United States Patent Application Publication US 2025/0222082 A1 - sequence listing, part 4

SEQ ID NO: 9198 - DNA, 963 bp, synthetic construct
  source 1..963: mol_type = other DNA
atgatcgccaaggcttccgctcctgccaaaactatactgtttggggagcactcagtggtatacgatgaacctgccatcgcaggcgcggtgaacaagagggcctatattacaattaaggagtccaagagcgacaagagcatctttagagcgccagatataggtttcgaggctgagctgctcagcaaacagaagaagtacatcctgacaaagggaaagcccggcattatcagatatattctggagagcctgtaccgcgcacacgaccactcgcccatcgacataaccctttcatccaacgtccccatcggttctgggctgggtagctcagcggccgtgactgtagctacactagcggcactgtataggtatcataatattcggtttaacaagaaaagccttgcacacgacgcccacatggtggaacaggctgtgcagggggtcgccagtcccctcgacacactcgttagcacttacggggggctggtctacttgtctcgaaacaaaaaagttgaacacttcaaggtcaacttcaacgctccactcgtcgtaggctttaccaccaagcatggaaacacgggaaagatggttaaggacgtgaagaatttaaagaatcgcaatccaaaaattatcaatcctgtgattaccgcaatgggcaatctgacgaactatgccaagcaagctatcctgaaaaaagattacaataaagttggcgagctcatgaacatcaaccatggattcttggatgtgatcggtgtgaataccctagaactttcgcgtatggtctacaacgccagagaagccggagctatcgggtctaaaacgaccggcgccgggggcggcggcagtataattgccctgtgcccgggaaaagtggacgaggtggcaaacgccatcgcccgggacgatagtatcttgaaagtgcgattcacccgccggggcgtctcctccagggtgtacaagtga

SEQ ID NO: 9199 - DNA, 801 bp, synthetic construct
  source 1..801: mol_type = other DNA
atgatcatccttaagattggtggaagcagtctgactaataaggactcctccaagagtgaggtgaactccgacagcctgaagagaatcgctctggaaatcaagtcgtcactggacaactctgcaaaggagttgattgttgtgcacggtgcaggcagcttcggacacccacccgccaaaaaatataaaatcggcgaggtatttgataagtcagaatacccgcagaagcgcatcggcttctgtgaaactcagaacgcggttaagaaactcaacatgtatgtctgcgaggccttcatcgagcaggggctgcccgtggtggcaattcctgcttccagtttcatgacagccaccaataagaggataacccacggggacctcgactctttcaataaatacttggagaaaggttttatccctgtcatctacggcgatgtggtgctagacgacgaactggagttctgcgttatcagcggcgatcagctcattcaatacctggccatgaacttaaatcccaatcaggtgatcctcggaacagacgtggacggcgtgtataataaaaacccaaagacgcatgacgatgctatattttttgataaacttagctcccttgaagagctagacgcctttgaaggaacaaccaacgtcgatgtcacggggggaatgattgggaagatcaaagagctcctgtacctggccgatctgggcatagagagcaagataatcaacgcggaagtggaggacaacattttcaaagtattggagaacgaagatgtcaagggcaccgtgatttcacgggggaagtga

SEQ ID NO: 9200 - DNA, 1047 bp, synthetic construct
  source 1..1047: mol_type = other DNA
atgatctcagaccgaaagctcgagcaccttctcatttgcgagaattatgatgtaagcttcaagaacaaaaccaatgggttcgaagatatcgaattgatccacaacgttctgcctgaaatcgacaagcaggaaatcgacttgtccacgtccaccttcggcaaaaaactggacagccccctctttatcaccgccattactgggggccatcccgctgccaaagaaatcaacaaacagcttgccatcgctgctgaaaataacaatatagctctcggtgtcggatctcaacgcgccgcctgtgaacatccggagctcgaggatacgtacactgtcgtgcgagagaatgcccctaactgcttactggtggggaacataggcgccccgcagctgaatttagcggagaaggcagttgagatattggacgccgacattctagcaatccacctgaacccccttcaggagagcatacagcctgagggggatttggacgccaggggctatctggacctcatcagtcagattacaaattcagtcaacattccaatcattgcaaaggaaactggctgcggtatatccgcagagagcgcagaggcactagtcgaggctggtgtggactttatcgacatcgaaggggccggcggcaccagctgggcggccgtggagacataccgggctgaagacagatacctgggagagatattttgggattggggcatcccaacggcggtctccaccgttgaggtgaccaatgccatcgatgtgccagtaatcagctcgggcggaattaggagtggtctggaggcggccaaggccattgctctgggagcagatgctgtggggatggccctgcccttcctgaagaatagcacctcacaggaacaacttaacaagttcattagccgcttcaacgagtccctgcgcatcgccatgtttctcgtgggagctagtaacattgatgaactgaaagagtcgaagctggtgattcggggaaaaacaagggagtggctgaacgagagagggatcaacacaaagaactacagccggagatga

SEQ ID NO: 9201 - DNA, 1344 bp, synthetic construct
  source 1..1344: mol_type = other DNA
atgagcgtcgaagtaatcgcgattggcggataccaggaggtggggaagaacatgaccgctgtcaaggtaggcgaggatgtcatcatttttgacatgggcatccacctggaccggatcagtatgcatgaggacaccgatatcgatcgcatgcacagtctggacctcatcgaaagaggagtgattcctgacgatacactgatgaaagacgtggacggcaaagtcaaaggcataatctttagccacgggcatctggaccacattggggctgttgcgaagttagcccatagatacgatgcacccctgattggaacgccctacactgcggccctaattgagaagcagatcaaaggtgagcgcaagttcaaggtgaataatccaattcgccctttaaacgccgggtccaaactgaaactgtcaaaggacatcaccctggagtttgtccagtccacccatagcattccacaagcagtgttcccggttcttcacaccccggagggcatcatagtttacgctctggattttaagtttgacaatcaccaaaaagtaagccctccgcctgattataagagactccgggaactgggtagggaaggagtccttgctctcatagtggagacaacgaatagcactaactataacgaggttaaaacccactccgagcgtatcgctcgaaacatactcgaagacgtgatgcgaggcccccttcaggagaagaccgggatgatcgtcactaccttcagcagccatgtggaacgtgtgcaggccatcgccgatatcgccaagaagagccacagagagatatttttcctaggcagatccatggaaaggttctgcggtatcgcccagaagctcggcattttgaagttgcccaagaacgcctcaatctatggcagccccaaggcaataaaccgagccctgttgagggccgacgaggatagggctaactatctccttgtgacgacaggtcaccaaggggagccagacgcactcctgcccaggatcgccaacggacggacaccattcaatattaagaaaggagataacgtgattatctcagcccctattattccaaatcccactaacgctgcaaataggcatatcatggagagacggttgaagctgaaaggggcacggatctaccccaatgcgcatgtgtcggggcatgctggccgggaagaccaccgcgagttcctgcgcatgctcaaacctcagcacatcataccagcccacggagacctgacaatgctgtccgcctacgccgaactagcagaagaggaaggataccggattggctatgatatccacatcctgcgcaacgctcaggcccaggtgttcaaaagttga

SEQ ID NO: 9202 - DNA, 981 bp, synthetic construct
  source 1..981: mol_type = other DNA
atgagtgacgtaaaaaaaatactgggaaactattccaccgacatcacccgcacaattgaggaggaactttcagccatcactccgaataatctggcagaggccagcgtgtacctgacacgagcgggcggtaagatgctgaggcccgctttaacactgatcgctgccgaggctgttggcggtaatcgggaatctgcattgaaatccgccgccgccattgaactgatccacacattttcactgattcacgacgacattatggaccaggatgacatgaggcggggaatgcctagcgtgcataaggtgtggggggacgatgtcgccattctggccggagataccttattcagcaaggctttcgaaatcatcattggcaacaaaggaactaccagcgatcagaacaacaagagcctcgctacggtagccgatgcttgcgtcaagatctgtgagggtcaggccctcgacatgggctttgaggagagattcgatgtgacagaagatgagtacatggagatgattttcaagaagacgggggccctgattgcagcggccacgaaagtgggagctataatggggggggcatccgagggagtcatcgatgcgatgtatgagtacgggcggctcataggtctagctttccagatccaggacgactaccttgatctcgtgtcggacgaagaaaccctgggcaagccaatcggcagcgacatcgggaagggcaagatgaccgttattgcaattaaagggctggccagtgatgatactggcagactcctcgaaatcctgaaggatgacgagaactccaacgaagatataactgaggcaatcgacatcctgaccaaatgcggcgcgatcgaatatgctcgtaatttggccttggagagcatcaagcaagcaaaggaggtgcttgaaatactcgacgactcctcaagcaaacaaatgctagtcgacatcgccgactttgtgctggagcgcagtgcctga

SEQ ID NO: 9203 - DNA, 1014 bp, synthetic construct
  source 1..1014: mol_type = other DNA
atgctggagatcaagcacacactctgcccttcctgtagcgtgggctgcgggattaatgtcgtgctgaaggaggggaatgtggtcggcacttttccctataaaagacacccggtgaactcgggaaaaaactgcctgaatgggcgcaatagcatcgagtgctacctcaacaaattcgaggatattaacgtggacgacgtggtagccgacgtgctcaaggagttgaaatccgccgatgcatccagtgtgaccgtggtttgttcaggtaataacgatgttgaggaaatcaaggccatcaaagaatttgctgagtccaacaactttaatctggccttctatgccgataacctgaagaactttgacgacgtggcaacctacgacgatgtggcggacgccagcaagatattcgtcatcggcgatcttttgtttgagaacccacttattggccggaggattgttcatgccaagcagaacggagctaaaatctacgcactcgggaagacggaaaagtctgtgacattcaacattgctgacgagacgttcaacacgtctgtcgttgattttctggatgcgaatgacagcaacattgacgaatccagtgtcattgtattcaattacgtggacagcgccgaggatttagacaaaatcgagtcaatcggatgtaagtcttttcccgtgttcagcaaatccaattctaagggcgccctggatattgtggaggttaagtccctggacgaaatgatggaattgctggagaatactaaggtgctcctagtattcaacgacgacatcgctgatgaaatagactttgacttcactaaaatctcgaaaatcataagtttcgctccatgcgaaaataacaccaccaaaatctcagatattgtggtacccatcaagacatggcttgagaaggacggaagcttcgtcaatgcaatgggtgacacacagaccttcaccaccgtcatagattcagatgtcctgagtgaaatcgaggtcatcgaaaagctaaacagctga

SEQ ID NO: 9204 - DNA, 1143 bp, synthetic construct
  source 1..1143: mol_type = other DNA
atgagctatgtgctcgcaaaatcgaaggacgacgacatcctgtccgccggtgagtgtggcggagcggtcacgagtattctcaaatacttgctggatgagaagctggtggacggggttctcaccctcaggccatttgatgacatttacgacgctatgcccgtgtatgtgactgactctgacgatctaatatccacagcggggagctaccactgcgcccccacaatgatcggggatataattgaacggttcatcgatgacgacactaagatcgcagtcactgtgaagccttgtgacatgagggccatgaaagagcttataaagaggcacagaatcaatgacgataatgtttacttcatcggcttgaattgtggcggcaccgtgtctccggtgtccggcagaaaaatgatcgatctgttctatgaagcagaccctaacgacgtggtcagtgaggagatagataaaggtaagttcattatcgagcttgctgacggtggggaagaagccgtcaaaatccatgatctggaggccgagggatatgggcgccggaacaactgtcagagatgcgacgtaaaaattccacggatggccgacattgcttgtggaaactggggcgccgaggatggctggacattcattgagatcaatgacgagaaaggccagaagctggtggatggcgccaaaaaggtgggcatccttgaaacgaaaacccctaatgatgccgcggtggaaggacgcagcaaggtggaaaacatcatgataaagatggcaaagaagaaccaggatgcaacctacccactggttagcgagcgggacgaatggagccgctgcatcggatgctacgcttgccgtgacatttgcccggtctgctggtgctttgaaaactgcgaattaaacaagtcttacttcaaggacgaggccaacgccttttcaagtcccatcgcttttcagggggtacgactgtcccacatgagcttctcgtgttgcgattgcggtcaatgtgaggacgtctgtcccatggatatccccgtttcactaatttttgacaagctgcagaagaaatactatggacgaaccgggtatgtagctggagtgtcagaggatatcaagcctcccctctactccccagaaaagacagagctgtga

SEQ ID NO: 9205 - DNA, 402 bp, synthetic construct
  source 1..402: mol_type = other DNA
atgtccgaagacctaaagattgtggggctgttgtgcaactggtgttgctacggcggcgcggacactgcaggaacagcacgcatgcaatatcccagcaatatccggatcattagggtgatgtgctccgggcgaattaacccgagcatggtcttcaaggccttccaggagggtgctgacggcgtctttgtaggcgggtgtcatatcggagactgccactacgatgccgggaactacaaatggtcgagaaggagcaagatagtggaggatatccttgaggagtttggtatagagaaggaacgcttccggcacgagtggatctcagccagtgagggcgagaaattccagacgaccatggaagaatttcacaagacactcaccaaactcggaccactggaactgtga

SEQ ID NO: 9206 - DNA, 366 bp, synthetic construct
  source 1..366: mol_type = other DNA
atggagatctacatgcagaagatcggactaatcagacagagcttgaaccccaagaacagcagtctcgatctggacatcgattggaatatcgagtacgtacataggaatcagaacgaaataaacttcgacatcaatctgcgaagcattgagaacttcaacctcaacttcaaaattgagggggtgatcgtcctggacctgtttgaaatttttatccaggaagacgtgtcccaaataattttccaccgcgcctgcaatgtgcttatggatatgatatctctgacccggcagagttcgcacattttatcaaatgaggataaatacccggacattggctccgaacacatcccaaagacactctataactga

SEQ ID NO: 9207 - DNA, 1017 bp, synthetic construct
  source 1..1017: mol_type = other DNA
atgctggagattaagcacaccttgtgcccgtcctgtagtgttggctgtgggatcaacgtagtgctgaaggatggagacatcgtcgggacgttcccctacaaacggcatcccgtcaactccggcaaaaactgcctcaacgggagaaacagcattgagtgctacctaaacaagtttgaagacattaatgtggacgacgtggtggcagacgtgttaaaagagctgaaatctgctgatgcctctagtgtcaccgtggtttgctccggcaataatgatgtggaggagattaaggcgattaaagagttcgcagagtcgaataacttcaacctcgccttttacgccgacaatctcaaaaacttcgatgatgttgcaacctatgacgatgtggccggagccagcaagatattcgtgattggcgatcttctctttgagaatccactcatcggtaggcgcatcgttcacgcgaagcagaatggcgctaagatttacgccttggggaagagcgaaaaaagcgtcaccttcaatatcgccgacgaaactttcaacacttctgtggaggagtttctagacaagaacgcaaacgagtttgatgactcctccgtcattgtatttaattatgtggattcagtggatgatctcgacaagatcaatgaacttaactgcaagaaactgcccgtgttcagcaagtccaactctaagggcacactggacattgtcgaggttaagagcctggacgaaatgatggaactgctggagaataccaaagtgctgttggtattcaacgatgacatcgcggacgaaatagactttgacttcacaaaaatctcgaagatcataagcttcgctccatgtgagaacaacaccacaaagatctcagacataatcgtgcctatcaaaacatggcttgaaaaggacggaagttttgtcaatgccatgggtacgtgtcaggagttcactgctgtggtggaatcagatgtcctgagtgagatcgaagtcatcgaaaagctgaacggaaactga

SEQ ID NO: 9208 - DNA, 1143 bp, synthetic construct
  source 1..1143: mol_type = other DNA
atgtcctatgtgctggctaaatcgaaggacgatgacatcctcagtgcaggagaatgcggcggagccataaccagcattctgaagtatttgctagacgaaaagctggttgatggaatcttcgcactcaggccctttgacgacatctatgacgccatgccagtatttataacagatagcgaagatttgataagcacggcggggtcctaccactgcgctccaaccatgattggggacatcatagagcgctttatcgatgatgatactaaaatcgccgtcaccgtgaaaccttgcgacatgcgagctatgcatgagctcgttattaggcacagaattaacgacgacaacgtgtatttcattgggctcaattgtggcggcaccgtgtcacccgtgagtggcagaaaaatgattgacctcttctacgaggcagaccctaatgacgtggtcagcgaggagatagataagggtaaattcatcatcgagcttgcagatgggggggaggaggcagtcaaaatccatgaccttgaagctgaaggatacgggcgccgaaacaattgtcagcggtgtgacgtaaagatcccacggatggcggacattgcctgtggcaactggggcgccgaggacggctggacattcattgagatcaacagcgaaaaaggccaaaagctggttgatggggccaagaaggtgggcattctggaaactaagactccgaatgatgcggctgtggagggaagaagcaaagtggagaacatcatgattaagatggccaagaagaaccaggatgccacctacccactggtgagcgagatggacgaatggagccgctgcatcggttgctacgcctgccgtgacatttgccccgtctgctggtgcttcgagaactgcgagctgaacaaatcctacttcaaagacggaacaaatatgcctccgagtcctatcgcctttcagggtgtcaggctgtcgcacatgagcttctcctgttgtgattgcggtcagtgtgaggatgtatgtcccatggacatccccgtgtcactaatctttgacaaactgcagaagaagtactatgaacggacgggctacgtcgctggagtgtcagaggatatcaagccccctctgtactccccagaaaagacagaattatga

SEQ ID NO: 9209 - DNA, 405 bp, synthetic construct
  source 1..405: mol_type = other DNA
atgtccgaagaccttaagatcgtgggcctcctgtgtaactggtgctgttacgggggggccgacaccgccggaactgcccgaatgcagtaccctccgaatatccgcatcattcgggtgatgtgctccggaaggattaaccccagtatggtctttaaagcatttcaggaaggggctgacggcgtattcgtgggcgggtgccacataggcgactgccactatgatgcgggtaactacaaatggtcaagaaggagcaagattgtcgaagatatcctcgaggagttcggcatagagaaggagcgcttccggcatgagtggatcagcgcatctgaaggtgagaagttccaaacaacgatggaggagtttcacaagacactgaccaaactgggaccactagaattgaaatga

SEQ ID NO: 9210 - DNA, 1656 bp, synthetic construct
  source 1..1656: mol_type = other DNA
atggggttggagaacaaaaaattcttgagcgcactgaataagaagttcaaaggcgaggatcaggagaatgaccacaccagtttctactgcttcgacggctggaaacagagcgctaggaaacgcgaatttaacgaagctgctgagaagttggctaaggagaggaacatccctttttataatcctgatatcggcgtacctctgggtcagagacaacttatggcctataagatttcaggcaccgaggactacgtcgaaggcgatgatttgcacttctgcaacaactcggccatccagcaactcgtggacgatatcaagcggacaatcattgttggaatggacacggcgcatagcgtactccaagaacggctaggtgtagaggtcacgcccgaaacaataaacgagtatatggaaaacattaaccacgcccttcccgggggcgccgtcgtgcaagagcacatggtggaagtgcacccggggctcgtggatgactgctatgccaagatatttactggcaatgatgatttagctgacgaattagacaagcgactactgatcgacatcaacaaggagttcccagaagagcaggctgagatgctgaaaagctacgtgggaaataagacctatcaggtcagtcgggttccaacactggtcgtccgcgcttgcgacggcggtacagtttcccgctggtccgccatgcagatcgggatgtcctttattaatgcatacaaactgtgtgcaggagaggccgccattgccgatttcagttatgctgcaaagcacgccgacgtgatcggaatgggcgcatttctgccaagcagacgtgccagaggccccaacgagcctgggggtgtggccttcgggaccctcgccgatatggtgcagacatccaggatctcagatgacccctgcgaagtttccctagaagtgatcgccgcagctgcagccctgtacgaccaggtgtggctcggaagctacatgagcgggggggtgggatttacccagtacgccagtgcggcctacactgatgatattctcgacgacttcctttactacggcaaggactacgtggaaaagaagtacggaatgtgtcaggctgacctgagtatggacaccgtgcgtgacatatcaactgaggtcactctgtacggactggagcagtatgagaccccgaccctcctggaaacgcacttcggagggagccaacgggcttcggtcgtgagcgcggcagccggctgtagcaccgcctttgctactggcaattccaatgcaggcgtgaatggttggtatctcagcatgatcctgcacaaagagacacatagcaggctgggattctacggctacgatctgcaggaccaggcgggtgcgagcaactctctttccatacgctccgatgaggggctgatccacgagctgcgaggtcccaactacccgaactatgccatgaatgttggccatcagcccgagtatgctgggattgcacaggctccccatgcggcccggagggacgccttctgtaccaacccactcatcaagattgcctttgcggaccaccatcttacgttcgatttccgccatccacgaaaagagattgccaaaggcgccctgagagaatttatgcctgcaggagagcgggaaataatcatcccctcaagatga

SEQ ID NO: 9211 - DNA, 795 bp, synthetic construct
  source 1..795: mol_type = other DNA
atggaatacaaagcccagtattgccctggcgagaccataatcgctgagaacagacgcaagcatatgaacccagaacacgagtttaaaaaaattagatccgtgagcgacgaggggctggtgaagatcctgggccacagaaacccgggggaaagctataagactgtccacccccccttggcagagatggaggatgatggcgatattattaaaagtatcatagagcctacgccaggagccgcggagggaatcagggtgcggtacatccagttcgccgattcaatgtacaatgccccagcacagccctacgatcgagcccggacctatatgtggaggtacaggggagtagacacaggcaccttaagcggacgccaagtgattgagatccgggagcaggacctggaaaaaatctcgaaagaactcgtcgaaaccgacattttcgaccctgccaggtgtgggatgcgaggcgctacggtgcatggacactccctacgccttgacgaaaacgggctcatgttcgatggtcttcaaagatacatctttaatgaagaggacggacacgtttactacatcaaggaccaggtcggccggcagctggatgaagctatagacgtcggggttcccctggatgaggagtatctcaaggagatcaccacaatctaccgtgaggacaatatcggtatgcgccaggacaaggaggcgctggaggtgattgagaacattcatactgcacggacagaaggcggctatggtatgggcgtgtttttcaaggacttgaagaagaagctgggggaatga

SEQ ID NO: 9212 - DNA, 495 bp, synthetic construct
  source 1..495: mol_type = other DNA
atggacgagtcggaacaaattaacgtgatcgatgtgaaaatcactccatacaggtttctgaaacccaagacaaccgaaaagattctcaacgagatctataagttgaaagggcagcagagagtccttatacatggcccttccattcccaagaaggttttctacggcccgggtaagggacacgtggtgaaccacaccgatcgcaaggaaatcaatgtgaaaggatgtgacgtagagctgcgagtgatggtgggggagataatcgtgaccgtcgacatgagcgagctgaaggagtttatgaacaacctaaaggacatcctcgagacccacatgccatgcgattactatatactgatcggcgtattcacgcggacaaaaacaacgatctccgattatctgaagtacggcaacaatttcgaaaatagcatcgacaggcggtacattgggctcgtcgactcacatagtaaaactagcgaaaccgtcaaggttattaaatga

SEQ ID NO: 9213 - DNA, 1332 bp, synthetic construct
  source 1..1332: mol_type = other DNA
atgaagatatatgatgacaatctggacctgtacgggcctgacgggaaaattatcgaagaaagcgtccccctggagtctattagtcccctcaaaaattctgcaatacagcagatgatatatgacattaaacggtccgccgctgtgaacctggtggggatcgagaagggcttgaagagcggggccatgggtggaaagtccacttacatcccaggccgtgaactggacctgcctatcgtgaagaatgccgagcttattgcaacaaaaatcaagaagatactacaggtgaacgaggatgatgacaccaccgtcaacctcatcaatgggggccagcagctcttagtgcaactcccattcgagcgcctgaacgtggccgccgattacagtgtttctactctccagaccagtgccgccaccattcagtcaatcattgacagctttgaaatcaatatgtttgatgcatccaccatcaagacggccgtaatgggcgcctacccaaggacagttgacctttccgggtccaatatcagcgccctccttggcccccccgttctcctagaaggattgggctacggcctgcggaacattatggccaatcacgtcgtggctatcaccaacaagcagacgttgaacgctgctgcattatcttcaatcatggagcagactgcaatgtttgagacaggggatgctaccggagcttttgaacggatgcacctgttgacgctggcttatcagggcctgaatgcgaacaacctggttttcgatatcgttaaagaaaacggtaaaggaacagtcggtaccgtgatccaaacacttgtgggacgagccattgaggataagatcatcaaggtagctaaaaaaatgccgtccggctacaacatgtacgaacctattgactgggcgctgtggaacgcctatgctgctgcaggcctgctggccgccgtcattattaacgtcggggctgcgagagccgcccaggcggtcgcatcaacagtcctgtactacaatgacatgcttgagtacgagactggactcccgggagtggactatgggagaaccgagggggtgggtgtaggcttcagcttcttcagccactcgatatatggtggtggaggccccggcactttccatggcaaccacgtggtgacaaggcatgccaagggcactgcaatcccttgcgcaagtgccgcgatgtgtctggacgccgggacccagatgttctcggtgcaaaggaccagcgcactaatcggaacggtgtatggcaccatagacaatctgcgcaacccaatccccaacgtggccaaaattgcgggagagatcaaggataagctctga

SEQ ID NO: 9214 - DNA, 822 bp, synthetic construct
  source 1..822: mol_type = other DNA
atgagttgttacaaatactgggggaaactcgaggagattgcgaataagctgtcctcatacggcgacttagacaagtatggggactctgcactcgatgatgtggatattaacgagatcattgagatcctggacgacgtagaaattatcgctcatgacaaaacgatcgactttgactctgccaagcacattcttgacgatgaaaagatgaataaggcgttgaaactgatacgcaaattctacgtctacgtgggggccagactcgaaaccgagaaggcaatcgagatgttggaaagcgatgacctggacacaaacctggagagcttcgagttttatgaccgctacgtgggcctgctgaacaacgaaagtcaactggccaagttcaacgaaaacaagacattcgtgtttttgggctccggtccactcccgattactctcatgatgtttaatgaactgttcggatgcaagtgcattggaatcgagcagcaggaggatgtggctgagctcagcagaaaactgctgaagaagcttggtcttgagaacgaaatcgaaattatagtgggggacgagaccacgatcgaatcactggaatatgacatcctgatggtggccgccctggcagagcccaaagagagggtattcagcaatatctggcagtatgttgatgagaagacccctgtcatatacaggacttataccggcatgcgggccatcctctactcccccgttctagataaggatacacggggattccacaaagaggtcatgatcctaccaacaggcaataccaacaacacttcggtgttaatccgaaaaatagtctga

SEQ ID NO: 9215 - DNA, 786 bp, synthetic construct
  source 1..786: mol_type = other DNA
atgaagggcatcctgggcgccatctgcggagacatcattggatcgactcgcgagtttaacccaattaagacaaaagacttcaagctgttcaaacgcaaatctaccttcaccgacgacacggtaatgaccctcgctatcgccaactggctgatcgaagataccgccagcgagagtatcttgatcaagcagctgcagtattggggaaacaaatatcctgactcagggtacggcggacggtttcgaaattggctgaaggagatagacccgaagccatacgggagttgggctaacggctccgccatgagagtttccccctgtccctgggtggccaactccctccaggaaagccaaaaacttgctaaattgtccgccattgtcactcacaatcatcctgagggcatcaaaggggcactggctacgtcagatgcaatctatcttgcaaagactggtgcggggaaagagaagataaagcaccacattgagagccattacagttacgacttatctcggagcgtcgatgaaataaggaccaactacagctttgacgtctcctgcgccggcagcgtgccagagtccataatctgcttcctggagggagtgtcatttgaggacacaatcaggaacgcggtgagcctgggtggggatgccgatacacaggcagctattgcgggcagcattgccagtgcctactgggacatccccaagaatatctcgtataagagcattaacagactcaactacgatctgctaaatgtgctcgtgaatttcgaagaaaagttcatgtga

SEQ ID NO: 9216 - DNA, 783 bp, synthetic construct
  source 1..783: mol_type = other DNA
atggacgagaacatagccattctgaagggcatcggcctgacgatgtatgaggcgcaagcatatgtaacactcgtgagcttgatcagcagcaacgcgacggagatatctgagaaatcggggattcctcgatccaagatatatgatgtcctcaaaggcctaatccagaaaaattacattgatgttgaagatggacgccccctcacttacaatgtcaaatcccctgtggaagtcctaagtcttgagaagaaccggttgaccacagagctggatgacacaatcacgcggctcacaaatgtctacgagaatggaatgagtcaggtacaggccccgatctggaggatttacggggtggataaaatcataaaccaagagttagaaatcatcactcgcgctaagcattccatcaacatgaggatcggttttctgttcgaagaagaaggcgaagccctggttaaaatactcaaaaagagaaagaacctgaacatcaatatcctggccagcccaacctgctgtattaacaataagaccttcaacatcatcaagttcttcaaggacaatgacatgcccgtgcacaaagccgacattccatttgtgaaggtgctgatttctgactcaaaggagatgatgcacacatataccaaattttcagaggacaagcgtactgtgcttcccgagaccgcaattgggatctggaacaagtacgaagacattgctagaaactacgatgagcggttcatgaaccagctgcacaagatccagaataaaaagaagaaaaccacctga

SEQ ID NO: 9217 - DNA, 1308 bp, synthetic construct
  source 1..1308: mol_type = other DNA
atggcagatggcctggacatgttttgctatcagtgctctcagacagcgcatgggaccggctgcacaataagtggcgtttgtgggaagaagccaaccgtggcccggctgcaagataatctgatctttacaatgaagggcattagtgcctacaactacaatgcaaatgttctgggcaagtacaaccctgagattgatgcctttctgactaaagggttgtatacgactctgaccaacgtgaacttcgatgcggaggacctggtggctctggctttggaggccggtaaaatcagcgtggatgtcatgcggttgcttaaagacgcacacatcgaagcatatggcgagccacagcctgtggaggtcaaggtcggggctcaggagggccccgctataatcgtaacgggtcacgaccttaaagccttggaggaattacttaagcaggtggagggcacagatgtgaaagtgtacactcattccgagatgctcccagcgcacggatacccgggccttaacaagtacgaaaacctcgtaggccagctgggcggagcatggcacgaccagagaacaatcttcaagaagtacaacgcagctattgttggaaccagcaactgcgtcttaccggcactagacgcttataaggagcgcatgttcaccatggatgttgccaagctggagggcgtcaagacgattgagaattatgatttctccgaggtcatagagtgcgctaagtcattaggatcactagaacctgaagaactgaccaccctcacgacagggtggtccgcaggggctattgtggagcatgccgacgccatcaaaaagctggttgaagaaggtaaaataaggcgattcttcgtggtcggtggatgcgacaaggcttcgaaacacaacaactactatagggagtttgtgcagaacctgccccaggataccgtgatcctcacactggcctgcggaaagtacaagtttaacgacctggatctgggtgacatcgagggaatcccacgcctgctggacctcgggcaatgtaatgacaccatcgtggcggtggacgtggccctagccctgtgtgagctcttcgacatggagctgaatgaactgcccctcaccatcgtgctcagctggatggaacaaaaagccgcggccgtcctatgggccctgctctatcttggaaaaaccgacatgtggctcggccctattctgcccgcctggtgtaatgaagacattcttaatgtcctcgtggagaactacaacttgactcccactagcgggaatgccttggtagatatcaaaaagatcatgggggaatga

SEQ ID NO: 9218 - DNA, 330 bp, synthetic construct
  source 1..330: mol_type = other DNA
gtgaatgaggatatcaaagccaagtctctgaacatccagttcctcctggactaccagaaggatagtgtggtcagccgggagataatcaagaaagagctggggacggtcaccttctttgcttttgatcagggtcagggattgtcagaacacagcgctcctttcgacgccatggtgcagattattgacggcgaagcggaaatcacaatttccggcaaaaagaacactgtatgtgccggggagatcataatcatgccggcaaatgagccccatgcactacaagccgaaaactgcccattcaaaatgatcctcaccatgattaagtccgactga

SEQ ID NO: 9219 - DNA, 813 bp, synthetic construct
  source 1..813: mol_type = other DNA
atgaaacagtgcatcgacaacccgaatgatgtggattgggtgaatttttgggccgagcgcctgaagaacaaaaagaataaggattgggacaaagccgcgcccggtttttataagaggacccggaaggatgactatcaggacgccctgttcgaaaagctgatacttgatgagaacgacaccgtgctagatgtcggctgtggcgaggggtccgtcaccatcccaatagccgagaaagtgaggaaggtcatcggaattgatagctctcctaaaatgctggaatacctcaaaaagcgagctatcgaaaataacataaacaacattgagacaatcctaaaaccaatcgaagacatcacctacgacgaaattggaaacgtggacgtagtgatctgctcaagaagcctcaacggcattgtgcccatcgataaaacactgtcggagctcaataaaatcgccaacaagtatgttttcatcactattttcggacctgaaaacaagaagatcgagaaagattttgaaaaggagatagggattaagacggaggacttccccgattacaacttcttcttcaacatactgtttaatttaggcatttacgcaaacatcgagaggtttgacctcagcaattatcgggaatacgacagtatcaaggaggcaatggacaatgggaagttccggctggatctttacaatgacaaggagaaagagctcctggagaagtacctggaacgtattttgacttacaaccgcaagtccaagaaatactataatgttaaagacaaggctgactggatcttgatttggtggagaaagtga

SEQ ID NO: 9220 - DNA, 1020 bp, synthetic construct
  source 1..1020: mol_type = other DNA
atggtgattaaaatgcgcctgggcaagactaattttaaagtaaacaagaatggattcggagccctaccaatccaacgacgcaatgaaaaggatagcatcgaaatacttaagaaagcatacgataacgggattaacttctatgattcagctcggttctacacagacagcgaagggaagctcggcaaagcatttgaggacattcgtgagaacatctacatcgccacaaagacgggcaccgagacccctgaagagttctggaatgatttggaaacctcccttaaagagctcaagacggattacgtggacctgtaccagttccacaacatcagcttctgccccaaggaagacgacgagctgtataaagccatgcttgaggctaaggaagagggcactgtgaaacacatcggaatcacaacccataaaatcacccatgcgcacgaggccctcgacagcggactctatgaaaccttgcagtaccccttttcgtacctgagtggtgaagaggagctgaacctggtggaaaagtgtaggcagctggacgttggttttatcgcgatgaaaggaatgggcgggggcctcattaaaaactcccaggcctccttcgcatacatgaatcaatttgataacgtccttcccatatgggggattcaggagctggaggagctggacgaatttctatcttacgacgccaatactatcctgaccgctgatctgaaggagtacatcgagaaggataaggaagaactgggcgtgaacttctgtagaggttgcggctactgcatgccttgtccagaggaaatcaacattagtttatgtagcaggatgtctttatggctgagacggttcccgacagagcccagcttggatgagaagacgcagaagattatggaaaagaccaaagactgcactgagtgctattcctgcgtcgacaaatgcccatatgagctcgacatacctgagctgttgaagtcaaactatgaggactatcagaatgtcctcagtgggaagacaaaggtgtga

SEQ ID NO: 9221 - DNA, 1005 bp, synthetic construct
  source 1..1005: mol_type = other DNA
atgaatacagacattaacaaggcccaaaaatacatcgacgatgaaaattacaaagatgctatcattctagctcgcaaaaaacatagcaaggacgatgtggagacttatctctcaattctggatctgcttattgaagcggactacataatagctatcgaagagaaaggaatgtattatcagtactacgataagacacacgacaatggagattatggtgagaaatacttcgacgagtatctcaaaaaacagcccaagtccatcaacgccctgtgtgacaaggcgatgtccagattcaacaagggccaaattgacgaaagcctgaagtacatggacacggcctacaaaaactataaaaactatagcaagattgagaaaccacggatctctaagaaagagctcctcattgcaaagatagagctcctcatgcaggccaagcgctatgatgatgcattgaagtatctcaataattacgaaaatcagttcggcggcaaccagaagagcgacctttacaaggggcagatgctgcagaagaacgggaaaaacaaagaggccctggtatatctgaacaagagcttgctggaggaggatacccttgtgggattcaatgccaagggtgacgccctgttcgacctgggaaggtatgaagacgcactgaaggagtacaagaactgcctaaattacgagagtaagatcgagggggatctggaactgatcaccaattttaactacaaatctgcattctgttgcgtcaatctgggcgacgatggggaggctataaagtacttaaacaaaactattaacatgctcaacgagcacggcagacttccgaggaatatcgaggccatctaccagaagtgctcctttgaaaaggaacggatcatgaaaaagggcaacgtgacagacgaagaatttcgaaagagtaagttcttctcaaccaagacctcgttaatcatcttgttcatcatttttatattttttatcatcctgaaattgaacgggtactga

SEQ ID NO: 9222 - DNA, 1671 bp, synthetic construct
  source 1..1671: mol_type = other DNA
atgaatgatttagagaagattgttttcaagcacgctttgctgaacgcggctaagcataaaggcagtgcaaatcccggggctgtcatgggcagcatcatgtccaacgaggtcgaactccgctccaaggcaaaagaaataggttcactggcggggaagatcgtcgccaaggtgaatgccctatcccccgaggaacaggcctccgagatggaaaagttcggggtggaggtgcaggataaaaaacccaaaaccaaggactcgggccttcaggaactgcctggaactcatgagaatatagtacttcggtttgctccaaacccaagcggccctctccacatcggacacagccgcgccgccgtgcccaatgccgagtacgtgaagcgtcatgatggcaagcttattctgcgcattgaagacaccgacccgaaacgtgtgtttgaacccgcttacgagatgatccctgaggacctcgcctggctgggaatagagccaaatgaaatcgtgtaccagtcagaccgcttcgagatctattacgactacgcccgccagctgatcgaaaaaggggctgcctatatgtgcacttgtgacggggagacattcaaagagctcaaggataattgtaagccttgcctatgcagagataacagcgtcgaagagaaccttgctctgtgggagaagttcgacactatggaatccggcgaagcagtactgagaatcaagaccgacattaaccacaaaaacccagctattcgggattgggtcgcaatgcggttggtggacgaagagcaccctcgggtcgggaccaagtacaggatctatccaatgatgaacttctctgttagcgtggatgatcatctcatgggcatgacccacgttctaaggggtaaggaccacctggccaacagtgagaaacaaaaatacctgtacaatcacatgggctgggatctcccagagtttatccactacggaagactgaaaatggaggacatagctctcagtacgagcaaggcgatggcgggcatcgaggatggcacatacagcggatgggacgacccgaggctgggcaccctcagagccatcgcacgaaggggaattgacccccgcacaatttataaccttatcacggagattggtgtgaaaatggccgattctgccatcagctggaaaaaaatctatggactgaaccggaacttcgtcgaacccatcgcaaacagatatttcttctgcgaagatcctgtggagattaaaattgacggttacaatgacggcgaggtctcaatcgagcgaccgctccatgccgaccacatagacagggggaacaggatcttgtcctttgacggaagtgcctacttagcaaaggaagatattgccgacgggatctttagactgatggacgcagtaaacgtggagattgatgggaataaaataatctatcactcaacatctttcgaggacgcgaagaaggtcaaggctaagatcattcaatgggttcccacaaaagacaacgtaaatgtgaagatagtgatggacgacgcctcggccaagacgggagtgggtgaggacaccctgcgggatttggaagtgggcgatattgttcagttcgagcgagtgggttttgcccggctggatgaaatcaaggatgataagctggtgttttattacgcacataagtga

SEQ ID NO: 9223 - DNA, 483 bp, synthetic construct
  source 1..483: mol_type = other DNA
atgcacatcagcagtgataagatgactatgtttagcaatggctattcgacgcttcgaatgccggaggacttcgaaccagtcaacgccaaggacgagttcaacgacctgtacttggtcaacaccaagattcctatgtcaatcaaattctcaacaacccccacactggttgggctcccttccataaaagaggatattgaaaagaatattaacgataacccccgcattaacgtaatactctctgacttcatcccaataaacgaggacatttactacctaattgtgtccagtttttccgacggcgaaaaagagatcagacggaacgaatttctctatgtggaggataataacttatacatcttcgaatttacctacccctatgcagacagggagctggacgatttctacctgaatatcatccggagcttcaagatcagcgtgccaaagtacatcgtggaggatggaaattataaactgaatgagtga

SEQ ID NO: 9224 - DNA, 1476 bp, synthetic construct
  source 1..1476: mol_type = other DNA
atgaatggaatcaccatattaatttggataacgatcgtcataattggggtaatcgcctgcatcttggtgaagctgcactacaaagggaatgagctcgagcaagacgaaggctcaatcattccaagcacagacaaattgaacgggatcttgagccagggcaaggaaaagatcaattccaaaaaccttacgaatagtctctcttccaaaaccacccgaacccagaacagccagaataccaagtcactatacggaaacaaacagcacacctcgcaggactatgatgtttacattgtccccgaagtgaacaacaaaaagacgtacgagtatgagtcggagaaccaggttctcatcgattatggcgacaaagtgaagaaatttcaggaacccatcaaacagagccagatggacattatgaatcaaaataaggacgacaaaacagagctgaaagaccttttcacaattgatgagctcatcaaggagtctaagcgcaaagacaacgaacgggagaaagagcagcccaaggtggaggacagtgagctcactgaactgaaggaaagtattgcgaagaaacaggagaatactatcgagaaaagctctagtgaggaagatatcggtgagtttgaaaccatcgagtccctcctgaatgaagaagaactgaatgaggatgaaacaagcgaggagattgaaacatccacaacctcccagaaaactatcgaagaagcaatctcctctgcctcgcaggagaagaaggaggagattgaaaacctgagtgagaacgagaacatcactgatgtcctgcttcatgccgatgacgatcagatggatatacccaatgaggagattaaagagccaactctaaagacgccaacaaaggtcgacgaatcaaacgacagcgaatttaactccccgctgaaggaggacaacgaggaaactatggatctggactatcgcaaggatctggacaagtttacacaaaagattaaaggcagcaagctcttcaaggacgtgaaggaaaaactgaccgctgagccagaggagtacattgaggagggaatccccaaggacgagacttacattaggaacgtgaaggaatacgatgacttcgagccgattatcaacgagacccatgccgattatgtcgaccctattggagacatcgaacctgcattcgaggataaccagtcactgaagctggaaaacaaacctaaggctttcgaggtgatcaaggatagctcaaagcctgaagtgacccagcaaaagatccccaccatcaagagtaaacctagcaggaacaacataaagataaagctgaataacaatgaagtggtacttaagaaaggcgacgaaatcatcttcaatcacttaggtgagacgtactccagccaagtttacgccattaacggggatgacatctccgtgaagtacagacggcagaatatcataatcaaaccagcggatgtgaagaagatatattga

SEQ ID NO: 9225 - DNA, 1230 bp, synthetic construct
  source 1..1230: mol_type = other DNA
atggttgtgaaaatcaatgaaaattaccttaagctaaagagcagttacctctttgtggaagtcgctagacgagaggcggaatttgtcaagaacaatcctgacgtggacgtcatcaagatgggtataggggatgtgacaaagccattagtgccatctgttgttaaggccttcaaggacgcggtggatgagatgggaagtgccgacacgttcatgggctacggcccggaacaggggtatgagtttttggcagaagccattgtgaaggattatgagaagtatggaataacccttgatacaagcgagattttcatcagtgacggggctaaatgtgacaccggcaatattcaggaaattttcggcatagacaacaaaatcgccgtaaccgacccagtctacaccgtgtacgtggatacaaacgtgatggctggcagaaccggtgaaatgaacgacgggatgtacgaggggttgacgtacctcaaatgcaacgccgaaaacggatttgtgccagaactgcccagcgagcccgtcgacatcatctatctgtgttatcctaacaatccaaccggtaccacactcactaaagatcagctgaaggtgtttgtcgattacgcccgggagaacaaagctattattctgtttgacgctgcgtacgaggccttcatcaacgaggaaaacgtgccccacagcatctacgagattgaaggtgccgaggaggtagctatcgagtttaagtccttctccaaaacggcgggcttcactggaactcgctgcgccttcacagtcgtgcctaaacagctgaccgcatacgactcagagggcaacgaggtagaggttaaccccctgtggaatcgcaggcaaaccaccaagtttaacggtgtttcctatccggtgcagaaagccgcccaggcaacctattccatcgaagggcagaaggagatccaagaggtcatagattattacatggaaaatgcaaaggtgatttgcgagagcttgtccaacctcggactggaggtctacgggggaatcaattcaccttacatctgggtaaaggctcccaataacatggactcatggactttcttcgatctgctgctaaatgaagccaacgtgattggaacacctgggtctggcttcggccccagcggcgaaggctatctcaggcttacggcattcaatacactggagaacactaaggaggcaatggaccggatctcgaaactggagttttga

SEQ ID NO: 9226 - DNA, 693 bp, synthetic construct
  source 1..693: mol_type = other DNA
ctgaagaagatagagaaacccgtagagattgaggacggggatagctttaaggttatccttagtaaatacggggcactggcactcgacaagcaagaaaacttagctgagctaattggcgaaaccattggggacctcgatatcgaaaatgaggtgattagcttcgacgatattaagatgccaatccacgtgctgggcttttacagccaggacctgaatcagtggtcctgggcctgggactgtgaagagatattcggcaataacctcatcgcctcggccgtggaaattaaaaaacttggagataagtttgacgtccctgaatttaattcctcactgatcaaaacagatttcaacttttgccatacaatcgcaatgaccgccactaccatcctgggattcgacggctattacgccgttagtgaggatggtctggacatctttgtggctatcgaatccgacctggtgaaggagaacaacgatgtcaaaaagttcagagacactttctatacgttccagaagaacttcaacatatttcccaaaattgccttcgagtcatacaccaagctcaagggatacgggttcaaaccgcaggatggcttttatttggcgaagatcggcgagagccgcgtgatggcggggttcacggaaaggggaaatgtcacacggatcttgatgttcggtgaggacgagcagtga

SEQ ID NO: 9227 - DNA, 612 bp, synthetic construct
  source 1..612: mol_type = other DNA
atgaactccgatattatgaaccaggatctggtcgacgaactagagtacatggaggagctcctcaccaagtccggcttttttgacagcgaagagatactggagatactggaagaccagttcatcgatgaggacatcgacatttctcagtattccgtgagctcaaatgattttagcaatgagaacttctcaaaactggaaaacgcctttacgaacttagcaagtgagaaaattgtcgctatccacaattgtggctacgacatcagtgagggggtaaacgacgcctttgagctttacgttcatttgcacaacaacaaattctccgtggaaggcttcagcttttatacttttgaggacatcgaggaaagcatctgcgagtgcaagctgaagatcaccttcggtgacttcgagaacaacgaggaaatggcactgaaaatcggaaaaatagtgttcaaatatctcaaggaagaaaatttcaatatcgcctgggatgggacaattaacaatcaaatcgagatttaccccttcaagtgggataagtcgtatgacagcgaaaaggaatacgaaattgagggagcgtacgaggtgttcatcaagaatcaggtgcttaagtga

SEQ ID NO: 9228 - DNA, 585 bp, synthetic construct
  source 1..585: mol_type = other DNA
atgaacaccagaagcctcaaactaattcgcgaggtgatgatcaactcagggaagtggtccagtatcgaaatatcacaggattccatttacctgcagttcagggacgtggaactgggaactcccaaaatcgatgaagacttttctctggttgtcaggttcgcggacgacagctttttcacagtcttctacaataacatttgggacatcgactttctgtccaagtatgattttaaaaaccagctgctgagtgaggaggtaagcttcaacattaaggacatcaaattcatcgatttcgagtacctcaacacatttttcaccaattacaaaaaggagaagtccgtcagcgtggtggaggactttaatatccacaatattcgcaatgactttttcatgttgcttgagacggatgaaatagccatcgtggttggcggcaaccaaatggatttcttcagccctttcgagcggctcgatgacgcatcgcttcgtgaactgagcaatgattggatgttatattttctgcggtatcatcagaagagaaacatagtgcgagacccgatgtgcgagaaccacccattgaagctctga

SEQ ID NO: 9229 - DNA, 1023 bp, synthetic construct
  source 1..1023: mol_type = other DNA
atgacgtgcaacattctcgtgggtggagcttggggggacgaaggcaagggcaagtgcatcacctacctctgtgacaacgataagcccgacatcatagcccgggccggagtggggcctaacgcagggcactccgtggaatttaacggagagaagtatggcctgcgcttaactccctccggtttcgtccataccggcgctaagctcatgatcggagcgggcgtcctagtgaacccggatgtgctgtttaaagaatttgaggacctgaagaaatacaacgtaaaagagcgcatgtgcattgactcgcgatgcgccatcatcaatgaggagcacatgactagggataaagggtcagagcatctggctaagaagatagggagcaccggaagtggttgtggcccagcaaactccgacagagtgctaagaaccatagaattggctcgtgacatccctgagcttgaagattacatcaccgatgtgagcctggaatgcaatgaggccattgacgaggggaaggacgtctttatcgaaggaagccagggcttcgccctgtcactctattatggcagctatccctatgtgaccagtaaggacaccacggcctctacattcgcggcggatgttggggttggaccaactaaagtagatgaggtcatcaatgtgttcaaatcctacattagccgggtcggggaaggccccttccctaccgagatgacacagaaggaggctgaaagtcacggctgggaggaatacggcgtggtaacaggacggcgaagaaggattggctacttcgatatggaccttgccaaagaatcttgcaggattaatggtgcaacccagatcgccctgacgtgtgtggataaactgtaccccgactgtgcacgcacacaagactacgatgagctgagcgccgagactaaggccttcatcgacgacatccagtccgcaactggtgttccagtcacgatcatttcaacagggccggatttgaaggacacaatagatctccggaaagagcttctgtga

SEQ ID NO: 9230 - DNA, 495 bp, synthetic construct
  source 1..495: mol_type = other DNA
atgtatatccggaaggccacactggatgatctctcgaaaatcatgagcatttacaagatcgcccaggatttcatgatcgagagcggaaaccccaaccagtggggccataacaacccttcagaagaaaaggtgaaggaggacatagacaaaaaaaatagctacctagtctgcaacggggaggacattcacggggtgttcgtgattttcaaaggtattgagcccacttataagcacattgagaatgggagatggcttaacgaagacgagtacatcaccatccaccggatcgcttccgacggcacccagaagggaatttttaagttcctgatcgactactgtaaaagtaaatccgaaaatattaggatcgatacgcaccacgacaataagataatgcagaagctcatagagcgaaacggatttcaaaagtgcggcaggatctacgtaacagatggctctccgcgcatcgcatatcagtggatgaatccactgcattga

SEQ ID NO: 9231 - DNA, 603 bp, synthetic construct
  source 1..603: mol_type = other DNA
atgactgatcaatatatgaagccgcatggcgaggaaggactgcagacaattaaaaatatgaatgaaaaccacaagaacatctctgagtttgccttcaaatgcgccattatcggagacaacgacaagattctagacgccggctgtggcgggggggtgaacatcgaaaaattcctcaagataacaaaaaacaacgtggacggtctggattacagcgagatcgccgtaaccgagtccatcaagcggaaccagaaggcgatcgatgatggacgctgccggatcatccaggcagatgtgagcaatatgccattcaaggacgagtgctatgactttatatccgcattcgagaccatatatttctggcccaacctggaggaaacctttaaggaagtttcacgaatcatcaaaccaaatgggcagttcatgattgctcaggagacagacggcaataatcctaacgacgaaacgtgggtgaacactgtcgagggcatgagaatttacaccgctcccgagttggaaaagtacctccttaatgccggtttcaggagtgtggaggtctttaaaaaagaggatgaatacattctggtcgtgatcgggaagaagtga

SEQ ID NO: 9232 - DNA, 939 bp, synthetic construct
  source 1..939: mol_type = other DNA
atggacaaaaagatcatcgcaatcattgttgccttcatcgccattgtcgcgatcggaggatatttcctcctgggcggtggcagtgacaatgtcactatagggtacttgccatctgaccacgacgcggccctgtttgtggctgacgcccaggggcaatacgccaagaatggaattaacaccaagctggtgcagtttaacaacggcggggacctgatgaccgctatggctagcggggaggttgacgtgggctatgtcggaatcacccctgtccttagctcaattgagaaaggagtgcccgtaaaagtcatcagcgccgcacaaaccgaggggtccggcattgtggtggctaagaacagcggcatcaactctgtcttcgacttggagggcaagaagatagccacaccaggtgaagcatccatccagcacatgctgctgcagtactacctgaagcagaatggtatcgatattaaggatgtgaaagtctctgccatgaaagtcccttcaatgaatgatgccctgaaaacaaataacatcgatgggatgatcacgtttgagccatacgtaagcattgcggagaagaacggggcaaaggtgctcgtggactcctccgaaatactgccgaatcatccgtgctgtgttgttgtggcttccgataagttccttgacgaacatcccaatgagacgcagaagatcctcgatattcacaagaacgcaaccgattatatcaacaataacactgacgaagctgccgaattactccccagtgatatcgtgagcgacgtggacgtggagaaacaggcacttgccggattccccttcatttcgggtctaaatgacacatacaagcagaacgtaatggagttcatgaacttggaagtggagctgggcgtgctcaagaaacctctatcagaagataaaatattttggaacggcagttga

SEQ ID NO: 9233 - DNA, 1407 bp, synthetic construct
  source 1..1407: mol_type = other DNA
atggagttgataaacctgagtaagatctccagtgaggaaatcctcgcaggttccttcggcatagagtgggaaagtctgcgtgtcaaaagcaacggggaactggccctgactccccaccctagcgtttttggggataagctcaagaatcctgttgtgacaaccgacttttcagaaagccaggtagaaatcataacccctgcttttgacaccgtcgacgaggcttttgacactttctcggccttaagcgacgtggtgaactcatcccttcccgagggtgagtatctgtggttccagtccctcccctgcattctgccatccccaaaccagattccaatcgcccagtacagccaggaaggggaggagtcccagaagtaccgggaaaacctggccagcaagtacggcgttaagaagcagctgatctcaggcgtgcactttaacttcagcttcgacgacggattcattgagaagcttaggaaaattacaaaatctgatttgtcatttcgacaatttagggatgagatctacctaaagatcactagaaactacctcagatactgctggctgataatttatttaaccggttgctccatcggagcccacgagtcgttctcatctgagtgcatcaacctcatggatatgcaggatggcttcggagggtattacagcacaaagggacccagctttcggaatgcgagctccggatacaagaatcttaagaagctgtatccaagttacaatagtatctctgagttcactcgcgacgtaacgaacttcattgataatggcgacctgagcgaagctaaggaactgtacacacaaatccgcttaaaacctaaaaatcccagcgatgtcctcaactctctgaacgagaccggaattgagtatatcgaaatccggacgttggacattaatccattttataaatgtgggctggtgaagcacgacatgaagttcctgcatctgttcttgatttacatgtttgtgaaaaacgagtcggactacccggactggcaaagggaggctaacatcaacgaggaaagagtcgcggagagagcattcgatgaaagcatgcgactactgaaagacggcaatgaggtcacccttaaagaatgggcctatgacctcatcaatgagatgtacggcatgtgtgatgtgtttgatatcaacgagtataacacactgaagttgatgcatgatcgggtgttgaatcccgaactaaccccgggcaaaaagctgctcaaactcatcaaacgcgacgggttcattaatgcacacatgttctccgcaatcacccataaacagacgagtaagaacctgattaagaatgtggataaggaggaatacggccgcctgaaaaagtatctcaacatagccctttacaggaaaaagtccgacaagaacagctga

SEQ ID NO: 9234 - DNA, 1047 bp, synthetic construct
  source 1..1047: mol_type = other DNA
ctccggcaatacatctacaacaatgtgcccaacattaagtattataatgagtttaaactgattgatggtgaaaagatgaataaaaaaattacattcgttctcgtgtttgcactagccgcatgtctggctatgggctcagcgagtgctggtcttttcgactttcttggagggggagacgacacggtcaagataggctacctgccctccgatcacgatgcagcactttttgtggccgatgctaagggcatgtacaaggataacaacatcacaacagagctggtgcagttcaacaacggcggggacttgatgacggccatggcgagtggggaagtggacgtcggatatgttggaatcacccccgtgctctctagcattgagaagaacgtccccgtcaaagttatttcttccgctcagactgagggtagcggcatcgtggtcacagatgactccggaatcaagtcaccggctgatctgaagggaaagaccattgcaacgcccggggaggcctctatccaacatgccttactcgtgtactacttgaaccagagcgacttaaccgtggatgacctgaatgtttcggcaatgaaagtgccttccatgaatgacgcgctgaagaccgggcagatcgatggcatagtcactttccagccttatgtgtccatcgctgccaatcagagcaacgcccacatactcgaaaactcaagcgaaatactaccaaaccatccatgctgcgtggtggtagcgtccgacgatttcatcaaaaaccacgaggaccaggctaagactatcgtcaagatccacgagaatgccaccaagttcatcaatgacaatgtgaaggccggcaacgccgacaaaattgtaaaactcctgcctgaggacattgtcagtgatgccaacttggaagccgactcgctggctagtttcccatttattagcggcatcgataatgacttcaaggccgatgtggacgagtttcaagccctggaagtaagcatcgggctgctgaacaacaccatcccgcaggacaaaatatactgggaggcatga

SEQ ID NO: 9235 - DNA, 627 bp, synthetic construct
  source 1..627: mol_type = other DNA
atgaaatttgacttatccgaaatcggaattaaatccggcctccaatatgaatgcatcaccacaaccgttaacaaagagggcgtgaaaaatgccggggcgttcgccttcgaatatctgggtgatgacaaggtaaagtgccacatctttgaggggagtaagactctgaaaaatatcctcgacactaacgagtatgtcgtgaacataacacagaaccccctagtgttcacctacgctaccttggactgtctgggcgatgaatattacaccgacgacgagagcatcgccatcattaaaaacacgccagcttacattattgtggatgtcgaaaacgtggaaattaagacacctgagaatttcccgatcaaaggggatagcaacatctactttatctacggcaagatcaggaagcttgtcgtaaacgatgaacgggccgccgcattcaatcgaggaatgagtgcgctgatcgagagcctggtgaacttttcgagatacaaaatagtcgacgaggagaagcgcaaagagtatatggacaagctcattgagaatcagcgggttataaataaggtgtcagacgaaaagacgaagaaggcaatttccgatctgaagtctgagtacgagaagtactga

SEQ ID NO: 9236 - DNA, 375 bp, synthetic construct
  source 1..375: mol_type = other DNA
atggacggcgaaattgacctcgagctgtatacaatcagtattattaggcttaattccatcttccagaagatcgaggataaaaagatagtcaccgatatcatctctgatataaacgattgctttaacgacctgaaccagatttacgaagacattttgaacgagctctccaaagaagaaatcaacatcaatgagtatgacccatttttcgagaacggaatggtaatgtttcccgagtacaccaagagcattgatgaaacgataggcaaaatcgacgacgagaacctaaaggtggccctcaatagcctgtcagacctgttcgtgaagctgatcaaagtggggaatgagtacttcgagaagcggggtgcattcaagtga

SEQ ID NO: 9237 - DNA, 2097 bp, synthetic construct
  source 1..2097: mol_type = other DNA
atggtggacctcaacaagatgtttaaacctgaatctgtggctgtgattggcgccagcaatactccaggcaaggtgggctacattatcgtggacaatctgattaatgacggctttaagggtgagatatatcccatcaacccgaaagggggagagatcctaggtaaaaaggcctatgcgaatatagaggacgtgcctggcaaggtcgacctggccataattactatcccctcggtctttgtcaatgccgttgttaaagagtgcggcgaagcgggtgtggaacatatggtagtgattacggcggggttcaaggaggtcggcgatgagggggctaaattagaggccgagctcaccgcaatcggcaaagagtatggcatcaacataatcggaccaaacagcctggggatcaccgattcccacactcccatgaacggatcattctcacaaatgatgcccccaacgggcaatatggctttcatctcacagagcggcgccatgatggtagctatcattgactggagtgtcacctccggaatcggattcagcaaggtgatcagtctagggaacaaggcgggcgtaaatgagatcgagctcctgcagtacctggcagatgatgacgaaacgaaagttatcatctgttacctggaatctatttctgagaacgaagacttcgtgaggaccatgcgggaaaccgcccgaaagaagcccattatcatactgaaatccgggagcagctccgcaggagccgccgccgcctcttcccacaccggagcactggcaggcagtgacctggcctttgacaccgccttccgccaatccggaatcatcagagtggacactatggcggagctgttcgatctgggtcttgctttcagcaaggcccccctcccacgaggagaccacgtcgccatcattacaaatgcggggggaggaggcgtcgtgaccgtcgacgccatggagaaggcaggcctcaagctcgttcagttcgacgaggagacaactgaacggctgaaaaagtgcgtgacagaggaggggagcgctaaaaatcctatcgacgttctgggcgacgcgcccgtcagccggtacaaggaatccttggagattgtgttgagtcaggatgaggtggactccttgattgtgatggtgtgtcctacagcttctgcagacccagatggcatcgccaatgccatccttgaggaaaggaaggagtttgataaaccgatcattgtcgtgaacatgggcggtccctcattcgagaaagctaacgatgctctgcgcgaaaatggtgtgccaacatacgtattccctgagaccgctgtcaccgccctcaaggccatgacagattatgcaaagctcgaagacaagtcatatgatgatgttgtggagaacatagatgacgtggacaaagatgcggtcaaggccatctttgagaaagtgaaagccgatggcagagacacgttgctggggagtgaggcctatgctgtggctgaggcatacggcatttcggctgcacccataaagctatctacaaacgccgaagaagcggcttccctggccgaagagatggagtttcctgtggtgcttaagatcgcatccgataagatactgcataagtcagatatagggggtgtcaaggtcggaatcagcagcgctgaggaggccaaaagcacatacgatgagattatcgcaaacgcaaaggcagcccaccccgacatcatccctgacggcgtagaagtgcagaagatgatggactctggggaagaagtgattgttggtatgatccgtgatgagcagtttggaccgatgattgcctttggtatgggggggatctacgtgaaccttatcgaagatgttagcttcaacctcgctaaagggatgagttcgcaagaaattgacgagcagatcaacaccaccaaggtatctcagttgcttgccggatacaggggcgaggcagcttgcgacgttgaggaagtgaaggaagccattaaacgcgtcgccagactcactctggacttcccagaaatatccgagctggacattaacccgatcttcgtgtacgaagaagggagcagtgctctggatattaagattaaattatga

SEQ ID NO: 9238 - DNA, 921 bp, synthetic construct
  source 1..921: mol_type = other DNA
atgagcctgattattgcttacatagggaagaagggctgtgtaatggcggctgacaagagacggataggatattttggtgacaagaagaacttagacctcctggaggaagaactgtatgagggaagcatcggaaatgatgaagaatttctggcccgagcttccgaacttggcatctcaattaagatcaccgacgacgcaaacaagctcaagaccgtgggaaactgtattcggggtgaggtcagtacaaagggcacactggagacgaagcgcagaaggatctacggcacaacgaacggttaccagatcatcgaactactcgggtcggataccaagtcacgtaatgccggggagaacggcattgtgatctttggtaataatttcgccaaacaacttgcccacaacttgataagcaagaaactcaaggggtccaagagtctgaggtacatgggcgaggtgtttgaagacatactcaaagaagtgtcctctaaaactcccaccgtcggaaagaacattgacgttttgatgcagcagccggatttcaataaaaccgaggcccagaagcacctgaacctcacaatcgatcacgacatcaaagtcctgactaaattccgccaggagctgaccgagcagattgtccaacagagcatcgagattgaaatggccaataaaattatcaacaaaggcagcgtaggccatgtggtcaatgtggatggaaacatgctcttcatccagctgaatgacaaaactcaagcgatggacgggaactggaagcagttggcagcaccaggccagaacgtgctgatgttcagtgaaagctccaacgtggagatcggggatgaggttgtgatcgagaatgaggagctgtgcctaaaaaaggataagtcctctcttaaatgcgacataatcttatgctcactgtga

SEQ ID NO: 9239 - DNA, 924 bp, synthetic construct
  source 1..924: mol_type = other DNA
atgaaaatcacattcctcggaagtggagggggacgattctccagcatctctcagcgacggatgaccggcgggtttagaatcgataatcttggcggtaagaattaccacatagatcccggcccgggggccctggtcagaacataccagtttgggttcgaccctcgcaatctaagtggcatttttgtgtcccacgcacatacagatcattataatgatgcggaaattctgatcgaggctatgaccaagggcatgacgaagaacaatgggaccatcctcggaagtgtgagtgtgctggacggctacaagaaatggggtccatgtatttcaaaataccatcagagcaagtcacggaccgtcatactcgagcccggcgagactaacgaatttgatagcatcaaggtcaagggcactaaaacccagcatggcgaccctgttggctccggatttcaaatcgactacaacggattcaaaatttcttatacgtccgataccggctatttcgacggacttgctaaggaccacgagggggcagacattctgatcgccagcgtactgaggcccggcgagaaatcaattccaggacacatgtgctcacgtaacttcatcgacttgatcgaagaagtgaaacctaaggtggccgtcatgacccacctgggtctgaaaatgatatccaataaccccgtggtggaggccaagaagatctccaaaaagacgggggtgaagacaatagccgcgtttgacgggctgagcttcaacatcaactacaataatccaagaaaattcaggctcatttcgctgaaggatgttgaatctagcatgcacagcacaagccacagtttattcaacagcggtaggcgcaactcgtatcagacttcttttcgcaacaaggagttcgacgagttgtccatcgtaaagcggaactga

SEQ ID NO: 9240 - DNA, 1101 bp, synthetic construct
  source 1..1101: mol_type = other DNA
atgagcaatagcatcggagaaaagtttaaaataacctccttcgggtcaagccacggcttcggtgtgggcgccattgttgacggatgtccggcaaacctgaagcttacaacagaggacatccagaaggagctcaacaaacggaaacccggcacaagcagcgtgaccacccctaggaaggaaaatgacgaagtgcagattctatctgggatctttgaaggcaaaactgatggcacgcccatcacgggcatcatcttcaacaaaaaccagcattcgaaagattattccatgttcaagaacacgccacgacctagtcacggggattacagttggatggtgaagtacggaaactatgactacaacggcggcggtcggggtagtggaagagtgactatcggacacgtgattggtggagcgatagctaagaagctcttaaaaacccaaaagatcgagattatatcccatgtcgtccaaattggcgatatcaaagcaaagccccaggactacagcacaatcaagaaaaacattgagaagaatccaatcaggtgcggggacttgaaagcttccaaggagatggaagagtttattctgtctaagaagcaggaaggggactctgttggcgggatcgtcgagacaatcgccatcggcgtgccacaggggcttggagagccggtcttcgaaagactggatggtgatctggcccggatattgatgaacattggatcagtgaaaggggtggaaatcggcctgggctttgacgtagccactcacactgggtctgagataaatgacgagtatcagatcacgaataacaagataaccaccaagacaaacaattcgggtgggatcatcgggggaatgagtaacggaatgcccatcacctcaaggattgcagttaaacctaccccctccatttccaaatgccagaatagcattaatctcgagaagatggagaacgaaaagatagagattaagggccgtcacgacccatgcatctgtcctcgcgtaaccgtcgtggccgagtcatccactgcgatcgtgctggccgaccatatgattcgcagcggcttcatccaccccaccaatctggataagagtatttga

SEQ ID NO: 9241 - DNA, 2628 bp, synthetic construct
  source 1..2628: mol_type = other DNA
atgaagcggcatggactgttcattctgatcctcctaattgtggtcctcgctatcatgaacagcgcctcggctgaaaattcgagcgccgatttgatttcagatacgcagtacgagaacagtgtggatattgatgtggctgacgataacctgaagtcctaccagagcgtcagctctgatctggaggataataacgaggtatacaatctgaaattgaacgataacagccaggtggacaacacatttctcaaggataacgccagcgtctctgactccaagatatataaactcgggtatgatgttacacacgttgctgataagctccttaatttcagctctgcggacgacatcttggtcatcacaacggcagggatggcttggattgacaacaagaccacggaatccgctttaggcgggatagtcgatgcctcaaacaattacgttagttatggaaaaggcaatatcctcacactctcctccaccaggaacgatcctactaatatcgccttttttattaagaaagacaactcccttaccatggcattctataaaaacggctcgctgactcctattttccacggcaatgcaggtccaacactctccgccggggagtggaagaagctacaaaaagctctgggggatgaggatgcctacagctacattagtatagccaacgcctggagcgccggaatgcccaatgatgtgctgacgcaagccacctatcatggacacgtgtgcaccggcctgataagtggccaggccatgattcaaaccctgctgacttactaccccccaaaggacgaatttggcctccccctggagcatacagcatactatgtccttggcgtgccgggcggatctgaggacgacgccttcacatggtcactggacattactccaggcaaaagggcgtacatcgggattgacaccatggttaataaggccatgactggcttcatccgatggaataccacttcaaacaccggaattatcatcataatgagctataatgagactgccataaaggaaagcttcaaaaaggtgtctggtctgaatcctgacgcctccgcaacgaatgacttgaagtaccagaattggcttatcagtaccctgcacaccaacccaacctccctggtcacaatactgtacgagtttaaaggacttactaaggacaatctggagtacctgatgggcttggaaatcggtaaggggaacgtggtgaagtccgctcatgggttggacatgaattatatcctgggactgaacttaaccaaagccaaccgtgaggcgaacgtgaacatcgctgaaataaagcttagcgatgctaaattgaagcagatcgggatcgacgcgtgcaacaatgccattgagtattttagtagccagggcatcaccattagcaaagatctcaataacctctacgtgcttacttctgcgggctatgttcgcatcaacggtacgcccacctccatggtctttgatggtatttacgaggtcctcggttcagcactatacaagaaaacactcttcccagtgcacacgccgatttggaaagacttagtgtttgacttctactgggtagaccccaacaatgtgacaaatgattcgagctttagtctgaagtatgacgtggctaaagatgagctgatcgtgatcggcaacaccaccaggaatgcaaactacatcctgcagaatgccatcaaatatgaccctccatacgatgtcctcatcggatggctgttccacaaccacgtatgcgggggaagtgctcctgggtacctgatcgctgactacatctatgagaacttccccaccaacgaaaatgagtcatatatctacctgacaactaatgcgaactgtaaggacgacgtgatttcaagagtgctgggtgtaagccccggtatggggacatattataatctcagatatgacaacaacaagaccaactccacaaatgttggcatcgcaatcaaatggaacagcaagaccaagactggagagctcatcattatcaatcttgacaactgggggagcggcgcgatattcaagaaaggctcaaatatgtacgaggaatacatcaaactatacaaaaaggactactccagcccaaacctgatctcccggccgcagatttcaataacagcccggaaagaaatcaacgaggaaatgctgaacaagattattggaggagccacggataccaaggaaggcaattcgattgcatatatcatgaacctgcccgacaagcttcctattaacaatggcgagaacaacaacaaaaaggacaacaagaaaaccaagataaccgggaacaaaaagaaaacggacggcaagcacatcaataacagctcctcaagctccaactctatcgactcgaacagtcctacaaccggaacttacggaaagtccaatgcagggctatccgtcggcattagcaagaacatcatcaatgcaaatagcaactctgaaagttccgacgagagttctggtgatggaaagacttatgaaataagcaagaagagtcccaataaaaaaatcaactcaaacaatgccatcttcgccatcttagccgtgctggtgttgggcggtattgttgggtacgggtacattcgcaagaaccgcggcaagtga

SEQ ID NO: 9242 - DNA, 480 bp, synthetic construct
  source 1..480: mol_type = other DNA
gtgatttcaacggttcttagcgtatcttatgcacaccccggacatggccactacgtcgatgagatcacatctgaggacgtgggccacagtaaccacccgtccagcgactcccatgacagttccgggaaggagctgtccagtaaaagctcatcaaatagcaggatcgcctcttctcacagtaactcgaaatcaaacaaggtctccagctcggatacctccaacagcgacctctccaacaaacacacgtccagccagagcattaagagttcaaagggtgatgtggagcctatcaattctcagaacgaggaaatgccaaataatacccaagtcaagaatacaagcaatataactaaccatacaatcaccgaagaagccgaaaataccaacttgctgactcagagcaacatactgctcttcattctggtggctatcgttgggttctgcatcgtggtgctatttgacaagttcaaaaaccggtga

SEQ ID NO: 9243 - DNA, 1005 bp, synthetic construct
  source 1..1005: mol_type = other DNA
atggaatttccaaccacccgactgaggaggcttagaaagaacgccaagattcgagatatcgttcgggagacgaagctcctaaaggaagacctgatctatcccatctacttcaaagaggaccttcagggcctggagaaggaagagatcagctcccttcccggggaatttaggtactcgctcgacagtggggtggagtttgctaaggaactggagtcaaaaggcttaaagagcattattgtcttcggaataccgaaggaagaaactaaagatgaaatcgcctccccagactacagcgctacagggatcgtgcagaaagcgatcagacgcctgaagaacgagaccaatctggttatcattagtgatgtgtgcctgtgccaatacacatctcacgggcactgtggcttgatcaaggagaacgaggacacggatgacggcattgaaatcttgaacgacgagagtctaccttacatcgcaaaagtggcactctctcacgctgaggccggtgccgatatcgttgcccctagcgacatgatggatgggcgcataaaatccattcgggagactcttgacgagaacggatattataatgtcatgataatggcctactccgcaaagtacgcctcagccttttatgaacccttccgcgtggcagcttgcagctccccacatctcggagataggaaatcttaccagatggaccccggcaacgctgtggaggctatccgcgagtgtgagctggacgtcgtcgaaggttgcgacttcctgatggtcaaacccgccctcccatacctggatgtagtgcggatggtgcgggatgagttcatgttgcctttagtggcctataatgtaagcggagagtacgcaatgattatggccgcgattgagaagggcttcctgacagaacgtgcgatcaccgaatcgttgctctcaattaagagagctggcgcagacctgataatcaccaacttcgccccgtatctgctcctgaatgacgtgatagagtga

SEQ ID NO: 9244 - DNA, 882 bp, synthetic construct
  source 1..882: mol_type = other DNA
atgaatgcctccgaaatcgctaagatcgcccagattgcctcagcactggaagtaagcggatacccaaagcctggcaatgtgcaccgcatacgagattacgacgacatggagttcgaggacttcgtcatcagtggcatcgtcatcggcgacactattcgggaagcatgcgacgacgtagatgtgaaaaacccaaagctgggcaaatacatccttcaagcagtgtccgaaaccgataaatggatcaaaaacaacaccaaccttggcattgtcatgatgataattccaattgccgtggcggcggccataagtaacagctttgacgagattcgcgataacataaaagtcctgatgaagaacactagcgttgacgacgcttgtgatctgtatgatgcaatcaacatcgccgacgcaggggggatgggggaccaggacgaatacgatgtggctagtgataacgcgaaaaagggactgaaggagaataaacagacaatgtacgacgtgctcaaaatctcagctccctgggacatgctggctcgggagatgacctcggatatgcccgctgtgttcgagatcggttatcctacgtatcatgagctctctaaaaagaagtctaagaacgagacgtgcatcctcaccttcttaacattgctctcccaggttcccgataccctgatctccagaaagtatggttccgacgaggccctaaagatctcaatgatgactagggacctgcttaacctgaagaatgagagcgactttaaggataagctaaaggaatttgacgatttcctcttcaaaaataagtacaatccgggaacaacagccgacctgaccgccgccagcatttttgtgagctacttgaaagataatttcatgatttga

SEQ ID NO: 9245 - DNA, 324 bp, synthetic construct
  source 1..324: mol_type = other DNA
atggaaattgagtataataaacacgctacatatccgcccctcatcgaggacctagtcaacgaactgctgaaggatgattttgtgcactttaagatcctttgcgccaacgaagtgcaccattttaataaaagcgacaacagcatcataaagttcgagaccacatatgtaaaggagacctgtgaaaacggcgatatgctctacattgcatacccagacattttccgggtgaaactgtacagggacgcgacgcagtacatcaaggacaaagagaagatcgatgccttcaacgacgtcgactggactgggaatcgcatcatattctga

SEQ ID NO: 9246 - DNA, 1545 bp, synthetic construct
  source 1..1545: mol_type = other DNA
atgagtgaggacattaagaaaaccatcaatgaactgcatatctacgaaaaaaagctgctgaaagaactggaagccagcgccaacgccaaccccgagaagatagctgagaagaccggcatggatattaaggcagtcatgagtgccgccggatcgcttgcatcaaaagatatcattgaagtagacaaggaggttgaggaggtcatctccctgtctgatgtgggtctggaatttgtgcaggacaaactgccagagcggaaaattcttgacgttctcattgaaaagaaggagatacacatgaaggatctcacggatatttccggcctggacaagaaggagtccaatatagctattggttggctccgccggaaaaactgggctcagatcgataaaggcgtagtgaaactgacggatgacggcatcgccttcaaagacaaactaggcgatgatgaagaactgctgaatatcctatctgagaccaagaacatcataaaggagaacctctccggcgatttaattgacggatttaataagctgaatgagcgcaagaatatcctcaacattaaaaagaacacctcacacagcttcaagctgctggacaaaggtgaagcaatactcaagcagggattcacgattcaaaagcaggcgacccaacttacacaccagcaactgaaggacggggaatggaagaacttgcagtaccgaccttacgatatcaacgccgaagcacccatcgtgtttgccgggaagaaacatcctttaagggtgatcattgacgaaatcagagagatcttcctgaacatgggattcagcgaggacaatggtcaatatgtagagtcagctttttggaacttcgactcccttttccagccacaggatcacgcggctcgggagatgcaggacacattctacctcaagaacccattgacttgtgacctgcccgatatggatttggtcaaacgcacggccgagacccacgagactggggccggcacaggttccgttggctggcagtacgattggagcgaagacattgcacgccagagtgtgctgagaacccacacaacaggaatctcgacaaagcatctctttgagcatgagcccccaatcaaaatgttttctgtggggcgagtgtttcgacgggaaactttcgactataagcacctgcctgagtttcaccaggtggagggccttgtctgcgacgagggaataagcttccagaatctcctgggaactttgaaggaattttataagaagctcggctttgaggtcagattccgcccggcctacttcccttacacttatttgagcaccgagaccgagatctacttggaggaaaaagagagttggatcgagctaggaggggcggggatgttcaggccagaagtgctaaaaccgctcggcatcaaccagcccgccctggctttcgggctggggatcgaaaggctggcaatgatcagatatgacgtggaggacatccggatgctttacaagagcgacattaaatggctccgtgagttacccattgacaggggcgtcgaactgtga

SEQ ID NO: 9247 - DNA, 774 bp, synthetic construct
  source 1..774: mol_type = other DNA
atgtcaatcaagctagtgagctggaacgttaatggcattagggccctcagcaagaaggaggagttttgggagtggttcgacaatactgacgcagatatcatcaactttcaagaagtacgctccacaaaggaacagatcccagagaaactggccgatgtcgagggatttcataaatcctttaatgaggccgaaaagaaagggtacagtggagtcggcacttactctaagatcgagccggtggacgtggtgaaaggtctcggtattgaggaactggacggggaaggacgggtgctgagaatcgagtaccctaactttattctgtataacatctacttccctaacagcggcacgggcgcgaaaaggctggactttaaggttgagttctgtaacgcattactgaaacagattgtggacctgaaaaacaaggggaaaaatgtcgtggtgaccggagactacaacattgctcacaatccaatagacgtctacaaccccaagaattgcgaaggcaagtcaggatacttgcccgaggaacgtagttggttggacgaacttgaaaacgccgggttcgttgatacattcaggatgttcgatgagggggaaaataacttcacctggtggtcctatagaacccgggcccgggagcgaaatgcgggctggcgccttgattatttctatgtaaacgaggaaataaagggcaatgtcaagtcggctaagatcctgaacgaggtgttcggtagcgaccactgccccgtgaccctcgagctcgatttctga

SEQ ID NO: 9248 - DNA, 696 bp, synthetic construct
  source 1..696: mol_type = other DNA
atgattaacaatgacaacgacagagttgtgttcttcgatatagacggtacactgctcgatacatcaaacttcgctgaaaccgctcgcaaagcagccattggcctcatggtcgataacggcttgccgctggataaggatgaagcatacggggtgttgaagactattatccgggagaagggctccaattacaacaaacatttcaacatactcacgcaggtggtcctcggccacgaggacccaatgctggtcgcgctgggaatggttacctaccacaacgtgaagatggcccttctacggccttttgccgagactatcgacaccctcatctatctgaagagccgcggataccgtctagctgtgattagcaacggcatcaccatcaagcagtgggaaaaactggtgaggcttaatgtctattcctttttcgatgcggtcatcacctcggaggaagtgggcaaagagaagcccgacaacttaatctatgacgttgcactgaggaagatgagaggaaatcccgagaaatctgtgatgataggtaataagcttaaagaggatgggctgggggccgtgaacgccgggatgagtgccattctggtaaatagcgatgtaacggaggaagaccgagaatttatcaagaagaataagctggacattaaaattatcgagaacatcggagacgtggacacaatcttgtga

SEQ ID NO: 9249 - DNA, 684 bp, synthetic construct
  source 1..684: mol_type = other DNA
ttggtcagcgagacaaaagagcaactggagctcgaagcagaaatcaaagagcaggcgcagatatttctcaaataccttaattcaactctgccagagagtatggaactagaatacgaggggttttacaggagaggatttttcgtatccaagaaacgatacgctgtgatcgaggatggggagatcatagccaaaggactggagttagtgagacgcgactgggcccccattgtcaagaagacccaagaggccgtgctgatggcgattctgaaggaaggcgatgccgacaaggcaatcaatgaagttaagaaggtgctgaagaatatcaagaagggcaacgtggataagaaggagatgatcattcacacacaaatcactaaaccacttgaccagtacaaacaggttggacctcacgtaatagctgcacgcaagattgaagagcatgggattaaagtctcccgtggcacgatcatccagtatataattgtgaagggcaaaggttctatcagccagcgggccgtgccgtacgagtactcggagggttatacctatgataaaaactattacatcaacaaccagctcatccccgctattgagaggatcatgtacagcttcggctataccaagcgggacttggaagacatggccaagggggaagtccagcagagtctggacgccttcttctga

SEQ ID NO: 9250 - DNA, 345 bp, synthetic construct
  source 1..345: mol_type = other DNA
atgaaaaaaaggctgattagcagctacgacgagatcaatgatatctttgtgggtaaggttgacggggagaacggcttctacgccgacttcgacatcagcgatgggatatttctaggcattaacaaggacaactgccccaattcgatctacgtgtccgatgcatctcgcgtactgaatgtctcaaagcagacgctggaaaattccgatgtgaaaatcacagtcagttgtgattccacctgtctctatttctcaatgttcattggaaacctccacatctgcagctaccggtgcaagaacatatttaagattccattcatcgactttgaaatggacagtaactattga

SEQ ID NO: 9251 - DNA, 276 bp, synthetic construct
  source 1..276: mol_type = other DNA
gtggacaatcctaagataaacgttaacagcgaagacgaaatcgtcattgtcgtgcccaaagacgtggacgaggacgagctggtgattgacctagacgaactgggaatcgacatcgagcagctcggggatgaggtgaacatagtaatccaggtggagggcgatgatgagctcgagagcgacttcatcaccgacgaggatttcatcctggagccaaatgaatggtacttcgatgatgatccctatggcattgtctactacgaatttccggaggaatga

SEQ ID NO: 9252 - DNA, 231 bp, synthetic construct
  source 1..231: mol_type = other DNA
atggacaaagagatcccctactatgtgcttgacgagaacggccagataggaagcatcaatgaaccgtacatcgatgacggcgatctgaaagagctgctcctgtccattttgggggacgacatcccacaggaagagatccaaaagattctggacgcaagcgccgacgaaaaactcaccgaggatgaatttgataagctagtcgatgagttcattctgaagaacaagaagtga

SEQ ID NO: 9253 - DNA, 375 bp, synthetic construct
  source 1..375: mol_type = other DNA
atggccatctctcagggaaagtcaacaaggagcccctccggtgcgcgcaatgttgctaaccggggcaaaagaaagagcgagcttggacgcgacccagccgagacaaggctggatgctaagagactacgcaaaattcggactcgtggcggaaacgaaaagctccgactggccactgggaatcgaatcaatgtgacggacgccgatgggaaaaccaaggtgctggacatcctcaacgtggtggagaacaccgcaaatcctaactacgtccggaggaacatcatcaccaagggcgcaattgtagagaccgcggaaggtaaggccaaagtcacaagtagaccgggccaggacggggtgataaacggcatattgatttga

SEQ ID NO: 9254 - DNA, 1380 bp, synthetic construct
  source 1..1380: mol_type = other DNA
atgaagctaaaaaagagcgattatattattatcatctccttcatcgcttcatttatcgctgcattcatcagcgcagcccctgccgtggcccttccccagctagccaacgaatttaatctgaacaatatcatgcagaactgggtggtgaacatctttctgttcactgttgctataactgccgtccctctgggcaagttcagcggcaaaaatggcatcaaaaaaaccttaaaccttggccttatcttgttccttattggcaccatcattactacattcgcaaatagttatatcactctcctgatttttagagcaattcaggccattgggaccgccatgatttacaacacccagacaagcatcgtggtcctggctgtcgaggaaaaaaacaggggaaaggcgctcggaataatcatatccggcgtttacatcggactggcgatcgcccccttcatcagtggcattctgacttacaatttcggttggcgaactattttttactttacaatccccttcacacttcttgcgctgttcttatccttgtacaaagtcaaggatgaatggaacatgtacgaagacgagagctatgacaagtttggaagcattctgtatatgattgggatcttcttctttatttatggatttaccatcttgaatcagaccaaaggggtgatcttcactgtgatcgggatagtgttactcatcggattcgctgtaatcgacctgaagatcaagaacccaatcttcgacctgaagctcttcaagaacaaacggttctcctcctcaaatatcgcctcactaataagttatattgccacctttgttgtgacatacatcctgaattaccacttccagtacatcctcagtctcaattcccaaacaaccggcattctgctggttgtgacgccggtgataatggctatcatatcgccatttagcggaaagttttcggataagatcgatagccagaaactggccgccattggcatgggctttgtaacgattgccgtgtttatcctcatcttcctggactattcaaccccactgtgggtgattattattgctatggcactccaagggttgggttacgggatcttctccagcccaaacaccaacatgataatgagtagcgtgccccaggaggagacaccgagcgcgagcgtctcgattacggtcatgcgcgtcatcgggcagacgatgtccctcgccatgttgaccataatcttttcagtgattatgggtaacgtccccatcatccctgagtacttcagtctgctgaccaagagctctcaaacagcatgcatcatatccaccctgctgtgtttcattgcagtgatagctagcctcgtaggcattggtgggaagaacgacttgacgaattga

SEQ ID NO: 9255 - DNA, 1023 bp, synthetic construct
  source 1..1023: mol_type = other DNA
atgtccgaggataagatctccatgaatcacggtgccggcggagaagtcatggctaatttaattgcgagcacaatcctggataacatcacgaaaaaaagcgtgaacggcgggattagtctggacgccctggatgacggcgcaagcatacctattggagaggactacgaactcgtgctgacaactgacggccacaccatcgacccactgttcttccccggcggagatattgggcggatctcagctgccggaacaatcaatgatgtgtccgtcatgggggctaggccgctggcgattagcaatgccataatcatgcaggagggctttccaatagaagacttggaccgcatcatcaaatccctcaacgaggcctgcgaggaggtggatgtggccgtgatcactggcgatacaaaggttatgccccaggacaagctcgagggcattgtcatggttaccaccgggctcggcatagccaaaaagggggaggttgtgcgggactcaacgctagaagtcggagacaagatcattgtcaccgggagtctgggcgaccatggaatgagtctaatgtcttttagagaaggtttcggctttgaaactgacttgaagagcgacgtggctccaatgtggaacatcattaagaaagctctggagatcggcggtgttacggccatgaaagatcccacccgcggaggcttcgccaatgccatcaacgagatggccagcaaatctggtgtaggggtggtgctcgagcaagaggcgattccaatcaaggaggaagttcacgccgtctcggaaatgctggggatcgatccgttcgaagtagcaaacgagggaaaggtggtcatgggcgtgaaggccgataaggcagaagcaatccttgaggctattaaaaacgaaaagtacggtgagaacgcagctataattggtgaggtagtggaaggagactatgtcgtagtgaacacccctatcgggggggagaggatacttgaggcacccatcgcggaccccgtgcctcgagtgtgttga

SEQ ID NO: 9256 - DNA, 396 bp, synthetic construct
  source 1..396: mol_type = other DNA
atggtaagtatctttagccgacggattatcgcctacttcgtggacttctttgtcgtgtcggcgttcatgtggattgtgagttacctcctgtcattagttatcggcaccaacaatccgatataccactatttcatctatctggtgcccattttgataatgatctactttgtgctatgcgaaaagatcgtcggggcttctgttggaaaaagcctgctgtacctgcaagtgagatcccagaacggcgcacatatctcctggtcccaggccattgtacgcaacctcacgaaaatttattggattccaataatctttgactggggtatcgggaaggtcctgaagaaggacaggctcttcaacagcatcacaaaaaccgtcgtgatcgatgagcttaattga

SEQ ID NO: 9257 - DNA, 450 bp, synthetic construct
  source 1..450: mol_type = other DNA
atgaacaaaaaatccatctcggtgatcttactcattattttttcaatcacaatcatattcacgactgcaaatatcctcattaacgacaacactccactagagaatcaggccggaaccctgaaaatcaacaataagaccatacactatgagaagtccgggaagtgtctggaggtcattgatggaaatacaatcaaagtctacggcatcgggaaggtgcagctcacccaagttggcagtccgagtagcgaagccaaggacttcgtggagaacaattgcctgggcaaaacggtatacctggatattgatgacaagaaagtggaagacgagtatggtcgggcgcttgctatcgtgtacaccgacaccgtggatgtcaacaaggagttgattaacaacaacctgagcgaaataagctacttcacacccagcgaatttaagaagggggacatctga

SEQ ID NO: 9258 - DNA, 687 bp, synthetic construct
  source 1..687: mol_type = other DNA
atggagcagaagaacattacacagtactccatcaattatgaaacgaaacagcacccttcagtgaagggtctgcagatcattgagggcaagaacaatttccccattagttggttgaacaaacagggatactgtgaataccaactctatctggagcacgtgaaaaacataaagtccccaaccacacctgaaatgacccacggctccgagattcacaagcagctggaggacatcttcaagcaggaaagcgcccaagtcagctttgaagaggtgattgaaagcagcaagagtgaggcctcaatgagtcgcgagtgctttgtcatctctcccaaatacgggatcaggggccatatcgatgaaatctggatgaaaccagaggagatcgtaataatcgacgataaacctggaaggacaccgtacaagagcacgatgaatcaggtgcgggcatattgcctggcctttaaagacatgtcgggcgatgatagaaagatcaaaggagcgcttcgggaaagaggtactgagaacctcttctggatcgaacccttcaccgaggacgttgagaaggagattaagttcaccattgaccgcatacatgggctatttaacgggagcaagccattcatgcccactaaaaatccgaagaagtgtcactcctgccgattcaagcacgactgcgagcatgctcaatga

SEQ ID NO: 9259 - DNA, 861 bp, synthetic construct
  source 1..861: mol_type = other DNA
atgcactatattaattccaagaccatactgtcacccaaaaacggcatgaacctatatcgcggttgtacgcacgggtgcatctactgcgattccagaagtgacatatacaatatgaatcatcggtttgaggacgtggaagtcaagaagaatgcgctggtgttactgaaaaatgagcttcttaagcgtccgcagagcatgattggaacgggcgccatgaccgatccatatatcccactggaaaagcacctcgagtatctcagaaagagcctgaatctcatctatcggtacggctttggattcacctgcatcactaaatccgacctgatcctccgggatctggatttgctcaagaaaatcaacgagaaaacaaaggtggtggtgcagatgactctgaccacctctgacgatgacctctgccgcatcctggagcctcatgtatgcaatacaacaaggagggtagaagttctgaagatacttcagaagcacggtattccgacagtggtgtggttaactccaatcttgccttacatcaacgataacattgagaacatcgagtccatcctaaactactgtattgacgcaggcgttaaaggagtcatctgtttcgaaatggggatgaccctccgagagggggacagggagtactactataagaaattggatgagtatttccccggcctgaaagataaatacattgaagaatttgggaacagttactcaatccctagccccaacaataagcagctgatgagcatattcaacgagaagaccgacaagcacgacattctgaacaaacccgacgaagtctttgactacattagctacttcccccagaagtcggtccaatctcgcctgatctga

SEQ ID NO: 9260 - DNA, 1284 bp, synthetic construct
  source 1..1284: mol_type = other DNA
atgaatttcaacgaactcaacatctctgataatattaagaacggactaaaaggaatgggctttacaaaagccacccccatccaggagcagtcaattcctgtcactctgaagggcaaagatgtcatggggcaggcacaaacaggttccggtaaaaccgttgcattcgcaattcccattatcgagaagatcttcatcgacgacaaatccccgcaagctatcgtactctgtccaacccgggagctctgcatgcaggtcgcagatgaaatctcgaaggtcgcaagtaacattaagaaactgaagattctgagcgtatacggtggccagccaattggccgccagacacgggtcctcaaaaagggggtccatatcgtggtcggaacacctgggcgagtgatcgatcacatcaataggggcaatcttgatctgaacggcatcgagagcgtggtgctcgacgaggctgatgagatgctgaatatggggtttcgggatgacatggagtttatattaaagaacaccccaaaaacccggcaaacactgctgttcagcgccacaatgcccgacgagattaagaagatagcccgcaagtaccaacgcaatcccaaattcatcaaggtgaaggctaacaagaagaactccccaaaaataacgcagtatagctttaaatgcaatgcgaaatataagttcgatgacatgaccaggctgctggacgtattcgacgtggaactcgctcttatattctgcaacactaaaaagggcgttaattacgtggctaagcacttaaagaaacggggatactctgtggacgggcttcatggggacatgactcagaaaatgagagataaagtgatgaacaagtttcgcaatgataacatcgacatcttggtggccaccgacgtggccgcccgaggcctggatgttgacaacttggacgttatcatcaactacgatgtgccgcagaaccccgaaaactatatccacagaattggaagaaccgccagagcaggcaaactggggtacgcgttcacgctagtctgcagggacgaaactaggaggtttgccgccatcaaaaaggccaataacactaaaattaccgagaagcagattccttcctataaggaggtggagacgatcaagaataagctgattctggacaaggtgatcaactgtatagagcgtggagaactggaagacagctacattaactcaatcaaggacagtatgaataagaagataaacgctcagcagttggccgcgggtctcttgaagatggtgcgagaaaattga

SEQ ID NO: 9261 - DNA, 807 bp, synthetic construct
  source 1..807: mol_type = other DNA
atgatgaaagcattcaagaagagaggggcccttacccacttccagatcctcagcgaaatctccaaacaggaccctcacctcaagcaaaaggatttggcgaacaagctgggcatcacaatccaggctgtgtccgagaacataaaaacactgattgaacaaggatacatcagctcgaaggacggccgatcaccctataagataacccagaaggggattgaaaaggttaaaaaagatgccatcagtctgcggaagtacagcgacgctgtgctggagacgatgaaccattacaagacgatttggccagcgattgcaagggaggacctccagaaggacgatatagtggggctgtttatggacgacggagtcctgtatgcccacaagaaagaagagaacgctaccggcattgtgatggataacactaaggagggcatggatgtggcactgtccaacctgacaggaactattgatgtatccaatggtgaggtcacgatcattaacgtcccaaccataaaggacggcggaagcaaggccagcgacctagaactgatcaagaaggtatatgagaacggcacaaacagcggcgagccgatcgataaaatcgcttgtgcagggaccgtctcacgcgccattatcaataaattagagcttcccctagacattgaatacgccgcccccaatgcaactgccaatgcggcccgcaaaggtttgaatgttctcgctatctgcgtgggagatatgagtaaagccttcacccgggagctcgagtctgaaaaaatcaagtacaatgtgatcgacgggaagaaatga

SEQ ID NO: 9262 - DNA, 1407 bp, synthetic construct
  source 1..1407: mol_type = other DNA
atgcagatcccccaactaatgcacgagcagtacaggcaagctaaggagctcatcgagaacgcggaagacattaaggtgtactcccatatcgattgcgacgggatctgtagcggtgctatcctcagcaccatcctagacaggcagaataaggaatacgaaatcgaatttgtgaacctggacgtgttggacgacattgagcttacccatgagcttacaatattcagtgatttgggctccgggcagaagatcgacgcgaaagcccagaagaaccagaagatactcattctggaccaccaccctccccttcgggacttggactacaagaacaacaaggattatacttatctggagattaatcccaaccatcacgggatcgatggttcatactacgtctgcgggggaggcctgtgttactttctcgccaaacggttcggctacgatgatttaagctggattggggtcctgtcggccatcggtgacatgcaaaatactaagacagggcatttcgagggcttgaataaaatcatacagcaggacgcaattgatggcggatacctggaaatcatcaagagcgacatcaacatttacggcaggaacacccgccccttattcgtggcactgagctatttcagcgatgtgaaactgccaatcaccaacaataccaatgaaaccatggctattttagaggagttgggtattgacgaaaagcacaacagaaaaactcttaacgagctgacaatggaggagaagggcaagcttttccagcgtctcatgtccatgctgacacaggccgtgccaccgaaatatatccagtatctgcctcagctgatcctgggggactcctatactttcctgaaggaggacgagcacagcttcctccgggacggttcggagttttcaacggcaatgaacgcgtgcggccgaaaccacgaggagcagatcgccatggaagtgttgaaaggggaccgctttgtggcactggatgaacttgaagtcgtaagcaaaatccatcgcacgaacctggccaaagggattagtagtgttgccgaaaatgatgaaaccaatatcatagaactcgagaatctgcaatacttcgatggaaccggcattgctcctgaaattgttggaactataacgggcatgattctgggatactgcaattggaagaaaccgattatcggctttacccagacagatagcgacggcctgaaggtatccctaagatgttccagactgctgtcatatgatggcatccacttcggaaatatcatacgagaggtcgccagtgacgtgggaggatctgggggcggtcacgccatggcctgcggagcttacatcccaatagataagaagtatgagtttctcgaggagtttaacaaccggctcgacggaaaactcacaaaatga

SEQ ID NO: 9263 - DNA, 270 bp, synthetic construct
  source 1..270: mol_type = other DNA
atgatcacagtgtggccacagtatcttaacaagaagctatctctcaatgagggccggaagatcagtaaggaggattgcgtcaaagaccccaccataaatgacatagagagggcattgaagagactggggctgaactacgaactggagaaagacaaatcatacccgggaaagtggtacgaaaaatccggccgagccctcgtggagtgggataaaagcaaactcgaactgatcaaggaaattagcctgaagattaaggagatccgcaactga

SEQ ID NO: 9264 - DNA, 1095 bp, synthetic construct
  source 1..1095: mol_type = other DNA
atggccgactacaagtatgtgatcgtcggtgcgggccttagcggcctgacaattgcggagcgcatcgccaatgagctgaacgaaaaggtcttgataattgagaagcgggaccacatcggcggtaacgtgtacgatttctacaaagacggcatactaattcagaagtatggacctcacatctatcatactaactacaaaaaagtgcacgattacctgtctaagtttaccgaatggaccgattatgtgcacaaggttctcagttatgtggatgacaagctcgtaccaatgcccatttgtatagacacactgaataagctgtacgatctggacctcgacgagaacagcatgaaagaatggatcgaggagcacaaagaggacattgacgagataaagtcctccgaggatgtggtgctgaagaacgctggccgggacatttacaataagctgttcaagaactataccgagaaacaatgggggacatcggctgccaatttgagccccgctgtcatctcaagaatcccgttcaggtttaatcatgatgaccgctacttcagtgacacttaccagggaatgcctaaggaaggcttcaccaaaatgtgcgagaacatggccaagagcgacaatattcatattggccttaattccgactataaggattatatcgggaagatcaattacgagaagctggtctacactggtccaatcgactacttttacgactacaagtatggggaattgctctaccgatgcctaaactttgtgtacgaggtgctcgatgaggactcatatcaggaagccggagtggtcaactatccaaacgacccgtactttacaaggatcaccgaatttaaaaaactgacgcagcaaaaagttgggggaaagacggccattatgcgtgaatatcccggcttcaacggagaaaaatgctacccctaccctacccaggagtatctggataagttcaagctgtacgagagcgaaatggagaaagaagagaacgtaatcttcgcagggagacttgcaaaatacaagtattacaacatggatttagttgtgaaagatgcactcgaaatcttcgagaatgagatcaagtga

SEQ ID NO: 9265 - DNA, 1104 bp, synthetic construct
  source 1..1104: mol_type = other DNA
atgaacgataaaatcagcattatccttcccatcttcaacgtgggggaccacctccgcggaggcattgactcactgattaatcagacaataggcaacgagaacctcgagataataatggtcaacgactgttccaccgacggatcggataagatcatcgatgagtatgcggagaaatacgactgctgcattgccatccaccacgaaaagaacagtggtgcggcctacacaccacggaacaccggcattgacgcttgcaccggggattatataatgttcctcgacccggatgaccgctacacaccggatgcttgtgagacactgtaccatgccgccaaaaagaacaacgcagatgtggccttcggacgttttagaagaatctttgaatatggcgggaaagttcagaaaagcttctcgccctacatcgacaccctcgaaaatagctatccaaatgaaactttcgacacggccaactttctggatgttcccgatttcatctgggacaattttgtggaaaggttcctctacggcaaaaccctggaagtaacttacccaagggacgtgccaattgacacaatccacgtggagaatatcgagcaggaacctgacttgctgaagatggctcctgctgtctggagtaagatctataaacgcgagctaattacggataataaccttcgattccagcccttcgtatccggtgacgatatggcatttagcctcgaagccctactgaaagcaaaggggatcgtgtttctgaacaatttcatgtgctataactactacatcagggacctgcctaacgataagtccattaccaacactgtgaacgtgcggctgctctatgagctgatggaatcatacatttactgccggcaatgtacggagggatttagtaaggaggtgcaaaccgtctccataaatcctcatctgctgcattggactaattcctggaagagctctcccttcaccaaggaagagaataagttgttactgagtgaggtcaataagcttaagagcatccacaacacagacttgaagactaaaatcttactgagctccatttcaaccgcaatcgagtctaaaattcagatccagaaggagtga

SEQ ID NO: 9266 - DNA, 771 bp, synthetic construct
  source 1..771: mol_type = other DNA
atgagcaaacccgtggttgcgataacccgacccgaggacagggccaaaaaggcctgtgacatcgtcgaaaaactgggtggcgaaccttttctggcaccaacactggatttggaaccggtaaacagcaagtctttaaaggatctgattaaacggaaggacgaactcgactggatcattttcacctcccccaccaccatcgtgtcactgaataaattctacccggacttcctggggagtcttaattgcaaacttgctgtgatcgggaataaaactggcaaactcgctgaggagaacggcctcaaggtggacctcatccctgaggatttcaccgccgaggggttgattgaggagttcaaggaaaggaagataaccaaccagatcattggaatccccagaacgctgtcggcccggccagtccttccagaagagctggaaaaaatgggcaatacggtgatcctagccgaagcctataagtccctgtttccaatggacaagaaggcggtcaaggagttaatcagcaagatcgaaaacaaagagattgatgcaatcacattcacaagtcccctgactgtggagaacttctttaagataatcgagaataaggagaagattgctaagctgctctccgacaacatactaaccgtctgcattggacctatcacggcaaaggtgctcaagaaatataacattacatacatccaccctgatacttacacagttcccgatatgatggaattgctgtttaagaaatggcgcgagcagaacgagtga

SEQ ID NO: 9267 - DNA, 306 bp, synthetic construct
  source 1..306: mol_type = other DNA
atgcatgaccggatagagatcgctagggagttcgcaaacgccatcaagtcagacaaaatcatcaagattatcctttttggcagcgtggcccgcgaggacgatattgaagactctgatattgacatcctgattataagtaatgaatgggagcagatcgattccctcatcaccgacgaggtattcaaggtcgtcctagacacacaagaactgatctccccccacatattgagcgaaaaacagtttgaggaaaccaaaaatttcaacttcctgacgaacgtgctcaaggatggggtggagattggatga

SEQ ID NO: 9268 - DNA, 363 bp, synthetic construct
  source 1..363: mol_type = other DNA
atggtgctcaagctggacgagtgcgaagcattcatcaaaaaagccaaaagtaagttgacctccagccgagccctgtacgagatagggcagtatggggactctgtaggacgcagctactacgcgatgtttctaagcgcaaaggcactgcttgtgcgggacgggtacgatgtcagtagccataagtccctgattggcatctttggccgggactatgtgaaaaagggagacttcgactcgaatattgccaagtatctctcaggcacacaatccctgagggataacgcggattacgacgctatagatgccatctcaaaggagattgcccacggtaggatcaaacaggctgaaagattcatcgcctga

SEQ ID NO: 9269 - DNA, 468 bp, synthetic construct
  source 1..468: mol_type = other DNA
atgacgaacgtgctgattgcgtacttcagcgccagtggggtgaccaaaaatctggctgagaagattgccaatgataatgattatgacatctttgaaatcgttccagaggagatctacactcccgaggacctggactggaccaacaagcagagccgctccacaattgaaatgaacgacaagtcgttcaggcccccaatttccgagagctgtgacgtcggcgaatacgagaccgtcgtgatcgggtttccggtatggtggtatacggcacccacaataatcaacacattcatcgaaagtgtggacctaactggtaagaaaatcaaaatattttgcacttccggcggaagcggggtggacaagtgcgtcaacgatctcaaagccacctaccctgagcttaacttcacaaagggcattcggttcaccggaaatgtgtcaaacgcaaaggagtggatcgaacaggatctctga

SEQ ID NO: 9270 - DNA, 969 bp, synthetic construct
  source 1..969: mol_type = other DNA
atgtttagcaacataggcgtggtgggcgccggcgcgatggggactgcaatctctcagaccatctgcgacaatacccaaaaggtgtcactgtacgcgagaagggaagaactggtggactcaataaacacaactcgctttaacaaggattatttcccaaacattagactcaaggacaacataatcgctaccaacgatctgaatgacctcaaggacgccgagatcatcttccttacattgccttccagcacaatacgggaggtctgcagccagctgaagtatatcatttctcaagactgcgttctggtaaacacggctaaaggcctggagaagggatctcagaagcggatgagtgaagttatcatggaggagacagggaggcccgcctgtgtcctgtccggacccaacattgctgttgaaatggtggagcgcacattctcctccgccagcattgcgtgcgagaataaacagtaccttgagaaagtggagaaggccctatcaacgttccgattcaaagtgtcggccagttgtgacgtgattggggttgaatactgcggtgtaatcaagaatattatcgcaatatcccagggaatctgtgaggggatgaagatcaatgacaatgcccgatttagcgtcttcaccaagacctataacgagacgaaagatatgatcgaaaagtttggaggtaaccggaacaccgtggatgattactgcggcttcggggatattattactgcttcgaccctgaacgtcagtcgcaaccatacattgggtgtgttatacggccagagaatcgtcattgacgagaaggcaagcggcgtgctctttgaaggaaaaaacaccattgtaatcatgaaaaagctctgtaaaaaacacaatatcgactgcgcaaccgtggacttcacttacgatgtcattatcaataggatcaatccgaagaaagccttcgaaatcttttgggataagctgtga

SEQ ID NO: 9271 - DNA, 696 bp, synthetic construct
  source 1..696: mol_type = other DNA
atgatctgcgcggcaatccttgcgggaggcatagggagtagactgaaacagggaaagcctaagcagtttgttaacattaacaataagccaatcttggtccacagcgtggaaatattcctttccgtggatgagctagataaaattatcgtctcctctccaaaggagtgtgttgataagaccaacgacctcatggacgaatatttcccgaaaaacgacaagataattgtgatcgagggcggagaaactcggaatggcaccatcctgaactcgatccagtatatgaaagggcagaactgcgagaaagatagcattctggtaacccacgacgcatcacgcatcttcgtgagcaaaaagctgattaaggacagtatcaagtacgcaattgaagtgggtgccgcttccgctgccatccccgccacagacgtgattttcgagacagagatcgatgggaagctgacgggtgtccccttgcgaaagtacctctgccacgcccaaaccccacagagctttaacattgataaatttctggatatttacgaggacctgtcagaagaggaaatcagcaaactcgacgaggctatggtgctgttccatctgaggaacgccgacgtcaagttattccccggcgaccaaaataattttaagataactcggccttttgacatcaaactcgccgagtctatcttcaagaattga

SEQ ID NO: 9272 - DNA, 1068 bp, synthetic construct
  source 1..1068: mol_type = other DNA
atggacaacttcaagtgcggaagtatggactttaagatcagcgtgattgcccccgtttacaatgcggtggactccctggaaatagcaataaactctatcatcaatcagacaatcggtttcaagaatatcgagttgattctcgttgacgataaaagcaatgacggaagtcaggacattatcaaaaaatacgctgataaatacgaaaatgtgattggcatatttctaaaggaaaattcaggcctccccggcaaaccaaggagcctgggaatcaagtacgcctccgcaccttacctcatgtttctggatgccgacgacgagtatctgcctaacgctttcgagctgctgtataacaccatagtgaacgagaaatctgattttgtcatggggtcgcacttctggaatatgaatggggagcgaatgaagattaacatcctgcatgattgtaacgacaaatcagacgtcatcaatattaacccattcttaaatcaacgcaactttattctgcttagttacaaccacgtggccccctggggtaagatctttaacaaggagctgatactcaaaaataacattagctttccagaggacacactggccgaagatacctatttctacttcaagactctaatcaactcaaagaaagtgacccttctgcctaacgatagcctgtacatgtacaacgtatttgaaaataaggattccgtcatccacacgcacaacctcagcaaattcaactatttcctcaaagggttcgcgaacgtgatggagctgatcaaggacatccccttttccaaagagcggattctaatctccaatatgggcagtttgcttctcatcttctcgaatttgtctatgaaggagaagaaagaggccgtcccgaaaatctattacttcgaaaagagcttagacgaagaagtggtacttaagagaaaggaactcatactgcttaataagttgattctgaagaagcatttctatctcgcaattattatctccgatatctactctatcctgtataacaacgagaaaattaagaacctgtaccggaagtggggccacaaggagtga

SEQ ID NO: 9273 - DNA, 999 bp, synthetic construct
  source 1..999: mol_type = other DNA
atgaaaaccaagaaagagcggatattctattacgacttcctgagggcatttgccattatcgccgtgattatctgccatgtggactatttctttggccccctcacctccacaacccaaatcatcgtgcagatgacgttccacgatattggccggattggggtgccaatctttctgatgatcagcggagcccttctcctgaatcgcgagtatcctgatctcagccagttcctgaagaagagatttgtgaggatcatttacccgtttatcttctggatcatacttatcctggcccagatatactactatgggggcaatcccacgtatctctggaaagtcttcatcggtgaaccctcaattacttggtacttctgggttctgatcggaatttatctgttcctaccgatcctcaactcatttgtcaaagaatatggtgagaaggggctgaaatactttttagctatatggttcagcatcataattttgcagacattcaatgtgtacccattgtggactaaccttgatctgagctactttgccggatatgtgggctacccagttctcggctactacctggaaaacaaggagttcaagctaaacaacgagaaaatttgcattctcggggtaatcactcttctgatttcattgagttgttttgtgtacctgaattacatcaatagtaccgctatccattcgatttaccagaatatccccattgtcttcatgggactcgggctgttcatctctattaagtatgcagacaagctgaacaaatttaaagcgattaaggacaacttcatcggcaagagcatcatctctttaagtatatgctcctatggcatgtacttctcgcacgtcatcgtgaccaagtttctgtcctactacaacccccactccaacctcatgtttccactgatgttcataatgataatcttcctatcttggttgatgccttacatcctgagcaagattccttatgtacgaacattttccggaatctga

SEQ ID NO: 9274 - DNA, 1083 bp, synthetic construct
  source 1..1083: mol_type = other DNA
atgaacttgaccgagctgtactacaagctccctaaaaaaatccgctactccgagcgattcatcctgttttgcatcaagctggccaaacccttccacaagaaaaagacacatgagaaggagatcaactacacactgaattatcttttcaagtccagcgatgtgaagattgagggtactctcaggaacattcaactgctgtatgcagaactcctgaggttcattgataacatctgcaaaaagtacaatctggactattgtctggcttatggaactctgttgggagccattcggcatgatggcttcattccatgggatgatgactgcgatatcatcatgatcagaaatgactacaacaaactaatcgaggtgctgccttccgagatcaacaagcacaagttcctgaaggagaacattgggctgaccaaactggtcggtttccgcgaaaactacttcaataacgttaagaccctctacgacgaagaattggggcacgacgtgtatttccacgactacaataaggcacctaaacagttcgacagtaagtataacgaaaagttacccaacttatgtaaatcactctttctgcagatagggtggctaaaaccgatggtcaggcttgacatatttccctacgactacatcgaggagaaatccctaaatcactacgacaagcattatcggcccgctaaggtgagctttagaaatttctttgccgatgacgactttagctatgagaaggaatttaataagcacttcgataaactgggcctgacgcttgagaagaccaagtatgtgggcgaagggatagatggatctgacgagtacgtgggcagctacgactccagcatgtttttcccagtaaaaacacataaattcgaaggctacgatctcaagtgcccgaacaagtctgaagagttgctcaaacgttggtatggcgagagttacatgagtatcccacaggccattgtcatgcacggatactcagagtataattcgcggttctttgattcaatagaagacatgaacgaaagctttaaactcgcgatcaacgagcttaagaagattaatgacgaatttgagtga

SEQ ID NO: 9275 - DNA, 834 bp, synthetic construct
  source 1..834: mol_type = other DNA
atgttcaggaccaagcgatacgatgacgagactctcaaacatctccagaaggtccaaatgtgcattctcaagtacttcattaagctctgcgaggagaacgacctgacgtacttcatctacggcggtagcctacttggaaccataagacataaagggttcatcccatgggatgatgatattgacgtgatcatgtttcgggaagaatttgagaaattgaacaagattatagagaaggacatcgacgataagtaccgcttcatcaacgtcttgaatgaggagacataccactacacatggggcaggcttatgctcaagaacactgtcataaatgaatggtgggccgatcaggtggattacacgcagaatatctttattgatgtgttcattctggacaatattccaaacaatagcttcaaacgttttattcacaaatgggtgtccttttcactgaaccagctgaccatgtatgcattcatcaagtatgacaatcagtcgaagctgaaaaagatactgcagcaaacaatccactacctgatcaagatcatccctatcagcgcctatggcattaaaaaacggtgtgtgaacagctatcgcaagtaccaaaacgacgactgcgatgacatatgtgatttcccggcaatttgccagatgcccatctatcacaaaaccgactggttacctcccaaaaaggctcagttcgaagacatcgaggtaaacatccccaacaattatgacaaggttctgaccagaacttacggaaactatatggcgctgcccccagaagaatccaagtggagtccggcccctgacgagatcgactttggggagtactga

SEQ ID NO: 9276 - DNA, 1308 bp, synthetic construct
  source 1..1308: mol_type = other DNA
atgaaatcggataacccaattgtctacacttgtttctgcaccgatatcatccatgacgggcacctaaatctgatcaacgaggccaagaaatatggagatgttgttgtcggagtgctgtgcgactctgagatggtcaaatataaccgcttccccctcaaaaccacggaggagcgtatcgagctggtgaaggagatcccggatataaaggatgtaattgtgcagaacaaaattatgtacgacgatgtggtgagcgagctcaaacccgattacattatccatggcgataactggagcgaggagtctatgaaggttataaggagaaatattattagcgtgctggacaagtacggggggaagttaatcgaggtgccctatacgttcaatgagaaaatacagaaagtggacaggcagatgcgagaaaagctagccatgcctgagctcagacgcgccagactgcgcaaactgctgaacatgatccctgtggtcaagacaatcgaggtgcacagtggcctgaccggcctgatcgctgaaaagactgtcgttgctgacgacgagcacatcgaccagttcgatgccatgtggatctcaagcctgtgtgacagtaccgaaaagggcaaacccgacatcgagcttgtggacatgaccagccggttccgaacaatcaacgacatcatggaagtcactacaaagcccatcatatttgatggggacacagggggcatagcagaacattttgtttacaccgtccgatccctcgaacggatgggcgtgtcagcagtgattattgaggataagatcggactcaagaaaaattcgttgtttggaaatgaggtcaagcagacccaagacgaaattgaccacttctgcgaaaagatctccgcaggtaaaaatgctcagttgtccgaggatttcatgattatagcccgcatcgagtccctgatccttgaacagggtatggatgacgccctcaagagggcattcgcctttcgggatgctggtgccgacggcatcatgatccacagccggcggaaagagccggacgagatcctggagttctgcgacaagtttagggccgaggacaaggaaacccctattgtagtggtgccatcctcatataacacaattacggaagatgaacttaaagcgcacggagtgaatattgtaatctacgcgaaccagttactcagagcagcgtttccaagcatgcaaaacgctgccaagagtattcttaagcaccacagggctcatgaaatcgacgaaaagctgttgtctattaagaagattatcactctgatagacgaattgtga

SEQ ID NO: 9277 - DNA, 732 bp, synthetic construct
  source 1..732: mol_type = other DNA
atgagcagatatgcaattctttcggatatccacggcaacctcttcgctctaaaggaggttttcaaggatctgagtacacagaaaaccgactacataattcttttgggggacctgatcgactacgggatgcagtccaatgaagtggtggagttcatccgggataacctgtctagtaagataatctgcaacatctggggaaaccatgagatggccatcctgacaaaggactttaagcacttcagcagctcaaggggtgttgaaagtgccaagttcaccgactccattctgaccaacgactctaggagctacctgaacaacgaactcgtgaaggaggggaaacttgattttgagatatgtgagaagcaggtcttggcagtgcacggcagcctgacggattattactggaaagctatcttcccagacaatctaaacggcaattatatcgactacgacatcgtcctctcaggccactcccactacccccatgtgtttcaaaagttttatgaggtggatgatccggacatgcgaaataagaagtccgtactctttattaatcccggatctgtgggccagcctcggaatcataacccaaacgcccagtatgccattttagacactgacctgatgaatatcgaactgaagagcgtcaaataccccaaatacgatgcgatggatctctacgacggtaatattgatgacttctatcgcaaacgcctgaaaaacggaatctga

SEQ ID NO: 9278 - DNA, 1005 bp, synthetic construct
  source 1..1005: mol_type = other DNA
atgaacatactgtatatcattagtggcgtgacaggaatgacgggtaacgagctggtgcgccagttgctcaaccagaatgaggatgaggtgaagatcatcggcttcgacaacttttacgcatcgtcaattgatacggtcagcgattgtattaacgacgggcgtttcgacttttacgagtatgacctcaacagtaatgacgatatggataaaatcgaagccctggtgctctccattaaggacgatttcgatgaattagtatatattaactgcgccgcggtcgtgcacaccgagcacttctataaagtttacgagacctatcagactaatgtggcttccatgaacgacttcctgcaacaggctatccgggtgggtgccgaaaagtacatcaattgttccacatcagaagtctactccatgaatagctggaatgaagaggggggggtgaaggagagcgacttcatcaccatggccgacgcagaacacagtcagaggaccagttacgcaactggcaagttgctcacagagtttttcatgaaggacagcgtcgataacggcaaaatcaagggatgtagcatccgctttgccaatgtgtactccaaggacgagaagtacccaaagcatatcataccccatattatcgacagctttaagaacaagggcgaagttgtgctgcttgaaaattcgaagaagaactgcaggaccttcctgaataactatgacagctgcagcgccgtaatcgaactggctaaaacggatagcgcacttgatgggacaatctataatgtcgctacagacgaagagatttcaattatcgacctggccatactgatagcgaaaaaaatgggaattgataaacctgttattaaatttgagggctacagagagtctgaccccgagcggagactactatccaccgaaaagatcataacccgaactaactggaaaccgatcattgacctcgataagggactggacgagtgcatcgagaactacactaaaaactga

SEQ ID NO: 9279 - DNA, 771 bp, synthetic construct
  source 1..771: mol_type = other DNA
ttgaagatctccattattactgtggccggggtctccagcaggttcaacaaggacattagcgaggaggaaaagatgcttaagtgcatatactacgaagaaaatcccaaggacacccttatctataagatgattaacaagctcagttattgcgacaaaatcgtggtggttggaggatacaaatactctgacttaaccgaatatgtcaataaagagatccctatagagctgcaggagaaaatcatgctcgttgaaaacgaccggtacgccgatctaagctcaggctacagtctatacctgggcatcaaagaatccctgaacaacttcgacggtattgaggagcttctctttgtagagggggatctggacatcgatagcgagagcctgacaaaggtcatcgattcggacaaaaatgtgctgacattcaacagagaaccaattttctcaaacaagtctgtggtcctgtatcagaatgagaacgacgaataccactacctgttcaacagtaatcatggcatgctgatcctcaacgaaccgtttaaagcaatcttcaatagcggtcaaacttggaagtttcgcgacattgagttgctgaagatagcgaacgattatttctacgagaattgcatagatgataccaacctcggcattatccagaaatactttgactccgtggagaataaggataccatcgagattatcggattggagcactgggtgaactgtaatacgcgagctgactatcagtatatcaaggaatactgggggaaatga

SEQ ID NO: 9280 - DNA, 1182 bp, synthetic construct
  source 1..1182: mol_type = other DNA
atgaaaaatctggatgaaaggctgaagatcgtcgaaaagcacgtgaaagacgacgagattacaataatgataattggcctgggtagtgttggaacatacttgctggacttcctagtaagcaaaaacgatgcggcgataaagctcgtagtggtgggcagaaatcaggaaaagatgcagtctgatgttaacatcgtccgggtggccgggctgattcgggaagtgaacaaatcgcagattgtcgtggaagcaggcgtggacctcaacgatattgactcaattcagaaagccatcagtaagcataaccctgatttcatcgtgaatagcagcagagcttatcccgggctaaagtacggctccatatcttggtccaacgtccgagcctacgggatctggactcccttgtcaatcaagttcacgaaaaatatcatggaagcatgcgagaacgttgacactgatgcagtggtcattaacacgtcatacagcgacgcagtgattccatggcttaagagtgccgaaaaggcctaccctgacttcggctccggaaatttaaatcacctgatcccccgcatgaagtttgctgtcgccaacattctcggggtggacgacttctggaatgttgactttaactttgctgccgcccacttccacgatgtatgcattagcaaagagggccaaaccgaaggtgtggacttgcctctcaagatatactacaaaggcgatgagcaagacatcccgcatgatgaaatctataatgcttgtagcatcagcatgcccgtggatcagaagaggaatatgatgaacgcttctagtaactaccggatcatttccgcaataatcgatgcaatacgcaccggtgagaaccagaaaatcttttctccaggagcgttcgggcacattggaggatatcccgtcatcatcggatataaggagggcaagatttcggcttggatcgatgagtccgtctttacattcgacgagatggacaaggccaaccgtaaatcccttgctctggatggcgtggaggacatccttgacgccaccctgatctacaccgatgacctgatcaagaaagttgagaaggccttcggggaggacctgccgaagaaggtgaaatatgacgagattgagaagaccgccgagtttctcatcgagaagatcatcactccacagctgaataaatga

SEQ ID NO: 9281 - DNA, 1119 bp, synthetic construct
  source 1..1119: mol_type = other DNA
atgaaagtggaggattttgttgatgttttggactgtgagttttacacgggggttccggattcccagctcaaggccctctgtaactacctcataaatgagtatggcattgatgaaaagcatcacttgatcgcagctaacgaaggaaactgcaccgctctggccgcaggctaccatctggccaccggaaaggtgccagtcgtgtacatgcaaaactccggcgaaggcaatattatcaatcccgtggcatcacttctgaatgaccaggtctacgccatcccagcgatcttcgtcatcggatggagaggacagcctggcatccatgatgagccccagcacatttaccagggaaagattacttgcgacctgctggatttgatggatatcgagaactttacagtcagtcccgaaacctcggtggacgaactgaacgacgtaatgatcaaatttaacaatgtcctgaagtccggcaaaagtgtggccttcgtgatcctcaagaatgccctgacttatgacgggaaaactatctatgaaaacgacaatgagctcatacgcgaggagatcatagagcacattgtcaacgtctcggacagtgaccccatcgtaagcacaacgggtaaggcaagccgggagctattcgaaatcagggaaagcaagaaccaggcgcacaaacacgacttcctgaccgtggggagcatggggcacagctcctctattgccctcgggatcgcaataaacaagcccgataagcgcgtgtggtgtattgacggtgacggcgctctgttaatgcacatgggctcaatgccggtggtgggaaacgtgaatcctgacaatctaatccatattgtaataaacaatggtgctcacgaaaccgtgggtggaatgccaaccgccgcggccggcacggacctggttgctattgccaaagcttgcggctacagctatgccgtgagcgtggacaacattgatgatctcgacgaggagctgatcaaggtcaaaaatatggggaatctgtgcttcattgaggttttatcttccatcgggtcacgggcagatcttggccgacctaccacaacagccctggagaacaagaaaagcttcatgaacttccttaaccaatga

SEQ ID NO: 9282 - DNA, 843 bp, synthetic construct
  source 1..843: mol_type = other DNA
ttgaagtataacgaatatgacgacaagaccctgaagcatctgcagagcttggagcttatgattcttaaggacttcatcaagatttgtgaggagaacaacctgacatactacatgtatgccggttcccttctcggcaccatccgacataacgggtttataccctgggatgacgacctggacgtcatcatgtttcgggacgatttcgagaaattcaaaaaaatttttatctcatctcaaagtgataagtatgaactcctctccaacgagactgaaaaagattacttccacctgctgagcaagttaatgcttaaaaatactaaattcgaggaagactgggtgaaccaggtggattttcatatcggaatcaacatggatatctttgtcctagatgatctcgctaatggcaagttcaagaggaattaccagctcaagaaaagcttcctctataacaagctgctgatcatgagcaagatcaaactgaatgatttgccattctctacgaaggtaataacccacgcatgctaccacattctgaacctgttcggaattaagccatcaaaaatcaacaagcggtgcttaaatttcttgaataagtataagaatccggatgccgaatttgtctttgacatatccgccaacgcggacgaatacccccagatcttccgccgcgacgacttcaaatcgatcataaaagttaaatttgaggacattgaggtgaatgtgcctgtgaactacgatcacattctgaagagcctctatggggactacatgagtctgcctcccaaggaggacagatacaaccacatcacagagaccctggactttggcccatacgaactatga

SEQ ID NO: 9283 - DNA, 1488 bp, synthetic construct
  source 1..1488: mol_type = other DNA
atgagcgacaagaacgaatggggcagcaacatgtcattcatccttgccatgataggcagtgcggtgggactgggaaacatttggagatatccctacgtcctttattcgaacggcgggggggccttttacatcccatacatcgtagccattctcctgatgggaatccccttcctcatcttggagtacggggtgggctacaattataagtcgagctttgccaaagcaatccggaagatcaatgccaaatgggagtatctgggctggttcctaccagttgccgtgtttatgatcatgatctactactccgctatcctgggctgggatggaatctacatggtgctgagcttctttaagggttggggagcagatcctaacacctactttgctactacgctcttacaatctagcgattccatgaacggcttgttcaccttcattcccgttattgccatcgccatgttagccggctgggtcattatctggttcatttcacataaggacctcgagtctggtttaggtaaggtttccaaaatactcgtgcccctgctcttcctgatcatggtggttattgtcgtcttttcacttacactccctggcagcagcatcggactggctgagctattcaacccggactggagtctcctcacgcactttgagatatggatggctgcattcggacagatcgtcttctcactgagcttgggcatgtccatcgcctttacatacgcaagttatacaaaagacgggtccgacttaattaccaataccattagcatcgccctcgcaaattccatatttgagaattttgctgcactgggagtgttctcaattctaggctatatgtccctgcagtccggaactgccgtggcagacctcgtcactcagggtactgggctggtttttatagcctatccaactgtcttcaatgtgctcggggattgggcattggtacttggcccgctcttcttcctgacagtgtatctggccgggcttaccagtattctgtctaccattgagccactgagctttagtatccagaacaagttcgggctaacacggtccaggacaatgaccatactgtgcgtggtgggtgctgtggtatcgatgctttatgcgaccgcttacggcggaagcctgcttggctacgtggatacattcattaaccagatagctctgctgatcggggtggtcgcggaatgtattgtcttcgcctggatcttcgaagcggaaaagctgatcgacttcctgaatgcgcgcagtaagaccattaaactggggaaatggtggttggggatcgtgaaatacatattgcctatttttgtaaccgtgatttggatcggcggcatggttgacgtggtcaacaacggtaccatggaccaactgatctttaccatcattagcgccgctgtgctgctgatcgccactttgatcttcacggtgctgcctgccaagacgcccgaatgggataatgctgaggaccgagtctga

SEQ ID NO: 9284 - DNA, 369 bp, synthetic construct
  source 1..369: mol_type = other DNA
atgaaaaactatgtgattatcctgattggagtcattatcgccctggtgatcgtggggggcgccatcgcgtacactagtatgcacgacgacacgtccgataacaacaataccacgataaagtcttgcatcccgaatatcacaaacgcaaccaacgatgctcccaacgccacaggcgatgataagaataccacctcctccgaaccttacgtggtcagcgaggtcgtgaaatttaatgcacagcaaggcgagggatattaccgggaagtaacatatagtgacgggaacttccgccagtacgacgttgacactggtaagctaatagggagctcatacgactcggaccaggataagctcccaagcatggagtga

SEQ ID NO: 9285 - DNA, 285 bp, synthetic construct
  source 1..285: mol_type = other DNA
atgatttttagcgaactcctaaagcatttcaatatcaaagaggagttcccaccttacctgcttgaccagtcctttaatgaagtcttcctggacggagagttgttcaggattgacaaaaactacaagatcgtcgtaaagacccggcaggatgtggttcacaagatgttcataaagccggacgacatgtaccccgtgatcatcctgagcaagctgcccaacggcctcctgaacggcatgaaatttgggcacgccaaagatgatgtgatctatattaacaagctctga

SEQ ID NO: 9286 - DNA, 729 bp, synthetic construct
  source 1..729: mol_type = other DNA
atgaacaagaaggagctgatcaatagcgggaaggtcaagagcgtcttcaacacagataacgacgatgaggtgatcatcgagtttagggatgacatgaccgcgggggacggtgcccgaaaagaaataatggcaaacaagggcgcgtacaatgctgtgatatcttccaaaatcttccgggtactggaggagaacggggttgccactcaatttattgacctccctgaaccaaacgtcatggtagcaaagaagctggagatgattcctatcgaggttattgtgcgcaacatcgcaaccggcagtctggtgcggaaatatccaatcgaggacggcaccaaacttaatccccccatcgtgcagatggacttcaaagatgatgagtatcacgatcccatgctcaatgatagcatcatcaaagccctgggaatagccacacaggaggagatcgatattctgacggaaaaagccttgcgcatcaacgagattctcaccaaattcttcgccgattcaggcattatcttagtggactacaaggtcgaatttggtaaggataaagacggcaacattctgttgggggacgagatatccccagacggatgcaggctgtgggattcggaaacactagacatgcttgacaaggaactctttagaaagggaaaggacgacgaagtgatgactgcttacatggaagtgtacaatagaatcatgccggaggacgaaaaggtgatttga

SEQ ID NO: 9287 - DNA, 267 bp, synthetic construct
  source 1..267: mol_type = other DNA
atgttgtttgacattgaagtgaagatctccctcaaacgaggaatgctgaacccagaggcaaccacaattgagagaagcctcgatctgcttggctacaaagtcaagaatgtcaagacggatgagatcatcaagttccagatggagggggaggacagggaagtgatccgcagcaatgtgaccgacatgtgtgaacggctactgtgcaaccccgtaatacacgactataagattaacgttatcccgcagaacatggcctgcggcaaatga

SEQ ID NO: 9288 - DNA, 645 bp, synthetic construct
  source 1..645: mol_type = other DNA
atgaagatcggcgtaatacgcttcccaggcaccaattgtgaccgggatgtggcaaaggcctgcgagcttgccggtctggaaccggaatacgtgtggtggagtgaggagaagctgaccgacttcgatggtattgtgatccctggcggattttcgtatggggatttcctgagggccggcgccatggcctccatcactcccgtcatcgacggaataaaagaactggtcaaagaagagaagccagtgctgggaatttgcaatggggcgcagattcttggcgaaatcgggctcatccccggaattttcatcacaaacgagaaccctaagttcaattgtgagtggtccaaattaaaggttgctacgaaccgaactccattcaccaaggcatttaaaaaggaccaaatcattgacctcccgatcgctcatgcagagggcagattttacacaaaagatgtggatttgctcaaggaccaggaccagatcgtgttgcagtttgaggggaaaaaccctaacgggtctatcgaagccattaccagcgtctgcgatgaatcaggcctggtggttgcgatgatgccccaccccgagcgggcttgcgagagcatattcggcagcgacgacggtctaaacttctttaagggatttctgtga

SEQ ID NO: 9289 - DNA, 720 bp, synthetic construct
  source 1..720: mol_type = other DNA
atggtggtgtacctgattggggcgggacccggcgacgccgatttaataactctgaaggcggtcaaagccctgaacaaggcagacgtggtgctgtatgactacttggctaacgaagagatcctcgctcacgccccggagacgtcccagagaatttacgtgggtaagaaggccggcgagcattacaaaactcaggatgaaataaacgatctgatcataaagcaggctcggaacaacgaaaatgtcgtgaggcttaagggaggcgaccctttcgtcttcggccgaggaggcgaggaaatattggccctcatggagcacgatatcaaatttgaggttattcccggggtcacctcggctattggagcacccacctctctgggactgccagtgacgcataggggggtggcaacaagcctcacgatcgtcaccggccacgaagaccctacaaaacccgagagtcaagttcactgggactataccgccgacactctcatcattctgatggggattggcaacatccgcgagaacacagctgagatcatgaagtatcggtcagccgataccccagtgtgcgcaattgaaagcgggacactagccaatcagaatctcgtattcggtaccctgggcgacatctccaataagaaaatcaataccccagccatccttgtaatcggggacgttgtgagcatgtacaaggacatctataactaccagggtgattga

SEQ ID NO: 9290 - DNA, 1788 bp, synthetic construct
  source 1..1788: mol_type = other DNA
atgtgcggaatcgtggggtgcatcctgaagaatgatgacgatgtcgctccaatcctctttgattgtattagcaaactcgagtaccgaggctatgactccatagggttagccacgtacagtgaggacaagatccacatcaagaaggacaaagggaagatcaaggaggttgataacaagctgaacctcagcgacatgcctggaaactacgggatcgctcatgtgcgctgggccacacacggcgatccttccaaactcaattcacatccccacgtggacgaacggcgggatgtggctgtcgtccataatggcatcattgaaaattacctggaaattaaagaaaagctcataagtgagggtcacgtattcaagagcgacactgatactgaagtgatcccccacttaattgagaaattcacaaatgaaggtttcgacctggaacacgcagttaggaaaaccgttgacatcatacacgggacgtatgcaattgccgccataagcattaacgaacccgataaaatcgtcgcgacccgcaaggacagcccactgatcgtgggaatcgggggggagggatattacttggcatccgactctccagctatcctgaagtacgctcgcgacatcatataccctgagcagggggaaatagtcatccttgacaagaacggcgtcgtcgtgcatgacgagtttgataacccagtcagcaaggaaattgagacaattaactggacacccgagatggctgagaaggagggctataatcacttcatgatcaaggaaatcaacgagcaggcaactagcgtgagaaacaccctgactcagagggagcatattcaggaaattattgatgacattgatgagggcatccaacgaatatgctttgtcgcctgcggcacctcatatcatgcatcgctcactggaaagtacttaatagagagtctggccggcatcccaacagatgtgatcctggcttccgagttcaaatactccgccaacacactgaatgataaaaccttggtgatatttatctcacagtccggtgaaaccgccgacagccttaaggccctggacgtggcaaacgagacgagtaagaccctgggtattgtgaacgtagccggctctagcatcacaagaagggcggagtatgtcattcaaactcaggccggcccggaaattggagtggcagcgacaaaaacctacgtggcccagctcacgagcatttatctctttgctgccctgctggccaagaacaccgagctacttgaagagctggaaaaagtgcccgatttcatcgacgaggcgctcgaggacatcgactttatcaaagaaatcagcaagagatataattacgctcgtgacttcttctacttgggccggggttattcatatcccacggctcttgagggagccttgaagctgaaggagatcacctacatccacggcgaaggctacgctgcgggggagcttaagcatggtcctctggccttgatcgatgaaggcatccctgtggtggttattgcgccaccgggagattcgcaccgcaaaaccatgagtaacctcgaggaagttaaatcccggggagccaatgtactggccatcggaagcgccgacgacgatgccctaaagactaaagcagacgacattatcaccattaatccggaggtaaacgagataatcgcacccctggtgtatgttgtccctcttcagctgattgcctactacattacactggagaaggggcacgaccccgataaacccaagaacctagcaaaatgtgtgaccgtggagtga

SEQ ID NO: 9291 - DNA, 1896 bp, synthetic construct
  source 1..1896: mol_type = other DNA
atgtttaacaagaaaatcagtctaattctgctgacactggtgtttatgctttcaatttctgccgctgtggccaccgataccaattctaccgacgatgtaatctcgagtgacgaggaggctgaacctccctcggtggtctctcaggacataagcataaacgagggaaatgattcaaaccctcaggaaaattacactttgaagggcagcgatgtgagtatgtattacaactcgggaagcggctatgaggcctccctttctgacggaaatgactctgtggaaaatgcaacgattaacctgaacattaacggtgtagactataataaaagcaccgacgccagtggtaaggtgttcttgatcatcaacctgaaaccgggcgactatgtaatcacagcgagctacggcaacctcactacagagaataagattaacgtcttgccagtgataacgggaaatgacgtgagtaccacttacaagcattcagtgccatattccgctacatttttaaaaagtgacggtagcccactgtccaatacctatgtcaaatttaagctgaacggcaagacatattccaagaaaaccaactcgaagggaatagctaagctgtacgtcggctcaaagatcggaacgtacaatatctatgcaatgcaccctaatggatacagcatctccaataaaatcactgtgaagaactccatcatatctagcaacctgaaaaaacactacaggagcagtaagacttttaaggccaccttctacggtaaaaatgggaagcttctcaccggtaagaccattaagttctacacgaaaggaagctacttctacaaaaaaaccaattccaaaggtgtggcttacattaaagtaatcagtaagcccggaacctacaagattactagcattaacaccaacaccggcgagaagaaatccaacaccatcacggtgctgtccacactggaagcgaagagcatgacagttttcaccggcaccacttcaaagtttaaagtgaaactctacaaaggggaaaacatcgctaagaacacgaagatgaccgtttatgtggacggagttaaaaagcgcgtgacaacaaactcaaatggggttgccaccgtgaagttcaaactggataaggggatttataacatcaagtcggtcgatccctttacaggctatgttttaaacaagaaggtgactgtgaagctggcgtccatcagtgccattaacgtcaatgcaattgaaggcaaggaagggctcttccccgccaagctactgcagcaaaacgggaaggtcgcaagtggtacttacatggagatgacgatcgatggcgtcaaacacaaggtcaaaactgattcccgcgggatcgcagggtataagttcaccttcaaggacgccggggtgcacactgtcgtgtgtaaagatctctccacaggctacaaggtcaccaaaaagattaacgtggtcaaaaagggtgaggggaaatcctatgaccagttcggcgtttcagaggatggcaaaacaatgctcgtgattggccggcccagcgcttctggcgagacagcgaagtatgggtacacatattacaagactgaggtggatagaacctgtcccatctgcgggagcaatgaactctactggagcatcttttgggcctccggtaataccgatggcggaacgttcccagagacacctagccgaccggcccattatgacgagggcaaccttgacggcatcatcatctgcatgcactacactggagatgacgagtactgcgacgccgactggtctgtgttcgggcataaccacgatgggagcggcagggacttgaagctcgtgtcaaagccagtccggtccagcgaaatagaggcatacctgctgaagagcggatactacgttaaagtatga

SEQ ID NO: 9292 - DNA, 1227 bp, synthetic construct
  source 1..1227: mol_type = other DNA
atgagttatgaaaatagtgctaggatcattaatgatgacatctttgatttggtgaacgaatgcttcggccaggaaaaaactagtcaaaacaacgagagccgcctgaacttcttcgatacgtacaagaattacttcgtgctgaccgacgatggatcttactctattaactcaaaggagataaatcataaagtcgaaaccctgcatacatctacaggtgccatcagcgagtccttcgagaagtttatcaaacctatgaaatttgactacaccaaagatatcgccatactcgacatttgcgccggactgggctacaatagctccgcagccatcgctgactttatcaagaatagcttcgattcaaatctgaaagtagacatggtggagatctcaaaagcgacctttgcctgtgggcttctggtcccatcccccatcccggaacacgacattacaaaaaaggctattgaagacgagctcatccggctcgattatgccactctgagcttagaggaatgtgagatccccgagaatattgacattaacgtgttcgtggaagatgccaggcagactgtccagaacctcgaggacaatacctatgatgcgatattcctagacccgttcagtcagaacatgacgccagagctcttctcactggagtttttcaaggagtttaagaggataatcaaagacaacggcattgtggccacatatacctcgagcgcacccgtcagagctgctttcatcgaagctggcttctacatcggtctcgggcccatttttggacgcaagcaggggggcacccttgcaagccctaatcctgaaatgctggattactccctacccaagaacgatgagatcagaatcgccctgagcgatgttggcatcccatttcgagaccctgacttgaacaagtccagtgacttcatcttaagcgaacggtctgaggaaaggcacaacgcacgtcacaacactaagatttcgtctgccgtaaaaacaccaatatttctgggggatgcgatggagaacgatgagaagcttaaacgccgagttgaacggaacctcattaagatgaatattccaagcactacctcccccgaggcattctacatcatcgagtgcgagaagaagtactccgaaaagcaagaccgcgagaacaactccaccgccagaatattggacatgaagaagcggctggagaaagtgaaggacggagactatacgctgacatga

SEQ ID NO: 9293 - DNA, 1977 bp, synthetic construct
  source 1..1977: mol_type = other DNA
atgttcgagatcaaggcaaaagacaacatgggtcgtgtgggagtgttaaagactaaacacggcaatgtcaagacccccgccttgatgccagtgatccatcctagaaagcaggccattgacgttgggaaatatggggctgacatcgttattactaacgcttacctgatctacaaggatgaggagctgaaacagaaggctatcgacgaaggactgcataagctcattaacttcgatggtcccataatgaccgactcgggctccttccagctgtccgtctatggcgatgtggagatcacgaacagggaagtgattgagtttcaggagtcaattaagaccgacattggcacaagcctagatattccaacagccccttttgtggacagggaaaaggcggaaagcgatctgaagatcacactggaacgtgcaaaggaggccgtcgagtttaagaaggagaataacatcgaaatgctgctgaacagtgttgtgcagggctcaacatatctcgacctgaggcaggactgcgcccgccaactctccaaactcgacgcggacctctaccctattggcgcggtggtgcctcttatggagtcctaccactacaaggatctggtggatgtagtgatgaatagtatgaaagaactgtccgacagtgtgccccggcacttgatgggggcgggacatcctatgatctttgccttgtgcgctgcaatgggatgcgaccttttcgattcggcagcctacatcctctatgcagaggacgaccgcttcctgaccacgcgcggaacctacaagctggagaacctgcacgaaatgccatgcagctgtgaggtctgcactaaatacacccccgacgacctgagggccatgcccaagaagcaacgaagagatcttatcgcccagcacaacctccatgtctcttttgcagagctccggcgcatccgacaggctatctacgagggcagtctgatggaactcgtcgaggaacgctgtcgagcccaccccgccctcctggatgcggtaagacagcttggaatgtatgcctgcgacctggagaagtacgacccgagaagcaaaaagtccgcattcttctacaccggacctgaaagcctgggaagaagcgaagtcttgaggcacatccagaagctaatggcaatgcccaagaagagggaccttattttactgcccccaagccggaagccatattctaagttcatctcagggaaactcggtgacttttaccgatacggcgaggaacacgatatcgacttggataatgctgacttcatggtggtcgatgttcccttcggtctgatccctcttgaggtggatgaggtgtatccgttgtcccaaaatagcactccaaagatcagagatgtagatgccgtggagtttttacaggaatttgtggatgagtttagcggctattatgaacaggtcttaatacactcccgcgttctgaaggacctagagatagagggggaaaacaacctggttgatgccgagatccgctacgctaaagatgacgtgaaaaagataaaggctatcgccgactaccagttcggggtgggcgcgggggaagccctctttgacggcaacatcaacattgagaaaagtaagaaaaccgggaaaataagacacatctacgatggcaaaacattgattgtcaatatgcgggcctcggactccttcttggtgctgagcaaagaaggggctcggcggctccatgctgccatgccgtcacttagtaacagggtggttgtaaacaaggactcagagccattcgcactcgatggcaaaagcgtattctgcaaattcgtcgtggactgtgacgacaatatacggtctaatgatgaggtgctgattgtcaatgaagaggatgagctgctggcttatggtaaggcactacttggagcctgtgaaattaaggagctgaagacgggccaagccattaaaacacggaaagggatgaaaaagtga

SEQ ID NO: 9294 - DNA, 669 bp, synthetic construct
  source 1..669: mol_type = other DNA
atggtggataacgataaggtcaatacggggcacaatattgaagataaggaacttatcaaaaatgcaagaaagccggtgggggagctgggacatcagatcctcgacaggatgaacaaatcccatgagtccatggcgcagtggggagtcagccacttcgaagtaaaggaggacagcaagatcctggacatcggctgtggcggcggcaagaacattgaacggttcgccaagcagatttcgcaaaacggccgcgtggttggtattgactacagtgaggtcagtgtggaaaaatccgccaaactcaaccagaagttcatagatgggggaattgtgaatgttctgcagggaagcgtgtcagacatgccatttcacgatgaaacctttgatatcgtcacagggtttgagaccatctatttctggcccgacttcataaatgacttaaaggaggtgaacagggttctgaagaatgatggtatcgtatttttctgcaacgaggccgtctaccgcgaaggcgagatggagaaatacgacgacttggtggagctgctcgacatgaagatctatagcgaggaggtgctacgaaactcattggaaaaaacagggtttaaagacttcaaggcttacctgaacgacgagaacgattggatctgcgtgactgcacggaaaatatga

SEQ ID NO: 9295 - DNA, 1428 bp, synthetic construct
  source 1..1428: mol_type = other DNA
atggccaaccaggtaaagaccatatttgctaacatgagtttcatgctagtcagccagatcatcgctagtgtctgtgcttttgtgtggaccattgttacggcctggtacctggggccgagcgactacggcgtgttcggtgccgccgtcagttttgctgcactttttgggattgtgatcgactttggcctctccacctatgtcgtgcgggccattagcacggattttgcgaatgaacataagtacctggacaacgcaatcagccttaagctgttcctgtccgtgttttacgtaattgctgtgtacctctccgtattggtcatgggttggcagcctaaattggtgttagcctgcgtcttcctagcctttgagaatgttatcaaatcttaccatgctatcttatttactagcttccaagcacacgagaaaatgaaataccaagccgttaccaacaccgtcatcaatgtgttcacactgatattcatactcctagtggcatgcactgattacgccctggttggaatcttaatggcttatattgtggcaaacgcattggggttgttctacgaggtgtatgccctccggaagcacattatcaaacccaaactctcgttcgatttttccttctacaaggccctgctgaaggccggactgcctttcgctctaaccggcctcttctatacagtgtattacagcatagaccttgtcatgattacacaattttccacgacttatgcaaccggactttataatagcgcctataagctcatcacagtgctgaccctcttctatacaatctacacctctgtgattttccccgtgatgagtaagctgttcaccgatgagaaggacctcttgaacctgtcctttgtaaagtcaattaaatacctgatgctggtcactatcccaatcgccgtgtttacgtcattctacagctatcagatcatcgcgatttacggggcggaatacatagaggccgggggcgtgctgcagatactgatctggacagtctgcttcctgttcgtgaacggcgcgtgttcactcgtcttgaatgcttcacaccaggaatacagcgtgacaaagatctataccatcgccgcccttttcaatgtggttctcaatctggccctcattccaaagtattccgtttacggcgcttcggtggcaaccgttttaagtgagatcctgatcctggtcttggaactgtacatgcttggaaaaatcaaccagctgcccgaccgccacctcattcacgacatcctcaggatcattttcgcaagcctggtcatgggcactgttctgtatgtgcttgacctgaacatatgggcggctattgcggtaagcgtggtggtctactttgccgtgatcgtgctgatcaaaactgtggatagcgaggataagctgataattcgacagattatcaacagatga

SEQ ID NO: 9296 - DNA, 1038 bp, synthetic construct
  source 1..1038: mol_type = other DNA
atggtgggaatcgtaggctatggggcctatgtgcccagttatcgaattaaggtcgaggaaatcgccaaggtgtggggcgatgaccctgtcgccctgtcacggggactcatcgtgaacgaaaagtccgtcccctcatccgacgaggataccgcaacaatcgccgtgactgctgctcggtacgctctagcacgggctcagattgacccaaagaatattggggcggtgtacgtcgggtccgaaagccacccttatgcagtaaagccaacggcctcaattgtggctgaagcagtgtgcgcaactccaaagttaactgccgcggacctggagtttgcctgtaaagccggcacggctggcattcaaatgtctatgggacttgtacagtccgacatggtggactatgctctcgccatcggagccgacacaagccagggcgcacccggcgatgcgctggagtacaccgcatcggcgggcggggccgcctatattataggtaacgacaacactgtggccgacatcgaacacacatgcagctacacaactgacaccccagatttttaccgcagggagggggagccctacccatctcatggtggccgtttcacaggagagccggcctactttaagcatgttctgagcgctgccgagatgctgttcgatgaaaccaataccgccgcggaggactacgactacgcttgcttccaccagcctaacgggaagttctacctgagggcaggtaaaaagcttggcttcacctctgagcagatcgaaagaggactgctcacccccaacattggaaacacgtactccggtgccgtccctctcgcgttgtcgaatatactggatgttgccgagcccggagataagatatttgttatcagctatggcagcggggccggcagtgacggcttcgcaataaccgtcaaagatgagatcgaagagcgcagagagttggctccgaaaacagaagacatcatcagtaaaaagacctacgtggattatgctgtgtacgccaaattcaaagggaagatcaaaatgtga

SEQ ID NO: 9297 - DNA, 1158 bp, synthetic construct
  source 1..1158: mol_type = other DNA
atgcgggacgtggctattgtaggcgtgtcacaaacaaaattcggcgagctttgggatagcagttttcgcgacctgatcgccgaagcaggggtaaaagcactggtggatgccgagatcgatggggcagacatcgaagcaatgtttgtcggaaatatgtccagcggactttttgtcgagcaggaacacatcgccgctctgataagcgaccatgtgggccttaaccccatccccaccacacgagtggaagctgcctgcgcctccggcggtctcgctctgagacagggaatcatggctgtggccagcggcttccatgatgtggtgattagcgcaggggtggagaaaatgaccgacgtcgtggatgctacccctgctattgccacggccagtgacaaagaatgggaggcccagcagggggctactttcccatcactatacgcaatgattgccaaaaggcacatgtatgagtacggtactacccgggagcagctggcgcagtttagcgtagtcaatcacaagaatgcaagcaagaacccgaacgcacaattcccgtttgagattaccgtcgataaggttttgaacgccaccatggtcgcggaccccttgaccctattcgactgttcccctgtgtctgacggggcggccgccgttgttatggtgcctgcggaagatgctaagaagtacactgacacgccaatctatgtcaaagccagcgcccaggctagtggaactctgacactgcatgacagaaaggacttaacgaccattgaatcgacaaaggtcgcctcccggaaggcctacgaaatggctggcgtgacacagaaggatattgacctgactgaggtgcatgactgcttctcaatcaatggcttgctcgccgttgaagacctcggatttgcggagaagggtaaggggggaatagctatcgaagagggccagacagagatcgatggcgatttcccaatcaacacatccggcggcctgaaagcacgcggccaccccctcggcgcaaccggcatcgctcaggccgccgaggtggtttggcagctcaggggggaggccggtgcacgtcaagtggacggggccgagatagggatgacccacaacatcggagggaccggaggtacggccgcggtacacatattcggacgcgatctgtga

SEQ ID NO: 9298 - DNA, 924 bp, synthetic construct
  source 1..924: mol_type = other DNA
atgatcatcaacaccgggtcccgcactgacattcccgcgtttttcagtaaatggcttctgaacaggatcgatgagggctccgtctgcaccagaaacccctacaacgacgatatttacaagtacccgttggatagtaagataattgactgcctctgtttctgtaccaagaatccaaaaccgatgatcgctagcctggataagctggatgatttccgccagtactggtttgtcacaataactccttatgggaaggacatggaacccaatgtgccagggtataaaaacgtaatgaaatcattcaaaaagctatctgagcatttgggcatcggcaaggtgtcctggcggtacgaccccattttcatatctgagaaatacaatctggatttccatatcgagatgtttgataagatggcctcggaacttggggactacacgaatgactgtacaatcagtttcattgacctgtatcaaaaggtcctccggaactttcccaacagcaaggaggtgacccaggacgaacagctcattatcggccgagaattttccaagacagccaacgaacacaacattaaaatgaaaacctgtgttgagggaacgctcctggaccagttcggctttgatagccggggatgcatgactcaggaggttatcgaaaaggcaattggtaaaaacctaaagatccctaagggcaagtaccgcatccgtgaatgcgactgtatattcggaagggacatcggcgcatataatacctgcctgcacggatgcaagtactgctatgccaacaccaacatgaagctggtgaaaaagaatcaaaagctgcacaatagcaattcaccattactcatcggggacgtgaaagagggtgatgtggtcaaagaggtgagggagcctagctatatcgacacacagcagagattcatttga

SEQ ID NO: 9299 - DNA, 1203 bp, synthetic construct
  source 1..1203: mol_type = other DNA
atgatcatccagcggaaagactacatcgacaagattaacccttttgtgaataagcacatcatcaaagttctgatcggagctagacggtccggcaagtcaaccatattaaaacagatcattgatagcctcataaagcaaggcaccccaaaggagaacatcgtgtggatgaacttcgaactcagtgattatttcgaaatggataatatcaagaagcttgaggagttcattagcaacaaaactgaaaatattgatggtaagatctacctattcttcgatgagatacagatcgtgccccagtgggaaaagttgatcaactcgtactttgccaaggagaattatgacatatacattaccgggtcaaacagcaaactgctgtccggcgagtttgctacatacctctccggccgctatgtggaactcaacatatatccattttcgttcagggagtaccttgagtactatgaaattacgagcgacttcaaatctcatttctaccgctatctggaagacggggggatgcctagcacattcgactacaggggcgacgataaaagactaatcctgattgacctgtacaacagtattgtccttaaagatatcatccaacgaaataacgttaagaatgtggacctgttggaccggattatgagatttgtcatgtacaacattagccagcccttctccgccaacaagattcacaaacgcctaaagcaggacatggtaaacctgtctgtaaatacaatttacaattatctgaagttctttgagaatgcatgcctgatttatcaggtcaagcgcgaggatctgcaggggaaacgtatcttaaagcacgatgaaaagtactacatatgtgacctcggattccggcaggcaataatcggcaacaaccagcgagatatcactcgggccatcgagaacattgtttatctggagcttctgcgaagaggatacgagatcaccatcggtaaggtggacaacctggaagtggactttgtgtgcaaaaaacaaaataaactcatttacatccaggtctcctatctcctcgccagtgaggagaccatcgaaagggaatttaagccgttgaataacatctcagataattatcccaagtacgtcataacgatggacgatgcggacatgtctcatgatggaatcattcacctgaacctgatcgactttttgagggacaacgaggtgatctga

SEQ ID NO: 9300 - DNA, 1191 bp, synthetic construct
  source 1..1191: mol_type = other DNA
atggacgagattgcctccattacggatacaaacctgaccgaaacacagtttttcaatcgaagagacgagatcaacatcctgtcaaacctattgatctctactgagtttaactccgcacccacgattctcctcaccggcattcgcggagtgggcaaaactgccctcatcaaaaagatccgcaataagttcgagagggaatacctcgtggtcgatatcgatttatcccgatctagtgcataccagcagaaaaatctcacaagggcttctatgatcaagataatctacgacagcatcatccggtcgtccaaagagtttggccttaagacaatcagcaatcagatagaaaagtattttaaaaccaagaacttcaagatagacaaactcttaagttacgagcacatccccatcccaatcttcgagagcgaagacaactacgagagattggcggagtttgtaatggagctgcctcagaaaatttatgaggacaataacgataagatcaagggagtcttcatattcattgatgaaatccaactgatcaaagatttgggggatgaattgaacggcttcctgtggtacatgcgcagtttcattcaaacccagaagaatgtggcttacatcttttgcggaagcatgagcctgaaggacagtctgattaacgacctgaatgggaataagggggcctttggagggaggatgctgaccattgaggttcagccattctccaaaaagaccactgagaactacatcaagtcaatgcggcggaacatccaactagaccacgggggttttgaaagattctacaagtgtacgcgtggcatcccttattacatcaacatatttgcgaaatacctgcctgaaaacctgaccctgagtgagaacaacatcagcgagctcttcaaggactcaattgattatctggccatccatttcgtctacatgtggtccaaactgaccttccaggaacagaagatcattatttcgctccttgagaatcccaaaaagagaatagaagtggctaattccctcaaagtgactagcggctcactaaacaggcccctgaaccgccttctggactatgatcttattgagtatgccaatgacaagtatcagattacagacccgatatttggttattggctgaagaacagctatgaaaagaatggcatttacccattccggagcatttga

SEQ ID NO: 9301 - DNA, 918 bp, synthetic construct
  source 1..918: mol_type = other DNA
atgccgatatataacattgacggggaaacactcactcccatcaaacaggtcaagttcaagaacgaaagggagctgcagatactgaccgagaagaaccttgaagagctattcgggttaaagttcatcgccacggagtttcaggtggacaacctccgaatagacacactcgccttcaatgaagagaccaactctttcgtcattattgaatacaagaatgtaaaaaactatagtgtgatcgaccagggctacagctatctctccctcttgcttaataacaaggccgagttcgtgctgaagtacaatcttgtttgcaatgcggcattatccaaagatgagtttgattttagccagaccaatgtcatgtttatcagcccaagctacacgacataccaactgcggagtgtggaattttcggatatagctttcgaactgtggaaggtagtgaaatattccaacggaactgttctgttcgacaaagtgaacaataccgatacccaggctagcatcaaacaaattaccaaagaaaacacaagtaaggataaggtcaataaggagatcaagaaatacacggaggaggataccctgatgaacaagtccgatgacattaaatctttgtacgataatctcaaggaactaatcctgtccaactatgatgacattgagatcaaccactggaaatattatgttgccatcaaggtgaataacaagatggtggcaactgtcagtgtgctgtcaaaatcattgaagacatggatcaatctgaaggagactgagctgcgcgactccgaaggcaaagtgagaaacgtgtcaaacattggacatcacggcgtaggtgactacgagtacgtcatctcgagcgaggacgacctgtactacttcaacaagctgtttaagcagagctacgacgagaaaatctga

SEQ ID NO: 9302 - DNA, 696 bp, synthetic construct
  source 1..696: mol_type = other DNA
atgaaaattgtgacttggaatgccaacgggaaattcagtgagaagtttccagccattctggagaaggacgcagacatctatgtgatccaggagtgcgaaaaccccgagataatcaatctgaaggagtatagcgagttttcttccaactattactgggttggggagaaccaatattacggccttggcatatttgctaaagataatgtgaagctggagctggtcgacttggacgataagggactccgctacttcatccccttcacagtgaacgatgactttaacctgctgggagtgtggaccaaccccgatatggacggcaccaaaacaatttattaccctaaggaaataaccaaatactacgaggaacacaaggatagtggattcttcaatgaagacatgatcatctgcggcgattttaattgtgatgtccggttaaagggcactcacgccaagaacgtttacgaagtgatcgaaaagctctccgagtgcggtctggtagacatttatcaccatctcaccggggagaacgaaggggaggagacgacgccaacattctacatgtacaggcacctggacaagccttaccacctggatcatatcttctcgtcaagcgataaggtgaaagcgttggaaattggtgacgcagacaaatggctacagcttagcgaccatgtcccgctcatcttcaaaatttga

SEQ ID NO: 9303 - DNA, 1452 bp, synthetic construct
  source 1..1452: mol_type = other DNA
atgttcgagaaggaagagctgatcactaatttcattaaggaggaactgacggatgtacccaatatcctcaacaaagagttaagcaaaaacaacgagaagttcaactcccgagaggagctggacgagattaaaggatacatggacacgtttttaaacgaagatacaagcaacaagatcatagttctgccgggcctcaggggcgtgggcaagaccacgctggtgctgcaggcctatgaatacctcctcaaagaacgcgacatccctcccagtaatgtcctctacatctcctttgacgatctcaatgatctggttgaatgcagtatccggcagatggtggagatttacctgaagaacatttttcatgcaaacattcgcaatttggacgagaaggttttcatattcgtcgacgagtcacaaaccgacaagaattgggctctttccgggaaggtcatatacgacaaaagctataacattttcatgatctttaccggtagtagcgctcttcatctggaacgcagcgatgagcttgccagacgaatgcgcaaaaaatccgtaactcccctaaactacacccagcacctgaagctgaagtacggcattgatgtgggaagtctatctgatgatctcagagagctggtattcaccggaaatattgacaatgcggccgcctcggagtttgaggccaataacctcttgaccaactgtttggattactctagtactgattgggacgagtattataagttcggcgggtttcccatattattcgacaagaagtcgcacagggaaatctgtgaggacctggtggaaatcacagagagggtcatcactaaggacatgccgcagataaaagagatctccagcgaaaatcagtccaatgcaaagcgtatcctgcggtacctcgccctccaacagcctggtgagctcacacaggcgaatctggcaaattacctgaaaacctcaaccgctaatgtcaacaagattttggacttgcttgaaaaaactcacctgatcttccactgcgaaccttatggcggttcagccaagcgggtgaaaaagagctggaaatattattttgccgctcccagcatcagacacgccctgtcagctaaaattgggaacccactgctgggaaccgacgattatgaggggctgcttctggaaaaccttgtcgcgtctaacttgttcaacctctccaacaggcaattcacaaatttcacagtgtactacgacgcagacaaaaagcggaacgtggatttcctgatccataaggacagcgagaacatcatcccaatcgaggtggggcggggaaagaaaaagaaactgcagatcaaacacgccattaacagatacgactgcgaatacggcatcgtggtggcaaacaactacagctctctaaagaaggatgacgatgtgatttatatatctccaaagacattttcctttctatga

SEQ ID NO: 9304 - DNA, 1440 bp, synthetic construct
  source 1..1440: mol_type = other DNA
atggaagacgtcatctataactatcttatcaaacagctgagcgaagtgcctatgattctaaaccgccggctgagctacaagaacatcaagttcaacaacaagaacgagtttgacaagctccggttgatgattgacagttttctggatggggaatctgaggagagatactttgtgctgccgggaattaggggggtggggaagacaacaatcctttaccaatgctacgagtacctgttaaaggaaaaaaacttcaatagctccgacctgctttacatttcatgtgagactactaatttcgccggggagacggatatcaaaaaaataatagagatttatctggatgaaattcacaatacgtcccccgccctgctggataggcctgtcttcattttcatagatgaagcgcactttgacatgaattgggctatgaacgggaagaccctctatgatgagtccccatacattttcctgatactggccggttcaagctcccttcatttgaattacaattctgatgctgcccgacggctcaatatcctgcctgtcatgcccctgaactactcccagcaccttagcctgaagtacaactaccagaccgacatcggcaatgacctcatcgacttgatattcacaggcaacattgaggccgcccaggaaaaggaactcaaaatccagaaggaccttattagcttaaatagttatccactgaatgactggaacatttatttgaactatggcggctttccagcaaccttcaacatcaaattcgaggacatcattgtatctaaactctggacaatcatctccaaggtaattactgtcgacatggcgaatgtcttcaatctcaacaagaacaatcagaacctggcttataagaccttggtgtacctggccagccaaaaaccgggagagatctcacatgacaagctgagcaactacttggattgcggcaaaactaccataaacaatattatcaacaccctcgagaagacgcaactgatatttcacagtgaagcttacggtggcgcttccaaaaaagttaagaagccctggaaatacaatctcgccactccaagtatccgtaactgcatcaacatcaaattcggaaacagcgcaggatcaaagagtgaatatgagggtatcttactggaaaaccagattgcgtctaatctatttaacctaaacaacaataacaccagctttgacttcaatgtgtattacgattcgcagaagggaggcgtggactttatcgttaagaaactgtttggcaatgcaatccccatcgagtccgggataggcagcaaaacccgcagacagatcaagaaggccatgaacaaatatgacgcagattacggaattgtggtgtcgaataagacagatttcatcgagaaggaggacgatgtgatcttcatccctcccaagaccttcacatttctctga

SEQ ID NO: 9305 - DNA, 456 bp, synthetic construct
  source 1..456: mol_type = other DNA
atgtctaagctgctgatcgattcatccttcatcattgcattgtttcggaaaaatgatggcctgcaccagaaggccattgagaacaaggacatgctgaataacgactgttacatcaccgacggtatattggcggaagtgatgacgattatcggccagaaaacaaaggacatcgggctcgtgaggacagtgtacaattatctaaaggacaacttcaccatcattcacgagtcggagatcagcatgtacaatgacaacgtgctctccgttttcgaaaaatacaaccagaatagctttaaggtctcctttatcgattgcagccaggtcattatctataatcattacaacctggattatgtaatcagtctggacaacggatttgggcttttcgaggaaatagagttaaaaaacctcagtgaacagaagcgcactatacaattcattaaatacaacatctga

SEQ ID NO: 9306 - DNA, 243 bp, synthetic construct
  source 1..243: mol_type = other DNA
atggacaacatactagcgacgacaaccctttataaaaactaccagctggccatccccaaggtcattcgcagccagtttaaggagctgaactccaaagacaccgtgattgactggttcatcaatgaggaaaatgaaatcatcataaagccgagaaagaaagtaagtctggaggatgtgatcggcatcattgaagatgatgacccacggaacgcagtggagctcaaaaggagcctctacaagtga

SEQ ID NO: 9307 - DNA, 120 bp, synthetic construct
  source 1..120: mol_type = other DNA
atgaagctggtcaaacggaatcagaagttgcatagcccggatctcccactgctgataggcgacgtggtgaaagaggtaagcgaacccgccatcctaacccacaacaagaggctcttctga

SEQ ID NO: 9308 - DNA, 1239 bp, synthetic construct
  source 1..1239: mol_type = other DNA
atggtcaaacgagagctttacctcgagaagatttacaatttcatgggcaagaacctgataaagatcatcacgggcatgcgccgttgcggcaagtcctacctgttcaagctgattatccacgaacttaagaaacgggggaccaaggatgaggacatcctcctaatagacctggagctgcccacctacaaccacattaagacacgggaacagctagacgagattgtggtgccgttcatcgaatcccatgagaacaaagtttatctgttctttgatgaaatccaaaacgtgaaggaatgggaagtcagtatcaacagctactacaagctcgagaacaccgacatctacattacaggtagcaacagcaagttaatgtctgcggagtttgccaccctgctgacgggacggtacgtaaacatcgagctctatccattctcattcaacgagtttctggattataagcaggaactgaatcaccccccttccatcacaaatgaactcaatagtgatttggaaaactttttcgaggaataccagaagtacggcggaatccccctcaccataagctcccagcacgacaaggagctcgtgctgaatgggatttactctagcatcatcctgaacgacatcgttgagagatatgaaattaggaatgtggggttgttcaatagaattgtgaaatatataattgagaacacagggaatctgatatcggcaaatgccgtatacaaatacttgaagcatgagaaacttcgcattacaaaaccaaccatctacaactacctggagtatcttgaaaacgcatacctcattgctaaggcctcaaaagaagacattgctggaaaaaaggagattatcggctctgagaaatattatctgctcgacactggtttttataagagccagcttgaggagaagcagagaaatatcgaccacatactggaaaacatcatattcatcgagttaaagcgacatggatataagatcacgatagggaaagtcaatgactatgaaatcgacttcatctgtaagaaaaacaaccagaaaatctacatccaggtgacctatctactggagaatgatgaaactattgagagggagtttaggccactgttgatgattaaagataattaccccaaatacgtgctgagtatggatcgcactgtccaacctcaaaatggcatcaagcacatgaacatcattgacttcttgaagaactttaaccatgatgagatcttttga

SEQ ID NO: 9309 - DNA, 1188 bp, synthetic construct
  source 1..1188: mol_type = other DNA
atgagcattgtgcccctgcacatcccaattaatgaaatcgaccgttacttctataaccggacggaggatattaaaaagatcgagtactacctaaattcgttggaaatcggcataagccaatcactgctgatccgcggagtgagaggtgtcggtaagaccttcctgcttcagaaactcaaacaggactcaaagaagaactttctggtgtcctacatcgatatctcaagaattgtgggcatcgatgatacgcagctgactgcccagagtgtgctcctggagctgttggacgaaatgaacaatacaatctacgataagatacatgacgggaagaaagtcacgttccttctcaagaagttaattgacaaactgaaaattaaagatttcagctttagcaaaggcatccatatggctgagataccgatacccgccaccgaggacaattacaagaaaatcagtaagtttgtaatggaatatcctcaaaatgttgttgaaagtattgatggcattaacggcttcatcattataattgatgagtttcagatgcttaaaaagttgaagaatcccgagtccttcttctggttgatgcgaagttattcccagttccagtccaacgtcagctacgtgatgagcggcagcatcagccaaacatccgatgcaatcgaaatgctcaacggagcgaccggagcctttggtggcaggatgatgcagatcaacatcgaccctttcacaaagcacgaaaccaagtcttacttcaacgaccggtttccagaaatcaagttcactgacgacgggtttaaccggttttatgagtacacaaaaggaatccccatgtatataaacagcttttacaatgcactctcatcccacgagacctacgacgaaaagtcgatagactatatcttcctcaataacatggaccagattcttgtcatgtggattcgcatctgggggactctcaacaaatacgagaaaaagatcatctgcgccatgttaaacaaagagaacatttcctggtctaagctggagaggagtctggacatgtctccagctaccctgaccaagtatattaaaactctacaggataagggaatcatcaagtaccacgatgggaactataatttcgaggacctgatgctgaagacatggctgaacaatgagaaggagaggaccggggtgtatcctcagtga

SEQ ID NO: 9310 - DNA, 1530 bp, synthetic construct
  source 1..1530: mol_type = other DNA
atgacaaactgcatcatggtgcaaggcacctcctccaacgctggaaagagtatgctggtagctgcattgtgtcgaatatacaagaaccggggatacaaggtagctcctttcaagagccagaacatgtctctgaactcatacaccaccaaggaaaatggggaaattggaatagcccagatgctccaggcggaggcggcgatggttgagcccagcatacacatgaaccccgtgctgctcaagccaaagggagatttcacctcaaatgtgattatccagggtaaatccatcggggacatggatttctacgactaccagcataagtaccatgataccgcccttgaggctataaaggaaagcttcaatattctcaaggaggagtacgacgtgatcattattgagggcgccgggtctcctgctgagatcaatatgcgggaccaggacatcgccaacatggaaattgcacacctggcagacgcgaatgtgattctgatcgccgatatcgaaatgggcggggttttcgccgccattgcaggaacttacgtgttgctggacgattatgacaggtcgcggcttaaagctactgtcatcaacaagtttaggggcaatctggacatcttaaagcccgggctggacaggatcgaagagatcaccggcgagcccgtgttgggagtgctcccttatgacgaaactcttaaattgcctgaagaggattccgcctcactaaccacgcatagcttcgcggaggataaggacatcacaattggcgtcattcggcttccaaaaatcgccaacttcacggacattgacccgtttgagtatgaagacgatgtggccctgaaaatgattgacatcaacgacaacatcagtgatgtggatgctatcataattcccggcacacgcaacagtacagaggacatgtttgaactccgcaagagcggtctggccgaccagataatcaagaaagccgatgaaatcccaataatcgggatatgcggcggcctgcagattctgggaaatgtcatttatgatgatgagaagagggaaagcaaacacggaacagtcaatgggctcggcctgctggatatcgagtctgaattttcaagagcagacaagatcgtcacccaatcggaggccacgatcccggacaatctcgatgggatcgctggtgcaattttcaagaacatcgcaggtgaaagcattacaggctatgagatccacgaggggaccagtgagctactgagctctaaagctttactgaatgttaaaaaaggacagggaaacaatgacgagggcatgattgacggggcatgcaatggcaacatctttgccacttactttcacggtatattccacaactacaacttccgaagagagtttcttaactacatccgtacgaagaaaggcctagaggcccgctacggtgaggacccatatgagactcaaaaagactattccctcaacagactggccgagattgtggaagaaaatttggatatggatatcatcgatgacctgctcttctccaagtga

SEQ ID NO: 9311 - DNA, 1980 bp, synthetic construct
  source 1..1980: mol_type = other DNA
atgaagtttgaggaagtcgagataactgaagattcacctcaggagttggtggcggagcccgtggtggagaaggaagaccacggcgaagagaccaaaccaatgctggactacgacaatattaagagttcacaggatattgaggttccacctctactgattgaccaggtgatagggcacgaggactccatagaaacaattaagaaggccgccaagcagagaaggaacgttctgctaatcggcgatcccggcgtgggaaaatccatgcttgctaagggaatggcgcaaatcctgcctcacgagaccttaaaggacgtactggtctacccgaacatggaggataacaaccacccgttgatacgcacagtgcctgcaggggaggggaagaagattgttaaggctacgaaggggtccgctaaaagccatgaagaaaagaagactatcattacaatgttcgcaatcggcggcattctggtaatcggattcatgtacggacggctgctggaatctattattgcagccgccctgatcctgcttatttccattcagatcaagccaaaaaacagcaatatgtcccccaagctcttggttaacaatcaggacagcagattcgcgcccttcatggacgccaccggttcgcatgctggtgccctcttgggggatgtacggcatgacccataccagtccggaggccttggcactcccgcacatgaacgtgtggaggcaggtatgatccacaaagctaatcggggagtgctctacatcgatgagatcgggacaatgtctatgaagacccagcaggagctgttgtcggccatgcaggaaaagcagtatgccatcacaggccaaagtgaaaactcaagcggggccatggtacgatcacaggcagtcccatgcgactttgtgctggtcgcctccgggaacctgcaagttctggagggcatgcacattgccatgaggtcgcgcatcagaggctatggctatgaggtgttcatgaaggactacatggaagacactactgagaaccgggagaagctggtccagttcgtagctcaggaggtgaaaaacgatggacgcatccctcactttgccacggatgccctcgatgaaataatcatggaggccaagcggcgatccggcaagcagaatgccttaacgctgcgcctccgcgacctcggtggactggtcaggagcgcaggggatgtggcgatagaaaaaggagccaaccttgtcaccgctgagcacgtctttgaagctaaaaagtatgcaagaacactcgaacagcaaatagctgacaggtccatcttacagagaaaggactacagcatggtgtccgcgcaggggggacgagtgggtctgattaacggccttgcagtgatcggtgacaggagcggaatcgtttctcccattgccgcagaagccgctccgacccaaagtaaaaccggcgggaagatcattgccaccggcaaactgggcgagatcgctaacgaatctgtgcagaatgtcagtgcactgatcaaaaaatacacgaataaggacatctcaaattatgacattcatgtgcagttcatccagacttacgacggcgtggagggggattctgccagcgtcagcattgccacagcggttatctcagctatcgaggagatccctatcgaccagactgtggccctcaccggtagcctgaatgtgcggggagatgtcatgcccatagggggcgccaccgccaaaatcgaggccgctgctgaagcgggaatgaaaaaggtgcttattcctaaaagcaacctgaaagatgtcatgatcgagaaaaaatatgaggacatgattgagatcatccccaccgagaccttgagtgatgtgctggaaaacatcctaattagtggctctagcaaagacaagctcatcgcaaaaatgaagaacctcagttctaaggtggccgataaggtgccccaaacaggtctcaacaatccaacgataaattga

SEQ ID NO: 9312 - DNA, 483 bp, synthetic construct
  source 1..483: mol_type = other DNA
atgaacatctacgagaccattaaaaacattcgcgccagctgcgataattacgtggacccaaacctgctggcattcatcattgatgacgacaaccatatgggagacaacaatatcctcgaaattaagggttatgatatccgggacaatgacgcctatgaggaaaggctgttcaagattcacaaaaacgaaaatatcttcctcccttgtggcatgattacattcatccccgtgctaaatgaatgtgacatattttccactaaggactatagcctgaagctttcaccggaggagtttgacaagtactgcgaacaggaggaaaagctgtttggcattttgataaaaaaagattccaccgattacaagatcgggcagacagatgtctgcaactgcagtatcacggcgtcgttcaaggagtttaaaaaggctgacgggaaattctacaaaaagatcgaggagataatcgagagcaagatcatcgattga

SEQ ID NO: 9313 - DNA, 906 bp, synthetic construct
  source 1..906: mol_type = other DNA
atgaaggtcaaggacgggatcatcggtctagtcgtcggggacgcactgggtgtgcccgtggagttctacaggcgagaagaccttgagaagaatcccgtgacaggcatgaaaagttatggaacatacaataagccagccggaacctggtctgatgatacttccctgacgatagccaccatggccagcatcataaacaaaaagtgcatcgactattcagatatcatggaggagtttattgaatggcggaagaataataaatactcccaggaggaaaccttcgacataggcattacaacccggaacgccctcgacagctacacgccaggcatcaacccgctgtgtggaatgggcggagagggcgacaatggaaatgggtctctgatgagaattttgcccctggcgttcatcggcaacatcgactatgagactatcgaaaacatcagctctttaacccacaggcatgagcgctcaagaattgcttgcgtactgtacgtggagattgcccggtccatgattagtaactccaacctgactataaacgagcacgttaaaaatgcaagcgctaaaatcattgaatattacaaggatagcgaagagctcagtaactttaagcgcatcttcgacgacgattactcgaaaggcgtgtcagggaagggctatgtgatctccacctttgaagcggtgatctactgcctggaaaacacaaataactataaggatgcagttctgaaggctgtgaacttgggggatgacaccgatacggtcgctgccatctgcggtggacttgcaggcatctactacgggttcgacgaaattcctatagagtggattagcgagattcgtcagatcgagacaattatcgacctctgtgaaaaatacgaggtagcctgtgatgagtatctctga

SEQ ID NO: 9314 - DNA, 510 bp, synthetic construct
  source 1..510: mol_type = other DNA
atgatttttaagactgccaacctcacactacgaccatggcaaatctccgatgcggagtgcctgtatcacttcgccaagaaccccaacatcggtccgatcgcgggctggcctccacatgagagcgtcgaggactccttaaacatcattcagacggtatttagcaaaaaggagacctacgccgtggtgatagataacgtgcccattggctgtgtgggacttttgttccaccccgactgcaatcactattggggggataactcggctgagctggggtactggattgccgaagagtattgggggaatggatacgctgttgaaggcagcgaggtcctgatcaagagagcattcgaggacttcaacataaaccagatctacgcaacctacaggtgcgaaaatacccggtcaaaacgcgtgctcgaaaaactcaattttaaatattttgacaacctgacaaatgtcaattacctgggcgaccagttcagtgaaatcgccatggtgctgaagaagtga

SEQ ID NO: 9315 - DNA, 369 bp, synthetic construct
  source 1..369: mol_type = other DNA
atgacacgcctctgcaaaaactgcggatttgaaaaccaggacgattacgacttctgtgctaaatgcggcacccccctggttgagggcctaaagcctaaccagttccgggtctacaggacacaagacctcgagattaataagaaggccctgatagccgcctacatcgccactatattcctcagctggagtggcttttttatcgggctgatctcaaaaaatacggtgtttgcaaccttcaccttcttcggatttttcatgccattcttcctggtgcagagcaaacacccggcacttaagaagcacggtctgatcatgatggcgatttcttttgtcggggtggctttgtccttctatgtaatgatgcattga

SEQ ID NO: 9316 - DNA, 513 bp, synthetic construct
  source 1..513: mol_type = other DNA
atgaagaaactaaatgtcgcccttatagcattggtactgatcgttgtggccttcctggcttccacgattgtgagcccggtgctgatcgtggcggaggacgcatctgaagacaatgggattgacatggctgcgaccattggtctcaccggcttcaactggatctatcccggcaactcggttaacgctcaggggcaaacactgcacaacgtgtacgcggactaccctgataatccatatggagccgcccgcgacataatgagttacacataccatgtcaccccacacatcataatttccattaacaatgatgccgctgcagccattttcggcgaaaacatcatcgatgatatcagggctaacgatgggtacaacggctatgccggtaacgacaaggtgtcaggaagcatggaccggggagacgccgtgggcactgccatggcagagaatggaatcaatatcattgagatccccatacagtttctcatcgggaacatcagcccccactttgtctga

SEQ ID NO: 9317 - DNA, 918 bp, synthetic construct
  source 1..918: mol_type = other DNA
atgatcatcggtggcagctcctcccaggatctggccgcgagtgtcgcacgcgagctgggcgaagaactatgttatgtcgagaccaggaagttcccggatggagagagatacctgaagattaatggccacgtggaagatgaggccgtcactgtcatccaatcaactggataccctcaggacgagaatctcatggaattgctgttcataatagctaacctgaaggacttaggtgccaagaaagtgaaagtggtagtgccatacatgggctatgcacgacaggaaaagcgtttcaaccccggcgagaccatttcggctaagattgtttgcgacctcatccagacagtgggggctgatgaatttataacatttaacattcacgaggcctgcgtgctcgactttttcgacatacccgcacgcaatctgtccgcaatgcccgctatcgccgagtacctggacaagaaattctttaagaaagaagagcttaaaccactaatcgtggcccctgacaaaggggcctatggattcgcacaagaaataagcgaaattattgggtgcgactgtacctaccttactaaagttcggctcggacccgataaggttgagaccaaaatcgtagatgtccggtgcgacagcgagtccgagaacacggtgaacattgactctgtgaagggcatgcacgcgatcattgttgatgacattatcgccacggggggaacaatcgtcaacgcagtaaacatcctgaagcagtatggcgctagcgcggtggatgtgtgctgtgtgcatccaattctgacaaacaatggggtgacgagaatctactctgccggtgccagtaagatcatcggcaccaataccctctctagcgacacctcacgggtcagcatcgctaagagtatcgcccaggccttgagggagtga

SEQ ID NO: 9318 - DNA, 291 bp, synthetic construct
  source 1..291: mol_type = other DNA
atggacaaggagaccatcaaaaaggagctggccgacaaaagcaacgaactcctggccaaatatggcgagcaggatctagtagaggatatatcagttatgaatatggcgacgaagacagtgtttctcggatctcttagggtctacaactacgacaatgcaggcaagatcaagaacgatctggaaaagaagattaaaaactatggggaaattgccatccgggacgagaagatcgtgccatgctgtgctcccagttacatccacgtctccttcaacgtgagcattaataaatga

SEQ ID NO: 9319 - DNA, 1965 bp, synthetic construct
  source 1..1965: mol_type = other DNA
atgaaagaatttaagttaaactcaccttataaaccattaggtgaccaacccaaggccatcaacagcctagccgaaggtatcaaaaaaggcatcaaggagcagacgcttctgggcgtcaccggttcggggaagacttttactatggctaatgtcattgaaaaggtgcagaagcccactcttgtgatctcccacaacaaaactctcgctgcccagctgtacgaggaatttaaagaatttttcccagacaacgccgtggaatactttgtgagttattatgattattatcagcctgaagcatacgtgccaagaaccgacaccttcatcgataaggaggcttctattaatgacgacattgacataatgcgacactcggcaacacagagcttgttgagcagggacgatgtcatcgttgttagcagtgtgagttgtatttacggtattggcagccctgaagattatggggagtttgcctttggaatatccgtgggcgatatttacgacaggagcgagatcctggcccggctggtcttcatgcagtacgagcgcaacgacattgaatttgccagagggcaattcagagtgaggggcgacgttattgagatcaatcctgtgcatggaaccccgccaatacgaatcgaactattcggggacgagatagatgcaatcagtatcattgataaggtgacaggtaagaagcaggagtcgcttaaaagatacatgatcttccccgccaagcatttcgtggttggccaagacaagatggacgaggccctcagcaaaattacaagtgaactggatgagagactcagcgaactgaatgccatggggaagctgctggaagcccaaaggcttgagcagcgcacccggtttgacatagagatgctaaaagagatgggatactgccccggaattgagaactattccatgcacctgtccggacggcactggggagataagccctacagcctgctgaaatacttccccgacgatttcttgacaatcatcgacgagtcccacgtgaccgtaccccagatcagaggaatgtacaacggggaccgcgcacgtaaggaaaccttggtggattacggcttccgcctcccgtctgctaaggagaaccggcccctgcgcttcgatgagttcgagtcatccgtgaatcaggtcatctacgtaagcgcaacacctgccgcctatgagctgtcaaagtcccggaatgtggttgagcagatcatcaggccaaccggactcgtcgatcctgaggtgatcatcagacccgtgagcggccaggttgaagatctgctgaaagaagtgaaggccacggctgagaagaacgagcgcatcttagtgaccaccttgaccaagaggatggcggaggacttgacggactattacgcccggatagggatcaaggtacgctacatgcattctgagattgacacactggagcgcattgaaattgtcgatgatctccgccggggcaaattcgatgtactggtgggcgtcaacctcctcagggaagggctcgacctgccggaggtctccctggtcgccattctggacgctgacaaggaggggtttctgagaaatgagacttcactgatccagactatcggccgggcagcacgaaacgttaacggccgtgtgataatgtacgcggacgaaatgaccgatagcgtgcgaaatgcgtacgacatcacccttaaaaggcgtaaactacagatgaaatacaatgaagtccacggaatcactccaacatcaacgcagaggacactcaaggagaaactggctgaggaggacgaacggtataaaattgcgggcgctaacattgagaagatgccgaaagacgagcttcgactgctcatcaaggacatagaaaaggatatgaaggatgcggccgcacgccttgacttcgaacgggctgccgatctcagaaacaaactgtatgctttgaagggtatggacaagtga

SEQ ID NO: 9320 - DNA, 2889 bp, synthetic construct
  source 1..2889: mol_type = other DNA
atgaccgaggatagcaagaaacagatcatcatccgaggcgcacgggagcacaatttacaggacattgatgtttgcgtcccccgggatgaatttattgtaatcacaggcctgagcggatcagggaagtcgtcactggctttcgatacaatctacgcggagggccagcgtcggtatgtggagagcctgagcgcgtacgcaagacagttcctggggcaaatgaaaaagcccgagatggaatccattgagggattgtcgccggctatttcaatcgatcagaagaccacacgcgaaaacccccgatccaccgtgggcacaattactgaaatttatgactacctacgtctcttgtttgccagggtcggaatccctcactgccccaattgtggaaaagagatatcacaacaaactcttggacagataggcgactccatcatcgaggaaggggaaggtctgaaaatccagatcctagcacctatcgtccgcgacaagaaaggccagcacaaggacgtcttcgaggacctgcgcaacaaggggtttgtcagagtccgggttgatggggagataagggagctggaggaagacatcggcctcgccaagacataccggcacagtatcgatgttgtggttgacagactgaaaacccgccgggatgtcgattttaaaaggaggctcgttgattctctggaaacagcatccgagttctcggagggtttgattaccgtactgttcaccaaggacgacgaggattatgagaagaaatactccgaacatttcgcatgtgtggactgcggaataaacttcgaggagctgactccaaggatgttcagctttaacgctcctcagggagcctgtccagaatgtaacggcattggcagcaagatggagatcgacccggacctgatcgtgcctgacaagaccctaacactcagtgaaggcgccattgcgccgtggtcaaagtcgtcaacaaaggagaattattactaccagatgctcgaggcagtatccgagtattttaatttcagtatggacattccctttaatgagctcgataaggaataccaaaacacaatcctttatggctgtaacgataagatcccgttcacttttaaacgaagaaacaaatcttacatggtgaaccgtaaatttgagggtgtcatcccacgcatggaaaggctctacgtggaaacgaagtccaactactcccgcaaatacctcagcaagttcatgtctgaccggaaatgccatgtgtgcggaggcaagcgactccgcccagaggtcttggcagtgaccgtgggcggaaaatccatcatcgacgtgtgcgatatggccatcaaggactcatatcagttcttccaggacctcaaactgacggagagagagaacttcatagcaaaggaagtgctgaaggagattaaagaacggctgagcttcttggtggaagtcggactggactatctgtccatgagcagatcctccgggaccctgtctgggggagaggctcagaggattcgcctggccactcagatcggcagcggactggtgggagtcctctacatattggacgaaccaagtatcgggcttcaccaacgtgacaacataaagcttatcgacgcccttaaacgactgaaggacctgggaaatacgcttgtggtagtggagcatgatgaagaaacaatcctgtctgctgattatgtggtagacatcggcccgggcgctggtgagcacgggggcaaggttgtggcccagggaacccccctggacatcatgaacaatccagattccattactggccagtacataagccgggtgaagaaaatagaaattcctaaacagagacgacctggaaacggcaatttcataaggattgtgggtgctgcccaaaacaaccttaaagacattgatgtggatatccccctcggtaagttcacttgtgtcaccggggttagtgggtctgggaagagtagtctgattaatgagatattatacaagggggttcaaggcaagctcgccaagaagttcacgttcgccgggaaatacaaggaaattgaaggcctggaaaacatcgataaggtgattgccatagaccagaaaccaatcggacgcaccccacggagcaatcccgccacgtatacgggagtgtttactgacattcgggagttatttgcaaacacccccgaaagcaaggctcgggggtacaaacctggacgcttctcttttaacgtcaaggggggaaggtgcgaagcctgcagcggtgacgggatcgtgcagattgagatgcactttctggcggatgtttatgtgccctgtgaggtctgcggggggaaaagatacaatgaggaaacgctggacatcaggtataagggtaagaatatctatgaggttctggagatgaccgtcgaagaagcactagagttctttgagaacatcccaaagattacgaaaaaactgcagactttatacgatgtgggattaggttacatgaagatcggtcagcccgctacaacactgagcggcggcgaggcccagagaattaagctcgctaaggagctgtctcgcacaagcaccggcaagactctctacatcctcgacgagcctaccaccggcctccatttcgccgatattgaaaggttgcttgacgtgctggccagattgaccgatgcgggcaatagtgtggtggtgatcgagcacaatctggacgtcatcaaaacagcggaccatattatcgatctgggtcccgagggcggtgacggcgggggccaggtgatcgctactggcacccccgaggacattgccaaagccggcacttataccggggaatttttggagaagatgcttaatgagaacattaccccttacgccaaggaactagtagaggatatcggtaaatga

SEQ ID NO: 9321 - DNA, 1209 bp, synthetic construct
  source 1..1209: mol_type = other DNA
atggtgctgagtacaggaaacactgcctggatgctgatcgccacgattatggtgttactgatgagtgttcccgggattgccttcttctatggtgggttatcaaagagaaagaacgtcctgaactcaatgttcctctctttaatagcattcgcaattgtgagtatcctttgggtgatgtacgggtatcaatttgcctttgcagacctcagttttgcggggctgatcggaatcccaaaaacattgttcatggaaggaattggggtaggttctctgaccggcactattccaaccttcgtcttcgccggatttcagctaacatttgccggactgaccgctgccgtggtatcgggcgcaatcgtgggacgcatgaagacaaaagcctgggtcatatttatcatactctgggccacctttgtctacatccccatctgccactggatctgggggggcggctggctcatgaacattggcgccatcgatttcgccgggggggttgccgtggaagtgaacagcggcttctccgctctggctctagctctgatccttggaaagcgaaaggatacgtccttgctgccacataacctgggctactccatcctaggtgcgggattcctctggttcggctggatgggattcaacggcggcagcgctctggccgctaatggcctggcagggtccgcgattctggtgtccaataccgctgctgctgtggccatgattgtatggttgcttctggacgtgctcaatgacggcaagccgacagtcctgggtgcaatcactggtgccgtggccggcctggtggccgtcacgcctgctgcggggtttgtttccctcagcggcgggattataattggacttggcgcgtcgttgatttcatactacgcagtgttttatatcaaaagcaaattcggttacgacgatgcattggatgtatttggtgtgcacggactttctggggtctggggcctgatcgccaccgggctgttcgccgcacccagcatcaatggtgtggcggggctcttctacggcaatcctgagcagttgatcatccagctgatagcagttgttgccgctatctcatatagctttaccgtcagctatttcattggaaaggtgctcgatatccttattggcctgagggtcgacgacaaagaggaaataatgggactcgactctgccctgcacgaggagagcggctaccggatctga

SEQ ID NO: 9322 - DNA, 339 bp, synthetic construct
  source 1..339: mol_type = other DNA
atgaagcgcatcatcgcggtaatacgtgaagagatgtttgaccccgtgaagctggccctcttggccgccggatgtgaggggatgaacgtcagcaccgtgaagggccggggcagacagactggaattaaggagtcttaccgcggttccagctattgcattgacctgattccaaaaacacgggtcgagctaatcgtgaacgaggaggacctcgataggattattaacatcatcctggaaaatgctcgaaccggggatatcggcgacggaaaaatattcgtgtcagacgtggaggaagtcatcaggatcagaacgggggaacggggcagtgatgcagtttga

SEQ ID NO: 9323 - DNA, 1500 bp, synthetic construct
  source 1..1500: mol_type = other DNA
atgaaggaactgtatgagaagatgattgacgaggccatggcggctcagaaggctgacgtctcggttgtatcaaaaaacaggtataatgactttaaaatagtggatgcaaagccatatgccgatgctgtgagcaacatgaaagccctggacaaccaggccgagtctgtgatcaacttgcataaagaaagcgtgaagaaccattacgagatcttgagctccatcacaaagaccctcaagtgcgaggatgatcccttcattgagcacttccagacccctccggtgtttgagatcctctgtgacgaggacggggactttgccgatagtgtggacaaattcgttcaggcaatcgccgatgcggaagcactgattgccaaggagtccatcaggcgctatggcggattttacggccctacatgcgtggttgacttcgccttaatgccgggcagtaccagtaatgtggtcaaccagatactgaaaacagtcgatatcccagttcaccacaagcaggccatcctgtctgctaagagttggggtatgaacacttcttacggcatcggcgatgcttttgcgcatgcaattgaagatgggttaaccgccgcccaggctacggaaaaagagatcgagaccctgcaaatgatctacaagactcctattgagggccaggggactttgatggacaacgcaaatcattcatcatttgacgtgcgcgatcacatgaataagtacaaaaaggcaatgaccaaatcggtgaaggctgcaatggacgatggggtccactacggcaacattgtaacggtgccagcttactgcgtgggggacataggacaccacatcggtcagtccacctacaatatgtgtaaggacgacgtgataatggctattatagaggccacgacaggggttatcgaaaacagcctccgcaacaacatcgacaagttcaaaactccatttgacgtcctgaaacttagcaccggcgcgccggcctgcgccacagaatttctactcgaactggatggattcaccgctcccatgatcgtggacctgctgaataagcgtttccacaactatgtccagcaatatcctacccgaggcgcagccgctgagctgcacaattgcgacttcatggacatgatctaccggggattcaacgccatgagcaatgcccggaagatgagatcctccgcaggattcgagattatcccccggattaagggtatggaaattgatttcacacccatcctcgaaaatgaggtgctgatgaaccctcagagatacacatatcccgcctgtgctatttctgtcaggttctcatccctcatgcggctggccgattacccatgtcttctaactagcgagcccatcaccgcaaccatgatgacaaatattatagcccttgacaagaaaacgcccggtagccccgtaagaggatgtaaacaatgcgcctccgcctgcctcgcggataacactcatgaatactgccagtggcgagaggcggtctga

SEQ ID NO: 9324 - DNA, 774 bp, synthetic construct
  source 1..774: mol_type = other DNA
atgccctgtaatatacgcaaaaaattcttcgccgagctactcggcacctttttcctggtctttttcgggacgggatcagcagtggtcaccctgctggtgtcgcagagtatcaatcccgctaatgtcggcattggagtgctcggagggctgggtgactggattgcaatcgccctagccttcgggctcactgtcatgatcggcatctacgcctttgggaggatatctggggcccacttcaacccagccgtcactatcggcctgcttgtcacgaagaacattcctctggtggatagtatctattacattgttgcacagttgattggcgcctgcctgggcagcctcgccttattcctgtgtcttggggcgcaggctgttacaatcggaggactgggcgccacagcccccggtctgggtatcggctatatgcaagctatgtttgctgagtttatcggaacatttttcttaatgatggtgattatgggtgtggctgtggataagaaggcggaacctgggtttgcaggagtatccattggcatgaccgtgactgctgtgatcgtagtgttgggcagcttcaccggggcctccatcaaccccgcacggaccttcggcccgtacttgatggacatgatcctgggcgggcagaacctgtggggcttcttcccaatatacctcgtgggacctatacttggtgctatctgcgcggcatttgcctatgcctacctggcgaagaacagcggagtttgcgaactcccgcagccatttaaagacgagtga

SEQ ID NO: 9325 - DNA, 1782 bp, synthetic construct
  source 1..1782: mol_type = other DNA
atgaacaaggagattatcgcagccgttatggcttctaccatagatatggataacatgtctagtgacagactagaagccctgaccaaaggacatgggatgctgaatatcgctgccatttgctctgcgaacgtcattgccgaggaggtgctgcgaggcgttaatctgcagctgactgacgaaaatatcggagaactaccaatcgacgatcttctgcgcaaatccatcgaggccgccgagaacgccggggcggatgcagcaaacgctgctctcctcagtgcaaccctctgttacttcgctggtagcaacgctcaagccggcgtcccggcaggcaaccggaagctcggtgctatggcacggatgatcgctggggtggaccggtgcggagtactggctattccaacaccaaaggcaaacaacagaatttcaggatatgctgctgtgaaggccgtgtacgatgaggtgtttaataatagcctgacgcccatcgacggctccatcttgcccttgggcgtgggcggaggcccattgtacggacacaacgccctcggggaggatatcgggttctcccagctggccatcaacggtgctaaagcaggtactaaggggatgttgcaggcattcgcgaatgtgggaatgcctcccagcccgattattgccgcaattcttggtgttgccgcaatattagaaatcgtccaccccgacagcgaggtggcggaggaatatggggaatttttcgtagccaactcggcctacgtcgccgggctgggcgcctgtgaggtggccggcctgcccgagaagctgcatatcagggggaccggcgaggagtatgacaccgctaacctcgtcggggaccttggcgtcattatgaaggatatcggcggaccctccgtggtcggcatgattgcatttgaggaaatgctttcggcgtttgaagagagcttggacattggtgcaggattttcaggcggccccctgcagccacctctcggccacatgacagctgacgcgattctcgcccttaaggttttactgagcaccaatggcgacattgaccaggctgctgagaagatcaaagagatcaagactaatttctggctggagcctgagatagcaaaaatagctacaaacaccatcgctcgtaaatcagagcaagtcaggcgcggacccgtgacacgggccatgatcctcgccacggaaggcgccctgacgaaggagaccctgcgaattgctgagttcacacaggaaaagatcactgaaggaatggatctgagcgacatcaccaaagcactagacgacgaaaagctgaacaatgtgtgcaaggcggccagcagtctcttcagtggaatgatggataaggacatcaagatcatgatcactaagtacgccggccgctcccgcaggaaagaaaatccattcctggataattacgccgggtttgataccaacgtcgacgtggagatagagatcgaaggggaaaaaatagtgatggaaaagcttgccaacgaaatcattcctgatgcggtggtcaacaagaaacaggacgtattggaggtgttacctctggcctccgtgcctgtgaccgaactgcagctgtgcggacacacaatcgtgaatgtaatcgtgccggccgccgttgccggggcaatgggtgttgatgagtccgaggtcatcgctaaaaaggccacaaagggggcctatataacgtcaagcattcccggtggcattgagagggccagagacgtggcgaaaagagcggccaatataatgaaagatctcaactga

SEQ ID NO: 9326 - DNA, 849 bp, synthetic construct
  source 1..849: mol_type = other DNA
gtgtttctgatattcgttcgcggagtgctgatgggcagcgctgatatcgtccccggggttagcggcggcacaattgccctcatcaccggaatctacggccatctcgtcgaggcaattagcaacatcagattcggtttcctgaaacccctgttcaagggggattttgacggattcgtaaatagtatcctcgacgaaatcgactttaagttcctgatacctctcatcctgggcatcggggtggcctttttgaccctggccaaggtcgtgacttactgtatggacgtctatactgccttcacctacgcattctttttgggtctgatcatagcgtccgcggttattctcttcaaaaagctcaatcacattaactttaaaaacatcttattcgctcttatagggtgcattttgacatttatatttgtgagcctcaaccccatcgccaccaatcattccttactggtccttttcatctccggaatgatcgccatctgcgccatgatcttgccgggcatctcagggagcttccttctgctgctactgggccagtacaagtacatgctgaatgccctgcacaattttcacctttcagagatcatcgtgttcgtagtgggggcactaattggcattctgggattcagcaagatcctgaactatctgctcaaaaaccacgaggagatcacaatggcttttcttattggcgtgatgatcggatcgctacgggtgccatgtgtagaaattgctaacagcatttccataaacatcgctagtttgttcccatgcctgattgtggccgtgatcggtttcgcaataattattgtcctcgaaacgaggtttgactatattgattga

SEQ ID NO: 9327 - DNA, 2577 bp, synthetic construct
  source 1..2577: mol_type = other DNA
atgatcaaaaagcagtggcgcctgtacccgattgggtcaccaaaaggcgccctgaaccgtaagcgggagcccgatttcgtggggaacataaaattctcacggaatggggacgttctaagcatcagccgctttgtggccgattacaatttcaacgataactccaccctgaatgaaaagctcatgcccccgggggaagtaatcaagctgctacgcagtcaggccgtgtttctcgctactcctgatgatgacgtggagaagtttctccgctccctgaatatcaaagttcgcaaaactcaggtctgtgacttctgtgcctatgagggggatattacaattgtcaactcttcctactcgtacaagtaccacaaccagctgatctgtaggaactgcgcattcgacacgataaaacaagagatcaaacttcaaggtttcgacaagaagatttttcggaatcttaaaagcacgctggaaaaaacaggaaacctggagaagacactcagcgtccttgaccctcactttgatcccctggggaatactaatctaaccttatttgataagacaaagaaaagcaagcatatcataccgccagtggacatgaaaaggctgaaaattcctaagaacttcaagaaagtccttctggagtcgggaaataccaagctgctgccggtgcagtatctcgccatcaaggagggcctgctgaagggcgaggatctcctggtggtcagtgcaaccggttccggcaagaccctcgtgggtgaactgtcaggcattaccaaggcactcaaaggtaagaaattcatcttcctcactcctctggttgcgcttgctaaccagaagtacagggacttcaaaaagaagtacagcaaactaggcctgaaagtatccattaaagtgggccgtaacagagtgaaggcgaagggagagctgaacctgccagattcagatgtctcctccagcgatatcgtggttgctacatatgaaggaatcgattatttgctccgaaatggcaattcgcaggcgttatctaatttgggtgtggtgcttatagacgagatccacatgattgatgatgaggataggggcactcgcttgaacggactcatcaagcggctgaaaaacctctatcctaagacgcagattatcggcctgtctgctaccgtgaagaaccccgaatttttggcttccgagtttaacatgaagttagttcaatactcgcagaggccagtgcctttggaacgacatctcgtttataccagaaacgagagccagaagcggcacttgatgcgaaagctggtgcagaaggagcataacactaagtctaagaaagggtatagtggacaaactatcatatttacaaattccagaaggaagacccaccagatcgccaactatctgaacaacaagcgggtgaatgcccaggcctaccatgcaggcttgagctactacaaaaaagagataatcgagaaagacttcgataaggggaagataagctgtgtggtaacaacggccgctctggctgccggtgttgatttccccgcctcacaggtcatattcgactcacttgtcatgggaaacaaatggattaacccaaacgagttctcccagatgctcgggcgggctggccgaccatcttaccacgaccgtggcgtggtgtatctgatgcccgaagtaggcaacgacttcgccggagaatccgaggaggccaaggcgctggacctgctcgaaagcaacagtgaggacgtctacatagagtacgacgaagagtcctcttacgaacagatcctcgctgacattagttccaatagcattaaatctcgcaatgaactgaacgatttctatgagaatatcgacgtgcccatttcccttaagacagccacggacgaaatggaagatctgggacttatccgctatgccagcagcaacaagtttgagattaccaaatacggcagagcaacttcagtgtcattcctgtcagtcgacgaggcagagtttattaaaaacacactgaacaataaggaatacctcaatcggtacgttgctcattctcccatgtataagaaaaagaagaaatacgacaagctaaaagtgctggtgctggcgatggcattggacctggaaatgtttgaaaatgcctacttatcgagtgtcattcacaatcagatcgcaaacgccctgaagatcaagtttagcaccagacttttcgcagaaagcaccctagacatcatctctagtggggaagctattgagaaagtggacaaaaagttccaggacgccttgattgcgctgcaaagtgatttcatgcaatgcaagtgccaggacaggccattctgcacctgcatgcagaagggaatcagcgaggtcatcattcacgagaggctcaagggcaaagacccccaggatatcagcaacaagttatttcggaaataccagatccaagtatatcctggagacatctttagctggctggacaattttgtgaagaacttggacgccattaaaagaatcgccaagtccttcaatagaagtaacgtagtcaaaaagaccagttatctcatcaagaagatcgagaatgggtga

SEQ ID NO: 9328 - DNA, 420 bp, synthetic construct
  source 1..420: mol_type = other DNA
atgaaggggtgctactgcctaataattaatgtggattctaagaagacaatcaaaatcggcaagttgggcaagatccagttcgagaaagggtattacatttacgtgggtagcgccatgaatagcctcatggcacggatcaagcgccacctgagtgacgaaaagaagcttcactggcacattgattacctgctgaaaaatgccgagatcaccgatgtaatttacaactcctcaacaaaaaaggtcgaatgtgaactgtccgagttcatcggatcgaagaccactggaattacggacttcggctgcaccgactgtgattgcaaaagccatctgtattactttaaaaacaggaacaaagcgatccattgtgtgctcaacgcttatgacagcatagacatcccctgcgagtttttcaaggagtga

SEQ ID NO: 9329 - DNA, 414 bp, synthetic construct
  source 1..414: mol_type = other DNA
atgattttcaagctccagaccaagggccacaagaacgtcaccagcctacataaatcgactttcgagataaccgaggatgtcgaaattgggctggccgcggattgtatcattggcaccagtatggacaaatccatgagcgactttccagaggagtttaaggataagatcgccaattcaaacacaaaaatcaccgtgatcctggatacggagaatggacacgacgagatcgtggggttcggtcatgaaaacttgacccttactcaccccacagacatggtaagcaggactagcgattacacgtgctcccgcacactgatgattaaggcaaacaaggctgcccgggacctggacgacaatctgatcgaagacctcaagaacgaaaaaatcatggatgtgacaataaaactcgagtga

SEQ ID NO: 9330 - DNA, 852 bp, synthetic construct
  source 1..852: mol_type = other DNA
atgaaggctgtaatcccggcagccggcttcggaactcggttcctccctgctactaaggcccaacctaaagagatgttgcccgtattcgataaaccgactatccagtacgtgatcgaggaagcagtcgcctccggcatcgatgacattctgattgtcacgggtcgcaacaaacgcagcatcgaagaccacttcgacaagtcatttgagctcgaacaaaccctgcagagtgcgggtaaagacgatcgcctaaagcaggttcgtgccattacggatttggccgatatctgttatgtgaggcagaaggagcagaagggtctgggcgacgccatttactgcgccaaaaagcacgtcggagacgaggcttttgccgtcatgcttggggatagcatcacaaaagggccaaccccatgcaccaaacagctgatcgacgtgtacaggaagtacggggcgtccgcaataagtctggaagcagtgccaagagaaaaggtggagcgatatggaataatcaagggggaggaggttgagaagggcatctacaacatttcgaagctggtggagaaaccccttgctcatcaggcaccctcaaacctcgccatcatggggcggtacgtcctcacacctgatatttttgacagaatagacgaaaccgagcccggcgtgggcggcgaaatccaactgacagacgccctgcagaagctcgatgcgatttatggggtgattttcgatggaaagacctatgacattggcaatcggctggagtggttaaagacaagcatagaatttgctctagacgattccgagagcaaagacatcctgatcgaatacatgaaagagatgatcgacggagtgtga

SEQ ID NO: 9331 - DNA, 1266 bp, synthetic construct
  source 1..1266: mol_type = other DNA
atgcagtaccggctgatcaagaagacaggggacgaaattagctcaatcggcttcggcgccatgcggctacccttgaagaacggcaagattgatcgcaccgaagcccgtaaactcatttttcacgcaatcgacaacggcatcaatttcattgacactgcctacctctacggggacagcgaaacgttcctgggggagatcctcaccgaggacatacgatccaaggtgaagatatgcaccaaactgcccgccatcaacgttaaaaagtatgaggacatggagtcctttctcaacgagcagctgaggcgcctgaatattgactgcatcgattattacctcatccatggggtggacctcaagaacatgaaccgcctgctaaagcgggatctgattaaattcatcgagaaggctaaaagcgatgggaaaatcaagtacataggcttcagctaccatggacctaaagaggagtttcagactgtcgtggactgctatgactgggatgttgtaatggtgcaatacaattacttcgacgagaatgtccaggccagtatagaaggcatcgagtatgcggcgtcaaagaacatgggcatctttgttatggagccactgaagggtggaattttagcagggaatatgcctaaggaagcagagaaagtgttcagaaagagcaacccggacaaaaccaacgccgcctgggctttggagtgggtgctgaataatcgaaacgtaacatgtgttttaagtgggatggatagtttcgagcagcttgatgagaacctggctgtggccaatagaactacacccatgtcgatgacatttgaagatttggaaacggtggaactggtgaaaagggtaatgagaaactccctcaagatcaattgctctacctgtggatactgcatgccctgtccacagggtgtcaacatcccggaatgtatgaaaatatataatgagaaatatctattcaaccacaaaggaattgctaatctgtataatgacgtctacctcttcaacccaaagggccttattaatcagtccttcattgattattaccaatacgtcggtggaattatgggaaactctggaaacgcaggtaaatgcaacgcctgtggcaagtgcctgaggaaatgcccccagaagctggacatcatcgctgagctggagaaggtgaagaaggaatttgaatttcctggcgtcaagtacatgttgctgtttgtgaagcacgtgggcttcccactttataaatttatcaacaagcttctgaactga

SEQ ID NO: 9332 - DNA, 210 bp, synthetic construct
  source 1..210: mol_type = other DNA
atgaaactcgaggaactgctggcaccatgccccaagtgtggcagcaaagacaaaattgcccaccggaagatgctcgataatcatagggctcacgccgagatggacaccgtcaagtgcgaagagtgcgggtatatctttttcgtgaacgagaacatggaggaagacgagaaaaagcagctactgaatgaacttaacaagatctacggatga

SEQ ID NO: 9333 - DNA, 1113 bp, synthetic construct
  source 1..1113: mol_type = other DNA
atgattattcccactctcaactgcccctccaagtgcaaatattgttggggctctgagaataaaaaagaaatgatggatattggcatcatagatcagattataacttggcttagcgacttcagagacgataaggtgcactttaccttccatggcggtgaaccgctgctcgcaggctacgacttctacaagaccgctttggagaagctgtcgctattgcctaacctagatggattttcgctgcagagcaatatttggctgctgacggacgagcttatcgacctcttcgtcgagtacaacgtggtagtatccacaagtattgacggaccaaaggagatcaacgactaccaaagaggggaggggtactttgataagacaatggccaggtacgaagctgctaagaacaaaggactcttaattaactttgtgctcacagtgactgattactccaaggacttcagcgacgaactgtacgatttcttcaaaaatgagaagatgaatcttaagatccacgccgccctgccctcactccgcggcgacaacgccgactcctgggcccttgagcaagaagagcacgggaagctcctggtcgagtggttggataagtacctgtatgacctggacaaattctccatcatggatctcgaccatatcagcaaaagttcactgcggcgcaggggcacgctgtgcacctttgcagactgtatcggaaccaccttcgcggtcgggttcgatggctctatctatccatgctaccgctttgtgggaatgccggactacatcttagggaacgtcggtgacaatccaagtttcgatgacctgaagacaagcgatgcctgggtgaagctgcaggagtttcgggattatgtggatgaaaactgcaagaaatgcaagcacgttaaatattgtgagggaggctgcccttacaatgccatcgtggcatatcagacccccaaagccgttgacccccagtgtcgggcatataagatgatattcgacgaagtgtcaaaacgaatgaacaaggagttcgctcgttctgcgtttgggctgggtggcagcgagcctaaaggtgaaggggaagcctttagcatcatggacttggctatgaagcactga

SEQ ID NO: 9334 - DNA, 2049 bp, synthetic construct
  source 1..2049: mol_type = other DNA
atgatcgatgagatcacggatttcctatttggacttaagatgaccattgtgtcagggatatttttactgattgccgtgatcttcatgatctttggagtgaatacgccgatctatttaaaccctgcctggggaaccgtgataataagcgggattccaatgctaacactggccatgagcagacttatcagggagaagtggatcagctcggccctgctgatcgctatcgctatggtggccagcctgttgatcggtgaagttttcgccgcaggcgaagtggcctggatcatggccctcggtgctatcttggaggactggacagtggaaagagctaagaaaggactgaagaatctgattaatctcaccccccgaaccggtaggagaataatcaacggtaacgaggagatgatctttgtcaatgaaatcaaaattggggacatcctgcgaattttgccaggggagagtgtccctgttgacggcgagatcgtcagggggacatcttcgctggatcagtcaattatgactggagaatctctccctattgacaaagaggtgggcgatgaggtgttttgcggaaccatgaacatgtatggcgcaatagacatcaaggccactagtttggatgagaactcatccctgcagaaactgatcgacctcgttaaagcagcggatgagaagcaggctccaacacaacgcatcgcggacaagtgggccacttggctcgtgcctgtggccctcatcattgctgtggtctcctggatcgtcacgggcaacatcgagcgtggcgtaacagttttggtagtgttctgcccatgtgcactcatactggctacacccacggccataatggctgcgattgggcaggcaaccaaatatggggtcctgatcaagagcggcgaagcactcgagaccctgggcggcctcaatacgctggtcttcgacaagactggcaccctgacctacggtaaccttgaagtttctgacgtgatctcccttaacgagcacctcactgatgaggatttgctaaagatcaccgccagctgtgaaaaattaagcgagcacccattggccaaggccatcgtaaataacgcaaacgaagttaagattcaaattgaagagcccgaggagtttaagatgtaccccgggaagggagtgacatgtatcaactcctacggtcgcgtttatgtaggaaactccaaattcctatccgaaaacaacattcatataaacattgacagtcagctggacaagctcaaacatgagggcaaggcctccatcataattgcactgaacggcgaggtcatcggccttatcggcctttctgatgttgtgcgcgaagactccaaaagcatgattgacaaactccacgacctggggaacgagactatattgctgaccggggataacacagaaaccgccaattacttcgcggccaaggtgggaattagccgggtgtacggaaacctgctgccgcacgagaagctggaccggattgaaaagctcaaaaatgatggcaagaatgtctgcatgatcggcgatggcgtcaatgatgcccccgctctgaaaaccagcgacgtgggtgtggctatggggtcagtgggaagtgacgtcgctatcgaagccgccgatattgctctgctgggcgacgatatcgggaaaattccctacctcaagaaactgtccaattcgacgctattcacaattaaggccaacattgcaatttccatgacaatcaatgccgtcgcgattgtctgctctgtccttggcctgctgaatcctgtaaccggtgcgatcgtgcacaacgccggaagctgtctggtggtgcttaacgcagcactcttatatgacaggcactttgatgactcagtgaaaataatggatactgagagtgtggagcactctcattaccacttccacaacgacggggagcacacccatagccacgaccacgtgcatataattaatgaaatccgcaccgacaatggaatcaagcatatccatgctcacaagcatgcgttccggcggcagatctgcaagacttaccacagttga

SEQ ID NO: 9335 - DNA, 903 bp, synthetic construct
  source 1..903: mol_type = other DNA
atgctgacaagcgtgcaaaaggaaattctgcaaaccctcataaacttatatcagtccagcaatgggaagtctatcaagggagaggacatcgctgaggtgatggggaggaatcccggcaccattcgtaatcagatgcagtcactgcggagcctggggctagttaagggggtacccggtcctagaggcggatacaagccaaccattgaagcttaccactcgctcaacataacagtttcagataaagactccaaagtgcctattttcaagaacggcaacagggtggaggatatttctgtggcaaagattgagtttacgagcgtgccacagcccagtgagtgtgaagccgccatcaaggtacttggaagtatcaaggaccttactctgggcgataccatatccatcggcccgacgcctgtcaacaacctgggcatccttggaaccatcgttggccgggacgatatggacaatatcctgctcctcgacacgaagactatccgaagtattcccaaacagtcagtgggtgagattgcgagccgggatgtcatatcctttaaaatgaattgcactatcaaggacgccgccaaacgcctcgctgaaaacgagattgacggtgctccggtcatgaaggatggaaaggtcgtcggggtattcacagtgtctgacctggtccatgcgattgccgaggacaaagataactgcactgtgggggaattgatgagcaccaatctcataatcgtgaatgaggatttgaaaatcgccaacgcaatcgaagtgatgctgaaaaaatcgatctcccgcctgatcgttgcagacaacaaccaggatctgctaggcatcgtgaccagaacagacttgatcaatataattgccaacctggaccagttcccaatcatcacaaactga

SEQ ID NO: 9336 - DNA, 924 bp, synthetic construct
  source 1..924: mol_type = other DNA
atgaaggttaaccagatcaatgtcgaatccaacatgaatgtgagcgatctgatcgacaactttgacgcctccggtgtgttgggggctggccgagtagcgcgggcccgcaatattcttgtggacatgatacaggataaggacatgaatgtgtttatgagtctgggcggtcccctgatacctggcggcatgagaaacgttgtctcgaaaatgatcaaagaggggcacgtgaatctgatcgtcagctccggagctaacctcactcacgacctggtcgaggccttcggcggcgcacattaccgccacgagggaaaggatgacgaggaactaaacgaagaagggatcggtaggattgctgatattaatgtgggtagcgacgatttcaccatttttgagacagagatcaccaaaatattcgaaaaaatagcctccaagaggaaggtgatcagcatccaagagttactgtatgaaattgggcttctcgtggaggatgaaaactcattcattgcaaacgctgcaaagaacaatgtcccaatcttcgcgccgggaatcattgactcaatgatcggcttgcagctctggattttttcccaggaccacgactttacaataagtgccgccggagatatgccttatctaagcgatattgtattcgggtcggagaaagttggtgccatcctcttggggggcggcctcaccaagcattacaccctggccagcaacgtaatcactggaggactggactcagctattcagatcacaatggatcggcccgaggcaggcagtctggggggcgcgccactcgaggaggccaagtcctgggccaaagccaagtgcggatctaacctggctagcgtggtgggggacgtcacggtgatcttcccccttatctacgcaagcgcactggacaagatcaatagtgactga

SEQ ID NO: 9337 - DNA, 480 bp, synthetic construct
  source 1..480: mol_type = other DNA
atgaaatacagcgacgatctgttcgacgacaagaaggatctgaagttcgcctccgtgttcggggttctctgcgctatcgcatcggccggtgcgaccatctatagtacagaggccgcatacatttttattgccatcctgctaggcaacctgatagccctcaaagtcgacggcattcaccatattataacgttgcttttgtttgttctgttatgtctcgtgttcgggattcccgagctgagctacgtcattctgctcatctgcatcctggccgctcttggagacgaagtcgggcacgagctgatctcaaaggtgaccgataacaagtttctgaatctcttcttcgaataccggtttgtaatgaaagtggtgatcctccttttggcgatcggcggcgtgttcagcatttggatattcctatgctttctgtccttcgaaatcgcttatgagttcgcaggaatcatctttgagaggtttaactga

SEQ ID NO: 9338 - DNA, 246 bp, synthetic construct
  source 1..246: mol_type = other DNA
atggccaacgaggtcaccaagctggtcatggagaccatcctgggcctaattaccactgccttcgcattcgtcgccgggctggcttggaatgatgccatccagaagttgattgcgacaatcataggaacgggagacgcgcttcccagcctctttatctacgctatcatcgtgactattgttgccgtggtggtgacagtgctgctggctcgggtagcagggaaaatgggcatagaactcggcgaatga

SEQ ID NO: 9339 - DNA, 648 bp, synthetic construct
  source 1..648: mol_type = other DNA
atgaacataaagaacaacctgatcctagcccttgatgtcatgaacgaaagtgatgctattgagatttgcgattcaattaaggaatacatcgacacaatcaagatcggttaccctcttgccttggccgaagggctcgagattatcaataagctgaaaaataagttcggctttaaagtgatatgcgacttcaaggtagcggacatcgacgcaacaaactccaagatctgtgacgagacctttaaggcgggggccgatgcaataatctgccatggcttcgtgggcgaggacagcgtccaagcctgtctgaatatggcaaacaaacacggcaaagagttgtttctcctgacggagatgtcacaccccggggctaaaatgttcctgcagaagaatgccgatgcgatagctcagatgggcgtggatatgggaatcaccaactatgtggcccccgcaactaggctcgacagactgtccgagatccgcaacattgtgggaaatgagagctacattatttcgccgggcgtcggaaagcagggtggagacgggaagaaaactctcgaatactccaatgccatcatcgttgggcggagcatttatgaaagtgaaaagccaaaaaccgcttgcaaaaacctgatcgagagcttaaagtga

SEQ ID NO: 9340 - DNA, 666 bp, synthetic construct
  source 1..666: mol_type = other DNA
atgcatatcatggagggatatctcccactaacatggtgcatcgtgtggtttgtcatctcattcatcattgtggcctttgggatttatcagatcaagaagatcgtggacgaaacccccgagagcaaggcgctgctcgctgtgagcggcgccttcatgttcatcctcagctcattgaaactgccctccgtgactggcagttgctcccacccttgtggcaatggactgggcgccgccctgtttgggcccgcagtgacggctgttttagctaccattgttcttttgttccaagcaatcctccttgctcacggcggcctgacgacactgggggccaacatattttccatggggattgtcggccctttcgtcgcctggattgcatacaaagggctcacaaaggccaacatctctagcaccatcgctatattcttcgccgcatttttgggagacctactgacctacgtagccacttcgttccagctcgcatttgccttcccagcgccgaccttcagtgcagctctgggaaagttcctggtgatttttgccgtgacacaggtcccattagcgatcggtgaggccatactgactgtaatcatttgggatcggctgaaagcgtacaagcctaaactcctgaacaagcttggtgccctggctcccaatgaagcctga

SEQ ID NO: 9341 - DNA, 288 bp, synthetic construct
  source 1..288: mol_type = other DNA
atgaagacctctacactcatcatcctggccgtggtctgcatcatcctgttcgtggcaccactggcaatgtataacggccacggggaggacgatggatactttggcggggcggacgacgctgccggcgaggcgattgaggaatccgggttcgaaccctggttcagctcaatatgggagccgcctagcggcgaaatcgagagtctactcttcgctcttcaggccgctataggtgccatcattattggatacgcctttggctactggcggggtaaaggaaaggaagagtga

SEQ ID NO: 9342 - DNA, 690 bp, synthetic construct
  source 1..690: mol_type = other DNA
atgaagttcgacatggattatatcgcgcacaacaacgcccttacagaaaccaatccttacttcaagttgtttctcacgatcatactcctaattgttaccctggccttcgataacctctacttcgatgtaacggtgtttgtgatcatgagcattgtcatcctgaccatcgccaaaattaactacaaatcatatctgaagtttctcagcattcccatggcttttctggtgatcacatgcatctttctgatcttcttctttggcaaaggagatgtgatctatgagaccggaatactgggcatcgtcgttactaccgactcgtggcactacggcgtgtacacattcatgcgcgtgctgggatgcctgccctgtcttggcttcctcgctctaacgaccccaattgccaagatcttaaattgcctgaggactttgaaggtccccaaaattttgattgagatcgcacttctcatgtataattccattttcatcttcctgaacgaaatcgacaccatgcagaaggcacaagagactcggctggggtatcattcctactggtcctcatttagtagcttgggggccctggtctccataatattccttcgaagcctcgacaaaagtgaaacattacagtacagcctggacagccggggttactctggggagctgccggtgtacgagccaaagaagagatga

SEQ ID NO: 9343 - DNA, 843 bp, synthetic construct
  source 1..843: mol_type = other DNA
atgatcaacatgctggaagtcaagaatattaagtactcgtacaacagcaactatcaggcacttaagggcgtcagcctgaaagtggacaagggcgaaatggtcgctcttctaggtaaaaatggtgccgggaaaagcactttattcctccacctgaatggaatctacaggccggatgaaggaaaagtgttcatcgatggggaagagctgaaatacgacaaaaaatccctgctgaagtttagacaaaaggtcggcattgtattccagaaccctgatgaccagatatttgccccaaccgtcgaggaagatgttgcattcggacccctgaatctcggattgccaatggaagaggtgcaggaccgcgtggaggaggccctcgtgcgggtcggcatgtcagggtatgaaaaaaccgcgcctcaccatcttagtggcggccaaaagaagagggtagctatagcgggcatccttgcaatgaaacccgagatcatggtgctggacgagccaacggccgggctcgacccacagggagtggtggacctgagcaagctgttgcgagagctcaacgacgaaggaatcactattataatctccacacatgatgtggagttagttccgaactatgctcagcgggtattcgtgctcgtggatggtctgctgatcgctgaaggcacccccaaggagatttttgccaagcccgagattctggagaaggccaacctgaaagtgcctatcgttacagaactgtttcagaagctcgaggatgaggggttcgacatggaagggaattaccccctaaccattgacgaggccaaggacaagttcctcaagttgttgcacgagaactga

SEQ ID NO: 9344 - DNA, 459 bp, synthetic construct
  source 1..459: mol_type = other DNA
atgcgcatcggcatatgcgataccacattcgctcggttcgatatggccggcgccgcgatcgatgagctaaagaagaatgcctacgatctcaagataatccgccaaacggtaccaggggtcaaggacctgcctgtgactgccaaaattctcatcgaagaagaaaactgtgacattgtgatggcgctcggcatgcccggccccatgaaaaaggacaagatgtgcgctcacgaagcaagcaccggtttgatcaatgcccagctgatgacaaacaagcatattctggaagtctttgtgcacgaggacgaggaggacaacccggttgagcttgctaaactggcagagaacagggcccgagagcatgcacagaatctgatcaaaatgatgtatcaccggaaagcaatgagaaaggaggctggaatggggatgagggagggaaaggaaaacgccgggccattatga

SEQ ID NO: 9345 - DNA, 708 bp, synthetic construct
  source 1..708: mol_type = other DNA
atgggatttgaagtcacagaggaggacaagaaagccacctatgtcatcctacccgcatacaacgaggccacgcgcatccagccagtgattgaggagattgcggaaaagggctataacatgatcatcgtgaacgacggtagctcagacaacactctggatgtgattaaggagtcccaaaataagtaccctgataagattttcatctacagccacatgatcaatcgaggggtgggcgtagccatgcagaccggctttgacgctgttttacggtataatccaagatacatcgtgaacatggattccgatgggcagcatgacgctgatgacctcgaaaatgtgctggaacccctgataatgggcagggcccaggcagtgatcggggtccggccccttaaggacatgccgctgacccgcaacattgccaacgcaataatgaaccttctcacaaaagtgttctacaaagttgatgtaagtgacagccagacgggtttccgcgctatcaccatcgacgccttgcggaagataaacatcaatgctagaggatatctcatctcgagcgagttcattcgtgaggtcaatgacaacaagatcccattcgaggaagtcgagataagaacaatttacactcctgaaactcgagcgaagggaaccaatgtggcagttgcctttaaaattctgatccaaatgattaaacacaggctgaggtga

SEQ ID NO: 9346 - DNA, 348 bp, synthetic construct
  source 1..348: mol_type = other DNA
atgctgttttactcaattttattccccataatcagcctcattgccattatctggcttctctggaggtacctgaatgagaaagacagcctgatcacggtgattctgtgggcggttttcttgatcatcgtgtccgtctttgccatcttcccacacgccagtaccacatttgctaagctctttggcattactcgggggctggatttcatcatcataattgtgttcgcagtgttggtatataccatcttcaagctgtattacaagatcgacaaacttgaagacaacattaacaaaatagtgaaggaagtcgcactaagcaacgagatctccctgaaagataaggaggactga

SEQ ID NO: 9347 - DNA, 672 bp, synthetic construct
  source 1..672: mol_type = other DNA
atgctgtatttccggggctgcaccgcacgggaaaagctcaataacattcagtctgcaacagagaagttgctgaaactggcggatgtggactatcacatactagatgacgaaaaatgttgcgggagcgtgctgcttagaacaggctttttaaaggaggccgaagaccaaatcaaaaaaaacacggaaattcttaaaggagagaccatcattactagctgcgctggatgttacaaaaccctcacagaagactacgatggcctggatgtcatccacatctcccagctgcttgacgagctaatcaaggaggggaaactcaagctgagcaaaatggacttggacgtcaccttccatgactcctgtcatttaggacgccactgcgctgtgttcgaggagccacgcgacgtgatcacctcggttgctgatatcgtggagatgaagaatatccgagaaaacagtctctgttgcggagccggcggcggggtgaagagtgcctacccggaaattgccgatcagatggccaagtcaaggatagagcaggcgaaggagacaggttgcaagacgctggtaacttcctgtcccttctgcaagctgaatttggagaacggtgatctggaggtcctcgacctcactgagtttctggttaagtacgggggcctgaacgaaaggcagtga

SEQ ID NO: 9348 - DNA, 1203 bp, synthetic construct
  source 1..1203: mol_type = other DNA
atgaaagacagtgagctggaaaccatgcgaaatagcttcaataccgtgaagaatagatccaattccctcattgagagccccagcgctaagcgactgattagcaggggtcgtgaaatcaaaaagtattcaatcgagaacaatgacgagttactcaaccaggtgtgtgagagctttaagcggaacgacgttgacttcaagatcgcggagacggccgaggatgctctatccatcatagacgatctcctctgtgagtacgattgcaacaccatcgccaaagctaaatcgaacaccctgggggagatcaacctgaaacgccacttggccaatgaaaacattgatgttgtcgagaccgacctgggagacagaattttgcaactcaaaaagattgacaacaagccagtgcatccaactggccctgcgagccacttgaatgtcgacaacatcacggatattgttaatgagtccctggacgtcaatgtgaatcccgtgccccgcgagatcatggaagcagtaaggtacgatgtgctgaagcggctggaaaacgcaaatgtagggataagtggagccaacgcaatagcctctgaggagggatctatcgtgatggtgcacaacgaagggaacatctcgcttgtcagcctaaaggatctgcatataatcgtggccggcattgacaaaatagtgcctacattggaggacgcaatctcaatcgtcaagcttgagacgatcttcgctaccggcaactacgtcacaagctacatgaatgtaatctcaggcccgtccaagacagccgatattgaaaaaaagcttctgaagaacatgtacggggcggaacgcgtcgtggtgattcttctggacaacggcaggagtgacgcaacacaggaatgtctgtattgcatcggttgtggcaactgtgtggttcactgccccgtgtacaacgctgtcggaaacgaatttggctttaacaattatctcggtgggcggggagtggccatgtccaagttcattgaagatgacgagacctgctataactcaggattatatatgtgcactctctgcggcctgtgcactctgaactgccctgtggatatcccaacaaatgaaatcattgagaatatgagaaaactgtccgccgatgccgggttctacccgaaagctcacggcataatcaaggataacgtttctagtaaggacagcccctactga

SEQ ID NO: 9349 - DNA, 714 bp, synthetic construct
  source 1..714: mol_type = other DNA
atgctcctactgatctcccccatcaatcgagaggaagcccttgaaagcatcgaaggtggcgccgacattgtggatgtaaagaaccccaaagaggggagcctgggggctaattttccttgggtcattaaggagatcagggagctgactccggaagacaagctggtaagtgcgaccctcggtgacgtcccttacaaaccagggacagtgtccctggccgcaatgggcgcccacgtttctggagcagattatatcaaagtcggcctttatggaacaaagaaccatgacgaagcggtggaggtcatggaaaatgttgtcaaaaccgtcaaagagataagcgaggaaacgatcattgtggctgctggatacgcagacgcccaccgggtgggggcggtggagccaatggaaattccaaaaatcgccaaggatgccggctgcgacctcgctatgctcgatacagctgtaaaagacggacacacgttattcgattacctggacctgaaccagctaaaggagttcgtggatgaggcccacggatacggtctgttgactgcactcgcaggctcggttaagaaggaccagcttaagcccttgcatgatatcggctgcgatgtggtgggcattcgcggagccgcctgtgtgggcggggacagaaacaccgggaagatacaccataccgctgtggccgagctgaaggagctgtgcgactcattctga

SEQ ID NO: 9350 - DNA, 1485 bp, synthetic construct
  source 1..1485: mol_type = other DNA
atgtcattttccaagaaggtgcaagaggccagaatgagctacacatttgacgatttcctgctgactcccaatgccagctacgtggagcccaaggacatcgacacaagaatcgagctaggaaaaggcattcgactaaacatcccagttctgagtgcggctatggataccgtaaccgaagccgacctcgccattgctatggcccaggaggggggagtaggcgtcatccaccgaaacatcacccaggaacgccaggtcgaagaagtgaagaaagtgaaaaatgccgaggacctgacaattcgggacgttataaccatcactccggactccactattgcagatgtgcagactaagatgcaggacgagctgataagcgggctcccagtggtggagggggataagatcatcgggatcatctcgaaaagggatattaggcccgttctcaagtcagagcctgataaaactgtcaaggatatcatgacatcggatgtggtcacagtggaggagggagtgagcgccgaggaagcactgaacatcgcttatgagaacaaggtggaacgtctgcccgtggtccgggatggcaagttagttggaatcctgaccatcaaggacatcctcaatcaggcacagtaccctaatgccgctcgggacaagaacggcaactatctggtggcggcagcttgcggaccatttgacctggacagggcaatggcccttgaccaggccggtgccgacataatttctattgattgtgctcatgctcacaacatgaatgtcgttaaattcacagagaccatcaaggacaacattgatgccgagctgtgtgtcgggaacattgctacggcggaggccgctgaggacttgatatccatgggtgtcgatgcacttaaagtgggtattgggcccggttcaatgtgcaccacacggatcgtggcgggtgtgggggtcccgcagctgaccgccattagcgatgtggctgatgccgttgaagacaccggtgtacccgtgatcgccgatggggggatcagatacagcggcgatgtggcgaaagcaataggggctggcgcagacgccgtcatgctcggcaatttgctcgcagcctctcttgaagcccccggagatattgtggtcatgaatggaaagcagtacaagaagtaccgcggcatgggctccatgggcgcaatgaccagcgagtatgacggcggcgccgaccgctacttccaggggcaaaaaagtaagatgaaccacactaagtatgttccagagggaatcgaaggagctgtaccttataaaggcacggtggcagaaatactcttccaactggtaggaggcttaaaatccagtatgggatactgcggcgcgaaggacattgctgccatgcaggaaaaggccaacttcgtgaggatcaccagtagcggcattaaagaatcccaccctcatgacttgctgatcacgaacgagagccctaattacccaacgcttgactga

SEQ ID NO: 9351 - DNA, 270 bp, synthetic construct
  source 1..270: mol_type = other DNA
atggcccgcactaaaaaagtgggcatcacagggaggttcggggcacgctacggaagaaaggctaagagaagcgtcaagatcatcgaggaaaacatgaagaagaaccacgtctgcccgaaatgcgcgcgtccttatgtaaagcgacaggctgccggaatttggaaatgccggaagtgtggcgccgtgtttaccggtggcgcctacataccacagacccccatggccaagagcgcaacgcggaatatcagggacattaaagtggaggaatga

SEQ ID NO: 9352 - DNA, 132 bp, synthetic construct
  source 1..132: mol_type = other DNA
ctgtacaggtgcccaagctgcggcgccgaggtcgaccacaagagctacatggaaaacaagtgtcccaagtgcagatatcgcatcctcttcaaaaatgtgccggagaccacacggattatcaaagcacgatga

SEQ ID NO: 9353 - DNA, 486 bp, synthetic construct
  source 1..486: mol_type = other DNA
atgctgatttccaccagccgaaagccatcgcagaagacccggaagttttgcaagaacttagcccacgccacagggagcatttccgtgaacagaggcaagatgaacatgcgcgagctgctgatcaaagcattggaagttgaggagtacaacctggctatcgtcaacgagattaaggggaatcccagcaggatttcattttactccaacaaaggtaagttgctcctcacgctgataatcggagcaagcgaagaaaaagagaaaatgaacatcgccccgtctcagctgaaaatagtgtctgaagtgaaagagctcaatatcctgagtgaaatccttgacatggatctcgtcgataatgcggagagtaactatatccttatatccgaagatgaggacagcctagctaatattaacttcatcaataaattcggcgacatgaacaacttcaagattaatgtaaagaagatcctggaggtgtcaaatgactga

SEQ ID NO: 9354 - DNA, 267 bp, synthetic construct
  source 1..267: mol_type = other DNA
atgattgatgagagtcccctcgagagggtgcgcagcaacatagtgattgaatttgaagataatgcccaggctaagattatctacgattctattatcctggaattttcgaccgcgccagacttcagatcatccatgacgattgacctggacgagagtaacatcataatcaacatcgatgcagaggactccacctccttccgggccagcgtcaacagcgccatcaagtggatcaaactggcactagagatcaatgacctcacaaattga

SEQ ID NO: 9355 - DNA, 348 bp, synthetic construct
  source 1..348: mol_type = other DNA
atggagattcccgagaacattcaacagcagctcaatcagtttcagcaactccagcagcaggcccaggcgataagcatgcaggtacaaaacgtcgagatccagatccaggagacagagaaggctctggaggagctgaaaaaaaccgacgaaagcactgaggtcttcaagcaggccggaacactccttatcaaggtggaatacgccgatgcactgtccgacatggaggacaagctggaaacgctgggcttgcgcaaacagaccatgtcacggcaggaagaaagggtgatgaagaaactagaggaaatgcaggcatctatccaaagtgtgatgcaggggatgggccaatga

SEQ ID NO: 9356 - DNA, 285 bp, synthetic construct
  source 1..285: mol_type = other DNA
atgagcaaactgaaaacactctcacaggatgatctgtcctctattagtgataagttcggcgagattcttgagaaggaaataagcaaaagtatctcgatgaaggagctcgaggatctagacttagatatcatcctcaactacgaaaacgagcagctggacgtggacgtgaatgtgggggtcttgtttgacgaactgtccgagatcacccaagaccaggtaatgcagagcatcgacgaagcctatctgaagttcgactcctacattgatgacaacttccggatgtga

SEQ ID NO: 9357 - DNA, 690 bp, synthetic construct
  source 1..690: mol_type = other DNA
atgatcaaaaagatcccagtgatcgacctgaaacaacaccaggcagtaagcgggaagtcaggcatgagagacaagtatcagcccctgaaaacagtgttcgccaagagcgccaatcccgtggaaattgctcagggactgaagctgaacggggcaaccgaaatgtacatcgctgatttggacctgattgaaagcgtggggcacaacatcaacgatattaagatggtgaacacaatcctgcctgtcatcttcgatggcggcgttaagaattgcgaaggattcgaatttttcctcaattacgcgtataagatcataatcccgaccgagacgctagagagtatcgacgagatgcgcaagatatttgaaaaatacccaaaggagaggattgtcattagtgtggacgtgaagaacggtgagctactggccaaacatctgaaccttaatctgtctgagtttaaagagatcctgaaggagcttgatcccaatgatattatcatcctcgatatttccagcgtcggcactgaacggggctacaacaaaaagttgcttgaggagttcggagacctgaaagaaaaactgatcattgggggcgggttaaacaaggactccctcgttgagttggagtcactgggtataaagaaagtcttaataggaacctcgctccactccggcgaggtaaagctcctcgactga

SEQ ID NO: 9358 - DNA, 180 bp, synthetic construct
  source 1..180: mol_type = other DNA
atggccatagtgggcacaaccatattttcacacatccttcccgtgatttgtggcttcttcggtatcgtaatgattatttccggaagcctcgagaaaagcaacagcaagctggggctagggatcgtgctgtttatcatcgcatgcatcttcccatacctgattttgagtgtcctcgtctga

SEQ ID NO: 9359 - DNA, 849 bp, synthetic construct
  source 1..849: mol_type = other DNA
atgagaatcgacacacaccaccaccacaagaaggccggcgagaatctagcatttgtgtttttcatgaacttgacgttcaatataatcgttatagccgggggtctcgccaccaatagcatggcaatcctggctgattgcatccacgatatgtccgacacaatctccatcgctttcgcgtggtttctggagcatgttgcgcagaaggattcaaccgataagtactcttacggttaccagaggtttagcattctgggcgcggtaataatcagcattttcgtcatcattatggctctgttgatcctccaggaggctattccgcgcctcttcgcccccgaaagtgttgacgcaaatggaatgctactcatggcaattgtgggattggtattcaaatccatttcagtgtaccggctccatgggggcgaaaccttcaatgagaaggccatcctgctccaccagctgggggatgtcctcgaatggatcaccattttaatacttagcttagtgctgatgttctgggacggcgccccttacctggaccccttcgtcagtatcggaatcgccctgtggctgatatttaaccttggaatgaacttgtataaatcggtggaggtgcttcttcaaaagactccaaaccattttgatgtgaaagagttcaaagtcaacgtgctgaacatcgaaggcatcaaaagtttcgacgactttcatgtgtggagcctggatgggatcgactctgtgctgacactgaaggtgtctattgatgactggaacaatcaggaaaagatcaaaaacgacatttataacattgcctccaagtatcacatagtcgacattactatcgagtttgactga

SEQ ID NO: 9360 - DNA, 885 bp, synthetic construct
  source 1..885: mol_type = other DNA
atggtggaaaagggaacagatgtactgaaagaaggcttcgctaaaatgacaaagggcggagttataatggatgtcgtcaacgctgaacaggctagcattgcagaggacgccggtgccgtcgcagtgatggccctcgaaaaagtgccagctgatatccgggctgcggggggggtggctcgcatggccgaccccacaatcgtggaagaggtggtggacgcggtgtcgataccggttatggccaaagcgagaattggtcacatcgccgaagcacagatcctcgagaccctgggggtggacatgattgacgaaagtgaagtactcacccctgccgatgaggagtaccatattaacaagaaggaatttactatccctttcgtgtgcggggcacgtaatctgggcgaggcgctgaggaggatcgatgagggggcagccatgattcggaccaagggtgagcctggcaccggaaatatcgtagaggctgtccgccacatgcgcatggtgatgggtgagatccgaaccgttcagggaatggaggaagaagagatatggaagtatgccagaaaaatagaggcacccattgacctggttaagaaaactgcagagctaggaaagctgcccgtggtgaactttgcggctggcggaatcgccacgccagccgacgcctctcttatgatgcaattagggagcgacggcatctttgtcggctccggaatcttcaaaagcaacaatccagaggccttcgctaaggctatcgtcgaggcaactgccaactacgacaagcccgaggtgttggccgaggtctccaaggggcttggccaggccatgaagggcattgaaatgtcaacactgacggaggccgaccggatgcaggataggggcatctga

SEQ ID NO: 9361 - DNA, 813 bp, synthetic construct
  source 1..813: mol_type = other DNA
atgactctcgtgattatcggcccggtcacccaggacctggttgtcattggggagaagagcactcacaaaatcggtggagccacgtactttcagtcctttgtgttcgagaaattctacaacgactacttggctatcgtcaactgttctgacgagaagatagctaacgaatttccatcaaaggataaggttaaggtgattctgaaggagtttacccacttctttatcaacaattacccagatgtcaacaacaaagactaccgggagcaattgagtaatttcgtgcagatacccatcttcaagagcgatctggagaaaatcttacctaaaaagattgatgggttcgttattaacccccttaataggcatgatttcccaatcgagacaatcgactatctgaaaagcttcaatgtgcccattttcatatcaatccagggattcctacgaatccctgatgtggaggtaaatggcaaatatgccatcaaactcggtacctttgacaagctgtccgatatcctggaaggggtcagctcaatcttcctggatgaaggggaagcgaacatcaccggaattgactttgacgtagacgaagtggtgataaccgacggcagtaacggctcgcggataatcagcgacaatcacgaaacgaagatcaacgcggtgaaatgcgagaatatcgcagacgcaacagggtgcggcgatacttacatggccgcctatatttccaagagactcaacgactatagcattcgcagctccggcgagtttgccagcgacatttccagtaagaagcttacaaagttcggacattactga

SEQ ID NO: 9362 - DNA, 585 bp, synthetic construct
  source 1..585: mol_type = other DNA
atggtcaagatcggaatcctgaacctgcagggggctgtgagtgaacattacaacataacacgaaaggcagtgaaaaatatgggtgttgatgtggaggtagaaagcgtccgctacgccgaagacgtggaaacttgcgatgggcttatcatttccggcggggagagcacggtcataggcaagctcatcaaacagcggggcatcgataaagttattaaagagaacaatattgccgtgttcggaacttgcgcggggatggtactcctgtccaagaagaccgactttaaccaaccgttaatcggactgatggacattgcagtgaaacgcaatacatacggcagacagaaagactctttcgagtgtccaatagacatcttcggtaagaagtatttgggcgtcttcatccgggcccccgcccttgacagttataaccactcaaaggaagatattaaggtgctgtccgtgctggatgacgagatcattgccatccagcagggacctcatattgctatcagctttcaccccgagctaaccgaggacaccctcatccacgagcactttatcgatggcgtgataaacaggtcgtga

SEQ ID NO: 9363 - DNA, 7176 bp, synthetic construct
  source 1..7176: mol_type = other DNA
atgcttaataaatcctccaacataatcgagaaggagttcaagaatctgcgtaaggagctgctggatcttactctccgcaatcaactgctgaacttcaagagccgcgctaaaaccatcacgatagtaaaccagacccccgtaaacctgtttcagaccttagtgttacaagacaacaagatgtatttcgtcgcgaataaaaaggataagaaggaagacaagtccagcgtctgggatcacattccctttgatttctcaaagtttagcgaaggggacaagaagctggccactgagttgacccccaaagagcttcagaagcgactctattacattaataaccaggccaaaacaatgctacaggagcagggctataacatcttgtacctggccatcggttttctcgagtggactgacaaaagcaagccaaaacagagaaacaacgccccacttgtgctgatccccgtggcaatggagagaaagaaggttggtgaatcattcaaccttgaatggaccggagaagacatccagaccaacatctcactcaaagccaagctgctcgaggcagggatcgactttccggacttcgagttcaagcgctacggcgaggttatcgaccattacattgcaagcgtgcggcggtccgtgagtaaaatggacggatggaccgtgaacaataatgtcgccctcggtttctttagttttacaaaatttgtcatgtacaacgacctgaatcctgaggcgtgggaggacaacgtggacttgacgaaaaacgagctcatccaggctatttttaaccctgccaagaacgaccacgagtcatttcgcgaggaagacatagacagccgcctggagtatcagaacatgtatcaggttcttgacgccgattcctcccagattgctgctatccaggacgtgaaggccggacgtaacctggtggtggagggtccgcccggaaccggtaagtcacaaaccatcgtaaacttgatcgccgagttactggccgagggcaagtccgttctgtttgtctcagagaagatggcggccctagacgttgtaaaggacaggctgacaggggtggggctcggcaagtttgtgctggaactacactcccataaaacaagaaggaaaaaattccttaaggaattgcagaaagccactaatgtacagtctcaggagcccctgaacatcgaccagactatccggaagttggagacgttgcgtcggcagctggacgactacagccagattatacacaaaccagtgtttgccgttaatctctcagcctttcagctctatggcatgaaggagtcggccgatgaccatttcgccaccaaaaacgcactgatgcccctggtgcgattcgataacccggagtccatcacgctgaaggatctggacgacatgaagatcgctttagagaacctcgctgaactctaccaaaccatcagcaaggagaacccctggagtaagtgctctccaaaaagcctgcttcctgcggacttgagagagatcgagatgttaatcggagactccctgtacgctcttgacaatttcctagttgagcggggcagggtctacgatatttatgggattaagaagccagatacgttaaatgagtttcaaaactccctttccgcgtttgaaataatcaagtctcaaaatgccgagctgatagatggaaatatattgaaatccggcgcctggaataacaacaacgatgatgcattcaagctcatccaagagctccagcgctaccaaaagtacgctgagaccttaaccaagttcaatcaaagcattttccaagccgacattgacggactggtctacgagctgcgcaacatctccaacaagaagttccggttcttcaacaacaagcagcacattgagctagttgagcgatattactccataccggttagcggcagtgtggacgatatcataagagagctccaggaggccaaaaccataatcaacattagaaaaagtctggaagccaataatgccctcgggcaaaagtacttcggcggttactggcatcttaatgcaaatatcgacgatctgaatgctatcgcaaaatggatgcacgagtttactgccctggtacacgagggcacattcagcgagaatacgattgagctgatgagtaaagacctgttcgacatcaagcctgagagagacctttcagactacatcgacgcgggagaggaatttgtgcacgtcttatcacgcctgaaggacaaattgaatccccgaagcaaactcatattcaagcgagagacgggggatgtgccatttgagtcatggaaggaacagctgtataactggagagggcagctatccagcctccacctgtggtctcagtacttgaacaccaaaaactccctgaagtcttcaaatgctaaaatgtttgtagacagcatcgagaagcgcaacatcaagaaggaggatattgaagcacttgtggacggcaacttcgccgattcactcttgaatatattgttcgtggaaaaccaggagctcgcaacatttgtcggcgagctgcacgaaaacaggattcgggaatttaaagatctggacaagcagattttagtactgaaccggaagaggatttatcagaaactgaacagcaatattcccaagatttttggcggaactgaaaaccctcaggccaagatactcgccggtgagttcacacgcaaaagcggacacatgccagtgcggaagctcctcgagaagaccggcggaatgatcaagcagatcaaaccttgttttatgatgtctcccttgtcaattgcccagtaccttgaccccacgaatgaagagctgcagtttgatgttgttatttttgatgaggcaagccaggtgaagcctgaggatgcattaggcgcattcatgaggggaaagacagccgtggtcatgggcgacacccaacagctacctcccacctccttcttcgaccagatgagcgacgccgagagtgatgaggaagaggcgacttccctggacatggaaagcatcctgcatttgtgtaagttgtccttcccagtgaagatgcttaaatggcactaccggagtcgccacgagtcacttatcacagtttccaacagggaattttatgacaacgacctgcttgtgtaccccagccccagccacaatgatcctgagctgggtctgaagtttcactacaatccaaacaccgcgtaccacagagggtccagctctgccaaccccctggaggcgcaggatgtggtagaagagatcttcaaccattttgagaagtacggtgatacaaagagtctgggcgtcggaacattctctgtggctcagaagaatgcaatcctggaggctctggaagtcaaacgtaaagaaaggcctgaatttgagcctctcttctcggataataaggatgagcgcttctttgtgaaaaacctggagacaatccaaggggacgaaagggacgtcatactcatcagtgtggggtacggttacgatcaggaccgcaaaatgagcctgaacttcgggcctctgaaccagaacggtggggaacgcaggctgaacgtcctgatcacacgggcaagagagaagtgcgtggtcttttcaaacttcaaggcttatgacatgaagctgacagcgaacccaccatatggggtcaagtccctaaaggagtttctggaatatgctgagaacctcaccttgggcaccgacaatcaggactcttatacacgggaacccttcgaagatgctatagccagtttcctggaggagaacggttatacagtggatcgccagattggctgcgccggctttagggtagatcttgccatcgtggacgacgagaatccggggaagtacatcctgggcattaccacggatggcaaaatgtattcttccagtaaggtcgcacgggaccgggaccgcctacgtgagcaggtcctgagcggccttggctggaaattgtaccatctgtggtcaacggactggtaccggaacagggatctgggacggaagaaactcttggatttcgtgcagaagtcaatccgccagacccgcgaagaagagaagcgtaaatcagaagaagagaagaaactggctgaaaagagaagactggaggctgaaaagaaggctgaagagttgcggatcgcacgagagaaggaagaggccgagagaaaggccaaggaagagcaggagacgaataatgaaataaacatcggcgacatcgggcccgcagacttcgtggaagtggagaaagtggacgacggggatttcttggaaaagccgatcgatgttagtagcatcaatcctagcgaatttttcgaagaggaaccctccaggaatagtataaacgaggataaaacaacaaaagagactccttccgagtttgtcagcattgagcatccggataaggatgtggatttcaagaataactcttccgaagtggccaaccagtactcttctgacgacgagagcttcgaggtgaggaataacgacttcaaagacatcgagagcgagcatcctaagagcgacgaagacgatgacgaagtcaagattgagtcgctggatgatctcaacgccgatgagtataatgaggagaacgaaagctatgaagagattcataaagaaaacactagcaaagtcatggaaaatgacgaagactactctgatgagtcggatagtatttccaaaaagctgtctgataaattcaagagcatcctgaaatctgatgggcaggagcaggaagagaacactcattccttcttttcatccagcaaatttgcaaaggatctcgggaaaaattccgacctcaatgatgagaaatccttcgaagtcaacgacgaatttgattcaaaaatcaatgagtatactgacaacgaaattcttgaagaaaaccccgtcgacctggatagcaaagaggacacctcggtaaatgaggaggacacttcagacttcaaaacaccaaaattcagtaacaaaatcgaccttgaatctgacgacttcattgtggttgatcacgaagacaacgaggtgtcgaagagctcgtccgagaatatcgaaaatgacgacttcatcgttgtggatcacgacaatgacgaagtttcgaagtcctcttctgagaatattgaaaatgatgatttcatcgtggtggattatgaagataacgaaattgatgaaaaccagaaatactcgtctgtgggctctgatctcgacgatgaggtgataatggactacaatgaagtgcccaagaataaatcttacagtgacaaaaccgaggatatctccaatgagactacggatgacaaggtggacctcgatcctgaagaggactacatttatgtggaccacagtcatgacgacgagcgggtcctggatgaggatgatgtggagaagttcagtttcaaaagcgacgagatttccgaagaaccggaatttgaagtggacaaaaaaccacaaggccagaagcagtatcatcgaaaagggagtaccttcgtcaaatcaatcatcagtgatgttgtcatgggcgagtcccatctagagcaagaagaagtggaaaccgtgaagggggaaatcattgaggaggacgaggattacgactacaaggacgctccaagtgatgattccgttgtggaagcggaaattgtctacgacgatgaggagctgaacattctcaatgacaacctgcctgacgatgccctggaaaagcctactccgaagcacgtgtatgacgacgaggagctgaatattttcaatgacaatcttcctgacgatactcttgagaagcccgcccctaagagaaaccatgacattgaaaacgacgatctggacaagcccactccaaagatggattatacggaaggcgacgaactcaatatattcaccgacgatctcccagatctgaacaaggaggaaatcaacagaaacgccaccgacattgtcaccaaggcaatggaagagttcctggaggacgtctttgagaacgatgatgacatcgagaaaatcgaattggaaaacgagatcaaggaggacattccccaagataatgagatggttattgaggacaagggaataaccgagcacaatatagaggaaaccagcaacgatatcggtgacggcgtgacttactaccagggctctaatgatgtaagaagtaaacttcgcaaaaacaacttctactatgaggaagagaaaccaaaatctgtgcgagagtccatcaaaggaattaaaaaggacatggagtacatcaacaaatcgctaaaggaaatcgagaaccctaccaagattgactatgtctctgtggtggaccgaactgaagaatacgaccccatggattacctgaatatccccagtgatgacgactcggacaagatcatagagaaggaggaagagctcacattcgccgaaaaggaagagctcaggatcgagaaggagatgatgatggatgatctgaagaaagaaatcaaggaagagaaagatgtcatcgtgcccgtgcacgaacaggataggcgagaggagctcaaggatcaggcactggagaatatcatcctcagcgccaacgaagattacaaggaaatagagcgggaacgccggagaaaagacaatcagtttaagagctttgacgataacaaactcccgggaaagcgaaaaatggaggacgagatcgtggattatgtccacatcgaggatattggactccactccagcgacgagttatacagacagagcatagacaaaattgccaagtcgatcaacgacatcgtagacatcgagggtccaattcacgttagtgaggtgacaaagagggtgaaggagagctgcaacattaaaagggcgggagctaacctgaaaaaacgtgttaatgaaggcatcagtgaggctgagaaattgggatatattatccggattggaaactttctgtatgattctagcaacaacaacatcgtcatcaggaagagaaacaagccaaacattgagctgatctcagacgaagaaatagctaagagtatcgagaccgtcctactgcacaagcaaaatgtgacaaccaaacagattgcaaaggaagctagccggaacttcgggttcaagtccactagcaaaaagacagctaccaggattaatagcatcctcgatttaatgattgctaataataaggtgaagctggataaagacattgtggagctgaagtga

SEQ ID NO: 9364 - DNA, 1752 bp, synthetic construct
  source 1..1752: mol_type = other DNA
atgtccaccaaagttaagagccccgataacctcccaaacaaacctggcgtctacatcatgcgggacaatacagacacgatcatttatataggcaaggcaaagaacctgatcaagcgcgtcaagtcttatttccgcgagaaacttgataggccaaagacccaagtgctgatgtcccacttcgatagtctggagtatatcgtcaccaatagcgagaaggaggctctgatcctggaggccaatctgattaagaagcatcgcccacgctacaatgtccagctaaaagacgacaaaagatatccttacgttaagattactgacgaggaatttccacggctggtcatcacacgaaacgtaacaaaaaacggggtgtacttcggcccgttcacggacgtggggtccgtgaagcagaccgtgaaattcttaaaaagcctcttcaaaatacgaacctgccggaacatgaacgggccttgcctcaacagtcagatagatctgtgctacgccccctgtgacggaagaatctcgaaaaaggagtatagcgaaattatcaataagattgacctgttcttccagggaaagtactccactattgtgaagaacctcaaaaaagagatggcggacgccgctgggaaggaagagttcgaaaaggcagccgtgatcagggaccaaattagctctattgaggagataatggaaaagcagtttgtggacttggttgacgatgacctggatcaggatgtcatcgccatggctatggggaaaaatgaggtggtcgtaattataatgccgatcagaaacggaaaaatcgtgggccgtgacgactttctgatgagtggctctaagtacgattcaccctcagaagtgatgttttccttcatacagcagtactacggctacaaccgccatatcccaaagcaaatcctgctcgatgaggacatcaatgataaaaaactcctggaggattggttgtccgacttgaggggcaataaagttcgaatcaaaatcccccaaaagggtgtgaagctgaggctggtcaaaatggctaagaagaatgcggagatcattaaacaccagaagaaaaagatggaaaattccttaatcgagcttaaaaagtaccttaagcttgagaggataccccatgtaatcgagggatacgatattagtaatatctccgggaagtttgcagttggttcgaaggtgtcatttaaggatgcaaagcccaacaagaagatgtacaaacactttaagatggaaactcccggcccgaacgatttcgctatgatggaagaactgttgacccggagactcaagctgattgacagcgaccccgaacccgacctgattgtgatcgacgggggcaaaggacagctaggtatggcctgtggtgtattggagaaattaaatctgacccacatacctatcatcgggctggcaaaggaatttgaagagatctatattccaaactcaaagcggcctatcattatccctaagaacaacagggctctacacctgctgcagcaggtgcgggacgaatctcaccggttcgcgatcacataccatagaaaactccgcagcaacgatattcaggccagcagcctcgacgatatcgtgggaattggcaagaagcgtaagatcaatctccttagagaatttggaagtgtcgataacattaaggaggcctctattgaggagctcgccaaaatagacggcatgaaccttaaaacggccaagaacgtgtataattattatcactga

SEQ ID NO: 9365 - DNA, 540 bp, synthetic construct
  source 1..540: mol_type = other DNA
atggtgaaatgcccgcgatgtggctacgagaatagctccacagcagtttattgcgataactgtgcctaccttctgacagatagcgagggaaacaggattgataactccccccgcgtgtcctcatggaacataagtttcgcaaaaaagatcgtgatcgtcctgggaatcattgttatcgccatgttactattctcattcatctataataacacccagccttcccatgaggactctctgaacttgataacggacaatggcactgtgcacaagaccgcttcgtacccctataaggcggtcattgaatatgagggcagttggggggccaagatgggggacccaaattacctcgtcagcgaggacggttacggcactaagagctttgtcctcgattgcgccgcgtgggacagagtaagcatcagtgcccagaaatatgactacggtgaaggggagctgcacgtgaaactcctgcggaatggcgaagtggtcgctgaaaacagcaccacaaatgtgaccggagctgtggtagtgaactacaactga

SEQ ID NO: 9366 - DNA, 306 bp, synthetic construct
  source 1..306: mol_type = other DNA
gtcatcaaggtggcaagcgaagacaagattcaggaataccagaacatcctggaggaggagaagcttatgattgagacgcacttcgtgaacatcgaacggatcttaaaggagcccgagaaaatcgagaaagacaaaatattcgccctaatgaacagctacaataccctcaatatccagtatgagcagctgtgctccgatctgattgaatttatcaagatattcaagggcagtgaccaggaaattaggctctacaagacagatgaattgatcaacctgctggagtcaaaaattaatcaaatggactga

SEQ ID NO: 9367 - DNA, 1704 bp, synthetic construct
  source 1..1704: mol_type = other DNA
atgataaaggtggagaatgtcagtaaggattacgaactggccgacggaacgaagatcaccgctctcaagaacgtgagctttgaagtgaaagagggggagattctggggatcatgggcaagtccgggtcaggcaagacaactctgctcagagctctgaggggggtggagcatatagacaatggaattattgaagtcggcaaagcaaaggtgacgagcgaatcatctcagttttactacaacaacctgaagaaagagaccgccatacacctgcagcgaagctttggtatctggcccgacaccgttcgggagaatgtgctgagaaagctttatgcccggcgctatttcgacgagggggatactaattttgaaatcgccgagagcgagtttggaaaggaagctgacgagctcctcgagctagtgtccctgaccgataagcaagaccattacgccagcgtacttagtggcggggagaagcaacggctgatcatggcacgccaactggccaagcaacccaaagcgctgcttctcgacgaacccgccacgatggcgtgcccaaagacaaaacaggagatcttggacgcggtcaaaaagatcaacaaggaactgaacatcaccgtggtggtcgtctctcatctgccggatgtgcagaaatatctggccgacagggttatccttctcgaaaacggcgaaatcgccgaggagggttcggctaacgaaatctgcgataaattcatggatgaaatggatgatatcgtggacatcgacaacatcgcaactgatgaggatgtgattcaggtcaatgatatctacaagagattcttcttgctgaccggcggggaggtgctgcagatcgaggacgtgaactttaccgtgcagaaagaaaacattctaagtatcattggtccaagcggtgccggcaagaccgtgctgttacgcatgctcgggggattggaggaccccgatgagggagaggtcctctacaacgtggacgacgagtggtccgacattgacattcccggcatgggccggatgaagataaggtctaaacttggcttcatgcaccaggaatttgccctgaatcactacagcacagttctgaaccagctggctaccaggttgggctataaaaatcagaatattgttaaggaagctcagcagagagcgaggaagattggcctcagtgaggaattactcgattcgttctacctgctcacggacctgcctgagatagaggcacgtgaccgattgaagaaagtaggacttgattcagacatcctagatgacctcttcccacgatttcctgaaactgctacaaaagaagccgttgcagacatattcgagagccttgatttggatatgagtatcttacaccgcaaaagctatgagctgtccggcggtcagaaggtgcgggtcatgctggcactgattttagtttcccggcctaagttcctacttctcgacgagccattcggagatttggacccggtgaccctgcgcgacgtcacaaacgccctgaaaaaaatatcaaaagattacggaattacaatcgtaatgatttcccacaatactgactttatcaaggaactgtccaacagagccgtattcatggacgacggaaaaatcatcgacgatagcgaggatattgacaagattgtcgacaatttcatcgatttctgtcacgctgactatctcaagggggagtga

SEQ ID NO: 9368 - DNA, 426 bp, synthetic construct
  source 1..426: mol_type = other DNA
atgttcgacatcatcgcagtcccggtagacgggagcgactacggctacaaggcagcggacgtcgctatagaaatcgcccaaaagttcaactcgaaaattgccgctgtgcatgtgctggaggagttttcttttagcagctatgattcagaggaagatgaggggaactccattctgagtaaaatcaccaagaaagcgaacgatgtcggagttgaggtgaccgaacacttgctaacggccgatcccctgcgagacatgaagttcatagtggatcagacacgcgccgacctggtggtaattcacgcccacggcagtaacaataaccggttcgtcagctttgaggaaaataatgtgtccgacactcagatcggttcagtttccgagagactcctcaggacatctgaagtgccagtgcttctgatccggtga

SEQ ID NO: 9369 - DNA, 168 bp, synthetic construct
  source 1..168: mol_type = other DNA
atgatcgtgaaggattggtgcagcttttgcggcgagtgcgcgggggtgtgcccacggaacctcattcaggtcagggaatacagcctggtattcaatgatgacgactgtaaagattgtaacacctgcatcaaggcatgtcccatagacgccctggaaaaagaggactga

SEQ ID NO: 9370 - DNA, 1179 bp, synthetic construct
  source 1..1179: mol_type = other DNA
atgatcgaaactgacgtgatcgtagttgggagcggccccgcaggatcaagtgcggccaaacacgccgcgcttgggggagcaaaagtgattctgatggacaaaaagtcggagatagggtcaccaaagagatgcgccgagggggtgagcatacagggccttgagaaactgggtatagaaccttctcctcggtgggtgacccaggaaatccaaggtgtacgcatccagactcccgatggaacagacacatggttgacaaaagacgaggtgaagctcccggaggccgggtacatcctggagaggaaggtctttgataagcacatggccatggatgccgcccgggcaggggctgaaatccgaatcaagacgctggtgaccggaattgagaagattgaaaacggctatttggtctttaccgagtccatgggcaaggaggaagtcttcaagtgtaaggtattgattgctgccgacggccctgaagggcacattgcacgctgggccgggttaaggccggctgcaaaagctaaagaaatggagtccggagtgcagtacgaaatgtgcaacgttgagtttgagaaaccaggagtcattgaattttacctcggtagctgcgcacccggcggttatgtctggatcttccccaagggggacgacatcgctaatgtgggcctggcaattctgcctcacaaggctgagaagaccgccattgagtacctcgatgacttcgtggcaaagtccccctacctgaaaaacgcccaagccgtggagataaatgtgggcggcgatcccgtgggtggcatgaccaaaaaactctacgacgacaatatcctcgtctgcggagatgctgccggacaggtcaacccactgaccgggggaggaatcatcagtggcatgaccggtggcatgtgtgctggccaggttgcggcgcaggccattaaagaggattgtagcaagaagttcctcaaacaatatgatgagatggcgcatgctgaactagaccacgaaatcaagagatataaaaaggtgcaggagtacctgctcacgctgagcgacgaggagttaaacgagatcgcccatgccttcgagggcgagactttcgaaaagatctctacaacggaaatagttaagaaactaatcaagctgtccccaaaggccctgcttaagctgggcaagttcatttga

SEQ ID NO: 9371 - DNA, 969 bp, synthetic construct
  source 1..969: mol_type = other DNA
atgattctgatcactggtggggcaggctatatcgggtcgcatacaaacaaggccctccacaatgcagggtacgacacagtcgtggttgacaacttatgcaaaggctatgaaaactttgttaaatggggaaatttcgaaaactacgactttggaagtaaaactctcagggaggtgttcgaaaaatacgatatcgacggggtgattcacttcgctgctttttcaagcgtagcggagtcagtggagatgccccagaagtatttcaagaacaattataagaacaccctgaacctccttcagataatgagggagtttggggtgaacaagttcatcttgtcttccaccgccgccgtctacggaaaccccgacaaagtgcctatcactgaagatcaggacctcaagccaataaacccttacggccactccaagtttatcacagagaaggccctggagagagaagccgagaagaatgacttcaatttcgtgtctctgagatactttaacgcagccggcgcggacttcgattgcgaagtgggcgagtttcatgacccggaaacgcacctcatcccactggtgctggatgcggccatcggaaaacgcgagagtatcagcattttcggggatgattataacacggccgacggaacctgcgtgcgggactatatccatgtaaatgacctagccgatgctcacatccgagcttacgagtacctgtgtgacaaaaacgaatccaatattttcaatcttggaaacggtcaaggctacagcgttcgggaagtcattgacatgtgtaagaaggtcaccggccgggacttcgaggtgaaaattgatgagcgccgtgaaggcgatcccgatatactgatagccgatagcgcaaagatcaaggagaagttgggctggaccccaaaatacaatctggagcagattgtcgagagcgcttggaagtggcacaagaaaatcaatgtcatttga

SEQ ID NO: 9372 - DNA, 894 bp, synthetic construct
  source 1..894: mol_type = other DNA
atggagaacgaaagtcatgaatcaaagatcgatgtgcggataatagtctccggtcttgacattgcacagctagtctccaaggcggtgaacaatattcacctggagaacgattataatatcgtggtgagcagcataattccgaccgtagaactgagcatagtcaaaaaggtggccagcggggccgacattctgctgattggcggctatggtagtgatgaaacctataacattctcttcaatgagctgaagacagatttcaaccacattggactttttgactacaacaatatcatcgttgaagacgaaagcattgactttaagctcgctgagaaggagattcttaatagcatcatcaagtcaacattgtcttactccctgaatctgatcaacgttcatacactggagaacaagctaatgaaagtgacccacaactacaacaatttactggacgattacaatcaggtgctcaaagaaaacgaagtactttctcaggagaataacgagctcatggaggatatcaaagagctgaaatcggactttaacgcatttaaactcaggtatgaggatatctactcgaaggagattctggaaatcttcagtctcgatgacctgtggcaagaaaccttccgacaggatttattggatggggacagaatcgtgatcgccactgacaagttcaagcccgacgatatcctggtgggccagggcttcattgcttcacaaagcaaagaaaaagccatcgagtggctcaaaatcatccgcactgcgctgatattcgtcgacgacaacgccggggacttgaagaaggagtccggaatcggagaggaggagaacatcccagaggacaaggacgattacgacatgtccaatacgtttgaaaacttctgggactga

SEQ ID NO: 9373 - DNA, 1422 bp, synthetic construct
  source 1..1422: mol_type = other DNA
atgcagggcgagatagaggataagtgtggtattgtcggaatccattgcccagacgaatcaaagaacgtggcctcttttgtgtattattgcctctatgctctgcagcaccggggccaggagtcagcaggcattgccaccttcaaccccgagaaagggctgaattactactgcggtatggggctaataaccgatgttttcaaagactacgagatccagaatctcaagggaaacatggcgatcgggcacgtgcgctactccacaaccggccagtcccggctggaaaactcacagccattcgtcaccgactttgatgatggattcattgctatggctcacaatggagacatcgtaaactccgctgagctgagaaacgaattggtcaaggaaggctacgagtttaagagtgacacggactccgaagtgatctgctacatgctgaagcgagaacactatgacaataacaaaaatataattgacagcatagaatctgtgagcaaaaagcttgtgggcagctatgccctgacgatactcgtaaatggtgacctgtatggcgtccgtgaccctatgggaatcaaaccactggcagtggcaaagagaggcgacgagtttatcctcgcaagcgaaactgttgcattcgatgtcatcaacgctgaatatatccgagatatcgaaccaggcgaagtggtgttctttgagaatgatgagatcaacagccatatgttggagattgccggggactgcaagatcagccattgcatgttcgaatacgtgtacttcgccaggcccgacagtacaattgatgggattaatgtgtatgagacgcggatgaacatcgggcgccagctccacgagctgtaccccatcgacgctgacgtggtaattccggtgcctgacagctctatccctgcggctatcggctactcacgcgcctccggcataccatatggagaggggcttatcaagaacaggtacgtcggaaggacattcatcatgcccactcaggaggagcgcgagctggcggttaggcttaagctgaaccctatcaaagatgcgatcaaaggcaaaagaattattctaattgacgacagtattgtgcggggaactacatccaaaaagttgctggatctggtgaaagaagccgaaccggccgagattcactttttagtcggttgtccgcctgttatctcgccctgtttctacggcgtcgccatggcaaccaagaaggaacttatcgccgccaattacagtatagaagagatccaagaccaactggagattgatacattggggtacatcaccatcgaatcgttaattgaggccatcggaatgagcaaggatgatctctgtctcgggtgcattaacgaggagtatcccactgagatacccgagggtctggaggccgagacctactacaagccctga

SEQ ID NO: 9374 - DNA, 1248 bp, synthetic construct
  source 1..1248: mol_type = other DNA
atggtggaactgctggcccccgcgggaaacttcatcagccttcgggctgtgctcgagaacggggccgatgcagtctacttcggccttgatgactataatatgagagccaatgctaagaacttctccctgaacgacctgaaagaggtgtcaaagatagctaatgagtacggcgctaaaacttacctgtgtacaaacactatcctgaatgaacgcttggcctgttccctggacaataaactcggggatatcgcctctagcgagatagacgggctcattctatcagacatagggctcattgaaaacaccgtctccaatggcctcgaagcgcacatcagcgtacagcagaacgtgaccaacagctacatgctgaagacacttaagaagctcggtgctaagagagccattctcagccgggagctttctttaagggagatcatggatttggccaagaaaagcccaatcgaaacggaaatttttgtgcacggggctatctgcatggcaatctccggacgatgttttctgagctacggcctgtacggtaggagtgccaattgcggggactgcctgcagccttgccgaaaaaactggacactgacttatgaggagggggacgataacgtgataaacttctctgatgcggaggaggagtcatttattattacctcctccgatgacggaagttaccgcactaactttttctcccctaaagacctgtgcatgatcgaatacatcccggaattgatgaagagcggtgtggcctcatttaaactagaaggaagggcacgtagtcccgattatggtgcaatggtgaccggagtgtacaggcaagctatcgatagttatatcgccgacccactcaactacaaggtgaaggaggagtggatggaagagctggaaaatgtgttcaatcggggattcgacacgaatttctacttcaataccccctttgagatcagtgaggacaatcagagcaagtatatcaagaaggacattggccaagttgtaaactattataacaaagtaaaagcagccgagctgagaatttgggacgatttgaagacaggcgataagatcatcatccagggcaagacgaccggctcgattacccataccatcgactctatgcagatagacggcaagagcgtctcgagcgtgaaaaaaggctccaacgtcgcaattgccattccaacaaaagtccgcgaaaacgacttcgtttacaagttagttgagcggaacgtcgacgattga

SEQ ID NO: 9375 - DNA, 795 bp, synthetic construct
  source 1..795: mol_type = other DNA
atgattaagaagatcgctatctatggaaaaggtggaatcggaaagagtaccactgtagccaacctctcggccgtctgggggagcgataacctgaagtgtattgtgatcgggtgtgaccccaaggcagacacaacacggaccctgcatggctcaagaatcccaacggttgtgcagaccctgaaggataatcggaagccagagagggaggatctagtgttccgcgggttcaaggatattctctgcgtcgaaagcggaggtcccgagcctggtgtgggatgtgccggccgtggcgtgatcgtggccatgaagcgccttgaaaacttaggggttttcgacgaagaattggatgttgtcgtctatgacgtattgggcgacgtggtctgcggcgggtttagtgtgccacttcgcgaaaaatatgctgatgaggtgctgatcgtgacctctggcgagtacatggccctgtacgcggccaacaacattgtgaaaggggttaagaaactgaagggaaatctctccggcatagtctgcaactgccgaaacgtagagaatgaagagcagattgtcaatgactttgcccagaggataggcacacacgtgattggcacgatccacagaagcaacctcatccaggacgctgagctggacgcaaaaaccgtggtggagaaataccctgagtcctctgaggcacaagagtaccgggacctggcgtcaagtataatgagcaatgagaaaatctccactccggagcccatggacgatgaagaatttgaatccttcttcaagagctacctgtga

SEQ ID NO: 9376 - DNA, 480 bp, synthetic construct
  source 1..480: mol_type = other DNA
atgtactacagcactaactacaattccccgatcggcgagatgctctttgtcagcgacggtgaggccgtttgcggaatctggttttgcaatcagaagtacttcaagaacaacatcgacaagacggtgagaaaggacgatctagtaatcttcattaaacttaaaaagtggttcgacgactatttcaacgggttaaatcccaaaatcgattttaaactgaagcctcaaggcagtgagttccgccagaaggtctggaaaattctgtgtgagatcccatatggtgaaaccctgacctatggggatattgcatcaatgatatcccccaacatgagcgcccaggcggtgggcggggctgtgggacataatccaattacaattctgataccctgccaccgggtgctgggagcaaacgggaagctcacaggatacgccggcggcttggataggaaaatcaaactgctgaagctcgaaaagatcctttga

SEQ ID NO: 9377 - DNA, 540 bp, synthetic construct
  source 1..540: mol_type = other DNA
atgaatttaccgctgaatattgttatagggaacgccatatccctcatcgccggcattttcatcctgttcagcatgtgggtgaacgatgagaaggaagtctacaaacaccagttttccaacgccttcattctcaccatcagcagcgcgttctttttctcctggactggcgtggtgacgatggcaatcgccgcgagccgcaatgcaatggtgtataaggaccggcttacctttaactggactatattcttcatcatcgttagcctcacagtcggctgtcttgtaaatacaatgggaatcgtgggactgttgcccattatcgccctggtgcagatcaccctgtccaactactacctgaaaagcatcaaagccattaagatcagtttcattgtcaattcgatcatctatataatttacttctttgcaatatgggactttagtagcgtagctattgagagtgtgaccgtcgctgtggggatgatctcactgttgaggctcatcaacctaaacaagccaattttttgcaacaacgaagtgtcatga

SEQ ID NO: 9378 - DNA, 804 bp, synthetic construct
  source 1..804: mol_type = other DNA
atgcaaagcaacatctccgaagagctggagatgaaattcccacccatcgtgctgatcaagagcaacaccaaaccaaaggatgtgaaggaacctaagccgggcaaagggggatgcgtcatgtccttcgtggcccagacaatcgctaaaaggatcacgacctgttttggtcgggagcacatcagctgcggcggaatctctgtcgggtttgggtggggcgacggattcagggacgaaaatgccatggattttcaagcttcatttctgtcctgcggtgtggatagcgcgccaaacaaggagaagtatctcgaaaagttgagccatatgtctaagccaaccagagaaatgttcgagcacggcgagagaatttactcggactttaaaactgcaaaagagaatataaagtcccgacctgtgtacgactcggaggattacgtgatttttaagggcctcgagaacttgaactatggggagatccctgattctgtaatattcacagtgaatcccatcgagctaactgccttaattcagataaatacctcattccgccttaaagacacgtatattctgacaccgcaggcatcagggtgccaggccattggctgtttcaccttccgggaagacgagtccgacgaccccaaacctgttctgagtcccattgacttcgccggccgcagtaagatgaagcacttcatccccaacaactacctgattgtcagcatgccctggaaacttttcctgaagctcgaagaggtcagcgaaaagagtgttctccagactggaatgtggaaaaagtttatcgattga

SEQ ID NO: 9379 - DNA, 426 bp, synthetic construct
  source 1..426: mol_type = other DNA
atgtttaactccgacgagaacaacacaatcaaagttgtggtcgattacgtaaaggaatgctctgaatacgatctgagcgaagagctgtacaataaaatcgagctcatgcccaaaattgaggagaagatcggcatcacctacgaggccctgtcaataagggtgctatatttggagttcctgaagaactattccatttatgtctacggtgacatcgtggaaaataataaggagacactgaacaagctcgggccgtatcggaagatcgagactaatgtgaacctctacgacgaaaatggccgcatcatcgaaaccgcacagcacgagtttgcggtgaaggatttccttggaatgcatacctttaaggtcagtttcaacaacattaaaagcattgacaagattgacaaaataagaatattcccaacgtga

SEQ ID NO: 9380 - DNA, 543 bp, synthetic construct
  source 1..543: mol_type = other DNA
atgggtgacatcatgataaccttcgaggtcgatagccagcttaatgagaactgtggcattgtgcttcgcaacctcagcttcaactccgagataagtaatagcgaggagtacaagtgcaacgtgtatggcgaatttagtctaaagaaccatgaagactatgataatctcgaactgaagagcatcttctacgatgacgagagcaatattatcaatatcgaacgagactacattaatttagatgggtttctggggagcggaacgtttgacttctgggtctacctcaacaaggacaaactgataaaaacacacaaaattaagatcattccctcaaaattgcgcaggaagatcctcaagagaagtgtatgcaacaacaaaatctccatcgagtcggaaaacctgtccattaacatcaatctgaagaaggactactccgaggtggaaaagcgggaccggaaaaaggaactgatcaaggacatcgatgagaccatcgatgccctgtcaaaaagcgacgagatcattaatttgataaactactatgattga

SEQ ID NO: 9381 - DNA, 183 bp, synthetic construct
  source 1..183: mol_type = other DNA
atggagaagtactacgagtccataatgaaaaatctggaaatctatcggaacattgcaaacttcgtgagcaactttaatatctacggaacgagcgagggcaagtatctgattatcctgtggcagaaaacagtggggctcaagaccgaaaagagtcacaacaaactagccgtccccaagctctga

SEQ ID NO: 9382 - DNA, 858 bp, synthetic construct
  source 1..858: mol_type = other DNA
atgcggaagatcagcatactcgtgctgctgctgatcctcgttggaatgctcattcccaccggattcgccacagactccaacgtcgtgataacctatggggagactacctattcgaatagcaattacaaatcctttgttgacaacttcttcgttaaccaggccaacgtggacatcaacaatgtaggtgttaagaccatcaccgctgaccaggtgaatcaagtgagcagcggaatcacgggcaagtcatataattcaaatcaaatactgtctagcgcacttgttgacctgaatgataatggaaatctgaaggtgagtgtggacaaatccaaaatcaccacaattaccggcgacatgtacatctcagctttgaagagcgcgggcattacaagtgggcacgtgtacgtgacaagtccggtgcaggccacgggtgaaagcgcgcttgcaggaatcatgaatagctatgaggaagtcacggacgtgcagattccagactcggtcaaggaggccgcaaacgatgagatctacacccaggctgaaatcgtgaacaatagcggtgtcaatgccgatgatctctccaatctggtcaatcaggtgaaggatgaggtcagcggcggcaacgtgactaaccatgatgaaattgtaaacattatcaacagtcacgtggagaacaacaacatcaacataacaaataacgacatcgaaaacttagccgattcaatcgagcaagtccagaacgtgcagggggacgtcaactactacaaaactcaggtaaacgagtttctagacgacaactccacaggcgggttcagcttggatggcctgttcgactggattaaatcctttactgatgggatttga

SEQ ID NO: 9383 - DNA, 609 bp, synthetic construct
  source 1..609: mol_type = other DNA
atggtggtaaagcattgcccaaaatgtggaaatgacattgatgacgaggacatcgagttttgcaccgaatgcggtcacaagctgagcaacaaaattatcaaaaacagtagcaaaggtttcttcgacaatttaaacgaaaagacaagcttctcagtgatcatattctcgttcattatttttggcgtcttcctgttcatcgggagcgtggtatggtccagcttcatggccaacgggtcaattgatctggtgacgtatctgctgctcgttatcgtcttttcagtgttcttcgggggcatctttgtcgggtacttcggatgtatggatgagtcctacatcattccgaacttctccatatatttgggaagcatcttttccgtggtgctatgcggcatcggcctgatatttacattcctcatgggagtcatcagcatcctcagtagcatcgctccctttggcagttcaaacagcatatcccagactagcacctccagctacgcccagtcggttgacttgagtttcatctttaagctggtgctctttattctgctgattcctgtggcatcttacattggggtctatcttggctactttcttaagaagaatatctga

SEQ ID NO: 9384 - DNA, 456 bp, synthetic construct
  source 1..456: mol_type = other DNA
atgaaagtgaggaagattctggtcatgctgctaattctcgtgactctcgggttcactctgaatgcagtcgttgcgagcagcccagaccctatcaagctcggagacatcaaaaatgatgacttggtaatcacagaggtcgggcagaacaaactgaacttcgaatactccgtggaagtggacatctcggacttgtccagtgaggataagaagctttttgagaaggccctgaataataacaacacctcatttatccttaacctgacctcttcaaccccgacgaagattgccatcacgatgcacagtctgcccaaaaaggctgagatcataggcaatacactgtatattaaaaataacaacatgtttcgcctgattaacggtatccagctcgataacttaaagataagcgcagtgagcttcaacacaacctccggccaactcttcatagcccggaagtga

SEQ ID NO: 9385 - DNA, 957 bp, synthetic construct
  source 1..957: mol_type = other DNA
atgaatttgggaaagctggtgggaaatactccaatgataaaaattaactatgaatacggcggaaagtcagggagcatatactctaagctcgagttttacaattactccggcagtatcaaagatcgaatcgcactgtatattattgaaacagaaaggaagaacggcaacttgaaggaggggcaagccgtcgtggaagtgacaagcggcaacacggggatcgcatttagcgccatcggtgcgctcttcggtcacgaagttcacattttcatgcccgactgggtgagcctggagagacgcaagctgatccggatgtatggcgcccatgtgcatctcgtctccaaagaggaaggtggattcaagagggctcttgagcttgcggaggaatttgccataaagcacgacgcctacatgccactccagttcgacaacaagttaaacatagaggcccagtacatcaccgggcaggaaatcatcgatgagattccggatatcgacgctttcgtttcaggtattggcaccggcgggaccctgatgggcataggcaaaaagttaaaagagaacaatcctgatttcaaactctatgccctggagcccagcacactgagcatccttaagatgggaatggaggagggaactcacatgatcgaagggattggggatgattttattcctggaattgtggataagaatctgatcgacgatatcgtactaattgacgacttggacgcaattaacatgagtaaacggatcgctaaagagtttggactaggcatcggcatctcttcgggggccaatttcctcgcgggcgtgctgatcaacaccagtgatattaagatagctactgtctttgcagacgacaacaaaaagtacatcaccacgaagctgtccgaggaaatcgacgacgaccccaatctgatctccaataaaatcaagctgatcaacttcgaggtcatttga

SEQ ID NO: 9386 - DNA, 885 bp, synthetic construct
  source 1..885: mol_type = other DNA
atggtgcagtactgtaggaaatgcggaaaagaactggaagacgacgccgagttttgcgatggctgtgggtttaaccttaacaaccatcccaccgaggacaagcaggagttgaataaaaagatcaagcaaaccagccagaaggataaaaacgattttatcaccaaactacccctctcccttgccatcatcagcatcatcgtcgtgattgctgagggcctgggaacccctatgattatgggctgggacaacatcatgctcgcaatcgctataggaatcattgggggcatcattggaataattctgatggagaaaatagacgaaccgctcatcgctagcgttgagttcattgcaacgggcgccctcgtttactcatttattgggcggttcggcgacatatcccttataattttcattatcaccgcaatcctgacgctgtacttcaagggtcacagcgcgaataacaagaagctatggactatccccattttgactatcgtgctgctcttcgtgctgctgatcgcgagtggagccctgtatcagatcaacgccgaaaatagcgtcatcgtagggaatttaagccaaaacatcaccaatgacgggtacggctactataacgggtatgtaacgggagacattaaggtcgatagcagttttgactatctgtgcgtgaatgtgaacttcctggacaacaacggcaaggtcatcgatagcactatcggttggaatgatttgaaccctcagagtggtaagacatacaagatctctgcttggtatttcgaacagcaggccccagagaaagccgagatatccgtggtggactcggcagattccacaacaccactctacacagagaatattaccatttcaacatcatccggcgtgtga

SEQ ID NO: 9387 - DNA, 2724 bp, synthetic construct
  source 1..2724: mol_type = other DNA
atgtcaactcaaagcgaggccgtgctggagaacaatctgataaagagactgagcgaaaatggatatgagtttgttaagatccgaaacgaaaatgacctcttagcaaacttcagagtccagcttgataagctaaacaagtgtaaactcaccgatgaggaatttaacaaggtgctcctgttcctggatgagggctcgatcttcgacaaggccaagaaactgagggatcactattatatcgacaggaaagacaacccattctatattaagtttctgaaccagaaggactggtgtaagaacatctttcaagtaagcaaccagataacgatggagagtaaacacaaaaataggtatgacgtcacgctgctgatcaacgggttcccactcgttcagatagagctgaagcgacgcggtatgcctctgaaagaggcgttcgaccagatcacgaggtacaccttacactcctacaaagggctgttcaattacattcagatattcgtggtcagtaatggcatcaatacaaaatactttgctaacggactgaagaacgacctccaatttgagttcacattttattggaaggatgaaaagaacaacaacatcctgtcactggatgactttgctaataccttcctagagaaatgtaatcttgccaagatgatctcaaagtacatggttctaaatgagtcttccaaacgcctgatgatcctgcgcgcttatcagaagtacgctgtggaggccgtaattcaccaggctctggacattaagcaaaacggctatgtgtggcataccactggttccggcaagactcttacttcctacaaggtcagtcagttgctggcagaagacgaaagcatatacaaagtcattttcgtggttgataggcgggacctggatattcaaacgaataaggaatttaacagtttctgcgacgggtgcgttaacaccacaaaacacaccggtgctctcatcaagaaccttacaacggagggcaaaggtaagcttgtcactaccactattcagaagcttagcaaggcagtcaagacagcgggggacaaagtgaagcttcagaagatcaaggataagaaaatcatcctgatcttcgacgagtgccatcgaagccagttcggcgaaatgcataacgtcatcaccgaatttttctccaattcactcagctttggctttaccggaacgcccatttttgcgaagaacagcgacggaacacgaacaaccaaagacatttttggcaagaaactgcacgaatacgtgataaaggatgccatcgcagataacaatgttttaggcttcagcgtggactatgtagggggggcaaagtcccacaccgatatcgataaggaggtaaaaaagatcaacactaaggagtacttggagtcagacaaccggctgaatcagatcgtcgactacattatcgaaagttacgacagcaaaacgcgcaatcgcgaatttaacgccatgttcacagtgagccgcgggggagtgatacacaattactacgagcttttcaaaaagaagaagcatgacctcaagatagttacaatcttcaccttcaaagccaatgaagatctcagcgagaacgagcactcccaggacctgttggacaaatacatcctggattacaataagatgttcgaaactaatttcacctccgacgactttaaacagtaccatgccgacgtgtctaaaagaatgaagaacagggagatcgacttgctcctcgtggtcgacatgtttctaaccggattcgacagcaagcttctgaataccctgtatgtcgacaaaaacctgcaataccacggcctgctgcaggcctttagcagaaccaatcggattgtgaataagagaaagtcacagggaaacattgtgtgcttcaccaatttgaaggacaacgtggatgaggccatcgcactgttctccgatccgaacgcaatcgaggatattatcctacccccctatgagacattcgtgaagtggttcaacgaggatctcaaacggttattcaaactcgtgaagactgctacagaagccttggaccttcaaagtgaaaacgataagaagaagtttgtactcatcttccgggacctaattagaaacaaaaacaagctcgacattttcactgagtttaattgggatgacgtcaaaatcgatgaacaggagttcaacgattttaagtccgcctacctcgacatttacgacgagtttaagaaggataacgaggacggggaatctgtgctcggcgatatcgatttcgagctggaactgcttaggaacgaccagatcaacgtggattacatattgaacctgctcgcggatttagataagaatagcacctccttcaagcatgataagcagcggatcattagcctcatgaaggaacacgagaatctgcgtagcaagatcgacttgattgagaaattcataaatgagaaactgggcaatattgacagtaaagtgaccaacattaatgaagagtttgataagtttatgaaacatgagcgcaagcaggccatgtgcgaaatcgttgacgaggaaaacctgaacgaggatgtggcccgtcagatcttcgaatattttgagttttcgggaaaaatcgacgaagagctgattaagcagtcgttggtggaaaaattgaaattcaaagagcggaaagctaaggtgaatacaattaaattcaaaatatttgagctgttcgaaaaattcgactattga

SEQ ID NO: 9388 - DNA, 555 bp, synthetic construct
  source 1..555: mol_type = other DNA
atgatagtcaaaaagcttgaggacattgcagaggtgttcagtggcgtacagatatcccggttcatcgacctcaacgagaacaaattccccgtgatcaagaacaagtttgtggaagatgaaattctggattaccactatgaaaacatctctaagaatatcaataagaagtattattcgaagaagggagacattataatctccctgagtcagcctaataccgtcagcctcctgcagaaggagggattcattattccaatgtactttgccatcatccgcctcaacgagggctatgactcctcatttatctaccacttaatgaatagcgatttgttccataacaagctccacgtgctgctggagggggggacgctgagggttatcaaggtggcggatctgaaaaaaatgaagattaatatcccgaacttcgaaaagcagaatgactacggtaaatttctagacctcatcgacaaaaagtgtaaattgcttaactacaaaaagagctgcaacgaaaagatcaaagagtacctgattcaaacacagctgaaaggcgagtga

SEQ ID NO: 9389 - DNA, 1545 bp, synthetic construct
  source 1..1545: mol_type = other DNA
atgagcgattatcagaacaacctggaatccaagctttgggccatcgccgacgaacttaggggaaacatggatgcaaacgagtttaagaattatatcctcgggtttatcttctaccgctatttgtcagagaaattggaactgcacatgaacgaagaacttaaagaagatgagctgagcttcactgaggcttgggatgatgaggaatataaggatgacctgatggatgagggcatttctagcctgggctacttcctcgaaccacaatatctcttttccaccgttattgagaaagccaaggttaatgactttatcttagaggatctaattaaatccttaaattacattagcaatagcagcattggcaccgacagtcaagacgatttttccaatctcttcgaggacgtagatttgaatagcagcaagctgggcaagtcggacgacgacaagaacaagttaatttccaaaatcctgctgaatctaaacgacatcgacttcaaactcggagacgacgagtcagacatactcggggatgcttatgaatacctgataagtcagtttgcctccagtgcagggaaaaaggcaggcgagttttacacgccccaggaggtgtccaagatactcgctaagatcgtcacacttggcaaaaagaagctgagaaacgtgtacgacccgacgtgcggttcagggtcgctgctgttgagggtggccaaagaagtggaggtgggtgatttctgcgggcaggaactcaaccagaccacatacaacctggctagaatgaacatgatcctgcatggtgttaagtacgtggactttgatatcaagcagggagacagcctgaagtatcctcaacacattgacatgaatttcgacgccatcgtggcgaacccccctttctctgcaaaatggagcggggacaaatcattcctggacgacgaaaggttcagcgcctacgggaagctggcccctaaatcaaaggccgattacgccttcgtccagcacatgatttaccacctggaggagaatggaaccatggcgattgtgttgccccatggcgtgcttttccgcggcgcggcagaaggaacaatccgcaaatacctgatcgatgagaagaattacctggacgccgtaataggtcttccagctaatatattctacggaaccagtatccccaccgtgatcctcgtgttcaaaaagtgccgggaggaagaccaggaggtgctcttcatcgatgctagtaacgactttgagaaagtcaaaaaccagaacaagctccgatccgaagacattgagaagatcgtcaacacttatgcgaaccgtgaggagatcgataaatattctcacaaggcaacaattgacgagatccgggaaaacgatttcaatctgaacattccgcggtatgttgatacttttgaggaggaagaaccaatagacctaaatgaggtcgtctctgagctgaagatgatcaacgaggagatgaaaaaggtagacgctgaaatcaagaagtactgtgatgaattgggcatcgaggcccccatttttgattga

SEQ ID NO: 9390 - DNA, 1125 bp, synthetic construct
  source 1..1125: mol_type = other DNA
atgagcgaggagagattggtgcccaagctacgctttagcggcttctctgacgtatgggaatcctataaaattggtgacataagtaaaacttactctggaggcaccccttccaccagcaagagggagtattacgaaggagatattccatttatcaagagcggcgagatttgcaaggataagacggaacactatattaatgaaatcgcaatcaacaactcatccgctaaaaaaatcaagaagggggatttattgctggctctgtacggtgccaccagtggggaggttgccatctcgaaaatcgacggtgcgattaaccaagccgtcttaaagatcgacaataatatggataactacttccagtacaactattttctgaaatataaagacaagatcgtgcacaagtacatccagggcggccaaggcaacctttcagccaacatcattaaaaagttggagtttaagttcccaaagctggacgaacaaaagagaatatcccagttcctgctcctgatggacaagaagatcgatctcctggagaacaagctacagtattaccaggacttcaagaaatacctcatgcagcggatattcacgcaaaacctccgatttgattttgataatgtgaaactcaagaacatcagcaagatcaataaagggaaacagctcaacaaagatgacatggtggaaactggcatttttcatgtcctgaatgggggaaaagagccctccggctacacaaatgcgtggaacacccctgagaacacaattaccattagtgagggtggaaattcgtgcgggtacgtgaacttcaacacagaaaaattctggagcggggggcactgttattatctggacaatctggccgaaaaggtggacggatactacctttatagttacctgaagtttatcgagccaaagataatgcggctgcgcgttggaagcggcctgccgaacattcagaaaggagatatcgagaatatcaaggtcaagatagctcttcccactgagcagcagaggatctccaacctgttgtactcaacagacgaaaagataatcaacattgcaaatcagaaagacaatttcgagcttttcaaaaagggcctgctccagcagatgttcgtgtga

SEQ ID NO: 9391 - DNA, 1161 bp, synthetic construct
  source 1..1161: mol_type = other DNA
atggagtttaccgacaactggcagacgtacaaactgggggacatattgacattttactccacaaatagcttttccagggaaaagctgaactacgaatttggtaacgtgaagaacatacactacggggacattcacaccaagtacccaacgatcgtgagcctacagaataataaggatgttcccttcattaatgaagatatagatctgtctaagttcaacgaggaccagtatctgcaagacggggatctgatcattgtggacgcctcagaagactatgacgatattggcaaggccatcgaggtcatgaatgtcaacgacgaaaagttcctggccggattgcataccattttagctcgcgatgagaagaacataaccgtgaacggattcaaagcagatcttttctccactaacactctcaaaaccaaaatcaaagtaatcgctaatggaatctcggtactcggcatcagtaagaaaaatattagcaaactcgaggtcaagatcccttcgaaacgggaacagcaggagatcgtgagcttcatcaatacgatcgaccggaaaatagagctactggaggaaaaacaccagtactaccaagattttaagaagtatttgatgcagcagatcttcacacagaacttaagattcgacttcgacaaggagtgggagaacatcagacttaaagacttcctgaaatcttctagctcaagtctgagtctgaatgatctggaagagaaccatggcgaatacggcctctacggggcgacaggcattgtgaagctgatcaacttctatgaaaagacagagccttatctgtccattgtgaaggacggtgcaggagtcggccgaatctttctctgcgaaccaaacacttccatcgtgggcaccatgcaataccttactcccaaggagggtgtggatctggagttttcatattaccttctgaacaccattgagtttcgcaagtacgtcgtgggaagcaccatcccccacatttattttaaagactattccaaagagaagctactcgttccgcagatcgaggagcaacaggaaatcgccagtatcctgagcaacattgataacaagctcaatttgatacaggacaggattaatcacatgggccagttcaagaaggggctgctccagcagatgttcgtttga

SEQ ID NO: 9392 - DNA, 996 bp, synthetic construct
  source 1..996: mol_type = other DNA
atgaagaccagaatcatcaacaagatcaagagcaagatgaagctgtacctcgacgagaatcaactggtcatactcgacgagacgcttagaaatatcctgaaagactatgacttggtggagacggagagtgagttcactataaaagaatctaaggaaaactctatcttactgatgaacttcctcgcctctaagcatgtcgaggggtgtagcgagaggaccatcacgtactatcacacaactattgccaagatgctagagagcatttccaagaagatcgaatttatttcaacagacgatctgcggaagtacctggctgactatcgcaaggtaaatggcgcctccaaaaccacagtggataatatcagacgggtcctgtccagtttctttagttggctggaagacgaagattatattcttaagaaccccgtgcgccgaatccacaaaatcaagactaaaaaagtcgtgaaggaggtgttgtccgacgagcacttcgaagtgctccgcgataattgcgacaacattagggatctagccatgattgagctgctggctagcaccggcatccgtgtaggcgaactggtaaaccttaacatcgatgacgtgttatttaatgaacgagagtgcgttgtcttgggtaagggcgattcggaacggatcgtttacttcgatgcaaaaacaaagattcacctgctcaagtacttggagagccgaaaggacaacaatcctgcgctgtttgtgtcattcaaaaaaccatttaaacggctgggaataaacggcgtggagcggagaataagggagcttgggaacggggcgaatattaaaaaggtccatccccataaattccgccgcaccatggccaccaacgcaatcgacaaaggaatgccgatcgaacaggttcagaagctcctcggtcacgtgcagatcgataccacaatgcagtacgcaatggtgaatcagaacaacgtgaaaatagcccacaggaagttcattggatga

SEQ ID NO: 9393 - DNA, 1671 bp, synthetic construct
  source 1..1671: mol_type = other DNA
atggatgccggaaaactgcagctcctctacttcctcagtcagaaccaacagctctcaatcccaatttatcaacggaagtacagttggagcgaaaaagaatgtagtcagctactagaggacatactgcgagttggcgagtccgatgagcagaaccacttcatcggatcgatcgtgtacatgaatcagaaaggccacattgcgtcccctattaatagcctgatgatcatcgacggccagcagcgcgcaacgaccatcacactgttaatctccgctatcgtggagtttttgtttaagaacccaaacgataatgtcatgtctcccgaaaattttatcagttactacctccttaacgatcgggaaaagggagagacccgctacaaactgattctgactcaggacgacaagcggactttgattaagataattgactacctggagactagtgacgaaatcccatttgacagcaatgattctatccggatcaaggagaacttcgagtttttcaagaagaagattaatacggacaacatagaaatcctgttcaatgggttaaacaagcttcttattatttttgtggctctcgagcataacatcgacaacccccagttgatctttgagagcctgaactccacaggactcgaactttctcaggtggacctgattcgcaattacatcctaatggggctcgttcccgaggagcaggagaaattatacaatgatttctggcacgagatagagaccctgttcgagaaaaatgaggggaactttgataagttcattagagactatctgacagtgaagacggataaagtgcctgtattccgaaacatatatagcgactttaaaaagtattcagcacaaatcgacgtgaaggagttggtaaaggatatccacaaatatgccttctacttcaactccattgcctttggcgccgaggagaaccccaagctgaaggaatccctcgactccctgaacagcctgggttatgacgtcactgacccttttatgcttcatttgtatagggactacaaggaaaacaagctgtccaccgacgatttctgcgaaatcattaaatataccgaaagttacttgctgagacgactcatctgcagcatcccaacacccagccttaacaaaacctttgccggaatgtacgtgcaaattgacaacaccagccatctgagctcatacaaagcgatactccgttcaaaagagaattaccaacggatgccgagcaatagggagttcgtcgccaattttagacagagggacatctacaacctccgcagcaaaaatagggattacatattcgataagttcgaaaattggggctccaaggaaaagacgaacattcagaactacactatcgaacacatcatgcctcaaaaccccaatctgagccaggactggaagctagagctgggcgaacagtgggcagatatccagaagacctatttgcacacaatagggaacctgaccctgacagggtataactcggagcttagcgacaggtcattcaatgaaaaaagagatatggccggcggtttcaaggattcggctattagactgaatatctatctccaggatctgaacaactggaacgaaaatgagattaagctgcgcacaaaccggttcgtcgagaaagctaaaaccatctggccatatccgtga

SEQ ID NO: 9394 - DNA, 825 bp, synthetic construct
  source 1..825: mol_type = other DNA
atggtacgattcagccagacactcgacgacaagcaatcaaagaacagggaaaaatcctataggcaggtgatggagaacccctaccatgcatctgagaaccggcagtcctacagtgcccaaaacgaggacagattttatagccaaccgtctgtgcagcgctccaactaccatgaggacaactttcacagtcagaaagacgaggtcatatacgaaatgtctgtgatcgagaaggaaagcgtcaaacccgattacagcaagccagagctgaagttccctgccgaccagaacatccagtttggcgtggagtatgcaccaaactccaagcccccagtgatcggtcgcaattacacgatacggtcaaattccatcatctacaacgacgtggtaatcggggacaacttccggaccggccacaacgtggtgattcgagaaaacaccaatatcggggacgatgtgcttatcggaaccaacactgttattgaaggggacgtgattattggcaatgatgtgagtatccagtcaaatgtctacattcccacgaatagcgtcatcgaagataatgtcttcatcggaccttgtgcgtgctttacaaacgataagtatcctgttagaatcaactatgagctgcagggccctaaggtgaggagaggggcgtcgattggaggcaatactaccttcctgagcaatgtcgaggtcggggaaggttcgatagttgccgctggcgctatcgtaatacacagcgttccaccattctacttggccattggaacacctgcccgcattaagcccctaccggatcacctcaaagtgcccaataaattctga

SEQ ID NO: 9395 - DNA, 162 bp, synthetic construct
  source 1..162: mol_type = other DNA
atggccaagtacaaatgtaagatttgcggctatatcttcgatgaggacaatatagaagagggactgaacatcccggaaggcaccaagttcgaggacctccctagctccttcaaatgccccaagtgcgggatgccaaaaagcatgtttatgaagatggactga

SEQ ID NO: 9396 - DNA, 120 bp, synthetic construct
  source 1..120: mol_type = other DNA
atggccaagtttaaatgcaagatctgcgggtacgtgacagaggagttcgaagaactgcccgaagatttcaaatgtccaatgtgcggcgcaaccgcggacatgttcgagaagatagagtga

SEQ ID NO: 9397 - DNA, 111 bp, synthetic construct
  source 1..111: mol_type = other DNA
atggcatttatatgcaaggtatgcaacttcgtgctggaggaggatgaactccccgaggactacatctgtccagtctgcggcgtgggggccgagcacttcgaagaacagtga

SEQ ID NO: 9398 - DNA, 600 bp, synthetic construct
  source 1..600: mol_type = other DNA
atgaagacgatcaagaacgccattcaaagcgaaatcaatgtgaagaaatcccagtttatctgtagcctcgtgccaaccgagactaaggccgaatcaaaggccgtgattcagaagttcagggagcagtacagtgacgcaacacataattgcaccgcctatattgtctctgacggagaaggcttcgatgatgacggcgaaccgggcgggactgcggggaaacccatgatcaacgtgctgcgcaaaaacgagctgcacaacgtaaccgcgattgttacacggtactttggaggaatcaagcttggtgccggcggcctggtgagagcatactccaagtccgtaatggaggctgttggggaggctgaaatcctagagattgaagagtatgacgtgtataagctgatcttcgaatacagcaatatccggatagtcgacagcgaggtgcgaaacaacaatctggaggtcatcaacaaggagtacagtgataaagtcagctatgacatcgtgtcaaaggacggtagggatattttgaaaatatttgagaaatactcgggaaaaataaacaccgggttcaagaataagcagttcctcgagaacaaatga

SEQ ID NO: 9399 - DNA, 420 bp, synthetic construct
  source 1..420: mol_type = other DNA
gtgatcttcctgccaggcagtaagagcgctacatttctcgtcattttcatagtggccatcgtagccttctgcattgcatgcgtctgtgccagcatgacaggacagatttcgatcctacccaacgacaacgaatccgagagtatcctggataacctgtccgcgatcaccaatgacaccggaaacagcggacagagttacggttctaaggattatagctcaagcagctccagtagctcgtccaatgatgactcccaagtggagactaccactgaccactcaggcgacaatcagggggactcccagaaggacagcgatgatcacgaccacgaaaatagcaaccagaataacaaagacaaggatacgaaaaccgattctgggcatgcagggcaaggctcaggcgacgctaacgattttgactga

SEQ ID NO: 9400 - DNA, 693 bp, synthetic construct
  source 1..693: mol_type = other DNA
atggctgagctccggtacagagcaggaaacatacgaaaccccgaggtgcacaagatcggaatcatagcactgggctcacacctagaaaaccacggtcccgccctcccaatcgatactgacgcgaaaattggagcgcacatcgcattccagtcgagcctgcagactggagctaaatttctcggcatcatatttccagcttatgaactggataccattgaccatggcgtgcacgtgagtctggagacattgaaagaaaatgttattaggacacttaacgacgccaagaaattcctggatatcgaaaaggtcgtcattgtgaactcccatggtggcaacattcctctgatgagtgagttatgggatatcgaggacaaaaccgacatgattgtcgtattcaacaataaggtaatctcctccgagggcccccatggaggcagcggtgagttgtcaatggccaaggtgctcgggatcgtgaacgaaaacgaactggacaatcaaaccaatgttaatgaatatgaggaggtggggctttacgggtttaagcaggcccggcgcgacgacccgaacatcgaggagggggcccgcgatgtcgaggagaatggggtgtacatcgacgaggaatacggcgaaaggctattcacgctggccattagcagcgtcctctttgatgtggagaagctgctggacttctga

SEQ ID NO: 9401 - DNA, 483 bp, synthetic construct
  source 1..483: mol_type = other DNA
atggtggtgaaagttaagaagcggaacttcttgaagaaaaagaaaatcaaggaaatcaaggcggaactcggggagtacggaaacctgcttcagggcaagaagaatgtggagatactggaggccgagcccaacagcttcatcctcgtcgatggggaaccatacattatattgattgatgaaaggcccttcccaactttaaaagcagctctggacaatgagatcgatgcgaaaacggtgaccgtcgacatgggcgccatcagatttgtagccaacggtgccgacattatgtcccctggaatcgtggctgcttcagagggtgtgaaagagggcgacgtcgtgctgatcattgacgaaacacatggcaagccgctggccatcggggtaagtctgctcagcggggaggagatggtccgcaacgatagcggaaaggcagttgaaaccaaacactatgtgggcgacgacatttggaattttgagctatga

SEQ ID NO: 9402 - DNA, 498 bp, synthetic construct
  source 1..498: mol_type = other DNA
atgaacttcaaccgggaaaagtatatcgacctgataatgtacatcctcttgaagtgctactcaaagcccaatctggggaagaccgtactctgcggcatcctgtactttattgacctcaactactatgaagtctatggaaaattcctgacttgtgagacctacatcaaatccaaaaaaggtattgagccgaagcacttcaaggaagtgacagaggagttaatcgctacagacaagctgtttctaaggagggaggcatattacaacagaatcattcaccgctactaccttacgataatcccccagtttaaattcagcaaaaaggaacttgagatcatcgacgccagcatcaagcgactgaaggataataatgcatccagcattacccggtatgcgataaaagaccctccattgcatattgctaatttcggcgaggatatcgattacaagtatgtgttctcgcgcaacagtgcctactctgccattaagaactttctgtga

SEQ ID NO: 9403 - DNA, 231 bp, synthetic construct
  source 1..231: mol_type = other DNA
atgagcggccagaatgtgcaacggccgctggacgccctgggaaaaagcgtggatgcgcccgtgttgataaagctcaaaggagatcgagagttccgcggcatcctgaagtcctttgacctgcacatgaacctggtcctaaacgatgcagaagagctccaggacggggaagttaccaggagactcggggtcgtgcttattcggggcgacaacatcgtatacatcagtccatga

SEQ ID NO: 9404 - DNA, 189 bp, synthetic construct
  source 1..189: mol_type = other DNA
atgagcaagggcactccctcaatgggtaagaagaataagaagacccacatacgctgcaggagatgcgggcggaacacataccatatccggaaaaaagtgtgtgccagttgcggattcggcaagagcaaaaaactgcgaagatattcctggcagaacaaaaagccaaccacgaggcagcgcctcgtctga

SEQ ID NO: 9405 - DNA, 1392 bp, synthetic construct
  source 1..1392: mol_type = other DNA
atgaagtacgataagagtctcatcgtgcttttcatcatacaaatttgcgagggctttagtttttacgggctgggcgccatactgacccttttcatgacgcagtttttgaacctgagcctgtcatttgcctttttagtgtatgggacctactttgggctggtttatattgcaaccctgtttggaggctatctctccgacaaatacatacgtagccggtgccttatcaatgcgggcataatcctgatggggcttggtttcattgtcctgagctatttcgcctcatgggccaaccccctggtgcagacacactcttacttctattttaatacgcccgaaatcatgctgatcattagcctgatgagcatcattttgggggagggcctactccgggtaaacatctcctccacggtaaaacaggtgtacgaggataacgagaagaaagtggaatcggcattcaccctcctgataatggcactcaacattggagctgtgtccagcgccatcatcctgggcctgacaattggtgagggaaaccttagtctctacaagtacggcttcttaatactggctgtgagcctgttcattggcatcatcatttataatctcttccggaataaatatctcgtcaacagcaaaggagagatcgtgggaattaagccgtcaatcaagctggaatctgtaatggacaacgcggaggagaagctgaccaagcaggagagaaaccacgtgaaggctattatcattatcctttccatctctttaattttcttcatcgggtttgaagtcatcgactcatccctcatgtttttcgccaaagattacgttgcaaataccattccttttgtcccattcaggatcagtcctgaaatcatcaaatttatcgagccctttggtgtgattatcttctcaccattcatcctaacatactttaatctcaaggacggggacgaaaatgagtctctcatctttcgcatcatgctgggcattattgtgctgctggttacttacgctgtcttcttcatcccttgcatgatggtcgacaacaacatgaccgatgtctccatcattttcattatcatcatggagctaatcagatccacttcggaaatactgatactgcccatagggttgagtattgtctcgaaactgagcccagccaagtacttgagccgattgctcggcctcttctattgtagcctggccggagcgtacgtggtgtccggatacatggcaggcttctatccgaatgccgaaagtatggctcataagttgtttggtcttatacagatcaacgatttcaagatcttcgccagcgttttcatcgtgatgtacctgacattgtttacagctacttatatttctcgcaacaaaattagggacctaatggagtga

SEQ ID NO: 9406 - DNA, 999 bp, synthetic construct
  source 1..999: mol_type = other DNA
atgaataaccccaacatcatcctaaagatgatctttatgaagaagatgaagggagtcctgctcgaagccagtgccattgacaagggcgacatttcatgggaggagctgtccgagcatgtcgatctaacaatttacgagaacacaactgaacgcaacaagttcgaacatatcggcgacgccgaagtcatattcgacaacaaggtgatcattgatgaggaggtcttccggaagtgtccaaatatcaaatacgtgggcgtttgtgctacgggctataacgtggtcgacatgactgcggcccggaaaagaaacatcaccgtgacgaacgtccctgcttactcgacggacagcgtggtgcaacttacctgggcgctcatcctggagcagacctgcaatcttgaactccacaaccagtccgtgaagaatggtgactggataaattccgagatattctgctactggctcaagcccattagcgagctgtcaggtaagaccctgggcattatcgggtatggaaacattgggaagaaagtggccaccatagctaaaagctttggcatgaacataattgtaaacacagaccaccctgaaaaatacagcgaggagaacatcaattttgtagataaagatgagatctttgccaagtccgacattatcacactgcactgcccactgacagaagataccaaagacatcattcgcaaggaaaacattgacaaaatgaaaaacggcgtgcggatcgtgaacgttagccgtggagggctggtcagggaaaatgatttagctgacgcactgaatagtgggaaagtgttgagcgcaggggttgatgtggttgtcaccgaaccaatgagtgaggataatcccctcttggacgccgagaacatcataatcactccgcacatcggatgggcaagcatcgatgcacgaaagaggctggtagacgagattatcaagaattataaggccttcatcaacaatgagaaaagaaacgtggtgaattga

SEQ ID NO: 9407 - DNA, 915 bp, synthetic construct
  source 1..915: mol_type = other DNA
atgagcaaggagaacatagagaaaaatgagattaacaactcgaatgcgccaatcctgtataagaggcacgaagactacatcccccgggtcgctgcaatacacgatctctgcggctacgggaaatgcagcctgggcgtagccattcccgtcctgtcagcagccggctgtgatgtgtgcccagtcccgactggattgttcagcaatcataccggatatccgacatggtacatgcacgacaccacagagatccttaacgactatttgaatacctggaaggagatcgacatcgacatagatgctgtgtattccgggtttttaggctccgatgaacaggtggaagtgatcaaaagcgtttacgaaacctacccccacgccctcaaggtggtagatcctgtcatggccgaccatggacaagtctaccccacgtatgacgatgatctgtgtcaagccatggcaagtctggcctgcgaagctgacattctcactccaaatcttaccgaagctgcgattattctgggggagcctatcggtgagaaatggagaggggccaacattgatgatgaggaagcgcaccgcattctaaacgctctgctcgaccatggagccaagtacgtggtcctcaaggggatacagcgggaagatggaatcatccgcaacttcgtgggtggaaaggacatggacatcagcgaggcctccaacgagtttcttccctacatgctgcatggcactggggacctgtacgcaagttccctgctggccgctgtgatggttggcaaagacctatttgagtctgttgagtttgcaggcaatatcacgcacgatgccatgatcgtgtcaagtaagcagcctaacttccaggaccgaggcgtgaacttcgagtctctgctcggtcaggtgacagacttgttcatctga

SEQ ID NO: 9408 - DNA, 840 bp, synthetic construct
  source 1..840: mol_type = other DNA
atgatgaggaaagtgacccacaaaaccaagggccagaaggccattgacggcgccggagtgcatctggtgcgcgtcttgggcaacactacaaccgatgtgcacgacccgttcctgatgttggatgcctttgactcaacgaatcctgacgattacacggcaggctttcccatgcaccctcacaggggcatcgagacaattaccttcgtcagcaagggacaaatgctccatcaggaccatttgggcaccgaagcactggtcggagacggggaagctcaatggctgactgcggggtctggggctgagcacgccgagtttcccgggggagaacgcatgcttggcacacagctctggcttaatcttccagcaaaggataagatcaccgctcctcccgcatatcacagtataactacagacgagattaaggaattttccctcgatggtggctttctgcggctaatggctggggagtataatggtgaggagggttggcagggcaaatacctgcccgttgacttctatgacatccatctagaacccaacaccaaagtggagattccagtaaaggagggacggtccgccttcgtgttcacactgctcggcgacgtcgtgatcagcggggatgttgtgctggaaaagaccgccgccaagctctcggatggtgaccacgtaatattcgaaactaaagacaacagcgccgaaatcttactgtacagttccaagcgactggatgagccggtggcgtgggccggaccaatcgtcatgaacacaagagaggaactcaaccaggctttcgaggatctggccaacgggacgttcatcaaaaaacaggcggagtactga

SEQ ID NO: 9409 - DNA, 408 bp, synthetic construct
  source 1..408: mol_type = other DNA
atggtggaactgaaagacatagcccaagagaacgaagtggatctcgagaactgtgtcgtgtttgtaagaggcgaagacgacatcctagctgttgacgtgagcaatgctaagatcaggcagcgcagtgacgacaccatgggcttcaccttttcaattacacccgagcagacgctgaaatttgaagagtattttaataagttcgcaaacggggaaaaattctacttcgatatttcccagactggataccggccggcctactaccgaggtctgtctcagatcaacaaggaggtctccgaggagtatgacacaaagttcaatgtgaccctcttcgcccagaaggccatcgtcgagcctgatgatagctattttgcaccaacttgcgcgtgctgccaattctgtcacctttga

SEQ ID NO: 9410 - DNA, 453 bp, synthetic construct
  source 1..453: mol_type = other DNA
atgattcacattttgcaccagctggtgctggttgccaatagcgtcatttacaagggcgacataatgttcgattccccattctccaactacatcgtgcttactcgcaataaaacaaatgaaagcatcaaactcgaccagcggcgcgtgaaactcagagagaacaagaacggcctgatggcattaagttatattggcccgctcttcgagatcatggatctggaagacttttttgatgacatgatcagctcagaaaaactgtcgatggacatcagtgagaccggggagtttcgagtaagctttaggggaatcatagacgggaagggaaaaaacttccctcagaaccttgaccataagatcatcctgctacaggaacccacgtgcctggatgagcgggtcaatattcaagaaaccggtttctcaaagttcaagttgaagaacgaggtgtccgagtga

SEQ ID NO: 9411 - DNA, 405 bp, synthetic construct
  source 1..405: mol_type = other DNA
atgctctcccagtttatctatatgttcattaagaccaaattaaagatcaagactaggatcttggtcaacatgattataaactggcaagaggaaatcacgcggattgaccccgagatgaagttccgggccgagggcgggtggctgaagacaatcgaaaaactcgacaagagcgtgaagaacggatacagcctagtgggggactttgtgaaagccggcgactttgaggagaactacgacgagggcatatatctggattgcaataaggaaaagacaggaagaaaaacccagcaggactaccgcctgttcaggttccgagatggtaaagtccgccttctcgatatggtaatcgatggcgaaaatgggtgggcagttgacctgtgggacgctgtggaagatgagctgtga

SEQ ID NO: 9412 - DNA, 672 bp, synthetic construct
  source 1..672: mol_type = other DNA
atgaacctgtacgagaagttcgggatcaagacggacaacaaggtgctgtacgacaccgcatttacccatggctcatactcgaccaagcacgacctgaagtataactacgagcgcttggagtttctgggggatagcgtgctgagtgtcattgtttctgagtatctctacgagaaatacccccactatgaggaaggcaagctgaccaaattaagggccaactatgtgtgccaattcgcactcatctactacagccacgagttgggtcttgataagtatctaaaagtcgctgcgaaggagtccaacctcactaaaaatgagatcctttccatcactgctgatatcttcgagagctttctgggagccatgtttctggaccagggctggtattttgtcaagcggtttgtgagtaattcaatattcaagttcatcgacgccaacgttatattcttcgccgattataagagcgctatgaaagaatacggggacgccaaagacctcgaggtctcctacaaaattctgaaagaatgtggtgtgccacataacaagacattcatcacagcaatcctaattgatggagaagagatgggcgtgggaaagggcaagaataagaaggaagctgaacaggcagccgccaaagtagcgattgaaaaactcaatattaaagtgttctga

SEQ ID NO: 9413 - DNA, 1467 bp, synthetic construct
  source 1..1467: mol_type = other DNA
atgaacaaggagagcgtgggaattgttgagacggagtatcacgacatctccaacccgatcatattagacagtggagaaactctggacgaagtcaccgtggcgtatgagacctatggtgaactcaataaagagaagtctaacgctattctgatttgccatgcactgacaggggatgctcacgctgccggctggcacgaaggggacaaaaagcctggctggtgggagatggtgatcggtcccgggaaggccctggacagcgagaagtacttcataatctgctctaacgtcttgggaggatgtaagggaacaactggtccaagttctattagccccaaaactggcaaagaatacggcgtggacttcccagtcattacaatcaatgatatggttaaggtccagaaggagctaatagactctttcggcatcagccagctggccgcagtgatcggcggaagcatgggggggatgcaggttctggagtggatggtctcttaccctcgaatgatgaaaaaggccattgcaatcgcaaccgccggcaggtcctcgcctcagcagatcgccttcaacaccgtaggccggcaggcgatattttcagactcgaagtggaacaacggcaattattatgatacctgcgagatcccaagtaatggactgtccctcgcccgtatgatcgcgcacattacttacctcagcgatgagtcaatggacattaagtttgggcgcggcttgcaagacaaggatgaaatcagctacgacttctcggtcgatttccaagtggaaagttacctgaagcaccaaggggaaacctttgtcaagcggtttgacgctaacagctacctattcattacgaaggctgttgacctgttcgacctttcagctaatgattccctcattgacggatttaagaacgttgaggccaagatcaaaattattagcgtggatacggactggttatatcccaccgagcagagtatggaattggtaaccgctctgaatgccaatgatgtggacgtgtcattttccgagatcaaatctaactacggtcatgacgccttcctccttgagagaggccagctgaactacatcttctccaacttcctgagcgagaacgtggtggatgacctgatgatagaggatatcgccacaatcagggaaaacgccgacatagtggaggcggccaaactgatgctagataaacacctcacgcatattcccgtggtaactgatgattgtaaacttattggcatcgtgaccagctgggacttgtccaaatccatcgccaccaactccaatcatctgaaggacatcatgacaaagaaagtcaaatactgccacgcaaatgatagcatagaggaaatcgcaagaaagatgcgcaaatttgatatctcatgtctcccggtagtggatgaagagatgaaggtgctggggcttatcacaacagaccagatctccaatctgctcagttga

SEQ ID NO: 9414 - DNA, 624 bp, synthetic construct
  source 1..624: mol_type = other DNA
atggggatcgggtatgctgcgattgccatcaaggccggcatgactccattgcagacaatctctatgtctgtgctggtatacgccggtgcgggccagttcattgctgcgtcaatgatactcagcagtgcaagtgtgctggcaatcgtccttacgaacttcgtggtgaatctgcggtattttgtcatgtcgacctgcgtgctaaatcaaatcgaggactccaacttacctctgaatgtcctggccgctcacacgactgtggatgaaagcttcgccgtgttttcactgtccgaggacagcagcatctgggtctacctcggcattgcagtgacagcatggctgagttggatactgggagctgcaattggggttgtcgtcctggaccttctcccggtgatagtgaccaactcctttaacatctccctgtatgccctcttcgtagccatcctgacccccgctatcaaggaaaacaaacagatcgccatcttggttgcaataacagctgtgctgaatatcattttgagccagttcttaggaaactggagcctaattgtatcaacccttgttggtgccgccattggcatgtacatcgtggatgatgagtacctcctctccggagacgcctga

SEQ ID NO: 9415 - DNA, 315 bp, synthetic construct
  source 1..315: mol_type = other DNA
atggattacatgatgctggtgatcgtgggttgtactctggtcacctttatcccacggctaattccagccctgttcattgacaagctgaatttcagccccaagtttgagaaattcctcgacttaatcccctacacggcgctggccgcccttatatgccctggcgtcttgacagtagacaaccagctctggtatatcgggctcatcggcgctgtggttgccgcatgcctggcttggaagaaagcacccatgggagccattgtgattatcaccgttgtggtgcttatcgcggtgtacagcatagtcccgtttttctga

SEQ ID NO: 9416 - DNA, 237 bp, synthetic construct
  source 1..237: mol_type = other DNA
atgaggaccatgatcaagtatctgcggcaggagctcaagatgagccaaaaagaactgggcaacaaagtgggagtaacaagacagaccataaatgcactagagaacggccgctacaatcccagcctgttccttgcctacgatatcacgcaggtgttcaacaaaatgctctttaagggggacaaggaacagtacttcgtcatggaggacatcttcatttttgatgaggactattactga

SEQ ID NO: 9417 - DNA, 732 bp, synthetic construct
  source 1..732: mol_type = other DNA
atgatcctggatatatacaaagacgcattcgaatattcggctaaggactggaagactttgctgatattgggggtgatctgtcttttcagctttcttctgatccctgtctttctgcttgcaggttataactatagggtggttggtacggctgtgcggggaatcatcaacggcaaagatccactccccgagttcgacgatctgattggaatgttcattgacggcatcaaagtggtcatcgtgcaaattgtgtaccttatcgtccccgccgtgacctttatcgtattcgtgctcatcgccaaccatctaagcggtgttctagccagcgctgtagtactgctggggtgcctggtgaccctgattctgggcattatcgcctgtctcatgattcagatgggcatatgccacatggcatacaatgacggggcgtttacgaaggcattcgcggccgaggagatcaaggctgtcattaacgaaatcggactcttcaagtgcctcttgacttacgtgggcataatcattatatgcgtcgtgttcggagtggtggttacagggattgtcggaatcatatttaccatcttcggtctctcaggagccatgttgggggttgatgccgggggcatcctggtgttagggacactcgtcaattccctgattaccacatttgtggtcggcccgtacctgagtatcttcactggccgctccattggcctgttatacaccatgcagatctga

SEQ ID NO: 9418 - DNA, 825 bp, synthetic construct
  source 1..825: mol_type = other DNA
atgaccagtatcacagactgcgtggtggaggggctgaaatacccattcaatgatctgaaaaaggtgctcagctttggtgtgctcttcgccttgattaacttaatatcattggacattactaccaagtttatcgacgcggtaataaaatatagcaagctgtaccctagcgccagtaacgtgttccatctctcacagctgcccgccaacgatatttacatgatcatcgctttgctgatcattagttttatcatcgtattgtttataaacggatacgaatggaacatcgttcgcttctccattgacaaaaaggaggacctgcccgagtttagcaacgtcctaaagatgtttgtcaacggcgtgaaatatttcctggtcaatgtggcatacaatattattccgattgtcctccttatcattggcctggcccttttcaatgagtcctactccccaatcatcatactgattagcgttctgcttttcctcattgcttattttatcttaatcatggccctcaataatatggtggcacacgattcgatcaagaaggcgtttgacctgcgggaaatcactaagaacattagcaacctcgggtggggcaaatacataggaatcatcgttttcacgctgattgtatatcttgtgattatggtggctgtcggcgtgatcctgttctttataacagttttcatcatcagcgccatcaccgatcagtccatgattatctccattttcctggcaataatcgaggggctgttcatactaccctacgtggaaatcttcttcagcagggtctttggaagcatctatagagaatcaatcaagtga

SEQ ID NO: 9419 - DNA, 633 bp, synthetic construct
  source 1..633: mol_type = other DNA
atggacgtgtttcagcaccccatttttctcctgggggagctgatgaacattaacgtagaactcttctaccttttcaatcatgcattccagaatccattctttgattacataatgccggtgttcacccacttcggcggatttaaattcctaatattggtgttgatcgccattgtgctgtacgcccatttacgaaacaagcgcacactccggaagatcattttccttacgctgatcgccttgctgttttccgacgggatcgctttcgtcctgaagcatctaattcacgaacccaggcctttcctcagtcttgataacgtccacctgctgatcgcggaggacgatccactgagctttccttcaggccacaccacttccacaattgccatagtcaccttcctggtattcaacatgaaagaactggcgaagaagcactacaaaatcatcaatgtgtgcctcatcatctttgccatcctcattccatttagcagaatgtatatcggagttcattatcccggggacgtgttagctggcgccgcaatcggcatagtcggtgcagtgatcgttaaccactttaaatgtgagatcctgaaccggattgacatactgaataagattaaggagtcgatcagctga

SEQ ID NO: 9420 - DNA, 276 bp, synthetic construct
  source 1..276: mol_type = other DNA
atgaacaacttcgagaaccagaagttctgccagtcctgtgcaatgccgctcgaaagcagcgatttctttggaacgaatgccgatggcagtaaaaatgaagactattgcatctactgttttaaggacggcgagtttacaagcgacatgtcaatggatgagatgatgaacttctgcattgacaagatgaccgaagtgcaccccgacatcgacaaacagcaagcgaccgctatgatgggggagatattcccaaaactgaagcggtgggccgacgattga

SEQ ID NO: 9421 - DNA, 1446 bp, synthetic construct
  source 1..1446: mol_type = other DNA
atgtgctcaatcgttggactccagggcaatgttaaggccgaggacattctgaagatgttaaaggtcagcaaaagtaggggtcccgatagcagcggcatctatctggacaagctgtataaaaatattaatctagatgagtttgaagacgataacacttacccaattgcgtttggccataacctgctgtccatttacgatctgaataaccgcatatccaagctgcagcccgtgacggatgacaacctggtgctcttgttcaacggcgagatttataattttaagacaattacaaacttactttctaaggtgggcgtggagaaagaaatcctctctgacgccgaggctctgctgtatttaatcgatttttacaataagggagacctggtgaaagctattcagaacacgacccgcctgttcgacggggactacgcctttgccgtcttcgacggtgaaaacctggccctcgtacgagatcctctcggagtaaagccattgttctatggggagaacgacaaactcaagggattcgcaagctcaaagcagagcctcaaagaggtcggcatcaccgacattaatacactcaagccggagcatatcctttttaacggccaggacataagcccagctcaagcagtgcacgagaaagtctttgagggggacgtagccaaaatcgagaagatgttgagactgagtgttctcaaacgggtggaggatataaacgagattggggtgatcttctcaggtgggctcgactccagctacctggccttgctgctcaaagagatatccgagaatgttcccctgaaaatcaaactttacgctgtgggggtaaaagggtcgaaggatgtggaagcagccgtctacgcttctaaattcttgaacctcgatctggaaatctgcgaagtcaccgaaaaactaatccttgaagcactgcccagtgtcgtgaaggcaatcggcgacgataacctcatgaaagttggtgtgggacttacaacttacttcgcaaccaaaatggtggcctgcgatggtgtcaaggtggctgtgtccgggcaaggcgccgacgagctattcggcgggtataagagatacctgcagagtttcgtggacggaaccctaaactacgacctgagggaagatatgtcaaatatgtatcacgtgaatcttgagcgagacgatgcgtgttccatgcttaacggcgttgagttgcggctgccgtttctggacaagaccctggtggaactggtcctgaacatccctgacaataagaagatcgtgagcatgcacgacgatatgaggaagtcgatcctgcggaagttggctttcgaaggaggcctggattacgaaatcgcctaccgccctaagaaagcggcccagtatggaactggcatcgacaagattctcagaaagaagatcataaaggacatggatatttctcagttcttatga

SEQ ID NO: 9422 - DNA, 216 bp, synthetic construct
  source 1..216: mol_type = other DNA
atgacaatcgagaaagatgcagaagacatcatagaaaagttctccaaaattctcgaagatatcccagacagcgacgagacctggtacattacggataatctaaacctgacccgcgacgataaaagccaggagaagaaccccgagaagatcctgaggaacgcccggatcgacaaggagggcaacctgattgtgaagaaagcggactggactaattga

SEQ ID NO: 9423 - DNA, 486 bp, synthetic construct
  source 1..486: mol_type = other DNA
atgaggataaacttggtcctcgaacttctcgatgctcccgggcagttagtgaaggcgctggaaccgatcagcacttacggggctaacctggtaactatcatccacaagcgggactacaagaacgacaatggcatggttccagtgcagctgacgatagaaggagaacgaaatgatctgaagaatgtcgtcgacaagtatgaggagctgggattcaccatcattgagatggacggcgttgtgaagaaggaaaaaatcaccacaatcctgttcggccatattgtggaccaggacctccgcgataccatggacaaaattaaccagatcgatggtgtgattatcgtagcattcgacattaaactaaatggggaggaaaaaagcacagccctcatcaacatcgaggccgatgtgggccttaagcaaaacgtctttgatagaattgccgagatagcagaggagaaagagttgctggtgatcaacgaggtgtga

SEQ ID NO: 9424 - DNA, 1020 bp, synthetic construct
  source 1..1020: mol_type = other DNA
atggatgagtgcaaggtcatcatcatgggattcgggagcgtggggcagggtgtggcgaaggctatctccatgaagaaggatctgattaaggataaaaccggagtggacataaaagtggttgctgccgccgactcatcgagttcggcaatctcacaagagggattagatgaagaactgcttgtaaagacaaagaaggaggaagggaaactcagcgcatatcctgagttcgggagcgacaagaacggggccgacattctggacgctgtggaatacgactgcctaatcgaggccactcccaccaacatcgtggacgccgaaccggcacttagcctaaccttcaaggcattcgaacagggcaaagatgtcgtcaccagcaataagggccacttggctctcaagtttagggaggtggtggaagccgccgagaaggcgggggttgagtttaaatatgaggcgacggttggcgggtccatgcccataatcaactttacaaaggagaccttggcaagctgtgaaatcaagtccattaagggcatcttgaatggtaccaccaactatatactgtcacggatgacctccgaaggcagcgaatacgaggtgattctgaaagagtcccaagagctgggaatagctgaaacagacccaacacaggacgtggagggtatcgacgccgcctgcaaaactgtcattcttgctaattctctcctgggcatcgatgctacgtacagtgacgtgaaggtcgaaggtatttcaaaaatcaacagccaggcgattgagctcgccaaaaaagacgattacctgatcaagctgatagctgaggtgagccccgataatctccaggtctccccaagactggtgaaacgcggaagttcctacgacgtcagtggcacgctcaacatggccacaattaagacagacttagccaacgaggtaagcgtaatcggactgggcgccggcagcctcgagactgccagcgcaatgctgactgatctgattagtatcctgaaaaataagatctga

SEQ ID NO: 9425 - DNA, 1212 bp, synthetic construct
  source 1..1212: mol_type = other DNA
atgaagtacgtaatatttatcccagacggttcatcggaccttccactagacgaaattaatggtcagactcccctgaaggtggctaacactcccaacattgacaagctggccaaagcgggttatggcggcctcaccaacaacgtccccgagggttatactccagggagcgatgttgctaacatgagcatcttcggatacaaccctgccgactattataccgggagggggcctctggaagccggcagcgtgggcatcgagaccacaccctgcgatgtgatatttagatgcaacactatctttgagaaaaatgggaaaatggaagatttcaatgcaggccacatcacaacagaggaggccgatgtcctgatgaaaggattgaaccgatacttcaatgataagtatcccggattcaaggggaagttttacacgggcatcagttaccgccatctcttcgtatattcctgtgataacgtggaggatgccgaaattttagccaacttaaagacaatgccgcctcacgacatttcaggggagaacctcgttgacaatttgttcggagactgcgagcttgctcgtgaaatccagaacatcatgtttgagtccaaagaatttctgaagacacaggaaatcaatcagaaaagagagattccagcaaatatggtctggctctgggggcagggtgtcacccccaaactacttaacttcaaggagaaatacggcctggacgcggctgtcatcaccggcgtggacttgctgaagggcatcggagtgttcgctggcatggagatcatcgatgttcccggcgccacgggattcttcgacaccgattatgaggccaagggaaagtacggcatagaagctctgaagcggaatgacgtgctgtttattcacatagaagcacctgacgaggccgggcacgcccagctgctggacgagaaggtaaaggcgatcgaacaaattgataaattcatcgtcggccctatcctggacagcctcgagggtcaggactaccgcgcagccattctgccggatcacccaacccccatcgacatcggcacacatacgcgggatgacgtgccgattattatgtacgcatccgatatggagggggatgactgtgtggcatttgacgaggtgtctgtgctcaatggaagtataaccaagaaagaagggtacaaactcatgcaaaggctgattgatggagacttctga

SEQ ID NO: 9426 - DNA, 636 bp, synthetic construct
  source 1..636: mol_type = other DNA
atgaaggtgctcctcgtaaacgggagccccaacaggaaaggctgcacatacaccgccctgtcagaagtggcaaatgtcctgaatgaacacgacattgagactgagatcttctggatcaaaaccaagcccataacaggctgcactgcctgtggcacctgtgctaccattggcaagtgcacctacgatgctgacagtgtgaacgagtttgttgagaaagcctacgaggctgatgcgttcgtcttcggttcaccagtgtattatgccagcgcaaatggctcgatggttagctttttagaccgggccttctactccaacagccatggaaaaggggcggaagcctttaagcacaagcccggggcagtgatatgtagcgcccggaggggcggaacaaccgcaacttacgatcaactgatcaagtacctgggaatctcccagatgcctattatctccagtttctattggaatatggtgcatgggaacacgccggaggaggtgctccaggacgaggaaggactggggacgatgcgacagttggctcacaacatggcctttttcctgcagtgccttgaagccggtgctgaaaaaggcctaaaggtcacggaggagccaaagcctcgcacaaacttcatcagatga

SEQ ID NO: 9427 - DNA, 1356 bp, synthetic construct
  source 1..1356: mol_type = other DNA
atgaacatcttcaaaactcctgaaggttacatatacagcaacaaggcgctgctcgctctgttcattcccctcctgatcgagtatgccttggagtttttcgtaggatttgccgactcgataatggtggcaagccttggtgaggctgccatctccggcgtgtcgctcgttgactttcttattcagctgcttatcttctctttttcagctctcgcaactggcggagctgtggtggccggacagtacttggggaataagcaaatagacaaagcccaggactctgccacgcagctggtgtggttctcaaccatcctgtcagtcatcctcatgatcattgttatcattctgaggcagtacctgatcgggatcttgttcggccaaatcgaagtggatgtgtggcaaaacgccgataagtacctctacatcgtggcactctctatcccctttttagctatctacaacgccggcgccagcatctttcgtaccacgaacaacgcctccctgccaatgaaaatactattcatttgcgacatcctgaacattgtggggaatgcgatttgcatttactatctgggatgggatgtgcacggtgtggcaatccctacggtcataagccggctgctgtccgccatcctaatattgcacttcgttgtgaatgaggattataagctgcacattaagcggacattaattcataaatttgactttaagatccttcgcaaggtcctccaggttggcattccctatgggatcgaaaatgggctgttccagctgggaagagtgctcgtgctcagtatcgtgtccacatttggaacaatggccatcgcggccaactcagtcgggtacgccgtcgggatattcagtgtcttgccaggtttcgcaattaacctgggcctgaccgctataatctccagatgcgttggagctaatgactacgaacaggtccgatattacaataagaagtgtttaattatcgtattcgtctcccacatcgtaatcaatctgattatttttgcagcccttccgctaatcttgaacatttacaacctctccgctaagaccgccgccatgaccagtgagatgatcatttggcatggcatattcggcattatcatatggccactgtctttcacactgcccgctacatttcgcggcgctggcgatagcaaaagcgtgatgtatatcagtctgatcgtgatgtttacctgtcgcattgcgcttagctatgtcatcgcggacttcatgggcgttggtgtattcgggacttggatcgcaatgttcatcgattggtatgtgcgggccgcaatttatatttacaggtacttcagcaataaatggaccgagtacagggtgatctga

SEQ ID NO: 9428 - DNA, 408 bp, synthetic construct
  source 1..408: mol_type = other DNA
atggacggcatcgtgtacaagaacactcacaactttagtaaacgcgagctcgaggagctatttctgtctctggaatggtccgcagggcatttcccagacaaactgatcattgcaatgaagaacttcaagacagtcttcagcgcctgggatggtgaagaccttgtggggctggcgtgtgctatggacgacggcatcatgaatgcctacgtgcactatctgctcgtgaagccggagtatcagttaaaaggcattggaaaggagttgctgaataggatcaccacccactacaaagattacatgcggattgtagtcgttgcctatagcgacgaaatcaagttctacgaatactgcggatttgagaaagccgatgatgcctcacccatgttcataacgaagctctgggcttga

SEQ ID NO: 9429 - DNA, 774 bp, synthetic construct
  source 1..774: mol_type = other DNA
atggtcctgttccggggagacatcaagtgtaagagcctccagcggcgcaccagcattagtgtgatactgcctgcggacaacatccacttcctctccgatacagaagagatcgtccctcaaccctacaagaccctgtatctgctccatggactgtacggaagcgatgacatctttctggcaaacacatctatccagaagtttgccgaagaccatggaatagcgatcgtaataccatgtggggaaaacagtttctacctggataacaagaaagctcacgcctattatggcgagtatgtgggccaggagctcctagacatcaccagaaacattttccccctatctgacaatagggaggacacctttatcgcaggcttctcaatggggggctatggggccatcaggaatggccttaagtactccaagaacttcagtaaaattggcatgatcagcgccgcattaataacggacgaaatcgtggattacacagatgacgacaatgtgctctggagcaactcattttacaagtcctgctttggtgatttggacaagatcaaaaactcggataaagatcccaaatatcttattgagaatactgccgatattccagacattttcatggcctgcggtgtcgacgacttcctgtacgataagaatgtggagttctacgagttcctggagtccaaagacatcaacgctgaatttatgcagtctccgggggagcacacttgggacttctgcgatcgatacgttaaggaatttattaaacgcttgtga

SEQ ID NO: 9430 - DNA, 444 bp, synthetic construct
  source 1..444: mol_type = other DNA
atgaagtgtcccgaatgtggcaacgagctggacgaggacaattactgtagcgaatgtatggaatttatcgataaccccattggaggcaggctctgcccatactgcggggaggagctggatgaagataactattgtaacagttgcatgcagtattactacgaggaggaaaatacacaggaactggaggagatcgactatgactccatggtgaataacggcgactccatctgccttaactgcacgttttggtctgtctccccgtacgggtcggctcatggaatgatctgccgcaaaggtcagataagtgacggccctggagacagctgcgggctattcgtgcaggagtacaacttcgccaactacggtgatgcaggccaatatcagttcaatgagaccaatcgggccatttcaaacaagctctatcactggaaaaatagcgggtga

SEQ ID NO: 9431 - DNA, 1617 bp, synthetic construct
  source 1..1617: mol_type = other DNA
atggagaggatttttctgacaaagtacatcatcataaccggaggggtagttagttccataggcaagggtattacctccgcctccatgggacgaatcttgcgctcctacggtctcaacgtgtcagctatcaagatagacccgtacctgaactgggattccggcacactcaacccatatcagcacggggaggtattcgtcacgagtgacggcatggagaccgacttggacctcggccactacgaacgctttctggacgtggaacttaaaggccttgccaatatcaccactggtaaggtttacgagtccgtcatcgccaaagagcgagagggtggctatctgggggaatgtgtccaggtcataccccacatcactaaccggattaaggaaatgatcagggagaactccgagagcgcagattacgacgtggtgctggttgagctcggcgggactgtcggagacattgagagccagcccttccttgaggcactccgccaactccgcaacgaggagggtcgggagaacgtgatgtttgtccatgtgacattcattccctacctggatgcagcgggagagtttaagaccaagccaacacagcactctacaaaagagctgagaagtgttggaatcaaccctgatgtgatcgtatgccggtcacagaagccaattgatgacgggctgagaggcaaaatcgctcacttctgtgacgttgacttcgaagcggttgtcaatacgcctgacgctgataccatctacgaggtgcccttagtcttggaagaacacagcatcggcgagctgatcgtcaaaagaataggactgaacatcaaacctgattcgtctaagctgaatgaatggcgcgaagtggtaaaaagcctcaagatcaaggagcctaaggtgaatatcgggattatagggaaatacgtggagcttgaagactcatatattagtatccgggagtcactactccatgccgcggccagcattggcgtgaaggctaacattatatatctgagctcggacgtggaagagctggaccaggatgccatgagcgaactggacgggattctaattcccggaggattcggggaacggggcttcgagggcaagctggatgccatcgagtatgccattgagaacaatgtgcctttgttcggaatttgccttggcatgcagagcatggtgacccaatttgccaggagaaatgggttcagcggagcaaatagctccgaatttgatgatgacctgaagttccccgtgattgacatgatggaggagcaaaagaaaatcaagaacatgggcggcacaatgcgtctcggatcgtacggttgcaagataatcgaagggaccaaaacttatgaagcctacggcgagagcgacatcgaggagcgtcaccggcaccgatatgaatttaataatgattacagggatggtctgcaggaaaagggcctaatcatcagcggaacgagtccagacgacttcttagtggagatcattgagttgccgaaccacccctgggctgtggggtgccagttccatccggaatttaaatcaagaccaaataggccccatccactgttcaaagcatttctggaagctatccatgattattctaagaactga

SEQ ID NO: 9432 - DNA, 867 bp, synthetic construct
  source 1..867: mol_type = other DNA
atgattattacgacaatcttcctgatccagatcatcataacagttctgttttcaataatggccgccatttacgatatcaaaagcaacatcgtgcctaacaaactcaactattccctgatcttttttggcttattcagcaatttaatcctctccattatttcaaacaatatcaagtacatcctggcctcttttatctccatgtttatcacctacgctgtgacttatatgctgtggaagctgaatatctggggaggaggcgacgtcaagctcttcaccgcaattgccacagtaataccatctggtcttaacatcaacttcttgaacattttcccgcaactgtccgtgtaccccttttcatttagcgtggtaattaacagtatcctcgttagcttccccttcctggtgatcttcgtcacccatctaatatttaaaaataaagtgtttatgggcaacatcgattttctagtcaatatcttcaacatcgaaagtctgaagtacataaaaaatagtactctcaacaagctgattcctattaaggacctcaaggaagggatgatcgtcaacgactactacttcaacaatgagcacatcatcgagcttttgtccgagatggggggtaatctggagatttataagtcgaaccggaatgatttcaagtattacttcaagagccagagcgcaggcggcattaccaatgaggaagtgtggcagcttaaaattatgaacagtcaggatataatttccgacaatatatcgatcaagctcagctttccattcgcgcccgccatcttcctgggactggtcatcgctattgtgtatggggacatgatgatgctgatcattaaaaacatcttcttggtgatatga

SEQ ID NO: 9433 - DNA, 429 bp, synthetic construct
  source 1..429: mol_type = other DNA
atggttaaagaaagtggcgcccagattagcttagagtatatgttgatcttttcaatatccctggtgatcctgatcgtgttcacactgcccctcgctgaaaacagcattcggaacactctcgacgtctccgactctctgaatgtgaagagcgacctcagcaaaatcgcgaacgcaatcaagcaggtgtacggtgagggccaaggaagtaggcagaccattaagattgaaagtaacaagaaactaaagataaatatagccaacagccatgtttctacatcgttcaagcttaagtccaactccaagaaggatatcaaagagcacgtcatgtcaaacattgggaaaaccaccatcagcctgaacaagggggagaatgtgatcattgtggagtggccagtcaattctaaaaatatgctgatctacacggtatga

SEQ ID NO: 9434 - DNA, 804 bp, synthetic construct
  source 1..804: mol_type = other DNA
atggacataataactacaatcatttacctcgtgctcttcatcgtcatgatggtcttcgtcttctcgattggaatgctgagacagtacatgcctaagcgggaggtcatcctggtaatccttgtagcctttctgattgggtcaatcggaggggcatttttcctcgaccccatctatgatgagttacccaacgtggccagtgtgattgagaagaacatgccaaacaacgaagagacactgtacttggatctgtcatcgtccattaatattgatgacctgaagaacaatctatctgcaactgacggattcattagtttcgacgaaaagagcgttaacatccccatgtggacgttcaatgagcgcgagcacaactacttcgacgaaatcgtgggcaacatcgacagcaattacaaagcgtataatatcagtacatccgagatccagataacccttgccgacaactacacctctgcccaggctcttaaatcctttagcgattggtataaactggtgtatggcgaaactattagctacgcgcaggtgcatgccgtactggttgtggactccagcagcctagatacgtttgagcacatcctgctccaaaagggcatcgtggctagcaagattgaagggccgatccaggacacagtcaacaataccaattcatccatgttgaccaacatagagtttaccctcgtctgcggcggcatcggtgtggtggtggcattcatgggtatatacgttgattctgttgtgccagcctataggaagtttagaaaattcctgagggaaaaacgccgacggtga

SEQ ID NO: 9435 - DNA, 690 bp, synthetic construct
  source 1..690: mol_type = other DNA
atgaatgtggccgtcctgttttcaggtggaaaggacagtacgatggcactctacaacgctctcgattcgaaagaggatgtgaaatacctgctgagcatgaaatccaggaacgatgaatcatacatgttccacgtccctaatatccacctaactgacttgttgagccaagcgttcgacatcccaatcatgagcgtggaaaccgacgggattaaggaggatgagcttaaggacctgaagcaggccttcgagaacctcaaggaccttggcgtcgaggccatctatacaggggccctctactcccagtatcagaagagccgcatcgaacagctatgcgatgaagttggccttgtggctatctctccctattggcatgtcgatgagttggagtacatgcggaagatagtgagcctgggcttcaagattataatcagtggagtagcagcttggggcctcgacgagagctggctgggaagaataatcgacgacgaaaccattgacgagttaatggagattcatgaaaaatatcacgttgatctggcctttgagggcggggaggcagaaacactggcgattgacgggccgatttttaagaaacgaattaaaatcctgaagtacaagaaagaatggcacaatgactccggtgtgtacatcatcgaggatgccgtgctggaggaaaagatgaacctgtga

SEQ ID NO: 9436 - DNA, 540 bp, synthetic construct
  source 1..540: mol_type = other DNA
atgcaggtcatggggatctcaggcctaccaggaagcggcaaaagtttagttagcaagattgcaattgaaagaggcgccaaaatcgtgagcatgggagacatcatacgggaggaatcgaagaagagaggggagagcaccaaggagacggcccagaatctgcgcgccgagtttggacagtacattgtatccgaactcaccatcaagaagattaaaaaactgcaggaagagggcttcgagagcaagatcatcgtggaggggatacgaagtccgcacgaagtgaacatgttcaagaaaaacttcgagaactttatcattctgtccatcttcgcgaaccccaccctcaggttcgagaggctgaaaaaccgcatgcgggaggacgattccactgattatgtggaatttaaggctcgtgaccaaatggagctcgacttcggtattggtgatgtcatctcactgtccgacaaaatcatcatcaatgagacagatttggaaagctacacaaacagcataaataagtttcttgacgagattgaactgtga

SEQ ID NO: 9437 - DNA, 738 bp, synthetic construct
  source 1..738: mol_type = other DNA
atgatacccaagagccaccctcgatacgagtcacttctgctcagagataagatggttaaggcctccaaggagggttatctcgcggatagtgcgcttatcgcccatgggaggggcgaggcttttgactatctgattggagagaagactacgtaccccgccaagcgggcaatgtatgtggctgtcgccgctctgctgttatccaacaacccggtgattagcgtgaacgggaatgcaaccgccctggctattgacgaaataatcgagttcgccaatgccatcaatgctaagattgaaattaacctgttctacaaaaccaacgagagagtcaagatcatcaccaagctatatgaggatcacggctaccgcaacatacttggcggcctcgacgacgatattgaatacatcaatgacatagaaaacaatagggcgagcgccagcaaaaacggaatctacacagccgatacaatcctgatccccctggaggacggagaccgcgcagaaatcttgaaaaagagtgggaaaaacattctaacaattgacttgaacccactgtcgcggacgtccaagatgagcgatgtatcaatcatggacaatatcgtgcgtgcaatcccattcatgacccagatcgccaatgacttgaaaactcaggataagaaaatcctcgtggagctggtgaatgaatttgacaacgaggagaacctcaaagaaagcctggaacaaattaaagtcaaggagtga

SEQ ID NO: 9438 - DNA, 384 bp, synthetic construct
  source 1..384: mol_type = other DNA
atgaaaatcaaactggcaataatttttggagtgctcatctggatcttgaccttcgtgctgagcgccacattcaacccaatctttacgaccaatgttcgcaatgtcaacatcgtggtgcccattattactatcatcgtaactgggttcttcggcatcctctatatccgggccattgacactaatgagattgtggaaggctttctggtcggcataatctttgtcataatcgacattattcttgattacatattcatcatatccctacagaagaacctgtacatcatcgggaactatacactgcacgtgttcagcatgatcacaattacgctcctgatcaccaccttcctgggatacttagctcagatgaccattgaccttaagtga

SEQ ID NO: 9439 - DNA, 1035 bp, synthetic construct
  source 1..1035: mol_type = other DNA
atgaacgcctatattgaacacgagaagtacctgaaaaacaccttgctcggccttaacaactcctcagattccaagcaaaaggaaaagagtctgagcagccactactttaaggatttgaaagagaagctgctgatccagtatgagaataagtcactaaaagatgtcatggactgcaatatatgtaacacaagctttggggacgccctcaaaataaccaccaaagaaaaaatcgatttcaacatctatgacaacaactttaagaaccagatcaaccacaacctcaagctcctcccgaaaatcggcctgaaaactgaagaaaatctcaagaataagggatacatgacaattgagagccttaagaaccatgacaaatattgcgacaccgcgtcgaagttcctaaataaaatcgacgacatgtcttttcacgaaattatggacctgctggacaacaataggtacagcaagaagtgccgggataatctgctgaaatgtataagtctaacggatgttgagaacttcaaattcatggatatcgaaactaagggactcagcaatgtgcccatcatcttgatcggtgtggccgaaatcaagaagtgtaagatcatatcttcccagtatttcctgagggactacacagaggagcagaatattatcgaggcatacctcaatcatttggatgaagactccattcatgtaacattcaacggtaagagcttcgacgtgccatttattcggaaccgctgcatttacaatagaattaaccacaatctggagctgcctcatctggatttaatgtactttgctaagaacttatggaaagggtcacttcctaatttcaaactgcaaacgatcgaggaggagattttcggcataactcgctatcgagacgtccccggccagtacatcccaggatattacgacacctacctgtccaagaagaacatcgggccagtggtccccattatccagcacaactgccaggacatcatttcgcttgcaagtttcctggagaaaatgtacgaggatgtgaattga

SEQ ID NO: 9440 - DNA, 1503 bp, synthetic construct
  source 1..1503: mol_type = other DNA
atgggtctgttcgatcgattcaagaagagcgataaaaaggaaaagaagttgattccagacaacccggagattgaagacgaggagctacgcctgaaagaaatagccattaatcacaaggacaggctggagagggcgcaagccgcagataaaatctcaaacgaatttctcgcactggacatggctaagaccgtgaaagacagggccataagactcatcgcggccaataagctgaaggacgaagaccttttaatggacgccgctctgaacagccagttcttcgatgtacgcagctttgcatgggaacgtctgggggagaacaacaagtccatcgctgaaattgtcataaataccaagaaaaactctcacgtcgatgagatcttcaacaaaatcgtggacgaagaaactctgaaatggatcgcaattgaggccgtggacaagcggtatcgcacacgggccctcaataagattgacgatgccgggatactgtacgatcttgttttcaaatccaatgacagtagtattaaaaaagccgccatcctgaaagactcttttgtaagtgaggacattcttaagaaggtcgccatcgaggacaaggatgagggagtaaagaagatcgctattggcaaaattaagaatgaggactcactggttctgatagcgcagaatgaggataatgcgaaggtgagaagcttcatctttgacaagatcaacaatcccgagaacctcaagcatatcattttggactctaaaaaggccgacgtcaaaacagaacttattaacaagatcaccgacagcgaccttctggccaagatcgcactcgaagataacgacaatatcgtgcggagtgaggctgtgaagaaaatcactgacgaggagatcctgatcaaaatcatcagcacggagaaagatcgcttcgtgcgccagattgctgtgaagaacatcaacaatcctaaagagctgattaagatagctctgaacgacgatgaccagttcgtcagaaaccacgcaatcagcaattctgcactggccgacgaaaaagactttaagtatttggccatcaactccatacatgaggatgtggcatcggaggccctgaatcacattaatgatgaaaacgacttcatcgatatactaaagaacgcaaaactcacatcaattcgaaaaaacaccctagataacatcagcgatctcgaaaccttaatccgaattatcctctcaaacgaggatgaagagttttcgctcaaagctttagataaaatcaaggtggagaaatgcctgattaagatatacgagcagaatatctccgaaaatatcagcatcagggccattagcctgataagaaatcaaaagtacttgggcgaagtcgctcggaacgattcctcctggaaggtgagggaggcggctacgaagaaggtggtcagtagaaaagttctcaaggagatctccaacaacgacgaaaacgagtacgtgcggaacattgccaaaaagaagttgaagctgtga

SEQ ID NO: 9441 - DNA, 759 bp, synthetic construct
  source 1..759: mol_type = other DNA
atgaagaagatcaccaggatattctttagcccatcggggactaccaagaagatcgtagataaaatagctacgaacttcaaatacgagaaagagatttgtgatctgctgcatttcaacgacactaaggagtttacagactcagacatcgtgatcgtgggcatgccggtgttttctggccgaatcccaaagaccgcccgcaacagactcttgaagctgacagggaataacacaaaagcaattgctgttgctaactatggcaacgcgaaagtcggcgacgcactcattgagttagtagatattctgaaagaaaataacttcgacgtcatcgccgccatttccaccgtcagccaccactccatttttaatggtgtggccgtgggacggcctgacaccgcagacatggagaagatcaatgagtttggacaaaagtgcgtcgaaaaactagaatctggggaatccctcaacagcgaggttcccggaaacagaccatatgccgattacaagcagcttccttttatcgtcagctgtgaccagaataagtgcatcttctgttacgattgcgtgactttctgccccgaaaacgcaatccctgatgaggaccccgccgatgtggaccttgacatatgctcacggtgcacggcttgcatccacatttgtcaggaggatgcgaggagcttcaccggtgaggccttcgagacaaaaaagcccgtgttcgagagtgaaaatagtgagcgcaaggaagtggaactgtacctgtga

SEQ ID NO: 9442 - DNA, 1032 bp, synthetic construct
  source 1..1032: mol_type = other DNA
atgatggagctgatgagagagctcagcctgacaccaggcgtgagcggctccgaggaaaagatagctgagatcattacacgggaactcaaggatgtcgccgacaagatcgaaacggacagtatgggaaacatcattgcaaccaaaaagggggaaaagaaggctccaaccgttatgctagcctcgcacatggacgagataggcctgatggtcaggtacatcgacgatgacggttttattaaattctcaaacattgggggaatcaatgatcagatgctgatgaaccagacggtcaccgtgcatagctccgtgggcgagcccatcgtaggcgtcatcggctcaaagccacctcacgtgacaaccgctgaagaaaaaaacaaagtggttaaatctaccgacatgttcattgacatcggggccaaagacaaagaagaggcagagaaaatggtgcggattggagacaagatgacattcaacagcctgttcgctgagtaccccaataatctcatcatgggtaaggccctcgacaaccgggtgggttgctacgttatgatggaggtgctgaagagagtagatactcgcgccaccgtttatggggtcggtaccgtgcaggaggaggtagggcttaagggagccaagacctccgcatttcgactgaaccctgaccttgccatcgcacttgatgtgacactgtctggcgaccatcccggcattaaaccggaggaggcgcctgtcgtgatgggtaaggggcccgccatcatattggcggatgcgagcggaagggggatcttgacgcaacagagtgtgaaggatttgctcattaatgccggagatgaaaatgagatcccctaccagttagaagtgagcgacggcggcactactgacggaaccgcaatacacctgactcgcgagggcatcccaacaggggttctaagcgtgcctacacgttatatccacactccggtctccgtctgtagtatggatgatgtggaagctaccattcaactgatcacggaagccataaacaacctgtga

SEQ ID NO: 9443 - DNA, 486 bp, synthetic construct
  source 1..486: mol_type = other DNA
atgaatatcgagctggagagcatcgggacaatacacacggaatttaaggaaatcgaggggatgcccatccagcctactggtgccaaaggaatcaaaggcaccatcgagatcaaagataagttcgttgacggcctaaaggacttaaaggacttctcacacattcatctgatttatttgctccacaaggtggagggttacaagctggaggtcaagccgttcatggatactaaaacccacggggtgtttgcgacaagatctcccaaaaggcctaaccgcatcggaatgagtgtggtgaaggtcaacaaggtggaaggcaacaaggtccatgtggaaaacgtagacattcttaatggaacccccctgctggacattaaaccatacgttccacagctctacgaagacaccattgatgagctcaagataggctggttcgagtccaaacaccaaaaagcaaagtcccagaagagcgatgaccggtttaaatga

SEQ ID NO: 9444 - DNA, 207 bp, synthetic construct
  source 1..207: mol_type = other DNA
atgcagctaagtgcgcggaatcagctgaacggtaaggtcactggcgtggagaagggggcagtaatggctaacatcaaaatagaggtgtccgaacccagcacgatcacagccattattaccaaagagagcgcagaaaaactcggcctggccgaaggggatgacgtgacagccatcatcaagtcaaccgaggtcatcattggaaagtga

SEQ ID NO: 9445 - DNA, 438 bp, synthetic construct
  source 1..438: mol_type = other DNA
atggtcgtacgggtcatagaatcaaaggaggacaaaatcacgacagcggacctcatcgacgagttgaagaaaaattccaaagtggattactgcggagcaattttcagttttgaggggtttgtgcgcgggaaagaagagaacatgaacctgcagaagctgattctgactacccccgataaggaaaagacaaagtccgagatcgagaaaatcgtggagaacgccaagatcaagtacaatgttgccgaaatcagcgtggtccactacatcggtgagttctacaccggcgaccttctcttcctcgtggcagtgctggggtatcatagggacgagagctataaggccctgaaggaagtaatagagaccgtgaagttcgatgttgactttaaaaaagaagaaatttctgatgagggaactaaggtcattctagctggcggctga

SEQ ID NO: 9446 - DNA, 534 bp, synthetic construct
  source 1..534: mol_type = other DNA
atgaacaaagttcgggggattttcattggacgcatgcagcccgtgcacaatgggcatatgcagattattgacaagatcctcgaggaagtggacgaaatcatcataggcatcggcagcgcccagctgagccacagcctgaagaatcccttcaccgcgggtgagcgcgtggtcatgctcaaccaggcacttgctgaaaggggtgtcgatccgtcaaggtactacatcatacctatgcaagacatcaactttaacgccctttgggtgtcccacgtgaagatgctgactccaccattctccatcatttatagtggaaaccagctggttaaacaactgttctcggaggaaggctttgaggtccgacagcctcccctctacgacagactacggctgtctggaacagaggtgcgtacgagaatgattgagggcggcaattgggaggaattagtaccaaacgccaccatcaatttgatcaacgaaattaacggggatgagaggatcaagaatctgtccatacgggagatcagtgagatctga

SEQ ID NO: 9447 - DNA, 711 bp, synthetic construct
  source 1..711: mol_type = other DNA
atgaataaaaagatgcagtaccagatactgctcattgttctaatcgctatcgtaatctttaacttaagcatcatcgtcagtagcatgatgaacactcccgataatgtttataacatcaccaatgtagggcacaacgctaatggtaccgtgtacaagatcgaggccgggaacatgtcctctaatgagaccgtgggactcatcctgggcgtccatccccgcgaacacgaaattcacgaggcggtgaataataccatttataatattacttccgagaacggcacgaacaacctgacgaaaaagtatgtcatatactacatcaagacaaaggacaacttgacttcccgggaagatacaaggcctgccggcgaagaactggccaacaaattcattgttccaaatatcgtgaaggacaagccattcatcgtcttggacgtgcacgaaataaacccagactatgagtactcaaattttatattcagtctttccaacagaaccaacacagtggacagctacatttctcatattgccaacgatgtgaacctggtggattaccagttctcggaggggacaagccctgagaaggtgaccaaaccgattgccagcaagggagtcactacactgctgatggagacgtcaatcaccgacgcactgatggagaaacaaaagaccgcagacaaccttatcaaaagcctcgatagtctcgagccctga

SEQ ID NO: 9448 - DNA, 675 bp, synthetic construct
  source 1..675: mol_type = other DNA
atggaaaacaagaacatgatcattatttttgcggccgtggctgtggtcatcattgcaatcgccggcatcctgttcgctaccggattcatcggcgggaatgacgtcgagaccaccccatttaagatgagtttcatggaaggctccttcatagggaatgtcagtctcgagaatgacaaagagaaattcatgcactcttacgaggataaagagaacaagataacctacaacatctccactgtggacaactcttccgtactgatggagatatatcagatccagggactagggaaccccgaggtgaggtcattcaatggcaacgaatggaacatttactttacacaggccgtgccgaataataattcaagcactaatagcagtaacggggacgacgcaatgaacatcatcatcggagaatcccaaggtaagaaacaggggtacctcatttatatgattattgatggcaaatcgaagatcaacgccaccggtaagatgtatggcgaggcctatacgaactactttgagcctttgctggaaagcttaacactcaaggaaagcaagaacgttccccatatctacgatgagtttggacttacaaaagaacagttcgactaccagatcgatctgatacggcagtataagagcggcaatacgtctgcgctgcagggagctcaatga

SEQ ID NO: 9449 - DNA, 531 bp, synthetic construct
  source 1..531: mol_type = other DNA
atgcgaattacagttttccacgcaaatgagtgcgaccgcaagaagtgcacgagcatcaaaatggagaaaatgggaaagtgcagactggtgtacgacataaacaaaatccccggtggcgcagtcgtgctcaatccctacgcggagaaagctgtgagctacgaagactacaaatatgtccagcggaggggcgtggtgggcttggactgttcctggaatgaggtaagccaaagcaagaagttcttctccctgtcaaaatatcacaggtccctgccttttctgatagccacaaacccggtgaactatggaaagccatgtatcctgtcgactgtggaagctattgccgccaccctgtacatcacccgcttcaaggacgaggcgtatgatatgatggatgggttcaagtgggggcatacttttctcgagctaaatcaggatttgcttgaggcctacagtgaggtcgacaccagtgccgaagttgtccggctccagaacgaatttttagaaaactcaaagaaggaggtaaacgattga

SEQ ID NO: 9450 - DNA, 147 bp, synthetic construct
  source 1..147: mol_type = other DNA
atggccagattcgaagaggcagaaaacaggatgtttaatgtgaaaatctgcctcaaatgcaacgcccggaacccagcgggggccacaacctgccgaaagtgtggctataagggcctgcggtacaaggctaaggagccccgcggatga

SEQ ID NO: 9451 - DNA, 753 bp, synthetic construct
  source 1..753: mol_type = other DNA
atgaaagatgtggagaactatattcgagatatactgaagagtaggaagatacactttactctcattgaccctgacgaacagacaccagaggaggcgctagagatagccacgcaggcaatcgaaggtggcaccgacggtatcatgattggaggatcgactgtgaatggcgacgatgtcaacaacacatgcaaaatcctgtctgaaaatatcgccgttccgatcattatcttcccgggcaataccagcagcgtcagtgaatacgctgatgctattttctacatgagctatgtcaactcaagagacccatactggatcaacggtgctcaggccctggctgcccctgccgtgaaggcaagcggaatggagatcctctccatgcattacatggtggtgtcccctggcggaacggttggctgggttggggacgccaatttggtaccccgcaacaaacccaagatacccgccgcgtatgcaatgtccgccgaactgtttgggatcaagttcttctaccttgaggcaggttctggggccgaagagcccgtgccacccaagatggtggggtatgcgaaaatggccggcccaaagaacattctggtcgtcggcggaggcatccgggacggcaaagcagcttacatggctgcaaaggccgggggggacgtgatcgtaacagggaccgtggtggaagaggtcgatgatgtgaagaccaaaattcaagagatcaccggagctatcctcaaggcctcaatggagtga

SEQ ID NO: 9452 - DNA, 1074 bp, synthetic construct
  source 1..1074: mol_type = other DNA
atgctcaactcattatacgagaaggccatcgctaagcgcggcttcatccatgacattgacagccagactgacgtggagagccaattggagtacaagtggtttaatcgcgacattctagaaatcgacaatggtttctccatcgctgccggagatggaagtttcaacaagaagaaattcctaactacgaatttctgcgcagttggcgccgagtccataatttatgatgggaaaatcaagaagatagatgactccgacatcttcgacatcccgcacgtctctttcctggatgagttgctcagtaactacatggcgatctacgaactgaaatgtgcccttcggaccatcaaggagtacaatgtggactattatatgattgacggatctatcctgggtgatctgcagaacccattcccacgtggggccaagctgccctccaaacttaaaaataatctggacgatattctccttaaagaatttgagagaagactgaacatcaaaaaatatggcctgatatttccagagattagggactcactcaacctggttgaatttcctaagaacgagaatagcaacaaaatcgaagagtacaatctgcaccttgcgtcgatcgagaagataattctcctgaaagagatcctccagtttcgaaaaaaaatcatctcaattagcaaaaccagcagcgacaacgatctgtttcactggaacattcccgacattgcattcctggataagttcacagagaagcagggcatttcgctgattaagcacaaaaccgtctacaaaaagaccgcctttccctactttaacgatttcttcaagagtataacattcacgatcttctacattcggctgcaggacaataagaatgtgttgaaggtggaattgccttataaggcaagcaaagaggacgtctttgaactcatcaagaagatcaacgctctgaccgtgcaagggtacccctatctcctgaacaaggctcataacgatgtggtaatcacagataagaacatcaaggaattactaaagatagccaagatctatgaaacaactaacagggaggtgatgtcctggtga

SEQ ID NO: 9453 - DNA, 1488 bp, synthetic construct
  source 1..1488: mol_type = other DNA
atggtcgtgggaatttgcatcggcgagacttccctcacggaggtaaccttcatttcagataagatgccaaaggtgggcgaatacgtgactatcgagtatgacggaaagaaggtgctcggcatgatcgaaaatctgataaggggaaacgactctctcaacgtggacattaatgacttcaacgccatacagaagattagcagaattggggccgaagacaactacattaagggtagggtaaagatcctcggggatgtgaacgacaacctgaagttacctcgcacccccgtccttcccggaacagaaattcacctagctgatggagagattcttgacaaaatattcaatgtcaagaaccccatcaagctgggctgtctggtcaatcaaagtgatgtggatgtcaacgttgaagcaaaccctatccttagccggcaccttgccattctcgccatgaccggtgccggcaagagcaacaccgtcgctgtgcttatagatcaactgctgggctacaatgtgcctatcttcgtgtttgacatgcatggcgagtataaagacgcggagtttcccaacggcaacgtgaatgtgatcatgccgaagatcaaccctcactatatgaatttctacgagatcaaaaaattggtaaacatcggcgccaatagttttatccaggaacgccactttcggagagctttcaaacaggctgagaagaacatctcagacggcatcgcccagaccaacaacttcctacagataatgtacgacatcctcgataaagattcccacgttgaaggatcggataaacagatcgtggacgtcatgaataagatcgatgacgctatggagcgatactccaatctgttcgacaaaaacatcggaaatattttgtctaatgtcaagcgagggtatgtgaatgttttggacttaagccaggttgatgagagtgtggccagtgtcctcgtgagccacatcctgagaaacgcactgaaacgctccaaggacgcggcacacacgggggataaaaaagacctgatcgataattcagtcttctttattctggaagaagcacacatcctggcgccgaataagcgggagtccgactctaaacgctggatacagcgagtggcaagagagggacggaagttcggtctgggcttatgcctcgtcagccagtccccaaaaacagtggatcatgatgccctgtctcagatgaacaacatgattattctcaggctggttgagcccgaagaccagaggcatgtgcaatcagccagcgagagcttgagccaagacttgatcaatcagctgccatcgctcaacgtgggggaggctatcgttctgggcctaatgagtaagataccaacactggtgaaaattgacatgtttaagggtcgtcggcatggggacgatatggacctgatctcttactttaaggagctgggggaggactccgactacaacgacgaaactgtagatatggggtatgattactga

SEQ ID NO: 9454 - DNA, 1242 bp, synthetic construct
  source 1..1242: mol_type = other DNA
atgaagtttgcccacttggccgatacccatctgggctacagacagtttggcctgattgaaagggagaaagacttctatgaagtctttgaaaaggtgatagacaaaataattgaggaaaaagtggatttcgtcattcatagtggggatctctttgaaacagcccgaccgagccccaacgcccttctggttttccagaaagggctcctgaaactgaagggggcaggaatccctatgtatgccatcgcaggcaatcacgattctgtaatgcggcagggagctatccctccgcaggtcatatttaagaaactggggctcaaggtcatcagccccattaacactgattatatgcacggagacatctttatcgccggactgccctactacccaagctcacagtccaaaactctaaaaagcaagctggcggagctgtcgaaaaaggcggccaaccacgagaaatcaattctagtactgcaccagggcatcgacaaatacctcggataccaatacgagctggaaataggcgacataccagataattttacttactatgctttcggccacattcataagtatatcaacgaatccttcgggaatggacggctcgtgtaccccggatctgtggagatctggaaaacggacgaggtggaagattacaagaagaacgggaagggtttcgtagtggttgaccttgagggccccaagccaattgtgaaaagggtcaagatcgatgttcctcgcgagttcatcaagcgctcccttgattacgagaacctggagagtggtatcgcaggtatcaaggagacaattaaggacttcgacaaacagcctatcctcaatttgacaatcaaggatgtggagtctgatacaagtggggtgtatgacatcattaacgaggacttaggcgacttgagcctgatgattagaccaaaattcaatatcaagggcgaggagcttattgacgaggacaatatcaagaagaacggtctgggcgctaaggagatattggtggaacaactgaagaaatacaacgatgacaatgtcacgcagctagctatcgacctgtatgagtacctctccaaggataagattgaagagtcaaaagatctgatcgaacagttctacaacgacttttataattccaccaaggacgaggtggaactccagaccgaggaaattgaacccgaaaccgcccaggtgaagagcgaggacgttcaagcaaccttcaacgaggtgttaaagtga

SEQ ID NO: 9455 - DNA, 2748 bp, synthetic construct
  source 1..2748: mol_type = other DNA
atgattttcaccaaactccgactccgcaacttcaagtcgcacgaggataccatcatccgctttgaaaagggcatcagtgtaatcgtaggtgaaaatggtgcgggaaaatccaccatcctggagggcatttccttttctctgttcaagcagcacaccgctaagaagatcgacgacctggttcgcaataatgcccagtccatgtttgtggaactgaagttcatttctaacggaaaaaagtacaagatcgtgcgtgagaaaaagagcaacctcaagtcagtcctgtacaagaagacatccctcgacggcgagtacgtgcacgtgtgcagtggggataaagaggtcgccaacgaaatataccagatcctggacatagattctgacctattcctaaatgcaatttacatcagacagggtgagatcgcggagttggttgataagactcccgccgagaaaaaacagctaatcgctaagctgctcggtattgattccctggaaaagtcctggaaacacctcctccccttcatcaatgactacgaaaaccaactatcggagcttaagggcaagctttacaattccaaggaactggcagacgacttgaccaggaaacgcgaggagttaaattcattaaagcaaagaggatacgagctcgaggagaacatcgaagaggtcagcgtacttctgaaggagatcagcgagagtaagagggacatggaacgcgaaaaggagatctacgaaactcaggtgaacaaccttgaaaatgaggagaagacactgtctaaactcgagcaggataagcacgtcattcagaataatcttgataacattagggaggccgaagagcagatcagccgattggagaagtatgtgagcaagctcgacgtgtatctcgattttgagaaaagcgtgttgagtatacaaaatctcaaacagaaggagcaagaaatcgaggacaaaattaagagcattgctcaacagaagcagctcgttgcagacaataaggagaactacaataaattcctggcttccgacgaggagatcaataaatataacaatcagaaggtgaacttcgagaaagagctggccaccatggctaagctggacaaagacaagaaggacctcttaaaggaggtgcagaatgaacggaatgaagttaaccaatttttcgccagagccaaagataagcttgatgattacggactggaccaggacagattggccaagataaacgacattaatagtattgaagatgccacaaacaatttctttgacgagatatctggaaagattaaaagcttaagcgacgatatcatcgccaagaacgaagaaatcgtggtctttaagcagaacatcaaatcaagccagaaaccactcaaagatctcaaagatgtggacagtaaatgcccggtgtgtcaggcggacatcgatgacaataagaagtcggaactcatcaaacagtacaatgctgagatcgaggagaacaccaagcttatctccgaatatgaggagagcgtgagattactcaccaagaacaaggccagttttgaggacaaatctgataaactgtcagagctgtccaagcagattatcgaatataaacacaaattctctcatttggagaaccaactggttaaattgaacaagctggacgatgaactggtatcaaaggacttcattagtgggaagctgggggaattgattctgattatcgcaaacaagaaggagaatcgtgagtcttacaaagagttttacgatgcgtacaatcaggccaaaggcgctctggaggttctcggcagtgaaatagacgcacaatacaagttaaagcaggtcaaaaatgaaatcgacaaccacgtcacgaatatcaaactggcaattgagcaagatccccacctgagcagagacataactgccgctgagcttcaggaccggatcactgacctgaaacataaaaacgaggaatacaaccagcttaagggctttattcagaataaaaagtcgtacctgacacagctggattcagtgaaggaggacatcggaatgtcgattaaccagatagatatcctgaaaaacaagatcaaggcctcagtctatgatacggagaagtacgaacagattatttaccattctgatatatatgagcggcggttcaacaagttcaacaacgagctgtcaggcatcaagggacaggcacgcgaaacaatcacgcaggtgaaagatttgacggggaagctagaaagcgtgaaggtcttccaaaaacagtacgacgacatcagcgattatatcaaccttctaaatcatttcaggagcctgtatagtaagaatggcattcagaaggatctgcggaacatttccaggccactgatccagaagtataccaaggacttcttcaacgaatttaactttaactatagcgacctgacccttgacgatgagtatgatgtgactgtgtatggtcctgaaggggaaagctccatgagcatggttagcgggggggaaaaaatcgctatagcccttgccctgcggctgggcattacacaggcaatggcgaacggggaactggatactattttgctcgacgagcccacaattcacctggactcctcacgaaggcacgagctcatcaacctgctgaaagagatgtccgtcctgcctcagatgataattgtgacccatgaaccacaactggagaacgctgccgacaacttgatcaaggtagaaaaagtgaacggcgtgtccaaagtcataatgtga

SEQ ID NO: 9456 - DNA, 396 bp, synthetic construct
  source 1..396: mol_type = other DNA
atgtttgaggacgagcgcgacaataaaatttacaacctaataatcacaaacggtttcgacaccaacaaggagtacaatcagttcacagagaagctgtactcaaagacggacttcctttggaaagagtccatgagcggagcatatagtaccgccggggaggaattttatcagaaggtggacaggattgtgctgttggccggcctctacaatgataacaaagaactcttcgaggatctcctgattgtcagcgaaaagtatgagatcccgatcgttctggtacggccattaggggtggaagaggtccccatcaaactggaggaaaaggccgcaaccattgtgggctggaacgcgaactgcatcatagatgccatcaaggatgctgctgaaactatgtga

SEQ ID NO: 9457 - DNA, 1281 bp, synthetic construct
  source 1..1281: mol_type = other DNA
atgaaggcagccgtcatcggactgggcgtggagggaaagaaggccgtgaactctctgctcaaccacggctgggaggtatacgccaccgacttgaatatcaatgttgatctgtccgggctgaatctaccaaatctgtcactggatgtcatcgacgagactcaaacagttagtatcgtgggagacggcataactctggatcttggttttacaaacccttatgacatcgaccagtgcgatgccgtagcaattagccccagcatgttcggaggcgaatttgccaccaaactgttgaaaaattcaaatctgctaagtgacgttgtcgacaagcacaaggatatcttcaccatcggcattacagggacgaatggcaaaaccaccaccgtccacatgctcaaggagatcttggagaacgctgggaagaatgtgttggtgggaggaaatgggggtgggggcttttcaggttactacgacttaatccttgaggccaacgaaggggaatacgatatattgctggtcgaggtatgtgatatgacactggacttctgcaagtattgcttcgatttcgacatgattggtctcaccaacattggaaacgatcatatgaacgtgcacaaaaccatcgccaactataaaaatagccttgtgcgattctttgagggaaaaacagtcttcactgcatttaaccaggacttcaacactgacttcaaagaaagcagcgacaagaacattccttactttgaatatcaggacgagctgaagctgttcggcaagtttaacctccttaacgctgggctggcaacagccatcgctagggagctgaagataccaaaggatgtgatcaagagtacactttcggaatttaatgcggtggaaggccgcctcgatgtgtacaaaattaacaatgtgagcgtttacgtgggcaaaacggacaattccgacgcattaacctccattctttcggagaaagatttttatgcgatcttcataggcacgccccgccataacgaaatccacagactcgatattctggacgccgccgtgaggtacaacccggaggtgattgtcctgttccccggactagacgataccctggacatggcggtttaccggctcaattccctcggctacatggggaacatcatcacggtcaattccctggacgagatcatcgaactggtggctgagtatagccatgaggatgctatactgatagggggcaacggtcaggacactctcatcaacattcaggagcggattaagttaatttctgaaaacctctga

SEQ ID NO: 9458 - DNA, 1188 bp, synthetic construct
  source 1..1188: mol_type = other DNA
atgagtagcggctggaggagaatcagcattacaatctgtctcgctttgatcgtgctgagcatactgtttgtggccttcagtgccgccaccaacgcgccttacaccgctcagtccgttgccgacgagtataatcttcccatcggacagtccatgttcgagaaccagtccattctgggtcagcaagattcaatttcggtcccactcatctcaaatgtgggcttccttcagcatcaaatcaccgccctggatatccaaggactgttaatgactctcactaccggtatggtgccatttgatttctccactgtatctagcgaggggatagactcctatggggatgtggtgaatgtcgagggcccaggatttctgacatttgagggcgacaaactggccgtgaagtcacccaataactatgtctgggggtacagtacaccctataaatggttggttaagactgacactggggtggatgtggttgagaacggcacggttgtgaaatctgtgcccgagaacgaaatcaagaaccttgattatcacaatgattactacaacagttcaaccatccggtcctggtataactacgacgcccacaacgggtctacattcactctagaaaaaggaatgaagggattctctgatggccggaacaacatttccgccgccgacgtgccagtcatattcgggcatgacgtggtagactacgcaagcgaatatcccaccgggagccctatactgctctactctggcaattacaccgaggaagacggcgaggcgtatggcacgagcctgggatcgcacgcagagtacggcgattccattcgcgaggtaaatgcaagacagtttgtcgacgcctggaacggaaccgtcatcccccctaacagcacctcaagcggtaaggactatgtgtactttgaaagcgctgttgacccaaccgcccctggaggaagtgcagcgcacggcgtctgcccgcctgctagggctctgcgcgccgcagtcacagctgaagggttcggtctacccgtgggcatgacctgggacgaggatgcagtgctcttcgggtacaatccggctcaggacattacagtgacaaacaatcacgactaccccgtattgatcaagatgtggacggaaggcgaaggtacgggcatggggatctactgccagattgtccgatacatcccgaagtga

SEQ ID NO: 9459 - DNA, 654 bp, synthetic construct
  source 1..654: mol_type = other DNA
atgtcaatctcaacgatcattaccgcggctggcaaaaactcccggatgaggaacgaccagatcagccgcaacattgagctgacaaataagcttatccttcccttcaaaaataagaccgttatagagaccaccatcgacaacgcattaagcgccgacatcgatgagtgtattgtggtactcgggcactatgcgaatgagatcctagaaagcatttttgacaattacaaggattcggtcaagtttgtgatcaataaccctgtggatgtcgggttgagcgtcagcctgtacaacggtctctccaacataagtagcgatttcgccctctgcataacagcagaccaaccgacggtgtccaccgagactttcaaccgtatgatcgaagccagtcagaactccaagaatccaaacaggacaattagcatcctccgaagacgcaagattggcctcctggatagtgctgaaggactaggcatgccatttgtggcccatcggctgaacctgatgaactatttggaaaacgaagacgacaacataaatcccatccttagaaaaatcttcaacgacgggtacactttctacggaatcaaggagaaaaataagaaagagctgctgaatattaattactatgatgactacctggccctgctggactga

SEQ ID NO: 9460 - DNA, 675 bp, synthetic construct
  source 1..675: mol_type = other DNA
atgacgaacctggagaagaacaagaagtactgcgaagtgatcgagagtaagatcaagctggacgcgaaacccgtagcaatgaagctcataaaaaccgaggatgacttgccagagggcattgacttaatcgatgagaagattcgacattgcgagatggtgagaaaagctagccttggaaacactttttactccacaatcgatcagcagctgtgtttggggggagccggagccattggcctgagggacatgcctgagaaactggcaaacggcgaaaagtacttcagccttggccgcttccaggatctggagaccgctaagaagctgacttccaaactctcaatcgtgaaggacatccactggggaatgatatacgcgccgctggatgaagccgactttgaagccgatgtcatccagatcataaccgaacccgtcggcggaatgaaactggcccaaagtattgtctataagacaggtgaaaaaattaaccccagctttgcagggattcagtcgctctgtggcgacgccttcgctgacccatatatcacaaatggggttaatttcacgctagggtgcgacggctcacggaaagcagccgacataaaggataatgagatgaccgtggggatctccaaggctaaaatcgaggaggtgatttctggtctcgaaagcatctga

SEQ ID NO: 9461 - DNA, 1236 bp, synthetic construct
  source 1..1236: mol_type = other DNA
ttgaagttgccctcacgctcaaagtcctacatgatcccagagtacagtgtaacgggtgacttactgtcatacctcacgtgcaacctgcagtacaggtaccaaaataaaggcacactacccccgagcaaaccggtccagcgctggtttggggaatttattcatggcgtaatcgaagaagcgtacatccaatgggagcagaacaacatgcactttccttgggactggaaaaaggatatccgacccatcgaggacctgattgatttgaggctccaggtgagaggcctttacccattcgacgaggatctcttcttcagcattcacaatcaatcggacgaagaactgacaatcgatgatctgaatgagcacgaccataagaagctggcttccgcccgggccgagaaggcaataaacatttggggaaaggacctgttcccactgatcgacgcatctgagcacctgataaagggcatacgtgatatgcccaactatgatgaaaacaccagtcggagtaattactatggcattaatggtgtggtggatgtctcctcctctgtgaaaatcaataagaccctcgagcagagcaactttgacaactataacaacagaattatcgaatacctgaagaaggatgagaacttccagaaacgcatcgcgaagttcgacaaggacgacgagtatgagatacttattgattacaaagggatgaaaagaccccctgaaaaagtcaacaatcctaaggtggaaaataaatgggaaactcacgagcagcagatattaacctacagctggcttaggtcagagcagaaatcctctaagccaatcatcgccgggatcattttttacctgaacgagctggtgccaagcaaagaggacttgattctaatcaaagatgaactgaacaatggactcactgatattggatatgagtatgataaagacattgagctcatcaatagctggcaggaggatgataaggctcctgagctgagtgacaacttcaagatcgacaggtccatccgaattataaacgtcgacgaatatgaacgggagaaagcccttctgaaattcgatagtgtggttagcaatatcgaagagtccctcatcaaggagatgaagggatgcaagattcaggacgcctggaaaggggactcggacgagcggacctgcagcgcttgtgactttaagaccttctgtaagaataacagcgttaagacaaaggacttcaagatcccctga

SEQ ID NO: 9462 - DNA, 2439 bp, synthetic construct
  source 1..2439: mol_type = other DNA
atgatttcctacgaagaatttgaggacatggtggtgaatatactgaaaagagatatttcgtccaataaagagcagaagaacgccatcctggctccttgcaataagagcctcttccttgtggcaggcccagggagcggaaaaaccactgtaatggtgctgaaaatactgaaatacatctttgtcgatgacattgaaccaaacgaaatcatagctaccaccttcactcgcaaggccgctgacgagttgtattcacgaatcctgggatggggcgatatgatcaaaaatcaccttctcaacactattcacgatttcaacaatatcaccaagatcacaagaattgatttcaatcaaataaaaataggtactacagacagcatcgcggaagagttgctgagggagtataaaaaacccggggaaaatcaggcaatcgtgattgaagggtttgtcgctaactccgccatgataaaaatcattatcgaggacgaaaaatatctcaataaaaatctcgtagagtatctcaaggaagtgagcggcaaggagaagatcgaggaaccctctaagctctcggaaatcctaattgagatcaagaaccggatctactacgatcaggtcgatttcaacgagctgtacaataaaacccaaaaggatagtggagcacgcatcgcccttgactgcataaaaaagtatgaggacaagcttcagaaccggaacaccattgatttcgcgatgctagagtcagagtttcttaagaagctgaagaacaacgaactggagacatttctgaacgagaccaaaattgtgctaatcgacgagtatcaggacactaacctgcttcaagaagacatttacttcacgatagcccgctccgcgatcgctaataacggcaacatcacggtagtcggtgatgacgaccagtcactgtaccggtttcgcggcgccaccgtggacctcttcacaacgtaccaggaacgcatcaatgaaaaactagggatcgaggttgaggagatcaacctgaggaccaattatagatccaccgaaaatatcatcgagcactgcaatcagtttgccgagttggatagtgagtaccagaatgcccgggtggaaaataagcccaaaatcattgcccccgacttcgacaatgacaagatgcccattttaggcatgttcaggaacaacccagaaatgctggcgaaggatttatccaagctcatcaaccagctcgtcaacaagggggaagctgagattaaggttctgcaggttttgaataaggagtattacgaaaaggtaaacggtgtgattgacatagcaaggctccagcagattaaagcggagaatgtcaaggccggaaaggagattgaaaaaataacgctgaagctggacagcgactacggtagcgcatcggacattgccattttgtcatactcaccgaaggagacatattacggcaaccgtagcttcctgcattacctgcggaaaaatctcaagaagctgagacagccgattgaggtcttcaacccccgaggcatcgagcttcaagacattgatatcgtggggatcttttgtggtttaatgctcgaatgtattgatcctgatagtactgtgcagaaatctgataagaccatacctaagctcgcaacacacaacatgcggcgttggcgcatcaaggccaaggacttcatcaagttgaaccctgagcctcatgaaccaataacactctcccagttcgtgacctattggcagctgagaagaccccgggggcacgaagagtggcccaaaactgccagtttgatggagctggcatacaagatcacgacttggatcgaggaactgcaagaggacgtggaagggatcgtgtacctagaggctattacccagtccatcacccaaacaggattttttaacgactatcatagcaatatttctttccgaacccagaaacaggagcgcgagagcatacttgaagctatctggaacattttcattccgctgagcactggcggaatacagatcgatgagagccttctcgaaacactgcctgacaataggattaacgtcttgtccatccaccagtccaagggattagagtttccactggtgatcgttgatgtggggtctcggttcaagcagaacgacatcaggacgcagaaactgagattccccaaatcaattaaagaggagacaacactggaggataggatcaggcgatacagcaagatcggccaaagtaagcggggcgaaaaagacaagagctttgatgacctgaccagactgtactttgttgcctttagccgcgccgagaaggtcctgttgctcatcggcctcaaccctgctatcgaaggatataacaaaaagaacaatcatttcaacatcccaaacgtggccctgggctggagtcgagacgagaagtacatcggattcaacgagatttatctgatctga

SEQ ID NO: 9463 - DNA, 2871 bp, synthetic construct
  source 1..2871: mol_type = other DNA
atgtctgaagtaaacaacatagacatgttcaaaaatgacgtgcgctacagggagaacatcgcccatatcgagacaataccggctaaaaaggccagtttcaagaaagtcgataatctgaacgagaacattgtcaattacctctattcaaaagacgtgaaactttacaagcatcaggcagagacctatgaggctatcaagaatggtgaaaacgtcattatcaccacaccgaccgccagcggcaaaacgcttgcctttaacctacccataatggagactatgattgaagatgataatgctaccgctctttacatctaccctgcaaaagccctttccaatgatcagctgcacgtgctagagaacctggagaaggaactcgatatcactatcaacccgcgcacctacgacggagacactccaagaaacgagaagcggggcatcagggaaaaatccaggattgttctcaccaatccctatcagctccacctgattctgtcctggcaccatcagtggacacggttttataagaacctcagatatatcgtcatcgacgaatcccactattataagggagtctttgggagcaacgtgagcttccttattaaacgcttaaagagaatagctaacttttacggctcgtacccccagtttatcctctcctcggcaactctggccaacccattggaactggctaatagactgactgggcaggactttgtactggtggataacgacacaagccccagtggcgagaaggacttcatcctctataacccttttcaaaactacgttcgaaacaaggtgtatgcccagaacgccccctctgtgcacatggagactgaaaacatcttcatgtacctgatgctaaagaatatccagacattgtgcttcacagtttcaaggaagaccaccgaacttattgccatgtgggccaaaaaagatatgacgcaagtaaagggcaagctggcccaccggattgccgcatatagggcaggatatcagccgcaggagcgacgggagattgaggagggtctgaagagtggaaaatacctgggagtgacatgcacgaacgctttagaactgggaatcaacatcgggtccctcgatgccgtcatcattagcgggtaccctggcactatgattagcacctggcagcaaagcggcagggcaggtcggagtaatcaaaaaagcatcgcgatattgatcgcctttgagaatcagttggaccagtacttcatgaataatcccaagttcttcttcgacaaacctcacgagaatgccattattgacctcaccaacccaatattgcaggaagcccacttgctgtgtgctgccaaggagctgcccctgaagcggggagaggcagagaaatacttcgacatatctcaggatgtgatcgacgagcttgtcagcaaaaaggatctgtacgagaatcaccgtggagactttatgtacccttacgacgacaatcccgccatggatcatagcctggatcagattagctcagaggaatttaaagtcatggtgaatggccgcctcttagagacgatggaacgttcccaagtgtaccgcgaagcccatgagggagctatcctgatcaataagggcgacacctacgtcgtgaacagtgttaacctaaagaaaggttatgtgaacgtgagcaaggaagttgtagattaccataccatggtactcaataagacggagaccaacatcaagaagaagctgtcaaaaaccaagtatggggatctgaccattcatttcggggaactgactgtcagtgaggactacttcaagtacaagaagatgcactttagcaaacctatcggcacattcctgctcgacctgcccccccttacattcaacacaaaaggactgtggttcacaatcccaaaggaggttaaggacgcggtggaagacatgttcccaaacgatgaagaagtgtttgcgggcggcctgcatggtgcagagcacgcgctcattggcctattccccctgcacaccatgtgtgacagatttgacattggtggcctgtcaacaaattatcacgaagacacccaggaggctaccatctttatctatgatgggtatgaaggcggcattggaatcaccgaaaaagcagtcgatgtgttcgttgacctgctgaactccaccattgacctccttaacaattgcaaatgcaagaaaggttgtcctgcatgcatctactcgccaaaatgtggcaatgataataagccactccataagggggcaactaagtatatcctcgaatacatgaagaaactgatctcggatgaggtggatgggcaaaaggaggacattattgatgttcagtccactgtggacgacagcaaggagttcgaggaggcttaccagctctatgagaacggggattattctgcttcaaaggacatcttgaacaacatcctggccaacgataagaagcacgtcagatcactcgcccttatggcgcagatattgtacgatcaggatcaaaaggacatcgccctcctatttacgaaaaaggcgctggcaatcgaccgcagcaatgagatggctaacaacctcgaggtgttactgaccaataagagcaaaacgaaggagaaccactctgacctgagctcccttgacgacgtggatactctgttcgaggaagcctacgacatgtacagtcagggggatttggatgcgagcttgaacattttagaaaaactgctggacttcgacagtaaaaacgccgaaacgttggccctgatgggactgatacattaccactccgggtttttccctaaggctgtggagtactatcgaaaagccacaaagatcaataagaatggcgagatggtgaaagaattaaagatacgggtgtcctga

SEQ ID NO: 9464 - DNA, 1140 bp, synthetic construct
  source 1..1140: mol_type = other DNA
atgaattttaagtctaaatttggttttggatgtatgcgccttccaacaaccgacgagaacgatccatcctcaatcgaccaggatctgtttaacaagatggttgacatttacatggaaaaaggatataactacttcgatacctcttacgcttaccataacggtaagagcgaggtcgctatcagaaaagccctcgtcgaaagatacccccgcgagacattcaagatttgcgacaagatgcctacttgggcactcactaacagtgaggacaacgaaaaattcgtgaatgaaatgctggagaggctgggaatcgattattttgacgtatttttcatacacaacatcaacggcccctggctgaagaatgccaaaaatgcagataccttcgaatatgtgaaaaagatgaaggaaaacggcattgcccgggaaattggctttagctttcacgacaagtctgatctgttaaaagaggtcctggatgagtatggagacatctttgacatcgtgcagctggaactcaattacctggattgggaagacccggccattgaggctcataaatgttatgatctgtgcgtcgagcacgggctggacgtgtacgtgatggagcccctcaaggggggggtgatcgtcaatccaaacgatgagatcaaaaacgatttcaaggagttcaatcctaacaagtccatagccagtttcgccatacgattctgcgcgtcattggagcacgttaaaatggtgttatccggcatgagcaagatggaggacctccttgacaattgcgatacctacgagaacttcaagccgttgaatagggaagagaacgagtttctggagaagatggctcagaagctgagcgacaatcttgcggtatcgtgcagcgagtgcggctattgtgttgacgcatgtccagagatgatccctatccccgaatacttcaacctatacaacacaagtaagaaccagccagaatccaatatctaccggctgtacttcgacaaactaggggatgaaaaagtgcctgccgacgagtgcacgtattgtgggacgtgtctcgactactgcacccagaagattgacattcccgaagagttggagaaggtggtggaacacttccaagagggcttcagcccctatgaatga

SEQ ID NO: 9465 - DNA, 378 bp, synthetic construct
  source 1..378: mol_type = other DNA
atgcatgagctcagcatggcccagggcattataaatgcagtgctggacaccgcaaaggaaaataacgcgacggaggttaacaaggtgacaatcgaggtcgggcggctggccatgatcaacccggagcagctgcaattcatcctaggtgtcctgattgaaaacaccataatggaggatgccgaaatcaacttcgaggaagtgcccgtggagatgaagtgttttgattgcgacttccacggcaacgctgtactcgatgacagcgaccactacgctccacttgtgaaatgccctaagtgcaattccctgaaaatcgacatcttgaacggaaaggatatcatcgtcaaaaatattgtgattgaaaaacccgacgacgcctga

SEQ ID NO: 9466 - DNA, 651 bp, synthetic construct
  source 1..651: mol_type = other DNA
atgcaccaggtggctgacgtagaagttgccaagaatatcatggatgctaataaacggttagctgacaaaaaccttaaaaatctggaggacaagaacatattctgcgtggattttgtcggcgcaatcgggagcgggaagacaacccttgtggaggacatcattgacaacacagattacaagattggcgtcctagcaggcgatgtgatctcaaagttcgacgcgggacgcatagaaaagcacaacgtccccgtagttggcctgaacaccgggaaggaatgtcacttggacgcccatttggtcggccacggactcgcagatctgccgctggatgatctggacatggtgatcatcgagaacgtgggtaatctgatttgccccgtagactttgagctgggttcccatctcaggattgtggtggtgagtgtgacggagggggacgatactgtcgagaaacacccaatcatcttccagacttcggacgtggttgttatcaacaaaattgacctggcggatgccgtgggagctgacgccgataagatggtcgccgacgcccaaaaactcaatcctaagatcaagataatcaaatccagcctgaaggaaggcaagggactcgacgagatcattagcaccattgaggaagccatgaactga

SEQ ID NO: 9467 - DNA, 1032 bp, synthetic construct
  source 1..1032: mol_type = other DNA
atgaaagtctggatagatattagtaacgccccccatgttcggttctttaagaacgtgataaagtatctagaggccgaaggcgaggatgtcatcgtaaccgcaaggcagtttggggatatccataagctcatggaaatgtatgacattgatttcatctctgtcggtaagcatggcgtaagcctgtatgataagcttaaggagagcacttccagagtgtacaatttggtggacgtgatccacgacgaaaacgtggatgtcgcacttagcaagcactcaattgagctgcccagaatcagttttggcctgggaatcccaagtctgtacgtgcttgacaatgagcacgccctggctgctaacaaactcaccctgcctctgtgcgatcgcatcatcacaccaaaaattattgacatgtggaagctcatgaaattcggtgcggaccccaacaccattatctcgtatgacggcacaagcgaactcatgcatttcaaagatttcaagtacaatgacaacatattcgacgatttaaatctaaatttgacgcaccctaaaaccatcttgatgcggcccgaaccctccctcgcatcctacttggatgccgattgccgcaagtcagtgctgtccccaatagttgacgagctgaaaaatgtagccaatattctcattcttccacggttcaaggaacaggctgagatctttgagggaattgaaggggtgtctatcctgaaaccgcctgtcgacacctcaaacatcatcaagaagtgcgacctggtgattggcgcgggaggaacaatgaaccgtgaggccgcaatactgcagacgccggtgatctcctgttaccccggcaagacactcagcgtggaccagtactacatcaacaaggggttaatgtaccgaagccaggatactgacgaggttatccacaaagccctggagtttatcgtgaatcctcacgagaggattgacgtcaagactgacgacctcttccaaatcattatagataacctgtatgacctggctaaaaacgggaaatga

SEQ ID NO: 9468 - DNA, 1083 bp, synthetic construct
  source 1..1083: mol_type = other DNA
atgctgctgatagctcagaaccacctccaactgattctcgaggttgggctgatgttgttcgtcacactggtcttctgcctgaacctgatccccctgagccttagtatcgtgaccttcttgtcattgttcataatgggcggactcaccctgctgtttggagcggatattgctctgcttgtgttattttccagtcaagcggaatttactcacccatttggcccaattgccctcctgggtgctgtaactgctctggcctcgctgaaggtcatgtccgaatctggtgttgacatccggccactgagacgatttgtgattttgttcctagccggaatcacagtgttcggaggcttaatgcacagatccttcctaatcctctggctactcggcttattcctcggctacctgatgatctccaagtctttccgggaaaaaagcgtgtttaccctcaagaggatcatgatgtttttcggtgccgccggcgccgggttcatcttccttgaagttcttgcgcgagtcagcggcatgaccatcttcagcccgctgctgcgcctggggagaatcgagcagtacagcctctcgagtattaagatggtcctgaacaacattcagctgatcgggcataacgccaatgcttcttattggggcgccgatggcacggcctttgccgagggatatattactctccccatgcagcttatcctgttcttcggactgcctttccctctattctttggtgtgctcgtgaaccagaaagacaccattgactatatgcttcccgggatctttggctggggcttcgactttggaatactggggctcattgggctgatgatatttgtacttggcacaatcatcatcggatttaaggtgctcaatatgtaccgcgagaaacgggagaagaataataagaaatacttgggcagggaggtgctccttacgggggcactggccgcattctgtgcacagagcttaattggactgttcatatttaaccgctccatcaacggtatggcattgctgacattcttgtttgtgggggcactcattctggctaatgtggtcagcttgaaatcaaggtcatga

SEQ ID NO: 9469 - DNA, 459 bp, synthetic construct
  source 1..459: mol_type = other DNA
atgaaggctctcatcctgctgggatgccccgagactcctgcccagaccccaatggcagtgtacgtctttaacaagctgacgaagatgggctacgatactaccatcgcagctaaccccgccgcctccaaactcgtcaaaataagcgaccccgaggggctctacaatcttaacttaatcgatttggaacgcacactgggggagattaacgagggcgactatgacctgctggttggattcgtacacaaagacgcggcagcctcctttttcgtgacattcgaccagattctaaataccaaaagcattgcgcttgtcttctcacgggatgctgacgaagtggccgagtttgtgaatatgatcgaagaaagtggcagcaaggctctgatatctgccgtgagggcattccataacccatcgccgatcaaggtgaaattcgataaggccatcaaggagtttgagtga

SEQ ID NO: 9470 - DNA, 315 bp, synthetic construct
  source 1..315: mol_type = other DNA
atgagtttctgcctagatacttacctgcagcagagcgacgattacgagatacatgccagcaaagcagggtttaaggattgtgccatgattatcaggttcaaggctgatgacctggtgtatgtgaagcccggcgacgaggtgctcggcgtgcgcgtcatcggtattcctccaattccaatcggatttgaccacaacaagggaaccgtattcatcccctacaccaaaccctgccacggcacatccgttgtcgagctcccgataaacgaagaggaaatcgaaaaaatccggaaactggacacggggaataagaagtga

SEQ ID NO: 9471 - DNA, 945 bp, synthetic construct
  source 1..945: mol_type = other DNA
atgaaaagcaccgtggtcggcagtttccccgctaaggaaagctccccaagcaattttaaagataagatattaaatacactgggactgtatgaccctttccgcgaggcaatcagatcgagcgtgattgctcagcttgacgcgggggtggacatcatctccgacggtcaggtcaggggagacatggtttctatcttcacaaaatacattccaggaatgaagatcgaggatggcaacaccgtgatcgtgagcaagatacggaatccgatcaaggagatctccattaaggatatgcaatacgccaaaaaggtcatgaaagagtattacaatggcaacattcccgatggtaagggcatcaagggaatcatcaccggccccaataccatagtccacagctcaagaatcgaaagcttttataaaaacaaggaggacgcaatcattgacctggcacatagtctaaagttcgaagtcgattctatcgccaaaaaagtagagcctgtgtacatacagatcgacgaaccatttctttccacgggcatggtggacatgaatacagctcgcgaagcgattgacataatccacgatggtctcgacatccctctcggaatgcacgtctgcgggattctgtctaacgccttcaaggacctggccaaatttaacattgatattctggatatggagtttgccggaaacaacataaacttgggggtgctggagaagaacgcatccctcctcactaataagaaggtgggcttcggctgtattgattcatcggtgcatactgtggatgacatcggggacattgacatgctagtaagtagggccattgagatcgttgggaaggacaacctgctgctggacccggactgcgggcttcggcgatcacccaaggatgttgctttcgaaaaattgaagctcatgaacgagatcaaagataaatacgcctga

SEQ ID NO: 9472 - DNA, 432 bp, synthetic construct
  source 1..432: mol_type = other DNA
atgtatttcggattttcattcatcgggctgctcttcctaatcatgctgttcattccaaatgtgctgtggaataagttccagccaaccgattacgagaagtacagcaaacgggagaacatcattctactggcttttgaacgcgtcggccaggtgttggtgtgcatattttccctcttttgcggcgttaattttaacctgtcgatctgcgtggcaatcccgttcatcatcctgatattatatgagttttactggattaagtatttcaaaagcaacaagaccatgggagacatgtacagtgacttcctcaaaatccctctccccggcgccacactgcccgtgcttgcctttgtcttcctcgggatttgtagcgacaacatacttctgattttctccacgatcatctgggaactggtcatcttggtattcatttga

SEQ ID NO: 9473 - DNA, 732 bp, synthetic construct
  source 1..732: mol_type = other DNA
atgaagttcctcgtaatcaatggcagccctcgcaagcagaacacgtacaacgtgattaagcaggccaaggtcaatctgaacggtgacttcgaggaaatcaacctgattaaggagaacatccccatgtgtaacggctgctttaagtgtatccttgaaagtgagacagagtgcccccactacgataaaatcgacccaatcatcgagaagctccacgaatgcgacggactgattattgggagccccgtctatgcgatgaacgttaccggacttctgaaaaacttctttgaccacaccgcctacttgtaccatcggcctgagttctttactaaaaaagctctggtggttgtgaccacagctggtgcagggcataagaaggtcgcgaagtacattgatgaaaccttgaggcattggggagtaaacaaggtgtataaaatatcgttcgcttgcggcgggaatgatagcctggacaatgacaaggttaataaagtgagtcaaaagttcgccttcgatctcatatccaacaaattacactctcccaagttcacagatatcatcttttacaatgtgtggagagccatggccctatcaaaagacccaataaaggcagataaggagtattggttcaatactggcctggtgaaccacgacttttccccggaagtcaagctcaatatcccaaaaattgtgttcgcaaaaattgtctttaacgtgctgaagaaagccatcaaatga

SEQ ID NO: 9474 - DNA, 1029 bp, synthetic construct
  source 1..1029: mol_type = other DNA
atggtcctgcgggaaaaccgcattttttacctggatgagctaagagctattgccatcctgtgcgtcatattcgctcacaccatccaaaactttcccactaacatggactaccttacatcccccacccttctttcttacctcacagtggcccggatgggcgttattctctttttcatgatctcaggggctctgctgattggcagggaatataacctctcggatttcctgaagcgacgcttcgccagagtcttaatccccaccatcttttggcagatcatcggatatctgagcgtgctcatctttatcggatttacgtacgacaatctggtgcaggcaagtgtgcaggtggggtttccgtggttcgtctgtgcaattctcgggatctatttcgtgatccccatatttaactccttcatcaaggaatatgggattaaaggtgcggagtacttcttgatcatctgggtgttcctcgtaatactgaccaacatgcagctaaatgagacatactacattgacttcatattcaacaacgtcggaatctatatcggatatgccgtgttgggctattacctggccaataaagagttcaacatatactcttttcctatggttgtaatatgcagtgtgcttttcatcatttcgctggctctgaacagctactacgccttcaatttttcccatgtcttttacatagagtcctatagcatcatcgtgcagtgtgctctcttgttcctgatcttgaggtatatgagtaagctggccaagttccgtccaaagttcgttttaagcaaactacactcatttgtgcaaaattcatttattggcagctttatctactatctttccattttctccttcacgatttacctgatgcacggcttcatcgtcaatgccattattaaatacatgccagtgactcagttcagcatgattccagcaatctttctcctgatagcggtaatctctattgttatcgccgcagtgctcagtaagatgcctatcatcagcaagctgtgcggtatttactga

SEQ ID NO: 9475 - DNA, 753 bp, synthetic construct
  source 1..753: mol_type = other DNA
atgaagggcaaggtgatcttcatcggtgcggggcccggagatcctgagctgataactgttaagggcaggaatgtcatagagaaagctgacgtaattatctatgccgggagccttgtcaaccccgatgtgttatcacccgctcgcgaggactgtgagattcataatagcgcctacttgaatttggacgagacagacgccatcattaccaaagcagtggacgaaggaaagctcgtcgctcgggtgcacaccggcgaccccagcatctacggcgccatcgctgagcagatccgggaacttaaaaagcacgatatcgagtacgagattatccctggagtgtcgtccctgttcgggactgccagtgtcctcgaggcagaactcaccctgccggaaatctcacagtccgtgatcatcacccgacccgaaggacgcaccccaaagccagacggcgaaagcctggccagtttctccaaacaccacgcaacgatgtgcatctttctgggtattgggatgattgataaggtggtggatgagctgctggtagggtatgagaaaactacaccgattgctgttgtgaagaaggccacgtggccagaccagcagataatcaaaggcaccctcgaggatattgcacaaaaagtcaaggacgccaacattacaaagacagccatgatcatagtgggcgatgttctggaccctggagattttaacgcgtctaagctatatgacaaaaacttcaagcatgaatacagatga

SEQ ID NO: 9476 - DNA, 396 bp, synthetic construct
  source 1..396: mol_type = other DNA
atgaacgataggggcttcgtcagcgtggagtacatattcacattattcatactcttcaccatcggctgtggtcttctcttttactccagcagtctgattaacagcagtatcaacatcgaagacagtgtctctcaccggatcattctaaacgacgtgagctgcgtaatcagccaggtcaattcaaatggcgtggggtactccaaatacatcaagctgccatcggacaagggctattttgagattaccgttgataagtccaagctgacaatcgaatacgacaataagaaaggggagactatgctgcccctcttgaacatggactccaagtataagctgatcagcgggcgcggatactatatttcaaaaagcgatgatggaaaaattgtgataacgtga

SEQ ID NO: 9477 - DNA, 498 bp, synthetic construct
  source 1..498: mol_type = other DNA
atgacaggcgacaacggacagattagcgccgagctgctcttcctgtttggaacactcatcatcgtgttaatgatctccattgtgttcattagcgacgagaacgaactcaacatcgccatggcggccgcacacagcggtgtgatagaggggctggctactagctcaagcggcatctaccccgcagacgcttacagtgattattccaattcgaaaatgaatgtcttggaaccgtactccgttgagatcgtgaatattagctataccgagcttggcggggacaacaactacgataagaagcaaatccagttcaaagtctacgcgaaaaccagcgaccgcttcaataacaaggaactaactagtattggggataggataaattacaacctgcggaagtccatagccgttagttttaactcaatcaatgccaccaataagctgtataacccagtctttagccctcattatgtgtacacgaccgctaacgtgaaatgggtatga

SEQ ID NO: 9478 - DNA, 396 bp, synthetic construct
  source 1..396: mol_type = other DNA
atgggtatcaacacgtatattgacttcatgtacagcgaggatgaaaagaagcagctgatggaagacttaaaagagatggagacttttaaggtggataccggcgacgaaggcaaaatactgcagaacgacttggaggagtactttatcaatggaaatggggatagggaggaccttacattcagaattgaactgtacttctatgcctttaagatattctgccgcaagcccgtggtcattgatcgaaaccaattcacaatctttttcaacgactccctcctggactggaacctcatcaaactgattatggatgatcttagcgactttgaactggaaatcgaggcagtaaaagaggagcgggacgtgctcatcaacctgaatttcaccctacactactga

SEQ ID NO: 9479 - DNA, 762 bp, synthetic construct
  source 1..762: mol_type = other DNA
atgattgacacacattgccacattgattttgaagactttgacgatgacagggacgaggttatcaaacgggccaaagataaattagacaacgtcatcgtgtccgggtactccaatgacagcaacatggacgtgttgaagctttcaaaagactatgaggggttcatctatccaactttcggcttccaccccgtcagtagccaaaacgcaacagatgatgagataaagactgcccacgaaaacatcgtagagcatctggatgacatcgtagccattggggaggtgggaatggactacttctacgtcaccgacaactcgctccgcaagagacagcagaagatattcaccggatttctggaactagccaatgagtacaaaaagccaatcgtcatgcatgtgagggattgtgagaaaaaggcggttaacatcatctatgagtatgaagatatcccttactttgtgtttcactgctacggcggttccctgaagacggcaaagcggatcatgaacatggacaacgcctacatgagcttctcaaccatgctctgctactctaagcagcaccaggatctcattgagaagatcgacctggactatatcctgactgagacggacagtccctacctggcgatgacaaaagaagagcgaaatgaaccggctaatgtggtgaatgcagtgtataagatagccgaaattaagaatatggatatcggcaccgtggatgagataaccacaagcaacgcttgtaacattttcaaaatttga

SEQ ID NO: 9480 - DNA, 765 bp, synthetic construct
  source 1..765: mol_type = other DNA
atggcagagaacatcttgtacagactgtatgagtggtacatctccaggaatctggtgcctgaaaagatgccaaagcacgtcgcctttattatggacggcaacagacgctacagcaaactgcagggcaacattgacgtggtgaaagggcacgaaatgggtgtgaatatcctggagaaagtgatggactggagtattgagctcggcatagagattatcaccgcgtatgctttctcaaccgagaatttcaatagatcaaagcacgaaatcgacgggctgatgaacctgttcgtcattaacttcaagcgcttagtggacaacccgaaaatccataagtatgaagtcaaagttaaagtcgtaggccgcacagagctcttgcccgacaacgtgaaggaggccataaaggaggcagaggatgctacagcgcagtataacaagcggttcctcaacttggccattgggtacgacggacggctggaaatcatcgacagctttaaaaagatcatcaaggacgtgcaggacggaaagatatctattgatgatgtggatgaggagcttgtaagcaagaatctctatacggccggacttgatgatccaaatctaatcatcaggaccagcggggaggagcgactgagtggctttctactgtggcaatcttcgtactccgaactgtacttctgcgaaactctctggcccgaacttcggaaagttgatttcataagggccatccgttcctaccaggcacgagaacggaggtttggtgcctga

SEQ ID NO: 9481 - DNA, 717 bp, synthetic construct
  source 1..717: mol_type = other DNA
atgaaaaccatagccattggtgtaggaaagaatgagaatatcatccaagcgtgtcacatctttaaggagaaacacccgaagacggatttgaaactcatctaccgggatgaagacctggtgcgggcagtgcttgataataagatacatggggtggtgcgcgggagtctgccagcttccaatatcatgagggaactgaaggaaatctacccagagattacccgagccacttatgtcaacggcgacgaatacgaatttctcctgacacctgtgggaatcgacgagggcaactcggtagaggataagctgaatattgtcaagaactgcattgccttctacaagagactggggaagacgcccaagattgctgtcctggcagagggaagaaaggatgatttcggccgcggcgaagaagtgtcaaaatctatcaccgacagcgagaaactaacaaagctgatccaggagacaactggcgaggaggtcaaaaactattacattctcgttgagaaagctattaaagacgactgcaacatcattgttgcccccaacggcagggtgggtaacatcatctttaggacactggtgttattgaactcctggcccagctatggggcgattaccttcggaatggacaagatatacatcgacaccagccgtgaccagagtatcgaggggtatgtgcggtcccttatactcgccaatactctagacaacttctga

SEQ ID NO: 9482 - DNA, 1380 bp, synthetic construct
  source 1..1380: mol_type = other DNA
atgaaggcgattaacaagatgctatgtctggtggacggcgagcactacctccccgtaacccaacaggccatagatactctgaacaacttggagcatattgatgttgcgggggctgtattcatcggaggaactgaaaagctgcgggacgattcggaggagacatacagccagaagctcggcgtgccagttcagtttgcagaggacaaagatattccctacgatatcatcgtcagcatgatcagacagtataatatcgacacagtcatggacctgagtgacgaaccaatcttggattatccgaagcggtttaagatagcttgcagtgtgctgaatgaaggcatcagctacgaggggccggatttcaagtttgaacctgtgtcccagtatgacatcatgaaaaagccctcaattactattctcggcacgggcaaacgcatcggcaagactgccgtgtccggcttcgtctctcgcctgattgacaaaaataattatgagccctgtgtgatcgctatgggtagaggcggacctagcgagcctgaaatagtccacggtgaagaactggagatcaccagcaagtttctcctagaacaatctgaaaaaggaatccacgccgcaagtgaccattgggaagacgcgctgatgtccaggatcttgaccatagggtgtcgccgttgcggcggtggaatggctggcgaggtattcttgaccaacatgaagaagggcgccaagctggccaatgaggtggattccaaactggcaatcttcgagggtagcggagctgcaataccccctatcaagacggacaagaagatcacactggtgggagccaaccagccaattgagaccgtgacagggtacttcggcccctacaggatctcacttggagatctcatcatccttacaatgtgcgaggagcctatggccagtaaggataaaatcgccaaaattgaggagttcatacaggaaattaatccagacgctccaatcatttcgaccgtctttaggcctaagccactggaggacatttctgggaagaacgttctgtttgccactaccgccccggagggggtgaaagacaagctcgtgcagtatctggagaagaactacaaatgcaaaatcattgggaccacctcccacctctctaaccgaccgcttttacgggaagatatgaagaagtatatggacaatgccgatgtgatgctctccgaactgaaagccgccgcggtggacgttgcaacaaaagacgcaataaatgctgggcttgacgtcgtgtactgcgacaacattcccattcccattaacgacacctaccccgatctgtcaaaaacgatcattaacttagtcaacagcgccatcgacaacttcgataatcaaatctga

SEQ ID NO: 9483 - DNA, 717 bp, synthetic construct
  source 1..717: mol_type = other DNA
atggacatcagcgaaatcaatctcgacgaaacgcatatcaggctcacaaccgatctgagttgtcacgacctgaaacggtacatcttcagcattcggagggatttaaaaaattatatcttcaagaatcaggagtttgccctgtcactggagccgatcaagtctgaagataaccttcctttgatcgtaaagacaatgattgatgcatccaacattgcggatgtcgggccaatggcttgtgtcgcaggtgccatatctcaactgtcgcttaactacctcattgagcaggacagcaagtactccatcgtggagaatggcggcgacatagccctgataaacgacagttcactattgtgcggaatttactccaataatcaggtgctgggcaacgacattgccttcaagatcaaaccccgcaagaaacccctggggatttgcaccagcagcggaaagattgggcactccataagcttcggcaaaagcgacagcgtcaccgttatctcgaagtcctccgccatctcagacggaatcgcgacccgagttgctaacgaagtgaacggcagcaacagtgaggagaaagtgagcaagggtctggaatgcggggaggattatagtgagttttttgacgggctactcataatctcagaaaacaacgtgggaactgtgggcagactcccaaaaatcattgagactaaggagttcgatgtcaagatcgtgtga

SEQ ID NO: 9484 - DNA, 288 bp, synthetic construct
  source 1..288: mol_type = other DNA
atgtacaaggacgagatgatccagctccaccagtttttggtctacgtgctgaaatacctggccgaggatgaccagatcacaaacgactgttccgaatatatatccctcaaaatcagcccacaccatattcataagacgaaggccgagcacaaacacgctattttcgtcctatgcaagattatcgcgcaagtggtggccgataaagagaacaatagcatccccgacaatgtgcgcaactcacttggcgatctggtaacccggtctcaggttgaactgagtgcaaagtga

SEQ ID NO: 9485 - DNA, 771 bp, synthetic construct
  source 1..771: mol_type = other DNA
ttgaaatccttcgaatttctcagcataaagagggagaagaagccccggacatccggtctgaccatggtgctggacaaggggctagggcttgagactgccagcagcctgatggatatttcaggagaatacgtggactacctcaagttcggatggggcacctccatcgtccacgaacaggacatcatcaaatcgaaggtggaaatgtataagagccacaatattaccccctacactggcggaaccctgttcgagcttgcttatacaaaagataagctcgaggagtttttcgacgaagcccacaacttagggttcccagccattgaggtcagtgacggcagcacagacatcccgcatgagaacaaattggagtgcatcgagaaggcaaaagaatcagggtttgaagtgctgagcgaaattggtaagaaaaacccaatcctggataaggagttgagcatcgacgagaggatctctaacatggccgatgagcttaacgccgggtcctcactgataattgtagaggcgcgcgagggcggcaagaatattggaatatttgatagtaaaggcaatgctaaagaagacgagatcgacacgatcctaaacagcatcaagggcgaaaagatcctgtgggaagcacctaataaaaaccagcaagtgtttttcattctgaagctgggaaatacggttaacctcggaaacatatcgagtgatgagatcacatccctggagactctcagacggggtctccgaggcgacaccttcgggaaactgtga

SEQ ID NO: 9486 - DNA, 1254 bp, synthetic construct
  source 1..1254: mol_type = other DNA
ctgaagaacaatcgaacaatcggggaaattaacgagaaaatcaccaacggcgaggcgaatatttacaccgcagaagaatttaaaaaactcataaagaatgacgagacacccagtttcaatgaagttgatgtcgtgacctgcggcacttgtggggtaatgtcggggacagctgctatcctgaacttcgtcgtgtccgaacccgggaagtttatacgggcaaacgaggtgtatttgaacggagtgcccgcgtacgccggcccgtgtccaaatgagtggctgggttctgtggacgtgattattcacggaactgcccattccattcacaacgaaaactacggtggcggattcctgttcaaagacatactcgaaggcaaagaaatcgacgtgagggtagagtcagccgacggcaagacaatcaataatactatcacgaaggaggatattataagagcgcagattattggcactagaatggccttcaagaactacaccgcctttaccaacccaaataaggaggacattagctcaatcttcgctgcaaagcctctgggtggaaacttgagtgggctgaccttcagcggctgcggtgatctgaaccctcttcagaacgacgtgcctcagaacgttataaaagagggaacgaaaatccttatcaacggaacccaggggtatgtccttgggaacggaacacggagctccgctgagaagcccaatctcatgttgaccgccgacctgatgcaaatggatagctactatatcggcggtttcaagaccggccagggcggggaagtttatgatacagtggccatccccatccccgtcctgaatgaggagatctataacaacttactaatcactgatgacaagatcagcattacggtatccgacatcaaaggccgacacctgccgctaacggagaccaactacgccaagctgtggggtgaatacagcttaagaccacaatacgaccgcgccaattgctacaagtgtgattcatgcactgtggaggaggtctgcccaaccaacgcatttgcaaacgaacggttggatctcacccactgtttcggatgcggcatgtgtgccaactattgccgccatgatgcttttgacatgaacatggggagtgtcgacctgacaatcgacaatgaggacgtgaatattcctatcatctgccgccagtctgataggctcaggggaaataagctttccctgaagctgaagaaactcatacagaatcaggagtttaaactctga

SEQ ID NO: 9487 - DNA, 609 bp, synthetic construct
  source 1..609: mol_type = other DNA
atgcagaaaattacggattcccccatcgactttgctgaagagatcatcgaagacgtcaagaactctaaggaggaaggcgtgctgaaatgtgtgcaatgcggaatgtgcacttcaacatgccctgcggccctacacagcgactacaaccctcgagacataatcgaacgcgtgctggacggtgatgtgagcatcattgaggacgattgtatctggaactgcttttactgttatacctgccatagcgtctgccccgttggcaatagtgtatgtgaggtgaaccagatcctcaagcagtttgcaattaaaaacgagatcgggcacgataaactttacgagtacatggggttcgccgattcctatttcactgccgctattggcgcaattccagaaatattcttcaaggatatcgatcgcgacgtgccaggatggtgggactttcggctccacctcgacgagatccggaaggagttggacctgaatcccccactgatgccgagcaaagaggttattgacgaagtctcaaagatcctgaccatcaccgggttcaaggacaagattgaaaccataaggtcgacacaggaggataagaacgagagtaattccagatga

SEQ ID NO: 9488 - DNA, 942 bp, synthetic construct
  source 1..942: mol_type = other DNA
atgaaagtaattcccgatagcgatattctcctgttccggagctgtctggtgagtgtggagtacccagggatagaaagctccacaaagtttgtgtttgacaagctgggaatcgattacgccatctcagaaaaccaaacctgctgcacagggctcgggcactactccgacgtgttcgatcagattgacaccacggcgatcggagcccggaatttcaagatcgccggtaatctggggcggaaaaatctggtgatgatgtgtgccacatgttatgcaattaataagaagtcggttaaactgctcaacaaaaaggacgacctgagaaaccatattaacaagctatttgacgataatgacttgagccacttaaagtacgagaaggatgacctgaacccaaccgagaacatcttccacgtcgtggacattttgtacggcaaaaaggacgagattaaagataacatcaagtatgacctaagtgattacgcaatcgcaacccaccatggatgtcattactgcaaagtccactacgaggatactattggaggtgtgagggaccctaatatccttgacgaactgatcgaagcatgcggctgtaatacgatcggttggtatgactacaaacgtgctacctgcgggactggatttcgccagcgatattccaaccccgatctgtcatttacagccactgcggacaagatgaacagcatagacgacgagaacgtggacattcttgttcacctctgcccgaactgccacatccagttcgataggtatcagcatctcatcggcgaacgcgagggccgcaagttcagagccatacatttgaatatcgctcagttcatcgccctggctatgggcggcgatttcgataaggtcataggcgtgaaagctcacaccgtacccatagacagcgtcatcaaagagcttaaggaggtcaacaagtga

SEQ ID NO: 9489 - DNA, 2310 bp, synthetic construct
  source 1..2310: mol_type = other DNA
atgagggataacttgaaaattggggtgtttctctgcgagtgcgggggaaatattgccgatacgattgatctggacgaggtaagggatgcactggatgtggaatttatcggacagttcgagaatctgtgttcacttaacggacggaagatcattcgggacgccatcttcgaccatgatctggaccgggttgtcgtggcagcctgttcgcctattagccatgagaagaccttccaggactacatcaagccattgaacccctacctgatggacatggcaaatatacgagagcagtgcagctgggtccatagcgacaacgaaaaagcaacgcacaaggctattaccctgataaacgcctccatcgagaaggtgaaacagtctgacgccgtagatcccatttactgccagactcctgacgaggttgccgtgatcggcgggggcatagctggaatgaacgcaacgctttctctcgccaagcagggcaccaaggtgaccctgatcgaacaatccccttcgatcggcgggcatatggctaaaattgggaaggtctttagccctgtgaagatcgcagaagaatgcggcatgtgtctgttgaatccgatccttaacgaactcgtgtggaacgaaaatatcgaggtgctaacaaacaccaaggttattgaagctgagagacgggccggcacgtacaacctaatactggagcgctccccccgctatgttgatactgaaaaatgtattgcttgcgggaattgcgcggaggtgtgtgaagttgaagtgccaaatgactggaacgataacctgtctttaagaaaagccatctacaggcccttcggacagtcctatcctgaagcgtatgtaattgacatggagaactgtagcaaatgtggagactgttttagagagtgcaccatgaaagctatcagactgaagggcaagcccgaaaggataccgctccaggtcgggagcgttatcgtggccacaggccacaagcttttcgacatggagaaacggcccgagtacggctacacccgttatgacgacgtcataacacagtctgagcttggccgtattactggtgttaacggcccaaccaaagggaagctcctcaagtcaaatggggaagtgccaaaacgcgtggtgatgattcaatgcgtgggtagtcgcgatgagaaaccagagggccacagatattgtagcaaaatctgctgtaccatagctctaaagaatgccaacatcattaagcacaaataccccgacacggacgtgctgatttgttacaccgacgtgagaacccccggcatgttcgagaagtattacaagcacacccaggaaaatgaggtgaggtttatccgaggacggcccggggaagtagtgaaaaagggcgataacttcatcgtccgaacagaggatacaattaagggggagtttgtcgagatcgaagccgacatggtagtgctcagtactgctatggaaccaagcgagggcacaatcgaaattgctgaaatcctgaacgtgggtacgactgaggatggcttcattaaagaatcacaccctaagatcaagcctgtcgcgaccgacgttcagggcatcttcgtctgcggaaccgcacaagatccgaaggacatcactgactcaattatgcaggcaaccgccgccgcatcaaaggtgaacgaatacaactacggtggagtggaaatcgagcctttcatcgccgaaatcgacactgagaagtgcatagtctgtggggactgtatcgagcgctgcaaatataagtccatgagcatacagaacgatgagatctatatcgatccgatgagttgcactgggtgcggaaagtgcctggtgggatgcaatcagagggccatcacagtgaatgggaacatcgatgagaagatcatgtccacaataaaaggcgtcttgtccaagaaacaggagggtcaacggacaatactcgtctttttggataacattggttataccgccgcggacaatatcggcgtgaatcgactgtcctaccccgagagtatccacattatcaaggtgatcagcgtcaaccgggtcaggccacgccacattcagtatgccctggagaatggtgctgatggtgtttttattggcgaatttcccggagacttaatgtacgatgaggtggagcgtaaaatccaaagggtcaaagaccgcatctatgagatgggtgaaaatcccgagagagtaacattcagcaaggtttacattccatacttcagtggactcgcgcgcaaattcgtggatttcgacaagaagattgaggagctggacgaggccgagctgtga

SEQ ID NO: 9490 - DNA, 570 bp, synthetic construct
  source 1..570: mol_type = other DNA
gtgtattacttgaaactgagcattggtgacaacatggcccggagagaggctatcgaaaacatcattaactgtatcgacgacgaactggtcgtttgcaatattggatttccaagccgggagctctatgacatcaaggataggaaggagaacttctatatgatcggctccatgggattggcctcatcaatcggacttgggctggccttagcacagcctaaccgcaacatcgttgtcattgacggggacggcgcccttctgatgaatatggggtccctggtaaccatatttgccaacaatcccaagaacctcacgtggatcgtcatagataatggggcatacggaagtactggtaatcaagatacctacgctcagaaactggacctcgtggacgtggcgcgaggcgtgggctttaagaatagttacgacttcgaagatattaacctaaaggagttcataaagtccgatgatgcgagcttcatcgtgtaccacacagaacccggcaacagcaaagctccgatcatcgacctgtcgccagtggagattaaaaataggttcatggatattgtgtga

SEQ ID NO: 9491 - DNA, 492 bp, synthetic construct
  source 1..492: mol_type = other DNA
atggactccagcgaggctatcttcgatggcctgaaagacgccggaatcaactttattgttagtgtgccctgcgtgaacctgtccaagttactcaacatgatcgacaaagacccggatatcatccatattccagtgactcgggaagaagaagggataggcatctgtgccggcgcatacctcggagggaagaaggccgccattttgatgcagaatagcgggcttggcaattcgattaacgccctgaaatccctcacggaactatatgagtttccccttctcatggtcatgagccacagggggaccgaaggagagaacatctgcggtcaggtcccaatgggtgagtcaacacccctgatattggaagcgatgaattacaagttcttcaagccaggcacccctgagggcgcatatgaggatgtcaaggaggcttgggagctgtctgtggaggagggaaaacctgtaagtgtgctgctggaaatcaagtactggtga

SEQ ID NO: 9492 - DNA, 1119 bp, synthetic construct
  source 1..1119: mol_type = other DNA
atgttcgaccgcctaccaatttcgagcaaaacagagaagattctgaccaagtccctggatgagcagataactgttggggaagccaattacctaatgaacatcaagggtgctgacctctaccctctgcttgcaactgcggactatttacggcagaaaatcgttggcgacaacgtcacattcattaataactgtaatatcaacttcaccaacatctgtaccgtgcgctgcggcttttgcgccttcggcaaggatgcagacaaccctgacgcgtacattctggacgacgaggccatccttaaaaaggctcagagcgctattaaaaaaggcgcccatgagttttgcgtaatgggcggggtcctgcctgacgccgatatcgaatattacgaacacctcatgcacctgctgaaggacgaatacccgaatgtgatgattcacggcttctcaccaacaatgatcgcggatgcatgcaaggtctccggcatcagtatcgctgagggctgcgaacggttgaaggatgccggtctcgatacattaccaggaaccgccgccgagatcctgaccgaccgttcacgagcattgatatgtcctgagaaggtgagtgtggacgagtggataaacatcatcaaaacagcccacgaggtcggaatccccggttctgcgactatcatgtatgggcacgtggagaccctggaagagcgcgtggaacatattgatataattcggaggatacaggaagagacccatggcttcacggaatttatccccatgactttcatgcacgaatattccccaatcttcctcgaggggcagagcaacctcggagccagtggaacccaggacctgaagctgtacgctgtaagcagacttatgctgagggacctcatcccgaatattcaagtctcctgggtgaaaatggggtacagatttgctcaagtggctctgacggcaggaaccaacgatcttgggggaacgctggggggcgatgagttgtcagaagcctctggcgcacccgatggagtggaggcctccatcgacacattgagcaggatggttaaggatctcggtagaaatcccattgagcgaaactctaagtatagcgagttttaccccattgagtga

SEQ ID NO: 9493 - DNA, 585 bp, synthetic construct
  source 1..585: mol_type = other DNA
atgaagaagtttattgtcattgacggactggacggcagcggcaaggatacgcaggtgaaattaatcgccgagatgtatgagaaacagggacggaatgtcgtgatcaggagccatccctgctttgacaataggtacggtcgcaaatcaaaggaagcactactgaagactgggaaaatcaatcacttgcttgccactgtttactttgggctcgacgcgatccgcagtgtggttaaatacacacacgatgataacgtggatgtcttgatcttctcccggtacattctcgccgtgatgtatctgccaaacgggataaataccatcgtgtataagatcgtggcattcattctccctacctccgattgtatgttcttcctggacgtaagtcccgaggagagcctgagaagaattggctcacgaaacgaaaacaccgagatgtttgagaacattgaatgcctgcggaagaaccgtctcaaaagccaaaagttcacatacaactggaacgtaataccgggcgacgactcggctgaggtcatctccgaaaagataaagatgaaatgcatcgaaaccgacaagcttctgaattga

SEQ ID NO: 9494 - DNA, 258 bp, synthetic construct
  source 1..258: mol_type = other DNA
atggataaggttctgcgggatatcctaaggaacaatcagtacttcgaagagataaatcccgaccgctacgtcccggaatttttgggcctcatcgtgaacggagtggtggtctatcacgtgaactggattgacatcattgagaacgagatcgtcttcatgcataaagacatccagacccacccaattgtgagcctcgtgctggaaaaccttaatagcctgatgattataacaaacgaggggatcaaggaggtactgtga

SEQ ID NO: 9495 - DNA, 978 bp, synthetic construct
  source 1..978: mol_type = other DNA
atgttttcgaaagcgaccctcaaggagaggagacagtattaccgggaagagtggtcagtcaaggacttgccagagtttatagctaccgatcttaaaaagagggaatttggtttcgaccacaacgggcgcggccccaacgaccgttacaaggtctttagaggacccgaatctcttggaaagttccttaaattcaagtccccatttgcagcctacatttcagtagccttctacaacaatccccgacgaagggaggactggttgaaagcagaatacatctttgatgtcgacgccaaggacatcccaattaggacctgccaatgcaacggcgtgtgcgaggtgtgtctgggggaagctctggagatagtgaactccctgatcgacacactacagtcagatctggggctgaagaacatacacctgatctatagcggcaggggatatcatatccgcattttagacgaggagatgatgagtgcgaacagcgagctccggagcgaagtgctgaaatatgccgcaggagccgaggttccgaaatcgcagtttattaatcccgaaatctccaataagagtttcaactttgagcacttcacaatccccgtggggtactctaagatattcacggacaaagtgaagttcaacattcagcatctggttggcaacgagaaaatcgatggcatcaatccgaagttgatgaaagatatcctgtccagcagacatcacctggataatgacaactgggggtatttcaaacgagatattggccctagacggtacaagaatctggtggctgctatggcccgggtgaatctatccactatcgatgcaaaggtgagcattgacctcaaacgcatcctgcgcctcccaagcagcctccacagcaaggtaagtatgaagtgtatggaagtgaagaaccgggaaaatttcgatcctctcgacaaggccgtccctaagttcgtttacgagcgcaaaggtgtctga

SEQ ID NO: 9496 - DNA, 516 bp, synthetic construct
  source 1..516: mol_type = other DNA
atggaagaggtggtgaaggtcatcgggatcgaacacctaaaagtaatcttatctagcctgacacctgaggacatagtgaagcccgcctacgaaaactggcagaccggcatgaagacaggctacactaggctcaacctggagacgggagagatctacggaataggggtcgaacttaacaaccttccactcccaaataatattttcattgatctgttcaagatagactcctatgacgatcccatcgatgaggaggaatttttctctagctcggaatacaatgagtttttggagttcagcagcagtgaacctagtgaatatatcccggacatcatcaccgagttttgcgagctcaaaggtattgacgagatgaaacgcaagatcggcctgctggcatataactttgagaaaaacgagcggagcaactataacatgtgggaatcatccattctgaataagtactacgatgcgatttacgaggaccataatcccttcatgttctcacagaactccctgtga

SEQ ID NO: 9497 - DNA, 1326 bp, synthetic construct
  source 1..1326: mol_type = other DNA
atgacggaggtgtcttacatcaacccgttatcaaacgagggaagaggaatcatccgaaactatggcgacctcaaccagatctttaaagaggatgattccctgattgagatctgcacccatactgcaaaccagaaactcagcgatgactacattccaaagtcgtaccacgacctggcccttaagcgcatccaatgggcgatagagaagaagaataacaaaaacttcacccaggcggaatttgaatttctgaccaatgacgagctctacttacaggacgtcgtaactttccacatattgtgtcaggcaattgctgttcagttcaacaccgggtcacgggagacccggctgtttgtccagagccaaggaacactcatcctcgaacgactcgctaagataccccccatgtccagggctgagatcatcgacgacgtactcgatgaagtgaaaattgatggcagcattaagtggaaaagccttaaggacatcgtggcaagcaagaggctgaaactgactgatcttctgatagaccggggcgatattgtgctgcagcaggacgacttccttaatagatttgccgaccggttccacgacagaagtccggatcgcatgtacagcatcttgatcggcgacagtgtgaaggaacaaatactttcaaggctggtcatgcaaaaaaccgaggaatacatcaaacgcatcaaggagatgtcttctcgaatcgaaatccaccctgccattatcaaaattggcgaggagctaaaggaatttattcccgacgagacgggcaagtacaaccagtattatgccggcaacggaggaatctacgggagtgtgcaggctggtaaactgaaccctgacgctttccccccttgcattcaggaaacagtgaatggagtgtcttccgggggtcggaatgacgccatcgtcctgctgctgacatcgttcgcctcctatgcgagattgtatccacgcattttcgccagcgaggaaaacgtgaaggtttcagacatggaccccgatctgacaatcacagagaatgagattctgcctctgatcttcgatgccgcagataactgtaccccaccactcttcgaggatcagccacaagagaagatcaatattatatccaaactcgggtttggcatgcacgataggctagacattaaccacgaaggggaaactaaatggtacacgcccatgagttgcgagaaaataaagatccatctgcctaatctatgtcatcccgacaagtcctgcaaggggatcaataacccgttgagctgctatggtcgtaagaagttccagctggataatgcccagaaggagtga

SEQ ID NO: 9498 - DNA, 804 bp, synthetic construct
  source 1..804: mol_type = other DNA
atgttcaacgagcacgttataaagattaaggaggtgttccgcatccccaaggtgctgataagtggacggggaggttgcggcaagagcaccatcgtgtccctgctggctcggaaactcaagaataatggaaatagaatcttagtggtcgactgtgacgagagcaatttcggccttaacaagattttgggtatcgaaaagccgaagaaaacactaatgaacaatcttggcgggaaactggcggtcagggataaactcctggagatcgtgcagaaggatgagaatcatctgaacatttttgatgtcatgtccctcgatgatctgtcgaacgactatgtgacttgggatgacaatctgggctttctggagattggcaaaatcgaacatagcatggaggggtgtgcatgcccaatgggggctttgagccgagacttccttaaccacctcacgatcaacgaaaatgagtggatactggttgacacagaagccggcatcgagcactttggcaggggggtgttggagggagccgactttatcatcgctattgtggaccctagcgaggacgccatactcctggcgaacaaagcatacaaattatctttcgaaaacaataaaaacttcggggtgattctaaacaagatcgatgacaatctcgaagagatccttaagagtaagttggattccaacattgccattctcggaatcattaactactcctcagacatagccatgctgaacctgcagggcaactcagtagaaagtgtatctatcggtgtcctggatgacattatcacctgcatcaactga

SEQ ID NO: 9499 - DNA, 630 bp, synthetic construct
  source 1..630: mol_type = other DNA
atgaagctgaagaactttaagagagaaaacatgatccctcttcccgtgactctgatcagcaccgccaataaagagggcattcgcaacatcgcgccttattcctgcgtagtgactatcttgcggccaacaaaccttgtctgcatagctagcgcaatgatgagggacacatacgttaatatagaagagaccggggaatttgttattaacatgatcagtgccgatatggtggatgccgtcatccccacgtcatcccatgtgagctttgaggtggatgagtatgaactggccggtctcgaggccacggaatcaaaaaaggtaagtgcaccagggattaagggagcttattcgcagatggagtgtaagctaacaaaaatctacaaggacaaagaccccattggtatcccatacctgctcatcataggggaagtggtccacctggaagtcgatgacgactgcctcgacgaggagtacggcgtgctcgatttgaacaaggtgaagccgttaatgatgctggagtccgataaaggcatgcacttctgtaccattgaggacctgaataagttcgaaaccttcggcgcgatgttcagcgacggaaaagaccccctggagtggatgtacgagggagactga

SEQ ID NO: 9500 - DNA, 546 bp, synthetic construct
  source 1..546: mol_type = other DNA
atgaagattgaaagtatcacggattttgaaaatctagactcgcctcgcgtgcagcgaatccccggcttctacggcgaaaagctcatagatggtgtggtgattaggaaactgccaatgttcagtgacgagcggggctttctgtgcgagttcatccgcctgaatgatgaggaactcaaggcaagcaacatcaagcagatgattgcctcatattcttatccaggcatgatcaagggctggcaccttcatagcaaacaggaggaccacctgttttgtgtcaagggaatggtgaaagtcgttctgtacgacttcaggaaagattcccaaacctacggtatgataaacgagattttcatgggggacaaatcccccataattgtatatattcccccggggatcttccacggaacaaagaacattggaatagacatgtccatcgtgatcgggatgcctagcttgttttacgacatcgatgatgtcgacgagagacgggtgaatccaatcgacaacgatatcatcccctacgagtgggactgcaagatggaatga

SEQ ID NO: 9501 - DNA, 2727 bp, synthetic construct
  source 1..2727: mol_type = other DNA
atgaacaagaaactgttgatcatctccgtgctcgtcatatttatcttcattaatgcggtctcagctgagaactcgacagatatcaacctggagctcaatcacaacaatgacgaatgcatcaaggaaatctctgatgagtcctcaacagacatcgatctgaagatcaactacgaatatggggatgaaatcaacccggaaatctccatatctcactgcaataacaacatgaactatacaaaaaatataattcacagcaacaactacaggattaccatgaacaagctcaatgacggcgcagagtgttcggtgagcgtgtcagccctcgggtacatcacccagatccagaatataaccataaactcccaatccaacaaaactaccatctttaatctaaaggccacggacatctacaaaatgggctatgatatgacaaaatccgcagatagactccttaacttttcctctgccgatgacgtgctggttattaccactgccggaatgacaaggatcaacgacattactacagaaaacgccctggacggcatttataatgccgctgacggccacataacgtacggcaaggggaatcttttaacactccacgccatacgcacagaccccactaatttcgccttctttattaagaaaggaaacaggttgacaatggcattctatcagaatgctagcaccacgccagtctataccggaatcggcggggtgggactgacgacaaatcagtggaaaaaacttaaaggcctcatcggggccgacgacgcctatacctacgtaagtattgctaacgcctggaacgccgggctctatagcgacatcctgacgctggcctcgtatcatggacatgtctgcaccggtctgattagtgggcaggctatggtgactacgctgattaagtactatcctccacggggggagaccggcgcccagcctcttgagaacaccgcctactacgtgctaggagtgccgggcggtagcgacgacgacgcattcacatggacacttgatatcacccagggcaagatgtcatacattgggtttgacaccatggagaacaaaaatatgaacgggttcatccgctggaatagttcaagcaacaccggccttctcatcataatgtcttacgacgaggcaaagataaagaatacatttaagagcctgtatccaaatattaatcccgacaacagtgtgaccgaagacctgatctaccaaaactggttgattagcactttgatgagcaatcccgaaagcctggtcacaatcgaagcagcctataaagatcttaccctggaacagaagaaccagctgataggaaatcaactgtggagcgcgtcgaacattactgcgcggggactggatttggactacatcaacagtctgaacttgcccgatgctgagatggagactggaatcttcaataatgtccatctctctgactcacagctcaagcaaatcggggtggatgcttctctgaaagctgtcgattacttcaaaaatatcaacgttactatcgagaaagacatgtcgaacttttatgtgttgacgggtgcgggattcgtgcggattaacgacaccgcaacctctatggtgtttgacggtatcgaggatatttttggcgcccgactgagccggggaaacctactgccagtgcacaccgcactgtggaaggacctgatcatcgagttctactggctgaacactagcgatatctacaacagcgtgacttacagtctaaagtataactcaacaaccgggcagctgtacgaatgctcacagcagtataacattcaggatcggagtctgaggtacgaccccccttatgacgctctcatgggctggctcttccataatcacgtttgtactggtagctctcccggcgtcttgctggcggataagatattcgacgatctccccctgggtgagaacgagagctacgtgctggtgtcaacgtacacctactgtaaggacgacatgttatcccgcctccttggcgtgagcccgggtatgggtaattactataacctggcttactccaatagtgacgtaaatgccggcgccctgtggacggctgattctgatataatcatccgctggaatagtgagacaaacaccggaaccgccacaatcattaagttcggttaccctatcttcaaagatggggccgacgaatacgcggaatggatgagattcgtaaagggcgactatagctctgagaacattgtctcgttacctactttaagttttgaggtgaccaagccaattaccagagatgattacaataagatcatttccggcaagtccgatgatgagggaattaatgtcctgtcctatattagagctctgccagacaagattcctgccgtgctaattgacaacaacggcatctctaacggaaatgatggcaattccatcaacaaatatcccaagaaaagcaataacaacagtgcaaacaccaacagtatcttctcctcttcaaacaattacaattccccaagcaagggactcaatcccaacgttggggtgagctcctactctctttcaggcgactccgatgttgaggacaagggggaggcaagcagcaatggaaagtcctacgaagtatccaagacgcctgcaactaaatccattgacagcaacagtttaatctacgccctcgttggcgtcttggctatcggtattctgatcggcctggggtttatgaaacgtcgaaagtga

SEQ ID NO: 9502 - DNA, 1989 bp, synthetic construct
  source 1..1989: mol_type = other DNA
atgagtaagatatttatcagctgcgccctgccttatgccaacgggccatgccacctgggtcacatccgttcgacctacctgcctgccgacatctatgcccgatacaaccggatggcaggcaatgacgtgctgatggtgtgcgctaccgatgagcatggcacacccattgctgtaaaggcagataaggagaataaaaagccaatcgaaatttctaaacgctatcacgatatgatcgttcgggacgtcgaaagcatgaacatatctttggataattttagtcgcacgacggacgaaaagcattacgagattgctcagaacttctttaaggagctgtacgagaaaggacttatttacagacaggacctggagcagctgtactgtcccaattgcaagaagttcctcccggacagatatgtggaggggctgtgccctgtgtgtggagccgaggcccggggagatcactgtgagaaatgcgggagggccctagatccaaccgaactggacgagccccattgcatcacctgcgggactacccccgtgatcaaagacacttaccaatacgcattcaagttgtccgagtttgaagacgagcttaaggagtatatcgataacaatgaaaacctgccttccaatgtgaagaactatgccagcaactggctgaaagaaggattgaaagactggatcttaacaagagatatggactggggcatccccgtcccgttggacgaagcaaagggcaaggtgctttacgtctggattgaagccttcttgggttatatctcgtctgcctcacagtggtcagcgcagtctggcaaaaaatgggaagaatactggaacgactttgtagtgcacttcattggcaaagatatcatataccaccactcaatcttctggccaggcctgttgaaggctgccggatgtaaactgcccgacatgatttatgccggcgagtttctgtcccttgagggagaaaagatgtccaccagtaaaaattgggtgatctggatcgacgactttgtcaaggagtatgaccctgacattctgaggtactttcttaccattaatgcgcccctgaataaggattcagactttagctgggatgacttccaaaagcgaaacaatgacgaactcgctgacgtgattggcaacttcctgcatcgcacattcacattcacacgaaaattctttgataacaagatccctgaatacgcaaatccaagccgggaggatgaggagtttagaaagtctatcgaaagcttaccgaaggttgctggggaatttatagctaacttcgagttcagggaaggcctgctggagatatttaaagtcgctaagaagggaaataagtatttcaatgatcaggagccctggaaagcggtcaaagaagacatgcagaaggcagctaactgtctctacctctccaaccagctggctaaaacactcgcctacacccttaaaccttacctgccaacgaaagcggacgccatagctaagatactcaatattgatgagctgagcaactgggcagacgcagccgtcttcctcccgagtggctacgagatcaacaaggccaagcctctattcaaaaagattgaggatgaggagatagaggcgcagaaggaaaagctccagaagaacctaaagaacaacgaggatgagaatatgagtgacctgattactattgatcagttcgatgaagtgatcattaaaatcgggcagatcaaagaggcagagaagatcgagaagagcgacaagctcctaaagctgcaagttgagatcggtgaggacaaaccccggcagatcgtggccgggctcgccaagttctattccccagaggaacttatcagcaggaaagtatgtgttgtggcaaacttacagtccgccaagctcttcggcaccctcagcgaaggtatgattctcgccactggagaatccggtgccttgctgactcccgatgtcaaagcggaggtgggggaacgcatccaatga

SEQ ID NO: 9503 - DNA, 1578 bp, synthetic construct
  source 1..1578: mol_type = other DNA
atgcctgaatccgtcctagtcaacaaagccgaaaactacttgaaggccatagccaatgacgctattagtctcgataatatcgaggatttcgagtacttcaaggacctgtactttaaactagatgacaggttaaactttcttcaggagcttaaggaggacatggatgcccaagggtacactacaccttttacatccctgaacaaatacggatcgaaggccgtagcggatatcgatgttgaggagatgggcgagaacagccgacacaacaaaatcttccgcatgaaggccaacgcgaagaaaaacattctggaccgcgtgaaatcagctatcgattcacacaaaatcgcaatcggcaacttggagcagtttggatatgtgaagtgtgattcctgctataaaaagtacagcatgagcgaatacaagcagatagagggaaagtgcagttgcggatgcactattttttcatttaaaatccgaaaggacgccacccatagaatagagataatcccctacctgccgttgtccggcaattacatggttctccgaaaccagctaaacacttttggccgggagtctctgaagcaggtgctgaacatcctcaaacaggaacgcagaggtgtggtgaaaacaatagctctcgtgatacgttttcgagataaaaacaatcggctcgtgagaaagaacatcaccctcgactctgagtatattaacaactatgaagaagaggtgagaaggatttacggtaagcgggtcaggatcgaagcattacggtttcaccggaccaagcccgccatcatcgacgataagcatgcccgcacggccctggctattgggtacgtcaggtatagcgagcagataatcgacgacattaaggacgaaatacttaaacgcaagctcagcgacttcaaaagaattaacacctatgacgagatcttcgctgagtatgaaaataagacgcccaacttcattgacaagtatgacttggaggcaatcgataaatggcgcaaatctcagatcaaggagaatttcaagcacctgggcttctacgataaatacgggaacataaacaggtctcttagccgggacctgaagaaaagggaaaatatttacaaaaacattctgagaaacatcgcatcggcactgatcatctgggatatcttcaggtactacattacaacttcaaacaactcccgtaagatcgacatcagcccattcccctatatccgggtggagctggaccgggaacaacgcaaagtcttccaaacaacccacaaaaaggtaatcgaaaccctgaatacctatacgaacattaagatcattccagtttgtgaaatggatctgctgctgcacgataaatttaagttcgaaaagcagatcaaaaattccaatattaaattcaatcatgtggcattgggggctgccctgattcatgagaatagcgacatcgagctcgaggacattagtaatgcgcttaatattaacgagagcaagatcaagaaagagattaagaatatcgaaaatattaagaatccaaagagtgacaagtccaagaagttcctggacctcatcaagaagtga

SEQ ID NO: 9504 - DNA, 465 bp, synthetic construct
  source 1..465: mol_type = other DNA
atggacgaggatgtgaagacagtgcatatcaccaaagccttgagttctgccgtgatcgtgaatctgattgagaactaccccaatcttgaagtaataacttgctccccttcggtgtacgatagaacgtcaagcaaatatatcgacgcactgtcccagctcgatattgaggttaagaagaaatacaattggggagcgaagagccaaaccaatggcgctgagttcgaggtcctggaactgagcgacaacgggttaaaaccgaaggaaatagcccagaagctcgacctgaagctgaaccgcgtctattacctcctgaagaaaagtaacgcaaaatacgacaatcgaaaacggaagcacgatcacgaagagattaaagaacttaaaaacgagggcttgtcagctaaggagatctcccagaagctcaacatcccactgaggagcgtctactatatcctaaacaagaagtga

SEQ ID NO: 9505 - DNA, 1014 bp, synthetic construct
  source 1..1014: mol_type = other DNA
atgatgatcctcccacagattcctctgtatggaatagccataatctgtggactgctaagctttttcgtcagccgcctgactatgccaaggatcatacggaagctcgaagcggcggacatcgtggggaaagatattcacaaatcctggaagcccgtggtggctgagatgggtggcttcggcatcctgtttggctttattataggaatctttagcggcatatacatgcatgacattcttacatttaacctggtggtggtgctggtagtaatcctgctggttggaataatcgggatcgtggacgacctgcttgccctgtcttcgaaggagaagttcttccttctgttcctggccgggctaccactcatctgggtggcccctcccaatgtcggattactgtatctgatcacgattcctattgcattatccgtcggctctaacctcaccaacatgcttgcagggttgaatggaattgagtccggtctgggcattatctcaatggcttcactgacaatagcctgcattattttgggcaaatacgacgtgaccatcatctccatgagtatgctcggcgcactgatcgcatttctctactataacagataccccgccaagatattccccggagacaccgggaccctcattatcggtgctgccatcgtttgcatcgccttcattggccgggtgaaacttatcgcattcattgtactgatgcccaatattattgacgcagccttgaaattctacagtgctgggtttatgaatcgtcagcagcagaagccaacgcaactgaacgatgagggtaagttggtcaggcctgatgttgggtttaaaagcctcatccgcttgattttgagaaagccgatcgccgaaaaggatgccgtgcgactcatctgggctatcggcttcgtcttcggcatcctgggtatcgctgtggcgctaacaatgccgggggtccttgagagcaaaactctcatgaacttcttacagatcaaggaaatgctgtaccacatctga

SEQ ID NO: 9506 - DNA, 669 bp, synthetic construct
  source 1..669: mol_type = other DNA
atgatgccctatgtaatactctccgccgcgatgacactggatggtaagatcgcaaccaagaccggaagctcaaacatctcgggaaaaaaggatctgctccgcgtgcacgagcttaggaaagaatgtgacgcgattatggtggggatcggcactgtcattgctgatgacccaagattgactgtgcacaaggtagatgccaaaccggatgacaaccctgtccgtgtggtggtggatagtaaattccggacccccgctgatgcccggattaccaattctgacgctgaaacaatcatcgcctgcgcaagagagtataaggacgaactgatcgccagcgataaatacgaaacattcaaaaagcgaggagttaagtttttctactccggcagtaaacgcgtggacctgaagtcactgatgagctacctgcatgaggaggggatcgacaagctcatgcttgaaggcggctctacgttaaacttttccatgataaaggcaggcctcattgacgagataaggatttgcgtcgccccaatgatcgtcgggggctgcgacagcaagaccttctttgacggagaggggttcgatctgatgggtgaggccgtgaagctggagctaactgacagctaccagttggacaaggacctgatcctaacgtataaagttctcaaatga

SEQ ID NO: 9507 - DNA, 465 bp, synthetic construct
  source 1..465: mol_type = other DNA
atgaaggccagtgagcttctggaggccatcaaggaaaacattcggtattacccgatcgagtatttgaagaacaaggtggccgacgataggtacaaagatcctctgaccaaaaagctggctgagtataactccaacgcatatgacgatatttatgagacagtgatcatcgatgactttgacatcaatgacaaggtggttaaaaagatccgagaagacatcgcattctattttgacaagtatggcggaggcgaggatgagcacaagatattcgcggagaacatttcactctacctggccctcatagctaaaaagccactacacccctacggggaaaacaagaaagacgaagtctactacagcaatggctcttactactgcagagggcgcatcaaatacattcatgacgaaaaaagcctctgccggtactgtgtatgcaagaatgtcggattcatggatctgttctga

SEQ ID NO: 9508 - DNA, 666 bp, synthetic construct
  source 1..666: mol_type = other DNA
ttgaacaaacgaatcgatctacacatgcacagcctgttctcggatggggaactcctaccctccgagcttgccagaagggccttgaagctcaaccatgaggcaatcgctattactgaccacgttgactggagcaacgtggaggccataccaacaatccaggatgcaattgacgacattaatgctaactgggacataacggtggtgctgggtgctgaggtcacacatgccccagtcgagtccattgacggcatcgctgagagggccaaggagctgggagccgagatcgtagtggtccacggcgagacgctgaatgagcctgtcactcccgggacaaaccgggccgcggtggaaagcaaacacgtggatatcctgggacacccgggcctcatcaccaagaaggaagcggaaattgcccttaagaatgacatctatcttgaaatctcagcgcgcaaaggccactgcctcggaaacgggcacgtagctaacatcgcctgtgaggtgggaaataagctgctggttgataccgatacccatgcacctgatgacatcattacctttgaaaaaagctacgaaattgcactgggtgctgggctgaaccatgacgacgcaatgaaagccatcgtggacaatccccgccggctcctgaagagtaagggcatattatga

SEQ ID NO: 9509 - DNA, 1224 bp, synthetic construct
  source 1..1224: mol_type = other DNA
atgaaggcaaaagcttttaagatagccgacggtgtgtactgggtgggtgtgatccactggaatagtcggactttccacgggtacggaatccccgggaccacatacaacgcatatttggtgtttggtgaggagaaaaatgtccttattgataatgtttacaggggactgttcgatcagtttgacgcacgtgtgaaagacgcgttcgaacaggagggcaaggagtttaagatcgatgtattcgtgcaaaatcattcagagatggaccacagcacatttctccgcgatacaatcgccaaatacaaccctgatgcggaaatttatgcctcacaaaattgcattaacttcctggaggctcagtatcataacttctcggacctggagctcaatgctgtcaacaccggtgacgagctggacatcgggggccggaccctaaagttcatatccgccccaatgcttcactggcctgacagtatgtttacctttctagcggaagacggaatactcttcagcaacgatgccttcggccagcacctgtgtcatagcaaacgatttgacagggactatccgttggagtacgtgttaggggaagcccagaagtactatgctaatctggtgacgctcggctccccaatgttcagaatgaagctgcaggagttaactgacaacgggatactggacgagattaaaatgatcgctccatgccatggtcagatctggactaaccccgcccccatcgtggaaaaatactctgagtgggcctccggggtatgcaaggataagattacggttatatatgataccatgcaccacagcactgagaaactcgccttccaaatcgccgagggcattatgtccgagggcgtcgaggtcaagatgtactttatgcaggaagacgggcccgatgatgttatcaccgacattctggacagcaaggcgatcgcaatcggcgcccccacaatgatgaacaagccattcccgagaatcggaaacatgatgtactggctggattgtgtgaacttcaagggaaccggcagtgagaagaatgcattgatcttcagctcaaaaggctggggcggaggcgccgtcgacaagctgcagaaagacctggaatccgccggatttaacgtcacggacacaatggatattctgtttgtgcctgatgaagatatgcttgctgaagcattcgaaaagggggccgagctcgctcgctctatcaaagaatga

SEQ ID NO: 9510 - DNA, 507 bp, synthetic construct
  source 1..507: mol_type = other DNA
atgtccgacctgattatctatttcagcagggatggggaaaattacttctccggcgaaattaaaagcatcgagaagggaaacaccgaggtaattgccgagtacattcaggagtttactggtgcggacatattcaaagtgatcccaaaaaaggactatccttccgactacatgaagtgcatcgacattgctaagaaggagttgaaagcaaacgcccgcccggagattaaggaagagctgagtgacatctcagactatgatattatctacatcggcttccccaactggtggggaacgcttcccatgcccatgtggacccagctggaaaagctagattttacaggcaaggtcataaaaccatttgtgacacacgaaggaagccggttcgggaaatcgggtaaggacctgaagagactctgtaaggatgccataatcaaaaaagggctgtcaatcagcggcagtgatgtgtacgacctcgcagatatcgtcaagatctggctcgaggagtga

SEQ ID NO: 9511 - DNA, 4047 bp, synthetic construct
  source 1..4047: mol_type = other DNA
atgaagatcaaatccatctacaaaatactgatatttagcatagtcctgctgattagcctgtctgccgtcgccgccgaagagagtatggataacaccacaagcaacgatgacgtgctaacttccgacagccatgatgatgtgcttaccctgaatagcaacgatgatattctcacctcttccgaaaagacatggtatgtgggaaaaaatacgactgtgggaggtagcggaacacaggaagacccatttaataacatcgaactggcgctcaatcactcgtccagtaatgatacaatctatatcaaccccggggtttacgacggtccgcacaacacgaatctgaaaatcgatatcgacaacctaacaattaaagcaaaaccaaactccgtgttattaaatgcaaacattaacaacacacgagtgttcgaggttacggggaacgacgtttcaatttcagggctgaacttctccaacgtgtatatggagtacggcggggtgatcaagtgggacggaaatggaggatcactcaccgactccacgatcaagaactccaagtcccgagtggggtctattcgttgggagggcaacaatgccatcatcaataacatcacgatcctcaactctacgtccgaaaatggtatcctggtcatatcagggacttcttccaacataacaaactccacaattcgcgatactaaggggtattatggtgcagtgatgttcggcggcaaattcaacatcatcgacaactgcacctttattaacaacaccgcctggatgaatggcggtggagtgtatgattggggggccaacaacaccgtcagtaactcgctttttatcgctaacaatggaacccgcggtggagccattctgacctacgaaaaccagccaaaccgcatgaacataatcaacaacacctttattaacaatatcgggggacaggccggggctattgtagtaagacgggccggtgcaaacatcgataactgcacttttatcaataactcagccggatctgctggagcggtcctcatattgtctgaagccaatatcaccaactccattttcgagaacaacagtgcttcaaccgtggggggcgctgtatacattacaggcgacggctccactatcgacaacagcatctttattaacaacaccgcaaataacgacgggggcgcaatttactggagcggcgagaacgggaccgttaccaatacaattttcattaacaacacagtaaacaacgggaccggggaggccatcgggtacattaataacgtgaccctcaataatgtgacattggtaaacaataacattgaacaagtcattgtgaacgaaagcacacccacatttgagtatgtgttcaaactgaccgagggatacagtaatgttaagttgaccgacaattatacggcattctgtaccgaaaagacgaagtggtcctcgagccctcgaactccactgatacctcacaatgatctgtccatccttaaaaaccatatcacaggcgagtcagtcgcggagtatctgaagatactgatctacaagtatctgaaagatccagaccggattagaaacctgcagcaaaagatctggatcttcaccgacgacaactatattgacagcactgattcgataatcaaagaggtcatctctgattataatagtggcttccggatacccaaccagggattctctgaaatcataaatgatacaaccgtacttagaattgactttaagtcctacaacattaccaagcagatccaaaacatgatcggatttaagagtagcatcgagaatattacttacaacatgtccgttgttaagaacacactcactcccgccgtgattctgggaaatcaaacaacctttgaaatcaaagtgactaacacggggagttactacctcacgaatgtaagtgtgattgaagacggctacgacgggctcatctacaacagtttctcagatcctagcggaaaatggatattctcccgcaatagtgatggaaagcccatgtggacatacaatggcaccctatacgttgggatctcatacagtttcaatgtaacattcaatactacaaagaccggcaacttcaccaattttgtagtcgtcacatctaacgaaaccgacaacaagaccacgaacaataccaccaaggtgtataagcccgatatgactgtggagaagctgtctttgaatcggaccgtttacgtcggaaatcagactgtctttactatcgtggtccgtaataccggcgattgcgatttgggtgacgtctttgttgtggaaaaagccccagaaggactggtgtacaactcattcaaaggcaccgactggagctacaacaatggcaagtttacttacggtaaagtgctgaaagtcaacgagtcggtcagcttcgagattgtcttcgacgctgtgagcccaggtaactggaccaacgtggttgttgcaggctccaatgaaactgacaacaaaacaggtaacaatactactaaggtgtataagccggacatgaccgtggagaagctgagcctcaataggactgtgtatgtgggcaatcagaccgtcttcaccatcgtcgtgcgcaacactggtgattgcgatctaggagaggtcttcgttgtggaaaaagcccccgagggactggtttacaactcatttaagggcacagactggtcctacgatggcaataaattcatgtatgggaaaaccctgaaggtgggcgagagcgcgagctttgatatagtatttgacacaatcagccccggcaattggaccaacgtggttgtggctggctccaacgtaaccgacaacaaaacaggaaataacactaccaaggtgtacaagccggatatgactgtggagaagctgtctctcaacaggaccgtgtatgtgggaaaccagactgtcttcacgatcgtggtccggaatacaggcgattgtgacttaggcgaggtcttcatcgtggaaaaagctccagagggacttgtgtacaacagctttaaaggcacagactggagctacgacggcaataagttcacatacgccaaggtgttgaaagtcaacgagtcggtcagttttgagatcgtattcgacgctgtgagccctggcaattggaccaacgttgtggtggccggctccaacgaaacggacaacaagacagggaataatactacgaaggtgtacaagccggacatgacagtggagaagctctctttgaacaggactgtgtacgtggggaatcagaccgtctttacgattgtggttcgcaacacaggtgattgtgatctcggcgaggttttcatcgtcgaaaaggctcccgaaggacttgtgtacaacagcttcaagggcacagactggagctatgacggcaacaaattcacatatgctaaggtgctgaaggtcaacgagagcgttagtttcgagatcgtattcgacgcggtgagccctggtaattggaccaatgtcgtggttgcggggagcaatctgacagggaataagaccggcaataacaccactaaggtctacaatcccggtttgaaggtggagaagatcactctcgaccctgtggtgagcgtgggtgagatcacatcgtttgagatcgtggtccggaatactggtgactgcaaactgggggacgtctttgttcacgaagatagttacgagggcttaaggttccatagcttcaggggcgacatgtggaagcagaagggcgacacgttctattatcagggcgtgctgaaccctggggagtcagtgtcatttgtcattctgtttactacgctgaagcctggaaatttcaccaatattgttaccgccgggtccaatgtgacgaacaatacgaccacggaaaacaaaaccaaagtaatagagaaccacaccaacaacaataccaacggcactaacaaaacagtcaataatgagaccaaagaggtgaatgtccacaaggtggatacttcaagagcaaccgggaatcccctgctcgcccttctcatggtgctacttatgattagtgtgaccagcgtgagaaagttcaagaaatga

SEQ ID NO: 9512 - DNA, 789 bp, synthetic construct
  source 1..789: mol_type = other DNA
atggacaacaggaaggtgatcatcatcgccctcatagcggtgattgttgtgctcggtggtctgattgcctacagcctgtttactcagaaccaggtccagtatcagaccatagctgtgagcaatgcgaccacgatggaagtgccggtctctaaaaactcaaccttcttcaatgacgccctaggcatcaaatactaccaggacgacaaaagcggcgttcaggtgattagctggaacggccaggaacaagcctcagctaaaggggcggtgaatattgccagccaatttgaaaagcagaaggcaggaaccacacagtcaattgaaaacggagtgcccgtttacgagaataagaagctgcggtgcttcatcatcgaagtgaagaacgccacaacgaacgacaacatcataatcgtggcaaaggacaagaacgtggctttgcacatgcttaagagcatcaaattcggcgtaagcaacattacaaatgcagctcaagtcgagccttacgctgagtcggggggaaaccatctgaatgacaataacgacactgtcttcgtcttttacccatggtacgtatacgatgagggggactacgatgcctacgatgactactcgtcccgcgattccgagtatgcagatgacagttactacgactattccagcagtgattccgaatacgccgatgactcctattatgactacagctccagtgatagcgagtatgccgatgactcctatgatgaggaatatgacgagagcgatgaggattatgagagttcagaggactttaattga

SEQ ID NO: 9513 - DNA, 315 bp, synthetic construct
  source 1..315: mol_type = other DNA
atggacgaactcaagtccgagattatcaagttccagaaagagagggattggaagaagtttcacaccccagagaacctggctaagagcataagtatcgaggccgccgaacttctagaacatttccagtggggcaaggattacagcataaacgaggtggccgatgagctggcagatgtactcaactactgcatcctgatggcggacgcactggacctggacatcaaagaaattgtcttgaataaaatgaaaaagaatgctgtgaagtatcccgtggacaaagcccgggggaacgcggccaagtacacagagctctga

SEQ ID NO: 9514 - DNA, 1869 bp, synthetic construct
  source 1..1869: mol_type = other DNA
atgatcgtttacgaggccaccaaggccgaatttattgacagcgtattttccggctcgatcacagacgagatctacgagatatatcagcagaagataggcaagtccggtaagtcacagatcatgtcctgggagaacagtatgcagtacatgtacagggtgttggaagacccggagatccctgatgatagcggggtggctatcgagttcactatccccaccacctccaaacggattgacttcatcctgactgggctgaaccagttccatgaggactctgttgtgattattgaactgaagcagtggatggaggcgcagaaggtggaaggcaaggatggggtggtcaagaccattctgggtggaggcctccgggagacaacgcacccttcctatcaggtctggagctacgccagcctgattaagaactttaaccagacagttgatgaagatgaaatcggcctttacccctgcgcatatctgcataactacgacttcaccgacgccgacgacctgagcgacgaaatttataagccctactatgacaaagccccactgtatggcaaaagagatgcgctaaagctcagaaacttcattaagaagtacataaggcatggagataattcagacatcctgtaccgcattgacaatggtaagatccggccttccaggaaactgcaggactcacttagcagcatgctggaaggcaacaaggagtttgtcatgattgatgagcagaaaatagcatatgagatggctatcaagatggctcgagaaagctatttagatgataaaaaacgagtgctcatcatcgaaggcggaccggggactgggaagtcggttgtggcgatcaatttgctagttgatatcattgccgacgacatgctatctctgtacgtgaccaagaactccgccccaagaaacgtcttctttgagaagttgcgaggagacaaatacagcctcagctacctcaaaaaccttttcaaagggtccggaagttttacaaagagcaagagcaatgagtttgatgctatcatcgtggatgaggcccaccggctgaacgaaaagagcggactctttggcaatttaggtgagaaccaggtcaaggaaatcatgaatgcatcgaagttctccgcctttttcatagacaagcatcagaagatcagcttaaaagattatggcagtgtggaagctatcaggaaatttgcccaagagtttgatgctgaggtggagcagattaagctcacgtcccagttcagatgcaatgggtcagacggctaccttagttggctcaataacgtcttggagatcgaggagaccgccaactttgacggcttcgacttcgactatgattttagggtggtcgattctcccaacgagctgaaaaatctgattttcgaaaaaaacaaggaaaacaacaacgcgcgcctgctcgcaggatactgctggaactggataaaagaaggaaaaaacaattcagacgtacacgacattgagattgacgacttcagtatgagctggaacttgggaaacagtgacacatgggcaatcgatgacaacagtgtcaatgaggtgggatgtatccacacatcacaagggctggaatttgattacgtgggtgtaatcattggcaatgacatgcggttcgacggggaacacatcatcacggatttcaatcaacgtgccaagaccgacaagtctctcttcggtataaaaaagaaacacaaagagaatccagacgaggccctgaaggtggcagatgagataattaaaaatacctaccgcactctgatgactcgcggcatgaagggctgttatatctactgcgaggatatgctgcttcaagcttatttcaaagaacgcttcgggaattga

SEQ ID NO: 9515 - DNA, 1209 bp, synthetic construct
  source 1..1209: mol_type = other DNA
atgattaagaggaaattgtacttaaaccagattgaaaggttaatggataaggaacctatcaaaattataactggcgttcggagaagtgggaaaacctatctgctgaaaagcattcaggaggaactcaagaaccgaggtatcaacgaggagaacatcttcataattagctttgagtccatgaaatacaacaaaatcgagaacttccgggagctggatgagtgcatcatcaacctgaccagaaataccaaaggcaagatctacctgctttttgacgagatccagaatgtgaaaaactgggaaaaaagcatcaatgcctgccgggtggacctcgactgtgacatctacatcacaggaagtaactccgaactgctctcgggggagatggcgaccctgatctctggacgctactatcagattaatatttacccctttagttttagcgagttcatacagtacaagaaggaaattgagaagacagatattgatgacttggaggaactcttcaaggagtatgtggagtatgggggtatgcccccaatccaacaggtagctacggaagacaagtattcctatctgggcgacatctacaataccatacttttgaaagacattattgcccggcataacatccgcaatacagacatgctgaaccgtattctggactatgtgatcatgaacctgggaaagaacttcagcgcaaccaatattgtcaaatacatgaagtacgagcgaagaaagatatcaaaggatactatactcgattacatcctctacagcaaaaatgcatgcttcatccatcaagccccgagggaggacatcaagggcaagaaagtgctgaagcacaatgagaagtatttcctggtcgatcacggattctaccaggctaagtacggcgaaattgaaaatatggggtccatccttgagaacatcgtctacatcgagctacttagacgcggctacgatgtgaaagtgggcatcatcaataagaaggagatagatttcgtctgtactaaagacaaaaagcggatatatattcaggtgacctataagttggaaaatgatgagacgattgaaagggaattttcagggctggtaaagatcaacgacaactttgacaagtacgttctgagcatggataagctagatttctccggaagcggtctcaagcaccgcaacatcatcgactttctcacatcagactatatttga

SEQ ID NO: 9516 - DNA, 2946 bp, synthetic construct
  source 1..2946: mol_type = other DNA
atggagttcaatgaaaaccagaagcgcgtcattgcacacgaaaagggtcctcttctggtggaggcgggcccgggctctggaaagactactgttattgtggagagaattaagtatctcctgaacaacctcaacattgcccccgagtctatcctcgtcatcacctttacccgtaaggccactgaaaacctgagaaacagattgaacgactatatcagcaaagatgacttgtccaaaatgcacatctccactatccattccttctgtcttgagtacttgaagtcaaaagaggggtttctgaagctcttagatgatgataactcagaaaagaaggagctgtttattcagaagcataaacgagccttgggattcgttgggtcggcaaccctctttgattaccagatcccagccattatcgacaagttcggtgagtacacctcattcaatgtgaatacagataagttaatcaactatatcaaggagacaaagccaatttcgaaggattacttggatttcatcgagtccgaaatctattttagcaagaagaggattgaagataacgactttaaggacgactggtacaatgccagatacctgcaaacgcctaaggcctacctcaaatacctggaagtgctcgataacaacagctacgtcgattacgatactctgcagcttaagaccctaaagcacctcacaagagatccgaaaacccagttcaatgctgtgctgatcgatgagtttcaggacaccgaccccctgcaaattcggattttcgagattctccttaagcagagcgactatttcacggctgtgggggatgttgaccaacacatttacgcgtttaggagtagcttccgggattacttcaaggacatgaaagaacgctttgacgctgagatcataagtttggacgtcaactacaggtcaaccgccaatatcgtgcgggttaccgacagcttcatcaagcatcagcgaagtgactacacccagaagcatctggtcagtaataacgacaattatgacaacgatacgttcctgattgaaagtgaggactcacaagatgaagccagcaagattttcaacatcatcgcagagctcaaacgcctgaataagatcgaggactacggcgaagtggcggttctgtacagaaaacacaatacaaggaccattgcgaacctcattgaactgctcgatgagaacaacattgagtttgtcattcgggggcagaacgacctggccgatcagaacgagatccgttccatccttttgctgttgtggtatcttactcgcaacatggacgaaggccacgtgttatctggcgacgaactcgacgagttgaacctaaaagccttctgcggagagtactttgaacccacattctggagcctggaggacgagacgaagacatacctgaccaccctccaagacttattctatgagaatatactaaaagtcgagaatgaaatccgcagcctccagggaaaacggcccgtcaaatcatacaagcgggtaagggtgaacgaaagctatgaaaacctcatcaggatattcaacaaggtaacgccccccgtgattgacctccggcatgtgcacgaggccgacagggaatttttcaacaatctgaacaatctgcgtaaacgaatcttaaataacgaacttacaatcctggacgtgtattacgagctgatctccctgaatttcaataagctgagccaggataaagtgagaaatctttccatgctgacccgaaccatttacaactatgagtcgttcatctcccagactgacgtgaagggcctattttactttctgaataggataatcaagaattatggttcgaattacagtagccagaatggggtgcagctaatgactgttcatgcagcaaaaggattggagttcccagtcgccattgtggcctccctggaaaaagacaagttcccaatgaagatcaaggaccctaaacgcgaaaaacgcaccatatttatgaaggacactttctacaccccaaacgagtttcttaaatacaaggaggtgaccctggacgaggagaatgagctagacagacaggaagaggagcgaatcatctacgtggccatgacccgggctgcagatctgctcatcctgtcttgtgtgggcaagactcctgacgtgatcaataacatcaaaaactacctcaaaaagcccaacctgaacaatgtgatcatcaacaggcacttcaccaataacgatacagagaaactcaaattgaactactcaagtttttccacgtacaacctctgcccctacatgtatgatctggtctataactatgggttcaaagtttccagcgagaaagtcacaaattttggaacagtattccacgaagtaatggagacagtaaacctgaagcttaaggatggtgagaaaataagcaaagaagaactgatcctgattactcaggatatctacaagagcatgttcgatatcaaagagacggaggacgagtttaacatgctgatagactccattcttaactactataacacatatagcctgaaccaagaggtcgtggaatgcgagctgccgtttgagctggaacacgaaaattacattctcaatggggaaatcgacctgatatacaagattaaagacagtgaaatcgctattttggattataaaaacgcagagcacgacgacaataaaatagcccactatgaaaagcagctgtatatttatgctagcgctctgaaggagatgacagagttcgacaaatacgagatcaagaaaggcataacacattttgtgaagacggactaccggcacgaggtggatataaccgatgaaaagatcaataagcagctttataagctgaatgaggtcgctttaaagatacagaataacgagtatcctaagcgcgaaagcggcttctgcaacgtgtgcaagtttcaggttatctgtcaaaactga

SEQ ID NO: 9517 - DNA, 507 bp, synthetic construct
  source 1..507: mol_type = other DNA
atgaacaccacaaagaaccagtccattgtatacgatgagaagacaatctttaaggtgaaggagatgatcgtggccggcttaaataagctgaaactgtttaaatgtaaaaagagcgggaatctcgacttttacaatgacctgaaagagacgttcaccgaaatcgctctgaacctcaaggaactgaaattgtggaatgaactggattacttcctttcaatttcgctttatattgaatatatcgtctacaaaaactccatcgacagctctttcggtcactgctcatttgccattgagttgctgaacttctacatcaacctaatcaaaactagtagcgactattacctcaatctcaccgagatgtccataaaggatttcggaatataccagaacgaaacaaagacccggtacaggcaatatagacgcaagttccacacggatgtctacgtgctgagtggcaacttcactgaggaccagatgtatgagatccatgcaagcctgcgagagtga

SEQ ID NO: 9518 - DNA, 666 bp, synthetic construct
  source 1..666: mol_type = other DNA
gtgtacttcctggacacaaatgtgcccattggctataccatcatccacgatcggtggcacgagaacagcaagaatttcatcgacaacaacaaaaactcaatcttctggagcaacttcgtgaagagtgagtattataataagctggataacatacttgattacatagtcaaatttttaaagagtattgtctgcatcctgaaagtgaatgaaatggatttctactcgtacaatagctttgaggagcatatactgaacgaaactagattttgcaagctagactacttcaaaaaacagaagattttggaaaacttttggaacgagtatgacttcatcgttggtatttccacaaagctttatgactgtttctataattacgcttttgatttcgtaaataattacaacaatcgagatctccggctgaacgaaatcatgaggctgcatgactgcgggctagacaactacctcaagtactatgactacgccctcaagctctacaagaacggcatccacccgccagactgtaagattatcatcgacgcccacgactgtgggctgacgcacgatgatctgaaattcatttcaaacgacaacaaattgatcgatgcactgtccaagatagacaccagcaatctccgcatcattgagtttggactgtgcaactcctga

SEQ ID NO: 9519 - DNA, 1008 bp, synthetic construct
  source 1..1008: mol_type = other DNA
atgtcagtcaaggagctgctgaaggaatgtgggtttctctacttcaaggaagactataaaaacctcctgattaaatgtgaagaagtgctgaagatcgacgaaaaaaatcccatcgccctcaactataaggccatcgctttttactactttgacatggatgacatagccctgaaaatcctcaatgacacgcaaaagctatatcctaagaactactacacactcagcattaaatcccttgtatatattgccctgaaggaatacaggaaagctctcgactgctgtaatgaggggctgaaaatcaaaaatttcgacttgctggagatcaataagatcaaagccttaatttacctagacaagattgatgatgcatacaacttctataacaccatcgaatgccccaacttcaagttcgaggagatattgatagaatgcgagaagtacagtgaggcgctgaactcgtacaacagcaagttaaaagaaaattcccaggatttggagcttattgacaacgtgaagaccctgatggtgaagtacgacctcaatgtcaagccaaactgggacgaggagttctacattagctggatttatcacatcaaacataatgacaacaagaattgcccgaaatgtggcagtaaactgattccaattgtgtatggatatccccttgaagaggcactaaagcaggagaagaacggcgaaataatcctgggaggatgctgcatcaacgacgagatgggtaacctccactgtccaaattgcaaaaacgatttttacatcgatgccctgcacatcgatgcaaagggccccctgtatgactacatcgtcctgaagatcaataacctggatgaattgcttttcgatgagatctgctgttccatctacaagatacgggaggatatcgagtactttgacgatgacgagtttaaggcgttcatcaaccatcttataagcattggctacctctatgagcctgttaaagggtatattaagctggtggatatccactga

SEQ ID NO: 9520 - DNA, 1893 bp, synthetic construct
  source 1..1893: mol_type = other DNA
atggactggcagtattccgactactcaaaaattaaccctaatgcaaagaagcatttccccttcgacaaccctcgggataatcagctggaaactgtgtccgagattgccgatgcgattaatcacggctacaagtatatcgtcctggaagccggaaccgggacgggcaagagcgccatcgccgctacactatccaatatgtccgactcatcgtacattttgaccatcaccaagcaactccaggaccagtatctgagagactttaaagatttcaaggtcgttaaaggaagaagcaacttcagatgtcagaattatattaacaaatcctgctccgaaggcaagtgcctgacggaaggatttgaatgtcggttctctttgaagaacagggagaacgagatcaggaaggacaacacctgcccgtactattatcagaaatacctggctcttcatgccaaaactgtcgtgagcaattactattacatgtttctggagcttaactatgtgaaggacttccagaaaagggatttgttaattttcgatgaggcccataacctcgagtcgaccctgatggacgagctgaccctcgaattttctaagagtgacctcgaggagtacctggactataatttaagatgtgaaaagatcgaggaactgaacagtaacaactacttaaattggatagaatttatcaatgagatcaaggagggctacctcgaggagctgaacaagctggagcgtctggacaagctggaacttgctgagaaaatagcattcatcaaacatcaaatcaacgactgcagccggtttatcgaacacctcactcacgatccgaagatttggattttcgactgggatgacgattatcagaccgcccagttcaaacctctaaaggtagacaactatgccaagaatacactcttcgattacgctgatgtctgtatattcatgagtgcaaccatccttgactggaagctgttttccaaatggctcggaatacctgaagatgaaatctatgcaataagacacaagagtccattcgacatcaacaataaccccatcactgcatatgatgaatataatctgagccgcaagttcattaaggtgaacgcgcagaagagcatcggctcaatcaatgagatcctggataaacacaagaatgagaaaggaataatccacacagtaagcggaaaatgccgggacttcttgattgacaatattgccgatgagagactgatcgctcacgaccgccataaccgctcagaaatgctggaggaatttatctccagtgatgaacccctcgtgttgattagcccaagcatgagtgagggcgtggatctcccaggggacctgtgtcgttttcaggtcatatacaagctccccttcccagactggggtgataagcagatcaatcaacgcgccggcattgatagggagtggtacgactaccgcacatgcctcaacctggtgcagacacacgggcggggtgtgcggtacgatggggactactgccacacgtacgttattgacagccggtttcgctcatacatccgagaggcgtttccatcgaaattcctgcccgacacatttaaagagagcatcgagggcagggagtttgatctgaaggaaaagaaaaggttgatggagattggcgatttccatatcgaaaacaacgactacgagtccgccattatattcttcaaggagctcctaaacaacgagctgttcaaaaatgacatctacccctaccttaaactgagcaacctgtaccacgagaccgggttgtttgagtgcgaggttcaagtgatcatgcgatttcttagctctggggctgaatacaaccactttgaaaaacgactaaaggagcttgcagacatgggttatttcgatttcaattga

SEQ ID NO: 9521 - DNA, 1452 bp, synthetic construct
  source 1..1452: mol_type = other DNA
atgttggagtggaatatctgcaaaaactgtggtgccattctggataattctcagaacacctgcctgaactgccagggggatgtggagaaggtcaacattgattatctcaagaagtatttggataatctcaactttgtcgtgaagacgctgaacatcttcaccccctactgtacgctcacaaaagacatgggcaatattgcgctggagagcctgatcatggacgacctcttcaagtatttctcatatctgggccttggagataacgagattacggacaatgaggtggagtttatcaatagcctgctcgataccaatttttccaaggaggacattcagaccctaacagatgccgagcttgacaaatccctgcccgcctcatttaagtgcctgcaggaaatagacgaatacgggcaaaacttcgacatgtatcagctcaactcctgcagcgaattattcaactgttttaaactgttcggaaaattctttatcacggctgacaacgaactcgacggcgacgtcctgaagatctattcccaatacatcaactacctggagagttctctgaaaagtaagaacactgctctcaagccgattgatcacctgaactacaagccatccaagaaggaggagacacattcactggacgaatacctcaacgagttgaacaaacttgtcggtctggaaaaagtcaagaaggacgttaattcccttatcaaccttgtccagatcaggaagctaagagaaaaacggggcatcaagcagcctccaatgagccttcacctggttttcagcggcaaccccggaactggcaaaaccacagtggcccgactgctatcgaaaatttaccacgagatcgggttgttatcagaagggcatttaatcgagactgaccgctcggggctggtgggcggttacgtgggccagactgccatcaagacccaggaagtaatacaatctgccctcgggggaatattgtttatcgatgaagcatacagcctgacctccaaaagcgaaaacgactatgggctggaagcggtggacacactgcttaaggccatggaggaccaccgggacaatctgattgtgattgttgccggttaccctgcactaatggaaaagtttctgtacagtaatcccggcctggagagtaggtttaataagttcatttacttcgaagactataacgaggaggaactctataatatattctggctgatgtgtgaggagagtaacctcacattggatgaggcgggagataattatataaaggagtacttcaaaagaatctacgacaacaggagcaacaattttgctaatggacgggcagtgcgcaacctgttcgaggaagtaatcactaaccaggcaaaccgtttagctccaaaaaaggagatcagcgatgtggaattgaataccctcacctaccaggatttcctcgtggatgagaatgagtga

SEQ ID NO: 9522 - DNA, 1059 bp, synthetic construct
  source 1..1059: mol_type = other DNA
atgagtgagaaaatctgcagtaactgtggcaataaagtggacggcagcgcaaacttctgcccaaagtgcaagtcacaatcgttcagaaacatcaacgaggtggccaagccaaagagtggggtggtgcataagttgttttacaagtatcaggggggttactttgctgtctccaagagcaagatcgcggcaatcactacattcatcctgttcgccagcctcggctttgagtcgcccaacctaatcatatccagcgtgatcatcgccttcctggtgtacattataggcttcgctataagacggatcaatattattaaccagaactcaaaaatgtttttcaggaataacaatttagggttgatcaccgatctgatgcacctgtttgctttttggcaggaccgggaaaccggaaagttcgcactgtcaaaaaccaagctaatttccatcctcatcttcttcgtgtttgcaacatccgggctttcactgcctaatgctacccccattctggccgcagtcttcggtctgatattcgccctgcctgtctttgtggtcggatacggaatccaccgccttacaacgagccgccctgtgaaaaagatagtcaaacaggccgaaccagataccggcaagaaacacgatgatgccagcaatgctaaaaaagacattcacatacatgaatttgacaagtaccgggccaaactgaacgaactcaaggtaaggtatgagatcaaggaaaaaaacgcccgcaatctgatcgccaagcgtttcacgccgccccaactcacttatgacaagtttattgcttctgttgacaagtccactatgatgttcaacagtcacgccgaggttattagcaacatccttgacttggcgtcccaggacagcaagaagattgacgatgaactcaatgaccgattcgacatcctggaggcgcttgtggagaaaattgacgagctgattgatgagctcgttttaagcctgaacgatgatgaaaaagagggaaatcccagcaatctcctgaacgacctcgatgacttgatcgattctgtaaagaactactga

SEQ ID NO: 9523 - DNA, 519 bp, synthetic construct
  source 1..519: mol_type = other DNA
atgaatggggctggcgctattgactctgcaaactggaccagtgcggacgtcggatacgagacttttaagatacctccccagtatgaaaatccatacagcagtgacttcgacatgtacgaatttgatgaggacatcgatgttttcaccatcaggtacgtgaaccccaatctgatggatctgtatgggcatttcctaaatgaataccacggaaagaaggtgaacgtggccggccacgacgccgtacacttcacatattatgatcggcatgacaagaccaacaattcagtcctttggtttagcgccggtgaggaattttactatatcaactggattggcagcaacatcacaccggcaattaaggaggtcgtgaaaagctccctcaaatcaaactacacccacaaggagttctactccatattaaacgataacatcaaaattacgatcctgtccattccactgaatctcaaagggttgatcatcctcctgagctctacgcacacaacttcggagatggtgtga

SEQ ID NO: 9524 - DNA, 891 bp, synthetic construct
  source 1..891: mol_type = other DNA
atgaccaaccacaaacacctgcgcaccgttattgaggatatatattcgaatggaaacaagctcactgaggaactcactgcccgcctaatacatgaatttagatactccaacttgtacattcccagcaagaaagaggacaacaagctgaactttatcatttacgaggatgacgactccaaacttacgccactgttcaccgatctggacgaatttagaaagttctataaggatgaggatgttcgggccctgcaaaatccctttgaattgtatcagaacgtcctcaagacaacggacatcgaagggtacatcctgaaccctgcgagtgaaaagtatctctttaaaaaagaatttatcctggctatcaacaacattccaaagacagacttctacactaccaatccctactctgaggaggagttgctcaacatgaagaggagcgtggataacaaaaatctggaacgattcatcgagaatagggcaaacattggggatttcgagggcttatttgagcagatggccaattcacagctattcgctttaatgctctctgatctgaagctgaataaggagatgattagcctcaagaagagtgggcctgtggcggccatgtataccgacaatgtaggtggcatctatgcaactctgttcacaagcgagcggaaaatggacgcagtcaagacaaaaaaatacaagtattcccagctggtgaacctggccacacttgtgaatttcatcctgaccgaggacatggacggccttatagtgaacccggaaagtgacaatgtgttggtcccacgtaccacgctgcttcggtacagcctgggattcgagatgtacgccaacgacgaacgcctatcagaatccatgttctacctcttcaggatcgagtga

SEQ ID NO: 9525 - DNA, 606 bp, synthetic construct
  source 1..606: mol_type = other DNA
atgtccgagctctcccaattaattcagatcaacaaaaacattgaaaaacagaatgaggagatcatacggctacttaaagtgatcgcttgcgagaagcaagagggcgaaaacagtgacaagtcagttattgatctcggcgagctgtacttggaggacgacgcgagtttcgaagccgagccaaaagaaggggaaatcgagaacctgtggcgcgtgggatctctcctggacaactcgatcgatgttggggaggtctattttattgaaggcactgacatcttcaggctgagcgtgaaaaataacgagacaagcattgataacctgacaggggacggccaggccaatatatttgcccttgaggaaacgatcgccaacgagtccgtcaagaacaataagagtctggaagacagcaccgtcatactgagcagcgaacacagccagaacctcccggagaccctgaagatctgtgtggaacagggtgctaagaaggtgtacatgcacctattcgcatcatcccagctggtaggagcaccccagagccttatggagctgatcaagtttgatttctacaaaaataatgaacatctcgtggagaagttgttcaagtga

SEQ ID NO: 9526 - DNA, 306 bp, synthetic construct
  source 1..306: mol_type = other DNA
atgagcaagttttgtcccaaatgcggagaagagcttgtagatgacgccaagttctgcaagaactgtggcgaaacgataaaaacagagcaggagacccaaaacaatgaggtccagaatgtggaaaacgaccataaaatagctctgatcctgggctatgtctgcgccattctgatcccactgtttggactcattttcggcatctacctagtgacccggaaagactccagcaaggcgaactaccacgggaagatcatcattgggattgcaattgtgatctggatcatcagtttcctcttgatgatgtga

SEQ ID NO: 9527 - DNA, 267 bp, synthetic construct
  source 1..267: mol_type = other DNA
atgcgggaaatctccatcgattcagatttcgacgtcggtgaaatcacaagcaagatcaacaagctcatgagtgagtggccaatccagcttctggacatcattggccccaactggattgtgtttggctacgacatgaaggtgaaattcgtactgatattcgacgccgactttaatgatttggagacccagataaaactggaggatctgaggctaaacgtgatccaccacattgagagcctcaagggactgcatatcgggattacgtga

SEQ ID NO: 9528 - DNA, 339 bp, synthetic construct
  source 1..339: mol_type = other DNA
atgaaaaataaaaacatcctgctcattgccatagcagtgctagtggtggccctcatcgcggtgggagcttacaccatgtttaacggcaatacccacctgaacgttacagacaacaccactgggatagacaacagcaccggcatcgataacaatacgactgtggtcggagataatagcccacttgagaacctgaccaacaacaacacaacatataaggtatacaatccccagagtgactcctatgtcccggttatcggggaaaagttcgacgaggaagtgaaccggtggtatacgtacgacgatcagggcgtccgctactacaatactaggattaattga

SEQ ID NO: 9529 - DNA, 1092 bp, synthetic construct
  source 1..1092: mol_type = other DNA
atgactcgtcaggagaaaatcatcaaaaccagtgtgatagggatcgtggttaacctgatcctagtggcattcaaggctacaatcggaatgttagtgaatagcatcgccatcaccttggatgccgttaacaacctcactgacgcgctgtcttccattattacgatcatcgggacaaagctggccggcaaagcgccagacaagaatcacccctacggatacggtcgggttgagtacttcgcctcggtcatcattgcagctatcgtgctctgggcggggattacggcctttatggaatcctggccaaagatactgaacccggatgccacttcatataccgccgtgtcactcgtcataattgctgtggccgtgttagtgaagtttgcccttggaaaatacgtaaagaacgtcggcgaggatattaactcacaggctcttgttgcctcgggcagcgacgcattcttcgatgcagtgctgagccttagcaccctaatagctgctgtcatttccgtcttcttccacgtgtctctcgaaggcattctgggcgtggtcatttctatcgtgatcatcaaggccagtgtcgacatgttgagagagacaattgacagcatgatcggcagcagagtggactcagagctctcccggaaactgaaagagtatatctgcgaaatccccgaagtgtacggggcatacgatttgagtctccataattatggtcctgaggatatgcgcgggtccgtgcatatcgaagtggacgacgatctgaccgcttttgacatccacagcctgacccgaaacatcgtctacaaggtatacgacgagttcagcatagtgctgaccatcggaatttatgcaaggaacaacgactataaggacgtccgggaggatctgtacaatatagccagcaaatacgaggaaatcattgagatccacggctttattgtaaataaggatgaggactacgccacatttgacattatcgttgatttcgatgcggaccgcgagaaggtaaaggaaaggatttacagtgaaatcaagtccaaacaccccgaactggactattatattatcgatgactatgacatatccgattga

SEQ ID NO: 9530 - DNA, 540 bp, synthetic construct
  source 1..540: mol_type = other DNA
atgagcatatatgactttgaagttaaggatggagagggcaacacgatttccctcagccaatataaggataaagtgctcctgatcgtgaacagtgccaccgaatgtggattcaccccgcagtatacacagctgaacgaaatctactcagaatttaacgaagacggtttcgagatcctcgacttcccttgcaaccagtttggcggacaggcacccgggaccacagaggagatcaccgaggtctgccgctccaaatggttagtcccttacgctatcttcgacaagattgaggtgaacggggagaacgaaagcccactgtacacatacctgaaaaaagagcagcccttcaaagatatcacgggggaaggctcggaagagtttaagaagattttggagagcataaatcccaattacatggacaatgatgacatcaagtggaatttcactaagttcctggtagacaggaagggcaatgccattcaacggtttgagccaactgaggatctgaacgacgtgaaggaggcgatcaaagcccttctatga

SEQ ID NO: 9531 - DNA, 2688 bp, synthetic construct
  source 1..2688: mol_type = other DNA
ttggagtccgacaacgtgagcaagaacatcagcacttcactcaataagacacagaataagaccctcatcaacaacgagacctacaaaaagaccaccctggagttttccccgatcatcactgagtatacgtccggaaacatcatttatacagtgaaagcctacagcctcttgaactacaatggaatgaagtataaagaccccaaatacaactccctgattaagataaaactatacaccggtaactctttcaagagctatagcagccacatcgacaataacggcattgcttctatcaaagtccctgatctgagcattggctatcacaaggtggagatcttcattgataatgtgcagggagctacatcatacatcaaggttattaagagcactactaaagtatatgcgccaactacaattataaaatttaagaaaaatatgaattataagatcaaggtcgtcgacagtcataataaccccgtaaaaaacatcatactgaaagttaaagtttacactgacagcaagtataacatttatagcattaagaccaattcgaaggggctcgcaacactgaagattaacaagttatctctgaagacgcacaagattgtgattaccactaacaataaaaactacaagattaacaaaaactcaaaaattctgattaaaaagacaatccctaaaaagattgaaaccttaacagtatcctcgccgaacaagacaatacaaaggggtacttccttcacgatcaagctgacagatgattataatgatatcgtgaagaaagtgagcatcaaggtcaatatatacacagggaaaaaatttaagactttcaagatcacaaccaacaacaacggggtggccaaactgaagaccgacaaactcagcctcggaacgcataacctgaagatcgcatccaacaacaaaaactacaaatttcacaagactttcaaaatcaccctcgttaagaccatcatccatgatgacattaaaacgctggtgttaaagaatatcacgtactaccaaacaaaggacggaaagttcaacgccaaactggggtggtactctaaagtgggcagttcatatcagattcttcgcaaaacaaatgagaactacaacataatctcgaccgtcaagagcaattccagctttaccaccttctacgataagatcgacggcaacgccagctacacatactctgtgagggagattattgtgaagaacaacgacatcatactggggccatacgacaaggaaggtctgaagctcttgaagagtcccaatatcactgctgacttccagaatctgaaggccgagatcacgtggaacaaggtggagggagcaaccaagtatatcatcttcagaaaaattggccgtgatgcgaattttaaggctatcggcatcgtgaatagcaacgtcctgaactacactgacttctactataagacccctaaacaactcaggagtatcctgaacagcaacacgtttgtcgaccccagttttaataacttgttttacacagtgcgagcttgcactgtcaagaatacatccggcatcaaccagataagttacggatcataccttatcgacggcgatttccacctcgaagcacccagtatcatttccctgaaggacaatgaaattaagtggggtaaagtgccaaacgccgatggctatctgatcctgaagaagaacagtgatgacgacgagtggaccattatcaatcaggtggcccaaaatgagtccaatacgatcaccttgaagctgaacaacatcgagaacagttcgtactattctgtgaaggcctttgccaagaaaaatggggagatcatttacagcaagttcgactcgggctttagcctaaaaaactactcaaaagacaatagcaagtataagattttatatttcggagatagcatcacgtacgggtcaccgtacaagtcaaattcaaacaaacacattttctccatcccctatagagtaggcgaactgcttggctgtgtttactataaccctagcattccagggtccacttaccatgatctggggcagaaggacggaaagaacatcgaaaacaccaaatactacagatatcggatctgccgcgaggtggttgaccagatatctatcggggaactgcccggaaattggaaggagctcgataatttgaagaacagtgagggcataaccaacacatacatcgatgactacaatattgttgtactcgccgctggaaccaatgattaccttgacaattccatactgggctctataaattctgtggatacccacacattcaatggtgcccttaaccatattctgaataaaatcgagacggcgagcaaaacacgggtggaacgaggggaatcccctattaaagtcatatttgtcgatctatgctactccgaccgggcctacgataaaaccataaaagaaaatcgcgatgtcaccaaaaacaagatcggtctaaccttgaacgactatcagaatgcactcaacaagcagtacaacaagtggaagaacaataacttccttaccctctataatttcaagacccgggactataatatcgtgaaccaggagaactgtccatacactacctccgacaacctgcacttttcaaagttcacttatggccagtatggcaacgcattcgctagttttcttaaagaaaatatcttctataactga

SEQ ID NO: 9532 - DNA, 1317 bp, synthetic construct
  source 1..1317: mol_type = other DNA
atgaagaagatcatcacctatggaacatttgatctcttccataagggccactataacatactgaagcgcgctaagatgtacggggattacctcatcgtaggagtcactggcgaaaattacgacatagggcggggaaagttaaacgttaacgacagccttgccacaaggattgaaaacgttcagaaaaccggttttgcagatgagatcatcgttgaggaataccttggccagaagatcggcgatatcatcaagtacgatatcgacagcttcgtcattggtgatgactggaagggcaaattcgaccatctcagcaagtattgcaacatgatttaccttgagcgaaccaaagggatctcatccacccaaatccgggaggagaccttcaatcagtacaccataggtatcgtgtgcgacttcgtcgacgacaaccagatcatcaatgaggccaagttggtgaatggcttcgaagtcaaaaacatcttttgcgaggacgaggagattaagaataagtttcaggagaagtatcacctggaaaattcgtgtgaggaattttcagagttgctggagttgtccgatatcatttatgtgcgttgcaatatctccaaacgcttcaactatattcaaaaggctctgaatgccggtaagcatgtgatatacgacccccctgccactttcaactacaatgaactggatgagctaatacacctggcggagcagaagaacgtaattctgatggaaaacattaagatggtgcacatttatgtctttaaccagttgctgtggatgacccaggggggcctcatcggcgacatactgtcctttaactgttcaattagcaagattgacataaatcggccgaacctgttctacgacttaagtgtgtacacactgctccccatgcttaaaatcatggggcaagactatgaaaagtatgacttcatcgtcaaaaaagatggcgaggatattgaatttgcaagcatgaacttcgtgtactctaatggaagaagcattatcaatgtgggcaataaaattcgggtggacaaccagctcgagattatcgggacggaaggaactattaggatgaaaggcgagtggtggcgcagtaggaacttcgagatccactacccagagagccaggaaatacagctgtacaacacaaacttcgaaggaaacggatttaagtacctactccgcgagctgtccagaatgctggataataatcgaatcgacacgagaagtatcttcaaagatgaaagcctgaaaattgtgaaaatcctcgagcaggtgaaaaagatcgagaacaacaacggggactga

SEQ ID NO: 9533 - DNA, 1068 bp, synthetic construct
  source 1..1068: mol_type = other DNA
atgaaacacctctttaccatcggacccgtggaaatgtacccggagaccctgaagattgggggcaagcaggtaccttattttcgcaatgacgagttttccaacatcatactgtctattaataaaggcttaaagaagctattgtttaacaaaaacggcgaaatcatccttctaacatcgtcaggcacaggcgccatggaagcaactattatgaactgcttcaccaaggaggacaacctcatcatcattaatggagggagcttcggccaccgttttacccagatctgcgacgtccacgggattccatatgagagcgttaacattatcttcggagagaccctgacgagagagatgatcgaggataaactcaacaatgggaagttcacggggttgcttgtcaacctggacgagacttcaaatggtcagctgtacgatataaagatgctctccgacgtttgtaagaagaataatctggtgttcgtggtggatgccatcagtgccttcctggccgacgaagtaaacatggacaaatactctattgacgcggtgattctcagtagtcaaaaagctttgagcctcgccccgggtctgagcatagtcgccctgagcgagaagatgctgaaaagggtggaggtgatcgattcagaatccatctatttcgattttaaggattatttgaaaaatgctgagcggggacagaccccttttactcccgctgtacgagtgatcatcgagcttgaagatatgattaagcgcctggaaaaaaaaggcatctacaacattattaagcatacaaacgacatcgcttcttacttcagaaagcgggtgaacgagattggacttgaatacccctcctaccccctgtccaatgcagtcacacctataattttcccaaaaaacaatgccgacttagtctacaagaggctgatcgaggattatggctttgtggtgaacccaagtgggggtaacttcgcgaagagcatgttccgggttagccatgtcggaaaccagtcgatcgaagactgcgaggaactgatcctcgcaatatccgagataatcaagaagctgtga

SEQ ID NO: 9534 - DNA, 1659 bp, synthetic construct
  source 1..1659: mol_type = other DNA
ttgagtaacatgaactccatccagaagaacctgttccagctgcttgtggagttcgacgagatttgtaagaagtatgatatcaagtacctgctggcagctggtgctagcctgggtgccgtcaggaatcacagattcatgccatgggacgacgacattgatctctatatcaccagggagaattggaacaagctgagacacatccttgagaccgaaaaggacgtgctccctaacggccgttcttttgtgtacaaggagaacaccccatattactccaaccccctcccaagatatatcaacgataccacaaccacaatgtacagaaaccaagccctcgcgggcaaagcatgtggacagcacctggaaatatttatttttgatcctattccccggggcgagaaagagaagcagaagtacctcgacttactccacgtgtacacagagctgctctcaccttattttatcgtcaacaagcatgccacttatgaagactgggaaaagcactacaagctctataagaagtattgcgatcgcatagacaaagagggggaagaaaaggtcttgaacgaactggaaaatacattgcagcagtactccatcgaagactgcgacgagtactgtatgtgttggggaaccaaagactacatctacgacaaagagctgttccaggaaggacaaatgggactgttcgaggggaaggagtttccgatcgggaagcatccggaagggattctgcgcatcgcttatggtgacagctggatgtacattcccgagattgacgaacaaattgttcacggggggatcaagtatgataacatctccttcaaggaatatactgataagtaccttcataaaatcaaccgggactccgcatttgaaaagttcaagatcaataagcggaacaacgtagatctgtacaatgtgcgcgagaaagtccgaatgctgattgccaaagagaaggtccaggtgggctgcatgcatttcaaaaataatctgaaagaaaacgaagagctcttgcggtcattgctggagaatggcgactacctagaactttctgaacgctttgaggagtactcaatcttgcagagcatgaatgaggtgcagaaatttaaaatttttgtgccaattacggataagaatctggccacattccttctgaacctgttgaagcagggaaaatactaccagataaacaagtacctgaacatccgaaaactcaacgaaagccccctgacgaaagagctgataactattgagaatgaagtagagttctgcaggaagcttagcatcgctcgatacgataataaagatgaggagctcgtgcaaagtatcatcgacaagtacgacggcatattctccgatctcctagacatttatcgcgccaagctatggataaaagagatcaatgccaagtcgagtaaagattataaggatatcaacaatctgtgcaacgaaatcttaaagaaatatcccttcgacggcgagaccatggcgatccaggcaaaggccaagtcggagttaggccaggagaacgagagcctagaactgtacaaaaaatctattctgaacacgaggaatggcctcatatggcagaaagttgaagacgagagtggaattagcaggatggaaatggagcgggagcttatcgaggaggagaattga

SEQ ID NO: 9535 - DNA, 1203 bp, synthetic construct
  source 1..1203: mol_type = other DNA
atgaagtcaaagcaggatattcagctcgagctactccaggagatcgacgatatctgttcgaagaacgacctgaagtacattttcgtcggaaagaacgccttcaatgcgtacgtaaatcacacaattaagaacaataacgcccacgtgtccgtcgctatgacactgggggacatcaatagattttgcaatattattgaaaaacagaacaaccctaatcgatatgtggagagtatgtttaccaaccccaaatacatccccctgtacataagctatggcaacgaaaacactactgactaccacatgatcatcctcaataataatctccatcacggaatcaacatccggatttatccaatcatcaaatccgtcacactggatgacgaaaaaattaagataatggatagtaaaatatataaggaatataagtttcgcaaattcctgaacaagaagatcataaacaaaaagttcttgccgataaagatcggcatcagcctgcttaataatatctacaacattagcgggtttaggaaaaaatatcccgataagatcttcaacaagatctacatcgataactgggatgatatccagaactattccaaggtacgcatcggaaaaaagataatcaactccgaatatttcaaggaacttacacggtacaaggtggacaatatagagctcaactatcctaaggataccgacaactactttaaacaaatttacggcagaaacatagagaacgtcaacgtggtgctgaagccagagaggaagaatgcaatcgtggatacggaaatcggctacaaaaagatcatcaatgagacgaaagacctgctggacgaaattcggagcactcatgaggaactagtgtgggggaggttcaaggtgcgcagagagaagaagtgcgtcgatgacgtttggaagctggttaaaatgaccaacagccaaattaagtacattgactttttcgaggagaacatcgactacctcttaagtttggaccttaatgataaaagccagtttgaggagatggagatcattcttaacccaattatcaaaaaactgcagaagtacgccaataaaggtatgaccttcagcattgacgagaagaccgactcattaattcgaaaattcctgttgctgaaaaacaatgagaaactgattaataagatcgacgaaattaacaagctcaagtacttcgtggaatga

SEQ ID NO: 9536 - DNA, 792 bp, synthetic construct
  source 1..792: mol_type = other DNA
atgataatcgagtgcacaaacgacaacattaaaaccgtatttaattatattggggaggattacggaaagtgcctgtacatcttcatcgacctcaaaaaatatggtttggatgacgacaattttaacgtgtggattcagtacaataacgataaaatttgcgccataattagtgagtactacaacggcatccagatttacagtaaattcgaagatctcataatcgaggaaatcgtcaaattcattaaacagaaggacgtgaagacgctgttttccatcaagccaatcatcaacaagatcaacgaatttctccccaactataagcaagagactggcatcgttggtgagctgaagaagttgatcttcgaaccaaacgtccacgcttacagcgcacccataagcgagctggaagagattgtcaagctcgtgtccgaagacgaaaatatcggaaagccctatggctacgatagcctgttctcacagtactatgaaagaaagaccagtaatttcggccgaaatttcgttttacgggacaagattaataacgaaattatctgtcacgccgggacctatgccgagcttcctgagtttgcagtgatagggggggtgattacatcaaagcagtacaggggaaagggattcagcaagggcacactgagcgctctttgtcatcaactaaaatccgagaacaaacgcgtgtttagctactattacatcccgagcgcgaccaaaatgcacactagcgtgggcttcaagaagatcgaggagtggtcgaaactgtccaagatcgactga

SEQ ID NO: 9537 - DNA, 426 bp, synthetic construct
  source 1..426: mol_type = other DNA
atgtataagaaaattctcttgccgactgacggaagcgggtacgcagatcaggaaatcgacagggtgaccagactaataaatgaggacggtgagataatcatcctgtcggtggcccccaaactgagcaccagcgcctttcaacggcgcaaggacatcgagcagctcaataagacgttcttcgaggaagcggaagatgtggtcgagaaaatgaagaacaagtttcctgaaaactacaacattaaaaccattacaaagtacgggttcccagctgaaacaattaccaatactgccaaggaggagggcgctgagcttattgtcatctccgccagcggaaagagtggcatccatcagttcgtgatcggctccgtcgcagaaaaggtgctgaaactgtcagagatcgatgtactgctcgttcacaacaaatga

SEQ ID NO: 9538 - DNA, 387 bp, synthetic construct
  source 1..387: mol_type = other DNA
atggatctgaagaagattgcaattgtagtgagcatactacttatcatcgctattggcagttttgcttacatcagcttaaacacccaggagacaaaagtggacatcattacgcaaaacaccatccacaatggggacattattaccgtccagctgaaagatctctaccggaacggcatccccaatcaggcgatcgacttgaaaatactggatgactccggatgggcccacaactataacgccaccacagatgagctggggatcggtcagatccagatactcggcctggaaaatgggaattacactgcccacgccaagttcaacggcactctgtttctcaaggaatctgcaaaccatgtctcattcgaggtgacagacggatatttctga

SEQ ID NO: 9539 - DNA, 2610 bp, synthetic construct
  source 1..2610: mol_type = other DNA
atgaacatcatcaacagcacctcggatttagattacgattttacaatcgtcctctacaatatcgagaactgcatcgaagacagcattaagtccgtaatcaaccagaaatacgatttcaagaaagtggaaatcatcttcatcaatgacggctcagataagaaccataaaatagccctgaactatcagaagaaatatcccaagaactttttcatcgtcgagaatgacgagaaagacatggccgaaagcctaaaccttgggctgaatcacagcaagggagaatatattaattttctgaactcgggcgacatactctccaacgacacactgtccgaggtcaattcatttttcagtaaggtgacgagctcagacgtggtgggcattcgtgtagacgaagggagggaaaaatttagcatcgactatagcttcataaagagcaaccagattatcgatatctcccagtaccctgaggttatcaattctattctgagttcattttttattaaaaaggagagcgtgaatgtgaactttgacataaacccttacgagaaatctgacttactgttcatcgatgaactactaatcaactccaaaatcggctttgtgatacaaccaaaagtgcagaagagctcctccaattatctgattaagaacaagagtaccctgaatcagttcaaacactattacgattccatctacacgttctgcaacgagcagctcggctatattccgaactacatccagtataagatagcgatcgagcttgcaagcattgttgagatcgaggacatcgacgacatcctgattgacaacatgactgctagtgatgcctacagttacatcaataaggttctgaatcacatcagtctgagcaatatcaaaggcaatatcttcattaaccagcacacacagaacttcctgctctatctgaaaaataaggatttccacattgacgtggatggaaacgaagttatcttttactgcggcagctatgttcttaatgtcttgacccggcagaacctttggttggacattatagagatcaaggaagattacattaacttctccggaagtattacctcctactgtgaatatgaccacatcagtattgaggctataaaggaagctaatggtgaaactgagatcattcccgtgaagttcattgactacagtacaacggagagaaaagtgaaaaagttcctgtccgtcccctgggtctatagctataactttgacgcccacattcaaatttctgactgtgaaaattgcaaaatctcatttaggtacacctactccgagaaagagactgggattactgtcatgccaaacattaagtttcgcaaatttgcctccctgtctaagtttagccactacttcatcaaggattctagaattgtcttgttcacacaaaactcattcctggtaatgccttactcattgaagaaggtgttcaaatttgagttcagtagcatcaaaaaaatacttcaaagtaccgcgaaaaacaaaattaaaactattggttacaaggccatatacctagcgctctttcactacatgaaaaacaagaagatctggctcatgggcgatcgcaaggagttcgccgatgacaatgcagagtatctgttcaagtattgcataaaacagaaggatgatgtgaacaagtattttgtggtcaacaaaaactcgccggactataagcgacttaacagagaatgtgggaatattgtggccttcggctcgctcaagcataagctgctgttcacatttagcgataagctcatctcgtcacaggtaaacaagtttatcttaaaccccttcctgagatccaaccagttcctctacaatggtgtgctattgcacgacgagtgtttcatccagcatggaatcatcctgcacgacctcagcagctggattaggaagtacatctacaatctgtcgctgttcgtgacaagcgccgaagcagagtgggagagcatcgccaataccaactacaattttgacactgagcgaatacagcttctggggcttcctcgctacgacaacttggtgaacaatgctgacaagcaaatactctttgtgcccacctggaggcgggatctggatgacccccaactgctcgtcaattccgagtacttcaacaacatcaatagcatcctcaataacgaaaaactcattaagctcgcacgggactacggatattctctcgtgttcaggccacatccagagctgtggcgctatctggatttattcgacatttcagatgaatttcggatctctaatgagagctactccaccttgctgagtgaatccagcgtcatgatcaccgattactcaagcattgctttcgatttcgcatatctgaagaagccactgatctactaccagacgcaggactttgagaacttccattacgaaaagggttatttcgactacgagaccatgggattcggggaaatcataaaaacccaggaggagttgatcaacaagattgaattttatatgaagaacgggtctgttcttgaggacaagtacaagcagcgatccgctaagtttttccgcttccatgatcggaataactctaaaagaatatatgactggctgatcaagcattga

SEQ ID NO: 9540 - DNA, 2604 bp, synthetic construct
  source 1..2604: mol_type = other DNA
atggcggacaacttcaagttttcgattatcgtgtcaaacctctcgggatacaaggactctattgacagcattatcagccaagaactggatttcaggcagaacgtgcagctcataattattaaggatagtaacatccttacaagcgacatcgatgaatacatcacggaatatccaaacaacatccttgttctggagaataaggacaatctgaactcacgcaatttcgcacttcgccatgctagtggggaatttattaatttcatgaaagccggagataccttcgacaagtcttgcctgaagacagtgaacgacctgttcaacagcaacacggatattaacctggtgtccatagcgctctttgatcccatctacaaaaacatcatatacaagacaccactgtccgaaaaccgattaatcgatatcaacaaggtaaataacaaagagtttaattactactttcacctgccgatttatgcctcttttatccggggaactgactactatttcgaagataaaaatattgacgagaacggaatcagcgtcacgagtaaaatactgatcgacgacgacaaattcggctttgtgaaggatattttctgctaccacaaccctgagagcgagtttagtgaaaatataaactacagaaacgtaatgggaaaactgaaactattgaacaacatcatgcagtatgccgatgataatctgaataagaaccctgagtttctgcagcacattgtggcaaaggagctggaatacatcgttcggatcgaggacctcagccagatcagtactgacctcaataagttgaacgagttctggaatctgatggacgccgtcttaaagaatgtgtctaaaaaggctataaagagcaacaacttcctcgacaacttcgtcatctcatttctgttatttatcaagaataagtccttcgctatcgattgcagtcagcataaagtgttttttaagaccgaaaattactccatgcttaatttgcacaaccagaaattgcactttgacgtgatcgagattaaaaagggcattctcaatctctccggttatctgaagagcatctgttattccgacaacatttccgtcgaagcacttctgaaggacgagaacggtgacgtaaaatattacaagggtaagttcgtggagtacccaacaaccaatcggaaaactgtaacttttctgtcccatccatggatctttagttacaatttcgacttcaagattcctataaacgaaaagaaaatagaaaagatttcattcagaaccgtctaccacgagaacagcgagtacgtcatctggaacaacaagatttctcccaggaaatattcaaacttaagcaagttctcgcattacagtgtgaaagagaacatgctggtgctccttaaagacaactcattttactccatgcccctgaacgccaaaagcaagtacaagttcgacctacgcgccatcttccaaatccttaaggagaggccccagtattaccggggaggcatattctaccggacgctgataatgcttctgtatccgttttggaagaacaggaagatctggatgttcatggatcgacaggacttcgcagatgataatggggaacacctgtttaagtatgctctcaaccaaaaggacgacgtggataagtattatgtcctggataaaaatgctagcgactttaaaagactctccaaaagcttcaagaacgtcattgcctttggcagcttcaaacacaagctgctatttttgttctcccagaagattatcacctctcagcctgccgttagcttgtacaatcccttctttagtaaaaacattacaatgtttgccggcttctatccgaacgtgtacttcctgcagcatggggttacaaaggacaacgtgtcctcttggctgcataaattcaatcgaaacctcagccttatctcaacaaccagcgacctggagaagaagagctttctagacgtcggctacaactatgatgaggatatcatccaaaccctcggtttcacccgttacgataatctcaatggggagaacgcgaagaaacagatcgtgatcatgccaacctggagaaattacattaaaaacgaagaggatttgaaaaattcagagtactttaagcgctggaacagtctgatcaacaataatgaatttattgagtacgctggcaaaaaggggtacgagatcatattcaaacctcaccccaacctatacaaatttatcgacctgtttgacaagaacaatcacgtgattatcgactacgttaagaagtaccaggagatattcaatgagtcggccctgctcattaccgactattcctccattttcttcgatttcgcctatatcaagaaacccttgatcttctaccagtatgcaaatgactatcactttgattctgaaaatgggtatttcaattatgagtccatgggcttcggcgaagtcattaaaaacgaggatgacatcgtgaacaagatcaagtactatctcgacaatgattgtgttatggaagatctgtacaggaagcgggtggacgacttcttcaaatacaccgatcgcaataattgcatgagaacttatgagtggatctataagaactga

SEQ ID NO: 9541 - DNA, 1071 bp, synthetic construct
  source 1..1071: mol_type = other DNA
atgtataaagtggtcaatggtagaaaacgcatcttctacctcgacttcatcagagcactggctatcattctggtcgtcctggctcatgtcacaagggcctttttccagaactcccccgccggcagcttcaatatgtgctttgtgtcgcagttcatcgatttcggggttattggtgttccactgtttctgatgattagtggggcccttcttctgaacaaggactacgagcttggagatttcttaaaacgaaggtattctcgcgtgctggtgccattcctgttttgggcgatgatcttcccgattagcaaaattctattcgaagggcaggtggcgactgtggctaattttatcaaaatgtactttgactctaacttttggtttgtctggatgatcttgggtgtttacctgttcatccccattataaattccttcattaaggagtacgacatgcggggcgtagagtacttcttgctgatctggggcggagtgatgtttctgaacaccatcgggcagtacccctttcaccaacttgagctgagctattttgcaggatacctgggctacttcgtactgggctactatttggccaacaagaagttcaggctctccgattcaaagctgttagtgatctccctactgatatttctaacgttcacattcattaacatcgactatacaattaccatgtgtatcctcaagaataagctcctctactataagtacgaaaccattgtgaccgtcgtgcagtctgcaggattgttcatgttcatacgttattttgctctggtgagtagcaacaaacccgagtcgattaaaaaccggatttacctgttctttaaggactcattcatgttcaagatcatattttcaatcagcacgttcagctacggcatctatctcgcccactataatcctctctttttccttaaatacgaatataagatactcttcacttttaaccctattatctggctcccaataatgatgatcgccatcatcgggagttcctggttcatcttgtggatttttgataagatacctggcctgcggaacatcaatggagcccactga

SEQ ID NO: 9542 - DNA, 819 bp, synthetic construct
  source 1..819: mol_type = other DNA
atgaataagaagataggtttcattcttgccctggtagtgatatccctcatgatgtgctccacggtgagcgcagggttgtttgacttcatgggcggcagcgactcaagcaatgatgataatacattcgtcgtggggtttgacgcagagtttccaccatatggctacaaagacgatagtggcaactacacgggcttcgacctcgacctggccaaagaagtctgtgaacggaacaactggacattcaaggcccagcccattgactgggacgccaaggatgtcgagctggatagcgggtctattgactgcatctggaatggatttaccatggacggcagggaagacaactacacctggtcgaacccttactttgacaacaaacagatcattgttgtgaagtccaactccggaatcaatacccccgccgatttgaaagggaagatcgtggaaacacagaaggacagctcagcgctggctgcccttcagggagacaacaagactctcgctgacacatttggaacactgaccgaagttgccgattataatactgcgttcatggatctcgagtccggggcttgcgacgccatcgctatggatatcggggtggcagagtacgatattaagaataagaacgccacgagtgattaccagatcctaaaggagagcattaccagtgagaagtatggtataggcttcaaacagggaaacaccgatttaaaagacaaagtccagtctaccctggacgacatgttcaaagatggcactgtggcgaaaatcgcacaaaagtatggtatctcagaggatgctctgatccaaccgtga

SEQ ID NO: 9543 - DNA, 651 bp, synthetic construct
  source 1..651: mol_type = other DNA
atgatattatccaacgtgatcggccaattgctcggcgggatggttacgtcggtggagatctttctgctgacattgctgttctctctgcctctcggtctggtggtggccggcggaaggatgagcaagtttgcccccttgcgatggctcatgaagatatacatctcaatcatgagagggacccccctgatgctgcagcttattatcgtgtttttcgctccgtactatgtgttcggtatgagtctaagtgccgattaccggtttatagcggtcattattgcattcacaatcaactatgctgcgtacttcgccgaaatctatcggggcggaatcgaggctattccaaaaggccagtacgaggcggctcaggtcctaggatataacaaatttgaaacctttttcataatcgtccttccacaggtgttcaaaatcgtgctgcctagcatcactaatgaggtgattactcttgtaaaggatacctccctcagcttcgtgatcgccattcccgaaatgttcaccgttgccaagcagattgccgccgccgacgcatccattgctgcactgctcgtggccgggatcttctactatgtatttaatgtcatcgttgcattcgtcatggagcacctggaaaaccgcctggactactacgactga

SEQ ID NO: 9544 - DNA, 684 bp, synthetic construct
  source 1..684: mol_type = other DNA
atgagtctcctggaaataaagaaccttaagaaaagcttcggagacaatgtggttctgaaggatatttccctgaatgtagacaaaggggaggtcctgtccatcatcgggccaagcggaagcggcaaaagcacactgttgcgatgcatcaccgacctggaacaggaagacagtgggattatcaattttgacggcgcgttcggattggtgttccaagactttaacctcttcccacatcacagcgtgatcaaaaatattacgaacgctcccctaagagtgcagaagagggacaggaccgaagtgttcaaccacgcacgccatctcctcaagaaaatgggcctggaagacaaggaggatgcatacccttgtgagctgtccggcggccagcagcagagagtctcaattgcccgcgcgcttgccatgaacccggacatccttttctttgatgagcccaccagcgccctcgatcctgagctgactggagagattctggctgtgataaagcagttagctgccgataacatgaccatggtcatagttactcacgagatgaattttgcccggaaggtctctgactcgatcatcttcatggagaacggtgtgatcgtagaagaggggtcacccgaggaggtgttcacatccaataacaagcggatgcaagaatttctaggtaaatttaacgattga

SEQ ID NO: 9545 - DNA, 1512 bp, synthetic construct
  source 1..1512: mol_type = other DNA
atggaaaacaacgacgtggactatctggtgattagctactacttccctccccggttagagaccagtgggttggtagtggccagaaaaattatggagaaaaacctgaatgtggatgttattcaaagtgcctacgatgaaagctccgatttcaacgaaatcatcaacaagcacatcaacaaccgattcccaatcgacatcaagactaaacccgactatattccattcatttttaaatacatcgacctaggcctaaaggccatcaagaagaactataaaaaggtgtatagcaggagctatatttactcaaaccatttcctggccttggagtataaatttaaaaatccgaatgctgaatggacggcggaattttcagaccccttgcttctgaatctctacaccggtgcgatcaagaactaccccagggctattctggacaattcggattatatcaataagctgaatgagaaaatagagaagttcaacgaggtcagtgatacggactttaaggctttggacaatcccaacaatacattctttatggccgaatatctgacattcatatttgctgacaaaatcatattcacaaacgaaaaccagagagaggtcatgctgtccgtatacgataacgagctgcgcgagtttgtcatgaataagtcaaagctggaagcacacccgactattgataaaaagttctacaacttcaaagactgcgagatcaggctcgacaataacaacatcaatatagcgtatttcgggacatactattacattagacattttgagagcctgttctatgcatttgaggcacttaatcacaagtataaagataaaatcaagctgtactttttcacgtcccgtgccgaattactcaaggtcgcaaccggcagtctgaagattagcaataatatcatcatcgagaaaccactcaaatacttcgagtttctcaatgccactaccaagttcgacattttactgatcaatgatacaatcaccaaggggcactttaaggtgaacccatacctgcctagcaaatattccgattacatcggatcgggaagcgacatttggggcatctgcgaagaggacagcatattgtctaagaaagagctgatgtataagtctagcatgactgactaccagtccagctgtgacgttctcatcgacattctaaacgattatggatacgaggatcaggactactacttcgaggataacatatacgagaagcggatcaacgaactgaactggcgcttcggtttcgaatttgacgagcgcaagaaatacctttcccgatacaacaatctgaaggaaaagaacatgaccctgaatggcgaactgcagaccctcatgaacaagaacaagaaacttaaagccgaaaatgatgtgctccggaagaaaaataagaacctcaaaaaggagaatgagacccttgaatccaagtacaacgagattgtgaactcaaacagctggaagataacagagcctctccggaagctgaagaacagtaaatga

SEQ ID NO: 9546 - DNA, 723 bp, synthetic construct
  source 1..723: mol_type = other DNA
atggtcaaggtgtcagtaatcttaactgccttcaatgaagagaaatacattgggaaagctatcgacagcatactgaaacagaccctgaccgactttgagctgattatcgtgaacgatgggtcgaccgacaatacgctaaacattatcaacagcttcgaagacgagaggattaagctgatcagtcacgacaacataggcccgggagccagtcgcaacaaggccctgaatatcgccaagggagaatatataatgtaccttgacggggatgattggtatcgagtcgacggcttggagatagcgtactccgaagcaaaagataaggacaccgacttcacattctatcaaatgatcaattatgatgagaaaactggcaaaacatacgagaacgattggttcaacctgaatatctttgacgaatccttcgagaacactgtgttcaacattaacgattttaagggttcaattttcgacttgtctgtgggtgtgtgccagaagatctataatacaagcttcctcaaacggatcgatgctaagtttccagagggcatcctctttgaggacatgccctttttttactacgtgctgctcaaggccgacaagatctccattattaagcagcagctttactaccggagaaagcacgatggaagcatcacccacgtcgttgatgagaaattcctcgacacggttcctgcaggccaggaactgatcttccattactga

SEQ ID NO: 9547 - DNA, 273 bp, synthetic construct
  source 1..273: mol_type = other DNA
atggagaacggatggtatgatacctacaagttcgatctgttggcctataagatcaacgggccccggtttgcgctgagggatattgaagagaactataagattccactgtacatgctgatcaagaaggactaccacagcatcaagcagagcaaatattaccaggactacctagacaaccttggcccggtgaagaaaaaattcttcctggacatcataaagtccaaaaattacaatgactacctcgcactcaacagtgacaaagataattattga

SEQ ID NO: 9548 - DNA, 972 bp, synthetic construct
  source 1..972: mol_type = other DNA
atgaacatcacagtcggtgttattggagcaggtgccctcgggactgcaatatcccaaaacatcagcggaaacgtcgctgagataatcttgcttttaagaaacaaagagctttgcgatgagatcaataattgtagatacaatagccagtattatccgaattataagctgaaggataatattaaagccaccctagagacaggggacctctcaaattgtgacattattttcctggctatcccctccagtgctttccggaaaaccctgaaggatctgcaggatattgtgaagaaagacgttatcatcgtcaccactgccaaaggcattgaatatcccagcttgaagaccatggggaacctgattgaggagtacttcgacgagaattacgtggctctgagcggccctaattttgccagcgaaataatgctcaacctgccaacagtcaccaatatagccagcaaaagttatgagaacagcgtgaaggtgaagaaggtgctgtccactaagcagttcaaggtgaagattattgaggacatttacggaatcgaactttgcggcatcctgaaaaacattaacgcgatcgccaacggtatttgcgaggggatcaacattaatgaaaatgcacgattcgccgtgctgacgaaagggtttaacgatacgatcaccatcataaaagcaatcggagggaagtctgaaacggttcacgagtactgcggattcggcgatctcatattgacttcaacctcccgcgaaagcaggaaccacaccctgggcatactctacggccagaggctcatcatcaatgagaatgcgaacggcgtggtgtttgaaggcaaaaactcgatcaaggccatccgggacatctgtctgaagaacaacatccatagtgacattgtgaactttgtatacgacgtcatgatccgcaaggtaacaccaacaatcgcgttcaacaatctatgggaaaacatggagtga

SEQ ID NO: 9549 - DNA, 768 bp, synthetic construct
  source 1..768: mol_type = other DNA
atgatgatcggcgtgattctcagcgccggcatgggaaccaggctccgacccctgacagacgaaattccaaagccgttgctggagatcaacaacacaaccctgctggagagaatgatcaggaactgcataaatgcgggaatccgggagtttatactgattgtcggttatgaaaaggaaaaagtgttcgaaatcgctcccaaacttgaggagaagcttgacatatccatccggataattgaaaacatggagtacgatgccaccaacacctctgtgtcggcttacctcgccagtagctacattgagaaagagaatctggacgatttcatcctaattaacggagataatgtggtcgacccagagatcatcacgcgtattgcgaagacagacaatacttccctgattgtcgataactttaaggacctcaatggcgaatcatttaagttgattttaaaggatgtaaagaaagccgataacagcatcgcaaacgggataatcagcgaaatcggcaaagaaatcgatataccctccagcacgggtgagttcatcggggtgtcaaaagttatcaaggaggacgttagtcggttcaatgagattcttatccgcctgatcgatgaagacaggcagaactattacgatttcgcctataagcctctctctcgcgacagaaaaattgactttgtgctgactaacgggctgaagtggactgagatcgacgactacaatgactggaagaccgcaaatggcctaatcaaagagttcgagaactga

SEQ ID NO: 9550 - DNA, 1698 bp, synthetic construct
  source 1..1698: mol_type = other DNA
atggctctgatcggaaaaatcaataacctgaaggaatgcctcgacaacaccaagatttacgacagctactactccgccgaaatcgacgaaagcattatctatctggagagccgtaacggcatggatttcaccgggaacatttttcggatcactgaagagctgtccaccggcaaatacggaaactttaagatctatgtttacgccgcaaaaagtatcaaggctaaaatcgagttgtttaagcggaactacaacctgaaaatcacgaaaatcataactgacgaagacgaggctaccaagatcctgcataaagccaaatacatcttcacagactccggcattcgctacaagtatgtgaagaaaccggggcaaattttcgtcaacacctggcacggcactccccttaagctgatgggattcgacaacccatcagaaaaacacaacgtggggatcatccagcggtcgtttcttttcagcgactatattctgttccccaatgagtatatgctagatagaatgagccatgcgtacatgattgataaggtgtatggcgggacattcctgttggagggatatcctcgaaatagtgttttcttaaaggataactccaactataaggaaaagttgaatctgaaggacaaagaagtgtttgtctatatgcctacattcaaggggatcgtgaataataggaaagatgaaaagcagaagaacgacgtcaacaagtttctcaataaactcaattcgaagttgaatgacaaccagatactctttgtgaagttccacccctacaatcagtccaaaatcgatttttctaagtttaatcacattaaggagtatccaaagaacttcgagaattacgacatactgaatgctgccgatgtgctcattacagactacagcagcgtctttttcgattttgcatccactagacggaaaattatcatttttaactacgaccaggatgagtatctcaaagataggggcctgtacttccctcttgaagaccttccattccccaaagtccagaatatcaacgatctggtatgcgagctcaactctccaaaaaactacgacgacacaaagtttaccgaggaatactgcaaatacgacagcaccaacagcgcggagcacatatgtgaaactgtaattaatggtaaaatcgagtgcgattacaagataatcagtaatgcaaacaagaacatcttaatttacctgggaagcatggagaacaaccaggccaagagccagcttattcagatccttgagaacacggacgacaatatcaacatcttcctgtcatttaagccctggaataagaacattaaagagaaccatctgaatctactcaaggatattcccaacacgattgagtttctcccgttaagttataatttgaccccaacattcaaggaaaaggtggagctgaaccgctttataaagaagggcacggacctcaatctggaactaacagagatgttcaacaggaactataagcgccaatacggtgatttcaagttcgacctgatcattgacttcatcagtaatgatcctgagcagtcactgacctatgcctgttctaactcaaagaatgccattatcataaacgaggaaacccaacctaaagtgtacaatcagttcaacaaaatctacagactgtccgagttcaacatcaaaaatatatgtgatgagataatccgatga

SEQ ID NO: 9551 - DNA, 855 bp, synthetic construct
  source 1..855: mol_type = other DNA
atgaaccgactaaaagccgctaagactatatcggccatcaccaaccccccaatcatctgcatccctctttttcttatcatatgtataatcctctccaacgggaacttcaatagcttcatcgttctggagagcatttccctggtgttcacatcaatcctaccaatgatcatcatcgtttactgggctaagaggcttgacacggatcgggatatttcaaatcggaaggaccgcttcacccccttgatcgtgggaatcataagctacttcatcggctttctggtctccctcattctggggaccaatgactttctcaccgctcttctcctgtgctactccattaatacaggcgtggtactgctgataaccgtaaaatggaagattagtgtccacacaacgggactgtcaggtcccgtcggggcccttattttgctgctgggcccgaccggtgcactctttgggattatctatcctattctgatatggagcagagtgacactggaaaaacacacttcggcccaggctattgccggcggagtgcagggcttctttctgacagtgttggagatgtatatgttcatctccctcttcaacttcaatgtgggcaacctggtgcccttgactgattgcatctggtatatcctggccatcatatctgcacctgtgattctaggcatcctcagctacgcacatatgaacaagatcgttttcagtgccgcggtgattattggatttaccgtctttttagaatacgcgccactgagtgcatctgtcatttacattctggtctgtctcacgagctgcctgatcagcttatatgccggggaggactacgagtggtctgacgtgctcatctga

SEQ ID NO: 9552 - DNA, 579 bp, synthetic construct
  source 1..579: mol_type = other DNA
atgaaagttaacctgaagccccatgccatgatgtacccgtcgcccgctgttgtcgcaagcgcgtacgataacgatggcaaggtggacgcctgcacccttgcctttgcagccatgtgttcccacaggcctcccgccgtaatgatcgcaatcaactccaccctgaagagaaaaacattagccagtatcctaaagaccaaggagttttgcctggggttcccaagtatcgaacacgtcagggaggtggactatctcggaatcgaatccggatataatctcgataagattgacaagatccggttcacagctaagaagggcgagtttgtcaacgctcctataattaatgagttcaaagtctcaattgaatgccgcgtgatggacattaaagaggtggggagccacactcagataacgggagaaattcttaacatccaggctgaggagagcgtgttggacgatcggaataaagtagtgctcggcctgctgaacccaatcgcgtacgatgacatcagccattcatacttcaaaatgggtggcaaaatagccgacgggtttaaggtgggtctgaagttccgagaatga

SEQ ID NO: 9553 - DNA, 450 bp, synthetic construct
  source 1..450: mol_type = other DNA
atgaaaagtctggtgacatattatagtaggtcagatataacgaagaaactcgccgaagacattgctaaccaactgaactgcgacatcgaggagatcaagcccaaagtagattaccacggaaagttggggtacgccagaggcattaaggatggtcgcgcagggaaaatcgtggaactggaatcgctgaagtacaatccgcaggactatgacgtcgtctacgttggagggcccgtgtgggccgccaaggctgcaaatcctgtgatcagctacctcaaggaaaatgagggcaagtttaacaacgtgaagttcttcataaccgccggcagcaaaggctttgagtccagcctggagcagatggagaacaccagcatgaagccacttaagactttacagctgcgggcgaaagaggtcaaaaacgaggattacgacctaacatccttcctcgaatga

SEQ ID NO: 9554 - DNA, 471 bp, synthetic construct
  source 1..471: mol_type = other DNA
atgattaatgaagaatttcgactcatcgacgcttcagaacttcccatcagtaaactgatcaccatcattgcaaaatgtcagagcttctacttgaacaacatgttaaatgagtcgggcatcaatagcacacaactgcacattctcttcgaaataagccatcagaacaacattaaccaggagaagatcgccgccagatgcagcatcaacaagggcgccgtcgcgcgctccattaaaaagttggaggacatggggctggtcatcagggagatcgacgaaaacaataggcggcagaacaaggtgtccctaacacaaaaaggagaggagctgctgaacaagagcattaaaatcctcaatgatctggagcaggaggtgttcgacgatgaaacgataaataaggaggaacttcagaacgtgctgaaggagattaccatcaagatcatggaaataactgagcgggaggtaaagaattga

SEQ ID NO: 9555 - DNA, 1386 bp, synthetic construct
  source 1..1386: mol_type = other DNA
ttgagcaaaaatgacaacatcaaaattataacgggtgaccccaaaaaggctattgtgaaattagccatccctatgatgatttccatgctgctcatcatgatgtataatatcgcagatagtatctgggtagcgggcctcggggcagatgctctggctgccatcggcttcattacaccgctgtttatggtgctggtggggctggggaacggtattggcgccggggccaatagcctcatcgccaggaacatcggcgctaagaattacaagcaggctaacaactccggcctccatgccatcctgttgtcggtaattgtcagcgtcatatttaccatcctcattgaaggcttcatggtgcccatattgcagtttatgggcgccggcgatactatccagtacgccatggactacagttacatcatcttcggtttcctgttcatatttgtctactcaggagtggcttctgccatattccggagcgagggagacatgaaacgcagcactattgcgatcgctatcactgccgttctgaatattatcttggaccctatcttcatctacatactgaaccttggtattgcaggtgccgcctgggcaaccgtgatctctgctacgatgtcctgcgtgatcatgagttattggatttgggggaagaaggacctctacctggatttgtcccttaagaactttgattatcaaacgagtttaatggtggacaccctgcaggtggccatacctagcacactggagaatatagttttttccgcccttgccatcattatcaacagcatgctcgtgctcgcagcaggaaccaccgcagtcgctgtctacaccgcctcaatgaggattgtgcagctggcgatgattcccctaatcggccttggcaccgcggtgcttacagtggccggggtggcatatggggcgcacaactacaagaatctgaaaaccgcacactcctacagcatcaaggtggggttcctgatctcaatcattctgggcgcaatcatgttcgtattcagcagcccaatcgccacaatattttcatatactgcggccagtgccagcctgtcaccacaaatcgctactgccatttcggtgctcagcctctttgtccttgctattccacacggcataatgtcgtccatgatgttccagggcgttggcaagggaacgtattccctattgatcacactgctgagatctctgatcctggaaacagtcttcgcctatctattctgcttcacctttggatggggactgaccggaatttacgccggggttgtatttggttgttttgttggaggaacaatcgggtatgtctgggcaaagttattcatccgacgcttcaagcagattgctattcggaaatacgctccccaggagaactga

SEQ ID NO: 9556 - DNA, 441 bp, synthetic construct
  source 1..441: mol_type = other DNA
atggaatttatcctcaacaataagaaatatagcatcctgaaccacgagctcttcatcaactacctgatggtggacaactacttcagaaatcactattccaagtatgactacgagattcgcttcgactttataacacccctattaaataaggagaagatcaaatttgaggacatcctggcgggaactaaaaacctcgaagaattgatagagcgggaggagattaacttcatccccccgggcctgaaaataaaccagcataccaatggcaactttaagatcacctaccaggatctcgattttaacaacatcaccgtgggggaggccattcctttcctgattgcattgaatagccttctgacgtacaagccaattgtcacactgagtcaaatcgaagaagagcttgagaatttcattgaaaagttcaggtcatacaataaatga

SEQ ID NO: 9557 - DNA, 651 bp, synthetic construct
  source 1..651: mol_type = other DNA
atgtactgcccgaattgtaactccgagaacaacgactctgccaaattctgcaagaaatgcggaacccccctaaagaaggaggtttctcataaaaagatcatcaattccatcaacgatgagaagtcaagtaaagacgacattaccaagtacataatcatcgcactcattataattgccattgccctggcgggcgcatttgcctacatcggatttggaaatcacaacgatgatgggcagacccaggtccagaataacgcctcctccagtcccaaccccgtgcagagcacacaaagcagccagcctcagcagtcatcgtcagcacagagtgctgcgatggacatcctcggcggttccttctccacgggcagcagcttgtctgccaagacttacgccagcatctacgtgggctcacaacactccggggaaaaagtgataatccaaattaagtatagccgggacggctctagccttaacaatgggaatatggtgccaaagacagtcgacagctccggttacattaacgtaaagagtgctgattcattcaaatattatcctgactttgctgaaatcaacctgttcgacactaataaaaacctgctggatacccagtcggtgtcgctgtctccagatagcagtacgcagacattctga

SEQ ID NO: 9558 - DNA, 480 bp, synthetic construct
  source 1..480: mol_type = other DNA
gattccgacctggacgacctcaatgacgactctgatctcgacgagttcgatgacgactccgatctcgatgagttcgatgatgactctgatctggaagatgtggacgattcggactttgaggactatgacatggagaactacgacttcaaacataatctacttaaccttaacataacatacaaagcctgcagttcccggctgggcgcgaccagcaacctcaataatcacagcgtcaacgagacgaaaaaagattcaaatcccaacactgaaagcattgaacacgctaagaaggccaagtctgtactgaaatccataaatctgccaagtgaaaaccagagcaattacgacaagaacatcagtgggaacaataatgaaaagagcaacaacgaggagaacaagcagggaaacaactatttaaccatcatctcaattattttggtgttgatcctggtgatcatcgcatgtaagaagctgtactga

SEQ ID NO: 9559 - DNA, 498 bp, synthetic construct
  source 1..498: mol_type = other DNA
atgtcgggcatccccaagaaagagataaagaagcacatccctgtgaaggacctagataaacgcatcaagaagctggagaaggacgtaaaagtgctgaacaggcttcacttcatcaaggcctgctacagcggaatgagtattaaggaggctgcggaactgaatgggatatcctacagcaacgcatacgtgtggttcaaccgatggaacgaagaggggccagagggcatcatcccgaaatacgccggcggacggccatcctacctgacctcagacgagaagattgagctggaaaagctcctccagcaggaggaggtgataacaaccgaaatcgtgcataagattattaaagataatttcggtgtcgattatagccataagcaggtcagaatcattgtcaaaagtttggggtacagctattcaaaaccctatcccatcaacattgaaacggacagccaaaaagttgaaatctttaaaaagaactcccacaatagcatctga

SEQ ID NO: 9560 - DNA, 165 bp, synthetic construct
  source 1..165: mol_type = other DNA
gtgatcattggggaaggccacatattcagcgacaacgacttcaaagaggacctgctaaacgtcggatttaagatcgtgaagtttaacaggggcgaagcaacctacgatttcgcctttatcaagagcgattatttcaattactggcccctgctcaaacgggagtga

SEQ ID NO: 9561 - DNA, 1380 bp, synthetic construct
  source 1..1380: mol_type = other DNA
gtgcagatcattgacaaaatcaaactaaagttgctcaactccagcaattcctacaatttctacaaaaataactatctcgctcagaacatccagttaaagttactcaatgaggagctggaggacaagaatagcgaaattaacaagttcaatgagatcgtgctcgagcagggcaacaacctcaagttgcttaacgaggaactggaggacaagaatagcgaaatcaataaattcaacgagatcgtgctgggccaaggaaacaatctcaagctgctgaacgaggaactcgaggataagaatagtgagatcaacagagtcaattaccggattgataagatgctgtcatttgacttgctgttcaaagaaaacctgacaatgtttaacactcacatcaaagagatcttcgataatcaacgagacttcgcctcgaatctgaatgagtactatgagaaacttagttataggagcaacgaggttaatgaatcattgattaagttcgaaaccatgctctctaaaagcaacaggggaatggacgagaagtctgacgtcattcttgacttcattaaaaatgagaacattcgcataaacaaccatgtggaaatgctgtttaaccaccacgtgaaagaatttaacaaatttaacaagaacataaagaactccatggatttcattgaaaacaattacaagaactgtagaaagtacttcttcaaggggaatgaatccctgctggagccctatctggatacggacttcatgttcaacttttgctacttcaataacatcgagctgctgagctactcaccgaaagagaacctgatactcctaaagaataaggatgggatcgttattgggacaaacaaccacctttggaccattatggagatctacgggttaaatgaatatatgatcccaatcctcttttactttgacgattttgtggtgtttgacatcggaatgaaccgggcctacgcctccttgagttttgccaacatgcagaactgctcttccgtttttggatttgagatcgatgagttcgtatattctaaagcaatagataacatctccctgaaccccaatctggccaacaaaataacaacgtacaacttcggcctgtcggatgaagacggcatcgtcgaactgtattgctacgaaggtttcgacggcctgaataccatgatgtacgacttcctcgaggctaacccttcactgaatctttataaggacaaacttgatgtgaagaaggtgcatgtgaaaaaggcgagtgaggtcatactggacatcattagcaagaataacatcaccagcaatattgtactaaagattgatactgaaggtgcagagtataagattgtctacgacttgatcaagatccgcttcaattga

SEQ ID NO: 9562 - DNA, 1395 bp, synthetic construct
  source 1..1395: mol_type = other DNA
gtggtcccgattaaggagtttacccaacctaaaatctccataatcctgaatctgaacgacgtcacagagaaatacttcgaaaaatgttttgattccatctgcaaccaggaactggattacgttgagatcatctgcgtggaaaacgaaaactataagtttgataaattccagaaatatcttctcgagtacgagtttattaaaatcttcgacgagtactaccttcagaataacttcaacttgatcataaactcggactacattttatttctaaacgcaaaggattggttgctgtttgtgggcctgaagcatgcctacaacctcgccatcgagaatgacatggacattctcataaacagctacaatatattccacgagttttccggcgaaatcgaagacccataccaggaggagtatgcccagctgaacaatctgaacagtttttccggtaacgactttaagaacatcctgttcaacatgcccaagtactctttcaacctttataaaacggactttatcaaaaagctgaacctaaagatccccctggaccttaccagtcagatcagcttctttattaacagctcaatgatgactagccgcattgggtataacaacaaaccattgctgtacaatcggcttaatgaggagaatgataatctcaattactataatctgatttgcaatgacttcaacttcggaatctgtgagaacaatctggagattaacatggacagcattattgacacatatttcaatatcctgtacttcctggagaaggagggcatctacaactgcaataagtactatttgtggaactatattttccgggtcttcagacgcatctatctccagaacttcaagaataatatcgtgattttcaagaatatccatgatttctgtacaaatgtgtttagcaagtaccacaatgacctggtgctcaacttgaaaatagaaaacctcaccttctacaggagtattttaaagtcaaactccatttatgaactggagctgctgtatgaaaataacaggctggtgctgcaaaacgagggaaaagataagatcatcaacgaaaagaacaacttgataagcaatctgaacaacgatctcgctaatagcagcaagaaactcgatgtggaaattaaaaagtatctcaacatactggacgataaggacaatcgaatcaatattctggaggagaagtactcttaccaggtccacgaaaacaatctactaatcgcgaagcttagtgaggtcgaaacctcgcggtcctggagattaacgaagatctttcgtaagatcgggatgttcaaatcaatcatcgtgctggtaactgttgggttcataatctttctcgtaatgtacatacttattatcatgttgatgctcatcattaaatga

SEQ ID NO: 9563 - DNA, 2571 bp, synthetic construct
  source 1..2571: mol_type = other DNA
atgggctttaaggtcagtattataataccagtcttcaatgttgagttctatattgagtcctgcatcctgtcacttcagaatcaaactatcggctttgagaacctcgaaatcatttttatcgacgattgcagcacggataatacttcaataatcatcgagtactacgccaaaaaatacaaaaatattcgcgcaatttattgtaatgagaatagcggagtggccggtaaaccccggaacattgggatggtgaacgccacctcagattatataatgttcattgacccggacgacactttctctaaggatgcctgtgaggttctctatgacaagatcagcaagtcgaaggtggacgtggtgtccgggctccattccaagaagatccacggcgacaccgacatcatttttccaggcctcctgataagtaccttcacaaaccccaatgattcctggcagatcaggaagaagcagctagccgagtacctgaaagattttgatgagctgtacttcgaatcgctcgacgaaatgccctatctcctggggaacttcgccatcatgagcaagatttatcgcaaaagtttcctcttctccaacaatatcaacttccccgaggagatacccggcgaagactccgtatttctgctgaacgtattcctaaatgctaaaggaattatctttattaacaagataatcttctcttattacacttcacgggacgacgaggacaacgcatcgcttacacaccagagtgatttgtccagaaacttggggcgcctgaaggcgtacaagatgatgctgaagctgagcaaggaccacgataagctcgacgagtttgtgaattacctgctgtgcggtaagatgaactacttcttgaatcaatacgtgaataataagaacttatctaaaaaggagatctccataatcattaacgaaagttacgacctatttaccttgatcaacaacagcaattgtaaattcgatagcgattacaaaaagttagttgaactcattattgacaaaaacgtggatgagctgtataagtactcagaaaatgatgtttttcatatcgtgacaaacaaccacgagaccaaatatattaaagacataaaggtagcagtgataatggaccccttcacttacacctcatatagcaatgagttcgaagacattataatcgaaccatcatcgtggttggagacgttcgagaatgaaaaaccagacttattcttctgcgaatccgcttattccggagtgaacaagaagtccgtgatcaacggggtagcaattgaggataatattacgccatggcagggaaaaattgggctgaatctgatcagcggcaacgataatcggaagattctcttcgacatactgaattactgcaataatcataacattcctacaatcttttggaataaggaagaccctacctctttcgacatcaaacagtacaacttcatcgataccagcttgcattttgactacattttcacaaccgatgaagaaaccattccccgatacaatgccagaggacacgacaacgtctacccgcttctgtttgccagccaaattaagctgttcaaccctatcgagtataaaaaacggactaacgacatcatcttcgccggtagttggtataatcagttctccgaacgaagtaacgtgatgagagagttttttaacaaaatcatcaatagtgattacaacctcaagatatacgatcgtgctagcgagatcaactctatcaaccgcaagttccctaaggaatactctcgctatgtgttccccaaggtccactttgataagatgccgagcgtctacaaggagagcaagatatccttgaacatcaacacggtcacaaacagctacacaatgtttgctagacgggtgtttgagctgatgtcatctaatacactggtgctcagcaactatagcaaagggatctttgacctgtttaaggataacgtgatttatctagacaagctctcctctctgaatcttgataagattgatatcgaaaacatttgtgagaacaacctgtacgatgtgctcgagaatcacacttactataacaggttcaagtatatcctgaatattatcggattcaagttcaaggaggagaataataacctgatcatcatctacggcttgaataataaaaacgagctggagattatcttgaacgacttcgagagcatcaagtacgttaacaaaacgtgccttatctatgtcaaagataataatctcctgaacagcctgaacgagaggttcatcgaagacgttaagtttattggtatcaaagagcttatcatgatcagcgaagaatttaaccagagttactttttcatcatcagggacctgtttcacccacttgaaaaggacttcattagaagggcttttctgcattacaactatctggacaagaacatcggcgtcaagcagggcaaccctaaatacaacctggcgaaaaccatagaatacaaaaatatccttttcaacattgagctgcttgacaaagtcctcgagggcttattaaaatatcgactgaacaagctaaccatcctcaacatctga

SEQ ID NO: 9564 - DNA, 1236 bp, synthetic construct
  source 1..1236: mol_type = other DNA
atgaagatatgcattttgggtcagggatacattgggctcccaactgccgcactcttcagtctcaaccactgcgaggtgattggagtggacatctttgaggatatgataaataatttgaacaaggggattatccatatagaggagcccggaatttccaagatcatcaaaaaggcgatcgagtcaaacgtgtacagagctagcctcatcccggaaaaagccgacgcttttataatcacggtccccacaccgtatatcgtggaaaactatagctgtgacttaagttacgttacaactgcctgtaagagcatccttccgtacattgagaagggcaacacagtaatcatcgaatccactattgctcctatgagcacggatgatgtgattaagcccatatttgagaacgccggctttataatcggcgaggacctgttcctggcacactgccctgagcgcgtcatccccggcaagatcattgacgaactgattcacaacgaccggatcatcgggggagtcacccccaagtgtgccgtaaaagctagcgaagtgtacgatcagtttgtggagggagagctaatcctgaccgaggccaaaaccgccgaattatctaagtgcatggagaacacattcagggatgtgaatattgcactggcaaacgagctgacgaagatctgtaccgaaatcggtgttaatgtactcgacgtgatcgaaatggccaataaacacccaagggtgaatctgcactcacctggtccaggggtgggcgggcattgcctcgccatcgacccttacttcatttatgctaaagcccccaagaccgcccacattatcaagctggcacgggacacaaacaaatccatgccagatttcgtctgtgagaacgttgagaaaattatctcgaagggcaaaatcgctattttgggcgtgagctacaaaggcaacattggggacgatcgagagagcccctcctacgaaatcatcgcgaagctgtgctcaaagtatgaaatttctatacatgaccctcacatcgacaatcccaatttcgtcagtctgggcaccgccgtgaatggtgcggatctgattctggtcctttgcgatcataacgaatttaagaacatggattatgatctgatcaaagacaaaatggaaaaggcaatcatcttcgacaccaagaacataataaaagaggttccagacgacatcaagctattcaactatggaaatctttactccatttga

SEQ ID NO: 9565 - DNA, 438 bp, synthetic construct
  source 1..438: mol_type = other DNA
atggataaaaagtggatcgtccttacgatcttcctggtaattttcggctttctaatcctgaacggactgaataatagtatacatgtgggggactcctactttagcctccccgaagggtacgtggagggcaatattgtgaaatacaacgatgtgaacataaccaatggcactacctcattgcggatcatagagtacaacgataacaatatccaggagcacatcgacaagtacgtgaactatagcactaaccacaactattccacaaaaattaataacttcaatgttgatggtatgaacgtttataagtctgaaatcatccagaacaacaagacattccactattggttcatcaagaaggacaaagtctacgagattgtcacctgggacggaaattcgtacaccgacaatacagtgtttaacctcattaagagcaactga

SEQ ID NO: 9566 - DNA, 867 bp, synthetic construct
  source 1..867: mol_type = other DNA
atgaaaaatctcattaagatcaacgtcgattttgaggagctggacaattacaagttcataatggacgaacccttttccctagaggtgaattataaccatgtgaagtacaactttatcatcaaattcagcagcaataataacaacctgatctgctgtgcgcccggagcccaagaccgcaacaagcgaaccagtcagggggaattgatcaagcccccgtatttcgaccggtggagctggttcaagtactttgaggaaagtttcattgctttcagcgaccccattttctattacgataaagagatcacactgggctggtgcgtgggcgataaaaaccagtggtatgccgaaaacatatccctgatcatccagaaactggcaaaaaaccaggaaatcattaatgagaatatcctatttttcgcatccagcggcgggggattcgtatcgataattctggctactctcatcaaaggttccaaatgtgtggttaacaactctcaatttagcatatttaatttttacgaaacccacatcaaccggctttttaagtttctcgaaaattcattcagactcaataagagcgagatcacggacaagatcgattacaggctggatctgataaagcttttcaagaaagagaactatatgcctagcatcacatactacgtgaacgcctgctcaaagtacgacattaagtatcacgccatgccattcatcgagaacgtcatgttcatcccacagttcaaagataacttaaatgtccattattaccacgagtacaaagactttcctcacaacccaatgagtaccgacaagattctggtgattctcaagaacttcattaagattaatttgtacaacaatttctga

SEQ ID NO: 9567 - DNA, 534 bp, synthetic construct
  source 1..534: mol_type = other DNA
atgccaacgtggcggctgcagctcgaaagtgaagacctgttcctaaacagcaagtactacgaaaccctgaataacttcctaaacaataaagaactcctcgagctgctgaacaagaacgactataaactggtattcaagccgcacgccgagttaatggaatacctcgatcttcttaatgtggacaacgacgtgtacattagcattaatgaatcctatcaggatctgttcaatgagtcggcaatactgatcaccgattacagctcagtgttcttcgactttgcgtacctcaaaaagcccgtcatttattaccaggacaataacgattaccattatgatgagggctacttcgattatgaaacaatgggatttggggaggtcatctccgacgagaacctgttgatcgagaagatcaagttttacctggagaacaactgccaaatggagtacaagtataagtgcaacgtggagaacttctttaaatttaacgacaaaaagaactgtgagagggtttataattggatcttgaataattga

SEQ ID NO: 9568 - DNA, 1926 bp, synthetic construct
  source 1..1926: mol_type = other DNA
atgaagtataatttcaaattttctatcatcattgcagtgtacaacgcggaaaagtacttgaacgaggctatcgattcaattatcgatcaatcctttgattttgaaaagaacacgcagttgatccttgttgacgacggtagttcagataattcactcgaaatcgctttgcagtaccagaaagacttccctgacaatatcctcgtcctctccaaagagaatgggggccaagccagtgcacgtaacctgggactgaaatatgccactgggaaatacgtgaactttctggatagcgatgactacctgtctaacaatactctggaagaggtgtacaatttcttcgagaaccatttcgatgagattgacatacttgcaatacccatgattctctttgagagagtgaacaagccccacagattaaattataaatttaatgagaacaagatcatcgacctcattgaggacccaaataacccgctcttgtcctcaagctctagcttcattaagagcgacgccatccgagattacaaatttgacattaaccttgtcaatctggaagacgctctggtaatcaataagatattgctggacaagaagaagtacgctatcctgaatacatgtaaatattactataggcagaggaacttacgaaactcgaccgtggacacaatcaatagtaaaaaagagtattttaccgaccgcctgaaaagcttttactgcaacataatcgactactgcttgtctaaggagggcaacatccccaaattcatccagtatctgatggcctatgacctccagtggctgctcaagctacccaacctcgatgtgctggagacggagattgaggtgcaggaattttgggattgcctgtattacgtgttaggatttatcagtaccaacgttgtctatggaaacaagaatattcttaacgatgtgaagcccttctttctgtacctgcttggcgaagaaaaatacatctcgctggatgacgacgggtcagtgctgctaaatgtgggcacacacaacgttgacaagctcagccgccacaagatctggctggacataatcgatataaagaaggatatactcaatatcagcgggatcttcctgactaatttccctaaccagaacatctcgatcaaagtcattaaggagagtgagaagcatgacaaggaatacttctgccagtataaaaagtacaacagcttcgagcggaaaaacaggacatttctgggattcgactggatcttcccatacaatttcgatgtcaagatcccactggtgaagaatgaatccagcaagctaagatttgtggtcaactaccaggatgatgaacacttatttagcttcgaatccagcctgggtctgaactatggcgtacggctgtccgacttcagtgcctgtattagcaaaaagcactatatcgtgcttttcaaatactctaaacttttcattctcccttataagtattctagcatgctgcggtacgagttctccaacattaaaaagaccatcaaggataagccaaatttcttcttgagtagcattttcataagactggcatactacatcttgtaccctctgttctccaacaagaagatttggatcttttccgaccgccccgacttcgccgatgataacgcgaaacacctttttaagtatgccattaaccaggacgacgacgttaaaaagttctttgtactgaataaggacagtaattcatttaacgacatgaagaatgagaataagaacgtcatctctttttccagcctcaagcatcggttcctgtacctatatgcggagaaaattatttcatcctacgtgaatgaggactttataaacccgttcttcaactacaacaaagatctctttgatggcctcattacctcgcaacgcgtcttcttcaccgcctggtccaaccagaggtga

SEQ ID NO: 9569 - DNA, 807 bp, synthetic construct
  source 1..807: mol_type = other DNA
gtggaactcgtcaagaaactggacgacgtgaagaacttaactaacaacaagctgattggtgctcccgatttgataaatagcgagatccagttccacgggaggaataacatcctggtatgtgagggcacgatcaacctggtgaacagcaatatcgtgttccagggaaataacagcatcatttacctttcctacacgaaacacgattacaagctgatggtctttgttcgcagtgacagcaccatcttcctgggaaaaaataacgagatcggctctaagttcaatattaacatccaagaacaccagaacctgattattggtgatgactgcattatagggaacgatgtaactatccgaacctgcgatacacgggccatttatgattttaacaccaagaaaagaattaatttttcagagagtatcttcataggcgaccatgtctggatagatcacttctcgtatatctctcggggggtgcacgtgggcagcggagccatcgtggcggtgcatagttttctgagcccgtactgcaaggtgcattcaaacaactacgttatggggaacccaatcaaggtgttcaatgacaatgttttcttcacaaaggagttcaccggcagctataacgtcgaggatacaatgaatttctcctcctacaagtccgacatcttccactacgactttgtgcttaatgaaaccttggcaatggacaatatagacaaaattctaaaggacctcactgtcgacgagaggctcgattttctcgaaaaactgtttatcaagaacaaaagaaaaaaccgcttttattattga

SEQ ID NO: 9570 - DNA, 1068 bp, synthetic construct
  source 1..1068: mol_type = other DNA
atgggagtcaatatggtgagcgaatttacagtctttgggtcatgtacttgcagagacatcttcaacagtacgattaataagaactataaagattatttccatatcaatcccagcgggattagggtatcctacattagtctgatgcacccaccggtggactacacagaggagtccttgatcatacaccccgagacaaagaaaaacatcaacttcagcaattggattaagcaggatctcgacaaaagcttcctgaacgagcttaagaaaaacaaaagcgagtaccttatcatagacacgtattacgacgtgaacttcggcatcattgaatttgaaaataaaaactacattaccaacaatctgcatattgataagacggaattttacaagaacctaaactataaaaaggtcatgacaattcagtctaacaaaaatgagtatctgaagctgtggaaggaaaattgcaatctattcttcaactttctggagaagtactgccctgataccaagatcatattaaatcccacccgccacgtgactaatctgatccgcgccgacggaacaatctctgaaatgggcatatacaagaagatcagtgagaagtataacccatatcgggacctgctcgacagccatattattgagaacttcaatgttgacgtgctctacttcgatgagaacacccttgcatccgagaacagcatttggggcgcttcatccctccactataatacctcatacttcatggatgttacaaaacagttgaacgagtttatcaaaaggaacaaaatactggataatgccaatgagaagcgattaaataacctgttcaagaaacaaaaccggaacttgctcacttttaaaatccagctgaacaacaatgagaagatcaacaaaatcgtgcacaagttcaagcagaacaatacctacaagaaccttctgaagaataataacgaaatcaccaataacatcaccgaactgaaggacatcctgacttcgaatgaatacgcgtttctcaactctataaacaactccaaactgtcgcagatcaagcaactcaagttgaaatga

SEQ ID NO: 9571 - DNA, 771 bp, synthetic construct
  source 1..771: mol_type = other DNA
atgtcgctgatcaaggagaatgaaatttttttgttcgaagagattgtgaaaaaaaactttgcctcaaagtacaagggttccgtactgggcatcctgtggagtgtcctgaaaccactcctcatcatgattctgttaacaataatcttttccactctattcgggggcagcattaagaattaccctgtttacttcttgtctgccaagtgcatttttgatttcttcacggctgggacgaacagtgccatgaatgcgatcaaaggaaacaagaacatcttgaagcgcactgctgcccctaagcacgctttcgtcctcggcagcattatcgcagagtttatcaacttccttatcactctggttattctcgtggcggtcatgattgtaacaaaagcaccctttaacatcaatacaatccccttcaccatactaccgattataagccttctcatgatgatcaccggcattgggttcatactgtccatcctctgtgtgtactataccgacatccagcacctgtggagtgtggtgacactgatggccatgtacgcatctgccatattttatccaatggacatcatcccagaaccctaccaccagtatatgattctgaaccctatcttctggattattgaccagtttaggcatatgaccctctggcaaagcatgcccagcaccctgaacctgatcaattcattagtgctgtccaccataatccttgtgattggaatcatcgtctatatcgtgtacgagaaaaaggtggccatgcggttctga

SEQ ID NO: 9572 - DNA, 1110 bp, synthetic construct
  source 1..1110: mol_type = other DNA
atgaataagcgggacaaaataaagacaaatctgatcaaaaagtacaacatctcccccgaagagtcagagatcctcctgaccaagattgagaagcgaattgcgaaggagaatgctaggaaacgggaaattctctctaaaaacatgttcaacgagagcaaggaagaatttaaccagccggagcataagataaggaatatcaattcagaaacgaacaagtataatgacttcgagaccatcacccaaaacatttcaagcaaggaaagtgagaagctcaagaaagaggagaacaataatgttgacacaatcctctccaacattattcccaactatgatcaggagatctccatcgagctgaataatgtcgacctaatctttgaggtggagacagacaaaattgacaacataaaagagaacatcatccgtactttgaagaggaacaagtctaaaaaaaccaagtttcaagctctgaacaacatctccttcaagatcaacaagggagagaaagtgggaatcatcggatacaacggcgcggggaaaagcactctgctgaacgtgattaccggcatttaccctataaacaatgggactgtgaccacccacggcaagataagcccactgctttcattgggcgctggttttgaccataattactctggccgcaaaaatatctacttaaacggcgcagtgctggggtacagtaaaaagttcctggaggaaaaggaagaggagatcattgagtttagcgaactgggagagtttatcgacttccctattaaaaactattcctcgggtatgctcgccaaactagggttctcgatcgcaacaattgttgaaccagatatcctcataatcgatgagatcctgggagtaggcgatgtcaatttccagagaaagagtagcgacaaaattaagagcttgatggatggtgggacgacggtgcttctggtgagccactccatcccccagatcagagaaatctgcgacaaggccatttggattgacaaggggaaagtccgcgaaataggcgaagtaaataaggtctgtgatcactatcttaaggatgccgaaaaggccagtaacaagcagttagccaacattaaattccggtga

SEQ ID NO: 9573 - DNA, 1194 bp, synthetic construct
  source 1..1194: mol_type = other DNA
atggacctgatagtagcaaagtttgggggcaccagcgtggggaacggtaaaaggattagaaaggccgccgagtccgtggcaagggagtacaaaaagggcagcgaaatagttgtggtcgtctcggccgtcaataagaccactgacgatcttataaacataacaaacgatgccatcacatgcaatctgacagaaaaacagcacgctgaaattgtgggtatgggggagcgcactagcgtgcggctattctcagctacgcttgaaagcttgggcatcaaatccttgttcatcgatccttactctgaactctggcccattattacggattccaattatatggaggcccgaatcgatcttgataaaaccaaggagaaggtgaacaacctcaaaagtctcctggaccagggaatcgtgccggtggtctgtggcttcctgggcaagtgcaagaatcaggttaccacactgggccgcgggggaagtgacatcaccgccttcctgatcggggaatgcctgaatgcaaccgaagtgatcatcgtaactgacgtcgacggagtcctatcaactgacccacaaaagattagtgaggccgagctcttagaaagcatcacagttgacgagatgaaaacactggcaacccacggtgcccaggtcctccacccccacgccctggattacaaacaccccaagatcgatgctaaaatcatcaactacaacaaggaggacctgaaagcggaaggaacctacattaccgggccaaaggattacaagccaatcgacttgtatgagaaccctgtggcgtcaataacgatcgtcggcaaaagcttgctcaacaaggtgggaatcgtatcggcactgtcaaatattctcctcgaaaacggcatcaatctgtttaagatgaatcctcatcacaacagcataaccgtgttcattgactccgaagacgcggataaagcttacgagctataccatgatcatgtggttaaaagcgaggaccttagttccatttcccgggacaaggacactgccatgtttagcattacaagccccgagatcagcgagattacactggctaatctgctgaccgagaatgacatcgatgctgtgttaatcaactatacgaagaccgaaattctgctttttgtggagtgggagttcaagtatgaggtttccaagctgctcaacacttataagaactga

SEQ ID NO: 9574 - DNA, 783 bp, synthetic construct
  source 1..783: mol_type = other DNA
atggagaacatgataaatagtctaaaaaagttgggactgaaccggtacgaggcactcgcttacatcggccttaacaagataaagaccggacaggccgacgaaatttcggaagtgtccaagctgcctcgctctcgaatatatgatgtgcttaaggagttgaataggaagggcttcgttgagattgaggggggaaagccactgaagtataagatcatccctccgagcaagatctttaaagaagaaaagaacaagctaatcgaggagctggagaatactgaaaagaagctcgaaaagctttacaacgacgagttggatgaaatccaggctccaatatggctgatccattccagtgagaacattatcgaaaaagaagtcggcatcatcagaaaagcgcgtaagacgatcacatgcagcatcggcttcctcctggagggggaaggtaaagcaatgattaaggcctttaacgaaatcccacgcaacgtggagatcaagattctggccaatcagttctgttatgtgaataaccacaagatagacatcatcaaaatttttaaagacaccaaattagacaatctggagattatcccctcagatctgcccatgatgaaactcctgattgtcgacgagaaagagctcatcagaacattcacccggttcaccggtgaaaacaacgagatactgccccagactgccattggggtacacaatacatacgaggacatttgcaaaaatttcagcaggcacattctcaaagagtttgataagaaccggcaagagaactga

SEQ ID NO: 9575 - DNA, 420 bp, synthetic construct
  source 1..420: mol_type = other DNA
atggctaacttcaatagcctcaaggaagcacgagagtttttctacaaggacaagtttgccataaatacaggagttacactggacgagttaaccgaagacaaggcaatttgctctcttatgctgaacgacgagcataggaatgcgtacggcggggtaatgggaggcgtcatcttcacgttggccgatttcgccttcgccgtgctcagtaaccaaatccaccagctcactgtcgcgcagcaggtgagcattaactatctatccgcccccaagggcgacatgctgatcgccgaggcagcttgccggaaaagcggccgcacctcatccattgtgatagtggatatctcggacgacctgggttgtgatgtggctcagtttgtcgggaccgggtttaaactgaaaaacagcaaaatcagagattga

SEQ ID NO: 9576 - DNA, 477 bp, synthetic construct
  source 1..477: mol_type = other DNA
atgtccgagttgacatttaagatcgccgaaagaaaggattcccgactcatcctggaatacatcaagaagctggccgattatgaaaagagatcggacgaggtgattgcaaccgaaaagagtattgagaaatggatattcgacgagaagcaggccgaggtcctatttgctctggaggataggcacatcgtcgggtttgctctttatttcctgagcttttcaacctatattgggaatgtgaacatgcatctggaggatttattcatcgaccccgaataccggcgccgcggatacggtaaagcattgctgaaagagctgggcaagatagtgatcgacagggactacggccgtttcgagtggacttgcctttcttggaaccggccaagcattgatttttacctcagcatcggcgccgaacagaaagattgggacgtattccacttcacgggagacgcgctcaaggacttcgttaaagagtga

SEQ ID NO: 9577 - DNA, 735 bp, synthetic construct
  source 1..735: mol_type = other DNA
ttgtatctgcttagcaatatcgacgccgttgactggtcaattgatgacgggtatgacgccgtggacgtctgcccgttctgtgaaatgcccgtgccagattatgtcaggagctgtgtggtgtgtggcctgagtatacgcgacatcgacttcgaagagaatagcattaataagtacacggacttccgagaaagctttgacaagctgtttgatgatatggactctaaacttggaaatatgattttcattaaggacgatgatgagctattcgagttcaaaacattctataacagtttcatgctgaactacgattaccacgagttcttagaattttacaatcgggcggataagaaccttgaaatgcagcaaatcgccgagttgttcatcaatgacaaactcaacaagtccctgggcaccgagtcggaatttgacgactacgccaagtatctgatatactactgcaactattacatcgctaatgacgacctggatgatgctttcatatactatgcacagatgctcctgctcatgtccaattattctggagacaacaacggcgagctcttgatcagtgtatacctgtttgatagcttttcatgctacaactgcctctacgggtcccagcatagctttgacatctccaaactattcgatgaagcaatcaacacctttagaatcgaggagtacaacaagaaccacaagttcattctggagaaactggaggccatgtttggttga

SEQ ID NO: 9578 - DNA, 450 bp, synthetic construct
  source 1..450: mol_type = other DNA
ttgaagaatgactatgcaatcaagctgacgtccaacttcatcctcagctacctcaagttcattgtggatactgatgagatctacaagaacccgaaaatcaaaaagttctacaagaaatcagagcacaccatcccctataaggctaatctgtttgacatggacctgtgtggcgtcatgtttcgagaccctgcgggaaacttcattaagtacactgattttttcgccgtaacaattccaagaaagtacgacctgaaaaaatacaagtgccggaagaaactaaagaaagtgaccgagagctaccttgacgacaaatattccgtctggacagatagcgtggatataatcaacgaatttgtggacctgaaggatcgcgagttcgacgaaatgctcaatattgaaaacatgatcgggatgcggaggagttatgccaggaccttactgatagtttga

SEQ ID NO: 9579 - DNA, 336 bp, synthetic construct
  source 1..336: mol_type = other DNA
atggatgaagggctgtttcaggacaagaatttgaaagacaagctgttcaacgaatatcctcatatcttaaaagccatcgagaaggaaggctatatactcgattacctctccttcgatgtctttaccgagatccgatttgaggacgatgtggtgggattcattagctttagcagattcgacattgtagagaattacttcgccattgacgaggcatatatcatacccgaataccggggcaacaacctcctgttcgagcacctgaacaatctgttccttctagacaacttcaggtactttccacgcaagccgacaaaagcttttatcaacgtgtgctga

SEQ ID NO: 9580 - DNA, 1335 bp, synthetic construct
  source 1..1335: mol_type = other DNA
ttgtcatacgtggacgaggtgattgaaaccattattgagcagaaccctggcgaggcagaatttcatcaggccctgcgcgaagtcatggagtctataagggtcgtggtggaagaaaacgaggaagagtacaagaagaatgcccttcttgagagactggctaatcccgaaaggcagatcaagttccgggtgccctgggttgatgacaacggtcaggtgcaggtcaatacaggataccgggtacagttcaacagtgccatcggaccatacaagggaggactgcgtttccactcctcggtcaacataggtattatcaagttcctggggtttgagcagatcttcaaaaacagcctaaccgggcttcctatcgggggaggtaagggcggctctaactttgatcctaagggcaaaagcgacagggaggtcatggcattttgccaaagtttcatgactgagctctacagacacattggcgctgacactgacgtgcccgcgggcgatatcggggtgggcgctcgggaagttgggttcctattcggccaatacaagagactcagcaacctctatgagggagtactgacagggaagggcctgaccttcggcggcagcctcacacgaacagaggccaccggttacggactgttgtactttacgaacgcaatgctgaaggccaatgatatcgacattgccggtaaaaccatcgccgtgagcggggctggaaatgtcgccatctatgccatagaaaaagcccaacagctgggcggcaagccagtgacatgctctgactcaactgggtggatttacgactcagaaggcatcgatgtggaattgctcaaagagataaaggaggtcaaacgagagcggctgactgcatatgcgaaagcccgcgaaagtgccgagtatcacgaaggtaaaggggtttggacggtgaagtgtgacatcgccttgccatgcgccacccagaacgagctgcagctggaagacgcgaaaagcctggtggagaatggggtgcttgcagtggctgagggggcgaacatgcccaccacgattgaggcgaccgagtacctccaagagaatgatgtcctgttcgccccgggaaaagcctccaacgcgggcggcgtcgccacatccgctttagaaatggcccagaactcccagcgcttatcctggacctttgaggaggttgatgccaagctccagaatattatggagaacatctttgcaaatgccgctgctgctgctgaagaatatgggctggacaaaaactatgtggctggcgcaaacatcgcaggattcaagaaggtagttgaggcaatgaatgcacagggaatcgtgtga

SEQ ID NO: 9581 - DNA, 252 bp, synthetic construct
  source 1..252: mol_type = other DNA
atgagtgtggaaaagcttacgaaatcccagtacaatgatctgaagaatagctatctgaccaagaaccgcaccatgcatagcctctacgccgagatcaacaaggagaacaaggtcgacaaacacctatttttcaaactgataaataaaatccggcaggaggaaggcctcaacgacttctacacaatgaaaaaggaaaaaaagaggaataacattatcgagaacttggacaagtcacccaagtactataactga

SEQ ID NO: 9582 - DNA, 1245 bp, synthetic construct
  source 1..1245: mol_type = other DNA
atggccgaagtaagcagcaaggagctgtatgagtttaaaaagacgctgaaggaactaagcggaaagcgaggccgagggacagagctcgtttccgtgtacattcctcacgataagcaactgagcgacgtgggtaagcacatgcgggacgaactcggacaaagcgccaacatcaagagtaaacagacacgcaagaacgtccaatccgcaatcgaggtgattttacagagcatacgcctgtataaacagcccccagagaacggcctggtgctgtttgtgggcatgatccctaagggagggcccggcactgaaaagatggaaaaatatattctcgaaccccctgaaccaatcaccacctactggtacaaatgcaataacgaatttttcatcgaaccgctggaggagatcatcgaagagcgtgacacctacggccttgcggtagtggacagaaaagaggccactgtcgctacgctgaagggtaagaaggtcaatattctaacccacctgacaagtggtgtgcccggtaagcacaaagcaggcgggcagagccaaaggaggttcgaccgggtcattgacctcgcggctcacgagttcaagaaacgcatcggggaacatatgaatgatgacttcttggagctcaaggacgatctcaaaggaatcatcgtgggcggaccagggttcaccaaagaggaatttatccagggggactatcttcagtatgagcttaaggacaaaataatagcaaccgttgatacatcatacaccggagagccgggcattcgggaagtcatcgacaaatctgcagacatcttggacaacctggacgtgatgcatgagaagaagcaggttcagagattcctgaaggagctcactaaggataaaggcctgtgctcttacggggaaaaccaggttagaaacaatttgattatgggtgccgtcgacaccctgctgctgagtgaggatctctcatccatgcggaagacattcgagtgcaccaactgcggaactcagattgaggtcacagtgaaaactcaggctgaggcggataaattcaatgaaaggtgtcccaactgtaacgatacgtttaaggaagtggcctcgaaggatttgacggatgagtttgtggagaaagccgaggagatgaatacaaatgtagagtttatatccaccgagaccgaagagggcatgcagcttttccgcgccttcggcgggatcgccgctattttaaggtactacgtggaatactga

SEQ ID NO: 9583 - DNA, 1068 bp, synthetic construct
  source 1..1068: mol_type = other DNA
ttgaaagcggcaaagaacatcaagatcattaagcgaaacaaaaacgtgatgaagtggaagattgggaatgtcaaaattagcaatcagatagtcttagcacccatggctgggatatgtgactatgccttccgcagcataatcaagtccatggggtgcggtctgattgagacagagatggtgtcagacaaagccataatgtacaacaactttaaaacacaagagatgctcttcatgaaggacgaagaaaggccgatctcgcagcagatcttcggttgcggcaccgacagcttcaaaattgcttccaaatacatctatgaaaatatgaaacctgacattatcgacatcaacatgggatgtcccgtgaagaaagtagccattaagtcaaaagctggcagtgcccttttgaagaatcctgagaaagcccggagcattgtggagaccgtggtggacagtgtgccaattccggtcaccgttaaaattcgcagcgggtgggataagagcagcatcaatgctgttgagatggcgcagatcatcgaagaggccggggcttccgcaattactgtccacccccgaacaagacaccaacggtacgacattcctgcagactggagtataatcaaggatgtgaagaaccacgtgtccataccagttatcggcaacggagatattaagtcatgctatgatgccaagagaatgctggatgagactggctgtgatgcaattatgatcggcagggccacgctgggaaatccctggctggtaaaacagtgcatcgactacatcgactatggcatggagcccgaaaaaatcagcgtggaagaaaagatcaacatggccaagaggcatgctgatatcatcgagaagacccaagcggagaagctagcaatctcccgcatgagaacccagacggcctactacatgaagggaatgtacaacactgccgacatcaagccaaagctgtttaagatgaatagcaaagaggaaatattcagtctgctggatgagtatctcgcctcgcataagcagcaccttcgggaatttgtcaaacagaaccagatcctctcctga

SEQ ID NO: 9584 - DNA, 969 bp, synthetic construct
  source 1..969: mol_type = other DNA
atgatcgagaaaatagagatcacgcagagatttaacttcaagcggctgaatcgccactacgaatgcttcacaatcgacttcagcaataattcggcctactataagatcagcgagaggggcagcggtgataagtttctgagcgaaagtgatctgtgcgacgattcctggattgaaatcctcagcgggctgcgcaggaacatgacaagtgagatctgccacttcaacctgaagcaagctgacaagttcctgaacgactttaacaagctaaatctttttaaggacttccgatccgaaaatttttcttactttgaaaaaatagagttgatctattcttgcaatattatcatctactcaaccgataactacgaggagtatgcgttcaagaacaacttcccgataaattggattaagtttggtgaaatcctcaaagagctactgaacttcgacgtgctccaccttgactaccagaaacagatggtcaccccattattctacgacgtgtgtctggacggcgtttactacgatggggagctcttgaagctgaaagccattgagtttggccattacaggacctacccctatgatattccaaaacccagattaatcatcgacttcaataaaaagcggatcgacggctatattgacaaaaatctctccagcggcgatgagaacgcaattctgagtctgcttgaaaagtaccatgtgtataactggattttcgatgaatatcacaacaagtccaatactcgggaccctgatgatctggaaggatacgactggtacctggagatggtgtttgaagaggggatcatttggcacctgttcggatacaacgactatcccgatacctatgtctgtctcgcccgtgaggtggagaagctcactgggatggatcttttggaaataaacacaatctcaggagaggacttggtactgtttgacaaattctctaagatgctgctcatgtga

SEQ ID NO: 9585 - DNA, 519 bp, synthetic construct
  source 1..519: mol_type = other DNA
atggtatttcgacggtgcccccagtgtgggagcacaagtgatgatcagtatggattctgtatcaaatgcgggtgggagttcgcaaagatagacgccacaaagaacctctgtcctctatgcggacacgaaaatcccaacgaggccgacttctgcgttaagtgcggtgcgccactcgtgtttaagaaccacccgaatgaagagcagaggaatataaccccaatcgtcatcaacaaggaggtggctggcacgcctattcaaaagaacagcggcggctggatcaaatggattataatcctggggtacatcttctccatcctgggcggtctgcttggattgatcattgctgtgtacttagtgactcgcaaagaagcgactgtgagaaaacatgggatcatccagctcgccatctttgccttctacatcgtcctgattgccgccctgtacgccaccggaatgattcccgcagacgcaattaccaactatcagcaactgattgctggcaatatgacccttccatga

SEQ ID NO: 9586 - DNA, 456 bp, synthetic construct
  source 1..456: mol_type = other DNA
atgattattcgaaagttcaacccaaatgacctcaagagagtgtttgaaatagagaacatgagctttgaccagtcgtacggcataaaaatgttccagcagctgtatgaaatgggcatcggattcttggtcgccgaacacgaaggtcacgtgattggctatgtgatgttctggattaaatacgagttcaatggacacatcatctcaatagctgtggacgagaactacaggcgcctgggggccggaacaaagctgctcgtgaaagcaatctccatcctaagcatgcttaatatcgacaacatttacctggaggtaaatgagcataatgatggcgcgattgagttttacaggcggtttaacttccaaatcgatcggaccgttcccaactattacgcaagtggggatggtgccgtcatcatgtatctgccgctccgcaaggggcatatctccagcaactga

SEQ ID NO: 9587 - DNA, 390 bp, synthetic construct
  source 1..390: mol_type = other DNA
atgtggcaagacttcggcgattacatcctgagcgaggccggagacgatcccgtcaagatcgcagagatcggggtgggtaagttcgacaaaatttcagagatactgtccgaaaagaagaacattaccgtgctgaagacagatattcacccaaaagatagcaccgtgataaaggacgacgtaacaaatcccaacttggaattatacaaagacgtcgacattatctactcgatccgcccgccaagtgagcttcagcctcatctaatcaatctcgctgagaagataaactcccagctgattatcaaacccctgacgaacgaagatctgaatactggcagggttaagatgaaactcaaaaactataagaaggccagcttttatatcctccggtga

SEQ ID NO: 9588 - DNA, 2430 bp, synthetic construct
  source 1..2430: mol_type = other DNA
atggagaagctgctaaagaaatataataccacacctgatggcctgagcgagtccgaagtgctaaagaggcatgaacggtacgggcttaacgagctggatgagaaaaagccaaccccaccaatcatactgttcctgtcccagtttgccgatattctcatcgctcttctgatcattgccgccatcgcctcttttgcgattggtgacaccatagacgccggcgtgattctcctggccgtgctcttaaatgtaatcatcggattcattcaggagtatcggagcatacgcgccgtcaatagcctgaaagacttgatggtcaagaaggccatcgtgaaaaggaataatgaggtcctggaagtggacgctcggttcttgaccattggtgacattgtaatccttgaggaggggaataagtcccccgccgatctgatcctcatcgaaagcaatgacataaactgtgacgaatccttcctcacgggtgaatctgaagcggtgataaaggaagagaaggacgctgtgttcatggactccaacatcattagcggccacgggctgggcattgtgaccgacatcggaatggacacggagatcgggaagatcgcagagattgtgcacgaagaagatgagaagacacccctggcagtgaaggtgggcaaacttggcaaaatcctttcagccattgcgatcttggtgtgtaccgtgatctttatcctggagcttatccagggagccggtattgtggagacgttcatgactgctgtgagcctagcagttgcagccattcccgagggtctgcctgcggttctgacgctgacactggcgctgggcatgtctgagatggcatcaagcgacgctctggtcaagcgcttgttgtctgtggaaacattaggctcatgtaccatcatctgcagtgacaagaccggcacactgactgataataagatgtcggtggtggagtcctacctgctgaacaaagacaagctcttgcttatttcaaagctgtgcaacaacgcgatcattaaggacaatgccctgatcggaaatcagactgacggcgctatcctcagatttgcccaaaactacgagacttccctggagcgcatcgatgaaatccccctggacagcaaccggaaaatgatgaccacaatacacaggctggacagtgaaaataagattgttttgagcaaaggggcgcccgagatcattctaaataactgcaagtatatagataacaacggaagtatcgagattctcgacgaagagatcaaggagactgtagtcaaaagaattgatgagatgagtgacgaagcactcagagtcatcggctttgcatacaagatcaacgatgatgaacgacccgaggaaaacctcatttttacagggctgcttgggctcattgatcccccaaagaagaacgccaaaaaggcagtgaaggaatgcatcaacgctgggatcaaagtccgcatgattaccggagaccatgagaaaacggcaagtgcaatagcaaagcagctcgggatacttactgacggccgggtcattaccggcaaagaattagaaaaaatctccgatgaggagtatctggccatcgccgacgatatccaggtttacgccagggtcaagcctgctcagaagatgaggatcgttgaagctctgaaagatctgggaaacatagttgccatgaccggagacggaattaacgatgcccctgctctgaagaaagcgtcaatcggtattgccatgggcgatgggactgatgtgtctaaagagagctcggacatgattctgcaggacaatgatttcagcacgatcgtaaaggccatcaaagaagggcgtaagatttacgacaacattaagagattcgtcaagttccaagtatccacaaacgtgggggctattctcacgatcgtcggaacaagcctactcaacctgcctctgccattcaatcccgcccagctcttgtggttgaacatcgtgatggacggcccgccggcccaaacacttgggatggagggtgctgaaaaagataccatggcccgaccccctgagaccggcgacatcttaaccaagaagacactgactgagatatttctactgggcctggtgatggctaccggcaccatcctcgtcttcagctgggagatctatagtggtgccccaactgagaaggctatgagtgttgccttcaccctgttcgtcgtgtaccagctgtttaatgcctttaacggacgctccaactcgactaaaagcagcaaatatttatacattggacttgccttgtccttcatgctccaattgctcataatatacatcccgcagctccagatcatttttcgaacaactgcaatcggcattgcagagtggaccatcataatcattgttgcatcaacaataatcgctgctcagaaaatcatgaataaagtgatcaagtga

SEQ ID NO: 9589 - DNA, 786 bp, synthetic construct
  source 1..786: mol_type = other DNA
atgaagatcttcctgctgggcggtacgaaagactcaatcaacatcatcaagttcatcaagaagaattacgacgcatacattctcacaaccactacgaccgagtacggcgctaaactcgccaaggagggcggaagcgacgatacaatagcccgaccgcttccaaaagaagagattattgacatgataatcagtaagaactatgacatcttaatcgatgcaacccaccctttcgccgagcacatcacccagactagcgccagcattgagaacgagttgaaaattccatacctccgcttcgagcggcctatcaccaaccttgagaacatcgacacatcaaatgtgtattacgtaaactccttcatcgaagcggggaagctgatagcttcggaattttccaagggcaatgtcctgcattttgcaggggctaacaccatggaggacatcctaaagaacatccccacagacaggttttatcccaggatcttgaaagtggaaaaaagcgtggagaaatgcaacgagctcaacattaaccccaaccacattatcccaatgaccggagctgccagcacgaaggagaatatcgagctgatcgaaaagtacaatgccagtgtcatcattactaaggagagcggtgagatagggggagttattgataaaatcgaagcagccaatgcgaaaaacattgccgtggtgatgattcggagaccccagataaaggaaataaataagaaaaatattgtctccaatctggatgaactggatgtggaactgaagaactttttctga

SEQ ID NO: 9590 - DNA, 309 bp, synthetic construct
  source 1..309: mol_type = other DNA
atgaaccaggcaagaatcaagctgaccggaacagatccggaaaaactggcgtacgtttgcgaccaactcaaaaagatcgccgagcggaccggggtggacctgtccgggcctatccccttgccaactaaaaagctggtagtgcccacgcgcaagagcccagacggcgagggtaaggccagctgggagaagtgggaactcaggatacacaaacgccttatcggcattggcgctgacgaacgggccatgcgacaggtcatgaagattaacgtccccgataatgtgagtatcgagattgagctaaaaggatga

SEQ ID NO: 9591 - DNA, 1242 bp, synthetic construct
  source 1..1242: mol_type = other DNA
atggccaaagagaaggagcatcttaatctggcctttattggacacgtggaccacggcaaatccacgctggtgggacatttactgttgaaggctggtgccatcgccgagcagcagttagatgatggtgagaacaaattccgctttgtgatggacaagctgggcgaggagagggaacggggagtcacgatagatctggcgcatcaaaaattcagcaccaaaaagtacgactatactgttgtcgattgtcccggacaccgagacttcgtgaagaacatgattaccggcgcgtcccaggcagacgctggggttctggtagtggcagctgacgacggggtaatgccgcaaacgaaggaacacgttttcctgtcacgcacactagggattggccagctcatcgtggcaatcaacaaaatcgatgtggtggactatagcgaggacaagtacaatgagttgaaggaagaagtggctaacctcatcaagaccgtcggcttcaacccagccgacgtgccattcatcccactgtccgcatttgaaggggacaacattaaagaggccagtgaaaacactccctggtataagggcgactcgctgatggatgccctcgacaagctgacaccacctgagaagcctaccgacctgccgctccggatacccattcaggacgtgtacagcattacaggggtcggcactgtccctgtgggcagagtggagaccggtatcatgaagaaaggtgaaaatgtgatatttgaacccgccggagcctcaggcgaggtgaaatctatagaaatgcaccacgaggtctttgatgtagctgagcctggcgacaacatcggcttcaacgtcaggggcgtcggaaaaaacgatatccggagaggagacgtagctggacataccgacaatgcccccaccgtggccaaggagtttgatgcacaggtggttgtgctacagcaccccggcgtcatcaccgttggatacacgcctgtcttccattgccacacaagccaggtcgcatgcactttcttggagcttagtaaaaaactcaatcctgctacaggggctgttgatgaagaaaatcccgatttcctgaagacaggtaatgcggccattgtgaagatcaagcccaccaagccaatgtgcctcgagaacgcaaaggagatcccgcagatggggaggtttgccatccgtgatatggggcaaactgtggccgccgggctgtgtcttaatgtgaccccagcgaagtga

SEQ ID NO: 9592 - DNA, 2184 bp, synthetic construct
  source 1..2184: mol_type = other DNA
atgatcgcgaaaatcaaagagcttatgtataagccggaccagatccgcaacattgggatctgcgctcacatcgatcatggtaaaaccaccctgagcgacaacttgcttgcaggcgccggaatgatttccgaggagctcgccggtgatcagaggttcctggattttgatgaacaggagcaggcacggggcattactattgacgcagctaacgtatccatggtccacgattacaaggacgacgaatatttaatcaaccttattgatacacccgggcacgtggactttgggggggacgtgacccgtgctatgagggcggtagacggagcagtggtggtcgtgtgcgccgtcgagggtataatgcctcagacagagacagtgttcagacaagccctcaaggaaaacgtcaaaccagttttgttcataaacaaagtggaccggctgatcaacgagctaaagctcgaacccgaggagctgcagaaaaggttcatcaatatctacatggaagcgaataagttaatcaagaacatggctcccgaagacaaaaaagatgattggtcattagacttcaccgatggcagtgtagcctttggcagcgcatatcacaactgggccatcaacgtgccaacaatgcaagaaactggagttaactttaatgacattatccaatattgcaatgaggataagcagaaggagctggcccagaaagttccgctgtctgacgtgctgctaggtatggtggtggaacacctgcccagccctaaggaggcccaggtgtaccgggtgcctaacatatgggacggagacattgaatctcccgccggcgagtgcatggtcaccacttcccccgacggccccctggcagtcatggtgaccaatgtatctgttgacaaacacgccggcgagatcgccaccgggagggtgtacggaggcgcaattgagaaaggcactgaggtctatctcgtgggcagccatggcaagagcagagtgcagcaggtaggggtctacttcggccccgaacgcgttaacacggacaaagtgcctgccggcaacatcgtctatgttgcgggggccaaaggtgctattgcgggggagacgctgtgtgatcccgagcataagatagttgaatttgaaggactggagcacatatccgaacctgttgtgaccgtggctgtggaagccaagaatactaaggacctaccaaagttgattgaggtcctgcgacaggtgggaaaagaggaccccaccgtgaagatagacattaacgaggagacaggggaacacctggtctcaggtatgggagagctccacctagaggtgatcggttaccggataggcgagaagggcgtggatataaccacgtcagaacccatcgtggtctaccgagaaacggtccgccagttgagtccacaggtggagggcaaatcgccgaacaagcataacaggttctacatcactgtggagccgattgagcccgagctctataccgctatccaggacggcgacattaaggagggcaaggttaaaggcaaagagggcgcgaatgacttcatggaacacggcctggaaaaggaggaggctcgacgtgtctgggctgtgcataaccgcagtatcttcctgaacatgacacggggtatccagtacctcgatgaagttaaggagctcctgatcgagggatttgagagtgccttggaaaatgggcctctcgggaatgagattgccatgggattgaagttcaagctccatgatgcaaaacttcatgaagatgcagtgcacagaggacctgctcaagtcctgccggccatccgcaatgcaatccttgggagcatgatgctggctgaaccagccctgctcgagccaatgcagaaggtagtgatcgacacacctaatgattacatgggttcatgtacgcgggaaatccagaatagaagggggcagattgtcaacatggggcaggaaacaggagatatggccagaattgagagcaaggtgcctgtagccgagatgtttgggttcgccggggacatccgctccgctgctgagggcagatgtctgtggtcgaccgaaattgccggatttgaaccacttccacgggagatgcaaaatcagatcgtcaaggagatccgccaacgaaagggactgtccgccgaaccattccccgcaagccactacctgggagatctgtga

SEQ ID NO: 9593 - DNA, 561 bp, synthetic construct
  source 1..561: mol_type = other DNA
atgagtaagttgtttgacaaatgggatctcaatgaggtcaaggtggaggacctggggttggtcaaatatatctgcctcgacgagactctggtgccgcacacatccggccgccacgtcaaaaggcagtttgccaagtctaaagtaagtatagtagaacgcctgatgaacaagatcatgaggacccatctcaacagcggcaagaaaaataaggcttacaacattgtgaaggaatctctagagataatcaataagcgcaccaagcagaaccctgtgcagattttagttaaggcagtggagaacaccgcaccccgggaggagacaacccgaatcaaatacgggggtattggataccaagtggccgtcgatatctcaccacagagacgggttgaccttagcctgggcttcctgactcggggaacgctgcagtcgtccttcaaaaacaggaagtccgtggccgaatgtctcgctgacgaactgatccttgccagcgaagaggattcaagaagcttcgcgctgagaaaagcggaagagaaggagcgagtggccaaggcagcccactga

SEQ ID NO: 9594 - DNA, 426 bp, synthetic construct
  source 1..426: mol_type = other DNA
atgccagggcttttcgccgccaagaagctgaaaaaaaacaggcaaaatttcaagtggaaggatgtcgactacaagcgaagggccctcagactggacgtgaaggcagatcctctcgagggagctccccaggctcgcggaattgtaatcgaaaaggttgggatcgaggccaaacagcctaactctgcgatccgtaagtgcgtccgggtgcagctgatcaagaacggtaaacagctaaccgccttcgcaccaggcgacggcgctatcggctttatagacgaacacgatgaggtgatgatcgagggaattggtggaccgagcggccgctcaatgggggacattcccggggtgcggtggaaagtgtccaaagttaataacgtcgcgttgagcgagatggtgagtggcaagatagaaaaacccgtgagatga

SEQ ID NO: 9595 - DNA, 432 bp, synthetic construct
  source 1..432: mol_type = other DNA
gtgagcatcaagctgagtgccaatgaaattcggttcatagctctgttcgagagcatgaccggagcaatggtgaaggattgcatcatcgatgatgaacacggcaaagtcacgttcattgtgaagaaaggtgatatggggctggctattggcaaagggggcagtagcgtgtcgaaggttcagcgcgccgtagacaaaagcgtggaaatcatcgagctcgacgacgacccaatcatctttatcaaaaatgtgctatcccccgcgaagttgcagtccgtcaagatatcccaaaagcagtcaggggagaaaatagcgattgtcacagcagacaacaccaacaaacgaatcgccatcggcaagaatggaatcaacattgagagagccaagctgctcgccaacaggcagcataacatcgacaacattattcttaagtga

SEQ ID NO: 9596 - DNA, 297 bp, synthetic construct
  source 1..297: mol_type = other DNA
atggacgtcgatcgggggatcagagtcgcggtcgatacgggtgacgtgacactgggctctgaaaaatcaatccagtcccttaagctgggaaaaggccagctcgtggtggtggccgccaacgccccgaaggagctgattgaggacgttgaatattacgcaaatctatccgagattccttttgtggtctacgacggaactagtgtagacctggggagcgtgtgcgggaagcccttcaccgtggctaccctcatcgttaacgacccaggcgacagcacaatactggatgatttgaggtga

SEQ ID NO: 9597 - DNA, 1179 bp, synthetic construct
  source 1..1179: mol_type = other DNA
atggacgagattataactaagattaggggcatgatcacggagatcaacgaaaccgagaatctggggatcgattttgcagacagctacatcaaagacttggcggaacactatatcagtaagaatttgacggacgacgaattacgcaagctcataattaagctcaaacaggcctacgaccgagcccatgtggaagcgggcgaggcggtgggaacagtagcagcccagagcgtgggtgagccgggaacccagatgaccatgaggaccttccactatgccggggtcactgagctgaacgtaacactgggccttccaaggctcatcgaaatcgtcgatgcccgcgagaaaatcaagactcccacaatggatatctatttcacggaagacaagcgggatgatgaggagtttgttagaaccttagctaataaaataggtaagagcaccatcaacgacatccttagcgacttcaatctgaactacggaaccatggaggtcgaggctgttctggacaataagaagatcgaggaaaagcggctcaacagggaggagatcgatgcaaagatcctgaagacatttaagaaagccacaatcaacggggataacatagtgctctccagcaacaagacagactccgacttcatcatcagagaactgcggctgctggccgacaagttccgagatttgcaaattagcggcattaagaatattggacgagtcatcattcggcgcgacgaggaatggataattcacactgaaggatcaaaccttaaagaggtgctcactatggatggcattgaccaggtgcgcactaccaccaacaatatccatgaaattgggcagatcctgggtatagaagcagctcgcaggtccattattaacgaagctcagaaaaccctgtcagagcagggcctttccgtggatgtaagacacattatgctggttgcagatatcatgacctccgagggcgtggtgaagtctattggaagacacggcatcagtggtgagaagtcaagtgtgctcgctcgggccgcctttgaggagacgggcaaacacctactacatgcctcgatccgtggcgaggtggacgacctgacagggatcatcgagaatattattatcggacaacccatacctctggggaccggctctgtcggggtcaaaatggattacaaaaaagaatga

SEQ ID NO: 9598 - DNA, 3006 bp, synthetic construct
  source 1..3006: mol_type = other DNA
atgaaagcatttatcaagaagattcagagaataaactttggtttgatgtcgcccgaggatatccggaagatgtccgttgtcaccgtcgagtatcccgatacatatggcgatgacggctttcccatcgataaaggtctaatggaccctcatctgggtattatagaccctagtctcgtgtgtaggacttgcgggagcaaagggggagtttgtcagggacacttcgggagtatagagctcgcccgaccagtgatccacgttggtttcggggatgttattcataaaatactgcgtagcacctgcaatgagtgcggccggacacttctgacggacgaagagatcgaagagtacacacagaagatcctggaactcaaagcccaaaatgagagcattagcagtatcctcaaggagatatatgatgctgccaaaaaggatggggaggaatgcccccattgcgggaccatccaggataagattgtgctggacaaacccgtttctattgtgcaacgcattgacccacttttcgagtttaagaaggtattttacgaaactgcctcttcggactctattactatcgaagagattgggccaatggctcgcgaaatcgtggagaacaaggaggaactcttccagaataaattgttgattaacagcaacctgctcgagaggctttgtgaaagattgcatgatgtggattacatcattaatatcctggacttggaagatgaggatggtagctatgaggtgaataacacccggctgaacaacatcttcaaaacagcgatcagtgacaacaatcttaccgaggattataagctgaccgccagcgaggtgcgggagcggcttgaaagaatttctgacgaagacagctttgtgctgggggtcaatcctgaggtggccagaccggaatggctggtgctgacagtgcttcccgtgcccccggtgactgtacgcccatcgatcatcctggacactggcgagagaagtgaggacgacttaactcataaactggtagatattctccgtattaatcagcggctcctcgagaacatggaggcaggcgctccacagctgatcgttgaagacctctgggaattactgcagtaccatgtcaccacctactttgataatgaggccagcggcgtgccaccagcaaggcacagatcaggcaggccactgaaaacactaacccagaggctaaaaggtaaagagggacggttcagatccaacctgtccggcaagcgcgttaatttctcagcccggaccgtgatctcaccggaccctaacatcagcatcaatgaagtcggggtgcctgaaatgatagccaaggaagtcacggtgcccgtgcacgtcaacgaatggaacatggatgaaatgcggacatacatagagaatggcccggacgtacatcccggcgcgaactatgtcatcaatggagacaggaagagacgcgtgaccgacgagacaaaggagtacattctggagacactggaacccggcgtcatcatcgagcgacacctgaaagatggggatatggtgctcttcaaccgtcagcctagcctgcaccgcatgagtatgatggcgcacgaagtacgcgtgctcccttacaagacgttcagactaaacttatgcgtctgccctccatacaacgcggatttcgacggggacgagatgaacatgcacgtcttccaaaccgacgagtcccgggccgaggccaagtcactaatgcgcgtacaggagcatatcttgtctccaaggtttggaggaccaatcatcggagctattcacgaccacatctccggcgcatatctgttaactcgtgatggggttgagtttagtgaagagcaggctctccaaattatccgaaagtctcacctcaagatccccgagttcaagtcaaaccagtggattctgaagtatgacagcaatggaaatgaagacagcttcatctacaaagagaagggggagaagtggactggcaaggagttgttctctctgctcttgcctaacgaccttaacctgtcctactccgctgaaatatccaaatgtcctgtggtgtaccctcccgaggacgcggaagttgtcatcaaaaacgggattctcatacagggagtcatagatgagagtgcatacggcagcttctcaggtaaaatactggataagattgttaaagaatacgggcccggacgagccaaggagtttttagaccgatccacggacctcgctatctgcggaatcatgaagaccggaataaccacttccctgaacgacgaagagatccctgaggaggcccaggacagaattaacgagcatctgcagaataagatggatgaggtcgacaagctggtggaggcttatgaggaaggctaccttgaagctctgcccggccgcagtctggaggaaacactcgagatgaagatcatgcaagtgctgggggaagctagggatatgagcggtcagatcgccgaacactacctgaacatgggcaaacagtatcccgacgacccctatgaccacgtgatggccgtggaaaatcactctgttgtcatggcccggactggcgcacgcgcctcaatgctgaacctgacgcagattaccgcttgtgtaggacaacaggcagtgaggggcggccggattgaaagaggctacattaaccgcacgctgccccacttcaagaagggcgagctgggggccaaggccaagggatttgtgcactcatcctataaatccggactcgatccaatcgagtttttcttccatgcaatgggcggacgcgagggtcttgtcgatacagcaatccggaccgcccagagcggttacatgcagcgaaggcttgtgaatgccctacaggacttgcaagtcaagtcgacaggactggtgaccgataaccagggcaatgtgatccagaccatgttcggtgaagatggcgtggacccggcgaaatccgactttgggaagccggcaaacttggacaaacttatcgacgaaattaggatggagggcaagtga

SEQ ID NO: 9599 - DNA, 2226 bp, synthetic construct
  source 1..2226: mol_type = other DNA
atgctaagcgaagactacaagaaacccgagactgacgaaaaaaaggcgttttattacttcggctttgagcgcctagcccctttcaatgaggtggacgtcatcatcacccagctcaaagagaagttgggggatgatgaagaagctctggagaaaattaataagcacgttgaatttatcgagtcatattttgacagcgacgagttgaaggctgatgatagtcttaacgtgccatttaagaaggataagcggcgcgccaagtgggagtcctacaagaaagacttccctgagatagatctgactgaggaggtcgacaccgaggatagcattgagcccgccgaggaagagaccgtggaagaagctatcgtcagtgacgacgagatcgagacggttggggagcagcccaacgtatttaataaaaaacatccccaaactaagatctatattaatggagagctgctgggctattgtgacgacccaataaacttcacccaggagatgagggagaagaggcgaaatggggagataagccacgaaatgaatattacgtactatgccgacaatcaggagatatacatcttcaacgatcccggacgggccagaaggccactaatcatagttaaggacggtgtgcccctgttaaaagaggagcacatcaataagattgccaacggtaaactcaactgggataacttaatcaatgatgggctgattgagtacttggacgcggaggaggaagagaatgcctacatcgcaatgaatcttgccgacctcagtgaggatcacacccatctggaaatcgacccggctaccatgctgggcatttgcgccggcatcatcccattcagcgatcacaacagctcgccacgaaacacaatggaagccggtatgaccaaacaggctctcggactgtatgtgtcaaattatgccctgcgtaccgatacccgggctcacctgctgcaccaccctcagacccctatcgtgaagacacgtattatcgatagcaccaattacgacttacggccctccggccagaacttcgtggtggcactcatgtcttacgagggatacaatatggaagacgccatggtgatcaacaaggcggctctggagcgcggcctggcacgctcctcattcttcagagcctatgacacatcagagaagaaatacgccggcggccaggtcgacaagtttgaggtgcctgataagaacattaaaggctaccgaagcgaggaagcttacaggaacctcgacaacgacggggtggtcaaccccgagtcctacgtcaaatctggggatgtcctgatcgggaaaacgtcacccccaagatttctggaagaaaacttcggcagtgtggcggaccggcgccgcgagacttcggtgactgtaagacatggggagaagggtattgtggacgccgtgctcctcagcgaaacagtggagggctccaaactggccaagattcgcgtcagggacacacgacagccggaatttggcgacaaattcgcatcccggcacgggcagaagggggttatcgggctgatattgagtccggaagatgtgcccttcacggaatttggcgtggtgccagacctcatagtgaaccctcacgcgattccatccaggatgagcatcggacaagtactggagatggtcgccggtaaggctggatgccttgaaggcgaaagggttgatgcaaccccgttcaaccagaccctggaagatgagatccagcagttgcttgtggacaacggatttgagtcggcaggatgcgaaagcctgtacagcggagtaactggtgaaagattggatgcggagatctttgtcggggttgcatattaccaaaagctacaccatatgaccacggacaaggtttatgctcggtctcgtggccctgtccaagttctgacacggcagcctacagaaggcagagctcgggagggcggtcttcgcttcggagaaatggagagggattgcctcattgcccatggcgccgcacttactctgaaagagagactgcttgatgaatccgacaagtatgaggccgtggtctgtgaaaactgtggtatgctggccgtagaggacacaagcaagcataaaaaatactgccccatctgtggagatgtggaaacatatcctgtggagatctcctacgcattcaagttactgttggacgaactcaaaagtctctgcattttccccaagctggtgctcggagacaaggcatga

SEQ ID NO: 9600 - DNA, 1551 bp, synthetic construct
  source 1..1551: mol_type = other DNA
atgacagtgaacaattggaagctggtcgatgcctttttcgataagtatgatctcgtcgaccaccatataaaatcctacaacgactttgtgaataataggattcagaatatcatcgacatcaccgaccctatttcgctggacgatggaaagtacacacttaaaaccgggaaaatacgcatcgagaagccaagcaataaagaagcggacggcagccgcagcatcatcgaccccaccgaggcccgcctgaggaatctgaactattctgcagacatgtatctggagatggcactgaacgaggagggcgaagacaatcccctggaggaggtctacatcggtgagctgccggtgatgcttaaatccgacatctgccatcttaacgggctaagtgatgaggagttaattgccaaacacgaggacccccaagatttaggaggatatttcatagtaaatgggtctgaaagagccgtggtgacaatggaggagattgccccgaataagatcattctcgaacggataggcgaagtggaagaaaggcacgccaaggctgtcgtgacttcaatcaagagtgggttcagagctcgaatcaccctggaatacaagaaaccacggaagaataaggccttcctgcggatatcgttcccatatcttcctggggagatcccactggtcgtgctactccgagcccttggcttgtccacggatcaggaaatcatcaccgctatttctgacgataacaacttccagatgatgattgcggatgacattcaggtgagcgcagaggaactcgacaaattcatagatcagaatgtcattaaaaacggcgacaaggatgaggtgaagcagcatctacaggacgccgctatcaagtacattggcaacagggtcgccaagaacatgcccaaggactatcggtacaaacgcgctaaggatgttattaaccggtacctcctgccccacatgggtattgaggaagagaggtgttacgataaagcaatctatctcgcggaaatgactgaaatgctgttggaggttattgaagagaaaagagagcctcacgacaaggaccactacaccaacaagagacttcgcgtatccggcgacttgatggaggatctctttcgcgttgcttttacaaacctcacaagggacatgagttaccagctggagagatccctgtcacgtggtaaagagctctcaatcaagcaggcagtgcggagcgacgtcctgactgagaacatcaagcatgctatcgccaccggaaactgggttggcggacgcgcgggggtaagccagctgttagatagaacaagctacatgggaactctcagccacttgcgacgtgtggtgtcccctctgacgcgaagtcaacctcacttcgaagcacgggacttgcatccgacgcaatttggtaaaatatgccccaacgaaaccccagagggccccaactgtgggctcgtgaagaatctggccctgctgtgcaacatctcagaaggctctgatgagcaggagattatcgatgttatcggacagatggacgtggaactgatctga

SEQ ID NO: 9601 - DNA, 240 bp, synthetic construct
  source 1..240: mol_type = other DNA
ctcaaatccgaatttgacattcagaagcatatgctggtcccaaagcacgagatcatgacagacgaggagatttcaaacgaatttagcaatctggattacagcttcaagaacctacctaaaatcaaagtagatgacccggtggccgaatctatcggagcaaagcccggggacgttctgaggataacgcgcgaaagtcagaccgcgggcgtgttcgtgacctatcggatcgtcgaggagtga

SEQ ID NO: 9602 - DNA, 867 bp, synthetic construct
  source 1..867: mol_type = other DNA
atgacgaacaataagattgagatcttagacaagatcgaggaaaatcttattaagatccgcgaaaagaacgccttgacccattgcatcacaaatagcgtgacaatcaacgactgcgcgaatgccgtgcttgcaataggcggatcacccttcatggctgaggatgccgaggaactcgaagaagtcgtcgcaatcgctgatgtcctcgtgattaatatcgggaaactgtccaagaaccagattaaagctatggaaatcagctgtaaaaaggctgacgaaacaaacacgcccatcatactcgacccagtaggcgtcggcgtgaccgagctgagaaacaaaataaccatgaacctaattgacaaccacaacattactgcaatcaggggaaacattagtgaggtcaaatccatcgcaaagcttagcggagttctggacgagagcaacactgccaagggggtggatgttaacgtagatgacatcatcactaagcagaacctgaagacaaatggcgagctcatttcaacactggcgtccaagttgaataccgtgatactggccagcggccctatcgacatcctgaccgatggcaaaacaaccatagccattgacaatggagacgatatgatgccgttgatcactggtagcgggtgcatgctgtcctcggtggtgggcagttgtatcggtgggagcaatccactggagggaagtctgatcgcgattctggccatgaacatcgctggcgagaaagcccgggccaaagtggatgagaaggatgagggtaccgggtcctttcgaacgtacctcatcgactatctctacaagaccaatagcgaaagcctaattaacgagtcaaacattatgatactgtga

SEQ ID NO: 9603 - DNA, 621 bp, synthetic construct
  source 1..621: mol_type = other DNA
atgaagaacatcgatctcagcctttacctggtcactgacaaaagtgaagacatcgaaaagttccttaagacaatcgaggagtccataaaaggcggagtcagcatcgtgcagatcagggaaaagacggccgaaacgttggacttctataatctggctttgaaagtgaagaagattaccacaaagtacaacgtgccactgataattaatgatcggatcgatgtagcgctggctattgatgctgacggagttcacgtcgggcagtcggacatgccctgcgacgtgacccgcaagctcatcggcaaagacaaaatcctcggggtgagcgcctctaccataagcgaggcgaaaaaagcacaggaggatggcgccgactacatcggtactggggctgtatttccaactgccaccaaagatgatgccccctcaattacaaagcaagacctaaagaagatcgtggacgcaatcgacattccggtggttgccatcggtggcattaaccatgagaatgcatctgagctgatcgagaccggcatttccggactgtccgtcgtgagtgcgataatgaacgccgagaaccctaagaaggcatcagaagagctgttaaacgtgttcaatgcctga

SEQ ID NO: 9604 - DNA, 777 bp, synthetic construct
  source 1..777: mol_type = other DNA
atgaacaagcaaaggcgcatgcctgtgatctttgtaggtcacggggcccccacgaacgcaattggtgacaatatctacatccccgagtggaagaaagtaggggaatacctggggaaacccaacgtcataatagcggtgagtgctcattggtacagcgagaaactctatgtgaggaccgctaagaagaataagcagatccatgacatgtacggctttccagatgagctgtatcaggtgaaatatgagcccaaggggagcccgagacatgctgaaaaagtcctggagcttttggacattgccgaggagaacaatgattggggaattgaccacggggtctggtccgtgttatcaaatatgtacccagaagccgatgtgcccgtagtgatggtgagcgttaatggtaacctgacccctgttgagcagtttgaaatcggccgcaagcttgagccactgcgacacgaaggcgcactggtgctcggaagtggcaatatcgtgcacaatttgggaatggtggactggagaatgaacggcggatataagtgggcctatgccttcgacaacgacgtgaagaaggctgttctcaacggcgacttcgaacggatcgttaatttccggaacatcaaattcaacgagattgccatcccggccccagatcacttctacccttttctaaacgtcctcggagcggcatccaaagaggataacgtcaagatcttcaacgatgtctgcgaactgggctccatatctatgacatcgtacattttcgaggacatttga

SEQ ID NO: 9605 - DNA, 291 bp, synthetic construct
  source 1..291: mol_type = other DNA
atgcttctgtacatcaatttcctcacccaggtgcacttccagtttaacaacaacataaacgtccaggcagacatccaagagggcaaaagtgaaagcaagctggaagacggggatctcacatggattttcaccgacgagaacactaagcaggtggagctcaactccaagagccttattctagcctatcgcaagggcgactacgagggttttaaagaatttctgaatgatgtatcactgatcctggctgccctgcggtggtgcacgcccttcaatttaacattcttgggatga

SEQ ID NO: 9606 - DNA, 276 bp, synthetic construct
  source 1..276: mol_type = other DNA
ttgctgaaggacgactaccagctgaccttccagtacggctttttcaatcccgagtacccaagcgccaatgccaaaaaggattttatcctcgactatgactgcaaattaatcaaggtggacagcgctaactcccaattcgaagtcgaggaggaactaaaaaagatgaacaagattatctatgataaaagtatactcaagtcaaacttgatgaggattctcaaaaagctgctgcggaaatctatcatccttattatactgaagctgaaggcagattga

SEQ ID NO: 9607 - DNA, 1215 bp, synthetic construct
  source 1..1215: mol_type = other DNA
atggcgaaatttaacaccatcgatgatttcgatgtcgagaacaagacggtgcttgtcagagttgacatcaactcacccgtggaccccggctctggaatcattctcgacgacactagactgaaactgcattcaaaaacgatcaaggagttgagcaagaaaggtgctaaggtagtactcctggcacaccagagccgaccaggcaagaaagacttcacaaccctgagccagcacgccgatgccctttcagacattctgaatctgcgcgtcaagtacgtggacagcttattttccaacgtggccaaggaagccatccgggacctgaagcctcacgaaattctgttacttgaaaatgcacgcttcttcagcgaagagtccctctcgcgcacaccagtggagcagagtaagaccttgctcgtgcgacatctctctccattgattgattactttgttaacgacgccttcgccgcggcccatagaagccaagcttccctggtgggcttcactgtgaataccccttccgctgccggccgggtaatggagaaggagctgactgtgattcaagatgcactggacaacgtgcagcacccctgcgttttcctgctggggggaatgaaacctgacgactcaattgatgtcatggagaatgttctgaacaatgggacagcagatgctattctcacaactggtatcgtgggaaatatcgtcctctgggcgtccggcgtcgatatcggtcaggtgaacaaagatttcatcacgaataggggatatgaggacatggtggaaaagtccagggtgctaatcgagaagtttggagataaagtaaagtacccgatcgacgtggcctgtgagatagacggggagcgggttgacattgatataggcgagatcccggatgagtctatctttgacataggggtcaaaacaatcgcattttatgcaaaagaaattagggacgctaaaaccatattcgctaacgggcccgccggcgtctttgaagaccccaaattcgcaatgggcaccgaagacctgatcaatgccatcgccaactcggacgggttcagtatcataggtggcggacacattgccgccgctaccgctggccttgggtgcgaggatcagatgagccacgtcagcagtggtggcggagcctgcattagtatgctagccgggaagaagctcgcggtggtggaagctttgaagaacaacaagaagtga

SEQ ID NO: 9608 - DNA, 669 bp, synthetic construct
  source 1..669: mol_type = other DNA
atggatacaccaatcgtaatactgaactacaagacctatctcgagagcagtgggataaaagcgctggagcttgcaaacgatctggagtccgccgcctccgagtccggcattaccatggtcgctgtgccccaggctgccgacatttaccgggtcagtcaggaaacttcactccccatcttcgctcagcacgtggactccatttctcctggcggccacaccgggtctaatttgatcaacacactgattgacgccgggataagcggaactctgatcaaccattctgagaaccgcatgaagctggcggacatcgcagaggtgatcaagagctgcagggattacgagatagaatcctgcgtttgcacgaataacattgaaacctcaaaagctgtggccgccctcaatcccgtggctgtggccgtcgagcctccggaactcatcggaacgggcatcccagtcagccaggcccaaccagagattgttgaagacactgtcaaggaggtgaaatcaattaataagaagatcaaggtgttgtgtggtgcaggaatcacaaccggcgatgacatgaagtcggccatggacttaggagcggacggggtgctgctggcaagcggcatcatcaaagcagaaagtcccaaagatgccctgcttgatctcgtaagcaagctatga

SEQ ID NO: 9609 - DNA, 879 bp, synthetic construct
  source 1..879: mol_type = other DNA
atggtcaaaaagactcagactgccagcttcggctccgtgctacggcagtcccataacagccgaaagttttacaactcaaagttgtatgaaaacctgaagatccccgaaaatattgattttaaggagtttaagatcaaaaaagaggacctcaataagctgtactgtaaatcgagtgagaacatggacgagattcccgacaacagcatccacttaatgattacatcccccccttacaacgtcggcaaggagtatgatgatgaccttaccttggacgagtatctggaactactcacttctgtgtttgcgcaaacgtacaagaaactcgtgagtgggggcagggcatgtataaacatagccaacatcggccgcaaaccctacatcccccttcatgccatggtcatcgaaataatgctgaacctgggattcctgatgcggggcgagatcatatgggacaagtctgcttcagctggtggaagctgcgcctgggggagttggatgtctgcgtcaaatcctgttctcagggattttcacgagtatatcctgattttctcaaaggaatcctacagcaaaaacaagtctcaagaaaagaaggacaccattagccacgacgagttcatccagtggacaaaatccatctggacattcccagccgtaaatgcaaaaaaaattggacacccggcaccgttcccaaccgagctgccacacagactgatcaatctgtatagctacgagggggatgtggtgctcgaccctttctgcggtagtggaacgacctgcatcgccgctaccaagaataagagaaactacatcgggtacgatattgaagagaagtatattcagttgtccaagagccgcctttcgaatcagaaattcatctga

SEQ ID NO: 9610 - DNA, 933 bp, synthetic construct
  source 1..933: mol_type = other DNA
atgaacaacattgtaatatatttcctgaaactcttcatctgcctgataattatcgtggttattatgcgcctttggagtaagaaccaggagaaaatctttttcatcaattcccgcaaagtcgcctttccaagccagctcttctacaagaccgatgacggcaggtacttggcatattggccgaaggactacaggggcaggaagagcaccctgcagagcagaaatagcttgatcggcaagttcacagaggagtgggtgtgcaagctctttggacgactgatcgtggacgacgatctgtatctggtgaaacaggccatcattccttccctagggattacctcccggtctccagtcgacctggtgatcagcaccgccaatcggaaaattttaaaggcaagtgaggtaaaagttatttttgaggttaagatgtccatcgtctggaattggcaatacttcgacgattccaataacgtggtggaaatcggagatttcagaactcaccagggaaagcccagtttcacacgttcagactctatcctgaaggctatcgggaaatgcatcggtattcgggtgtcaagcttcgaatcaagtaagattcctatcgtggtgataggcaatgcgccactatcgaatggattctgtaagaaagccgatcacctcaagcgcgtcggggtcatacaagggttttggagcctgaatcctttccccctcaaccatggaaatactcgaaagacgaccccctacggcggctacatccgctttaacaacacgtccgaacttaaacggaaccttgacaacttgttctcgcaggatttaaacttttttagcggcatggagaaccccaagacactcgggaaatacatcgaaattgctaacaacgagaataactatgaagacaagggtctgaaatttctgaagctgataagaaggtattga

SEQ ID NO: 9611 - DNA, 918 bp, synthetic construct
  source 1..918: mol_type = other DNA
atgtccttcaacgagaaccaaattcagaaactggaaaagagcggctatcgcttcgtcgggaagcacagacacgctgccgtaaagacttgccattggacccggcagagcatcgtggagaagggcgtgtgctataaagagaagttttacggcatacagtcacaccgatgtctccagatgtctcctgccgtgccaaattgccaacaggagtgtgaattttgctggcgcgacttgacccatactcagaccgagtgggaagacaacgagtacgatgatcccaagacaatcgtggacgaagctattgaggcacagaacaatctgctctgtggctattacggaaatgacaaggccaacaagaagaaactcgaagagctgaaaaagcccaccaatgcggcgatctcccttgcaggagaacccacgctgtacccgaagattgacgaattgatcggtgagtttaaccacagagacttcactacatttgtcgtgagtaatgggcagtgcgttgacaggctgcggaatctggaaaatgacccatatcaactgtacctttcgctcgatgcccctaacgagaaaattttcaacgaaatctgtaggccgaggattaacgatgcttggaacaatttgaacgagagccttgagacactgtccagtttcaactcccgtacctgcatcaggaatacgtgcgtgaaaggaagaaacatggagcagcccgagaagtatgccgaactaataaagaaggcagaccctgattacgtcgaagtaaaagcctacatgtgtgttggtagttcacgggaccgactgaccctggacaatatgccaacattcgatgaggtgaagagcttcgccaaacgcatcggggatgagtgcggcaaagaactcgtcaacgagtctgagatcagccgggtggtgttactagagtga

SEQ ID NO: 9612 - DNA, 1119 bp, synthetic construct
  source 1..1119: mol_type = other DNA
atgaagttcttcgaaaatgtggccaagcagatttttaacaaggagggcatcccaattttggaagggcatgtcgcctacagcccagaggaagccatgtccataagcagcgagatgggcgtgccagtggtgattaaggcccaggtgctgactggcggacggggcaaagtgggcggagttaaatttgccaacaatcctggagaggccctgaaggtagctgatgagatcttaggaatgcaaatcaaaggggagaccgtcaagcacctgcttatcgaggagaaggctgaaatcctgaacgagttcttcgtcactgtgtcgatagaccgaggtgccagacgccccgtgattatcgcaagtaaggaggggggggtggagattgagaatctagccaagacaaacccggaaaagcttatcaaatattaccccaacccgctgatcgagtttctcccctacgaagcccgcgagatcgcacggaagatgggcgtgtcctcagatttgatttctcctctcggctctatcatctggaagttgtacaacgtctttacaaaatacgactgtgacactgccgaaatcaaccccctcatcacaacgcctaacggactcatagctgcggatgcgaagatggtggtggaaaatgattccctgttcagacaccagaatctcgtgaagaggctccattataaaaggaaagctgttgatttcgtgaagcttaatgggaatattgcagtcatcggcaacggtgcaggtctaaccttaacagctatggacatgataaagctgaacggaggggaaccagccacgttcctggacattgggggcggagctagtgaacaagtcattaaccaggccctgaacatcgtattgaactatgaacctgttaaggtcatatttctgaatgtgctgggaggtattaccaaagccgacgacgtcgcgcgtggcgtgatcaaagctctgaagcagagcgagcggcacgttcccatcgtaatccgcctgaccggcaccaacgaggaggaaggccagaaactgcttgaggaagccgggattccctacgagacctcaatggaaaaggcagcgaaaaaggcagttgacctctgcaatgagctgaaacaggagatgaaatga

SEQ ID NO: 9613 - DNA, 549 bp, synthetic construct
  source 1..549: mol_type = other DNA
atgcggacggagattcgcatctgcggctttggcggtcagggcatcatcctggcagggattattctcgggaagagtgcatgcctcttcgacgggaaggaagccgtgcaaactcagtcgtacggtccggaagcgagaggaggcgcctccaagtgtgaggtggtaattagcgatacggaagtcgactatcccaaagtgcagagtccagacattctggtggcaatgtctaacgaggccctaatcaagtatatcgtggatttgaaagataacgggaccctgatcgttgaccccggaacaaccgatatcgaagatgtcagggactacattgaggagcacaatattaaggtatacgaggcccctgctaccaagacagctaccgacgacataggccttaaaatagtggccaatatagtcatggttggatcaatcacaaagatcactggggtcatatccaaagaagccgctatcaaagcaatcgaggtgagcgtgccaaaaggcaccgagaagaagaacatcagcgctttcgaggcgggatacgccctggtggaatga

SEQ ID NO: 9614 - DNA, 864 bp, synthetic construct
  source 1..864: mol_type = other DNA
atgaatgaaggaaagcagaaccggtttctcccttacctgagagacgaccgattacctcacattttctgccccggttgtgggaatggcgctatcattaacgccttcctggcagctatggagaaggcagagatggactttgataatatagctatggtttccggaattggatgttccagccgcatcccgggataccttaaatgcgacagcctccacaccacgcatggccgggccttgagtttcgctaccgggctgaagacagcgaacaaaaatttggacgtggtggtatttacgggcgatggggacgcggcttccatcgggggtaaccatctgattcacgccgcacgccgcaatatcaacctgactgtgatctgcatcaacaacaatatttatggcatgacagggggccagataagcccgacatctcccaagggctcttttggaactaccgcgccatatgggaatctagattcaccatttaaactggccgaactcgtcgccgccgcaggcgcaacatatagcgcccggtggaccactgtgcaaatagagaacctcgtgacgtccattaaggatggcctgaaaaaccccggattcagcttcatcgaagttgccacacagtgcccaacctacttcggtcgtaagaacaagcttaaaactcctaccgccatggccgctgtcatgaaagcgaacaccgtgttcaagtcggctgccgacaggatgaggcccaaggagctcgaaggcaagatcgtcgtcggggagttcgccaattcccagagaagtgagtttaccgagaacatcgaaaagctgagtgtggaaaagagcggtaacaaaacctcaatcaattcagcatacgagacagagctgtga

SEQ ID NO: 9615 - DNA, 1176 bp, synthetic construct
  source 1..1176: mol_type = other DNA
atggctatcatactgaccctcatcctcgacagtcagaaggagaaagtgggtgtcaagatggctgaggagtttttcatccagggcaatgaagcctgcgctaaaggagcattggccgccgggtgcaggttcttcgccgggtatccaatcacgccatcgacagagattgcagagactctgagccgggatctcccgaaggtgggggggagcttcgttcaaatggaggacgagattgcctccgcaggagcgatcatcggcgctagctgggggggcgctaaagccatgaccgccacttcaggtcccggtatctccctgatgcaagagaatatcggctacgccttcatgactgaaacaccgattgtcttcgtgaatgtgcagcgcggtagcccctccaccgcgcaacccaccatggcagcccaggcggacatgatgcaggcacgatggggtagccacggggactatgaacccattgcactgagccccagctccgtccaggaattttttgatttcacaatcaaggcttttaatttggcggaggagtaccgggttcccgtatttgtcatggccgacgagatcattggccacatgagagaaaagataaccgttccggagaacatcgaaatcgtggccagaaagcggccagagaagacggacgattatctgccattcgaaaatattgagaacggaaccacacccatgccagcctttggggacggattcaacgtgcatgtgaccggacttactcacgacgagcgaggctaccctgacacaaacacccctgaaactcacgaaaaactcatcaagaggatctgtaacaaagtcctgatgaacagggataaaatttgctctgtacgcagtgaaaactgtgaagatgctgacatcgtcatcgtttcatatggcgcccctgttcgctctgtggtagaggccgtgaacaagacagataaaaaggtcggctacattaaaatagataccccatggcctttccctgacgaacagattaaagagctgacggcaacggccagtgacgtgctagtcgtggaaatgaatctcggccagatgtactacgaggtggatagagtggtgaaggataagaatgtgcatctgcttggcaagatagggggagctctgcccacccctgacgagatattagacgagattaacaagatcggaggcaactga

SEQ ID NO: 9616 - DNA, 273 bp, synthetic construct
  source 1..273: mol_type = other DNA
ctgattatcatagatgaaaacctatgtaaggggtgtcacctctgcctgttcatgtgtcatgagaacgtatacgcaataagcagcgaggtgaataagaagggagtccagctcccattcgtgaagtttgaggaacggtgcattaaatgcggcacctgtgagatcgcgtgccccgaccaggccatcacggtggacctgccggaaaactggtggatgaaagacggcaataatatcaactttaaccctaggttcacaaaaggtaagtccgggtgctga

SEQ ID NO: 9617 - DNA, 492 bp, synthetic construct
  source 1..492: mol_type = other DNA
atgaaggacctgaatacacctatcaccgacgaggacctgttgaacctcaacataggagatcagatcactatttctgggacaatatatacgggcagggatgccgcccttccacagctggttgagctgatcaaagagaagaaggtgccatttgatctgaatggcagtgtcataatgcacactgcattcagtaacgcaggaatcgcgcccaccacgagcagcaaagtggaaatcgaatcgaccatcccctacctctccgaaaacggcattaaaattcacattggaaaggggatgctcagcgacgagaccatcaaagagctagataagaataactccattttcgtaatcaccccccctgtggccgccctgcttacatccaaggtcctggacaaaaagtgcgtcctctttgagtcagagggcatggaagctatgttcaagttaaaggtggaacgcatcccggggatcgtggctatccataacggtttgcggatttga

SEQ ID NO: 9618 - DNA, 735 bp, synthetic construct
  source 1..735: mol_type = other DNA
atggccgtagacaacggagattttgtcagagtcaatttcacagggaaagtgaaggaaaccgacgaagtgtttgataccacttatgatgaaattgcccaggaagccggccttttcgatgagaacaagacatacaagccaattccgatcgtggtcgggggaaaccacctattgcccgccatagaagaggcaatcattggactcgaagaaggagagacaaaacacatcgaggtcgattcagacaacgcgtttgggccccgagaccctaagatggtgcagctggtgcccatgaaggagttcaagaagcagggcatgacgccattcccaggtatgaggattcaaagtgaggggagcaacggcaaaatcctcaccgtaaatggtggccgggtcaaggttgactttaaccatgaactggcaggcaaagacctggtttatgacgtggaggtcactgagatcatcgccgatgaggaggacaagatcaaaagcatgatcgaactgcactacgctaatcctaacgtggatattgacaaaaccgagatcgacattgtggacggggtggcaaacataaaactggatgaaatggcgaagttcgaccagaagtcttacatggatgtgacgttcgcccggttccgcatagctaaagacatctgggataatgtggaaggcatcaccaaggttaatttcgtagatgagtttgagaaaaaggaggagtccgacgacgaggtggaggaagagtga

SEQ ID NO: 9619 - DNA, 1095 bp, synthetic construct
  source 1..1095: mol_type = other DNA
atgaagagacgaggagtcgcgaacctgcccctccatggaggccatcccccaaaatggctgttcacccgcatggtggacctcagcggggccctcgctagcgtcatcattgaagagtattccctgaatgagtttctgaataggatttccaacccatactggtttcaggcattctcctgtgttttaggcttcgactggcacagctcaggaaccaccactacaacattgggagcccttaaagcttccctgagtcctgaggaacacggcatctatttgagtgggggcaaaggtgccaaaagcagaaagacaccgcaaggcattgaacacgccggggaaatcttcaatctaaagaccgaaacgactgaaaagctggtggaaactagtaagctgtcggccaagatcgacaacagctgcattcaggacggctacacgctgtaccagcatgacttcttcatcactgagaaaggggactgggctgtggtgcagcaaggactaaacacctacacaaagtacgccagacgatatcattggctgggttctgaagtggaggagcttctgaatgacccccattccgggatttcatgcgataagaaaaccccagatacacttaacatgtcttcaaaagactccgccaacgctcagaaggtctcggtggatctgatcaacgacaacccaaaccacctcaggcagtactttaagaggaagaatagtcagatgctgctcgacgatttcacaatgcctagccaccaccctatcctcgacatggatattagcgataaggagttcgaagtactgacgcgggcctacgagatacagccggagaattacgaggagttaatactgctgcaggggatgggccccaagaagatccgcgcactcgctctaatctcagatttggtctatggtgagcctgcaagctggaaagatcccgtaaaatacagctttacccacggcggcaaggatggatttccatatcccgttgatcgggacgtgtatgataactctatccaaaccatacgggacgcgctggaccaggcccacatcaagaaggatgagaaacttaaggcaattaaacgcttggacgactttatcctctga

SEQ ID NO: 9620 - DNA, 540 bp, synthetic construct
  source 1..540: mol_type = other DNA
atgaatgtcaacgtgctgcgcctagatcatcggctcaaaagggacaccagaatcaccactcacgtttgcctgactgctcgggccttcggagcaagtaaaatctacctttcgggtgaacgcgatgccaaactcatggagaatgtcagggacacagcttcaagattcggtggaaacttcgagatagagtactccgagtcctacatgggcgtcatcaagaaatggaaatcagacgggggcaaggtggtccacctgaccatgtatggctcccaggcgcacgagattgcccctgaagtacgagaggatggcagcgacatcttaattgtggttgggggctctaaggtgcccggaagtgtgtataaggccgccgactggaacgtgtctgtgacaacccaaccgcacagcgaggtaagcagcctggcagtctttcagcatctgctgatgaacgggaaggaatttgatctcaagttcgaaaaccccgttttggaggtgatcccaacggcgcatgggaagaacgtgaatattcacaatgaaaaccgttga

SEQ ID NO: 9621 - DNA, 783 bp, synthetic construct
  source 1..783: mol_type = other DNA
atggaggacgacagctattttgagaatgaagagttttccccaataaaatcactgctggggcttctgaccttctcgacaatcctcccaatcaatgtgtacaccagcatcgagtacatgacaaagctcacgtggtgctggcctttcttgcacgtgttggtcggtatcttagctgctgtgtgtggatacgtaagcttcgaagtcctacatctgaacgccctcttcaccgccgtgattgtgtacgcgtttctgatgctgatcacggggtataaccacttggacggagtcatggacatggctgatggcgtgatggttcacggcgatcccgagcggaagatctccgtaatgaaagatagcagcgtaggggccggtggcgttgccactctgtttctcgtggcaagtctgacgatcgccggattatacaatatcctcgactactatttcatactggggattatagtctgcgaaatggccgctaagactagcttgatcaccaccgcactgctgagcaagcccctcatcccgggaattggctcctactttattaaagagaccacaattgtgaactatctcgtgtccacaatccttgtcatttgcatagcgttcctgctggggaacctaatcggtgtggttggcgtgcttggcgctatcgtggggggcattatcatagcaaccatttcaaagaggaatttcatcctcgccaacggcgatgtccttggaatgagtaacgaaactggacgcctgttcgccctactgtttatggcaattgccctgtatttcatctga

SEQ ID NO: 9622 - DNA, 2115 bp, synthetic construct
  source 1..2115: mol_type = other DNA
atgacgacagaatttatcatccgcatggatgatatgcccaagattatacacaacgacttgagcgactctctggacgtggagtctatcctgaagaaggattacaaatacatttatgaggctatccagaacgagggcttcataatcgaaaataattcaggagaccttttcaaggagatactctttgatagtaaggtggtgggatttgctttttatgaactcaatgcactcactagctttgttctgaacgaggtgtacatcttacctgagtttaggggtaactctttattcctcttggagattaatgtcctccttagcgccggcaacacactcagtattcttcagccaaccaagaaccttgtagagatcctgatccattatgggtttgccagcaagctgagcgaaaacattgtagccagtgccattggctttgatttcaaaagtgaaaatatcctgtccaattccagtgaggagtttgacaatgacgaccagatactgagctccaacatatatgatctggatatccggtcctgcctattccttaaggacatctccactcctgggaaaaatattatttactaccacgaagagcttaagaatgattttaaagaatatggggagcgtaaatccctcaacaagaattacttcaacgaaatcaaagacctcttcttgcaaaacagcgatgaatttacccaaatcctgttcgatctgaaagaagagctgccgaagtctcagctgggctttgatgtcgtcatcggaaatgatgacggcttctcagagtacatgcaggacatcattgatgacggcatcatttcagaggacaaagcaaagaaaattaacaacatcctgaaagaggagtatgagcgaggtgaggtgaccgacgatggcattataacccggctgaacttctttatcaatgatctcgattcgcaaatcgaccctttcaacatctttgaaatcggtgcgaacttgtgcccatactgttgcaacttcataaatctgacagacgaatcatgtccaatctgcggttataacctattctatgaaaatgatttcgatttcgaagatgatgacaactttgaagacggaatattcatcaacaaggacaacgtgctgtccgttatgtccggcctgtatgagcgattcggcagaaaatacaaacttgaagacattaattatggcaagcagtaccccaccagttacgacctcgaccagtaccgcatcttaaaattcattgacgaataccacaatctggaagtggccttctacttcctgaacaatctaaagctgccccaggagatcttcaacgacctgttgtttgaggaggaatacgtgacgtacgaaattacggaagagacatggtctgacttcgcgaattacagcctgaccgtcaacgatctcaaagatattctcagagacaacgggctaagggtgagcggaagaaaacaggaactcatcgacaggatcgggaagtccgatatctctgtgagcgaatttagctccgacaaactgttcctgaccagaaaagggaaagactacttaaacgagtatagctggatcggcctatacaatgagtttttgaagaacttcgatttcgacgacttttaccggttctacgagtctaacgacggaaacttcaacgagattgtctccaaatatcttgacgagcacatcaagatagctaagaataacaaggatttcgattatttgataaactgcttctcatcgaaggcaatctttagcgggctggacaagaaccccaatgacgcactgaagtgggagatgcgcaggttctgtctgacaatcaacccgatctacagccggggggtgtatcatgatttctatctgcacctgaatagtgagaacatcaacaacctccgatccctcaaagacgagttctcaagtgaggagatgttggactcgttcgaggagtcttgggactactttgaatttaacaagtccattgtttcgaagaaggacgctaagattatttttgaacggctgctgattaataatgaggatttgaagctcattaacatggagcttaaggacaggtacagcggacgcgacgccatcgataatactttctcagccgatctgaatgactattttaagtga

SEQ ID NO: 9623 - DNA, 1083 bp, synthetic construct
  source 1..1083: mol_type = other DNA
atggagctaaatatcacgaagaaggattatggaatctgtataaacaaccccaaccacttcctcgcccttagtgacttcacagtcagtgatgggattgatattgtcgagaacgtcaatgtggtgaaggccaaagacgagttcaaagccactgccaaaaaagctgaggcattcaaccaatccaaaggttcctatattgctcaggctagcgacagcatcgattacttccagaacaattatgacgacctgaccatctttacattcatggcaaatgatgttgttatcgaagacttcaccgagtacctcaaggtcgccaactcgcccaaaggcttctttgatgccagaattaacttaagccacatcatctacatcgacagcgtggtgtctccaaaggacttgctgaagatctttaagatagtgacgaacaccaaagcaaaggtcctggctaacatgtgcctgccggcgcacatccagaacataatcaacacaaatgacttcctggccgtgctctccaacattaatgtctctgaaagtcaagaccttgacattaacaacgccgagtatgaagaaatagattgggatgatctgaaaatcaagatggaagatgccgtggaaatctccctggaggacgcatttagctacctggaactcacctttggaattttggactatttggtatcagagggtatcttaattggagaccttgtggacaccgggatggagctcgcaaatggggtgaagataactcaggagctgcgggataagatggagacccagatccttaagagcctgacagacatcaatgtggtttccctaattatcgctggcatgcgcatggaacaggatctgacgggcaatcacatcagggagtttgatgtgcatgacgactcagactacctctacaccgacgaagtattggggctcgctatttcaaatcagattgccgggacaaaagcaactttcaactttaagcgataccatgaggccaagccaggcattatcgcgggactgcctcccatcctcgacgatatctttgccggcctgattgcgggctgcatgagcaagatattcgaggagctgctgtga

SEQ ID NO: 9624 - DNA, 1170 bp, synthetic construct
  source 1..1170: mol_type = other DNA
atggccattatcattgaccctcaagtaagcggcattgccggaaacatgctgattggcgcgttcgtggacctgggtgcagatgccaacaaactaaaggaagttatggagaaatccgcagagtgcttcgggaaggtggaagttacattcaaaaagataaataaaaagggaatctcctctacatactgccatgttgagatgctggaacacaaacactccatttgctatcccaagttcattgaaaagattaagaagctggacctggacaaaaaggtgaaagagacctcaatcaaagtatttgagcgcatcgccatcgcagagagtaagatccatggaaagactctcgattccgtccattttcacgaggtaggggccagcgatgctgtcgccgatgttatcggctcaatctacgcctattactcccttaacctggacaatcagaaaattatcggcctcccaatcgccgtgggagggggccgtgtcgagactgcacatggcattatacccgtgcccgctcctgctgtcgtggaggtcctgaagaacgcaaagatgattggggggccagtggacagtgaactggcaaccccaactggagccgccgtgtacatggagatctgtgatgaaatcaaagagtttatacccctcattaaagcgaaaaagaccggttacggtgctggcaagaaggactttgaccaccctaacgtgttaaggatcatcgaaagcagcgatatcgcggagtcggacaagattgatgtgattgagaccaatatggaccacttgaccggggaggaaatcggctacttgttcgacaaactcctagacattggtgccagagatgtcagcgtcacgcctatcattatgaagaagaacagacccggcaatctccttaaggtgatctctcggaaagaaaacagggagaaagtgattgaagccatcttcaaagaaacgggctcgttgggcatccgaatagctccaaatatgcaccggggaatctcaaagagggagtttagcaagcagatcttcaacataaatgataaggactatgaggtgacattcaagatagggtacctgaacggggaaatcatctctaaacggccggagtatgaggacctgaagaagatcgctcaggatagcggacttccgctgaaaaagataagtgagatgatccgctga

SEQ ID NO: 9625 - DNA, 678 bp, synthetic construct
  source 1..678: mol_type = other DNA
atgaaaaaggctatctcaatcttttccgggggcctggactgtactgtggcaacaagcgttttctccaagagccacaaaattcacgcgatcaccttcaattacggtcagaaagccttcaaaagagagttaaaggcctcaaaggagatctgcaagaagatggattggactcatgaggtcattgacctcccctggctagccaatatcagtaactcgagcctgaataccaatgagaaaatccccgagcttagcgctgaagatctcgacaacctgaagataagtcaagagtccgccagtagtgtgtgggtaccagccaggaacacggtgttcacctccatcgccttgtcttacgctgaatccatcggcgcaagcagcataattgtggggtggaacggcgaggagggagcgacatttcccgacaactcaaagggatatatgaaaaagtttaatgaactgatcaaggaaggcagccctgaaaacatccgcattgaggcaccactcattgatctggacaaagaagaaattgtgaagctgggagtcgagtatgatgctccgatggagcttagctattcttgctacaaaggcaagaagaagcagtgtgggatctgcgaatcctgcatgcggcggaagcgagccttcaagaacctgggtataaaagacaaatcggagtacgagaactga

SEQ ID NO: 9626 - DNA, 999 bp, synthetic construct
  source 1..999: mol_type = other DNA
atggccaaagaggaccggagtgagataaacccattcaccggtagaaagcattatgataagattaatgatgacaaattcctcaaggagtcatacaaggaatactacagcatgatcgatcaggtacaactcctggataacactcagaatggccagatcgtcattaatgtggcgctgaacttaatcaacgccgtcaactcctatctttcggagatcggcaggctggactacgtggaggactactatgactgggacgtgcacttggttggagataacgctgtaaacgctttctgcatgcctgggggtaagattgtgatgttctccggcattctgagcgtggccaataccgaagaaaagatagccttcatcctgggtcatgaaatggctcacgcccttctggaccacgctcgcaccaggatcagtgctcagaatactcagaacgccataacgtccgcagcctggattggctccatcgcaatggatttttttggccttggggaactgggcagtctaacacgggccgccactaacgttgcaagcatcgggtctcagttcctcctaatgaatagttggggaagggaccaggagctggaagctgacagactgggcatgatgatcatccactgggccggttacgacgtcagccgcattcccgcattctggcgagatatgtcaatgcaaaattctaacgagcatgacttcttttccacacaccccgcagatagcaaacgtatcgcgacgatgcagcaattgatcgtcgagatagcaaacgacaatgatttctatagcaaaccagtcattggggatgtgaatcagaccaacgtgaagtcggtttcttcagagggggggttctgttcaaactgcggaaatccggtggacattgacgcgaaattttgcacaagcagcggaaccaagctcgatgtgggactccggtgtcccaactgcggctccgccgtgggaaacaatgacgtgttttgtatcaactgcggctttaagctgtga

SEQ ID NO: 9627 - DNA, 999 bp, synthetic construct
  source 1..999: mol_type = other DNA
atgaaggacattttcgataacgtgcagttcggcgacctgaaacttaacagccggatagtgagaacaggtacgtgggagacggaaacctccgaaggaggcttcctcacccctgacatctatgatcgctatgaaaagatcgccagcagtgggacagggctgatcgtctctgagatgttcgccctggaccacaaggatagattttacccttattcaaccaatatgaactacagggggttcattaaggattaccagatggtcactgacattgcccacaagtatgacgtgccaattttcggtcaattggcattcttctactatgatgacggcgaaaatcagaaggtagaggcgaatgatatcgctcaggagggcatcaggaaattgcaggccgaggtaatcatggcagctaaaaagttcagctttgctggattcgacggaatccagatcaacatggggaataacttttacctatcacgcttcatgaacccctacttcaaccaacgggacgataagtacggcgggaatactgagaatcgggtccgaatttcagctgagataatcaaggtgatcaagaagaccatggacatccacgtgtcctgcaggattaatccgtgggatgccagaaaggacggaatgaccgccgacgagtcgatcgcaatcgccaaagaacttgaaaaagccggcgccgattccattcagctcaccgcacgcacaattagccagatttacgataaaggcgagaagcatccatttctggtgtacgttgaaaaactgatagacgcagtggacatccccgtggttttagggggctctctgcgagatatgaaaacaataaatgatgtgctgaacagctcgacggtggagtatatcagcatgtccaagccctttgttgcccaggcggactttctcgctgactggaaggcgaacggtgagggagtcagcgtctgtcaaagttgtaacaactgctactccaagaaaactagtacctgctttaaattttga

SEQ ID NO: 9628 - DNA, 216 bp, synthetic construct
  source 1..216: mol_type = other DNA
atggtgaatccaattatcgccgctattatcagctttttcctgcccggcatagggcagatcatacagggagcggacgtgaagaaaggcatcatcatgttcgtaattgctatcattcttggctggctactcgtcaacttcctcgggagcctgggaaacattatatactgcatctatgccctgtatgcagcctacgatgcatacaagatcgaggcctga

SEQ ID NO: 9629 - DNA, 1716 bp, synthetic construct
  source 1..1716: mol_type = other DNA
atgatggcaaaggtaaggttcacagaaaccgcactgcgggatgcccaccagagcctgcttgcaaccagaatgcgcaccagagacatgatccctgttgcgaaggagatggacaaggtcgggtactttagcgtagaggcttggggcggggccacgtttgacacgtgcatccgttatctcaatgaagacccatgggagcggctgcgccagctaaagagcgaatttaagaagacgccgattcagatgctgctcagagggcaaaatctggtgggttataagcactaccctgacgacattgtgacaaagttcgtggagaaatcctacgaaaatggtgtggatattttccgagtcttcgatgctctgaacgacgtgcgcaacatggagaaggcgataactgtggctaaggaccagggggcgcatgtccagggaaccattagctataccatatcccccgtgcacactatagacggctttgtcgatctcgctaagcatcttgaagccctggattgtgactccgtggccgttaaagatatggccggtttgataacccccgcagccgcctacgagctggtcagcaagttgaaagaggagactgatctactggtggatctccattgtcactgcactagtgggatgaccccaatcagttattacgcagcctgccaagcgggcgttgatatcctcgacactgccatttcacccctcgcatggggaacaagccagcccccaacagaaagtatggtggccgctctacagggcaccgagtttgataccgggctggatctcaaattgttggcttctattaaagaatacttcgaggacatcaaggagaaatatctcggcatccttgatcctatcagcacatccatcgacgctgatgtattactgtatcagattcccggaggaatgctgagcaatctgatttcccagcttaaagagcagaatgccctggacaggtacaacgacgtcttggacgaaatgcctcgagtgcggaaggacatgggctaccctcctctggtcacgccaacatcccaaattgtgggcatacaatcggtcatgaacgtgctgggcggggaaaggtacaagacagtgtctaatgaggtgaaggattacatgaaaggaatgtacggcaaaccaccagcccccgtggacgagaagctgtcgaaaaagattttaggggatgaggagatcatctcatgccggcccgccgacctgctggagccggaatttgacaaaatcaaagcagacggtaaggagaagggattcgttaaatccgatgaggatgcgttaacgtacgccctgtacccccccatcgccccgaagttcctcaagggagagactgtagaggaggaacttaaggccccccacgcattcagtgaggacgaggctattggcatcccaacccagtataacgtggaagttgacggagacatgtatgaagtcaaaatcatgcctacaggcttcatggagatcgaagaggctgataatggtaacttccacccggtggaagggggagtgactagctcaatgaacggcatggtaatcaaactgaaagtgaacgtgggggacaaggtcaccaaaggatcaaccatatgtgttattgaagctatgaagatggagaacgacatccagtctgaggttgacggtgtggtggaggaaatctttgtcgaacctggcgatgccgtgaacgccggcgacaccctcatggtcatcaagtga

SEQ ID NO: 9630 - DNA, 1095 bp, synthetic construct
  source 1..1095: mol_type = other DNA
ctgaataaaattaaaatagccatcgtgggaataggcaactgtgccagtagcctcatccagggaatacactactatgacggcaagaaccccgaagacgcaatagggctgatgcattgggacatcggcggatacgagcccagtgacattgaggtggttgcagcttttgatgtggacgctcgcaaagtgggcaagaccattgacgaggcgattttcgctaaaccaaactgcacaacggtgtttcaggaggacatccctaagtacgacgcgaaagtatccatgggccacgtcctggatggggtggccgagcacatgtctaactacgatgatgagtacaccttcgttgtctccgacgaagatcccgtggatgtggtcgaagtcctgaaggagtccggcgcagagatactagtgaattacttgcctgtgggttcagaaaaggcagcacgctattacgctcagtgcgctctggacgccggggtggcctatgtcaattgtatgccggtcttcatcgtcagcgatgacgaatgggacgtgaagttcaaagccaaaggaatcccaatcgttggcgacgatattaaggcccagatcggcgccacgatcacacaccgaacactagcgagtctctttatggatcgcggggtaaaactcgacaagacctatcagatcaacaccggtggcaacaccgactttctgaacatgctgaaccgggaaagactggactcaaagaaagaaagcaagactgaagccgtgcaatcagttctgaaggagcggatggacgatagggacatccacattggtccgagcgattatgtgccatggcaaaatgataataagctgtgcttccttagaatggagggtcgaacatttggggacgtgccaatgaacattgaacttcggctctccgtcgaggacagccccaacagcgccggatgtgtaatcgacgctgttagatgctgcaagattggattagagagggggattggcggacagctcacctccatcagctcttacactatgaagcatcctcccatccagtacactgatgatgaggccttcgagaatgtggaaaagttcatctcgggggatttggagaggtga

SEQ ID NO: 9631 - DNA, 846 bp, synthetic construct
  source 1..846: mol_type = other DNA
atgaatccatatatagagattctccgccccggcaacgccttgatgggtgccatatccatcatcctcgtggccctcattgataagaccatctcaatccccgtaattcttgctatgattgctgtcttttttgaaaccagcgcgggaaatgtgatcaacgattactttgactacaaaatcgatctcatcaacaagcctgaaaggccaatcccgtctggccggattagtctcaagaatgggagaaactacgggtactcactgtttgccgctggcaccgtctgtggtttcctgatcagctacatcacgaacaactggattccatttggaattgtcctgttcgcagacatcatcctttatctctatgcatacacattaaaaactacacctctgattgggaacctgaccgtggggttcatgaccggcttcggattcgtgttcggcggcttttccatcaacaaccccaatattataataacttcgctgttcctgggcttttttgcattcgttatgacaacagcccgggagatcgtgaaggacatcgaagatattgagggagacaaaactgacggtgcgaagacgttaccgatcctgattggggagaaaaaacccgccatacttgccgctatcctgataatcattgacagtgccttgtgccctcttctgtattactaccacatcttcggaatcttgtatctcgtagtgatcgcctttgctgtcatgctgttcatctactccgcaattctgatcctgaagagccagaagcgagagatcgcggcaaaggttagcaaaaatctgaagattggcatgctaattgctttcgtggccttcatcttcgggtctctaatatga

SEQ ID NO: 9632 - DNA, 1578 bp, synthetic construct
  source 1..1578: mol_type = other DNA
atgtttaaggagttcaacatcaacaggaaggacaagtactatctgatcgctatcctgatcttcagcgcaattctagtcggctattatattaactttaataatgcaataggcatctcatgctcagatgtttatatttacctcatcaactctctgtattacactggtgaaaaggtaaacatcacaaactttatccatatttctccggttgtctgttttctgacttctctgttttttagggtggggtttgtggataaattggctatctatgttgttactggttttttcgcgatcatcggcaacatcgggttctacttactgctgaaaaagtttttcaacgaggagttgagcttgaccgggacgatactgtactcctccttctcgctttatctcatctggcttgcaaacggcacactggacatccctgcaacgggtgtgatcatctggattgccctgtttacaatgattgccgtgcgagagaacccaaagtactaccagtacctcatccctctgatggtcatcggcctctacacccggtacaccgtgattctgaccctccctgccttcttcttattctacgtgctcgagaacgggttcaagattaagcccgaagactggaaatacattaagcgcggaatcatcatcgccaccatcatagctatcacagtgttcctaatagtgtttactatgggaaatggccggtttgacgccgcttcccagatggcgaacggcgtaaaggggacaaatggagagctcaccgatcccgcctacaatcccgatagttcctattactttatgaattatatcaattacatttcaaatagccacactgtcttcgagataaacccgaccctgtactcccctacgatcctggcctatgctatctacgcattgctgtttattggggccgggttctggctgtatgaccacaaaaaagtcaactttagaaaaacagatgcgattagcattatcataatcctcatgggtatcataagtttcacccgcgtgaccagcgtgattacgtccattctcatttacattggaatttatctgctcgccagagacagggagtataatgatggagtcttcatgctgggctggatcttggcaaatgctattttcctgagcttcaacatagtgaaagttaaccgttacataatccccacattcccaccattcatcttctttgtcttaacggccattgagactattcacgcgcacgtcaagattaacaagaacatgatacccctagccctgatagtactttttgtgattcaggctttcgccttcaccgccaccgtggaaccaacagacaaatacatgagtcccgaagaaatctcgaactacataatcgacagcaatccggactatgagaacatgaccattggagtgtacaacatccggccatacagctggtgggtgggctcaaataccatcggcatcccttccagccatcaaagtgaaatcgagcagagcaacattagttattacatcgtgaacaagcccatggacaaccttaccaacttcactgagatcaaaaatatcaatgaactttatctgtacaagaataataatttctga

SEQ ID NO: 9633 - DNA, 1575 bp, synthetic construct
  source 1..1575: mol_type = other DNA
atgttcaacgagttcaacataaataagaaggataagatttacctcattgctatccttatattcagtgccattctagtcggctattatatcaacttcaataacgccattggtatttcctgcagcgacgtttatgtttatctcctgaatgccctttattacaccggaaccaacgtacactcaatcgacaacatcttcttgtctccggtggtctgttttctgacttctctgttttttcgcgcggggtttgtggataaactggctatctatgtggttactgggttttttgcgattatcggcaatattggtttttaccttctgctcaaaaagttctttaacgaagaactcagcctgaccgggacgatactgtactcctcattctcactgtatctgatctggctcgctaacggaaccctggacatccctgccacaggagtgattatctggatcgccctctttaccatgattgccgttagggagaacccaaaatactaccagtacttgatccccttgatggtaatcggactgtatacacggtacactgtcatcttaaccctgccagcattcttcctgttctatgtgctcgagaacggcttcaaaatcaaaccagaggactggaaatacataaaaaggggcatcatcatcgccacaatcatcgcaataacagtcttcctaagagtttatgggatgggcaacgggcaattcgaagccggctcgcagatcgccaatggggtgaagggaaccaatggcgaactcacagatcccgcctacaacccggatatcagctactatttgacgaacttccccaacttcatctccaacagccatactatctttgagtcgaatcctgtcctggaataccctaccccattaagctttgcagtcttcgcactcctgtttatcggcatcggattttggctgtacgacaataagctaaaggctgagaagagagatgtgatccctgtgattttgattctgattggcatcatcagtttcacacgtgtgacctccgtggctacaaccctccttattctcattgctttctacctgattgggaaaaatagtgagcataagaatgagctgttcatgcttatttggatactggctaatgccatcttctttagctatcacatcattaaggtgaaccgatacatcctgcccatagtgcccccattcatctttttcatactgctcgcgatcaacaccatccctgagcacatcaacatcaacaagaatgtgattccgattgtccttatcgccctgttcgcgattcaggctttcgcattcacggcaacagtggagcccacgaacaagtatttggcaactgaagagatatccaattacatcattgacagtaaccccgactacgaaaatatgaccattggcgtgtacaacatacggccctacagctggtggattggtccaaacacgatcattcttcacgccgacgcccctggagagattgaccagtccaatgtcagctactacatctcacagagccgcatagataacctaaaaaattttactgaggtaaagaatagcggcggtctgcacttatatgaaaacaacaatttttga

SEQ ID NO: 9634 - DNA, 1545 bp, synthetic construct
  source 1..1545: mol_type = other DNA
atgaaggtggtctgctgcaagaactgtggtgcaaagtaccagctcgacgatgatgatgacatatccacattcgagtgctcttcatgtgccggggacctcgagtacctcgagaactattctaacggcaaagagtctaatcaatccttcgttagctccactaaatataatgactcatacatcgtacaatgtcaggaatgcggactgaagtacaaaattaaaagtagtgacagcatactggactacgaatgcgacagttgcgggggatctctgagatacctcgatgacgagatgaataaggagctggatagctacctggaggagagacacgccgagctgcagaacatcaggaaggaatccaaaccgaaggagccaacttctgaggaaatcaacacagaagacaacacccccagcatcaagtcgattaccgataagctggagaacttcttctccgaggagcacatgttgcagatagccgatatcgagaagaaggaggaggaagaaattcaggagcaggtcatcagcaaaacagcccgtaccaccataccccaatccgtgctctcccgctttggcaaggagtttgctacgcccaagaccgaggattacgacatcctaaagaatttcctgaagacagaatttttcaaaggcatggatgaatactatccaaaagacaataagctaaagtcgaacaaaagctttcttgataaaatcagccttaaggaacccgataacggcgagtcaaagcctgtcaagagttccatcataaacaataacagcaaattcaacctggaaaactttaacgttgagaacatagagagcaacaataccatcattatcatcggggtagtgattttcatcttgagcattatcgaggtgctgaccatcaacagtgggatcggaattattgcgctgttcatcggagtgattattctttgttatggaatctataagacgcgcgacgtgaagcaggacgaggaacggacaaggattatccgggagcacttgttaagtctgcctgaggagttctacgtcttctacaacgttaaaatcccaacgtccactagcggcatcaatcatgtggtggtcggtccgaccggcatctatgcactgctgtcacagaaatataatcccaagctgcgattggagtcggagaacgaaaatctcaatctcattggcagcagtgaatctgaggaaaacaaactggaagaattttcaagctatgggaatatgcggaaatttaggtacactacaaaacaggctaagttttcccaggacaacaaagtgaagcagaaggcgttgagcctaggtgaagatctcataaacttcctcaatgaaaataacattaagaattgcttcgtggaaccactggtaggcttcatcaacaatgaggtcgtggttatcaacatgcctcttactgacgaggatctctttattgaggaactgctgaataagatccagaataccaccattaaattagactctgaaacgatcgacaagtgtgctgtgcttattaacaaatactctgccgactgctcctcagagttttga

SEQ ID NO: 9635 - DNA, 1002 bp, synthetic construct
  source 1..1002: mol_type = other DNA
atgaagctatttaacaaataccctttcctgattggcgagatcagtttcaattactacgacctggctaaaaaagaggagttaagctactttcgagtggcgaaactcctgatagagaagtgtagtgagtgcggaatcaatggagtgaatttccatgtgggcgactccgaatacctgcattgcaaatatgaagaagattccaaccagaccgaccagctcagttttgacgagtacaaggagctggcggagtactgtaagaaactcggtctggttttcattatcacccctgccaacatcgaaatcgtggacaagttgaacgacgtagtggacgtttataaaatctctagttctgatcttacgaatctgccacttattgactacattagcaacaagcacaagcccatactgttgtccactgcagcctccaacttacgcgagatcaagtctgctgtgaagtgcatcgaagacaactctaacttcaagattatcataatgcacagcgttctgagctaccccacaaagctcgaggacgccaatctgctcatgatcaaggacctatcagaacagttcaaggattatgatgtcgggtactcggactataccgtgtccgataattttatgttcatcttgaccactgcctaccagtacggcgccgtcgtgctggagaaatatttcacactggataagtcatttgagggacacgaatttgccatggacgaagaggacgcacggatcgtgcggctgagtgccaacgtcctctcgaagatcaacggctataaaaataaacaaccccttatctgcgagagcttctcaaagaggaatgtcagaaaaagcattgtcgcaaagcgcgatatcaaaagcggggagataattgacaactcaaacatcgacttcaaaagaccgggcgtggggatttctccaagcaaggtagatgatattattgggaagaatgctaacagggatatctccaagggtagcctcatagaatatgatatgctgtcctga

SEQ ID NO: 9636 - DNA, 1665 bp, synthetic construct
  source 1..1665: mol_type = other DNA
atgttcaacaataataagatcctggtcgtgattccagctaagggggtgagcaaggggattccccgcaagtatgtgcggctgctgaacaacaaaccgctcatttactacgccatcaacattgctaaatcatcccaatacgtggacgacgtcgtggtaactacagatgactctgaaattgcatcaatctctgagaagtttggcgtcagtgttatccgccgtagcaaggaactctccggagaggatatccccttggacgcggttgtgttcaatgcgatggttcaaaaggaaaaatcggcatttgatgagtacgacatcgtaattacaatgctgccgacctcccctctgcttaaaacccagaccttggataatgccatcgaaaattttgatgattttagccttgaaagcgtgatctctgtggtcgaggacaagcagttgttctggggctatgacgacgacaacaaaatatacttccccaagtacatcgagagatgcaatagaaaggacctacccagttccttccgagagaccggcgcaatcatagcgactcggcggggctttatcaacgagatttcgtgtattggggaaaatatcgacgtgatcgagttatccgatgaggaggccattacagtggatgactttaaagactggtggattgtggagacaatcctccagaggaagaggataggaattgtagtcaacgccaataacgaaataggcacgcgccgaattgacaactgtctggccttcgcaagcaaactagtttctcatgagttcctatttatcctggatgaaaagcacaagctgggacaaaacctggtggaaaaattcggcttcaacttcaagatctacaatgggcacgatgcaatctacaacatactggaggagttcgcccctcagatcataatcaatgatgtcagtgacactacggaggagtacatgtctgatcttaaggagagagggtatttcgtagctaacttcgatgacctcggcgtggggtcaaacctcgctgacgtggtatttgattcactgtacgagcatgatctgagtgacacaaacgtttatacgggacagaagttccatattctgaaggacgaattttacttccagcctcacaaagtcattacccaggacgtcgacaatatcctcattatggtggatggcaacgatccaaagcatctctcggaaaagtttctcgaagccatcctgtccactacctacgagatgaaaataaatatcatcgtcggtaggggatatgagaacattgaacagtttatcagcaactacgaatccaatcccctggtgcagatttatcagaatgtgccaaacgtcagcgattttatgttcaaagccgacatactcgtgactagcgccagtaaaatcatgtatgacgcttgcgccctcggtgtgccaaccatctgcgtgtatcaaaatgatctggaaacctcccacgttttcgccaatagcgcaaacggaatcttaaaccttggtgacgttgagtcactgacaaagcaggagtttgtgaaccagttcttggagctggtgaacaatcacgaccttaggttgaacatgcacaacaaaatgaagagcattgacctgcagcacggctacgaaaatatctgcgctgtggtcaccgaggagtatcggaagttcgccatgaacaaatga

SEQ ID NO: 9637 - DNA, 1050 bp, synthetic construct
  source 1..1050: mol_type = other DNA
atgaatatgaagagcatgagcgacaagctcttaaagaagataaacgagctttccacaccggtgaagatcatgcacgtttgcggttcccacgagcataccataatggagaatggaattagaagtctgcttccagatgaaatcgaaatcatcgccggacccgggtgtcctgtgtgtgtcgtgccctctcgggagatcgatgaggctttggaactgattgatcgcggcgttacaattaccaccttcggagacatgttgcgggtgccgggttcagaaaggtcactggcagatgcgaaggctgagggtggcgacgtgagagtagtttacggcatcaatcgggccatcgaaatctctgagaaggaggacaacgatgtggccttcatcagcgcagggttcgaaactactgcaccaaccactgcggccgaactcttggccacaccccccgagaatttctccgtcctctcatgtcaccgactgataccacctgccatcgactttctgattaacagcggggagaccagtctcaacgctctgattgagcccgggcatgtgtgcacgatcattggcactcggccgtttgagtatttcagcaaagagtttggcatccctcaggctgtcgcggggtttaatcccctggacatcctgatgagcgtatatatgatcctgcgccaaattcacaacgagacacccaagatagagaacgaatacacccgcgcagtgagagaggagggaaacacgattgcccaggaaaaaatgaaccaggtcttcgaggtgacctccagggagtggaggggatttccaaagatacccaactccatcctcgaaatcaaagacgagttctcggaatataacgcccgggaaaagtacgacattgaagtgaaagatgtgaatgaagcacctaaagggtgcatttgcggccctattctacgcggactggctcgaccagaggactgcaagctattccgtaaaacatgcaatccacttcatcctatcggcgcctgtatggtcagtaaagagggcacgtgcaacatcgcccacagatacagcaggtga

SEQ ID NO: 9638 - DNA, 705 bp, synthetic construct
  source 1..705: mol_type = other DNA
atgacaatcgaggccatcgcagttgacatcgacggcacgataacagatgagaaaaggcagatctgcatttctgcgatcgaagccctgcgcaaagcagagagcaagggaatccccaccattattgtcacaggcaatgtggtgaactatgcttatgcgaccgaggtcctcattgggtgcagcggcggccttgtagccgaaaacggtggggtggtctttaaggaaggggaaaacaacaatgctgtggagacactggttgaacgggccttcgtgacctcggctgaggagcacttgaaagacaagttaggcgacaagtttgataagcatgcctcccacgacaacatgtacagactgaccgagactgtcttctataagacgctcgatatcaaagagctggaagatgccctgaaggattttaagtacctcgacgaactggagatctacgacagcgggttcgcactccacatcaccgacaagcgggtgaacaaaggaacttcactaaaatacctgtgcgagcgaaatggaataaacatggagaacgtgatggctatcggagatagtcaaaacgacgaagatttccttaagcaggccgggtacaagatagctgtggcaaatgcggaggacaaactgaaagacatttccacctacacttgtgagaatatgttcggcgatggtgtagccgaggccattgaaaagtttgtgttgtga

SEQ ID NO: 9639 - DNA, 1314 bp, synthetic construct
  source 1..1314: mol_type = other DNA
atgatctacgagatagcccaggaggcgaaaaaggccatagagaacaattgtgacgcctatgagatctacattgatgagtcgaaatccatccagctcgactcccgaaaggaggaactgaattttgcaaaggaggagatcgaccggggcgtcggcatccgcgtcattaaggacaataaaatcgggtttgcattcacgagcaacatggataagattgctgaaacagccaaacactccattgaaaacacgaagctgaacaagactgacgagaattacgccttcgctgaggtcgaagaaatccccagtgtgaagaaagtctatgataagaaattcaacgaactagaccttgatgaatccattgaatttctgaagaacaccatcgacaccaccatcgaccaaggctgcgacatcactgggtccggctttagcgccagtgagggaaagtcccttattctcaactcgaacggggtgtccattgaggatgagggtaccggctttagtatcggacttagcgtaaatatacagaaagatggaaaaatcgccacagcgtacaacagccagagctcaaggttctttgacttggatggggagaaactggctatcgaagtgtgcaatcttgctaaaagtagcctggatacaaaacccattgagacgaacaactatgacgtggtgctagactactacgctgcgaccggtctgctgcagacattcatgaatgcattcaacggtgaaaatgtgatgcggggaaggtctatcctcaaggataagatcaacttccagatcgctaacccgaatttgagcataattgacaacccactcttagaaaagggcatgtatacctcaaagtgcgacggggagggcatcgtaagtcagaaaactgacttgatcaaggacggcattctcaattcattcatctatgacatttacaccgccaacaagagcggcgtgaagaccacatctaacggtctccgcgggagctacctgacaacccctatgatttcccccaccaacctcgagttcaagtttagcgatatgaaggacctgtcagagattaaaaatggtgtgttaactacgagcgttctgggggcccatactgccaatccaatctcgggagatttctcagtggaggcaagtaacgcattcaagatagaaaatggggagctgagcgagcccatcaataaagccatgatcagcggcaacatatttgaaatcatggagaaagtcgaaggattgcaatccgagataaagcagtacggcccattcatcattcctaagctgctggtgcacgatctgagagttgttggacagaaccaatga

SEQ ID NO: 9640 - DNA, 252 bp, synthetic construct
  source 1..252: mol_type = other DNA
atgcccaagaatgaggagttcgacctggacaaagagatcgaacggatttcccgcaaaacaaacattaatatgcgaaatagtgagttctccttcgagaaccagatcagaaagctagataaggaaattgataagatcatggaagacaaactcaaagagtttgacgataacaagaagctgacgtcagattactttagcatcgactataacgaatctaccataagccggtacagggagaaactgaagaagatctga

SEQ ID NO: 9641 - DNA, 462 bp, synthetic construct
  source 1..462: mol_type = other DNA
atggagagtgaggtgaaggtcatcccagaacagaagttggccgtgatcaattgtaaaactcccatcaccgatctagagattttcctgtccatgctgatggggtgggtggacgcggaagagatcgagacagccggcgagccgttcattgtctatttctcgcctaggcatcaggtcaataagggggacgcagtatttgacgtcagcatcccaattaaggaggacgctaacgaaacagatcgcatccgggttgtggacatgatcagcaacaaagtgctgtccggtattcactacggctctgcagacagcataatggaaacctatgagaaactcgtggacatcgcccaggaaaaccactacgatattatcggatcacccaaagaagtgcttataaagaacgttcacaattgcgatgatgagaaggagtacataacggagattcaactccccatcatcgaaatgtga

SEQ ID NO: 9642 - DNA, 1224 bp, synthetic construct
  source 1..1224: mol_type = other DNA
atggggaccgagtttctgaagatcaaggagtgcgatgaggccaccgagattattcagaaactgttcgacgagaagctcaatcaacagagtgaagagatactggttacagagagctacggaagaattttattcgaggacgtttactcaaagatggattttcccccctttgataaggctctgaaggatggatttgcaatccttgcggaagacagtttcggagcctccgaagaaagccctaagacattggacgtaatcgatttcttagaggcaggtgcaaccactgacaaaaaggtggagaaaggcaaatgcattgagattagtaccggggcagccatgccggaaggcgccgagtctgttgtaatggtggagtatgcggaaaagtccgacggtaaagtgaatctcctgaccactgccacacctacacaggatgtggcccggaagggctccgacatcgaggagggtaagctgatcctgaaaaagggcgatttcctgaaccccgggaagatcggcgtcctgcttagccaggggttcgagaccatcgaggtgtacaaaaagcctatcctcggagtgatctcgagcggaaacgaaatctcccttcagggcgaaggattgacctacgggaaaatctacgacgtgaacggaggcatgattaaaaacgccgctatctcctgcggcgccgacgcccactttctcggcatcatgagggataactatgacgaagtgaaacacaaaataacggacgctctaaaagaggcggacattataatttgttcggggggcacttctgccgggctcggagacgtcctgaacagcgtgctcgaggaactgggcgaagtgtacattcacgggatctcagtgcaacccggtaagccaaccatcatcggcgtcatcgaggataagctagtcattgggctgcccggcaatccagtgagtgctctgatgatattcaatgcattcattgcagaaccgctgacaaagctggctggaattgataaggacttcgagctggacacggtgaaaggcaagatgactcggcgcatccattctcctgttggacgaatgcagtaccagctcgtcaaggtcgatggcaaggacatccatccaatatttaaagactccggtgccatattttcacttagcacggctgacgggtatgtcaaggtcccaaagagcgtggaattgctcgatgagggtgaagaagtagaggtgtatttgttcaactga

SEQ ID NO: 9643 - DNA, 306 bp, synthetic construct
  source 1..306: mol_type = other DNA
ctgagcaagccgaaccagaatcagcagcaggaatatagacgcgtgaggacgcctaagaaaggtgagattcccggggtcgtcgagcaaattatgggccacggaaagctaaaggttcggtgcgcagatggcaacatgcgaatgaccagaatccccggaaagatgaaaaaacgtatctggatacgggagggggacgtgatcctggtaaagccatgggatttccagtccgacgaaaaagccgacgtgatctggaggtacaccaaaacagaaagcaactggctggagcgcaagggctacctcaagatgtga

SEQ ID NO: 9644 - DNA, 771 bp, synthetic construct
  source 1..771: mol_type = other DNA
atggactcgaagatagccaaggcagatgccaagcatgaaaagctacattcccagaagcggaagaaggatagttcagacaggaaagtggggaacgagattttcgacaagataactttggaaacactatacaagcttgcgaaccaggggcacatcgatatcctgaacggtgctatcagcaccggaaaagaagccaacgtactgacaggcattactgacgatggcaaatttatcgcagtcaaggtgtatagaattgctacgagcgactttaaaaagatggattattacctcaaaggggacccacgatttaacctgaaaaccaaaaacaagagaaaaattatttattcatgggtcacaaaggagttcaaaaatctgacccgcctggaaagcgccggcgtgaaggtccctcacccaatcaccagtgcgaacaatgtcttgcttatcgaatttatcggagatgagaatggaaatcctgctcagcccgttaagaaccaaccacccaaaaatagcgaggagttcttcaagaagttactcataaatctcaagctgttcgtgaacgaggccaagctcgtgcacggcgacttgtccaattacaacatcctgaacaaagacgaggagcccgtaatcatcgacgtcagccagtctgtggttcttgataatccgatttcccgcgagctgctggagagggacattaacaccctcgtgcgtgaatacacgaaactgggtgtgaagactagcttcgaggagatctgggaatacgtgaacccccggtga

SEQ ID NO: 9645 - DNA, 249 bp, synthetic construct
  source 1..249: mol_type = other DNA
atggaaaccccaccctgtaagagcaagatcaaccgcatcccgaagccacctagcgccaagatctgcgtcaaacatagtcaaaagaaaaaacacatgacgggcatgaccaaattttaccggtcctacgacttcgagattcagaaactgcctatgatcaatgaaaacacaatgcagaagccccagcagatctatttcaaggacctgcccgacaaggagattataaaggaggatgtgattctctttttctga

SEQ ID NO: 9646 - DNA, 1317 bp, synthetic construct
  source 1..1317: mol_type = other DNA
atgggcgaaaagtataaaaaggtgattaacatgaaaaagtatctgcccagatacactgaccaggaactgaaagaatctctagaatacatgggcgctgtgctcatcactggtccgaagtggtgtggtaagaccaccacagccaaacagcaatgcaagagcctcaaggagctacagcaccccgttcatggaaaatcttacctgaagcttgccgataccaaccccatagagcttctgaagggcgagaagcccatgctgattgacgagtggcagatggcaccagaactgtgggggactgtcagatatctggtagacgaatcagacgaggacggactgtatatcctgaccggatcgaccattgttgatgaaagcaagattgtgcactcgggcgccggccggataaagaggattgtgatgcgcccaatgagtctgtatgaaagtggtgaatccacaggtgagatcagcctgatcgacttgttcgataatgacgacttaaacattgacggagtaacgtccaacctgacaatccctgatttgatctttgccgcatgccgggggggctggcccgaaagcctaaacaagaagaccaaaaagcagcaattggcaattgtatcaaattacatcgatatcatttgcaatagcgatgtgagcgaggtggatggggtgaagcgcagtcctcagcgggttaaaacgattctcaaatcctacgccaggaacatatctacactggcaactaagaaaaccctcatgaaggatataaagaccgagtacgctgatatctccctgccgacattcaattcctatattgatgcgcttgagaggttatatgtcatccagaacatccctgcttggtcacccaacatcagatccgccaacaccatccgaaaatcctacaaaaaagagtttattgacccaagcatcgccgtggccagcctgaacctcactcctgagaagctgttgaaagacttcgagaccttcggattcatatttgagaatctctgcatacgtgacctgctggtgtactcaagtagcgtcaacgggaaggtcctgtactacaatgacgacagcgggcttgaggcggactgtgtcatttatctcaatgacggccgctacgctttgatcgagtttaaattgggcaaccgagaaatcgataatggagctggcaatttacttaaactcaaggatctcatcaagaaaagcgtcgagaacaagaagattgacctggaagagccaagtttcctcgcggtgatcacggggggggagctggcctacacaagggccgacggcgtgaaggtgatcccaatcggatgtcttcggtga

SEQ ID NO: 9647 - DNA, 939 bp, synthetic construct
  source 1..939: mol_type = other DNA
atgtttaaatttgataaggaacaagaggtgtttgacttcgccggcgtcaagatggggggacagcccggagagtaccccactgtgctcgcaggaaccattttctacgggggccacaacatactgaatgatgaactgaccggagacttcgacaaggacaaggctgaaacattggtgaacgatatggcatccatctctgacgtaacaggcaacccgtacatcgtccaggtgttcggccaaaccgtggaagccctgccaaagtacatcgaatacatcggggaaatctgtgatgctccattccttatagatagcacaagcggcgatgcacgcgtggcgggtgctcagtacgccgacgaagttggcctaaccgagagggcaatctataacagcatcaacatggcagccgacaagtcggagctggatgctctcgcgtcaacggacattagtgcctccattatcctgggcttcaacccaatgaatgcgaccgttgaagggaaaatgaacatgtgggagaatggagacgatggggcttacgagaagggtttgctcgaggtcgcagcagactgcggtattgacaaatttatgatggatacggccgtgacgcctttaggacagggggccggtattgctgctagaacctcctttgccgagaaggcgaagtggggatatccggtgggctcagggatacacaacgtgcccagcgcctgggactggctgcgggactataaaaaagaggggaataaaactgccttcacagtgtgcgatataggcgctaacatcgtgcaggtaatgtgcggcggagacttcgttctctttggccctatcgagaatgccaaaatcgctttccccgccgtcgcccagactgacatgttcattagtgaggccgccaagcccctgggcaccgagcctgtcgattatcatccaatgaataagcttctgtga

SEQ ID NO: 9648 - DNA, 621 bp, synthetic construct
  source 1..621: mol_type = other DNA
atgccggaaacagattacttaaaaataccacagaacaggataggggccctcattggcagcaacggaggcgttaaaaagtccatcgagaaagcgactggaaccatcctggacatcgatagtgacgagggcactgtgtacatcacccctggtgaaaatatggaggacccattgggagtgtggaacgcgaatcacattgtcaaggccgtggcccggggcttcaaccccgaggtggcacttaaactcgtctcggacgactattatctggaggtaattagcctgcccctctacatcggaaaatccaagaaagccctggcaagacataagggtcgaatcatcggaaaggacgggaagacacgggagatcatcatggaaatggctgaagtgaacatggctatctacggcaagacggttagcctgattggggagatggacaatattatggtggctaaggaagccattgagatgattttgaaggggtctcgccacaagtcagtgtatgggttcctggaacacaagaaggaggacctgaagatgaaggagttcaaagatcttgtcggcatcgaagatgataaaatagagtttaaggatggcatcgaatttgacgagaaaaccctacagtga

SEQ ID NO: 9649 - DNA, 1704 bp, synthetic construct
  source 1..1704: mol_type = other DNA
ctccaggagcaagatgtgggcaccgattggcggaatgattttaagaacctgactccatccgagttctttaggaaaaacaagcagatgttaggctttacggggaagattcggtccctgaccattgtgttccacgagttgattaccaacagcttcgacgccgccgaggaagctggaatactcccggagatcgatatcgagctcaagcgcgtggaaaaggagcattacatactcaaactcaaggataatgggccgggcatccctgaagactatgtaatgcgcgtgtactgtagtatgtttgccggctcgaagttcaggaacatacagtcgcgagggcagcagggactggggtgtagtgggtgcgtgctcctgagccagatgaccaccggtaagcccgcgcgggtcataagctgctataaagaaaatggcgacatcaagggggtgaagatgaagttccaaatggacgtcaagaacaaccggggaattttgatggaaagggaagactatcccgcagaaagcacaggcgtgtgcatcgagctacagttcaaagaggtgtcctattctctggccgagcagggggcttttgagtacatcaggagaaccatgattggaaacccacatgccaaaatcacattcagagacccaagcggccacaaatacatattcaaacgagcggccgacattgtcccaatccttcccaaagaggtcctgcctcaccctaagggtgtcagcgctgacgacttgatgaccatggcacaaaatacagacagtaggcgttacaagagcatgctcacctcctcactgagccgcatgtccaataaaagagtggacgagatctccgaacttacgggaatcgacatgaacaagcggccaaaagacctgacattccctgaagccgagactattgtacattgctttaagaagatgaagttcatggcccctcccaccgatggcctgatacctatcggaagcgaacagatcgaaaaggggatgaagcagatccttaagcccgagtttgtcacgacaattaccagaaaacctgtgacataccaaggcggtgtttcattcattatcgaggccggtctggcatacggcggggactccggccgcgtcgtaaaagaacaacgaaaatctgagattatgagattcgcaaaccgcgttccactgacttttgatgcaggcagctgtgctattacggaagccctgaaaagtattgattggaaacggtacggcttgaaggacttagataatacgcccctgaccttgtttgtaaatatcatttcaacacaggtgccgtatctctcaactggtaaacagagcgtttctcccgagcccgaaatcgtgcacgagatccgccagtccactatgaagctagcccggaaacttcagaagcacctcagagctaagaaggctgctaaggaaaaggagaaacgttcaaaagtcttcgaggattacatgcccgtgatcatcgaagaagctgccaagctgggcgagaccggagtgccagaatatcaggaggtgctggcaaaggtgactaagagggccctggccgagctgctgggggaaaaagtcgaggaggaagaggaggaagaggagcttgacgcgatcatcatggaagaagttgatgagcgaggatacgcggttgatggaaacagtacactagatagcttcgaggaggatgacgtggacgacgagtttgaggactga

SEQ ID NO: 9650 - DNA, 1095 bp, synthetic construct
  source 1..1095: mol_type = other DNA
atgactgaaataaaagaaaaccagaaggcccatagagagaagaggaaggaatacacctacaataagctgaaaggactgggtcaagaaatcattgaggatattgaaaagcagaaggtgcctagcgtgaaggtgccctctcgcggtactggcaacatcgtgtacgataatgctaaacgctactatgtgctcggggaccgctacggccgtcgaagcctggggaacgtcaagcagattcggaagctaggccagatggtgtatgtggcgaacttctgcaaagatttagtggcccgggagaagaccgccacaatcagggaaatgtactatgtttcagaggggtggggcataagttttaaaacccagcaggagtccaacatcgtgggagaggatttggaagtaacactgggaaccacccgggaggacctcgggcttatgcccgaagaggacggggcttcggtctatggcgacatcacactcctagatgatggcgttgaaatcaatgccgcaaaagccggaaagtccggttacacaatttcaccaacgatagaccaggtcgaatttcttgactgcggtgtggagagggttattgccgtcgagaccatgggaatgttccacaggatggtacaggagaatgctaacaagagattcaacactctgatcgttggactgaaaggccaggctgcccgggctacaagacgatttatcaagagagtcaacgaggagataggcttgccagtgtacatctgtaacgacggagacccctggggcttccacattgcccaggtcattatctccggcagtgcgaagctggcgcatgtgaaccacgacctggcaacgcctgacgccaagtttatgggcgtcaccgcaagcgacatcatcaattatgatctgccaaccgataaactcaaagacgtggatgtaatgcgcctcaaagagctctctaaggacccccggtataagagcgacttctggcaaactgagatcaagaaaatgcttaaaattgggaagaaggcagaacagcaaagcttctccaaatatgggctggagtacgtcgtggatacgtacttcccgcagaagctggaggagttggaaaattga

SEQ ID NO: 9651 - DNA, 273 bp, synthetic construct
  source 1..273: mol_type = other DNA
atgaagcagtgcatggataccgaaaacctgcacagacgcctcaagaagatcatcgggcagctgaatgccattgaccggatgatcgaggaggacattccctgtgagcagatactcatgcaggtgaacgccagcaagagtgcactgcataaagtgggacacatcatcgtcgaaggccatttggaacactgcgtcaaacaagcgatggaggaagatgacgtagatgaggctcttgtggacatttcatccatactagagtattacagcaggctgtga

SEQ ID NO: 9652 - DNA, 1869 bp, synthetic construct
  source 1..1869: mol_type = other DNA
atgaatctcaagtttaaaaatgaggagaagctcgagatcatctttatcatcgtgtcatccatcagccttgttctggggtttctcctgtctatcgactacctgtcttggatctcaatcataatttgtgggattcccattttcaaggagtgcatcgaaggactgatcacagagttcgatattaaagcggatttgctcgtgagcatcgcgatcattgcatccattattatcggtgaaatatttgctgccggggagatcgcgactataatggcgattggcggtttcttggaggagtataccgtagccaaggcccaaaaccagatcaaggagctcgctaagatgacgcccaagaccgccaccaggattaaaaatggcaccgaagaaaaggtcccaattgaggaggttaagatcggagacattctgaagattcttcccggtgagagcataccaaacgacggcatcataatcaatggagagacatcaatcaaccaagctacgctgaccggagaatcgataccggtggataaaacccggaatgacgaagtatacagcgggactattaacctgtacggctcatttacaatgaaaaccactaagataagtgaggacagttcccttcagaaactcattaagcttgtggaatccagcaagccggagaacgccaacattgtgcgtgccgctgacaaatgggcaaccatgattgtggtcatcgcctttacagccgccatactcacctacctgttcacattcgaaataacccgctccgtgacaatcctcgtggtattctgcccttgtgcactggtgctggccactccaactgcactcatggccgccgtcagtaatttaactaagtacggcatcctagtcaagaacggagagtctcttgaagaattagcccacatcgacgaagtcatctttgacaaaaccggcaccctgacttacggcaacccaacggtcataagggttatctccgaaaacccccaggagatgatgtatctggccgcatcacttgagtctaaatctgagcaccctctagcgaaagctatcgtgaaatattataataacaacgacttagccgctgtgaatgagtttaagatccatattggtaaaggaattacggggtatatcaacggggtgcagataattgctgggaacaagaagttcctagagtctaagaacatccctctaggttccaatgaaaatagcagtaatggcgaaatcgaaatttttgtggccaaggggaataaaatcatcggcaagatcttcctggcagataccatccgcagtaatgctaaggcgacaattaaaaacctcaagaagctgaggattaaaacaacattgctgacaggcgataatgaaaacactgccaagagcattgcaaatcaggtgcgaatccataacatcaaattcaattgcctgcctgaagacaagatccagtacatcaaagacgagcagatccggaaccacagagttgccatgattggagacgggatcaatgatgctccatcactccggaaatccaacgttggaatctccatggggaacatcggcagcgatctgtcgatcgagagctccaacatcacgctgatcaaggacaacatcgagaatattccccacctgattgaggtctcgaagaaaaccataaagacgatcaacataagcatcggcttcgcattgactctgaatataattgccatggcactcgctattctgggaatcttgaaccccattgagggcgccctgatacacaacatcggcagcgtgattgtaatcatttactctagcatcttggtgaactacaagagtagtaaaattgattatagaacccaacagttcgatgtcaacaaggctctgaacattaccatgttctga

SEQ ID NO: 9653 - DNA, 204 bp, synthetic construct
  source 1..204: mol_type = other DNA
atggccgagaaggagatcaaggtggtgggtatgcactgcagttcctgcgtcaacgccgttgagctatgtctgaaagatgtggatgggatcgacgatgctaaggcagacctggactcaggaattacaaccctcacgctgagcggcaacgtgagcgacgaagacataaatgaagccgtcaaagaagcgggcttcgaggtagagtga

SEQ ID NO: 9654 - DNA, 1017 bp, synthetic construct
  source 1..1017: mol_type = other DNA
atgaagaccgtagcaattaatggatatggaaccatcgggaaacgagtggctgatgcggtcgctgcgcaagacgacatgaaggtgattggtgtcagtaagacccgacccaactatgaagccagaaccgcagtggaggaaaagggctaccctctgtacatcggaatcccagaacgcgaacagatgtttaaagatgctgagatcgaaatatccgggactgttgaagatatgatccaggaagctgatatagtcgtggactgtacgcccgggacgatcggaccccagaacctggagatgtacaagaaggccggggtgaaagcgatctatcaggggggcgaggaccatgatctcactgggctgtcattcaatgccatgagtaattatgacgagagctacggtgctgactacacaagggtcgtatcctgcaacaccaccggcctgacccgtaccttgagcacaatcgatcccattgcaaatattaagaaagttagagccgtcatggtacgcagaggctctgaccccagcgagattaagaagggcccgatcaatgcaattgtgccaaatcctccaaaagtaccttcgcaccacggccccgatgtcaagacggtgatgaaggacatcgacgtgacaacaatggccttgctcgtgcctaccacactgatgcaccagcacaacatcatggtggagattaacaacgaagtggagacagaggacatcgttgaaagcctcgagaagcggtctagggtcatggtggtgtccgccgaggatggtctcggctctactgccgagctaatggagtacgccaaagagcttggacgcaaccggaatgacctgtacgaaatcccagtttggagggagtcaataaacgtggtcggcaatgagttattctatatgcaagccgttcatcaggaaagcgacgtggtgccggagaacattgatgctatccgggcccttctggaaatggagagtgacaacgagaaatccattgcaaagactaacaaagccatgggaatactgtga

SEQ ID NO: 9655 - DNA, 834 bp, synthetic construct
  source 1..834: mol_type = other DNA
atgaagcagaaggtgattttcgggcctgcaggaagccccgtagactacaaaggagccgcatacaaagctccaaagtatattagcgaggagggtctggacagctacgaataccaaagcccctatggagtccgcatcggcgaatccagtgccagtaccttaaaagaggaatccgaaaagcacgatgtgctgatcagtatgcatgccccctactatattaacctatgtgccaaagaggaaagcaagcttgacaaaagcatcgaccacctgatagctgccgcacgtgcgggcgagtggatgggcgcctaccggctggtcttccacccgggcgcttacctcaacagaaaacctgagaaggccatggaaatatcccgaaataccatcaatcggctgtttgaggagctcgagtcggaaggaatcgaagagttcacctttgcgcctgagaccacaggtaaacgcacgcagctgggaaatataagggaggtggttgagctgtgcgctagcttcgaccattttgaaccaacaatcgacttcgcccacatccacgcaaggggccgggggttcttgaacaagaaggaggattataattgcatcttttcaacgattgagaaccagctaaacattgacatcctccactgccatttcacaaccattgaatacggcaaggggggggagatcaagcaccatactttggatgaaaacgactacgggccaaacatagacgatctgctctccaatctgatcgataacggctggaatgcgaacatcatctgtgagactccccttagagatattgactcactcaagatgaagaaaaagtatgaagagatgatttga

SEQ ID NO: 9656 - DNA, 510 bp, synthetic construct
  source 1..510: mol_type = other DNA
atgactattaacgacaaccataatcacttctgcatttactgcggcgccaaactcgatttcgggcaacacttttgcaccaaatgtggaaaggaagtggtgcacgcggaacccacgtacgagatcgtgtcccgctactacgacctgctatatgacatcgagcaggaatatgatgctaaacaggaaagggccaaggagctggtcaacaagctcttcgatccagcccacatgagctacaacaagtttctcagctccatcaataaatcgaacgggctgttcaacaatcagttggacgtggcaaagcggatgatcgaagtctacgacggtaccaaggactttatcgagcatgagattgacaacaaaatcagaaccctgcagacattcgttgataagatgaatgatctgatcgacgagatggtgattcacctgagttcaaacaagcaggatacaggcgatataaataacctttttgaggacatggacgacttaatagacagcgtaaaggattattga

SEQ ID NO: 9657 - DNA, 1068 bp, synthetic construct
  source 1..1068: mol_type = other DNA
atgagcttccggacccgaagaatcttaatcatgacgcctttttatatgatcttccagttcttcctgctaaaatatctgctgttgctgtttggcgggcttgatgacggctacctcatcatcattgcaatcatcgtcgggctgctccactgcatgccaatgttttttgagagcaagaagagcactgtggctgggcgcttcctgacaacaattggcggtgtctggatgtggatgtcgctaatgttcctgttcgacctcatgttcatctacctcattaagatgttcgtaatactgccttttgagataatcgtggacctggttctgatcgtgccgttcctcggcatctataacttctacaagtcccataaactcgtgattaacgagaaaatactggagctgaataacctgtcacgcgatatcaacattgtgcacctgtctgacgtgcacttcggaagcgtccggcataaaaagattatcaatcttctcgtcaataagctgaaggaacttgaagacacatgtgagcttgcgattatttctggtgacctggcggatgggtcttccgctgttggcactgatgacttcttggccttcaaggacgtggatatgcctatcatcttcacccccggaaaccacgatttctacccgggtatcgacaacgtgataaacgcctgcaaaaacgccggaattattgtgctggataacgaaaagaaggagtttggggacctcagtatcttcgggctgacgtttagctttgaagataggtgcgtgcccaaaattgacgaaagttggataaatcccaatctaatcaatattatcaactatcatgtgccctactactgggacgagtttagtaagctcggctttgacatccaactttccggccacacacacggcggacagttttatccagccatttggtttgccaacatactgttcaagtacaacaagggactctttaaaaataatttgggaaaatacttgcatgtcaccactggtgtagggtcaatggataccccaatgaggtggggcaccgactccgagatcgttatcttaaagttgaagaaagcatga

SEQ ID NO: 9658 - DNA, 1125 bp, synthetic construct
  source 1..1125: mol_type = other DNA
ttgaagaatgataacaagaaagcagaaatcaagacaactaaccagaagcagaaattgaagaaagccgagagtaaggagtgcgctgaatgtgtcatcctgaagcccgtgggctatccattcgaatttaatctcatggacgaacacattgagattaccaacaagaagctatttgaagagtatgctcgggagcagtggctgggcctggtggtgaaagagaactcccacctgttcgatcagaagataattcctgattatggtttcgaggtcataaaggccaagccgaataacagcataatctctgaaacaacgcgcatccaactaatcaccagcgatctcgagaacaagaatgacaagctcaccttcaaatcaaacatatcgatttcggatatcgtcggccaaacgaatgcaaaaaataaagtgaaggtgatcatgaaatacttagagcacccgggcaaattcggaccctgggcacctaagaacattctgttttacggcctgccagggaccgggaagaccatgctcgtgaaagcgctggcgaacgagctggaagttcccttgtacctcattaaggccacatcactgatcggcgaccacgtaggggatggtgcctctaaaatccatgatctcttcaagaaggctagtgagaacagcccatccatcatctttatcgacgaaatggacgcagttgctctgcacaggtcattccagtccctgagaggagacgtgtcagagatcgtaaactcctttctgactgaaatggacgggataagcgagaacgagcatgtcatcaccattggggccactaacagccctaatagccttgattacgcgatcaggagtcgattcgaggaggaaattgaatttaagcttcccgacgacgaagagcgcctcacaatcctgaaaaataacttaaagagcatgcccctggactacgagctcgacttggaaaaaattgtgaaacttacgaagggactttccggacgggacataaaggagaaaattctgaaaaccgccctgcataacgccatcgccaacgactccgacagcatcacaatgaaaaatattgattacagcatcgagtctagtaagatcaaaaataaggatattaagggcatgttcgagtga

SEQ ID NO: 9659 - DNA, 1191 bp, synthetic construct
  source 1..1191: mol_type = other DNA
ttgatcctaaacttacgggtggatcataagattgcggacatccagtccatggaggtgattgcaaaagacatcgacgacctattcgcagagctgcaagaaaaatacagcattggggagtacatagagatcagtacatgcaatcgaaaagagtactacattcataacaacaatatccccgaagatgatgagctgctctcacacgaaaacgtgagcattgtaattgactacggccagtccgccgtcatgcacctgcttcgtttgacgtcgggcctggagagcatgattattggagaggaccagatcctcggccaggtgaaggatgccaaaaacaatgctatcaagaaccaccactgcgggaaagtgctcgacacaatcttcaccaaggctatccacgtcggtcaagtagtgagaaataagacacgcatcaacaagggatctgtgtccattggatcagcagccatcgacttggctgagaaacacataggatctctggtggacaaaagcgttctggtcatcggggcaggaaaaatggggaagctggttgctaaggccctcgctgaaaaggacctcaaggctatcttcgtggccaataggacttattatgtcgcggtgaatctcgcggaggacttgggcggggaagccatactgttcaacgacctggagaaatacctcactaccgccgacttggtgattagtgcaacaagcgccccgcatccagtcatcaccaaggaccggctcctgaaatgcggtaggaactacgaaaccttaatgatggtggacatcgctaaccctcgcgatatctctgaagacgtgtgtgagctaggcgtcaaaagcttcaacattgatgatctcagagagatcgccgagatcaatacgaaccttagacgcaaggaatttgtcgaagcggaatcgatcatcaatgaagagtttatcctgctgaaagagtcctttaagataatggaatttgataagctgcttggcaatctgagggcatcaatggaggacatacggcagcgagagactcagaaagccaacgtgaagctggctgtcgatggcagtgtaaagatcctggataatctgaccaacagcattgttaacaaaatattctatgatatttccaagaaggttaagaaggccgccaaggatgagaatgaggacatacttgccgcctgtgaatatattttcaactga

SEQ ID NO: 9660 - DNA, 621 bp, synthetic construct
  source 1..621: mol_type = other DNA
atggactggacctcgctttacttaaagacattcgattttaacgtgttcattcttggtacgggcgaggttgcaactcggcgagccaataagtttctggaccacggggcgaatgtcaagctcgtgggagatagtctgcctaaggaattgaaatacaaaggagccagcctctgcagcgtctccgatgtcgacgaccttatcgattggtccgacctggtggtgatagccagcggggacagggagctgtctgattacgtgagcggcattgccaagaataaactgattaaccgtgcagatttcccacaggaggggaacgtaatcgtgccgacaagttttaacatcggtgaaatcgagatttcaatcttcaccggaggcaaatcccccctgatggctcgccaactgagaaagaagatacagtcaatcatcaccgaggaagatatcctggagatcgaactgcaggactatgctcgcaaaaacctgaagaaactagtggaaaatcagaaggacagaaaaaagtacctctatgaaatcttcgaggacgagaaggttaatgtcttgattaagaaccggaagattgacgaggccaaactctatattgacaacctaataaggggcctcatctga

SEQ ID NO: 9661 - DNA, 483 bp, synthetic construct
  source 1..483: mol_type = other DNA
atgacctgggaggacgcgccatcacacatctgccgaggaggtgacatcagggggctcgctttctgttgtccccccgtgaagccatgccctatcctgaatgcactccaggaagtcaacttgactccgaaggagtacattgaaattaagacgcagttcgccaaagagacccgcctcggcgagggggccggaacctgtttcggcagcctggtatggtgctgcaagccctccaagccctgccctctgagggacatgactcttaaaaatatgggcatgagccacgatgagtatctggacttgaagaaagagttatccgaacggctcgtcggggttaagaaaccagaccctgatgagaaggccgaggcactggccgaaacatttaacgtgacaaaactggaagctatgaacatactaaacgaatgtaacgacgatctgcgggcggctgtgaaggtgcttcatgccagatctctggagaatagtgattga

SEQ ID NO: 9662 - DNA, 687 bp, synthetic construct
  source 1..687: mol_type = other DNA
atgaaggagaagctgatcgtggaagacataaccatcacactcgagcggaaaaatatcaagaacatgtaccttcgagtcctccctcccaaaggcgatgtgaagctgagcgtccccttattcttgccaaacaacgaggtgattatgtttatcaagtcacgcaagaattggattctgaagaaacaagagttcattctgaacaacaacatccagcctcccttaaagttcattagcggtgaaaagcatcagctgtggggcagagaatacacgctccaactaattaagaatgacaacatagagcacgtgctaatcgatgaggacaccagcattatgtacttgccactcccgaagaagagtacaattaaggcgcgcgaggagatcctgatcgatttttatcggaaagagcttcagaacgccatccctcaggtgcttgaaaaatgctccctcatcgtcgggcagaaaccatccgaggtgaaagttaggaaaatgaaaaattggggaaattgcaggcaggatagacgtataactctgaatctgaacctggcaaagaaagaccccaagtgcctcgaatatgtaatgatccacgaactgtgtcatctgatcgagtttaaccacggggagaagttcaagaaactgatagacaagttctgtccggactggaagaaaatcaagaaagaattgaatgaatga

SEQ ID NO: 9663 - DNA, 1602 bp, synthetic construct
  source 1..1602: mol_type = other DNA
atggatttcataacactgaaaaacattacgaaaacttttgacggggtcgacgtgcttaagaatataaatctgaaaattaacgagggggagaccctggggattctgggccgcagtggatcaggaaagagcgttttaataaatatgcttcgaggcacatcagactacaaacccgatgccggtcagatactagtgaatgtggccgtgtgtcccgattgcttagccgtcgactcaccatctcacgtgggggaaaagtgctcctgtggcgcgactctcgaggcgaaggaggtagatttctttaacagcgagcgcaaactgttcgctagcattaaaagacgcatttccatcatgctgcagcggaacttcgccctgtatgatgaggaaacggtcatcgaaaacgtgatgagggcgatgcccgagggcaaagattacgacgagaagatctacgaggcactggagctgctggagatggtgcaaatgaatcacaggatcacgcacatcgctcgggatctgagcggaggggaaaaacagcgcgtcgtgctggcccgccagctcgccaagagcccaatgatgtttctcgccgatgaacctacaggaaccctcgatcctcaaactgccatcaagctgcataacaccctgaaggaaggcgtgaaggacaagggaatcaccatgctgatcacctctcactggcccgaggtaatgattgaactcgcagactccgtgatctggctggaggagggtcaaatcaaagaggagggcgagccggagaaagtggtcaacgagtttgtcgctacaatccctattcctgagaaaccagagatccccgaatttggagaaccagaggttgttcttgaagacgttaagaagcactactactccattgaacggggggtggtgaaggcagtcgacggggtgagtttaaacatcaacaaggaggagatcttcggcatagtgggcctcagcggttccggaaaaaccacgacaacaagaatgctgatgggactaactgaaccaagctccggcaacatacagattaagctcggcgatgaatggatcgacatgacgaaggtgggcccccttaaccgggggcggatcatgccctatatcgggctgttgcatcaggagtattcgctgtatcctcataggaccgtgctcggcaacttgaccgatgcaatcagtttgaatctccccgccgagttcggtaagatcaaggctatccatgccctcaccactgtagggttcgccgacgacgtcgccgcaagcatccttgataagtaccccgaccagctgagtgtaggtgaaaagcacagggttgcgttggctcaggttctgattaaggagcctaatttgattgtgttggatgagccgacaggtaccatggacccaattacccgtgtcattgtctcggactcaattctaaaggcacgaaccgagctagaacagacattcatcatcatctctcacgacatggattttgtgctggatgtctgcgaccgagctgctctcatgagaggaggcaaacttctggacattggcactccggaagaaatagtggacaaactcactgccgacgaaaaagaggacatgctgaaggaaaatagatga

SEQ ID NO: 9664 - DNA, 732 bp, synthetic construct
  source 1..732: mol_type = other DNA
atgctgaaggtagttgccccgatggctggtataactaatgctgcctttctgaataaagtgatcccatatggattcaatgtcgctaccttgggcggatactcccttgactccccaaccatcgaggccagtaagaaaattatccagcgaggcaggaaggaatttgattttcctctcgatgtgatcttcaatcatatcgaaaacgaggtggatttaattaaaaagtaccacaagaacgtaaaagtgtcggcgaacgtcagagcatcaaacccccaacccataatccacgttggcaatattaaaaagctagacattgtcgaaattaactgccattgccgccagaaagaaattctcgatgttgggtgtggacaggaaatgctgaaacgggatgatctgaagaagttcatctcccagatcgtggacaatgtggacagtgaggtgagcgtgaagattagggctaacgtggacgggatcgacacactggagatagccaacatcatcgcagatgccggcgcagactacttgcacgtggacgcgatgaagaagggggtgtttgaggccgactgggagctcctgcgcagcatttgcaacgatgtggatatcaacgtcattggaaacaattctgtaaactctgagataaatgttagaaagatgatcggcacgggtgtcgacgggttcagcatagcccggtcagtcatcagcggcaacctggagttcgacatcagcgacttctga

SEQ ID NO: 9665 - DNA, 780 bp, synthetic construct
  source 1..780: mol_type = other DNA
atggaaagagggtattcaatgatacaaatgacattaatacagatcgataattacgggccttggaccgtgaccccccgtccccggactgaatctgacctgcagattcttcaggcacgcctcttcgccgacctgaacagttattttggatcgaaaaaaggcctggtgttcttcacccgattcgacaacctgctcgccatcagcaacggtatagatgaggaggaccatctccgcatccagaggtccattcggaataaatacccaattactgtatccatgggggtgggcgctgccgagactccacatgaagctcagaagctcgccacgattgcgctccagaaggcaggctccgcccaatctggcgaaaggaaagagattctggccatcgatagcttggtggacgaggagaacagctttgtccaggcagcgcacatcgacatcaacagcgtcacagagacgttcacagatattgagagtgcatttgacacaagctttagtgtgaacaaggctcagcactacctgatgaccaagctgattaagaagggctcattgctattctttatcggtggggacaatttcatggctccgtgcaatggactttccgagaaggagatagaaaatctaatgatcgaaatcgatgaagagatcgggattaagctgaaagccggcatcggaagagcgaaaaacgctgaagacgccgcctacatggccgatatcggactggaggagatccgggcacacaacaacggcatgtggacctgggttgtcgagaaggaagactga

SEQ ID NO: 9666 - DNA, 906 bp, synthetic construct
  source 1..906: mol_type = other DNA
atgattacggtgcttagcgggggaacaggcaccccaaagctcctgcagggactaaaggaggtagttgaccctaaggacctgacaattattgtgaacacactagagaatgactacttctctggggtgtatgtcagcgccgatattgacactgtcctgtataccatggccgacataatcaatgacgagttttggtatggtgttaaaaatgacacttttatcacccacaaccgcctggaggagctgggctgcagcgaactgctccggattggggacatcgacagggcaactaaaatacaaaagacgcagctgatggaaaaatacgggcttggcaaggcatgcgagatccaggcaaaaaacatgaatattcaatcaaaaatcatcccaatgagtgaggaggacagtgatattaagatcatcaccgatatcggcgagctggagttccacgatttcctgattaaacatcagtccgagcccgaagtgtcggatcttaaattttccaaagtgtctcccacggaaggagtcatcgaggcgatcgaaaacagcgaggccgtaattatcggtccgtcaaaccccatcacatccattagtccaatcctctccctcgatggggtgtgtgatgccctgaaggacacctacgtggtcgctgtcagccccatcgtgggctcagactccgtgtcgggacctgctaacaagttcatgaaggccctcaacatcgacgttagctcctacggcgtggccagcatatacgaagacttcttagacacaatcgtcattgacgtacaggataatgataaaaaggatgaaataaatcagatagtgaacaaggtgataatcaccaacaccatcatgaacaatttggatgctaagaagaacttggcggaaattatcattgatagtatcccttga

SEQ ID NO: 9667 - DNA, 765 bp, synthetic construct
  source 1..765: mol_type = other DNA
atgagtatagagttgttcggactggagaacatccctattattgacggcaatagtgacatttcaaaaatcatcaaggaagccatcgagaagcagggctgcaacctgtgtcatggagacatcatcctcatcgccgagaccctgatcagcaaggctgaagagaattttataaagctggacgagctgacgccatcaacccaggccatcgaactggcgaagaaagccaaaaaagacccaaagttagtggagtctataattcagcagtccaacgaaattgtcgctgtcggccccaagttcatcataactgagacagtgcacggtttcgtatgtgccaatgcaggcattgacgaaagcaacgtcggcgatgggctggtgaccctaatgcctaatgatgcggacatcagcgctctcaatattcgcaagtacctcgaaaacgagtttgacgaggagattgccgttatcatcaccgatacacagggacgggcattccgattcggggccgtggggaccgccatcggatgctccggtatttcgccgatatggaaaagagttggggagaaagacctctatggaagggagttggaaactacggaaattgcaacatgcgatgagctggctagcgctgcatctcttatcatgggtcaagccgacgaaggcctgcccgtggtggtgatccgcgggttcgacggctttgataagctccgggatgtggattccaacatcaagagcgtccttatgcccaaagagtttgatgtattcaggaactga

SEQ ID NO: 9668 - DNA, 627 bp, synthetic construct
  source 1..627: mol_type = other DNA
atgtatacaggtcgaattttgagcactggcatgaactgtgagggtaagcctttcatagcgtatcgggtctcaagcaggtcattccccaataggcaatgcctgaaattcgaaaatcgcgccgctatcgtgcccaaagaaggattcgagaaggacatctttgagaacccttatattacctacaattgtatccggatagtggatgacgtggcgatcgtgtccaatggatcgcagaccgatgtaatcagcgacaagatttctctgggcatgaacctcagagacgccatggcctatagcctcctaacgatggactacgagaaggatagttacaataccccacgcattgccgcagtcgttacagcctccaccgacgaagacggctacggatgctacatcgggatagtgaacgacaacaaaattctggtcgaacaggtgccacacgggaaggccgccttcatctccacatacggcagtcaggttcccgataccgtggatttcgatgcaaaaactgctaacgagtgcgccaagtttatttttgacgagggcgctttcgcagattacgaaaagccggtaacgtctagcgctgcgatctttgacggggagtgggcaatcgacgtctataacccatga

SEQ ID NO: 9669 - DNA, 411 bp, synthetic construct
  source 1..411: mol_type = other DNA
atggcaatcgacgttggcaagcacaagaagaaaatctcggacagcaaaccaagtatcaatctggtgccgttcatcgatatcctattcacaataatgatttttctcgtcgtaacaagtaacttctcagccgatgtgcaaacggatgattccgacgtgaccgacggtggctccggaaagcctaatgtgacttcagtgagcggggactctgaatactatgtcatgcccgtcgctaacctgcataaagtgacagtcaacggcgtggacaagagcgacaccattctgaacagcgccgtaggggttcaggcgaatgtcattgacaacgggaagatcaccattaaacccggcgagatcgatataaccactcctgatggagtgtcccccgacaaggccgtgcagcggccacagctctga

SEQ ID NO: 9670 - DNA, 840 bp, synthetic construct
  source 1..840: mol_type = other DNA
atgattattgagtccattatgcccttcgtggatgggatagtggacatctttactcaggggggcttcatcacatatataatcctgttcattgggatctatggtcttattattggactgcggaagatagcataccttaggaagatcagtaaggtggacacaaccgagatatttggggtggtaaccgccagcatggagcgaggaggggcggtcgaggccctcaagcagatcaatggcttcaaaaaccccatcagcagaatcatctcggagactttgaaaattggctacaagaacaagacagaagtggaggagtccatggagcagatcttcattgtcgaagttggaaaaatgacgaagggactctccaccatcaaaaccctgacggaactagcaccattcctgggactgatcggtactgtgatcggcatttggctgacctttaaatcactcggcgtccatccggatagcgctgctatggccgaaggcatttacgttgcattgaccacaacaatcatggggctcctggtcgcaattgtgttactccctatacacacttacatccagggtcttatcgaagtggagatggacaagatcgaactggccacgaagatgaccaattggggctatgccgtagtgaaagtccgcgtggattcaaatgtagaatgtgccctggaggctctccaggaagcggagggcgtggtcaacacacggctgattagcgacccatacgccaacatcaaggtgagctttaaacccagcatgctggacaaaagcatctccaacatcatattggagaagtgcaatgttaacgctgaaattaccgagagtaagctaaagcaatga

SEQ ID NO: 9671 - DNA, 615 bp, synthetic construct
  source 1..615: mol_type = other DNA
atggatatcctgggaatcgatgaagcgggacgggggtcggtcctggggcccatggtgatcgccggagtgatcgtgcctgagaaaatggacaaggtactggagcgcatgggcgttaaggactctaaaagactcactccgaaccggcgcaccatcctcagcagaaagctccgcaagatgttcgagtacgaaattgtcgtcataagtgcccgggagattgatgagctgagggcgaacgggataaatctgaatgaaatagagaagaacgccatggaaagcattatccttaagctaaaacccgaaaaaacgattgtggatgcagtagatgttaaggctgagcgtttccaggagaacttgtgcaacgacacatgttgcaatgtggtggccgaacataaagccgacgataagtatatcgaggtgagtgcagcaagcattatcgctaaagctgaaagggacgcccacattaatgagatcaacatggactacgtgaattttggcggcatcggctccggttatccatccgacccaaccacaaaaaagttcttaactaactacacctacgacgagatgcccgactttgtccgaaagtcatgggctaccgtggccaagatgaagtga

SEQ ID NO: 9672 - DNA, 1074 bp, synthetic construct
  source 1..1074: mol_type = other DNA
atgaacattttcggaaaggaggaagaggagccacagattaatgataccaaagtgataagcaacagtctgggaatcgacctgggaacactgaacaccgttatcgcaaagccttccggtgacaagtttgacttgtatcagataccaagcgtcgtggccgtgaaaaaggatgacccctcagaggtgctcgccgtgggggaggaggctaagaaaatgctaggacgaacccccgaagatattctcgccgtacggcctctgaagaagggagtaatcgagaacgtggtgcaggctcaggccctgttaattaaggccatgcagatcgggatcaatgagggggagagtgttggacgcatcgtgattggcatccccggcgacgcctcagaagtcgaaaaaaatgcggctgaagagataggtaggaaggctggggcccagaatattctcgtgatttccgaaggcctggccgctgctattggcgcaggccttcccatcgcggagccaaacggcacaatggtggttgacatcggggcaggatcaactgacattgttatcattagcctaggcggtatcaacgacatcgaaaccgtgcgctgcggcggcgatgacatcgataacaagattgtcgaactggtcgctgagaaatacgacgtcgccatcggcatccatgacgcggaatccgctaaaattgaagtagggatggtgcactgttctgagcagctggagaacctctccgtggagattatcggtaaatctctggagacaaacaggcccaaaaaggtcatcatcgattctatgctggtggcagaggcagtggagccgtacatgcaacaaataatcagtggactcaatattgtcttggagcggctgtccccggagttgatgatgggggtgtacaataacagcgtggcggttggcggcactagcagactgcgcgggatgaaggaacggatcttcgatgaaatatcgatcccaatagaagttagcgacgatcctatgacggtggtagccaaaggtacggcaatcgtcgccgccgagcctcttgccctcgagcccgaagtccgtcttagagccatgaagtga

SEQ ID NO: 9673 - DNA, 645 bp, synthetic construct
  source 1..645: mol_type = other DNA
atgatcgaggacaacatccgggtgcttcggcaagcagccaaggtttcctccaatagtggctacgagatcgagaaaaactggtgcgtgatcgccgggaatgctgagataattgataaaatagcttacaaggccattgcaagcaaccaccgagtgaaaatcatcttccgcgaacacgtcatgctgaacgacgggaaattggacaaaaagtttgacttcatcatgctgtatggcaacagcattgtgattgatgagttcaagaagctcgccgaccagtacggtggagcctatgtgaggatactccataagtatttgattgaagagccgaatctcatggtatttgttgcgcctgataacgtcattaagaaaaccgtgagcgtcatcgaaaaatcgaagatctccttcgccatcctacaggattcacagactaccgccttcatcgacgtggacttaagtaatgaggtgaagctgcccaattttatcaaatctgcactgaagccattctacaacgcgaacgaagtggttctgagcacaatcctgatttccgtcgataagaaggaggaaattaagaaagtgcagagcatagctacaagcaacagaatcttcgtcatcgactttaaggacattgtaacggaggattactcatga

SEQ ID NO: 9674 - DNA, 696 bp, synthetic construct
  source 1..696: mol_type = other DNA
atgaagattgagaacacaaatatgaaacgcttcattgccctgtccgacatcattagcctgctaaacatgacaagcggattcttatccatcatcttcagctttaatcacgaatttaatatcgctgccatcctgctcattatcgccatcatgttcgactcggccgatggttgggtcgcgcgaaagattaataggcaggacgagttagggtttgggaaaaacattgattcactgagcgacatcgtcagcttcggagtggcccccgcaatatttctttacagttgtatcaacaccaccccgggcatcttccagatcattgtaacgattgtctgcctcctgattgtggtttgtggcgtgctccggctgaccagatataatgtgattgctggcaaaataaacactaacgattttattggattcccaattccagggatgtcactgatgatcggttctttttatctcagcggcatattcaatccccatatcgcaatcctgttgagtatcatagtgtccttgcttatgatcagtaatatcaagtaccctaagttcgataacatggctctgattggcatatcctgcatactgatcataatcctgatcctccctatcgacatgattctctttaacattaacatccccgcgatcctattgcttttcttctgcctgtactacctcatcatcaacctgattaagaaatga

SEQ ID NO: 9675 - DNA, 1170 bp, synthetic construct
  source 1..1170: mol_type = other DNA
atgaacgacaagaaaccacgcgacccactgtatccaaagggtttcgaagagactcggaagttaaagaaccaactcaccaaggaatacagcaaaccaaataaaaaggaggatgaactaaccccgcttaaaaagctcaaccacaagcttggagtgtacctcagccctaatagcgttgagatctcaaacgatgagaagaagaagaaaattggcataatcataactacgctgatactgatcaccctgattagctcagcgtactatttcctgatctatgagcccgctcaggaagagctgacccttgcgaagacaaccaagctcaacgagttgcacgagatatacaacggacccctcactacctcccagaacagtattttgttggaaaaccagatcaatgatgggaaaactcccgaagagatcgagaggatcaacatcctgacccccgcaaccaaagactggcagtcctttcacaaaaagtcgatttacacaaataaggataaatataaccgaactatggccatatattcaaatgagagtaagaacatcatcctgagcacaacaaaagccatcaagattgtcaacgagaataacgccgaagtgctgagcaaaattaagttcgaagagccaaacacggtcagcgttcccattctcatcagccggctgcaggctggagcaggcctcgtaaacgtaggcagcgtggtggacatctacacaaacaacaataatacaaacgagaattacactcctaacaatacgagtcctaatatcagtggctgcaccgtgctcgccatcatgagatatgaggacaatggagagatcgactccaaatactctaaatccaatacaatcatcaaggggaaccataccaacccgaaggagaatacgaaggagttttcctcagacgtcctggagctgattaaggggtcgattattaatgggtatgacgaagaaaaaaccattgaaattcttaaaaactacggcataaagctaagcaattacgagaggcagattaacctgggtgacttaaatgcccagtatatgctgctgatcgagacccctcaagataaagtggaatacgtgatcaacaacatggaaaacatcattttgacaatccccactaccaaggctcctaattggatggtcaacgaaataagctccacgtaccaggattga

SEQ ID NO: 9676 - DNA, 720 bp, synthetic construct
  source 1..720: mol_type = other DNA
atgaacaagccaacgattagcaccattgtcattatcatctgcatcctgataattggactgtacgccatgggcgaggtgaactacttttcatctaaaattgctgtggaacgcaacatcgactccccaactattctgatacccagcattggagtgaatgagaagatcaataatgtcagtctcaaccaaggcgtactgagtgatcccggcgagaacatccccactaaggattacgtcgcattatatgggcacagaacccttcagggtagcccctttttccggctgaacgaactttcaattggggacagcatcctcctcgagtggccgggggttggcgagctgaactacacaattaccaatacaaccatcgtgcctggcactgcggatgtgcctatcggtggaaacgacagtttgttcctaatcacctgtgaccctatcgggtccacggccaataggataatcattgaaggcacactagagaagcagaatcctattaacaacgaaattatcaaggaaaacccacaggagtccaatgccatcataatcacagctatattctttatagtgggatgcatcttcagctatttctatccaaaagacaatcgaatctacatcttggccgttatcctgatcatctcggcactgctgttctattcctgcatcaaccccatcccgagcgagatcatttacgagaaaattatatttctcaacgggggcctctga

SEQ ID NO: 9677 - DNA, 375 bp, synthetic construct
  source 1..375: mol_type = other DNA
atggatgttgataagaagtatttctcaaacattacaacacgagagcgggcgatcttcgaaggcgccattagcatgggtgccctgttccaccagttcgtgggaaccccagtgaacaaatacaccaagaatggcttggagaaaagcatggaggactccctacgccttcagcccgcaatcgaagacgtgaacgtcaagatcagatttgacaaactgaaggaaagtatgacggagtttgactacacttctctgaacggggatatgctcgatgtgaaaatctacgccaaggtcgacaatgtgaaggctataattaggatagaatttatcgaggagctcaattacccgctgatgtatgtagaaaacatcaccgaggactga

SEQ ID NO: 9678 - DNA, 1158 bp, synthetic construct
  source 1..1158: mol_type = other DNA
atggacgagaaatcaatagacaaggacgtgatcctcaaggagctggatgaactccacaacctggaccacaactatgcagatgggaggattctcggcagcatgtgcactgaggcccatcctttcgcaaaagagatctattacaagtttcttgatacaaacctgggcgaccccggtctttttaagggtacaaaactgatagaaaataaagtgatcgaaagtatgggcgaaatcctaagcattgagaaaccctacgggcatgttgtaacgggaggcacggaggctaacctgatggccataagagctgcgcgcaaccatgcacggaagtacaagggcatcgtggacggggagatcatcatccctgaatccgcccacttctcctttaaaaaagccgcggacatgctgaacctgaagattgtcgaggccgatctggacgataattataagattaatgtaggaagtgtgaagcggctgatctcggacaaaacagtcgctatcgtggccatcgccggcacgactgagttagggctaattgatccaattgaagaaatcagtaagatcgcctacgaaaataacatctatttccatgttgatgcagcgtttggcggcttctctataccatttttgagagacatgggctacgaccttcctgttttcgatttttcactggatggggtctgttccataactattgacccccacaagatgggtctggccccgatcccggcagggggcattctgtttcgcaaggaagagtacctggacgtgatggccgtggactctccatacttgaccgtgaagacccagagcaccatcgtcggaacacgatccggtgctgcttctgccgctacctatgcagtcatgaagtatttcggaaagaagggatacagcaaactgattaaggagctgatggacaacacccagttcttaaaagagaatctcgagaagatcggatacgagatcgtgtgcgaaccagaattgaatctcatcgctttcaatcaccccaacatggagaccaatgagttcgccgagaaactggagggattcgggtggaaagtgagcgttgcgaagtgccccgtcgccattagggtggtacttatgaaccacattaaactcaaccacctcaaggaattggtggaggatctcaaggagatattctga

SEQ ID NO: 9679 - DNA, 2277 bp, synthetic construct
  source 1..2277: mol_type = other DNA
atgtatgtgaaaaagttcgaggatctcaacaaatccgacatcccaatcgctggaggaaagggcgctaacctgggcgaactgacccaagccggcatcccagtacccccgggcttcgttgtgaccgcacagacctacgagaagttcatggtggaaacaggcattaacgatcaggtgttgtccattctggatgagattgacatcaatgacaccaaggctctgcaagcagccgctgaggaaattaaagcgattattaatgaagtccccatccccgaggatatgatattgatcattaccgaggcctacaatcagctttgtcagagatgcggcgaggaggatgtggaggtcgccatccgcagctctgcgaccgccgaggatttgccggaagctagcttcgcaggtcagcaggacacttatctctatgtgagcggcaccgattcagtcctggagtacgtgaggaaatgttgggccagcctcttcgaagcccgcgctatattctacagggaagagaataacttcgaacactccaaagttctgattgccgtcgtggtgcagaaaatggccaacgctgacaaggcaggggtcatgtttactgtgaaccccagcactggggaagacatcgccctgatcgaaggaagttggggacttggagagtctgttgtgtcgggtgatgtgacccccgataactaccaggtggccaagaaggacaacgacattatcaatgtgaccgtcagcgacaagaaggtcatgtacgtgaacgacgaaaacgaaacaagcgtgaaggtggatgtgccagaggacatgagaaacgagcgggtgctctcggacgaggagctcatcgagctgacagagatgggtaagcgagttcaggctcattacggtgagccaatggacactgaatgggcattcgaaaaaggagagctcttcctcctgcaggcaaggccgatcactacattgggggacgtgaccggagaatccgtggaaaccagctctgacactggcgaggtgctggtcagagggctcggcgcctccccgggcatggctagcggcaacgtgaagatcatcctggacattgacgagttagataaaattaaagatggggacataatggttaccacgatgactaccccagacatggtgcccgccatgaagagatcaagtggcatcgtcaccgatgaggggggcgtcacatgccacgcatcgatcatttcccgggagctgggaatcccttgtgttgtcgggacgggtgacgctacaacaattttgaaggaaaatactggggtcaccattgacggtaagaagggacttgtatttgacggcatctcagaaattaaggaggaggccgtacaggtcaaggtgtccgctgaggccgcccccgtgataacggtcaccgaggtaaaagctaatgtgagtatgcctgaggccgccgcaaaagccgcggcaaccggggccgatggggtgggattgctacgaacggagcacctgatgctcacggccggcattcaccctggcaaattcatcgctgatgggagggaggacgaactaatagacactatagccgagaatgtgatgatagtggcagatgagttttatcccaaacctgtctggtaccggacactggacgcccctacggacgagtttatcacactggaagggggagaaaacgagcctgaggaacacaacccaatgctcggctggagaggaatccgccgcgaactggatcagcctgagatccttaagtgcgagtttaaggcgattaaaaaattacacgagaagggctacactaacatcggaatcatgatcccactgtcccagagccccgaagagctgaagcaagctaagtcactttgcagcgagattggccttgaaccacataaagatgtggattttggtatgatggtggagatccccgctgcagcactgacaatcgaagattacattgatgtcggcattgactttgtaagtctgggaaccaatgacctaactcagtataccctcgcggttgaccgaaacaatgaatatgtggccaagcattattctgaagagcatcctgcagtaatgaagctgatcgagatgacaatcaaaaaatgtgttgaagccggggtgaaatgcagtatatgcggccaagcggggtccgtcccccgtatcgttgagaagctggttgagttcggtatcacaagtgtatcttcaaataccgacgccatagctgaggtccggaagacggttgcgagggcggaacagaagataatcctggatgccgcccggaagcgcttagaatga

SEQ ID NO: 9680 - DNA, 483 bp, synthetic construct
  source 1..483: mol_type = other DNA
atggtgcgtgcttatacaagacgggactacatccggaaaacccccaattcaagaattgtccagtacgacatggggaatctgaaggacgagtttcccgtctccgtatccctggtggtgaaaaagcccgcccatatacgacacaactctctcgaggccgccaggattgccagcaaccgcctaatgcagagggctgccggtcgattgggctaccacctgaagctgcgggtgtatcctcaccagatcgtaagggaaaacccgatggcaacgggggcaggggcggatcgcgtccaaagcggaatgcggaacgctttcggaaagcctatcagtgtggaagccattgtcaaaaaaggccagcgcatcgttaccatagattgtaatgagaagaacttcgagcaggcgaaggtggctcttaagagggccggcatgaagctcccagtgccatgcagaatcgtggtggacaagggcgcagatctggttaaatga

SEQ ID NO: 9681 - DNA, 228 bp, synthetic construct
  source 1..228: mol_type = other DNA
atgaatgtcaagggcaagatctacctggactacaataataaagaaagtgcggagcttatatttaactccttggagatcgacaacaagaactatctcaaatcaaaactgaaggaagacaagatcatctacgagattaacagcgagacactggggagcttcctcgcaacggccgatgacctaatcgcttctgagattgtgattgaaaaaatactggatgccacccagtga

SEQ ID NO: 9682 - DNA, 1137 bp, synthetic construct
  source 1..1137: mol_type = other DNA
atggagtgctattaccaccctgagaaggagagtacagccaactgcgccatatgcggaaaaagtgtgtgtggggagtgctccctggagatcgcagggaaagtttactgtaaggagtgtctggagaaaattgtcggtctaggtatccagaataacatcccggaagagaacaagtccgatgaacaaaaccccatcgtcaccgagtcacctgaggttaatgcgcagagtgtagacgataatatataccagccccaggaggaaacagacttcgagataccatatactcctcaagaggaagtgcctagcaaggagtttaaaggcatttccgatgactcaccctacaatatcaaagaaaacatcgagtatacgggaggcctcgaatcctcttacacaatcgattccgatatctaccaaaagcctcaagtggagcaacagccacaggtcgctcagaatgagctggacattaagcagcccaccttgaactcgatgaacaaggacgatttcatctatcccgaccacgactacgaaccacccaccactagcgcccgccaggagttagaggacaagtatgaaaaatatctcgacgatttgtacttcgacgagaatgaagtgccactgggcgagcagctcgcaaaggacgaagcccagtacggctcgttaaccagaaaggaatatgcttctaagccgaagaacatcgtggagcctcagatccccacccagaaagacgagccaatcatagaaacccccgaagagatggaagcccgaattagggccgagatcctaaaagagcagggactgatgacagatacccagagcattgatagcactctgaaagaagagcttgagtccagcaaggggaaaaagctctttgggctgcggaggaacaagaacaatgaagaggaactgatcacggctagtgaagataaaaacatccataaccttaactacaaggacgagaaggaacccatgggcgtggtcgacatactgctgaccatcattctggttattgtgatactgattgtaatttactacatcgtgtaccttttcctcctcagctcaacttatccaacattcatggacgcagtctttgcgatccggaacccgcagaatgtgattaatagcattctgacgcagttgtga

SEQ ID NO: 9683 - DNA, 1083 bp, synthetic construct
  source 1..1083: mol_type = other DNA
atgtcccaagtcttggatatcctcaaacgcgataaggagctctttttcagtgatgtggagatggaatgcaacaatagcgacacctcctcagacatgaatctgatcgccgacttcaccgagtacaacccgctgcacaacggccatttccactgcatgaagaccgcaaagcatatgttccctgacagtctgttcgtggcgattgtccctggactattcgagcggagtggcagggggattccatacatactgcccagagaaattagggcagagatcgccatctccgtgggcgcggatattgtggttgaggggcctcctatggggatcatggggagcggccagtatagcttatgtctttgcaagatgtttaagtcactcaacaccgactacatcccaagaggatacaagcccaaggagggttttgatgagattctgaagcggatcaatttaggacaccatatagccccaaaaccgtataaaattgtagacaaaacggctcatgagactatacttaacgataagcttgaggaggacaattacgtcataacaagcttcagcaatagcttgagcaaaatcggctttgattacacaaacaaatttatctttgtgaagcgcattgaaggggtaagcggcacgctgatccgagaaagtatccagaaggacaacttcgacaacgtgctaaacatgatgcccagcgagaccatcgaagtgctgaagcgagagatcaagaataactccataatttatggcattagggacgtcgaatcaatcctggatactgccaacacattcaactttgaggagctctcggccctcaacctgttcaatgaaaagctggctaaaaacattgttaacaataagccctatgagaatctcgacgagttggaaaaagtgatcctgcacggattctcatcgcactttcaccagagagtgctgagcatcttggaaaaccccatccccaaaaaaattatttctaagtacatcgaaaagtacccatccaacatccgggttctcggttatcgcaataaagaaatcctggagaagttcataaagaaagtcaataatgaaaacatttcccttctgtga

SEQ ID NO: 9684 - DNA, 1257 bp, synthetic construct
  source 1..1257: mol_type = other DNA
atggacctggtcatcaagaattgcaagctagtgaacaaaattggcgagtattcaattaaggtcgaaaatgggaagataaccaagatctcaaaaaccccgctcaaggccgataaagtaatcgacattaagagcaactacattatgcctggttttattgacccccacatccatttccgagatcccgggctaactcagaaggaggacttcaagacaggcagcaaaagtgcggcgaacggaggctttaccacggtgatcgacatgcccaacaccatccctaaaaccaacacctacgaggccctcaaggagaagattgagatcgccaagaagaaatccgttgtgaactttgagcttcaggccggacctaataatcttgaggaaatgaaaaagatgatcaaattgaaccccatttctttcaagatcttcatggacctcgagaacgatgaaagtctggaggagatcttcaagaatctgtccatactgaaggagaacaccaaatacaacggcctggtggcagtccattgtgaaaagaagtccattgttgagaatgagactgccaagctgaaagagaagaaggagaatatcccgatcgattacacgtatgctagacctaccacaagtgaagacgccagcgtaattcaatctattgaactcgccaaaaagaacgacctgaaactgcacatctgccatttaagctccgctaagtccttgcatatagcaaagaacgccagcaaaaacatggatgtgacatgggaatttactccccaccacctgcttctggacaacaccgcctacaatacatatggtacattcataaagacaaaccctccactgcggccaaagaacgaaagcgtcaggatcgaggacctcgacgagacttcgatcataggcacggatcacgcaccacacaaaatcgaagacaagaccaaaggcgtgtggaatagctcaccaggaatccccaacttagagacggttgtgccactcatcctcactgaggtgaataagggaaatattaagctggatatcattccgaaaatcttctctaaaaatgctgctatggcctacggcctgaaaaacaagggggaaatagcgatcggtaaggatgctgactttactgtgattgatttgcgccaggaagggaaattcaatatcgatgaatttaaaaccaaggcaacatactcgcccttcgacgggtggaattatattggcaagcccgtgatgaccatcgtgaacggaaacccagtcatggacaaactgtga

SEQ ID NO: 9685 - DNA, 1236 bp, synthetic construct
  source 1..1236: mol_type = other DNA
atgattgtgtttaatgatgatggctgtattaaatgcggggcctgtcaggggacttgccctacctccgcgatcgaggtcacaccgaacgctattgtccattgcgacacttgcggggaggagccaaagtgtgctgacgtttgtccgaatggtgcccttaaagtcgaagagtacgagatcgctgagggcatctcccaggcacgcttggtgtttaacagcatactgtgcgaccagtgcgggaaatgtgaggaagtttgtccacaagaaactataaaagtcaccgggacaaaattgaaggaggtggaagggttctgtgtaatgtgccagaaatgcgttgacatctgcccagtggacgtgatcggggtgcccggggtgaaggagcccgcagagtatgacctggacctcaagggaaagggccccgtgtacattaaggactgcgtgggatgcggcacctgtgtggacccctgtcccgtaggcgcgatcactctggatgaggtcggcagtcctgtgaccgtgaatgatgattgtatcagatgtggactatgctcccaaacgtgcccatggaatgccatattcattgccgagaaaaagcctatcaaacggacaaaggaaataaaatcatttaccttcgattcagccaagtgtatcggatgcaacacttgcgtcgaagcctgtccgggtgacttcatcgccgctaacagttcgagcctcacggtggccatccctagcgtatgcgccgcatgtagcttatgcgttaacctttgccccgttaatgcactggaaatcgatgtggagtggggcgaaggcagccctgtggatgcggaaggcattggaagggacgtcgagaagtgcgactttataggagcatgtgctaacaaatgtcccacagaggctattcgcgtggtgaccaagaccggtatgtcctgcccagccctggtcgagaccgacgccgagccatctttcacgagttgtattcgatgcggagcgtgtgccagcgtctgctctaacgatgcactcaaggtggaacagtacgaagtaaccattaacggtgaagctgttgctagggatcggatcgctttcaacccaagcaagtgtaaccagtgcggcgactgcatcgaggcctgcccctatgacatgatccacaagacagaaaatcctaagctgcccatcgccggcttctgcacactgtgtggtcagtgtctcgaggcatgccctgaggatgccctgtgctacaagtga

SEQ ID NO: 9686 - DNA, 1428 bp, synthetic construct
  source 1..1428: mol_type = other DNA
atggtgaaacttaccatggaacccgtgacacggatcgagggacacgctaaaattaccgtgcaccttgatgacgcgggaaacgtggaggagacaaggctacatgtgatggagtttcgaggcttcgagaagttcttacaaggtcgtcccgtcgaggaactcgcccgcatcgtaccaagaatctgcggcatctgtgatgtccagcaccacctagcagccgctaaagccgtcgaccagatctttggctttgacgactatgacattctgcccgctgcctataggatgcgggagattatgaactgggggagttacatgcactcccatgccctgcatttctacttcctcgcggcacccgatttaattattcctaacggaacccggaagaccagaaatgtgttccaggtgatcaaagacatgccggaggtggcacttcaggccatcaatatccgccggaacggccttgagatggtgagaaagatagggggccggccaattcaccctacaagttcgacccccgggggtattagcaccgaactggacgacgaaacgcagaaagatctgctcaacagggccaagcaaaatgtggagctggcccaggctactttggatctggcgatccctgtatttgaagagaatattgacctgatttcttcactggggaattttggcgatactcgccactgcggtctcgtcaagccggatggaacatgggatgtctacaatgggaacgtcaagatcaaggataaggatggaagcgacctcctggaatacaggaacgaggagtacacggacatcgttgctgagcatgtaaagccgtactcctggctgaagttcccctatataaaagaactgggttatccagagggtatttacagagtggcaccattgagccgaataaatgtgtgtgacgacatgcctaaggaggcacctcttgcaagagatgcgctgaaagactttcgttcagctttcggctatgcacaggcccccctcttgttcaactatgctcgcctcatagagctgctagcctccgccgaatgtgctgccgccgcactggaggaggatttgtctggccagaagttcccagaagaactggagcggactgaagggaagggcgttgggatagttgaggccccccgaggcacgctgatccaccattacgagagcgatgagaatggactgaccactaaggctaacatcgttgtggccacaatccagaacaaccccgccatggaaatggggattcaccaggtggccaaggactacatcaaacctggcgtggaagtcgacgacaagatctttaacttgatggaaatggttatcagggcctacgacccatgcctgagctgcgcgacccactccatggacagtcaaatgcgcctcgctgaagtcgatatcgtggacagcgagggaaacctcataaaaaaattctga

SEQ ID NO: 9687 - DNA, 927 bp, synthetic construct
  source 1..927: mol_type = other DNA
atggccgataaagtaaagataggcactatgtggtttggcggatgttccggttgccacctttccatcgcagatttccacgagtccttgattgatgtgatggagtttgccgacttcgagttttctccggtgctcatggacactaaatatgatgaggtcccagaattggacataattattgtcgaagggggcatccggaatgatgaaaacagagagctgtcagagatgttaaatgaaaaatccaacatggtgattgcgtacggcacctgttcttgctacgggggcatcccaggtcttggaaacctgtggaccgttgaagagctggaggaagaggcctacatcaatagcgtgagcaccgtcaaccccgagggaatcataccccatgaagatgttccccacctcgagagccgcgtgcgccctatcggagagacgatggacatcgacctaatgatcccagggtgcccaccccggtcagacgtggtggctgaagccattctaacactgctgaaaggggaaacaatcgaactcccaagcactaacctttgcgaagtgtgtcctcgagagaagccaccggcgggtctggctatggacttcatcaagaggcaattcgagctgggcgctcctgagccggatctgtgcctcattagtcagggactcgtgtgtatgggtcccgcaacagtctcgctgtgtggagcagagtgccccgccatcggcatccagtgcaggggctgctatgggcctacggctaaggtattggatcagggagccaagatgatcagtgcaatagctagcgattatggggtgcaggaggacaaaacggtcgaccctgagaccgttgccgaccaactggacgacattgtcgggaccttctacacctacacactccccgccgccctggtgcccatgaagatgcagaagggcggcgaatga

SEQ ID NO: 9688 - DNA, 426 bp, synthetic construct
  source 1..426: mol_type = other DNA
atggccgacgatgtaaagattgtcatgttttgctgcaactggtgttcatacggcggagccgacaccgcagggacagcacggatgcagtaccctccgaacatcagggtgattcgcgtgatgtgcagtgggcgcatcgacccacaatttatactgaaggccttcaaagaaggggctgacggtgtgttcgtggcgggctgtcatatgggcgactgccactatgatgctggcaactacaagcttgatcggaggatgagactcgtttataagctagtcgaggatatgggaatcggaaaagaaagactgcaccacgactggatatccgccagcgagggcgaaaagttcagcgaggctgtcaagatgatggtgagccgaatcaagggtttggggcccgcgcccctgaaaaaacagctcaatgccgagggatga

SEQ ID NO: 9689 - DNA, 1236 bp, synthetic construct
  source 1..1236: mol_type = other DNA
gtgcgcaatgtgtatgaagacgctgagagggcaaaagataaaaaggcagcaatcggtgccgacatcaccatcgagaacttcactgatgaaacaatcaatgctattgacatgattgatgacttagacgacctgagcaaacagacaaagaaggacctgctgaaagtgggcgttgacactaacgaggaaaatagggcgggctcatttctgcaggtggatcagagtaatatcttcaccaacaattccatctcagactcaattgaggtaatgaacatgggtatagccttggagaagtattcctggctcgaagactatatgtggaatgtggtcaagccagatgcggataagtacacggctaagaccgccctgagagagaaggaggaaggtgtgacaagcgggtattttgtgcggagcctgccaagcactaaagaggtcatgcctgttcaagcctgcatgtttatcagtgatgccgacatcatgcagacggctcacaatgtcataatagccgaggagaactctgaactgcatctaatcaccgggtgcgctaccggggatgacattagctctgccatgcacgtgggggtgagcgaaatgtatctcaagcccgggtcaaagatcactttcacaatggtccacaactgggccgaagaagtcgaggtacggcccagaacgggcatcaagctcgaggataactccacctacatcaacaactacatccttacaagcccagtcagcactattcagagcttcccgacggcctactgtgacggcaaaaactcccgtgccatcttccagagtatacaaggcggcaagaaggattccatcattgacgtaggaagcagggccctactgaacgccgagggtgctaaggcagaggtcatttcccgggctgttgcgcaggatgagtcgaaaatatacgcccgaggacatttggcaggcattgtgcccaatgtgaaaggacacctcgagtgccacgggctggtgctgtcagacgacagtttcatctacgcagtgcctgaacttgaagctagttccaccaatttggagatgtcgcatgaggcggccgtgggcaaaatttctgaggacgaaattaactacctgacaagccgcggaatacccgaggaggaagccgagtccatgattgttcgcggatttctgaacatggacatcaccggccttcctgatgaactcgcacagcagacccaaaacatgatcgacatgagcctcgatggaatgtga

SEQ ID NO: 9690 - DNA, 756 bp, synthetic construct
  source 1..756: mol_type = other DNA
atgctcctggagatagaaaatttggcggtggaagtcgccggcaagcgcgttctgaaaggggttaacctgtcaatcgctgaaggcgaaactcacgtgctgctcggcccgaatggcgccgggaagagtacactcttccttacaattctaggtttcccacagtatgatgtggtagaggggtctatcaaatttaaagggcaagacataaccaacctgaccacagccgaaagagttcagcttggcattggcgtgagcttccagactcccccagcaattaggggaattagcgtgggcgatctcctaaagatcatatccaatcaggacgtgcgagaagaactgaacccaaggatgaaagagctggctaaccagctgaagttcagtgacgagtttctggaccgtgacgtcaatctcggattctcaggcggtgaggtcaagcggtccgagatcctgcaactgctggctcagatgcccgacttcaccatgtttgacgagcctgactctggggtggatatcgaaaatgtagagcttttagccagcgagatcggaacgttgttagacaaggacaagccccagcggattagacaacgcagcgggcttctgatcacccacctcggatacatcttgaactttgtctccgcagataaggcgcatgtgttgattgatggagtcatctcctgctcgggcaaccctaacgagatcctcgaggatatccggaaaagcggtttcaacggatgcgtggagtgcgcccagtgtctgtga

SEQ ID NO: 9691 - DNA, 267 bp, synthetic construct
  source 1..267: mol_type = other DNA
atggagaacaagcagatacccaggcgcgaggagaagctttggagcgagatcaaaaactaccaggtcgcgaccaacaatgcacggattctgggagtgctggacgaactaatcattaatgaaaagacgggcaagatcgtggacattgccatcagagtcgagagcgatcggaatatacacgtgaaaggtgctaagcgaaacggggacctcctgctcgttccattcgccaaagtggagaaagtgggcgaatttatcatcgtaacagaatga

SEQ ID NO: 9692 - DNA, 609 bp, synthetic construct
  source 1..609: mol_type = other DNA
atgatctacgcaattttgatggcggggggaaagggaactaggctggagaccccctgcgagaagccgctttttcgcctgcatgacaagcctctcataaagtacgtgcttgataatcttaaggagtccaagctgatcgacaagatcgtcatcgccgtcagtccccactcctgtgagaccacaaagtacctaaaaagcctgaacgacgatttcgaaatcctcgacacgagcggcaaagactatctggtcgatttatcatatatcctggattacttcgagcaacggtcgaaagaagacatactgctctttatcaatgccgatttaccattcattagcgctgagacagtggacatcgtgttggagtattacctaaaatcagataaagacgctctctctgttctcgtgccagtagaaatcttcaacgatctggggctggactatagctatgaatttgacggcaacgtcccctccggcctgaatgtgctgaaaagcatgaacataattcaggacgaaaatcagattgtgattcctaaggtggaattggcactcaacattaacaccctcctggatagtaaggttgccgaggagctgtacaaagagtactacatctga

SEQ ID NO: 9693 - DNA, 1470 bp, synthetic construct
  source 1..1470: mol_type = other DNA
atgtcttttctgagcaagattttcaacaaggggcctaaaccagtgatagccaagtcccgagaaggcaacctggcgacacttaccgcccagaaggcaggccccgcctcacccggtgttgtgaaaaaacctgacacgttttacgtcaccgcttccgtggaactgggcaacactaccactaagtgtatagtcatggccacaaatctcaacactagcgagtcttaccttctaaacaaaactgttaaaatgacaagggacattcgccaacctaaacccggagaaaaagtcttcggtaaaaccgtgtggggcattgagctttccaaggaagctgtaacagagctcgtgaaagacaccgtcttggagagcttgagaaagtgcaacgtggataaagataaggacctggattttgtggtcagatcaacgggagtaacagctggcttcgccacggccgaggaggcggggcagctgattatcgccctggcagacggatgtctggaagccgacatccccccgcggaagatgtcccccgccatgagcattagccagcttcctgagcgcctgcaaaagcactccctcctggagaatatcatgtttgatggggccgtggtaagtgtggtgccccctgagggaaaagagaccgtggcaaatgagatggagggagaacttgtgaccgcaggcattaagctgggggctaaatggaccgatgtggattataggaacccgtgcgtttccctggatttcggctctacgctcgccggccggatagtcaatgaccacgaaccctatgccaacactatcggaaacttcctcggcttagcaggggtggttagtgattcattggctaagggctccggtctcatcgacaaaaagaatggggctgccctggacctgtactctgacaaggcaatgaaaaaggctaaccacaagaaggcccaggtcaatgccttagaagcccataaactgattaatatccggaaggtgccaatggacgttgaacggttcggaacggtgccactcaaccccgaagctgctgagaaggcaggaactaccctcataggctgcgacgtgggcttcaacggggataagctggacgaattaatggaattgggtgcgcagttctacgactcggatgggctcccaacattgctaagcaccctggactatgtcagtactaatattgtcacaaggctcctggatgttgcatttgaggaggacgtcatcgtgccaggttcaagcctaggaatcacaggaagggctgggatcaccgggcgcaagcctcagctgatcctggagagcgtccaggacaaattcgagaacgtggtatttgtggaggatggccttgcgctggggtcggccatcatggcccgatgcatgaatagtatgggcaccccaaaggtgccgatcgggggaaagcagggtggcagatgtatcctgaaggaccgtatgaagatgaacggcggcaagttcgcgtga

SEQ ID NO: 9694 - DNA, 933 bp, synthetic construct
  source 1..933: mol_type = other DNA
atgtttcgatttgataaggagcagctcgtggttgatgtggcgggaatgaagatggggggtcagcccggcgagtacccgaccgtgcttgcaggcaccatcttctatgggggccacaatattattagcgatgaaaaggccggggtctttgacaaggatgcagctgaggagcggatcaaaacaatggaagagatgtccgatgtgacgggcaacccctgtgtggttcagactttcggcgctactgccgaggctatggtcaagtacctggagtttgtcggagacgtctgcgacaagccgttcctgatagactcaacggccgctgccgcgaagattgccggggtagagtatgtacaagaggtcggacttaccgaacgggcggtgtacaactcgttgagcatggctgccgaacctgccgaaattgaggccgtgaaaaactcagacatcgacgcctccatcctgctgggtttcaacccaatgaatccaggcgtggcagggaaaatagagatctgggagacagggggcgacgttatcgacaaaggcatcctcgaaatggctgaagagtgtggaattaccaagccattcatggacgtggctgtcactcccttaggccagggagccggacccgccgtgcgcaccagcttcgccgtgaagtccaagtggggttatccagtaggaagcggcatccataacgtgccaagtgcatgggactggctgaggggctacaaaaaagagcacaaagaggcctggcctgtgtgcgatatcggtagtaacatcgttcaacagatggccgggggcgacttcgtcctctttggacctatcgagaatgcaagactagcattccctgcttgcgggatggcagatattatgattgctgaagccgcgaaggatataggtacagaacccgtggaagaccaccccatcaataagctgctgtga

SEQ ID NO: 9695 - DNA, 240 bp, synthetic construct
  source 1..240: mol_type = other DNA
atgagcgaggaaaatagcattccccaggtcatggtttcctcagacgagtttaacgatgtggtcgctaagctggacgccgcagaagagaaagtggatttcacggtgggcgagtattaccaacgcctgggccagcagacaggacgggacgtggggatactctacggcatcatccttggactcatgattctaatcgtggccatcaagttcggggtagcgagtatgttgtctaccctgctgtga

SEQ ID NO: 9696 - DNA, 207 bp, synthetic construct
  source 1..207: mol_type = other DNA
atggtgcagatctccaacaagccaaatataggcggaatgaaaacggccgccgatgacgctgaatacagcagcaagctgctggccagggaggggaagttgttcgcggggcttctcgcaacccggtttaaaggcttcgctatcggcatctgcatcgcaacactgctcatcgtcattattcccttcattgccaaggcggccggactatga

SEQ ID NO: 9697 - DNA, 717 bp, synthetic construct
  source 1..717: mol_type = other DNA
atggccgataaaaaagcccccgccgatggctggccggtgatttccggggactacatagtcggtgaccccgagagccctgtggccgtaacaaccctggccagccatatcgaggccgaactgagcggcgcagcgattgcaggcccatgcaagacagaaaaccttggaatcgaaaaggtggtggcaaatatcatcagtaaccctaacattcggtttctgatactggccggtgctgaggtccagggccacatcacggggcagtcctttaaggcactgcacgagaacggggccgaccccgacaaaaagaagattgtgggagcaaccggcgctattccattcgtagaaaatgtgccactcgagggggttgaacggttccagcagcaactggagatcgttgatctaatcgacactgaagatataggcgccattcagtcaaagattaatgagtgtgtcgagaaagatcccggagcttttgaggaggaggcgatggtgatctctgtcgaaggcgacgacgctgatgaggaagagggagaggcaattcgagtggtttcggcggaaactgggctcatcgaggcccgcatcagggacattaacaccaaaatcgacatggtcggcgctgtgcagagaaatatggccgggaactatgctggcaaggtgcaaggtataatgatcggacttgccttcaccctcatcatcggagtgctgttcttgttattctga

SEQ ID NO: 9698 - DNA, 330 bp, synthetic construct
  source 1..330: mol_type = other DNA
atggctcagatgctgccgatggtccaagtggtccctgaaatgaatttcgcatacgacccagtcagcggggttatcggaagtagcctggggagcggcgtcgttctcctctctatggatgaggtgaacgagcaggtggccaaggtggagttggcggccgacgagcttatggcgtccctagacccctacacaagtcccgtgggatcgtatcccggccgggaaggttcctacgtgaccgccggcctgctgacgaacatcgtatatggcttcctccttgcctcattcattatatttgctgcactgccaatcttacaggccatgggggtgctgtga

SEQ ID NO: 9699 - DNA, 816 bp, synthetic construct
  source 1..816: mol_type = other DNA
atgagcgcgggcggaagtgcagacggtgccgctgccggcgccgtggactcaatgcatttgctggtgctgggcatagttgggggattgctcgggatttacctgaccgcgttcctgggcgaaactatcggatcgctgttcgcaggccttggggccgtctgcgctattgtctggggggctgacgctatccgccgggtagctagctacggcctaggcacaggtgtcccatctataggctacatgagcctctccgttggtgtgatcagcgcctttgcagggatcagtttggctgccatcctgaaaatgccaatggtcggaccgatcgcagccctgctggtggctgtgatcattggcgcggtgattgcccttgtggccactaaaattgtcggtatgaagatccccattatgcttcagtgtaccatcgaaatcgccggggccgccgcactgtctatcctgggattctccgcggcaatagctggcagtttcgatatggccgcagtgtatgagaacgttgtggccacaggctttatcgctgtactctttattctctgcacgatggccatccagcaccccttcaatgcatgcctgggacccaacgaggatcaattaaggacactcaagtgtgccgcaagcacggcttttttatccatgactattgtggggctcatgtccatcaccaccggtggactggggtggttcattgtcttcatcgttggcctgatagggtggataatctcattcaaagcctttgtggtggcctctatgaatgacgccgctagcaccaagtgggcgggactatggcctaaggtagagaactga

SEQ ID NO: 9700 - DNA, 702 bp, synthetic construct
  source 1..702: mol_type = other DNA
atggaccccatcagtttaattttgttcatcgccataggcgggatcatgatcggggcaggcgtgcactttattcctgtcggaggagcgcccgccgccatggccacagctactggagtcggaactgggacggcaatgctggctgccggggccgggctgacaggtctgatcaccgctgcaacgatgacaggggagccattttacataatcgggatcgggggcgccataggcgccatgatcatgatgggtattacgatgctcatcgctaacataatttatatattcggcgtgggcatagttccagcagcctccaaggtgcctgtggactggatcacaaagcgcaatcaggaggcgtacaaaacccccggtaccgaaggccacggtgtgcccgttacctcctttgtgagcgggctgatcggagggctccttggcggcttcggcggcggactggtctactatggcattgacaccgccatcaaccagtcgagtttcgtgagcgatccggctgtcagcattggcctcgcggcgattattggtgtcggggtattcttcattaactccgtaatcgcttcatacaatatcggaggtactattgaaggcatgcatgatccaaagttcaaacggattggaaccggagctatcgcctgcgcaatcgcatctatcgtggtggccatcttttgtatcattctaaccggaggcatctga

SEQ ID NO: 9701 - DNA, 879 bp, synthetic construct
  source 1..879: mol_type = other DNA
atggaccccgtgacattaggtgtggtggcactgatgggggcagtggccacgatcggaggggccgccgaggacttggaaagcgatatcggtagccaatcaaacccgaactcccaagtgcaacttgcgccccagatgggccatctgcaccggatgataaacaaggcggcatccggcgagccagtcgcttacggcgtgtggtgcggggtggccggtgccattgcatatatcgtcatgtcgctgggcatgctaccgatcgtggctatcgcaatgggtgcctgtgtcgctgcttttgtgcacgctatttacactgtgacatcccacatgggaaggatcgtgggacagtctcagtttgagcagcccttgttcatggacgtactgactcagagcctgggccctatcgtgggccacggatttataaccagcttctgcatagtgggaatatcatacctgatgaccatcccaattaatggcaccgcactgcatgtgttccccctcccactcctggccatgctttgggggattgcgctcggtgccatcgggtccagcacgggggacgtgcactatggcgccgaaagtgaatatcagaaattcgagtttgggggaggcacccctgtcgctatccagggagatattgtgactaaggctcctatgggggccaaaaactctatggatgttgtaaacttctgcgccaagttcggcggccccctgaccggcttctgtttcgggctcgttgtcttctttagtttctggaatacagtcgtctttggagtttatggcggcatcattgtcgggattatcattgttatcctactcgttatcatggacaattacctggaggtatttgcccgcaaccagtacggaccatacgaggaggaatga

SEQ ID NO: 9702 - DNA, 1668 bp, synthetic construct
  source 1..1668: mol_type = other DNA
atggtgattaatatggctgacaaaaaattcctgaatgcaatgaaacaaaagtttagtgaagacccaaccgaaaagtcaacccagttttataacatgggtggttggactcaatctgaaaggaagaccgcatttgtgaacgaaggcaaagaaatagctgagaaacgcggaatccccatgtataaccccgacatcggtacccctcttggtcagcgcgctctgatgagctaccaactctccactactgatacgttcgttgagggtgacgatctgcacttcatcaacaacgcagccatccagcaggcgtgggatgacattcgaagaacagtcatagtagggctgaacacggcgcacaatgtgctggagaagcgactcgggattgaggtcacgccggagacaatcaccaattacttggaaacggtaaaccacgccatgccgggcgcagccgtcgtgcaggagcatatggtcgagacagacccactgctcgtcgccgattcatacgttaaagtgttcaccggcgacgatgagctggctgacgagattgacagcgcctttgtgttggacattaataaagagtttaatgaggagcaggctgaggctttaaaggctgaggtgggcagtgcggtgtggcaagcggtgcgcatcccttccatcgtgggaagggtgtgcgacggaggtacaacctcccgatggagcgccatgcagatagggatgtcgatgatttctgcatacaaccagtgcgctggtgaaggagccactggcgactttgcctatgcaagtaagcatgccgaggtggtgcaaatgggcacttacctgcctgttagaagagcccgtgcagcaaacgagcttgggggagtgccattcggattcatggccgatatctgtcagggcagcagggtttacgctgatgaccctgtgcggcagaccctcgaagtcgtcgccttgggcgccgctctttatgaccagatatggctgggcagctatatgagcggcggggtcggattcacacagtatgctaccgcagcatacacagataatgtgctggatgacttcacctactatggcaaagactatgtcgaggacaagtatggagatttgtgcgccgcacctaataacatggacaccgtgctagatgtaggctctgaggttgccttttatgccctcgaccagtacgaagaataccccgccctgctggagacgcacttcgggggatctcagcgggcgtcagttatctcggccgccgcgggctgttccacagccttcgctacagggaatgcacagactggcctgagcggatggtacttatccatgtacctacataaggaacagcattcccggctcgggttctacggcttcgatctgcaggatcaatgcggggccgcgaacgtattcagcatcagaaatgatgaagggctgcccctcgagatgaggggaccaaactaccccaactacgctatgaacgtggggcaccagggcgaatacgcgggcatcgcccaggccccgcacgccgcccggggagacgcttttgccttcaacccactgatcaagatcgcatttgctgataagaacctttcattcgacttcagtaaggtccgggcagaatttgctaagggcgccctccgcgagtttgagcccgccggggagaggactgtgattacccccgccaagtga

SEQ ID NO: 9703 - DNA, 759 bp, synthetic construct
  source 1..759: mol_type = other DNA
atggtgcagttttatccaggcacgtcgcaggttgctcaaaaccggcggaatttctgtaatcccgaacatgaacttgagaagctgcgagaaatcagcgatgaagacgtcgtcaaaatactgggccaccgcgctcccggagaggaatataagagtgtgcacccccctctggacgagatggatgagccggacgacatcgtaagagagctcgttacccctattgatggggccaaagccggagacagaattaggtatatccaattcgtggattccatgtacttcgctcctgcgcagccctacttacgcgcccgctcatacctgaataggtacaggggaattgataccggcactttgagcggacgacaggtaatcgaggcacgggagcgagacatcgagaagctgagcaagatcctcctggagaccgagtacttcgacacagcaaggacggggattcgtggcgccggcgtgcacgggcactctctgagactcgatgaaaacggtttgatgtttgatatgctccgcagacaggttttcaacaaggagaccggtaacgtggaaatggtgaaagaccagatcggcaaggaactggatgaaccggtggtcctaggggagccactggacgaggaaacacttaaggccaaaacaactatctaccgggtcgacggggaggcctaccgggaggacgtggaggcggtggaagtctgccagcgcatacatgtgtccaggagttttggcgcctatgacccaaacgcaggatggtga

SEQ ID NO: 9704 - DNA, 600 bp, synthetic construct
  source 1..600: mol_type = other DNA
atgataggacgctgcacgcacgtggtagactgcagggaaacatcggggatgggaaaggggggcagcctcgcccagcgcggcaccttcgctgagtgtggcaccgatgtatgcgccgtcgctatgtcccctggacggagacacataactaagccggtgtgcgagattaccttcgggctgcgtgagagcaacgttcttaccagtaccgtcgtgctcaacgccggtgcaggggttccccatgatgcgcccgctagcggcgggacattatttggaattacagaaaaggagattgaccaactgaataacttcaaattgctggtgatccaccttggtggcgtggccaaccatatcatctacaaggcacgactgatcctaaggaatgtcaataagccctgtgtgatcatctgcgagtccccagtggactgtgaggattttgcgaaaattggagtgaagaccagcaaagtcatgccagcagacgaagacatcaagactcagggcacgatcaaggacatcgtcacaggcgttattcggggtgaaactatttcacaggagaaactggacgaaatcataagaaaagtgaagctggccctcggcgatgcctga

SEQ ID NO: 9705 - DNA, 456 bp, synthetic construct
  source 1..456: mol_type = other DNA
atggacattgagatatttcctcatagaattttaggaagtgacacaacagaactgctccttaatgaactggagtctatcgatgatgtgcagcgcaccgtcatacacggaccaaggttccccaaaggcgaagcaaccttgcccgacaagtacaaagagcggagggtcataaacattaacggggaagacgtcgtgctgcaggtgaaaactgctcgcatcttcatcgagctcaccatggagagcacaatcaaggagattgaagaggtgtgcaagaagcatattccgttcggcttcgacatcaaccaagatcgggccaattacatccgtaagcacaaaacggttactgacagaatcaagtacggctccgccgatctaccagacgacctggtagggatgaccgaccagtattcagattttgagagccacgtgaatatcatcaagcgagacaacctggattga

SEQ ID NO: 9706 - DNA, 1332 bp, synthetic construct
  source 1..1332: mol_type = other DNA
atggcaaagtttgacgataaggtcgatctgtatgacgatagaggctcactgatagcctctgacgtcccaatcgaggctatcagtcccctgcgcaaccctgcaattcaaagcatcgtgaagggcgtgaagaggaccgtggccgtcaacctggagggagtcgagaagtccgttaagaccggaagcgttgggggagacaagtccaagatcctcggacgcgaactagatttagacatcgtgtcgaatgccgaggcaatttcggaaaagataaaaggaactatccaggttagcgaggatgacgacaccaaagtagagcctatcagcggtggcaaaaggctgctcgtccaagtaccttctcagagaatcgacgttagcgctgagtactccgtggccccgctcgctacagccactgctctggtgcaggctatcattgatgtgtgcgacgtcgacatatacgacgccaacttcgtgaaagctgctgtgctgggccgatatccccaatctgttgaatacaagggatcaaacatagcaaccatgcttgatattccacagaaactcgagggaccaggctacgcattacggggggtaaaggcaaacgattttgcggccgcgaccttgaagaatacattccaggctaccgccctggcatccatcttcgaacagacagctatgtttgaaatgggcgatgccatcggtacatatgagagactgcacctgctaggccttgcctaccagggcctcaatgccgataatatggtgatggacctggtcaaagacaatgcggcggaaggcactgttgggtctattgtgcaggccaccattgcccgagcagaggccgacggggtgatcgcgccccagaaagacttgaccgacttctccatctacaatacggatgatgccgcgaaatggaacgcctatgccgccgctggtgctgtagccgccacaatggtgaacattggtgcggcccgggctgctcagggggtgcccagcaccctgctttacttcaacgacaacattgaatttgccacggggctccccagtattgactatgggcgcgcagagggcgtcgctgtgggattctcattcttcagtcactccatctacgggggcggcggtccgggcctgttcaacgggaaccacgtggtgacgcggcatagtaaaggcttctgcataccctgtgtggctgccgccatgtccctggatgcaggaacacagctcttttcaccagaggcaactagcggtttgattaaggaggtctacagccagatcgatgaatttagggaacctattaatgcggtggccatcgcagccgaggagatcaagggggacatctga

SEQ ID NO: 9707 - DNA, 1245 bp, synthetic construct
  source 1..1245: mol_type = other DNA
atgcagattgtagcagacgtggggggaatccctggcaaggactgcaatgggttctgtaaatactgttactttaggaaagtcaagaaagtcaaaagctttgggtgcgcgtattgccccccgaataagataggctgtgaaaggtgcagcaagggcgtgagtgagacacaaagcgagtttaagtcaccattacaggttatgaacgaggtgcgaaattcgctcatgatgaacatgcacggcggcaaagtaacggccaacatcagtggtgggggagatattagctgttacccccacctagaaacactgaccagcaatctgaatcaaatctcaatccccagcgtgctgtcctatacttgtggaaagggcataaccaatagcgagattgcttcaaagctgatcaataacggagtcgaagaagtctcatttactatcttcagctccgaccctaagctgcggaaagaatgggttaaggaccagcaccctgaagaagctctgaaggcctgcaagatcttctgcgagaacatcaagctgacgggggctgccgtcatcatccccggtgtgaacgacggcgagatactccgccagacgtgcaatatcctcgaggagtggggtgccaagggcatgcttctgatgcggttcgccaacaccttcaacgaaggactgattcttggcaacgagcccattcttaaaggcattgaatcgcagcctgtggaagacttcgccgagctcgtcagacaaattaacagcgaatactccttcagagtgagcggaaccccattgtgtgaccctgaaaccggtgggccatttgcaatcgccaaagatgaaaatgagatcttcttacagtttatcaagcccattaccggagaggcaactataattacatccaaaattgccgcaccattcatctccaagatattcaacaagctagaggtggacagtgtgaacgtagtggcggtggagaaggagatagcttgcttgatcacaaaagaggacctggagaaactcgatttgaacgagatcaaggatgttgcgatcatcccgggacgctcttttgtgcatcagctggacgccgagcgcatccttagtgctgatggtattgagaggctggtggggcgaggcccagacaccctctccgttgatggggagctgagcattgacatgactgatgaaaatgtcatcgaaacagagctcgagcagttcaacgatctggcagatgccatcaacttctttggcatgcggagaatttga

SEQ ID NO: 9708 - DNA, 924 bp, synthetic construct
  source 1..924: mol_type = other DNA
atgtacgagacacttacctttactggtggagtgcacaagagcgaggagtttaaggagctgattgaggacctgggcggattcatcctgcaggaaaacattcaacagatggaactagtactcaacatggcggttcctctcgaggatgtggacaaggtggaggagaaagctaatgagctgcttgctaaaattagcatcgcgccaatggcagggtctgaaatagccatcgttagccccaccctcgccagacaccacctgcctcatgcggcatgcgacatctcagaatatttgcgggaatttggggcaaaggataacatgttgggccttgccaggggggacggcaagggaacgtccggaatcaccgaagaagaaaaagacttaattaacgagcatgatatcgctattttctcgctgggctcctttgaaaattgcatcaaggagaaggcattcctgtacgacgacatcgatataccggtgatcgtcaccggcgccccggacatccctgtcgaggagctgcccggcgccgacgcctatgtgggcgggctgggtcgaatccctagacgcctgaggcggggacccgatgtgcgtgccctcgacaaactggtcgagacatgtgaaaaaatcctgaacgataagaagcgggaaatggctctcgatccacccctggtgccatctatcgttgtcaaaaacgctattgaaaatcaggtgcgcgagattaaagacgtgttcagtcccgccccagtcacttcacagttagacggggtgcgcgtaaaattgaactacgatgattacgccgacgtcatatccaatgtgatcattgacgataaaaagctctccgagctagccgagataaagaagagcttcatgtacgactatatcctcgtaaagattaacagtgagagctctctggtggagaatagtaactga

SEQ ID NO: 9709 - DNA, 519 bp, synthetic construct
  source 1..519: mol_type = other DNA
atgaagatcgtgacgacacctatgtgcgaggaaattgtgaaactggcaggcattagcgactattcgataaacaagaacccagatgacgaaaagggggacttggccatcctcctgagcgagagcaacgtcaagatggatagtcttacaatcaaaatcaatactccctcacaggtgtttgagagtatcaaaaaagtgagcaagatcaccaagaatgaactctctgatgaagaggtgctggtcttttttgaagactacaggttatgtaaaaagtacctcaccagcaatttcaagcgcgacatcaatgtgaaggtctattccaactttctgaaggatatccttctggatatgggattcaacattgtcttcaccgatttcaagtacgtagtttacccggactacttgaaagacaaagttgtagagtccgagaatctggtggagattcagagccacgacaacatttcaaaaaaccccttcgagaagattgagatacggtattccatactagaaaacctgatctga

SEQ ID NO: 9710 - DNA, 684 bp, synthetic construct
  source 1..684: mol_type = other DNA
atgaaagttaccctgagctttgagaagagtgaatcctcagatgtctcaatcatggtggatgccctcagagcttcgtctaccatcacacttgctctaaataacttcgagaaagtgatcccatgtttcacacctgaggaggccttcaagctaaaggagaaacttggggggattgtggcgggggaacgggacggcaaaaagatcaatggctttgacctgggaaactcacccgccgatattaaggactatacaagcgatcacctcattctcacgaccagcaacggtactcgaatactggagaacatgaagagcactgtgctgataggaagcatcattaatgcttgcgaggtagctaataaatccattgagatcgccaataaccatatcgatgtggtgatggcaggagttaaaggcgaatttgccatcgaggacttcctggccgcaggcgagatcctgtactggattctccaggaactcccggactgcaacttaagtgagtacgccaaagcggcagtcttggcaagccggaattacgaatccctgaaggaatccttctttaactctaggtcgggtaagcgccttatcgaactgggctatgaaagtgacgtggagctgtgcagcttgaagaacatctccaacaacgtcgccatatacgaaaatcaggagctgaccttgctgaaggactga

SEQ ID NO: 9711 - DNA, 1173 bp, synthetic construct
  source 1..1173: mol_type = other DNA
atgaaacgcgagctgctgacaataatcggtacggcgcatgtgtctgaagaaagcgttaacgaagtgaaggacgcaatctatgagcagcacccagacattgtggctatcgaactggacaggggaaggtatgccaaaatacgaaataaaatgcatggtatcgaggaagatgacaatatctctgtgacccgcataatcaaggagaacaaagtgggactgtttctggtcagcactctgctgggatacttccagagcaagatcggcgcagaggtcgatgtcgacccgggttccgagatgattggcgctattgaagccagcaaagacctgggcattcccatcgccctgattgatcgtgaaatcaacaccaccttgcagcgggcattgaataagatgggcttcatggagaaggcgaagttcgcatatgggctcatcgctagcattctgggtttcgacaatgacgaagaggagatagatatcgaggagctaaaaaactccgagaacattgatgacatgatggagatgttcaaggatgaagcccctagtgtgtatgaggtgcttgtacacgagcgggacgcttacctggccgggaaaattatgcagataccatacgataaagtaatcgccgtcgttggagccggccacaagcctggaattgagaagtacttggacaaccccgagacattacccgatctgaaggagctcgagatcattaacgataaaaagggcatcccttggcttaagatttttctggctctaataccgattctgttcgttgtgatattctttctggcctactttaatgggataaacattactggaaatatctacgaatttatcgtcatcagtgtaattatggggttcatcggatcaattctcagcggttccaaaatccagtcggcaattgttgggggcatcgtggcgccactcacgatcatccaccccctccttgccgccggctggtttagcgggctaaccgaagccaagtacagaaaagtcaagcaatccgacattaagaacctggtgaaaatcgaagggttcaaggacctgtggaacaataatatctttagaatcctccttgtcgtgatcggcaccaacttgggcgtgagtatcgctacactcgtgatcctcccatcaaaggtgttcattcccttattcatgaagatctttgggggctga

SEQ ID NO: 9712 - DNA, 213 bp, synthetic construct
  source 1..213: mol_type = other DNA
atgtacttcatctttcggtgcgactgcggacgagcactgtatgcaaaggagggcgtagcgacacggaaatgtgtgtgcggcaaaaccatcaaggtgaagtccaggcgcatattccagaaggtcgctaccagagaggaagccagcctggccgtgcaggaaatgcaagacaagatttacgggaacacgggtttcatgaaagccagcgatctctga

SEQ ID NO: 9713 - DNA, 1320 bp, synthetic construct
  source 1..1320: mol_type = other DNA
atgatcgggacgacactcaaaattgtgataattataatcctcattattctcactggatacctgtcaatggccgagctggctgtggtctccatccgaaaggccaaaatgcagaagtacctcgaagatggaaataagaacgctcagatcgtgttcgacctcctggaagacccaaatgagtttttgtccaccgttcaaatcggcatttcactgattggtgttctgactggggcgtttggtgggattaccctggcagagcctctggcgaagataatctatttcataccatatagcgacatgattagtgtggtgttggtggtgctggtcacgacatacctcacattagtcataggggaaattgttcctaaagtcattgctctaaacgaccccgaaaaagtgtcgcttaaggtggccaagagcatggtcattctgagcaagattagcaaacccgccagctttgtgcttgccaagagctcctcctttctgctctgggtattgagaatcgaaaacaagaatgatgagatagtgaccgaagaagagatcgagctgatgatcaaggagggcagggaagacggaactatcgaaaaagaggaggaggacatcataaaacgggttttcaagcttgacgacaagaaggtggaaagcataatgaccccacggaatgagatcatctggattaacctggaggacagtagggacatcaacaagatcaagattgtggagagtaaacgttcgatcttcccaatcgcaaagggcgagctggacgatttcattggagtcgtgcaggccaaagacatcctgtcagtgatgttcagtgaggaggagttcgatatcaatacgatcataaaagaacctttggtcgtatccgagcacctagagaccttagaactgctgaaagagtttaaggaaaaccagggctacgttcatatgtctcttgtaatcgatgagttcgggagcgtggagggtttaattacactaaacgatttgcttgaaggtattgtcggggatattcctggaatcgacgaggaggatgagccggaggccatcaagcgcgaagacggcacctggctcatcgatggcagatacccgatcgacaagtttaaaaaactctttaaattcgaggaccccctgcccgacgaagaggaagacaactacaccactctggcaggctttatcctcagcatctccggcacaatccccgatgaagaggataagtatgaatgcggacgcttcatcttcgaaattatcgacattgatggccaccaaatcgataaggtgctggtcaccgatctggggccccaggaggacatcgaagaggagtga

SEQ ID NO: 9714 - DNA, 945 bp, synthetic construct
  source 1..945: mol_type = other DNA
atggatagcggaatcatcattcaagttgtattactgatcgtcgggttcgtctttctgatcaaaggctcggatatttttgtggacggctcaagcagcattgcctcgctgctaaaggtgccgacaatcatcgtgggtctcacgattgtggcatttggcaccagtgctcccgaggccgccgtgagcataatttcttctatcaacggaaataatgcaatggcggtgagcaacatcattggcagtaacattttcaacatacttatcatcatcggtgttgggacactacttggcgatctgctcatggagaaaaatgtgcttaaccgggacttgcccatcctcataggcgtgacattgctactgacggcgttcatcattattggatggaacatatccactattgagggtatcatccttctggccatcattgtggtgtacgtattttcactcatccattcttccaagaaggacagtcacgcacacgatgtcgataaaccaaagttgagcactaagaagagcatatccttcatcattatcggcctggtgggcatcattctcggtggagacctggttgtcaagagtgctagcactatcgccatctccttcgggatgagcgagaccctcgtaggcttgaccattgtcgctatcgggaccagcctgcctgaactggtgacctcactcacggctctgaaaaagggagaaaaccagctggtcataggcaatgtgatcggaagcaatatcttcaacatgttatttgtgctgggggcctcctccgccatctccgaaattccactcgactcaagtctgctcgttgacgtcatgtttatgatttttatcacactgctgtgcttcatattcgggaaaacccaggagaagtacgacaagaaagaagggattatattcatcgcccttttcattgcatatatggctttcgccatcctgaggaactga

SEQ ID NO: 9715 - DNA, 876 bp, synthetic construct
  source 1..876: mol_type = other DNA
atgtccaaactgaacaaagatgaatttaatgactatatctttacaaggattaatacattgatacatgactacgaactgatcagggagggggaactgatcgccgtcgcattgtccggcggaaaggacagcgtcctgaccctacacgccctcaaaaactatcagaaccaactcgacttcgatttagtagctattagtgtggatgagggaattgagggttaccgccagcacggcatcgattccgccgttagcaacgcgaatgagctgggcattgagctgatccaaaagtcatttaaggaggaggagggattcgccctggatgacatctaccaggacttcaaaagtgcatgcattccatgtggcgtgttccgccggaatatcctcaataaaacggcctacgagatcggcgccgtgaagatcgctactgggcacaaccttgacgatgagatacagtcttttctgatgagcttcgcccgaggggacaccattaagttctcaaaatttgggcccgagcttgacgtgatccaccccaagctggtgccaagaataaagcccctgtggaacacccctgaaaaggaggtcggaatgtgggctatcatcaatgacattaacatccatctggatgaatgtccgtattctcacttgagtctacgggctaagattaaagaatttctcaacgttagcgaagataagtaccctggcgtgaaaaacaacgtgatggaaagcttccagaagatactcaccttcgaaaatgacatatcggcaaaccttaacgagtgtgaattatgtggtgagccaacttcatccaacatttgcaaggcgtgcgagctcaaagaactgatctcccaggactgcgagagccatatctgcaataagtga

SEQ ID NO: 9716 - DNA, 306 bp, synthetic construct
  source 1..306: mol_type = other DNA
atgatcacatgcgactttgccatattgcccgtcggcaccgagactaccgagtgtaaggagtacgtgactgcagccgtccagagcatcaaggactccgggctgagctaccagctgaccggcatgggtacacaaatcgaagcggacgatctagaagagctctacacggccattgctaaggcacaggaagccatcttcaaacttggaattgggagggtgtatacagttataaaggtagacgatcgccgggacctggagaacagaacgctggatgctaaagtgagtaccgtggaggaaatgctcaaatga

SEQ ID NO: 9717 - DNA, 1107 bp, synthetic construct
  source 1..1107: mol_type = other DNA
atggtgagcaacataaaagtgcctattgccaaacccataattggagaagaggagatagaaaacgtggtggaggtgctgaaaagtggaatgatcgctcaaggcccacgagtggctgaatttgagcaaaaattcgctgactgggtgggagccaagtacggcattgctgtgaactccggaacagctgcactgcacgttgccctgctcagctgcgggattggggaaggggatgaggtaatcacaacgccatttacatttattgcaaccggcaatagcattctgtacaccggtgccaagccggtttttgccgacatcgacctcaagacctataccatgaatcctgagtccattgaggcactcataactgagcacaccaaggctattttacctgtacagctgtacggacagtcggccaatatggacaagatcaacgatattgccgaaaagcacgggttgatggtcattgaggatgccgcccaggcccatggtgccacctgcaatggtaggaaggtgggcagtctaggggacatgtcatgtttcagcttctaccctaccaagaacatgacaacttctgaaggtggaataatcacaacggacgatgaggagctcgcggagaacgctaagatattcagagcccacggtgcaagcgtccggtatcatcacgatgaagtaggctacaacttcagaatgactgatatctccgcagctattgggttggcgcagctggataagatcgatggcttcaacgacaaaaggatcaagaacgcagcctatctaaatgaagggctgaaagatgttgacggcatcatcaccccctattgcgcctacgactcaaagcacgtctaccatcagtacaccatccgggtggagggaaatcgcgacgactgggtcgacatcatcaacgagtgcggggtcggcacgggcatccactatcccatccccctgtacaaccagcccatctataagagcctgggcatcactggcaattgtccgcgcgcagaacttgctgccaatagcgtgatctcccttccagtccatccaagccttacaaaagaggacctggacttggtgatcgaggcggttaaaatggccagtgaaaaactcgcgtga

SEQ ID NO: 9718 - DNA, 1167 bp, synthetic construct
  source 1..1167: mol_type = other DNA
atggaggaatataaaatcaagactatcgaggaaggactgaccaagattgaatttccagaatttgacaaggtctcttcggacgctcccgtcttctacaatccccacatggagcttaacagggacctcagcatacttgcaatacaggtgttccagaaggaacagaagcgcgagatcaacatctgcgatctctttggcgggagcggaatacgaggcatccggtacaagaacgagatcgacggagtgggggagatttccatcaatgacatcagtgagaccgcaaaccactacgagaaacacaacataaagctgaacaatttagaagatattgaagtgtaccaacatgatgcatccatgtttcttagaatgaagcggggggaatttgatgtaatcgacattgaccccttcgggaccccatcccctttcctggattcatccggttattgtgccaaacgcaactccctactgtgcgtgacagccacggacacgtcggccctctgcggaacctataaagagccgtgcatacggaagtacaacgccaagccctacaaaagtgaatactgtcacgagaccggcattaggatactggctgggttcgttgccctcactctttcaaaatatgccaagtgcattgatgtcaaaatgagccacagcactgagcattacatgaggttgtacctggagatcaaaaagggctcaaaacgtacagatgaaaccttgaacaacattgggtatatcagccattgtaagaattgtctgcacagacagacgagcaacggcctcgcgagttctattgatgccatctgtccagtgtgcggtgagaaactaattcatgcgggccctctctggctgggccctatccagaatggagagttcatccagaagatgattgaggagactgagaataagaagatcaatagcgaaaaagaggctttgaaactgctgaataaatgccacgatgaggctaacgcgccggccacattctttgacatccacctcatctgcaaaacactgaagatttccgctcccaagttcgacttgatcctggacgaactgaagaaggaaggcttcatcgccgtgaagacccatttcaagccattaggtatgaaaacagacgcatctattgagaatatcaagaacatcctgatccaactgcagagtaagatttga

SEQ ID NO: 9719 - DNA, 477 bp, synthetic construct
  source 1..477: mol_type = other DNA
atggtcaaaacaaaggataatgtgatcaagctggacgacactgacatcaagatcctgaaaataatcaatgaggatgtgcgaacgagctacaggcagattagtcgcagcttagatgtatccgtcggcacagtgcacaaccggattgacaaaatggtcaagtccggagtgatcaaaaaattcagccccgtgatagaccatgaaaagctggggttcgtgctgaccaccattatcggggtgagagtaaagggtggcaagctcaagaattgggaagagaagaccttttttaacaagaatgtcgtgggaatctacgacgtgaccggcgaatacgacgcattcctgattgccaaattccgcaacacaaacgagcttaacgggtttattaaggagttgctcaaagatccaatcatagaacggacttatacccagacggttctagacgttattaaggaggatatgggctcgtcaaacatcctctga

SEQ ID NO: 9720 - DNA, 939 bp, synthetic construct
  source 1..939: mol_type = other DNA
ttggcagtgtgcctgcccgatacgcaggacgacgccccatctatccctataaagctgacgagagtcggggtgaccggagtgaagaaactgctgcagctggatcgcaccaataaacgccctataattctgctgcccacattcgacgcctttgtcgacttgcctaacgatcaaaagggagtccacatgtccaggaacccggaggctatcagtgaagtccttgaaagtgtggccaaagatccaacggtagacattgagtccctctgtgccaagatcgtggaaaagatgatgaccaagcatgagtacgctaagcgggttgaaatctccatgacaacagactacatgttcatgaaagagtcacctgtgaccaaaaataagactcaggagatgagcaagctgatagccaaggccattgggtttagggacgagaagggcaacattaagatccggaaaagcgtgggtgcagaagtgattgggatgacagtgtgcccctgtgcccaagagtctgtccgagagagcgataaaaacaagctcctggaatttctggacgaggagactacacagaaggtcctggacaccgttactttcgcgagccacaaccagagaggcatcggcaccctcctcattgaagtgccagaagataaaaaagtgaaagcggaggaccttatcgacattatcgaaagctcaatgagctcgccggtgtgcgagcttctcaaacgccccgatgagaatgccactgtgatgaacgcccatagaaagcccgtcttcgttgaggattgcgtacgaaacatgatggagaaaatcgctaacaagtacgctaacttgccagacgacaccctaatcacagcacggcaggaaaatcaggagagtatccacaggcacaatgcatatgctgaaaaggtaaccaccatgggcgagttaaagtccgagctagatatctga

SEQ ID NO: 9721 - DNA, 441 bp, synthetic construct
  source 1..441: mol_type = other DNA
atgaagaagagctacgagattgccggccaggtaatgggcttcttcgagagttttaaaggttcacgaccggcgattaacaatgatcggatactcatcgttcgcggaaggtcaaggaagatcatccctattaacgaatttgactccaaactgtccgagatcggagagattcttggggggaccgagctcaatgctagcagcgaaaagatctccgagatcttgcagtacggtgacaagaacatccaaaagagtgagggcaatacaaccagcatcgacgaacacggatttacgagaatgaaagatgaactggaatcgatggggctggtggtcgcatataaagtgttcgagctcctaggcttcgatgtggtcattgccatatgggaggaccggaacgaactgcccccactgtacgtggaggtgactgtcagcgagcatgaagactga

SEQ ID NO: 9722 - DNA, 1113 bp, synthetic construct
  source 1..1113: mol_type = other DNA
atgaagatcaagatgcagaacaaacttaacaaagaagatatcctccacattctgaatgccacagataatgagataatcaattatatgctgaagacggtgcagtacagggagaatcacctgattacttactccaagaacgtgttcatacctctaaccgagatttgccgcaacgactgtggctactgcaactttaaaaagaaatctgacgatcctgaggccataattctgaagaccaaacaggaggtgttggaaagcttgaaggaggccgagaagtacggttgtaaggaagccctcttcactttcggggaggatgctgacaaagaggaggttgtgaaactcaaactcgccgagtacggctacgaaaagatgatagactacatcatcgacatctgtcagatgactctggatgagacaagtctactgccccacacaaacgggggaaacttcagctttgacgatttgaagcgactgaaagaagtcaatgcatccctaggattaatgctggagaacacctcaaaccggctcatggagttgcccgctcataacaaatcccccggcaaaaatccgaagcttaggctcgagaccatatcaaatgcgggaaagctgaaaattccctataccacgggtatcctgatcggtatcggcgaaacaaaggaagaaattgccgaatcgctgattgcaattagagacttgtacgacaaatatggccatatccaggaggtcattatccagaacttcaccccaatcccgggcatagagatggaaaactggccagagcctagttttttagacatgatcaagacagtaattgctggaactctcctctttggcgacaccgacgtcagcatccaagtgccccctaacctgaacaatgaaaccgctcagatcttcctgctgtgcggggcggatgactgggggggagttagcccagtgtcccgggattatgtgaatatcacatctccctggccagggatcaacgagcttaagaaactgaccattgacgccggcttcaagctgacggaacgcctgtgcatctatgaaaagtacatcaatagcgagtggcttaacgataatctcctgaagaaggcatctaaccttagtaagcaccaatga

SEQ ID NO: 9723 - DNA, 729 bp, synthetic construct
  source 1..729: mol_type = other DNA
atgaaatacaaaaagatcggtgacatcctaattctggataacaaatactcagacaataattttgacgaattgagcaggaagcacaacgtgaaaacgatcatgaagatcgaccacattcagggcaccaaacgtgaaccaatctacaaaattctttacggggaggagaccgaaacaatccacagggaaaatgggtgcctgttcaaactcgacctcagcaaggtcatgtggtcgaaggggaacaacaacgagcggctgagaatcgctaagctggtggatgacgatgaaaccgtccttgacatgttcgcagggattggctatttctccattcccatcggtgtgcacagcaatcccaagaaaattatcccaatcgagataaacccaaactcctaccattttctgtgcgagaacattcggctgaacaagctcactaacgtgacgcctattctgggagattgtatgatgaagactcctaaattcaaggccgatcgcattctgatgggctatgtcaagacaacccatcattatctgaagatagctatcgacagtctaaataagggaggcatcctgcattatcacgagacagtgcccgagaagctcataaacacccggcccatcgagagaatcaaagcgcaggccggaaatcgagacgttgaattactcaaaataaataagatcaagcgctacgcaccgggcgtagagcacgtggttatcgatgccttgataaattga

SEQ ID NO: 9724 - DNA, 615 bp, synthetic construct
  source 1..615: mol_type = other DNA
atgaaagacaagatcgtagagggaacaacaaccgtcgggatcacctgcaaggatgggatcgtgttcgccaccgaacggcgcgccacgatgggaaatctggtggctcataaagtcgcagagaaaatatttaagatcgatgaccacatcgccacaaccatcgcaggttcagttggagacgcgcaatccctgatgaaggtgattggtgcagaaaccagcctgtatcagatgaggaacaatgacgagattagtgtgaaggccgcagccagccttactgccaacattctaagatcaggacccatgtatgtacagatcctccttggcgggatggacgaagacgagccatccatttacagcctcgatccggctggcgggatgatcaaggataattacatttccacgggaagtggctcgatcgtggcttacggggtgctcgaagaccggttccgagatgatctgagcgttgatgagggcctggagctggctataagggccatcagagccgctgccgagcgcgacacttactctggcaacggctttttagtcgcgaaagtcgacaaggacggcttcgaaatgctggacaacgagaaagtgaaggagattttggataagatatga

SEQ ID NO: 9725 - DNA, 1914 bp, synthetic construct
  source 1..1914: mol_type = other DNA
atggcttcagacattctggaagatatcaaaaaagagattttgcagaaactacctaataagattcaggtgtcgaaagtcgagtttgaagggcctgaagtcgtggtgtacaccaagaaccccgaaataataacagaaaacggcgacctcatacgctcgcttgcaaaagaactgagaaagaggataattatcaggtcagataaaagcgctttactcgataatgagtccaccataaataagattcatgaaattgtgcccgacggagcggagattaccgatatttacttcgataccgtaacgggcgaagtcgtgatcactgctaagaaacctggcctcgtgattggaaagtatggggtcacttctagaaacattgtgaagaataccggttgggctcctaagatactgaggacccccccaataagtagcgacatcattggcaagattagaactatccagaaaaacagcagtaaggacaggaaaaagctgctgcagcggcttggacggcagatccaccagggaagcaaataccccaatgactgggcccgagttacgagcatgggcggctttaaggaagttggccggagctccatgctcctgcagacacccaacagtcgtgtgctactggactgtggcgtcaacgtggctgcaagcgataataagaatgccttcccgtatttgaacgcgcccgagtttagcattgaggagctagatgcagtcatcatctctcatgcccacttggaccactgcggattcgtgccgtacttattccattacggctatgacggaccagtgtactgcacaacccctacgagggatctgaccactctgcttcaatttgatcacctggacatcgctcacagagaggggaaccccctgcctttcacatccaagcacgtcaaacaggccatcaaaaacaccattacattggattatggggaagtgactgacatctcaccagacattcgactgaccttgcacaatgccggccatatcctcgggagtgccatctcccacatgcacatcggcgacggagctcacaacctggtatatacgggagattttaagtacgagccatcccggctgctcgaacctgccaccatacggttcccacgtgccgaaaccgtgatcatggaaagcacatatggtggaaaggaggacatccaaccgtcccgaaataacgcggaaaaggagatgatgaagacaatctataaaacccttaagcggggtggcaaagtgctggtgccagtatttgccgtagggcgcgcccaggagcttatggtcgttctggaggagtacatgagacatgggctcatcgaggaagtgccgatctacattgacggcatgatctgggaagccacagcaatccacacagcaaggcccgagtacttatcgaaggacttgagagaccagatcttccacatgggccgcaatccattcgtgtcagacatgtttaataaggttcaaaaccacgaccagcggaaggaaatcgtggagagtcaagaccccgcaatcatcctgtccacatccggtatgctcactggcggtaactcagtcgagtacttcaaatggctctgtgaggatgagcggaacactcttatctttgtcggatatcagtccgaagggagcatggggaggcgtgtgcagaaggggtggaaggagatccctctggaggatgatgatgggaaaacgcgcattttcaatgtggagatggagattaaaaccatcaacggattcagcggtcactctaaccgcagacagctgatggagtacgttaagcgcctgaacccacgacccgagaaggttatcacctgccatggcgacccctataaaacggtggatctggcctctagcatccatcgcagttacaagatcgagaccaagactcccattaacctcgactgcgtcaggatacattga

SEQ ID NO: 9726 - DNA, 1020 bp, synthetic construct
  source 1..1020: mol_type = other DNA
atggtgacatatagcgagtcaggggtggacatcgatctggaagcaattactgtgtcaaaactggccgacaagctcaaatccaccttggagtgccgcgacattatcaccgacagtggccactacgccgcgctggtcaagctgggcgacaaggctatcgccatgagcaccgatggcgtgggaagtaagattctcatcgcagagatgatgaacaagtatgacaccgtcggcatcgactgtatcgcgatggtggtgaatgacattttatgcgttggggccgagccaatagcactcgtcgattacctcgctgttgaaaagccagatcctgagagagcagccgaaattgctgagggccttgtgaagggtgccaatgagtccaagattgcaattatcgggggagagacagcctctctgccaggcatcataaaggactttgatttggccggaactgggattggatttgtcgacatcgataagatcattacgggagaatcgatacagcccggaaacgtgctcattgggatcaacagtaatgggattcactctaacggctactccctggctcggaatgccatctttgacaaagggggattctctgtggatgacaaaatgcctaatggtgaaacaaccattggtgaggaactgatcaggccgacggaactatatgtcaagcccattgtagccctattcaaaaaagagtacaatatcaacggcctggctcatataaccggcgggggcttcaccaaccttcgacggttgaagaaaggtgtaggctatgagatcaacagccttcccgaggttcccgagatattcaagctgatctacgaacagggagtagacatcaaagagatgtacaaggtgttcaacatgggtgtcgggttcgtggtgatctgcgacgaggaggaggcgggaaagataatgtccactctggatgaatattgcaactgtcaaatcatcggcaaagtgacggatgatgagacaatcaaagttaagagctttgaaggcagcgaactggaatactga

SEQ ID NO: 9727 - DNA, 1032 bp, synthetic construct
  source 1..1032: mol_type = other DNA
atgatgaaaataatgatggacaatgagacagctctcgtgaaagagatactaaaggagttgggcgctagtaaggaggaccaggaacttgttgccgaagctacagtggatgccgaccttaaaggcttcacatcccacgggctcggcaggttcccacagtaccttattagcattaaggccggcacaattaacctagacgaaaatattaccatcgaaaaagaaacccccgccatggcactgattaacgggaacagcggctttggccaggccgtgtcctacaaggccatgcagatcgcaattaagaaggcaaaagagatgggtatcgcctgcgtgggggtccacaacaccaaccacttcggagtcactggattctacagtgacttggctttaagagaaaactgcatcggactcgtcatcgccaacacagacccggctatcgctcctatcggaggtaaggttccactgataggcactaaccctattgctctgggtatcccctctgacagttacattaccgtagatatggccacctcagtgacggcgcggggcaagatactggaatccaagcgcaaaggcctggacctgccagatggatgggccttagacgccaatggaaatcccacgaacgaccccgaggaggcgctgaagggcagcattctgcctttcgggggattcaagggctatgcgctctccctcctgatcgagatcctgaccgggcccttggtgcaggcaggctatgggcatgaagtgactgggaccgcatcacctgataagaattgcacaaaaggagacctgtatatcgtcatcgatccgagcaaattcggtgactttgatgagtttaaggcaaacaccgaggactttatctctcaagtaaggtcgactggggagaacatcccagtgcccggtgacctcgaagtgaagcgggtcaaagaggccgagacgaatgggataagcattgatgaaaagctgtacgagcaactgaaacgaatctgtgacgatctgaatatcgatcttgattcttacctcgaggagtga

SEQ ID NO: 9728 - DNA, 2370 bp, synthetic construct
  source 1..2370: mol_type = other DNA
atgtacaaatgtatcagtgcctataaaatcaagattattaacatcaaaaatatgactaattttacgaagaatgattcatttaaggaggagaataaggttatgaagctgaaagactcttatatcctgctgatcgcaatggcaatcttcctattgatgagtatcggcagcgtgtgcgccagtgaaatatcggccgacgacaccatcggcctagctgatgacggaagcgatgtggttatggacgacaagccaattgaaccctccaaccccacaacaccacacaaagtggacaccatgattgtgagtagcgacacggtatcgataaacgaaaaggaaaagatcaagagcatcgacttgaccgtcaacgataccaataaatctaaggtcattgcggggatcacagttaagaatttgacagtgaaggagggaaccaagacaatcaaatttgattacaataactcgaaggtcatcattaaagacgcgctggtcctcggtaagcacgatcttctggtcagctatctggggaatgagaattacacgaactcttccaagaacattgttctgaccattttcggaaactacacaatccaagcccccacctccgttgacgtaaactccaccaagattgttgaggtgcctatcaatgtgaccaacgggatcgatccaaaagaacttgtcaaagacgactttaatgtgacactgacatataaggatggaaacatcactaaggcaattaacataaccgatttccggatcataaataacaccataatattcaattatcccctcagcaggaatattactaccagcaccatcaccctggtttatacggctaatgagaccgtgaaatcaaaaaatgttacaataaaccggatttacaatgtgaaaattgaagggatcaacacgaaaaaccaatacaagaatggtaactttacattccgcctgaccgatatcgataacgccactgagaacctcaccggttttaagcttaacctccttatcgggaaaaacgtgataaaccagattacaggaacggcggacaagaacggtattgtcaactttaagaccagcaagatcttcggatacgacttcaataacaacacaatcgtcatcaagtacctcaatgtgggcaataacacggtggagttgaagtccggcgacaacgtgaagttaaccacaaacaaagtgaatctcactatcgaaaaggcaaaaatcaacattaccattgataaatacaacgagcagtatggaagtaacaagaatctgaccatcacggtgataaatgcagataacggggagcctgtgccgggcatcatcctgcatctgaacatgcctcagaccgccggcaagaactattacattcagactgacacaaatggcatcggcatcatatccgttaagggtctgattcctggaaagtacaacctgacggtcagcaacaatgacactgtcaatattatcaacaacaaggccagcagcaagattattatcacaccaaaacccgtgacaataaagattacaagcgggctgactattaactataacactggcaataccgccgccatcaaggtgactgacaaaaaggggaaaggcgtgtctggcgcctatgtgctagtccagctgtatactgggtcaaagtcagccaattaccttttccagactgacaaatatggcaatatcaaattcaaggcaccgctctcagtggggaagcacaagatcgtggtgagtggggccgtcggctacagttccagcaaggtgaccaagtatattaaagtcaaaaaagctaccgccaagatctccgcgccaaaagtcaccgcctactacaagcagggaaagtactttacaataaagctcattaacacgaaaaagagcaatgcacccatttatgctgccaaggtggacatccgagtctacatttcgaactacaagtactacaaattcaacggaaagaccggcgtggacggtaagctcaagctgtcaatcgatctcaaaccgaaaacatacaaggtggaggtgagaggggcagattccaaaaattacgctgctagcaaagtagtatccaaaatcgtagtggttaaggctcccacgaagctgtatcctgccaagttaactgctaaaaaaggcacaaataaatacttcaaagtgactgtaaagaacaccaaaaccaagaaagtgatccccggcgttaaagtcaagatcaaggtgtacactggtaagaagttcaagacctataccgtcaagactaacagcaagggaattgcccagtttaacgtaaaatcattgagtgtgggcaagcataaggcgatcgtctccagcgccaacaagtattgcatcgctaaatccgctaagaactacatcaaaataactaaatga

SEQ ID NO: 9729 - DNA, 1797 bp, synthetic construct
  source 1..1797: mol_type = other DNA
atgcagagaaacgtggttatcttagatatcgactatgtcacctacgagaacaagcctgtgatcaggttattttcaaaagacggtgataagaacatcatactgcttgacgatacctttgaaccttacctctacgttatggccgatgatctggataagtgcatcgatgagatccagaacaattttgacgtggtttgcatcgaaaaggtaaataagaaggacttccagattgagaaggagtttctcaaagtgacatttaatcacccccaagaactggcaaagaacagggacgccctgagagatctagagagtgtggtccagattcgcgaatttgacatcccattttatagacgatatctcatggaccgggacgtgattcccatgactgaggtcgtggcaatcggcgataagatcgacagctttctcgatctggactccaataagcaggacattgaaatcataaaacttacagatgagctgaaacgttcccccgactacccgcgagagtttcgtatcttgagcttcgacttggaggttcgcaacccccacggcatgccaaacagcgagattgatgagatcataatgattggcgtgtcaagtaacttcgggatcaaccaggtgattagtacgaagacaaactctgactgcagagacgacttcgtaaatcaaatgaactctgagaaagagatgatcgaggagttcgtcaagatcattaaggagaacaacattgacattattgtgggatataactcagacaactttgatttcccataccttaaagacagggctaaaatactgggaattgacctcgacatcggaatggacggatcggatatccgctttattcgccgaggatacgccaacgcggccagcttcaagggcctgattcatgtggacctctatctagtcatgcgcagatacatgacccttgagcggtacaccctggaaagagtgtactatgagttgttcggcgaggaaaaaattgatgttccgggggacaggatctgggagttctgggacaatggcggtgaagaattggataatctgttcgattactcccttgacgatgtggtgagcacactgaaaatcgccgaacagaccctgcccctcaatctggagctcacccggatcatcgggcagcctctgttcgatgtatcccggatggccacgggacaacaagcagaatggttcctggtcaagcaggcctattttgacaacgaggtcgtgcccaacaagcagggcgctaatttcgccaatagggcggcggccgaagataatgaagggggctacgtaagggaacccgagaaggggctgcacgagaacctcgtgcaattcgacttccggagcctatacccgagtattatcatctccaagaacatatctccagacgtgatgtatctgggggatgtggacaatgaagaggattacaatatatctcctgagcatggcctcaaattcaaaaaagaaccccagggcttcattccttccgtcatcgacaagatattgcaggaacggtttcggatcaagcgggaaatgaaggcaagcgacgatgataccgagaaaaaggcactgaatgtccagcagcaggctatcaaacgcctggccaatactatgtatgggatctacggtttcccacgcttcaggtggtatagcttcgagtgtgcaaaggccatcacgtcgtggggacgacagtacattaagtcatccataaaaaaagctgaagagtacggtttctatgccatatacgctgacactgacggcttttacgctaagtataaaaaaaaggataagagaaactga

SEQ ID NO: 9730 - DNA, 1023 bp, synthetic construct
  source 1..1023: mol_type = other DNA
atgggaatcgaaatcgagaaatatctgaactttcccgtgctgcttatctgctttctgctgatcacctcacttatattcatattccctgccctgaaaatgatcgtgctcggagctattttggcctaccttgtgcgaccagtagcgtttaagattcaaagcaagctgaagttttcctccgttagcatactaatcgccatggtgatcgtgctgattcccctgattgccctcgtcgggtatatctcatacgaactgtctagcgttgcttcaacgatgcttgcatctagttccactgcagatattaatgagtctatcctgaagctcatcacctacctgcatatcgacgttaacccgaatgagatttctcagagcattatttcgtcctttgaaacaatcgccagctacgtgatgaactacggggtctcctttctaggtaaatttgccaacctgacgctggacctctttatcttggtgtgttcggtattctatttcgtgcgggatggcgataattgccttaatttcattaaatcctttgtgcccgagggctcagtggagttttttgacaagaccgttgacaacatcaaagacgtgctgaagagcatattttatggccacttcttaaccgctgtcatcatcggaatcttcggatgcatcggctactccattttgggttacccgttcggcatcttcctaggggtcttgaccgggattctgcagttaatcccaatattcggcccctggcccatctactggactctgttcttcattgatgcgctcagtggaaactacccaagggccataatggtcttgctgttcggcttcttcctcagtactattgacatgtacatacgcccagctctcagcagccactacgcagacatccaccctctgatcttactcgtcgggttccttgcaggccctctggtatatgggatcgtgggtttcattgtgggacctctcattctgggcatcacatatacagtcctggatagttatagaaaggaatacctcatgcgggtggagtga

SEQ ID NO: 9731 - DNA, 801 bp, synthetic construct
  source 1..801: mol_type = other DNA
atgatcaacgagccaaagatcgtggaaatcacagatattattgatgagactcctacaattaagacgttcaagttcgactggaatatgaagagcctcggcaaaccgaaccccggggaatttgtaatgatttggaacttcaaaaatgaaaagccaatgagcattgctcagatcaatgacaacgaactggcgatcaccgtgaaaaatatcggcgagtttacctcgcagctgcatgacctaaaaattgggaaccagattggggtccggggcagttacggcaacggatttaacaactcatttgagggcaagaagatcctggcgatcgggggaggtgtaggaatggctcctatcaacgccatcgtcagcgacctgatcaagaagggcaataaaatcgacgttgtggccgccgccgtcactaaaaacgagctcctctatgctacttcccttgaggaattgggcgctaacgtccaccactgtaccgatgacggctccttcggatttaaaggtttcgccacagattgcacccggaatttactgcaggactcaacgtacgattacgcattcgtgtgcggccccgagataatgatgaaaggaatattcgacattctggaggaggcaggaatatccgcacaatatagccttgagagatacatgaagtgtgccatcggcatttgcgggcagtgttgcgtggacagtgaagggtggaggatatgcgttgaggggcccgtgttcgagaatgacaagatcaataagatcaccgaatttggtaaataccgacgcgatgcctctggtgtgaagtattga

SEQ ID NO: 9732 - DNA, 912 bp, synthetic construct
  source 1..912: mol_type = other DNA
atgttaaagacgaatatttgtggagtggagtttagaaatcctctcatgctggccgcaggcatcatgggaagtaatgccagctcaatgaactggatcttgaagtccggggctggcggggttgtttccaagagcttcagcttgaactctcaccctggatatgtgaacccaacaactgtagccgtggaggggggcatcatcaacgccatcggccttagcaacccgggggtggcgaatttcaaagaggaactggaaaaaatcgaaaggaagaacagcgtggtgatcgcttcaatctatggggccacccccgacgagttctcatcactggtctgcgaggtgcaggaactggtggacatgatagagctgaatatttcttgcccccatgcaatggacggctatggcgcttctatcggccaggactgcaatctcagtcataccattgtgagcgcagcaaaagatgcttcggatgtgcccatcatcgccaagctgacacccaacgtaactgacatcaccgaaatcgccaaaacctgtgaagacgcaggtgccgactgcctgtccctgatcaacacactcgggccgggaatgaagatcaacattgatgttgcgcggccagtgctgagcaataaatttggaggtatgagtggccggagcattaagccaatagctattagtaacgtctactccgtctacgagtccgtcgacattcctctcattggtgttggcggaatttacaactgggaggatgtggtggaatttatatacgcgggcgccagggccgtccaaatagggacggctataatggatgagggtgtcgaagtattcgaccacattaatgaggggctcgagcgcttcatgaccgagaagggattttcctcgatcgacgatatggtcggccttgcccaccgagagctatga

SEQ ID NO: 9733 - DNA, 615 bp, synthetic construct
  source 1..615: mol_type = other DNA
atggtgtacgaagacttgatctatcttaagataatagaactggtgtattgctgttgccttttcggatttgagatcatgagtgacggcagctataaagatctgaaatacgagctggaactgaaaaacgccgaaattgacgagctcaatatcgagctggagaataagaaggaggaaattaataagctgaggctgtacgcaactaaattgaaatacgagaagaagaacctcgaggataagctggacaccaagatcgattacgataaggcgacaatgagtgaattggatgacttaagcgacaaaatcaaagagaaggaggtaatcatcgaggacaagcaggaccaggtgcggtatctcagatccctcatcgatgattataagatccaggtcagcaacaacacggaaaacctagaaatccaactccgcaagatctcgaagacctacggcgagctgcttaaacagaaggactccattatcgagaagcaagacgagcagatttcaaacctactgaaatccaaggaggagataattaaatctaacaaaaccaatataattgggctgaagctccagaatgaaaagtaccaggaaatcattgacaaactgacaaagactaactga

SEQ ID NO: 9734 - DNA, 1152 bp, synthetic construct
  source 1..1152: mol_type = other DNA
atggagtgctacatcacgtacagcgtgaagggattcttagcctttaacagtgagaatgagttgatatccgaaaaactgttcccagaagacaagatcatcgaccgcctcgctgagatcgatgacaaaaagatcgtggaggaggagctcgagatcatcgaggaagtcagcagtgattatgatgagattatcattgagtcaaacaaaagacgttctgactacgataacgagaagataatcgtcaaaactcccaatcaggggggggaatacctcagaaacaactatgagaagtttaagctggatagcgaggagatcacctcgatttatcgaaatttggccatttacaagatcaagaaggaatcagcctcagaagataaacacctaatccaggccattaactccatcgacgagatcgatgaaagcatctctaagctaattgagagaattagagagtggtacgccctttatttccctgagatggatgtcattcataataacgagacctacataaaactcataagccaaaataagaccaaagaaaagattatcgaggccaagccggacgcgttcccaaacgacatcatcgacctggaagaggatataaatcctctggacctggaaattatgaacaactacgctaattctatttacgaactccagaaatccaggaagaatatcgaggactatattgacaagaagatggaatccattgcacctaatctgaaactgctcgttggcagctccctgggtgccaagctgatctcccacgccggcggcattaagcgcctggcagtgtaccccagcagtactgttcaaataatgggtgctgaaaaggcactgtttcgacatttgaaaagtggcgaccggccccccaaatatggacttatctatcagcacccgcaggtaaggggcgcaaagtggtggaaccgggggaaaatcgcccgcatgcttgctggaatgatctcgctggcggtgcggcgagacgtgttcacgaagacctttgacgaaaacgtggctgatgaattaacatcaaagatcgaggaaatagagaaaaataaccccttcccaacaaaaacaaccaagcggcggaacgaagagcgctccaaatctaaaaaaagcaagaaaaaggggaagaagaggaagaagaggaggtga

SEQ ID NO: 9735 - DNA, 642 bp, synthetic construct
  source 1..642: mol_type = other DNA
atgaatgtatatttcaaggacggcaacgtcgccactaagaacctcaatcccgggacgagcgtgtatggggaagaactcattcaggaagatgtggagtatagaatatggaaccctaggcggtccaaactctcagccgcactactgaacggcctggagaacttaaagctggaagacactagcaaagtactgtacctgggcgcgagtacgggtaccaccgtttcccacatttccgatgtcctaatcaacggacggatatacgccgttgagtttagccccaccacagcgaaaaaactggtgcaactctcgcgaaagaggtttaatattgctccgatcctcggcgatgcaacaaaacctaaagaatacctgaacatcgtcgagaaggtcgacctggtgtactgcgacgtggctcagccaacacagagtgagttgttcatgaaaaatatcaacatgttcgccaaggacaacgcacagggacttatcaccattaaagcccgcagcattgatgtggtgcaaaagccaaaaaagatcttcaaggagcaggagaagaagttgaaagagaaggggttcaaaatcatagagaaggtgaagctggaaccctacgaaaaggaccatatcgcccttctggtggagaagaatttttga

SEQ ID NO: 9736 - DNA, 549 bp, synthetic construct
  source 1..549: mol_type = other DNA
atgaagaataacgtgctgaaacgcagtctaatcatcatttcatttatattcctgatcatttgcgcattctcgtgtgtgaatgcacaggaagataacagcgacatcaccatgatgactctgagtaagggaggcattgtgatccactacccatccaattggggctacagccagtccgactccaattattccataatgagtatcagcaaactggactcagtggactccgcgggggtcggtcaggttaatataaacttcgagaaaaaggctatcgaaggcgacttctacacatacttgaacaacacctaccggagcatgcaaagggatagctccttcaacctcacctcgtcaggggaagtcatggtcagtaatattcatgcctacgagtatatgtatagcagcaaccagaacggcacggtgaaagagcacaaggctgtgtggtttgagaaggggggacaggcctacgtgatgctgtatagcgcccccgtaaacgattttgaggacaacctttatgtttttgactacatcctcagcgatatccaaattacatga

SEQ ID NO: 9737 - DNA, 726 bp, synthetic construct
  source 1..726: mol_type = other DNA
atgccaaatgatagggataagcttctcaagatcatggacagtttggaagttgattaccgctctggaaagataagtcccgagaaatatagctactttcggtccaaatacgaggacaagctgaacagcatcgacgcgaaagaggccacccaacggatcaggtccatgcagggtaagtcaaatcagactacatcaataaagagaagtagaaagcccaccaaaaacaaaaaagagaaggaacaggacctcgtgcagaagtacatcatcaaccctaagaagggcgacgccaagtataacaaaaaagagaagaagtcaatgagctccggaacattcaaactggtgctcctgctagtgctggtggttgccttcactgtgggcgtcggctatggggtctttaatctggatttcaacaacatttctgaaacaagcaccgtagctatggtgcacgacactgcattcccggatattaccgaagacattaaaaacaccacaaagaccacgagctcatctaacaccaattactcatctactagttataacgtcaagacaacggaggattctagcagtgacagcgactactcggacgggggccgaaatagcgggtcctccgactctacgtactccggaagtgattcgggttccggaagctccggcagtgactcgggctccggcagcgggtcatccagcaatagcggtgggtccgaaagcaacggacgcagcgatgagtga

SEQ ID NO: 9738 - DNA, 801 bp, synthetic construct
  source 1..801: mol_type = other DNA
atgcagattaagaacctgatgagcgagaatctaatcaccattgacaaagaccagaacctttccgatgcactcaagttgctgcgcaaacacaatatctcgcggctgcccgtcaccaacaataaagaactcgttggcatcgtgtctgagcgtgacatcgctaacaagctgggaagtagcaaatccgagggcatgcccgcctcacggtttcatatctcaagcgtgatggtgaaggatgtgatcacagtgctggaaaccatgcagctgggtgacgtagcggagcttatgttggagaacgggattggcagtgtccctgtcgtctctggggaggggatgatcggcattgtgagtaaggccgatttcgtcactctggctgttggaattgcttttgataagataaccgtcaaagagataatgacgggcgacgtagttgcagtttccccaactgacaggctaattcacgcgagaagactgatgattgacgcccacattggacgcgtgcctgtgatcgaagaggatgaacttaaaggcataatcacgagcaaagacctcatgagggccttcattgacttccgaaagaatgtgccggagaagcatcaaaaatcccagatcaaggaggtgctggtggaagacatcatgtcctcaaacccaagcagcgtgtctaagaaaatgagcatcagtgatgtatcgaagatcatgatcgagaccggattcaacgggctccccgtggtggaagacggtaaggtcatcgggattataacacagacagatatactgcggttaatcgccaagctcgaatcctga

SEQ ID NO: 9739 - DNA, 936 bp, synthetic construct
  source 1..936: mol_type = other DNA
atgaaagacaagacgtccataaatcgcaaatcaaacaccggcgcagttgaacatgtgacgaaggtgcacgaccgagagggggacataatggcccttgccaccaaggaggtgatctccattcctccgactaagtcgatcaaggacactgccaaggtcatgatggaacacgaatttcggcgcctgccaattaccgatccggggtctgggaagttgctgggcattgtcaccgtaatggacatattggacttctttggaggaggaaagaaattcaacatcatcgagaaaaaatacgaagataactttctggcggctatcaacgagcccgtgaaggagatcatgactcgtgatctgattacactaagcacaaaggtgtccatcggggacaccctcaagacaatgctggacaaccagctgggggccattccccttgtggatgcggatggaaaacttgccggcatcgtcactgagcgcgatattgcactgtctttagcaggcatggcaggtaaggagaccgtgcacgaatatatgagtcctaaagtcttcaccaccacccccggcacaccactcgagagtgcttgtaaaataatggtgaggaatggactaaggagaatcccaattgttggtggagaagctgacatcagcaaggccaacaaaaagctcctgggcatcctcacgagcactgacgtgatcaggtttctgaatgccaaggagttgttcgataacctcaacagcaatctggctagcgacgtgctcaaaatcacagtctcagagattatggtgaaggaccctattacagtagaacagacaatgacgattggggagctgtgccaactgttcgcggagaagaatatcggcggcgtccccatcatcaaagatgacgaaatagtaggtatcattaccgagagagatgtgttaaactccgttcggcgggcctga

SEQ ID NO: 9740 - DNA, 699 bp, synthetic construct
  source 1..699: mol_type = other DNA
atgaaagcaccagtgattgagatctttagcagtttccaaggcgaaggcctgctgatcggtgaacgccagatcttcgtccgattcgccggctgtaaccttaattgcaagtactgtgatactgaggacagcaagtcggagaaatccggaaaactcatgacggtggacgaggtctgccgggagatcaataagatcctcactcccgactgcaacaccatctcattcaccgggggggaaccgagtctgtaccccgagtttattagcgaggtcagcaagaattttaatttgaacataatgctcgaaaccaacgggacactgccagataatatcaataagattgagcagttagatgtagtttctctcgacatcaagctgcctgaacacttcaacggcaactttaacgaggatattctgcttaatgagattaagagcgtgaacctgctaagggagaagtccatatccgtgtattgcaaagtggtcatcctccccagcacaaaaatagaaagcttcaaggaggtaattgagaaactatcaaagaatatctcaaacaagagtaacctgaaaataatcatccagccctcgtcccctctgaaagactggaaggatattaacttcagattgtttgaatactctgaagttgtgggacagtatttcgacgtgtccaccatcccacagatccataagattctggacattgaatga

SEQ ID NO: 9741 - DNA, 516 bp, synthetic construct
  source 1..516: mol_type = other DNA
atgaagatcctggttaacggaatccaatcaaatttaaggttctcaagcgcccacgtcatcccgggccacgaaagctgcggattcatacatgggcattcgtacttcgtcgacgtggagattgagggcgagcggacaggaaaattcgagtttgtggttgattttaaagacgtcaagggcttcacgaaagagttctgcaacgaacttgaccacagactcctgattcccgtgttcaatgagttgatcgaatttaaggactttgacaaaaaaactgatagtatcgatggcctgaaggagaacaagaccatacagttcaagatcgacggtaagggctacagtattcctagcgtggattgtgtactcctcccactgccctataccagcgccgaggaactgtccaaatactttgctgaagggctggccgaaaagctgtccgagtcctatgacaacctaaagtatgtggcggtgtgcgtgaatgagggtattgggcagggggcagaataccgcaaggagctttga

SEQ ID NO: 9742 - DNA, 597 bp, synthetic construct
  source 1..597: mol_type = other DNA
atgtccatcatccataagcacattgacgaaatatttgaatacgatggaagccaaatcaatccaagctgggcatttcaggagttcggcgtgtatgggtcttcgattataacatggatcggtccggtaaacatcactcccgataacctgaaagacttcgccgatgtcggccttgagataaaatctaactacatggttaacttcatttgcgaatttttcgatcagcagcctcccaatatgcggattgcttatttaagacagcgcctgattgtcatgatctttcgagagatcctgaccgagtacggaattaagaccaagagggagggtgatgacattttcgtggacgacgggaaactctccatctcaatcgccagtatcagcctcagcagcgccaaaatccactttgcactaaacttggaagacaagggaactccagacgatgtggagacaattgggctcttcgacattaaggatgaaaatggcacgcaaatcttcaacaaagacaatctgtcagacctgatcaatgagaccgcgtcccggttcatcgatgagcttcagaccatcgagaacgacataagtaagacaaaggtgctgggctga

SEQ ID NO: 9743 - DNA, 1074 bp, synthetic construct
  source 1..1074: mol_type = other DNA
atggagcaggtccgcacacgggacttcatttacacatccgacgatctgtattttgccagcacaaattatatacatccagaggacagggtgatttcctttctgcgctacatcccagatccagaaggagacagggaaaaggatggtaagaaataccgaaaggtgggcagcgcagaggcttatgagtacctccgggagaaccaccccgattatctgtatttctgtgatgtgaccaacgtggaaatgatgggtgtgcccctcgataaggtgaagcgaataatcaaacctgaaaagagactgctaggtctgaaagacacattcgacaacggaggggaagtgaaaaaccccgagcttattgcaaaactgatggacgtggctgactttttccatttcatggccaatatcccttatgaccacctgggtatctcagggtccatcctgccgggactccagaagagcgacgtgtctgacttggattttgtcgtctacgggctggacaaccatagaagggccatctcggccttcaagaaacaccggggcaaggaagtctacatcaaggaagttgacaaacacatcacggtggaaggcataaccaatgattattgggactttgtgtacaataaaagaatgagcgatgaatccctgactaaagaagagtttcggtggtacgagaacagaaaggctaacaggggaacaatcaatggaacgctcttcgacatcctagcgacccgcgactacgatgagatcgagggcacttggggcgacacggtttatgagccccagggcattgcgcaaattgagtgcgatatcgtcagtagcctcggggccttcgataacccgagcagttacactattgagaacttaaagatcttggagggggtagaggcacctatcaaggagattgtttcattcacccacacctacgccggggaggtaattgatggagaacacataatcgccaaaggcaaagtagagaaggtcactatccagggcaaggaggactattaccgcatagttgtgggcaccacccgtgaaagcattgacgagtaccttaagcttaaggaaagtcccgcttga

SEQ ID NO: 9744 - DNA, 1479 bp, synthetic construct
  source 1..1479: mol_type = other DNA
atgagtgagaagaggatagagtggaatagtaatttcgccttcatgatggctatgatcgggagcgctgtcgggcttgggaacatctggagattcccaaatgtgctgtattccaacgggggagggtctttcatgatcccttacatcgtgtcactgttcttattgggcatcagctttgtgctagtagaatatgcggtgggttttcggtttaaaaaaagtattggaagaatcctcttcagcattagcaaaaaactcgagccaatcgcgtggtttatcgtcctcatcgtatttctgatcaccacctactatgtgtgcgtggttggctgggatctcatctatgttgtgctgagtttcaccaaggcatggggggcaaaccccgataccttctttgctagcaacgtcttgcaagcgacagacagcatctctgggatattccagattgtacccatcgtgcttgccagcgtgtttgctatctggtttatgatctggttcattgtgaaacgcgacttgaatgacggcattggaaacgttagcaagattctgctgcccacactttgcctgatggttgtgatcatcgtggtcttttcgctgacccttcccggcgcgtcgatcggatacacccagatatttacccctgattggaatgccctaactaacctcaatgtgtggctggcagcctttggtcagattgtcttctccctgagtctggggatggccattgcaatgacctatgccagctacttgccggaaaagtcaaggctgatcgactccgccgtcaccgtggcattctcaaactccgctttcgaggtgtttaactccattggcatcttctccattttaggtttcatggccttgtctacgaagatccctttcgaccagctcgtaactgagggaacaggactggcctttgtggttttcccccaggtcttcaacactatgggcccgatgggctcaattatcggaccactgttcttcatatgcatcctttttgcaggcattacctccgctatagctctgctggaagtggtcacatatgctatttctgaaaaattcaatatcgaacgaaaacggacggtgactgtgatctgtatcgtcggctttcttatctccaccatgtttgcaaccggcattggcagcacaatactgggagccttcgacgccttcctgaacaactttgccctgctcctcggcatcctgatcgagtgcataatcttcgggtggatttacgactttaacaagctcatcgagacgctaaacaaggattcacgcatcaaggtgggtaagacttggaaggccgtcattaagtacattctccccatttgtatagctgttctctggatacaaggcgtttactccacgattacaagctcggataatctgagtctgacaattatgggtatcctaactgtgatattaattgtattgccaatcgtgttcgccaaactgcctgccaagaatgaggattactacaaggtcgactga

SEQ ID NO: 9745 - DNA, 744 bp, synthetic construct
  source 1..744: mol_type = other DNA
atgggaaagctcgatgggaaggtcgcaattgtgaccggcagcacctcaggcatggggcgagactccgcaaaactcttcgccgaagaaggggccaaggtggttgtaacgggaagaaacgaggagagggctaaggctgtggtggatgacataaaaagcgagggcaatgaagcaatctacgttatagctgacatggccaatgtggacgatatcaaaaaagtgttcgacactaccatggaggagtatggcaccgtggacatcctattcaacaacgctgggctgctgagtgtcacgcccctgcttgagatgactaaggaggagtgggataaggtcttcgacgtcgatgtgtacgcggcattataccttacacaattggtggcgccggtcatgaaggaaaagggaaaaggtactattattaacacatgttcagtcgcctcctatgcggcccactttggcttcgtgggttacattagctcgaaacatgccatcgccggcctgacaaagagcatggcttttgagctcgggcctgaaatacggtgcaatggcatcgcacccggggctatccacaccgcaatggttgatagtattggtggagtagaagccctgcagatgatggtggacggtgccccaatgaagcgcgtagggcagggagaagacatcgccgccctggccttgttcctggcttccgatgagagcgagtttgtggacggccagatcatccggtgcgacggcggatttgagtgctga

SEQ ID NO: 9746 - DNA, 795 bp, synthetic construct
  source 1..795: mol_type = other DNA
atgatcaatctctcttccatcaaaatgcacatgtactgtcccatgagtctgtacctaaaaacccatgttgacattgacgagaatgacatgtacaattgttatttggagatcaaaaacctcaaaattgatatccaggacctgatgcaaaagaatatcagaaaaatcaagagaaccatgagtctggaagaaattgagaagatcctctctcagaatatttatgagtacattgaaaacacaactaaaagcatgaagtctagcaacatcgagatcacttcagagcagattagcgagataaacgacgagacatacttcaacatcaagatactgagcatcaaatcaaaaaaggccatgaccatcttgaacaaggacgggttcggcattacagaaatgttcttccccaattgcctgtattcctacttaattaaggacacccagctcgagctgatcgggatatgtgataagatcgagataattgacggacgatattacccaatcagcattaagagctccaacccgcccatcaagggcgtgtgggatcaggatgcaatagaactggtagctaatgccatcctgcttgaagaggagtttgatacggaaatctttgtgggattcgtcgactataaaaagattggcgaccggaggcctgtcatcatggatgtgaaccttcggaagagtctcttttccgtgatcagggaagtgaaagagataattgagaacaagaagctgccaaacatcaagcgcaactcgaaaaagtgccgcaactgcgaatacgagaatatttgcatgaagaaatga

SEQ ID NO: 9747 - DNA, 660 bp, synthetic construct
  source 1..660: mol_type = other DNA
atgaacgactacacactgacgatcaaatctgatgagaaaaagggggtactctacgatatcactgatgtcatcacagcctatggggccaacattagttatgtccacctgttcgtggagaagaacaacatgggctccattaatcttgagctcgaacacgtggagaacatcgaggacctcataaaggacctcgagaagatcaaggaaataaaatccgtggaattgcacggatcacagctggacatttacggtaagcgcataatcatcatcgggggaggcgcacaagtctctcaggtagccatgggcgcaatcaccgaggccgacaggcataacatacgcggcgaaagaatcagcatcgacactatcccgctggtgggtgaaaagtcactggctgaggctatcgaggctatcagcagacttcctcgagtgagcgctttagtgctagccgggtcgctgatgggaggggaaatcacacgggcggtgaagaaagttaaagaagagagcaatctgattgtcatttccctgaatatgcccggcagtgtgaccgactacgccgacctcattatcaccgatccaattcaggccggagttttggcggtcatgagcattgcagataccgcagtgtttaatattaagaggctggatggcaacatacggttctga

SEQ ID NO: 9748 - DNA, 264 bp, synthetic construct
  source 1..264: mol_type = other DNA
atgaagtttgtgatgcggccgtatcacataatcagcctggggggctacattgtagagtgggatttcccctatagaaacctcattgtcgtgaataaaaccagcgaaccaatcaaaattgagatccccgtcttcaacgaggagtggatacaggagcatcgcgacctgggactggacatcatcccagtgaataagtacgataactacctctccatgtggaaaaaggcacacgccgaactagacaagatcaggcctaagaacgaatga

SEQ ID NO: 9749 - DNA, 999 bp, synthetic construct
  source 1..999: mol_type = other DNA
atgtattcaaatatactgacaaacagcatcgtggccgtaattctgaccgtgatcgtttgttttgtcatctcgacactactccccggcattgaacggaagtatgttcatgcacgaatccagcagcgtgtgggccccctggtctttgccccgggtattatggctccactgaagttcctgttcaaggagaatgtggaggttagcagccctgtgccaaagctgtacaagatcttgccgattttatgcttcattgtgattctgtgcgtcttcattgccctcacccctcaggcgtacaagatccccgccctttcatccctcgtggccatcgtggggtttctgaaggtggaagaaatatgctatgtgctaatgggagcactcagcaaatctgtaatgagcgtgcgcatgccgttccccgaccggatcaaaggcgcagcccacatcaaagcgcctctctcatttatcgaagacatcagtgcaaaaaggtcgctgagaatgatcacttacggctccttccccttgtacctcgccctgtttgctcccgtcacggctgcccgcagtattttcctgaaggatatagtggcattccaacaggtgcacgggcccttcctgtttaccgtggctggtggaatcgccgcgattgtgttttttatcggctacatgataatcctcaacgagtatccattcagcattatcaaggccaaaagcgacgttatcgagggaccctacatggagtatgctgctaagtacaggtccatcgtctttataaccagaggcttcttcatgtttgtcttggggtctgtcttctccgtattgttcattggggtgccacctagtatcttcagcctgggaattttagtgaacatcgcggttgcccttattttcgtctttatgatgggaattttctccgcctttgccccagtcttcaccaacaaacagctactccctacaatcctgggcacgactctgcttggtatacttgctatcgcactggggctcctgtga

SEQ ID NO: 9750 - DNA, 1131 bp, synthetic construct
  source 1..1131: mol_type = other DNA
atggacgaaaagctgccaacaaacaacataattgagacagagattccgatgggcaccgtgcaccccgctgcattggagccctataaagtcaggttcttcgttgaagatgagataatccaggaagccgaaatcacaatcggggttaatcacaggggaatagaacgcattatggagggcctgcctgttcagaaggcaaacagcctcaccgagaagatttgcggaatttgttctaattcacatatatggaacagttgccggaccgccgagatcgggctcgacatcgagattcccgagagagctacttacattcgtgtcatcatgggggagcttgagcgactgcattcccacttcctgtacctcgctcacggttgtgaggtgctagcacacgagaccttttcaatgagagtgttctacctccgggagatcgtcatggaactgctggccatgatcggcggaaaccgggtgcagtatggttgctcggtgttgggaggcgtgcgccccagatgtgaactggacgctaacaagatacagcgacttaaggacgatatggacaagctcgagggggggctgtccgactttgcggaccgctttgttgccgaccctatcgtgctgagccggatcacgggcgtgggagtcctcccccaaaaacaggcgattaaactggccgtaaccggcccatctcttagagctacaggcatcgcacgtgacctgaggactactatgttcgaatacgataattttgactataatatcgtaacacaacaggatggggatgtcaaatccaatctgctaatgcgcgtattagaaagcttcgagtccattaagatcatacgacaggccatcgcgaacatcccggatggtaaactggtgaacaatgactgggatatggtggacactgaggacattgctgaaagttacatcgaagtgccacggggcaccctctaccacagctacgcattggagaccgggagaatccgccattgcattatccggacccctagcatggccaacatcggtgccatgcagtatgcctgcatcggaaaccatctgacagatggccagttatgcatcgtgcaatgtgacccatgcttcacgtgtacggatagggccattgaagtcattaggaggtga

SEQ ID NO: 9751 - DNA, 447 bp, synthetic construct
  source 1..447: mol_type = other DNA
atgggaatcaaatccttttcaagagcaagggcaatccatgtcatgctggtttacaccggcggctgtaacggatgcgacatcgagatcgtcaacagcatattatccccacggttcgatgcggaacagtataacgtgttcctgacgtggaatccccgagaagccgatgtgctcgtggtgactgggcctgtcacccacctgaatcggaaacctctcgaggcaatttacgatgctattccgaatccaaagctcgttgtagccgccggcagttgcgctctgatgggtggggtgtacaagaactgccacggagacataccttctgaagagatcgagggcccggtcgacaagattatccccgtggacgccaaggtaccaggttgtgccgtccgcccccaggatgtgctggccggggtggtgagccttctacccacactgttggacgcggactga

SEQ ID NO: 9752 - DNA, 492 bp, synthetic construct
  source 1..492: mol_type = other DNA
atgcggaacctgatcaaaatcgctctcgaaggagcgtttacaaactttaagcgcatcttcttcgcagccgacagagtgacagacatggacatgaagaagcagatcgcaacgctgagcgtggaagtggatgacagggttgacgagagtgcctgcattggctgttcggggtgcgctaatgtctgtcccaccaatgcgattgtcatgaaaccactggcccatcccgtgaagttgactgagggatgggtgaaggatcaggtgcctgagattatccttgagaagtgtgtagtctgctactattgccacgatttctgtccaatattcagcctctacgggcaaaagggcgccatccacccctcctgcgttggcgatcaggaggtcgatgtgagcgaatttctggaacagccgttcaaaatatccgatgacaaactcaaaattatcgcccagtacctgtcagacaaaaccgtactaaagaacaaggaggacggtgactga

SEQ ID NO: 9753 - DNA, 1407 bp, synthetic construct
  source 1..1407: mol_type = other DNA
atgtttctgaccacgagcacctgcgagggcaagagggagtgtattaatcagtgccccacaaaagctattaaatttattaacgggagggcctttagttgcctgacctgtggaatatgctacaagaactgtccaaacgacgcaatattccaaaatagctacggggggtatgtcgtagaccgcgccaaatgtaatggctgcggcatgtgcatgtacaactgccccacaaacaatattacgattgaagacggcattgtatatggtatctgttcccgctgtggcgtgtgccatgaagtttgttcaaaccgggttgacgggtatgaactggaaaaagataaacagttaaacctgatcagatcactccaaatcctcaatcctccattgaacgacgtgccctacaagaaggagagcgaaactaaggtcgtcacccggaattacttcggcactgatgtggagaattgcatcctgtgtggcagatgccaggagtactgtcccacgggcgctatccatgtcaagatagactgggatgaaggaatttgcagcggatgccgcctatgcgaggatgtttgcccgaatgacagtatgaacaaacaccagatcgtgaataagaaatcttgtactctctgccttaattgcatgaaggcctgccctcataacgcaatctccgttgaggatagctcaattgtggtcaacaagctcaaccagaaacccaacggctcgatcatcagttgtctgaattgcggcttgtgcgcggatttatgtgaaaacgagtcccacaagaaggtggacggaaaactgcgatacgacccaacactggacatggagaacgtgaaccacgacgtggcgatcagtcattgccctgtgcacaccttgactgaagatgacgagatgttcatctacgacgagtttaatgacgaggagctccccatactgtccggattctgcgtatcctgtggaaactgcgtgcaggtgtgtaatgagtatggtgcccggcagtcgatgacccagagctgggacgggaaggtcagcgaggattgcatttcttgcgggatctgtgctgaagtctgccaggaggaggcaatcacacttcacaggggcagcatctctgtcgacctcgacaagtgtatactttgtgaaaactgcgccgtgcactgtccagtggatgtgattcctaagtctaccatgtataaaaacgaaatcaaagatggattcaacttcatcgaacaaaagctgtgcatgcactgtgggctgtgttataaaacctgctcatacgatgctatcgaaaagattaatgacgagtttgtggttaatgaggaaaactgtacatactgcggtgcatgcaagaacgcctgtccggccagagccttcctgttcgagcgaaactttaaggattccctagagggtatctga

SEQ ID NO: 9754 - DNA, 252 bp, synthetic construct
  source 1..252: mol_type = other DNA
atgatgctcagccttgggccaatcattttcggaataatcctgggtgtgattattggcagccagatcaagctgaaatgttgcgattccaatttcacgtggacctcatttgtcataatcattatcgccggaatcatcatcgcctggcagtccggcaactatccgttttacacagacttgcccatcagcaccgcatttgtgtcggctctgatagggattttcgtaggcaaactcctattcgcgcggagtaagtga

SEQ ID NO: 9755 - DNA, 477 bp, synthetic construct
  source 1..477: mol_type = other DNA
atgtcccagtccagtattatcctgaaattagtctcgctcccaattagcatgatactaatttgcctggggatcatgacaatcctgggcgggcatatcacccccgggggcgggttccaaggcggtgctatgatagcaggcggtgttatcctgagcgtcctggtgtatggcctggataatagcccgctggagttttcacacctttacattgaagtcctggaatccatcggggcactcggattcatcatccttggactaatcggcttgttcgtaagtggattcttcctgtacaacgtgggtaccgaccttttgaacgtggtgccccctacgatccagaacgttctccactatcccgacgtgactaacgcgggcatcattccatacctcaatatatttgtgggcctcaaggtctttgtaggactgtcagccattgtgatcgccttcgccggatttaaaaagattacagaggagagcaagtga

SEQ ID NO: 9756 - DNA, 282 bp, synthetic construct
  source 1..282: mol_type = other DNA
ctctcgagtcacacaaccgtgcggaatctgatcgcgtcagtcatggcagctatattctccgtgactctgcttgatgccgtatttcatttgagcagcatgattaatgcaggcgtgtccaacatctacaacgtgctgggaaccaaaatcgcccccaacatggtcacagtggtcatttttgacttcagggcctatgacaccctaggcgagagcattatcctgctgacggctgggctcgtggttctccttatcttcggacgcggcttactgggggacaagcagtga

SEQ ID NO: 9757 - DNA, 336 bp, synthetic construct
  source 1..336: mol_type = other DNA
atgagcctgtacgacaagatctttgatgtggtgaagcagttccggaagttgttttcccccgggcctgtcaccaacgcagacgtgtccggcagcattaccgccgaaatattcctgatcgtgtcacttgtgctagccacgatactgttgaggcacattagtgtgctgctcgcaggactggttatcttatttgtagctgttgtgctcatcatcaacattccactgatcccgaagttcaaaatcgagcaggaggattctctcgacaaaatgctcttctacgccattgtcacactggcgattatcggcgtagtcatgtattggggtgggaatcttgtctga

SEQ ID NO: 9758 - DNA, 1455 bp, synthetic construct
  source 1..1455: mol_type = other DNA
atgaacgagctaattccactgatggtgattgtgccactgatggccgccttaattattagtgccttttcaaagttcaacaaagccactaagattttcgcgtttgtcattgcgatttgcctccccttaattcccctgctgagcaattatggcctccactactttggcggatacgagccgattctagataatgtgaccaacgtcgtgtatcaccctgcaatcacatacagcttcacattcttccagcagatattcatcgccatgatcggacttttgacatttctggtggtatttgtctatctaaccaagtacaaagagatttcgggcccttatttgttcctgctgttcttaggtaccgcagcggtgactgccatgattctgaccgacgacatatttcacatgtttgtctttttcgaaatcttggccctggcccaggttgggatagtggccgcctcatccatcgactacagttacgaaatggctctgaagtatatgattttgggaagcatcggcagtccgataatgctgctgggaatcggattcctgctggccctcacggggagtgtaaacattactgatatcgtgacggccgtgcacaatggtctggtgaacgccaaatcgcccgtctttctactgtccctcggacttatcttctttggttggctttacgcctctggcctccccccattccatactatcaagagcggaatctactcaaaagcagaacctcatggcgcagctctgctgcaatcatttacggtgatttccatgatctccatcgtactgatcatgtaccgcatctattctgtcctccccatcttcgaggtgctcatcgtcttcttcagcatcctggctatggtcttgggggtttccctcgcactgacccagaccgacttcagaaggatgattggattcctggctgttggtgagctggggttcatcgggttagggattggcctgggcacgaacttcgcaatcactgccggcctgttccaggccctaaacgaaatcataatcaccgcacttctttttatcggcttcggtgcaatagttgaggcgacaaacgaagtggatacacgaaagctggggggtcttctggcttaccacccaaaggtgagcatcatgctcctcatcggggggttggctatggcgggagtgcccccgctctccgggtttcagagcaagctgatgcttgtgcaagcttctctcagttgtggcttccctgagctgtccatattggccattatggtcagcattgctacatttgtcgtgttcgtcaaaaccttctataccatgtttctgaaacccaagccagtggaattggacgttgagaataaggaggtgcctcgggctatggtttttgtgatgggcatacttctgattatcatcgtgctcctcggcctcttccccaatctgatcatccatggaatcagcagctttgtaggcggcatactctga

SEQ ID NO: 9759 - DNA, 387 bp, synthetic construct
  source 1..387: mol_type = other DNA
atggcccaaacccagctggccatactgttgacttccgtggctctcgtcatagtcggactttactctgcaatttttattgacaatatcatcaagaagataattggcatcagcttcatcgaagaaggggccaacctcttcatcgtggccatcgggtataaagcaggcggagtggtccctattatcatgccggggatggacacaagctggttcgcttccaacgcggcttacccactgccctttggtttagtacttacgagtattgttatcggcgcatcgaccctggcggttatgctcgccctggtgatggtgctgtacaaacggtacggcactctgagcaccagcgtgatgctagccgatacatcaaagcaggaggagtatgacgagtga

SEQ ID NO: 9760 - DNA, 234 bp, synthetic construct
  source 1..234: mol_type = other DNA
atgatcgagtttatcttatgcctgataacagttctgagcgctattctcgcgctcatccagaaggaccttctgaaagcagcaattctgaccggattcagcggcggcgccctggccgtacttttccaaatcctgttggcccccgatgtggccctaacgcaggccatagtgggggccgcaattgtcccagtgttcatcgcgctcgctgtcaagaaaacccagcgggtggacaactga

SEQ ID NO: 9761 - DNA, 423 bp, synthetic construct
  source 1..423: mol_type = other DNA
atgatggagtacattcagagcgctctcctcatcatatctgctattctgaccataattagtgccataggccttattagcctggacaagaacacaaaggatgtggtttatgcgcgcatccacatcgtgggggtgttcgacatcgcttgcgtcattgcaatgattgccatcgggcagtacctgctcgccggcatttacttcatcctagcaccatttatcgcccatgcaatcgccaacgcgtattggaaaaaagaggaccgggagaacaatctggatctgcagaatatcggagaggacgtcggtgaagaccacccctttctgcacccgaaagagaagatccaagccttagaatgtgaggattccgaaaagttcaaggtggacgagaggttctcagtaacgaccttggaaatcgaagaggatgagtga

SEQ ID NO: 9762 - DNA, 267 bp, synthetic construct
  source 1..267: mol_type = other DNA
atggacatcctgttcgtcagcaattatattgtggtgattgcactcatgataatgatgctcgcggcattgcgggccagcgcctacgagtccacatctatggggctgctagggagttcaattgtggtaaacgccttcgccgtcgccctgcttatcatcggtggattatacaacctggaattttttagggatatctccctggcgctgatcttcttcggctttgtgggcaccgtggctttcgctgtcgttctcggcggagacgacgagtga

SEQ ID NO: 9763 - DNA, 315 bp, synthetic construct
  source 1..315: mol_type = other DNA
atgttcctgacccgaattggatacgggattatctatttcctggacctgatttacgaaatccttaagtcaacatttgatgtggcctttaatggcatcatgaggcgcaatatcaacccggtcgtcttcgacattgaaacggtgttggagagacccgtgagccagaccatactggcaaactccatcagcctaacacccggcactctgtctgttgatctcgacagtgaaaacaacattatcaaagtagcgaccatctccccacggaagaaggaggacgtgatccctttcgagcagtacataaagaaaatgctcgagtga

SEQ ID NO: 9764 - DNA, 966 bp, synthetic construct
  source 1..966: mol_type = other DNA
atgaatctggtcgagaagctggaaccgataatcatcttttctgccgtactgattgggattttggccagcaacattaacatcgctcagcacaccaactacctcatcaacatcttcctttgtttaatgatatacggactcttcctggaggtgaatcttaatgagctgaagaatagttttaggaatattaagttcaccctgaccagcctaatcatcaacttcatatggacgccattattcgggtactggattggttcaatttttctgaatggcaacctagacatcctaattggcttctttatgctcattatcacgccctgcaccgactggtatctggtgtttacaaagcttgctaaaggcgatttgaatttgaatctgagcatcctgcctctgaacttaattctgcaaataatcctcctccccatctatcttataatcttcttcagcagtaaaaacagcatcgactacacacaaatcatttattccattctcataatcatcataatcccattcatcacagcacagatcacaaagtttgtgttgattacctcactgaaggaacgggcgattaacataatctccgatctggaaatttggtttctgagccttgccgtgttttgcattttttctagtcagggaaaacagctctttgagaatctaaacttcctgatcaccatcttcctgccactcatcatcttctttattgtcaactcgctggtggacctcctgatctcgaaaaagataaacttcacttatcccgagtacgtttccctcactatgacgacactggcccgcaacagccccctggccctggctattgcgataatttccttccagaatcatgagctggtctccatcgcacttgtgatcgggcctttgattgaactgcctatcttgtacattatcagcaaattctgcctctggatcaagaacaccaagctcttctcatttcacgattacactatctga

SEQ ID NO: 9765 - DNA, 705 bp, synthetic construct
  source 1..705: mol_type = other DNA
ttgagcagctataaggggcactctatatttgcatttctcctcgcgtgcatgttcttccacaatccactgctcatctcactgacgttgatcggggcgaacattcccgactttgaccataagttcaagaaggacaatgtatataagatgatcatcctggggttaatcatttttatctcactttatatccttaaactcccttactacatcggtctgatcattgtgttcctcggcatcacattttacttcagcgagcaccggagtttcacacacagcctgttcggcgtgttgaccctgactgctgctgtgagtcttatattgatttgggccctgcagctgatcaccattgttaccacattaaacaaccattacctgatcctggccatactgatctccctgctgagctttctgttcctgaacaaaaaactgctaatggtgttcctgcccatattcttcatttctctctttgtcatcaaaaccggagatattgcctatactgagatagtgctcagtctattgctgggcattttttcccacattgtgcttgattccttcacgccatcgggaatcaagcttttcgccccgctgtccagcaagaaagtctacaaaaatttcggcctaaccgtcatttttatcctcgccatcctctccattttctatcatgcatcaagcctctttaagctgtttgaaatgtacatcaagtactga

SEQ ID NO: 9766 - DNA, 741 bp, synthetic construct
  source 1..741: mol_type = other DNA
atgcatctgaagaagatagggcagtttgaaaatctaaaaatgggctacatcagcgacttctccggtggttacatcagccgcaataaggacatcttaaaccacctcgaattgtcgtcacttaatcagtttattttggagaagtctgtgtacggcacaccaattttcaaacttgggaatggcggaaagaagatactggtgctaagcggaatccatgggaacgagctgcctccgcagattgccaatgtatatctcatcaatgagctgctcaacaaaaagctgactaacacggtgtatctgatcccttttgccgctcccaagtcgtccatgaacaatgaaagaacctttaacgagcttgacctgaaccgagcaagccacatcaagaactcagtcagtaacctgatcatgcaggccattgaacagctcggcattgtcgccgtgggcgatttccacagtactagctttaactcaaaccccggctgcgagtccatcttcagctccaaaagcccctcccccgagagtttcctgatggcaaattacatttcacggaacgtggggtctgagttgatcagcttcgacttcgctggctccatgtacaaaggagcgatcgaagatgtttgtaacctgaatggaatcccatctgtgacctgcgaggtcctgtccccattcggcaacgttggtagggggaccgtggagacatctttcaatcaaatgataagttttctctcttatttcggaatttga

SEQ ID NO: 9767 - DNA, 1923 bp, synthetic construct
  source 1..1923: mol_type = other DNA
ttgaagaagtacatcaagagactgatcagactcgttaactatgagcgtgatgctgaaatcgaccttatgacacatgagataagtacaatgtcgggtaagaagcgagaggagctgggaagggcaatcaataaggtgaaaggcaagatcataggcaaagagctcggtctgcagatcgtgcaattcgggcgctctgagaggattgaaactgagatctctgtgggagacatggtgttgatctccaccgataatcccctgaagagcgacctgacgggcacggtgaccgaaaagggcgccagattcataaaaatcgcatttgacaagaaaatccccaagtgggcgatgaagaagaaagttcgcatagacctgtatgccaatgacgtgactttcaagcgcatggaggataacctcaggcatctgaatttgaggggaaaggatgcgctagagtatattctgactgaacgagatccgcgcaagaataaacagatcccttacattgactacattgataagtctctgaatgattcacagaaacaggcgattaagaacgctctgagttgtgagaacttctttctgatacacggccccttcggcacaggcaagacccgcactctcgtggagttaatttcacaggaaacacggcagaaacacaaagtactggctaccgccgagagtaacgcggcagtcgacaacatcctggagagactaatgaacaacaagcaactgaatctcaccagacttgggcatccgcagagggtctccgagcacaacatcacgcagacgctggcctacaaggttgagaagcatgagctgaacaagaaaattaaaaagattcaccggaaaattgagaaactcattgaaacccgtaatacccacacacggccaacaccccagttccggcgcggctacggcgactatgacatactgcataacgcttccaaaggtaagggcggtcgtgggattagtcctgagaagatgaagtcgatggccagttggatcgagtgcaaccaagagattaacgaaagctacgacgacatcaagcgcgtcgagaacaaaatgattcgcgatatcatcgaatgcagcgatgtgattctctccaccaacagcagcgctgctctggattccatagccaagactaaattcgacgtggccattatcgacgagtcatctcaggccaccatccctagcatcttaatcccaatcgccaaagctaagaggttcatactcgcaggggaccacaagcagctccctcctacaattatatccgccaaatcgagggatcttgaaaagacattgtttgaggagttgatcaagctttatccatacaaatctcaactactgaacgtccagtaccggatgaacaaggcacttatgaaattcccgaacaaggaattttacaacaatggattgaagagcgacccaagtgtagaggagatcaaaatagatgacctactcgaccacaatcaccacgaggaagccttgcttttcatcaacaccagcaacgtctacaataataaagaaaagcggctcaaggattccaaatcaatcatcaatcccgtagaatccgaaattaccatcaatattgtgaaaaattacctcgaaagcgggatcgataacgaagatatcgggatcattagcccatatgccgaccaggtgaaggtcatccaggacaacacgcccgttgaggtcaagactgtggatggatttcaggggcgggaaaaagaaatcattatcatctcaaccgtccggagcaataacaacggaaacatcggctttttaaaagacctgaggcgactgaatgtggccatcacacgagcaaagagaaagctgatcatagtgggaaacaaggaaactctgaaaaactcccccacctataaaagacttattgaatttattgagaatgagaatctgctcattgacctgtga

SEQ ID NO: 9768 - DNA, 1179 bp, synthetic construct
  source 1..1179: mol_type = other DNA
atgacggaaaaggtcgtactcgcgttcagtggcggattggataccagcgtttgtgtgaagctcctggaagaaaaatacgacgtggaggtgataactgcctgcgtcgatgtgggccagggggaggaagaaatggaaagagcgaaaaccatggcttctaagatcgggggcctaaagcactacaacattgacgcgaaggatgagtttgccaacgagtacatcgcacgtgccatcaaagccaatgccgagtacgaaggatatcccttgagtaccgcccttgcccggcccctgatcgctcagaaaattatcgatgtcgctgagaaggagggggcaaccgccattgcccacggctgcactggaaagggcaacgatcagttcagatttgaggcagtgatcctggcgatgagcgaccttgatattatagctccaatcagagaactgaacttgacacgaactgaggagcaggagtatgctgcctcgaagggaatcgaactcagctccgacaagctgtactccattgatgaaaacatctggggcaggagcatcgagggggacatcctcgaggacccctcaaatgagcctcctgaggagatctatgcctggaccaagagctggaaggattcaaatgacgagccggaaaaggtcacaatagagtttgaagaaggtgtcccagtggccattaacggcgagatgatgccgttgatagaccttatacgcaaggcaaatgagatcgctggaaacaattcagtgggccgggtggataccatcgagaaccgcatgattggtctgaaaagcagggaaaactatgaagttcccggagctaagctgttaattgcagcccatcaagctttagaggagctagttctcaccacagacgagctcaggttcgccgagtacatgtctacactttatgctgacctggtctaccgagccctgtggcaggagccactgcgggaagacctggatcaggcattcgacaaaatgcaagaacgggtaagtggggaggtggtaatgaagctcttcaaagggtccatccagcccctggtgcgcaaatcccctttcagcctgcattccattgaacagattacgtttgaggacaaagaaacggaccaaagggaggtggagggcatgatcaaataccacggtctgcaggccgcaaattaccagaagctgaaccgctga

SEQ ID NO: 9769 - DNA, 726 bp, synthetic construct
  source 1..726: mol_type = other DNA
atgtccaagcttaaccagttacaagagattattgattcgtctgacaatattgtctttttcggcggggccggcgtaagcaccgagagcggaatcccagacttcaggtctgaaaacggcatattcgagagtctgaataaatatggcaagacccccgagaatatcgtgtcacatagctactacatcgaccacacagccgagtttttcaagtactataaggacaatctggttttcaaggatgctaagcccaaccctgcccacatcgcgctagctaagctggaggaaattggcaaactgaaagctgtagtgacacagaacatcgacgggttgcatcagaaagccgggagtaagaccgtgctggagctacacggcagcattcaccggaattattgccagatatgcggaaaacagtatgagctcaattccgtgctcgaatcagacggcatcccaaaatgcgaatgtggagggactataaagccggacgtggtcctgtacgaagaacctttgaacagtgcagtgctgaactttagcatagattacatctcaaacgcagataccctcatcgtcggaggtacttctctcgtggtttaccccgcagccagcctgatcaactattttaatgggaaaaatcttgtgctgattaacaagtccgagacacaatacgacaacctggcgtccctcgtcattaacgatgccatcggtgagacgttctcccagatcaagatctga

SEQ ID NO: 9770 - DNA, 717 bp, synthetic construct
  source 1..717: mol_type = other DNA
atggactatgtgaagggaattttcaagaaccggcccaataggttcatagccgaggtggaagtggggggcaacttggagatagcccatgtgccaaataccggtaggtgcaaggagcttctggttgatgacgctgtggtgtggctcaaggttgccgacaaccccaaacgcaaaactcggtttagcttgcactttgtagagaacaagaatgtgctggtctcgctttactcccagcaggcgaatacaatcgtgtacgacgccgtcattgagggcaaaatcaaggaactgaacggttactccatctaccagagggaaaaaactattgataactcaagaatcgatatctatctggagaatgagaccgaagaatgttacgtcgaagtcaaaggagtaacactgatcgttgacggggaggctcgatttcctgacgcaccaaccgagcgcggcagcaagcacctcaaagagctgataaaactgaagaaggaggggaaccggtgcgtggtcttcttcctgattcagcaccctgtgggaaagttctttcgtccaaactgggaaaacgacccgaagttcagccaaacgctaaatgaggcatatgaaaagggcgtcgagattctcgtatacagatgcgataaccagctcgatgggatcaatctcatccccgaagccttagactttgatctgggaaaaagtttcaccgacggcatcgtgaacgacaagtga

SEQ ID NO: 9771 - DNA, 1527 bp, synthetic construct
  source 1..1527: mol_type = other DNA
atgatggtgacggattacaactgtgaatatctgggattgtctcggctttgtctgatggaaagcgccgggaagtcgctagccgaagaagtggggaagattgctgtatacacattcgccaagccgatcaaagtcgtcatcttcaccgggtccggtggcaacggtggagatggcttcgtcgcagccagatacttgctaaataggggttatgacgtggacatctacatgctgaaagacaacatccgctctgaagacgcaaaaaccaaccttgagatcctcaagaatatgaagccccgactgtccagactgaacattttcaacctcaaaacactagatgatatcaataattgcgaggtggttagtgacgaaactagtgatttcataatcgtggactgcctgctcggaactggcatcgacgggaatttacagacgaatattaaacgggccattgaggtaattaatgagtctaacgggcttaaaataagtgtggacgtgccttccggcatgaaccccctgaccggggtggtggacgacttggcggttatcccagactacaccatcagcttccacaagatcaaaacaggagtcaggaacgctgatgaggaagcggttggcgggataataaccgccgacatcggaatcccatttgaggcggagtattttgtgaactatggggactttctccgcctcaagaacagggattctgactcacataaaggcaacaacggacggctgctgattgtcggcggatctgcgaactatagcggtgctcctgctatcgctggcatggctgccatcggtgccggcgccgacctggtccatgtggcagcacccgagaaagccgccgaagctataaaggcgacaagtcccgacctgatcgtgaactcccttgagggggacgagttgtcactggaacacggcgaggagataatcagattaagcgagaacgtagatgcaattctgatcgggcctggcgccggcatatccgatagtaccagcaaactgtttaacctgcttgtagcaaagatcaagaagccgatcgttctggacgccgatgctctgaagcaagttgagctgagcctgattcgaaaccgtgaggatattattctgacgccacacatttttgagtttaaatcattcttcaaggtcaagaatgacttgaagttagatatcgattcatacgatttcaagaaagttgacgagaatatcaccgaaatccagtttatcactaaccagattaagggaacagtcatcgtgaagggaaaatacgacctcattttgtccgaaaataacttcaaaatcaataagagcggaaatagcggcatgactgtgggagggaccggcgacgcactctccggtattgtggtcagcctctccgcccagggcctgaatgctttcgatgccgcctcgcttgctgtgttcattaatggcctcgccggcgaccgcgcattcgacgagaagggaaatgggttttcagccacagatctggtgagctttgtgggtaacgtgattaaggatggcctctgctga

SEQ ID NO: 9772 - DNA, 1134 bp, synthetic construct
  source 1..1134: mol_type = other DNA
atgaggaaaataacgatccgcctgttaaccaggttgcccaccaagtatgtgaccatcggcctactcctaattatcgccctgtttgtgtacggaatcttagggtcgtatttcatcatgcacctgaatattatcgatagcatttattactctattattaccatggctacggtagggtacggcgactatacaccccacacaggaatccagaagatctttgccacaacacttgccctgtccggtgttgcccttctcgcttatgtgttcaatatcatgttgacatcattccaggaaaagatgagcacctattccaaaggtgcccggaaaatgaaaaccatcgaggatatggacgactactatatcatctgcggctttggcagagtgggcaaggtggtctttgacgagctgaacaaacgcaagcagaacatcattgtcattgagaaaaaagaagagatttgtaataatatcgaggagtccagctcggtcgtgagtattcacaaggatgctagcgaagacaatctgatatcaaagctggcgggtgaacgctgcaacagtgtgatcgttagtactggagatgacgtgaacaacctcttcatcgtcctgactatccgggagacaaacccggacgcgtggatcgtgactcgagcctccaaagtggaaaacattcctcggcttaagaaggcaggggccgataaggttgtctcccccgagataagcggaggacaagacatgttcttcgaaagcactaacccttacctgctgagaattacagtcaaacacacggtagaccagatatacgacgaatttaaggtgatcaacaagtacgattgcagcctggaaaccattgactaccacatcccaggcgtggagaccccactcacccgtgaaatatatgtaacccggctggcagacggcaagaaatactacaactacctccagacacatgatgatcagcgacaagcacttgacaccttgtacagaactaccaataacatccattcacatttgatcctcgggcaggataaggagtctttcgagaacctgataaaggatctgaaggagatcgaggaaattattgggattaacctcacgaatgaggagatcgctaaaataactaggaaggaggactctaattga

SEQ ID NO: 9773 - DNA, 891 bp, synthetic construct
  source 1..891: mol_type = other DNA
atggagataaatggcgtcgaaatcaaagatacatacgctgaaggcttcggaattaaagtgacccgcattttggtgactgccgcaacggaagaattggccaagatcgccgccactgaggcaacagggtatggaacgtctgttatcggatgccccgcagaggcgggcattgattgctttgttcccgccgaaaatactcccgatggaagaccgggctacgtgattatgatctgccagggcgggaaaaaggcactcgaccatgaacttatggagcgagtgggaatgtgtatcctgacagctcctaccgccgctgctttcaactgtctggaatcggaaaccaccttaaaaaccggcaacaaactgaagttcttcggtgacggttttgagaaggagtgtgagatcgacggacggaagatccacagcattccaataatgagcggggacttcctggtcgagtccgagtttgggtataaggacggtgtggcagggggcaacttctttattctcgccaaggaccagatgaccggagtagaggccgcgcaagccgctgtggaggccatctccaaggttgagggcgtaatcacgccattccctggcggcatggtggcttctggcagcaaagtgggatcaaacaagtacagtaaattcctgaatgcgtccaccaatgaaaagatgtgcgtcacactgaagggggaggtggattcagacatcagggatgatgccgatggtgtatttgagatagtgatcgacggggtcgacgaggaaagcgtcaaggccgctatgaaggcgggcatagaggcagcctgcgaggtggacggcgtcctagaaattagtgctggtaactttgacgggaaactgggggcctacatcatgaaccttcaggagctcttctga

SEQ ID NO: 9774 - DNA, 1062 bp, synthetic construct
  source 1..1062: mol_type = other DNA
atggacaagaagtcagtttttttcctaggaataagtgtctttatattgatcataatgctgtggttggtggggatagaggacattatcgatgcgctgaatgtcgctaaactcgagctcatcgcgctcgccattggcgtccagatcttcacatatgccctctacacgctccggtggcagatacttaataacctagcagatatcaataccagcttcaaaaagctgctgcctatgattctggtagggctggccgtcaacaacatcactccatcgggccggggcgggggcgagcctgttcgagcatatatcctgtctaaagaggaagactacccgatgcgcgagacattcgctaccgtggtcgctgatagagctctggacactttccccttcgtggtgctgaccgttatcaccatcattggtatgactttttactttaatttcgatttatggttacttatcgtaatgatcagcgccgtaatctgcatcgtggcctttttgctgatgatcatatacatgagcatcaaccccaacttcggcaaacgcgtcgacggctggatcattaagctcgttagaaggttctacaagaagaatagcgaggaactggaaaacaaaatccacgcagtgatccttgacttccaaagcacaatgaaaatcgtgatttcaagtaagaaggtcacatattacgcattgcccctgtcatttatcatctggattttcgaaattctgagggtgtatatcgtctttctcgcctttggagcggacattagtcctattgtgattggggaggtgttcattattgccagcctggtggggatgatcccactgcttcccgggggactgggtgccgtggacggaattatggtggttttctactccgtggcaggcataagtgcttccatatccgccgccgcaacggtgatcgagcgtcttatttccttttggatggccaccattctcggcatgattatcctaccacattatggatcgagcatcctcgacaagattagcttcggttcctccaacgatgaaatcgaggaagctctggagaacgaaatcgataactga

SEQ ID NO: 9775 - DNA, 1434 bp, synthetic construct
  source 1..1434: mol_type = other DNA
atgcgctacattaccaagacggacctgttggttatcggtctgaactccggatacctgctgattggcatcggcataatgtgcctgatcccactgatttttgacctgatttattttgagttcgacctgattagctttattctgcctggcgctatatcaatatgcctcggcttctttcttaccaagtacctcgatgaatattcaaacaagaatgtgcgactcaagcacgggatgatcatctcctcacttggatggatatgggccgctctcattggcggattagtcttcatgctggccaccaacatgccccccattgatgccatctttgagagcatgtctgccctaaccgggactggagtgaccatgtacacaaatcttgagatcctgcctcatagcatactcttttttagagcgttcgaacaatggatcggggggctgggcgtggtcgtcatggtgatcagtgtgctggcaaaaccgggtacggctacctcgacgttatatcacagcgaagcacacgatgagcggataaaacccagtacgaaggctaccctggagaaaaccattgagatctacataatctacaccgtggtaggaatcgttctttacgccatcgcgggcatgccactcttcgattccctatgcaataccttctgcatcattagcactggaggtatgaacgtgaagaatgcaaacatgggctattaccataacgacttgatttatttcatatccatcgttcttatgatactgggtgccacatcctttctcgtacattataaggtgatcaagactaagggcaaatccttgttggaggatttgcagtttaagattattatctgcgtgattgcaattgtcacgttgatgctctattacgtgagcaacatcgtcccgatggaacttttattcacagttgtatcagccatcactactacaggggccagcatctccagctctctgacaatggcgagttggccatcttttgtgatcatctgtctgatctgtctgatgctgtcgggcgggagcaacggttctactgtgggagctattaaactgatcaggctgatcaccttcttcaagggaatctaccggaacatacgggagatcctgtcccccagtgggagggtggtgcccatcaaactccagggcaggccactccctgagaatgcctcggaacagtctggtaattacatcacactttatctaatgttcatcatgtttacatgggccctgttctgtttcttcggccacgacccctttgacagcttgttcgcaactgtctcactgcagggcaacaatgggctggacctggggattattaccaaccagattcaccctgtcctcaaaatcgtcagtatgctcaatatgtggatcggaagactcgagatttacccagttctaatcacactgcgcaccgtgttcgaaattttcaagcgttga

SEQ ID NO: 9776 - DNA, 660 bp, synthetic construct
  source 1..660: mol_type = other DNA
atggattacgtcgtaatcatgggcggaggtcgggtagggctggctctggccaacctgttaatcaatgagggatatgacatcactctgattgaaagtgatacgaagttgtgcgacgaagtggcatcagagctcgatgcactcgtgatttgtggcaacgggaccaattctaaaatactggaagaggtgaacatcgaggacgcaaagtacttcattgccacaactggaaatgatgaagccaacttgctttcatgcatccttgttagaaaatacaacgtggagcatatcattgcccgcgtcagcaatccggaccacgaggaggcgttcaaagaagtgggcatcgaacaggtcatcagtccagaacgagccgctgcctcgtatctgcagaagatcgtgaccaggcccaacacagcggagctgatgactatagggcaaggagacggcgagattctcgatatgaccataaccaataacaaaattgttggtaagaaatttaaggacgtgagcccaacaaaggactttatgattatcgctacgtaccagaatggcaccctaatcatcccccagcctgacaacatcataagccgcggcgagaaggtgtctgtgctggtcaagcgggggtccttcagcaaggtctccaaaaaactcgagaacaagtcctga

SEQ ID NO: 9777 - DNA, 612 bp, synthetic construct
  source 1..612: mol_type = other DNA
atgtccaagatcgtgttcattttgggctacaattacgattcaaattgctatctgatcgatgataaaatcctggtggacaccggcgcgggggaaaacagggactacctcttcagcaagctgcgagaaaacggcgtggaaccggacgacatcgagctagtcgtgaacacccactgtcatttcgaccacattggagggaactacctgtttcccaatgccaagattgccgttcacaaattggatgcaacccccatcagaaatgaggacacattaggcacggccggcactgcttttggttttgacaacataaacaattcccgggttgatatcgagctggaagagggggataaaatagcagacttcgaggtaattcatactcctggccacacaagcgggggaatatctctgtgggacggggagaacctcatttgcggagataccatctttgctgggggaggtgtgggacggatggatatcggcggaaactatgacgacatgaagaatagtgtggaaaagcttatggccctgaacgtcaagcgcatcttcccaggtcatggcccaatcgtcgagaacaatggcaaggagcacattaaactctcgtatagctacctttga

SEQ ID NO: 9778 - DNA, 411 bp, synthetic construct
  source 1..411: mol_type = other DNA
atggcgaaaaagggaagtgccgaggagcgagagctggtacacaagctctgggaacgcaatttcgcagccatgagggctccagcctcaggcggggcgaccaaaaagtcccttcctgatgtggtggccggcaatggcaaactgtacctcgctatcgaggtcaaaacaactacaaaagacaagatatacattgacagcatccagatcgaggagctgtgcgaatttagcaacatttttggagccaagccctatatcggggtccggttcaaatacactaagtggctgttcctggagccggacaacacgccccggaccaagaaaggcaactatcgcgtggaaaaggactacgcactagagaaggggttggagatagatgaaatcaccggtattgatagacagatgaagttcgaatga

SEQ ID NO: 9779 - DNA, 981 bp, synthetic construct
  source 1..981: mol_type = other DNA
atggatagcaacatctttgatttaataaagaaagccaatgaagtcacgctgaacaagcacggcgatctcattaccctggagcgagctgtcttcctgtcctggtggtgcgataagggcgactgtgccttttgctacatgtccacacagaaggacaagattagagatccgaccaaggcgaggcgcaacattaataacatctatgctgaagccgagatgtgtaagcggctggactggaacattgaatttctctctggtggctacgagagttacaccacccaggagataaaagagatcgccactacaatcaaggatatcactggcgatggggtgtggcttaacactggcatcacggacgaactagaagagtacggttctgaaataaaaggaatcaccggcgccgtggaggtggccaatcccaagatccatgaaaaggtttgccctagcaagaagctgagcgacatcagtaacatgctcgataccgcaaacgacctgggattcaagaaggccatcacgattatcttggggcttggggaaaccctaagcgacgtggactacatcataaattatattcaagcccacaagatcgacagagtcatcttctattcactgaatccccacaaggagacaatctatgcaaacagctcacagcccgcttccctctactacgcgcaaatcgtggctcaggttcgcctggcgttcccagacattgagatcatctgcggcacttggattgataatcttgcaaacatcggcatattgatactgagtggtgcaaacgggattaccaaattcccactcttcaaaatgttcggaacaaagtacggaaaaagggtggaggaggaagtaaagtggaccgggcggaaactcaagggaacatttacagacaaaaatcagctggggcctaaaaagagcgagatttccccagagttggacaaatttattaagcgttacgtgaaagagtcgctgaaaaataaatattga

SEQ ID NO: 9780 - DNA, 1353 bp, synthetic construct
  source 1..1353: mol_type = other DNA
atgatgtgtggactcgagatccacgtccagctagaaaccgagtcaaagctgttctgcgactgtcctacaaactatcaggacgcgccagccaataccaatatctgccccgtgtgccttaaccagcccggagccaagccccatcccaccaataagaaggctttagagaacgccctgatgattgctttgatgctcaactgcgaaatcgaccaagacgtcatctacttcatgcgcaaacattacgactacccagatctaagcagtggctatcagcgaacttcggtcccgatcgggatcaagggggagctgaacggaatcagaattagggagattcacgcagaggaggacccggggcagtacaagcccgaccgcgggatcgtgaacttcaaccggagtggcatccccctggttgagattgtgaccgagccggatataaaatctcctgaggaagccagaaacttcctgaaagaactgattcgtgtgctccagtacagtggcggggctcgcggcgagggcaccatgcgggcagacgtcaacatttccatcaatggtggcaacagagtcgagatgaaaaacgtgaactccatcaagggcgcctacaaagccttgaagttcgagctcgtacggcagaagaacctgatgaagagaggtgtggaagttaagcaggaaacgcgggcctatctggagtcccaaatgatcacggtggggatgaggatgaaagaggatgccgatgactaccgcttcatcacggaccctgatctgccaccaatgcagatcagcgatgagacaattcaaaggatactggacaccatgcctgaagccccccacaacaaggtaaagcgatttgtggaagattatgggatcgatgcggagtctgcgaaggtgctgactagcgagctcgacttggcgattgcctacgaagaagtggtaaaagagatcgagcccatatttgcatccaagtggatgagggacgagcttaaacgggtgctgtcttataacaaactcgattttgcagacagcggcataagcgttgccaatctcattgaatttctgaatatgattcagacaaaggagattacccagaaggccgctaaaaaaatcattgaacagatgccaaataacgagaagacacctaaggcaatcgctgaagaactgggcctcctaggtgtggtcaaagatgacgaggtgcttgcagccgtcaagcaggcaatcgaggaaaatccaaaggctgtggaggattacctggccggtcaaaaagcttcaataaatttcctgatgggacaggtcatgaagcttacacgaggaaaagctgaccctggagaaactgttaagttgttacgcgagaatatagaatga

SEQ ID NO: 9781 - DNA, 807 bp, synthetic construct
  source 1..807: mol_type = other DNA
atggtggagaagaaatctttcgtcaaagactacatgaccaaaaatgtgatctgcgtgtccccaaacacccctactgaagagatcatcgaactgatgaggacaagccggcacaacagttaccccgtggtggtcaatgaccggcttgttggaatggtaaccgcgttcgatgtggtatctaagaagtggtcggacacggtagaagggttgatgagcaccaagctcgtggtggctaacccggagttgtccataaatgatgcctctcgcgtcatgtttaggcggggcatctcccgaatgcctgtcgttgacgagaacaggaaaattgttggaatcataacaaacacggacatggttcggagtcatatcgaaaggagtacccccaataaggtggagtacttcaagaaaactctagagcagctctacgatatcaaggccacactgagacacatgcccgtggagaccaacaagctccgcccaacccaagatcgcgtctatgcggatgagctggagggcagaacttacgaactgaagagaggcttagcagaaccagcaattgtggtcaaaacgggtaaccgatggattctggtggacgggcaccaccgcgctgtcgcttcatcccagcagggttatgaaaccgtggatagctatgtgattgacctgggacaggacatcaaactggggatggagaagactgccgataaagccggcatcaagacattttcagacatcgagattattgacgatgacaagcatcccctgatagccctcacagaaagccttcaggatcaagagcgtaagagcgacgactga

SEQ ID NO: 9782 - DNA, 288 bp, synthetic construct
  source 1..288: mol_type = other DNA
atgaatgacaagattatacgagaggtatacgaagtgctggaatcacgccgggacaaccccattgacagttacaccagcaagatcatgcagaatagcgacaaaaaggccgaggacaaaatcttggaaaaaatcgccgaggaggcgggggaagtcctgattgcttctaagaacgatgagaacctagtgtatgagtccgtcgacctcatcttccacacactcctgctgcttgcatacaaaggcatcgacctggatgatgtgtttgatgagttcgccagaaggcggaagtga

SEQ ID NO: 9783 - DNA, 768 bp, synthetic construct
  source 1..768: mol_type = other DNA
atgttcgacaccttcactgaaaagaaatttctcctgaaggagttggtcaaaaaagatttgacgagcaagtataaagactctgtcctaggcatactttggagtttcttcaacccccttctgataatgttagtgtttacagcaatcttttcaatgctcttcggacggcagattgagaattatcccgtttatttcctgtccggcaggatcatttttgacttctacaacagtgggacaaagggtgctatgaagagcattaagcgaaatgccaacctgttaaaaaagatttacgttcccaagtacatgtttagcgtaagtaccatctgctatgaatttgtgaactttctgatctcctttgtgatactattcatcgtcatgatccttacaggcgctaccttccattggactatagtgctctccatcatccctatgttcttcctggtgtgcctgatcttcggggttgggttgattctggcggtctgcaacacttacttctcggatatcggtcacctttacaacgtcttcaccctcgtactgatgtacgcctccgccttgttctaccctatggagatcgtgccagcaatagtgcagagaatctttaccctgaatccagtgtacagcgcgatttcttgtttccgcgagtgtatcagctatggcatttttccgaatacgtctaccctggcctacctcgccattttttcatttacaaccctgggaatcggactgtatctcttcaaaatttacgagaagaagctcgtgctggaaatctga

SEQ ID NO: 9784 - DNA, 1425 bp, synthetic construct
  source 1..1425: mol_type = other DNA
atgaacttgatcaacaagatcaggaacctgtttaacgataacactaagcaggaaaagaacaagcacattcctcttgacgctaaatttcagagcagtcgtttcaagaatatcaagatccacgcaccggactacgtcatgtccaccgaaaacagataccatatgcagatactcgataattctaacaaccctatcaaaaacgaagccataacactggtgattaatggaaagtgttacgagaagataaccaataaggacggctatgcatccgccaaaatctcccccaacaagaagaagaaggagatgaaaatatattatctctcaaatgaggagtactgcccctgcataattgccaaactcattcaccctgataacattaatcccgaggaaaataatgaaaaccccaaactgtacgccccagatatgagcatctattcgaaggacgagccagaatacaatgctcgcctgctggatagtgaggacaacccaatgatcggggaaacactaatattcaactttaataaccagacctatgagaaaatcaccgacgaagaaggcttcgccagcatcgatctgaagttggatgaggggacatattccattgaaacaatcttcaaaggcgagaaggacagcaatcccattaccaagacgtcaacaattaatgtgaaaaccagaaatatcgatcggaagatcatgatcgaagtcaaacaccttgcaatggagttcaaaattagcaaagacaagatagacacactgaaagagtacgtgattcgaacgatcaaaagaaccaaaaaggagcacgagaaaattcggatcttggacgacatttccttcaacatttaccagggagagagggtgggcatcttaggcttcaatggtgctggcaaatccactctactccgaattatagcgggaatctatgagcctactgaaggcgaagtcataatcaatgggcggatcgcaccactgcttgagttaagtgccgggtttgataagaactacactggaaagaacaacatctttctgaacggagctctgcttagcatggaagaagacttcatcaaggagaaatacgacgagatcgtcgaattttctgagctcggcgagcacatcaactaccccgttaagaactactcaaaggggatgagggcgaaactgggtttctcaatcgccacgctcgtaaatccggagattctcatcattgacgagattctggcggttggagacattaaattccgcaagaaaagctctgagaagatcaagtcgatgatgaaggagggtgtgaccgtactgctggtgtcccattctattagccaaatccgcaacatctgcgatcggtgcatctggatcgaaaatggccatgtgtacatggaggggccagccaaaaaggtgtgtgatgcctatgtgaagagtgctaagaagaagtga

SEQ ID NO: 9785 - DNA, 501 bp, synthetic construct
  source 1..501: mol_type = other DNA
atgatactgatcttcctgattatagggtgctgttgcctattctacgttgtggaaacatcaaccacggtggggaatgctattactgtcgtgaacaaaacggtggtcacactgccaaacgaatttagcattgagtcgcgggagactggctacggcaccttaattaacaagaacacaaaggaaaaaatcaccatcaaagatctgggtaagggaaacctcgccctgactaagtttaagaacgcacttaccgacctgactaaaaatcccgacatcgaccatgtgaaaaattccacaagcaacattaacaacatcaccgcctataagatcgattatcaggacataacaaaagagaataactccgatctcagtaatgtttatgtctttacgtgcaatcacaccttcctcatcaagcttgagaattacaacaataacgtgaagagcgacaacgacttggattacgtaatcacccacatgaccccggacttcaagcagtctcaagattga

SEQ ID NO: 9786 - DNA, 2544 bp, synthetic construct
  source 1..2544: mol_type = other DNA
gtgatcaaattggacgaaatcgagtttagcgtgatcatacccacgcacaattcagagctcggcatcaaaaaaagcatcaagtccatcctgaatcaaaccctaaactttgagaacaacattgaaatcattattgtggacaacaatagtgaggataaaactcaggacatttgctacgactacatttccaagtacccgaagaacataagctatatccagctggacaccgtgaatctgcacaaaagcaaaaataccgcaatgaagcacgcttatgggaaattcatcacatttctcaaacctcatgactacttgtcaaaggattcactttcacatctgcttaagttcatcaacacccacgagaacatcgacctggcaatcctgccgatcttctattataaaaacaaccgcaaggagcgttacataaattataagattaagaacaacaaaaagatcaacctgatagagcaaccacaatattcccagctgattggtctgtccaccttcttcaagaaagagagcattaagaacattgagtttctggatactactaacgaaaacattactttcttcagcgaaatgctgataaacaatccttatctcgggatttgcagcaaaggcgcctacttcgccaagaacattgaagaacggatttatccttccgacactaccatttatagcaccaaggagtacgaaaagtttatcaaatacaattttaacaatctgaagaataagtgtttcaacaagttttccaaaatacccgagtttatccagtttagctttatcaatcatttacgatggctgctgtctatcaagaagacagaagagaagattgatttgaaaagtctgatcgacaccatctcatatatcaacaatgatatcctcctcgagaaccgccttctcaaacaggaactaacgattaccacgtttctgctcaagtacaacaacgacctgagcaacgaccttatggaaaagctggacctgaataccctgttcatcgacatatacgatatcatcgacaacaagatccacattctagcgaacatcaaaaacatcacaaccggagatatcaacatattagtcaataacaaaaagatcaagttcaaaaaactcaccttcccgcacaagtatgctcctagtctcgggtataacctactccaggattactccatcgagtgtatcattccaattaaaacaaatgaaaagttcaagcttgaatttaaacagaaagacaaactgctgcacatcgacttcagccggccttgcaatttctccaaaagtgtcggttacgccaagactaaacactacttgagtatcctgaaggacgaccacatctcgattgagaaaaaaacaacattaaagtggataaagcaggaactcaagagtcttaagacgatgttcaagaaccacgagactggcttcataaaagcagtgccctttagggtagcttatatgataagttaccccttcctgcggaataagaaaatctggtttttcatggaccgccccgatgaagcagatgacaatggactggccctcttcaagtacgctgtcaaacaggaggatgacatctctaagtactttattcttagctcaaagaataacgatttcaataatataaagaagatcgggaaggttattaactacaaatccctcaagcacagatttttaggcatgttcgtggagaatattatcacaagccatccagacaacggcatcatttacccattctggggaggttacccattcttcgccggccttctcagatcaagcacgatgtttttgcagcatggcgtggccaaggacgacatttcctattgggcgaacaaggctaacatgaacttatctctgtttctgacatcgactattcaggagtacgagtccatcctggagaaccactataactacgatgactacgtggtgcaactcctggggttgcccagatttgataaccttaagaatcaggaagaaaagaggcagatcctgattatgccttcgtggcgccgggacttgaattataaaagcaaggagtacatcaagaagaacggctttttcaaaaagttcaacagccttataaacaataagcgactgatagagacggcccgggagaacaactacgagatcatctttaaaccacatcccaacgtttacaagttcattgacctgttcgataagaacaattatattgagatcgactatgggaaaaccaagtatcaggaactcttcaacagcggaagtctggtgatcacagattactcgtctgtagcctttgactttgcctacctctacaagcccgtcctatactaccactacgataatgactaccatttcaatctggaagagggatacttcaattatgagaccatgggatttggcgaggttgtgaagaaagaggatgagttggtcgacttggtcatcgaatacattaagaacgattgtaagatcaaggaaaaatattccaataggatcaaaaataccttcaaattcaatgataaaaagaattgcaagagaacctatgataggataaaggagattacactgaaggattga

SEQ ID NO: 9787 - DNA, 570 bp, synthetic construct
  source 1..570: mol_type = other DNA
gtgattaacttgaggtacgtgaacttcaatccacacattcacgatacgtataaggtcgccgagctagtatacgacgtggatttccgcacatttgacttgctgtttaaaacccccaaggaagctatcagtacaatcgagaacgacctcaggaagcatggaccggaaaacactttcaaagtaattttaaatgatgaaatgcagataattggggttcttataatgtacatttctgagaagtcatttgaccttaggctcaagagcttgcggcttatcctcgtggacatactcgactatttcgtcctgtgcgacgtgaagaaagatgatctgtacctggcagagctggccatcgacgagagcctgagaggccaggggctgggccggaaagtggtcctggacgttatcgattatgcccgctccaagaacctgaatcgagtcattatcgacgcagattttagaaatgtgggcgcgcgaaagctgtacgaaagaatcggtttcaccatcttcaacaaaaagcgggtgaaaatcgggaatttcgagcgcggaatgtacaacatggagctaatcctctga

SEQ ID NO: 9788 - DNA, 762 bp, synthetic construct
  source 1..762: mol_type = other DNA
atgaaggacatcctggagagattggtggacggcgagatcaacattgatgaggctgaacgcctgatcaacgcggacaacatccttgagtttaatgaagtggccaaattcgactccaagcgcaagaatagggccggcttcccagaggcggtcttcgcacagtccaaagaatacgaggatttactgctcataataaaaaagtacatgcagagcaataacgataatctcatcgttacacgcctttctaaggagcgatatgaaaatattctaaacgacctcggtgagaacagctttgtgttcgaatacaacaggcgagcccaaattctgatcataagaaaagagattgtcgaaaagcccgccatcgcaaaggtgggcatcatgaccgccggaactagcgatgtcaacattgctgaggaggcccgggtgatcgtcgaggaaggcggttgtgaggcgatcacatcgtatgacgtcggggtggccggcatccacaggctctttccccagatagctcggatggtggaggagaacgttcgggccattattgtgtgcgccggaatggaaggaaccctgcctagtgtggtggcagggttggtggacgttccggtcatcgctgttccaacgtccgtaggctacggggtaggggaagggggaagagtggctctggacgccatgctgcagtcatgcgctcccggaatcgcagtggtgaatattgataatggttttggcgccggcgtcttcgcactgaccatcgtaaacagtgattga

SEQ ID NO: 9789 - DNA, 2241 bp, synthetic construct
  source 1..2241: mol_type = other DNA
atgaaagctctaaagattctgacacagggcatagtgcagggcgtcggattcaggccctacgtgtatagactcgcagtagacctgaatctcaaaggatacgtgagaaacctgggcaatgtagtggagatcatcattgaggggcagaatacggagctgtttgttgacagactccccaaggagctgccgcctattgccaaaatcaactcaatgaacgtcgaggaaatcgagaagactaactatacggattttaagataatcgaaagtggcaactcctattctggcattagcgtcgttccacccgacatcgcaatatgcgataaatgcttggaggaaattcgcaatcctactgataggcggtacaagtacgcattcaatgcctgtactgattgtggtcccaggtttaccgtgatcgaaagtgtgccctatgacaggatcaggacgagcatggacgagttcccactctgcgacgattgttccgtcgagtacgaagaaccactgaaccggcgttaccacggggaggccatatgctgcagtgagtgtggcccccagatggagatttacgaagggaaacacaaaatcaacacagacaacccaatcaaggtcggtgccaacaagctgaaagatgggaagatcctggccattaaaggcatcgggggcacccacctggttgtcgatgcctataataacaaggccatcaaggagctgaggaaacggctcaaccggccaaaccaagctttcgcagtcatgtgtaaggatctggaaagccttcagaattatgcagaacttagcaagaaggagattgacacaatctccagcaataaaagacccattgttatcttaaagaaaaaaaacaactatcccttccctgagagcctgtccccgagactccacaatatcggggtgatgctgccttactctcccatgcattacctcctatttgacgagggggacattgacacctacgtgatgacttctgccaacattcctggagagcctatgatgatcgagaatgaggacatcatcaacggaatcaatgattactcattgatccacaatcgccgaatactaaaccgatgcgatgactcggtgatccgatttcggaacaatgagttgagctttattcgacggagccgcggctacacaccagagccctacaccataaattacgaggtgaacgacttgaatatactggccctgggtcctgagctcgatgtgacattctcaatcgccaaagacaatatcgcatatccctcccagcacatcggcaatactaacaaaccaaagactttagcattcctgcgcgaggctattgaaaatatgcagcgcattaccaagatcaacgagtatgacatcatcgcttgcgacatgcatccgcattttttcacaacaaagctggcttatgagcttgctgaaaaatatgacgcggaggtgcagccaatccaacaccaccatgcgcactctgtcgctctgtccaacgacaacgcaattgacgaaatgattgtgatcgccgctgacggagtgggttatggctcggacggaactagctgggggggggaaattctctacaccgacataaagaacttcgagaggctcggccacctccaaacccagctaatgccggggggtgacatcgctaccaaataccctgccagaatgctggcaagtatcttgaacgatgaaaatctcatcaagaattacagcgactacttcaagtatggcgaaattgagatcaagaacattttcaagcagatggatgcgggcatcaacgtgggtaaaacaaccagtaccggccgggtgcttgattcaatggccgtggctcttgaaatctgtaacgaacgcacctacgagggagagtgctcgatgaagctggagagcgccgcctactattccaacaagaacatagaaatccccttgaacattgagaacaatattcttaatacctccgaaatattaaaggaagttgtaaagctgtatcaggatggtgaaaagaaggccgatgtggctgctgccggacaaaacgccatcgcacgtgggctgagccagctggccataaacgctgcctccaaaaagagtattcaggagattggggccacgggaggagtcttttacaatgaggcgattaccaacacagttaagaattacgtagaaaacaatggcttcaactttattcagcataaaaatacgtgcgcgggagatggatctgtgtcactgggccaggccatcatcgcgaaaaaggtctga

SEQ ID NO: 9790 - DNA, 576 bp, synthetic construct
  source 1..576: mol_type = other DNA
atgatcagaaacgacgacatcgacaacattaaaaagaaccggaagaacgtcaactcgtctaacggccacatagagatcagggggaactacaatgaccagctgggagggatcgacaaagaggacatccttgatgtgatgggttgcaagaccaggcgagacatcatcaacctcctgagggaggagccgatgtttgtaagtgaaatctcaaatgaactggatatcggccagaaagcaattatagctcatctgcgggcgatggaggacatcgggatactaaatagcagctacaagaagattctccgaggacgcccacgtaagtactacgatctccagaatgaagtgaatattcacattaccataaataggaacactttcgatgtgaacttgagcgaggatatgctcaacacactacaactgccctccggcgacgaatggtcccgcctgctggatattgagaagagaatcgacgatggacagctggaggccatcgacgagttgaagaatcagatccggctctatggcaatcttaaagaacgcgccgagtatattctggaaagaacgttaaaaaaccggtga

SEQ ID NO: 9791 - DNA, 552 bp, synthetic construct
  source 1..552: mol_type = other DNA
atgacagacgagaataaaagcgaaaccgaggcggagactcaggactttcaggaaaagtatgatgagctgcttgagaagctggctcttaaggaagaagagctgaaagaagtgaaggagaacctggagaagcaggaagccgagacgcaagagtacatttccctcagtcagcgcctgcaggcagatttcgagaacttcaagaaaatcaccgacaaacggaacaaggagtttatcaaattcgcaaatgaggacataatcaaggactttctggactgctacgaagatttcggtagggccctagagatcaagaataatgatgacctgaaggaaggggtcgagctcatatataacaagttcaaggacattttgacaaaagaaggcatcaaggagatccccaccaagggagagaagtttgacttgaacaagcacgaagccatgatggtgcaagaatcagaggatgtggagaacgattatattatcgaagagttaatgaaaggctacatgtacaaagacaaagtcctcaaatacagcaaggttattgtatgtaaaaagtga

SEQ ID NO: 9792 - DNA, 1872 bp, synthetic construct
  source 1..1872: mol_type = other DNA
atgagcgatacgaagaaagagaagattatcggcatcgatctgggaacaagtaacagcgccgcctcggtgcttgtggggggcaagcctactacaatcccctcagccgaaggcgcaagtcagtatgggaagagcttccctagctatgtggcctttacccctgagggtcagatgctggtaggggaaccggccagaagacaggcggtgaccaacccagaaaatactatttccgccattaagcgcagtatggggacggaccacaaggtgacagtcaacggaaagcagtactccccccaggaaatctcggccttcatcctgcagaaaatcaagaaagatgccgagaccttcctaggagaacccatcgagaaggcggttattacggtccccgcgtactttgatgacaaccaaaggaccgctaccaaggacgctggcacaattgcaggacttgacgtggttcgcctcgtgaacgagccaacagctgcatccctcgcctatggccttgacaaatcagaggatgatgacatgaacattatggtgtacgatctggggggcgggaccctggacgtcaccattatggagtttgggggaggagtgtttgaagtaaaaagcaccagcggggatacccaactgggcggcactgacatggataatgttctgatcaagtacctggccagtgagtttaagacccaggagggtattgatctaatggacaacgatcaggccgtgcagcgactcagggaagcggctgagaaggcaaaaatagaactgtccaccactacaaccacccaggtcaatttgccattcatagctatggggagcgacggaacacccaaaaacttaattatcgatctgacaagagcaaagctcgaggaattggtcgacagcattgtggagaagtcggggaaacctatgcagcaggccctcgacgatgctaaaatgaataagtctgagatcgataagatcattctggtgggtggccctacccggatgccaattgtccagaagttcgtggaaaagttcatagggaagccagtggagcgtggaatcgacccgatggaatgcgtttccatgggcgctgccatccaaggaggagtgttggctggtgaaatcaaagacatcgttctgctcgacgttacccctctgagcctcggcatcgaaaccttgggtggcgtgtcaactacgttaatagagcggaacacaactatccccaccaaaaaaagtcaggtcttctccacagctgccgataaccagccaagtgtagacattaatgtcttgcagggcgagaggaagatggcggcggacaacacgagcctgggacggttccaactggtgggcattcctcccgcccccaggggcgtgccgcagatcgaggtgacttttgatattgatgctaacggtatcatcaatgtgacggccaaggacaaaggaactggcaaagaacaggccatcactataacctcctcaaccaagctttccgacgaagaaatcgaacaaaagatcaaggaggcagaaatgaatgctgaggcggatgccaagcggcaagaggagatcgagatccgcaacaatgccgactcactgatctacactagcgagaagacgcttgatgacctcaaagaccaggtctctgaggacgagaaaacaaaagtcgaagacctcgtgaaggagctgcgagagctgatagccggcgatgacgttgacgccataaaagcaaaaagcgatgagctatccaacgtcgtgcaggagataggggcaaagatctaccagcaagcccaggctgaagcacaagcacagcagcaggcaggtgctgaccccaatgccggcgctcaggacaaggatgacgacacaattgatgccgactatgaggtaaaagactga

SEQ ID NO: 9793 - DNA, 1146 bp, synthetic construct
  source 1..1146: mol_type = other DNA
atggcagacaagcgggactattatgaagtccttggagtcgataagtcggctgacgagaagacaatcaagaaggcttatcggaaactggctaggaagtaccacccggacgtatgtgacgagccggatgcggaagataagttcaaagaggtatccgaggcctacgcggtcctgtccgatgatgacaaacgccaacggtacgatcagtttgggcatgcaggcatggacggcttctccgccgaagacttctatcaaaatgtgaacttcgaagatatattccagggctttgatatcggcaacatctttgatatgttcggatttggtggcggggcccggtccagggggggacgaactggcccccagagagggtcagatatctacaccgagataccaattaccctggaggaggccttcaacggctgcgagaaggagataaaaattaccagaagtgagctgtgtcctacctgcaagggaagcaaatcaaaacccggttctaatccagagacctgtaagacttgtggcggaacaggacagatcaaggaagtcagtaacacgttcctgggccagatggttaatgtaaggccctgccgggagtgcggcggtacggggaagattattacagacccctgcgacgaatgccacggccgcggtagcgtgagaaaaactaaaacaatcaagatcgagattccagagggggtggacgaaggaaaccacttgcgagtgagccgcgagggaaactgcggggataaggaaggtttggaaggcgacttaattgtgactgtccatgtgaagaagcacaagaaattcaaacgtgagggcgaccacctctacctggagcagcagatcagcttcccccaggcagcccttggggatgtgctcagcatccctaccatcgaagggaaggagattgaatttaaggtcaccccagggacccagagcgagacggtgtacaagctacgcggccagggtatgaactccgtgcgacataacagcaggggcaatctctacgtgaatgttacagttgtggttcctaagaaactgagttcaaaacaaaaggaactgctgaaagagtttgccgaggtcagcggagacgaaatcaagcacgtggaaaaaggactctttgacagagtgaaagacgccatgaagtga

SEQ ID NO: 9794 - DNA, 3489 bp, synthetic construct
  source 1..3489: mol_type = other DNA
gtggtgttactttcgacgggcgtggcgtttgccattagtgaaaacgatgtggctgtctccaacgacgtggggatcgtgaacgagacggttctagaggtaagctccgacgattcggatctcagcgaagcggacgtgttagagacacaaaccaacgtggtgaccaaagatacgttccacaattacttcggaaatgacggtacacttctggacaacgtgtctagtgacgagctgatattcaaaggagatttcaccggaatcgacgtcagttacatgacaattggcaagtctgttaagttgtctggcggtaataccaccctgaacaacgtgactttcatcatcggggccgacaatgtggtgattgatgggttcgttctcgatcattccgatgtgtatctgtttgatatagaaaacgtcaacggcgtgactctgtcgaacaatataatcaatttcaaaacactcgaagggacagagggatacgctatctttgccaacactgtcaacgattttaagatcatcaacaatacgatcaattacgtgggcaacaccaaagggacgatggttaataatgcgatccgggtgaccggtgacgaggatagcgccatcgcctcaaaaaagatcatcgtggaagggaacgtcattaacataaagatcccatctgtggacgtgggttacgaccccgtgacctgggaatcaaaggtgttttctgagggcattgtcttctattattgtgaggatgtgaagtttatagataaccgggtggacctgaagtataacaatttcagtggtggcttcgatacgatttacgcactgagtgtacgcggaaacccttataacttcgagaacacaatcgtgagctctgacattgaaataattaacaatacaatcaatgctaatggacataattatatttacactatcttcctgtctgctaatgactttaaactcttcaataatgtaatcaactcaacagccgacttttattacgctaacggaatcaacattgatgggcccgcctccgaaggaattgtaagcaacaacttgatcagtgtggagtcaccatacgacgtgtatggcatctacagctaccagatgaacggccccattgagtatatctcctatgtcaacaatacaatcataggtaaatcctatgtcggctgcggaatggaaatcgttgaatgcaatccctacatcgcagacaacctcataatcatgaatggtaactatacctttggcgtggtcgcaagtattagggataatgggaccatctcaaacaacagcatcagcagcctgggaaataacaatggcaccgatggaaccggcgatccgctgttgcctttaaatagcctcggcatcagtgtaaaggggagtgtactgattgaaaagaacaaaatcaactccgggggcatcgggctgaaccttgtcgaaaaaggcaacattaccattaacgataacaacattaatgtgaacacgactggcggcgttgagagttatgccatctactccgacaagcttagtaacctagttattagcaataataacatcctctttaccggaaacaccaatggaaccatggttaataacgccattcgggtcaacggtgatgaaaataagaagataattgccaagaacattatcgtcgacaataacaatatcaacatcaacattccctccatcgatgtgagttacaaccccgtcacctacgaggcaaccgtctactcggaagggattgtgttctattactgcgaggatgtcaaattcatagataaccgtgtcgacctcaagtataacaattttagtggcagcttcgacactatctatgtggtgagcgtaagaagtaacccgtataactatgtgttcgacgaggaggacaatatcatctacagcatcgtcagctcggatatcctgatctctaacaacacggtcaacgctctggggaataactacacctacgggatctacatcagcgcggagaacttcactgtgggtgacaactttgtcaacatcagctccgatggcaagtacgccaacggagtgaacgttgacgcattgtccagcaacggggttataaaaaataacaatgttatcgtgaacgctgacatcatcgtatacggcgtgtactctgccaatttcatgggccctattgagaacatcacttacgacaacaacacaattcgcgtaaatgcctatgcggcttgtgcgatggaactcatggagccaaatccgtacgttttcgacaacacaataattgctgctgggaactataccttcggcgtggtcgccagcatcagggacaacggaacaatttccaacaattcaataagctccctgggaaataataatggcacgaatgggactggagactccattctccccctcaattccctggccatcagcacgaaaggcgatgtgataatcaaggataatgagattgtgacaagcgggattggggtgaagacactgaaaggaaacgtggacattctaggcaacgacattagaactaccggaaaccacaccatcgaggccataaattccaatctgacagtgaagaataactacttggtaagcaaaaaagccgtcggcacagactccatcgtgtcagacaaggaggttatatcggctaataatacccccgccttgaagaccatcatatcggcaccaaatatatttactgaatatattaagggcgcggtcttcccagtcgcagcactggacgagaacggagatccaatcagcgacatcgttctctttctaacaatggacggcatcgtgtacaatgtgaccaccgatgcaaacggctacgccgccttcctgcttaaccctgattccggtattcacaatgtcgtggtctcctttaatggtaacgaggtctacggccctaaatcagtaaatagtattatttctgtggacgcctccgccagcaagatcgttgccaaaacatctacaaccgtgtaccttacgtcagtgaagtctggctcatactttaacatcgctgtaaaggacgtgaacggcaagggtctggcaaacaagaaggtgagcatttacttcaacggtaagactaagagctacacaacaaattcactgggagtcatcaagttcaagctgtccgccaataagatagggaattaccagttgaagatgaaatttgctggggacaagaactataccgcatccactgccatcgccaaaatcaaagtcattaagcaggcaactaagctgaccgtggctaaaaagactttcaaagcgaagactaaggtcaagaagtacaccatcactcttaaagacaacaaaggaaaggcaattaaaaaagccaaagtcaccattaaggttaaagggaaagtgtacaaggccgtgaccaacagcaagggcaaggccacttttaaaattaccaagctggctaagaagggtacgtacaaagcttatgtgaaatttgcagggaataagtattataaggtgtcctcaaaatctgttaaaatctcagttaagcgatga

SEQ ID NO: 9795 - DNA, 4065 bp, synthetic construct
  source 1..4065: mol_type = other DNA
atggtgaagaaatttaacatctccttgctcctgttcctcatctttataagcatggctactgtgtgcgctagtgacaacatggaggacacgctgaacaacaatggttctatcctgagtaatccctcggacgagagcatcttgctttccaacgacgatgtcctagctgagtttacaacacacgagataaatgtagaaaagtacagcatttactttaacaataacggcgacctaatctctagcaaggttaaatccggggacacacttaattttactggagattggaatgaggtgagttctaaaacctttaatttcaataagaccctgaacatcgtgtactctggatcaaaaccaatgaagaacggcgtcttcacattctacaacggtgcaaccggcagttccatcatcggcctgaatatcgctaataccgaggactacaactacggaatcttcctgaatggcgcaagtaactgcattgtcaaggattgctttatcaacaacacaggaatgtcctcctacgcaatttgcatcgccaataacgccaattacaacaacgtctcaaataactttttctgcgactacgggatgaattacgggggtcagggaacccggagcaccccccctgtgctgctttcgggcgctcaccacaactatatcgctaacaatcatattgagtgtgacgatgccaacgggatctatctgtcttactatgacgggggccccctccatggcggggtgtctaattacaacttaatttacaacaacaccgtcaagtacaacgtgctcccaaccagctggggttatggcattcagataatggggggatacaacaagatctactccaacaggatcatcggtgccttcagaggcatcagcactagcaatggagcattcaatgagatcttcaacaatcgaatcatcaacatcacgggcgcggattttaaccatcctgttgtggaggtgggaggggagtacggaatcgttggctcagccaatgcgataataataaacaactctattgaaaacgcacgcatacttccagggagcggggcgatctatgctatcgacaacgccattattgaaaacaacaccatcgacgtggtgtcatccggatatgggattcaggccagtggaagtaatatttctatcaaaaacaattccatcattactgaatcgggcgcgggcgtcttctggaagggcgagtacttcgacctcgtggtagtgggtaataacatcacaagtggaaacggggtgggtgtgctggtgaaaaaagaaagtgtgaagaaaatgcccgggaatataacgattgtggacaactacatcagcacgggaaataagtatgccatcgatgccatcgaggtgaatgctgatactagttatgtgatcgaaaataacaccattcctaagggcaaggggatcgttgcaacgcctgaagggtcatatgacccaagcaagccacggtacatctttaagggaacaacctatagtatcactcccgagaactacgacgactatttcgatgtgggagggactctgaacagcgtggtgaaaaatggagacattttgtacttcgatggtaattttgagaacaagggcgtcatctacattaatagcgccgtcaaaattactggtaagaacccgaacttctataatgctaccttcaggataagcgagggcgtctggatcgaaaacctgacaatcaaaaataaggacagcgaacgcatcaacgcatggggaatcctcgtctataacaccggcggagcgataatctctaactgcaacattgaagtcacagaccccaacgcagcctacgccatctatgtggtcgaaagcagcgacattgatgtgttgaataataacctgacatcgaacgggaattatctgacctacacactcctcgctatatccgtctacgactgtaacttcatcaataacagcattcacaccattggaactgggatcgagcatgtattcgaaaatagccactgcgttgatggcaattccaattgtatcgatggctctacttgtgttggcggagacacggtttgtacaagcgggaacacgataactggaaaccacgtcctcaacgaggtttataggacctatggcattttgatggcctacagctcgggttgcaacatttctggaaataaagtaaatgccaccagcaagctgaataagacatccaacacatttaacagcagttggggaaataactaccataacaacatatccacaaactctatcgtaggtatcgacctgtactttaacagtcacaacaacaccttctcaaacaacaacatctacgtcaagtccaatgataactatatttacggtatgggcgtcctgggctccaatacggggcacgacgcgcccgagggaaaagacgcctctaacaatcaatttatcaacaataacattgtgttggaaggcgattactttgttcagggtctagtgatcggccacgagtcaaaaaacaccacactcatttcaaacaccgtgaacgccaagagcaataacttctcctacggaatcaatctggaagggtctcaaaaatccattattaaagataataatctaaagctgacctccgacattgtctacggacttgaggtgttccgctcgaatggcaactttattaaggggaacaacctagatatcaaggctaagcaggcctatgccatcgcactgtcaaacgctgagaataatattatcctgaataacattgtcatgaataacgttactggcgaggaaataacttacaacgtgtgtgattcactgggggtcggggtggctggaatctgcctcaagtttaatagcagctccaacaatatatctggcaacaatataacctctaaaaagggctacgcaatcgtgattgacaagctggccattaaaaacaatctgttttacaattatctcaattccgagatgggcatcggcgacaaggcgatcaataacacaaacaataatttcgttaaggggaactacatctatattttaaatggactcatcccggaggtcacgattaactacctgggtaccgcagatattgtgctcaacgttggcgtggatggggtattggtgaagttctatatttgtggggaagagatcggcaatgccacttcctcaaatggcgtcgccaagcttagatacaagtttgatgacagttatacgcccgcggggtactcgatcaaagccattgcatccaaaaaggattacttgaccaaagagttcatttcttacctgaccatcgaaaaaggcctgctgaatattaactataatgacgtcaccgccattccgacaagcaagggaaaatttgtcgtggttgtagaggatatcttcggcaattctgtatccggaatcactgtgaagttctatcgactgcagggaagggatgtgttcataggcaaggtcaaaaccgacaaaaacggtgtcgccacccttgtggccgaggtcccttcactgggtaactacaaactccgggcagatgtggtggaaaatgacaacttcaagagcaacagtgggaaagctaatctgatcgtggcctacaagccttcaatctatcagtataaaaccaaagccgtgtactacggtaatactataaagtacacggttcgggtgaagggcatcgacggtaaatatgttgctggggggaagatcgtaaccatcaaggtgaacggcaagacctaccgcgtgaagaccgataaatatggcaaggcctataagtccatcaagctgaaggcaggttcctacaaagtaactgcccagtatggggttacgaaggtgtcaagtaagatcaaattcaagccaattttaatcgctaaaaacattgtgaagaagaaaagcaagaaaattaagttctcggtgaagctcgtgaacaagcatggcaaaatacttaagtacaaaaaaattatttttaagatcaagaacaaaaagtatagtgccaaaacaaacagccacggcgtggctatattatccatcaagaacctgaagataggcaaaaacactattacaagcttctatggcggttgcacaatatcaaacacaatcaccattcgtagatga

SEQ ID NO: 9796 - DNA, 4815 bp, synthetic construct
  source 1..4815: mol_type = other DNA
atgtacattgacgtcaagggggtgaagataacgaaacgacttgataacaagctcctttttacactcttcgcagtcatgtttatactctttagtctcaactgcgtgttcgcacagaataacaccacagtaaccgacgtcctgtccacggtggaggacgacgttgggattcagcaaatacagagttttcaggtcgatgaaccgctactcgccgcgaccaacaacaacattcagattaatgtgaaacaccattataatgaaacggccaatacatgggacgaggacgggtacaatctggctaacgccacagtgaaactgtacggcgccaatgacaaactgatctccacccataagacagatagcaagggctcagtcctgatcaaaaacttaaaatccaccaagtactatgtggaggtgagttacgcagactacgaaccaaaaaagtctaaggtactggattttaccaagaagtccggaactttgaaaggatcatttgactttatccccgatattctattattcgtcgactataagtcccacaatgaaaagctgaatgtgttgatgaatatgtctaagagagtggctttcattagcacggggcaggactatgatgtgtctcgtgagtggctcgtggggtatgcacggttcatccacattgatatgttctccgagggagcatatgccatattcactgcggagaaactgaagaagctgctggccatcagcccagctaacgccaactataatgttgcctacacattcggcgtgtatagcaattccatcctgaacgccactggcctgcacatcgttggtgccaactcgaagaacaataccttcaacactatcgagaacacctatatcggctcttatttccaggccaaggacataaacctgtccgatgtgttgtaccataacatggaaaactatctgaaatacgtgtattatcttattaatccgtcaaagtacgagaatcccacacttaacgacagcaacgctccccagatgggtccagaatgcggattctaccatccagatctggggatcttcaccatctaccctgaaggcagcttgatcaataattggatcaaaacgaaccccggatacggggtggatggaatcggcagtctgaattggatgatacaggactacccaaagtggtttgtcgacctactggaccccacgaccttatttgagcagtttgaaaaccagttcatcgacagatttaaccctaacaagaagttcatcgctattgttagctactattgcggcggggaggtggttgattccttaattcggggttacgaagaaattggaaggcccgccttcaacgtgtttaagttctccacagaccccagcatgtcttccatactgaataagatcaataacgtctcaaaaataggaatcagctctatcacctcattatacagctggtctcttagttacgctaacggctcggccgagaaagacttatcggacatcgatgtggagatcctgaagggtgtcaacgaaatttcaaaatacagctacgaaagcgagctgggacctcaagtggagtggacgtactccgtgacctacccgagttttgagggggtgtttagtcccgttatcctgtcgtatctagacgaggacaaggtgcatgtaatccaaagcggcgtggacaagatggtccagctcagtagtcgctgggccgacctcaaagatcttaacaacagcgaaaaaacaatagctatcgtgctttataactaccctcctggaaaggccgagatcggcgcctcttacctggacgtcatgcagagtacctacgacctgcttattaagctctatgagaatgggtatgccattggggatattcgcaaaatgatgaatatcacagaatttaccaatctcctcatcgatagcggcaacaaaggatcatgggccggggggctccttaagaaatatgtggagaagaactgggatgaactggttaaacataaccaactgatctccatggatgagttcattgacctcacctccgaccttccagacgagctttacgaggaaatggtgacccaatggggtgccggtttggggaagagcatggtttacacagccagtgatggtaaacagtacctggtgatccctggcgtgtggttcggcaacatttttattacctaccagccaagccgggggtgggaggaagccgatattggcgaggttatccagaactaccatgacttgaagcttcctccccatcagcagtatgtggcattctacgagtggatggacaaggtaacaaaggctaacgccatcgttagtatgggaacccacggaacactggagtggctacctggcaaaaatatcggggtgggcagcggagactggtcctacgagctcaccagaatcccaacaatatacccatacattgtatcgaaccctggtgaggctatggtcgctagggaccgagggctggcaatgctcatcacccacatgactcccgcgatagtatcatctgagttgtacggcaattattcgatcctgaacaattacatcaatagctataacaatcagattaaactcaatgttactagcaatgctaatatatacaaagagaaaatcctgaagttggctcccaatctggggttccggaagatgagcaagggtgagtcttttaatcactggctggaggagttgcacctttatcttgaaagtatgggcgacgacctaatgacttacggactgcacaacttgggcaaagtgttgacagggaacgagctatctgaagaggtggtcacaatcgtaacctctcagacgaagatttacaaccaaataatggaatttctgtacccgaacctgaaaggcaaagacttttataaggatattcagggcgatgtcaaatacctcaacgagcggcacacgatccaggccttcttgcgaaactatgtggacggcctggtcaacggatcttccgttctggatctcgtgaacaagcttggtgtaaataaggatagctccttattctcatccatgaaatatgcgcaggatgtaatcatcaatatccagaataacaatgagtggaatgcaattctcactgcattaagcggcggatatgtgaaggccgggttgttcgcggaccctgcctacggtgacagcatccccacaggatatgacggatacgcatccgaccccactagaatgccctctgaggcagcatatgagtctgccgtcaacatcgtgaacctcctgctggcggattactatgaaaagcacgggaagtggccagaaatgactgctctcatcctgtggggcacagaaataagcagaactgaaggaattggcgttgccgaatttctctacttcttgggatgcaaaccgaagtgggcagagaatggtaaagtcattggcgtggagctactgcctctgaaggaccttaaggtgaagctgcacaacgggtcggtggtgaaccgtcccaggattgacgtctatgcaagcctggtcaccagtaacaaagattggattacttggatggtaaccgccactaggctggcggccaatgctggggaaagtgaaaatgacaactacgtcataaagcattataatgagtaccccactctggaccgcctctttggcctgccgggcaacattctggagggtactggcatgagcaccctcattccaaatactgccaactggaacatctccacagtgaatgtggagggcatgaacgtttacttggacacggtctcatttagctggaccattgatgagaagggcaatatcaacatcaccaaacagaaggatacctacaaatacctcctgacaaagacagagctgataacacagaacctagacagtacttggaggatcttagactcggatgattactatgactggttcgggggactgtacaacgctgcttcaatcctgaggcagaaagccggcctgagccgaccggacacctcattcgtggacatccgggacaagaacaagtatgttacgcggacctatgaggaagagatggagttcgaaatccgcaccactcttctgaacccaaagtatctgaagcctcttaagggaaccgccgccggcatgaactggatcgcttcaagaatgcagaacacattcggcatcctcaccattagtgggaacaagctgaataaggagctcggtaaccaaatgtccaacaccctgctggacctcgccagtggtgtgcgcgatgcaagcacctcttacggcattcagtccgctattgcgcacatgatctacctggcaacgcagggcacgtgggatgcagacagtgaaaccctgcagaaactcgctgacgagtatatgcgccaggtgctcaagtatggtgtggcctgttgtcaccacacctgtaagaacctggatttcaacaacaaggtcattcaagtctcctccctgacccccgctcaaaaggccgaatttgccaaaatactcgcacaagctactaacactgatcccctgtacgaggtggaaaaggattccgctaataatgataataatgcccagggaattgtcaatggcactaccaaagacaagcagtcagattcagagagcggggataaaacaagcttcggaggagattccagccaagcaggcgatgccaaaagcgcgtcccaatctcaggactctagtgatagctcaggggattcaggggctgacgcctacgagttgtcccagcagtccgcctcgaagtctacgagcggcgcggaatccagcatgccaatattcgttatcatcgcgatcattatcctgatcgtcattttcttggtgggatacgtgcgcaatcagaaagacgaagacttcgatgactactga

SEQ ID NO: 9797 - DNA, 843 bp, synthetic construct
  source 1..843: mol_type = other DNA
atgcacaagaatagcatcatcataattatcctgagcatcaccatcatcggaatgcttatcccagccggtttctccgcaaatgattaccaaatcgtgatcacatacggtgagactacaaagaacaatgctgaatacaagaacactgttgactccttctttgaaaaccaggcacacatggacttgaagggggtcaattccaaaataatcactgccaatgaagtgaacaaaatttcaagtacaatcactggaaagtcctataactcgaaccagatcttctcctcagcactagttgatctgggcgacaatgataacctgaaggttagcgtcgacaaaagcaaaattaccaccatcactggcgatatgtatctctccgcattaaagtcagccggcatcaccaatggccatgtgtatatcaccagtcctgtgacggcgactggggagtctgcccttgccggcatcatgaacagttatgaggtcgctacggacgtggagattcccgctccggtgaaggaggccgctaacaaagagatttatacacaggcggagattgtaaaagagagcaatgtgagcgccgacgacctgtcgaacttggtggatgacgtaaaggagaccgtgaaggaggaaaacattacagactaccagacaatagtcaatataatcaacaacacgaccattaattacaatatcaatctgacctacaacgatattgagaacctggccgaaagtattgaacagatacaaaatgtgcagggggacattaacagctaccagacagaagtcaacgatgtgctcaacacgaccgataccagcaacaccggatttctggacgggctcttcaactga

SEQ ID NO: 9798 - DNA, 324 bp, synthetic construct
  source 1..324: mol_type = other DNA
atggagcacattacctacgatgacgtggtggagtacaaccacctgttcaccctcgtgccatctttcgtcctggaaaaaatggccaagaagaacagcaacctggtagacaagtttgagagtgccatccagtcccatatcaatgatttaacggttgaacaacgcatcaaactgaacattatccttgacagcgacgtctcagaactgcaggatctcatgtacaacgcatatatgaggacaaacaaaaagcagtaccagatactggctaatcccaagtataagcagttcattgagctcaatctaggcgagttgcggaaaataatctga

SEQ ID NO: 9799 - DNA, 531 bp, synthetic construct
  source 1..531: mol_type = other DNA
atggacgctatagaagccgtggccatcctgatcctcgtggtggccatttttattctggtctactactatttgctaaattccccctcgagtatggataaactcaagaacattgtcccagaaagtgctgacgcgcacatggacgaagtgctcggcaaaaataatgtggattcaagttacgatctgtccaaggaggacgtcctgggtgacaaggaggaatccgaatcaatgggaaagcggatcaaggttaaactgagcgacatcgatggcagcacgattaacaccagcgcattctcccataaacttgatgcattcttagatcagaaaagcgaccagctgatcaaagactggtctctggccactacaaacgatttggacaaccttcaggccaaattcgatgagaccacaaacaatgtagatactctcgagaagaacttcaacgagtttaagcagagctctgaagagtttcaaaagatcaccggggagcgcctggacgacctggacaagaggatagagtctctcgagaataagtga

SEQ ID NO: 9800 - DNA, 411 bp, synthetic construct
  source 1..411: mol_type = other DNA
atggaagctatccccacaataccggatcagatcttttacttgatcatcctggtaatcgtcgccatagtcctcatagtgattgtgttccaatggaagaaagttgcacagagcaaaaactcaattctgatcctggaaaaggagattgaactaaagaagatgtccatggtggaaaaagacatcgagagcaaacgcctcatggacaatccaattcccctgcctcaggagcagcaggacagtctttccgcaatcaggcagtctaccacggaggtgcggagtaatgtgggctatctgcacagcgagatcaacgagagattagcccggctcgaggccgaaaccgaacaacgaaagctggaaaagatgctgaaagagattgaggcgaaagagaagaagctttcgaagatgaacaagtga

SEQ ID NO: 9801 - DNA, 918 bp, synthetic construct
  source 1..918: mol_type = other DNA
atgatggaatcctatataaaggcgggcaagattgtgagcaagatccggagtgaggcttcaaaaatgatcgtcgatggagccctcgttattgaccttgtcaactacgtggagagtgagatactgaagaccggggccgagatcgccttcccctgcaatgtatcaatcaacgagattgcagctcattatacctcccctattagggatgaaactgcttttaaggcaggagacatggtgaaactagacttgggggcaatggtggacggctgcattgccgatagcgccgtgacaatcatagcgaacgggaatattgacgaaaattacagccaggacgagatcaatctccacgaggagatccaagaagcttctgccgccggccttgaagctgctatcgccacagctcgggccggaatcgaggtgtcgaaaataggtgctgcagtccacgaagccatcgcggagtaccacttaaacccgatattcaacctgactggccatagcttggagcagtacaacctgcatgccggcatttccatccccaattatgacaaccacgacaactacattctggaggaggggcaggccatcgcaatcgaacccttcgccaccaacggagagggtattgtcaatgatgcgcccgggcattatatattctcctacatggcaaacaagccattcagaatgaaaagcacgcagaaagttctgaagtacatccaacacaaccacagggatgtgccattttctggccgatggatcaccaatgaatttggagagcgcaagggcagcatcgccctgaagcagctctcagaatccatggcaatctacccatatgcccctctgcgcgaaaaagagaattgctttgtaagtcagaaagagcacaccgtgattattgagaaggaaggttgtacggtgacaactatctga

SEQ ID NO: 9802 - DNA, 852 bp, synthetic construct
  source 1..852: mol_type = other DNA
atgccactgggcaattataaggaagccatcagcgccagagctacggagaagaagatcctagacgtgtcccaggacggcggaatcgtatccgcattgttgtgttacgcactggatgagggcaaaattgaaggggccgtggtagccggcactcctgacgatgattggcgcccggttcccactgtggtgacctcatcggatgaagtcatcgccaacgctggcaccaaatattcaatgtcccctaccctggccgtcctgaaggaggctacccgccagtacgggctggaaaagattggcgtggtcgccacaccctgccagatccaagggctgaggaaggcacaggcgtacccattcacacggtttgtcgtgaataaaattaatttaatcattggaatctactgcatggagaacttccctatggcgagcctcgacacttttgccacggccaaactcggatttgacaagctgacagacgctacgaaaatggacatagggaaaggcaaattctggctaacaaaggatggagaggattccgggctgaagcttaaggagacacacggctacgaacagagcggatgtaacatctgcaccgactatgtggctgagtgggctgacataagcaccgggagcgtcggaagtccagatggatggtctaccgtgctcactcgaaccgatgatggtaacagtatcttcaaggaagcagtttctgcgggtctcattgagacaaagcccgtggacgacggcaaattcggtcttccgctgctcgaaaagctggccaagggtaagaaagacaagaacggggccgagtttgagcggagggcaaaaatgggcgtgagagttcccaccatatactga

SEQ ID NO: 9803 - DNA, 843 bp, synthetic construct
  source 1..843: mol_type = other DNA
atgtttgataagctgaagaaagcctttggcggtagcgcggagcctgccccaaaagtcgacgaaaaagtggaagaggtggcgcccgtcgagacaaaagcacccgctgaggagcccaaagccgcctcatccaagccacgaatcgggtacatacacctaagtgggtgcacgggagatgccatgagcctaaccgagaattatgacatcttatccacagtgttgactgatatggtggacattgtctacggacagactctggtggataagtggattcacggcacttatgctgaggaaatgcctgagatggacctgtgcctcatcgagggttctgtctgcctgcaggatgagcatagtgtacatgagctgctggaagcaaggaagaaggcggggctgatcgcagcattcgggagctgcgctattaccggttgtttcacgacctattccagaggaggccagcaagctcagccgagccacgaaagtttcctgccaatcggttcgctcgttaaggtggatgtggcccttcccggctgccctgtggctcccgaaatgatcgccaagaccatagttgccctgtgtgagggcgaccttgactacctcaaaccggcaatggattgggctgcatgcgacaaaggatgcgggtgcgacgtactgaccaacgtcgtgcgccagggactctgtaccgggtgtggcacatgtgccctcgcctgtcccacgcgggccatgggcttctccgaagggcggccaagctgcgacaaggacagatgcatcaagtgcggatcttgttacatgatgtgtccaaggtcatggttgcctgagggccgcattaagaaggaaacaggcctttga

SEQ ID NO: 9804 - DNA, 570 bp, synthetic construct
  source 1..570: mol_type = other DNA
atgccatacgacagcgacattatcgtgattggctgtggaaatatccttttcaaggacgatggctacgggcccatagttatcaatctgctccaaaagtatttcaacgacaagaacgattactatgatcccgcggtcacatcctatgtggaggacgagtttgacaagaatgttctgaaccagatcaaggaaaaatttgaaggggtaactttgccagacagtgtgcagtttattgatggaggcaccgcagcaccaatgaacttcttcccgctgtacaaagagtacgactggaaaaagctcatcgtgatcgacgtggtcgagtcaaacgccgaacctggcaccgtgggcatattcgatcctaatgctatgcaggtcggaaagtacgataacccgcacggtatgacggtggaagagcccctacagaagattagcgagaaatgcgaagttgtcattgtgggttgcaaacccgcctcgatcccaatacccgacatcgatgtggggctgtccgagagcgtcgaaaaggctatccctgaggccattgacattatcctgaaggagatcggggtaaaatga

SEQ ID NO: 9805 - DNA, 1215 bp, synthetic construct
  source 1..1215: mol_type = other DNA
ctgaaagacagagtcgtgataagccctacaacacggcaggagggccatgccgagctggtcatggaagttgatgatgaggggatagtgacaaaggggatgtacctgagcataactccggttaggggcctggagaagatggtgcttgacaaagcccctgagtctgctgtggtgctgtgccagcgtatttgcggggtctgtccaattccccataccctagcctccgccgaagcaatggatatggcccttggcatcgagatcccgaaaaatgcgaagctcctgaggaaggctacgctcgccgcccacaacattaacagcgcagctatccaccagtttttgattgcaaccgattttgtccccgagaacctgttcgccacagctgtggacagcgtgagtgaagtacgaaaaacagtgcaatatgttgtcgacatgattgctggggagggtatccacccctctgatgtacgcgtggggggaatggcgagaaacatcacccccttcaccaaagaaaggctgatcgaacgaatgacggccctccggccaaagctcgaggaacacatcgagctaatcaagaactgcgtggtggagaaggggctgcctgacgatttgggcgtaatcaacagaccattaatggcgactgacgcaacctacggaaccaacgacttcgatatggacgtgttctcagaagtgttgcctgaagcttggtatgacgaccccgagatcggtaaaaaggcctgctcggtgatcccactgatcaatggagagaatgttgaaacgggtcctcgggcaagaatggagaagtttgcgggcttcaaggggaaaggtgtaaatgcacagcacgtggcccgggccgacgagatgctcaaaaactacgacgcctgtatggaagccctggatgcaattgatcccgctgcgcccgccaaggtcagttatgataaacgcggaaccggcgaacttggctttggcgtgatcgagggccccaggggaaccaatgtccatatggctaaggttgtcgaaggaaagactaaattctactccgccattgtcccaaccacgtggaacattcctacaatgggacccgccactgagggcttccatcacgagtacggcccacacgttatccgcgcatacgacccgtgtctgtcatgcgctactcacgtcatggtggtggacgacgaggataagtccattctcaagaatgagatggtgcgcatatga

SEQ ID NO: 9806 - DNA, 528 bp, synthetic construct
  source 1..528: mol_type = other DNA
ctggacaaggcaaacataattatttcaatcattatcgtcctatgcgtggccgcagccgttgcggcgtatgggatcacaaacagcgataaccccatcttctctgacctctccagtatgtcagcaaacgacaatgatgctggaaacggaataggcaataatacagtgacggggaatggctcgggcaacacgattgccaccacatccgggtcaggaagtggcagcagctccagtagcagctccggtagcgggagcgggtccggctctggctccgggtcgagcagcagttccagctccggcagcggctcaggttcgggatctggaggcggctcaaacagcaactccaggacccacctgagctattcagaggccaaaagtatcgccaacgatgctatcgaggaagctggatgttacgccggcagtggtagctactctgggggctactggtactttactgtctatgatgccaacgggaataatgtagacaccatctccgtgaatgacaacactggtgctaccggacggggatga

SEQ ID NO: 9807 - DNA, 1179 bp, synthetic construct
  source 1..1179: mol_type = other DNA
atgctcgtaaacgctgactttcatgtgcacagctgcttctcaatggcatcaagcaaggacatgctgatcaagaacatggctgctaaaagcaagcttaaagggcttaatctgctgggcacgggcgacgcgttccatcccaactggttagacatgatcgaggagagtaccgtctattgtggggatggaatttacaacagtgacgatatgaattttgtgctgacaaccgaagtcgagggccgcaaccgaatccatcacctgattatcatcccaaacattgacatcgcgcgtgagctgtcctataagcttccctctaagaacaaaaagatcgatggtcggccaaagaccaacctgtctggaatcgagctgctggagttggtgcgggactatgactgcttgatcgggccagcccacgcattcaccccgtggacgggaatgtacaagtcctacgacagtatctatgactgttacgagaagagagtggacttcgtagaactcggtctcagcgccgacacgttcatggccgatcggatctccgagcttaaagactttcctttcctcactaattcggacgcccatagcccatggcctcaccgcttgggcagggaatttaatcaaatagagctcaaggatatctccttctcttcaataaagaacgcattcaagcacaacaagattaaagccaattatggcctggtgcccaacctaggaaaatatcacatgactgcatgcaccaaatgctacaatctgatagatcctatgatcgcccacgaaaacaagatgaagtgcagctgtggcggaaccattaagaaaggagtggactttaggatctcggaaattgccgactacgacaaacccaaacacccggcgttcagaccaaagtacgtgcatctcatgcctctggctgaaataatctccagtgtttacgagaaaggcgtcactacaaagacagttcaggggaagtggcagaagctgatcgataatttcggcacagagattgatgtgctaattaacgtcagcctcgacgatatagagaagattgatttaaatattgcccccgctatcaacgcctttaggaatggtgaaatcaacgtcattcccggtgggggggggaaatacggccagatttccttcgataaaataaagaaacaggataagatcgtgaccctggataatttttga

SEQ ID NO: 9808 - DNA, 771 bp, synthetic construct
  source 1..771: mol_type = other DNA
gtgaacacagcggagataaacattctcaaagagatcgagctggagaatcccattttcattgaagcattgccgggtctggggcatgtcggcaagctggccgcagaccacatgattgatgagttgaacgcaaccaagttcgctgaaatctattccccagcctttccacctcaggtgcttatcaaggaggatgggatcataggcaacatgctgaatgagctgtattacttaaaggacgttggggaggacaatctggacctgatcgtgctggtgggtaacactcaagcgctgtcccctgaaggacagtacctcgtctgtaaagacatcctcgattttgtaaaaggctacggaataaccagaatgttcacaatgggtggaatggctataccccagcccgtggagaaccccaaagtctacggcgcggcaagtgatgaggctacaatcgaactgctcaaggaagccggcattgagatccgaagcaacgacggggggatcgtgggcgccagcggtctgttcctaggcttaggcattaggcagggaatccagggggcctgccttatgggggagacgccaggatacttcatcgacgccgaatctgcagaggccatcctgaagaagctgtcactcctactcaactttgaaatcaatactgacaagcttgatgaacgcgctgaggaaacccggcagatgattgccaaagcccagcaaatggagcaggacttgattaacaaggctaataccggcaatgccgacgatctccggtatatcggatga

SEQ ID NO: 9809 - DNA, 162 bp, synthetic construct
  source 1..162: mol_type = other DNA
atgaagatgaacaaatgccctgaatgtggaatctacaccctcaaggacagctgcccgaaatgcggcgggaaactgaaagtcatttacccacccaagttcagcgtggaggataagtacggcaagtatcggcgcatcctgaagaaagaatccatgaaggagtga

SEQ ID NO: 9810 - DNA, 801 bp, synthetic construct
  source 1..801: mol_type = other DNA
atggtgcgaaaaagtcaagaatggccagacgagggggagttgatcgtggggacagtgtataaggtcctgaactacggggctttcgcaaagctggaggagtaccagggcaaagaggcctttattcatattagcgaagtgagctcaggctgggtgaagaacatccgggaccacgtcagggagaaccagaagatcgtgtgtcgtgtgctcagagtcaatcccaagaaggggcacgtggacgcttccctgaaacgcatccgggaggaccaaagaaccaagaagatccagcattggaaaatagagcagaaagctgagaaattcctggaattatccgcaaagagcctcgataagagtttggatgatgcttatgatgaagtaggctacgaactcatggacatctttggagatgtgtacggagccttcgaaactgcctccgaggagggtgcggggagccttaccgaggaaggaatcccgcaggattgggccgatgccattaccgaggtcgcgcagcggaatatcaccccccccgaagttcacatctcaggctatgtcgacattgaaactttcgtgcctaacggagtggagattatcattgacgcacttaaggccgccgaggacaatggcgacgaggaggaggaaattaaggtccagtgcgttggcgccccacgctacaggataacagtaaaatctacggactacatactggcggaaaaggccctgaaagccgcagctgataggtgcatcgcagttatcgaagagtcggaaggcaacggttcttttctacgcgagctggacaacaattga

SEQ ID NO: 9811 - DNA, 180 bp, synthetic construct
  source 1..180: mol_type = other DNA
atggtgtccaaagggaggggaaacttcctgaaagtaaaatgcctcgactgcgacaatgaacaggtgatatttgatcgcgcggccagcgacgtgaagtgtattatctgcggcaagacactggtcaaaagccggggcgccaaggctaagatcaccgcacacatcgagaaggtcctaaactga

SEQ ID NO: 9812 - DNA, 279 bp, synthetic construct
  source 1..279: mol_type = other DNA
atgaaaatcccaaaggaaaagagaacgtactgtccccactgcaaaaagcacacaatgcatgaggtgcacactgccaaaaagaggaaggcgagcgaactaacctggggacagcgccagttcagacgggtgaccgctggctaccgcggttatcccaggcctctgcccgccggcaacaaaccagtcaaaaagctggacctgcgactcaagtgcaaggagtgcgggaaatcccatataaagcaaagcttccggacagggaagccggagtttgtagcaaaatga

SEQ ID NO: 9813 - DNA, 876 bp, synthetic construct
  source 1..876: mol_type = other DNA
gtggatcaattttaccaggaactgcgaaagattcagaagaaggagcggaacaacgggaccctcgctcgggtcgacgaaaacttctacgccagtatccacgaatatctcgatgagctgaggcaggaagcaatccgcgatcccttctcgaacatccatggcatgcttaaagaagctcagattattgccacggagatttgcgaaagaagagaacataagataactgacgctgccgttgtaaacatccaccgatcatatcggctgttcaccgggaaacccaaatttgacctcgtggacaccacgccccttaatctgactcccgaagaggagaagttttacttctcactgttggataccctgaaaaaccacaggggaaacatctctctcgagaaattatccgacgacgatgagttcgtcaagcccaaagaaacccaaaccaacacactggtgccaaaacacgatgagatcaagccaaaggttagcaacctgacacacgacaatgaaagcgaggacgaggtcctaaaccggttggacgagatctccagggcaaagccactaaaaaaagaaccgttggagcctaaaatcgagagcaaaacaatgtccatcccaaagacgcaggccggcaatatccctgagaaaagtattgagataaaccctaatgccttcgacaagcaggatgaattttatgacctcgagagcaagaagctggcgcgcgatacagagcttgtgaccatgctggtgtttgatgagatcaatccgatcgtgggcgtggacgagaaggtctacggaccattccgccctcaggacctggtgactctccccctgataaatgcgaaggtatttttcaagaatagaaagggtcgtcagattaagatttga

SEQ ID NO: 9814 - DNA, 735 bp, synthetic construct
  source 1..735: mol_type = other DNA
atgtttaaggcagagctctccgactctagtatactaaaaaccagctttgatgccatcagctcgatcgtggacgaggtccagattcagacagacagcgagggcatgcggctagatgccctcgaccggagtcacataacgttcgtacatttggagcttaaatcaagtctttttgatgagtacgtgtgcgacgtgccagagaagatcaacatcgatactgatgagtttatgcgcatcttaaaacgtgccaagtcccaggacagagtgttgatgtccctggacgaggggaacttcatcatcacgttcgaaggcgacgctaccagaaccttcaaaattaggctgattgacatggaatacgataatcccgtgcccccgcagattgatcacccaacaaaattcaaagtccgctttagcatcctgaaggattgtattaacgacatcgatattttcagcgacaaaatagctcttcaagttgatgaagactacttcatggcatctgccgacggtgaatttggagacgcatccatcaagtatctgcacggagagaatattcaggagcatgccaagtcgctgttctcactggacaagatccgagaaatgctcaaggccgataagttcagcgaggaagcggaaatctccctgggcaatgacatgcccctcagcctcactctgaacatggtcaccggggatgggaagctgtcattcttgctggcgcctaggctggagacagacgactga

SEQ ID NO: 9815 - DNA, 774 bp, synthetic construct
  source 1..774: mol_type = other DNA
atgagcaaaatagctgatgcatttaagaacggaacggccttcattggctttttaaccgccggggacccgaccattgacaagactgtggagtatattctggccatggaagaagcaggttgcgatctgatcgagatcggcatcccatttagcgaccccatggctgagggtgttgttatccaggacgcaaatgtccgggccctgaagcacaacacaaccgccgatgatgtctttgggattgtaaagagggtccgggagaagacagacatccctcttgtttttctgacctacatcaatcccgtgttcttctatgggtatgaggagttcttcaagaaatgtggagaactgggagtcgacggcatcatatcaccagacttgccttacgaggaaaaaggggagatcaaggacatagctcttgagaatggtgtagatgtgattagcctcattgctcccacctccagtgagagaatcaagatgatcgcgggcgacgccactggcttcatctacgtggtgtcctcactgggggtgaccggaatgcgctcggagatcaaaacagacctcaacagcatactaaaagacattcgagaagtgactgatttgccactcgcagtggggttcggcatcaacacgcccaagcaggccgaagatatctccaaaattgccgatggcgtgatcgtgggaagtgcgattgtcaagataatcgaagagcatggcgaaaacgctacaaaatacctgaaagagtacgtgtcttgcatgaagaaggcctgcaacaagtga

SEQ ID NO: 9816 - DNA, 1185 bp, synthetic construct
  source 1..1185: mol_type = other DNA
ttgagcaaaggccgctatggagagtatggggggcagtacatatctgagacactgatgaacgagttgatttacctggaggaacagtacaaccactacatgagtgaccccggtttcgtcgaagagcttgacatgctgctcaaggagtacgcaggacggcctagcctcctgtactatgccgaaagaatgacaaaagacctgggcggggcgaagatctatcttaagcgggaggacctgaaccacaccggcgctcacaaaattaataacgtgttaggtcaggtgctgctggctaaaaaaatgggaaaaacacgcgtgatcgcggagacgggcgctggccaacatggcgtggcgactgcaactgccgccgcactgttggacatggaatgcgaggtattcatgggggaactggacaccaaacgacaggccctcaatgtgtaccgaatggagctactcggggccaaggttcacagcgtaaagtccggcacgaagactttaaaggatgccgtaaacgacgccttccgcgattggattgctcgcgtgcatgataccaattatgtcatcggctcaacaatgggcccccatcccttcccaatgatcgtgcgggattttcaagccgtcatcagcgctgaggcccgtgaacagttcctcgaaaaggaaggaaggctccctgctgctgtggttgcatgcgtgggcggtggaagcaacgccatgggcgccttttacaactttattgatgacgacgaggtgaagctaatcggatgcgaggctggcggaaagggtatcgataccccctacaacgccgccgccctgaccaaaggtaagatcgggatcttccacgggatgaagtccatattcaatcagagtaattatggccagattgcgccagtccactcggtgagcgcagggctggattaccccggagtgggcccggagcatgcttacctcagggacataggtagggccgagtacgttcctgtcaccgatgaagaagcagttaccgcctttgagtatcttagtaagatggaggggattattccggctatcgagtccgcacacgccgtggcccacgtcatgaaaatcgcaccactgatggacaaggaagatatcataatgatctgtctttcaggaagaggggacaaggacgtcagatccattgcggagtatcggggagtggaactgaacgagtga

SEQ ID NO: 9817 - DNA, 600 bp, synthetic construct
  source 1..600: mol_type = other DNA
atggtgaaaatcaagatttgcggtatcaaacgactcgaggatatcgagatcgtgaacaagtacaaccccgactatatcggatttgtgttcgccgacagcaagcggaagatttcgcatgatctggccaaacgccttaaggacaacttgaatagcaatatcctcagtgtgggtgtattcgtcaactcatccaaggacgagattctggggctgtttaatgagggcataattgaaatcgcacagcttcacggcaacgaaagtgaggaatacataatcgatataaaagaaaggaccaattatgagctaaaaattataaacgcgatcgaaatgtcacaggatatcgacctgctcaaatacgataagagcctggccgactatctattgctggactccggcaaaggaagcggaaagacattcgactggcaactgatcagaaacgatttaaaaaagaacttctttctcgctgggggcctgaacatccagaacgtccgggaagctattcacgagtgtaatccatacgcaatcgacctctcctctgggctggaaacggacggcttcaaggatgagatgaagattaaggagattatggaggttatcaattga

SEQ ID NO: 9818 - DNA, 777 bp, synthetic construct
  source 1..777: mol_type = other DNA
atgctgtgtgagattgtcgagaagactaaggaacgagtggagcaagccaagaaatccatccctcttgatgaaattaagaaggaagtttccagcatggagatgacagatgagttcccgtttaaaaaagcccttatggaggacggaatctcaatcattgctgaagttaaaaaggcaagcccctcaaagggtctgatcgccgagaactttgaccacgtgaacatcgcaaaagattacgagcaggctggcgctagcgcaatttcagtcctgacagagcccttctttttcatgggatcgaatgagtacctaagtgagatttctgaaaacgtgtccatcccaattctgaggaaggactttgtggtggacgaatacatgatctgggaagccaagttgctcggagcttctgccatattactcatagtgagcatactggacgtcgtacagctcaagaagtatttgaacctggcccacgacttggggctgtcggtcatcgtggagacccatgacgcagacgaaattcgcatggccatgatcgtgggggcggaaatcatcggggtcaataacagaaatctcaaggacttcacggtaaacattgagaatagcattaacctacggcggtgcgtaagtggcgatgttatattcgtgagcgagagcggtatcaagaccaaggatgacgtcactaaactcaaagaaaacgatgtggacgcggtgctgatcggcgagaccctgatgaaaagtaatgataagaggtccatgatctccgagctgaaaaacggctga

SEQ ID NO: 9819 - DNA, 1008 bp, synthetic construct
  source 1..1008: mol_type = other DNA
atgattaaagaagccatcctgaaagtatacaaaaatcaagatttgactcacgacgaggcattccaaaccatggacgagatcatgagtggtgaagccagcgaagtgcagatgagtgcctacttgacggccatgtccatgaagggagagaccataaccgagatcacggcgagcgctgaggctatgcgcgcgcactgtgtaaggcttctcaacgaccgggaggtgctcgagattgtgggcaccggcggggacggctccaataccttcaacattagcacgacctcttcaattgtgatatcagccgcgggggttcccgttgcaaagcacgggaacagatccgcctcaagcaagtgcggcgcagcggatgtcctggagcagttaggtgtaaacatctatattgagccagagaagagtatcaagtgcctggaaaaaataaacctatgcttcctgttcgctcagaattaccatctctccatgaagtacgtggctaatgtgcgtaaggaactgagtatcaggaccatctttaacatcttggggcctctgactaatcccgccggggctacaatgcaggtcttgggggtctacgaaaaagagcttgccgaacccctgatcgatgtcctgaaaaatctgggagttagctcggctgtgtctgtgtatggaatggacggaatggacgagataagcgccagcgataaaacttttgtgtgtgagctgaaagatggcaagacaatgtcctatgagatttcaccggaactgtttggcatggagctcgccagcaaggacgatctcgttgggggcaacgctcgggagaacgcagaaattacactgtccatccttaagggcgaaaagggaccacgaagaaatgcagtgttactaaactctgccgccggtctctacgtggcaggcaaggtggaatccctgcgcgacggtgtcgacctcgccgctgaggtcatcgactcgggaaaagccctgaagcagcttgaaaacttcatcgagtttacaaacagctga

SEQ ID NO: 9820 - DNA, 585 bp, synthetic construct
  source 1..585: mol_type = other DNA
atgattctgttaatagacaactacgacagtttcagctacaacctctaccagttgattggcgaagtcatgaaggatattcaggtgtatcgcaatgacaagatcacagtcgaggagatcaaagatctcgcgccggaggcaattgtgctgtccccaggtcccggaaagcctgagaatgccggcatctgtattgatgtagttaaggagttccatgacaagatacctatcgttggggtgtgcctggggcaccaggccatctgcgccgctttcggcggaaacattagccacgccaaacggctgatgcacggcaagtcttcgaaaatcagcctccattatgatttcatctttaagggactgccaagtgagatatccgtcggcagatatcattcactgagcctcatcgaggacacgcttcccgattgccttgagatcatttccaaggctaaagacgacggtgaaatcatggccgtgaaacacaaggaatttaacgtgtacggactgcaattccaccccgagtcaatactaaccccagacgggctgaccatcatcgaaaattttgcagaaaaagtggaaagggggatcttgtga

SEQ ID NO: 9821 - DNA, 1524 bp, synthetic construct
  source 1..1524: mol_type = other DNA
atgatgatgaaaatactgagtgatacgatgttctccccctcgttagaggaggtaatcgaaataggaaagaacgaggagtataagaggataccaatcagctatgaactattttcagatatcgccactcctattgaggtgttaagaattttgaagggcataagtaatcatacctacatgctcgagagcgttgaggactcaaagaagtggggccgatactcctttttagggtttgatcccctcctggaagtcacatgccatgacaacatggtgcacatccgcggggacaaggagttcaatgagctgactgatgaggaaacaatcattgagaccaatgtgcccagcgatgtgatcaaagaccttgtgtccaaaaataagtcgccaaagctcgagtacctgcccccattcacgggtgggtttgtcgggtattttgcctatgactacattaaatacagtgagccgtctctgaatctggacgccgagaatcaggatcagttcaaggacatcgatctgatgctgtttgacaaggtcattgccttcgacaacttcaaacagaagatcatcatcataatcaacatgaagaccgatgacctagaatgtaattataaaaaagcctgtgagaacctaaaaaatattgccaacttgatccgcaccgggaaaaaggcagaaatccagccactgaacctcaaatccgagtttacacccgtttttagccgtgaaaaatactgcgaaatggtcaagaaagctaaggagtacatctatgagggggatatattccaggttgtcctctcaaacagaatcgaggcagacatcagcggaagcttgttcgacacctacagggtgctgcggacaactaatccctctccttacatgttctactttagcagtaacgatatcgagatcgcgggcgcttcacctgagaccctggtgaagctgactgacaatcaactctacacatttccgcttgccggaacaaggcctcgaggcaaaaccgaagaagaagacttgatgttcgaaaaggagctgcttgcagatgaaaaggaactggctgagcacaatatgctcgtggatctgggtcggaacgacattggcaaaatttccgaaatcggctccgtaagtgtggacaagtatctgtctgtagagaagttcagccacgtgatgcacatcggcagcacggtcagcggaacccttcgcagcgatctggactcactgtccgcaattgactcgattctccctgccggcactctcagcggtgctccaaagctgcgcgcttgcgagataattaacgagcttgaaaacaacaagagaggaatctatgggggagccatcggctacgtggacctcagtggcaacatcgacacctgcatctccattaggatcgccttcgcccggaacaacaaggttttcatccggtccggggcaggcattgtggcagatagcgtgcccgataacgagttcgacgaatgtctgaacaaagcggccgctgtcattaatgctttgaagattgcggacggaggtattctgtga

SEQ ID NO: 9822 - DNA, 402 bp, synthetic construct
  source 1..402: mol_type = other DNA
atggacctcagaaaaataggcatcctcctaatcttcgtgggcattttcgtgacgatcttctttataaatgatgataaactgtttgtcccggccctcaccgtgacagttctgggatttttcgtaaccgtggtgggtttcgtcattgaaattaggaaacaaaagattaaaaacgaccggctggagaaggatatagagagcatcctgcagcccttgatcaccgagtatagcaaccttaacaagcagtaccgaatggactttcagggggatgaatacactcaaaagcgcattcagttaaaccgggacctggaaaaggaaatcacagacaagattccatacctggagagtagggagatcaagaagatcgtcatccagttctcccaggagcaggacaaaatgaattga

SEQ ID NO: 9823 - DNA, 777 bp, synthetic construct
  source 1..777: mol_type = other DNA
atgtcttcccttaacgagaagctgaaacttgttaccttaaagggtctgctgatcttcatttttttcatattcctaataaatgtgctcctgggcagcctcaacctgatccagatcaataacgcgtggatctatatcttcgtgattttctatttcatctttaaacttcgggagggcttcagcagtttcaagcacgacttcttaaaagtgttcacttttgaatcgctgaagatcatttccgccatcgtaatcttgaacgtctttatttcttatgggctgctgtacttgagtgactttatcctgaatgtctttcccaacctcaatagcatcgtgatgtcgagcgaatacatcaacaactctctgtttgttttttacggggtcataaccaccgtgtttatctcacctatttccgaagagcttatcttccgcggagtcttgctgaataggctaaacctcattattccgctggatttttcaattgtaatcacatccattttgttcgcgagcctacatagtttcggaagcattacggccgcattcattttcgccgtgtgcatggctgttctctacctgagaaccgacaatatactggtgccaatctttgcccacttcctcaataaccttatcgccgagattatcgtgattgctgatgtgggcaacatgttgttcacaaacaacgtggtcatgctgataatgtcagtgctcgcaatcatctccacttttctcatcctgatactgattaaaaagcagtggaacatactcaatatcaataagctgtga

SEQ ID NO: 9824 - DNA, 204 bp, synthetic construct
  source 1..204: mol_type = other DNA
ctggagacaagaatccgaaaattccgccaggagaagggcatgacccagcaacatctagccgagctggtcggagtgacgcggcagaccatcaatgccctcgagaacgctaggtacaaccccagccttctcttgagctatcacatcactaagattctggggaaagcagcgattgaagatgtgtttatattcaacgaagacgactga

SEQ ID NO: 9825 - DNA, 1350 bp, synthetic construct
  source 1..1350: mol_type = other DNA
atggctatacatccgattgaatttcgatatgggactcctgagatgaagaacatttgggaagaggaaaataaactgcaaaggatgctcgatgttgagtccgctctggcccaggcggagggtaagcttggcataatcccgcaggaggtggcggatgaaatcagttcaaaagctaacaccaagtacgtgaagctgacacggatgaaagaaattgaagcggccactaaccatgatattgctgcactgagcaagtcaatcaccgaggtatgtgagaacggcgccggggaatatgtgcacttcggcgcaacatccaacgatatcgttgactcctccaattcacttctgattaaggatagcattaacgtcctgaaggagaagctggagaagctcactaagatcatgctagacctcgcctccgaaaacaagatgaaagtctgcatcggccgaacccacgggcagcatgccctgcccacaacgtacggaatgaagttcgccctatgggcagacgagctccacaggcagtatgacagactggaacacgccgaaagcaatgtctgcgttggaatgatggatggggccgtggggaccaccgccgcactgggcgagcagggttgggaaatccacaagaccgtggccgagatcctcggtttgcccgctgcaacaattacgaatcaggtggtccagagagacaatcacgttgagtttatcagtgtattggctaatattgcatcgactttagataagatcggactggaaatcaggagcttgcaacggaccgagattatggagctgggcgagtacttcgatcccgaaaagcaagtcgggagtagcactatgcctcacaaaatgaatccaataacggctgagcggatctgcggcgtggcccggatcgtgaagtcctatgtcaacgcggctctcgacaacaatccactttggcacgaaagggacctgacaaactcgtcttgcgagcgcataatgtttcccgagagttgtattctaaccgactacatccttaacctgacaatcaaactgatgagcaacctcgtattctacgatgaaaacatcgagcgcaacctgaatttcacccatggtttggtgatggctgagcgcctgatggccgagttgacccgtgcaggcatgggaaaacagactgcctacggaatcgtgagaaagaatgccattaaagccaacaaagagaagctgctcctgggcgagctcattctcgaagacgaggaagtgaagaaataccttacgaaggaggacgtggacaaaataatggaccctcatacatataccggatctataccaaccatcatcgacgaattactggagaaaagcaaagagtggttttga

SEQ ID NO: 9826 - DNA, 2493 bp, synthetic construct
  source 1..2493: mol_type = other DNA
atggcctacctcaagcggatggatctgccaatagaaggaatgcactgcgcgtcctgcgtcttaagtgtgaacaagactttcggcaaaatcgaaggagtcgaggaagttgacgctgacctggcggcaaataggctccatatcaccataaatcctaaaaagatcagctatgaagagatggagcgattagtgaagaacctggggttcgagctgcactccgatgagatgaccctgagaatccaggggatgcattgcgcatcgtgtacgatgaacgtcgagaatttcctgatccgagtcgatggcattttcgatgttaaggccgacctgacaagccagaccgcgaagataagatacgactcaagcaaactggacatgaacgaggtggaaaaagtgatagagtccctggggtttgagcttctcggtattgaggggcagaccgaaatcgacgaggaagcaatttatcagcaggatctaaaagacaagctcacgcgaatcatcgtaggcgtcgtgtttaccgctattctcatgattctgatgtttagcggctgggacccactgatggggcccattgccagtcttaaccaggtcaccgggcttcatattagcgcaatgggactcctgtccttaatcgtgagcatcggccccttcatttacatttcactgccaatcttgaaggcaggatggaacggattgagccacaagaacttgaacatggacgtaatgtattccatggggatcatggtggcttacgtctccagcatctttggaacattcgggatagtattggaccacactttcatgttttatgacagcgcggtgatgctgcctgcatttttaatgattggaagatacctggaggccagggctaaaaagcgcacctctgactcaatccgggagctgatcgggctgcaacctacagtggctatttcaattgaagtcgatgagaacggcgagatcacatctcagaaggaggtgtctatagccgatatcgtcctcaatgacctcctgctggtaaagcctggagaaaagatccccgtggatggtgacgttgtgggcggagaaagctgcgtggacgaatccatgatcaacggggagccaatccctaaagtcaaaaaagacggcgaagaggtgtttgccggcactatcaatcaggacggagtgctgtacataaaagctaagaaaatcggcaaagagacggtgctctcgaacatcatccggctggtggagaaagcacagtcttcgcgcccgccagtgcaaaagttcgccaataccatcgtaagctacttcatcccagttatcctcacaatagctattgtggtcttcttgatctggtactttgtcctgggagaaacactgctattctcacttacctgcctcatctccatcttggtggtggcctgtccctgtgctctgggtctggccacccccactgccgttacggtcggcgtgggcagggccgctgaatttggcatcctgattaagaacggggatacactcgaaaacgcaggacagcttgacgtagcagccttcgacaagacgggcactataactgaaggcaagccggaggtggatgatatcattgcctatgccacttccgaggaggacttgattaagcttgtggctagtgtggagcaaaactccacccatcccattgcaaaggcgattgttaacaaagccaaggagctcaatattgagctcgaccagacgaccagttttgaaaatgtcactggtaaggggttgaaggctgagatcaactccaaagagattctggcagggaacctggccctgatggaaagcgaaaatgtggaggtgtcttcaaagctggctgataaatactacgagctggagaaattatctaagaccattattttccttgcggaagacaaaactgtgaaaggtattctcagtctatcagataagatcaaggaaaactctcggaggaccatcgaggagttgcacaagatgggtgtgcagacatacatgctaaccggagacaacgaatctaccgccctgaatgtggctcgtgaggtcggcatcgataacgtgaaagcgagcgtgcttcccgaaaataaactggagatcgttaaggatgctcagagcaatcacaccaagaaagttctgtttgttggcgacggcattaacgatgcccctgcactgacacaggccgacattggtgtggcgatgggtaacggcactgatatcgccatggagagtggagacgtggtcgttatggagggtgatctcgaaaatgtggtggccgccattcaattctcgaagaaggtcatgcgccgcatcaaggagaatatattctgggcttttgcatacaattccattctaatcccgatcgccgccggcatcctctatcctgccttcggcataacattcgaacccgctctcgccgggctggccatggccatgagtagcgtaacagtcataagcctttccttgatgcttaaacggtatgttcccgagataaagagaaagagtaacatctga

SEQ ID NO: 9827 - DNA, 792 bp, synthetic construct
  source 1..792: mol_type = other DNA
atgaagctgattatcgacacggaactatgcactgcctgtaaactttgctcccaggtatgtattcgggataacatctatgtcgatgactttgccgtggaaatgggcgacaattgcttcgagtgcggacattgtatggccgtctgcaaagtgggggcagtcacgttgaagagtttcataggtcatgaggaccgaatccaggagtataattcgcacgaaattcccgttaaatacgatgacctgctgcaactgctgaaacagagaaggtccatacgttggttcaagaataaaaaggtggacaagaagacctttgagaaattgttcgagggggcgtactacagcccaagtgctcagaacgaacaggacgtggagtttgtggttctcgacgagaaactcgacgagtttatggatgtcgtatacgatatcattaaggtggacgaagataaatttttccgcattaaggaatttggcgattacttaaaggacaactccaaaaagaagttccaccctttgctctgggaaggaaagcaactcattcttacattctcaacagataagaacaatgccgtgatcgcaaacacccggctagagctgcttgcgtatagcctgggcctcgggggattctattctctgtttatcctgaaggctgacgagatcaaccacgataagctgatggagtttttcccagacatcgataagaacaaacacatgtacagcactttcataatcggctatcccaaaaagcgcttcagacggaccatcccgcacagggacatcacagccacctactactga

SEQ ID NO: 9828 - DNA, 1215 bp, synthetic construct
  source 1..1215: mol_type = other DNA
atgcagaccctaatcgagaacgtaaatattgtgaaccccggtgacgacataaagacacatcagaatatcttgattgaggacgccctgattaaggaaatctctcaggataagctatccactaaggacaatgtgaagatcatcgatggcgaggacaattacctgcttccgggcttcatcgattgccacacccacatcttcgccaaagggttccacaaggaggagaacatgaccaaccctctcggaatccatttctataatgccgtgccccattcgttgcagaccattgacgcgggggttacaaccatcagagattgcggcagcgcagacctcagtttcaagctggcgcaacagcgcaagctgttcaccgctcctaagattcacttatctgtgacgcctcttgtcatcaccggaggacatttcgacctgcttctcccaagcgggtgggatatggagataatgtatcccgggttcccaaaaggacggtgtgacggcgtcgaggaagtgctgaaaaagactcgggaagtcaaacgcgcaggtgctgattttatcaaggtaatgtgctccgggggcgtgctcacaacgaacaattcaccagagtttgcacagtttaacaagaaagagttgaaaacaatcgcctgtgaggctaacgccaataacatgtcagtgtctgcccattgtcactccctgaagggcatgaacaattgcatcgatgttggcttttcatccatcgagcacggaacattcattgacaggaaaactgcttgccgaatggccgaaaatgatgtgagtctggtcccaacacttctggtgcaccagtttctgtacaaaaacggttttcccgcctgggacaactacgccagagaaaagaccgcaaagttaaaggagatagttaaagtccacaaggagaacattgccgctgcctacgaagagggggtgaatatcctcatgggaacggattccggggtgatcccgcatggtcacaacctcgaagagctgattcacctgactgatatcggcatgagtgaaagcgaagcaattgccagcggaaccgtgaacgcagctaaattcctgggcaatgacgacctcggcaaagtaaggaagaactgtattgcggatttggtgctggtcaattcgaacccctttgatgacatcagcatactcagcgacaacgacaacatactgactgtcatacaagacggcattgtggttaaatga

SEQ ID NO: 9829 - DNA, 390 bp, synthetic construct
  source 1..390: mol_type = other DNA
atgattacatgccggaatattgcaaaaggcaaaggaaagggtgagttgatagtcagctccgaaccaattagtttcctggggggcgtcgatcctgaaacgggcatcgtgatcgacccgacacacgagctcaagggagagtgcattaaagacaaagttctttttattcctggaggcaagggttctactgtggggagctacgtgatattccagatgatgaagaacaataccgcccccaacgccataatctgtctaaacgctgagcccatcatcgcaacaggcgcgatcatgtccgatatcccaatggtagactcacccgcccagactaaggacctgaccaatgggaccctggtggaggtggatggggacaacggaaccatcgaaatcctctga

SEQ ID NO: 9830 - DNA, 1266 bp, synthetic construct
  source 1..1266: mol_type = other DNA
gtgataatcatgctgaacgcgaacacgtacgtgacagcccaggagggtattgggggcaccatcaggaaccagtacgaggatttctacgtcgaagagattccggagatcattcccgacggagaggggcccaatgtttacgtctggatcgagaagctgggaagaactacattggatgtcgttttggatatcgctcgcgacctgcatatcagccggaagcgcatgggctttgcaggaatgaaggacaagaaagctatcacaaggcagtggatctgcatcgccaacatggactccgaagaacagtttaagcaagtcgaagcgctggatatttacaaaacggatttcctgaagaccgttcgaggtcgtaagaagcttagaatgggccagctccgaggaaacaaattcagaatattagtgaaagacctcaaggatatcgagaagagcgccgacgtggcaaacgaggtgctcgacgaactccagcacaccggggtgccaaactacttcggctggcagcggttcgggaagccacggaccataactcaccttgtgggggaagcattggtcgaaaatgacctggagaaggctgttggagtgtatatcggtaaccctcaggaggacgagtctgagaaaaaccagaaggccaggcaggcatacgatgacggaaatctggaagaggccttcaatctgatgggcaaggggatgcggtatgagaagatgatgctaaaagagctcgtcaaggcctccaaaaaaggagagctcacggacaaagactatatgaatgccctacacgccctgcccaagccgctccagaggatgtttgtccacgcttaccaaagctatcttttcaatgaagcggtcagtaagagagtagagatgggcattaacaagtacatcgagggcgacatcataattgacacagaagagcatatcgtgcgagacaagactcctgaggaatttcaggaactgattgataacttccaagcaagtcccacctgccccctgtatggcacaaaggtgccttttgccgaagatgctgtgggcaaaatggaggaggacatcctgacaaattataatattaccaaggccaacttcgaggtgccaaaaatgccacgcttaggcagccacggtcttcggaggtcaatgcgcttcaaagtatgggatgcatccgctaccgccaccgatgagggggtgctgtgtgaattttcgattgacaaaggctcatacgccactgctgtactgcgcgaaataatgaaaaaggatgtgatctga

SEQ ID NO: 9831 - DNA, 438 bp, synthetic construct
  source 1..438: mol_type = other DNA
atgctcgatgaaaaaggatatttctacatcattgatgccattcttgctgtgatcctggtcagcatagtgtttctcgtggtaaacacggcaatctccatccccagtccagactactcttacgacagttgcgagtttcgcaccgcccaggatgtcatggaaatcctaagcggcaaggtgaatttcaccgacaggaccttcattggggagatatccaaaatcctgaaagacaacaaaaatagcaaagagtctattaacctggttagcaagatctgtaagaacaagttcaagagtttaaatctgacaaactatagatttactgagaacaagattctgaaggaaaagatcttggacagctcaggcgattactccaagagcaatatggtgtcagtggcgacacggaactacgacgactattcgtacactctctccgtctggtga

SEQ ID NO: 9832 - DNA, 1365 bp, synthetic construct
  source 1..1365: mol_type = other DNA
atggacattgagggattcgtccgcgccagaatcgatgactacgactacaacgacctcaccgagcttttggctgtaagaatccgagagtataagaagatcagcgagaagaacagcgtggagatggccaaagcggtcatcgatgaggtctccactacgctcaagttgcaggagtgtggcgatgagtttctgaaagaaatagcgaatgttaacaaggccgacgttctgatgggggaaatgggcgtcggctctcgcggcgccggggacttctttgtgcacagaaaaattgccgagattgtcgcctcaaccaacacagccagcctcataaatccgtccgaacaagatgacggtggggtggtgaaggccaaggcaaacaacgacgatgtgtacattaccacggcagtcgatggcatccattcacggctgagcgaatatccctttctgggggggttccatgtcacccgagcgaccctaagggacgtttgcgtcatgggcgccgaccccgtggccattctgagtgatgtccacctggcagatgatggggacgtggccaagatattcgacttcacggcgggggtggctgctgtatctgagctcgtggatgtgccaatagtagccggcagtacactgcgtgtgggcggagacatggtgctgggcgacaggttcgtgagcgccgttggcagtgtgggtgtttccaaccaccctccgaccgcacggaagggagcaactgacggcgatgtcattcttctgacagagggcagcggtggaggaaccatcacaaccacagctttgtacaatgggttctttgacgtggtgtgggataccatgaatgtaaacttcgtgcaggcttcccatgcactcttcgaggccgatctcgtaaaagacattcacgccatgactgatgtcaccaacggcgggctgaggggagatgcgcacgaaatcagcaatacaacgggggtgggtctggagttttacgaaaaagaaatccgccagatggtggctccaaatgtcctcaacatgctggaaaccctgaacattgaccccctgggagtgtcaactgacagtctaatgttgatcgcacctcccgagatcgtgggcgatatcaagaaagtggtgggaaaatatgacgtttccatatctgaaatcggtgaggtgaacactagcggagaaccaatcttaattaaagaagactcctcggaggaaaaacttgttccccttttcagggaggctgcttacaccaagatcaaaaagttagttggtgagacaactcctgaggactttgaggaaatgaaggagaaagtccagcgggcttcggacgccgccatcgctaagaaggaaaaggtgatcaatcacattcgggcaaattga

SEQ ID NO: 9833 - DNA, 597 bp, synthetic construct
  source 1..597: mol_type = other DNA
atgatcacgattatcgattacaagtccggcaacctgaaaagcatctccaacggattcaagaaaatcggtgccgagtacaaaattagcgatgacaaagaggtcatcgctaacagtgattatctggtgttgccaggtgtgggggcgtttggaagtgcaatggagaatctcaagcccttccgggacgtaattcacgagcacgtcagcgaagataaaccatttcttggcatttgcctcggccagcaggtgctcatgtccagcagtgaggaagcagacggtgttaagggactagacctgttcaaaggacatgtggagctgctgtccggggacgttaagatccctcacatgggctggaataagttaaagatatgcaacaattcacccatcctggaaggcatagacggggagttcttctacttcgtgcattcgtaccacgtggtcccggacgatgagagcattatcgccggcgtgtgtgaatatggggggaaaatcgtcgctagcctgagccaaaataacttgttctcaacccagtttcaccccgaaaagagcggcatagccggactgaagattctgaagaactttacaaacctcgagctttga

SEQ ID NO: 9834 - DNA, 1074 bp, synthetic construct
  source 1..1074: mol_type = other DNA
atgcacccccgtcccagcccaatcgccgcgtccctctacactctgcgcgacatgaacgtggacgttattgtgatgcacgggcccaacggttgctgctttagaacgggaaggctgctggagagtgacggcgtcagggtcttaacaaccgcaatggccgaaaacgatttcattttaggagctggcgagaagctcgaagagacgctcaaaaaagcgtatgacatgtttaagccagaattgatgggtgtggtaggcacttgtgcaagtatgattattggcgaggaccttaaagaggccatcgctaacgccgacttgccgtgcaccgtaatacccgtggagtcccatgggggaagcggcgaaggggacaacacagtgggtgcgatcatggtgcttgaagccgccgtcgagtgtggggtgatacctcagggggaggcggatcgacaaattgaaatgctggagaaagccaccgaggtggaaaaaacccggggaatggcacagggaaagtacattaagcctaactttggcgattcgaaggagaatgttgctaaactggtagttcgcgccatcaaagatggcaagaaagtcgctttcgtgcataacgctaagaaggagaccgcatatctgttcgccgatattatcaacttcgactacaaggatatccgccgggacaataagcctatcattgtcgccaatctcgacggcagcactggcctggaacgaatcagatgccacgcaaagaacatcaaggaggaattgccgatggaaatcgactttatcacaggggggcttgatgagtatcctatcaccgccgacgtggcagctgaatacctgaaaaatatggacctcgacctcatcgtggtcttcggcgtcccacacgctttcccaatcgaggacttcgatgtggagtcagttgccataacagacgggccccggctggtggagcccctgagggatctaggttacaatcatgtggtggctgaactggatgcccactcaaagacgctgggaaccgatgagattgtcttctccgactttggcggtatgataagaagcgccatcggatggctagatgagtga

SEQ ID NO: 9835 - DNA, 402 bp, synthetic construct
  source 1..402: mol_type = other DNA
atgatgaagctcgataaaaaaatcctggaggaaaagattcgggagtacagggacttcaagagttgtagcgagtcaacgctgatggggctgtgcgaggctgccgagtatccaatgagcaaagccgaaatgtgcaagatagcatgcggcttcgccggcggaattgggggaacattcgacgaagggacatgcggtgcggtaactggcgctcttattgcgaatggtctcgtgctagacaatccggttaaaatcaaggaaaacgcaaaggagatctttaattcttttaaagaaaaatacggaaccgtgtgttgtggcaagatcaccaacaacggcaaggataagtccccctgtgtcgactgctgcgtcttcatcgccaacaaggtggccgatttgtgggacgagtga

SEQ ID NO: 9836 - DNA, 486 bp, synthetic construct
  source 1..486: mol_type = other DNA
atggatgaaaaacacttgccgctatttggcgtgggcccttatctaatgggactgattatcatcatcacctttctcagcattgcagcctccatctacaaaatcataccagtgtacaacatcaataagctcaatatcttcctgattaccctggggataatttcgatcatttttgctatcgtactgtggctgctggcgatactcaatagtaagttgatgaagaatatcaagaacaacaacctcgtcacaactggagtgtattccttcgtcagccatccaatctacgcctgcttccttttcatcagcatcggcctgatcttaattagccagaacatcctgttgttctttctgccctttcttttctgggccttcctgacaattagtctcattaagacggaggagaagtggcttttcgaaaggtatggggacgagtacataaagtactcaaagaaagttaaccggttcattccctttaaaaaaatattctga

SEQ ID NO: 9837 - DNA, 906 bp, synthetic construct
  source 1..906: mol_type = other DNA
atgatcgagaccattatcattatcgtcatctttctcgtgtacattgcaatgaaatacgtgaagatcctcaggccctacgagaagggcgtggtggagcgcctcggaaagtacaaccgaactgtgtccagcgggatagtggtccttatcccattcctggagaacttagaaagggtggacctgcgcgaacaggtggtagatgtcccgcctcaggaagtcatcaccaaggacaatactgtggttgttgttgattgcgtcatcttttatgaggttgtagacccattcaatgcaacatataacgtagtgaacttttatcaggccattacaaaacttgcccagaccaacctaagaaatataattggggatctggagcttgaccagaccctcacgtcgcgtgagatgattaacgccgaattgcgggaggtcttggatgaggctacagacaaatggggctccaaggtcgtgcgggtggaaatccaaaaaattgaacctcccaaggatatagtggaggcaatgagtaaacagatgaaggctgagagaatgaaacgggcctcaattctcgaagctgagggctacaaacagagcgaaatcaaaaaatctgagggggacaaacaagccgccattctggaagcagaaggcaaggctgagtccatcaagaagatggcggaggccaagaagcaggcgctgatcctggaggccgagggcgaaagcatggccatcgagaaggtctatgctgcaattcacgagggaaatcccgacgacgggctgatagcgatcaaatacttggaaagcctggaaaagatcgccgatggaaaggcctctaagatcttcctgccattcgagtcaagcggtgtgctaagttccgtggcaggtatagctgagctgttcaaggaggacaagaaagaatga

SEQ ID NO: 9838 - DNA, 408 bp, synthetic construct
  source 1..408: mol_type = other DNA
atggaaatctttatctggatcatcctggctatcctgttcttcctgctagaaatccttacaggaagctttattctggtgtggttcggcataagcagcatcgtggcagcggtactcaattactttaaattcgatttctacacccagtttggggccttcatagtcatctcaatcattttgctcgtgttcaccaagaaatttgccattaaggtcacacccgagatcaacaagaagaccactgcagaaaggctgattggacgcaacgctaaagttgtgcggaagattgacgataagaacattattgtgaaggtctgtggcgaggagtggtccgcctatgccaaaaacaatgtggacatcggggacacggtgaaggtctgcggcatagagagtatcaaactcatagttgagtga

SEQ ID NO: 9839 - DNA, 216 bp, synthetic construct
  source 1..216: mol_type = other DNA
ctcggaatcatcatcaagagcctgaagtacttcatttatctacagattgaggcattcaaccacgaatttttcaggtggcccaagcggatggagtactggaagaaagccctcagtatcatcattttcttttgtattgggctgatactgatggatatgatagcttgcggcgaccttccagacaaaaataccgcctccagctttatgttctacatctga

SEQ ID NO: 9840 - DNA, 315 bp, synthetic construct
  source 1..315: mol_type = other DNA
atgaaaaaagtaaaaatcacagtcatgcggaaggtgaggcacgacgatctcatagaagagtacgaaaaccctctagagcatgaatgcagcgtggaggagggacaggttttcatcgcaaatggctgggcccgcccggacgatttctgcgacagtgcttgggagtcgctttcacccttcgtgatggcactggcgaatggcgctagcgacttctatgacgggtggatgaagaacaagaagtccgccatgatttcctgtaacgacggttttagaccagtcagctttctgctggagaccctcgacgaagatgccgattga

SEQ ID NO: 9841 - DNA, 1191 bp, synthetic construct
  source 1..1191: mol_type = other DNA
atgctccagattgccgtttgcggcaagccgaacgtggggaagtccagcttttttaattcagcaacggcctcgaccgtcgaaatggcaaactaccccttcacaaccattgatgccaacaaggctgttgcgcatgtcatcaaggattgcccctgcaaggagttggaggttacatgtaatcctcacaacagcatctgtattgacggaaaaagactccttccaattgagctgatagacgtggcaggcctggtgcctggagcccatgaaggcaagggcctcggtaacaagtttcttgatgatctgatgcaggccaaggtgtttatccacgtcatcgacgctagcggttcaaccgatatcgagggaaaccctgtcgatcctggcagtcatgacccactggaagacattcaattcctcgaagaggaaatagtgatgtggatgtacggaattttgagcagaaactgggtacggcttatacgaaaagtgggtgccgaacatttggatatttccaaagtgctgttcgaccagctgtccggcaccggcataactatcgaggacatcatcgaggctaagaggaatatcgagccagactacaataaatgggaggagaaggaccttatagagctgacacgcaacatcctcaggatcgccaaacccatgatgatcatcgccaataaggcagacctccccactagcgccgctaacatcgagcggattaaagaaaaatacccctacgtgatccccacctccgcggaaagcgagatcgctctagtgcgtgccgccgaggctggcctgataagctatattagtggggatgaccacttcgagattctgcaagcggacaagctgaaccccaaccagctgaaagcactcgaatacatccagacgaatatcctagacaaatatggcagtactggggtccagaaggcgttaaactatggaattttcgaactgctggataggatcgtagtctacccggttcaggacgaacacaaatataccgaccagaaggggaatgtgttgccagacggattcctggtgccaaatggtgccacccctcgggagctggcctacatcgtccacacggatatcggggataagttcatgcacgccgtggatgcacgccgcaacatgcgagtggctagcgattatgagttaaaggacggggacattatcagcattgtaacaagagggtga

SEQ ID NO: 9842 - DNA, 870 bp, synthetic construct
  source 1..870: mol_type = other DNA
atgaaaaactacgacactgaccgtcctccagccatgaagattcgacagggcatccaggacgctatgacctacagtctgcctgacaagaagtttgagcccagtgagatcgacttggtcgaggtagacattaagctgaataatctgggctggaacttccacaactttaagatcttaaacctaacagacatccatctcggtcaatggattaatcccgaataccttgacgagctgatagattatgtcaatatcctgaacgtcgacctaattaccctgacgggagattactttagctacatcacagaggggtatgagaagtccctcactgactctttcaagaagctcaaaagccggtatggaaaatttggggttttgggcaatcacgatcactggatggatgcgtccaaaattcgcgacatatttaagagctcaaagatcatcgatctgagcaataaggtttatactctggaaaaggaaggtgaatttctcaatatctgcggggtggacagctgcacagtgtgcgcagataacctggatgaggtgctggtgaaaatcagagaagatacgccaagtattctccttgcccacgagccagacttcgccgaggaatcctctaagaccaacaagttcgatttgcaaatctcggggcatagccacggcggacagttcattatcccgaagttcgagaccacccccttccgggggccgaactccaaaaaataccccgtgggcctctacaaagtgagaaatatgatacagtatacaagcaaaggcctgggaacgaactcattcaggatgaggatcaactgtaagcctgaaattacaataattacccttaaaaccaaccgcaagcagaaaatcgacgtgaagtga

SEQ ID NO: 9843 - DNA, 2121 bp, synthetic construct
  source 1..2121: mol_type = other DNA
atgaacacccacaatatcataacgagcacaaagaacataatcaacctgatcctgctggttttacttaatatcctagtgataatcctcatgtccgatctgtacggggacttctccatcggcccgtggtataatgcttttttcatagtcctctcaatcaccatagccaacaccctgctatggccaattttcaagcgcttttttatgaagttcatgatccagactttgggcattggtaccatctttattaacgcactcatcttctatattgcgtgctacttcatcccgaacgttgacgtggggttttatgcttccatcaaggtgcccttcttcatgagcattgccacaactgttgtgactaacatgacaaacacgaattactacaataggcacctgaaaaacattgtaaagtacgcccttaacaaaaaaatcgattcaaagagctatccgggcattatcatgctggagattgacggactgagcatcaacatcctcaagaaggcaatcgacaataatataatgccaacaattaaggagtggattgacagcagtactcataatctcaaggagtgggagacagacctgtcttcccagaccggggccagccaggcgggaatattgcacggaaataacgaaaatatcgtcgcttatcgctgggttgagaaggaaaacgacaacaagatcatcgtttccggaaagttaagccatgctccactcatagaaaagcggatcagtaacggggaaggattgctggtggacgggataagcgtgagcaatatgttttcaggagattccaaaagcgcacccttgacgtcttccaaattggggactctaactagaatcaaccataagaccctcaatactgtcttcctggacacgtacaactaccaacggatcttcaccctgttcttatgggacatcctggtggaacttaagtcacagattaaacatctgattaaaaacatccaaccacggcttaggcgcacagtggtgtatgcggctgtgcgggctggggccaacgtagtgcttcgagaggttaccacggatatcctgacaagtgagatcctgaagggcgagattgatactgcatacgcaaccttcatggggtatgacgaggtcgcccaccactctggaacccaggatgaggatgtgtggcccgtcctgaaacagattgacactcagatccagaggctcacaaacgccatcgacatgagcaacaggggctacaagcttgtgattctgagcgaccatggccagagtaatggggccacatttaagcagaagtacggcattaccctcggaaattatgtgagaagattccttcccgatgatctcaaggtgtatcggaatgagtttaacatcgaccactttcgagatgccgtgttttcggaaaatatcaagctcaagatcgtcaaggagaaaatcggcgatttccgtgacgacatattcgatgagaacacctactttcagaacattagagacgaactggagaacaagaagcctgccattattttcgataacgagcaataccagaacctgaggaaaaaatatagcaactccctggaatacattaagggccatgagagtatcgagcagagcacgaaaaaagccaaagactctgaattgattgtcttgggttcgggaaacctagggctcatatatctcacagagtggaagcagcgcctgacctatgaggaaatcgtgatgctgttccctgagttgatacccggccttgtaaaacacccaggaattggcttcattctcgtacactcaatcaccaatggcggcatggtgatcggggaggatggaatctactacctggatacagacaagatcatcggtgagaaccccctgattaattatggcaaaaatgctgcacgccacctcaaacgacagaacacctttaacaatatgcccgacatcatggtcaatggtttctacgacgaaaagtacgatgaagtcaacgcgtttgaagagctgatcggcagtcacggtggtctgggcggggatcaaaccaaacctttcatcctgtacccttccgagtgggaagaccctggtaaactgattggcgcctcctcaatttacgagtttttaaagaaagaaattaatgaactgaagtcgtga

SEQ ID NO: 9844 - DNA, 852 bp, synthetic construct
  source 1..852: mol_type = other DNA
atggacaatttcaagcaaaggcttaacaagtccaaggaggccattgataacgctgactatatcatcatcggggccggcgccggcttcagcgcggctgctggtatactgtattcgggaaagcggttcgaagataatttcaaggatttcatcgaaaaatatgacatgaaggacatgtacagcgcagggttttatccattcaagactcaggaggagaaatgggcgtattggtgtcgtcatgtgtacgtaaatcggtactccgtgggaaagaccgagctgtacaagaagctgttcaatctcgtgaaagataaagactatttcgtcttaacaaccaatgtggagcaccagttttggatcaatgactttgaggataagcgcatcttcgcaactcagggggactacggctcaatgcagtgcgagaagggatgccacgataaactgtacagcaacgaggacttcgtttacgaaagcctcggaaaaatagaaggctgccgaatcccctctaacctggtccctaagtgcccggtgtgtggtgggaacatggatctcaacctcaggaaagaccagttcttcattgaagacaaaaagtggcacgagatggccagtaactaccagaattttctgtcccgcattgacgaggacaaaaacattgtcctgttggaattgggcgtgggctttaacacccccacaattatcagatacccctttgaacaaatgacatacaataacaaaaacatgacgctaattcgccttaacagggactacccagatgccatcgaccagaacaaggaccggaccatcagttttgatgaggagatctatgaaatatttgattactggctgtcaagattttga

SEQ ID NO: 9845 - DNA, 642 bp, synthetic construct
  source 1..642: mol_type = other DNA
atgcagactggaaagattttcatcattgggatcgggccgggcgcttccgaatatctgactaagaaagccatcgacactgtgaagaccagtgattacaccataggcagtacgcgggcgattgagctattcgatgatgttcaaaataagatcgcatttaatgtcaaggagctccttgagaaattaaacgagggggtgcaactcgcctgcaacggcaataccgtgagcatactgtcaacaggagaccctggcttttcgggggtgctgaacacggtgctgcggatcagcaaagagaaagaatttcccaacgaaaacattgaagttatcccaggcatcagctccctgcagctcgccgccgcaaaatgccacatccagtgggacaacgcgaacgtcatgacattccacggtcgagaaaatatagaggacatcctcccagtcatcaacaatggaaagacaaccatagccctgcccagccgcaaagtcaaggacatggcccagttcttgcttgaccatggtgtagaagaaaataggaaggtggtggtatgcgagagactgtcctatcccgacgagaacattgtggaggctacattgaaggatatcgcacagtcagagttcacctacatgtgtattatgatcatttactga

SEQ ID NO: 9846 - DNA, 2811 bp, synthetic construct
  source 1..2811: mol_type = other DNA
atgaatgcgaagctcaacaccacctgcttcatcttgttatttattttcctgattaccgccgtctcagcggcggacaataaaaatgagacactcctgacgcagaaggagacagattccagtcagaagctctgcaagtcctccgttagtaaggagactagcaagaaggagaaggtcactcttaaggcacctaatctgaagatgtattataaggatgggagcaaattcaaggccaccgtgaagaacaagaataagaaggccatcacaaaggcaaaagtggattttacggttaacggcaaagtttataacaagaagactgactcgaaaggtgacgcttacctgaccattagcagcctgaagtccggaaattatcccattaagatccggttcgctgggacaacgaaatacactgcaatctcaaagaagagcacaatcaccgtgaaatccaccatcaaaagtaacgatttcaagaaatactacaaaaatacttcgccctacacgtctaaattctataatcaaaagggcaatatcctgaaaaacaaagccgtgaagttcaagctgaacaagaaacactacacggtgaagaccgacaaaaagggtgtgggaaagctgccgattaatttaaagcctggaacctacgccatctccattatcaaccccaagacatctgaaacggtcaataagaaaatcacgatcaagtcgctcattaaaacgaaggatctaagcatcaatgggcaaaatgatggtaagttcaatgtaaaggtctttaataacaaaggcgaggtctatccaaatcagaaggtgacatttaagattaacggcaagacttactcaaaaaagactaataagaatggcattgcaacactggacatcaatcttgatgtggggaaacactcaatcacaaccgagtacatgggtctgaaaaatactaacaaaatcaacatcaacaaaatagtgaaatcaaccaactatatccacaccaccctgatcccaaactacgttaatgttacagctaagtatgtggtgaataactctgtttactgtcttaaatctggcatcaacggcatcataaagatgccaaagaacgaaatttttaaaattcaggttgggggaaaaatctacacctttacaaccactagcattaacggcataaactccatcacgctccgatacaacaacaattacctagtgcccttcgacgggagtggcgtcaaaagttacacgaaccgaaacaagctgaccagcgacggcataattattagcaaggtaaatgactacacccagattgactatcagagcaagacaaaagataacaccgctctcttcggattctacgctagcaaggggctggacaaaagtgaaactttaacatatgtggagaatgacaagatcactgccaagatcaacttcaacactttgtcctttgacgaatttagcctccggtactcgctgtctgcattgcatggcaaaacaatttataacttcaactatggcaattacaatgacaccatcagatttgcgaacaccaacactcccgtaacattttcctattttggcaatagcatagtcggatacgcctcccaagaaaccatcataactaagtttaaggtggacgagatcaaggaagtcgagaaggaggagaacataagttacggcctgaataaaaagtataggacggccatgggcttcgaagtgctgcaatcatacactctgatcaacgaaaaaattaaccagaaaacgctggagaattgggtgcttaagaatccggactatttgtcgcgtttcggcgtaatgaacatttatggaatgcatcttgcctctctggaggtcgcttggatcgcagatataatcgccgataagagctccaaggaactgaacgtgaattggaaaaggaacaacaccctaaccatcctgggtggaataaacttggaggacacttatctcaatattctcaacgccgacatgggtatgaaggtcacaggcaaatttgacaacgccttcctattcaaactgctcaacagcatgaacctgcccaatattgaggaatacgccctcttgaaagttgcctatagatacttggataaaagtagcaacagcctcgacaatgtctttctgtccattctcaaaaacaactttagcatcgcccagctcgatgacatgatttacatattctcagaagcaaatagcaagtctgccattatcctgaacacaagcagcggggtgagcagcgtagtgctagctcagaactccgtgtacaagggatcatcactgaagaccacccacgactgctgcggtgtggggattatccccaaagacatcataaaagggattaaggaaaccttcaacatcatcaataacggactgagcaacatataccccaataagacccaccctattagtaagctcttctacatggctgcgaatttgcttgccaagcctctgaacggggtgggaagcttaggtatgaacctgatcacaaccatggctcttatccagtccggcggcaccacctaccgcaacgagatggtggagaagtccgattggcatgaggtgatggataagattactttcacacggccaggataccttcagtcaaaaaaaatctacaacatcccgaacgaaaagggagggtgtgatttcattgaggtcaaaatccgcgacgacatgaccctggatcgcaacaatgcaatctatatatccgacgggaaaaccagaaagctgagtaaaacagagacttacaaatatttcatcgatgactactggacaccatttagtatgcctcagaagtattgggataagtcctggaacaggtga

SEQ ID NO: 9847 - DNA, 330 bp, synthetic construct
  source 1..330: mol_type = other DNA
gtgataaaaatcaagaaagaaagcaagttcaccgtatcaatcataatcatcctgtgcgcgcttatcgctataaccctagtctaccccaagtattccgctatctgggatgtggcctttctcattagtattttctacaccagtacacagaccattctggacacttccaagaaatctaagcggaaattaaacattaacatcgtgattatcataatcttcgcaacaatcatcgcattctacgagatgagcattggcaatccactgattttttccacggccctgctcatcctggccaacctcctggacagcactttgaacaagaagtcgaattga

SEQ ID NO: 9848 - DNA, 1011 bp, synthetic construct
  source 1..1011: mol_type = other DNA
ctgagctttaaggattactttaaatttgataaggacaaaaccacatttattttcgttggcggcaaaggtggagtcggaaaaacttctgtttccagcgccaccgccctgtggctggctgagcaagggaagaagacattgattgtaagcacggacccggcccattcgctggcggactcactcgaagtgccaatcggcagttaccctcgcgaaattaagacgaacctctttgcggtggaaatcgacccggacgtggcaatggctcagaagcaggcccagttggaggcccagaaagccgcaaatcctgacgacggggggctcctggggatggacttcctgtccgaccagctcgatatggcatctgcctcacccggcgccgacgaggcggctgcattcgagatgttcatgggcgtaatgaatagtgacgagtttgacgtagtggtgttcgatacagcaccaacaggacacaccctccgcctgctgtctttccctgaggtcatggattcctgggtcggcaagatgatgatgcttaaagccaaactgggtggagtcacgaacagcctcaagaagattatgccatttatggacgccgtggatgatcctcaaacttccgaagacttaaaacggaccaaggagcagatcgacatggcaaaagaggtgctgagcgatcccgatcggaccaccttcaagatggttgtgatacccgaggagatgagcatctatgagtccgaaagggctctagaagctcttggcaagtacgatataactgtggatagtgtgatcgtcaatcaggtgatgcccgatatctgcgactgcgacttctgtcactcaagacataagctgcagcaaaagcgattggctctgattgaccaaaaattcccaaaccagcacatcgccgaagtgcccctcttcaaggatgaagttaaggggcaggacaaactactgaagctggcccacatattatatgatgacgaggacaacgatgaggtggtccaggacgctatccagctttga

SEQ ID NO: 9849 - DNA, 810 bp, synthetic construct
  source 1..810: mol_type = other DNA
atgatcaaggtgggtgagaacattagcgagatcccaaagctaaactgcgagaagacaaaatgcaacatcgttgacttcattaagtcaaaggtctcggaatcaaaatctaagggtatagtcatcgggttgtccggcggcattgattcaacactcgccgcataccttgcctgcgaggcggtgggcaaggaaaacgtgttcggagtcagcatgccttccactaccaccccaactgaagacaaaatccatgcgattgagatagctcaggaactcggcatcaaatacaaggagatagctattgacagtgttctgaatgagtatttatccgtaacgcaactcgacaattataatctggccatagggaacctgaaggcccgaatcaggatgtccatcatctattactacgccaaccacaacaactacatcgtgtgtggaactgggaacagaagcgagatactgattggctactttaccaagcacggggatggggcctgtgatatcgaaccgattggaaacctgtacaaaaccgatgtgttcaaactgagcgaatttcttaatattcccaaggagatcatcgagaagcccccacgggccggactgtgggataatcagaccgacgaggacgagatcggcatgagttatgacttgctcgatcagattctgtatctgtctacggagaagtacatgaaaaataatgaaatcgctaatcgcctaaacatctccgcagaggaagtggacatgattattaacaagatcatcaggagcaaacacaaaagtaaggtgcccgaaagccctgcaaaaacaatactctga

SEQ ID NO: 9850 - DNA, 2856 bp, synthetic construct
  source 1..2856: mol_type = other DNA
gtgagcgaaaatattgaaaagaaatggcagaagaagtgggccgacgccaaactatttgagtcaaaccccgatgagcgagaaaagctctaccttactgtggcttttccctaccctagcggagcgatgcatataggtcacggacgtacctacaccgtgcccgatgtgtatgcacgtttcaagcgaatggagggctataatgtcctttttcccatggcatggcatgtgactggggcacccgtgatcggcatagcggaccgcattaagagaaaggacaagtggacactggatctgtaccacaacgtgcatggagtgcccaaggaaacgctccccaaactggaggaccctgagtacatcgtaaaatacttcagcacggagtaccatgaggtcatggaggaaatggggtattctattgattggaggcgcgaatttcgaacaattgatccaacatacaggaaattcatcgagtggcaaatcacccagctgcacgaaaaggggctagtcgccaagggcgaacacccagtgaagtactgccccaactgtgacaacccagttggagaccatgatttgcttgaaggcgaaggcgttggggtcaacgaactcacattgctgaaattccctataggtgataagatcctggtaactgctactctgcggccggagaccatcgtgggagcaaccaatatttggctcaacccggatgtggagtatgtcttggtcaatgctaacggtgagcgctgggtcatcacaaaggaggcgcactacaacctcaaaaatcagattaaaaacttagacataatatcggagataaatcctaacgacttgatcggacagatggctaagaatccgtttactggggaagaactgcctgtgttccccgcaagttttgtctccgagtcctacggctcgggcgtggtgttcagcgagcccgccgatgccccagcagattacattgctcttcaggacctgaagaacaacgccgagctgatatctaagtacaacctcgagggcattattgagaacgttcatccaattcccgtctgtacgctgaaaggctatggagagattcccgctgccgacatcatcgagagactgggtatcactgaccagaacgacgagaagttacatgaggccactaatgaattgtacaaggcccagcacagcaagggtaagatcatcgattccatccctgatttcggtgggatgaaggttcggtttgctcgggaagagctaaaagaaaagctcatcaacgacaacatggccacaatcatgtacgactttgctgagaggcccgtagtctgcagatgcggcaacaattgcgtggtgaagattatggacgaccaatggttcatgaaatatggtaatgaggaatggaccgagaagaccctcgaggttcttgatggcgagaccataatccccaaggaaattaagaataatttcgaatattatctcaactggttggatgactgggcctgctcacgcaaggtcggactgggaacccgcctgccttgggacaatcagtggcttatcgaaccgttaaccgatagcacaatctacatgagctattatactatcgctaaatacctaaaagacatgaaccctgacgacttgaacctggctttctttgacaaagttctgttgaacaaggactccggggagattacagtgccggcggagaaagtgaaggagatccaggacgagtttaactactggtatcctctggactggcggctctccgcaaaagacctcgttgggaaccacctgagcttcctgatgttccaccacagtgcaatttatccgaaggacaagtggccaagggggaccgtagtcttcgggatgggtcttctagaggggaataagatgtcttcatccaaaggcaatgttatactccttaaggatgccatcaaggactactccgctgacgtggtaaggctcttcctgatggcctctgctgagccatggcaagatttcgactggcgcgaaaaggaggtgctcggaactaaacgaagactggagtggttccgggaatttgccgcaagagttgaagagatcaaggggtcccccctggatttaagtaacatcgaagaggtggaactgaaaaggaccattgacctctggataatcagtcagctgaatcagcacattaagaatgccacggaggcgcttgaagtcttccagacaagacaagcgctgcaagattcgcttttcctgctgaagaaggatgtggatcattacctgtaccgggtcaagcacataattgatgcccaggatagcgccgtgatctatgtgctgtccacggtgctggaggcctggatcaggctcctcgctccattcacccctcacaccagcgaagaattgtggtcaacctatggcggcgctggctttgccagtgaagccgcctggccagaatacaacgaagagctggttagtgccgagattgaaaaaagcgaggacctggtggaaaacatcattaaagatatcgcccacatcaaacagatggtgggagaggatgtggagaaagtccacatttatctggcacctgactggaaatgggacttatacaagatcgccgacgaggtgggcaaaccagacatcggacagattatgggccgggccattggaagcaaaattcatgatgataaaaaggagattgctatggtagcgaaaaagatcgggaaagagataacgaaaacacgctatatcggcaagatcaacgaggcagagatcctgtctgacgcgctggactacatcaaggaggagtgtggcaacgaggtgatcatccacaccgatgactcatacgacccacagaataaggccaagaatgccatgccctataaacctgcaatctttatggaatga

SEQ ID NO: 9851 - DNA, 732 bp, synthetic construct
  source 1..732: mol_type = other DNA
atgaagatgatcctggacgaacgtggcaagaagtatgtcctgaaatcgggcgaggatttccaatccgacctgggaatcgtaagcgccgacgtactgaacgatgccgacattggggaggaggttaagagtcacttaaaccacaccttcaaaataataaaaccgaacatcaacgacttcattgatataatggatcggagatgctccattctccttaagaaggatattggactggtgttggctcatactgggttggggtcaggcagtcgggtggtcgacgcgggaacaggagcaggcgcgatcgccctaaacttcggcaatgtggtgggaagcgaaggtgacgtcttcacctacgagattagggaggactttgctgaagtggcccggaaaaacattgagaagttcggcatcacgaacgtgcatgtgaaaaataagaatatcaaggacgggatcgacgaggataagatcgatctggtctttctcgacctccccaaacccttcgaggtcttcgaggaagtgatggaatgtctgaatgttggcgggtggctgaccgtgtatgccccatacatcgatcaggcagagatatcttaccgcatcgcaaaaaaactcggcttttacgacattgagatctttgagatcctcgaacgcggtcttgaagttaggcctcagggggtcagaccaaagacacgaatggtgggtcacagcggatatatggtgtttgcccgcaagctgtga

SEQ ID NO: 9852 - DNA, 957 bp, synthetic construct
  source 1..957: mol_type = other DNA
atgaagaacacatggaagctgaagctgagaatgattcttacctcagtggtcatgttcactattgtctatttcctgatcatgctggtcgggctctaccttggtgtgagcagctggaagctgtactttggggcaagcctggtaatcgtctttttgcagtattggttcggaccctccctggtaaaacggagcatgaatgttaggcccctgtcagaggctgaggccccccacattcatcagatggtgcaggagctcgcagacgccgctggaatccctaaaccagagattgggctctcggaaattaacatcccaaacgcatttgcgtatggcagatccagccgaagtggacacatcgccataacccgtcccatcctaggcttacttgaccgggacgaactgaaggccgtcatcggccatgaaatggggcacatcaagcataacgacatgattgtgactgctgctgtgagcgttatcccaatgatctgctattacatcgcgctgtctttcatgttctcgggcgataatgacaatggtggcggaatcataatcggaatcctcggctacgtgttctatctgattggccaactgctggtgctcttcatttcacgaacccgggaatactacgctgacgaagccagtgttgactttggtaaccgcccggccgcactcgtgagtgccctttacaagctcagctacggcgccgctagttgtgataagcagacaattagcgaggtcaacacgaaccgcgccttctttataaacgatgtaaacaatgcaaggcacgatgtgtctgacttccagcaaatcgactttgacggggacggaaaaatatctaatgatgagctgagacgcctagccaactccgatgtgaaagtgtccaggaaaaatgggctcatggagttactgtccacccaccctgattccttgaagcgggtgaaacgcttggcggagttggagtga

SEQ ID NO: 9853 - DNA, 948 bp, synthetic construct
  source 1..948: mol_type = other DNA
atgagcggaccatgggtggagaagtatagaccacagaaactggaagacattgttggccagaagcagattgtggcccgactgcagaaatatgtaggcgaagagagtatgcccaaccttatgttcacagggcctgccggggtggggaaaacaaccacagccctggccttggtcaagtccatccttggagaatactggcgccagaactttctggagctgaatgcatctgacgcaagaggaatcgagactgtccggaataacatcaagaatttctgtcgcttgaagcctgttggtgctccctttagaataatcttcctagacgaagtggacaacatgaccaaagacgcccagcacgccctgcggcgggagatggagatgtacactaagaccgctagttttatactcagctgcaattactccagcaaaatcatcgacccgattcagtcaaggtgcgcaatcttccgttttgctccaatcaagggcgaggagatcaaggagcggctgaagtatatttgcgaaagtgagggcttccaggctgatgatgaagggctggaatccatcgtgtattttgctgagggcgacatgaggaaagctgtaaacgtcctccaagccgccacctccgaaggagagaccgtcacagaggatagcgtgtacgaggtggtgtcgaaagccaagccccaggacattgaaaatatgattaacaaagcactcatgggtgacttcatgggggcgcgcacgcttctgagggaaactatagtcctgcagggcaccagcggtgaggatatggtgacgcagatttaccaagatgtttctaagcgcgtgctcgagggcaagatggatgcgtcaatctacatggacctgattgaatctatcgcggagtgtgatttcagaataagggaaggagcaaacccccgaatccagctcgaggccttgctaacccaattcttatga

SEQ ID NO: 9854 - DNA, 1446 bp, synthetic construct
  source 1..1446: mol_type = other DNA
atgctgtggactgataaataccgaccccaggaactgagcgccgtggtcggtaataaaaaggagatcaagataattacagattgggtgaatgcctggaagagcaacaacccccagatacccctactcctcgtggggccgccgggcattggaaagacaaccctctctcaaattatcgcaaagcaattctccgaacacattgagctcaacgctagcgataaacggagccaagagattatcaaaagtacgatcggggagagctcatcttccagatccctatttggggacgagtacaaactgataatccttgatgaagtcgacggcatccacggcactaacgaccgaggcggagttaaagccatcggagacataatcaaaagttcgaagcacccaatgatcctgatcgccaacgatttttactcaaagaggctgcagagcatcaaacccaagtgccaggtaattaagatgaagaagtcacgctggaatagtatcaccaaacttttaagggagattgctcaggcagagaacgtggacgcaaatcctgcagccctgaaggagatcgccttgaagtcccagggggatgtgagatccgccatcaacaccttgcaggcactgtccagtaaagattcgacactggaggtccaggacgtagaaaacatgaaaaccaaggatacccggtccgacatctttaatgcgattaccggggtgctgaaaagtaagaccccagcccacgttaaggaggcgatgtggatcgaagaagacccaacgctggtcatggagtacatcgctgagaacattccacgcgagtacaagaagaaagacgagatcaagaaagcttatgactacatttctaaggccgacatcttctttggacgcacacagcgcagcagaaattacggctattggaagtatgccagcgactttatgggtattggcgtcagcaactccaagcatgagacatataagaaattcacgaagatacaaactcctaccatcttcaccttaatgagccggaacaggggcaaaagaaatctccgagacgaaattgctgaaaagatgtcggtcaaactgcacgttagccattcaatagctatcagcatgttcccctacctggagatcatgttcaaaaacgacgagctggcctgggagattagcgattacttggaacttgaagataatgagatcaagcgttttaggtctaaaaagattcctaagaaggtgatcaataagatggaaaagcagaaagcgcagatgcgcgtggaagaacgggacaggcgggccgaagaactcaagaaccagatgataaccgctgcagtggaaatcgaggatagctatgagatttccaagcctgatgagactaaagcggaggacacagtgaaaaaagagcccccaaaagagaaaaaggagaagaagaagactgacaagcaggtgtcactcttcagtttctga

SEQ ID NO: 9855 - DNA, 690 bp, synthetic construct
  source 1..690: mol_type = other DNA
atggatctcatgttcgacgtgagcggactcgcaggcgaaaaggaggagtttagtacctccaagaaggacgtgttgaagtttctgaaaataattggagtggacagtcgatttgtctcttacacgcccgacaaaatctacatcaacaacctgaggttctcgaagttctcacggaagagacaggcaaccttcaataagcagtaccccgagattgaagttgtccgcagcagcctgttccagaagatttgctctaagagcagcaaacacctggccctggaaatcaaaccaaattcccttgtcctgatgcccaaggacaatttcatagtggagctcatcatggagccttacacacgcaagtacggcgctaggctagtttatgagggggattatgaccttatggtgaatccactgattctcgatgaccaggtaaacgacatatttgagggtatcttcaatggggaaggcctgaattttaacatcaactctaacgagatctacccattaattaacgtgcctctgaactggatcaattccttcctcgagatggatgggcaaaaatcaatcgagaataagaacaaaaaccggctggcggcctccttcagtgaatttttggaagatgtcgccccgcaatataaggaaaacgtggtaaaagccgctaaatatattgaaaaaaagctagagactgagcagtga

SEQ ID NO: 9856 - DNA, 852 bp, synthetic construct
  source 1..852: mol_type = other DNA
atgaaaatcaaaggcagtaccaacatcgtaggcctgatcggccatcccgttgaacacagtttctcgccccctatgcacaacgccgccttcgacaaactgaatatggattacgcatacgtggcctttgatgtggacagcaacaacctaaagtcagctattgacggtgcgaaatccctgaacatcaaggggtttaatgtgaccatcccacataaaatcggaatcatgcaattcctggacgagattgatgaggtggcttccctcataggggctgtcaataccatcgacttcaagaacctgaagggctacaacacggatggaatcggcgccgtacgggcaatcgaggaagtgaccaacattaaaaataagaatgtcgtcgtggctggggcaggcggtgctagcagagccatttcattttatctggctaggtacggtgccgacaccataactctcctcaatcggaatgttgaccgcgccatgaaccttgccgaggacatcttggactccggactgatcactgagattaagagcgattccatcagcgaaatcaacagctacttgtctgacgcagatattctcgtggacacaacgcctaggggaatgcacccgcacacagacgacgagcccattgcccgagcggaaaacatgcaggaagatctggttgtctttgatgccgtgtataaccccaatgaaacagtgctgataaaggaagcaattaaggctggggcaaaaccagtgtatggcattaagatgctcctttaccagggagccgagagcttcaagatatggactggccgcaaggccccaatcgatgtcatggagaaggcgctgggggagacactaaacttagagtga

SEQ ID NO: 9857 - DNA, 1296 bp, synthetic construct
  source 1..1296: mol_type = other DNA
atggaatttacacgaccgagagggactcgagattttcttttcgaagagatgagggagcggaagcaggcagaaagtaccctgcgcactgtcttcgaaagttacgggtatcaagagatccagaccccactgttcgaagagttgaagctgttcacaaccaaatccggcgaagaaatcgtaaatcagctctacaacttcaaggataaatctgacagagaattgacgctgagacctgaaataacagccccagtggctagattatacttgaacgagctggaaaaaacaagcacgaaacccattaaactctactattacggcagctgctttcgctacgagcgccctcagaagggccggttcaggcagttctggcagttcggctgtgagttaataggggccaagacaccccaaggtgaggccgaggttattgcactctgctgtgatgccatcaaatccctgggaattaccaccgctgatgtcaacctcaaccaccttggcattatacgtggactgttcaagcattttgacatttcagttgaaactcaaagggaaattatggtagttatagataagggagataaggacttgctgatcgaaagcctgagtggcgacgaacccgtgatcaataacgaggagttaaaccagattcttctcaagctgatcgacctggtcggagacaagtcaatcatccccgaggtggaagaactcatctccccgtatgaagagtcgaaagccgcccttgaggagtttaaggaactgatttcactgctagacgcgtttaaggtggagaattataccctcaacctaggggtggcacggggtctggactattacaccggaatcgtgttcgagatttacgtgccagagctgggggcccagaagcagatatgcgggggcggaagctacagcctcgtgaagctttttggcggccaggaggtcgagtccacggggtttgctctcgggttcgaccgccttatgaatgcaattgaggagctggccgataaagaggagttgccctcccacctggacgtgtatgtagcgcctatctctaacgatgtgcggctaaaagctttcgagataacccagatcctgaggaagaacggatttaaggccgacgtcgatctgaacggcaaaaagttcaagaaactcatgaactacgcggataagatcaaggttgaaaaaatgatcatcatcggtgctaatgacctgaaaagcgacaaagtcactatcaagaatatgatcaacggcgagcaggagttggtgggtatcaataatattgtggactatctgaaggaggagtga

SEQ ID NO: 9858 - DNA, 408 bp, synthetic construct
  source 1..408: mol_type = other DNA
atgaaagtcaatttcaggcacgagatcaacggagttaaggtcatcactgccattgcacaggacgccaagaccaatcagatcttgatgctcgcaaatatgaacaaggaggccctcatcaaaaccattaagacaggcaaagctcactactggagtacgtccagaaacaagctgtggctaaagggggaaagctcaggccacatccaagaggtggaagagatcctcgtagactgcgatatggacgccattatactgaaaatcaaccagacaggtgctgcgtgccatgaagggtatttaagctgtttttaccggaagataaacaccaaaaatgaagtggatatcgacgacctgaaggatgaggatctggaggtgattctggagcgccttgtgaaccccgaagacgtgtactga

SEQ ID NO: 9859 - DNA, 1845 bp, synthetic construct
  source 1..1845: mol_type = other DNA
atgaagtgcatcataccagacacaagtgccgttattatcggggcaataaccgagctcatcgagaaggagaacattgactaccctgagatcattgtccctgaagcagttgtgtgtgagctcgaacaccaagccaatgccaaccgatccgagggtcagaagggattaaaggaattgcagaaactacaggaactccagtacgacggcgagctatccattagctttaagggccggcgaccaaccaatcatgacatcaagtacgccaagagcggcgagattgatagcatcataagagatctcgctagaagcgaaatgggaacgcttctgacaaatgacaaagtccaggcggagactgcgaaagcccagggaatccctgtgtattactttgaacaggagtacaaggagactccgctttccatcgagaaattcttcgatgatgagaccatgtccattcatttaaaggagaatgtcgtgccaatggctaaaaagggtaccccgggccacgtggatttcaaaatcctgaacgagaagcgttatacttacaaggaactcaaaaaaattgtggatgaaattctggacaaggccaaaagtgaccctaagacttaccttgagagcgaaaaggaggggtccttcgtggtccaatcaagggaatacaggattagcatagcgtatcctccattttcagaggctctggagattacagccgtccgccctgtggttagtatctccctcaatgaatacaacctatcggaaaagctgctggacaggatcaggaccagcgctgaaggaatcctgatctctggctcacccggtgcaggtaaatcgacattcgtccaggctatcgctaaatattacagcagcaagctgaataaggtggtaaaaacaatggaatcgcccagggatttgcagctgcccgacgagatcacgcaatacagcccattggaggggtcaatggagaacacggccgacgtgctcctgctggtaagaccggattatactatctatgacgagctgcgcaagaatagcgacttcaacatcttcgccgatatgcggttggccggcgttggaatgattggcgtggtgcacgcaactcggcccatagatgccatccagcgcatagcttcacgcgttgaactgggagtcatcccctccattgtggacacaagtatttacattgaggacgggaaagtgacgcacgtgtatgaaacaaagatgaccgtcaaggttcccaccggcatgaaagaggcagatctcgcacggcccgtaattgaggtccgggactttgaaacgggcgagctcaaaaacgaaatctacacctatggggagcagaccatagtcatggacatggacctggtcaatgggtctcaaaactccgaacgccagaagaccgccgtggaaaaaatcgcagagaaagagatcctgagaaagatccggaagatccttccgaaaaaggccaaggtggacgtggaggtgacctctcctgagcgagccaacatctacattccagaagatttcattcccaaaatcattggcaagaacgggaagcgcattgctgagatcgaagagagtatcggcatcagtcttggagtggaagtgatcgaatccaagcccataaacaaacatccaatcgaggtggatatcatccacaccaaaaaacagctgatcctggatctggggcgtgacaagggcaggaagaactttgacgtatttatagacggggagtatctgctcacagcgacaactagcaaaaagggtgaaataaagatcaagagaggcatagagttgtctgatttcatcattgaggccattgagatgggactggagattaccgctattcagaagatgtga

SEQ ID NO: 9860 - DNA, 750 bp, synthetic construct
  source 1..750: mol_type = other DNA
atgaagattggggcctcaacactggctggcatagaatataagctagagaacaccctggaatttattgaagatctggggctgaattacgctgagctggtgcaccagttcccaaacgaaagtattgatgtggaacttctggagaatttcaatctcaaatattcaatccacacaccgttcatggatgtcaacatcgcgagtcttcagaatcagagccggatcaatgcaatcaaccaaatcaaatcctcctttaaactcgcaaacaagattgactgcgagagcgtggtcatccatcctggaacgattcccttcttggccaacaaatactttaggagcaaagtgatagatgttgcgaacaagtcgatgatcgagctcggaggatacggcgaggatctcggcgtccagactaccttcgagaacatgccccagttcgacaatatgatttacagcaatatcgaaaagttgcacgaatttctaacagacaacaacctcagcatgactttagacattggtcatgccaaacacgccggctatagcagcgaggagatgtatttcgattccatcaagcacatacacatccatgacaatttcggggacgatgacacccacctggccctgggtgaggggagcattgacctgaaccatatagtaaacaccctggagaagaataactacgacggcatctacatcatcgaggtgaataactatgactccatcaaaaagagttacgaatacatgaagaagaacttttga

SEQ ID NO: 9861 - DNA, 2322 bp, synthetic construct
  source 1..2322: mol_type = other DNA
atgacttcctacatctcgcaccccctattgaaggagaacgcaattgaaagcagactgtaccagcaggtgcttgctggggacgtgctcaaaaagggcaacactatggtggttgcccctaccgctttaggtaagaccattgtggccgttctggtggcagcagacaggttgcagaaggtgaaaaactctaagatactgattctggccccctccaaacccctcgcaattcaacacgaagctagttttaaggagtttatcactctcccatgcgcttcaataaccggcgctatcaagccagaagagagagttaaacgatgggaagaaagccgcataatttcggcaacacctcaaactgtggagtctgacctccttaacggccgatacgatctgagttccgtgtccctcatggtattcgatgaatgccatcacggggtcggatcgtacagctacgtctacctggcgtctcgatacgtgcaggaaagcaagtttaacctcatcctggctcttaccgcctctcccggctcagataaactcaaaatcaaggaggtttgtgagaacctctacattcagaacatcgtggtgaaaacagaggaggatgccgacgtgaaaccgtacttcaacccagtcgagctggattgggtgagagtaaagatgagttccgaaatcgagaagatcaagggatatgtcgacaaaagcctaaagataagactcaaagctttgaaaaacatgggaatcatcagaaccgtcagcgtgggaaaagtggatatcctgaaagccaggggcaaggtgcaaggcgagattgcccgatccactaatcctgacaaggacctgttccaggccatctctatcctgagcgctgtgattaatatacaacatgctcaggagttaatcgaaacccagggcgtgcaaacatttaacaaatatgtcgccaggctacggaaaaagaagaccaaagccgcgaaatcactgatgtgggacgataattttagccgggccattaaactggcaagggaagctgagaagcatgggtgggagcacccaaagctgggagaaatcacaaagatcatcaagaaggaattgggagaaagtgacgggcagctgaaactgacgacgaatcggttcgatgacaagaacgataagaacgcctctaagatcatggtatttacccagtatcgggacactcttgagatgatccatcagaagcttgaaaaggaaggcatcaagtcagtgaaattcttcggacaggcgtcaaaagatggggaaaaaggtttgacgcagaagcagcagaaagcgatcatcaagagcttcaagatgggggaatatgacgtgctgatatccaccagcgtggccgaggagggcatcgatatccctgccgtggatctggtgatattatatgagcccgtgccctccgaggtacgtatgattcagagacggggccgcacgggcaggaaacgcaccggtcgggtcaaagtcctcatgacaaatggaacaagggatgaagcgtattactggaccagtgtcaataaggagagccggatgaagaaccagttaatagacccggatgtgctggaggagctgaacgcatctgccattgaacgcatggagaaccagcgcaatgtcaaggtcatcgagaagcctaagaaagaaaacaatttccccatagtgtatgcggactcccgggaaggcaactcaaaagtcatcaggcacctgactgagatggagatcgacgtgaaggttaacagcatggctgtcgccgactaccaggtcagtgatgaggtggccattgagagaaagacagccaaggacttcgttgattccatcatcgacaagcgcctctttaagcaggcccgtgagttgagcgaggaatttaagcggcctctgctgatcctggaaggtgacgatctctatgctggtatggtgaatccaaatgcaattcgcggatcactggcatccattgcaattgactttggcatcagcatcattccaacccgaaatgcgcaggacacggctgccatgattaaacgcatcgccgtgcgtgagcaaaatggggagaggacccccatccagattagaacagacaagaaacctgtaagcatgttggagcaacagctgttcattgtcgagtcgctgccgaacattgggcccgttaatgccaagaacctccttgcccacttcggtagtgttggcaaaataataaatgcaagtgagtccgacctacaggaggttgaggggatcgggaagaagacagccgagaacatccgcaaggtaattgacagcaaatacctgtacttcgaaaaggagattaaagaaaagaggcttctctga

SEQ ID NO: 9862 - DNA, 1512 bp, synthetic construct
  source 1..1512: mol_type = other DNA
atgaacaaaaataaaaccttcggggttatcggtgtgtgtggagccaacggcaatttaatcgcaaggatacttaagcagcgcggttataatgttatcgggaccgacctgtctttcaagaaggattgccggtttgcgaaggccctggaaggttacgacatcgaggtcttctacggtaacgcccccgaggctttctttaagaaggctgactatataatccctcccgctagcctgagcaaagactccagtctgttcaagcaaatgggggacaagcctattttcgagctgtacgatgtaatcgaaatgattcagagcgagaagccagtcttcggcataacggggacgaacggtaagacaaccaccaccacactgctgaaaaaaatcgcctacgacaatggcattaagccatgtgaacacgacttggagggcatgcaggggaatgccgagtttatccccattctgcagtctcgtttggacggcgatgtcggaattattgaggtgggcactttcggcgttccgggcaccattggaagaatcgtgaaaaacactggcatgtccggcggtctgattaccaacatcactccagaccatctaaacgatctgggcagcttcatggactacgcaaaggttaaagcggaatttatttccgagctcgggctggggcagctgatcgtaaacggccaagatccaacaattatgggcctcctacgggagctggactttaagggcgaggtcatcacctttggggtggatgagctcccggactcgattggaatgaaagagtgtgtctgcggaaacgagatcgccgtgaaagaaataatttcgggctgcggatactacttctgcaagtgcggcctgacaacgccccaggccgactatatcgcaacaaacatcgatttaaaaaatagaacctttgatttgcatacgcccactgaaaaactcacagtgaagatgggagtggacggactccacaacgtgtacaacctcactggcgtcatcatcgcagctcacaagttcctcgacctcccttatgataagattctgcctaccattgctagtttcaccggtgtcagcggccgcatggaagaggtggccaaagtgaaagggaaggacatcttcgtggactacgcccacaatcctgccggggtcgaaacagtgcttaaggagtttaagaagctatttggagacttcacaacggtcatcaccgtgtcctctgagagcggatatgttggggatatcgatatatttaacagtgcgttgaagttttcaaagttcatcgtgccagcatcagtggcatcacagaaaatcgccattgagaaactcaagtccaagcccgagctgaatgacaggatatttcttaaccacatcgataacttcgagaaaactggaaccctgggggcgagcgaagatgaagtgcgggacgggcttcgaaaagctcttaatttggattgtgaaatggtaatagctatcggagaagccgccactaagttcaagaatgccgtgttcgacctgtga

SEQ ID NO: 9863 - DNA, 1386 bp, synthetic construct
  source 1..1386: mol_type = other DNA
atgaactatctcgttgttggtgccggaaatgctagtaggcccgtggcacgcctgctgaactacctcgggcacgacgtcgtggtcacagacctaaaggacatcagcgaatttaaaatagaatttcagcgaagtctgattgaaatggaaaaagaaggggtccgcttggacatggccaacaaaaacccttcggtggaagggtttgacgctgtttacatgcctcccacgttgcccgagacagccccaatcgctcaaaagatctacgagtctgacctgaagattctcaccaacgaggaatttagcaagatcgtaaacgatttgattgacgtggatatcattggcattactggaactatgggcaagaccaccaccacctttattacaacaagcctgtttaaacaggcaggatacaaggtgtggtcatgttcctcgcttgtaaacaacttagtctcagaagccattgtggacggcatcgtgaagggcaaggtcaatgaatgcgacatcgccatcttcgaactgcctcacgggactattggtcttctcaacaaactgaatatcaaaatcgggctgttgaccaatatcgctgaggaccacctgtcagagttcggtggctcccttgagaagtatcagaagcggaagctgctgctgcaggccatgagtgagatcttcatctccaacaatagctgccatgatatcattgagaaggtccgtgatgacgcaatattttatgctcttgacgaggacgtagacttcaaaggtacggtgggcgataagtcactgactattgcctacggcgataatgaatttacaacaccgttcaacatgatgagctacttcttcgaaaactccgtggcagccgcctccattgcgctcacatatggagtgaacgagaaggatatcatcgatgctctcaaggccttcaaagggctgccagcgcatatggaggacgtgggggagtataatggccggaaagtaatcttggattctgcgtttttatacgatggcatgaaaatcaccctagattacttcaaggatgacagcgtggtcctgttcctggatcacttcgacaccctcagcgtcagggacaaggcagaggtgggcaacctaatcagtgagtataaccttaaggccgttatagcgagcggattcaatgaggttacccaggccgtggagatggacgccgcaaatgagatcctcgacgctataactaatataaacattgagaaagtcgctgtggaaacgatagagaaagccgccgagctgaccttcaaatactccgagcccggagatgtgattctccacatggggccactgatcgcatatgatagactcacgaccgtggacaagattatcaagggcctggaaagaggaagcaaaaagtacgagtga

SEQ ID NO: 9864 - DNA, 1188 bp, synthetic construct
  source 1..1188: mol_type = other DNA
atgttcctaacaaagaaggaggagcaaatgtgcgacggggagttcggagaaactatcagaaaaagcatggacatcctggttgctctcggggatatctatggggcttctaaattggtggatattacctccgcacaggtctcgggtgtgagctacaagaccatcggagacgctggcctggaatatctagaggacttggctcgggacggatcaggaaaagctaccataaacgccagcctgaacccgccaggaactgatctggacaactggaaagagctgggctttcccgaagagtttgccatcaagcagaaccagattgtggatgcctacgccaacctgggaatttacaaaacgtgcacatgcacaccctatctggtggggaatgtgccacgcttcgccgaccatgtgtcctggtccgaaagtagcgctgtggcattcgttaatagtgtgatcggagctaggaccaacagagaaggtggcccggcggcacttgcggcagccattgtcggcaaaaccccattatacggcttccacttggagcagaaccggaaggccaatctgatagtcaatgttgactgcaagatcaatggcgccgatttcggtgcactggggtacattattggtaagttcgttggggggggcgttccctacttcaatcttatgaacagtcccaacaacaacgacctgaaaactctcggggcggcactggcatcgagcggctcagtggctctttatcacatggagaacataacccccgagcataagaatgccgggaaagatgatgtggaagatatcatgtttgtgagccgagatcaaattaatgagacacgccaaaagctctccacgacagacaagaaaccagacctcatctgcttaggatgtcctcacgcctctctcgacgagatcaagcaggtcgctagcatcgtgcagggcaagaccatcaagaataagctctggatctgtacgtccgtcagtgtcaaggccacatccgataggatgggctacaccaagattatcgaacaggccggcggcaatatcgtatgtgacacttgtatggtggtcgcccctattgaagacatgggctttgaggtaataggtgtgaactcagccaaagcggccaactatgtgcctagcatgtgcggactggacgtcgtatacaacgatgtggagaacctgatacagtttaaatga

SEQ ID NO: 9865 - DNA, 1335 bp, synthetic construct
  source 1..1335: mol_type = other DNA
ttgctcaacagggccagtgaagccacagacatgctcaaggagcacatcgagaatgatgacgttatcagaataatttctcataacgatgccgacggaatatcctctgcagccgtcctggcgaacgctctggccgaggaggacgtacaattccatacgacaatcatccctcgcctcaagggggatatcgtaaaccagctgcgacatgagaaatatgatttattcatattcagcgacatgggaagtccattcatcaaggaatttaacacctataaacatgacgtgattgttgcagatcaccaccaggtcaatgacactgaggcggaaagcaatgttgtccacctgaatcctcacctgttcggcatagacggtagtaaggatctgtgtggggcaggctcatcctacctcaccatccgcgggctcgacaagaaacacctggcttatttcgccctgatcggtgcattcggggatatgcaaggacagaatggattcactggagtcaacaaactaattgtagatgacgccattgagagcggcacgctcgaaatccatgaggggcttaagatcgtgtccaagtccagcgaaccaattttcaagtcgcttgcttatacctttagccccccccttcctaagatctccggcgattttgagggggcgcgggagtttctcgaacgtatgaacttgtcttatggaatcaaattcacagacttggaagacgaagagaaagatctgttaaaagaggccttgatgagcatcaacccggacatctttggcgactgctacacagtgcccaaggaagtcccattactgcgcgatctggaggagtactcttacattctggatgcttgcgggaaaaacaaaaaacagggcctgggtctcagtattgcactgggcgagagggatcaggcactggacactgcccttaaactgcaatcccagtacagggaccagattgtgaagggcctggagtggattaagaagcagggtgctgaacagctgaacagtattcagtacctctactcggaagacaaagtcctgaagagcgtgatggggacgatcgcgagcatcggcttgtcagtggagctgctggacgattcaaagcccgtgattggcctttcccggctgcacaaggacatcaagataagcggcagaaccacccggaatatggtggctaagggcgtgaatctcggtaaagccttgcaggactcttcaaacaactttgggggtaccggaggaggacacgacatcgccgccggcgccatggtggcttacgagtttaaggacaagttcctacacctagtggatgagatggtggaataccagcttaccaatgattga

SEQ ID NO: 9866 - DNA, 399 bp, synthetic construct
  source 1..399: mol_type = other DNA
atggcaagaccagaatgggtgacctatagtgacgaggagattgaggagatgattctgaagttcaacaaggaggggaagagcacgtctgagatcgggatagtgctccgggaccagtatggcatcccaagcgtaaaggacgttaccggagaacgcataacacaaattctgaaaaggaatgatcaggccggacagtacccggaggatctcctgaatctgatcaaacgcgctgtcaacatcagagatcacctgagcgaaaaccccaaggacttacattcgaagcggggtttgactattatcgagtcacgaatcaggcgtctagcatcctactacgtgtccgaaggcgcgctgcctgaaggctggcggtacaaccccaaagaggccgccctccttgtcaaatga

SEQ ID NO: 9867 - DNA, 552 bp, synthetic construct
  source 1..552: mol_type = other DNA
atgatcaccttcataactggcaatgaacacaaagtgaaggaggccgagaacatcttcaaagactatgacattaaccttgagcatatcgatctggggtatgaggagccgcagggaactctggaggaggtcgcgataagcggcgcagaatacgcctgtcggaagctcgacaaacctgtgattgtggaggatgcgggcctgttcattaaagctctcaagggattccccggcacatactcccactacgttcaggataccttgggcaatcagggaatcctcaagctgttagccgacaccgatgaccgatatgccgaatttaggtcggtgatcgggtactgcgctcccaattccgagcccaagatcttcctgggaaaggtcagcggtgaaatcgcagtggaagagcgcggcgacttggggttcgcctttgacccactgttctacgtaccaagccttggtaaaacatttggggaactgaccacggaggagaagaaccagttttcacacagaaagaacagtctagaacagtttattaagtggtactctagtcaagaatga

SEQ ID NO: 9868 - DNA, 1590 bp, synthetic construct
  source 1..1590: mol_type = other DNA
ctgatatgcctgggaatcgaaggaactgccgagaagacaggtgtcggcatcgtggatggtgatggcaacatattggcgatgaccggaaatcaattatttccagaggaaggcgggattcacccacgcatggcggccgagcatcacgccgagtggattcctaagctgatccctcaggcgatcgaggagtctggactttcctatgaggatattgacatgatatctttctcccagggccccggcttgggccccgggctgcgcatcgtggccacatcggcccgtagtctcgccctgagcctgaaaaagccaatcattggggtcaatcattgtatcgcccacgtggaggtgggaaagctggacaccggggctgtaaatccggtgagcctgtacgtaagcgggggaaacagtcaagtgattgctcatgagagtggaagatataggatctttggcgaaaccctggacatagccatcggtaactgcctcgaccattttggccgggaaaccgggctggggcaccccggcggcccagtgattgaaaagctgagcaagcaggggtcttacatcgatttgccttatgttgtcaagggaatggacttctcattctcaggactcctctcagccgcgctgagggaggccaaaaagggaacgcccatcgaagacatctgtttttccctgcaggaaacggctttctccatgctggttgaagtaacagaacgggctctgtcccatacgcagaaggatgaggtaatgctgtgcggcggtgttgcagccaactcccggctaagggaaatgcttaacacaatgagcgaggagcacggcgccaaattctacatgcccgagatgaaactctgtggcgacaatggggtcatgatcgcatggctcggtctactgatgtttcgggagtttggctcgatggacttatcccaaactggcattattcagaagttcagaaccgatgaagtggacatcccgtgggtggacaacgtgaagacctacctcaagctgtccgatgacttgatcgctaaaggtgcagagagcaacatcgtgaagagtaactacctgggcgagaaggccgtgctaaaagaccgaatccctaaggggtatcgaatcgccgaaattgatgataagatacgccgcgcaaggacaaaggaggaggctaaacttctaagcgacgccaagtgcgctggtgtcaaaactcccatcttatacgacattaacctcgaagagaaaagcattttgatggaagagatcaagggtaaaatggtcaaggatgtcatggacgaggacctcgcattcaaaataggcgtggaaatcgccaagctgcacgctgctgatattattcacggggacattactagctcaaacatgatgcttcaggatgggaaattggttttcatcgacttcggccttggaaaatactctaatctcgatgaggataaagcagtggacctgctggtgctcaagaaatctcttcagagtatcgactacaatctcgcatcgaagtacttcgattgcgtcctggtgggatatggcgacgaaaatatggttaacaagatcagcgacatagagtcaagagggagatatacccactga

SEQ ID NO: 9869 - DNA, 501 bp, synthetic construct
  source 1..501: mol_type = other DNA
atgggattctacaacgccaatactccagagcagaaacgggtgaaaaaattgacgggggacatcaacatctccgacctgtttaagaacgaatgcaagacccgtgggattgctatttacaacgcgtacaacatccagaagagacttctccacgaggtcgaacaagaacagcttcacggtgtgaaagaggtagacgatcgcctgatggagttactagacgaaaggggaaagaataaggtgacacatcgctatgtcgatttcatcagcaacgaggatagtgcaagcaagggcatcataccccaaaagaccaatgagcagaatcccctgcctcctaaccaaataagaatccccccgcgagcccgggacggcaagcagttcctgaatgatgacgaactcccagaaatcgagatgttgaagaaaatcatgctccagaataagaagattattaaccagaacaaaataattctggagcagctgaggaagctgggcgagaaagatgactga

SEQ ID NO: 9870 - DNA, 1071 bp, synthetic construct
  source 1..1071: mol_type = other DNA
gtgaaaaagatgattgacggcataaagacatacggctccactgagctgatcgaaaagctgcaggaatgcgatgacccagtcttccttcttactataggaacgactgatactagcacaatccccgatattagcggagctggcgccacccccgagctcaccgttttcaccccagcagcagatgctgagttcctggtgctgggcgaagtccactgtacccgaacggccgccgagacagtcgtggacggcgcggccgcccccacccctgccaggcttactaaagcggcactccagctaagcaatatcccattcgtgattattgacgccggctcaaaggtgaaagccgacgtatcgtattactcctttggaaaggagcatgggcgggacatccgcaccggagaggggatcttgaatccactggaaatcatcgaaaacggaaaggatctggggaacgagctatccagacgccacgagatgctcatcatcggggaaagcattcctgccggcacaaccacggccctcggcgttttgaaggccctgggttacgaggctaacgaaaaggttagtggcagtatgcctcacaatccacatgatctcaagtccaaagtggtggatgaggggttgcggaatgctggaataatacccggtgaggccgatgccatccaagtgattggggctgtcggagatccgaccattccggcaattgcaggtctggtgctgggctctgacatccccattatcttagcgggcgggacacagatggcggccacatgcgctgtaataaaatcaatccagcccaactttgacttctccaggatcaacctggctaccacagtatttgtcgccgctgacgagactgcagacttattcggtatcctgaaccagatcgacagcagcattacggtgcacgtcgtggaccctaagttcgaagactcaaaacacgaaggtctcaagaactatctcaccggctttgttaaggagggggcaggggctggcggaatgatgtttaccgccctggtgctgggaagttctgtggaagagctgagagagaagatcgagaaagtctgcaaatga

SEQ ID NO: 9871 - DNA, 834 bp, synthetic construct
  source 1..834: mol_type = other DNA
atggacatactgcaggcgatcattatcggcattgtgcaggggttaactgagtttctgcccgtgagcagcagcgcccacctggtattcgctcaaaaactggtgggagttgaaagttcccttacatttgacgtgctactgcacctcggaaccctcatcgctgtgctgtggttcttccggtgggacataattaaaatgctgaagagctggtggctgtccattggcgacctcttgcagggacgctttaagcaagggttttacgatgatccttataagcgactggcctggtatgtgatcctggcgaccattccagtgggtatcgtgggcgtcttgttcgatgatgccatagaatcattgttcgcaggcgcactatacgtcccggcattctttctgtttgtcacggggaccatcctttacctctctcagaggatgaatagtggaaagattaacatgaataacatgtcgaaggttgaggctctggtcatgggactcggtcaggcctgtgccatcctgcccgggctttcacggtcaggaactacaatcgcagccgggttggtcatgggcctagataaagagttcgctgctaagttcagttttattctctccatcccagccatctttggcgccttcattttcaagctgaaagacataggtagcgccatggacgttaacttcttacccgtgttcatcggcttcatcgtatccatacttgcaggctacctggcgatcaaatggatgctggacctcatcaagaacagaagcctcgacatctttgcctattactgctggctgatggggattattgtgttcatgggcagcatctcccatatcttttga

SEQ ID NO: 9872 - DNA, 924 bp, synthetic construct
  source 1..924: mol_type = other DNA
atggcctgggatgacaccgctagtaagatctgggtggacggagacatggtggattggaaggacgccaagatccatgtgctgagccacgtggtccactatggtacaagtgtgtttgagggcatcagggcatacaaaaacgaaaatggggtcgcggtattccggctcaaggagcatgtccagcgtctgttcgattccgctaagatatacaagatggaaattccatttacacaggaagagattcaagaagccattcttgaggtggttcgcgtcaatgatcttaatggatgctacatccggcccatcgcttttaaaggctatggacagttaggtgtcgatccttcaagctgccctgttaacgtcgtaatcgctgcctgggaatggggctcctacttgggcgaggagggaatggccaacggggtggacatcggagtaagctcttggagaaagccggcacccgacaccttcccagccctggccaaatgtggggccaactatatgaactcccagctggcaaagctcgaggcgattgataatggctacgacgaggccatcatgctggattatgaggggcacgtttccgagggcagtggggagaacatcttcctggtggaagatgaaaagctcttcacgccagcaatgagcagctcaaacctcaaagggattacacgagactccataatgaccgtggcacgggacttgggctacgaggtgattgaagaggttatttcaagggaacgcctgtactcggctaatgaggtcttttttaccggcacggctgccgaggtgactcccatccgcagcatcgaccacagaaccataggtataggcaagaggggacccatctctgaaaaactacagactgccttcttcgagattgtggaagcgaaagtggaggacaaatatggttggctgagctacatctga

SEQ ID NO: 9873 - DNA, 828 bp, synthetic construct
  source 1..828: mol_type = other DNA
atggtggttaagattgctatcatcaagagcgggaatattgggacatcgcccgtaattgacctattgctcgatgaaagggccgaccggccaaatatcgatgtccgcacatttggatctggagcaaaaatgaaccctgagcaggtcgaggacgttgtgccgaaaatagatgccttcgaacccgattttgccatctttatcagcccaaatcccggagcccctgggcccgctaaggcccgagagatgctgagtgaaaaggatattcctgccattatcgtgggggacgccccgggcaaaggcaaaaaggacgaaatggatgaacagggcctgggttacatcatcgtgatgagcgacccaatgattggcgccaaaagggagtggctggacccaactgagatggcgatcttcaactccgacatcctgaaggtgctcgcagagaccggcgcattacgcctggtccagcaaaccattgacacagtaatcgagcaggccgaagcaggggaaatcgagctgcccaagcttatagtcacggcggagaaagctgctgaggcaggtggattcgcaaacccttacgccaaggccaaggccattgcggcatatgagatggctggaagcgtggccaacttggacatgaagggttgctttatgaccaaaggcttcgagaacttcatccccctggtggcggcggctcatgaaatagctgcatgtgctgccaaactcgctcaggaagccagagagatagagaaagccaatgatactgtgctgcggacccctcacatgaaggaaggcaaccttggctccaagacggacctcatctcaaagccagagtga

SEQ ID NO: 9874 - DNA, 579 bp, synthetic construct
  source 1..579: mol_type = other DNA
atgacaaggaacataaacgtgtcacggaagacctccgagactgacattaacattaaaatgaacctcgatggtacgggcaagtacaatatcagcaccggcgtgaacttctttaaccacatgctggaatcgttctcaaagcacagtatgatcgacttggatgtgcaggcccgcggggacattgaaatcgatgaccaccacacaattgaggacgtgggaatactgctcggcgaggcctttaacaaggctattggcgataagaagggaatcaaaagaatggcacacagcatcgttccaatggacgaaagcgtcgcaacaatcgcgatagacattagtggacgaagctactgcaatatggacctaaagttcaagaatgaaaaaatcggggatatgacctccgatgtggtaatccattttttcgagtctttcgccggtagcgccaaactgaatatctatggcactgtcgagggggccaacgaccatcataaggctgaagctgtgtttaaagcgttcgcaaaatctattaaagaggccatcaagatcgagcacaatcagatcccctccaccaagggggtcctttga

SEQ ID NO: 9875 - DNA, 192 bp, synthetic construct
  source 1..192: mol_type = other DNA
atgctacagatcctggtcgacgaggagaagtgcatcggctgcgggaactgtgccgagatctgtcccaagagcgctaaaatttggaaggtaaaggacgtggcacacatactggatctgaggtactgccatgtgtgtacactctgtgccatggaatgcccaacccagtgcattaaaatcgaacggaatggatga

SEQ ID NO: 9876 - DNA, 693 bp, synthetic construct
  source 1..693: mol_type = other DNA
atggcggacgtaaacgctggggtcgaatataagataaatgtggacggtaacttattcctgttggacaacaagaaataccagctcctgcaaagcatcttggatacagggtccctgacaaacgcgtctaaggagatcaaagtgagctataggactgccctgagttacatcgagaaaatggaaagcgcccttaatgtcaagatcgtgaatacgacgaagggcggcaaggggggaggcggaggaacctccctcaccgatgaggggtacagcatcctgaaggagtgcaagaagattaacgcaatcatggaactacacaaggacgtgaatgagattgaggctgatattgttgacattaacgttgagaagggtgtcatgaccatcaaaatgaaccagtttgaaataaatgcccccctgaaccgcaattacgatattggggataaaatcctggccctgatcagctatgacaacatattcctgatgctggagccacagtcctcaagtatcagaaatgtgctaaaaggccagatcatcgaaatgtcacttcagaacgagataattcgggtgaaagtggacgtgggcggagtggtcttgtgttcggacattactgtctctgccgaaaaagagctcaaccttaatatcggcaccgaagtgtacgtaggcttcaaggcaatgtccgttgctacactcaagctctga

SEQ ID NO: 9877 - DNA, 1557 bp, synthetic construct
  source 1..1557: mol_type = other DNA
atggccaacaagctgattagagggagcctcataatcctcataggtaacgtcatcttccgaatcgggggttacatctaccggttcctcatggccatcctgctgggacccacggcctatggtatccttggcattactctgccatttcagggcatctttcagactcttagcgctggggggctccctcccgccatcgccaagtacgtggccgaatacgaagcgatcgacgagaaggacatggcccggcaaacaatctacaccgccctgaagatcatggttttcctaggcctgttcttcggcgtattgatgattttcattgtggcgccatatttggcttatggctatttggggaagcctgaagctctgatccctctgcagatcgtcgggctgatcacgccattcagcgtgatcgtgggcgccttccgcggagcattccaaggggtatataaaatggagtacattgtctatacgcgggctgtagagcagctaggaatgattttatttgccaccgctttcgtccttataggcctgtccacagtgggagcgttatggggcaccgtgctcggatattccctgagtgtggtcgcggcggtgtacatcttcaaataccacatgggaaatctgataccggagcctagtgacgattttgtgtttacacgccgtgatgaattaaaacttgcaactgtcctggtcaagttttccattcctgtcattattaccgctattgctgaaatgctgatctacaatatctgtacaattgtgatggggaagtttcttacattcgatgacattggctttttcgccgcggctgatcctattgcaaggctgcccctgattatctcaatttccatcgctactacaattctgccggcctcgtccgaggcattcaagctcaaagacattggcatgctccagaagtacgtgtcagaggcctataagttctcattgttgtttgtggttccgatgtgcgtgggtctcgccctgtttgcagagcccactctaagagtgctctacttcaaaaaccccgcctatgtggctggagcaatggcactggcaatcctatcgatcggaatgaccttctacagcatattcgccatctccaccagtatcgtgcagggcattggcaatccacgcatccctatgtatattctcgtgggcggggccgttgtcacgggagttctgaactggatcatggtgccaacactcggcatcgctggtggagcacttgctaccagtgtggcctgttttcttatgatggtgccatgcatatactttgtctttagactgaccaaaaccaaagcccccgttgttgcagtcgctaagatattggtcgcctctgccgtgatgggtatagttgcatacttcatccccaagagcaccctgttcctgttccccgggatagtactctgcatggtggtatacttttttgccttgattctggtgaaatttttccagaaggacgacatcgagagcctgaggaaattcagctctaagtttggccccttctctaagctgatcaacaaaatgctcaacttcgtggagaggatcgaatttcgatga

SEQ ID NO: 9878 - DNA, 585 bp, synthetic construct
  source 1..585: mol_type = other DNA
atgaagattttcggcatctgtgccagtccgaggaataacacaaccgagtatgcgctttcaaaagctatgaggcggctgaacgaagagggttttgagacggaaatgttcacgtgccaatccaaagatataaagccctgcatgcattgcgactactgtctggaacataaaaagtgcataatccaggacgacatgggggacgtatacaaagggcttctaactgctgatgggattatcctggccacaccagtgcagaacggcggcatcagtagctatctgagcgccatcatggaccgcaccagagcactcgaggccatcgactacaacatcctccgcggcaagatcggaatgagcatcactgtgggcggcgatcgaacagggggacaggactttgcccacctgaagaatatcacctacttcatgatacacggaattattcccgtcagcggaggtccttttgggtcaaacctgggagcatccttctggtcgaaagattctttagatgatattaaggaggactattacggcatggactccctgaaccggaccttgcacgaatttgagaatttcctcaataagtacatttga

SEQ ID NO: 9879 - DNA, 339 bp, synthetic construct
  source 1..339: mol_type = other DNA
atgattcgccggaagaaaggaaaattcctctcgcaaggtgaagaagatcccatgagtggaacatcaaacttggtggatgtcatgctggtgatcgccgtcggcctgctgatattcctagtgattagctggaacatgcagaacatcgtatttaatgagaacatggacgaacagcagaaggagaaagtgaagaacgcaattaaggaggttagccagatcgaccagggcaatgagcttaatgacaccccagatatcagcaagagctccggcaaggggttcacggaaatggggaaggtgtacagggactccgacaccggcaaactcatcatggtcgaggggtga

SEQ ID NO: 9880 - DNA, 642 bp, synthetic construct
  source 1..642: mol_type = other DNA
atggtggctatccctgggagtgagttcctgaccgcggctctcaatgtggttagccagagtctgcagatccccgtaattattttccttttgattttcgcagtgtttgccgtttttgcctttggaggccttatctccgactaccggaccaggataaaactgaatagggattacaaagaaaagctgatattttccctcgtcaactctaagacagtcgacgaactgaaacacgctgtggatggttcagagatctataattctcaaaaggaagtgctactcaagatcgccgatgcccatagcctcagttgcgaatctcgggagtcatgggccctgaacctgattgaggaagaggaggtcgtcatggccaagagccttgagaagatcgacatcgttactcgaattggaccaactctaggactgatggggacgctgatcccgatgggccccggtctcgcagcactgggcaacggggatgtgtccacattggccgctgccatcattgtggccttcgacaccaccgtcgtgggcatcgggtccggcgcggtggcttacgtgataagcaaaatcagacgccgctggtatgaggaatacagctcgaacctgcagttattcgtaaacgcagtgctcgagaatttgaacgactga

SEQ ID NO: 9881 - DNA, 684 bp, synthetic construct
  source 1..684: mol_type = other DNA
atgagtttcagtctgttgtggagcgtgggcttcgccgtttccatagtggtcttcgcgataagtatcggtttggtgattaatagcaaaattaattcgaacaagaacctggtcaagctggtttttgtcctcttcatatccaccctgatccttatctattcgatttgcattttcaagattcagttgaacagcatcatagggtcctacaattatgtactgctgtttctgattgcattcctactgatgtttatcggatacattatcatcaaagagaatgggtgcggccgaaccttcatcaacgtgcttctcctcagctacctcagctttatcctcgtgatgttaatctgcataggctccaaagaatccatttttggactggatgaccttcagatcagtctcctggctacactactgttcaattccctcatccttgtggtattcttcgcctgtcggaaactcaagttgattgacaggagctaccgcagcttcggcagcctatacctcatactgggaatttattgtctgatgatttcattactgcttcccaacatcatcagcctgaacatgggggatatgaagccaatcaacatcgtctcaatcgactcaatcgcctttatttttattctgctgatcgtgatcatggtgctgggtctgctgtactataagagaaacacgttgctcaagtga

SEQ ID NO: 9882 - DNA, 516 bp, synthetic construct
  source 1..516: mol_type = other DNA
atggagtgcaagaaattagccctgctgatttccgtgatcttcatcatgtcatttgcagcaagcggagtcttcgcgcaccccggccacggttctgagtacgtggaagaggtgacgtcagacgatgtgggcagcagcagcaattccggaagctcttccgggagcagcggctcttcaagtaactctgggggctccaccgtgccagcttcatcgtctagtagcagctctagttcttcacggagttccagctactccagtagcgacccgtattccagcagctcgagttcgagtggagcccacgattcaaaccatgacagctaccagggctcctcatccaactcggtcgtaaaagacaactcctcccttaaggacgccaacaagactaacgaaaatctgaccaatgattccggtgagatcgataatgacgaactcttcacagtcaacaatattctcctgctgatcatcgtgttgttttgtgggtttttcataagtgttattctatttaagctcttctcttga

SEQ ID NO: 9883 - DNA, 2931 bp, synthetic construct
  source 1..2931: mol_type = other DNA
atggggggtaagaatattaacaaacacctaattagcctactcttcttttgcatcttggttctcctaatggccggcggagtgtatgccgaggatatcggcaactccgatgtgtttgaaaatccaatcagcacggacatccagcaagacgacttatccgaggacgacttggatatctctaacctgaacgttaaggtgaattatcagtatgcggatgacaacggcaagatcaaccccacgattaaagtgaatgacaaacacatcatctccaaagaatttaattccagctatcagaattacaatgtgatcattaactctacaaacatcgccgataaactcaacatctcgatcagcgcaccgggatatctcacccaatacaagatagtcaccccaaacatggggaaatctatcttggcgaacgtcacttttaacatggagtccagcgagtcctacaagctcggtagagacgtcactgcggaggccgacaagctgctggactttaaaaatgctgacgatgtgctggctatcacaactgctggtgtggcaaagtataacggcaagaccagtgaagacgcaatggaagccatggttaattacggaaaaatcagctatagcaacatactcatgcttcgtcaaagcgcgatcgaccccatcgacttcgccttcattgtgaagaagggaaatgagttaaaggcgatcatcttccagaacgcatccactaaatattcatatttgggaacgattagcgagaacatgacaaaggcccaatggaacaagtactacaagtcactggttggtgaaaattcctgggccttcgccagcctcgcaaacgggtgggctgctggcgtttctcgcgaaatcctgcaggaggccgcctttcatggccatatttgtgagggcaccctgggcggctacagtattattcaggctttgctgaagtactatccgcctgagcaggaaaataatcccggcggaatcgggtcccctgccgacatcactgcgtacaaggttctcggagtgcctggcggatcggacgatgacgcagctctgttctttctcgacgacacaattgggaagactgggtatgccggcatgaacaccacgaataccggggccacggagaatatgattgggttcatcaagtggaatagtaagcaaaagactggcgacctgatcatcatgtccttcaattccacgaagcttaaaaaacttttcaaaaaagagaccaaaataaacgccgatgctggcagtctggaagagctgaaatactgcagctggtggatcaacaagattaacaacaaccccgagaagctggtggactttctgtatgaatttacagggctcaaccaagaacagtataattacctgatgggaaccacggaaaacataacctacgacggggagcccgcagagtacggtctggatggccacggcctggacctgaactacatcttatctctgaatctccccaccgcgaagcgcacaatcaatagcgtggcgcacgctaagttaacagatgctgagcttaagcagatcgggattgatgccgccaataaggccaagaagatattcaacgaagagcttggggtggagatcgacagggacgacattgatttcctagccctgaccgacgccggatacgccttcctgaacggccaggataccgtcgtggtgcgcgatggtctccatgaagtcctgggaggaacactgtatagtcagaacctcttaagccttcaccaggccgtatggaagccgttgtggtttgccttcgccatccggtatccggattctgatctggtggacatgatttacctgagatacaatccagacaccaaagatttctttgtgggaacgctggacgggaatcgagtggtggatatcgggttcgagacactgaataactccgataaactcaaggctatcgcaaagtctttcgtgcccgatggaaactggttcaatatccagagtatagttaacgcctggaacgagcaccctctgtttgaccagatggccactttcttgtaccatgctcacgtctgtcccggcgtgcagccaggtttctttatcaccgactacattcaggaaaagtacccacttggcgaaaacgagtcttacacctacattgcatcgagtatttactgcaaggacgacagtctcacctatctattggatctgagccccggcctcggtactttttatgtccagaaactgccaaagaacgaaactgaaaatggaatatcccagggtgttctggtcgtatgggacaagaaccttaagataggtaaggcagtaattgtgaacttcgatgattgggggacaatcgacacaagtatgtatgtgaccagtgaggcaaagcgggcctcccagatcaaagcttatattgacatatacgggaataggaacaatccaaacgtgaagtctaaaccaattgtctcaaccgtaaatgagaagtggatcaccgaggaacagttcaacatgcttaaacaaggggccggcgatgatttcaatgtcctctcatacttgaagagccttgatgatatcactaaagaggatctgctcaagagcataaatcagaactccaacagcaactcaaactcaaactcgaagcctaacattaaccccaacagtaattcaaactccaatagcaacagctcctcaaatgctatagcatcgcacacaaactccaatccttcaagcagcggaagcgtgggaacctccggcgccgtcgtgtcgagtgcatacgtgggcgagtttacaaaagatgcggaaagcgaggactcacagaacgggcctgacgacgcaaaatcatacgaggtctctaaatcccccgccgccaagagcgctgatagcaatagtctgatttacgctctgattggtgtcttggctatcggcattctgctgggcgtaggctacatgaaacgggacaaaaaatga

SEQ ID NO: 9884 - DNA, 624 bp, synthetic construct
  source 1..624: mol_type = other DNA
atgcatctacctgacggaatcattagtttcgaacaggcaattatctattggacaataacactcatcatcgtgtccctattcttttacaaattctctaacgatgagaataaagaaaagcggattatttcaattgcgctgtttagtgtttttacgatcggcatcacgagcctgtccatcccatcaccgcttggagtgcctatccacttcttcataataccacttatagccatgctgctgggtcccttctccagcaccattgtaagctttgtcactttgatcatgcaagcgctcactctgaacatgggggggattaccagcctgggtgctaatttcattgtgattggcttcatactgagcgtcgccacctacgggttctataagctcttcctgaatctcaacaagaaatttgccatttttgggtcgacagtgatcggaattatcatcgccacctttggccagatcggcatcttattgatctccggcgcaatgaaccttgacgtgttgctgagtactctgctccccttttacgtcttcatcagcttcatcgagggatttgctaacgtgattattatcaccgccatcgagaagataaagcccgagatcatcgaaattaacaaaatctga

SEQ ID NO: 9885 - DNA, 483 bp, synthetic construct
  source 1..483: mol_type = other DNA
atgaagtacctcaagatctccattctgttgctgattctgcttctcggaatctcgacggtgagcagccacggcgtggatgtgacagccgacaccatggttgtggccaacgacagcaatggcaaaatggtcaaaagtattgccgaatcaaataatatcaacattagcgtgtacaaattcacctcagaagatgaggttacacatatcctagaacactccatcaacaacaccaacaagcgcatcctgtttactgcatatcaggagacggctaatgatttcctgaaaaagcacccggacatgtccaataggataattgtgatcgacaatgtcaacgacaacaccactttggagggactgcagaacatcatgaatgtgcccgtagagaacgtcaatagtgagaacaacttcggcctcccacttacaatcgggatcataatagggttactgatcggtattggctgcggggcgtacattatgaagcggtga

SEQ ID NO: 9886 - DNA, 840 bp, synthetic construct
  source 1..840: mol_type = other DNA
atgaagatagggaaaggtatcgtgaagaaatactcgcggaagtataaccgaacactcaaaaatggcgaacagaagaagtatactaccgaacaaatacaaatcaccatcccaaaaaacgaagacatttactacaaccaggaggaggtactgattatccccaatagtgaaatcgaaaacttcaagagtagagaagaggagaatgagtttctgaagatcgcaaattatttctatgtggaggaagtgaaacagttgaatgagcagatggatgagaacctgaacagcacgagcgagtacgaaaaggaaatcgaggagctgaaagcgaagattacttctttaaaggatatcgaagacaaatataacagcatcaagaaggacaatatcgaccagctcaaacaggagaacgagaatatccgcgataagcactccaaattgattatcgagaacgaaaacctgaaaaacaagttcgtcaacattaaaaccgagaatgagaacctaaaaagcaaatactcaagcattaaggaagagaataggaacctcaaaatcaagtgctccaacctgaaggacgagcattccactattaaagatagctacaatcaagtttcaacaaagtacgatcagctcaagcaggaaaacctcaataccaagacaggctatgccgagatctacgaaatcaacgaggaactagaaaaagactacgacacgcttcggcttgagtacaatgacctggtcgataagattaacagtctggaggaggagctgtacaagataaaggctatgaaggaccacgacacctatatagccaataaggtgaaagagtttattctgaagtccggaaactga

SEQ ID NO: 9887 - DNA, 282 bp, synthetic construct
  source 1..282: mol_type = other DNA
atgggcttctgcaatagctgcgggcggccaatcgtcaaagaggattacggcactaacaaggacgggagcctaaaccccgacttttgtaaagactgctatcagaacggcgagtacacggaacctgatataactctcgcagaaatgattacccgcaagacaaaggaaatgatggagaaaaaccccaggctgcccgagacacaggcgaccggaatcaccgccgtgttcatcccgggactgaagagatggaatccagagttccaagatgactacaagaccctgtga

SEQ ID NO: 9888 - DNA, 1251 bp, synthetic construct
  source 1..1251: mol_type = other DNA
atggaccccatgtataagataggagaggccctgatcggagacggccctgaattggcacacatcgacttattgattggtgataaattcggccctatcgggcaggccttcgccaatggtctatcaaacctcagcgtcggacacacgcctctgacaagcgtgattagacccaacttaatgaccaaaccggctactcttatcatccctaaagtaacagttggggatctggatgacgcgggcaagatctttggcccggcccagacagcggtggcacgggccgtcgcggacgccgtagaggacggatatattcccaaggagatagtcgaggatatagtcattaatgtgagtgtgttcattgaccccagcgctaaagattaccgcaaaatctatcaatacaactacggagccaccaagctcgccatcaggcgcgcaatggaggactacccctccattgagaaagttctggcagaaaaagaccggggcactcacccaataatgggattcaaggtcaaaaagctgtggagcccaccctacctgcaagtggctctcgacctggataatgaggatgccatggagaggataatcaacgatttgccggataatgaccgaatattgctcgaggctggcactccactcgttaagaagtttggggtgggcatcattggcaaaatccgcgccctgcggcccgatgcattcatcattgccgacctcaagaccctggacgtgggccgggtggaagtgaaaatggcggcagatgagaccgccgacgccgtcgctatctcagggctcggcacggtggagtccatcgctaaggctattcacgagacccagaagcagggtatctattccatccttgacatgatgaacgtcgccggatttgaggaaaagcttgccaagcttccaaaggacctgaagccagatattgttctgctgcacaggaatgtggacatggaaacgtaccgtgccgagcatggggaggacacaagtgacatgaccgagtgggggaacatcaaggacattaagagcatgctgggtgataaagggctggtggcagtggcaggcgggattcgacctaacaatgccgaagaagctatcgagaagggcgcgaacatcattatcgctggtaggtacatcattggatcgaaggatgtacgcagagccgcacaggacttcctggaacattttgaaccagatcccgacaacatgagactagctatggatgaagacgaaaacatcgaggtgaaagatgactga

SEQ ID NO: 9889 - DNA, 1827 bp, synthetic construct
  source 1..1827: mol_type = other DNA
atgcggatcttactcatccactctgattacctgaattataatgtgaagaacaagacacctgtcgcagaggatattgaggaggctaagaaggaagggtccttcgatgactcgctggtggtctttacagctgtggagaaagatgacgaaaataaccccgaggggatcgtgaagaacctggtgagtgaggtgaaaaagactaatgaccaagtgaaagccgagaatatcgtcttgtatccgtacgctcacctctcttcctccctgagctctccaaaagttgctatacagatcctgaaggacgtggaggaagcgctgctggctgaagatttcaatgtcaagcgcgtgccgttcggatggtataaggcctttgagataagctgcaagggtcatccactcagtgaactctcccgcacgatcaccgccgatgacgccgagaaggcgaaagtggagagaaaacctagcaaatggcagattctcgaaggtaacaagatcacacagattgaagactttgagtttgataacaagaccttcaagcaactagtggactacgagttgggacagggcgcctccgacgagggcgaacctcctcatgtgaagcttatgagggagaaggaaatttgtgactatgagccagccagcgatgttgggaacctgagatggtatcctaaggggcgactgatcagggatctgctcgcggattacgtgtacaaccttacagtagaccatggagcaatgcctattgagacccccattttctacgacctcgataatgaggccatctatcagcatgcttacaagtttggcgagagacagtatcggacagacacgaagaagaatttaatgcttcgctttgcctgttgcttcggagcatttagggtcatgtcagactcatacttgacgtggaaaaacttgcccgccaaagtttacgaactgtctacatacagtttccgtttcgagaaaaaaggcgaggtggtgggtctcaagagactgcgcgccttcaccatgcctgacttccacagcttctgtgccgacgtgccggcatcgctggaagaattttcaaatcagactgagatgtgcatgcaaactggaaacgatttaaatctagacttcgaggtcattttccgggccacccaggacttcttcgatgagcacgaggaatggatgtatgaggtcgctgaaaaattcggcaagcctgtccttctggagattttgccagaacgacaccactattgggtctgcaagatagacctggcaaacatcgacgcgctgggtcggcccatagagaacccaaccgtgcagattgacgtggagagtgggaaacgctttgacatctcctacctcggcgaggacggggaacagcataacccgaccatactccactgctctcccaccggctccatcgaacgcgtgctgtgcgccatgcttgagaagaccgccattgagctgaacgaaaagagcccaatgctgccaacctggctgagtcccatccaggcaagaatccttacggtgggagaaagccacaaggaatttgcagaggaactgtacagcaaaattaatgcttcaaacattcgtgtagatatcgacgatagggatgaatccgtaggcaaaaaaatccgaaatgccagcaaagagtggataccctacatttttgtcgttggcgataaggaggttgaaagcggcaagttccaagtcactgtacgggagactggggaaaaggttgacatgacagtggatgagctaatcaacgagatcaacgagaagtgtgaaggaaaaccctttcggaggttgcccctgcccaaagacatctcaagaaggatcaacttccagtga

SEQ ID NO: 9890 - DNA, 1356 bp, synthetic construct
  source 1..1356: mol_type = other DNA
atgagaatcattctggccggaaccggtagcgccgtgggcaaaacaaccatcgctaccggaatcatgaaggcgctgagtgagaagtacaatgtgcagccgttcaaggtgggccccgactatatcgatccgtcttaccacacacttgcgacggaaaatattagccgcaacctggactcgttttttatgaaggaggggcaagttagggatagctatctcaagggaatggagggaaaggacatcgccattattgagggggtcagaggcctttttgagggcatcgactccgtcaacgacatcggcagtacggcttcaatcgcgaaatctctaaaagcaccagtaatcctcatcattaattctagaagcttggtgaagagtgctgcagcgatagtgttaggattcaagtcactagatcccgagatcaatattgccggcgttattcttaacaaggttaagaataaagcccactatctgaaaactaagaaatcaattgaggagatcacaaacaccgaggtcatcgggggaataatccgtgatgacaacatctccatcgagcagcgacatctgggcctcgtgcccgcccgggaacgcgaaagctcccttaaatttatcgaactgtggtccgaagtgatcaaaaactccattgacttggatcggctcatcgagatagcaaagactgctcccaggattacctccaacattactcctatctggaataaactgaataagcagcaggtaaaaataggtgtggcttatgatgaagtcttcaatttctactataaggagaacattgaatccctggaggcaaacaacgctaagataaagtacttcagcccactgaaggatgaggagctgcctgacgtggacggcatctacatcggcggcggttacccagagctcttttccaaagaactgaatgcaaaccagaatatgttgagtcaaatcaagaacttccacatggaagacaggcccatctttgccgaatgcggggggctcatgtatctgatgaacagcatacacgaggatgctgtggtcaatatatacccttacaagtcaattctcacagatcgcgtccaggccttaaaatacaccatcgccgaggtgaaagaggacaacattattagtaagaaaggtgaaaagttcaacgggcacgagtttcattacagcaaagtgctggtcaacgacaataatatcaagaacaagttggccttcgagatactgcgggggaagggaagctacaacaaccaggacggcttcatggaacgaaatacgctggcaagctatgtgcacacccatgtagccgccatgccaaacttcgggggcaacttctgtatctcgagcctcgaaattggaggttga

SEQ ID NO: 9891 - DNA, 1062 bp, synthetic construct
  source 1..1062: mol_type = other DNA
atgaacatccggaagattgattttttcaatccacttattgtggtagtggctatcgtcgtgttccttctgatggggtatgccggctcgtttgactaccgctttgaagaccctctcaacatgaacgtctttctgaccattattttcgcatgtattgtgttcgcaactggctttttggtcatggagaacaaaatcatcgttgataagactaaggaaatcaattttatttctgagaggctcctgatcattctcgtgctcattgccttgatactgcagactctaaatataatcttaatcgggggtattcctctgtttaacagtgtgctgaagagcaactcaacgacaaatatctggcgaatagcttacccgctctttttgataatgatcaacctgctgctcgccaaatattataacaagaaatatttaatcctggtggccctgggcgctctcatattcgggctgaacggctataggacatccgtgttgggcattctcgggagctctttcatcaccctatactatttgaatcgcatcagcaagaaaataggtatcctcttcatagcaatcatcgcgatcggattcatggccatcggatacattgcctcccagtccatcgcgaatcagcattggaccttgaatccagggcaactggtactgtacagagccgcatttaccctagaggtgtttgaaaaaataatcccccttgccggttcaacaaatgggcacattttaagcatgattttcagtagcggaagcccccggacctttattggcgaatacgtcctgcactacaacgtttgccttactagtacactgttcggcccagttaccctcgacttcggactgattggcctggctattcagatgcttttcatgggcgtcttcattggaataatctacaagctgaaagagggcatcggagtgggagtgtactccattatcctgacgcacacgctgatctggatcgagaccggtcccacagacatcatgatctggttcctttatttcctggggctgatcctgatcatcatcaatcataactacattaagctcaacaagaactga

SEQ ID NO: 9892 - DNA, 903 bp, synthetic construct
  source 1..903: mol_type = other DNA
ctggagaagccccagctcatcaactttatagctaaagtaatggaggacagcggttttaaggtgtacaagaattttaagacttcccagagagtgatcgacatatacgccatcctgcctaccacaatcggcgatttcggggtggtggtcgcctgcaaaaactacgataaagacttcaaaattggggtcgacgtactgcgggaaatggaggaagtgcagcagagtataaaagcatctaaggtcaccattgtgtcgtcatcttacttttcagaccaagccaagaactatgcgctccgcaagaacattaaactggtggatagggacaacctgcttgagctcgccaagaagtatcaggaccgcaccagccaaacgacattggacaatacgccctacgatggcggcgcctcccagtacatcgaagatgaatatccagagtacacttacgacgcgtcggatatggagtacctcatgagacggcgagagcagaatccggctgtctataaaaataccctgtacaggcagatcgacgaagaccgtcacacaggattctcaagcatcctgaataggggaagcagccgcaacagtagcttatccggggtaaccaacctgtataactaccagtcccggaaaagcactttcggacaagatagcctgctcttcaacttggtgaagaatccaatcgtgcttattatcctcgttgtcgcagtttcctatatcatttcttacattgcaggtaatctattaaaggtcgatgccggcatcagtggactgattgagatgatcgtggctctgttcctttcatatgggctgtccctctataccgatagaaaccgagactttatcgtgaagggcacattcatattcttcatcagtttgattattctaatcatactgatctttgtttga

SEQ ID NO: 9893 - DNA, 777 bp, synthetic construct
  source 1..777: mol_type = other DNA
atgaacgcactcatttcgaacgatgacggtatcaccgctagcggaatcctggcgtccaagaaggccatggaaaatctgtgcgacacatacgtggttgcccctgagactcagcagagtggaataggccacgcccttacactcttcgagccattgcgggtgaatgaatatacgctgagagacgggagcatggggtatggggtgaacggcacccccaccgacgcggtcacaatcggcctgttcgaaatactcgataaaaaaccagacatcatgatttcaggcataaacacggggttcaatattggaaaagcagagcttaccacgtccgggacactgggagctgccatggaagctgccagtttcggcatcccaacaatcgccatctctcaagaggtaactcaggacgacgttaagtttgagaatggtaaggtggaagtggattttgactttgcagtgaaaatgcttaacaagctggccaagatcgtactgaagaaaggactgcctgagggcattgatttgctaaacgtgaacatcccggtcaacccgtcagatgatgaatttgaggtggtcgaactgggcaataggatgtactcccccgtggtcgagcagcgcttagacccccgaggaaagccatactactggattgacggcgagccctatgagttcaacgagcctggcagcgacgggtacgaactaaagattaaacagaaaactaccattacccccctcaagatcgatctgaccggtgatatgagcttgatcaaggagtggctcaagtga

SEQ ID NO: 9894 - DNA, 144 bp, synthetic construct
  source 1..144: mol_type = other DNA
atggcaatcaatcagctcgagagcaacctggaagccatcacccgcacaattgcgcagctgaagagagacggctgcacggacgagaaaatcctaaacgaactccgggaggagagggacaaaatacttaaggatctgaacttgtga

SEQ ID NO: 9895 - DNA, 204 bp, synthetic construct
  source 1..204: mol_type = other DNA
atgaaccaagacaaagataatgtgaataaaatgttcaagcagttcaagaataagtatgtaacagtggacctacggggaaactaccagagcgaaggcaagataatcgccattgacaactacctcaacatcatcctggagaacgagaacgggctggaaaccgtcaaaggcggtaatatcatatttattagcgtgaaggaggagtga

SEQ ID NO: 9896 - DNA, 1008 bp, synthetic construct
  source 1..1008: mol_type = other DNA
atggtgttcatcggtatggaccacggtaccaccggaatctccttctgcataatgagcgatgatggcgaggtcctcgacgtgtttaaactgggccgggaggaaagtaaaaaggggctagtgtcggccactgaggagataacaaaacgagtggacctggactcagtcaagctaatggctatcacctatgccatgggggatggcataaaccagatcctgcccacagacaaggtagaagaccgcgggattttgagcatcgatggggctggaaaagtcaccggcggtggaacgtccgtgttctccgagctcgagtcattggacattgacagcatcatgattccgggccttcataaagactctaactctctgaacgaactctttcgggcagcgtactcccaccaggccagtcccgaaaaggtgagtatctgctacaacggcctgaaggaaacaggctggtctaacttcattgtagcagatatttcctcaaatagcgtcgatatactgattgaaaacgggaaaattaagggggcgatggacgcctgtctgggcgcgatgggcgttgtgcacggacctatcgacctgaagatgattagggacattgacgagggaaagagctcggctaacgactgtttttcacacgctggagccatcaagattgcaggaattagcgggaaggtcgctaacgtgaaagatgtccttctcgaaaagtatagaaacggggatgaaaaggccaagttggccatcgatacccttatcatgactgtggccatggaaatcgccgggctggatgtgatatgcgagaatgagatcgagggaatcgtactgacgggcagcattggcagtgcaatcgagccatttaatttcgaggacgagatcaataaatacttcaagaataagtaccatttaaaagtgattagcaaagagtctggcgccatcggcgctgcccaaatagcaatggatgtttataacggtaaggaggaaatcctcggtatcgaggttaatatctcctga

SEQ ID NO: 9897 - DNA, 993 bp, synthetic construct
  source 1..993: mol_type = other DNA
atgaaaatgtattacgacgccgatgtgaatacagacgcccttaagggaaagaccatagctgtgatcggttacggcagccagggccgagcacaaagccgtaatatggcggattcgggagcgaacgtcattgttggggtacggaagaatggctcatcttggaacttggttcaggaagatggcatgacagtgaaaacgatcgaggatgcagccaaagaggccgatatcatccacatcctgctccccgacgaaattcaggagaaggtgtacaaggagcaaatagctccctacgtggagagcgggaacaccatcagcttctcccatggctataacattcacttcggtctgattgaccccgccgccgacgtcaacattgtaatgttcgcacctaaggggccaggctccatggtcaggcgcacttacgaggaaggatttggcataccagggctggtggcagtggagagagacgctaccggcgatgccctgcagctcgcactcgggatggccaaagcatgcggtctgactaaggcgggggtgctggagaccaccttcaaggaagagacggaaaccgacctgtttggcgagcagacagtgctctgtggaggcataacagaattgatcaatgcaggatttacaacattagtggaggctggttatcagccggagatcgcttacttcgaaacttgccacgaagtcaagctcattgtggatctgatctacgaaaaaggcttcgccggcatgtggaacgacgtcagtaacaccgccgagtatggggggctaacccgcggaaaaaccatcatcacggacgaagccaaggaggggatgaaagtcgccctgaaacagatccaggacggaactttcaagaagcagtttgccgatgagaatgccactgatggagctaaccttaaggagatgagggcggctgagggccagaaggagatcgaaattgttggtgaacggctgagaaaggcttgcggactacaaaaagacgactga

SEQ ID NO: 9898 - DNA, 528 bp, synthetic construct
  source 1..528: mol_type = other DNA
atgagtatactggagaatgtcctcgaagataataagaaattcgttgagaacttcgagggcgaggaaatgtcacaccatgcccagaagaacctcgctatcctcacgtgcatggactgtagattaattaactttttcgaaccggctctgggtcttaagcgcggggatgcaaaaatagtccgaaacgcaggaaattccatcgtgggcgaggatgccatcaggagcattggagcggcgctgtacaacctcggagctgaagaggtgctggtagtggggcacaccgagtgcggcatggccggcgccgacgtggaagccctaaaggaaaagatgctggcacggggcatcaaagaggaggacatcgccaagtatgacttgagcaaatggatcggcggatttgacgacgaggaggagaatattaagaacgtggtggaaaagattaaaaaccacccactgatccctgacgtgcccgtccatgggctgatcttggatgtcgttacaggtgaactgaaggtgcttgtagatgggtactga

SEQ ID NO: 9899 - DNA, 486 bp, synthetic construct
  source 1..486: mol_type = other DNA
atgaacaaggaataccacgttatctcaacattggtcgaggacaggcccggggtgctgcagaaaattgcagggttattcaaccgcagaggcttcaacatcgacagtattactgtgggtgccagcgaggtggaaggactgtcgagaatggtcatcagcgtcaacgccgacaagcagggccttgaacaggtaaccaagcagctcaataagctggtggatgttatcaagatcaaagatattacacagaatgccgtcaatcgagagctgtgcctgatcaaggtgcatattccaaacgaaaaagcaagggctgagattatgcaatataccaacatttttcgggccaaaatagtggatgtgagcgaggagaacctcatcattgagctcactggagacatcggcaagatcaatgcgttcatatccctgataaaaggttacggaatcaagacgatctcccgcaccggcctaaccgctatggcccggggggtatga

SEQ ID NO: 9900 - DNA, 1698 bp, synthetic construct
  source 1..1698: mol_type = other DNA
atgcgcggcggcgaagcgataatccagtccctaaagaacatgggggttaagacaatatttggctacccggggggacagaccataccgttttatgacatgttgtacgactcagacatggaacatatacttgtccgccacgagcaatgcgcagcccacgccgctgacggctacgctcgcgcttctggccgtgttggcgtgtgtctggcgacttctgggccaggggcgaccaaccttgtgacgggtattgccacagcctacatggactcttctccaattgtggctattacaggacaagttcctactcacctgatcggaaacgatgcattccaggaggccgatattatcggcattacaatgcccatcacgaaacatagctttcagcccaagaatccaaattatatcccctcaatgatcaagtccggcttcgaaattgccgcaagcggcaggcctggacctgtggtaattgatgtgcccaaggaggtgcaggaaggtgagctcagcgacttcgatgattcgttaatcgatacacccgggtacaatcccaccactaaagggaacctgagacagataaggaaggcctgcaacttgattaaggatgccaaaaagccaatgatcctggctggggcaggtgtcatcatctccggcgcctgctgtgaactaaaaaaactggctcacaccatcaacgccccggtcatgacctccctgctggggaagggagctatcgacgaaacggacgacttggcgctggggatgctggggatgcatggaagaaaagtctctaatgattacatcaatgaaagtgatctcctgatagccattggcgttcgcttttcagatcgaacgaccggccggctcgacagtttcgcgcctgacacgaaagtgatccacatcgatatcgatcctgctgaaatcggcaagaatgttgacgtggatttaccaattgtcggggatgcccataatgtgctgaccagcctgaacaattacctaaaggagtataaagtgtccagggacgtcaccgagtgggcaaacatgatcaaagagaagaaacagaaactccggccccgagtgtcctactcggatgtgcccctgaagccacaaactgtgataaaggagatcgccgaggcattaaccagcgacagcatcttgacaacagacgtcgggcagaaccagatgtgggcagcccacttcttcgaaactcagaagccacggaagtttatcagcagtggtggcctcggcactatgggattcggattcccggcagccatcggtgctaaggtagcttgccctgagtatcccgtggtcagtcttaacggcgacggcggatttctcatggtttgtcaagagctggctaccatccgggagtatgacctccccgtgattgccattgtgctggagaatcggacacttggcatggtctaccagtggcagagcctcctgtataacggaaggcactcacagactctgctcggtaacagccccgacttcgtgaagttggccgagagcttcggtgtaaacggcgtgagaatcaccgagcctggggaaaccaaaaaggaggtagcgtccgccattaaggacaacgagccagtgctgcttaatatcgtcattgactccgaagaggcactccccatgctgcctcctggagccggaatcagtgagatgattggtgaatacaaactggagaaggacgtgattagatga

SEQ ID NO: 9901 - DNA, 333 bp, synthetic construct
  source 1..333: mol_type = other DNA
atggagctcaccaagtacatttgtcacagaaagccagagcgcagcttccacataaaaaatcatcaattcccggtctgcgcccggtgctgtggcttttacacgggactcattgtatatctgatctgctaccagttttacaaccacaactacgacctgaatatgctactgatctccatgattcttatgattcccgtggcaattgatggcttcacacagtatttcagcctgcgggaaagtaagaacaacctgcgatttatcaccgggctcatcggagggatcggcttaataatcttcctgaaaatcatcataaggtggatcttgtatgtgttgtga

SEQ ID NO: 9902 - DNA, 909 bp, synthetic construct
  source 1..909: mol_type = other DNA
atggggagtttactgagcgtgaccgacattaaggacgacgtcaagtatatcctggagctagccagcaagattaaggcaggagagatcgaagaaaaaccactaaaggataagacactcgccatgatcttccaaaaaagctcaacccggacccgagtgtcgtttgatgtgggcatgtaccagctgggcggcagagcaattttcctctctagcaacgatttgcagatggggaggggagagccaatctccgacaccgcaaaggtgctgagccggtttgttgacgggataatgattagagcgattgagcacgatgatgtcatcgaattggctaaacactcagatgtgcctgtgataagcggactgactaatcttgagcacccctgccaggccctcgccgacatgctgacaatcaaagagcatttcggtgtttggaaaggcaaaaaaatctgtttcgtgggagacggcaacaatgtatgcaactcccttctgttgatcgctccgctccttggtatgaatatgtctgtggcctgtcccaagggttacgagccttccgaaacgatcctgaaaacggctaaggagtacgccatggagaacaatactgaaattatcgtcagtgatgacatcggggtggccctggagaatgtagacgtcgtttataccgacgtgtgggtaagtatgggcgacgaagccgagacaaagcagcgcgaaatagacttcgcgccctttcaggtcaactccgacctcatgtccatagctaacgatgaagctatttttatgcactgcctgcccgcaatccgcgggcaggaggtcactggcgacgtgattgatggaccaaagtcagtgatcttcgacgaagccgagaacaggatgcatgcccaaaaggcggttctgtattactacatgaaggattga

SEQ ID NO: 9903 - DNA, 834 bp, synthetic construct
  source 1..834: mol_type = other DNA
atgaacaacatgcctaaagaccttgataagatcaaatttgagttaagcgagaagctggagtttctgaaggagaatgccgagtcggaggaggaaatagaaaagctcaacaactttgcttcttacctcgctgacaaatactcgcagatcgacgacgaagatataaaaactgaaaaattaaaccgcattaacacagggctaagctactatcaacggttcaagaaggccctggagaagaacattgacattgatcctggccggctgatggggcttacagacggcatctttggaatggtgatgaccctcctggtctttggcattgcactcccagaattgcagatcacgtactactccacctttctgtcattcttctcaagtttggcacccacaattggcgtaacggttgtcagcttcgtgctgttgagttctttttggatctaccaccatgaatttatcaaggtgaataaccttaatatcccctacctgtggctcaacgtgttctttctcatctgcatatcctttgtcccattcacaacttccctgatcgggcactacagccatttcttcttgagcgaggtcatcttcggaatcaatattctcctgaccataatctccttcctgctgatgtatcactatgccaatagcatgcactttcttgagaatgcgccctccaagaaggagcgaaattatgtgtaccagactttcggaatgatcatgggtctgaccattgtggtgaacctcctggacttccacgtgtcaagttatttcatctatctgttcctgctagttccggtaatctctaccattagggatattagattcaaaatgaacgaatga

SEQ ID NO: 9904 - DNA, 1311 bp, synthetic construct
  source 1..1311: mol_type = other DNA
atgaaggtgttagtggttggcaccggtgctagagaacatgccattgctgatgctctcaaggaggacgtggagttgtactgttacatgagtaaggtaaaccccggcatgtcaaaaatcgccgaatttaagcagggggacgagggggaggtggagaaggtggcagaatatgccgtggagaaggatatagacattgcattcattggtcccgaagctcctcttggcaagggaattgtcgacgaacttcagaaaaacgggatctcctgtgtcggaccaactcaaagtgctgctcggatagaaaccgataaatcattcatgagaaagctgtttgaggactataatatcgacggctcactggtttacaaggtgttcgataacagcgccgacgttagcgccttcctcgacgaatttgagagggatgtcgtggtcaagccggtgggattgaccggaggtaagggcgttaaaatcgtgggcgatcacctcaaagacaacgaggaagccaaggaatacagctgtgaagtgattgacaacgtgatggggggctttgcgcaggtcatcatcgaggagcggctcattggcgaggagttcacaatccaggctttctgcgatggggaacacttagcgccaatgcctgcagcacaggaccatcctcatgccttcgagggggacgtcggagcaattactggcgggatgggatcttattccgacgtcggcggactgctgccctttctcactcaaaatgactacgatgatgctgtcaagatcatggaatcgacgctaaaggctatcgcgaaagaagcggagccctacaaagggatactctatggccagttcatgcttaccgctgacgggccaaaactaatcgagtacaacgcccgctttggcgaccccgaggcaatgaatgtgctgccactgctcaaaacgcccttgatcgatgtttgccaggccatcgtggacggaaacctggataaagtggagttcaaggataaagcctccgtgtgcaaatatgtggtgcctgacggatatccggaaacagagttcgccggagatctggtggatgtagacgaggaatccatcgagaagctgggcgccaaggtattctacgcagcagtctccgccgaggacgatggtattcacctgagcggcagcagggccctggggattgtagccagtggcaatagcatcgaggaagcggagaagatagccgagaaggcctgcgagtttgtgaaaggtaatgtgtaccaccgccgagacgtcggtacaaccgaactggttaacaagcgtgtcgagcacatgaaggaaatcctgagctga

SEQ ID NO: 9905 - DNA, 1365 bp, synthetic construct
  source 1..1365: mol_type = other DNA
atggagaaaaattcaaatatagagatgatcaccggcgaccctaagaaggcaatcaacaagctgtccatacccatcatcgctagcatgttcctgattttcgccaacaacattatcgacagtgtgtgggtcgcaggactcggtgctgatcccctggctgccctaggatatgtcacgcccttgtttatggtgctgatcggaattggcaacggcatcggggctggcgggaacagcctgattagccgctatatcggtgctgagaagcggcagagcgccaacaatgccgcaatccacaacttaattttgggaatcattctgtcgattgccgtctcaataatcctgcttacctttcttaagccgctcttaatcgttatgggggcgtcagctgtgttgaagtacgcgatggattacggcattgtgatctttgcgttctcctttgctatgctgcttccaccaatcttcgggggcgccttccgcgcagaaggcgatgtcaagagagccaccatacccctcgccatttccgcgatcaccaacatgatcatcgaccctattttcatttacactttcaatttgggggtcgccggtgccgcctgggccactgttattgcacatatattcgccgtcgctgcgatgctgtattggatgcttgtgaaaaaggatacctacctgaaatataatcgtgaaagctttaaaaacgacctgaccatgtataaggacatcctggtggtgggcatccccgcctccctggagcagctgatcctgtctgcactcacaatagtggtaaatttcatgcttacaattgtttccggccctgttgcagtagctgtgtatacagccggttggcggatcatcaacatcggaatgcttccggcgatcggcgtgggtactgccgccataagcgtgtcgggagtcgcatacggcgctcggaaatacgagaatctccgaatcacggcccgctacgctgtgaaagtggccctgatagctagcattattgtgtgcattatcctgaacatatttgcaaatcagatcgcattcatattcagttactctgaaagttccgctcagctggaaccactcattgccagtttcctgcaaatcatgtgcttatttatcttgtacgttccattcggggccagtgcaggcaacgtattccagggggtggggaagggaagcattagctttattttgacatcattcagggagtttgtcctcgtgctgatctttgcctacgtactcggcttcaccctcaatatgggggagtttggcatctactgtggaatgctgctaggtggaggaattgggagcctcatctgttacatctgcattgagctatatatcaacagactgatgaggtccatcgaaagctga

SEQ ID NO: 9906 - DNA, 417 bp, synthetic construct
  source 1..417: mol_type = other DNA
atgaagtttaacgaaaacaaacccagtgccgccttcataagcatcattcacaaggaacacgcaaaatacattaacgaaaatgtgaaggacgaggacctgagcttcggcctccacccaatcctgatcataatctatgaaaacgagggaatcaatcaggagaagctggccgaagtgttgcatctgaacgagtccactataacccggaaccttaagaagctggaggataaagggtttattgagagaattaaaaataagcgaaagaagatcattaaactcacatcaaagggccgcaaaacggctcagaaagtcatcaattacgactacaaatgggatgagaagctgaagcaaaaccttaccgaagaggagtatgcgaatttcctcgaggcactgaggacaatctgcgaggaattactatga

SEQ ID NO: 9907 - DNA, 534 bp, synthetic construct
  source 1..534: mol_type = other DNA
atgaatcagaccataaacgacctgaagagtaggcgcagcatcagaaaattcaaggacaaacagatctccgacgaagacctgaagacgattttagaaaccgggacttatgccccaactgcgcgaggaatgcaatccccgaaaatcgtggtgattcagaacccggaaaccatcaaggagctgtcaaagtggaacaggagttacttccccgtggatgtccccgaggatatggaccccttctatggcgccaagacaatactaattgtcctcgcggatagcaagatgccaacatttgttgaggatggtgctagcgtactcgcagtgctggtcaatgccgctcatgcaatcggggttggatcatgctggatacaccgcgctcgggacgagttttcgtctgaaaaaggcaaggccctgctcaaaaagtggggcattcctgagtcctacgaaggaatcggccacgtggcccttgggtatcctgacatggagagccctaagcccttgccacggaaagaggattacatccactacgtggactga

SEQ ID NO: 9908 - DNA, 1701 bp, synthetic construct
  source 1..1701: mol_type = other DNA
atgtatttcgaaatcgaaaagcaggcgattgacgccattaacaaagcattagatcagtatgatgtcgaagttgaccggaattttaagctggagtttccacccaatccaaacctcggcgacctcgcgagcacaatcgcatttgccctgaccaagaagcttaaaacttcaccccctgaggttgcgaagggcctggttgagaaaatagaggtgcctgaaatcttttctaaggtgcagaattttggaccctatgtgaacttcttcatcgattacagtaaattcagcaaactcctcttggagaaggtggacgagaattacgggcaactgccagcatatggcgaaaagatcgtcttggagcacaccagcgccaacccaaacggaccactgcacattgggcacatccgaaattcgattttcggggattccctctccagattgctaaagctcgctgggcgcgatgttataacccagtactacgtcaacgacatgggaagacaaatagcgatcattgtgtgcggcataaccgaatgtggcctgaagattgaggattatgatggggacaagatagaccataaaatcggtaaactatacttcgatgccaacaaagccgtggaagaggatgaggctttaaatgataaggtggacgaacttatccgaaaatacgaggagggcagcgataagaagttaaataagatcttcgaggatgtggtcgccaagtgcatttctggaatgaaagagtccctgctgcggatgaatattgtccatgacgactttgtatgggagggccagtttgtccgcagtggggaggtcaataacctggtgaactacatccagaaggaaggattcacccgggaagaggatgtcctgttcattgatctgactgactttaatatcgacaaagagttcgtacttcggcgctccaacggaacttctctgtacagcacaagggacctggcctaccacaaatacaaggccacgctgggtgacacggtgctcgacatcctcggctcagaccacaaattggccgctaagcagattaaggttatctttgaggagattctgcggcagaaggcccctgaggtcatcttctatgaatttatcaccctgccggaggggagtatgagtaccagaaaaggtaagtttgtaagcgtggacgaactgattaacgaggccgtgtcacgtgcccatgacgaaatcaaatctagaaaccctgagcttaacgaagaggaaatcgccccgatggctgaggacatcggtgtaggagcaatcaggttcttcatcgccaaattgtcccccgaaaagcacctgacattcaagtgggacgaggctcttagcttcgaacgcggctgtgcttcgattcaatatgctcacgcacgcgcatgcaaactgcttgcaaagtcaggcaaagatatcaattccctcacggtgagtgacgactggattcctaatgaggacgagcaggagctggtgaggcagatagcgaaattcccccaggtggtggaagattgcgctaacaagcagcgagtgcataacattactcagtactgtcaggacctcgctggttcctttaacaagttctacaagagccaacaggtcatcgggagcgacctcgaaaacacaaggctaatactggttgatagggccaagacaaccatcaaaaacgccttggatatcctgggcgtggtggcacccgaaaagatgtga

SEQ ID NO: 9909 - DNA, 426 bp, synthetic construct
  source 1..426: mol_type = other DNA
atggagatcgattacaaagaaatcgcaagctatgtagtgatcctcattatagttctcatcgccgctcagcaccttaacgtcgttgtatctggctccatggagccggccttttatcggggtgacatcgtgctggtcgaaaaagccgacttcttcggcatccatgagttcaacgcgagcgatgtcaaagtcggggacgtggttgtgtacgatgcagcctggtacaaccagcccgtgatccaccgcattattaacattacggacattaatggaaccaccatgtacgtgatcaagggagataataacaatgctcctgacccctactacgtgacttcaagtcaaataaaggagaaggtggtgacagtggacgacaacctagtcgtgataccaaagatcggctatctgtccctgtggctgagggggttgtga

SEQ ID NO: 9910 - DNA, 1275 bp, synthetic construct
  source 1..1275: mol_type = other DNA
atgaatagtgaggaactgttcaacgagtctaagaactacttcccggggggcgtcaatagccctgtacgggcgttcaaaccctaccctttctttgttaaaaacgccggaggttcaaagctgaccgatgaggacggaaaaagctacatagattattgcctggcatatggcccgttaattctcgggcatgctaaccccaaggtggtcagggaggtgtctaatcagcttaccatcggcacagcatacggtacgcccactgagaatgagattactctcgccaaggaggtgatcgacagaatcccatcggctgagatggtcagattctgtaatagtgggactgaggccaccatgtccgccatccggttggcacgcggcttcacggggagagacaagattgtgaaattcgaaggagcttaccatggagcacacgactatgtgttggtgaagggcggaagtggggctgcaacattgcctgatagcgccggcatcccagtggacacaacaaagaacaccctttctgtgccatttaacgatgaggagatcctgacagacctcatcgagcgtgaaggtgacaatatcgcgtgcatcataatggaggttgtcatgggcaacgtgggctgtatcgaacccaagccgggctttctggaatttgtgcggaagatcacagaagaaaataacatagttctaatttttgatgaagtcatcaccgggtttagggcttcccgagggggagcccaggagtattatggagtcacccccgacctgaccactctgggtaaaattgttgggggcggactccctatgggagctttctgcggtaagaaagaaatcatggagctgattgccccaaacgggcccgtatatcaggccggtacttttagcggaaatcctataagcgtacaggcaggcatcagcaccctgacgcagctcaataacgccttttacaaggagctcgagaggaagggcaactttcttcgaggcaacattcaatcgataatcgatgatgaagagtataacgtgcaacccgtggggttttcatccatgtttcagatttacttcaacccagccccagtgtacaactacgcggatgcccaggaatccgaccggaaaaagttcctgcgctacttcaagtcactactgaaacaaggcgtcttcatccctccctcccagttcgagtgcaatttcatttccaacgcgcacagtatggaagacttacagaagaccagcgacgccatcgaaatttctctgcacgaggctttcaaaaaacgccgcaggtga

SEQ ID NO: 9911 - DNA, 630 bp, synthetic construct
  source 1..630: mol_type = other DNA
atgtcggacaagatgttcatgggggcatcaaccaagcaaggcttggacatcgctaataagagtagggagatcatccggaacctgatcggagacgacgtcaaagatctgaaccccgccgaaagggatattgttgagcggatcgtccacagcaccgccgatcccgagtacgcaaagctggtgaaaattagtcctgacttcgtagatgccgctatggcctccctcaaaaacaaggaaaccatcctgacggatattaacatggtgaagtatggcatcacacgctacgaaggggaggtcgagtgctatataaagaacaaagaagtgatcaaaatagctaaggagaatcagatcacaagagcagcagccgccatgcgatacgccgctgacaatggttttgagggtattgtggtttccggcaatgcgccaactgccgtgtttgaggcgatggacctatacgaaaaaggcgagatgaatcttaaggccattgtgggagtgcccgtagggttcgtcggagctgccgacagcaaggaagcgctccacaactctaacatccctaacattattgtggagggaccaaaagggggcactccgatagcagtggcttgtgtcaacagcctgatccagcatctctga

SEQ ID NO: 9912 - DNA, 1206 bp, synthetic construct
  source 1..1206: mol_type = other DNA
atggaggagtacgagatagctgtgattggcggaggaccggcaggaatcatggccgccatcgcggcctcgcaaaattcttcaagcgtcattctgcttgaaaagaacccgaagttggggcggaaactcctaaccacgggcggcgggaggtgtaacatcacgaatgcgaaaccaatacgcgagctgctgaagttctaccctcagaagaactttctcaagcacgcgttttacaccctttccaatgagaagctgctaagctttttcgagaacaaaggattaaagttcatcgaggaagcaaacaatagaatcttccctgagactgagaaaagcattgatatcctgaaaattctcaccgattacctggaggacataattatctcctacaacttcgaagtgaagagcatcgatgaggactttgtgatcaatgataagctcaaagccgataagattatcattgccacaggcggcatcacctatcccaaaactggttgcagcatcaagaactactcactgacaaagcagcccatcactgacatcaagtacggactctccccactgattacaaaaaaggacttgtctgacattgctgggataacattgtatgatgtcattgtaagttataagaagactaaggttaaggggaacgtgctcatttcccattttggtctgaccgggcccgccatcatcgacctgtccaatttcatctcggagagcataagttataacctgttggaaaacgataattgcgatattaattttgagatagccattgacctgtgccccgatttcagccgggaaaaactccaggaaaaattcaaccaggactttcaggtgaagggcaaaacgatgatcaagaattatctgaagctctttctgaccaacaacttcattgacttctttctagacgaaattaaccttgacagggaaactcaactgtcacgaatcaacaagaaaagtaagaaccgcctgatcaaaaatctgaagagtttcaacttcaaaatcaaaggttttaataacgacttggccaagatcaccgttggcggcatcgacctcaacaatgtcaatccaaaaaccatgcagtccacaatcatacctaatctgtacttcgcaggcgaagtgctcgaccttcacggacccacaggcggttataacttaaagatcgctttctcaaccgggtacctggctgggctttctgcaagcgagaaatga

SEQ ID NO: 9913 - DNA, 1320 bp, synthetic construct
  source 1..1320: mol_type = other DNA
ttgcaggggttgcttaacgactggcggcggacgcactacgctaaggagacaacccccgacatcgccggtagtgacgtgaccatcatgggatgggtccatgagatccgagatcttggcgggatcatctttgtggttatccgagatgttactggcagagtgcagctgacagctccaagtaagaaggtcgaagcggaaatactggaggacattaggaagttccgaaaagagagcgttgtggccgtgcgcggactcgttcaggaggccccaaaagccccgaacggggtggagataattcccaatgagatcaaagtactgaacttatcgaaccaacccctccccatggaccctactgagaaagttcaggccggaattgatacccggctggattccaggttcattgatctcaggaaggaaaatgtgtcagccattttcaaaattaaggggcagatgttccacaccatcagggactatttttacaacaacggattccacgagatcaatacacccaagctggtcgcttccgcaacagaaggagggacagagctgttcccaattacgtactttgaaaaagaagccttcctgggtcagagccctcagctatacaagcagatgatgatgggcgccggcatggacaaggtctttgagatcgggcaaatcttccgcgcggaggaacacgacaccctgagacacttgaacgaggctatctccatcgacgcagaggcctcattcatggacgatgtggatgtaatgaaagtgttgaatgacatgctgatcaacgtcctcaccgatgtcaacgataagtgcagtgatgaactgtctattcttggatacgaactggacgtgcctaagggaaatttccccgtggtgacatacgatgaggcggtggatatagtcaattcacgcggagtggagatggaatggggggaagacctgagccgggaagctgaaaaggcactcggcgacagcatggggggcttttactttctgaccgaatggccgtctgcaattaagccattttatgtaatgccccaagagggcgacgagaagtactcccatgctttcgacctaatgtataataaccttgagttatctagcggtgccacgcgggtgcatcagcatgacctgctcgtcaaacagatagaggaaagaggcctcaatcctgacggctttggcagctatctcaaagcatttgagtatggtatgccgccccacgcaggttgggggctgggcgccgataggctgactatggtcctcactggctccgagaacatccgtgagtgtgtgctattcccacgcgacagacaccgcctgaccccttga

SEQ ID NO: 9914 - DNA, 1284 bp, synthetic construct
  source 1..1284: mol_type = other DNA
atggaaattctgaaatactccgatattgaccttgtggagactataaagagaagcgaggaagatgtcaacaaagtgctgggcattgttagcgacattttggacaacgtgaaaaacaatcatgatctcgccatccgggagtacactgaaaagttcgatggcgtgacaatagagaatctaaaagtctcggaggacgagatcaaggaagcgtacgacacgctggacgatagtctgctagtcgccctgaagcaagcggcaagcaatatcgagaaattccacaagaagcagatcccacatgagtgggaaatcgaagtaaatccggggattgtggctgggcagatcgtcaggcctataaactccgctggctgctatatccctgggggaagggcagcctaccccagtagcatcctgatgaccgtcatccctgcgaagattgcaggggttaagaaggttgtctgcgtgacccctccccaaaaggacggtaaaattctcgacgctatactggtggccgccgacattgccggggccaatgaaatatacaaggtgggtggagctcaggctattgcaggtctggcatacggcacagaatccatcccgcaggtagaaaagattgtgggccccggcaacatcttcgtgacagctgcgaaaaaactcgtgtacgggcaggtggacattgagtttccagcaggcccatccgaggtgttgattctcgccgacgagaccgccaaccctgagttcctcgccactgatatacttgcccaggccgagcacgatcccaatgccagctgtttcttagtgaccgactctgaaaaactggcgatcgaggtggacgagtttgtaaagaaactgaccgaggttgccccacgccgggaaatcatcgaaaagagcctgtccaagagtggcaaaattattatcaccaacactttcgaggaggctatctatatcacaaacgaatacgctcccgagcatttaatcataagcaccaaagatgatgacgacacattgtcacacatcaacaatgctggctccatctttctgggtagctattcaccagtcgccgccggagattacggatcaggaactaaccacgttctgccgaccggagggggcgctaagatgtatagcggactctctaccgaagcatttatcaagaagcccacggtgcagcgaatcacgaaagagggccttaaggagctgagtaagacgtcggtccccatcgccgagtatgaagggttctttgagcacgcaaactcattcaagacacgcctcaaggacgattggaaatga

SEQ ID NO: 9915 - DNA, 1650 bp, synthetic construct
  source 1..1650: mol_type = other DNA
atgaaaagcgatagcgtcaagaaaggaatccaacgggcgccacaccggtccctactgagagcttgcgggctcgacgacgacgactttaagaagccgttcattgggatagcaaatagctttaccgacatcgttccgggccatatccacctgcgggagctggttgagtttgtaaaggaagggattatcgctgccggtgggattccattcgaatttgacaccatggccatttgcgatggaattagtatgaaccacgagggcatgaagtactcccttccttcaagggagatcatcgctgctacagtggagagtatgactaaggggcatgctttcgacggcctagtcttgatccccagctgcgataaggtggttcccggaatgatcatgggcgccacccgtgtgaatgttccctccattgtggtcaccggcggcccaatgatttcaggggaatacaaaggtaaaagtgccgacttaatcactgtgttcgaagcagtgggggctcacagcgccggaaaaatgagcgaggaagaagtctacgagctggaaaaatgtgcctgccccggtgccgggagctgtagcggactcttcacggccaatacaatggcatgcataaccgaaaccctcggcctgtctcttcccacctgtgcaaccacgcacgcccggaccgaggagaacaatcaaatagccctggattctggtaagcagattgtgaagctcgtggaggagaacatcaagccatctgatattctgactcaggagtccttcaacaatgcgatagccgtggacatggcactgggaggctctagcaacacggctcttcatatccctgctatcgccagtgaggtgaaggacttgaacgtgaacctggagctctttgacgagatttccagaaacgtgcctcacatcgccctcatcagccccgctggtgaagattccatgatggatctgcatttggcgggtggaatccaggcggtcttgaaaacactcggtgacaagattgacattaaccagctgacagtcaccggcaagacaattaaagaaaacctggaaacggtagagaacaagaacactgacgtgatccacactttggataaccccgtccatgaagatggcggaatagcaatcctgaaaggaaatcttgcccctaatggaagtgtggttaaaaagggcgccgtggccgatcatctgatgcacctgaagggacccgcaaaagtgtacgactgcgaggaggacgttaccaaagcaatcttcaatcacgaaattaaggagggggacatcgtggtcattcgctatgaaggcccaaaaggaggtccgggcatgagggagatgctaaatccaacttcagcgctggccgggatgaacatcaaggatgtcggcctgataacagatggccgcttctctggcggaacacgagggccctgtatcggccatgtatcgcctgaagcaatggagaacgggccaatagccgccatcgagaacggcgacataatcgagatcgatattaataacagatcgatcaatgtagaactctcagatgacgagatcgagaagcgattaaagtccgtgaagcaccctgaaagggagcttgacggctggctgcgcctctatcagaaactggtgcactccgctgacaccggggctatcctcaggtga

SEQ ID NO: 9916 - DNA, 1113 bp, synthetic construct
  source 1..1113: mol_type = other DNA
atgtccacactagagaaaatgaagattctgaccgactcggctcagtacgacctgtgcgattacgttagtcaccataaaagcagccagataaatttgcctggaatttatgaggcaatagggcataatggctgcaaaatcccactgttcaagaccctcatgaccaataagtgcaaaaatgattgcaagtactgtatcaaccagtccaaacgcaactttacaagattagaactatcacctgaggaactggcacgcgcgtttctcggctactataaccggggactggtgaacggtctgttcttaagttccggcataagcgatgacgtcgactccacgatggagaagcaaatcgagaccgtgagcctgcttcgaaagaagtatggttacgacgactacattcacctgaaagttatacccggcgctagcagagactcgattaagagagccatggccttggccaaccgagtgagcatcaacattgaggccgccacgtcctcaggacttgccgaactctcctccaccaaggattataataaagatatcctcaagcgcttgagctggatcaactccctccagcataaaagcactacctaccccaactctacacacacaacccagctgattatcggcgctaacaatgaaactgacaaagagattctgagtcggatggagaaaatctacaaaaagtcagacctgaagcggacatatttctctgccttcactcccatcgaggagactgagtttaagaacaaggaagcctgtagcaccgataggacctcaaagctctacaacgcagacactctgattaattcttacaagtacaacgtgaaagaactgatatttgacgaaagtgataagctttctctgacacaagatccgaagatcctcgccgcaaagaatatgaatatttttcccgtcgagatcaacagtgctcctattcgggagcttatcagggtgccgggaatcggggtaaaatctgcgcacgaaatcgtcagcatccgtaagaagaaaccattcacgcacaaggagcagctgcaggagttgggggtgatcacaaacagggctgacccatatattaagatcaacggggaatatcagaccacgttcaatttctga

SEQ ID NO: 9917 - DNA, 621 bp, synthetic construct
  source 1..621: mol_type = other DNA
atggcccgaaaaagtcttggcaagggactggcttcactgattccagatttttacaacgaagacttcgacagcaattccacgcaatcgctcgaggatattatgaatgagactgaaaataacgaagaaatcaaggacagcgaagagaagaatgcccccaaagagaaatcttccaacgatgtgaacaacaacagtaacgaagaagagatttccaaagacgaaacactggaggagtccgggaacgatgagacccagaagaatatctttgaagagatcgaggaagagaagaataatcaggagaagtccatcgacagcaacgagactaccttgaaggaggacgtctcggagaatatcaaggaaagcgagaacatatctatacagaacaacgaaaagaacacatcaacaacccaggagaccaaaatccaggaacacatcgtagaggtgaaggagatcgttgataaaaatcctcgcatcacgctgtggagttcaagatccagcgcggtgttcaggtatctccggaagaccgaaccggagttcagtattagcaaggaggcaagcaacctaattgaggaggctgtcgccaaaaaataccccgaaatatgggcactgttcgacgactactga

SEQ ID NO: 9918 - DNA, 843 bp, synthetic construct
  source 1..843: mol_type = other DNA
atgtccgagatcatcgcagtgatgaaccaaaaggggggctgtggtaaaacaactaccgtggtgaacaccgccacctctctagcagtaatgggcaaaagcgtgctggtggtggacatggaccctcaggcgaatgcgaccacgagcttcgggatcgataagactaaaattgagaatacaatatacgacgccctgatcggagacatctccgtgaagaaagccacaattcccacgtttattaaaaacttatttatcatcccaagtaatatttcgctgtccggagccggaatggagctcagccgtcgggagaactatcacattgtgctccaggaaacacttaaagatgttgtccccctatttgattacatattcatcgatctgcctccgtcactgggggtcataacagtcaatgccctcgtagcttcagacagtgtcttaattcccatccaggccgaatattatgcactcgaaggcgttgctgatttgatcaatactattaagctggtggagaagaggcttaggagtccaacccctataaagggaattttgctcactctgttcgataagagaaccagactgtccaaggacgtgcggaaagagctcaagaactacttcggcgagacaaacctgctgtttaaaaccatcatcccacgaaacatacgcttggccgaggcacccagcttcggcaaaccgtgcctgatttacgaccccgatagcaccggcacgaagtcttacctgaagctggccaaggaaatcatccagcgcgacgagaatgtccagcttaacatcgctaagaccaacatcgacaaagtgaagaaggactctgaagttgctgggggtaagtga

SEQ ID NO: 9919 - DNA, 1302 bp, synthetic construct
  source 1..1302: mol_type = other DNA
atggactataagatcacattaaacagcaatgaggtccccaaaaagtggtacaatatcaacgctgacttgccggtcgagctgccaatgcctaagaacagtgagggaaatgatcagatcagctcgctgcagaaagcctttacaaaagtgggccttgagcaggagtttagcaccgaacgtttcataaagatcccaaaggacgtgcgcaagctctacatgcagatgggacggccctcgcccctcttcagggcaacaaagcttgaggaatacctggacactccggcaaaaatatattacaaacgcgaagacacttcccccacggggtctcacaagcttaactccgcaattcctcaagcctatttcgcgaaaaaagagggcatcgagcgcttaaccacagaaaccggggccgggcaatggggcaccgctctgtccctcgcatgtaacctgcttgatctggaatgcaccgtctacatggtgaaggtgtccttccagcagaaacctgacagaaagagtatcatgaacatttacaacggcaacgtttttgcctctccaagcgaaaacactaaagttggccgggagattctagctcagaatcccaatcaccctggatctctcggtgtggccatctcagaggctatggaagaagctctggagaatgagaaggtgaagtacacactcggcagtgtcttgaatcacgtgatgctacatcagacaattatcgggcaggagctgaaaaagcagttggagattgccggtgaggagcccgatataatgatcgcctgcgccggtggcggctccaacttcgccggctcactgttcccattcattaaggataagattgcggataagagcgatactcagtttattgctgttgaaccaagtgcctgccctacgctgacgaagggaagctatgaatatgacttcggggatgtaaatggatttacccccatgctcaaaatgttcaccctgggtcacgacttcgtggcccctagcgtccatgccgggggactgaggtaccatggcatgtctccacaagtgagcctgctcaccaaggaggggtatatcgagccccgatctgctcaccaaagagacgtgtttgaggctggaataacatttgcgcggaacgaaggcgtattgcccgccccggagacgacccacgcaatcaaagtggcgatcgacgaagccctcaagtgtaaacagactggggaagaaaaaaccatcgtcatgaacttctcaggccatgggatgctggacctgaagggatacgcatcctactttgagggttcaatgcctaactccaagtga

SEQ ID NO: 9920 - DNA, 1074 bp, synthetic construct
  source 1..1074: mol_type = other DNA
atgtacactctgattatcaataatatcaagaacaacaagaagatcatgagaattttagctattgatgtgggaaccgggacacaggacatcatgatttatgacaccgaaaaggagcttgagaacagcatcaagttggttctaccctcgccccacctgtttatcagccaacagataagggatatcgagaacgacatctacttcgaaggcgagatcatgggcgggggaaagattaagaaaagcattattgagcacatcgagaagggatacgaggtcgtgatggaaccgacctgcgctaagactattcgtgacaacctggaacaggtgaagagctttggaattaagatagctgacgagtcaaaaaagtataggaattatacaaaaatcaagatgggtgatatcaacatcacgaaactcagtaagctgctactggattacgatctggaatttgacttcgacaagatcgcgatcgcagtacaggatcatgggtatagcgaaaacatgggggaccgggactttcgattcgaaaagatacgggagaagatctccaaaccaatgtctcccttggagtttggattcaccgacgacctccctgagtactacacccgcatgaatgccgtcagacgcattgtgaagcatgagggcatcgatgagattcctctcatcatggatacaaaattcgccagcatagccgggatgtgtttcgacgaggtggccgagaaactggagagttacatcgtaatagatattggcaatggccataccactgcagcatccatagatgaaggtaaaattcagggcgtgttcgagcaccacacctctagtctcacgggcgaatcacttgagcgctacattaaaaggctggccgacggcatcatcaccaatgaagaagtgtataacgatcatggacacggggcgcacgtgttgaacccaatctccgagatcgaaaaggtgatcgtctccgggccaaaacgggagctcattgaaaaaacaaaccttgactggcaccacgccgcccccggtggagacgtcatgatgactggcacggttggtctgataaaaacaatcctgggctga

SEQ ID NO: 9921 - DNA, 660 bp, synthetic construct
  source 1..660: mol_type = other DNA
atgtttaaaatggactcgcacattcacagcgagtactcctccgactcaaacagcaaaattgacgatattctgaagaaagccaacaaggagaacatcaacatcatctccataagcgaccacgacacggtcgatggcaccagtgaggtgatgcggaagacaaggaatacagacatcctggccatcccctctatagagatctcttcatcaaaaggccacatcctggggttcgggtgtgaggagaagatcccgaaggacctgccacctcaggaaaccatagaccgaatccatgacttaggcggtcttgcaattatcccccatccatactgtttctaccggcatggcctgttgtgcaagagtgacaacgaaaagctgaagatagacgctatcgagactaaaaacgcgcgcttcattgtcggatattgcaatagaaaggctaggaaactgtctattaagaaaaatctccccgcattgggtgccagtgatagccactattggaagttcgtgggggattgttatagcctgattgattgcgaaaaggatatcgatagcgtgctaaaagccatcctcaagggaaaggtaaaagcctgcggaaaaggcacctccaatattctcctgtccaagtacctacttgaaaagaacctcctcaagaagtttaaatga

SEQ ID NO: 9922 - DNA, 276 bp, synthetic construct
  source 1..276: mol_type = other DNA
atggagaacaacactatttttgtgggcagcaaacccgtgatgaattacgtgctggccgtggtcacgcagttcaatgaaggatcagacagtgtcgttctccgcgccagggggaaggccatcagccgggcggttgacgcagcagagatagtcagaaaccgattcgtgccagcttccgatgtgacagacatcaagatctccaccgaggaggtggagaactataacaaggaaaaaaccaatgtatctattatcgaaatcctgattgagaagggcgaatga

SEQ ID NO: 9923 - DNA, 1542 bp, synthetic construct
  source 1..1542: mol_type = other DNA
atgaatgcaaagaatatcgagactctgaagaaggagaacatgaatcttgctgagaaaatctatatcttcgacacgaccttgagagacggtgaacaaactcctggcgtcgcccttaccgttgatgaaaaaatccagatcgcacagaaactgaacaacctgggcgtagataagatcgaggtagggttcccggcaagcagccccggcgaaatggaatccgcaaagagaatcaaaaacagagaactggactctaggctcgtcggtctggcccgttcactcacaggagacatcgatgccgtcattgatgccgatctggactatattcatacattcataggcacgtccccactgcaccgggactacaaactcaaaaagtctaaggaagacattatccacagctccgtcgtggctattgactacgcaaaggaccatggccttacagtggagtttagcgccgaggacgccacacgcaccgagcgagattttctattcgagatattcaacgaggtggtggacgctggtgctgattttctcgatattcccgacactgtcggcgttcttacccccattgttacccgggagttaatcacagacatcaaaaataactttaagaccccgatcagtgttcacttccacaatgatttcggactcgcgacagccaacactctcaccgcgatagagtgtggggccaatcaggcccatgtaacaattaatggactgggggaaaggaccggtaactgctccctggaagaactcgtcatggctctcaagtctgcgtacaacatcgatctgggattagacaccacgcgcctgtacagcctgtcgaacctggttggccgactgacaggcgtgaagatgccagtgaacaaaccaattgtaggggacaatgcattcgctcatgagtccggcatccatgtgcacggaatcctgaacaacgcttcgacttacgagcccatgtcccccgaaatggtgggccactcacggaagatcgtgctcggaaagcacaccggagctaatgccgtgaaggccaaacttaaagaacaccacatagacctgaacgagaagcagtttgacaaggtctttaagaatattaaaagcctgggggataacgggaagtgcgtgacggatgatgatttaatagctattgcgattacagagcttgcgagtgcacgggagaccccaatcgtgattaaggggttgagtatctcaatgggagccaatgtttctcctacggccactgtgaagctagagattgatggcgtggaaaaagagaccgccagtactggagtggggcctgtggacgcagccctcaacgccattcgcgagctgatacaggacacaatggacatcgagctagaagaatataacctggaggccattaccggtgggaccgacgccctcgccgaggtgttcgtcatcagctctgactccgacggcaacaaaagcaccggccgctcaactaatcaagatatcgtcatggcaagtatattggctgtgttggattccatcaataagttgctgctgatcaacaggagcatcctgtga

SEQ ID NO: 9924 - DNA, 1206 bp, synthetic construct
  source 1..1206: mol_type = other DNA
atgtataagaagctcttcatcggcatactcatctgcctgcttgtcatcagcccaattgctgccgccaactggaacagcttcgcggggggagtggaccacaacgcatttcgggaagagagttcggactttgtaacgaatctttggacctttaacatggagtcccctattcactcatctcccgcagtgtacaaagacttcatttatgtggtgtccacccaggggattttgaaagtgattaatatggaaacaggcgagaaggactgggactttgatctggagagcaataccaactcttcccccatcattaacagcaataagctgttcattggaactgaggatggtatcaaagcgattaatatcaataaccataacgaaatctgggattatgactgtgatgatgtggaaagcacccccttcctgtataaagatacaatctactttggcagtgacgacgggcatctgtacggactagataaggataacggcaaggtggtcttcaataagaagctcgatggagaacttaaatcctccccaatcgtagtcgacgatacaatctacattggctctacaaactgcaagttgtacagtatcggaaccgacaaggataaaaattgggagttcacaaccggggacgagatcttatcttcccctagtttcatcaatgacactattgtgttcggcagcaacgacggcaatatctattgcttaaacgagagcgacggggccctgaattggaaagttgacctcaacaataaggtgctaagctcacctaccgtggataatcacgacaataacatttttatagggtccgacgaaggcaacctgacgtgtatcgacaacagggacgggactataaagtggtcgcactcagtgggtggtaaaatacagtcaacccccgccatcaaggataatctcgttgtgttcggttcggacaacggcaatctgtacgttttgaacaaatacactgggagtgaggaatttacctacaacccaggaacaatcctgttcaacagcgccatcaatagctcaccggtcatcaacggcaacagtctgatatttggcgatgatagcggcaacgtctactctctgaacattgacaagcatgaggtcccgggaagcacgcaaatgtatttctccatttccgtgctcataatcatcgtcattgtagctctggttatcgtgcacaaagtcaagggacgcaagtga

SEQ ID NO: 9925 - DNA, 1155 bp, synthetic construct
  source 1..1155: mol_type = other DNA
atgctagagttcaagaagttctggtggatgattaaaaaagaggtcctgagtctgaagcggcaccccgctaggctggtgtctattatcgcctttcccataatcatgatcctcctctttggttacggaatggggggcgagatgaccgacctgccgattctggtggtgtcgcagagtcacgggaacctgaccgacctcacactcgatacgattaaaaccaccgaaacttacaaggtgatcgaggttatcgacgacttggatgagggcaagaaacgcgtggatagcggcgaggtaaaggcagcgatcatcctgcctagcgattatgacgataacagcacacagcaaaagtcggttaccttgtacttggactcctccgaccaaatggcttcccagatcttagactcctcaactcaggccatattctctcgcctctcaaatatggtggcttcccagacgaatgtggaaaacaaagatgccaacatcaatccatccatctcaaacagctttaacaacttcaaagacgacattagcttacatatcaatcgcatctacgggaacattaagtacattgacttcctggtgccggcaatccttggtatgaccgtcatgatgagttgcatgatgggcatgggggccacaatcgccggcgaacgtgaaaccggcgagcttgcacggctgttcatgactcccacaagcgtgagcaccgtgattggagggaaaattgcggccaagctcctaatcgagctgcttagagccctgatactgatcttcatggctgtactccttttcaacgttagtataaagggaggtatcctccagacttttatagtccttgtcgtgggagctctgtgttttgtgggatttggcatgatgttgagcgcaagaacctctacgcaggaggactatgtgcaaatggtcatgccattttcaatgcctatgatgtttatcagcggggtcttctatcctatcgaaacaatgccatggatactccagaaactggcctatatcttccccctcacttacttaaatgatgccatgaggggaattatgctaaagggtcagaccctgggggatgtctggctggatctggcggtgctgctgggcttcacattgctgttcttcattattggcgttaagcggtttaatcgagacgtatga

SEQ ID NO: 9926 - DNA, 1047 bp, synthetic construct
  source 1..1047: mol_type = other DNA
atgaaaaacgcaatcgaaactaacaatcttaccaaggtctacggtaacttcaccgcggtcaattctctcaatctgaaaatccccaataacagcattttcggaatgcttggccccaacggggcaggaaaaaccacaacaatcaagatgcttacttgtctcatccagccgacttcgggcaaggccgtcgtggggggatatgatgtggaaaagaaccctgacgaggtgagaaatctcctaggcatggttccccagcaggtcagtttgtacaaggacctgacagttatggaaaactcccagatgtgcgctgactattacgggataccaagcgatgagcgggacgcgcggatcgaagacctgatggaattggttgacattaagtacgccaagaataagcgagtggggcaactctccggcggccagaagcagaaagcatccctggtagccagtctggtccaccgcccagacatccttttcttggatgagccaaccattggcctagaccctacgaccaaacggactttatgggacctgattcgcgatttgaacgatgagggccataccataatcctctgctcacacgacatgcatgaggtagatatgctctgcgacaatgtgggaatcattaacaccgggaacctggtggcttatgatacaccccagggcctgaaggacagcctcctggaggccaacaagaagaaaatgacagaggccctgggaaagatcagcgatgagacgaagatatcaacgagcacgaaagaagacatcggcaacctgggactgaggaaaatgtcaatactgctgaagaaccagaacgaagaaatcattgaggctatcaaaacatccgatttcgtgaaaaccgtggagattgcccacaacggtcgtattaatttaagaatcgacagttacgatgacatggccgtgcaaaacgtgctcaaggacatcaattcttttggtggggtaataaagagcatctacactgaggaaccttccctggaggatgtctttattaaagcaaccgccgaggtggatgagaatgctagggtgtga

SEQ ID NO: 9927 - DNA, 408 bp, synthetic construct
  source 1..408: mol_type = other DNA
atgacagacaaggaaatatatgacacacagaccatgctgatcaaacactattccaatggtctgacccggaatctgattctgtggattatctccaaggaaaagatccatggctacggcataatgaaaaagctagacgagtttttcaacttcgaggacgtgaactacgagatcaagaatacgagcagtaaagtctatccaatcttgaggaaaatggagaagaacggactcatcatcggcgaatgggatattaacgagaacaataaaagagtaaagtactactctattactgacgagggactgataatccttgataagatccgaagcattatcaactttatctcaaataaccccgcctggctcaacttctacggggatatgggggtggagattaacgaaaagcgcaattga

SEQ ID NO: 9928 - DNA, 714 bp, synthetic construct
  source 1..714: mol_type = other DNA
atgaagctcggattcacgaccctggccctgttcatggaggataacaacaagatcatcgagctagccaagcagcacgggtttgaaataattgaaattctcggcgaagatccattctacgagaaagacaaaggcgagtttaagaactgtggcatagacatgcgaatccatgccgcgacagtcgacatcaacattgcaagcctcaataaaggaatccggactgagtccatcaagcagatgatccagtgtggccactatgctgaatcgatcaacgctaatacaatcacgctgcaccccggcataatcggccggaacgaacctcgcctcaggaaatgggcacttgagattgccgtggagagtatcggaaagatcattgacaacaccaatattgagatatcaatcgagaatatgccggtaagagggaagttcctgggcaataaagtggaggagattgaaatgatccaggaggaaactgggtgcagcttgaccatcgataccgggcacggaaacacctgcggaaacctggaggaaatgctgaatctgaaaaacatctcctactgccatcttaacgacaacaacggtgtcaaggaccaacacattacactcggggagggtactctggacctaaatctgcttaagaaaatagatacagccattattgagttgaacaattttaataatatcctgaagagcaagaaggtgatcgaaaacttatga

SEQ ID NO: 9929 - DNA, 795 bp, synthetic construct
  source 1..795: mol_type = other DNA
atgaagaaagcagtggtcttcgataactccgggacactcattgagcggtaccgcgtgattaaggacgttctgaatggcaacctcttcacagacattaactccctcgatctgatcgacgccgctgacgccctcgcgttggtggtccttcagttcaacacaaataaactgttagatcttgaccagaacaccttgatctctggcgtgatcagggagtacaacattgactttgacgtcagcttttcaaccaatccgatttctaaggccgaagtgaaggagatcatcgataatgagaaaagcgccaccatagcagatatcaccgacgggtttgatatcctgagagataaggtgcctaatatggagctatgcaacggaagcgcactgatcgtggacatggacctaggggtgatagcatatactataacgagcgccggcaagttctttcccaaggtgtttgagaccattgagactctgaaatcacgcggaattgaaatcttcatcgcttccggcgaccgaaagggagcgatcaaccggctggctaacctgcttgacatcccagaagacaatgccttcggcactgtcagtaccaggggtaagtgtgaggtggtgtccatcctcaaggatagtggatacaaagtcatgatggttggggatggtatcaacgatctgttggctttcaaaaatgccgacgtcagcgtactgacaatagaacaacaggaagagatatcgcccaaagtaatggataagaccgaccacatcattgaggatatcttcgaagttacgatgattgacttttga

SEQ ID NO: 9930 - DNA, 1371 bp, synthetic construct
  source 1..1371: mol_type = other DNA
atgaatgtgattgagaagctgaactccattaagaatggagagataacagctaaagaaaatgtggagaacttcatcaaagtgatcgacgagaataacgagagtatcaacgcatttattgaattaaactatgaaaatgcgctgaagcaggccgacgttatcgacgcaaagatagcgaacggagaagacgttggggcgctcgcgggcatagtattcggtattaaagcaaacattaacgtggaggacctgatcatctcagccgcctcaaagactttggaaaactacatcggcagttacaatgccacagtcgtgaaggaaatcctggatgaggacgggattatcatcggtatcttgaatatggacgaatttgctgccggaagttcaaccgaaacctcctactacggccctacacagaaccccgcggccatgggacgaatccccggagggtcatccggaggctgcgccgcagcaatagctgggaagatgtgtgacatctccatcggctcggacactggcggctctataagaaacccagcatctcactgcggggtcatcggcttcaaacccacctatggggccgttagcagacaaggattgcttgacctgtccatgagtctggaccagattggaccgctcagcaatgacgtgagcgggattgccctcacactcaatactatcgccaagtacgatgagacggagtgtaccaccctgaactgggataaacccgatttcaccaacgtcctggatgacaccagcttaaagggcatgaagattgccgtgtgtaaagagttcattgacgtaacagatgatgagattaacaagacggtcaaccaggccatcaataaacttgtggaagcaggcgctgagcttgttgaagtgagctttgactacatcaacctgtgcctacccacatattacctgattaactatgtagaatttttctccgccacgcggaaatatgatggccgcgagtatgggtcgcggatcgaggaggtgtgcggcgatgaggtccttcgtaggataaagatagggtctcacatcgctgaggctgagtttagcggtaaatactacaaacaggccctcaaggcaaggagcgtgatccgcagcgagatcacctccatgctcgagaatgtggatctgattgtcggaccaaccgtgcccaagctgcctcatgaaatcggtgctgaactggagccaatggaaatgtatgcttacgatatcctgactgtgattgccaatctggccggtatcccagccgcaagcatacctgctggcgaggtcgacgggattcctgtcggcctccaattgcaggctaagccgctagacgatctcaaaattatcaaggccatgagtgtgttcgagaacactcagtga

SEQ ID NO: 9931 - DNA, 1506 bp, synthetic construct
  source 1..1506: mol_type = other DNA
atgaccagaatcgggctggtttatgtgaacggggctgtgccggggttcgaggacttcggcaacctgcccactgacatcgtgaaggagaacggacttattgatggcttcaaagctagcaacgaattggacgccttgatcattcctggcggcacactcatcgagagcaatgacatcaacatggatctcaacacggaaattaagaagatggcctccgacggaaagccagtgatcggcatttgcgctgggtttcagctactgtccaatcagatcgatatcgggcgcaagtcccccgtcccgatcgtgaaggagggtctgggcataatcgatgtaaacttctcccccctgatcacaagtgaccgtgtcaaagccaaggtctttaataactcttttctggtgaagggtcagaaagaggatgttgatgggttccatactcacacgtatgggaaggtggaaggagacgctaagccactcttctactcccaggttcaaagaatgaattacggggatacaaacaagaatggcgagtacaacatcttcagcggtgcctgtaatgacgacggcaacgtgatcggcaccatgatccacggcatactggacgaaaatccaatccttatcaagaacctattagagcagatcgacgctgcaaatattgacgacatatactccaggaacatcgagatcaaaaagtacttgcaatccgaggtgggcatcaacaccaacattaaggttcctaaactcgacattaagtgcaagaaacctaaatatctaatgattggaagtaacggaagcgatagtggaaagaccttcattgtcactggcctcgcaggagcgctgcggcgacggggatacaaggtggccctgctcaagattggtcccgatgtacgggacattatacccggcctgtatctgacaaaaggaaagatggagaaattctcaagcattaagatcggtcacttagggtggagtgatattgaatcgaccataagcaaactcaactcaagcaactatgatatcgtgctgattgaaggagtcatgagtgtctttacgggccttctgaatgaaaaggtcccctttagcgccgccgaaatcgccatgtctagcaagatccccatgatattgatttcaggtgtgaacaaggggggcattgaaagcgcggccgttgacctcgtgtctcattctaatatgcttgagaaattcggaatccctgtcaaggcaatacttctcaacaaagtatactccgaggatattttcaacgaggtaattccttacatcaagaataacaccactgtggacacagtgctgaaactgccaaagataaaatcagcagacatgaggggctttattccagaagtggagatccgctatgagctgtttaccaatcacgccatggacctgatcgagaacaacctgaatatcgatgaaattatcaatatggcgagggaagtcgagtttgagaaaatatacaatttcaacgagatcaaaaataaaatggtgaatgggtcgtga

SEQ ID NO: 9932 - DNA, 684 bp, synthetic construct
  source 1..684: mol_type = other DNA
atgaaccaggaaacgaatctcgacaaggccttggaagccattcgcaacggggagttcgtcctcgtgtttgacgacgacgatagggagggcgaagtggatatgatcatcgcttcagagttcgtcacccctaagagcattgccacaatgagagacaacgccggtggcttaatctgcaattgcatacactccgacttctgtgatgagatacatttgccattcatggttgatattatggaggcggccagtgaaaagtacccagagctggccaagctggcacccaacgacattccctatgatgagcggagctcattctcgatctgggtgaatcaccgcaagtccttcaccggtgtcacagatcacgacagggccatgacaatcagtgaatgcgctatcatgatgaaagaaggccgatttgacgagtttggaagcacgttcaggtccccggggcatgtatgtctgctgcgtggagcagatggcctggtcaaaaaccggagaggccacaccgaaatagggctggctctatgcgagatggccggggtgactcccgtgtgtgtggtttgcgagatgatggacggggaaactggacaagcaaccagcgtggcggatgctcggaaatttgcacaggagaacggactgatccttcttaagggcgaggacatcattaataaatacctcgaggactga

SEQ ID NO: 9933 - DNA, 381 bp, synthetic construct
  source 1..381: mol_type = other DNA
atgaagattgacggcgaggttacaacgggtctgggcaaggccgcatactttctgtcccaggagttctacacaaatgaatttaagaagaatttagggttcgtacctttcccaggaaccctcaacgtcatcgtgagcgataactatctggacgaaataaacgaaatcaaaaacaattgcaagaacctaatcaagcccgacaaggggttcggagctgtgaaatatattaaggcaaaattgaacgataacatcgacggcgccatcgtcttcccggcgaaaactacccacgaggagaactacctcgagtttattagcaaaaataagctccgggacgaactggccctgaatgatggggatatagtgagtcttgagtttcagaactga

SEQ ID NO: 9934 - DNA, 1644 bp, synthetic construct
  source 1..1644: mol_type = other DNA
atgaaaataaagactatcagcaccgatgtcctcatcatcggctctgggggagcagggtcaagagccgccatcgaagtggataacgctggactgaaagccataattgtaagcaaaggtctgagctttcgctctgggtgcacgggcatggcggaaggcggatacaacgccgtctttaaaacagtggacaaggacgattcaaaggaggcccacatctacgacacactgaaggggggaagttaccttaacgacgagaagctcgtagagatcctggtgaatgaaagcccacagcgccttatcgacctggagaactacggggctctgttcgaccgccaagagtctggcgagatagatcaacgcccgttcggtggacagacctaccgccggacgtgttatcagggcgaccgaactggggccgagctgctcaacgccctcaaggaagaaatcatcaagagagacattgagtgcattgaggaggtgatgatcacatccctcatcaccgacaaaaaccaggtgattggcgcaactgggcttgacctcaaggattcctccctgatttactttaaggcaaaaagcaccatcctcgctagtggaggggcgggccaactgtaccctgtgacatcaaacaccttccagaaaaatggcgacggttatgccatagcgtacaaggcgggagccaagcttatcgacatggagcaggtccagttccatcccaccgggatggttgcccccgagtccaagaagggcgtgctagttacagaggctgtaagggctgaaggcggaaagctgttaaataaagacggcgccagattcatgaggaagtatgcacccgaaaagatggagctggccacccgggatattgttgcccggagcatttaccaggaaataatcgaggggcggggaactgagaagggcggagtttatctagacattagccacctggatgatgactatatcgacgaaaagctggagacaatggtgttgcagttcaataacgtctccatcgacattaagcatgaacccattgaggtggcaccaactgcccaccacttcatgggcggtttgaaaatcaatacggatgccagcacatccctaaggaacttgttcggtgctggcgaggtgtgcggaggcgtccatggtgctaaccgactgggcggcaacgcactcgcggacacgcaggtctttggaaaaattgccggtgagtccgcaagtaaggcctgtgctgacaccgagatcaagaccgattatgagcaggtcaaacgggagagctccagaatcgagaacttgattaagaaagggaatatcaagccacagaaattcaaagagaacattaagaacctgatgtgggagaaagtggctatcgtgcgggatgaaaaaaccttgaatgaggggctgaaggacctccaggatatgcagaaagaattaaataacctcgatgtgagcgataaaaagcaatacaacaccgaactggtgactgcacttgaagtgatcaatatggttgaaatctgcattctgattgtcaagtctgccatactgcgtagagagtcgaggggctcacactttaggtcggacttccctgaaagtaaggatgaatggaagaaaagtatcatatttaataaagacaagatcgaatttgaggctcgatga

SEQ ID NO: 9935 - DNA, 1305 bp, synthetic construct
  source 1..1305: mol_type = other DNA
atgaatgacaacaccatcctgatcaaaaatgcactgatcctcagtccaaatacaaactttgagaacaaacagtcgatcctgataaaggacaacctgattgccgagatcagccccgacatcgatgagagcaatgtcagtaaaattatagacgccaccgggaagatcctcctgccgggactgatcaacacgcatactcacctgtccatgacactgtttagaggtcttgccgatgatctgagcttggacagttggctaaatgattacatatggcccatggaagctaatcttaacggcgattactgctacattggggcgcttctcggcgctgtcgagctcatcaagagcggaacaaccaccttcagcgacatgtatttctacatggaagatgtcgcgcgggccgtggacgaatcaggcatcagggccgtgctctcatatgggatgatcgatttcggcgatgaagacaagcgcaagaacgagataaatgagaatctcgagctctttaaaagttgcgagggcatgggcaacgggcgaattaaggttttcttgggcccgcacagcccctacactgcctctgaagagttgcttatccaggtccgcgagctggccgacgagtatgacatgggtattcacatccacgtgagcgagacccagaaagagatcgtagatatctcatctgaaaaggggttacggccctttgaatatctggataaaattggattcctgggccctgacgtggtggccgcacactgtgtctggctgtccgacaacgagattgaaatcattaagaagaacaacgtaaagatctcacataatccatgcagtaacatgaagctggcgtccggaatcgccccagtttccaaactgatcgagaacgacatttgtgtgtccatcggaacggatggagcttctagcaacaacaacctagatcttattgaagagttgaagacagcttccctactgcagaaagtgagcactctcgaccctaaagtgttgacttccgatgaaaccctgtcgatgggaacaatcaaaggggccgagacgctcggcctggagagcgagattggttcgatagaggttggtaagaaagcagacattatcttaattgacaccaattcagccaacatgattcctgactccagctctttaagtagcaacatcatttactccgcaaacggcctcaatgtggacacaaccatttgcgacggcaagatactgatggagaataagaagctgaccgtgctggatgaaggggaaatctaccagaaggctaggcaagcaataaaggaacttaaagaagctatctga

SEQ ID NO: 9936 - DNA, 207 bp, synthetic construct
  source 1..207: mol_type = other DNA
atgagcgagataccaaaggcccccgtcgcacggatcattaaggaaagcggcgcagagagagtgtccgaagatgccaaggcggaactagccgcatacctcgaggacgtggctcgcaatgtcgctaaggaggccaacgctgtagccaaaattgcgaaaaggaagaccgtgaaggccgaggacatcaaactggccatcaaaaacctgtga

SEQ ID NO: 9937 - DNA, 864 bp, synthetic construct
  source 1..864: mol_type = other DNA
atgatgaaaatcaagattgcaattccatcgaagggccgaatcagtgaaccttctataaacatcctcgagaaggcagggctcgggctgatcgacaaaaacaacagaaaactaatttcaaagaccttcaacgaagacatagaagtgatgtttgcccgcgcatctgacatccccgagtttgtcaacgatggagtggccgacatgggcattaccggggtggatctgatcaacgagaacgaggccgatgtgatagagctgctcgacctccggttcggtcagaccaaactggttctggccgctccagaagaatccaatataaattccgtggatgatattaccgaagagatgaaagtcgctaccgagttccccgtcctgacgaagaagtaccttgacaagaagggcttatccttaaaaatcgtgaaactaagcggatcaacagaagcggccccgttcattggaatcgcggatttgatcactgacctgaccagtacgggaacaactctgaagatgaatcacctccagatcatcgacaacattctggatagcaccatcaagctgatcggcaataaatatagcctgaagaacaagaaggagctgattgaggccgttagtacaagcattaaaggcgtgcttgacgctgaacggaaaaagcttatcatgatgaatgtgaagaatgacgatttggacaaggtcaaagaggtaatgccttccatgggcgggttgacaatctctgaggtcctgagcaacgagaagactgttgctgtgcaagcagtgattgatgagaaggaagtgtttgagctcgtcaactgcctcaggaatgccggtgccaaagacatcctggtagtacccattgagaggataatctga

SEQ ID NO: 9938 - DNA, 495 bp, synthetic construct
  source 1..495: mol_type = other DNA
atgaagatcgggatcatctacagcacgtcgaaaaaatcaactaaaaaggcctgtaaaatcctagctagcaaaatcaacactgatgtgcagctgataccgatcgaaaaagcaaagacaacctgcattctgaaatataatttcatcatcttcatcgcgtccgcctacaacggcaagtttcagagctccctcaagaggtatatcattcgcaacattaagaccatcaaggagaagcccattgccctggtcattaacagcgaagagaacattaacacagaggacatattcaacaagatctttaccgaggagctggtaaattcctcatgcattaacagcaacttcggatacgagctcaatatcaatgaaggcaatttctttgagaagataaagaccaagaacaagattaagaataaggagaaccttccaagtctgaacatcgacgaaatcaataaatttagtgattacataaacaatttgattgaaaaacgggtggactga

SEQ ID NO: 9939 - DNA, 936 bp, synthetic construct
  source 1..936: mol_type = other DNA
ttgatcaagattttccgcctaaagaacataattagcgtgaaggacttcgagagaaaggatatcgagtatatcctagacgaggcgagcaaactggaaaacattgccaaatctagagagatatcggaagagctgaagggaaaaatcctgggcctgatgttcttcgaacccagcacaaggacgaagatgtcatttgaaacatccatgaagcgtctgagcggggaatgtatcggatttgagaactccggaagcagttccgtgtctaagggtgagagtattgcagacacggcaaaaatgttcgagggctactgcgacgccttagtgatccgccacgagcttgaaggagtcagtaaatttatctccgatattgtagacgtccctgtcattaatgcaggggacggcgctgggcagcacccaacccagaccctcttggacttatacactattaagaacgagatcggcgagattgataatctgaagatcgccctgatcggtgaccttaagtttggccggaccgttcatagcctgacacatgccctcgggctcttcaaaaatataaagatatacctcatctcaccacctgagctgaagatgccgcaggaggtgctgcacgacttgaacaagaccaatgttgagtataaagaaatcggcagcatcgaagaaatcattgatgatgtcaacgtgctgtatgtaactaggatacagaaagagcggttcgccgatatcaatgactacctcaaaatcaaaggggcctacatcatcaataagaacatgcttgaaggcaaagatctcattattatgcaccccctcccacgaattgacgagatagacactaacgtggataataccaagtataataagtactttacccaagctgctaacgcggtgcccgtgcggatggccatcctgaagacactgatcaagaacaaccccaaatga

SEQ ID NO: 9940 - DNA, 1164 bp, synthetic construct
  source 1..1164: mol_type = other DNA
atgagtaacatctttgaagatctggaaaacgatgagacacaggggcccactatatttaaggacaagcgccctctggatcatagatggctgccagacaaactggtgcaccgcgaagagcagattaggcaaatcgccaagaattggattgacgtgttgagcaacgtcactccgagcaacgtgactctctacggtaaaaccggaaccgggaagacagctgccagcaaattcgcccgggagcagctgatcgacatcgcgcgtaagaagaacatttttgtcaaagtggagtacatccgatgcacggattatacaactgagtatcaggtcatcgcagagctgtgcaacaaactcggccgggacgtgccaaatcggggctggacaaagggcgaagtggtcaatacatttcgagacatcttcaagaccaacgcattcggcaagaagctgcatctgatcgtgatcctagatgagattgatatcttactcgataaggacggggacggaatcttgtacacgctgacccgaactgaaaacgttagcgtactctgtatcagcaactacctcgattttaaaaacttgattaaatctagggtgaccagtagtcttaacgataaagagatagtcttccctccctatggcgccgaccagctaagcgacattctgaaggaaagggccgagctctccttcaacgagaacgtcttggaaaatgacgtgatcccactgtgctcagccatggccgctaaagaggagggggacgccaggtacgctctcgacctgcttaagaatgcgggggagctcgcgttcgatgaagattcagagaaagtgaccaataaccacgtaaaaagagcaaaggacaagatagagcacaacaaggtgattgagatcatatccacgttgcccctgcagcagcagcgggttttagagtctatcctgaatctgaccaaacaaaaggaagagattacatcgggtaaactgtatgaagcttataccgacctgtacaagaaggacgcagttacttaccgcagaatatttgacttcattaatgaacttgagatgcttggaatcatatccaccaatacaatctcccgcggccggggcaagggaagaacgaatatcattaagctacaatgtgatgaaaccctgcttgagaccaccctcttctctatttga

SEQ ID NO: 9941 - DNA, 459 bp, synthetic construct
  source 1..459: mol_type = other DNA
atgatcaatgagaaaacaattgagaagtggcttcttgatgaagacatgctgcgggaaatgaagtttgatgagaacgctgattttcactttattatcgagtttccaaaagacaacatcatcgatattgtaaaaccgaagcagaaggattgtatcgtcttcgcctgcgccacccaagtgagccaggagcatattaacttgatggtgagtgcagacctgaagactaaaaaggacttcattctggagctgaacttcggcctcaataatttcttagtggactacgaactgcaaatccacgacgaaatgctacagcagttcatcatcacggaccagatattcgaagatgggctcaccaaggacaactttatcaagacaataaaaagggtcttcaaaagcaaactccactgcatctggctgattgagaagaagttcaacaatccttccttttcacccataaagtga

SEQ ID NO: 9942 - DNA, 1035 bp, synthetic construct
  source 1..1035: mol_type = other DNA
atggtgtacaatgagctcatcaataacatcaacctaataaatataaacaacatcatttcattctacctgtttctatttatcatattcgccctgttactctcactggtaatcgatgtcctctttggggagctccccggaaagatacaccctgtggtcataatggggagcttgatcaacttttttaagaaaaagttcattaatatcaaaaactgggcatccggcttgatgctggttctgtgtacctccgttatctccagtgtcctactgctgatcatctacaccatcattaagaataatattatcctgcttttcctggtcttcagcatcctgctgtcgtccacatttagcgtgaagatgctgctgcaaacagctattgatgtgaaaaacgaccttgataacgacatcaagaaagcccggaagtcagtgagctatctggtgagtcgaaacacggaagatctctcggaatgcttcattgtgtctgccgtgattgaaagtctcaccgagaatataactgactcttacgttgcaccaatcttctattacatcattttcgcgatcttcattctgttttatcccgtgcatttgaagttgtatctgctgttgctcgtacccatgctttataggctgagcaacacgcacgatgcgatgcttggatataaaactcaggagctcatctacatcggtttcctgccggcaaagatagacgacattctcaattatattccttccagaatcgccggcctgtttatcgtgatgtctgcctacttacttaacctcgacgggaaaaacagtttcaaaatcatgatgcgggacgctcgcaagtgcccaagcccaaacagcggatacaccatggcatccaccgccggcgccctgaatatccagttgatcaagaaggatacatacattctcggcgacaacaataaaataatcaccgctaacgacatttccagcgctgtcaaactgagcaagctgtcaattattcttttcacactgactattatctgcttatttatcctaatctacgtgattctctga

SEQ ID NO: 9943 - DNA, 1014 bp, synthetic construct
  source 1..1014: mol_type = other DNA
atgaagttggcgatcatctccgttagtaataagggccagaagctggccttcaagctcaaggaaaagctcaacgaggactcaactatcctgaaggtcgatctgtaccacaaaaatgtgaagaagtactttcagatccttttctacgaatacgatgcaatcatagcaattatggcttctggcattttaatccggacaatcgcccccctaatagaaagcaaggtgaccgatccggctattctgaacattgacgacaacgggaatttcgtgatctctactctcagcggccacctggggggagctaataaactaacagacaaaatcgccaacctgatcgatgcaattccagtcattaccacctccacggacgttaataaaaagcttggaatagacattctcgccaaagatctctatttgtccattaataataccaaggagattctcttctttaacaaatcaatcctcgagggcgaacaactgaatttcacaattaacccaaataagaacttcgactatctgtttaactacttgaaaaatatcaccctggagatcgacgtctcgtttagctactcaaacaacattaatacagacgagatacatgtgaaacttgataaccacaagataatccttaaagagagaaaaatcgtggtgggaatcggctgccgccgaggaaaggaatgcagcgacatttataaaagtctcattaagagcattaacgagctgaacatcgataaatcaaggatcaacatgttcagtagcgccgagatcaagaaaaacgagcaggggatcttagaactaagcgacaagctgaacatacccgtgaatttcgtagagttggacaagctgaagctgttcgaaagcaacgatatccagaagtcggagtttgtatactccaaattcggcatttatggtgtctgtgagcctagcgcgctgatcacggccggttttgacagtaaactgatatataagaagacctcctacgatggggtgactatctccatcgccctgagcaagtga

SEQ ID NO: 9944 - DNA, 246 bp, synthetic construct
  source 1..246: mol_type = other DNA
atgagttcccagattgacgaggtctgcgaaatactggagtacatcgccgataacaacaccgtaccgcgcaatattcgggaggctgccgggaagtccagcaccctgctcaaggacgaggagcaggatcaaagcgtgaagatttcgacggtccttggcaaactagacgaaatcagcaatgacccaaacatccccgtgcacgcaaggacactgatctgggaagtgttgagcaaactcgaatcaatctga

SEQ ID NO: 9945 - DNA, 177 bp, synthetic construct
  source 1..177: mol_type = other DNA
atgtccgacatctccaggaccacaataaacctgcccgtggatctgaaaaaggagctcaagaaactggccatcgacgaagatacgagcctctcggggctaattattaagatgatcaatgagggcatggagaatcggaagaacagcaacatcagctactcagacgaagacaacagttga

SEQ ID NO: 9946 - DNA, 582 bp, synthetic construct
  source 1..582: mol_type = other DNA
atgaaaaagcatataaatgaaattatcaacgtgtctaatgagatttacaacaaaggcctggtgtctggcaaagccggaaatatcagtaagcggatcaagggcagtacgggcgacattgtggcaattacccccacactcaagtccctgtcgtacctaaaggaggaagacatcgtactggtcgacatggatgggaacttgctgactaggggaaaaccgtcctcagagctgaacatgcacttagaaatctataagaagcgctctgacgtcaacgcgatcgtgcacactcacagcacatacgccaccggcttcgcctttagctccaagaagcttaagagactggaagggttcggagagatcaagaatccttacctgaacagcatcgagtattttaaaccagggaccagcgagttggctaaaaacgctagcgagggtataaaaaacgaagatgttctcatccttaaaaatcatggtgtgatatgcgttagtgataagctgaaagaagcaaagctgctctcaattttcgtggaggagagcgccaagacccagttcgtcacatgtatgctcaactccgtggaggactga

SEQ ID NO: 9947 - DNA, 1722 bp, synthetic construct
  source 1..1722: mol_type = other DNA
atgtcaactaacaaaattctactgaagttcgctaagaagggcatcaacctcagccctgaagcctacaataaggtgatcaatgctaaagatcctatcaactacgcaagctccctcatagtgaaactgaagagcgacaaatttagcccaaaagatctgatttcggtgagtggagagatggtggatgaaatcaacgggattaagaaggaagagtccaacaaccagaagagcctgaccgaggatataacacataatgaggagatcaagattaagaaggagagtataaaagaaacaccctcggagatccagccccaaatcaaagtggacacaaaggcagaaaataagcaagatctgtccattatcaaaaaggaagataccatcgacaacctgaaaaaggaaagtgacactcccgagaaatatataaacaaggaaattttagaggccagcgagaccatcaaagacgagaagattaagtttaaaaggaatgagcagaagacgaatgtgaagtacgatttcaaaataatacaggacacttccaagaagtcatatacaagtggtgaaattgagaacctgatttcctactttaagagcagatacgaaaaactcagcaacatcttatccaaacgaccagagcttaggaattatactaagatcgcggatatcgatgacagccaggagaacctgagcctgatactgatggtgcgtgagatccggaccagtaagaacgggcataagatcatcgaatttgaggacgataccggcacaatttcaatcttgttctcacacaataatgaagagctatttgccgaagcggaaaagcttgtcaaagatgaagttattggcgttattgcaaacaaatccgacgacccgggattcgccttcggccagcaaatcattgatccgggtgtgctgcgggttccggataaagagatggacttcggcattgtatttctcagcgacgtgcacatcgggtcgctcacctttctcgaagatgctttccagaggttcatcgactggataaattgcgagtacggaagcgaggagcagcgcagaattgcggaagacgtcaagtacctggtgatcgggggagacatcgtagacggtattggggtctatccaaaccaggacaaggagcttgccatcaaagacatcaccgagcagtacaacgaggccgctcgcttcctcgggaatattcggagtgacatcaagatcatcattgctcccggcaaccacgacgcctcccgggtcgcagaaccacaacccgctgtccccgaggagtacgcaaaggccctgtatgagctggacaacgtggaatttatatccaaccctggggtcgtgtctcttgacggcatcaacgtgctgatctaccacggccgaagcttcgacgatttggtaatggccgtgaaacagtttactcacgagcgcaatgacctgctgatggaggagttgttgaagaaaaggcatctagcccccatctatggagagagaacgcctctggcatcagagctggaagattatttggtcatcgacgaacttcccgatatattccacaccggtcatgtgcacattaatacatacaagaagttcaagggaatccacctcattaacagcggcaccttccagacccagacggaatttcagaaaatctacaatattgagccaacgcctgcccaggttccagtcatccacaagggcaaatataaacatctcaagttcatcgagtga

SEQ ID NO: 9948 - DNA, 501 bp, synthetic construct
  source 1..501: mol_type = other DNA
atggcgaacaagttcgtgcggattattctgatcgttgttctcttcgtgatcttttttgaggtaggcctcttcagtagctacactatcgtcactgccgaagcgccgaatatccaggggctgatcgacatgcagatccagaaaataagctccattctgaaccccgagaccgtgaacgaagccctgataaaagatcccacgccaatcaatattaccaataagaaggacgtggccctcaaaatgcaagacttgagcaaggtggacggcgtgaacgtcgattccatgaatatatctacacgcgacaacccttccaacgataagaacttcaccgtcatcatcgaagccctgggctatgcttcccctaatagtacatcagggcagattattatcagtcaggagccatcttacaagattatcgcttcggcacccgcaagctataggggagagggaataatggccgataccaacagcatgacaatcacgtcagtgcttaaactatactga

SEQ ID NO: 9949 - DNA, 1074 bp, synthetic construct
  source 1..1074: mol_type = other DNA
atgatttacgtcataggtatcgggcaaaaccgggaaaacatgaccctaggcgctttaaaggcgattgaagagtctgacgtcataatcggttataagaagtacatcgatcaaatcgaagacctggtgcaggacaaggaggtcataaaaaagggtatgggtgatgagatagctcgagctgagttcgcgatccagagaagcctgaatgggcagaatgtgagcttgatctccagcggagaccctggcgtcttcggaatggccaatgtactgtaccagatcgtctccaagtacgagggggtggaaataaaggtgtatcccggggtgtctgcactgaactacgcatcgtcccatctgggagcacctcttaacgacttcgccgcaatttcactgagtaacattcttactcccctgtcggagatcgaaaagaagctggaatacgccctcaaagctaacctcgtggtggccatttacaacccgatctccaaaacctgtaaggagcccttcaaaaggtttaagcagtgcgtttttaatatcaaaggcgaagacgccctgattggcatcgttgacagtacatacgagccgccaaaagccagcatcgtgaagatcaaggaactcaccgaagacatggtgaatatgtcttgcacactcattgtgggaaacgatctcacttatgttcaggatggaaaactggtaacaccccgtggatatgtcattaggtccaagattcacgagctatcacggaatcattacgagaagttccttaacggcgagatcgccaatggcccaaatagtgagtgcgagttttatccttgccactacgaaggccagtattgtgacttctgttattgccccttttacccctgcggggacagctcaaccggcggggagtggatcaaaggcaagaacgtgtggaactgtaaaaactgcatctggttgcacaacaaagaaagcatcgagtgccttcgcccacctttcgagaacattttagaggatattgaggatctgaaaagcaagaagaaaacgctgctgaagctcagacgcgcctgtctgttgaagaataacccaaacaatctctga

SEQ ID NO: 9950 - DNA, 603 bp, synthetic construct
  source 1..603: mol_type = other DNA
ttgtccatcaagaacctgctgatagagatgaagaatatgtcggaactgatggtggacctggcctactctgccgttctatttaacagtaaagacgcagcagaggaggtgattactctggagaatgaggtcaacagcatgaactatgaaatcaagaaggagagcctcgtcgcagcccgctcatacgaggacgcggaaaaactcaccgcattgctggaaattgctgaggctgccgaaagtatggcgaatgccgccaaggatctcgctgacctcgttatcactgggttcaagcctcacccggtattcaaaatggtgatggaggagtccgacaaaagcatagtgagagtcacaatcgacgagtcaagcgaactcgccaacaacaccctgggtgaccttctactcgtgaatcggacggggatgcgggtgattgcgattcgaaggggcgtgtcctggatctatggcccagataagaatacaatgctgctggccaacgatgtcctgatccttaaaggcacctacgaaggagccgaattactggaaaagctggctagcggagcttgcagccttgaagatatccccgaagagttggaggaggagttagagtga

SEQ ID NO: 9951 - DNA, 1272 bp, synthetic construct
  source 1..1272: mol_type = other DNA
gtgatatatgtgaagaagcaacagaagaagatccgctcctccctcagcacgcgaacattcagcgaatttttcagtgaacacgactacgtgataaaggagggcctcatcgctctcctcatctgcgccgtgggcgatcttatagccggtattgtcctgggcaagatgaccttcttcctggagagctttcccggcttgttggtggttattcctggagctatcggcatgaggggaaatatcttcggctccttcgcttcccggctgtctacctccctgcacattggcctgatcagcccccactttgagttttcagatgatttaaacaataacatcttttccagcttcgttcttacactggtgttatcgatatttcttgggattgtcgccaagattttctgcatcctcctacactaccactcaatggacctgattgactttatactcatttgcacaattgctggccttatctccaacctgataatgctaccaataactatgtttatttcgttcaaaagttttgaacacgggtgggacccagacaatattacaagtccgatcatcgcagccttcggggacctgttcaccctgcctgccatcatcgtcagcatcttcattttgaaatctctcaatttcaacctcatcgtcaaggatgtaatcctggccatcattcttatcgccgtgctcatgagctttattcattgttacaaactgtcttacgaaacgaagacgattctgcggcagtctaccccaatcctgctgctctgcagcttcttgggaggcagcgcaggcggaattttgaacagttcggtggaaaccttgctgagtaatcctagcctgctgaccctgatcccgctcttctccggtgagtccggcagtctgatcagtatcctcggggcgagaatatcaagcggtctgcatagcgggttaattgagcctctaagcaaacccgagggggagactatccataactttggaatctgttatatcctggcgatcgtgatattccccctcatcggcatcctggcagagacaagctccatctcattcggaaccatcggggtagggtttgacaaaatcatcctaatcagtggactttccggaatcattctggttaccgtcatggtcttcctggtgtactacatatcaacatcgtcatataacaataaccttgatccagataacattgtaattcccatctcaaccagcgtgactgacagcatttctagcttaatactgatttccatgagcctcttgatcctgggtactctgatttga

SEQ ID NO: 9952 - DNA, 867 bp, synthetic construct
  source 1..867: mol_type = other DNA
atggacaacactggcaacatgaccatagaaataacggtggtcctcctgatcgtcctgttgatcattagtgtgactattacctcctacgagaacatcaccgacaaactgatcaagacacaggaaaaggagaatatggaaatacttacctccgagattgtggataacttaatcaacaatcctggagtcccagagaagtggtttgagtacgggaagggcacacccgggcttgccattataaatgagggcggggaaattattcccaatagcgtgagctattccaagcttatctcgctgaaggaaaattacaagaagctggtggacgaccagctcttcaagagcaagttccattcatcaatggagctgatcccgcaaaagaggactattagcagtgtcaaaatcggttctaatagcgagtcgaataacatctttagcgtgaaccggttggtcaaatgcgatttttacaaaaagtacgtgctcaaggacttcaaaaacgatggaaaatgcaaccacaatcatgaccagaagtaccacagttgcaactatttcaagattttcaaaggcaatctcaaaaacagcgattactatctgctaatcgaggactccgagaagtatgacctgaagtatattgtggacaccacacgcgttgtgaaagaaaaatactgggagaatgcgatatcaaacaaaatctacctgaatgataagatcaacttttacgacgacacaagcgcaatcgtatttatccacttcaacaagccacagtctaaggtggtgctcgtatccgttcccaagaacttcgataaaaacaaactgaattacgattatttcatcacgaacgaatgtcagtttgttctaaaagtctggtattga

SEQ ID NO: 9953 - DNA, 939 bp, synthetic construct
  source 1..939: mol_type = other DNA
atgaagatcaactccaagggaaatttaatcgtcggaacgacagctattctcattatcgcgctgctctttatttgcatttttgtggtaacctctatcaattatattcaaaataaaaacatcggcatcgagagtaacgataacttcaaatatatcattgatgattacacccagaacctggagcttaactgccgcgacgccatcgatgaagccacccagaaggtgttcaacggcctccctgtgaccaacagtgagaaccagattaaaaagaacctgaataagatactcgacaaaaagaataaagagtacgaggaaaaatacgacgtgaagattaactccgaaacattgagcgtggaaaataccaagtcaccctggaagatcctttttaagattaagctcaacatcaagaagggggatgagaaatactccaagatcgttgagaagaacgcctccgttgaagggttaagagaccccctgccaatagctaaactcaccatcatgtcaggtattttgacttatgataatcagatccattacaaaactgcactgtccacatacatgctgctccaccatctggattcgcccgaaagctacatcgaggcgacagcccccctgtacatcaaaaaatgcccatatgacccttatatccaccacggcgaccctggcgtcatcgaggactgcctaaagcacggatatttccacgaaagcgcagacggcagttgttacctgtgtcggcttgaggggaagggaaaatgtccgcattacgggctggaagtgttcatacagactcacacgcccctaaaaaacgagtcactgtcttgcccggatcacgtggtcttcgccgaccactataacggtgagaagataaatccagacgactggaatagcctgattctggatagcagccataggaagaagtacgggttgataaatgacggctga

SEQ ID NO: 9954 - DNA, 399 bp, synthetic construct
  source 1..399: mol_type = other DNA
atgtcggacaccgtaagaacgtggagacacattcaacagcggtataatctcatcgggactaaatgtaacacctgcggtgaactgtttttccccagccgcgtggtgtgtcctaactgcaggcggaagggagatctggaacccttccagtttagtggaaaagggaagatttacacatacagcgtcattaggtccgcgccggatgatttcaagaaatcagcaccatatgccgttgctgtcatcgagctggaggaaggcgccaagcttacaagccagctagtcgactgcgacgttgatgacctcgagatcggggacgatgtggagatggtgtttcgaaagatacgcgaggacggcaaggacggcgtgatctcctacggctacaagttcaaagtgatcaaatga

SEQ ID NO: 9955 - DNA, 900 bp, synthetic construct
  source 1..900: mol_type = other DNA
atggataccaacagcaagctctcaaacaatgctggcgtgatcctcgtaagtcatggtagcacgctgccttttgccgaggaggtgttcaccgagatcaaagagaagttcatcaagaagtccgggctcgctaccgaaattggatacatgaaggtctctgaacccactatcgccggggccgtcgagatactaaaagagcaggtggacgatctggacaagattatcgcgcttccggtcttcctcgcccccggaatccatacaaatattgacattccacagctgctggggctggagcctttggaggtggacccacggtgccctgatggaaagtaccctgccgagcactatttgtcaatagctgacgatgtggattttgatggcgagattaggctcctgacgtccatcggaccccgggatgaacttctggacattatcgataaaaggatcaatgaagcattgtccgaaagtaagctggatgacagtgctaagacaggcattctccttgttacccacggttctagattacactacaacaaagaatttgccaccgaactgtatgacaaattcaaaaaaacatgtgacttaccctcgagcttcggcttcatggaactgtgcgggcccagcataccagaaagcattaacaagctcgcagacgagaaccgcctggaacgactggtcgttgtgccagtattcatcgcgccaggcatgcatacaactcacgatatcccccatatactgggctttctggatgaccacgaccataaccacgaggaccacgggcacgaccacactcacgacctcacccctgtggagtttgatggcgagatcctttaccccgagccgatcaagtccgacgacatcttgattgacatgctggtggcaatggtgaatgaggccctatga

SEQ ID NO: 9956 - DNA, 480 bp, synthetic construct
  source 1..480: mol_type = other DNA
atgtccgataaaaaaacaggaattttactcctgagccatggctcgaggctggaggaaggtaagaaagtcattgaggcctacaagaatatgtacctggaggaatttccagaggccatcgtcgattatgcattcatggaaatccggaagccgggcatcccagaaacgatcaagaaactcaccaccgaaaacgatctcgagaagataattgtggtgcccgtatttgtggctcatggactgcatactaagcgcgacatccccgacttgctggggatcgaatccgacttcgacattgaagaagtgagctgccaccatcacgatcacggccacagtcacggccatcaccaccaccaccacgaacacagccatgaggaggaggaggaggagttcgagttcgacggggagataatcctgaccgatcctctaggggtggacaagcgaatgtacgagatcattaaagacagagtttcagagcatctttga

SEQ ID NO: 9957 - DNA, 426 bp, synthetic construct
  source 1..426: mol_type = other DNA
gtgattggccgacagacaatcaacatcaataagagccgggagctcgaagagctctaccagatcatggagaaaaagtgggacaaggagaagtataataccttctttctaggcaagccaaaccccctctccatagaaaagtacatctgcctgcccgccacacagcgctacatgatcattgcttatcctagaaagggtgggaagttcttctcgcgcaacgataaagtggtcttaaccatctgtgatactccggacagcatgaagaatcaaatagtaacctcactggccagggacaacatttttaaactgacataccagattagtgaatccaaaagcaggaacgaggagcggaaagggccaaccgaggaaacgctgcagggatatactgcatacatgaaacaaatccttgaagaggaggacttgctgtga

SEQ ID NO: 9958 - DNA, 1026 bp, synthetic construct
  source 1..1026: mol_type = other DNA
atgctgttcatcctcctggattacatgatcctatttttaagacagctcaaatttatacagcgccaaaacctgtttatcttgaaggttatcctaatatttatgtccctcaaggtcagcgatattggcgaaaaagagctggtgcggtacattatagctaattccaagaagattactccggacgacgcggcaatcacgccattctacaactctaaccttatttcaacctgtgacatgcttatccagtcacgacactttccaaaaaacatgagctattacgatatgggcttcaagagcgtcacagttaacgtgagtgacctggctgccatgggcgcaaaacccctcggatttcttctcagcatggccatccccaagaatttggaggtggacaatttcaaggaaattgtagggggagtgctgaaggcttgcgattattactccatccctctcatcggcggggataccaacgaggcatccgaaatcatcatcagcggaacagcgctggggttgtgcgataatcccctgatgaaaaacaattacaaaaaggatgacctgatagccattaccggagacatcggcctggccgccctggggttcgagatagacgacctcgatagcatctatgtgaagcatgccctaaggccaaaagcgcggatcaatgaggggcagatcttaaagaaatacggtgccacctctgctacggacattactgacggactggcaagtgaactctacgagattaagaaagacggcttcggcttcatgattcatgaagagctgctgggcatcacagacgaatataagaacctggccagtaaccttaacttggattacctcgacctggtcttccacatcggtgaggatttcgaactgctgtttaccatatcaaaggagaacttggagaagctccctatcgagtacaaggtgattggaatcgtatcggattccgacgtgattgaacttactctggagaatgggttcgtcgaacagattaaaaataaaggctatgagcactatgtgggtgagtga

SEQ ID NO: 9959 - DNA, 873 bp, synthetic construct
  source 1..873: mol_type = other DNA
atgctagtgagtaacgacctgtataaaaagtcgtctaagacacagaagatcaggtgcgagatctgtgctaactactgtaagatcgatgagggcaatgttggtatctgtcatcagcacaaaaacattaatggcgagctattcgacgaaagctacggcattgtttcaagcctcagtcccgatcccattgagaagaaaccactgaacaagtttctgccccacacgtcaacatactcaattggagggttcgggtgcaatatgagttgcctgcactgccagaactatataatctcccacgaatatgggaactactccagaggcatcaagataaccccagaggagattgtggaaaacgcaatcaactacaattgcaagagcattgcctggacatacaatgaacctaccatccacttgctcttcaaccgcaagacttctctgcttgctaaacagaagaacctcaaagtgatatatgtaagcaatggatacttcagcgagaagtctcttgaggaggtgctgtgctttgtcgacgccttcaacatcgatctgaaatccatgtccagcaacttctacaagaaggtctgtggtgccgatctggacatcgtgctggataatctgaagcggatttacttcgaaaacaaacatctggagatcaccaatcttataatcaatgagtttaacgactcgatcgacgagattacccaattgtgcgacttcgtggtcaatgagctcgggccggaagtccccctccattttagccgagcgtttccttattataaaatgaatgacatttccccaactaacaccgaaacgttgtttaaggcaaaagaaatagccttaaaaaagggaatccagaacgtgtacctcggcaacatctga

SEQ ID NO: 9960 - DNA, 1254 bp, synthetic construct
  source 1..1254: mol_type = other DNA
atgatactgaaggataaaaacattatagagattaccgaggaactgtcaagtgagtttgaggtagccaaagttttgagaaaatatccaaaggacaccgtgctcattaagaatgtcaagggtttcgacattccagtgatctccggcatatgtaacaccagggataaaatcgccaaatccatcaactgcgaagtgagcgagattacggaaaaaattatcgaggctatggaaaacccaattaaggtcgacaagtttacggatttctcggattacgatagcctggatatcgatctgaataaaattcctattctgacccactacacacgcgatggcggagcgtacatcactgccggtgttgtctttgcacgcgatccggtaactggcatccaaaatgcatcaatccaccggatgatggtccttgacaacaagcgactcgtgatcaggatcgtgcccagaaacctctatacgtacttccagaatgcccagaaggccggcgaagacttgcagattgctatagctatcggaatggaccctgctattctccttgctagtaccacaagcatcccgattgactacaacgagatggacgtggcaaatgcctttaagaacggggagttagagctgatcaagtgcggagagctagaagtgccccaggcggacatcatcttggaggggaagatttccgtgacagagacgatcgctgagggcccattcgtcgatctgactgacacttatgatatcatccgggaccagcccataatcaacctggaaaaaatgcacatcaagaaggacgccgcctaccatgcaatcctgcccgcgggatttgagcacaagctgctccaggggcttccccaagaacctcggatattcaaagctgtgaagaatgccgtacctaccgtggaaaacgttgtgctgaccgaagggggttgctgctggttacattccgtggtttcaattgacaagcagacagagggcgacggcaagaacgccatcatggcggccctgagcgcacatcccagcctgaagcactgtgtggtcgtggacaccgacgtgaatgtcttcgatgccgaggatgttgaatatgccatagccacccgagtcaaaggggacagagacatcatgatcgtgcctaatgtgcgcggctctagcctcgatccagtcgctaagagcgacgggacaaccactaaaatcggagtagacgcaacaaaatccattaaaacactagagaagttcgaaagggtgagtttcagcgagtga

SEQ ID NO: 9961 - DNA, 1026 bp, synthetic construct
  source 1..1026: mol_type = other DNA
atgacaccaaagatcatgatcattctgggtagcggctcggatatcgctatcgccgagaagtctatgaagatattggagaaactggagatcccatacagtctgaagatcgcttctgcccaccgcaccccggacctggtccgggagattgttatccagggcactaatgcgggcatcgaggtgttcattgggatagccggtcttgccgcacacctacccggggccattgctgcctatacacctaggccagtgatcggggtcccagtagacgtgaagacaggaggggtggatgcattggaatccatcgtccaaatgccttatccttcccccattgctactgtcggaattgatcgcggcgacaatgccgcaatcctggccgcccaatttattggcctccacgatgacgaaatacgtcagaaaataatcaacttgagaaaaaattacgccctgaaggttaaaaacagcaacgaggagatcatccagaagattgaagacaagaagttcctccagaatgattttttaagaatcaaagacctaaatatcaatgacatcgaggcggatgagagtgacccatgctgtaagaacaagaacgctgatgtggcaatcatcgttggacggcagactgatgtggtaaccgcgaaaaaggtcgccgtgatcctggaccgacttaaaatcagccatgacacaaaggtggtgtgccccattaggtccaccaaaaaattcaccaactacgttaaggcaatgaaaaacgctaagatattcatcgggatcagctccaacagctctcaggtcacgggtggaattgtgggcctcacggaccggccggtaatcggcgtgccctgcacgaacgaaaacggcgacgattacatgctgaccacagtgagtatgccccccggtgtgcctgtggcaaccgtcgggataaacaacggaaaaaatgcggccgtcctggctggagaaattctgtcaattaataacccttcaattaccgaacttctcggcaaaataaagaacaagaagattaatctctga

SEQ ID NO: 9962 - DNA, 2190 bp, synthetic construct
  source 1..2190: mol_type = other DNA
ttgaaaataacactgatctacctgatcaaactgcgggagaaaatgatagctaagacactcgagaaggaattgaacctatcaaattggcaagtgaaaaaggtaataaagttaattgacgacggaaataccattcccttcattgccagatacaggaaggacgttactgggagcctgaatgatgctacactgaggaaatttgacgagcggctgaagtacctgaggaacttagaggaaaagaaagagaagatcatcaaacggatcaacgaacttggaaagcttgatgataacctcaaaaataagattcagaactccaagactctggtggaacttgaggatctgtaccgcccatacaagagtaagaaacagaccagggcaacaaaggctcgtgagaagggtctggaatctctggcatccatcatccttaaacaagaaatcaaggaaaatgtgaaaaatatcgccaaaaactacatcaccgacgaggtgaaaacactagaagaggctatccagggggcgcaggacatcattgccgaggagatttcgaacaatagcgagtttcgaaaaaagattcgaaagaacaatttctacaccgggcagattgaaaccaagacgaaaaataaggatgaatcgacggagtacgacctttattatgactacgccgaaaacatcaagaagatccccccccacagaatcttggcaatcaacagggcggagaaggagggaataattaaagtcaagatcaactgcgacaacgaggagataatcaaatatctaaatagacacgtgttgaagaacatctcgggcatccctgaaaagatcgagtataacccctatacaacccagattatcaaggagagcgttgaggacgcatacacccgcctgatttccccggccattgagagagagattcgaaactacctgactaagaaagcagaagaaaaatcaatcgaagtgttcgctaaaaacctcaaccagctgcttatggagagccccctggtgggcaaaaccatactcggctgggacccggctttccgcactggttgtaagctggccatcatagacaaaactgggaaagtgctggataccgagctgatctatccaacccagcctcagaacaaggttaccgaaagcatcaagacggtgaaggatttgatcgacaaatacagcattgatgtcatagccattggcaatgggactgcgtcccgagagtcagaggagatcgtggctaagatcatcaagaacaccaacgtggaatacatcatagtcaatgaggccggggcctccgtgtactccgccagcaagtacgccgacgaggaatttcctgacttctcagagggtgaacgcagcgccatctccatcgcccggcgcctgcaagatccactggccgaactggtcaagattgacccaaaaagcattggtgttggccagtatcagcacgacatgaatcaaaaacagctcaacgagacactgactggcgtggtggaaaaggtagtgaacgaggtcggagtagacctcaacactgcatctgtcagtctgctgaactatgtctctggcattggaaacacgaccgctaagaatatcattaactacagggaagagaatggaagtttcgacagcagaaaagagctcttaaaagttaagaaactggggaaaaagacatatgaacaatgcgctggctttattaaggtcaataaccccaagtaccccctcgataacacgaccatccaccccgagagctatgatgccgcgtacaagctacttgagaagctcaactatagcatcgatgatatcggcagttcaaatttaaagctcgacaacattaatctggaagagatctccgtcgagttggacatcggtcaggaaacactcaaagacatcattaaggagctccgcaaacctgggcgtgatcctcgggacgacatgccaaagccaatgctgcgcaagaatgtattgtccattgaagatctggagataggcatgataatgcagggaaccatccggaatattgtggacttcggcgcatttgttgatatcggcgttcaccaggatggactcgtgcatattagccagctcgtcgagaacaaattcgtaaagcatccgctggatatcgtgagtgtggggaatattgtggacgtcaaggtgctggacgtggatttgaagcggaatagaattaacctcagtatgatactttga

SEQ ID NO: 9963 - DNA, 1698 bp, synthetic construct
  source 1..1698: mol_type = other DNA
atgtactggtttttcgtcatcctgtccttcttgcttgcaggcataaaaactcagaagcctaacaagtacaagaaggtgagcgtgatcatcccagcctacaatgaggaagagactgtggccaaggttgtcaacgtcgtgaagaaagtatccttcgttgacgagatcatagttgttaacgacggctcaagcgataacacggagatggaggctctcaaggctggcgcgatcgtgatcaaccacgaggtgaataagggaaaaggcgaagctttgcagaccggctacagggaggcagagtgcgacatcatcgcatttattgatgccgacatctacaatctgacctccagtaaagtggagagtatgatcaagcccattttggacgggggagctgatatcactaaaaccaagttctctcgagccagcggccgggtgaccgagctgactgcgaagcctctgctgaacttcttcttccccgaaattagcttcgagcagccgctcagcgggcagttcgccgcccgtaaggaggtactaaagaagatcaacttcgaaagcgattacggtgtcgatgttggtatcgttatcgacgccgatgtcctgggaatcagcattatggaagtggacattggagctatcgaacacgacatgtctccactgagcgatttgaatttgatggcaaatgaagtggtaagaactattataggtcgcgccaataagtacggacgggtgacaatgatcgacgatatcgggtattacattcgcatgtcgatcgtgggtctgtcgctggtcattcttgggctgtttaccatattctttgtaaagtttgtgcctctggccattggcgtgataatttcaatcataggactgctcatcgccatcttctatatctttaaagtcatcattaaatcaatagtcatgttcaagaagacacccggccgcaatctgctcaaatccttcgtgaaaattcacttcccaatgattatttcaataattatactccttcttatgatcagcacatttctcggggccgcacacttcgaccatggcgtgctgtcaatcgagcccaatagccgaaacctaattatttatgccgatgactcgccaagggatactatctccgtgagaggaccctacacgattgacaccgcaatcgagaatgagtctgggcagatacggatgcccagcgatgctatgatgacactgggcgtcaatatcaatgacacgatcaagcttggcgcgaatacctataaagtcaacgaaaccagattaggggagcctgacattctcaggctgccgattgaggttaaaaagctactccaggtggaaaatggtgaagtgatccaaaacagtcggctcaaagatgtgtttgacggcagcctgatcactcacgcttatgaatataataacacaaccatcaaagagaaatacttcattacaagtaacgaaaaacaaagctccacatacgagatatttctggataacgaatccatcgtgaacagttatggcacgttcaaggacaacggaacgtacgacatctctgtagacgggaactatctcaccagcttcagttacaagaacaacctgaccaaatcatttaagttcgacgggcatgatctggagattgtctttcgcgacacaaactccacctccatcaagcagttttccagtggaaaccagggtgtgttcttaaattttaacttttga

SEQ ID NO: 9964 - DNA, 936 bp, synthetic construct
  source 1..936: mol_type = other DNA
atggaaatcctgaaacctaacgagctccgggagcgcttcaacgacccatggattgcaccatacaagaaagtcttgaccatggtggacggcaacaaggtcgagatcgtcgaataccacccctgcatatccggttcccactggttgttaaatcagtacctgaacaattccgagttgatcgatagcgcttatcgagacggtaacaaacatgtgtataagtgccacgtggggaaagctcccctagacctgaaagcaagctttaacgcagcgggcatcgacgagatcgtggtggctgatgatgaggttaaagtaacccacagcggactcgccggcgccggtgttggagctggaatgtgcagaggcatgggggaaggggtcaagtatattgaactcatacaagttggaggcgggtcaaaggccggaaaagccaccgtcgtaactcccaagcttaacaagatcgtaatcggtgtggatgacactgacgtgaaagatgccggagctacttggacgatggctcacaatttaggggtggagctagccaatgaggggttcgagtacctggatcatatcattgtccagctgtaccctcataatccccacaagacacagaactgtgtcagcatcgccctcacattcgctgtggaggagtctaaaaaggaaaagctgatagacagggttattgaaattctgaagagggacacactctcggacaaaaccgcaattgccatcctggaggggctggatatcccggaaaagctgcggaagtacagtatcgccacaaagagtggcatgatggacatcgagaccgcagaatcacttgccaaggaactgaacataccactgattgccgtgacgggcgagcagggcaaggtgggcgcgctcgcggcgctgggcctttacgatgacgtggaagaggcagtgaaagcctatgataagtga

SEQ ID NO: 9965 - DNA, 423 bp, synthetic construct
  source 1..423: mol_type = other DNA
atggccaagtacgagatcgccgcagtggtggccgaatttaactacgacattacgcaaatgatgttagagctcgcaaaagccgaggccaaaaaccggggatgcgagatcacaaaggtaatcgccgttcctggggtcttcgacatgccgctgatcataaagaagctcctaaaatccgaaaagtacgatgcaattgtcaccttgggcgctgtgatagagggcgcgaccgatcacgaccagatcgtcgcccagcatgctagccggaagattgctgatcttgcgctcgagtatgatacaccagtggccctggggattactggccccggaatgaccaggctggacgctcacagacgagtgaaaaatgcaaagagcgccgtggaagcggctatcaaaatgtgtgaccgcctgagtgagctggacgaatga

SEQ ID NO: 9966 - DNA, 102 bp, synthetic construct
  source 1..102: mol_type = other DNA
atggactttaaaaagctgaccaagatacagtttgccgcactgttcatcattttcatcatggtgctgagcggcgtcgcggggttcctactctacattatctga

SEQ ID NO: 9967 - DNA, 1008 bp, synthetic construct
  source 1..1008: mol_type = other DNA
ttgaacaccagcaagaccaaagacaagtacaagattgctgttattccaggcgatggcataggcaatgaggtcatggaagcggctatctacgttttaaatgccctgaacatcaactttgattacgtgtatggcgaagccggtgacgagtgtctcgaaaagaacggcacggcgttgcccgacgaaacacttgacatcattcgtaattctgacgcttgcctgttcggcgcagcaggggagacagccgcagacgtcattgtgaaaatacgacaggagatgaaaatgttcgctaacctcaggcctgtgaaatcataccccaacaccaattccttgtcggataacatcgatttcatgatcgtgcgggaaaacaccgaaggactctacattgcaggggaagagagttatactgacgagggcgcagtcgctaggcgcatcatcacgcgggaggccgagaagcgcattattgagtacgccttcaaatacgccaaggagaacaacaaaagcaaggtgactggtgtgcacaaagccaatgtactcaagaagagtgatgggctgttcaaggatgtattctatgaggtggcgaaacggtatcctgaaatcgcaacagaggactactatgtggacgcaacagccatgtatctgattaccaagcccgaaagctttgatgtgatcgtcaccacaaacctttttggagacatcctctccgatgagggggctggcctcgtcgggggactggggttaatcccctccgccaatatcggcgaagacgctgcactatttgaaccggtgcatggaagcgccccagacatcgccggtcagggaaaggccaacccaatagccatgatgctgtcagctatcatgatgctgagataccttggggagaacgaggcggcgaatagattcgacggagccatactgaaggttctgaacgaggccgacattctgactggtgatctgggaggctctgccaccacgatggaactagctgaggaggtgaaaaataatctgtga

SEQ ID NO: 9968 - DNA, 480 bp, synthetic construct
  source 1..480: mol_type = other DNA
atgaaaggaacggcctggaagttcggaaacgacattgataccgacattatcgtaccgggccgatatctgatctacaccaatgaagagcggctgtcacagcattgtatggaagggctcgaccccgatttcaacaagaagtgcaagaaaggcgattttatcgtggcaggaacaaactttggatgcggcagctccagagagcacgcccccatagcccttaaaggtgcgggcgtcagtgcagtgattgctgagagctttgcccggattttctaccgcaatgctacaaatattggcatccccctgctcgaggcgccagggatcaacaagctgatcgaagacggggaggagatcgagattgacatgaacaaagccactatcaaatcccaaaatggtgagataatcagcttcaagaagctacctccattcatgttggaaatcctggagcagggcgggttaatagaatacctcaagaacaagaggtga

SEQ ID NO: 9969 - DNA, 1245 bp, synthetic construct
  source 1..1245: mol_type = other DNA
atgcccacaatgtcagagaagatacttgccaaggcgtccggcaaagaaaaggttgaagccggcgatatagtgatcgcaaatatcgacgttgcgatgacccacgatttgacggggcctctgagcgtggagtccttcgaaaagattggagccgagaacgtgtgggacgccagcaagatcgtgatccctttcgaccaccaagttcccgccgatagcatcgactccgccaataaccatatcataatgcgcgagttcgtgaaaaagtacaatattgagaatttttacgacgtgaacgctggcgtgtgtcaccagattctacccgagaagggtcacgtggtccccggagaagtgatcgtcggggctgacagtcacacctgtacacatggcgccttgggcgcattcagcacagggatcggctcgactgatatggcaatggtcttcgcggagggcaacctttggctgaaggttcctgaaacaaatcgattcaacatcacaggagatctcaaggaaaacgtgtatgccaaagatgtcatcttgcacatcatcggggagatgggtgctgacgggtcaacctacaaggcctgcgaatttgccggtgagactatatcaaatatgagtatcagcgacagaatggtgctttgcaacatggcaattgaaatgggcggcaagaccgggctggtggagccggacaaaaaaaccattgattatgtggagaagcattccaacaagccttacgagattttcaaaacggacctcgactcctcctcgctaaacatgattgacatcgatgtgagcaacctcgagcctcagatagcctgcccccataacgtggataacgtcaagccaattagcgaagtcgaccaagagatcgaccaggtctttctggggtcttgcactaatgggaggctgagtgatttaagggacgctgccaagatactgaaaggcaagaaagtagctaaagacaccagaatgctcgttatccccgccagccaggagatctatctgaaagcactggacgaagggctgctgaagatctttgtggaggctggtgcactggtcagcgccccatgttgtggcccatgcctcggcggacacaccggaattattggaccagatgaagtaagtctcagcacgtccaatcggaacttccgcggacggcagggtagcccggatggaaaagtatttctgtcttctgctgctgtggccgctgcgtcagcaattgagggcaagatcgtcagtccagagtga

SEQ ID NO: 9970 - DNA, 1209 bp, synthetic construct
  source 1..1209: mol_type = other DNA
atgagtaactcaatttttaagcggttcaaaaaaaaagagacccctataatcgaggagaagcttcccattctcgaggaccgcatcttctgggtatccacgttacagaagatcgcttttccggtactcaataatctcgcacgggattcgctgagtaaaaacatgcccgtggaatcaattagcgccgaaggtcactcgagcgcttatttcgatgcctttgtcagaatattcaatggaatcgcctcctggctggaactgggcgcggacaacagcgaggaagggaagattcgggagaagtacatttatcttaccctgaaagctatcagcaatgccatcaatccaaaaagcaatgattacatcttcgtggttgaacctaagcagtccctggtggatgtggcgttatttgccgagggattgctcagagccaagaaccaaatttggctaaacctgcccattaaggtccaggcgcggatcatcagagacctgaagagtacacgaatcatcgccccatacgagaaccactggctcctctacacgagcatgatcgaagctgccctgctcgagtttaccggggaatgcgataaagaacggttggtgtacggggtccgtaaatttcgagacgaactgtacatcggagacgcaatgtacagcgatggcgaggacttcgagcttggctactataacagcctgtttatccatcccatgctcaacgacatcctaggcgtcatgagaaaatatggcttggaggacggtgagttcctggatgtgcaactgatgcgcagctcccgcctggcatctcagctggaacgcgtgatctcccccgagggcacttatccactcctgggaaagttcctgtcttataggtgtggggttttccatttgatgtctcaggcctcccttctgaaaatattgccaaagaacattcacccggctcaagtgaggtccgcccttacaaaggtgctaaagactcagtttgagtcctacaataacttcaattcaaacggatggctgattattggcctggagggcagccagaccgacatttcagacgaaaccacaaatacaggtactctttactcatgctgcagcatattcctgccattagggctcgacaggaacgacatgttctggaaggcaccttctgctgagtggagtagtctgaaggcatggaacgggcaccccatacagagggatcagcctatcaacttttga

SEQ ID NO: 9971 - DNA, 1239 bp, synthetic construct
  source 1..1239: mol_type = other DNA
atgaaagtgtgcatcatcgggcaggggtatatcggcctgcccaccgccgccctgttctccaagaaccattgcaaagttgtgggagtcgacatctctgagaaaatcatcaataacttaaacaagggcattgtgcacattgaagagcccggaatcggggacctaattaagaacgccgtggaaaagaaaagctactcagcctcactcacgccgcagaaggctgacgcattcattattacagtgccaaccccatacatcgcggagaattatagttgcgacctaagttacgttatcgacgcctgtcactcaatactgccctacttggagaaaggcaatatcgtgattattgagtccacagtggcccccatgagcactgacgaacaaataaagcccatattcgaggaggccggtttttccatcggcaaggacctctaccttgctcattgtcctgaacgcgtgctccccggcaagattatgtacgagctggtcaacaataaccggattattggcggcgtgaccgaagaatgtgctaaaaaggctagtgaagtttacggagagtttgtcgaaggtgaactgatactgactgaggccaagacagccgagttaagcaagtgcatggaaaatacgttccgggatgtaaatatcgccttggcgaatgagcttaccaagatctgtgctgagatcggcgtcaatgcacttgatgtaatcgagatggcaaacaaacacccaagagtcaacctgcattccccgggaccaggggtcggcggacactgcctggcaatcgatccttacttcatttatgccaaagcgcctgagaccgccaagattatcaaactggcaagggataccaacaactccatgcccgattttgtatgcgataacattaggaagatcatcaaaaagggtaagatcgctgtgctcggggtgtcttataaaggaaatactgacgatgatcgagagagcccggcttatgaaattatagataagctctcgaacgactacgagatccagattcacgaccctcacgtggaaaaccctaactacgtcaacttcgacatcgcagtgaaggacagcgacctgatcttggtgctctgcgaccataacgagtttaaggatctggactacaatctgataaagaagagcatgaaaaaccccgtcatcttcgatacaaaaaatataatcaaggaagttccatctgagattaaactgtataattacgggaacctctatgagctgaactga

SEQ ID NO: 9972 - DNA, 840 bp, synthetic construct
  source 1..840: mol_type = other DNA
atgaagatcctgataactgggtcgaacgggatgctggggtatgacttgcaggaggttctcaggcggactcacgagctcatcctgacaacttctgagacattagatatcacggacaagaaacataccatggagttcatttccaacaagaagccggacatcgtgataaatagtgcagcctataccgacgtggatggttgtgaggaaaaccaggatattgcttatacggtcaacagcgagggagtgaagaacctggctatcgcatgcaaggagatcgactgccctctcgtccacatcagtaccgattacgtgttcaatggtaagagcgacaagccatggattgaggaggacaatgtcgatcccatatccgtgtatggcaaaagcaagcttaggggagaaaaatatatccttgaaatcctagacaagttctttattgtacgcacagcctggctgtacgggattaacggccgaaatttccccaaaaccatactcgaactggccaaaaatcattctgagatcaccgttgtctacgacgaaatcggcacacctacatacacgcaagacctggctaaggcgatcagcgaactgataaaaactgatttctatggcatttaccacctaaccaactccggcagttgcagctggtgtgagtttgcaagatacatctttgaggtggccaacgtggatgtcaaggtgatcccagtgaccgccagcgaatttgcccgctccgcgtcaagaccaaactactcagtattgaagaataaaaactggattaaaaacggattcaatcccctccggaattacaaggaagccattaaagaatacattgagctgatcatctga

SEQ ID NO: 9973 - DNA, 450 bp, synthetic construct
  source 1..450: mol_type = other DNA
atgaacaaaaaactgattcttataattgcaagcatcgtcgccttgtttagcatcgcctcggtctccgcgggcttttttgatttcctgcattgggacgacgacagcgacaatatcaacgtagtggaggatggccaatattgcacagtgaaccaggtgtcagcctatattaaggagttccataaactcccatccaactatatcaccaagaaggaggctcagagcctcgggtggcacggcgggcctctgaagaagtacgcaccggggaaaagcatcggaggagacaccttcacgaacaggcagcacattctacccgatagtgattacaagtacatcgaatgtgacataaatgctaatggaaccttccggggtgccgaacgcatcgtgtacaataccggcaactataaggtgtactacactgacgatcactacaacacattcactgaggtttga

SEQ ID NO: 9974 - DNA, 231 bp, synthetic construct
  source 1..231: mol_type = other DNA
atgctcatagatggcaaattgattaagacagaggggcacgactatctgataaaaatcttaaacctgcccgactactacggaaaaaatctggatgccctttacgactgtctgtgcgaaatggactgcgaaattcagctcattaatccaaagtatgtgaacaaggacatcatcgataccttcctggatgcaagcatcgagaacgagtttctaaagttcgagatcctctactga

SEQ ID NO: 9975 - DNA, 867 bp, synthetic construct
  source 1..867: mol_type = other DNA
atgaagggcatagtgctggcaggggggtccggaacccgcctttatcccatcacaaaagctgtgtcgaagcagcttttgccgttatacgacaaaccaatgatttactacccgatatccgtactgatgcttgcaggaattaaggagatcttgattatctcaacccctcgggatctgccaatgtacaaagacctgctaggctccggcgccagtttcggcatcaaattgagctacgccattcaagagaaccccaacggccttgcagaggcgttcataataggtgaagacttcatcggaaacgataacgttgccctcatcctcggcgacaatattttccatgggcaccgcttcaccgaaatcctggagagagcaacgaaactggacgaaggtgcgattatcttcggttattacacgaacaatcccgaggcctttggggtggtcgaatttgatgacaattggaacgtcctgagcgtggaggagaaaccaaaaaaccctaaaagcaattatattgttcccgggctgtatttctatgacaacgatgtgatcgagatcgccaaaaacgtgaagccttctgaccggggagaggtggagatcaccagtgtcaatggggagtacttaaagaggggaaagctgaaggtcgaactcctcggccgagggatggcttggctcgataccggaactcacgaaggcctgctggaagctgccaactttatcgagacaattcagaagaggcagggcctgtacatcgcctgcctggaagagattgcctacctcaagggctacatcaataagaagcagttgctgaagactgcggaggaactaaagaagacagattatggtcagtatctgtttaatctcgctaagatgtga

SEQ ID NO: 9976 - DNA, 561 bp, synthetic construct
  source 1..561: mol_type = other DNA
atgggcaagttcaactttatcgagacggggatcgaggagatgtttgttgttgagcccgcaatcttcgaagataatcggggatatttcatggaaacatacaacgagaaagatttcaaggacgcgggacatgacctgaccttcgtgcaggacaatcagtcaaaaagcaggaaaggggtgctgcgcggcctccacctacaggtgaaatatcctcaaggcaagttagtgcgagtgatcaatggggaggtctttgacgtgggcgtagacctcagagccaactcccccacttacggtaaatggttcgggaccatcctcagcgacaagaacaaaaagcagttgttcatcccgccaaagtttgctcacggattccttgtcctgtccgacgaagccgaatttgtctataaatgcacagaattttaccacggtgaggacgaaagtggaatcaagtgggacgatgaggatatagccattgactggccactgaacgacattgatgagataattctgtcggataaggataagaaatggctgggcttcaaggagagccagattaagtacaagtga

SEQ ID NO: 9977 - DNA, 1008 bp, synthetic construct
  source 1..1008: mol_type = other DNA
atgtcaaagatacttgttactggcggagcaggattcattggaagtaattttgtccgctacatggtgaacaagtactccgaatatgaaattgtgaacctcgacgctcttacctactgcggaaacctcgagaatttaaaggacatcgaaaagaacgacaactatagcttcgtcaagggcgacatcagagacaagaacatcgtcgatgacctggtgcagcaatgtgactacgtgattaatttcgcagccgaatcccacgtagacaggtcaataaccgacccagagatatttatcaagagcaacgttcttggcacacaggtgctactgaacgccgcgaaaaagtacggtgtggataaatacatccaaatttcaactgatgaggtatacgggacgctgggaaaaacaggctatttcaaggaaaatacccccttacagcctaatagcccctactcggcgtccaaggctgggggagatctgatcacgcgggcctacagtgagacctttgatctgccgataaatatcacacggtgcagcaataactatggcccttatcagttcccagagaagctcattcccctaatgatcagcaatgctctggaggacaagaaactgcccgtgtacggtgacgggaaaaacatcagggattggctgcacgtttacgatcactgccgagccattgatctggtgttgcatgagggtaaactgggggaagtgtataacatcggtggcaacaacgagaagcagaacctggagatcgtcaaactcatcctcaatcagctcaataaggatgaaagcctgatcaaatttgtgaaggaccgtttggggcatgatcgccggtacgccatcgacagcaacaaaattcaggaggagttgggctggtccccaaagtacacattcgagatcgggattaaagaaaccattcaatggtatctggacaaccaggagtggacttccaaggtcaaaagtggccagtacaaagactattataataagatgtactctggcagatga

SEQ ID NO: 9978 - DNA, 318 bp, synthetic construct
  source 1..318: mol_type = other DNA
atgattattgtgtacggcaaatatagcatatatctgctcggaggaatggaaatgcttgagcagtacctgccctttgtggggctgataatcttcggaaacattgagaaccttgtactgagcagccaaggggtcgtggcaggcgtcaatccagttaagctcgggatcgtgtccatcctatttgtgatgggctggttattcatcgggacagttggtacctcaatgctgatgcagtacgtcgacttcatcgatttcatcggaggtctggccatctttatcttgggcctccaggcgatggtggaaagtattcggggcgtgtga

SEQ ID NO: 9979 - DNA, 279 bp, synthetic construct
  source 1..279: mol_type = other DNA
atgaaggaactaaaaccatttctggcactgttggtctttggcaacattgagaacctgatcctggccgcgcagggcgtggccgctcatgtagacccgattatcctcagtatcttaagcctgatcgcagtggtgtgctggcttctgatcgggacgttcggaaccaagctggccatgaaatacagccggtatattaatttcattggcggtttcgccatctttatactcgggatacaggctatgatcgagtccctccccggaatgcttacattcttccactga

SEQ ID NO: 9980 - DNA, 1080 bp, synthetic construct
  source 1..1080: mol_type = other DNA
atgagatattttaaacaccgcatctatggcgcactgttcaagcttttcaaagacaccatcatcaagaagaaccgggtgtccttcatcgtcgactcaaaggaaagcttcaagggcaatctggattacatccagaaggagttcgaaaacagaggaaacttcgagtttcattacttctacaagaacaaacttagcataggcagcttccggaagttgagctccagcaaatttatatttttgaacgacaacttttttccactcgcattcatggaatttcaccccgagaccacaattgttcagctgtggcacgctccaggggcctctaagaaatttggggggagcgtggacattcaaaacagggaaatcctggagaaaatttccaaaaatactgactacttgattactacgagcgtcaatatcaaggattattactccgaggccttccaaatgcctttaaacaagattaaatcactcggtatcccgcggatcgactattacttcgaaaatcatgacgtcaataccctgaagtccaatttccttaataaatataacatctcaagcaataagaagatactgctctatgctccaacatttagggatgaggaaaaatacaataacgtattcaactacctcaacctggaggagttcaacgagaatcttggtgacgaatacattctggcgctgcgcctgcaccccaaaatcgagaacttctacaagaacgacatttcggacaatggaaactacatcgacgtgagcgactatgaaagtgagcaggaactcatgctgatcagtgatatactcataacggattattcctctatcatgatcgaatttgccaccctgaataagcctataatcttcttcacatacgacttagatagttacctgtccaacgagcgtggcttctattacgattttaaaaaaactgtgcccggccccattgttcacacatcacaggagttgatcgatgtgattaaaaagaacgagtttgataagagtaagatttcggagttcctgaacacccagtttgacctaatcgatggagatagtagcaagcgaattgtggactttctactcaagtga

SEQ ID NO: 9981 - DNA, 960 bp, synthetic construct
  source 1..960: mol_type = other DNA
atggacaacattaatgtcagcgtcatcgtgccagtatacaataactgtgagtatatagagtccacactcagttcaattatcaaccaaaatttcgacaacttcgagattatcgtgatcgacgatggatcgacagacaacagtctggaaattgttaaagagaagctcagcgcttcagatattagctacctgatcatccatcaggagaacgccggagtcagctgcgcgaggaaccggggaattgaggtggcttgtggtgattatctggtgtttgtggatgccgacgactacatcagccagaaccacctgtccgaactgtacaacggggagactgatttcagtctcattcagctggttaagagggaggggaatgacctaagcatcccttatcatttctccgaaagttcaatctcctgcaacgactttattaaaatggagcttaacatggaaatcccctttaacttctgccagttgatgtataagaccgacatcgtgaagaaaaacaatattaagttcacgcccaatattatctacggggaggatacagagttcgcacttaaagcactgtcctttggtgacagaatatccataagcaatgaagtaacgtactactacatccagcacgagcaaagcgcgatccgcacctctgaatttaagcggtttgagatcgtcggcatcttcgaaaacctagcccagtactataagaaccagggcaagactgacctcgccaatctgatcattacctctcgaatcccgaaagctatatttggcaatatgaattattttttctacaataactacgatttcgacgacgtgatcgccaaaatgcaccagctcaacctgtttaccaagttgtctaaattcgaaggcgattttaagttcaagttcaagataagactgttccttttaaacccaaagatttactataagatatggcgcaaagtgaaaaattcgatcgattga

SEQ ID NO: 9982 - DNA, 960 bp, synthetic construct
  source 1..960: mol_type = other DNA
atgaaggtgtcagtggtaacaccaaactacaacggggagaaattcctaaagacctttttgaagtcccttaacgaggacagtcagtacatcggagaggtgataattgtggacaacggctcggatgacggtagtctcgactacctgaagaacaatagcttcagtttcccattagtactgatcgaaaacaaggaaaacatcggattctcccccgctgtgaaccagggcatcaagatctcgcaaaataatctgattttctcaatcaacaatgatactgagatcaaaaaggggtcaattaaaagccttgtggacctgatcaactccagcgatgatattttctctgttcaggctaagatgctccagtataacaataaaaacctaattgatgacgtcggagacgagtacaatttgctcgggtggacgaagaaaataggcgagaatcaccacagcaatgaatacaacaaagtcaaaaggatattttcttcctgtgccggagccgcgatgtacaacaagtccattctcgacgaaatcggcctcttcgacgataacttctttgcctatatggaagatgtggacctggccatccgctcccacatcaacggttataggaatttgtcatgcccggacgcgatcgtttaccatattgggagcgcaacaagcggtagcagatataacgagttcaaggttaaactggctgcacggaacaacgtctgggtcatctacaagaatttacccgtgcctcttaagattgtcaatttcatttttatcttcctgggcttcctgatcaaatacctgttcttttataaaaagggattcggcagcacttacctgagtgggattcgagagggcctgtccgccaaaagtaagatcagcaaagtgaagtttgagagcaagaataccaagaactattttaagctcgaatttcgcctgataataaataccatcaagtttctgaaacggtga

SEQ ID NO: 9983 - DNA, 858 bp, synthetic construct
  source 1..858: mol_type = other DNA
atggatctgtcaattgtaattctgaattaccagacctttgagcttaccaagaatacgattaactctatatttgagtacgaatactcctttgactatgagatcctggtggtggacaacgcatcaggtgacgacagtctggttcgcctcaaggagtacttcggcgacaaggtcaatttcatcgcctccaaagagaacaatgggttcgccgccggcaacaaccaggccttgaaaattgcaaatggcaaatacatcctgctcctgaatagcgacacgatagtttgggaagacacactggagaatatctacaactacatggaaaagcacaacgacgtgggggtcagcgggtgccgagtgcttctggagaacggcgagctggataaggcctgtaagaggagtttcccgaacgtgaaaaacagcttcttcaggttattccatattccaaccagcagcaaggataatgattataacctggacaatcttcccgatgatggaatctacgaaatcgactgtctcactggagccttcatgttcatgcgggctgacgctctaaaagacgcgggactactcgatgaaacattcttcatgtatggtgaggacatcgatttctgctttagagtcaaaaagactgggtggaagatcacatactacggcaagagcaagatcacccacttgaaaggagcctccagtaagaaacaaaaatcgaagctcatctatgaattttatcgggcaatgtatatttattacaaaaagcaccatgctgatgactccctgtttctcttgaactggattgtgtactttggcatagcgatcctgtgcgtgctgaagctgtttttaaacctctttaagaagaaagattga

SEQ ID NO: 9984 - DNA, 1404 bp, synthetic construct
  source 1..1404: mol_type = other DNA
atgattaaggagaatcagaaactgcttaatttctcactggtactgatcgatgtgatcgtcattggactggccctgctctgcagcctctggctacgattcaagactactctattcggtcccatcggcggacatctgggcttctttaactacctccttttcttcacatttgccgtgatccccgtgtatctaatcctctattttgcctttgggctgtataagccgcgcagaacttacaagaacattttctcagaggcaacacagctgatcaaagtcaatatattggcctttatcacactcgtttccatcctcttcattataaaccaacctgacttctcgagaatcatgctgattcttctcgccatcattgcttcattcttcggcatcatcgagaggtttaccatccgcaccatcctgaggaaaatgcgaattaataatcgtaatattaagcatattctgatcgttggggataacgaactggcgttcagctttgctcgtaaaatccgggaaaacccatacttgggcttcgtggtcagcggctttctcgggcggtccgagcacataggtcgggagatagacgggtgcagcgtcatcggaagctttgaggacatcgacaaaattcttgacaagaaccgatttgatagggttgtgctggctatccctctgaagtactattacaaaatcaacgacctggtggagtcctgtgaaagggtgggaatcaaagcggagattattcctgattacatcaggtacttcccagcccagccttcggtggacatgatcgaggacataccgattatcaacataagatacgtgccgctggatgacgactttaataagttcttgaaatacctgagcgattacattatttccatcatcgccattattatcaccagccccataatggtagtcaccgcaattgccatcaagttgagcagcaacgggccaatcatatttaagcaggagagaatcggctacaactccaagcccttcatgatgtataaattccggagtatgaaggtgcaggaccccagtgaagaaaaagccgaatggaccacaaaggacgaccccagaaagacgaaagtcggacaatttatacgcaagacaagtattgatgagttaccccagttcttcaacgtgttgaaaggggacatgagtgtggtcggtccacgccccgaacgcccatacttcgttgatcagtttaaggaaacggtgccaaagtatatggtcaaacaccaggtgaagcctggcttaaccggctgggctcaaatccacggttgccggggagacacgtccatcaagaaacggatcgaatatgatattgagtacgtagagaactggcacatgggcctggatctcgcaataatgattaagaccgcacttaagaagaaccctaatgcttattga

SEQ ID NO: 9985 - DNA, 2625 bp, synthetic construct
  source 1..2625: mol_type = other DNA
atgcaggaaaagattctgaagctttatgagaaaatcaaagaccagctgtccgaagacgaatttcaagccgagatggccgagattcgggaaaataacgcggacgtcacattcttcgatgatttggacattgcacatatggtgctgcagaatcacggcatcgaaaacacaattgcgcagaaagaagaagacactaaccagctcagctttgagagcagcgatgggaccggattcacaatgaccgaagaaatcttggagaagtataataaggtgaaggacaaaattagcgaagaggagttcctggctaagatgaaggttcacgccgaaaagaatgagcacgcctccttcatgaacgacgttacattcgctgacatggtcgtgggcgagtttataacggaggaggtcgagagcgtctcccagagccccgagttttccgataaagcgataagcgatcttgaggaaaacagcaaagacgtgactgtgagcggcagggtcatatccatttccaaccccagatcttttaaaacccggaagggacagagtggagaggtgtgcaatgtggagctgaaggataactccgggtcactcagggctgtgttttggacgcaaaatatcaagctcctgaagaacgtgaatgagggggatatcatccagatcaagggggtggatatcaaagaggggtactcgggcctggaagccaatctgaggccacgctctatcctggtgcacctcgaggaggacacctcaaagttccccgaatacaaagaggacatcaccgatattgccgacattaaaccagacacgaaagttaacataatcgcaaggataatcagaatccccaccatcaggacctatgagaagaacggcaaggaggggaaggttgcctcgattgaactgcaggactactctggcaaaatcacttacaccctatggaataaaaatgtggagctcattaacgacctgggcctggaagatggtgactcagtgaaaatcatccaagcccaggctcgggagcgcattaacagggatggcggatcggagctgtccttaacccactgggatggacgcatcatcaagggggaatttgacgtgccggaagttaagcaggagttcacgcctattggcgatgtattcgaggcgcaggatgtgtctatcaagggcatcgtgtcacgactccaggacatcaaaacattcctcagaaaaagtgatggttccgaaggaagactacggaatttcgacgtgcgcgatatcacaggcgagatacgcgtaactctttggggtgatgacacaactctacccatcaataagggagacattattaaaataatcgggggtaacgtccgatacgacgagtacacacagagtcaatactcaatgaacactaactttaacactcagatcaccattaaccctgagaatctgtctactgaagagctggatgagctgaacacactgagagaggagttacgccccaccccaatcggagaaatttacaccattgatgacgacggcattgagatcgatgtacgcggtagaattttgagcgtggatgacgtcaacgaatttcagagagacgatggaagtgtgggcattgtccgttcaataatcttcgccgatgaaagcgggaaggtccggttgtctctgtggaacgagcgggctgaagaggaatatatagtaggggacgcctaccagattgagaacgcacgcactcggctcggcatgtatagcgttgacctaaatatcggtagtggggctcggctgatcaagctttcagaggaacaggcctccagcatgttcatcccagagctctccacactggaaaaggccctctacgactacaagaagatcgaggagatcgacgaagatgaccaggacatcataataatcgggcgcgtcatcgaattaaatgatattcggaacttcgaaagagacaatggtgataccggttcagtgcgaaacattgagctggccgatgaaaccggatcgatgagggtggtgctctgggacgacgacgcaaagcgcgagtttgagatcggccagcccatcaaattgcaaaacccacgtttcgacttggatagggacaaccgtatcgaggcaatcgtcaaccgatccacggccattcttgagccaagtgaaagtgaaatagagaagttacccacgcaagatgagctgatggaggcaatctatgtgccgaaacctattgaggcacttacagaggacgatgttaatgtgtgcgtaaccggcaccatcagtgacatcgagagcgacagagttattcggaagaaatgcccttcttgtggaaataacatagaggagagtgaggacgagtacatctgcgacaactgtggccatgtcttcgatgaacctcgatatctcctcatggtgccgctgaggattgaagatgataccggcagcataaaagtcactttctttgacaagctggctgaagaacttattggaatgaacaaggaagaaatcatcaacattatcgaggatggctatggaattgaggacaaactggaggacctgaatgggcagaccatcgaaattatagctaatgtgtcctttgacgagtacagcgaagagaacaggctgaatcctaagaagatcttgagcaagtatatttga

SEQ ID NO: 9986 - DNA, 936 bp, synthetic construct
  source 1..936: mol_type = other DNA
atggtggagctcagcgacctgcccggtgtgggagaaaaaacagcagaaaagctccgcgacgcaggcttcgcggacatgatgagactcgccactgcgaccgccaaagagctatccgtaaaagcagaaattggtgaaggggtggccgagaaggttatcgaggccgcccggaggtccgagaacatagacttcgagacggcactggaggtggatgagcgacggaaagatgttggtcacatcacggtcgggagccaggagtttaacgacctgattgggggagggatcgaaacccagtcaatcaccgaagtcttcggcgaatttggatctggcaagagtcagatctctcatgagctggctgtcacagtgcaattacctgaagaattgggcggccttgatggcgaatgcgtatttgttgatactgagaacacattccggccagagaggatcaggcagatagccgagggtttcgagctggatgtcgaggaggttctgggcagaatccatgtggctcgtgctttcaactcgtcccaccaaatactcatggtggacaaaattaatgatctcatccagagtgggaagaatgtgaagctggtcattgtggactccctgatggcccacttcagagccgagtacgtgggacgagagagcctggccgtaaggcagcagaagctgaatcagcatctccactcacttcagcagattgctaacacctataacgtggccgtctttatcaccaatcaagtgcaggctaagccagactcattctttggcagtcccacaaaagccatcggagggcacgtgctgggacatgctagcacttaccgcatctggcttaagaagggattggcgggcaagcgcatcgcacggctagtggactccccgcacttgcccgagggcgaatgtgtctttaaaattaccagcgaagggattgtcagctga

SEQ ID NO: 9987 - DNA, 906 bp, synthetic construct
  source 1..906: mol_type = other DNA
atggacgcgatagccattactattttctcgatcatcataatgattggattgggctattttcttaaaagaattgattttctgtctaagaaagacatggacccatttaacaaaatcgtaatgtatatcttaatgccctgcatgatatttcacgcaatctacaatgccgatctctcatctcttcccaagttgagcctcctgcctttcgtgatcctggctagctccatcgtcaccggcgtgatcagttacttcattttaaaacggctgaaccttgatgacaagcaggtctggagtgtattggttaccgtcatgattgctaatacggccttcatgggatacccagtgaccctgggaatttacggccaaactgggttccttcgcgcaatattttgcgacattgccacactgtccatgttcctgctgctctcgtttgtgctgatcctgcggttcggcggaacagtgaagacagctatcaggaagatagctatttttccgccactgtgggccgttattctcgggctcattttcaacctcctcaacatccccattggtgatgtgtgtgagtataccgtgaactacctgggtcagggggctattcctttgatcatgatcactctggggctgtccattgacttttcagcactggcccgaagtaagtccatgatcatcttcacctcaatcatgaagctagcgttcttccccctcgtcgcattcttgcttgccacaaagctcggcctagtggacctgcagtacaatgtgagcatcatcgaggccgccatgcctagcggcatgatgagcctgttgcttgcgatcacctacaaattagattatgaactgacgagcgactgcatactgatcaacacggtcatctccctgatcaccctaccggttatcataagcctcctgtga

SEQ ID NO: 9988 - DNA, 1992 bp, synthetic construct
  source 1..1992: mol_type = other DNA
atggccgaagaaaaacgcgataataatgaggagctgaggattggggtgtatgtctgccactgcggtgtgaacgttgggggcgtcgtggactgccctaatgtcgcagagtatgctaagacactcccaaatgtggttcattcaactgactataaatacatgtgtagcgaccccggccaagctatgatccaggaggacatcaaggagaagaacttaaacagagtggtggtggcagcctgctccccgcgacttcacgagcctaccttccggcggtgcgtggaggaggccggcctgaacaagtttttgttcgaatttgctaatctgagagaacaggacagctgggtgcacatgaacgaacccgaggccgctaccgagaaggccaaggatctagtgcgtatggctgtggccaaggctaggttgctcgaaccactggaggctacgaaggtcgccgtagataacaaagcgctggttatcggcggcggcgtgtgcggcatccagacggccctggacttgggtgatatgggattcaaaacatacatggtcgaacgaaaccccaccattggtggacggatgggacagctggacaaaactttcccgacgcttgactgctcaatgtgcattctggcacctaagatggtagactgtgccaagcacgagaacatagagctaatttcatacgctgaggttaaggaggttgacggatacatcggcaactttacagtgaaagtagagaaaaaggcaaggtatgtggatgaggacctctgtaccggatgtggagcgtgcgtggaagcgtgtcccatcgagatacctaactattacgatgaaggggtagggatggtgaaagccgcatatatcccattcccccaggcggtgcccttgtgcgctactattgataaggattactgcattgagtgtatgctatgcactcaagcttgtggaccggatgcaatagatcacaatcaggaagccaccgagatcgaactcgaggttggcactattgtggccgctatcgggtacgatcccttcgacccatcgggaatttaccagtatgggtacgggcggtacaccaacgtgatcaccgccatggagatcgagaggatgatcaatgcatccgggcctaccggcggccatgtcatcaagcctagcgacgggattgaacccaagcgcgtcgcttttatccactgcgtgggtagccgcgacgagacaatcgggaagccttactgtagcagagtgtgttgcatgtactccatgaaaaatgcccaattatgtatcgaccacgaacccgatactgaagtcacgtgctactacatggacatacgggccttcgggaagggatatgaggagttctacaaaacgagccaagaaaaatatggaattgaatttatccgaggaaagccagcacagatcttcgaaaatgatgatctgacactgaccatccgcgccgaggataccctgcttggtaaggtgaccgagtacacatatgatctggtggtcctgagtgtaggtctcgagcatgccgaaggctcggacgagctccgccagacactgggggtttccaaatccgccgatggattttatatggaagcccacccaaagctcaggccagttgacacactcactgacggcgtgtacattgcgggtgtcgcacagggccccaaggacattcctgacagcgtcgctcagggcagtgcggccgccagtagagcagccatacccatggcacagggagaggtcgaaatcgagccgatcattgccagcaacgacgaggcgatctgcggcgcctgccaggtgtgcgtggagctgtgtccctacggcgccattgctatcgcaaccggtgtcggcggcaaggaatttgcccagattaactccgccctgtgtaagggatgcgggacctgtgtaggggcttgtccaagcggcgcgatgaaccaacagcatttcaaaacagagcagataatggcacagatcagtgccgctcttgaagacataggcaaatga

SEQ ID NO: 9989 - DNA, 1239 bp, synthetic construct
  source 1..1239: mol_type = other DNA
ctcatacactcgcaaaaattcaattactataatgagaacctgtcctggatcattggtgacaccatgaacgagatattcaggacttttacatccgaatcggtcacgcagggccatcctgacaagattgccgacatcgtgtctgacgcgatactggatgcctatatggccaaggacaagaactcccatgttgcctgtgagacctgtctcacaacggacttttgcatggtcttcggcgaaataacatctgcgggtcacctgtcagagaatgagattgaagatattatcaggaatacaattattgaaatcggttatgataactccgatctgaagtttgatgggcacagttgtgagattctgaacaagcttcacgagcaatctgcagatatcaaccagggcgtggacaggggagatgatgagaccggagctggggaccaggggatgatgttcgggttcgcaactaatgagaccgagagccttatgccgtacccaatcgacctggctagaaagctgacaaataaactgacagagctgagagagacgggcgagatcccatacctacgacctgacggtaaagcccaggtaagcgtgaactacgacaaagaggggaacgttgtgagtctcgacgccgtggtcctcagcacccagcacgacgaatcaatgagcgataatcaggagcagttaaaggaggatatccgggaaaagctattcaaggccgtgatacccgaggagctgatgaccgaaaacactaaagaacacatcaaccctactggcaagttcgaaattggtgggccccacggagacgccggattgacagggcggaagatcatcgtggacacttacggaggctatgctcgccatggaggaggcgcattttcaggcaaagactgcaccaaagttgaccggagtgcatgctacatggcgcgctacatcgccaagaacatcgtagccagcggcctcgctagcaagtgcgaaatccagctgagctatgccatcggcgtggcagaaccaacttccgtcatggtggatacctttggaacgggcgctaatatcggagatctcaccttcgagaaaatagtccgagaaaacttcaaattaacccccgatggcattattgaaacattggggcttagagacattacctataagcaaacggctaagtacggccattttggtatcgacgggctgccctgggagaagaccgacaaaatcgatgagttgcgcaagtacatcaaaaactga

SEQ ID NO: 9990 - DNA, 1269 bp, synthetic construct
  source 1..1269: mol_type = other DNA
atgactaattaccacgacgagatcctgaactttgagaaaatcgcaaaggagcatacggagtacatgagaaattccgttaacctcatagcctcggaaaacgtgacgagtgtggaggtcaccgaagccctagccaccgattttgctcacagatatgctgagggacaggcctttgaaagattctacgagggctgccagtacgtcgacctgatcgaggaccgcaccaaaaagcttagctgcaaggtatacgactgtgattatgctaatgtgcagcccgtgtctggggtaacggcaaacctggcagcctttttcggattctccaaccccggggagaaggtgatggcgcttgaagtcccgtctggcggccatatcagccatgccgacgtaagtgctgcggggattcggggactgaaaaccgtcttccacccattagacaaggatatcatgaacatagacattgacgccatgaacaagaaaatcattgaagagaagcccaagatcattctgttcggaggcagtttattcttgttccctcatcccattaaggaggcccgtgaagcggctgacgaagtgggcgccaaaatcatgtacgacggcgcccatgttctgggcctgattgccggagggcagttccagcaacctcttaaagagggagctgacctgatgatgggaagcacccacaagacattcccagggcctcagggcggcatcatcctctcacacgaagaaaatgccgagatcattgataatgccgtgttcccgggtgttgtcagcaaccaccatctccaccacctcctaggtttggggattgctacagccgaaatgttggagtttggtgaggattatgcaaagcagatcatcaaaaacgcccaggctctggggcaggcaatgtatgaacggggctttgacgtcctgtgcgaggagcaggggttcacccaatcccaccagattgccgttaatcttacaaacatacgatcagcatccgatattgcacgggagctggccgataataacgtgatcctgaacaagaatctgctccccggagataacagggacaacagcgatgatccatctggcatcaggataggtactcaagagatcactcgcaggggcctcaaagaaaaggagatggacgaggtggctgagtttataaagcgggtggctgtggacaaagaaaatatcgcggatgaggtggccgaatttatgaatcagtacacaaagctcgactacgcattcagcgatcgagacgcgtaccaatatcaccgcctgtga

SEQ ID NO: 9991 - DNA, 693 bp, synthetic construct
  source 1..693: mol_type = other DNA
atgcggataggattcgccttcacgggggccggacacctgcttaaggagtcagtccaggtggccgaaaagctggctaacgaccatgaggtcaccatcttcctgtccggtgccgcggaggaagttctgaaaatgtatgggttgtacgagagagtcaaaagcctcactggtggaaaataccgggaacttgcaactgactctgaccagaaattctcctaccccataactggccgactgagcctcggaaagtatgacctgctgatcgtgtcccccgctaccgccaatacggtgtcaaagatcgtttacgggatagcagacaccttagtcacaaacgctgtagcgcagagcggcaaaggcgctgtgcccgtatacatggtgcctgtggatatccaccccggccctattgacaccgtgctaccaagcaagatggagctgtcgaagtgtcagagttgcgatgactgctttgcctctattgcctgcgagcaaggggcaatcctgccacatgaagaaatcgatctaacaaaatgtattgggtgcggcttgtgccgcaacacatgtccgtacgatgcaattagcgagggcaagatcattacaatctatatgagggacattgatatcgaaaatacctgtaagctctccagtatcgataacattcagatatttgagaatccacacgagatcctcgacaagatctga

SEQ ID NO: 9992 - DNA, 318 bp, synthetic construct
  source 1..318: mol_type = other DNA
atgatatacaacaacgaacagattaacatcaagataacctacgccaataacttttacaaacggtttaagggcttgatgctgaaaaaggactttgatgacggactcctgttcacaaatcttaaggatagcagcatccacactttcttcatgaggttcgagattgatgtgtatttcctgaatgagaagaaatatattttcgaaaagacctccctgaaaccatggaagttctataagcccaaaaagcaggcaaagtacatcctagagacgagaaaaaacaagctcaaactgaagatcggggaccgcctcgactttatctga

SEQ ID NO: 9993 - DNA, 663 bp, synthetic construct
  source 1..663: mol_type = other DNA
atgatcattgagtacctgagcgacttcaactgcccatattcctatatcggcctgaatcgcatcatgagtgtgtgcaaccacttgaacctggacgtcatatgggaaatgaaatctttcgaacttgagccggaactcaacaacatcccaacatgcagcatcgataggtacgcaatcagaaaccgactgagcattaaagatgccgagaatgagatcgaggaaattgaaaaaatcgcgcaggacgaaggactgaatatcaattacaaaaacatgcagctgtcaagtagcaaggacgcccatcgcctggtgaagtatgtagaacggaattaccctacattaactcaagagatcgtgctgaagatatttgagtccaattttattaagaatgagaacatttcagattacaacgtcctgataaagattgctatctcctgtaagttgaatgaaaaagagatctacgagtttctcaaaaaggaaacctattcgatcgaggtggaccttgacatggatgaggcaatcagcaacggcataaacacgattccctactatttcattaattacaacgacgagcggctcattatacccggtgttttcgagaaggaggacttcaaaaccgccctagaggatctcgtgaacggggaaatgaagaacaagacctttatctga

SEQ ID NO: 9994 - DNA, 111 bp, synthetic construct
  source 1..111: mol_type = other DNA
atgggcttttataggaaatacaataccatcattcggacaatcgacaacttcgtcaagctgtacaaagtggccaagaaggatagcgagaagagcaaggacgacaaaaaatga

SEQ ID NO: 9995 - DNA, 3237 bp, synthetic construct
  source 1..3237: mol_type = other DNA
atgccaatacacgaggcagagaaatcatatgagcacgacaaaatagaaaagaaggtccaaaaattctggaaagaggaggatactttcaagaaggttaacgagctgcgcgagaagggccctaagtacagcttcctggatggcccaccctactgtagcgggaaaatccacctggggacagcctggaacaaggtgatcaaggactcgtacctgcggttcaagtcaatgaacggatttggcctccgccgccaggcaggctgggatatgcatggtcttcccattgagaataaggtggaacacctgatgggcattcagagcaagcaagaaatcgaagaggacatcggcatagctgctttcgtggacaagtgcagggaatttgccatcgagaacaaaatagcaatggagcaagagtttgaccagctgggtgtttggatggactgggataacccatacatgacacttgaccctaaatacatggaatcttcctggtggacacttaagagggccaacgagcaagatctgcttgtgaacgaccagagagtcatcagttggtgccctcactgcggcacggccctggcagccgcggagatagagtatgaagaaaaggccgatccctcgatttatatcaagttccccgtcaggggagaggagaatacttacttcctcgtttggacaaccaccccatggactcttcccgcaaatatggcaatctgtgccaacccggagtttgactatgtgtatgtgagcaaggacggggaaacctacattctggctgagaacctaattgaggaggtactgggtaagcaggttaagattcaccgcaccgagatcagcgatgattctgaagacggcgagaatcaaatcatcgaggaaaaggagatcatgtacgagatcattaagacagtgaagggggaggacttgatcggcatgagttatgactatatcctggccgacgaggtgcccatacatgacaagtttgacgagattgatgcggtgcacaccgtgctggaaggcaaccatgtggaactaggtgaaggtacgggcctcgtccacaccgcacccgggcacgggccagacgatttcgaggtgggtcaggctaacaatattcctatcttctgcccggtgggggaggacggctgtttcaccgaggaagctggcaagtataatgctaaattcactaaggatgaaaattcccagatcatcaaagatttggaggacaaaggactgatgtacaagtcagaaacaattgaacacagatatggtgtctgttggaggtgcaagacccccatcatctatcgggcgactaaacagtggtttctcaaggtgaccgacatcaaacagaaaatgctcgatgagattggccgtgtggaatgggtcccaaaatgggccggggaagggcgattctacgattgggtggataatgcgcgggactggacaatctccagacagaggtactggggcattccaattcctatatgggagtgtcctgactgtggggaactgaaagttattggttctcttaatgagctcaaagaggagtcactgaatgacattaatgtgtcggacgccgagctgatacataggccgtacgtcgatgaggtggaggttaaatgcgataagtgcggaaaggtgattaagcgaatccccgacgtgttggatgtgtggatcgattccggggtagctggctgggcctcactctactatccagaagagaaagaaaaattcgaagaatggtatccttacgactttataacggagggccatgatcagaccagaggatggttctactcccagctgggcactggcgtgatttccatgggcaaaagcccatacaaaaaagtattgatgcacggattcgtgttggatgagcacggaaataagatgtctaaaagcctggggaacgtagtctccccggaagaggtcatcgaaaaatacggggctgacgttttacgattctacctgctgtgggcctccaagccctgggatgacttaaaattcgtgtgggatgaacttctcaacattaataaaatgttcaacatcttgtggaatgtgtacgtattcagcactacctacatgtcacttgacaactttaaccctatcggactgacggaaaaggacatgattctaagagccgaggacaaatggatcatctctaaggcgaacacgttagtcaaggaggtcaccgaggacttggacaaactgttcttccataaggccacacgcaaaatcaataactttattctggaagatctgagccggtggtatgtcaggctgatccggggacgcacttgggtggagagcgatgaccctgacaagctcggggcctactacagtctctacacagctctggtcaagttaatcagcgtcctgtgtccaatagctcctcatgtgtctgaggagatctatgaaaacctagtcaaaggcgtgaaccccgatgccctggagagtattcacatgaacgactggggatacgacgatgacgccatcgacacagagctcgaatccaagatggacgttgtccggaatgtgattgatgcctctatccgggcccgtgatattgcacagtacaagctcaggtggccggtttcagacatcacggtggtgagccaggatgaaaacatcctcaaggctatcgaggagctcactgacattattaaggaccagtccaacacaaaggatgtactgtgcgcgagtgaatttgaaaagctgtcctttaatgccaaacccaacctcaagaccctgggcccccggcttaaaggagacatggggaaggtaatgaaggctctgaaagagagtgacggcaaccaaataaaggaggatattgaggcaaatggaagcatcaccgtagaaggtcatgagctgagcaacggagatgtcctattcgactccgaactccccgatgactttgtttcgagcgaatttgaggggggaaatgtctttgtcaatactaacgtgaccctggaaatcaagcaggaggccatggcccgtgaattaataagacgaatccaggacatgagaaaagatttggatttggacgtggaggcaaacatcaacgtggatgtggagaccagcgacgaatttaaggaactcatcgttcctcagtctgaggtgatcagccacgaagttcgcgctaagagtctgatcatatccaccagtgaagagtgcagtaagtattccaaggactataccaaggagtgggacattgagggagagaaggtgattatctcaattaaaaactga

SEQ ID NO: 9996 - DNA, 2139 bp, synthetic construct
  source 1..2139: mol_type = other DNA
atgacgctcgctgactccgagattgaatatatcgaaggcatccttggtaggaagatgaatgagctcgaggagggaatgttggatgtgatgttcagcgagcactgttcttacaaaagtagccgcccctttctgcgcgccttccccaccgaaggcaaaaatatcatcctagggcccggcgatgacgcgggacttgtatctatcaccgataaatatgccctggcggtcggaatggaatcccacaaccaccccagcgctatcgagccttacgggggtgcaggcaccggcatcggaggtattctaagagacataatatcgatgggcgccatgcctatagcccttctggactcactgaggtttggaccactcgaagacgacaaatccagatatctctttgaacatgttgtgaagggaatttccgactacgggaaccgggtaggcatcccaacggtggccggcgaaatcgagtttgatgagtcattccgaacaaatccactggtgaacgtcatgtgtgtcggactggtcgagaaagacaagatcgtgcgggctcaggccccgaacatcggtgatgtgttcctgctaatgggcggaacaactggccgggatggcatccacggggtcacattcgcatctgaagagttgacctcggattccgagacagaagacaggcccgctgtacaggtggcagatccgttcactaagaaacgggtcctggaggcatcactggagatcctggagaagatcaatgtgagtggggtgaaggacctggggggggggggtcttacctgctgcatctctgaacttgtcgatagctccagtaacggtgccttggtagacctgcggtcaatcccactcagggagacagggatgaccccatacgaaatcatgttgagcgagagccaagagaggatggtgtttgtcattggtcctaacgacgtggagcttgcgtgtcagatctgcgacaagcatgagattagttcttccatcgttggcgaggtgatcgaaggaaacaacatgattatctcggacgaagggaacgagattgctaacctgcctaccatcttgctcgccgacccgccctccatcaatcgtcccatcgttgagatatcggccgataccgagaagattgatgtgaaagagccttcaatactgaaatcactcccggccctcctgtccagttcaaacattgctagcaaggaatgggtttacaagcagtatgaccacgaggttcaggtccgcactgtggtcaagcctggggatgacgccgccgtgttaagaatcgatgagaacactgctattgcactcactaccgatagcaatacaattcacacgaagttaagccccttcgatggggcggcaggctgtgttgccgaagccattagaaacgtcattagcatgggggcaaccccatacgccgtggtggactgcctcaacttcggaaatcccgagacgcccgagattctatggcaattcaagacagctatcgagggaatgagtctggttgctgaaaaatttgatgctcccgtgattagtggcaacgtcagcttctacaacgagactgaaggtgtgaaaatcaatccaacacctgccgtgggcgtaattggtgtggaggatattgaaaatatacgcacactcgacttcaaaaatgagggagacaagatcatattgataggcaagacctacgacgaactgtctggatctgaatatcatcgaaccgtgcataatattgaaaagggcacggcgccaaaaatccgaatagaggaggaagtcgcgaacgggaagaccgtgctcgacctgataggcaaggacaaagacaagaacatcactgcagtacacgatgtgtccgctggaggactggcagtcgccctgagcgaaatggttattaagtccggcctgggctgcgaagtgaccctgcgcgatgacgagctggataagattcagctgctttacagcgaaagtcacgccagatatttgctcactgtgaaagccgacgccgtggatgacatcctgagcaagattgacgtggaggcaaatgtcatcggcgaggtgaaagggacctccctgttcatcaacggccacgagtttaagtttgaggacttagatgacgcctatcatggggttatcgagcagtacatggcttga

SEQ ID NO: 9997 - DNA, 1218 bp, synthetic construct
  source 1..1218: mol_type = other DNA
atgttcctgtccaagttagactcgctagccaatgctatcaaactcgtcaaggacaatcagaagttcacggaggtggaagaggtaccaatctctgaagcacacaaacgggtgcttgccgaagacatcatggcatttcacgatagcccacccttcgataaatctagcatggacggctatgcggtcattgctgaaaatacgtttggagcctcacaatccgcccctaaaaagtttaaaatcattgacgcaataggcgctggggatttttcctccaaaatcgtgaatagtaacgaggccatcattatcgccactggtgccccaatccctgacggagctaatgccgttctgatgaaggaatacacgacctcagacgaggatgatctgacaatctatagccaggtcacccccggcgagaacattagtccgaagagcgaggacatcgagaaaggccaaaaggtcttgtgtaagaataccttcatacgataccaggaaatgggtcttattgctagcgcaggctacgatacagttaaagtgttcaagaagcccagggtgaaaattattatcaccggtaacgagttggtcgagcccacaaaggaggagattgacaaggcgaagatcattaactcaaaccagttcaccaccaaagccatggttgaagacagcggagctattgctgaaattactcacgctggagataccttcggcgaagtgcgggaagccatcctcgaagcctctctggagtttgacgtgatcatcactactgggggaacagccatcagtaagggcgatgtggttctcgacgcactggccgacctaggggaaatactgttccacggtgtggctgtgaggccggggaagcctgtaggcgcgggcatcgtaaacggaaagatgatatttaccctttccggacagccagtagcatccatgagtcaattcgatatggtggtgcgcaaatacctctttgagatgcagggcagaccttttgagttccatctccagaaaagagtctccgagctgaaggtccccagccagctggggcgcacagattttatacgggccgttgccgatgacgagtgcgcaaagcatgtcttgaacagggggtcggggattatccgttcaatggtggaggcgaacagctatatcatcattgacgagaacgacgagggctaccagaaggatgatatagtggacgtggtgttcttcgacagcctgctgtggtga

SEQ ID NO: 9998 - DNA, 1131 bp, synthetic construct
  source 1..1131: mol_type = other DNA
atgaacggcatttactattatctgattgctttcgtgatcatctggatgctggtcacaatcttccatgataagctcagcaaccacgggtttgagctgaacttccctatcataatgtggaagactcaaaagctgaagggcctgatatccaaaatcagcaatttttcacccacattttggaaatggtatatgaacgtggggatcgttgtcgcctttggagcgatgattctggtgaccggatctatcatctcgtccataccaagcatcttcgaaacccctagcgtgtcgatccttattcctggcgttgacatcccaggctcccagatttatgtgcccttcatttacggtctaattggtctggccaccgtggtgataatccatgagttcagccacggtatccagtcagtctgcgagaaaatcccaatcaagtccatggggttgctcctgttttttattcttccaggggcattcgtcgagcctgacgaaaagagtctcaaaaactctaagaacgcctcaaagttaaggatctacgcagccggctcagtggcgaatattaccttggccgtagttgctctgatgttaatctctctgatatcaatcggtattccccactactttgccgaagatgggatcagcatcgaccggatcgtttctgactctccttccgagggcatcctaaaggagggcatgattttgcaggctattgacaatcataaaattaatgattccgagagctacgtcaatattgtgaaaagcttcaaacccggggataacgtcactgtgcagacgaaccaaggcagttacagcgtcgtgctgagtaagaatcccaacaacgacagcgtgggattcttcggaatccaggccgccaagcactatgtgcttctgaatgacagtctgggaccgataccgtggatcttgttcgagctcttcgagctgttcaactgggtgtttatcctgaaccttggaatcggactctttaacctacttccactcaagcccctcgatggcgggcacatgttggaaacactcctgtcctacaaatttaaggaacagctggtcaagaaatttgtaaatgcactgtccggcgtgatggcaataataattgtattcagtatcattgctggcttcctctga

SEQ ID NO: 9999 - DNA, 1227 bp, synthetic construct
  source 1..1227: mol_type = other DNA
atgaaggcgaacgcccaaaaaatagctgatggagtctactggatcggtgtactcgactgggatttgagaacttaccacgggtacacactggacggaaccacgtataatgcttacatagtgtttggagaagacgaagtcgccattattgacaacgcgtaccccggcaaaaccaaggagatgatggcgcgcattgacgatgcctttgcacaggaaggaagggacgttaaagttgactacatcgtccagaaccatgtggaaaaggaccacagcggcgtgctggtagatctgcacaaaaaattcccagaggctcccatctattgtaccgaaattgccgtgaaagggctgctgaaacactatcctgcactggaaggtgcagagtttgtcactgtgggcaccggggactccctagatgtggggggccgaactttggctttcctggatgctttcttactacattggccagacagtatgttcaccctgctcgccgacgagaccggcatccttttccccaatgatgcatttggccaacacctttgttttacaaagcggttctccgacgaaatacctgaaaatgtcttgatggatgcagcccagaagttctacgccaacctcatcacaccgctgtccaaactggtcctgaagaagctgaacgaggtggtggagctcgggctgctcgattccattaagatgattgcaccatctcatggccagatctggaccgacccgatgcaggtcatcggcgcttaccagaattgggccactggcgtgtgcgaggataagattacgatcatttatgacactatgcactattcaacccagcaaatggctcatgaaattgctgagggtgctatctctgaaggttacgatgttgaaatattctaccttcacgaggatgagaggtcggagatcgtgaagagcatccttaccagcaagggggttgccatcggcgaccctacaatcaacgatgcgccctatcctagtatcggagacatcatgtactacctcaagggactgctcttcaaccgcacagggatagagcggaaggccgtgacgttcggctcaatggggggcaagggaggaagccccgcaaagctcgccgaggagttagggaactgcggctttgacgtggtagacagtcaggagatctatttcgtgccaacagccgatgaggagaatgccagctttgacttgggtgtgaaactggccaaagcctgcaaggagctgtga

SEQ ID NO: 10000 - DNA, 777 bp, synthetic construct
  source 1..777: mol_type = other DNA
atgagcgaacagaagccaatccaaatctttagcgatagtacagaattgcgggttaacgtggtgaagagtcccgtcaagctcaccatcctagagatgctaagagaccgagatatggagtttgatgagatcgtgattaatacgggcaaaagcaaatccacagtgagcgtgcacctgaagaaccttcgcgaaaacggcattatatcatatcggatgcatcctatcgacaatcgcaaaaaaatcttctatctgaactccaagtacctggggtccgtaaacttctccgaacccaaagaacttgaagagacccagtcggactacttgatcaggaatattgtggagggtgacggacagtttagcacactgctcttccacacgctgaaggcaatgctgatccaggaaggaattaacatcgatcccatccttaagtcaaccggcaaccaaatcggcaagagcatcttctacaaattgtacaatgaggacctcgatatcttcatggacaatctgagcaaattctgggagaagaagggactcgggaggctcactttcgaaatagggcagattattaagattattatttatgactgctttgagtgtgaactgctgccaaaaacaggaaagccagcctgctttttagacaccggcatcatggagggtctgttcactgagtttttcaaactcccggtcagtgttatagagacccagtgttacaccatgggggatggcaagtgcgtcttcgaggtggagcctcagagcataaagctgactaaccacctgtga

SEQ ID NO: 10001 - DNA, 705 bp, synthetic construct
  source 1..705: mol_type = other DNA
atggttaagaaggggaaactcattggcatcggtgtgggaccgggggatactgaactgttaacattgaaggctgcgaaggtcctcgagaaagtcccagtgatctttagccccaagagcgcaaaggagaaagaaagcatcgccctgtccatcgtgaggcctatcctgaaagagagaaaggactacaaaaaaataatgatcgtggaacccatctttcctatgatcgaggataagaaagagcttgagaagatatgggatagtgcatctgagctggtggcacaatatctcaataccggcagagatgtcgccttcattaccctgggagacacctcaatcttcagtacatactcctacttgcagaaacgcctaatggatcgctatgagatagagacgattcccgggattacatcattcacggcgtgtgccgccgccaagaacgaggccctggtagagcagaacgacatccttaccattgttccaaaaatcgacagcaggatcgaaaacattctggaatatactgactccattgtgctgatgaaagctagccggaacagcaccaaactggaactcaagatcaagaatgacaagcgagaaaaggaaatttactccgtgcagaactgcactcgggagaatgagaagatcattgagggcttcagtcacgaaaagccatacctcacaacctcgatcataaagtttaaggacgactga

SEQ ID NO: 10002 - DNA, 1803 bp, synthetic construct
  source 1..1803: mol_type = other DNA
atgctgaaaagcaactgcacctgtggaaagtaccctaaaaaggagagcaagggcccaacaaacttgtttagttttactaagtccaagtcacgcagcagctcaatactggacgacgagatccctgaggtatattacgtggacgaccacaagcaggacgaggggaccgcagcctatctgaaggagctctatccaaacatagatgatgatataattgagaacttcccatttgatgaaccccgcatcggacaattggaaattatccaggacatcaatgatgcgattaaaaagggttacaagtacatcatactcgaggccggaactggaactggcaaaagcgcaatagctacaacattagccaaaatgtatgagtctgcctatatcctgactatgacgaaacagctgcagtcacagtactctgacgagtttgagtttcccctcgttaagggacggggcaattttgcttgtctccacgataacctggagtccacctgtgacataggggcctgcaaaacatcacctacttccagtaaattcttctgcccatatggtgtggccaagaatcccaccctggacgccgagctggctttcgaagactcctttgggggaaccgtgttctaccaaagcagcgggcattgccattactggaatcagaaagccaatgcaattaattcccccatcacactgatgaactatgactatgctatcgtggagcttaactacgtgaagcactttgggacgcggagcctccttatcctggacgaagcccacaacattgaaagtaaacttatgtcgaccatggaggtgaccctctacaatagggtgctcgaaaaggacatcaacaagcagatctcgccgcagactctgaaggacggcgaactggaagattggatcatggaaattgacgcaatcagagaggcatacgaggatattgatttgaaggacgtgagtaaaaataagagcgagaggattcgatccacgatcggtcggctaaagacacttagaaacaatctggaaaaggagccgaagaattgggtgattgatactgacgagtctggtgtcaccttcaagccactacgagtccaccattacgctaaaaataacctgttaaaatatggcgacgtggtcattttcatgagcgcaaccatcctatcccataagatgttttcaaaatggctcggactcaatcctaacgaagtatatcacattaaggtggattcccctttcaccaaagagaaaagacccattgtccttaatctggccggcaagatgtctgctaatcgcattaagaagaccgctcccaagacaatccccatcttgcaggaaatcctgaagaaacacgagggggataagggcctgatccatacgcacagttacaaatgccagcagtacatcataaacaacttatacaactcccgactgatttcgcacaccagcaagaacagggagcagatcttggatttcttcgagaaggatgagaaccctctggtgctggttagcccaagcatgagcgaaggggtcgaccttccatacgacaagtgtaggttccaagtgatctacaagatgccgttcccttacctcggcgataagcaagtcaacatgagaatgaagcgggacaagaagtggtacgcctacaaaacagtaatgacgctgatgcaggcgtatggccgtggcatgagggcggaagacgactcatgctacacctatatcatcgatagtgatattaacatgctgttcaaaagtcccatgtatcgctccttgatccccaacttctttaaagaagccgttgtccgggttaaaaaatga

SEQ ID NO: 10003 - DNA, 963 bp, synthetic construct
  source 1..963: mol_type = other DNA
atgaaagactctaaagagaaggaacatagaatcagcaatctcaaggacctgatcgacaacgtgaaggaggaggattccaatatcgactcacaggaagatagtgaattgataaactatctccacgaagatacagtggattttgatgagctcgagatcaacgacgagttcatctatcaccccgatgatgacgaagactacgtaattaacctggaggaatcccccattgatgaggagtttataatcaacacccccaaggaagaagagctgaaaaacatgtccgatgatctggaggagccagaggacatcatcagtgacgtgagcgaaaactttgaccagttcttcaacgcaaaaattggtaagacaccggtgctggcgatcgttagcagcgttctggggatcatatttatagccatctcaataatcattttcgagtcccggtcggacagggtcatcgacaatgtggtcagcggcgagacgaacttcatttctgtcattgtgcttggcctgggaatcctgttactgatttacggcatatacaaagtattcaacattaagagtcccctaaatgggataaccgagagcatcaattccatcgacggaaaagaaaaggtcaagactaatgcttcgaaggaaaaggaaaccgagaagattatccctaagagcaacatcccattggacaaagactcctacaagatcggggagtttgacatcggcgatattaagaataagttcaagaagtcaactacgtctaagaagcccaagccacgcccggaggacacaaacaatattcctcctgccaaagagaaagaggagaataaaaaggaactcaccatcgaaaaaatcgaagatattgaatataaacaagccaaacttgacaacgaaaccattgacgacattttcgcagaagtggaggacatcgatgagattccaattatctctatcgatagtgaggagaaagagtga

SEQ ID NO: 10004 - DNA, 312 bp, synthetic construct
  source 1..312: mol_type = other DNA
atggagttttgtccggaatgcggcgctatgatgttccccaacaacaacgtgctgaaatgcaatagctgcggttacatcaaggaggactccgataataacgactataaagtgagcaagaagattgaggccgaggaaacggtgaagatgctgggggaagatgtcgacgtcggcccaaggaccgaggagacatgccctgaatgtggacacaatatcgcaacctacaaactcctacagactcggagtgcggatgaggcccccacccgcatattcacatgcgtaaagtgtaaacatacttggagagcctacgactga

SEQ ID NO: 10005 - DNA, 423 bp, synthetic construct
  source 1..423: mol_type = other DNA
atgaataaatacaaaaaaccgagcgtaacaaccgatatcttcatcttcgacgaggattttaactttattctgatcaagcgaaagaataaccctttcaagaattattgggcgctgcccggtggctttgttgactatggggagaccgtcgagagcgccgcaatacgcgaggctaaggaagagacgtccatcgatgtggagctcaaggacctcgtgaacgtctactctaacccagaccgggattcaagggggcacaccataagtatcacatacactgcaaaaggagatttcaatgagagaaaggccaacgatgacgccatcgacattggcatattttccgccgaaaagctggacgaaatcaacattgctttcgaccataataaaattatcaaagactgcctaaacattgtgaagaacgaaaagtga

SEQ ID NO: 10006 - DNA, 282 bp, synthetic construct
  source 1..282: mol_type = other DNA
atggaaaatttcgagatcattgaggataagacgctagaactgaccttcatagtgaaggatgagagccatggcgtgtgcaatgcgcttagacacatcttgatgcagaaccctgacgtagagtacgccgtctataacatcgaccaccccctgactggaaagccagagatgaccatcaaaacaaagcgggggaaaaggccgcgcaacgccctccagaaggccgcagaacagctccaaaaagaaagcgacgaatttaagaaactgattgacgaggctctggagtga

SEQ ID NO: 10007 - DNA, 570 bp, synthetic construct
  source 1..570: mol_type = other DNA
atgaagatagaagaggacgaaattgtgatgcctggggataagctgggcatcatcgaacaatatctgccaggagagggtacctatgatgatgacggcgacattaagagctccgtactgggaaacgttaagatcaatcagaaaatgaaggtcatctcggtggtgtcagatgcgaagccggccctactgaaagtgggagacatcatttacggccagataacggatatcaaaccccagcgcgccaatgtcaacattgaatgtattaaagacaacgcccggccactggcgttgccctacatgggggccatccacatctcccaggcaaaaaaggactatctcgagaagcttagcgacgctttcagaataggggatatcatccaagcaaaggtggtgaagatcactggcgacaatgttgacttaggcagtacagacgatgattgcggtgtcctcaaagccatgtgcactcgctgccgagactacatgcatacaacccagaaggctgatgagctccagtgcaacacctgtaacaggaaagagaagcggaaagtgagcaagaactacattaatgactga

SEQ ID NO: 10008 - DNA, 1005 bp, synthetic construct
  source 1..1005: mol_type = other DNA
atgtccatgtacaacctggatctggacaaagtcatccggaagatcacgtccatggacgcccagactgtggggcttcaattccctgaggggttgaaaatgcaggctataaagatagccaggcagatcgaggaagaaaccgatgcaacggtcgtgatctccggcgacccctgcttcggcgcttgtgacgtgagcgactataagatgaaagggtcagtggatctgatcgtgcattacggacacacccccctccccctcaaatatgaagtgcccacattgtttatcgaggcatattccaacatagatatcaagaaggacctggagaagagcatcgagtacctgaaggactattacagaattggactcgtgacaacgacacaacacctgcacctccttaatgagaccaaagattacttagaagataacggcaaagaggttgtgctcggttcctcaccatcgactaggaagggtcaggtcctcggatgcaactttagctctattaagaaccttgatgcggaagtcatacttttcatagggactggcaatttccaccctctgggaatcaaactgtttagcaacaccccggtaattgccctcgacccatacaatagtgagattcgaagtatggacgagtttgccgacaggatcttgcgcatccgtttcgcccggattacaaaagcgcggggcgctaagaagtggggcatcctggtatctaccaaggaagggcagtacagaatgaccctggcaaaggaaattaaaaagatcctagaggatagcaaaatggaagcctatatcatcctggtggacaatgttagcccggacgtgctgctcccttacttggagttagacgctttcgtggttagtgcctgcccccgcatcgcaattgatgactcacagatgtataaaaagccactgctgaccccacaggagctggagattgtcctaaataagcgcaagtgggagaactaccagctagatgaaattctgttccacgagcattacaagtga

SEQ ID NO: 10009 - DNA, 570 bp, synthetic construct
  source 1..570: mol_type = other DNA
atgctggaggaggtaaaaaaaagcttggaagcctctcctatcgttaagaagggagactacaactacttcgtgaatccgataagcgatggtgtgccagccatggaccccaagatgcttcgcgagctatcactcgcggtgtacaagcacgcagaccttgacgttgataaaatcgtcgccgtggaggctatggggatacatctcgccaccgcactgtccctgacaactgacatcccctttgtggtcatccggaaaaggcagtacggtctggagggagaaacggaggtgtatcagaaaacaggatatgggagctccaatctgtatgtcaacgatttacacgaaggggagaagatactgctcattgacgacgtggtaagtaccggcggaactctgatcgctttgctgaacacgctgaaggacctcggcctcaagattaagagtaccgtggccgtgatcgaaaagggggagggcaagaatatcgtgaaaaaagaaaccggcgttgatgtcatctcgattattaagctagatgtcatcaacggcaaagtcgtgattgagaagacaattgaagattga

SEQ ID NO: 10010 - DNA, 1344 bp, synthetic construct
  source 1..1344: mol_type = other DNA
atgctgggaaacttaggagaaaatcttaccaacaccatgaagaaactagtaggaatgtccgtgatcgacaaaaagaccattaaagaggttgtcaaggatatccaacgagcactcatccagtccgatgtgaatattaagctggtgctggagctaagcaagaagatcgagagcaggagcctggaggagaagccaccaaagggcatcacgccacgggagcatgtgataacaattatctacgaggaaatggtcaatctgctggggagtgaaaccgtggggctggacattaacgagagaccttacaagatcctgttcttggggctccagggcagtggtaagaccacgacaattgggaagctgtgtaggtttctgcagaagaaaggtttcaaccctgcggtggtatgcaccgacacatggagaccggccgcctacgtccagctcaagcaactgaccgaggaaatggacgttcccttgtatggggaccccgagaacaaggacgctcttgatctggctaggaagggcctccaggagtttaaaaacaggaaggtgatcatcttcgatactgccggccgccacaaacaggaggaggacttgattgccgaaatggacgaactcgatgatattatcaaccccaatgaggctatccttgtgattgatggaaccatcggccagcaggcaggcgagcaggcgaaagccttctcacaggctaccgacatcggatcaataattatcacaaagctggacgggtcagcaaagggcgggggcgccatgtccgccgtggcagaaacaggggccccaatcaaattcataggcactggggagcgcattgacgactttgagctgtttgacccggaacgctttatcagccgactactgggcatgggtgacataaaatctctcatcgaaaaggctgaagagaatattgacgaggatattgcagagaaaacaatgaccaacatgctcacgggtaaattcactttgatggatatgaaaaaccagttcgagatgatgaataagatgggccccatgcagcaagtgttaaatatgatccccggcatgggaaataagatcagcaaggaagcctcgaaaatgactgaagataagataggactgtacaaggttatgatgtcttccatgacggaggaagagatgctcaaccctaaaataattaaacagtccagagtccaaagaatcgcccggggaagcggggtggaagagagtgaagtcaaggaacttctcaaatattataacaacactaaaaagacaatgaaaggaatcggtaagcgtggcggtcgcctggggggcggcgcgatgaaccggatgatgggacagttcatgaatcggtga

SEQ ID NO: 10011 - DNA, 1209 bp, synthetic construct
  source 1..1209: mol_type = other DNA
atgtacgaactggccaaacagattctagaggaaaccggcggccgcatctgcaagaactgcctcggacgcaagctgagcaagacaattgaagggacaaacaatatcgagcgcgcagacaaggtctgcgttgaactgaatatctccttggacgacgtcgactgtgtaatatgtaacaacatcttcgataagcttaacgacaagctctataagaagatcaacgataaaattaatcagctgggcctggagtttgatacctttctcgtgggttcaaaggtgcccaaggatgtgcaagaacgggacgattgcctgtctgagaagttcaatttaccagtggagactatcaaaaaggaaatcaacagactgattgggctggaactgtggaagatctacgacaaagaagccgaatttgaaagtcaggatattgtcttcaacatcgacctcatagacaatcctaaagttcgaatccagatcaatccgctgtatattgagggaaaatacaacaagttcaaaaggggaatcccccagaccaagtggccatgtacgaaatgtaaggggaagggatgttgcgaatgcaacttcaccggaaagcaatacccggaaagcgtggaagaactaatttccgagcacatacttaaattgactaagggcaaggaggctaagttccatggcgcggggcgggaggacatcgacgtgctcatgctcggctcgggcagaccctttgtattggagatcaaagagcccaaaatccgcaagctcaatctcgccaaagtggaggacgagataaataaaatcaacgagggcaaaacctcataccacaatctgcatctgtgcaaacggaaccgaaaagccgagattaaacagtcttctcctgatacttataaagtgtacaacgccatcgtggagtgcgacgaaagattcgacgagagtaagcttgaggagctcctgaagctagatgagattcatcagcagacgccacttagagtcctgaggaggcgggctgataaggtccgtatcaagcacgttaaagagctgagctatgaaataattgacgacaagcactttagcatgcggatcaaaacagagggtggactgtacattaaggaattaatctccggggatgggggcaggagtcaccctaacgtgtccgagatcctgggtattaaggcaatttgtgagcaattggatgtcatagaggtgagcgagaagtga

SEQ ID NO: 10012 - DNA, 468 bp, synthetic construct
  source 1..468: mol_type = other DNA
atggccgaggaatttacgcacctcacagaaacaggagtgcatatggtggaagttgggggcaagccggatcagaaaaggcgggccatcgcatccggatcaatattcctcgacaagaacactattaacctgatccagaatgacgaaatcaaaaagggtaatgtgctgacaaccgctcagatcgccggaatccaggccgtgaagaacacaagctctattatccccctgtgccacccattggcactgaccggcatcgagctggacttcgatgtgaagaaggacgaaataatagctacgtgtgctgtcaacacccttgggaagaccggcgttgagatggaggcgattaccggggtaagtgtcgccctcctaactgtctgggacatggtgaaagcggtggagaaagatgagaatggccaataccctgatactcgcatcagcgacattaacgtcattaagaaggagaaaatctga

SEQ ID NO: 10013 - DNA, 162 bp, synthetic construct
  source 1..162: mol_type = other DNA
atggccaagaaagacaacaagatcagcatgccgcagaccggcgcaggactggtaaggtattttgatgaggaaagcctagggccaaaactgagtcccgagcacataatcgtggctacagtgatcgtcgcgattctgtgcttcgtgctccggtactccgcctga

SEQ ID NO: 10014 - DNA, 825 bp, synthetic construct
  source 1..825: mol_type = other DNA
atgctcactaagagaatcattccttgcctcgattgtgacttacaggtgcctgaggggagggttgtcaaaggcgtcgagtttaaagagatcaaatacgcgggaaatcccgtggatcttgctaccaagtactatgaagagggcgcagacgagattgtggttctcgatatcacggcttcccatgagaggcgggctaccatggccgacgtgattgacatgctcacagaaaacgtcttcatgccaatctgtgtcgggggggggatacgcaaggtggaggattacatcaagatgcttcgcgcaggtgctgataaatgcagcaccaacacagcggcaatcaaaaaccccgaactgctgaccgaggcttcaaaggtggtaggatcgcaggcagtggttattggaatcgatgccaagcgaagatacatcagcaatccagacgacgccccggataaagtcgtggtggaaactgacaagggcttctgctggttcgacagctccatatacggcggacgggaatttaccggcatcgacgccattcaatgggctcagaaatgccaggacctaggggccggcgaaatcctgttgacaagtatggacggcgacgggactcaaaacggatatgacatagagctgaacaaggcgattaatgacgccgtggatatcccagtcatcgccagcggtggcgttggtaagcccaaagatattctggacgtattcaagaagacggacgtgtccgcagccttggccgccagtatattccactttaaccagtattcaatcggagatgtaaagaagtacctgaaagataataacgtggccgtgcgtctgtga

SEQ ID NO: 10015 - DNA, 915 bp, synthetic construct
  source 1..915: mol_type = other DNA
atgatcattgaaagtcctatcgacttggaattaacccagatcagcggccagacctcacaacccccttggacgaaagttgacaactcatatagggaggtcgtcctggtaaacaacaaccccgtgatcttcgacgttgaacagtccggagaattttttaatttcaattacattggcaatatcagcaagaaagaagccgtatcttccctcaaatacatttttgatctcgagtttgacctgaacaagttttataagtacttgaacggccatgcagagctggctgagatgtccaagttctgccacgggctgagactattcttggccccaaacccattcgagtgcatcatctcatcaatctgttccgccaataacagcatcaaacgatggacaaaaagcatctctgatattaaggagaaatggggcatcaatcataacgggttccacactttcccagaaatctctactttccaagagatcttcctggacgccgaggaggagctggaccttaccgatgcaggtgacatttccaactgcaaaaacaatctcaagagctgtggggtgggataccgggcttcctacatgcgcaaagccagcgagcttttcagcctggaaatggacattagcgaaatcagtaaaatgaactatgacgaggcgttcgagacaatactgcaggtccccggggtgggtccgaaggtggccgattgcatactcctttatggattcaatttcagagaggccttccctagtgatatatggataaagcgcattgtgagttacctgtactttgacggcaaggatatttcggtgcccaaggtcagggaatttggcatggatgagtttggagacaatgcaggctatgtgcagctgtacatgtttcactacgcgcggaagtcggggctcatggctaagctaaagtga

SEQ ID NO: 10016 - DNA, 351 bp, synthetic construct
  source 1..351: mol_type = other DNA
atgaagatcaggtacgccacaatgatcgttaatgacatggaggagagcgtgaagttttacaccgaaaccctggacttcacggtggacgaggtcttcgatgtgccggaaggcaaaatcactcttctggacggggagggctttgcaggaattgaactaatcgagagttcaaacttcggcagcggcctctattccattggaatggacgtcgaagatatccacaaagaaatcgagaatctggaggccaagggggctaacattgccatgaaacccataaagatccaggtcggttacatggcgaaggtaatagatccaaatgggattaacatcgtgctcgtgcagcataaccggtga

SEQ ID NO: 10017 - DNA, 1377 bp, synthetic construct
  source 1..1377: mol_type = other DNA
atgaagctcgagaaaatcgtgctgatcgtagccacattgacatccttcttcaccgtgtttctgtccagcgctgtgatggtggcagttcccactctggcttcggagttcggaatgagcaatattatccaaaactgggtcaccatgctatttttcctcgcagtagctatttttaccatcccatccgggcagctgtctggcaaattcggacttaagaaaagcatgatatttggcagttcagtgtatatcctaagcagcattgccgctatttttagcataaacagtgaaatttttctcatctgtcgattagttcagggtatcggggtgtcctttctcaacgtcgctagcatggcaatggtcgtctccgctttcagcccacaggaacgcggtaaagcaatcggcatcaacgtcacgggagtgtatctcgccacatccacctcccccgttatcgggggatttctgaactttcatttcggctggcggagcatcttcctcacctccgtgccctttttaatcttgattctggtgctgctcataactgagatcaaggaggagtgggtgactatgggggatgttccgattgactggaaaggcagcattgtctacagtctgggcatactgctgttcatctatggattcacaaggcttgacgagagtaccggcattatcttgacggttataggtctcatcgtcctcggcgtcttcgtcgccctggaacttagggaaaaatacccggtattcgacgtgaagttcttcaagaatcctaagttctcctctgcgaacttcgccgccctaaccgcgtacctcgccaccttcgccgtgaccacgatcgtgaattaccacctgcagtacattcgcggttatgatagccagatggcaggcataatcctgctggtggcccctctgattcaagtgatcatggccccaatctccggaagactgtcggataagatcaacccccaaaaactcgcggctatcggaatgtttttcggcgccatttcacttgccatgcttagcatgctgaacgtttcaacacccttatggtttttgattatagcgatggtcagtcacgggctggggtttggaatattttcatctccaaacacaaatgctatcatggggtcagtgccccagaaggacacgcctgtggcttctgcctcagtggcaaccatgcgggtgatcggccagacaatgagtatggggatgctgaccctggtctttgccttcgtgatgggtaatgtaccaatgatcgagaagtacttccctctgttgattactagtagccagattacttgcctgatttgcatggtgctttgcgcagcctcggttttcgccagcctggtgggcatcaagagcaaggaaatgttggagttcaattga

SEQ ID NO: 10018 - DNA, 432 bp, synthetic construct
  source 1..432: mol_type = other DNA
atgaaagtcgcaaccattgagaccgataaagggaatatcgagctggagctcttcccaaatgaggcccctggaactgttgccaactttgagaagctaatcaaggaaggcttctatgatggacttacattccacagggtgattcccaacttcgtcatccagggggggtgccctaagggcaacgggaccggtggcccaggttacactatcaagtgtgaaacggaaggcaacccgcaccggcatggaaccggagccctcagcatggcgcatgcaggcaaggacacgggcggaagccagttctttataacacactccccccaaccccacctggacggcgtccacaccgtatttgggcaggtgatcaaaggtcaggacgtggtgaatgctattcgccagggcgacaagatgaacaaactgacagtggaagagagatga

SEQ ID NO: 10019 - DNA, 1161 bp, synthetic construct
  source 1..1161: mol_type = other DNA
atgaacactcaagaactaataaaaatagaggacgactacttcataaacacgttcacgagacagcccgttgtacttgaccacggtgagggggtgagggtgaccgatatcgatggcaatgagtacctcgacatgttcgcaggtattgcggtaaatagtttgggtcataataaccctaaactggtcaaggccatccaggatcaggctgcaaagctcattcacatctcaagcatttattataatgaacctgccctcatctacgctaagcggctgatcgacctgaccagcttcgaccgcatcttttatgccaacagcggggccgaggccaatgagggagctattaagctagccgtgaagtacaccggcaagagtgagatcatctcgaccgtggactcctttcacggccgaacaattatgaccctggccgccactggtcacgaagagtaccatgaaccattcaaatccataatgccgcagggatttatcaatgttccctacaacgacctcgaggctatcaaaaatgccattactgagaataccgcagctatcatcgtcgaacctatccagggggagggcggggttcacgtgcctgacgtggagtatttaaagggaatcgaggccatctgcagagaaaagggcattgtatttattgtggatgaggtgcaaacaggattcggaaggtgcggcacactgtttgctcacgagttattcgacgtcaagccagatataatgactatggccaagggcatcggtggaggagtgccaatggggggaatcttggcaaccgagaaaattgcgtccgcattcgtcccgggcgatcatggcacaacattcggcggcgggccactcgtctgcgcggccgcgaacgctattctggatgaatttgcagataaaaacatcttggacaacgttaacgaggtgggcggatacttcatttctgaactgaagaaactggacaaggatatcatcgccgatgtgcgcgggaaggggctgatgatcgggcttgagctcaccaaacccggggccgaatatgtggacaaactccggaaggcaggcttccttattaactgtacagccggcaacgtgctgcgttttgtcccccccctgataattaccaagacggacatcgacgagtttgtcgaagctctggatgaaattctgtga

SEQ ID NO: 10020 - DNA, 1284 bp, synthetic construct
  source 1..1284: mol_type = other DNA
atggatctgaatatcaaagtgaacgataaaaaccacctcgatattgggggcgccgacgccatcgatatcgcagaggaatttggcactccaacctacgtgattgatgagaacaggatcagagataattacaatagattttattcagctttctcaaagtactatcccgacttcaaggtgttctacgcgtgcaaggctaatacgaacctggccgtaatgaaaattctcgagagtgaagggtgctgtatcgacgcggtgtcccccggagaggtgcatatcagcaaaatgctcgggttttccggagaccggatactgttcacgggtaacaatattactaatgacgagttaaaatacgtgcatgacgagggcgcagtgctgaatatagactcagtctcggcacttaaccgcctgtctaagatgatcgaccctgaaggtgtcaaaatctcctttcgcgtcaacccaatggtaggtgcaggccaccatgaccactgtatcacaggggggataatgagcaagtttggcataatggagtccgaggctgttgaggtttataagaaggccgaaaagctgggattcaaccccgtgggcatgcactctcacattgggtcggggatcttggacccggaaccatttaagctggctatcgaaagtaccatggatattgccgggaaggtgcaccaggatgctggaattgacttcgaatttgtggactttggtgggggcgtgggtatcccctacacccccgaggagaacgttgtagatctggacaaattcgccgaagttaacgtcggactgttcaaggagaaacttgagcagtatggcatgggcaaccctacaatgtatctggagcctggacgattcttggtgggagatgcttgtgtgcttctcgtaacggtgaacagcctaaaacagagctacaggaagttcattggcgtcgatgccggtttccataccctcctgcggccggcgatgtacgattcctaccaccacattgtcgacgcaagcaggatgaatgccgagaatacacaaaccgtggacatcgccggcaatgtctgcgagtctggagacctgttcgcccgtgaccgcctaatgcccgacgtggaagagggcgacgttctcggcatactcaacgcaggcgcctatggattcacaatgtctagtaactacaactcccgacctctggctagcgaaatcttggtcactgatggggaatgcagcgtggtccgggagagagaaacctttgaggatttatatgccaagcagagtatcccaccacatctgaagtga

SEQ ID NO: 10021 - DNA, 861 bp, synthetic construct
  source 1..861: mol_type = other DNA
atggtagatctaaaaggcctgaaattctccaagatgcatggaatagggaacgattttccaattattgatgaaacaaagggaaaggtcatttctgaggaagacaaacctgaagcatgccgaattttgtgccaccggaacttcggagtgggtggggacggggttctgttcgtggagccaagcgatgttgcggatatcgggtaccgcatgttcaaccccgacggcagtgaggccgagatgtgtggcaatggcatacgctgctttggagactttgtctaccggaagggcatcctgaaaaaggagaagatgacggtggagacaagggcgggaatcaaaactatcgagatcacgctcgaagacgatgaaccggtcttattcaaagtggatatgggactgtcaaccttcaagactccggaaatccccatgatttcggagatggacgaatttttggattgtgagctcgaggtgctcgataccaccttcaacctgacagccgtgtccgttggaaatcctcacgccatcatctttgtggacgacctcgacgaaatcgacattgacaagtacggtccagctatcgaagcccatgaagtgttccccgagaagatcaatgtccactttgtggaggtgatttccaagaacgagggcaagatgagaacatgggagaggggcgccggggtcaccctggcatgcgggaccggtgccactagcaccgctataagcggctacaaactaggtctgttcgacagtaatatcctgctgcacctgcctggcggcgacctcaagttcaacgtatatgagaaagacgacgctcttggcgccttcatgaaggggcccgcagagcttgtgtatgatggggaattttga

SEQ ID NO: 10022 - DNA, 585 bp, synthetic construct
  source 1..585: mol_type = other DNA
atgccggactttaaaattaacatcgacgataacgtttatatccccgctgaagacagctacctgctggctgataacctccagatcaaaaaaggccaaagtgtgctggagatcggcactggaagcggcatcgtcgccatgtacgccagccgccttacagacaatatcacggtgaccgacattaacttcgatgcctgtgagcttgcatgcaagaattttgaagcgaacaacatcgaaaatattgagatattattcggcaacttgttcgaccccgtgcagaaccggaagttcgacgtaattctcttcaacaccccatacctgcctactgagaagggggaggtcctggatgacaccatcaattacgccttcgacggtggactggatggtaggaaggtcatcgatgcctttctgaatgaggtggggaatcatctcaacgacggcggaatcgtgcagatgatacagtcgtcactatccgataatgaagaaacactgaaaaagctcgacaagctggggttcatttccgagatcgcaaagaaagagcacttttttttcgaggatataaccttgattaacgcgtataagatttga

SEQ ID NO: 10023 - DNA, 873 bp, synthetic construct
  source 1..873: mol_type = other DNA
ttgaatagtgaaaattccatatccctgtctaagacaactaaaagcatcctgaatcagaatgggatcaagctgaacaagaatcttggtcagaattatctcattgataagaataagcgcgatcaaatcatcaacttcggcaacatcaatgagaacgatgtcatccttgaaattgggacgggaattggcacccttacgatcgaactggccaaaaaagcgaaaaaggttatagctattgagcaagacaagaacatatgtgacatactggccaaaaggctgaaagaagagaagatagacaatgtagaactcctcaacgaagatgccttaaacattgagtttccgaagttcaataaaatcatctccaacctaccctatcagatcagcagccccatcacttttaagttcctggagtacgacttcgacttagctattctgatgtatcagaaggagttcgccgaccggatgaacggggaggtgggcactaagaactactcgcggctgagcgccatgctccatttcaagtgcgacgtgaagaaactgacagatgtgagtagcgaaagttttattccaaagcccaagatcgactcaacagtggttaaacttaccccaaaaaagaataaaatctcactggaggattttaaaatctactccaagttcaccaaggcactgtttcagcaccgcaacaagaaaatcaggaacgcattgattgactctcgacacatcattaccaacctggacaaaaaggaaatgaaaaaatgcatgaacgagatcgaggatgagaagttgaacaattacctcaagaagagagtggtggtcgtcacccctgaggagattctattcctcagcaaggacctgaacagcattctcaacggatga

SEQ ID NO: 10024 - DNA, 633 bp, synthetic construct
  source 1..633: mol_type = other DNA
atggtggataacaaaaagagaaatgggaagaagccaacggtcaaaaaggagcagtatgcggtggtgctggattacctgagcagaggctacgttaagtccgatatgtcgaaatttggcggaaagccgattgctcaagctatcggtaccgagcagttcactctacttgagctggcacctaagaatggggtcgatttagagataggggacaccgtatttataggccagggcaagaaggacaagatctaccgggtccttgggcgcctcaacttcgaacgcctgacggccacaagtcgaatcgagctggattacacaatccgggacatcgtggagtcaaacgaggaaaaatatgttaactttttcaatacaactggagccgtgagcactaggctccacaccttggagctgatccccggaatcggtaaaaagtatatgtgggacattattaacgcccgcgaagaaaaaccctttgagagcttcaaggacataaccgaacgactcccaacactgaccgaccccgcaggaatgattgtcaaccgtgtgaagcaggaattggacagaaacgccattaaacggggcaagtccaagtactacatcttcacccaggtgcccaaaaaacctaggaatccaaggtga

SEQ ID NO: 10025 - DNA, 354 bp, synthetic construct
  source 1..354: mol_type = other DNA
atgatctccatgatcgggaaggaaattattgagagtgagccaataagcagcgccgaggtcaaaaaggtgcttgaagacttctccgaagacaatgagctgaactacgaacagaatatcaccttaaaccacttggcgcgcttcaagaggtatagcgtggaggattcagaggagattatcgaaaagctccaagaggaatttggcctacgggataaagtcgctgtacgaatcgtggatctcgttccgaaggacctggcagacctgagactgatcttcgccaaggaggccataaaaattgagaaacccgacatggagaagatcctggaactcctggaacagtacaacatcgaggagtga

SEQ ID NO: 10026 - DNA, 291 bp, synthetic construct
  source 1..291: mol_type = other DNA
atgcaacgttcacgcgggctgaagagtcggagccggaaaaaaatgacaaagacccagagacctgggcgaaccaatcccataacgaaccgcatgcagaggtttgaggacggcgatctagtgcacatcaccatcaacccaagcattcaaaagggccagcccgccccgaggttccatggtaaaacaggaaaggtgactggccagaaggggaaagcatacatcgtatccctcaaggaaggaaacaaggcgaaagagctgattgtcagaccagaccacctgaagctccagaagtga

SEQ ID NO: 10027 - DNA, 2319 bp, synthetic construct
  source 1..2319: mol_type = other DNA
atggagaggacttcagaactcggaaaaaatttgcatgagtcgacaaagatcaatgtcgagaaaaataacgggattaaagaaaggttcagctatgagaagctgttgaagtcactggtgatggttgagactcccttttttgagtccgacaagattgtggccacagtcgtgagccagttgtatgacggaatcaaaaccaaggaaatcaaaaagatagtgcacgaatgcctagaggacatcgattctgagattgccaacaagtatttagccagtacccgcctcaaagtgcggacctcgagggacaccattgaagcttttgacctgtccaagattgccaacaccttgatcgaggagacgggcgcaagccaggagactgccttcgagatagccacagaaacctggaaggagctgaaaaaattgaatgtcgaatacttaacggctcccatgatccgagagatcgtgaacactaagctcgttgaatatggcctggaggacctgcggagtcgttacacgcggctagggataccagtctacaacatcacaaatctaattgagaacgggaacagggacaacgcgaacatgattcacaatcctgagagtatccacaaacacgtggcagatgaagcactgaagcagtatgcccttctgaagatgctccctgcccacttggccgatgcacacatgtctggcgacatccacatacatgatctcgaattttttgcaggccgacccctgaactgtatgcaacacgacattcgcaccttcatcaagtacggcctcaaggtcgacgggaccggtgaccacacttccatcgccggggccccaaatcacatggagacccttatgaaccacacgggcgagatcatgctagccgcccagcagaatatgtccggcggacagggaatgtcactctggaacgtatttgtagcgccatttgcgcgcggcaggacctacgaagaaatcaagcaatccgtgcagatgctcgtttacaacctcaacatggcctatgcagcccgcggttcacaagtgccattcacaagcatggcgctcgagtttggggtgccggacttcttaaaggaggagactgcctacggtccaaaaggccaggtagttggaacctatgctgacttcgaagaggaaaccagactgattcagagagccttcaccgagacactgctggagggcgacaacgagggaaagccccatcttttccctaacacaatctacaccctccggaaggaaacaatgaccagtgagtacgaagaggatatcaggctggtgcacgagctgtctgcgaagtatgggagctcctactttgtcaatatgttccctaaatacagaggcaacatggccaactacatgggttgccgcacctgtcttcaggacacgtggactggggactgggatcaggactgcctacgaacagggaatcttgcatatgtgactctgaacctcccaagaataggctaccaatctaaggatgaaagtcaggtgttcgagtatctggatgaatacatggacctggcggtggagactctgatgcttagaagagagcagggactcaagtgcctgaatgatttccatatcttgcccttcctgaagcagcaagtcgctgaggatagctactaccgaatccagaatagcaccctgagctttggtttcgttggactgaacgagatgctgtcctcattgtttggggccggtattgaaaatgctgacgcaaacaagtttggcgtaaaatgcattgaatatattaatgatcgcgctaatcaactgaaagacgaaacgggactccggtggtctgtgattcagacccccgctgaatcgactgcttacagattcgccacgctggataagaagcagtatggtgatcaggctatcgtgcagggggagggcaatgccaactactacacaaacagctcccatgtcccggtggacacaggactgagcctcatcgagaagatcaaaatcgaagagcagtatcacagtataacacctggcggacatatcttccatgcattcatgggtgaatcatacagcgatccggactctcttatgtccctgaccaataagattgctaaaaagtccgatataggattctgggcttacagctccgcactgagtttctgtcttaaatgcaaaactctgatgaagggcctgaacaatgtgtgtcccacctgcggggaaaaagaggatgtcgaatggtatgaccgcatcacaggctacgtccagcaggtgggacgggctaaaagcgccagcggcggctggaaccccgggaagcggcaagagttaattgaccggaggcgttttgaggataactga

SEQ ID NO: 10028 - DNA, 3297 bp, synthetic construct
  source 1..3297: mol_type = other DNA
atggattacttcgataggctcgaagctgatacccatcacctatacgacatagctaataaggccaggtctcgggggctcgacgtggaaatagagacagaagttccccttgccaaggacctggcggagagagtggaagggctcgttgggcctgagggcgtggccaaacggattaaaatcctggagcaaaacattacacgggaggaggtcgcgtttgagattgcggcggaaatcgcttccggcaagtttgagcttacaggcgagaaagctaactgggataccgagcagcgctgcgaccaggggctgaggacggctctggccatcctgacagaaggggtggtggctgcccccctggagggaatctccgatgtcaagattaaagacaactttgacggaaccaaatatataggggtatactttgcaggcccaatcagaagcgccggaggaacagccgcagccctagcagtactgttaggggataaaattagacaggccatcggcattgatgccttcaagccaatcgatgacgaaatcgagagatacgtagaagaggtggaactgtacgagagcgaggtgacaaatctgcaatactcgccaacccccgaagaagtgaggtttgctgcaaaccatattcccgtcgaagtgagcggcgagcagactgacaaggtcgaggtctctcatcgggacctggaacgtgtggagaccaacaacattcggggcggcgctcttctggccatggtggaaggcgtgatccagaagagcaagaagattaagaaaatctcaaataagctgggtctagactggaattggctcgaggaatacagcaagcctaagaaggacgattcaaaggaggacagcggcgacagtgagattgtgagtgagcccaagtacatccaggacatcattggtggacgacccgtgctcggctacccctcggagaaaggggcgttccggctgcgctatggacgatcgagaaacactggtctggccacgatgggggtgcacccagccacaatggccttgcttgatttcctggctgttggaacacaactgaagatcgagtaccccggaaaagggaactgtgtggtgcccgtggacagcattgagggccctaccgtgaagctgaaaaatggggatgtcctgattctcgattctgtaaagaaagcaagggaagttaagaaagacgttgtggaaatcctcttccttggtgatatgctggttgcctttggagagtttttacgcaacaaccagaccctgtatccctccggctggtgtgaagaatggtggatacagctgttgatgagaagcgataagtttgatgcagagaacacggaccttgacttgtacaagctcgagtatgagtatttatcagctactgaagcatttaatctctctaaggagtacaacatccctctccaccctaaatacacctactgttacaatgatgtgaccatcgaagacttaaattcactgattgacttgatcgagaatggaaagagcacattcaataaggatgagggcatgaagctcgacctgtcctaccagaagcgtattttggagatcataggggtcccccacattgtacgcaatgataaaatcatcatcgataaagaccactcttatagcctgctcgaaacattgcccaaaaaactaccagaaaatgagaccacgatagaagccgtcaacgaaattagccctatcgagataaagaacaaggcgcccgcttacatcggtacccgtgtcgggaggcccgaaaaaagcaaggaacgcctcatgaaacccgccccccatggcctgatcccaatagggaataatggtggtagccgacgcctggtggccaccgcggctaaaaaaggcagcgtgaaagtagatatcagtagaagaaagtgtaccaacccagaatgcggcatcagttcctttggaagcctgtgccctaagtgtggcagcccaactgaggtcggaaaaccgagccaaaagacgatcccccttgctactatgcttaagaaggcctcagacaacgttaaggttaggcgggtggatgaggttaagggcgtcgtgggtatgattagcgaatccaagctcccagagccgatcgaaaaaggcatactgagggcaaaacatgaagtcttcaccttcaaggacggaactattcggcacgactccactgacttgccactgactcacttcatcccaaaggaaatcggggtgacagtggagaagctactcaagatgggttatgagaaggattgctacggcaacccaatcgagaatgaaaaccagatcatcgaactgaaagttcaggacatcgtcatttcagacaactgcggcgagtatctgctgcgtactgcccagtacattgacgacgagctggaacgctattacgatatggaccccttctataatgttaaagagaaaagtgacctgatcgggcacctggtcgccggcctggccccgcatacaagcgcaggagtcctcgggagaattgtaggctttaccaaggccctggcttgttatgctcacccgtacttccacagcgccaaacggaggaactgtgacagtgacgaagacgcagtaatgttgcttttggacgcactgattaacttctccaagtcatatctgccgaacacccggggaggaagtatggacgcccctttagtgctgtctagtcgaatcgatccagaagagatagatgatgagtcgcacaacctcgacatcttcgagcgcttcccggtggagttttatgaggagacgtacacccctcacaagcctgcagaggtgcttaagtacattgataatgtcgagatgcatttgggcaccccacagcagtatgagggacttatgttttcccatcacacctccagcatacatgccggacctaccgtctgcctctataaacggctccctagcatgcgcgagaaggtggaggcccaaattgctctcgcggagacgattcgagccgtcgaccagcgaggtgtcgtggagaaggtgttatcctcccacttcctgcctgatataatggggaacagtcgcgcattctccaagcagaaggttcgctgcccgaagtgcggcgccaaatatagaaggatgccccttactgggaaatgcaagtgcggcggtaatctgatcctatcagtgtccaaaggcagcgtgactaagtatctcgagatctcccaagagctggtgaacaggtaccctgtgtcccactacttgaagcagcggctcgaaatccaggaatttggtatcaactcattgttcgagagtgacaaaagcaaacagagttcgctggatatcttcttctga

SEQ ID NO: 10029 - DNA, 954 bp, synthetic construct
  source 1..954: mol_type = other DNA
atgagcaatgacaagcccattaacgctatgtacgggagcaagatgaagctcgacctggacaaactcaaaaacaaccgcaaaaaggatgacgaaggaaaagtcattgaaacaaagcacatcttggagggtagcgaagaaccagtggtggaggatgcacctgaggaggtcgtagaggagactgtcaaaaaggaggccatggaggaggcagttaaggaaaagccgtccaagaacgtggactccagtgtggtcgacagtctgaaagtgaagcttggcgaacgggagaagaaactgagcaaccagtccagcgagctgaactatttaaccaataagcttattcccaaactgaagaaggaaaatgctaatctaaagtccctgaaaatcgagttaaccgatgccctggagaagagcacaagaaagtacttcgaccagctggacattaacgccgatttgagtaataaaatcggcaaaataggggcggaaggcgccgtgaacaaggtaagggccgataaatttgaggctgaaatcaattctgtgaaagaggaattgcaggacaagataaaccagtacaaggaaaaactcgattcagttaacattgatgggctgaagaaagagaacaatgaactgtcatgcgaactgcgcgacatcaaaaccgaactggataagactaaaaaagaaaacatgaagctttcggaggaggtgaagtcactcagggacgagataatcgagatcggcaactacaagcaagaggtggacaaccaaaataagaaggagatcgaggagtataaggaggagatctccagcatttccaccaagctccggctgaaggaaagcagctatgataaactcttcaatgaatcgagtaaaacgatctcaaatctacgtaagcaggtcgcgaagctggaagaggacttggagaaggagagcaaccgaggactctttaacagattcaaatga

SEQ ID NO: 10030 - DNA, 492 bp, synthetic construct
  source 1..492: mol_type = other DNA
atgacaaacgataattacttcatggacgaggctattgtggaagcccagataagcttgaacgaagggggcctgccaatcggagcagtccttgtgaaggataatgagatcatttccagaggccacaataggctgatccagaacaacagcgtggttctgcatgccgaaatggatgtgctcgaaaaggccgggcggctcaactacgaggactacattaagtgcaccctctatacaaccctgtcaccctgccccatgtgctctggagcgttaatcctgtataacataccgcgcgtcgtcatcggcgagaatactaccctaatgggtgcagagaacctgctcgaaagtaacgacgtggaggtagtgatcctgaataatctggaatgtcgagagctgtttttgaaattcgtcaaagacaaccctggggtatgggagaaggagcttaaaaaggttggcaacaatactacggtgaagtacggagactattgtaacaaatga

SEQ ID NO: 10031 - DNA, 378 bp, synthetic construct
  source 1..378: mol_type = other DNA
atggagatcattgtaacgaatgaaatggatgaacggttcatcgagatatgtaactccttcgagtgcttttccgacgagccccaggtggtgctgctacttaacaatttcgggaaaattgtcggctgcgcgagcttcaaggtgtacgatgcagactcggccgagatcaccacattatttttgaactcacacgacaattgcgaaaagatagcttacaaactgattaggcagctcgagaagatcgccatcgactacgagtttaagagtatagttgtcaacttcgacagctatgaggatattctgatcgaaatcttcgagaaactggattataagttcatcgacgaactcctgatgaagaaggaatttaaaagcctcatttga

SEQ ID NO: 10032 - DNA, 1584 bp, synthetic construct
  source 1..1584: mol_type = other DNA
atgacacactggattgagaatgtcgccaaagagttagcagagcgggatgtagaggaacacgttattgccagcggcaccagcatctcaggctccatacacatcggcaactcgtgtgacatatttattgctaatgccattggcaagaagctgaggaaacttggcaaaaaagccaagacaatttggattgcagatgaccatgaccccctgagaaaggttcctttcccgctgccccaggactacgataagtacctcggtatgccctactcagtgatcccctgccctgatggttgctgcgctaacttcgtggaacactttgaaaaacccctgctctcagtcatggacgattacggaattgagatggagaccaagtctgggttcgagatgtataagaatggagtgtacaacgactacatccgcacaagcctcgaacatactgatgagatcaaggagatcttcaacgaataccgtcgcgagcctctcgcggatgactggctgccatacaacccaatctgtgatgaatgcggccgcgtgaataccacctatgcttatgactttgacggggacataataaagtataggtgtgaatgtggccacgaaggggagatggatattaagagcgggaacgggaaactcacgtggagagtcgaatgggctgcccggtggaaaatctttaagacaacatgcgagccgtttggcaaggaccatgcggctagcggcggatcatacgatgtgagtagcataattagcgaaaagatcttcgactaccctgcaccttatccggtaccctacgagtggatcaccctcgacggtgaggccatgtccaagtctcatggagtcttctttgcccctgaagaatggcttaaaatcggacccgcagagtcccttaactattacttatttagatccaagccaatgaagagcaaggatttcagtccaaagatgcccttcctggactttatcgaccagttcgacactgttgagaaggtgttctatgatgaggaggaagcaccgtctgaaaaagaaggtaagaaattcaaagagatatatgagatcgtgcagatcaacgaggggagtcccctcccattcaggccctctttccgcttcctagtgaatgcctaccagattgccggaaatgacctggaaaaaatctatggcattctgaaacgaaacagccagctgtccaagagttttaaggacaaagagtttggggacttgacggaggccgagctggcccagtatcgggaacgggtcgacaatgtcatctactggctggacacttatgcccctaaattcgtaaaattccaagtgcaagagaagaacatccctaaattgccacttaccgacgagcagaccaagtttctgactgatctggcggacctaatggaaaacaatgagtttgcagaggctacgcaattgcacgatgccatgtacgaaatcctggaatcgcaggagctgaagccacaaaagggattccaggctatttacaagatgatcctgggccagaagcaggggcccagggccgcgtccttcctattgtccctggataaggattttgtggtgaaacgactcagacaggaggcttga

SEQ ID NO: 10033 - DNA, 1338 bp, synthetic construct
  source 1..1338: mol_type = other DNA
ttgactgttctgaaactgatcggactctggtgcgacaaaatgacgcagattagtgacgcccggaaaggcatactgaccgaagagatgaagcatgtagccaagatcgagaatgtgagcgaagactttatcctgaaatcagtcgctgaaggtacaatagtcataccaggaaatgtcaaccgagatgtggaagctgcagggatcggggcaggcctgagaacgaaggtgaatgcaacagtgggaaccagcacagatatcgttaacttcgatgaggaggtgcagaaagcaaagatcgccatcgaccatggggccgactgcctcatggaattgagtatcggtggagaccttgatgagatccgccggagggttctcgatatgagcccgctaccagtagggtccgtacccgtgtaccaagcctccattgagagtattcgcgagcatggcagcgtggtggacatgactgaggacgacctgttcaatgctatcgagaaacaggccaaggacggtatagacttcatggccatccacagtagcatcaacattgagactttaaccaggctaaagcgccagggcagagtcacgggcctggtatcccggggcgggtcctttatgtccggctggatcgttgaaaacgagaaggagaatccactttactccaactttgattatgtgctggaaattgctaaggagcacgacgttgtgctgtcactcgccaacggcatgagagccggatctatagcggactcaaccgacagggctcagatccaagagttgatcattctcggcgagctgattgatcgcagccgtgaagctggcgtccagtgtatgatcgagggccctggccacatccccattaatgagatcccaaccaacgtgatgattcagaagaagatgtgtagcaacgcgcctttttacatgctcggacctattgtgtgtgatgtggcaccagggtacgaccacattgtgagcgcaataggtgctgcctcgagcgcaaaggccggagctgacttcatctgttatgtgacacccgccgagcacctcgctctgcctaaccccgacgatgtgagagaaggcgtcattgctactaagatcggagcgtatgcgggggacctggccaccgggcaaatcgatggtagccaggatttagccatggccgaggcccggaaaaatcttgattgggaagcccagtactcatgcgcaatgttccccgaggcggcccgggccaagagggaccagcgacccccggaggaagaagacacctgcacaatgtgcgggaactactgcgcagtcaagatcgtcaacgaatggctggataaaagcgattcggacctgattaaatga

SEQ ID NO: 10034 - DNA, 915 bp, synthetic construct
  source 1..915: mol_type = other DNA
atggcaaagaacagagaccttctagcgatcgggcactccgctcatgactacatcattcgagtgcccgagtttccaaaagctaacttttcggccccaatcacaaacatgaagaccttcaatggcggcgccgctgcaaatgtggcctgcgtgggcgccaagctgggcctgaagaccagcctggtttcagccgtagggggcgacttcaagaaaacggaatattacgagcacatgcagaatctggacatcgacacggattctttgatcattgtcccgggtgagagcacccccacggcatttgtactgactgatgataatgaggaccagatcagttacttctactggggggcggctcgtgagtttgccgaaagcaaggtccccgcctctgccattaaaaacaccgaagccgtgcatctggcaacaggagaccctaactttaattggcgctgcagcgaagaggctaaaaacgaagagctgctcgtgtcattcgacccaggccaggacctcggaatgtatgatataaaaaagttaagggatgtgattgagaacactaccatcctcttcggcaaccaccacgagatcggccgcatcctagaatccctcgaagtggatttggacgggctcaggacacttgggcctaaaataattgttaaaacctgcggggccaagggaagtgaaatctacagcaacgaggacaagataaagatcgatgccattgagacagaggtggtggaccccactggagctggagatagctatcgggcgggattcctgtcccggtttctgaatggtgagtcgctggaagcatccgccaagttcgcaagcaccgtctcctcattcattgtcgagcaccaaggttgtcagacaaacatgcctactttcgacgatagtttcgagagaatgaatcggttttactga

SEQ ID NO: 10035 - DNA, 867 bp, synthetic construct
  source 1..867: mol_type = other DNA
atggagttcgagtcaaaagggctaataagcctggagatagagggcgaggtgtatggctataagctctatgagagccttgactcactaactaaaactaagtcccaaaggaagtctgcaaaggaactcaacatttcccacacagtcttcaaccgccgcatccttcgagcggagaagaaactgggattcaagctgacggaaaagctgggcaatggtaccgagctgaccaaagagggattggacctgttagaggaatttaaaaagtacgccatccagattgaaaaaactcccaccatcaacatcgttggtggccatatatcgaccgggctgctggaaagtatcgaattgccgttcaagaccaatatttacagctccaacgatgaggacgcttttgagcttgctaagcggggcgtagtggatatcctcacactcgatgatccattaatcgcattcgaaagagacatcaacttctaccctatagcctacgactacctggtgcttattagcagtcccgactctgagaaaattgagtccatctcagacctggagaacctcgattttgtcagtgtgtctggatctgcccaaaggttggcctggaacagtctgaagcactacgacatccacgtgaatattaaggagaacgtctcctcgcagttcgacgcgtataagaaagttcggaacagcaagaacctgcatacattcctcaatgcatcctacttcaaggggaacgagttgctgaaatttaatacccagcacgtcatcagcctgatcaaagtgaatgaagataaggccaaggtggacgagtttatcaaatatctcacgaatgaagcccaggaaagcattgaaaagcaggggtttacaccaatgtga

SEQ ID NO: 10036 - DNA, 591 bp, synthetic construct
  source 1..591: mol_type = other DNA
atggagattatgaaaacctcaatcaaggctatattggacaacattaagaacgccgaggacttcctggatgaaaaggcaattgacgaatttgaaaacatcatcatcggcagcaagaatatattcgtgactggtgctggacggtccggactcgccgctaaagccttcgcaatgcgcctgatgcacctggggctgagtgcctatgtggtgggggaaactatcagccccgcgatctacgaggatgactgcattatcgcaatcagcggctctggtgagaccaacaccatcgtttcagccgtaaagatagccaaaaacagaggctcgaaggtgctcgccctcacaagctatccggaatccagcctgggccaactagcggatgcttacattctggtgaaaggacgaacgaaaaaagaagtggacgacgagaattacatgaagcggcagatccacgggaattacacctctttgacaccactcggcacggcattcgagcttacaactttagtctttctggacgcgattgtctccgagcttatggagaagatgcagcagaccgagagtgatctgaaggccaggcatacagtcctggagtga

SEQ ID NO: 10037 - DNA, 750 bp, synthetic construct
  source 1..750: mol_type = other DNA
atgaaaatcgagaaggtcaacgccataaagtacaaaaacaaccagcacgaggaggtgaaagagaatgtggttaaagatgagactatcaccctcacaatcaatggcgagatcagccgcagtctcagcgcaattgaagactccctgaaagagtttgctgtgggctaccttttcaacgagaacatggtgaagtccctagaggacattaaaaagatagaaattgacggtgtgcagatcaatgccgaaattgacgataccttgctgaaaaccaacgagacggtcctgtgttctgattcagccgggggctggagatcgaagatcaaagaagtgaaccctgtggaatctgacctgcaggttaatgtgaaggaactgctcgatcggatcgaggaactgaagaataatgctgagatatggcaggctactgggggaacacatgttgccggcattgtccacaacggacaattcgtcgtcaaggaagatgtcagtaggcacgtggccgttgacaaggtaattggatatggactcttaaatggtttcaacttgaaccagtcctacgtaatttacagcgggagaatgccggctgacatggtgatcaagatgagcagggccggcgtgcccatcctggcaagcaacgcagcgccagccaattcaggctataacatcgcgaagaaggggaatataaccctggtggggttccttcgaggccagcgctgcaacatctataacaaccaaaatcgggtaatctttgactga

SEQ ID NO: 10038 - DNA, 570 bp, synthetic construct
  source 1..570: mol_type = other DNA
atgaatatagatgattacgacgagcagctgcagcgcgcagtggagtttcatggcgaactttgcggaggcatcgcgatcggaaccaagctcgggatgtacggtctcgagctgttgggcatggagctgaaccagaggcataagaacctgattgtaatcttagagagtgaacggtgcacatccgacgggattcagagcgtcacgaagtgctccattggcaaaaagagtctcaagctagtgtattacggaaagttcgccgccaccttctacaacatggacaccggggaggcataccgagtgagcgatgctgacgccaacaaaaagaataaatcgaatgagacaaaggacgagctggtggaacgctttcggataactccccccgaagaacttttcaacgtcgaaagagttcacgtgaagcctttcaaaggggctcaaaaaccggggggtaatcacaaaaccagatggtgtagcgtgtgtggcgaaaaggtcactgatgactaccacaagctgagggccggcaaaccaatctgcgagtcttgtgccaacggatcatattatgagatcatcgagtga

SEQ ID NO: 10039 - DNA, 804 bp, synthetic construct
  source 1..804: mol_type = other DNA
atgagctcctttaagagtccagtggatacggccaaggcaatatctaagacagctggagcaaagaacagcgcaaatatcgtgaatgttatattgctctcattcctggccggagcttacattgcctttgggggtctcctagcaatcgtctcgagcgccgggatgatcaaggccggggcccccttgggtctggagaagttcgtctttggcgcagtgttcccggtggggctgattatcgtggtgcttgccggaagcgaactgttcactggaaatgtgatgtttatggtgatgggggttctggatggatcagcttctattggcggactcgcgaaaaactgggtactcagctgggttttcaactttgtgggggctctattcgtggcctatgtgatagccttcatgggcggcctgtgccctacagacgcctccgtccctgcctacgcgataaccgctaaagcgattgccgtcgcagaaggcaaagttactatgcccttcacagtcgctctgattaaggctatcgggtgtaactggttagtgtgcttggctgtatggctggccaatgtatccgacgacgctatcggtaagattgtgggcatctggtttccaatcatggccttcgtcacccttggctttgagcacagtgtcgcaaacatgtgtttcatcccactggggatgttcctgggcgcgaaaggtgtcacctggactacgatcatcgttaacaatctgatccccgtgaccattggcaacatcattggcggcggactcttcgtggcctgcatctattggtacacctttcttaaagagtga

SEQ ID NO: 10040 - DNA, 2166 bp, synthetic construct
  source 1..2166: mol_type = other DNA
atggtggagatcaagtatgtgccaacaatctgtccatattgcggcaccggctgcggactcaatttcgtggtcaaagacggaaaaatcgtgggtgtggaaccgctaaaaagaagcccggtgaacgaggggaaggtatgccccaagggaaactttggataccagtttatcaatagggaggacaggcttaccacacccctgataaaagagaacggtgaatttcgagaggccagctgggatgaagccctggacctcgttgctaacaaactcaaggaggtgtcagatgaagatcctaataaagttggattctatgcctgtgcccgttcaccgaatgaaaacatatacattacccagaagctggccagggtggcctgcgggacacagaatgtcgaccactgcgcccggatatgccatggccccaccgtggccgggctcgcaaatacattcggcagcggggcgatgaccaatggtttcgacagtattaaggaagccgattacattttctgcattggaagcaacaacatggaggctcatcccctgtttggacggaagatgatccaggcgaaggagaatggggctaaactggtagtgttggacccacgatttactcctacggctaaaatcgccgacgagtatgtccagtttgagactggcactgacgtcgctctgatgaatgccatgattaaagtcatcatcgacaaagacttgcaagacgatgagtttatcgcaaacagaaccaagggttacgaggagatgaaggagactgtccagaaatacacactggacaaagtttctgaaattaccggtatcaagcctgaaactattgagcacttggctgttgaatatgcatccgcggacaaggcagctattgtgtacagcctgggcatcaccgaacactcccatggcgctgataacgtgatgtccactgccaaccttgctatgctgacagggaacataggtcggcagggtaccggcgtgaacccactcaggggccaaaacaacgttcagggggcgtgcgacatgggggcactgccctctgactacgtgggctaccgcaaggttaaagaccccgaaaccacggcatggttcaatgactactacagtggagatggctatgaggtgaacctgccaaccacacccggcctgacgctagtggagatgatgaatgccgctcatgccggggacctgaaggtgctgtatatccatggggaagatcccgttctctccgatgccgatgtaaaacacacaaaggaagcccttgagaacttagaaatgctggtggtgcaggagtgtttcctgacggacactgcccagtgcgctgatgttgtgttgcctgccgcagggtggggggagcaagaaggcaccttcaccagtggcgagcggagagtgcagtgcttacataaggcccaggaacctccggagggcgcatggcttgattggaagatcatggaggagattgccgtccgcatgggagtacctagatcgctgttccactacgagacttcagaggacatcttcaatgagatcagggagtgcgcccccatcatggcaggcatgaaccgggagcgtctggacacgcccgaagcacttcactggccgtgtccctctgaagacgacccatgtcagccactaatgcacaaggaaaaatttgctcaccccgatggcctcggagttttccaagccctcgagcacaagggacctgtggaaacaactgatgaggagtatccactggtcttaaccacaaccagggtattgttccattatcacgccgcaatgacccggagatgtgagacactgaataatgaagtgaagactggattcatcgagatcaacacgaaggatgcggaagagcgcggcattattaatggtgaagtggtcagagcctactcgcgccgcggcgagatcgctatacctgcccgggtcactgatgacatccgagaggggattgtgaacatcccaatgcactttgtcgaatgtgctgcaaacgtgctgacgaactccgatagcttcgaccccaaaagcaagatggtcgagctcaaggcctgtgcgatcaacgtggagaaactccctgagaaagtagtcatgcgcggagaagtctacaaggacgggacagataccgaaattaaggctgagaacatggcgaccaccaccataaaggtgggcaagtga

SEQ ID NO: 10041 - DNA, 1206 bp, synthetic construct
  source 1..1206: mol_type = other DNA
atgagcgccaaaataaacgacatgtattatgcatactcagcgatcgaagatatcaaggaaaagggagagtacggcggagtcgtgaccactatcatgaagtaccttcttgaggaagggatcgtggacggcgtggttggggtcaccgagggccatgatatgtatgatggtgttccaatcctcgtgaccgaccctgccgatgtaataaaaactgctggttcggtccactgcggcaccctgaacatcgccaagtttgtgtcaaagtacctggacggtgcaagagacatgaagctggctgtggcatgcaaaccctgcgacgccatgaccatccgcgagctgatgaaaaaggggaagatcatcgaagataatgttatcatgattggggtgaactgtgggggcaccttcagccctgtgcccaccatgaacatgatcagagatgtctacgaattagatcccaaggatgttatcaaagaagaaatatccaagggcaaactcattatggagaccgccgacggcgaaaaaggaattgccatcggcgagctagaggagcagggcttgggcaggcgagaaaactgccagcgctgtaatctcaagattccgagtaatgctgacatggctctgggtaactggggcgttattggtgacctggcgggaaaggcaacattcattgaagtcttcactgagaagggcgccgacgctcttgggaaggtgatcgatgccggcctgattgccacagaggaacctctggagaagggaatcaaaatccgggagaatataaacaacttcatgctcaaggagtccttggagaagaaggatgtggactatgccgggacaacgggagacattattgatgtgtttcacatgtatgaggacgagtttagcaaatgcatgaagtgttacgggtgtcgtgaagcatgccctctgtgttactgtgatgactgctgcctcgagactgaggggcccgagtgggtacccggcggatatacgccagcagcgcccttcttccacttgacacggctagtgcacatggtggacgcctgtacgaactgcggacaatgcagtgaggtgtgcccatgtgaaataccggtcgctaaggtatggagcattgtgaataataaagtcagggacatctacggatacattcctggtatggggagcgatgacccactgccatttacagaccatgtctccaaagccaaatggatctga

SEQ ID NO: 10042 - DNA, 936 bp, synthetic construct
  source 1..936: mol_type = other DNA
atgctgaagaacgtcgtgaaagataaatacgagagaccgatcctgtcactaaggatcacaataacaaaccgatgcaacgagaactgcatttactgtcatcacgatggcatggtgagctcaaaggatgagatgacccccgacgagctgtataagatcagcaagatcgccaggaaaattggggttaaacgcatgcgcctttctggcggagatcccttggtccggaaggacatagtggagattgtggagaaaatagcaagtctggattttaacgacatctccttgactacaaacggcgtactcctcgaaaagtacgccaagggcctgaaggacgcggggctggacagggttaacgtgtccctggacaccctgaaccgcgacacctacaagtatgtcactaacatggactatctaaatgaggccaaaagcggtatcctgaaggccgttgaggtcggattataccctgtgaagatcaacatggtgatcatgaaagatgtgaacgtccacgaaataaaggatatgtttgaattttgcaaagagcacggaattatcctccagttgatcgagctcatcgaaagtgagaattgtgaggacgataagttcagtgctgaacatcactacagcctcgactccctggaaaagaagctcacggacatggctgacaaagtacacgaacggaaattcatgcaggggcgtaagaaatattacattggggagggtgagatcgagattgtgcggccagtggacaatgccaagttctgcgcatcttgttcccggctgagaattaccccagatggcaagattaagccttgcttacttagaaatgataatctggtggagctgatcagccatattaggaatggaaaatcggaagaggaacttgaagaactcttcatcaatggcatcaataaccgagaacccttcaacaaggaggactga

SEQ ID NO: 10043 - DNA, 1038 bp, synthetic construct
  source 1..1038: mol_type = other DNA
atgaaaatcgtttctatagtgggacgcaagaataccggcaagactagcctaacagtgaaaattatcgaggagctgacaaagaggggctacaatgtcgccagcatcaagcatagccaccactcgatggaaatggacaaagaaaataccgacacatggaaacacaagcaggccggaagcaatgtggtcgtggggatcgggtcaaccacgttcttcaatgcccggaaagaaatggacctcaatagattgctcttcctgataaaacacatggaccccgtcgacttcgtggtcattgagggcttcaagaaatataactacccaaagatcgccaccagccctgacgtagtcgatgagtacaccattaaggagataaattcctttactatcgatgataaaggtctgaaggaactcgtggacatcatcgaggaacgatcccatgacatcgtcgatacactgtttgcaaataattgcggatataacaacggggagaatattgcgagtgagatccgtgagggcaacctgacggtggatgaactagataacgtgcacagttacctttcaattgataataaggtagtggggctgaaccggtttgtgagtgatttcctcaagcaaaatgtgcttggtgtaataaacaccttgaatctggatgactataacatcgagaagataagcaacattgaactgatcatccccaacgaggtcgacaagactccgattaacgctgaatgtacggttttgatcaatggcaacaatctcaaaatcaacaacttcgcaaagaaccttgtggccaactccattaagggaatgattaactccatcaaaactgaggacaacgctaagatgatcgacatcgctattagcaatatcaagaacaatgaattaaagaaagcgaccatcaacctgaaggtgaacaaccataacgttgaaattaacagatttacacagaagatactcaaagagaccatttttgcaattgttaacagcctgaggatcaacgaggagattgccgagctgcgcatcaaagtggaggaacggtga

SEQ ID NO: 10044 - DNA, 450 bp, synthetic construct
  source 1..450: mol_type = other DNA
atgccgaaacacatcgcctcggggctgaagtatctcgctgcggtcaagctaaagatggcggggaaaagtcaccaggaaattgctgacgagctgggcgtggatcgatccacaatctctcactacctgaatggacggaacctgagctggaacagcattgatgtagccaggacaatcatcgacctctgccccaaggatttcctgacgatgaccgaggccatatttaacaaccctgaacagagtcggaaaattgtgaacatctgcagagagcgcaacttcgaagcaaaggtcgaggactcctgcatcggatgcggcctgtgtgtgaatgcctgtaccatgaaagctatcaagttagaatcactcaaggcccatgcagactccatgcaatgctgtggctgtcagctttgcgaggacgagtgcccaactaatagcataaaaattttggagatctga

SEQ ID NO: 10045 - DNA, 1098 bp, synthetic construct
  source 1..1098: mol_type = other DNA
atgattagaaatctcaaggaggtgaaagacaataactttgacatcacaaggtccgcagacgaagttcgaaacttgagcttcaatgaccatgtctgtttaggttgcgggatctgcgagtcgacatgtcccgtggaggcgattacactcaatgccgttgctatagacgctcgtaacaggctttcaaacgacatctatttcagtgggcacgagaagatcgcccaaaacttccgggaggattttgatgtgcagcgaataagcattgacgagagtaagtgtgtgctgtgtggtatgtgcagcggactgtgtcccgtggacgcattggtgctgaccatcgatgatgtgccaattcgcgagatcgaagcatatccacactacaatgctttcagcgagatcgatgatgacgagtgtatctactgcaaaaggtgcgagatcgcatgccctcgggatgccatcgtgatcgagcgcgttctgccagaccgggctgacctggtcactggagagatcaatgtcgacgacgatgaatgtatatactgcggcatatgcgaagagctgtgtcctgccgaggccattgtggtggaccacgaaacgggcaaagaatctatcgtgatcgacaaagataaatgcgtctactgcctggtctgcaagaagagctgccctaccaatgcgatcaacgcaatatgcagactatgtaactatggagaatatgatcttgacagctcaaaaagcgtggtgaaggggaactccatcattgacccagacctctgtgtctactgtggatggtgcgagggcgtctgccccaccgatgctgccaaagtgaaaaagccgtttaaggggagcattgaagtggatgatgaaaagtgtcaggcttgcggggcctgcgtagatatttgtcagtgcaacgctctggccttccctgtaagtactggccccggctcccgcatggcgcatgttgttgccaatgacgactactgcgtacggtgcaaagcctgtgcaaaggcctgtcccaacggcgccattacggtcaagagaaccgaagtggaccacactccgatcaactccgcgacctggaaggaggccctcgatgccattaaggactga

SEQ ID NO: 10046 - DNA, 231 bp, synthetic construct
  source 1..231: mol_type = other DNA
atggagctgaaggtgaatcaggacaactgtctaggctgcgggatttgtgtaatcgcctgtcctgtcaacgccgctatcagcccggagaatgcggggggaaacggcgcaaagacagaagaagtcattatgatggtggaaaatggcttcatcaaactcttcagccccgagaaatgcgagctgtgcggaacctgccagatgttttgcccagtgaacgccatatggctggagtga

SEQ ID NO: 10047 - DNA, 570 bp, synthetic construct
  source 1..570: mol_type = other DNA
atgtattatgccaatacgtatttagaaaagcccgtcgtgccagacgtcaaaatcaccggtgaaggaaatacagaggtgctcaagtgcatgctgaacacgggaagcgacatataccagggcgcctgtaagaagagaggcagcacattgaagcaggagtacaaaaacgtgtccggcacctgctacatggaccctagggatatggcgaagctgggcgtaaacaattgggataccgttcttgttaaaacagattttggggaagtggtggtgaactgtgcagtatcacgagatgcaccacacgaggggacagtgttcatctgcaaaggcccgtgggctaacactattgtcagtcacgacacttactgctgctccgaccccacctacaaggggattaaatgtaccgtcgaaaaaactgatcggaaggtgctactcatggccgatctgatgcgctgggtctacaagaagtacgtggacgaggaggatgacgacgtggtggaaaacatggagagcctgggtgagctgcccgtttatcatggacggaaatgggaggagctcatcgaccacgacctgtga

SEQ ID NO: 10048 - DNA, 1377 bp, synthetic construct
  source 1..1377: mol_type = other DNA
atgacatatgagccacctgtgacggattatgaccacattgtggaaaattgtacgtgtgcattttgcgggtgcaactgcgatgacttagattacctggtgaaagataaccatgtggtggccgttcgccacgcctgcaggctgggagccagtaaaatcatggaggacatggaccagagactgcttgtgccaatgattagggacgagaatggcgagctcactgaggttgactgggataccgccctggataaggccgccgagtatatcgccaattctatccgacctgtgttctatggttggtccgaaacgagcacagagtgtatgaaggaaggcgtagccctgggtgaatacatcggggctgtcctcgataaccaagccacaatctgtcacgggccctctctccaggcggtgcagaacgcaggctaccccatacagaccctaggggaagtgcaaaatagggctgacatgattgtttactccggctcaaacgcgatgaatagccatcctagacatctggccagatatgctgctttctgccggggatacttccggcagaggggacggtttgaccggacagttgtgaccatggacccgaagttcagcgacactgcaaagtgctcggataaatggatcggatttgagcagaatggggactacggtttttataacgccattagagccgtccttagaggaaaggaactgtaccaggatgtcataagcggcatccccaaggaggatatctatgagttggcagaggaaatgaaacaggccgaatttggggtgctctttttcggcttagggctaacccacaccctgagcaaacagcgaaacattgacatcgctatcaagatggtccaggacctgaacaaatactccaaatggggacttactcccatgcgaggccacttcaacgtcaacggattcaacattttcatggcatttgagtgcggctttgctttcggtgtggactactgccgcggctacccccgctacatgctgggcgagaccaacaccatcgatctgctggtccgcaaggagcccgactgtttcatggtgattgccgcggaccctggcgctcacttccctaatggagcaaaccaacacctggccgacattcccgtgatacagatcgatattcattgggggccatccactgaactcgctgatgtcgtattgccgggttcattcatcgctgttgaatgcgacggcaccagttatcggatggatggggtgcctatatacatgaagaaggcaatcgacaagccggagacatgtcgtgacgacgagtggatcgtccgtgagttgaaggaaagggtaatgaaactccgcgaagagcccaatgtagcgccaaagtacgtgccaaatccaaacgccctctga

SEQ ID NO: 10049 - DNA, 1716 bp, synthetic construct
  source 1..1716: mol_type = other DNA
atggaatatattcttaagaatgggatcgtctacgaccccgccaatgagataaacggtgagaaaaaggacgtcatgtttaaggatggaatcatcgttgacgacgtctcctcagatgccaaagtcctggacgtgaccgacaagatagtcatgccggccgggattgaccctcacgcccatatcgccggccccaagctcgttgtgggaagattgtaccgacctgaggattccagacggggcgtgacacaaaaaaccaaagtgctccggtccgaaagcggtttcagcatcccaagttgccccgcaactggctacagatactcacgactcggctacgggactgtggttgaggcagcgatgcccccccttgaggcgaagcacacccacgaagagatcgctacaattcctcagctggatatccccgctctcccactgttcggaaacaactggtttgtaatggaatatgccaaagataacaatatcgaggacatcgcagcttttgtggccgcctggctgaaaatcagcaagggctacggaattaaaatcgtgaatccctgcggaagtgaagcctggggctggggcatgaatgtccatggggtgaatgataaagctccctattttgacgtaacgtccaaggaagtggttgtggctctggccaaggccaacgagatgctgaacctgcctcactcgattcacatacaccccaatgacttaggacacccgggcaatgtcccaacaaccctcgaaacaatggatgcagttaaaaacattaaaaagggttctaaggctgcggaaatcagggaccaagtgatgcacctgtgccacctgcagttccatgcatatactggtaactcgtggaaggatgcggccagcggcgcagaagagttgactaagtacattaacaaacatgatcatgtgacatgtgacgtagggcagattacgttcgacgagaccaccaccatgaccgcagatgctcctatggagtacgacctgttcaagctgagcggtttaaagtggacgaataaggatatcgagtgtgagactgcagccgggatcatcccatgtatctactcacctaagaatcccgttaatacactccagtgggccataggccttgaattgttccttcaaattgaggacccatggaaagtgtgcctaacaacggaccaccccaacgcaggcccgttcacccgctatcctcggatcatctcttggctgatgagtaaccagcgcagaatggagatgatcgaaaacagggaagtgcacaagtgggctgaaaagcgcacgaccctggccaccctcgacagggagtatgatttctatgacattgcgactattacacgctccgctcctgccaagatctacggatttacagatcggggcgccctaacccccggctacagggccgacatcgccgtgtatgatatcaatcctaatgagattgacccaagtcggcaggctgctgacatcgagaaggggttcaacatagcggactacactattaaagacgggcagatcctggtaaaagataaagagattgtcaaggtgaaggaaagccagaacatgtgggtgaacgtgaaaggatgggagcagaacgagcagaaggtgattgataacataatgccgttctttacccagtattacagcgtcaagtgggagaactacccagtccatgaccattacgtctccaacccaatccgtatagacgtggatgggaagtga

SEQ ID NO: 10050 - DNA, 867 bp, synthetic construct
  source 1..867: mol_type = other DNA
ttgaaaacaataacatttgatcagataaagaccagctcaatcgctttagagtttgatgaggtcattcctgatgaaattttttcctggaccgaggctgacttcgcaaagtaccaggttcccatcggaaattcacgcttcccaattactgacttcttcgacattaccgtggagggggacgctgcgggcccagatgaggtcaagatgattctcaacggggatctcaacagagtgaaatacatcgggtgcaaaatgagtggtggcgacatcgtctgtaactccagcgtagatctgcatgtgggtgcagagatgagcggcggaagtattctggttaaaggcaatgcggccgcccatgccggaagagagatgtccggaggatacctcgaaatcgaggggaacactaaggaatttaccggggcctcttacatcggcgagtggcgcggaatgacaggcggacagattgtggtgggcggcaatgccgggaagcaatgcggcgaatgcctgaccggtggacgaatccacgtaaagggcaattgtgacatcctggccggtatccacatgacgaaaggtattatcgaaatcgacggtgacgtcaaccggtggcccggcggccagatgaagaacggcaacatcattatccacggattcctaggacggctgctcgaaggtttcgtgctggatggggtggtggagaacccggaaatcgaggggacgactttcgaaggcaagtatataaagtataccggagacataggcctgaatggcaaggggaacctttacctgggggctgaggccaacaaagaaaaattggcaagctatggggagatagacgacgagtatacatcgatcagggagtacaggaatctttga

SEQ ID NO: 10051 - DNA, 291 bp, synthetic construct
  source 1..291: mol_type = other DNA
atgatcgaggagatcgagatgacctttgacgaggtgctctcctatgtaaagactaaagtggatgtcggcgatgtgctcgaaatcagctacaacaggatcttcgcccccggggaggttctgggattcacagaagaggatgacatgaccggagaaggcttccgggtcggcctgcagctgaacggggaaatccttaaccagagcattgagatcgattttaatgagattgaagacgacctaattgaaatgcgccacatcacggacgaaaaggagctgataatagagattttgtga

SEQ ID NO: 10052 - DNA, 291 bp, synthetic construct
  source 1..291: mol_type = other DNA
atgaaggaactgaaactgaccacaaaagaggcagtcaactacctaaaggagaacgtagacatccacgataggatcgaaattagctataaccggattttcgcggagggcgagatactgaatatggacttcagtgaatacttcgggaaacccggctttaagatgctcatcagcctcgacgagtcccaccttggagccacggtggagatcgatgtgtatgaagttgaggacgatattatagaatttaatcattacccaaaggatggtgaggaggtggacgtgaccgtcatctga

SEQ ID NO: 10053 - DNA, 1683 bp, synthetic construct
  source 1..1683: mol_type = other DNA
atgtcagagtcggagcatcgcatgattgagattctgaggatactgagcgaacaggaaaaacctactgggtccaagctcattgctgacgagctgaagaacaagggattcaatcttggcgagcgggccgtccgctaccacatgcagatattagatgagaaggggtttactgagagaattggaaattctggtcgcaagatcacaaaactggggcttgagaagctcgagaagggcttgatttatgaccaggtggacttcatctacagtaaatttgaagaaatgatctatctgacggacttcaactatatgacccaagaaggaaaagtggtggtcaatacctccaccatctacaatgaggaatcggtggacataattaagaatatcatccagagcgacctctccgttagcccttatgttaacctaaaccgaatcggcaacaatggggagatggaagtaacaacactctgcggcacaaccattgacggcgtgctgcttaatgagggaatcccttcacagcccaaatacggagggctactcaagattgaagacagcgagcctgtcaagtttacggagctcatctcctacaagaaaacatctgtgccccccctggaggccttctccgcaaaaggctgcacatcaatcatggatgtagtggagaacggtgaaggcatcatccctgccaatttccggctcattccgggtatcggccgggaaaaggccataaatatcattaacaaactggataaaataggcatcgggggggtaatcgcgatctctgaagaagaaaaggatatcctggggctctccgtccctgaaggcatggtgggaatcagcatcgtgggtggcatcacccccttttgtgccgtgcaggagcagaaccaggatattgaaatcaagatagccgaggaaattaaagacttcaagaccttgagcccaatcaccagcaagatcaagcccgttctgaaggatatcaagccgactcctcagcagaagatttcatttctgctttccaaaacttggaacttgatccaacaagtcaacttcgacattgagaagcgaaagggggacatcatttccaacgtttcgtttattgataaagacaagatcgacaaaagcctgagcgtgatggaggagacctacaatgataatccaaagtacatcaacccgtactataaattaattaaccaccccacgaatgattcaaaaataggcattgccactatctgcagcctgagcattgatggaattttaatagacaatggcgtcatgagtaaccccaagtacggcgggctgctggagctgaccgagccaccattgttcatcgacctcatcagttacaacggaagcaccgaggacccccataagatctttctggctaagaatatgacaagtattactaggaacaacggaagcaacaaaatcctggcgagtttcaaggagatcccatatatatccagagagcacagcgtccagcttctggagattctgaacaacatcggattcagcatatataaaatcggcaagccaagggaagtgacctacaacgctaaagctgacaattacaactttggtattgtgaccggcagtgggctgaacacgattggtgcaataaaggaaaaaggaatcgatgtcgaagtgaaggcaatcgagaagctattgcccttcgagaaaatggatagactctga

SEQ ID NO: 10054 - DNA, 1359 bp, synthetic construct
  source 1..1359: mol_type = other DNA
atgagcgacatcccagaggaaaaaatcgaaaggataaccgagataatgaaagaggacaatattaagtttatccggctccagtttgtggatatcaacggaactgtgaagaacattgtcatacccttcaatcctgaggatgacatgagtgagctgttcaacgaagggatgttatttgacggtagcagcatcgccggcttcgttggcatcaacgactccgatctggtgttgaagccagatattaacacctatagccgcctgtcatggcgccccgaggagtctgccacatgcagatttatctgcgatgtctggactcctgagaagaaaccctttgccggcgacccaagaggggtgctcaaaaagtcgttgtcccatatcgcaaagatggggctgaagtacaatattggccctgagccagaatttttcatcgtagacatcgatgagaacggctatcctatgccctacgacaatgctggatacttcgacgtggagcctctcgataagggccccgacttccgcagggagctgacactgaacctggaggatttggactttgaggttgaggcctcccaccatgaggtcgctcccggccaaaatgagattgcatttaagtttaaagatgcccttaagacagccgacgcagtaatcaccttcaaacaggctattaaagctattgtcgacaacatggcgacgttcgatcagctggactaccgagtgacattcatgcccaaaccgttcttcggggtgagcggcagtggaatgcactgtcaccaatccgttttcaagggagacaagaacctattctcagaccccgactctgaaaatggcctgtccaaggatgctctgtacttcatgggagggctgctgaagcacgcccccgcagtgactgctatcaccaaccctatagtcaattcgtataaacggctcgtgcccgggtacgaagcgccggtttacagggcctatgggcttcggaacaggtctgctctcattagagtgccggccgcgcgtggcaaggccacccggatcgaatatcgctcccccgaccctgcctgcaacccatacctagcatttacggtgatgcttgaagcgggtatcgatggtattgtcaataagatagacccgggtgagccagtggagctggatatttatagcatgagtgaggaggagagaattgaacgaggaatcaaagtcttgccaaccagtctctgggaagcataccactcactcgaggaagatccactcatccttaacgccctgggctctcatgtgagcgaaaaattcttagagctgaagtacaaagaatgggacgaataccgggtgcaggtatttggatacgaacagaagaagtatctggacatctga

SEQ ID NO: 10055 - DNA, 753 bp, synthetic construct
  source 1..753: mol_type = other DNA
atgccaacaagatatataggcgacggctactgggaaatcgtctcccgccagatgagcattgtgacccggagcgagcagcaaaagttcaaggatactaagattactgtgatcggatgtggcgggatcggcggtcagaccatcgaaatgctggcacggatgggcgtcggagagatcatcctcgtagacgaggattcctttgacatgtcaaacctgaacaggcagaatttcgcaaacctgaatggtattggcatagccaagagcgaagtggccaaagacaaggtgaggcttataaacccatatgtaaaggtgaccggcttcaatgagcacgtcgatgagaccaacattgataagatcattggagatagcgacattgtgatcgatgcccttgacaatgtcctcacacgagtgattagctcccgcaaagctatagagaagaaaatccctttcatacacggggccattcatggaactctggggcaagttacaacattcttgcccaataccaaaagttacgaagagatgttcaacctcccctcgtttgggaaggacctgaccgaggaggtcacggagagtctgaaaaacattaccagcggtacgccgcctgtgatcgggcccaccccaaacctgatcggctgcctgcaggcgatggaagcttacaaaatcatcactggagttggaaaggtgacggttgcccccaaaatcttaacatttgacctcttggacctggggtcatttctcctagaagaaatctga

SEQ ID NO: 10056 - DNA, 1167 bp, synthetic construct
  source 1..1167: mol_type = other DNA
atgctgtataatacactgggcaagactggtctgaaggtctcacgcctgggcttcggcacgatgaggctccccacaatcaactccaacgccgacattgacaagcaggaagcatctgagatgctcagctacggaattgaaaacggcattaacataattgatacagcgtacccttaccacagcgccggaatcgacggtaacggcaactccgaaaaatttctgggtgaatttttgaaagagaacaacctgcgggatgagatcctcctacagaccaagtcgccatcctggttgatcgagaagaaaacggatttcgaatactatttagatatccagcttgaaaagctgcagaccgactacatcgacctgtatctcctccatagcctaaccgtgccggactggaataaggtgcatgatctggaggtgctcgactttttagatgactgcctgtcgagtgggaagatcaaacacgttggattctcatcccatattgagatagactatcttattgagatcctggatgaataccccaaatgggaagttgcattgacccagatgaattaccttgacgagtattaccaatcaggggtcatgggccttaattatcttaaggagatcaatatggggagtatggtgatggaacctctgcgtggcggaaggctcgtccaaaacatccccaacgaggtgcaggagctgtggtctacagcggagaagaagcgcactcctgtggaatgggcactccagtacctatggaatcggaacgacgtggactgtgtattcagcgggatgaacagcctgaatcaagtgaaggagaatgtccgaatcgcctctattgaggacaaaataagcgaaaatgaccaggagttgatcagggaggtcgccagaacataccgcactttcctgggcaacagttgcacccggtgtggatactgcatgccctgtccgcacggggtggatattataaactgcctcacggaatataatatcgcccacatgatgcagaaccccaaagcttccgctatgcagtatttcaccctgatagatgatgattccagagccgacagttgtatcaactgcggagagtgcatcccattctgcacccagatgctgaacattccagaggagctgcagaaagtatacgaatactttgggagcgagtttaatcacttctga

SEQ ID NO: 10057 - DNA, 1251 bp, synthetic construct
  source 1..1251: mol_type = other DNA
atgagcaaggtgaaagatataagcctggcgcccgaggggatcaggaaaatcgagtgggtgcagaagcatatgcctgttttagagcacatcaagcaggagtatctggagacccagcccttcaaaggcattactatcggctcgtgtctgcacctcgagcctaaaacgatcaatctgggtctgaccctgatggcagggggggccgaggtcgcaatgacgggatgcaaccctctgtccacgcatgatgacgctgtggccggcgctgctgatctcggcctcaatgtgtacggctggagggaacaggacgatgaggaatattaccaaactataaatatggtcctggaccataaacccgatataattatcgacgacggtgccgacatgatcatggtgctgcacaatgaacgaaccgaactcttaagtcgtattaaaggagcttgcgaagagaccactaccggtgtgcacagactccaagcaatgcacgcggatggggcattgaagttccccgtgatcgctgtcaacgacgcttacaccaagtacctgttcgacaaccggtatggaacgggtcagtccagctttgacgcgataatgggaacaaccaacatggtaatcgccggcaagacagtaacaatctgtggctatggatggtgcggaagaggcctggcactgagagccgatggtcttggggccgacgttattgtcaccgaggtagacccaatccgcgccctagaagcacgcatggatgggtaccgcgtgatgaccatcagggaggctgtgaagcagtcagacctgatcatcacagtcacaggcaattccgatattataagtggggacgatttcaaatacatgaaggacgggtgcatgcttgccaactccggccactttaacgttgaaatcaaccgaccagatttggaggccatttcaactgaggtcaaagaagtgcgggaaagcattgaagagttcaccactaaggacggacgcaagatctatcttctcgcggatggccggctggtcaacctaagcgctgcccggggacagggacatccggccgagattatggacatgagctttgctgttcaagcactgtccgccaaacacattcttgaaaatgacctctctgtgggcgtgactaaggccccagatgagatcgactacagtgtggccacaatgaagttgaaggccatggggattaagattgacagcttgaccgacaagcagaaagattacatgtcaaactggcaggagggcacatga

SEQ ID NO: 10058 - DNA, 651 bp, synthetic construct
  source 1..651: mol_type = other DNA
atgtccttctttaaatatatagataacggcgaaggtcccaccaagctattcatcgggggactgcacggcaatgaagggaccacaagcctgaagttcattaaacggatcaaagacgaaaacctttcctccggacagttctacttctataattttgataagactccatacatcagcactgtggacaaggagtactacaaatctgagctggggcaaaaagtgctcggtcttatcgaatacctttgtcccgacttttacacagagctccattgctataatctgaagaactatgataagctaactagcatggagcgatacaagaagacaggcattcccccactgatcaagctgggaaaccacgttctcgtctcaagcgtaagccccttaatccggatgacgtacttttccaccgagaccgtctgcaaaacgctggagtttccgtgcttcgaaaagctgaactcggagatcattgaaaagtacaatttcaacaagagtctggcaatcgagacctatgaggagctgctcaatttgattctcagttcaccttctcgcgaccactttgaaagagagatgttgaaaaaacacgaaaaccaggtgcatatagcgatgaggtatgccgagaaggtgttcggcaaagacttccctccatactga

SEQ ID NO: 10059 - DNA, 336 bp, synthetic construct
  source 1..336: mol_type = other DNA
atgaacttcctgaacaattgtatcatcgtattccacgtgacgcatcggttcgtcaaggatgtccagattaaaggcatactagacatggactattacggtgagatcgagaacccattgcagtacttcgacgaggacaagaacctgatctggcacattcccccaaatccttacaggggaggcacaaaggagtatgtggcctacaaaaagctcatcgaggagtttaaaccggacgatgggtttattgaacttctggcggtgtgcggggaataccccgaatattatcactacgattggtacgatatagagatggaagcactcacctgggaaagcatctga

SEQ ID NO: 10060 - DNA, 984 bp, synthetic construct
  source 1..984: mol_type = other DNA
atgggggtgaaactcaaagacataatcgagccagagtcaattagtttcaaagacctggaaggaaggactgtaagcattgacgccttcaatacccttttccagttcttatccaccatccgccagcgagacggccgccccctcacggatgagaacggcaacatcacctcccatctgagcggaatcctgtacaggaactccagcatggtcgaaaaggatatcaaaccgatttacatctttgatggaaaagcacccgaactaaagagtgagactcaggccaagagacgggaggtgagggaggaagcggagaaaatctacaaggacgcactgtcacgcggcgacgctgaaaaagcgcgtaaatttgcaatgagaagctcgaagctctcacccgagatcatttcctcttctaagaagctgttgacactcatgggaatcccttatgttgacgccaagggcgagggtgaggctcaagccgcctacctcgtacaaaatggggatgcctacgccgtggccagtcaggactatgattgtctcttgttcggagctaagcgagtggttagaaatctggctgtcaacagcaaccttgggaacctcgagttctatcagttggacaaagtcctaagggaactggacataacacgggaagaactgattgacatgggcatactgatcggtacagatttttgcgatggtttgaaaggcgtgggggctaagaccgccctgaagctggctcacaaggggcaactgaaggagaagatagcagaacttcagaaggaaagcgcgcacgacttagatgaggtgcgggagatcttcctcaaccacaatgtcaacacggattacaagatcaagtgggagaagccacagaaagataagattattgagttcctgtgctatgaacatggcttttccgaggaccgggtgctgaaggcatcggacaaactgaaaaacctgaatagctcccagggcagtcttgacgcctggttttga

SEQ ID NO: 10061 - DNA, 564 bp, synthetic construct
  source 1..564: mol_type = other DNA
atgagcgagccgaaaaatgaagccaacagaggcctgattgataagataacacaagtggagcaggagtatggtaaaaatttcagtaacacgcagaagattctgctgaccactgacggatcaatcacagccatactcgatgtactatacgggaagatcacattgtcgacccttgatcagcatttcgaggacgcggacgaatatcacgctaaactggtcaacgttaataaaggggatgaaatcaattaccgagaagtgatcatgcatcggaacggcaagcccttaatctacgcaattagccacatcccactctcccgctgcacgaaggaggtgtgtgctgatctcatcagagcagacattcccattggaaggatcttgaaaaactacaacatcgagtcccggagggagatcaataacatatacattgaaaagcctaacgagactctgaaggagctgtttggcaccgacgaggacatgctggcccgcgactacgtcatcatcaaccacgacaagattcttatgtggattaaggaagtgttcccaatcagctattttaccgaaatatga

SEQ ID NO: 10062 - DNA, 1254 bp, synthetic construct
  source 1..1254: mol_type = other DNA
atgaatatcaccgagaaaatcttgtccgcaaaagccggccatgaggtcacatctggcgagatcattgagattcccgttgatcttgcgatgtcgcatgacggaaccagtccccccgctattaaaacatttgagaaggtcgcgaagaatgtatgggaccctgaaaaaatcgccattatattcgaccacaacatccccgccaacacaataggttccgcagagttccagaaagtctgtcgggacttcatcaaaacacaaaacattactaagaacttcatccacggtgaaggaatatgccaccaggtggtgcctgagatgggcctcgtggagcctgggatggtgattgtgggggctgactcacacacctgcacgtatggggcctttggcgccttcagcaccggaatgggggcgacggacctcgcaatggtgtgggcaactgggaagacctggttcatggtacctgaggccattcgaatgaaggtggagggtgagctgaacccatacatcgccccaaaggatatcatcctgaacattatcggcgaaaccggcatcgccggagcaacatacaggacggctgaattttgcggtgagactatcgaaaagatgggagtggagggacgtgctaccatgtgtaatatggctatcgagatgggggctaaaaatggtatcatggaaccaaatcgggaggttattaactatatctgccagcgcacgggcaagaacgaatcggaattaaacatcataaagagcgatgaagacgccgtttacagtaaagagatgcacttcgacattgaaggcatggaaccgcaaattgcatgtcctaatgacgtggacaatgtgaagggcatctccaagattgagggaactgtcataaatcagtgcctgatcggtagctgcaccaacgggagactgtctgatctaaaggatgcggccgagatattggaggggaagaaaatcaacgatgacatcaggctcattatcctgccagcttcaagagaaatctacaagcaggcaatgcatctgggctacatcgatacatttatagacgccggcgctattatctgcaatccaggctgtggaccctgtcttggcggacacatgggagtcctgtccgagggcgaaagctgcattagcaccaccaaccggaactttaaagggcgcatgggcgatccgaagtcttcagtctatctctccaatagtaaggtagtggccgccagcgccatcaagggggtgattactaaccccaaagatctgtga

SEQ ID NO: 10063 - DNA, 1179 bp, synthetic construct
  source 1..1179: mol_type = other DNA
gtgatcatcttgcagtattttatcagtcattacaacaaggagtatgagctgaactttccggaggacctcctcatctacgatacaactctgagggatggcgagcaaacccctggagtgtgtttcagtttcgatgagaagcttgaaatagctcgaaaactcgaccagttcaagattcatcagattgaagctggtttcccaatagtctctgaaaaagaaaaggagaccgtcaaggcaattgccaatgaaggtcttgatgctaccattttaggcttgacgaggaccaaaacagaggacattgacgccgctctcgattgtgacgtgggggggatcattacgttcgtgggcacttctgacattcacctggaccacaagatgcacataacacgccaggacgcaattaacctatgcgagacggcaattgattatgcgaaggatcatggcctgtacgtggccttttccgccgaggacgctacaaggaccgatatcgagtttctgaaacggatctatagcaaggccgaagaatgcggggctgaccgcgtccacattgcagacaccactggggccataacaccccagggcatcgactacctggtacgggaactggtcaaggatctggacataaacattgccctgcactgccacaatgacttcggtctggcggtgatcaactcaatcaccgggatcttggcaggcgcaaaggggatttccacaaccgtcaacgggattggcgagcgggccggaaatgcctcacttgaggagctgatcatggccctgaagatcctctacggtaaagactacggcttcaaaaccaaatacatcaaagaattgtccaacatcgtaagcgaagccagcggccttccaattccctacaacaaacctgttgtgggaaataatatatttagacacgaaagcggaatccatgtggacgccgttatcgaggagcccctatgctacgaaccatatgttcccgagctggttggacagaagcgccagctggtgttaggcaagcacagtggatgcagagctgtgaaagcgaagctcactgagtgtgagctggatgtgtcggatgacgaactcatccaaatcgtccgagaggtgaagaagtccagagaggagggaaaatatatcaacgataaggtattcaaggaaatcgtgaagaaaatcagcaaaaaggagtga

SEQ ID NO: 10064 - DNA, 552 bp, synthetic construct
  source 1..552: mol_type = other DNA
atgatcgaggtcgaagtgaaagccaagatcaccagcttcagtgaaatggaaaaaaaactggagaacatcggggcaacaaagagcaaaaaagagtttcaggaggacatctacttcaatagccccatcgtgaactttgctgagtcggatgaggcactgcggattcgaaccacaaaggagaatgacaacgtagatatattcattacgtacaagggcccgaagattgataagaaaagtaagaccagaaaagagattgagatgaagatagaagacgcggagaagtgctcagacatcttcgaagccatcggctttaggaaggtgcggactgtccgcaagaaccgccaatactatacctacgaaaacttcgaaatctccctagacgatattgaggggctggacccatatatggaaatagagatcggacttaaggacggagaagactattctaaggcccagaaatccatcttcgatctgtttgagaaactcaacatcacagagggcttcgataggacttcctacttggagctcctcgaaaacctgaatattacgaattga

SEQ ID NO: 10065 - DNA, 546 bp, synthetic construct
  source 1..546: mol_type = other DNA
ttgaccgatgtggagataaagattgagaacatcgttgctagcgccagcatcgggaaggacatcgtgctcacagaggtgtcccaagcccttgaaggggtgaatttcaatcgggagcagttcccaggactggtctttaagctcaaagatccaaagacagcagcactgatatttagctcaggcaagctggtctgcactggagccaagtcgatcgatgactccaaacttgcaatcaaaaagactgtagacctcatgaggaccattgacacggagatcccccacgagttcgagattaaaattcagaacatcgtggcctctgctaacttggaatccacacttaacctcgaggccgtcgcgctggaactggaaaataccgaatatgaacccgagcagttccctggtctggtatacagactgagcgacccgaaagtggttctattactctttggctcagggaaggtggtgtgtaccggcgctaagacgaagagtgacgccaaactgggcgtcgaacgcgcgtacgatcgactgagtgagctagacctgatctga

SEQ ID NO: 10066 - DNA, 1542 bp, synthetic construct
  source 1..1542: mol_type = other DNA
ttgatcaagctagttgtctttgacctggataacgtgattatcgacggcgaggcaatagacgagatcggaaaaatcgcaaatgtggaggaagacatagcggccattactgagaaggccatgcaaggggaaatcgacttcgaaacatctatcaaggacagggtgcagctgcttgagggcatcagcatcgaggatatcgagaaagttgccgacgagctccccctgataccaggtgccctggagacaatcaagtctttaaaggacaataacttagacgtggctattatcagcggtagtttcgatgtcgtggccgaaaagataaaagataaactcggggtcgacaaagtgtatactaacagtttcacagtcgaggatgggaagctgactggggaagtgacagggccattggtatccggctcaaagctggacgttctgaacgggctggtggaggaagcaggaattacgctcgatgaagtagtggctgttggagatggcgccaatgacatttccatgatcgagtcagccgggtgcggaatcgcattcaatgcaaaagattcagtcaaggagattgcggatgtggtgatagacgagaaagacctctgtaaggtctcagagaaaatcctgaatcagttgaccaccgacaacgccggcaacgaaactgtcgaaaaaaaggctgaagagaagaacacgctgccgaagagcgattttgtccttgccgacaccatggagggcgtaaggaaacagaaggacgagaaagaggctgagatcgccaaagtggccgaggaaagagagaacttcaaccgcatggctaaggaacagcgaaagattcgagatgaattgaacgcaagcctcaaagagaacctaaacaaagcgattgagtttcgcaatgaacggaacgaaatcaataaggctgtggagtccgccaagaaagcccgtaacgaggccaacaacaagattaagagtctggagtggtcgtctggtaagcgcgataagattaagatagagaatgaaatcaagaagatcgacaagatcattgaaacccgggtgctagacattaagaaggaaaatcagctggtgaagaatgccaatgatctcagaaaacagctgatgaagattcatgaggacgaatcggtgcaaggcgagagccaggagctcaaaaagctgagcgaagaggaacacgagaaagttatcacactttccgagaaagcccaagcggctcacgaggagatgctgacctacttcaggaaaaccgacgatatacgaacggctgccgacgaagcacacaagaatttcatcgaagcacggaagaatgcgtccgctaagcacgaagaatttaagaatatcctgagtgatattcacgtgatcaacaagaaactgggttcccatcgccctaagaaacggagaaacgataacaaaccctctagcggaagcaataggaaccgggaagagaaggagagagctgaagagatctttgccaaattcaaaaacggcggaaaggtctccaccgaggagattctcctccttcagaagtacaacatcggctga

SEQ ID NO: 10067 - DNA, 147 bp, synthetic construct
  source 1..147: mol_type = other DNA
atgacagaagagaagattgaaacctgcttcatctgtggcaaaaaatttgatatgaacaaggccgagctcgggtactatcggaatggaaagtaccccatctgcgacttctgcgcagacttttaccgcttctataacgaggagctgtga

SEQ ID NO: 10068 - DNA, 2157 bp, synthetic construct
  source 1..2157: mol_type = other DNA
atgcatgaagtgattgtgtgtgaaaagccaacatctgcagagaagatagccaaggccctgtcaccaagcgcaaaaaagaaggtgtataacaagaaagtcaagtattgggagctcaagaaggggtccaaggacattacggtggtatctgctgtcggacacctgtatagtcttacccctgacaacccaaaagataaagtatacttcgatctgcactgggctccggcctatgaagttaataagaggggcagcggctttaccaaggactatgtgagggctattaaaaagcttggacgcaatgcggactcctatatccatgcctgcgattacgacaccgaaggaacactgatcgggtacaacgccctgaagtacgcttgcggtcaagagaacctcgataaggtgtcgcgtatgaaattctccacactcaccaagaaagacctcctcgaagcgtacgacaatagaatagaattggacatgaaccaggtcgataccgggattgcaaggcatgtactagactactacttcggcgtgaacatctccaaggccctgatgaaaagtgtcagcaacgccaagcaccgcttcttaaagttatccgccggccgggtgcagacacccactctgagcatcttggtcgagagggaaaaagagattaaggattttgtgcccgagccctactggttgatcaaggctgtggtggaaggaaacatcgaggtcaatcatattgacgggaagatttttgacagggaccgagccgaggaaatcatgaccaaatgccagggaaaggatgccattgtggacagaatcagcttttccaattccacaacaaaacctccggtaccctttaacctgggcggcctgcagtctgaggcttataatgtcttcggattctcccctaagaaaacacaaactattgctcagaacctttacacctcaggttatacgtcgtaccctcggacctccagtcagaaattgcctgaaagtctggattttaaatcaatatttacccagctggggtacgatggtgaatttaagaagcacatcgatcagctgccatccaaactgaaacccaacaatgggaaaaaggacgacgccgcccatcccgcaatccacccaaccggcatcctcccccaaggcctatctaaggatgataaaaagatttatgagcttatcgtgtatcgctttatctcagtgttcttcgaggcagctaagttcgaaacaatgagcgccacactcgacattgagggtgagaagtttcgattcaagcgccgacgagttacgcacaagggatggatggaacactacccattcagaaaaattgacgatgagatattccctgatatcaaggaggacgacctgatgaaggtcctggagctgatttctgacgagaaagagactaagcctcccgcccgctataaccaggcgagcctgatcaaggagcttgaaaagagagaattgggtactaaggcaactcgtgccgatatcatcgataaactgtacgaccggaagtacataacaggcactcagcagattgaagtgaatcaactcggcgagaacatgatcgatacgctcagtatttattgtaacaacctcaccagcgaggaactgacccgggacctgcagatcaaactggacgggattagcaataacaaaagtactcggagggagatcatagatgagggggaaaaggacgttaaagtgatattagaggacatcactaaaaactcaaatgagatcgggagcaagctctacgagtcatatcaggagagtaacatcatcggaacctgccccacgtgtggaggcaatctcgtcaagagatacagcccaaagactaagagcagtttcgtgggttgcgcgaattacccggattgcactacgagctactctatccccaaaggcaccaacttcctgaagaagacctgcgagaaatgtggcctgcctataatcagcttcgggaagccccgccagcgggcatgtctggactctaactgcggcaaggacaaaaccaaaattcacaaacctaccgaggttggtaagtgtccgaattgcggcaagccccttttgaaacggtcgggcagatacggggaatttatcggatgcaaaggatttccaaaatgcaagttcacatgttccgttgacgagctagaaagcaaactaaagtga

SEQ ID NO: 10069 - DNA, 2679 bp, synthetic construct
  source 1..2679: mol_type = other DNA
atgaacaaagaaacaaagatgacaatcgtcaaaagcgtgtttattatcctcattctgctcgcagtggtttttgccctgaaaatgcccgctgccgatttgccgctaattactgacgaagctaagggcgagtacgttgattcgagcggcctcccctatttcagtgaaatggattcctattataacctgaggctgaccgaagactacattgatcatgggtatgtgggggaccagataataaatggtagcgagtgggatatgcacaggtatgcccctactggcaatcagatcaattacgagctagggatcgtgtatgtcacttcgttcctgcatgacatctttggaggcgaccactcagttagagaaatagccttctggacaggcgctattatatcaacccttgccgtgattccagcgtacattttctcaaggcgcttaactaacgagtatggtgcaattgtcgccacccttatcatcgcccttgccccaaactactttgcacacaccttcccgggattcttcgacacagacatgttctattacatcttctcattgttcttcatattcttctttgtagagagtatccgagcgaaaaaaatcgcctacaagttgctatttgcaatcctgtccattatatctatcggcctgttcagccaaagctggaccggttatatcttttacataggccttatgggaatatttagcatcgtgtatctgatcgcttgctactactttaatattggggaggacagccaggacgagtactcaagtaagctacattggtttattaaccaaaatgccctgaaatccatcttgatcctaggaatcattggattcattggtcttgccatcttcaaagggttagatggggtcacgggactcttcggaagcctgctgagcctgctgtccctgcagtccgcctcccgcgtggttggcggcttccctaatgtacttgtgtccgtggcagagatgcagatcccatccatgctgggcagcggtatgaatagtttatttctggctaacaccaatggggctgtcaacgggattggtggcataggggttctctttgccggcttgacagttgcctacctgttcgtgcgaaacatcttccgcatcaagggaaactctgttaagaccgaatccaacgtgaagccccagaagagcgaaaggctgtcctccagcaagcgcctcgataacaaacggaagctgaagattgatctgagccggtataatctcgaatttgtgagcgatatcctgtccgacaaaaaactcacactgttatacgggactctcttcattgtctggctcgtggtaactgcgcttgctgtcacacggggttcacggtttatcacgaccatcgtcctgccatttgcccttcttaccggcatatttgtcagtatcgcgatggaatatatcagaaacaaaataaccgatgatcgcattctgttggctatcaccgccatcgcagctatctttgtggcagtgcccgtgtcgaccgtcaattccattttcgcgattctggtgtttgtggccatcgtgggcattggggccgtcagcatctatgtgctcaagcctaaagctacatctggaaggaagctcccaatcaaaaagcacattgcaatcatcgccattgtactcgcgctggtcacgccctgtatctgcggggctttcctgacgagcgagtcggtggttcccggcacaagcgactcaatgtggaatgcaatgacttgggtgaatgaaacccagagtgatgatactgtgttgacctcctggtgggactttgggtacctcttcgagattgccgcagacaaacaagttacattcgacggaggcagccagagcggagaccgggccttctggctcggccaggccatgaccacggacaacctggagttgagcgcaggcatattcagaatgctggatacaacaggtgataaggccgttgagtctctggtgaacatcaccgaggacaccggcaagtccgtggatatcctcatcgacattttacccatgaagagcgacgacgcccagaagaccctgcaaagtaagtatcacctgaccgcggctcaagcaaatgaggtcgtccagtattcccacccgaagaacccacgtcctgtaatatttgtcgcctcttccgatatgctgcagaaagctggctggtggagttacttcggtgcttggaactttacaaaccagagctcggagaactacaactactacgtgcctacagagcaggtgaaggtgaacccgggctcaactggcaaactggccttgcttgacgaccagggtatgactgtaaatgccgtaatccagagaggctctggcaacaactcaaccactgcatatacggaggccgtgtacaccgacagtggaaagcagattatggtgaatgacactccttacaaccccctgaatattagtaacctgatggttatcgaagacggatacgtcatgaagaatcagtctgtgggaaacgtgaaggatgcaaactacaccctcctcctcatcggggaaaagaaccaatacacccccatcctgatgagtaatgagctagcgaacagcatgttcacacgactgtacttgtacgggggagccgggcagaacattttcgagaatgtccatacggagaatggagtgatgctgttcaaggtgaactttaataacacggctgctggggcttga

SEQ ID NO: 10070 - DNA, 1095 bp, synthetic construct
  source 1..1095: mol_type = other DNA
atggggatagaggagaaaataaaggacatcgaagacgaaatacaaaagacaccatataacaaggctacttcacaccatataggcaagctgaaagccaaactctctaagctcaaggaggagagtctgcagagaagtagcggtggccataagggtcagggcttccacgttaagaaaaccggggatgcgactgtggtactagttggatttcccagcgttggcaagtctactctcttaaacgaaatcaccaacgccgagagtaaggtgggagcttaccagttcacaacactggatatcgtgcctggggtgatggagcacaagaacgcaaagatccaggtgtttgatatccccggaattatcacaggagccagcagcggtaaagggaggggaaaagagatcctgtccgttgcacggacggcagatctgatcttaatcgtcctcgacacactcaacccacagcacttggatgtgattctgaacgaactgagaaacatcgggatcagacctaatgaaaaggaacctgacgtcacggtcaaaaggaagaaactggggggcatccacatttcgtccacctgtccgctcactcacctagacgaaaagattatccgatccatcatcaatgagtatggcatgcataatgccgacatattgttccgtgatgacgtgacgatggatcagtttattgacgtccttgatcgaaacaaatcatacgtgccgatgaaaatcctgctgaataaggtggatcttgtcgatgactcctaccttgaggaactcaagaaatacattcccgacttcatcccaatttctgcggataagaaaaccaacattgacgagctgaaggacattatctttgacaatctgaatctggtgagggtgtatttgaagccccaggggcgcaaggccgacatgaacgaccccctggtcataaaaaagggcaccaccgtaatcggcgcttgccgcaagttgcaccgcgagttcgtgaaaaatttccggcatgccaaggtctggggaaccagcgtgaaattcccaggccaaaaggtaggtcctgaccacgtccttgacgacgaggatgtgctgcggattattctcaagaaatga

SEQ ID NO: 10071 - DNA, 546 bp, synthetic construct
  source 1..546: mol_type = other DNA
atgtccgaagctatttttataacgggcaccccgtgcactggcaagacaaccgtcagtgaggtcctgagctcgaaattgaactgcaagctcatcaagattaatgatctggccatcgaaaacgacttcgtgctggggatcgacgaggagaagggctaccgcatcattgatattgaggcacttgatgagaaggtgtcagagatcattagcgaaagtgacgagctgatcatatttgaggggcacctggcacatttatgctcaggagccgacaaggtcatagtgttgagagtgaatcctgatatcctccgacccaggcttgaggcgcgggattattccgaaagcaagatccgggaaaacctggaagccgaggccatgggagtatgtaccagcgaggctttcgaagaatacggggacaaaatctctgagatcgacgtgagcaaactatccatcgaggagacagttaatgtcattagctacgtgatcgaagacaaactcgatttcccagtgggtgaggttgacttcatggactggctgatttccaacttttga

SEQ ID NO: 10072 - DNA, 825 bp, synthetic construct
  source 1..825: mol_type = other DNA
atgggggagaccaatgtgaaaatcctgtatctgaccgatctctactatgaagccaagggccggaagtacttcgaagaggacttatatatcagcggaatactcaaggaacatttcgacattgccttgtgccacccgaagaactcaaaggactttgaaaacgatgtggatctcatcgtttttagaaatacggggcctgtaactggattcgaggaggagtacgagagtttcgtcaaaagggtcacgtcgaacgacatcaggactttcaatgagttcgtgggcaaggcggacatgaagggcaaacagtaccttttggatctgacactggatgggtaccctgttattccaaccatcgatgacctggaaaacataaatctgatcccagattgtgaagagtacgtcattaaacccaaggatggtgccgattccataggtctggagtttctaaccaagagtgagttatttgaaaagaacctcgtgaacatgctaatccaacccgcaatcgactttgagtacgaggtgtccttctacttcatcaatgacagcctggagtatgccctgtatgctccaaataaggacaagcgatgggaacttgaaaaatatgaatttagccagcgcgacaaggagtttgcagaaaaattcattgcttggaacgacatcgaaaacggaatccagcgggtggacgcctgccgcacaaaagagggcgagctcctccttgtggagctggaggacctgaatccctacctgtctattttggagctggacgagaaaacaaaggacgatttcatgaaccacctcattattgcgctgaaaaacatctgcgattga

SEQ ID NO: 10073 - DNA, 387 bp, synthetic construct
  source 1..387: mol_type = other DNA
atgaataatgacaagaaagcggaaaaatgcccaatggaactggccatggaactcatcagcagaaagtgggtcatccagatcctgcgcgatatgttctttggtaaaaagcggttcaacgagtttaaggatggaaaacccaatctaagcaacaaggtgctttccaattgtctcaaggagatggaggagaacggccttatcagtaggaacaacgatgaggacaagcagattattgaatacacactgacggataaggggaaaaagctgaacaaggtggtatacgagctcgcaatgttcacattaactaccgacctgggcaacgaattttatgacgacgagaccaaaatcgagctggagaacattttcaaaaataccttgataaacaattga

SEQ ID NO: 10074 - DNA, 447 bp, synthetic construct
  source 1..447: mol_type = other DNA
atgaaattcaatgcatggaataataacgagaaattcttctcatccaagatcgcccaaaacgtaatttctaccgcttgcggaagcgacatcaacactgcctgcggaagcgacgtcgccgcctcggcctgcggctcagacattaacaccgcgtgtggcagtgacgtggctgccagcgcatgtgggtctgacattaacacggcttgcggcagtgatgtggcggctagcgcatgtgggagcgatatcaacactgccgtggccgtgatgtggctgctcctgctcgtggttctgatcctgaccctgcttgtcgcagtgatgtggctgcttctgctcgtcgttctgatcttgacactgcacgtggatcagatatccccccagttggtcgtacagacagattttaagattaattccatcctcaacatcttatttttctacatactatttttctga

SEQ ID NO: 10075 - DNA, 1029 bp, synthetic construct
  source 1..1029: mol_type = other DNA
atggctgatttttttgcctttcagtggcatatcctggatgactgtgaccagcgatgcaagcactgctatatcttctcagaagaaaatgacaaggaactcataacgatgaaatatgaggatatggagattgtgttagacaactgcctgaaattctgcctgaaaaccaacaggaccccatacttcagcattactggcggcgacccgatcctccaccctgacttttggcaattgctcgagatgctgcacgaaaagaagatccactattccatactgggcaacccctttcatatcaccgatgaagttgctaaaagacttaaaagcctgagctgcaggcagtaccagctgtccttggacgggctacgggacacccatgactattttagaaaacccggctcgttcgacattacccttgagaagattcgcatccttcaggatgccggagtccgggccagcatcatgacgacagtttccaagacaaacatcgatgaaatcccagatctgatcgacgtcgtggtggagaataatgcctgtctgttctccttcgcacgttattgtcccacctccctcgagaaggcggcacagatgacttctgaagagtacaaaaaccttttggcaaaggtctgggagaaatacaacgagtacaaggacagcaaaacgttttttacactcaaggatcatctatggaccctgttcctgtatgagaaggggctgtacgagatcccagagaatctgaacgacgatattgtctacgacggatgcaactgtggaaacagtcacctcacaattttgccttcaggtgatgtattcgcctgtcgccgcatggacagtaaggtgggtaatgccctcaatgagtcaatatatgatattttcatgggcgataacatggacgaataccggcagttcgaaaagttcgagaagtgcagccgatgcgagctgctgaggttctgtagagggtgtccggcggtgagttacgggacaactcacgacatgtactctcctgacccccaatgctggaaggtggtgttatga

SEQ ID NO: 10076 - DNA, 966 bp, synthetic construct
  source 1..966: mol_type = other DNA
atgaaagcagtggtgttggaaaagacctgcaacgcggacgagctgaaggtcagcgaagtggagatcccaaaagtgaaagatggttgggtgttagttaagatcctcggcttcggcatcaaccgcgctgaggtaatactgagggattatgaggccgatgaagactacatcgaattgcctgtcattcccgggatcgagtgcgttggaaaggtggtggactcctcaaatacccgatttaaaaacggggataggatagctgccctgatggggggaatgggacggagttttgatggcggatatgccgaatatgctctcctacccgaaaaaattgtcttcaaaattgatgaggacgtcttcgacaagctgacactggaggagataatagccattcccgaaacgtacttcactgcctatgggtcgctgatgagccttaatcttgtaaaggacgacactctactgatccgtggggcaaccagcgctttaggcctttccgcaatgcagctggccaacagcatgggatgtgagatcttcgcaacgtccagatccgaggaacgctttggtaagctgaagtcaaatggtgcggatgagtgctttgccgacgatgggtgtctggccgagaaactgaattgtgacaaggtcctggaactcatcggccccaaaaccctcgaggacagcatgaagtgcatcaacagtggcggcatatgctgtgtgacaggtgttttgggagggattgagtacatggacgaatttgacccaatcaagattatcccaaatggccggtacctcactagtttcttcagcaactacccgacacaggagatcatggacaacatctttgatttcattatcaagaacaacatcaagcctgagattagcagagtgttctacaatctggaagacattggcaaagctcacaccctcatggagagcaacatggcccaaggcaagattatcttcaagctcgagtga

SEQ ID NO: 10077 - DNA, 612 bp, synthetic construct
  source 1..612: mol_type = other DNA
atggtgacaaaggaggaatgctttaaacagctccgagacgtgattgatgccgttctgtccaccgtggacgacaatggcaatccccaatcgcgcatcatcgatataatgcacatcgaagacgataagatctattttctcaccggccggggcaaacacgtctactcagagattataaaccacccaaaggtaagctacctcagcctgaaggacaacaagtccattagaatcagtggcgaggcccacaaactggacaaccagaaatactggatcgatctaatattcgaaaacaatccattcatgaacaacgtctatcccggaaacgccaggtatatcctggagcctttctgcattgaagattacgaaatggaatttttcgacctgacccagaagcctatcttccggcaaagcttcaaattcggggacgtggagatcacagttaaggggtttgagattacgggggattgcattgcttgcggtacttgtcaggcatgctgtccacagcagatccccgtgtttgtggacgataagttcgagattcccccggagcattgcttgcattgcggactttgttacgagaattgtcctaatgacgcgatcgtcaagagggagtga

SEQ ID NO: 10078 - DNA, 627 bp, synthetic construct
  source 1..627: mol_type = other DNA
atgctgaaaagcgagaatggaatcattaaccagattgggtctaggatactgaccaggaaagccatactgaacaactccattaattacatcgagaagtgcgtgagctccaataacattttcaaaagacgcggtgtgatcgaggccatttcagtcgagttcgatgcgataaacgactattcctttctgaagcaaattatctcatgtttcctgaacgaaaccgacgtcgagatcctgagtaacctctctaaggtaatggacaagatcacgcggaacaactgctcctacttcaaggatgaaattctcaaatacatctctaaggacctggataaccactactatttgcatttgatcaatagtttctatgaaattagcgggggcgaagaagacgaatttatcctgaaagctatcaagcccttcatcgactacttcgaaaagaatagcatcgacatccgaaaaatcgacgcaagcatttcgacacggatcagtgatataatcctcaagatctacgaggagaacctaggcgacaacagcattaagaatcagtgcttagattatattgatatcatagtgaaggatgacctgtactattttgagaataaacttaatgagaagtttgagctcctttga

SEQ ID NO: 10079 - DNA, 582 bp, synthetic construct
  source 1..582: mol_type = other DNA
ctggaccataaaatcacggacctccagatcaacgcactaatcgggaccaactcaaagtacgagattttcgagatcgaccggcaatatgatatcatgagcacatccatcaagatggacaaatctaagaaaatcaatttcaacaatcacatgccccacgaatgcacccttctgaagaacgtgattgagctcaataacaaggaactctacgataaaataaaggactacttttgcctgtactatattagcgctttggagaacacaattgaaaacagttttagaaaattttggagccttagcgagaggattataaaggatattcacggcggcatgaaggacgagaaactggtgaagtacatgggaaagctgctgaagatgtgccgctatccagataagataatccagcgagtcaaattcatcaaaatcaaacggaacaatctggtgcatgaaaatattcacggtgagataactcagtccgatcaggccattgtcaagatcatcgccgagaacttaatcttgttcctcatctgttactttaatgaagtaaccgacattggggactacaagtcgttctatgatctgtga

SEQ ID NO: 10080 - DNA, 645 bp, synthetic construct
  source 1..645: mol_type = other DNA
atgaataagatcgaatacaccacgaggaaattgaactcactcaagcagaccctcatcaaaagctttgaggctatcaacagcactagcaacgacccaaagtactactacgaaacaatctgggacctgatgaaccagaagagcaacattaaggagatgtttgtgaaggccacacttagcaagcagatttatctcataaatatttcttccatcctgagaaagatccagaacaacgatgagtcggacattctggataattttctagtcgagcttaacaaaatgtacctggagtacaacgctatggacaaagaacaaatcaacattataatttacactaatattcccatcaaactgaagagtaatgataacctcatcgagaccctcaaatatttcaacttaaagattttcgagttctcaagttacaacttcgagaatgaacttgacttggacgacgaaatcaaatacaagttcaatagttccaagttcttgatgctgaagtacgcggcagatgcccgcgattatgaatttgtgaagtctgaggccctgaatgcaatttattccttctttgggtatataacctatatccatcggctgatcatgatcctgaaatccggcatactaatgaaactgcactggatcatcaagtga

SEQ ID NO: 10081 - DNA, 423 bp, synthetic construct
  source 1..423: mol_type = other DNA
atggtagacacatttagcaaagagactcgctcctatgtgatgagccgaataaaatgcaaggataccaaaccggaaatcatagtgcggagttatttgttctcaagaggcctgcgcttcaggaagaacgatgagagatatcctgggtcgcccgacattgtcctgccaaagtacaagaccattgtgttcgtgcacggctgcttttggcatctccacgagggttgcaagtacgcacgtatccccaagagcaacgtcgactactgggagaagaaactgtacaggaaccgggaacgggacaagcacaatcagaaagaactcgagaagatgggatggaatgtcatcacggtgtgggaatgtgagctgaaaaaagacaaggttgaacagacacttgaggatctatacgcccaaatcacctccaagctgtga

SEQ ID NO: 10082 - DNA, 174 bp, synthetic construct
  source 1..174: mol_type = other DNA
atgagcgacattgtcaaggtgcgggggaggcatggaacaaagacgctcgacataaccattcccgccaaaatcagcaaagaatacgatatccacgcaggcgacgtgttcaaggtgggcattgtcaaagagaacgattccatcaagatcatctacgagctggtatataaggactga

SEQ ID NO: 10083 - DNA, 165 bp, synthetic construct
  source 1..165: mol_type = other DNA
atgggccaggacgggtttgaaaatgagaccctcctcatggaggccctgaacaacaaaaggttcaatgagcttaacaagaacctgaaagacgtgatcacgttcaccagcgaaaagcccataaatgagaagtacgcagatacacggcactgcctaaagctgagctga

SEQ ID NO: 10084 - DNA, 306 bp, synthetic construct
  source 1..306: mol_type = other DNA
atgcccagacataccccaaaatctaacatttgcaataaactgtcaccggtggattgtataaacaaaatcaaaagtgtaataacggaaaagaggagcatcgggcacggcaacgtgtatggtatttcgggagacaatcaggagattacacagatcaacgaagcgatcaagctcgacaaggggtttcagttcgtcctgaactgcgaaagcgaggcacacctgtcccaattggaggacctcatcaagaaggagctaaccagcaatgagtacatctgtggcgatgcctcccggtgccgcgtgttctgctga

SEQ ID NO: 10085 - DNA, 270 bp, synthetic construct
  source 1..270: mol_type = other DNA
atgctgcccggcgccgagtttagcgtggagaacgtgatgggaatccacgagctgatatttaaggaagtcgtcacccaaaagagggattgtggcacagccatggttgggtcctcaatctaccatcagggggctgaatcccagtgcattgaatacgtggcgagcgccaatatccggttcgactgcaacattagcaacgtgaacgtgctcattaatgagatcgtatcggacttcgcagacaaaggatatggcgtcagtgtggagttcatctga

SEQ ID NO: 10086 - DNA, 252 bp, synthetic construct
  source 1..252: mol_type = other DNA
atggtgttcaatattgacgacattaaaaagagggtaatccccatcgtcataaagtatgggatcaacacctttagcctgttcggcagctacgcccggggcgatgcaaacgagaacagcgacctcgacttcgtgatggataaatgtgacctcaaaggactacagtacgtttcgctggtccaggatctggaaaaggagtttaactgccacgtggatgtgatcagtaaaggttcctcaaataagaagatatcctga

SEQ ID NO: 10087 - DNA, 177 bp, synthetic construct
  source 1..177: mol_type = other DNA
atgaacgagaaagacaacaggtgggcggaaaccatcattggctactgtaatcggattgacgattacctaaaccgctttgatgacgataaggagatctacatgagcgacagcctctataaggacgcctgcgcactggtcatcatccccattgtgaatctgcagataatcttcagatga

SEQ ID NO: 10088 - DNA, 294 bp, synthetic construct
  source 1..294: mol_type = other DNA
atgattagctcagaggaaaaggagaaaatcaaggaggagatcgtggagaaaataaactctgtgctggagaaaaacaacgaatccttccgcctggacaaaataaatgtgctgaacaaaaatgagaccgtaaagttcatggggaattacagggtctacgatcgaaagaagtacgacacggtttccagagaaattaactcgttcctcaagaagtatggcgatgtcgaaatcaagagcaagaagatccgggacagtggaatgaaatttacaaccgtgagcttcaactttgaactatga

SEQ ID NO: 10089 - DNA, 1221 bp, synthetic construct
  source 1..1221: mol_type = other DNA
atgatcaagcgggagctttacctcaaccaaatccgccacctgttcggaagcgactttatcaaggtgattgtcggactcagaagatgcggcaagactagcctgctaaagagcattatcggagaactccaggacaaaggtgtgaagaaagagaatatcatttacatatcctttgagttggtgcaatataagaatatctttaacgcgcaccaactcgatgagctgattttaaagctggtcgaggggctggagggcaaaatataccttctgttcgatgagattcagcaggtggagttttgggagaaatccatcaactcctatcaggcctcattcgactgcgacatttacataacagggtcaaacagcaagctgttgagcaacgagctcgccacacttctgtccggccgatatgtgaagatcaacttgtatccattcagcttcgccgaaatcttacagtacaagcaggagattaatggtttgaagctcaacgaaatgaacctgaaggaactattcaacgaatatctgttatttgggggaatgcctgggttgctgccgatcaaggatgaatcgactaagattaatatacttcatgacatttatgactccatcgtaattaatgacgttctaagccgatataagatcaatgagatcgacctgttcatgcgctttagctactatctgatgaatagtaccggccagacattctcaaagaccagtatcacgaactacctgaaaaacgaaaataaaaaaacctctaggaatactatatccaactttacaaagtaccttgaggattcgctcttctgtaaaaaggtcatgagacaggacatcataggcaagaaactgctcaagaccgaggagaaatactacctggcagaccagggatttcatcacgctctggtggacaacaatagtgactggcttggtaggatactggagaacgtggtttacaatgagctgatccggcgcggctactctgtcaaaattggcaagattaaaaacaaggagatcgatttcgtttgcgaaaaacaggataataagatctacgtgcaggtagcttatctcctctcaaccccagaaacgattgaaagggaatttagccccctgttcgacgtccccgataaataccgggcatacgtgctgagtatggatgaggtgaacctgagcgaaggcgggatcatccacgagaacatcattgacttcctcttggattatgaaatctga

SEQ ID NO: 10090 - DNA, 942 bp, synthetic construct
  source 1..942: mol_type = other DNA
atgttcaagtttgataaggagcagcatgtgtttgactttgccggggtaaaaatgggcgggcaaccgggagagtaccctacagtgctatgtggcaccatcttttacggcggacacaacatcatcaacgatgaacttaccggggacttcgatcatgaaagcgctgagaaattattgaatgatatgatcagcatgtccgacatcactgggaacccttgtattgcccaggttttcggtcagacggaagaggctattgtgaaatacctggagtttgtgggggacctgtgcgatatacccttcctgattgactccacttcagccgatgctagagtcgcgggtgcccagtatgcggacgaggtgggactgactgagagggcaatttacaactcgatcaacatgtccgccgacaagagcgaaatggacgccctcaaagaaaccaatatcgatagcagtataatcctgggattcaaccccatgaatagtacggtgcaagggaagatcgcaatgtgggagaacggcgacgatggcgcgtatgagaaggggttgcttgaagtcgctgaggactgcggcatcaccaaattcatgatggacacagccgtgaccccactgggacagggcgcaggcgttgctggtcgggccagctttgccgagaaggcaaagtgggggtatccggtaggctccggtatccacaatattccttcagcctgggattggctgcgcgactacaaaaatgagaccggcaacaagactgcattcacagtgtgcgatatcggagccaacattctccaggtcatgagctgtggagatttcgtcctgttcggccccatagacaatgcaacaatatgctttccagccattgcccagacagacatgttcattgctgaggctgcgaaggacctgagcaccgaaccaatcgaaacgcaccccatcaataacctcctctga

SEQ ID NO: 10091 - DNA, 366 bp, synthetic construct
  source 1..366: mol_type = other DNA
atggacgaacggtcctataacatctcagagtttgcgatagagggcgaggaggcagtgaagacagtcttttacacgacagacagcaccagcggcagcgtatggtgtgtgaagcccgggcaagaagtcgcatgccacacccacaacaattccgatgacatctggatctgcatacagggggaaggagtgttctacccggagctcggtgacgagattccaattaagaaaggccaggtggccgtcactccaaaaggactgtgccatggcgctactaacaccgggaatgaagatttcatcttcgtgagtattgttgcccctgtgcccgccgattataatcccctgtactcgttcctatttttcatcaactga

SEQ ID NO: 10092 - DNA, 366 bp, synthetic construct
  source 1..366: mol_type = other DNA
ctgagccgcggcaagaggcccaagtggatgatcgagatagctaaggaacggatggagatcctttttaatcgagccgagatggagttcatcaaccatcctgagagatccaatcgatacgtggaactggcactgaagctatctaccaagtacaatacgaagattccggagaaatggggaagaagatattgcaggaactgcaaaagcttcctcagtcccggccgcaattgcacagtccggctcgtgaactccgaagtgaacattttctgtggggagtgtgatcacgtaatgaaaataccatatcacaaggaaaaaaagaacaaaaggcgggccaagtacgagtcaatcaagaaacgcaacgacgaatga

SEQ ID NO: 10093 - DNA, 258 bp, synthetic construct
  source 1..258: mol_type = other DNA
atgagccagagtaaaaaggagatgatgaaccgggctctgtccgcgatgaccatcaacatcgggaagaatggcattaacgaaaatgtgatagatgaaattaaacgccaactggacagcaacgagatcgtcaaactcaaatttgcaaagaatatcgccagagacaaggataagttcatagacgatatcgtgtcacagacaagggccaagctaatcgacgtgcgaggacacgtcgccgtaatttacaagaaaaagccctga

SEQ ID NO: 10094 - DNA, 438 bp, synthetic construct
  source 1..438: mol_type = other DNA
atgaccaccgtattcgacgtccctgccgacctgcttattaagaaggtcgcagacgagtttaagaacaatgataagatcaattcccccgcatggtctaacttcgtgaagacgggggtccacaaggaacgtaaacccgaaaacgtcgattggtggtatgtaaggactgcttccattatcagacgcgtgtacatggatggtccagtgggcgttatgagtttgcggacattctacggcggcaagaaggaccggggggtgcggccggaggtctttagaaaaggcagcgggtcgatagtgcgaacctcactgcatcagctggaagacgccggactcgtggagaaagtggagggcggaagggttgtgacaccagccggacgcagcttcctggataagctaagcgcggaaatcatcaaagacgtgcccggtctcgagaaatactga

SEQ ID NO: 10095 - DNA, 357 bp, synthetic construct
  source 1..357: mol_type = other DNA
atgagcgacctcgatgaaatcaggcagaagcgcatggctgagctacaggcccaacaggccgcgatgcagaaccaagcacagcagcaggccatggctcaggcacaacagcaggaagcccaagccaagttcgagtctcagaagaaacagattatcgcgcagatcatgacctccgaagctcggaacaggctgagcaaccttaagttaacgaaacccgagttggtgaatcaaatcgaactgcagctgattcagtcagcacagtccggcagtctcagaggaaaggtgaccgacgagcagctgaaggtcctgctccgacagatagccgggcaaaagcgcgagatcaaaattacacggaaatga

SEQ ID NO: 10096 - DNA, 585 bp, synthetic construct
  source 1..585: mol_type = other DNA
atgaaggctggtgtgctctacagtgggggaaaggactcgtcttttgtcgcagtgatgctgaaacggttagggctggacgtagaactatgcaccgccaactttggggtgtacgatagctacattcccgccagcaaaagcgccgaagcgctgggtttcaagcacaatgtcctgaagatggattatggcatcttggacgatacttgtgacatgatcatgaacgacggcttcccgaatgatggaatcaagtttatccatgctagaacggttgagaagcttgccgacgattttgacattattgcagacgggacaagacgcgacgataggacccctaaactcaacatcaatcagatcaaatcccttgaggaccgcaagaacgtgcaatacattaacctggacagtttcggccacaagagcgtcaagctcataacttccagcctgttcgagatttcacacgaacgaagcaataaggacaactcctccgatttcgaggtggaaataaggaccctgatcgatgagaaaggcggcaactcattggatatcttcccagagcattatcagacacgggtgataggatataaaaaatga

SEQ ID NO: 10097 - DNA, 156 bp, synthetic construct
  source 1..156: mol_type = other DNA
atgagcagaaataaaccgctagccaagaagctgaggatggctaaagcaaacaagcagaataggcgaatccccatatgggcgtatgccaagaccaacagaaagctgcggtaccgaccaaaacctcgccactggcggcgcaacagcctcaaactgtga

SEQ ID NO: 10098 - DNA, 246 bp, synthetic construct
  source 1..246: mol_type = other DNA
atggaacgcgtttacacaataccactgaggaacgtgaaggagattaaaaggaccatccgggcaccccgagcgatcagagaggtgaagaacttcctgactaagcacatgaaggccgaggaagtcaaaattgatgaaagcatcaatcatgctatctggaaacggggcatccagaagataccgagcaagattacggtcaaagcagtaaaggacgacgacggggtggtgacagccaccctcgccgagtga

SEQ ID NO: 10099 - DNA, 675 bp, synthetic construct
  source 1..675: mol_type = other DNA
atgctgaaacgcgtagacatcgtgggaaacccgaatatcggggtcttcattctggccaccgacgagtacgcgattgtgccttacaatctcctggacgagaaggccgacataatcaaggagacattggacgtggatgtggtgaagtcctcaatctctggctgcagtctaatcggaagcctggctgtcgctaattccaacggcatggtggtgagcccccacgtgttagatcgggagatcaaacagtttgaagacctcgggattaacgtcgcgacggttcccggtcaatataccgcacttggcaatatcattgccgcaaacgataagggcgctctcgcctccccatttctgtctgaaaaggcaataaacatcatcgaggaaaccttggatgtaaatgtcgaatccactagcatggtaggaagtgacatcatcggcagcatgattcaggttacaaacaaaggattcctcataagcagcaacgctgttaagtcagagataagtttcgcccaggaggtctttggggtcgaaggggatattggtaccgtgggaaaaggcattagcctggtgggtgcttgttccatcgccaactcaaagggcgccatcgtggccaaagactcgactgggccagagatggccagggtggaagaggcactgggcttccttgacgatgacttctga

SEQ ID NO: 10100 - DNA, 225 bp, synthetic construct
  source 1..225: mol_type = other DNA
atgataacaaagatttacagagtcaagggaaccttcgtgatgggggatgagtatcataagttcacgaaagaatttaaagcaacctgcgaagcggatatcgaagagaagatctacgaacgcttcggctccaagcaccggatcaataggaaccagattagcatcagcgagatcgtggagattgcccccgaggacgtagtggacccaatcgtcaaagacatactgtga

SEQ ID NO: 10101 - DNA, 435 bp, synthetic construct
  source 1..435: mol_type = other DNA
atggaagaccagcagaagctaaacagtcttctcaacgaaatcaatgtataccggcagcaggctgacctgattcaacaacagatcgaattgatcaggacgagcatggctgaagtggacgcactgttctctgcgctcgatgatatcgagggtaaagagtcggtcgaggcttttgtgcccgtgggagccggctcattcgttaaaggagagttaaaatccaccgatgagatcatcgtgtccataggggccgggcttgccgtgaaaaaggacgctgatggcgcccgcgagatactgaatgggcagaagaaggacctgactgatagcctcgacaagatgctggccaacctgcagcaatgcacagacattgtcggcagcctgcaggcccaggcagagcagattgcagcagcggcccagggcaagatgacccagatgggatga

SEQ ID NO: 10102 - DNA, 6225 bp, synthetic construct
  source 1..6225: mol_type = other DNA
ctgaagaagatactgatattcctattgatattgatttttgccctcagcatcaatatcacattcgccagcaataccactaactcctcagacatctacataagtaacgaggggagtgatttttgtggagacgggtccatcgataatccctatcagacccttaactacaccattgggaaggtctcaaacaacagcaatatttacctcaagagcggaacctacaattctacagggtacgatattgtcaacaaaagcatttctattaacgggattggggacgttacgatcgatggcctcaatggatttatttcccaaagcattttcaagattaactctaacgccagtttgttcctgaacaatattaagtttaagaacggctattgcgatctggacaacgagacgccttcctgcatcatcaatcagggccgactcttcattacaaactccacctttgataacttcaagaccagcgtgggcgtcatcactaacgagaactatctgtgcatcagcaatgtcaagaccagcaacctgagcaactcccagctgttctccgcgccatataagtacaacatccctatccaatttatctacaacatatggtgttgtgatatttataattcatctatcggcgcctcgtacaataacaaaaacatgactctaaccaattcattcatcgagcgttttgtgagcaataaggattatagcaatcaaactagctacgcctactttaataacagtaacgtgcacttgatcaccgctaacgattgtgacatgttaattttcaataatacctatattaattgctactttgatgttgacgataccacgcataccatcgagtactccaacttgatttgggacaacgtaacactctcaaagtacaacgatttattttacttttccctcaaaattggctactctaatctcacagccatttccagctacttcctcacctccatcctcttcctcagctccaatgcaacaatctcctacagctgcatcttgagcaacattatcactgccgtcgttagcaacgtcaacgtgaactacaattggtggggggacaataagggacctaacgtaatgaacggtgagttctcaaagatcaccagcaattactgggtagtcatgatggcggactatgacgacagcctggttaaaatcgacctgagtaaatatacaaacggcctcgatgtctggaacttgaataatccctctaagctgcgcacccggctggtgaagctccggacagagaccgggaacttgaccaagactagcggttatttggagaacgctactttctactctgagctaaacggaaacaacattaacacgatgctttacgcgatggttgacaatcaggttctcagaatcgtggttggggagggtaactctgactatgacttgtatatctccgacactgaaggtaatgactatttctgtgacggatctctggagaacccatataagacccttaaaaaagtcgtgtccaaggccattagtggaaacaagatttacatcttgccgggatactatactctgagttggaatgccaacattaagatactgaaaaatctgacctttatcggcattggcaacgcaaccctctcccgcagcaatgctcgaaacattttcattgtgcaagaaaagggcgtgctgaacatcgagaatctcaccttcacacaggctacttccggatatcacaactactatgaccccatcattcatgtaatcgacggggatgtaaaccttaagaatagtaacttttataacatcaccacgtacggggtggtgttctccgacaaaagcgagcacgtgactgttaataacctgacgcttctaaacgttgaagggccggttgtagtgggtaactctacgaaggtgagtatttataactctaaattcttcaatggaagtgaagcctccttttacgactcatattactcatttctcatcccagtgtgttctaacctgtctgtggtaaattgcaccgtggatggatacaaagggggtttaattaagctaaatccgagatacgaacagatagccgccaggagctatatttataactcaaccttcctgagaaactatcagtacaactacgtgtatgctcctatggtgtccacctatagttacaattacatgacaggattcagtatcatcgagaactgcacgttttgcaacaacattgggaacctggtgttcagtaacatcataaacaattgcacattcgtcagcaataaaaggatacgttacgaggaaactaacatccattacaacgtcaactaccccaaagcgctaatctacgccaagatcattattaactctaatttcaataacaattctttcatctccaagaactatgaggacatggtcatccatggcgatgaggtgtactacagcaccttcatcaataactccgccgcattcggcggcgccctgtctggctccaaggagatccactatagcatatttataaacaacagcgccgcatttggaggtaatgatgtctttgtttataatggggacttaaactgctcgagcaactggtgggggagcaaccagaagccagattccagcagggtgtttgtgttcatcggcaccttggtcctggacgattgggtcatcttgaccatggactacaagaacgacagggtgatcgcatatctggacaacctgctggacaataacggcaacagctatcctctcaaccatgtgctcccatcgcgcgccgtgatttttagtacggaagggggcgagctgacgccctccaataccttcctcgtgaataataaggccagtactttcttaatcagactcacgagtagcgatttcaatgtttttgcccaggtcgataatcagatcacaagtttgacggtgtacaacaacaccacccagatactgatgagtaatgttgtcatatatgggaaggatgtactctataatctgtctttgataaatatcaacggacacaagatttcaaaccaggatctcaacgttatcatcactcacaaaaactcaattatcgactccttcattgtcaccactgataaaagcggggacgcatcatttagcgtcgactacgccatcggcatctatcaggtgaacgtggtctaccttggaaacggctatttcgaagaatgtaactcctccgctactattaacgtctcgagcatcaagactaaacttcaatcctataaccagacatattcaggtaaaaacaataagttttacgcaatcctggtcgactaccatggacggtacctgctgaacagggacctgattttacggatctttgatctcaacgataatctggtgaacacagtggacgttaagaccggggtgggtggaagggcagacgtgctcctgagcctggacgtgggaaattataaaatgaagtgggactacctgggaaatgaatggtacgagaagagcacttgtatatcatttgtgaccatccggcccatcgagacgaatatcatccttccaaacacaacactgtacggaaagggcaatgactacgagttcaccttcaaagacatgtacggaaatctgatttcgaacgagatgattacctttaagataagcaaggaaaatgagtcgagtaagtttagccttatcaccaagaaaggcattgcatcaataaatattaatctacttccaggaaaatacgacttagaagcggtgtatgccggcgacaaggtctacggttcgtcattcgcgtcggcaatcctgtacgtggaacccatcttcgtaaccatgaaccacaactcttaccagtccctacctaaaaatggggtgttcactgtgattctgaaagatatgtacggcactaaggtcagcggtgagaacctatcccttgaactgatcaacaaggacatccacaaagtttacgaggccgtaagtgatgctagtggccaagccaacttcaagctcgacgccccggagggcgtgtattttgcgctgatcaactatggaggtaacatctggtacggtagctccgtgagtgctgtgacgattgagataaactctaacgtgcctatcaatccagtttatatcaatggcagcaatctggtacagtattacggggaggacaagtactatctgatcaagtttaacgacaccaatgcatactcactggagggcaaacttgtcaacgtgctgatcaactctgaggattggagcaactcatacactcttgagagcaatgtcttcggtgaggctagaatccagatagcgttggaacccggaacgtataatatcacttacaattataagaatgaatactatggtctgtttgctcaaaatagtagtactatctttgtgtacaagatgccgaccagcctgatcgccagcaacatgatcctgaagaagggcgactccaagaacctggaagttaagcttgtgaataaaaacggagatcccattgctaacctccccgtcattattaagatagatgacaacgagtacaatataactactaatcagaaaggcattgctaagctgcttcttaacctcgatctcggcacacacaacgttacatactcctttaataataagaattacatctcttccaaggggaatgtaacgatcttggtggtgaatgactcgaagaagacaaccacacttgtcgggaacgacgtgtacacccgcgaagaccagaccataaattatacggtgctgctgtccgatctcttggacaatcccatttcatcctcggagattgtgctgaaaatcatcaactcagacgatattaacataaagacctacaaaggatataccgatgtaaatggcgttgctaccttcaagtttaatctcaagttcggtaactatttcgtgaacgcttattataatggcaatagtgtcaacctgcctagcttcacgactaacaacctctacattaaagtgctggagaactacacagagaccatcctgttcggaaacgatattgaaattcacaacgggggcgacgattactacagcgtggtgctgtctactgtggatggcgaatttattaagaaccagatcatcgagttcataattaagaacaatagctactttaccaatacagacgaaaacgggatagcctatctcaagatccccttttctccaggctcgtatgaggtcttaacgaagttccacgggtgcgataatctcaccagtagttcaattcacaactatatcagcatttacggagatctgttcaatttctactcaaaggatgtggttaaagcctacaacaatggtacccattactacgtggcactgtacgacacaaacaacgaacctctgtccaacaaaacaatcaatttctacgtgaataaccagacatatcaggatgtgacaaacgctgacggctttgtgtgctttgaggtctggctgaacccaggcaagtacatcattaatgccactttcaaaggcgaatatcctgatgaatttaccagtgtggtcaacaacatcacagtcctgcccaccatcatgggggagaacctggacgtttactacaacgaaaatacagtgttttcactattcctgctcgactacaactgcaaacccctcgaaaatacagaggtagtcatcacaatcggtggcgctaaatattccacgataagcacttttgggtcagcaagttggaaattgaaactgaacgccggggtctataacgtgatttgtaagaatcctatcacaaccgagaagatcacccggaaaattaatattaaatccacaataatctcgaaaaatctggttaagtactataaagggtcttctaaattctcagtcacattcaaagaccgcttcggcaatttcagccgaaattccaaagtgaagttcatcatcaacaagaagacgtacgtgaagaccaccaattcgcgcggcatcgtgtccctgaacattaacttaaagcccggcaaatacaccatcaagacttataacctgaagactggcgaaatcaaaacaaacaaaataacaatcaaaacactgataatctccaaaaacaagaaggtaaaggccggtaagaagattaactataatgtgaaggtcttcaattccaaaggcaagatcgctaaaaaagcaaccatcaaatttaaaatcaagggaataacctacaagatcaaaactaataaaaagggcattgcgaagctgaatatcgtgcttaagaagggaaaatacacacttaagacatcttacttcgggttaagcgtgaaaaataaaataactgtgaaatga

SEQ ID NO: 10103 - DNA, 5712 bp, synthetic construct
  source 1..5712: mol_type = other DNA
atgaagaacaaaatattcatcattggactgatcatcttgatcctgttcataagcatttcatccgtgtgtgccaacaacgaaaacagcacactgaatacctctatcaagatcaacaatgatcttaaccagataaacctgggcaacgaaataaatttgatcgacgaagcgcccaaagaggtgcttcaggacgaaagtgagatctcaatcactccccagaactataataagtattttaacgtctacactggtaaattcaagtctgatatcgtctcaagcaagatcaccacggtgaagatagggaatgtgtccaagtgtctgttcgcatttgagaagcccgtcaacttgatgccgatagactctagctgtcaaattaccaatggggtgatacatctgctgcccggaagcgatggatctaccatctccgggctgaaaattatcaacaacgactctgtgggggacatcaagtacggaggtattctgattagccgagcccatggaatatggctgacaaactcaagcaataaccttatttacaacaatacaatcatcataggcaaccagaaggggtgctacgccatgcctatggggtactcgaataataatagaatcctaaacaacactataatttccggtcttacgtcttgcatcgtcatgggccgcagctgctataataacattagcaacaattacattgagatctgcggctatgaacttttcactacatctaacttgattttctttaacccttggggacacgcagactatgacgacggcgtcgccgagtgcaacggaaattatatcgccaataactatctcaaaaactatggaaccggcatttgggcgatcacgctctctcttggctattacagcggagatacccaggtcatcaataacacaatcattaaggggtcatccggtattagcactagtgatatgctgttcacacaacccaaaaatattctcataaaggataacactttcatcgactgtccaataagcatactgacctgttccaacaatgtcacaatcgaaaagaataagatcttcggcagttccgaggacaacgccatctacatccaggccaatgacgctcagctctacaatcactccgtcacaatttcggataattatatagaatttgagaacctcggttgcgcgatcctcgtccatagcgacaatgtaacagtggtgaacaacgagattcacctctccaggtacggcactggaattgggatcagccccaccgacttccctaaagctagctctaataactgtaagatcgagaacaataaactttacctctccggcgacatgggcatcaggatactcggacacaataccacaatatgtaacaactacatctctaccaaggacaaaggcattgtgatttcaagctcgggctataagatctacaacaacactatcatcgccaacataattctctccgatgatgtgccaatctatatcgagggacacgtggtaaacagcacagtaatgtataatgagatcgagactaataacagtgaaggtattcatttcaacccctccggggatctgagtgactacttcggcaaggtgtcggaaaacacaatcaacggaatcatcgagaataccgaaactataattgtgaatgacaccaacttttatgattactttgacttaagcggctacctcaactatgaatttaagccaaactccaagaaaatcatctttttcaccttcttaaccaataaaaatatttacttcacagataaaatttttctgagtagtaacaagatgtacaatcttttgcacaacgtgtcgatcaaattctttgaaaacgccagcggatcgctgatccaagacctgaacttctacaacattgggaataacagtatcatcctcgatggggttaatgacgtctcaatcaacaacaatgactttaccatcctgtcaaataagggcaagaatatttccacaatttccgttattgggggcgagaattgcatcatatctaacaataacatcttcatgaacagcaagagcaatttcactacagcgatttctatcagcaaccctaacggcgccatcattaaaaaactgtcaaaaaactttaagattttcaacaataatatcctgattaagacaaacggcattgcacggggcatttatgcggacagccttgttgagacaaacatcctggaaaacaagatcaacatcatctcggattcgtcggcctacgggatctccatagagaataccaacgagatcgtctataacatcactattgacaataatctcgtggtgatcaattctaaggagatgagctatctaatcaaactgcagatgattggcacctctgacattatcaacaattacttggtgggaagcagtaacggtatttgcggtatcggggcctacaatagcctgaacctcaatataaatcgcaatgagatttccattagcggcaagaaacccattaacttcccggtttttgatgagctcggcagaaacaacgtggctatctatcttaagtccacagtcataaacggattctcaagaaatattttcgacattgaaaatagcacaatcctcatcaaagattcttcatcgatcattaagaatttcaatgtgaactcctacgtgattgcagactacaaccatgatttttactttgactcccagaataagcttaagagcaacatcattaacgacaatagtataattctctttaaaaacttcacttttaaaaagataaccaacattaatatcccggtaatcataaaaccatataaaaacctgaataatttcacggcgacactgattctttccgaaaatgccaacaaatcaagcatctacggcttcaattttatcaacgcaaatatcaatctgaacggggtcgataacgttaacatttttaataactcgttcaagtgcagtgagatcacggacaataatggtctgaataacattatctttaacaacagcttcgagtttaagttaaacaacgcagatggaatcatctttaatggatgcgcaggaggcatcttcacaaacaattatatcctaatcgactctaagaaatctaattttattctgattcgcaaagctaatggcacgaaggtgaacaacaactatatcaacgcgactggggatagtttggtgctgattaagtccgattcgtcagagaacacccagattctgaaaaacattattaacgtgacctctacgggcgattttaacgtgtacaatgcttttaagacgcacttcgataatatttcaaacaatgaaatcaagtgcagaggcacctcaaacagtgctgtaatttactacgactccagttcttcatgtaataaaattgagtttaatgaaattatctcaagttcctccaatggtcgggagtatgctgttgtattcgacaccaagcacgctttgtccaatactatcgcaaacaactacctgattacttctaacgggtacaggcgaggcaatgatgccgtgtacgctatctttgaactcgtctgtaacaacacgcctgtcacgatctatgtgagcattaactcaacggaagacgggaatggttcctttaccaacccctacttaacaatccaccaggccctcgagaacagcctcagcggagccataatctacatcttgcctggttactataaggaatctaatcttatcgtgaacaagaacatcaccctgaccgccataaacaatgacggagctgtgtacattgacgccctgaacaaccagttgttcaccataacggagaaggggagtctgaccattaatgccctgaagatctttaatggatttagcgtggaaggtggaagcttgttcttcaattttggcagcttaatcatcaacaattcagttatttataacagttcctcttactacgacaattccaacccaacctttaaattcaccaacatacagaccccaacgctcagctatagctacgattgcgagaacctgggtctgggaggggccatccttaactatgggaacctgttaatcaattcatccaccctattcgataacttcgcacacaagggcggcctattggctgattttggcaaatcaacaattaaaaattcactaatattcaacaatacggcagtgcatggcggggccatcttcacagactccagccacgagtttaacatcgagaacagcagcttcttggagaacctcgccattcagacactggattactgctacatccagagaaaatctctggactctggcggctatgagtatcgtagtctgtgtgacatgcggccgggatacggcggagccattttcagtaatagctccttaatcatatccaactgcctgtttgagaggaatattgccaaatctggcggcgccatcggccactactctaagatagagctcaacagtaaccggcaggggcccaattactacgctgtgaaccagaatgtgtacagtcagtttcggtatgtgcccaagctgaagatcgaaaattcgatcttccggtacaacgaggcaaaggacaccagttgtggtaacctgagcatgattagcgacaggatgtacaattactactatagtatcaactacaacggcggcgccattttcggctctctgagccagctgaccatcttcaattcactgttcgagcacaatgtagccaataccgttgggggtgcactgtgcgtgcaatgcgaaaattccgtcatcgagagttgtaagttctataacaacactgcgggggaatatgggggcgctatcgaggcctttggcacttaccgcatcttcaacacggaaatactgaacaacaatgctaaaaacggtggcgctattaagtacacttcatacaattcctatgggcatctacaggagatgatgagtttgttcaacgtcaccgttaccggaaataaggcgctctctagtggcggcgcatttattacccaagtggcgaatttcgcaatcactaatagcaacatctacgacaacagtgccccatatggtaacactttttatggaaagtatgggtatgacagtagctccaatatcgacgctcgtaataactggtggggctctgtggatggacctgacgattccgtgtggaactccgccaactccaagttcaagaattggctcaacgagaaagtcaactggcacgttccccacgtgagtgggggaagctcgaacaatgatgagtccgggatcggaaaccagaacaacggtgtcaatagctacatcccatctagcgtatccactgggtcgggggtccataccggctccacactcaccaacaacgtgaagtcttctggcgctagctcaaaagggttctccttcactggaaactggccttccggaaccgcaaacggctttaataacggtgggagcggggaaggtaacgccgtcaattcaaaagataactccggaaacagtcgcacctctatcgccggcaatgttaagaacctgaatagtgttagtaagatcaatagttctaacgtgaacaatctgttctccgtaggtatggacgccaacgctgcagacagctccgcttcctccgcctcaagcagccaggggggggctgatgagtccttctcaaatgcatacgaaatcattaacgaagttaagaaagagaacaaccaaaaatttagcatcttcaacatactgctgattatagcctggatcttctttgtggtgggattctaccgaaaatacaacgataatgagaaggagatctga

SEQ ID NO: 10104 - DNA, 5262 bp, synthetic construct
  source 1..5262: mol_type = other DNA
atgaaatatagcaagcttttcctcatctcttttgtcctcctcttcttcattgtcagtgcggtgaatgcgctggacgcctccgagatcactctgaacgccgacaattctattgacgaaatatccaatgaggatatgggaatactgaatgaggtgtccccctcgaatgatatcaaacatatctatgtcaacgacactggggatgacagcaacatcggtagcatcaacagcccttactcttccataagcaaggccattggggatgtcaactcgtctacaaatacaacgatataccttagcaagggcacctttggaaaaaataacgataccaatttccagtttaccaacgagataaacacttacttcgacaactgcaacgtgacgtttatcggggagggaaccgacaagacatttatcgacgggaagagcacatacaagttcatgacgatcctggagatcacgcctaacttggtttttaaagatattacatttgtgaactttaggggccgggggagttcggtgtttgagctgctggaggccggcaacctcacaattgataactgcgtgttcaaggattcatattctactagtaatggtgatacaatttcatctagcaacagtggggatttaaagatcatcaattcgcaattcatcaattccaatggtggaatcatttccctcctctacgaggatgtctcccccggcactctatacttggagaacaatacctttgtcaacatcaccaactctgaaaacaacggaattgccgtgacgagtaactatgctaaagcagtgatcaaaaacaataagtttaacaatatcacctgtatcaatcagaaccaggtgaccctttatctggaggcccccgacgaagggacactagtgctgactgacaataacttcgttaattgcgagtgcctcaacgaatacttcatggctccagtctatctgtgggcctatgaggaatacgtaatatttgaaagaaatatattcctcaactccactggtgcttcgggcttcaatatcttgcttaacggtagaatggataatctgaatatcagtataggggctgacgagattaacgtgcacaacaacgaaatcaaccacggggtgaacattccaatcaatatcacggatgatgtcggaaacctcgtgctgatcaacagtggaatccagctgaaccttatcggcgacaacaacaattacaccccctatctgtccttaaaaaataagaagctcaccttcgctactgtgcccgagagtggcatctataacgtcactatcacctacaacgatgggctatcaaccaccgaggtgttgacgatcataaagattaacatctccagcagccctgtgaacatttgggtctcgccgaaaggctccgacagcaacaatggcagtgaggagaacccattcaagacaattcagcacgccatcgacacgggctttgaaaagtcattcaacgtcataatatatctggatgaaggaatttactatggtgagagtaatgttaatttgatcattacgaacaaaggtagtcttcaaattatcggaaaaaaatataacaagacgatcattgacggggagcatagcaactggtttctgagtgttgacacctgcgatgtggaagtgaaaaacctaaagttcattaacggggccggaaataaaaatctaatctccggtagcaatctcctgaatctgaaggactgtatcgtcgactccaatatcgcttcccgcaactgctacgtgctgcatcagacactgtttgacaacctgacctataccaacaacaccgggacaatctattacaattataacaggaatataacaaagtcaaacttcatcaacaataagaatatttacgactctacggggatcatttatagttcctgggccccgatcatcattctcgattgcaagttcatcaataataccgccctgtatgactatggtgtaatatacagcaataacaacatcatgagcctgaataattactactatggaaacaaagccaaaaactacggaatcttctacgcctcgtcttacagcagcaacaagatgattctgatcaatgacacatatattaataatcacgtcgacggatcatatggaatcggcatttcaccttactccagcgtcgtcaactgcaagtttatcaataactctgctggcacagatgcgggcatagggagcataacaatcacctgctccttcaagaactgtagcttcatcaacaactccgctaccaagggcggggttttcgtcctgaacgctgtgcagcacgcactgggcaccacctacgaggagctcatcagctttgacaatgtcacttttgagaataataaggctagcatgggggccgacatctatctgccccccagaagttccaactcctactactcctatacataccccattgagctgacaattaccttcgacaacatcacggtgacctccctgaccgacaatctgacggcgagtgtttatggagttaacggaataatcgtgggaggcgcaattcttgaattttacctcaacgagctttatattgggtcttctcagattgtgaatagtaacgctattttggaatacgatgggttttccaacggcaaggctattgttaacggaaacatcattcacccctctgtcaagaacaatataaacaatgccacactggatatcaaactggataacgtactgaaccacattgacttctgggtgtcaaacatagggtccgatgaaaatggcgacggttccaagaccaagcctttcaaaacaattcaatacgcggtgaataaagccttcgagaattgtcgggacatcactatctacctcggagaggaaacatactctggcgagaataacactaacctgactatctcaagtgcaagtaatatcacaataattggcaagggaatcggtaaaaccattataaatggtggcaatagcagctactttgtcaagatcctcataggcattaataagatcattatcagcgacttgactattatcaacatgaccccagacaaccgcttcgaccttcccatcgggagcaccagcccatcaggcatccatagcattattaagagtgggtccacaagcccaatcactgtggacaagggcgccaccctgtatttgaacaacgtgaatatcacagagtgccgtggaggcaatgctataattgatggtgagggcaacatcttcattgataactccatcctgtacaagaatggcgttagcaagggcatcattaagtgcgaaaatctggtcatcaataattcaataatcgataagcacctggtgggagggtaccccatcataggaacgaacattatcataaataacaccaaaatcacagatgtatttaacattatccggaacggcttttatttcatctccaatgccaaaaataccactatcgaaaatacatgtgtgttaattaataattgggagaacccattaaacatactcgatatcattgaatattacgacacccaaatatgtcccgctgcttgcattgcgagcactaacgccatcatcaaaaactcatcattcaaaaatgagtttgaactggtgtacctatggcagtcaaccactgattactcatatcacaatgtttacagcggctccaacatcgaggcagtcaattcttccttcgaagggtaccaattcatcatctatagcaggatgcttcagaacccaatctacaagttcgatggatgtacatttaacaacatcgccaacctgatgattatgatgcagagccggaactcgatagtgagcttttcaaactccgtcatgttcatctcaggcaataagatcgcaagtaataatgcatttaataacagcttcctgttcaacaacaattactggggtaacaatagcaagcccgtaatcccaaactctgtaagcaacttccagatcccttctccagataattggatcatcctcatctcggaaggagaagagccggtgtttaagcttacagatgggaaaaacgtcactgagtatatctgtaatctacccgccaagatatcttatgttgccgacgagaacggtgaaatcattcctgtgttgaatcttaacggcaatggctacaagtttaacgtggacgaaaacgggaatgttgtgctgaacatcagtgccccgatgaaaaacattgtgccgaaagtgcccgtggatgagaccgtattcgcaaatgacattgaagtgattgtaaactcttcttcgaacttcaaggcgaagttcactaacaagtggggcgattccctgaaagggattaatgtgtccttcatcattggtgagaacatcatcaacataattaccaatgagaacggtaccgccatattgcctgtggactttgacctgggcgtctattttgtgaagattgtgaatcccgttaccgggcagttcattttcaagaccattgacgtgatacttgagaacacggtgaccgcaaacgacattatcgtaaagtacaacgataagagcaaattctctgttattttcactgacaaattcggcaacccgctcattaacaccaacgtcaagttcaaagtcggcaagtacattatcaaccgcactaccgacgaaaacggcatcgcctcatttgttatcaacttcaacgtgggcaattatgcggtcaacaccattaacccagtgactaaccagagtattgacaaaatcatcactgtgaacaaaatcgctacgaaattaacgagccctaaattgacggtaacctacaacgccggtaagtacctcactttaatcttgaaggactttaatggcaaagcactcattaaccagaaggtgagcatcaagatcaatgggaaggtgtacactaaaatcaccaattccaagggacgaagcagtctgaagattaatctccctgttaaaacatacattacaaccctcacctacgcaggagaccgcaaccatatcaagtcctctgcaacaaccaaggtgatcgttaagaaggccacccctaaaatgactgccaaaaaggcaacttttaagctgaaaacaaaaaccaagaaatactcaattattttgaaggacaacaggtacaaagtgatgaaaaaggtgaaggtatacctgaaggtcaaagggaaaacgtaccgggccataaccaattccaaaggaaaagcaacctttaagattacaaagctgactaagaagggcaaatattcggctagaatcaagtattcaggcaacaagtacttcaatagcatcacaaagtacgtgaaaataacaattaagcgatga

SEQ ID NO: 10105 - DNA, 492 bp, synthetic construct
  source 1..492: mol_type = other DNA
atgagcggcaaatctaagatcaatgttttcaacaaaatgaccaagactgctctagacgaagagatctccgcttatgtggcctaccaccggtactatcagaggctcatcgcggtgaagatcgtcagtgagggcaatacaattctggatgccgcaaagatcctgggaaagtcctaccagactgtgcatcggtggataaaaacgtgtgagtcagaagggctcgaggggctgaaaccgagttttgggggtggccgaccatcgaagctcacctatgaccagctgatggaactggataagatcattgagaagacacctaacatgagcatgaaggacgtgcacattcttgtgaacgagaaattcaatgtcaactacagcttaaaacaaataggaaaaattgtacgcaaactgggctacaactacagcaaggcctgccccaagttctcaaagtcccttgaagacgcagaggaacagttgaaaaagctgaagagaacctga

SEQ ID NO: 10106 - DNA, 237 bp, synthetic construct
  source 1..237: mol_type = other DNA
atgccacatgaccacctcgccattaacggcaatagcacaatcaccatcaccaacagtagcacagcacccgagatcgtgatggtcatccttgaactacggtgcgcgaacaccaagaataaaaattccactaagtcactgaacaagattattgaggaagtgaaactcacgaatgaggagatatacaaaatcctgatggaaaataacgaaaacaacatagtattcagggagaagctgtga

SEQ ID NO: 10107 - DNA, 1326 bp, synthetic construct
  source 1..1326: mol_type = other DNA
ctgtttgaatccttgaaaaagaagtttagccggacaagcgagaagctagaggaggaactgatcgaagaggctgaaaaggaggacaacctgcaggaagaggagggtaagaagttctctttcttttcctttggaagtaagaaggaaaatatggaagaagacgagagcaatttactcagcgaggcagaagggactgtaggaaaagaaaccgaaaacgagattcccggaggagactcgattgaggaggatgtggacgagaagtcaggcctgctatcccgactccgcgggtcctctgcgaaagagaatattgaggagactagcgacgaggaaaaaatcatcgaggaatcgcaagacgaggaaaaaagccacttctggagcaggaataaggacaacgaagataactccgttgacggcgaggccgggggtgggatattctcttttgttcgggagaaaaccattcaggagaagcatgtggaggacatattgttcgaactggaaatggagctcctgcaaggtgatgtggcaatggaagtggctaatgagatcgtcgagagtgtcaaagaggacctggttgggaagaagatcaaacgcagtaatgatattacagagtacacatttttagctcttaaaaacgcagtatccgacatcatcagcatcccatccaagagcatgaccgagatgatcgaggacaagaaagctgagggggggccgctggtggtcatgttcgtgggaataaatggtaccggaaaaacaacaacgatcggcaagctggcgaacttctacatgaagaaaggttacacgcccgtgattgccgcctcagacactttcagagccggggctatcgagcaggtgacatatcatgccgataacgtgggcgtgaagataatcaagcacaagaaggggtcagatcctgcggccgtggcatatgatgctgtggaacacgcccgtgcacagggaaaagagctcgtcctgattgatactgccggcaggatgcagaccaatacgaaccttatggacgaaatgaaaaagattaagagagtgtccaagcccgacctggtcatctttgtaggcgatgctctgaccggcaacgacgcaaccgaacaggccaagaagttcaacgaggccattgatatcgatggcgtcattttgaccaaagccgacgcggacagtaaaggcggagccagcctctcaatcggctacgtcatcaagaaaccaattctgttccttggcatgggccagggctatgatgatatcatggagtacgattctgaatggatgctcaaccagctcttcagtgacaacgacgaatctgagatcatagaggactga

SEQ ID NO: 10108 - DNA, 1083 bp, synthetic construct
  source 1..1083: mol_type = other DNA
atgaagatcagtaagattaacctgatcctcagcgtggtgctcgctatccttatcaccatggctacaaccgcctcacttctgtcaaatgccaacgactccttcagcaaggctgagccaaaggggaacgtttccatagctatcacaggggacgtgatgttcgcccgcaacatgccgggggtgttaagtgccgattccagccctttttccggcgtcagtaacgtaacgtccaacgttgaccttctgctgatcaacttcgagaacgcggccacctcttctgagaacgccgttaagggggacgtgcccctaaaatgtgacccgagatacgtgccactcgcaaaggggaacaataacacaatagcttccctggcaaataatcatgcctttgattacggcattgatggaatgaaggataccattgaaaacctgaaaaatgccggcattacgcccatcggcgctggggaaaatgaaaaaacagcgcacaacgcagtaactcaggagatcaatggtaggaatatcaccatactgaactatatggactcggacaacttcgctgagtatagctatgacgtcatgccttacgcaaatggttctaatcccggctactccgtctttgacctagcagatgcccaaaagcagatcaaagaaaacaacggctccgatttgattgtagtgtacatgcacttcggaaacgagtatagcaactctccaaatgacaaccaggtgaagatcgcgcatgaactcatagactctggcgcagatgtggttctgggaagccaccctcatgtgactcagggaattgagatgtacaacggaaaacccatcttctatagtttgggaaacttcatctttgaccaatcaaaccccgccacgcacagcgcctactttgtgcagatcgatctggtcaacaatactggtgagtgcagtgtctacccaattgtcatttcgggctacctgccccactatatggactcagatagcggtaattcattactcaatgagttgaaccctaatgccgatgaactggaagtgagcaatggcgtggggaaactccggttcaatctgaccgagggcgacagcaactga

SEQ ID NO: 10109 - DNA, 1740 bp, synthetic construct
  source 1..1740: mol_type = other DNA
atgatctcttgcgtgagtgctggcgacagtgagatgcaacaggtgaacaatgatagtgtggactcagccaaccagtacgtggaaccagtgaagaacgctagcttcagtaaggtgagcaatactaactatctcaaggacagcaacttcacagtaagtctgaaagacgagaataatgaggtcatcgtaaataaaaccgtgtacttcacgattgatgacggactcgtcatcaataccaccaccgacgggaagggcagtgcaaagctattactgaatatctcaaaaggcacccacacggtcaagtacatatttaacgaaacggggttcaccccatttaaatctagcaccaaggtccttgtgatcacaacatcaaactcgaagatcaaggcctcagcttacaagtcttacatcggctttaaaaagcattattcctacgcgaaacacatcagcttcaagaatacatacaagatcaccttgaccgccgatggcatccccctgtccaataggattgtgaagtttaccatcaacggaaagtcttacagtaagaaaacagattcaaagggagtggccagcctccctatcggtctgaaggccggcagataccctattaaattttcctatgccggggagaaaaacatcaaaaaggtctccggaagcagcatcgtgtatgtaattaagggcatgcctaagaagataatcaaagcaaacagcctgacttataaaaataaggtcagtgccccctttaaaataaaattggttaacgggcgaggaaacatactgaaaaacaagaaagtgacattcactctcgacggccggacatacacaaagtacacggacaataatggtatcgcaaccatctacctgaaattatcctggggcactcactccttgaaagtgagctcagccaagactagctattataaaagcgtgctgaagaaatactccatccacataaagtctaaggcggttaataacgggctgtggatgttctcctcggacatgaaaaaggcaaacctggcctcccttaaaaaggttggaaccaagcatattttcctttacgcaaaggcaattgacgtgtggggcaggtcggatgtcgagaagtttatcaagaccgcttccgggtatggaattaaggtgcatctctggatgaaagtgttcaacgacgacaatgataaatggattaacccggtgaaaaagggcaagatcaactatggtctgataaaatccaaaattaacctcgccaaagaatacgccaaggtcaagggggttgctggcatccactttgattatttgcgctatcccggcaatgcctacaagtactccaacggtgtaaatgccatcaactacttcacaaaggctgcaactagtgccattcatgcaatcaactcaagattcattgtcagcgctgctgttatgccggaacccagcgatatgaaatactactatggtcaggacattagcacaatgggcaagtgtctggatgtcatcattccaatgatttacaagggcaattataacgcgggatcgtcctggatacagaagacgactctaaaattcgttaaaaagtcagggcacgctaagatatggtctggaatccagacttaccacagcgatcggtctcccatcaagctgacctcctctgccctccttaaagacgctgatgcggcggccgccgggggagccgacggggtgattctgttccgctatggtctcaccaacctgattaactttaacaagctgtga

SEQ ID NO: 10110 - DNA, 1542 bp, synthetic construct
  source 1..1542: mol_type = other DNA
atgatgaacaagctcagtgtcttcatcgtgatcattatcatagccctaagcatctcctcggtgtgcgcgggcgatagtgatcacaataagacggacgactccattctcggggaggcggatacgtcaacgtccagtaatattacgcggattggcgtgaatagcatatacgacgacggggtgaatgagaccatcaagaccaattccagctttgtgagttccaacgtggtaacctacgaaaccttctccaccaagataaccgtcagattactgtcgaacaacaatccactgaacggaaaaaacatcatcatcagcgtcggtaacgtttcatacaataaaaccacggacgccaatggcaaggttgtgttaaatgtgaaactcgccaaaggcaagtataacgccatgtttagctatggcggggatgaaaacattaacccctgccagaagacaaccactgtgatcgtcaagactcccatcaaaacaaaaatctattgtgccgataagaacattaattacaggcaggacctcaagaataccttcatcgtcagattgattgatgggaatggaaaggcactgaaaagtcaaaccgtcactttcaaggtcaatgggaagatgtacattgcaaaaaccgacaaaaagggttatgccgaggtgtgtctcaacctgaaaaaggggtccttcactgtcggatttagcttctacaagaaaagcccgtacagccactcccacggatcttacaagatcaaggtaaaggctccgatcggcaagggtaacgggtattggctttggccagcccacatgaaacacctgaacctcaaatccctgagcaagcttggaacaaagcatatcttcctgcacgtgcaggctatttcagtttacggaaaatcgagcgttatctctttcgccaagaaagcacacaggtatgggatcaaagtgcatctgtggatgcaggtgtgctgtatccgcggggacaagtgggtgcggcctgtgaacaaggacggtagctttaaatacagttttataaacaaaaaggtcaaagaggcaatcagctacgctaagatacccggcattgatggggtgcacctggattacgtccgcttcggcggcactgcccatctgtataagacaagcacacagtcgataaactacatcgtgaagaaaaccagtttgggcatccataaggtgaaacctaactgcattgtttctgctgcagtcatgcccgaaatttcaaagatgatcagctggtacggtcaggatattcctacaatgggaaagtatctggacgtgattgttccaatggtgtacaagggcaactttaatcagaaaactgcttggatcacaaagatcgtaagtaagtataagtcacaatcaaaaagcgctgtaatctggggcggcctgcagacataccactcagacaataacgtgaagaagttgtcctattccgccctacttaaggacgcaaaatccagcaaggccggcggagcgaccggtagcatactgtttcgaattggactcactcattatctgaacttcaaaaaagtttga

SEQ ID NO: 10111 - DNA, 378 bp, synthetic construct
  source 1..378: mol_type = other DNA
atgaacgccttcgataagtttctcataggggacacatcaagcattaattggtgtttcgaaaaccgccacttcctggacaggctgcaggataatggaatctcccggcagtacgtggtggattgcctaatgaacgaggagcccatcaaatacgagcatattgacagcagcacttatgcggccgtctatgacgccccatcgaacaaggattacaaagagatccgaattttgatggctgtgagtggcaacagcatcgacctcgtaacgatcatgaggaacaatgaaaccacaaccgagcggcagaagagacaataccagtcccagaagcacaagaatatagaaaaaaagcgcctgaacgcaatcagtaagagaaaatggtga

SEQ ID NO: 10112 - DNA, 1455 bp, synthetic construct
  source 1..1455: mol_type = other DNA
atgtctgaacagccgcagtgggattcaagcatatcgtttatcttcgccatgatcggagcggcggttgggcttggtaatatctggcgattcagctatgtgctgtacagcaatggcgggggatcatttttcattccttatcttattgcaatagctattatggggattccctttctgattttagagtatggtgtgggcttttccttcaaggaatcgtttagcagtatcatgagaaaaatcaagccggagttcgaggtgatcgcctggatcttggtcctgttcgtgttcgtggtgaccatctattacctggtcattctcagttgggatctggtctacctatttagtagtttcacatttaactggggcaccgatactgcttcctactttgtgaacaccgttggcggcagctctgacctgactaatgccaactttctcttaattcctacgaccgtctgcgtgctattattgtggatctccgtctggttcataagccacagggacgtggacagtggcattggtcgggtatcgaagatcctgattcctgccctcttcgtgatcatgggaattatcattgtatacgctctcacactgcccggaagcgtggtggggataaacgccctgatccatcccaactggaatggcctgctcaacgtcaatatctggcttgcggcattcgcgcagatcatattctcattgagcatgggacaggccatagccattacatatgcctcctacctgcctaagaactctaagttgatcgacaacgtgctgattgttgtgttcgctaactctgcttttgaggtctgtaccgcattcggggtattctcaatactggggtatatgtctttcatcaacggaacgcccatcaccgacctgatcactgagggcacggggctggtcttcatcgtttttccaatgatcttcaatattatggggtcagtgggccgcatcctcgctccaatgcttttcctggcaatcctgtttgccggcattacttccgcccttggatattttgaacccatgctgagttcaactagcgcaaaactaggatggtcccgcaagaaggccgccagtgtgctgtccattattgggtgcgctttttccgtgctcctaacaaccggaatctccagctacgtagtgggtataatcgacagctttgtaaatgaatttggcattctgctgctgatcggcgtgcagtgcataatcttcgcctgggtctacggcgttgagcacttcttgcccctcctcaacgagtactcctcttttaccgtgggtaagaaatggattttcgtcatcaaatacttgctcccattcgttctcatcattatgtgggtggtgggcattgtgcaactgtttacaaccgcagacgtcttcgagatagcaatcgatttgatcatcatcgcctccgtgctggtctctgctgttttccttacaaaactcaagccaagcggggaatga

SEQ ID NO: 10113 - DNA, 222 bp, synthetic construct
  source 1..222: mol_type = other DNA
atggtcaggaacaagcgcctgaacgctgtcatcagttttatcttgcccggccttgggcagatactcaatggtgacgagaaacggggaataaagttcctaatcgggatggttgtactccacatcgtgatttactacgccctgaacaatgtggtgggcagcatgatttccacactgtaccatgcatatagcgcctatgatgcgtacaaaacctgcgaaatgtga

SEQ ID NO: 10114 - DNA, 732 bp, synthetic construct
  source 1..732: mol_type = other DNA
atgcagaatactagtaagtactttaacctgtccgacatgatggtcgaatacttcaacttcgagaataaggagcgggacatcccatattacaaccataatccacgcctcaccaagcacgcttggatcgtgctgctctccagcgtcctaatctcattcatcttctatgccctgttcgaagatgtgtctgaattttttgccagtttcatattctgcgcgattctgctcgttcctttaatgtactactccgactgggacttctccctaatctttcacaggccgacgaagagcgaaattaaactggccttgatcctcttcatcggttacctgatttatgcaatcatactggggggcgtgatagaggccctgctgagcattactacaacgaccagcgagctcacagttaacgcagagagcctgatttcgcttgtcttttcaatgatggctgaggaattgattaaattcatacccttcgtgtttatcatgagactggtctataaaagtaccagcaaccgaaaattgagcatcatcacatccacattcatcgtgctcatattttttggactgctccactacgatttcgagacctcaattattagcgtgctgctgctccagggccttggatcgttattcgagctgtatgggtacatcaagactaagaacctgtttgtaccctaccttagccatcttctaaccgatgccgtgatttttatcctcatcctgttcggcttgtga

SEQ ID NO: 10115 - DNA, 435 bp, synthetic construct
  source 1..435: mol_type = other DNA
ctgaacaaaaagattatcggcgttcttctcgttctgatagcggccgtggcttttgggtccgtggtgtatgccgccgagacggtcactatcggaggattcgacttcaatgtgccagacgggtttacagaagataagagccacgaaatcgtaaacatggagaaagagcagggcggaatcaaatacattaacaacggtaagctcttcgagaacgacaagggggatgtggtaaatatactagtggccaagtatgatgggcacaaggtcaccaataaaattgccaagggcattgctgacgagcccaagacaatcggcggtgtcgacggctacatagtgcataacggcacctttactagcttcgactacgcaaaagaagggaagctggtcgtgatcaccaccaacaatgaagatgcaatcgagggattcattatcgagtga

SEQ ID NO: 10116 - DNA, 627 bp, synthetic construct
  source 1..627: mol_type = other DNA
ctcaacaaaaaaatcattatcgccgctattatcgttgtcatcatagcggttgtggcagggttcatgctcacctcatcgaatagccaggacaattcaaaaataaccatcatgggcaacggaagcattcacgagaacggcactatcggaattaagctgacaaacggcgagaacaccgccctgaagaataagaccgtccatgtgtgcgttaaggactcagaagggaaaatcgtagtggacaagactgcgaagacatatgtgaacggggtggtgggcgtgaggcttaccaatgtgagcgccggagagtacgatgtgaatgtaacatttgagggggacgaaaattacacgtcctccagcgtctctcagaaactgaagatcattgcaggcgaatcggatgacgacccgacatatcccgtcgacgaggacacggtgaccacgactgccgacgccagcagtactcagtcatcccagtcctcctctcaaagccagtcttacacaccaagccggagtaatgattatgggggtagcagtagcagtgatgacgatggtggcttggatgctgactacgatgagaacggcaacgagatgctacctaccgtcgatgaagaaggaaacgaggtgtccaactga

SEQ ID NO: 10117 - DNA, 477 bp, synthetic construct
  source 1..477: mol_type = other DNA
atgagcttcaataagaagaccatcatcatttttcttattttaattagtgcgttcctgatcatcggcagcgtctgcgccgagaatttgaaggatttcaaagccacaaagatgctgaaaaagctgaccaagcagaaaaccctcacggtgaagatctacaactttaagcctggcgtcctgtgggcccccaaagctataaagctgaaaaacggcgacgccatcgcaggctatgtggaatataagggaaacatgcagtttgaaaaagggactgggataacgtcctggtacatcggatcgggtctcgacggagacatcgagccgcaccacacaaagctcattaaggcaaagttcttctttaaaaacaaaaagggcaaggttaaaaccaagaccgtgaaaggaaatgggggtggccatattagcacttcactaataaaagggtatgtaccatacaaggctaaggtgtcctacaaaacatactga

SEQ ID NO: 10118 - DNA, 1686 bp, synthetic construct
  source 1..1686: mol_type = other DNA
atgaacttcgaaaagtccattggcgctcatgtcatattctttgacgggaactattgtgtgaaggggtacaacgacagtttcgccaatttttttgacattgaagaggacctgaccggaaaacacatcgatgacctggagatgcctgctgacttcgcggacttcattctctctggggaggaggaaatcgagctgagcttaaacgtgaagaaccgctggattgatgtcaagaaagagaccattaacaccaatggggcccttatcggtcacttctttatcctggaagacgtcacggatcaaatcattaacaaccaggaactgattgccctcaatagcgttattggggacgtacaggacgtcatgtccatgagcattcatttcaaggatgctgagggtaagtatcactggactccggagacttacgcgttgattgaccgtgaaccaaggcttggagacgagaataacaacatctttgattctataacagtccagaatttggataacatcgctgataaccgccccaacatcgacgatgatgtgtacgtggaggactttacaatcattactgaatcaggtaaaacgaaatacctgagaggcaccgcccacaatgtgttcgatgacgaggggaattttctccggcttatcatgaccgcacaggatcttacaaaggagcacctgcaggaggcaaacctaaaaattctggatagtctaatgagcgatagcaactaccagctcggcgtgggtagttatgtgcacgagataggcagtgactatttctgcatctcgaaggaggccgttgacattgccgagctaaatgagaacgaagatagccacatgcagctgaaaagccttagtggaaattttgttgactcggacgccttcaaaaaagaagtgggcaaactgatatcaggagaattggacaaaatcgacaatgtgtgggagtacaaatccccaaagacaggccaaatcaaaaagttacacgtaatcaatagcatcaaggtcgtgggcgggcgaatattctcattcggcggaatcaaggatgtcacaagcgagatggaaaaacaagagaagctgaagcatcacaacatggagctggaaatgctcatacgggaaagcaaccataggatcaagaataacctcaacctgctactgaggttcatctccctcgaaaagcgcttcaataagaataaccccgagaagattatcgagaacacggttggacggatcgagtcattttccctgctgcatgaaaagatttataatgtggacaattttaaggacattaatgtggaggagtacctgaacagtctcatcagcgggctgtactcgatctttggcgatgacggcagcatcaactataactccaacaacaacgagctgatattgaactccgaaatcctggtgccactgtctctcataatcaccgaactggttatcaactcaatcaagtacggctacgtggactatgagctcgataataaggcaatcaatgtcagcgtggacaaattcgataataaactgatattgcattacagcgataatggcaagggattgcctaaggacttcaacccccacaagtccattggtctcggctggagaattattaacagccttatctcccagctcgaaggggaatacgaggtattcaatgatgacggaatgcactttaaattaaccttcaacatctga

SEQ ID NO: 10119 - DNA, 429 bp, synthetic construct
  source 1..429: mol_type = other DNA
atggatgccgctaaatataacatcgaggaaaatgtaatgaagacactgaatgtcgtggcagcaataatcaagaaggacaacaaaattctggccaccaagagggggtacggcgagtttaccgatatgtgggagttcccaggcggaaaaatagagaacaatgaaaccaaagaggaggccatcatccgcgaaatcaaggaagaacttgactgcgtgatcgagcctacaaagttcgccttggacctggaataccagtatccgaccttctacctgaagatgagctgttttgaggctataatcaaagagggtactcccaaactcatcgaacacaacgatgcgaagtggctaacgaagcaagagctggacagcattaactggattcccgccgacattcagatcattgactacctcaaggagactatgcgggattga

SEQ ID NO: 10120 - DNA, 150 bp, synthetic construct
  source 1..150: mol_type = other DNA
atgattgacaaacggttggaactggccaagaacaagaaggtcgagctggagctgaagctaaagaaagtgaaaggcacccccagggaagaggatttcaagctccaaatcgaaaaactggagcagcttatcgaacacctccagaaggagtga

SEQ ID NO: 10121 - DNA, 2958 bp, synthetic construct
  source 1..2958: mol_type = other DNA
atgaacatggacgagatcctgaacggtgcccggaccgcgtttattgacgaaaaactggactccagcctagatttccggcccaaactattgcataacggcaaggaaaccaaagtcattaactcaattcgagacgaactgcagaactgtgacgaatttataatatcctccgccttcatcaccctcagcgggttgactcccctgctggaagagtttaggaacctggagcagaaaaatatcaagggcaagattctcacaaccgattacttaaacttcacagaaccaaaggctctgcgcaaacttcagcaattcggtaatatcgaagttaagatctacagtcaggaaaaagaagggtttcacactaaaggctacatctttaagaaggatgatgtgtataagggcattgttggcagctcgaacttgaccatgaacgcactgtctgtcaataaggagtggaacgtggaatttacctctctaaaggagggggaaatgctgtccgagatcaaaagcgagtttttcgccctttggcgcgaagccgacgatttaaacaacgtgctgcccgagtatgagaagatctacaacgacaacaaacgtttcacggacttgaggaagattacagccgaaattaaaaagaaaaacatcacactgactccaaatatcatgcaggagcagttcattgaaaacctccgcaagctcatcaaacagggggaaaagagagctattctcgtatcagcaaccggaactggcaagacctacgcatccgcttttgccgtaaacgactttaacccgaagaagcttttgtttctggttcacagggaacaaattgcaaagcagagcatcaatgcttataaaaacgtcttcaaggaccacgagaatttcggactcctgtccggaaactccaaagactacgataagaactatcttttctcaacaatccagacaatgagcaaagatgatgtgttcagacggtatgataagaatcatttcgactatatcattatcgatgaggtgcacaaagccggtgccttaagctatcagaagattttccaatactttgagcccaaattctggctggggatgacggcatcacctgagaggactgacggcttcaacatctatgacctgttcgataataatatcgcccacgagatccgcctccaggaagctctcgaggaggacctcctgtgcccatttcactacttcgggatcgcggacgtggagttctgcgacggtgagattgacgactcttttgaggactttaacctgcttgcctccgacaagcgggtggattacctgatagagaagtccgagttctacggatactccggcgatcgccggaaggccctggtcttctgttctagaaagaaggaggcagagctgttgtcagacgagtttaaccgaagaggttataacagcacggtcctgacaggggacgatagccaggagaaaaggatcgaggctatcgatagacttaccaacgatgagaatccggacaagctggagtttattttcacggtggacattttcaacgagggagttgatatcccggaaatcaatcaggtcctgttggtgaggccaaccgaatcgccaatcatcttcatacagcaactgggaagaggacttcgaaaatatgagaataaggagtacgtggtgataatcgatttcatcggcaactataagaacaatttcatgattcccatcgccctgagcggcgatcgatcgtatgataaggataagatccggaagtacctcatggaaggcaacaaaattattcccggtgcctcttccattaattttgacgagatttcccgcaagcgtatatacgagtccatcaacaacagctcttttagcaagatcggcgtattcaaggaaaagtacaataatctaaaatacaagctcggccgtatccctagcttgcacgattttgctatcaacggcgaatttaaccctgagctgatcctcaaccactcccgattcgactcataccataacttcctcgactacgttgataatgattacaatagtaccctaagcgacgcagaagttgccagccttaagttcatttccaaaaagctgataaaaggaataaggcctcatgagctggtgatcttgagttgccttaaattcaataattacttcactgtgaatcagatcgagaagtacctgaatgagaagtatgggctctcaaatcaattcaaatcgataaggaacgccatcaactacctgagtatgaatttctaccggaaggagaccagcgatgactaccaagccaacactgtcacgagttttgtgtcaaaggaaaaaatcatcgactatgaggacatcttcttcaacttcgacgaagaaatctataatgacctggagaacaataaggactttaaattcgagattagccattacttcaagtcctgtctgatcaaccccgtgtatttaaatcactttgaggacgctgtcaagtacgcgatattcaagtatgctcaggtgtacaaaagcaatgataaattcagattatacgagaagtactcacgggaggacgtgctgaggctcctgaattgggagcgcttcatgaatgcgcagaacatcggaggatataaagtcaagtacaacacttgccctatcttcgtaacctacgacaaaaaggatgacattagcgaaaccattaattatgaagaccagtttctcagcaaacagctctttagctggatgagtcgcaacaatagaaagataagcagttcggagctagagcctattgtcaactacacagacttggatatcgagctgtttatccagaaaagtaatgatgagggcattgaattttactatgtggggaagctcacacccctggaacatgatcagctttatcgggaaattgaagggaagcagcacccaattgtgaactttaaatttaagataagtcccgaggtgaaagacgaactgtacagttattttataaacgactga

SEQ ID NO: 10122 - DNA, 1182 bp, synthetic construct
  source 1..1182: mol_type = other DNA
atggccagtttaccattgggaaatgacaacgacctggatgacacacagttctataatcgtgtcgaggagatctcattcatctgtgataatctggaactcactaaaaagggaagcactcccaccatcctgcttaccggcattcggggcgtcgggaagacggccctgatgaagaagctgaaaaaggactttcaaaacgactacctggtggtgtatatggacctgtcggcgatggacaagttcaaaaagaacgaactaacccggtttagctttatgaagctgttctacgagtcaatcatcaaagccctgaggcactccaacatcatcaccattgacacacagatcctcaaatacttcaagacacgcaattttaagctggataaactcaagtccgttgataaaatccccatcccgattctgaaaagcgaagaggattacgccaagttcacgactttcgtaatggacctcccccagcagatatacgatgattgcaaggaccacattgatggtgttctcatattcatggacgagtttcagatgttgaaacagcttgacgaggacgtgaacggattcctgtggtacatcagaagtgtgatccaatcccagaaacacattggctatattttttccggcagcatgagcgtgaaggatgagttgatcgcagatattgcggggcagaagggcgctttcggcggtcggatactgaactatgaactgaagaccttcccattcaacacaaccgagaactacctcaaagagaaggccaactacctgaagttcactgacgatgggatcgaaaggttttataagtgcacaaatggaatcccctattacgtgaacagttttgcacgcctgctgcctcctaacgaagagcttaatgagaagaagataattagcgaatttaaaaaagccctgccttatctactgatccatttgaccaatgaatggtacaagctcaacaatcaggagcaaagaattatcaccgctcttgtggagaaaccactcaagcgaattgaaattgctaacaagttaggcgtcacaagcggagccatcggggcttccctaaaatcattgcagaacaaaacgctcatagagcttgataaagacgggtatatgatatacgactctatcttcaaggcatggctcaagaaggaatacgaggagaaaggtaattatccgtactga

SEQ ID NO: 10123 - DNA, 939 bp, synthetic construct
  source 1..939: mol_type = other DNA
atggataggaagtacctgcgggaaaacaaaaactccttcaacatcgtgaaaaactctaagatttacgccaaaataacggcctatgaggatactatttttattagggacctgctgatcaaatatgactggaaccttgataaaatgcccagtattattaagaacgaggaaaagtatctcgtgctggccgtcatcgacgagaaactgcggctgctcgcgaagtacaatacgcgaccggactctcaggtaatcaccaagctgatcagaaaattcaagcgcaatcctaataactcagcctacggtttaaacatcaccaaagtgtttgatacctatgtcatcaagaagcagattgcgggagacgagtacatcttcggatactacgataatctcgacgacgctcaattcgtgcggaacattctgttggacaacaactgggacgtgaacatattcaatgaaatcgaatttgacgacgagacacttaactaccgtgtgatcagtgtaattgacagcaacgtctatgttctgggcaatttcaaggctaaggatgagatcgatatcaagaagatccgcgaggaatttctcgccaagataagcaagcataagtacggcctcgcaagctatccccacttggacctgctaaaggacaaaatctccgaactcgaggagaaattcaatgtcaaaaccaaggatgggatatggtcatttgagaatatcagcgagaacgaatccgtgttgaatcagattattttcaatctgactccattccagcaagctgttttcgacgcaatagataagaatacaagttacgatcagatcaaaaagagccttatcaggtataactccaaaaactttgacaagaagatcctgagaaacctagatgggctgatcgaactgaagctcatagagaaaattgatgacggctactcgaaaacaaatttatga

SEQ ID NO: 10124 - DNA, 189 bp, synthetic construct
  source 1..189: mol_type = other DNA
atgcccgtgattacaatcgccggcaacaagggaataacgatagaaaagaaaagggaaatggtcaagaaggtgtccgaggtggtcagcgaggcatatggtctgccaatcgaggccatcaccgtactgatccaggaatacgacttcgacgatattggcgttgctggggagctcctaagcgaccggaaatga

SEQ ID NO: 10125 - DNA, 459 bp, synthetic construct
  source 1..459: mol_type = other DNA
atgcttggtgaacgcgagctggtgaagctctttcccgacttcgccgacttagtccagcctagcggcattgatttggaactggacaagatatacacccaagaaagcggcgggagcctcattgataacgaaaaaaacctgcccgagatcaaagagatggatggaggcatctacacgctgaaaccacacactgcatacctagcgagtataaagaggaagatcaagatcccgaagggatacgccatgctttatctgccaagatccacactgctgcgaagtttcgtgtctgtccagacagccgtaggtgaccccggattctatgggaccctcatgttcatgatttacaaccatggggactacgaatataaaatcaagtcaggcgatcggatcgcacaggctgtggtctttcctgttgtggggtccggcgagtacaatggatcgtatcaggaggtggaggagtga

SEQ ID NO: 10126 - DNA, 1536 bp, synthetic construct
  source 1..1536: mol_type = other DNA
gtgaacgtcgccgacaatatcgtgaagatcctggaagaggagggaatagaaaacatcttcgggatacccggcgagcagatcatgccagtttacaaagccctctcggaaagcaacattaatcacatcctcacacggcacgaacaggccgccgcccacgcagctgatggatattataggagcagtggcaagatcggcgtctgcattgccactgccagccccggtgctttgaactttacaatggcagttgctactgcgtttaaagataatgtccccttactcatactcacgggggataatgagctcaagtacagagggtccgatcatttccaatccaccccgcaggtcgacatctttaaaaacatcacccgggcatcttacaaccctctgaatggaactgaggccatgtatgtgctgcgtgccgctatctatgagctgaagaccattccgaaggggcccatccatatcaacctgtcaaaagatatactgcttcaggaagatttcgatgatttcgagctgtgctacctttgcgaggaggatctgagcaacataagcaaggctcaggagcttataaacgcctcagagaaacctctgctgatcctcggtgccggcgcaattagccaaaaggagaacatcgaaatgctggcacatatgtatcagatcccagtcacgaccaccttccacgcaaagggaatcatcagcgaggaagatgagatcaatctgggcatcatcgggatacgctccacacccaggagtaagtacgcaattgagaacgccgactgtgtgattgcgcttggcatcaaggccagcgaaagaacgctgcccgaaatcccaaagaatttgatccatgtgaacattaataaggacgttcttattggaaattgtcctattcagggaaaggtggaagacttcctgctgaaaatcagctttaagaaggccgaatggctgtgcgaaattctggagattaataacaaaatcgagatcgaaggtttggacgtggactttaaacctcaggcctccattaaacgaatcctcgacaagtttaacgacaacatcatcgctgcggacgccggctcccacaccacctggaccaccctgctgaagaaaagcctgaaaccgggccaattattgttcagcggatcgatggctccaatggggtacggccttccagccgcgattggtgctgcaattgcaacagacgagaagatcatagtaatcaacggcgacggggacttccacatgaatctgcaggaactcgctactattcgcgaaaacaacttgaacatcatcatcttcattctcaataattcagagtatgggattatacggcagtggcaggagtccatatacggcatgaaaccataccaggtgaagctaaataaccctgacttcacaaagctggcgtcaagttacggaatcgatgccattaaggtggacaatctggctgatttggaactaattctagagaaagagttaacaggccccctcgtcgtggaggtaattgtggagagtgaggacattcccctccctaaaaactga

SEQ ID NO: 10127 - DNA, 258 bp, synthetic construct
  source 1..258: mol_type = other DNA
atgaaggaaaatatcaagtccttcattctagacatcgctaacatcaaggagataattgagtatgacttctacgagacgtgcggcttcacattcgtgttcaaaagcgaatttctcaaggtgaagaaccagatcaacagcgcaaccattgcgcccattgggataatctactatgaaaacgaggagtactactttgccccactggccaacgatgtaaatgtggacatcatcgtcaaaaattatctgaaatttaaaaactga

SEQ ID NO: 10128 - DNA, 558 bp, synthetic construct
  source 1..558: mol_type = other DNA
atgatcatcctgatcatcttcttttccattattgtgctgctctatttcggcgtgaagataagccttatctatgataaaaccgacagcaagcttgaagggtgcctgcaaataagcattcttcgcaaaatcaagatctacacattaaacctctccagtctgaacaaagataagaagaacgacgagaacgaaaaaaagaccaacaacgacatcaaacagctgtttaagctactgaagccctgcttcggaccttttaaactcttcctgaagagcttcatgaagtgtattaaggttcagaatctggaaaatcacctcatttttggcatggactcatacactgacacggcaaaatacattggatacatttggagtttcatcatcatcataaatagctcgcataagaacgccaaactcagcgcggagccgtcatttaatgggattgtcttcgatgtaaatggcatcaacgagctggagataaacatcttgaagttgatccccccagtgttgcggctgatttccaaaaaagaagtcaggacactaatcaaggaggtgaagaagtga

SEQ ID NO: 10129 - DNA, 405 bp, synthetic construct
  source 1..405: mol_type = other DNA
atgagcgagaacataaaaacaacggtggaggaattacgcaagcttatcaatgtcgagaatgtggttggacagcccatcgaaacagaggacaaactgctaatccccgtaatgaggatgggcgttggattcggcgtgggggaaaacatcctgggtgctgacaagggggacgccgcaggggccggcgccggcgtggaacctatttcaatggtcgtgattccgaagaaaggcaacgactccgagggagtgcgggtgctcaacctgagcaaggggaaccagaccaacaaggcactgtccgatctcggtctgctcatcagtgatttggtcaagaattatataaacaatgatgaaaaaattgacgagagcgagtacatcgaaccagagtttaccactgcggatgacgagtga

SEQ ID NO: 10130 - DNA, 1143 bp, synthetic construct
  source 1..1143: mol_type = other DNA
atgaacgaaaccctcctgatgcttcccgggccaactacagtacacccgagagtgctggcggccatgtcccgcgctgttgtgaaccatcgcggcgctaagtacggcgaaattctgtcggaaacgaataaactgatggcggacgtgttccaaaccagcaatgatgcttatctgttaacaggctcgggcactgcggccatggaggccgggatcagtaataccgtggcttctggggagaaaatgctcaacattgtgggaggcaagttcggtgaacgtttcatgaagatcgctcagacccatggaatagacgcgcaggaactcgcagtcgaatggggaacagctgtcacacccgaggcaatcaaggaggccttggacgcagacgaggatattaaggcagttagcgtcattcacaacgagacttccacgggagtcgccgccccgattgaggagatagggaaagtaatgaaaaattacgatgcattgtacatcgtggatactgtgtcttccctcggcggagattatgttgacgtggacaagtttggcatcgatgtctgcgtcactggttctcaaaaatgtatcgccgccccacctggaatggccgccatcacactgagcgatgacgcctgggctgctgcagacaaaattgactcacccacattttaccttgacatgaaagctgccaggaagagtggcaacaaggtgccaccccagacgccctacacccctgccgttagcctgacctatgctatgaacgaggccttgaatatggtgatggaggaggggctagaggcccgagtggcacggcaccacaaggccgctgaagctagtgttgccgccgtgaaagccctcgggctggaactgtttgctgacgaagcagtctcaagcgcaacagtgacggccgtaaagatgcctgagggcatcagcgacgaccagttcagaggcaccacccgggataaatacggtgtggagctggccggtggccaggaccatctaaagggcaacatcttcaggatcggacacatgggaaacatttcctacaaggaactcacccaggcgtttgccgcgatcgggatgacccttaagggtctgggcgtgatagaggatgccggggcgggggtcgcatccatcgcagagtcatatctgtga

SEQ ID NO: 10131 - DNA, 675 bp, synthetic construct
  source 1..675: mol_type = other DNA
atgaattttttctcctgggggaagataaatttcaagaggatgttccgctatgcggtgggtctgtttgtcatgaacattggaatcgccctgtcaatcaaatccaacctaggcagtactcctgtggtggccgtgccctatgctatcagcctgataacttctgtcgatctcggctactgcaacatgatatttcaggggttccttgtgcttgtggagttgattctcctggggcgggcctttaagccgaagcatttcctgcagttcttcgttggagtaatcttcggaatcttcacaagcctgtcgatgtttatattgagctttttgccactagctaacagtctgacctttcagattatcttcctcatttccggcatcgtgctcctcgccttcgggctgttcttatacgttccaatgaatgccgtgcccgtgtccgtcgacggcgtcacacaagcactggcgatcctgacaaaccagtcatttgcaaagaccaaaattatctttgacatatctatgatcagcatcagcctcattgtcctgttcaccttcaccggccacattaacgggagtgtgggtattgtaacgatcatcgccgccgtcagcattggcgcaacggtgaaactgatcaatatcgtttacgctaagatctctggaaacgaagctgaccttaagaaaatgtga

SEQ ID NO: 10132 - DNA, 651 bp, synthetic construct
  source 1..651: mol_type = other DNA
atgtgggtgaagcgaatattgtcatttgttattgggttgctgatcatgtccttcggtgtggccttttccattgtgtcccttctgggcacgacgcctataagtagcattagctattcgctggcgcttatcaccaacatcgacattggaattacaaccttcatcttcaatgcggccctgatcgtgatgcaactgctgatcctgaggagcaagttccataagaagcgcctgctgcagctgattaactgcgtgctcttcggatactttaccgacgtcgccctctactttgtggcattcataccctttgactcctcactatggatgtctgtcctcttcttgctcataagtatctttctgactgcattcgggatattcatctacatgccggctaacatcgcaccactccccggggaaggctgtgtcgaggccattgccattgtgaccggatggcggttcagcactatcaaaatcggttttgatgctagcatggtggtgatgagccttatcatgtgcggcttatggtatacagatatgttcggcgccgtttacatcggcacaattatcagtgccatcatggtcgggtttactctaagacagattaacaatatctatgctcacatcaccggagctcagattaacgtagtaaataaatga

SEQ ID NO: 10133 - DNA, 720 bp, synthetic construct
  source 1..720: mol_type = other DNA
atggagtttggactctgggaaaaatactataaggacataatcgaggacttcggctttagcaggagtggcgacgagaaatccgccaaactgctcgacgaaattttatccacagagggctgcctgaccctggacgacctgagtcagatcgtgggtttcagcgataagttcatcgtctttggagcaggtccgtctctaaaaaatcacgtgctgatgctcaaggaaaaccacgatctgaaggattacgtgttggtggccgcggacggcgcaaccaccgctctgattgaggagaagatctcacccgacattgtgtgtacggacttggatggaaatgttgatgacatacttctcgccaatctcagaggggccaacatggtcatccatgctcacggagataacattgataaagtcgctacactgtccagcctcttcagcaacgtcctgggcactacacaagcacagcctatcgggaacctgtacaacttcgggggctttactgatggggaccgcgcactcttcctgtcagtagccctgggggcctctgaaattatacttgcgggaatggacttcggcgataaggtaaccaagtactcgcgacccgacctggaagtgaaagttgagggtgctgacgagtttaagcggaaaaagctattgtatgccgagaagttcacgaattggatcaccgaaaacgagccagtgaatgtgatcaacttacttgaatga

SEQ ID NO: 10134 - DNA, 1110 bp, synthetic construct
  source 1..1110: mol_type = other DNA
atgggaatcgaagacattctgatgcacgatgaaagtctgtttcagaacatcaatgccttcgatccagactacgtccctcaagactacaatttccgcgatacccagatggaagccatggcaatatccatcaggcctgcaatgattggcgggcagccgtcaaatgcgatcgttctggggtcgcctgcaaccgggaaaacaacagcgatccgcaaggtctttgaattggtcgagaagagcaccgagaaggtggtttgtgtgtatattaactgccagctccacaccactcggtttggaatcttctcacagatttataaaaagatattcggccacattcccccagagaccggcgtgccattcagcagaatttacgaccagatcatgcagaacctccagaagaataacaagtccttggtgatcgccctggacgacgtcaactatttattccagtccaaaacagctaataaagtgttctacgacatgctgagggcctatgaagagtaccccggcgtgaaaacagccatcttcgccatcttgtcggatctggagtttaagtacgccttcgataagaatgtcaacagcgtgtttatcccgcaggagatcaatttccccctatacacttacagcgaaatcgaggatatactgaagaacagggctaaggccggattctttccaaacgtactgcccgaggacatactggagcaaatcgcaatgtacacgtatgaaaatggagatctccggattgggattaaccttttaaaaagctgcggtaacttcgcagaggccagtgcgagccgggaagtgacccaagagcatttcgagcaggctattgactccctggtgagcatcaacattcgtgagactctcaactcactcaacgatatggaaaaggatcttctaaaagtaattagtggctgggaaggtgtgtgcaaggccggcgaactcgctgagatgtatcgagagaagaccaattccagctatgcttctttcaaccgcacactcgacaaactggagtttgtgagactgatcgacacgaagtttacgggaaaaggggttagaggcaattctcgagagatcatactgcggtttaaccccgacgagtaccttatctga

SEQ ID NO: 10135 - DNA, 180 bp, synthetic construct
  source 1..180: mol_type = other DNA
atgttcgaaaataatgacaccacaattcaggtagatctgcggaagaaaaactccctcaaagaggagatcatgtataagaacatcgacgtgcagagctgcatggtcatgctagttgtgatagctgccctgctcctgagtgtgattagcgtggtcgcagcccaaaacccctacatcatctga

SEQ ID NO: 10136 - DNA, 414 bp, synthetic construct
  source 1..414: mol_type = other DNA
atgaagaagttcgagtactttgaagtcactgcggacatcggcttcaaggcttatggcaagaacctgaacgaggctttcgagaacgccggtctcgccattttcaacattatcagcgacacgaattatataaatccaacaaaggaaatcagctttgagatcacctccgaggacaatgtgtcgatgctgtacgactacttggaagagctgctcttctaccacgaggtggaatttatgctgtttagcgaatttagtgttgagatctccgagggattctcacttaaagcaacaattatgggggaagagatcgattgggataagcacgagcggaaatctgaaattaaagcaataaccttccataagatggaagtgctagagaccaaccccgtaaaactccaggccatcgtcgatctgtga

SEQ ID NO: 10137 - DNA, 321 bp, synthetic construct
  source 1..321: mol_type = other DNA
atgaagaggaccagaatcgtatcgcgcaacttcgagatggtgctggggattatcggctcaataatcgggtccttcagcggaagcatcctactgttccttggcaccttctataacgtccccacgccatttttgggctttgtggctataatcgcgtcctttctgggactcgccagtagtgtttacgtcaaaaaggacactgagattgctggggtgggcttcataatcgccacaatgttcgtgattgtcggatctgaatacattaatatcatcagcgccattttcctcctggtggcaggtgtgtccgcactgtttcggaaatga

SEQ ID NO: 10138 - DNA, 1449 bp, synthetic construct
  source 1..1449: mol_type = other DNA
atgagtataaaggatgaaattaagaaaattaaggacaatgtttacgagatccccgggtctttcaacaagaagatgcgagcttctggaaggttctacatagccgatgaatatttcgacgagctggaggagggagctgtggaacagatagtcaacgtcgcctgcctaccgggtgtgcaaagatattccattgggctccccgacatccattttggttatggctttccaatcggtggtgtggcagccttctccctccggaatggaatcgtaagccctggaggcgttggctttgatatcaactgtggcgtccggctcatcaagtccaatctgacgatagacgatattgacggcaagttggacgagctgacagagaaactgtttaagaacattcctagcggggtgggaagtaagggtaagatacgcttggaggagaacgaaatcaacgatgtcctagactatggggctgaatgggctgttaataacgggtatggctggccagaggacttggaagttctggaggagaacggacggatggtggacgccgactccagtatcgtatcggaaaaggccaaaaagagaggcatcccacagctcgggtctctggggtcaggcaaccacttcctggaagtgcaaattgtggacgagatttacaatgaagaggtggctaaggtattcggactggagaagggcatgattgtggtcatgatccacagcgggtctagaggctgcggtcaccaggtatgttcggactaccttcgcgtgatggataaagcctataagaaatacaaagtgaacatcgatgaccgacagctggcctgcgctccacttgattcaaaggaggcccaggagtatatccaggccatggcagcggccgccaactacgcatgggctaacaggcagatgatgacccattgggtgcgggaaaccttcgaggaggtcctgggcaaaagcgcaaaagagatggagatggatatcgtctacgatgtcgcccataatatcgcaaagatggagactcacaagatctacaaccgggaggaagaagtgttagtgcacagaaagggcgcaactcgcgcattcggccctggctgtgaggaagtgcctgaaaaatacagggcggtcggtcagccggtgctgattcccggaacaatggggacagcgtcctacatccttcacggaactgacgttgctatggaggagacctttgggtccaccgcgcatggcgccggacgcatactgagccgtagcaaagctaaaaaggactacaatgcggatgaaatcaccgaagatctcgagtcaaaggggattaaaattaaagccacgagcaaaaatgtgatcgcagaagaagcccccggcgcctacaaggacgtggacagtgtcgtgagggtgtcagacgagacaggcatcgctaagttagtcgccaaagtgaagcccctcagcgtttgcaaaggatga

SEQ ID NO: 10139 - DNA, 759 bp, synthetic construct
  source 1..759: mol_type = other DNA
atgatcggaatcattgggggcagtggagtatacgagatcactcagaaggcagacagctgcagcaaaaaagtagtcaagaccgattacggtgaggtgaccgtgtccatcctagaaatcttttccaagaaaatcgccttcattccccgacacgctcaggggcacagcataccaccacataagatcaactatagggccaacatcgacgcacttagaaatgtgggggtgacgcagataatagctaccaactccgtgggatcgatgaatatcgacatggctccgggttcattcgttgtgcctaacgattttctggatttcacacaaaaccgcattaagacattctacgaggataaggtggtccatgtggacgtgaccgagccctactgccccaatctcagagacatcctcgaccggtctggagacgtaatcctgggtggcacctatgtgtgcaccgaggggcctcgctttgaaactcctgccgagattaaaatgttcaagatgctcggcggggatctggttggaatgactggcgttccagaagtcacactggcccgggagaggggcatttgttataattcaatctgcattgtctctaattacgcggcgggcatcagctccaacacattaacgattgatgaggtcttcgacattgtcagtgagaaagaacacgacttgctggaactgatctacaactttataaagaatgccgaagacagccccaactgtgagtgtcaccacgcacttaacggcgccgaagtgtga

SEQ ID NO: 10140 - DNA, 324 bp, synthetic construct
  source 1..324: mol_type = other DNA
atgagactggccgtagtgagttccgacggggagaatgtcgatttgcacctcggcaagggaaagagcgtgtatatatacgaatacgtggagaacaaacttaactttatcgagcggagggacattgagataagcgacgattcaaagcaccagggcggaaaagtcatcaaaacctgcgaagactgtgacgtgctgatctctctgcagtacgggttcaagtccaagatcaaagcagacgatgtggatctaaagctggttatcgacgaaggccccattgatgaggtcctccaacgctatattgaccattacaacttcatgcacaagtga

SEQ ID NO: 10141 - DNA, 558 bp, synthetic construct
  source 1..558: mol_type = other DNA
atgagtaaatatatcatcgtgaccggaagcccacgcgtgggagccaattccgacgcgatcgctgaatttatcaaagagagcctgggaactaacgacgtcgaaatttggaatatatatgaaaaggattacacatactgtcatgcagacaatgcttgcaaggagcttgggcactgctcaatcgatgacgatgccacagatttggtggccgatctgaaggaggctgatggtgcattcctgatctcccccatctacttcggaaggctcccggggcccgtctacactattattgaccggttctatggcgtctttaacccagcgaagggcctggacgtgccttctccagataagaaaataggtttcgttctcacgatgggcggggacgaggaggccgtgaagaacgccgagcccgtagccgctcaggccggcttcgcattttcggtggtggggtttggcgcttccgacagcgtaattctggggggcaacaacgaccctaccgcattcgccaacagtgacgaggaacaggccaaggttaaaaccctagtcgactggatgctctga

SEQ ID NO: 10142 - DNA, 582 bp, synthetic construct
  source 1..582: mol_type = other DNA
atggcaaaggccaaggcccggcgtcgagtccgggatacatggaaagagaagtcctggtataccatcaaaacccctgtgaactttgaggacaaggaaataggggagactcccgctaaagacccggagcttctgataggacggggggttgaggtgacaatgagagaattgacaggcgacttctcaaaacagtacatcaagctcaggtttgagattgacaatgtggccggggaagtggcaaacacaaaattcaccggacataaaaccactaccgattacgtacgaagcatgattcggagaggcacgagccgcattgacgcgagcactatcgccaccacgaaagatggtcgcaagatcaagctacaagtgctggctgtcacggtcaggagagccaagagctcccagcagaaatacatgaggaaggtcattgaagatctgctcaacgaggccgcggctgagaagagtttcgacgaactgataaaagtggtggttaacggcaagctcgcatcggaaatctaccacaatgccaagaagatctatccactgaaacgcgtggagattatcaagagtaaggtaatcaagtga

SEQ ID NO: 10143 - DNA, 210 bp, synthetic construct
  source 1..210: mol_type = other DNA
atgaagaagatcttccagaatctgatcctccagccgcggtatgagacgaaaacaacaaacaccatcaatattgcaaacattggcctggccgctagcttcaagctctttactgtgaccagcttccccctaaatctgaacccaatcgaccacaaggcgaaacaagccaaaataaacaactaccaggtggccgataataacatgtttgtctga

SEQ ID NO: 10144 - DNA, 696 bp, synthetic construct
  source 1..696: mol_type = other DNA
atgtacgggataatgattaactggctttatgtaatcctactttttattctgggattcatcacgtataggcgccagtccctcgatctgttcggctctgcagtcatgatcattatgggcatcgtgatcatattcagcgcgggaaccaactggctgttgctgatcgtgctgttcctcgttttgagcctgattgccactaaattctcgaagaagtacaagctatccctgggcgaatttgagggtcggagaacatccaagaatgtgattagtaatggggttgtagcctgctttatggctgcctttggagggtattacagcccttttgtcggaggtttcattggcgccatcgcaacagcaaccgcagacacactcgcttccgagatcggggtgttggacccccacccgcgactgataaccaccctgcagaaagtcgatcccggcacgaatggggctgtgagcgtgctcggaactgtctcaggaatcgtgggcagtgcgatcattggtatcgcggcctacttcctgggaataatgccaaatccattcctggccatcttagtctcaatcatatctggcactatcggctgttttggggacagcatcctcggcgctctcttcgagaacaacgggtggctgaccaacgaacatgtgaacctgctggccacaatcttcggtgcccttgtgggcattttactcatttga

SEQ ID NO: 10145 - DNA, 1239 bp, synthetic construct
  source 1..1239: mol_type = other DNA
atgaagggcctcattctaatcatggacggtatgggcgaccgtcctattaaggagctgggaaacaagacacctttggaggcggctaatacgccaaatatggataaaatggccgaggaaggaattactggtatcatggacagcatagctccagggattatccctggaagtgataccgcccacctctccatcctggggtataacccctacgaggtatacaccggacgcggcccgtttgaggccaacggggttggagtggacgttctgccaggggatatcgcattcagatgcaatttctcaacggcagatgagaatctcatagtaactgataggcgggcaggccgaatcaaggaaggtaccgaggagatagtggaagaactgaacaagatggtgttggaagactaccctgagatcaagataatcttcaaagaatcgacaggtcaccgagcggtgcttgtgctccgcggggaggggctgtccggcaaagtcagcgacgcggaccccaaggtggagggcaacaaacccaaggaagtgaaggctttggatgatacccaggaagctaaaaaaaccgcagacattctaaacaaacttgtgtttaagacttacgagatggtgaaggaccacccagttaacctgaaacggattgaggaaggaaaaccgccggccaacattgtcatcccccggggggccggcgaggtgcccgttgtcgacagcctcaacgacaaatatgaggtcaacagtgcctgtattgcagaaacaggcctgatcatgggaattggcagatttgccggaatggacatcatcgaaatggaggatgtaaccggtggaatagacactaacctggagaatattcgggatacaatcatagaccaggtgaagaactccgaacacgacttcttccttgtgaacatcgatggggctgacgaggccgggcacgatggtcaaacgaaggagaagaaggagttcatcgaaaaggtcgactgcgtaattatgggcgagctgatgaaactggacaatgtttacatctatctgacagccgatcattctaccccaatctcagtcatgaatcatagcggcgatcccgtgcccgtgctgattcgcggccctgaagtcagggtggacgatgtgaaggagttttctgagagagcctgcgcaaaaggaggcctcaataggatcaggggcagcgacgtcatgaacatcatgatggacttaatgaattacgctcataagttcggggcctga

SEQ ID NO: 10146 - DNA, 1338 bp, synthetic construct
  source 1..1338: mol_type = other DNA
atggtcgccaaaaaactattcggaacctcaggcatccgaggaaggatcggcagcgaagttacctgcgaactggcactgaatgtcggtaagtccctcgcttactacctggggaactctggaacagtagtgctcggctacgacacaagaacaactaaccagatgttggatcaggcaatttgcgccggcttgctggagagtggggtggatgtcataaagatagggatggtgccaactcccctggtcggctacgccactgagaagcttgatgcggatgcaggcatcatgctcaccgcctcccataacccgagccagtacaacggaatcaagctgtggaataagaacggaatggcctacacctccaaacaggagaccgagatcgaaaagatttatgcaaacaatgactatattagcgtgaactgggataaaatcggcaagctgagtgtcaacgaggaaatcaaggggcagtatgttgacgaccttgtgaacctggtggacatcaaggaggggcttaaggtggtgatcgactgcgcgtctggggcaggtagtgaaataagccctctcgtgttccgcaaggccggatgtgaggtgaccaccctgaacagccaagtggacggattcttccccggtaggaatcctgaacctaacgaggagaacctccaaacactcatgaaaacggttgtggccatcggagctgatctggggatcgctcacgacggggacgccgaccgcatgattacggttgacgagaatggcaatgtgtccccctttgattctctgctagccctaatcagcaaagaatttgatggagatattgtcaccacagttgatgcgggcctgtgtatggatgagtccgtcaagggcaaagtgatacgcacgcccgtcggtgacgtaaatgtggctgaggcaataattgaaaaagatgccagttttggtggcgaaccctctggcacttggttgcacccagacttctgcatgtgtccggacggcatcctttccgggttacggatcgcgtcaattgtgtcacgagacgggaagctgagcgacctcttggattcgataccatcctatccaaacatccgtgagaagatcgtctgctcaaaagaggctaaaatcaaagtcatggagaacatggagaatctgctgatcaacgccttcgacgatgttgccgatgtaaatcccctcgacggcgtgaggctcacatttgaagacgacagctgggtactgattcggccttcgggtaccgaagactacattagaattactttagagagtcgggacgctaagagagctgaggagatcaaggaggtgtgtgtgaagattattaacgaaaatctgtga

SEQ ID NO: 10147 - DNA, 174 bp, synthetic construct
  source 1..174: mol_type = other DNA
atgacaatatacgtctgcctgcactgcgagtatcggtttgatagcgagaagggcgaccctgcctacaacattccagccggagcaaccccggcagacatgcccgacgattgggtgtgccccgaatgtgctgcgctcgggatcgaagctttcatcgccgaagaagaggaggagtga

SEQ ID NO: 10148 - DNA, 1308 bp, synthetic construct
  source 1..1308: mol_type = other DNA
gtgaaggcaatcattctgtgcgctggtgaggggtctcgcatgcgacccctcacactcaccaagcctaaaaccatgctgcctgttgccgggaaacccatcatgcagtacaacatagaatccctgagagagaatggtattgaagacatccttctgatcgtgcggtataaggaggagatggtgcgcaactactttggcgatgggagcgaatttggagtgaatatcatttaccagcgacagaaagatttcttgggaaccgctgacgccatctcttatggaaaaaacttcatcgatgatagcctgatagttcttaacggagacatcattttggacgacgagatcattagtgacttcatcaataaatacgacgagctaaagcccgatacgctcatgctcttaacagaggtcgagaacccgagcgccttcggggtcgttgaaatcgaagacggctacattaagaacatcgttgagaagcctaaaagagaggaagcgccaagcaacctggtgaatgccggaatctatatcttcaataaagatatatttgacaaaatcgacaagaccgaaatttcccagaggggggagtacgaaattactgattccctgacgatgcagatcgaggatggcctgaaggtcatggggcataaaactgacaaggactggattgacgtagggcggccgtgggaattgattgaggtgaatgaggagctcattggcaacctgaagacggaaatccgcggcaaggtggaggatggagcccatattcacggggaggtctttctggatgaaggcagtgtgataagggccggcgtgtacatcgtaggcaacgtgtacatcggcaaaaactgcgacataggccccaactcctatattcggggtaatagctacttcggagataatgtgcacgttggaaacgcggtggagatcaaaaactcaatcatcatggaaaacaccaacgtgagtcacctcagctatgtgggagattctgtcattggctctaactgtaatattgcagcaggaactaacatcgctaaccttcggtttgacaacaagtcagtgaagacaaagatcaaagaccaaatgatcgacagtggcagacgtaagttcggcagcatcataggggattcggtcaaaacagggattaactcatccttcagcccaggtgtaaaggtgggccacaattccaccatcggttcgggtgtcctactgtacaatgacgtcccatcagacaccagggtgctggtcaagcagaattatatcattcaggataaaaatataaagaacgacattcaagacaagaatataaagaagtga

SEQ ID NO: 10149 - DNA, 483 bp, synthetic construct
  source 1..483: mol_type = other DNA
atggagaacatcgaagactccattgtcatctgcccgggcgctcaagtattcggggatgttgaactcggggagaatgtctcgatatggcatggcgccgtgatacggggagatacggactcaatcaccattggaaataatagcaatgtgcaggataactgcgtgattcactgtacaaaaggcttccccgtggagatcggggacaacgtcagcgtgggccacggcgcagtggtccatggttgcaagctggatgacaacgtgctgatcggcatgaacgccaccgtgctggacggtgcacacatcagcaaaaactctattgttggagccggggccgtcgtatccgaggggaaggagtttcctgagaacagtctgattctcggaatccccgctaaagcggttaagcagctaagtccagaacaggtggagttgatccagaacaatgccgacaactatgtgaagctttccaagcagtacatggaagactga

SEQ ID NO: 10150 - DNA, 1101 bp, synthetic construct
  source 1..1101: mol_type = other DNA
atgaaagcaaggaaaatcgtcgatgagatggattcctatgtgccgggcaaaagccaggatgagattgctcaagactttaacctcaaaaaggaagatatcatcaagctgggttctaacgagaacccatgggggcccagcccgaaagctatggacgcaattaaacaggagatcaacactataaatcgctatcccgagtcccagctgggggagttggcatcggaaattgcccgatactccggcgtggacgattcgcaggtgattatcggtggcgatggcgcggatgagataatcgacgttctggccaagacattcatagacgccggagacgagtttatcgtccccctgccctcctacatgtattacgagtacttgttgaagcaatatggagccagtccaatctacgccagatgggacatcgagaagaacgaactggatgtggacagcatttacaacgctatcaccgacaaaaccaagatgattttcctctgcagtcctaataatcctaatggcgctctgatcgaccaggaggtctttatcgacatcgctagcaagaaccccaatatactgattgtgattgacgaagcctacttcgagtattcagaggtgacgaataaggatctgatcaatgaatttaacaacgtgttcattatccggaccttctccaaggtgctggggctggccggaatgcggatcgggtacggcctggcatgttccgaaattatcgagtacatgcacagaatcaagcctgtattctctatcacacgtttaagtttcatcgcggcccttaacactctcaaggacactgaatatattgaaaatagcatcaagaaggggatcgagagccgccagtacctctatgacgagatttcaaagatagacggtctttttgtctttccatctaaaagcaacttcatgctaatcaacatcaaggaaaccggctttacagcctcagaattagcgctggaactcatgaaacagggcataattgtaagggactgcacgagcttcaaaggactggatgagtactggattcggataagtatttgcacccttgatgaggataagaagttcattgaaatcctaaaagaggttctcggatga

SEQ ID NO: 10151 - DNA, 705 bp, synthetic construct
  source 1..705: mol_type = other DNA
atgtacataggtggtaccgtgattagctccgtggaatttcatggcaacatgtcgctcgtcatcttcatgagcaaatgccctttggcttgcaggtattgtcataatgtggagctgcttgaggacaacacggaatggcctttcgacaaggtaaaacaagaaattgattacagtgccgattttctagatgccgttgtcatctctgggggagagcccctggtacaagtcgacgcagtgatcgagatccttacttacgtgcgacagattggactgaagacaaaactggacaccagcggcatatacccagacaacctgaagaagatcttggatttaaacctgcttgattatgtctccctggatgttaagaccaccttctccaaatataaaaagatcacgggagcaaatgtggggtttcaggtgcgcaaatcaatgaacctcataaacgacgcgggcgtgcacctggaggtacggacaacttacgtccccaccctccacacaaaaaaagacattattaacctcgtggacgacatcaaggccgatatctacactatccagcagttcagaaacaagaatgtgctggaccccgctctcgagaaggtggacgtcccaaatccgcacgatctagtcatgctggcccaggaaattaagccatatttcaatgggatcgttaaggtgaagagtggcgaatttggcgagcaggtgatctga

SEQ ID NO: 10152 - DNA, 1137 bp, synthetic construct
  source 1..1137: mol_type = other DNA
atgcccatcctcagcttttccagcaatgacatcgacgtgattacaggtaaaaagacccggaccatccgaaaggcttggaaaacgccactgaaagtcggagacaggctgtactgctattggaaccttgtcagcaaggaaaagatgaagattttcgaggcgtttgttacaaagatcgaggacatctccttcgatgaactgaaaggaaatgacgaactcgcccggcaggaaggctttaaggactcaaaagacatgctgaaggaatttaagaagatgtacgggggaagaattgatccttctgacaagttccaaataatctacttcgaaaaaattcacattgacgattggaagggcgacaaaattgatgagaaggcaatgatttctaaaagggcagatatcctattcgatagtgggaaattcgacaagtccaccatgtgttacgacgccgctctgaaactcgacccccatgatgtgtatttgctgaacaaacagggagataacttaagcaggctaggtcgcttcatggacgccattgagtgctacgataaggcactcatgatcgagcctgataacgtatatatcttgaacaacaaggccatcgcactcctaaactcgggcaatatcaatgaagctctgaaggtcagtaacatcgcctacaattatcgcccatccagtccgatagtgctttattggcgagggtttattttggagatgctgggcagatacgacaacgctttaaaagtgtacgataagctgatagtgatagatggggacaatccagaggtatggaactcacgggggaacctgttgactgacatgggcatgctggaggaagccatcgagtccttcgataaggccgtggaggtctgcctggacgattctgaaatggacgcttcagccataaaccgcatgggtaacgcgtacatcgatctgggaaaacttgatgaggccctcgactgctttaataaggcgatcagcctggagaagaataacattgattttctgcttaataaaggcgtggtgctgatggaacttggcaagtttaaagaggccatcgacagcttcaacaaggttctgctcagaaaccccgacaatgaggacgcattcttcctcaaggaggaatgtctcgagtatctgtga

SEQ ID NO: 10153 - DNA, 1365 bp, synthetic construct
  source 1..1365: mol_type = other DNA
atgtccaacaagaagcggctgttcggcacattcggagtgagaagaactgcaaatgatgtgctcactcccgaatttgccacacggctgtctgcatgctatggcagtgtggtgaaaggcaagatcgcggtgggggcagacaccagaacaactagcccgatgctgaaagatgcagtgattgctggcttgctgtcagccggttgcgatgcggtggatctaggaaccttgcccacccccgcagtgcagtatgctgtacgacagtactacgatgggggaatcatgataaccgccagccacaatccgcctgagtttaatgggctcaagttcctcgatgaatttggtattggtctgcctgacgatatcgagttggagattgaaagcctgtacttcgactcggaaccaatccgcgccaattgggacgagattggggagaaatacacaaacgacaacatcattgacgagtacattcagaccgccatgtcccatgttgacgtcgacgccattaaggaggctaatctcaaggtcgtactggactgtggaagcggggccgggtcgtttaccgctccctatttagttcgggaacttggctgcgaagtgacgacgctcaactgccaagctgatgggtttttcccaggcagggaccctgagccaatcgaggagaacctccaggagctcatcagcgtggtgaaagagttgaacgcggatatcgggcttgctcacgatggtgacgccgaccgaaccatctgtattgatgaaaacggagcctttgtcctgggcgacaaaaccttcacactggtcgagaagcagatgctgaaagaaaacggtggcggcactattgtcacaaccgtggcaacttcacaggctatttacgacatagccgaggaatacaatggagaggtcatagcaactgccgtcggagatctgctggtagcccgtaaactcaaggacacggatggcctgttcggaggcgaggaaaacgggggcctaattttccccaacttcgtttatggcagggacgccgcgttaactgttgctaaaatcctagagataatcgcgaaggagaacaaaacactttcccaactggtgtcagaactgcccgtgtactattctgctaagatgaagacggagtgttctgacgacctgaaggaggaaatcatgtccaagatagccgcagaggttaaggaaaccaccgactacgaactggacacgaccgatggcgtgaaaatctttaaagacggtggctgggtcatcatccgcccatccggaacagagcctatcttcaggagttatagcgaagggaatagtcaggagcaagccgacgagatggcccagtggggaatcagccttatcaagaagtaccgcgattga

SEQ ID NO: 10154 - DNA, 399 bp, synthetic construct
  source 1..399: mol_type = other DNA
atgagaattacggatgaaaaactgcttaggatctccctgatcactgccctcattgggatcatcggactgatcatcttcacaccctcaatcgaagtcaaaaagatcgacattaaggatattacccggtccatgattgacgagaaggtatccgtgcggggcataatcacagacatcaaggagagcagtagcaaaaccaactattttttgactataagcgacggggaaagtcgaatcaccctgattatattcgaaaagcaggtttcagagattacgtctaggaacctagatatcggcgacttcaagaataaaaaggtggaggtggtcggaaccatcacagagtacaaatctgatctcgagttaattctctcgagcggcgacagcctgcgcataatcaactga

SEQ ID NO: 10155 - DNA, 1659 bp, synthetic construct
  source 1..1659: mol_type = other DNA
atgaagtaccaggagttggtagacgtgtactcagccctcgaggccactaccaagcgactcgagaaaaccgaaataatctcggaatttctcaagaaattagacaccggcaccattgagaaggtcggcctgctgatccttggggtggtcttcccagcatggtccagcgaagagatcggaattggcggtaagcttgttgaaagggccgtagcagaagccgtcggcaccacccaggctacggtcgaggacgcggtgcgtgacgaaggcgacattggtctggcatgtattaaactctacgccaaaaagtcccagatgacttttttcagccagccactaacaatcgatttcgtcttcaacagcctccgcaagctcagccagatcagcggaagccgcagcactaatcgcaaaatcgcggtgatcctggaactgctcagccaagccagtgccacagaggctaaatacttaacccggaccattacagaggagctgagaatcggcgtcggggacggcgtcgtgagggacgccatagcccaggccttcgacatcgacaagaaggtggtggagagagcccaaatgctgacaaatgacttttccgtggtggccaagacagcgaaggaggagggcagttccgggctcgagaagctgaatctcactcccggaactcccgttaaaccaatgcttgcccagctggccccacccctggaggaaatcatccccgaaatgggggtggctatctgcgataccaagtatgacggaatccgattgcaggtgcacaggaacaacgatgaaatcaacatattcacccggcggcttgagaatattactcacgctctgccggaaatcgttagactgtttgatgagcacttgccccatgagaactacatcgtagaaggggaggtcatagctacacgcgatggaaaaccattgcctttccaaaacatactgcatcgtgttcgcaggaagcacaatgtggaggaagctatagagaacgtgccgctaaaagtctatctgtttgacgtcatgtattaccaggttcctatgattgatgaacctctgaaaaacagaaggaccattctggagtcgattgtggatacttcagtggacgagatgaatcttagtaccatgaagattggaacagctgaaaacatcaaggagattcaggaactattcgagacctcaatcaaagaagggcacgagggaattatgattaaagatgcaagcgagccttatattccaggccttaggggcaagaagatgctgaagtacaaggcagaacccgagaccctcgacatgattgttataggtggcacctacggaatcgggaagcgcggcgatttcgtgggtagctacttggtagctctccgagacgagaacaatgagtttaagagtgtggcgtatgctgcaacaggtctggatgacgcaacactggagtacttgactggcaaaatgaaggaactggagctgtccacgaaagggcgggagatcaaggtggaacctaaaatcgtcttagaaatcgcctttagcgagatcgttgagtcacccgagtatgaaacggggtattctctgcggttccccgtggtgaagaacatccggaaagataagggtccgatggacgtggatacggtggaaagactgatctccatgtacaacacgggaaattga

SEQ ID NO: 10156 - DNA, 1275 bp, synthetic construct
  source 1..1275: mol_type = other DNA
ttgactcagaaaagtgaagcacagaagggtaatattaccccggagatggagattgtcgcaaaacaagaaaacatggacatcaataagctggtcaagctggtggacctcggaaagatcgtaattcccaaaaatatcaacgggcactcaaagccttgcgggattggagaaggcctgaagaccaagatcaacgcaaatattggtagcagctctaaaatcgacgatatcgagctcgagatcaacaaggccaagctggctcaggaatatggggccgacgctctcatggacctgagcaccggttctgatctgaagctattccgcaagaagatcatggatgccgtggacatctgtatcggcacggttccaatctatgaggccggggtggttaccctcggcaaaaacaaggagataatcgacatggaccctgacgacatatttaaggccatagaaaaccaggcgaaggaaggagtggatttcatgacgctccactgtggaatcacagaggacctagtgcagaaattgaaagactcgaacaggatgatgggaattgtgagtcgcggcggcacgtttatggccagctggatcaaccataacaatatggagaatcccttgtacgagaactatgattacctgttggagctcagctacgagtatgacatcacactgagcctgggcgatgggctgcgaccagggtgtctggctgacgccagtgacatccctcagattcaggagctggtaaacctgggtggccttgtgaagagagctcaagatgcaaatgtgcaggtcatggttgaggggccaggacacatgcccctgaatcagattaaggcaaacatggaactccagaaaaccatttgccatggggcccccttctacgtgctgggccccctcgtcactgaccttgctccgggctacgatcacattacaggcgcgataggcggcgccatcgccgcgtcatccggggcgaacttcttatgctacgtaacaccagcagagcacctatcccttcccagcctcgaggatgtcaaagaaggagtcatcgcgtccaagattgccgcagaagccgctgatgtggcaaaaggtctggaatcctcatggactcaggagcgggccatggctcaagctcggaaagagtttgactgggagaaacagttcaatctggccttagataaatccaaacctagaacctatagggagaagtgcgagcttgacgacgatgaaatgtgcgccatgtgcggagaatactgtgccgtgaagatagctaagggcgatttttga

SEQ ID NO: 10157 - DNA, 669 bp, synthetic construct
  source 1..669: mol_type = other DNA
gtgtttactataaaggtgatattctttgataccgaaactaccgggcttgactgctccaggtgcaagattatcgagcttgccatgctgaccgtggagaacggaatcgtcatcgacaagtatgatgaatttatcgatgtcgaggagccaatcccacctaaaatatcggcactgacgggcattacagacgacatgattaagaatgagggcgtgagcgaagaaaaggtcgccaacgacctgaaggagcggctaaccgacgacacattaatgatcgcccataactgtcaattcgacttgcagttcatttactacctcctcaagcgtcactttcccaacgaggcggacaagatcgtgagcaatctgaattggctggacacggtatccgtgctgaaagataggaaaaaattcccccacaaactgatcgacgctgtgaagcattataatattccggaagttaacttccaccgcgctattgatgatacaaaggccctctacaaggttaccttggccatgaaaagtgaacgagatgatctccgggactatatcaatatttttggctataaccccaaatacggggtaagcggaagacgcttcgatttcatcgagtacaagtcacagttctaccaccagcggatcgtcgcacaggagtttactctgcctaacaggagatga

SEQ ID NO: 10158 - DNA, 834 bp, synthetic construct
  source 1..834: mol_type = other DNA
atgagcgagcatatcattgaggcactcggactgagcaaggtaatcattaaagatggcaaagtgatcgacgtcagtgaaccccaggtggaatactgccctctgttcgaccatcacaggggcattaagaagctgacaagcgagataatcgccaagaacataaagttcaggatagatgattttggcatgtgcatgccaaatcgccagctccgaatgaaggacttcctgaactttggcattagcgagatcatgtgcacgctgcttgacgaaaaaataattgacagcgtggtaatggtgctggaggggtgcggcactctgatcgtcacagagtcagagctcgtgcagggtatcggtggaagagtgtctggccttgtcaagacctcccccattcctgaactaatcgataagatcggcaaggagaatattgtgcagccagagaccgctgagatcaaccagattaagggactcgagctagccatcaagaaagggtttaaaaatattgccgtgacgataaccctggcttcagatatcgacgagatcgaacgtatcaagtcggaaaaccccaatgtgtccatctacgtctttgtcgttcacactactaagagaaacgccaaggatgcgcggaaattattcgacggatgtgacgttatcaccagctgtgcatccaagtatgtgcgggaaatcggaaaaaaggagagtatcaagacagttgggcaatccattcccattttcgcccacaccgaagatggtaaacgcttcctcgagatgcggttgaagaaaatcgggggggaaaaacctaaaatagacaacccggacttgccatacccgctgatttga

SEQ ID NO: 10159 - DNA, 2202 bp, synthetic construct
  source 1..2202: mol_type = other DNA
atggcagaaaacgagattacgctaaaagttgctgaggccatcagccagaaagacgtcggccagggcgtggctcgactggaccctaacgtgatggatgacctgaatattcatgagcgggacctcatcgaaatcataggagaaaaacgcactgccgcaatcgcccttccctcccagaccgacatcggacttgaggtgataagaatcgacggactggtgcggaaaaattctggcgcaacgatcggcggggaggtgcagattaggaagattaaggctgtggaagccaaaaaggtggttctggcccccatcgaaaacaacatccgggtgcagggcgatgttcggggcctgtttgccggcaaggtaatggtgcagggagacattattggctctcagattcgcgccccaaagcccagtatgaatatggggttcggtagcttatttgacgagctcatggatttcacaccagctatgaaagaaatcaagttcgctgttgtctccacgaaccccaaggatatcgtgattgtgggtcccaataccgaagtgcagttgtacgagaccccagtggacgtgtcgaaaatagagggggtaggaaaccttgtggatgtcagctatgaagacatcggcgggctgaaggaagaggttaaaaaggtgagagagatgattgagatccctctaaagagacccgagctctttgagaaactggggattgcccctccaaaaggcgtcttgatgcatgggccaccaggcaccggtaagacactgctcgcgaaagctgtcgcgagtgaatccgatgctcacttcattgcaataaatgggccggagattatgagcaagtacgtaggtggatctgaagagaacctgagggagtacttcgaagaagcggaggagaatgccccttcaatcatattcatcgatgagctggacgccattgctcccaagagagaggagaccaacggtgaagtagaacggaggaccgtggcgcaattgcttacgttgatggatgggcttaaatcccggggccaagtcgtcgtcatcggggccaccaacaggcccgattctctggacccggcactgagaaggcccggacgatttgaccgggaaatcgaaatcggcgtcccggactctgaggaacgcaaggaggtgctggagatccacacacgcaacatgccgctcagtgaggatgtcgacctcgacaagattagcaatacaacccatggctttgtcggggccgacctggaatccctctgtaaggaagcagctatgcgagttgttcgcaggatcttaccggagatccaaaacgatgaggaaatcccaaaggaggtgatggagaagatcgtggttaccggcgacgactttaagaatgcgcaaaaggaaatccagcctagcgccctgcgggaagtcctcgtgcagatcccagatattaagtgggatgatatagggggtctggaagacgtaaaacaggaactcaaagaagcggtggaatggcccctcaagcaccctgaaaccttcaaacgtctgggaatacgtcccccaaagggaacattgctctatggcatccctggcactggtaaaactttactggccaaggccgtcgcaagtgagagtgaggctaacttcatttcagtgaagggtcctgaactgctgtccaagtgggtgggagagtcagagaagggggtgagagaggtgttccgcaaggccaaacaggcagctcccacagtgatttttttcgacgaaattgatgcaatagccagcacacgtagcggcaatgacactgactcgggggtgactaagagagtggtaaaccagctgctcacagagatggacgggctggaggagcttgaggatgtgtcaattatcgctgcaaccaaccggcccgacatcctggatgctggcctcatgcgccctggacgattcgataggcacatacaagtcgacgagcccgatgaagagaccagactggccatctttaaagtacacacgaaaaacatgcctctggcggaggacgttgacctaaagaagcttgccaagaatactgagaagtatgttggagccgacattgagtccgtgtgccgcgaggccgcaatgttgactctaaggaaggatttggacgccaaagagatcccatataaatacttcaaagaggccatcgataaagtcaagcctggatacagctccaacgaggagcagctggtccagtacatgtga

SEQ ID NO: 10160 - DNA, 1347 bp, synthetic construct
  source 1..1347: mol_type = other DNA
atgaaaatcaaggtgattaccaacctgaagctgttaatgattaaaatgaacgtcggaattattggcgggagcgacggcctcgggaaaacaattgtctactacctgagggatgagtttgatgtctacataacgggccgagatcataagaagggtaaggaagtggcttgtaatctgaacgtgaattacattgagagcaacactgaccttgccaagatcagtgatatcatcatcgtttccgtccccatacaccatacctcagatgtcatacgggaggtcgctcagttcatgaaggccggctccttgatgattgatgtaacatccgtgaaagaagagcccagccgcaccatggaggaggtattgcctgacaccgtggagtacatcccaacccacccaatcttcggcccgcggacaaccgagcttgacaaccaggtgatcgtgctgaccgctactaagaagggcgagtggtacaggaaggtgtacgactatctgaataaacaacacatgcgaatcattgaaaccactgccaagaaacacgactatatgatgagtatcgtgcaggtgttaactcatttttcgttcatttcaaccgcatcagctatcgaaaaactcaagatcgatatctccgaaacggaggactatgaatccccaatatataaccttatgatcgacatgatcgcccggattgttgcccagaacccttacctcacgtatcacattcagtcgatgaacaacaatggccccaagattagaaacacattcgccgacgccgtaattgagctccgcgacgtcattaacaatgaggacgatgagaaatttgtggagatcgcgatcaaagcgaccaagcatatgggggacatcaagaacgcactgggtagaagcgataaggccatcaacggactaaaccacgaatttacactgctgaataaaagcatagggactgaggttggcctaaggcacatttactctggaaagatccacgtgggaatcctggagaagatagagaacaaaacggcgatactcagaaaacgcaataaggtgaagaagctgcgcatagctaatatcgaggtgctgagcgacaatgaactttatgagtggaaaatcaataacctcgataagaaaagggaaagcatcagttgcgtattccctaagcgtgttgatgccgaagtcatccaagatacagtgatgaatatcgcaaacataattgacatcaaactgaccgacacatacaacgggccccagatcagcaaaaatagcattagtttgactttcgaagttatcgcactctccaaggaagacattgaaaagattaaggagctgttcaccggttttgggggagtgatccggtga

SEQ ID NO: 10161 - DNA, 4473 bp, synthetic construct
  source 1..4473: mol_type = other DNA
ttgaaaaactcaaagggcaaagtactgactgggaagaagatcaccgtcaattattctggtaaaacttactcacggaccacagactccaagggctgcgttagctggaatgtgcagaagaagccgggaacctattcggtgaaattcaccttcaaagccaagggatatcagaccagcagtaagacagccaaggtcacggtcaaggccatgccaacatcattgaccgtgaataatcttgccttcacatacggtgacggcaacaataagctgaaggcgaccctaaaagataagaaacgcaaagtcttagtcaacaagactgttgtcttcaactttaacggtaagaactataatcagaaaacaaattcgaagggagtggcaactctcacaattggcgctggacccaaaaagtacacgaccacaatctcctttacaaacgctaactacctgaaaagcaaaaagacagtaactgtcaccgtcaacagtatacctacatccctgactgtaaacgatcttacttgcaactatgatgacagcaacgcatacttatatgccactctgaaagataccaagaacaacaaatttctgagcggacagaccatcacgtttaaaatcaatgacaaaagcaaaaacgtcgtctccgacagcaatggcaaggccgggattaaaatagaggagaaaagcggaacatacaatgtggatgtctcattcgccaagagtccatatgctagcattagtaagaagatcaacctcaatgttcagggagcgttaacccctgagatcaacatgcacaatggtttttataacgtctcgaacctcctggtggatttcactggggataacgcggagtacatcgtctattgctcctttgataatggtgcctcgtggtacaaagacaatcacagtctgagctttaatctgactacatgtaactggagcataatatactactctagcttccgcggcttcaacagcaccatcaaccacgttaactacgtgctagatggggatgtgccattggtgtgggccagtcatgggagcggcatttataataccaacttccaggtgaatttgacctccgttgacctgtttgatgagaagcccataatatactacaccttggacgggagcgaccctacagtgcagagcactatttactcagaacccatcaatgtggtaaagaacaccaatctgcggttcttcgcaatggacacatttaaccatagaagtgagataatcagtgtgtactatttcattggaaactgcatagccaatctaaacaacggaaaaacatacaacaccatacagaacgctatcaatgacgataagacaaagaaaggagacattattgaggtgaacaaagatatcatcatcgagaacgtggttatcaacaaaaacatctatctgatctccaacaacgtgatttggcagtctaacaataagtcccctatcatctacatgaagaatgtcaataataccttcattgaggggtttacgtttaagagcgataacgggtcaggcattgaactgaataacgtgtccaattgcgttattcagaataacaacttttacaataagtacggcttcagtatccataatgaaaacaaggacaacgataacctaaataacatttgcatccaaggcaataacttttatgacaactattataattacattaatttcgaagttttagaaaactcaaaaatcattaacaacaactttgagtcgaacaagaacgtcagcgccataaccatcctcaacagcaaatccaatattcttatcaacaaccaatttactaaccttaactacggcattttgattaacaagtcctacgacgacgttttcttcggaaataacttctctataaataatatcgggctttacttaaactgtgtcgacagtaaagtaatttccaacactttcattaacaatcactacgggatttactccataaacgcctctaatctccgcatcaatttcaatcggatcgtagacaacagcaaattcggcgtgtactgcaagaagggtattgtggacgccaataacaactggtggggtaagaattatataacgaataacgccttgaacagcggagacatcaataataacgagaacattggcataaattgttcggcttatctcgttttgaatgtgtacgaaactaactataagatcgataatggcatcgtttataatgtgtcttacgtggctaatctgaggtcaaacaactacggggagatttttaatcagtatttcatcccgaactgtaagattgtgtataatatgtactgtgaatacctgtacgataacggcgttgtgtacaggggggttaaccgaataatcgacctgatgctgtctgagggctcctctattaaggagtacagactgggatttctaaacaacctaaccgtgacactcgaccaccagaatatctcattcttccgagaaagttcattcaatgcctacgccaccatcgatatcgttagttctgcgatctttaacgggtcaaaccttgatatctccgtgcgcgtgccactcgtcgacaacgtcgactggttttccattgtatgcagatacgtggggaacttcaagtccgagctgctgctcatctacaacggcgaggtgcgcaacaccatagtgatcgaaagttccttttataacgaggccaagaacgtgtttagcaataatttctggaacgctctggatacatatcactcgtgcttttccggttaccgaaacaagcagatatgcgcatacgcttacctctacctgaatgacccgagtttgaataccattgaactgctggataataagctcagcaaaagcaacatccaatttaagctccaagacgtgtataatcttctcgctaataacaatattactcttaacgacatcctgcttaatcttatcaagaatagctacagcctgagcgacctcgagatgtcatttatcgattacgcaaatggaaacctgttcgacacaatgagcgtgtccctgaagtaccctggcaacgacagactgttcttcgcattcgaagacaccatcaacaagacttttgtgtggagaggggacagctcagtgagcctctataatatccattatgtcaatggaggctattttgacctgacggcaccattcccaatcggcgacaacggtgacctcatctatgacaacggcaatatctactccatcaactataactgtatttacacattcctgtctagtgactacgattgcctgaaaacctacacctttgccaatagcaagattaataacaacgctctaaattactggctcaatcagaagaaccggactgacgtgaacggggaactgtattacaacatagggtatatgaaggccgcgtacggcagtttccttgagggtttgctcgtaatttactgcaatgatgtggtggctgacgtgagtgcagataagttcaacgtctcctggacccgtgtcaaccccatggtcatgagtgtgtgtgatagtctggaaggttattatctgacgggagagtcggattttaactttgggcgcgaggtagtgggggacgtcaataacattaaaagctttaattttgcttgttcagcctcattcagcatcatcgaaaagtatgtgatcgatgcattattccccaatgaaggcaacaaaagctccgcgatgttctctctgatcgatagcctcttcaacaatggaactctcgagttcatcgtggagggcaactataccctcatccggagcctgaatgtgtccaacgtggtctttgtttacgatgagacgaccggaattttgcgtgattgtatcaacggctgctatggagcttactgctacgccagccagcagactgagtgggggcacaatttcggtgaaaactccctcaaactcgaagatttgattgtgggtattatcaacggcattgacacctcgctggacaacatgaataacgattggctgggtttcgcaggctgtctggcaatcacgattggaaccggcctgttcctggtctctaaccccgtgggatggagcattgccatcggcgccggtctgctgattgggtccggcatgctggccacctactacgcagacgacctgaataaggggtggaactataataggggggcccacttcatcttcgatgtcggcacgagcatgattcccgccggcgctccctcatctctcataaagtggaatgtgggcagtcttggcaaaatcgttttgtccgacggtcatctggtgaggcacgtgacgaagaactccattaataaaggcttcgacaaatatctgatgaaccttgcgaagtctcatggcggaaccattgattacgggtctcacaagatcatccggtacggaacgatagagtccatctcaaataccatgtatgggacaacaaagaaggacttcatatactattccattcaatactatatcaacaaatacatcatcggagacatcgtaatcaacaaaatctttagcaggtga

SEQ ID NO: 10162 - DNA, 324 bp, synthetic construct
  source 1..324: mol_type = other DNA
atgagcttcgacacaaagagaaaaaagctgatcaggcacaccatcctgataaatattatcgtatttctgatcatgctcttcctcagcatctttctgaacaacgaagtgtatctacagtcctgccccttcattctgcttatgataggaggctacatatcgcgcgaatacacggagctgtatttcaagtacaaacataagtattcatacttccaggtttttttcaaggtctgtctttttagcgtcatcgtgagtattatctgctgcgaggtgatcttgcggctgtacttcgggtccagcatttttctcttcattttaaacaaatga

SEQ ID NO: 10163 - DNA, 333 bp, synthetic construct
  source 1..333: mol_type = other DNA
atgtcatttaacgaagagcggggctgcctcatgaaaatcaccatttgtatctatctgctccttctggtgattttcaccagcctgtccatactgttcagtaataagattttcctggagttgcttccaataatcatcctggtgataagcatcgagcacgtgcgcgactacgcgtgcatctatgagaagtactttaagcagaattattccttgtttaaactctacctgaacgtctctactattcccacgattctgttcgcaatctgttgcgaagccctcctgagggtatacttcaactcgagcattatcttaaaatacctaaagatcctcacatga

SEQ ID NO: 10164 - DNA, 384 bp, synthetic construct
  source 1..384: mol_type = other DNA
atggagattcagcccagtcaatttaccaactccagcacggcaccagaaattgctatcgcccttctagaaatcagatacgcgaacacaaagaacaagaatactgtcaagatactgaataaaatcatcaatgaggtaaatctgactgataaggagatcgacgagattctgatcgagaacaacgaaaacaataaggtgttcaccgagaagattctcaaaataattgaaaagtataaggacgacaccaccagcacaatcgccaggatcataggcaaacactgcaaccgggagagcatccagaacgtgaagaaacgacgggagatcaggcgcaaaatcacactgaatctcctgaagaaagaaaacattttgtcaaaaacgaagaagtga

SEQ ID NO: 10165 - DNA, 483 bp, synthetic construct
  source 1..483: mol_type = other DNA
atgtccggtaagtccaatattaacgtgttgaagaatgtgaaaaaaaccgccctggacgaggaaatagcaaagtacgtcgcttaccacaggtactatcagcggctaattgcaattcgcattatcagtgaagggcacagcattgcggaggccgccagaataatcaggaagagctatcagaccgtgcatcgatgggctaaaacatgcgagagcgaaggcctggaggggctcaagccctcatttgggggcggacggccgtccaagctcacttatgatcagctcatcgagctggacaagatcatcgagaagacgcctaacatctcaatgaaggacgtacacatccttgttaatgagaaattcaacgtcaactactcgctgaagcaaataggcaaaatcatgaagaaactgggatacaactacagtaaagcctatcccaagtctagcaaatctccaaaggatgccgaaaagcagttaaagaaaacatga

SEQ ID NO: 10166 - DNA, 1254 bp, synthetic construct
  source 1..1254: mol_type = other DNA
ttggcgtcatacatcatctggtcgttctacattgtgattattcacatcgacatattggtcccacttaacatactgttcctccagctcctgaatcagaaacgcagaaagagcagaaagaaaaatttttacgactcaaagattaatcaaaattcagatcacacaagtcgaaagagccagagcatcgtgaagctgatgaaaattataaagcaggacaccaaggagggaattattgagattgtcccggagacattggatgatctgtggcacctgtcccatataatcgaagagggcgataatgcatcttctaagacaacccgacgtattcaggataacactggagataaacttcggagtgacaggggagtgaaaaaaacattctatctggggctcgacatcgaaaacatcacgtttcacttattcactggcaagctgcggctgaccggcaccattacaaaggggcctgaagacctgattcctctcggctcccatcataccttggaagtaaaactgaacaccccaatcaaaatcaaaaagaggttctggcccaaatgggccatcaaacggctgaaccaggcgattgacgccagcaagaagctatccgccatcatcatcgtctttgaggacgatacagcaaccatcgggctgatgaggcagtttggaatcgagtactacggccccattaagggatatgtgagcggtaaacggataatcgataagaaccgccagaagaacatcgtgcagttctacgacaaggtcatcgagtccatagaaaagtttgactcaatccagaatatcgttattgccggtcccggcttcgtgaagaacgacttctacgaatatattaaggacaactacaagaaccttgcaaagatatcggttatagaggctacgggttctggagggcgcaacggcatcagtgaggtgctcaagaagggcactgtagagaaactgaccgcagagaatagggttgctcaggagatgggagccatcaatcgcctcctcacggaaattgggaaaaattccagcaagatcgcctatggtatcaaacaaaccaaaaacgccatcaacctgggcgctgtctccgagctcctgatcttagatactaaggtggcgagtgagaacatgggcgaactgatggacatggtggagaatatgaaaggggaggtaatggtggtcagcagcgaacacgaaggcggtaagcaactagaaagccttggggggatggccgctatcctaagatatgagattgtgtga

SEQ ID NO: 10167 - DNA, 963 bp, synthetic construct
  source 1..963: mol_type = other DNA
atgttctactcctccatcattattgccttcattatcgtgtttatcataactgccgtcagcaccgctatcctggacatcattttcaggttttttggaaaacggggctacctgggcaatctttacccgaatgtcagagggggcatacctcgtgctatcggcatcattccttttatcgtgctctccttctatatgatccctgtgtgcaactcaatgattctgattatcggtgtgttcgccttaatcgacgacatcctcgggagaaagaagtgcgtcccattaggcatcgagtggggccagctttcacgcggaatcggaattgttttggtgatgatcacaggtattctggaaggatattggatcagcgcaattttcattgccctgatggttcagcccctgaatatcagtgacatgcagccgggcagtgcctgcattgtgactatgataatgtctgtgataaccatgatcttcatgctgattgccgggtcgcccatggtcaatgaactgcccgcggtgtacacgcctcttctcatattcgtagtatgtgccgcttacagccccctcgactttagcggcaaaataatgttgggggaggtgggaaaccataccttcggggtcgcacttggtctagcgttttacctagtgggaggcctctggtccgtgatcctgctcggattcatcacagttgctctgatcgcatttgttagacgaaacaaccttcgggtatttttccgccaaaacctccgcatactgaatccaacatttggggattacttcatggacgtcctgaccgggggagggttgggcgatctatttaggaagctgattctgaaggataagcgattcgatatcaagaaccccctgctcatcagcctcggtttcaggcggctgctgttcaacccatatgcgagccacgcaaaagagtatgccccaaagaaaatccccaagttgggcaaaggcgtgtga

SEQ ID NO: 10168 - DNA, 1053 bp, synthetic construct
  source 1..1053: mol_type = other DNA
atgaaagcctttttcacagtgactggacgagggctggggggtgacgcagtggtggcacttaacaccatggccgcccttcgcaaaaggggtgtggaatgcatcattggcctggacaagacggcttccagtgacctctttgagaaaaacggctttgaggtctgcaagatcagcattccccacgctggtggccatagcgccaccaagctgtctgccatccggggggccctgaagctcgtgaccgctacatttaaggcaagaagcgccatcaagaaaagcaagtcggatttcgtcgttgccgttctgggcggcggagctattgtcgggtccctcggggcgaaattcgcaagaaaaccctgctttagcttaattagtacacccttggactccaaggtatgtcctaagttcaactactgctatgcgctgccagagctagatgcattccgcttcgacaccttgcctaaaaatatggataggagcttttacccactgactgatgacattggggacggcaaagaagaaatcgctctgcagaagctaaaggagtatccaaatttcgacgaaaataaaaagaccatcatattctcttcaggctcatcaatctttaagggcatgatcgatgccattaacatagtagccaactccacggatgagtacaacctcgtgctcatcggacggcccctgcgtgaggaatattacgacctgatcgacgacgagaagataatctatgtggggttcattgattggatcaaccacttattcaagtttgccgacctgacaatcttgaccgacgacggagtgtctcttgaagaggcgatgatctgcggaaaaccgattatcgccctcactaaagtcaagtggggccggtaccagaatatggctggtgtgtttaagggagctatcattgaatcggaggtcaaagatgtgtgtaaaagtataatgaaggcattcgagaattataactccctcaaggagaacgcggaggtctacggcaagcaatgtttcgaggctgccgatgtgctggccgataagatactgaaaaaggttgaatactga

SEQ ID NO: 10169 - DNA, 1302 bp, synthetic construct
  source 1..1302: mol_type = other DNA
atgaagaacatcgtgattggttcggggcctgctggaagactggcatccctgcaactgggcaaactgggcgaggatgtgactcttattgaaaaaaaccatatcgccggcacttgcctaaatgaggggtgcatggtggtttgtgcactcaccgacatcaccaaatttatcgacgcgaacaagcggttcaattcccacggcttccttaagagtcagctggagatctcttacgagaaaatcgtggagagaatcgtggagacacaagagaaactgaggaagcttaatcagatcgaaaacgagagtgtgggcaaccgcataatctatggtgaggccaacatcggaaataacatagtggaagtcaataacgaaagctttgagtacgataacctcctgattgccaccggggcacgcccgttcattcctaacatcaaagggaatgaatttgggctgaccaacaaggacattctgaagatcgacgacgttcctgagaaactgaatatcattggtggcggaatcatcgctggcgaaatcgctaacatctactcaacgctgggtagcgaagtcaacattttcgccaggaacacctttctgaaggaaatcactcccaacaccaagaagtatatattggaaaacctcatgacggatgttaatatctacgaaaacattaacgtggtagaagtcttcaaggacaaggttttgcttgaaaatggggaggagctcgatggaatccccttcttcgccacaggacggaccccaaacagtgaaattgtgaaagacattgtggagctcaaccacgacaaaaccataaaggtaaacgaaatgatgaagactagtgtcgagaacatatatgctgccggagacgtgacgggcggataccagctcacaccagtagcccgcaaagagggcatcacagctgcccgaaacatggcggggtactccaataaaatcacctacaattgcatcccccagagcttatcgttgaacatggaggtctcctttgtggagaatgagaaaagcgagtgtaatgaagaagacaagcagacaatcgccatgccggcgattgcaggcccctccgcattctggaatattctgaatgaggatacaggctattccgagattgagttcgacaagcgtaataataagataaaccggatcaattcaattagcccatctagcgtcagcgatgtggcctacctatcttacattatgaggatgaactatgatctcaatgactatgatgagtttttagagattcacccctcaactgataccaactacaagatcataaagaacatgtggctgtga

SEQ ID NO: 10170 - DNA, 273 bp, synthetic construct
  source 1..273: mol_type = other DNA
atgtgcatcgcagccccagcccatgtagtggaaatcaatagggaagacaactggctctacgcagacttcgggggagcccgccagcaggccaagatggatctgctacccgacgtcgagattggcgactacgtgctgatccacgctggctatgcaatagagaaactgaccgaggaggccgcgaaggaaagcctcgaagcttgggaggagctgcttgaggtgctggaggaagaagataaagagatggagaaggcccggatggcggacttggattga

SEQ ID NO: 10171 - DNA, 504 bp, synthetic construct
  source 1..504: mol_type = other DNA
atgtgggaaaagattaatgagaagttcaaaaagtacccggcaagaattagggttgccgagaagatgatcgagcttggcttgtctctgaacgaggacgggaaaatctactgcggaaatctcaagataagcgacaaggcactcgcgactgccgctgatgtggataggcgagccatcaagtccaccattgaagtcatacaggaagacgaagaattgtacaacctcttcagcaacatcatcccagccggcacactgctcaaaaacattgccaaaaacctgaaactgggagtgatcgagatcgaggtgggctccgagagcgaaggcatcctggcaaacactgctaatttaatcacgaagaaagggattgggatacggcaggcgtatgccgaggacacagaactgcaagagagtcccatcctaaccattatcaccgaggaggtcgtgtcgggtgatctgatcaatgagtttcttaagataaagggagtgacccgcgtatcaatttattga

SEQ ID NO: 10172 - DNA, 285 bp, synthetic construct
  source 1..285: mol_type = other DNA
atgagcgaagaactggtaaataatatcaaggatgctataaccgtgattaatgacccccacatggggattagtatagtcgagatgggcatcgtgcagaacatcaaagtggatggggaccaggctgagatcaccctcaagccaacaaacccgggttgcatgagcatcacgcggattgcagccgatgccaaagtcaaggccgaagccgttgacggaatcgagaaagcgaagattatcgtggagggccatgccatggcagactccattaacgagatgatcaacaggtga

SEQ ID NO: 10173 - DNA, 909 bp, synthetic construct
  source 1..909: mol_type = other DNA
atgaaggtaatatgttcaagcgaggagtccctataccgaccggaagccgttcgctggagacagcgcatggagatgatggagcctctcggggacagtgtggtgttactgccctgcagtatgaaaaagccctacagcaattctaaaagccaccagaagttcaggaagattgcacggtcatatcaggagcttatcgtgacatccccctttggcatttgcccgcgagagctggagaacactttcccaattcagtcgtacgacgtaagtacaactgggtcgtggtcccaggatgaaattgaagaaacgggcaagctgatcgccaagtattgcgaagggaaaaacatcgtcgccaacctgagcggaggatatttggagtcatgtgaaagctatgtggacgacttcatcaatgtgtgcaaagacggcaggccaacttcccctgatagcctgtacaatctgagaatggagcttaagaagcaccagaagatcaacaggaaggagaaaacactgcatgaattgcggtccatcgccaaattccaatttggggaaaacggagataaattcatccccgataacgttaaaaccaagggaatgtaccacaagcggatactgtctgatggtaaacaactcgctctgctaaacaaggaccacggcctctaccgcctcaatttgtctggcggggaaattctgaaagagcttaatacccatatcgtcgagattgactttgacctcacgaccaataccgtgtttgccccaggtatcatcaaggcagaccctaagatcgtgcccaacgatgaggtcattgtcgtcaaggacgatgcggtggttggtgtgggaaaggctataatgaccggccatgaaatggaggagtgtcgtaacggcatcagcgtgaagctgaaacacagagtgaaatga

SEQ ID NO: 10174 - DNA, 678 bp, synthetic construct
  source 1..678: mol_type = other DNA
atgatagacgacatactggtcaagaagctgctctcgcagatcgtagagaaggaccatgaggaaaacctgaagaagaatttccgcgaacggtaccccgatgagtccacccctgacggaatcgacaatcttatacgcgcactagagctgccaccagaggatgtgcagtatattgctaacgacatccgggagacggttgagaaaaccatcagcccaataatcaagtccctgatcgacggcgtggagacagacgaagagatcgcggaaaaaacaggcattaaactgaatatcgtgcgaaaaatcttatacaaactttacgacctgaagattgccaactacaagagaagcaaggacccggagactcaatggtttacctatagctggaaattcgaggaaagtgaactcatcaataggatcaagagtgatagcgagactgagctgtcagagttgaatgccaagctggagaacgaagagcacaacatgttcttcgtctgtccctacggtcacgtgaggtttaatttcgataccgccgccgatccctattacgaatttctctgccctgcatgcggggaagagttggaatttcaggataacgctgagattattgagaaactcaagaacaacattgaaatcgccgaagacaattataactcattcatcgagaaaattgataactcctga

SEQ ID NO: 10175 - DNA, 1200 bp, synthetic construct
  source 1..1200: mol_type = other DNA
atgaacatcccattttccccacccgatatcagcgagaaggagattgaggaagtggtggcagcgctcaagtctggctggatcacaacaggacccaaaacaaaggagtttgagaagaaaatcagcgcctactgtggcagtgacaagactgtttgcctttccgctgccaccaccgctctggaaatgacccttcgcttgttgggtattggtgaaggtgatgaagtgatcgtgcctgcctacacctatactgcaacatgtagtgtaatttgccacgtgggagcgacacctgtcatgatcgacagccaggaatacaaggaggaaatggactactccaaagtatccgatgccataacggagaagaccaaggtgatcatgcccgtcgacattgcggggatactgtgcaactatgataagctgtatgaaataattgagagcaagaaagagctcttcgccgccagcaatggcctgcagaaggcttacgggaggattatcgtcctggcagactgcgcccacgggttcggggctgtccagaacaataagacggcaggaaccctggctgatttcacctgcttttcattccacgcagtgaagaacctgacaacagctgaggggggcgccgtgacttggaaagaacatgagggaatcgatagcgagaaactttacaagcagctccagattctgtcactgcacgggcaaaccaaagacgccctggaaaagaccaaaaagggcagctgggagtatgacattctcctccccgcctacaaatgtaacatgactgatgtgcaagctggaatcggcctaggccagctggagcggtacgactcactgttgaaacggaggcacgagatcattaaaaagtatgacgaaggctttaaaaacagcaaaatcatatgtcccgagcatttctcggaaaacgcaacctcgtccggtcatttatatctcactagaattaaggacatcaacctagagcagcgaaatgagatcatgatcaaaatggatgagaagggcataagtaccaatgtccactacaagccgcttccgatgctcacggcctaccgcaatctcggattcgacatagaagattaccctaacgcctataacttatttaagaatgaaatcagcttgccaatctactccacgctgagtgacgaggaagttgagtatatcattgagaatttcctggacatcctgaaggagtactga

SEQ ID NO: 10176 - DNA, 1887 bp, synthetic construct
  source 1..1887: mol_type = other DNA
atgaatgtagacagctttggaaaataccgcaatttcctcttgccactcatggatagtatcagcgtgatcctgggatattacttgatatctgtgcttattacggacagctttctaatggacccgatcagtgcaataacaagaaacgaaattttaattagcatcatactcgccatcattatcctgcagaccatctttaggttaacaaagcggtactccaatatcatccggtacgagaacaaccaggactatattatgtacatcctcctgtccataatcagcctgctgattgtctctctgattgaggacataatcgggatgaagaacccatccataaagttcaacctgaccaccggcatcctaattgggacactaaccgttgtgtaccggctggtcataagatacgcccttctgtcagatatcgcgaacaaaggaattaactacacacccgaaaaccaggagaaggtcctgatcataggcggagggtattcggccaacaacatcatcaagactttgcaaacctcactgaaagggaagtacaacattattggtatcgtggatgacaataagaagcgtattggctactccgtagctggcgtcaagatcatcggtaaccgcaaggacatcctgaaaatatgcgagaacgaagagatcgatacaatcttcttcacaatcgtgaatattgacaacaagaataagaaggagatcctggagatttgtaataaaaccagcgcaaacgtcaaggttcttccggaccttcgagagatcatatcgtctgagaatctctatggtagtctgagggatattgagattgaagatttgctgggaagagagccagtagaactggataataataacattaagagtctcatcaataataaggtggtgctcgtgaccgggggcgggggcagcattggggaagagctgtgccgccagataatgattcaccaccctaaacagctgctcatgcttgacatctatgaaaattccttatacaacattgagctggaactgaaagataattatcccaacgatgacatcaaggcgattatcgcaaacattagggataaagagcgaatgtttgagatctttgaagaatattccccggaaattgtgtttcacgcggccgcccacaagcatgtgcccctaatggagaacaacccaacggaggcaattaaaaacaatgtgtttggcacttacaacctcgtgaatgcctgcgacaagtataacactaaacggttcatcctgatctcaacagacaaagcagttaaccccacaaatatcatgggtgctaccaagagactgtgcgaaatgatcatacaagccaaggacaaagagagtgagacggagttcgtcgctgttcgcttcggaaacgtgctcggaagcaacggcagcgtggtccctctcttcaaaaagcagattgccaacggcgggcctgtcactgtaacccataaggacatcactaggttcttcatgaccatccccgaggccgtggctttagtcttgcagagcatcacctacgctaaaggcggcgaaatctttgtgttgaatatgggggaacccgttaagatttacgatctggctaaatccctcatcgagctgtcaggactgactctgggaaaagatatcgacattaccttcaccggtttgcggcccggcgagaagctttatgaggaaattcttatggacgaggagaatctcgagggcactgggcacgagaaaatcttcatcacagaacctatgaatttcaccatgcgcgacgtggaggagaagctggacgcctttcgagagatcataaacaaagaaatcacggataaacagatcattaaggaaactatgaagaaatgtgtgcctacgtacaaggaaccaaaggaagttaacggcgagtga

SEQ ID NO: 10177 - DNA, 864 bp, synthetic construct
  source 1..864: mol_type = other DNA
atgacaagcagcaatgagttgaagaatatcaagcatattatcaatggagattacatcatcatccctatcgagacagggtacattaagccaaacgagagcctggacgtgatcattaaacctgccaaggagctaatgaaggataatgattatctcgtaatagctgaaactcccgtgtcggtgtcccagggccggctcatcgacgagtcaaaatatagcccaagcctgactgccaaattcctgacgacagtgtggagtaagtacctctggggctatattctgggacccgctctgggaatcaagaaacggaccattcgaaacttaagaaaattgcccaaagagacctacgcccataaggaactgatcctgcagctatacgggctgaaacacgcactgaagccggcctctgaggccggtgtggacctgagcaacgcgccaggaacgtacgtgtccttgcttccggacaaccccgaagaggtcactaaggacctgaagaagcgcatcggcaaagacgtgtgtgtcatgattattgacaccgacgcgacctatatgaagaacggcaagtacttcacgggcctccccattgctatcgaagggatcgacgccgataatggattctttgggtatgtaaaaggccagttatctgaaaacatgggcagtacaccactggggtgcagtgagaagctcgacgttgagaccgcactgaaaatagccaacatcgctgaagattaccaaaagtcactttccaccgaaatgaaaacaatacacagcgtgaaggatgtcctcggtaccgagtttgacgaagttactatcgaggatcttgattccattatccacacccctgcagtcataattaggaagatatga

SEQ ID NO: 10178 - DNA, 570 bp, synthetic construct
  source 1..570: mol_type = other DNA
atggcacggaaattcatcacatattttgataaggagggaaacgactacactgatgagctcatcatggccatcaaggacaagctggacatcaccgatattaaaagagtgatcatcgccagcgcctccggagagagcgcactgaagctctacgaagccatcggtgatgaagtcgagatcatcaatgtgacgcatcacgtgggcttcagcggctcgaatgaatcagatatttccaagggcatgattaagaagcttgagaaggtgggaatcaaaacatattttggcagtcacgccttcagtggcgctgccaggggagtcaccaacaaattcggagggtacagccccctggacattgtagctaacacttttcgaatgttttcacacgggattaaagtgggcgtggaaataagcatcatggcgaccgacgcgggcctgattcctgctggtgaagagataatagccgttggggggcgcgggcacggtgttgactccgctgtgatcctaaccccagtcaacagcaaagacttgttcgatctgaagatccatgagattatagcaatgccgcgggactga

SEQ ID NO: 10179 - DNA, 1137 bp, synthetic construct
  source 1..1137: mol_type = other DNA
gtgaagtttatagacgacgccatcaaagaatccgagcaacggatggaagagaaggtgcccgacaaactctcgtccgacattgacgacgacctgatagagatgattaagggagcgaaaactaatatatttgttgtaggcgccggcggagctggcaacaataccatcagcaggctgaacgagatggggatcgaaggcgccactacaattgccgtaaataccgatgcccaggacctgttttactcccagagcgccaagaaaattcttctcgggcgaaaaacgagtaaagggctgggggccgggggagaaccggctgtcggggaggaatgcgctgaggagagtgaggatgagatcagagaggagctggagggcgcagacatggtcttcgttacatgtggcctcggtggaggaacaggaaccgggtcagccccaatcatcagcaagctctctaagaagctgggcgcactgactgtggccgtcgctacaatgcccttttcagccgagggtattaagcggcgcgagaacgctgagcagggcttagaaaagctccaggagtctgccgacaccgtgatcgtaatcccaaacgacaagctgttggaggtcgcacccaacctgcccctaaacaaagcattcatggtgtcggacgagatacttggaagggcggtgaaaggcattaccgaattaattaccaagaaggggctggtcagtttggacttcgcagacatcagaagcatcatgggcgggtctggaatggccatgatcgggatgggcgaatctgatactggtgatcgtgcgctggaatccgtccacgaggcactgagcagcccactgttggatattgatatatccaacgctaccggtgcacttgtgaacatctcaggtagttccgaccttacactccatgaagctgagaagatcgtgcaggttgtggctgataaactcgatcctgaggccaacatcatttggggcacgcagattgatgaaagtctgcaaaacaccgtgcgcacgacagttgtggtgagcggcattaagaccggctacgaggaagataattcccctgaaatcgaatatgcggaggacaatagcgaaaataagtcagccgatgatcagctagatgacttcatcgacggaatcttctga

SEQ ID NO: 10180 - DNA, 180 bp, synthetic construct
  source 1..180: mol_type = other DNA
atgaacgtgcaggagaatttcaacaagtttatcaaggacagcaaaagggtactaaaggtcgccaaaaaacccgatggagccgagtaccgggaactggctaagatcagcgttcttggtgtggcagtcattggggtggtggggttcgtcatagtgctgctcggctccctcatcggcctgtga

SEQ ID NO: 10181 - DNA, 471 bp, synthetic construct
  source 1..471: mol_type = other DNA
atggaggataccaatagttccatatatgctctgaaaacctccgcaggtcaggagcgtaacgtggcgaggctgttggcacggaaggcccgaaccatcgacggcataggcatctccagcatcctggtgcccgagagcctaaaggggtacattttagtcgaatcgtcaacaaagatcgacctcaggaaccctgatcttaaagtgcagcacctgcgcggggtggttgggggagacgccacgatcacttttgaggaggtcaaaagattcctcaaaccggaacccatcatcagcagcattcaaaaaggaagtatcgtggaactgatttctggccccttcaagggcgaacgcgccaaggtggtacggatcgacgaatcacgggaagaggtcgttctggagctcatagaggctgccgtaccaattccagtcacagtgaaggcggatcagattagaatcattcagaaggaggccgactga

SEQ ID NO: 10182 - DNA, 480 bp, synthetic construct
  source 1..480: mol_type = other DNA
atggcaaaagatactgtcgaggttctgattgagggcggcaccgccacccctggtccacccctgggtccggctctaggacccctcggaataaacatgatgcaggtagtggaggaaattaacaagaagagcgctgacttcgccgggatgaaggtgcctgtgaaagtcatcgttgaccgcgatacgaaggactttgagatagaaatcggcactccccctacaaccgctctgatcatggaagagttaggcatcgagaaggcctcccacgaaccagggctcgatattgtcaacgacctgcccatcgaggcggcattcaagattacaaggatgaaattcgattcattgcttgccaatgactacaagagtgggatcaaggaagtgatgggcacctgcgtgagcatgggactgtctgtggatgggaaagacccacgggaggcccagaaggacgtggatgcgggaaaatatgacgacatcctgctctga

SEQ ID NO: 10183 - DNA, 639 bp, synthetic construct
  source 1..639: mol_type = other DNA
atgacacaggatgtaatcaacgcggtgaaggaggcaaaagagcagagcaagccgagaaacttcacggagtccgtagacatcatcattaatatccgtgacttagacgtcaagaaacccgaaaatcggtttaacgaggaagtgacccttcctaacggccggggcaaagatgttaagattggagtcatcgccgacggggaactcatagtgcaagccaaggatgctggtctggacactgtaatcaataaaggcgatcttgaagcgttcggaaaggacaggaagagcgccaagaagatggcaaactctgttgatttcctggtggctcaggcagatatgatgcccctggttgggaggttcttgggtcctgtcctggggcctcggggaaagatgccaaaacccgtgcccgcctcgattaagctggccccgctcctggagagattgcagaacaccgtcaaagtgggggttaagcagcagccaagtattcaaatagtggtgggcagccaggacatgtcagacgaggacatagccgagaatgtggaaaccgtgctcaccgtcctagaccgcaacctggagaaaggacgcagccagatcaagtccatgtttattaaaacaactatgggcccagtcgtgcgagtgatctga

SEQ ID NO: 10184 - DNA, 1005 bp, synthetic construct
  source 1..1005: mol_type = other DNA
atggcccatgtcgccgagtggaagaaggaagaggtccaagagatcaaggaaatcattaaccaacacgaagtaatcgggatcgtggatctgatgaacatacctgccaaacagctccaggagatgagaaagtctctcaacggcaaggccgtgatccgaatgagcaaaataaatctgattgacctggctctggaggattgtaatgcggataagaacaacattgtggacctgtcagagcacatggagggccaggttgcccttatagctactgagatgaatccgttcaagttgtacaagatactggaggacagcaagacctcagcccccgccaaacccggaaccattgcgtcggatgatatcattgtacctgagggcgacacaggttttgagccaggtcccttcctaggagagctgcagcaggtgggaatccccgcaaaaattgacaaaggcaagatttgcgtccagaaagagacagtcgtggtgaaggccggggaagaggtttccaagcaggtggccgccactctaagccggatggacatcaacccgatggaggtgggaattgatttgaaagcagtctatgaggacgaagcaatctacacatccgacatacttgcaatcgacgaagaacagacattggctgacgttcaaaacgccttccgcaatgcatttaatctgagcgtgaacgccgccatccctactgatgaaaccatctccaccatcatcacgctcgcatacacgagggctatcaacgttggcgtggcaggcgcaattatgacctccgaaaccgctgagccaatcctggggctggctcaggcgaagatgctggctattgcctctgaagtagcggacgcccccggcgccattgacgatgaactcgctgaaaaacttagcaatgtggccgtcgcagctgcgccagtcatcgaagaggtggtggaggaggaggaagaggaggaagaagaaagtagtgaggaggaggccgctgctgggttaggagccctcttcgggtga

SEQ ID NO: 10185 - DNA, 303 bp, synthetic construct
  source 1..303: mol_type = other DNA
atggaatacatatatgcggccatgatcctgcacagcgcagaaaaagagattaacgaagaaaatgtgaagtccattatcgaggccgccggaatcgaagctgaggacgcccggatcaaggcgctaatcgccgcgctggaggatgtcgacattgacgaagctatggagacaaccgctatggccgcagccgccccagcggccgcccccgccgcagctgaagcagctgaagaggaggaggaggaggaggaggaagaggaggctagcgaggaagaggccgcagcaggcctgggcgctctcttcgggtga

SEQ ID NO: 10186 - DNA, 2703 bp, synthetic construct
  source 1..2703: mol_type = other DNA
atgatcaacatggtcgaaatctttgagaagctcgggtataaactacaaacatgtaagacctgtggacaggagttttacagccaagtggatcgcgacacgtgtggtgatgctccctgtgatgagtacgggttcattgccaatcctgctaccgacaaaccatataatctgtacgaaatccaaaaggtgtttaaggaatttctggaaagcgaaggccacaccgctattgacagatatcccgtcctggcaaaacgctggagagacgatgtcttcctggtgggagcaagcatcttttgcttccagccatggattacctcaggacttgttaagccccctgccaaccccctggagatcgcccagccctctattcgactcaacgatgtcgataatgtgggcaggaccgggcgtcacatgacttgtttcaccatgggctcccacactgtgataaacaccgaggacgattttatctactgggaagacgagacgatccggctttgccacgaatttttcaagtcaattgggatcaataccgaggaaatcaccttcatcaagtcctggtggagcgggggagggaacgagggcccgtgctacgaagtatgctgtcgaggcgtcgagctggccacactggtgttcatacagtatgaaactcttgacgatggatcgaagaaggagatccctattaaagtcgtggatacaggctacgggcttgaacgaattgcctggatctctcagggaactccaacagcctatgacgcctgcttcgcgcccgttgtggacaaactgatggaactaaccggggtggagattaatgaggatattcagggaaaaaacgcccagatagctggaatgatggacattgaggatataggggacctgaaggacctccgccagcaagtggcagacagtttggggctgtcactgaacgattatttggagatagctgagccgatggaggccatctatattattgctgatcacacgcgttgcctcgcgttcatgattgccgacggcattattccatctaatgtcaaagagggttacctcgccaggcttgtgctacgcagaaccattaggttcatgaaagatttgaacatgaaggagtctcttgccgacattatggcaatacagctcgactttctgagcaagttctacccggagattcgcgatagtgagcagcacatcatgaatattatctctctggaggaggagagatactccgccactgtgaaaaagggcaaaagtatcgtgaagagatccattaaacgactcaagaaggagggcaagaacgaaatgcccctgaatctgctaatagatttgtacgacgcgcatggcatcccccctgaaacagtggttgagatcgccggagatgacttcgttgttaatgtgcccgacaatttctttacccaagtggcgggagctcatgagaaggataattccagcaagaaatccacgttcaaagtcgactttcctgagaccgagctgttattctataagtacttctaccagcaagagtttgaggcggaggtgttgggcgtgcttgagaaggatggaaaacagtgcttgatctttgacaagaccatattctaccctgaaggcggagggcagccttctgacatgggtgaaatttcaatcgatggaaatgtgctgaaggtaagccatgctgagaaagtcgacgatgtggtgttgcaccatgtagatgaagtttcccaggacatcgtcggcaaaacgatcctgggcaaaatcgactgggacaggcgcataacactggcccggcaccacacaggcactcacctcgttatcgcagcggccagaaaggtgctgggtcagcacatctggcaagcaggctcccagaatgggctgaccagggcacgcattgatctcagccattaccggcggatcactcaggaggagctgaacgaaatcgagaaactcgccaatgaatatgtcatggaaaacatcgatctggacattcagttccacacacgggacgaggcccaggaattgtacggcttcgtactgtaccagggcgggatcgtgccggggaagatgatccgggtcgtgaaaatcccaggtgttgacgttcaggcctgcgccggcacccatgttctccgcactggtgtagtgggaccaatcaaaattaacaagaccgaacgggtgcaggatggtgtggagagaatcgatttcagcgccggtctcgcagcaattgattccatgcagcatgacaacgagctgctgcgggagagctcatccatatttaaagtcgacaacgaacaactcccaaagacatgcgacaggttcttcagtgaatggaaggcccagaagaacgaaattgacaggttaaaaactcagatcgctagcctgaagatgaacagtctggccgaggactatgaagaaatcaatggcctcaaagtggtcagcgagctgatggaggcggactttaaggaacttcagaagatagccactgactttacggacaacggaaaggccgacgtagtgatcatgggcaacaacgacggcaagatcgtcggggcagcttcgcagaacgctatcgataacggaatcaaaattaacaacgtgatcaagtcggcagctagtatactcggtggcggcgggggaggccgtctgacattagcccaaggggctggtaagaacacagacaagatgaatgaggctatccagaccgcaatcgggttaatcaagggctga

SEQ ID NO: 10187 - DNA, 3057 bp, synthetic construct
  source 1..3057: mol_type = other DNA
atgaaactaaaaaacaagatcctggtgctcctactgtttctggtgcttatttgctgtctgggggccgtctccgcagctgaggacatcaacgaaaccataactgcggattccagcattgacgatgtgaacaccgtgtcggttgaggacgcagtggatgagactgtaagcgacgactcagattccgataagggcatcgtggagaatcaagatgtggaaaaaacaaccatgctcacggaccgaggagtgaatgtgaatgcagcaacatggagtaaactttcacagtatgccggagttattggcaccgactatattatcaccctgaccggggattcctacgctacggatagtcaaatcaagtttaataacggtgccacgatcatcggttcgccaaacaattacatcaccaccggctcgtacaccaaaaccccttttcttaacacaaatagcgctctcaccataactttcataaacgtcaccttcaagaacatgaacgttgactacctcctcagtctggccggaacaaatgtcctggagaactgtaacttctataatatcactgccggaacggggcataacgccgtcatctataacacagatggaacaatgaatctgaccaattgtaacgtgattaattcaagcgcaggttacggcgtggtcagcaattacaagtctggaacctatacaggggtggttatgaacgtcaaccactgcacattcatcaacaactctgctagcgtagagcctggtgctatcaacaactgtggtatcttgaatgtggataattcagagtttatcaataacaccgctacctggtgggccggcgccatccacacccactacaatgcccagactataataaacaactccctgtttgaagggaatgtcgccggatggaatggaggcgcactctatacctacagtacattaaaggtctataattccatttttaaacgtaacaaatgccacacaaatattgggggcggagccattggggcctcacgctggtggtccggcaactacgacatcacaatagtgaactgcactttcgaagaaaacgaaaactgcaacactaatggaaatggcggggcaattactgccttgaacagcggggcccttaacgtgcatgactcaaccttcatcgccaacgtggccaagaatgggcaggccataagcgccttcagtcaggcattcgaaaatatcacggccgggattcccaacctgaaggtatacaataacacgttctacaaccacaccctgactacatccgatacagtggaaatctccggaaactacacattcgagaacaatacatttatcaactgctaccagactaatctggggaccaataacgtcttcatcaaccctgtaaccctgaataacaacaatttgatcctcaaatcaaacaaagagcatttgctgatgagtaacctctctgagaacattcttaagaacgcgcccaatgtaatctatgtagacagtaactcggacaaggactgcgacgaagaccccaatattgacgggcacaattgggagacggcttacggcggaatttttgccctgtccagtgcaatatttaacatatgcgacggtggaaaaatctatctggccgatggcgaatatagctatcggacaaacggcgcgattactcatcccaaaaacctcaccatcatcgggcaaggcgccaatactatcgttgacctgatttcatgcggagaggaaacgacttacacgtgtattttcatcaatctgacggtgtctggcaaggattacggcaggaacaccaacttcattaactgtacgttcattaaaccaattagcatcagcgcggatataaacttgaatagtgtgctgaaggaacatgctgtggagaacggatatgccaatacatacctgataaattttgacaactgtgttttcaaagacgtggtggacgacagaataatcacgctattcgagtacggcgctttgaactttactgactgtgtgtttgagaacatcaccgccgattcaatcgtctatcgcaacagcactggctatttcgaggacgacagcattagctttaggaactgcactttcagtaattgcaagtttaacggcgtcgtggatagcaagaccaattttgatgacgcgattgttattgaggactgcacttatgacggggatgtcgccctgggtacgaccgaggtggacggccacttctatgtcaatgcgactaagctgaaggtggtagcggtggctaccaatatgagcatctctagctctcagcggggggttgtagtgatcacccttagagacgccgagggtaacgcagtgtccggtgttaatgtgagctacaccgtgaacggtgtgaacatgagtggcgtgtccgatgccaacggcactatcacgatttctgacctcaccgacgaggtgaccgttagtgccaacttcactgggtccgaatcttacctggcgtccaataacacggcgagctttaatttcaccattccaaaagtttccaccaagctctatgtgtcgtccgtgaccacattctacaatgcaggtaagtatttgaccgctaccttaaaggattccaacggcgaggtgctcgctaatcagaaggtgacaatcaagatcaacggcaagacatacaataagatcactaatgctaaggggcaggctaccttaaaaatcagcactcttctgccgaaaaagtatactgctactgtcaattacgccggcgatgatacacacatcaaatcttccgctaacgctaaggtcattgttaaaaaggcaaccctgaaactcacagctaaagcaaagacattcaagaaatcactcaagaccaaaaaatacacaataaccctgaaaaacaatgtcggcaaggtcatgaagaagaccaaagtcacattaaagatcaagggaaagacatacaaagcatacaccaacagcaagggaatcgccacatttaaaattacaaagctaacgaaaaaaggcaagtacaacgcctacattaagttcgcaggaagcaagtactacaacagcctgaacaagaaggtcaagatcaccctgaagtga

SEQ ID NO: 10188 - DNA, 1155 bp, synthetic construct
  source 1..1155: mol_type = other DNA
atgaactacgacctgatcatagccagatacggtgagattggcgtgaaaagtcccaagatcaggagccggtttgagaggaagctagtgaagaatatcaaggctacctttgactgcgaagtggatcgcaatcagggccgaatatacattcatccaaaggacttcgaagatggtgtaaagaagttgaacagggtattcggcgtcgtatcgtattcacccgccacatctactactgccacttatgaggggattgatgagaccctcaccaaatacgttggggatctgatatccgaggacctcattgatgagaatacaaagttcgctatcaaatgccgccgggtgggaaaacacgacttctccagccaggagatggccgctcactgtggtggggtggtgcggaacgtcgtcctggccccagttgaccttaccaacccggatctgacaatattcgtggagatccgcgacaataacgcgtttatcttccacgaaaagatcaagggccctggcgggctgccacttggaacacagggaaaggtggttgcactgctgtccagcggaatagactcgcccgtcgccgcttacttgatgatgaagagagggtgtgaggtcattgcactcaattgcgacaactcaccatttaccacccctaaagctagtgagctctttgacgccttagtggatcagctcaacatctacgcaaagggaagccccattaagaaacgagttgtgcactatggggagtatctgcaggccgccaaggataaggcgcccgaaaaaatgacttgcgtgctctgtaaatctggcatgtaccatattgcagagaagctcgccctgaagcttggagcagatgccatcgtggatggaagtagcgtcggccaggtggcgtcccaaacgctgtcaaacatcttggctacccggtacggggtggacatgcctatcctatcccccttaatcggcctggacaaggaagagattacgcaaatcgctaagaaaatcggcacgttcgaaatcagcaaaatcgatgacggtggctgcagcgcggtcccgagatatcctgaaacacaggcagacctggaacgtgtgaaactggcctgtgaagatatgaatcaggacgaggaaattgagaaagccttccgcaacattgtcaggtttgactga

SEQ ID NO: 10189 - DNA, 1095 bp, synthetic construct
  source 1..1095: mol_type = other DNA
atgaaaaccacagtgtcggtgattaaagccgacattggaagtgtgtctggacattgcgttgcccacccagaactgatcgacatctgcgatgaagtgctgaatgaggctctggaagcagggatcataaaggattactatatctcccggtgtggagacgacattgatctgatcatgacccatgataagggggaggagaatgaagaagtgcataagactgcctacactgctttcatgaaagctacagagagagctcgtgagctgaagctgtacggcgccgggcaggatttgctgacggacaccttcagcggaaacatcaaggggatgggtcccggcgtagccgaaatcgagttcgaggagcgccctagcgatccggtgcttgtcttctgttgcgacaaaaccgaacccggcgcatttaatctgccagtattccgaatattcgcagatcccttcaacacggcagggctcgtcatcgacccgaaactgcacgacggttttaaatttgaggtgttcgacgttatcgagcacaaaaaggtgatccttaactgtcccgaagaaatgtatgatctgctcgccttgataggctctaccggccggtacgtaattaagagggtctggaagaagaatggcgagattgcggcggccgtcagtacagagaggctgaaccttatggccggagagtacgtgggcaaggacgaccccgtgtgcattgtgcgggcccagtccgggtttcctgctaatggggaatgcgttgatccctttgcattcccacacatcgtgagcggatggatgagaggaagccacaacggcccaatgatgcctgtcagcgaggccgaagccaacccaatccgcttcgacggcccgcctcgagtggtgggcttgggtttccaggtttcaaacggggagctcataggtcccgtcgacctatttgacgaccccgcctttgatcctacccgggagcaagctgctaagattgcaacttatctcaggagacacggcccatttgaaccgcataggttacccgcggaggagatggaatacacatcactccctggtgtcatgaaaaagctagagtcccgcttcgaggacatggattga

SEQ ID NO: 10190 - DNA, 276 bp, synthetic construct
  source 1..276: mol_type = other DNA
atgccacagaatgaaatgcggaaaagcggcgtgaaaatgcacaagacttacctgctcgagaacatcgacgagatccacacaaccgaaatggggattggaagggtgcagaaaaacctgcaaatcacatccgagcccgtctcgtattgcatttcaaaactaaagcaggaggatagcaaggtaacgaagaagggcaaaaactactacgtgaaggcagacaattgtatcatcaccattaattccagcagtttcaccataataactgcccataagaactga

SEQ ID NO: 10191 - DNA, 1110 bp, synthetic construct
  source 1..1110: mol_type = other DNA
atgtcattcctgaagttcatcctgaaaaacccattccggagaaagaacagtgcaattctggctattgtgggcattgccataggtattgtcgtgattgtgagcctcggtggcatcaccgatggcctgatcaacacttttgaagataccatacacgcaggcggtgccgacttctcaatcagcggaaaggaaacgggaaattcggcctacggaactaatacaattgacagcagttggacagaaaaaatcgccaaggtccccggagttgatgaagcctatccaatttacgtggttctaacgtcggttggcgacgattacatgaatactctcattggcatcgatcctgagggcagtgagcttgcagacatcagcatgaaagagggcaggatatttgaagacaacacgagcgaggtgatcctgggggagatctatgcagaggacaataattactctgtgggagacagtatcatcatcaacggcgaggacttcaaagtgagcgggatctatgaaaccggcgaccagaacatggctggaggggtgtttacatccatcagcaagatcggagagcttatggacgataaagactccatctcaaacatttacgtgaaggtcaataagggggaagatgcccaggcggtggccgatcgaatcgacaccaagtatggggacaatatcaccaccgtcacatccgtgatggagatgacccaaatggccgatatgctaaacatgctgcaggcttccacctgggcgatcagccttctggcgattgtcgtgggggggctcggcatcatcaacaccatgttaatgagcgtcttcgagcggactcgcgagattggcgttctgaaggctgtgggttggtccaacaaaaagatcctgacaatgatcgtaggcgagtcactggtaattacaatagtctccgctattatcgggagcctcattggctttttggcctgcacgctgttgggtccgcagatgggaataaacccactcttcactcccaagatcttcatacaggcttttagcatagcaattatcgtcggggtggtgggagggttgtaccctgcaattaaagccgtaaagctcccccccaccgaggccctgcgctacgaatga

SEQ ID NO: 10192 - DNA, 699 bp, synthetic construct
  source 1..699: mol_type = other DNA
atgaatgcggtggaaatcaaagagctgtacaaaagttacgagggcggaaagataaaagccctgaatgggattaacctcactattaaacagggagaatttgtatctattatcggccccagcgggtctggcaagagcacactcctcaacatgctgggcgccctggacatccctgattcaggaacaatcaatgtcaacgggcatgacttaaaaacctccaaaaagctaaacgagtttagaagcaagaagatcggtttcattttccagctacacaatctcataccaaacatctcggtcgttgagaatgttgagatccccatgtatactcagaagctgagctcgaaggagatgcgattccgcgcattgaagttactggacgatgtgggtctttcagaaaagtcaaagatcctgcccaacaaactgtctggcggggagcggcagcgggtggctattgctcgcgcactggccaacaatccatccatcatactcgccgacgagccgaccggaagccttgactccaagaccagtagtaagattcttaaacaactgattgatttgcacgaggacaaaaacgtgacgttgatcattgtcacccacgacatggacgtggctaagctggcggatagggtgatcgaagtcctcgacggcgaaataatcagcgccggggacgattccctgatcaactccaagatcgatgtgtga

SEQ ID NO: 10193 - DNA, 243 bp, synthetic construct
  source 1..243: mol_type = other DNA
atgaccgaactggaatcccccgagaagatagccaaggatatcctcaaactcgagaggaatctgaaccaggtcgccgatattacatttaagggcaaagagaaggaggtgtacgacagagcgatagactactggaacgacagcaaatattatcttgagaaaaaggacatgcgcacggcattcgggtgcattgaatacagccacggcctgctagatgctttgcggatgatccatggaatcatctga

SEQ ID NO: 10194 - DNA, 570 bp, synthetic construct
  source 1..570: mol_type = other DNA
atgcttcaaagtctgagacctctgctcacacggatcttgaaccccatcgctaagcggctcaacatcaatccgaacatcgtgacaataatttccccattcgttgcgctacttgcggcctatggatttgcaaataaactcctaatcctcggcaccatagccattctgctgtcggggtttttagacgtcgtggatggtgctgtggcccgctatcacgaaaagagcagcaaattcggtgctttcctggattcaaccatggaccgatttgccgatgccataatttacatcggaattatctttggcgggtattgcgattggctggtgggaatactggcaatccatagcgccatctgtgtgagctatgtacgcgccagggccgaatcccaggaggtggactgcaacatcgggattgcagagcgggcggtccgtatgatcatcctgatgatcggcgctatcattggctacttcgcaggcgacatctacttcacgtacattatctacattctcgtgattctgtcttacttcactgtcgggcagagaatactgcacgtttggaggcagttgaatgactga

SEQ ID NO: 10195 - DNA, 582 bp, synthetic construct
  source 1..582: mol_type = other DNA
atgaaagtattaaagaccagtatcgactgcgtggacgagcggattatcaatgaagcggtgaacgtattggctaacggcggggtggtactctaccccaccgatactgtgtatggcctgggagccaacatcttcgataataaggcagttaaaaaagtgtatggtattaagcagaggagcctgctgaagcctttctcaatccttgtgaaggacatcgagtccatcaacctggttgcaaaggtctcctcagcccagaagaacctctttaataagtacctccctggcccctacacgttcatcctgaacaaacgcaatattgtgccgagagtcgtcacaagtgggctggccaacgtcggggtgagggtgcccgactgcgatatcgcctgtaaccttgccaagatttttccaataactacaaccagcgctaatgttagcgatgacgagatgctatctaacccccgagaaattttggagcaactggactgcgatgtggacctggtcatcgacgtgggagacctcgacagcaatgtcccatcctcgattatcgatctgagcggcttcaaaccaaagataatacggaaatga

SEQ ID NO: 10196 - DNA, 705 bp, synthetic construct
  source 1..705: mol_type = other DNA
atgaaggtcttagccaacttcgaagacaatcacaagatcccctcaaactctgcccttgacgtgatgttggcggggggattcgagaaaggaacaatcactcagatatttggcccgcccagctcagggaaaagcaatataacgctgagcgtagccgtcaacgtggctaaattcaacaagaaagtgatctacattgatactgagggcggaatctccatcgataggattaagcaaattgcaggtgtggacttttccaatgttgctaataacatcatcgtgttcgagccaaccagctttctcgagcaaaacgacgcagtaaagtccattgacgcttggctgcgaagtaatcataatgatgtggacctgattgtgctggacagcgcggtggcattgtaccgggtcgatgacatgaagtcctccaagctgaacaaggaactcgggaaacagatgggtctgctcagcaagatcgcccggcagtacgatgtcgccattatcctgacaaaccagatctattcgagctatgacgacgagggcaacaacgatattaaagccgttggcgggaccatcctacagtactggagtaaggtgataattcagcttgaacgcggcgaggagatcaatcagcgcatcgccacactcaaaaggcacagaagtatacctgaaggcaagcaggtcaccttcagcatcacctcaaagggaatcatttga

SEQ ID NO: 10197 - DNA, 1170 bp, synthetic construct
  source 1..1170: mol_type = other DNA
atgaggacggactttgacatcaagaacccaaagaaaaagttcaaaaagaccgaaagggtgcctccaaagggctacgacaacgccaacgatttcttcgaggatatgtacatggacgaaaatatgatttggatgggccaaaacaccaaccacctgcacgacgatacaatagcgaacgcgatgattgacgccatccgtatgaagacctactgccgatatccggccccagaggggttcagcgagctcaaaaagcttgttttgaaggacctcggttttgaagatgaggaggtcctcctcacctctggggccacggagtcactgtatttgtgtatgcaggctctgttgactcccgaggataacgtgattctatccgaccctggatacttcatcatcggcgactttgcaaatcgcttcgcaaatgaagtacggtatgtgcccatctatgatgagaagtacgggtacaagttaactcccgacctactgagagaaaacatggacgaaaacactcggatggccattctgatagatccattgaatccccttggttccagctacacggaagacgaacttaaagagtttgcagagatcgccaaagagaatgacatctacctgttacatgatgtgacctacaaagactttgcccgagagcactttctggtagagaattatgctcctggtcaaaccctgacaatttacagtttttcgaagatattcggcatggcgggcctcagaattgggggggtcgtttcctctaaaccgataatcgatgctatcaagaacgctgttgtcaatgacctgggcgtcaacattatcagccagtatggcgccatcgccggactcaagagcaaggatgtgtggtttgaggatatgaggcagacctgctttgaaaatcagcgcctgatcaaggagatggtggacacagtggacgggatcttcctgcccgtgtatccaagcgacgcaaacatgatggtgatcgatatctatgatacaggcatcaatcctaaagacctgtcaaactaccttattcagaaaggactcttcacccgcgaaggagaatacacttccgatgagttcggagagcggtacctgcgggtcagtttcagtatccccacagaagagattaaaatattctgcgaggagttccctaaagccattgaagctctgagaaagtga

SEQ ID NO: 10198 - DNA, 735 bp, synthetic construct
  source 1..735: mol_type = other DNA
atgatcaacatggacttcaaggggttcaggtaccacaagccgctgcccaatttctataagacagacaatcctctaacccctaaaagggagatttccgacgacctcctgctaaagctggataatctggccaaaaaatataatttcacgggcattagctactcaaagctctccgatgacttcaaaaaggatttcaacatagatttcgacaatgtcattatatttcgcttcctcatgaagaatgagttgatcaagatggaatcttcccccgagaagtcgaagttaatggatatggagtttcaggtatacggcatccacatctacgagtttgcagactttctgagagaaaacggatttcaagccgatctcctgcatccatttgacgacgaccttagcctcaagagcatagctatgcagtctggggattgcatcattacccgtagtaacatctgccttttcaaagaggggctgcacaacggattcttcatgatccacacaagtatcgacaacttgccatttaagaacgagaacgatatgctgtgggtgaaagatttctgttcaacttgtggcgtgtgcattgagcgctgtcccaacgacgccttcgactacgaagaaaacctgctgcgaaaattttgcaccgcgcatcgggagggatgtagcgaatgcattcttatctgcccattctttaagcggggttatgataaggtgaaaagacggtacgacggcatgaaaaagtga

SEQ ID NO: 10199 - DNA, 378 bp, synthetic construct
  source 1..378: mol_type = other DNA
atgaacgacaagattgcgctcgtttcctgtagcggcctgagcccactcggattagtggtcagggccgcaagtgttgaacttgctcttgagaacgaaaatattgtcgcagcgtgcattacagagtactcagcacagccgaacaattgcagccccatactggacgatgccaagatcgtgacgataaccgggtgcggcgatgactgtgcttcggtgatcctaaaggataagaacatcgccgctgtgaagaatatctccctcgatcacgtcgtaaaagcctatgaactgaaccctctggacgccgtgcggctggacgaggacggtgaaaaggccgtcgtggtgctgaaaaaatacatcctgaaagagttggagaacatctga

SEQ ID NO: 10200 - DNA, 1779 bp, synthetic construct
  source 1..1779: mol_type = other DNA
atgactcgtattagcattctggacaaagatagatgccaacctaaaaaatgtgattacctgtgtatcaattactgcccaggggtgaggatggacgaggacaccataataattgacgaggacacaaaaaagccgttgataagcgaggaactctgcgaaggatgcgggatctgtacaaaccgctgcccttttgatgccattaccatcatcaacctccccgaagccgtcggcgagcccattcacaggttcgggcagaatcagttcgagctttttggcctgcccacgttggaggagggaaccgtacttgggcttctcggccagaacgggatcggtaagtccacaatcatgaatattctgtccgggaacctgattccaaatttcggagactttgagaacaagcctgagaactgggatgaagtcatcgagttttacaagggcagctcgctgcagaagtacttccgagatctgtccgagggaaatatcaagaccatcctaaagccacaaatggtggatcagctgcccaaggtggtaaagggcaaggtgaaggacctcctaaccaacgtgaatgagagagataaactggattatgtgacccaagagctgcagctggagaacgttctcgagagaaagatggaaaacctcagtgggggggaactgcagagggtcgccatagccgccactgttttgcgggagggggatttttattatttcgacgagcctacttcatggctggacgtctctcagcgactgaacgctgtgaaagtcatccggtccctggctgatgaaggcaagagtgtcctcgtgattgaacacgacctcgccaccctggacgcactctctgataacataaacatcctctatggccaacctggcggctacggagtggtaagcggaagaaaaggcgtgcggttgggaattaatgcatatattaatggattcttaaatgaggagaatgtccgaattagaaagaatcctattgaatttaccataaggcccccaactccagaagacgagggagatgtcctggccagctactctgacttaaaaaaggagtatgacggcttccggttgagtgccgatgctggtgaaatcttttacgacgagatcatcaccgccttcggttcaaacggcattgggaaaaccacgttcgcgaagatgctggcaggcgtggaagaaccaaccaatggtgagatcgatgaagaagtgaccatcgcttacaaaccgcagtacatcgtttctaactttgagggcactgttagcgacttcctatacatgaatgctcccagtttcggtagcaagatcttcgatagcgagatcatgaaaccgctcacgctggatgaaatgttggacaaacccgtgaacggcctgagtggaggggagcttcagcgcttggcgatcgcggcaacactctcgaaggatgcggagatttacctgtttgacgagcccacagccttcctggatgtggaacagcggctaatagctgcaagggtgatccgcaaaatggtggaaagccgcaatgccgcctcacttatcgtggaccacgacatcgtctttatcgactacatctcagacagggcaatggttttcaacggaacgccaggtttaaacggtcatgcctccaagcccactgaccttcgtaatgctatgaacgagtttctgggcaacctgaacattacattcagacgcgataaagaaacaaagcgccctcgggtaaacaagcttgactcctataaggaccgggagcagaaagagaagggcgaatattattacctgtccgactga

SEQ ID NO: 10201 - DNA, 339 bp, synthetic construct
  source 1..339: mol_type = other DNA
atgaagcaggtgatgatcgtcaggacagacctaaagatgggaaagggaaaaatggctgcgcaatgctgtcacggctcaatcgggagctacaagaaggcatccccagacaaaatcaaaaaatgggaaaatgaggcctatgccaaggtggtcctgaaagtcaagaccctggaggaactgactgaacttaagaagatggccgatattaacaaagtgcccaactacctggtagtggacgctgggcggacccagattcctaccagcagtgttacagtgctcgcaatcggcccggatgaggacgagatcattgataagataacgggcaacctcaaactgttgtga

SEQ ID NO: 10202 - DNA, 663 bp, synthetic construct
  source 1..663: mol_type = other DNA
atgagcataaaacaggtggtgaagatcgggggaagtttgtttccagactacgccatcgatctggcccggcatctcaagaatacggactccctcatcattctaggcggcggtgaatttgcgaaccttattagaaagtatgactccgagatcaatttctcacagaaaaccagtcactggacagctatcgactgcatggacataattgctaagctcgtcaatgacaaggtcgaatcaaccaaactggcatatagcatcgacgaggttcaaaagatcagcgatgaggggttcactccgatttttgtggttagcggcttcttgcgctgtgaagatcccttcgagtgctcgtggaacgtcaccagcgattccattgccgcctacatctcacacctgctgaacgcaaacctgctcatcgtcacaaatgtaaacggtatctacacccacgaaccaaaagagagcggaagcacattcatcagtaagattgacgccaaaacgctgctaaactttcaggagtccagcattgatgtgatgctgccctctctcctgctgaagttcgggactgattgctacgtggtgaatggcaagtaccctgagagggtgctttccttaatcgacgataacataaacgattataacttcgactacacccagataatcggagactga

SEQ ID NO: 10203 - DNA, 162 bp, synthetic construct
  source 1..162: mol_type = other DNA
atgaagacggtggaatgcattagctgcaagcaggagataccactgaccggcacattcgtcgagttcaagtgcccgatctgcggagcaaagatcgcgaggtgcgagaaatgtcggacctttggtcacgcctacaaatgtgaatgtggcttcgaggggccctga

SEQ ID NO: 10204 - DNA, 270 bp, synthetic construct
  source 1..270: mol_type = other DNA
atgggagaagtgctcactacaatgaagatcatgcctgacagtcccgatatcgatctggatgcgattaaatctaccatcgaaaactcaatgccagagagcgccaagctccacgacatggccgaggaacccatcgcattcgggctggtggctatcatactgcagtttatcacggacgacggtgagggcggcagcgagccggtggaagacatggtccagtccatagagggcgtcgcctccattgagattaccggggtaggacggctaatgtga

SEQ ID NO: 10205 - DNA, 729 bp, synthetic construct
  source 1..729: mol_type = other DNA
atgggcaacattatggatagaaccaagaagatcatcatcgcactgataattattgtgttgattatcctggtaggaatcatcgcctccgtatggttcatcggccatgacgttgatctggatgagggcagcaaaaccatactcgtctgcgcaatcgacgagagcgaggatcggccaggtatgggggcctgtgatatggcattcctagttcacctggagaatggcgctattaaaaactacacgcctgtgtatcccggcggcatgacacacccaactgctcaggagcccgcggaggcgcaaagccagggcgccggaagcgacctcttacttcacgacgccttctgggatgtggacaactctaagggcatgaatctcgccaaggaaatcgtggaataccgaacagggtcctcagtcgacagcgtggtcgctattaacactaaagccctggacgctatcctgagcgccgccgctccccttgaggtcaatggtaagataatcaatggaagtggaattgacttcattcgcgaagacggaagtaacggtgtgtccaggggggacgcagtcatggaaatagtgaaggctaccgccaactcggcaaaagacccggtgaagaagagcgccatgatcaatgcggccgtggatcagtactccaaggggaacatcattatggaccagcaggggagttttgttgatctgttggcatcaaaagggatcgaaaccttttttaactga

SEQ ID NO: 10206 - DNA, 1068 bp, synthetic construct
  source 1..1068: mol_type = other DNA
atgtacaagaagatcctggtgcctaccgacgggtcggaggcgagcttcaaagaggtaatcagcgctagcaacctgctggccgaggacggggagattattgtcctctccgttgccaaacagctcaaacaacatccactccagataaagaaggatatcaagaaaaccaacgagaccttcattgagtacgccaaggaaaacgtggaggaaatgaagaagaaatttgacagcaacataaaggtgtccactaaagtggtggtgggcttcccggcggaagccatctgcgatgttgctgaaaaagagggcgttgaattaattgtaatctcttctgccggtgaacggggcttcagtaagagaattattggaagtgttgccggaaaggtctgctcgatatccaatatcaacgtcttgcttatcagcaatgaagaaaaagaactgatcaaacactcaaccactaagaagtccgacaataagaacaagatcaatagggactacacacgattcagaaacgatttgtacgtgctactgcgctttatctctgtggagaagcgcctgaacagcgattaccccgaggagatcatcgattccattgagcggaggatcaaatacctggacctgatctataagactcttaacacacacagcgaatcagaatatgtcaatgtgaaagagtactttaaaaagtacagtgctaatttttattcactctacaagaataagcagccaggcattgagtttgtcaataagagtgaggataatttcaatattcctgataacatcataacgcccctaacggcaataatcaatgaactcattgtcaacagcttgaagttcgcctatgaggactatgatgtggagaaaaagattatcacagagaaggtgacaaaaaacaaagacatctgtgaagtgttctataaggacaacgggaaaggactgcccgacgacttcgacaaagataacccaaccggcctcggttggaccatcataaacgcactggtgaagcagctggacggggaggtaaaagcatacaactccgacggaatgtgcttcgagatgaagtttaagctttga

SEQ ID NO: 10207 - DNA, 915 bp, synthetic construct
  source 1..915: mol_type = other DNA
gtgattaacattatagaggaatttttcatagcaatcggaggcattagccttttcctcatcgacttttttaagaatttctcactcaaggaaatcgaaattgagaaaacgaaagacattaaccagaatatagctcaaaagctcaacttacagaaggacatcaaattgcagaacaacgaaaaagatagcatcgataagatccggaggctgatcatcccctatctgaccaacaagaagatcatcggcctgctcggactgctttttctactaatcaatctgtttataagtctcgagatatccggaatttacatcgtattagtgctgatgacatacatttttgtcttttattaccctcagatccagcagcagagaaattactccgatataaaccaggagctgccatatgcattgcgccacattgggattgagctgaaatccggcaagggccttcacgacacgttgcgaaccatcaaaaatgccgactatggaagcattagccaggagttcaatagaattttggaagagattaaattcggtaagtcgactgaggagtccctcctggaaatgtctaccagggtgaagtcagaggggcttacccgggctatccatcagatcatcagtacactgcgcgtggggggtaacctgtccaacagtctggatatcatagccaaggacatatcgtttgacatgcaaattaagctcaaagaatactctcaaaaactgaactcattcatcctgatctacaccttcatcgccatcctgacaccagtgatcagtttgatcatgctgatggcgtctagcactgttatgggcgatattctgagcagcagcctcctattcattctctacggcgtcttcttcccctccatcgtcgttttcatgggggtgttcatcaagaagctggagccgaagatttga

SEQ ID NO: 10208 - DNA, 1419 bp, synthetic construct
  source 1..1419: mol_type = other DNA
atgaacaataatggtataatcccccaatacgacatcattaaacaagaatatactagcgaggagaagatccttctgggggaaatcagggaaaacctggttgacctggccattagcactggcgaaaacttccaggtaaacgaaactaagttgataaataacattaagaatttcctgttcgagcgcctgaacgacaaccaacagaacaacaatggcacaaacgaatacctcgataacttgagccggaagttgctcagagacatcgtgggctatggggagatagatcccctcatccaggatgatgagctggaggagatcatgattatcggaatcaataaaccagtctttgtgtatcacaggaagtacggcatgatgaagaccaatatcacatttaacgacgagcaggagctgatcgacctgattgatgcgatcgcccggcagatcaaccgacgaattgatcaggagtctcccattcttgatgggcgactgatcgacggtagccggatcaacgccacaattccgccaatcagtgccgacggcccatcactgacaatccgcaaattcaagaaagaccctctgacaataatcgacctgattaagtcaaagacaatctctgtggaacttgcggcgttcttttggctgtgctttgacggtctgggaatcaaatccgctaacgccattatttctggcgggaccagttccgggaagacgaccacactcaacgctctttcagccttcatcaatcccaaggagagaatcatcacgattgaggacaccttggaactgcagattcctcatgagcacgtgatcagaatggaaaccaggccctccaatgtggagaacaaaggcgaactgactatgaacgatttagttaaaaattccctccggcagcgcccagatcgcattatagtgggagaggtcagagctgaagaagcaataacgctattcaccgcactcaatactgggcactcaggattcggtaccctccacagcaacgacgcacgcgagaccataacccggttaacgaacgagcccatgtccgtccctaaaataatgatccaagccattgactttatcatcatgcagaatcggatctacacaagctcgggcgtctcctttaggagaatcagtgaagtggctgaggtcgtcggaatcgaggagggagtggtgcagctcaacaagattttccagtggaacccggaaaccgataccatcgataatgttagtataagcagcaagaccatctcccagattgccaacctcagtggcaagtcgctgaatgagctttaccatgaaattgagaaaagggagctggtattgaagcacatggtgaactacaatattcgttctgtggacgacgtaactgcaatcatagagctatactataaaaatcctgaaaaggtgctaaataacattatttga

SEQ ID NO: 10209 - DNA, 897 bp, synthetic construct
  source 1..897: mol_type = other DNA
atgattgatctgaatgagcagatcaaagccttggactactgcgagaactgcaacgacattcagatcaaaaagttctccccactgaaggacctcattgactttgatgaactgaatggcgaatacatgaaatgcgaatgtggaaagcgaccccttgacattgtaatgagtcacatcctgaagataatgattgaagagaagatagtccctgagaatgcatcactcagacgcaactctcccgtcccactgagcaacttttactacagcaacctgaacccgcagttcatcggcgagggtactttaattttactgcatcccgacttcacctcgaacgtcgctctaaagctgtttaacgaagttcaggaagtgcggtgtgtgctgaaggggagcccccagagtcacatcggtcagttcgataggaactcccaaatcaatcacttcgagattctcataggagacgacgagcagattaacgtgatgcggacgctgctgggggacaagattgtgctcgtgaagaaccaaagcaaacaccatatcgaggtggcaatgaccacagaggagaagctgttgaaacttcataactatctcgacaataataagatcaataagtgcgtggctatcgatgggatgtgcggcctcggggccttgggaatctatcttcttaaatatggctttaagaaagttatattcaacgatatcaaccctgaaatgatcgagaacctcaataagaatctgatcttcaataacattagcgagggattcgagatttttaatgaatccttcgagaacttggacgtgggccacgtggatctgtgtgtcatcgatgcctttccaggcgccgacacatcagagatcgtaaaaaaggccgaaaaaatcgcggatgatgtcctaatcatatga

SEQ ID NO: 10210 - DNA, 1254 bp, synthetic construct
  source 1..1254: mol_type = other DNA
atgatagaaattgtgattgcttgcttcatcggcatactcattggaaccaccaccggccttatacccggaatccatgtcaacactgctggtgcaatcctgtttgcaagctccggcttgctgctgacacagtttagtcctgagttcctctgcgtactgatggtttccatgagcgtggcccacgcgctgatcgagtttattccatccatgctcctgggggtcccacaggagggcaccgccacatcaattctgcccggtcaccgcatggtgctagaaggccggagtaaggaggtaattcgaattgtggctgtgggcgggttcggggccatcatcgtgactatcctgatgcttccaatcttctcgatcatactgccgatcctccatgatatcttgaagccttacacctggatcatcctgctggccgcgagcctctacctaacataccggttaacagtgaacttcagggacttcttgtggagcctcctgctgtttatcctgtccgggattttggggtggaccctcttccagagccccataacttccggagtgacgctgatgtgtaccttcagcgggctgttcggaataagtactattctgttcagtttgaacgatagctcaaccatgcctcatcagaacccattttatgagctgaatattgactacgacaaacttaaaagcatctttacaggaggcatcaccggagccattctcgggtttctgccagggtttggtcctgctcaaggaaccgtcatagctcaggccgtcagtggcacgaatgacaataggaacgatgacacagttaatttcctgcttgcaacatccggcctgaacattagcgactgtctgttttccctcattgcaatatatattatcggcaatccccgcagtggcatcgccgtgtatatgtcttatttaatttcagaaatgaacatcaaccacctcatcatattcatcttcgccagcttgcttgcggtttctgtgtcactcatccttgccctaaagttaggtgattcgttttctagactcatgggaatcgtgaactataagaaactttccatctccgtcattctgctgcaaatcattatcttatacatcttcattttctactacaagtcgcccacgtgctatatgaccctagccctgattacttcaacggctttgggcatgctgccccactacatcggtgtcggcaagtctcacctgatgggggtgctcatcatcccggcaattgtaatctacatgaaaatgtttatctga

SEQ ID NO: 10211 - DNA, 465 bp, synthetic construct
  source 1..465: mol_type = other DNA
atgatcgagtatgacgacataatcaaggatagcccctttctcgccaaccatctgattaccttgaataaaactcacgatttctacattaacaagcacatcaaaagcggcaccgacattctgccaagtcagtactatatgctgatgttcctgtactatgagatggggacaacacagtccgatatcgcgaaagcatgtttgatggaccgcagtggcgtgtcgagagccttcaaagatttcgaaaagaagggactgatcaagcggaaggtcgataacgacaataagcgagcctacaagataaagttaacccagaaaggtattgagacggctgagttcctaatcaaaaaagagaaggaatgggacaacatgatctgcgagcagctgtacatctcaagggaagacctccttaaactcctttccaagatttctctcaagagcctggaatttaatcggaaccagtttcaatga

SEQ ID NO: 10212 - DNA, 498 bp, synthetic construct
  source 1..498: mol_type = other DNA
atgaataaaaaggagattatcatcattctgatcttcatcggcttttgctttgtctttgccggacccgtattcgcaaaagaaaaggtgaaggtcaatgtgtctatcgacgaccatcctctgaacaacaagggtttcatcgtgatcaagctcgtggacagtaggggcaaggatattgaaagcaacggaacaatacactacaaaattacggacgagttcgggaactataagtgggcttataaatcatacgacggtgagatccggctaaagtatactgcggggatctacaaggtggacgtcaagttcgatggagacttccactataacagcgccattaaaaataaatccgttattgtgaagaccgagaaatttaacccatacacctactacgacaatcacaattggggcctgaaccaggagatagatgactatatagaatacaactactgggatgaagatatctatgatgaccccacaaactacgatggggagggcccgtga

SEQ ID NO: 10213 - DNA, 2019 bp, synthetic construct
  source 1..2019: mol_type = other DNA
atgaagaaattgatcgtaggactggccggaaaccccaatgtgggcaaaaccacagtatttaaccagctcacgggcatgcgacagcacgttgggaactggccgggcaaaactgtcgagagggccgaggggcacttcacccacggaaattatgagtacgatgtggttgacctcccgggcaattatgcccttagtgcccattccatggaagagattgtgtcccgcgactttatcgtcgacgacgactctgacgttatcgtgaacgtcgtggacgcagccaacctcgaacggaacctgtacctgacagtgcagatgatggagctgggtgccaacctcgtattggccctgaacatgaatgacttcgcaaagaagaaagaccatattattgatatcgacctgatgtcggagctacttgggttctctgtggtggagatcaatgccaagaacaaggacggatttgacgttctactgagtgctgtggaaaaggcggccagcaaacccaaaaatacaagtgctaaactcagctatggggacgagctcaaggaacacctcggggatctccaggagttaatcgaacgagacaacaagctgctcgatgtgccatctatttggacggccatcaaactcctggagaaggattccattgtcatccagaaagtccaacagagctcaataagctcgcagatcatggccgagaccgacaaggtggcaggtcacctgcatactatttacaaggagggtgcggaagaggtggtcgctaatgctagatacgcatttattgatggcttaatggccgaggctgtgaaacgccctgccgtggagaaggagacaattactgataagatcgacaaaatcgtgaccaacaggatactggcgcccttcatattcatcattctgatgtgggccatgttccagctaacatttacagtgggagcccctttccaggacatgatcgatcaggcctttggcatgctgagcgagtgggtcgctacattccttggcgacgggctgttaagctcattcgtctgcgatggcattatagggggggtgggcggcgtgcttacgttcctgcccataatcatcctaatgttcctctttttgtcaatcttggaggattgtgggtatctcgccagggcagcctttacgctggataaaattatgcataagatagtggggctgcacggcaaggcgtttattcctatgatcctgggatttggttgcggtgtgcctgctattatggcaacaagaactatggaaaatgagggggatcggatgcttgctatgatgctggttccatttatgtcttgtaccgccagattacccatttatgctatctttgtggccgcattcttcgctgacaatggaggcaatgtcctgcttgccatttacttgctcggcatcgttgtcgcgctcatcgtggccgcaatcctgaagcgcaccatgtttaaaggcctgtccaccccgtttgttatggagctccccacgtacaaggtgccctccctaaagggcgtcctgctgcacacctgggaaaaggtcaagggattcctgcggaaggcaggcactatcatccttgcttgttccatcgtactgtggattcttcagaacatattcccatacggcggatcagatcctcagatgagtcttctgggtatgatcggcactgcgatcgcccccatatttgccccattgggattcgggacatggcaagccgcggtagcaattatcgctggtctggctgccaaggaagtcgtggtggccaccttcggcactctggcggggatggaggaagacgatgaagaaggaattacaaacctgatacacgacaccttcaccccactctctgcattcagcttcatggcctttaccctgttgtacactccatgctttgctgccattggtgcaattaagcaagaaaccaactcctacaaatgggctctgacgatgtgcgctatcaccttggtgaccgcattcatcgttagcttcctcatctataacatcgggctgttggcaggattcggatga

SEQ ID NO: 10214 - DNA, 228 bp, synthetic construct
  source 1..228: mol_type = other DNA
atgaaaacactaaaagatgcaaaacccggggaaaccgtaaccctcgtgaagtatcatgatactggagaccttgacctccggaggcacctgctggggatgggcttcatcaagggcgccaagataacactgaaaaaggtcgccacgttgggagacccaatcgagatgaacgtgaagggctacgacgtctgcctgcgcaaggaggaagctgagaatattgaggtgatgtga

SEQ ID NO: 10215 - DNA, 207 bp, synthetic construct
  source 1..207: mol_type = other DNA
atgaagtgtaggatgtgtggcttcgagttcgacgaaaatgaactcgagaaccgcggctgttcatcctgcgggaaacataactgcaatcaggtgcactgcccaaactgcggattcggaaatagccccgaactgggccaggagttcgagtttataaccaagctgaagaaccggtttaataaaaacgaaagcgagaacgggagtatctga

SEQ ID NO: 10216 - DNA, 843 bp, synthetic construct
  source 1..843: mol_type = other DNA
atggaaaaaatccatctggagaccaaaaacctttctttcacttaccccgacggcactaaggcgctgaagaacgtgaatatccagattaagaagggcgagaagatcgccatcatggggcccaacggggccggcaaatccacactcttctcccactttaacgggctgacggagcctacaagcggacacgtggagatcgatggggagaagattatcttcaatcgggaggagctactgaaagtcaggcagaaagtcggaatcgtctttcaagaccctaatgaccagctgttcgcaccaacggtgaaagaggatgtggctttcggtcctatgaatctgggcctggattacgatgaagttaagaacagaatcgccgagagtttgaagatggtgggcatgtcgggttttgaagacaagaccccccaccatctcagtggaggccaacagaaacgaatagctattgccggcatagtggcaatgaagcccgaaattatgattctggatgagccaacagctgggctcgatccagagggtgttgacaaggtgttgaacatcttgaataaccttaataacgagggaatgagcattgtaattagctcccatgacattgaaatggtaaaccactttgcagacaaaatattcattttatacaacggggaaataatagccaaaggcaataagcaccagatcttctcaaacaaggaactgctgaagaaggcccacctcaaggcgccgaccaccaccgaaatcctgtataaactaaaggagaacggacttgacgtcaatactgaaaaaatcacagtggacgagaccgtggaagagatcctcaacatcgagcgcatcaagtga

SEQ ID NO: 10217 - DNA, 831 bp, synthetic construct
  source 1..831: mol_type = other DNA
atggtggacattacgcagattatgaggttcgacgagctttcctcccagaacagccccatacataatctcgagggccggattaagctgataaccacgatctttattatcctggtgagtgttatctcaaaggaactcttcatccccataatactggagatcatcctcttgaacatcctgaagatcgccgacctgtcctacattaactctgcaaagcggctcctgatgttgctccctttcggcggggcgatcattgtattccagccattcattcagccaggtaatataatctggagctactcgtggttgcacatcaccgattttggccttaattgggctattctgctactggtgcgcatgatcgtctgcctgactgctataatcatctattcatccacaacccccctacaggaaatggccagttcatttaggaaactcaagatgccgagagacctggccatgatcctgagcatcatggtcagattcctgtttctttttgtggatgagctcgccgcaatccgaaagagtcagaaaagccgcaatttcaacatccacagcaaaaacaccacttacaaatggcgcgtcaaacaagttggttacacaatcggaatgatgtttctgaaatcctatgaacaaggagagcgtgtgcacaagagcatggtgagccggggattctccgatacatcagaaatgtttgacgagaagaagtcgcctgaaaaaagcgattatatcttcattatcagcattattattgtcgtgatcatactggagattatcatgttcaagtacagtgggcagttagggtacttcggccagaacttatctattaactga

SEQ ID NO: 10218 - DNA, 306 bp, synthetic construct
  source 1..306: mol_type = other DNA
atggacaaaaaggacatgtccctaatcattgtggcagtcgtgatatgtattgtaatcagctgcctttcaccatacatcgccagcggcgatccagacggcttggaaaagtccgctgaggatgcgagtgtccctgaagacttccagattgagcccatcaacggaatcccggacgctatcttccccgattatgcgtttgccagcgcccccgataaccagggactgcaaatcgtggccctgatcataggcgccattctcaccctcggtgttgggtacggggtggcaacaattctgaaatcgcggaattga

SEQ ID NO: 10219 - DNA, 639 bp, synthetic construct
  source 1..639: mol_type = other DNA
ttgcatatacccgatggtttcatacctatcgctcagtgtctggtgtactatgtaattctcatcgtcgccctctacttctctgtgaagtgggccaagtccaacctggatgagaagcgcataccccttctggccgtgctggcggcggggatctttgcaatcatgagcatgaacatgcccatcccatttgggaccagcggacacatggtgggaggggcgctcgtggccattgtcttcctagcaccggaggctgcggtgctggtcttcacagttgtgctgctaatccaggccctgatcttcggcgacggcggcattactgctctgggcgcaaacgtcttgaacatggccattgttggagggtttgtgggtctctacaccttcaaaacattgaatggcaagataggaaaatatcctgcagccggaatcgctgcctggttagccaccgtgctggctgcacttgcctgcgccattgaaatgggcattgctgggaccttcccagtcaatgtgggcatcccctccatggttctgtaccacttctttattggtatcatcgaagctatcctgacggtaatcgtgctggtcgccctcgacaaatttcggccagaccttctctcatggaataagactgagggcagtgcatga

SEQ ID NO: 10220 - DNA, 1275 bp, synthetic construct
  source 1..1275: mol_type = other DNA
atgagcattatttattccaagataacttcagtgataaacaagataagcgatgagattcaccggtctttcctgtttacaacaatattctctattctcaggttcattgaactccaatggatcaacagctatttcaaggagctgtatcccaacgagaagttcctgaatttcctgaacaacagtatcctgaagaagaatctgtttaacccattaatcgtccttctgctattttctttctttctgatcctgtcaataaaatcaccctctaagagtctggtgatcacgctcattgtcggcttcatagcattcttcataggtagtaccatcctgccaaaatacttcctgaataataatatccggatcatcgaatttaataaaaaggacatctattcgattgggttttgcctgatcctggtgagtatcatctttttcggaatttgcattgcgtctgtcggcggcatccctcttctcaaaccctccataagatatctgctcaaaccaatattcacgatgcctgtgtttctgatcattccaggcacctgcctagtggcctccgcttacctcaaggatttccagatgaagaacatcacgcggagccaggcaaggttccgcttcatctttttgcttgccatcgacactgccttattgctgctcctcgggtacagaacaccgctagtagcagcctttctcatcattattatcattgggttttacggcaatatcatttcactttgggaagtgatcatcagcgggctgatcggtatcggggctatcataggcatcggttactttcgatcccttagcgagatgacaattacctccagcaccaatccgttttacacccttcagagccgcgcggatttcaccctgcatgtcctgaacttgcttgattttgttgggggcaacgctggactgacacacgggcacttgttgaccagttccattcccggatcggacctcggacctcgtatgctcattggcaagattattgcctggaggactgaggtgaccgtgacccccaccctaatcggccagatggttgtcgacttcggtaaaatcggggtagcagtggagatgtgtatcctgggattcatcctgggaatcggctttaagatcatgcagaaaacaaaaaactatttctacatcgccatttactccttgattctgacttacagcatcttaggcattgaaactggaattttggacatacaggttctcttctacttcgctacggccatctttatctatctgattaacatcaagaaatcccaacagtga

SEQ ID NO: 10221 - DNA, 774 bp, synthetic construct
  source 1..774: mol_type = other DNA
atgaagatcaaatttactctcattgactacctcatcatcatcctggtcgtgtgtgctatttcatttgcattcatacatataacaacagacaactcatccgaggtgcagaaaaccgtgttcgatgcctcgaccatcaataaaatccccgatacttatttcaactattatagggatgggtatatcgttggcactaccgtcgatggattcaatgccagtactggggagaagataacactcaatggcacgatcaagtggattggaaataatggtgggaccgacgtgaagatcctggtcgaatccgacaacaccacgtacctggtgggtctatacaagtccattcccgaggcggacatctacatcgacaaaatttcactagaaacgaacggcagtacctacccgaacctggtggagatcaaggccagtccagagaacatcagcacaatcaacgacttgaataaaaacttaagcaacagtgatttcgaaataagcactattatctcgctggattccctggacctggtgaaaatccaggagattgccaacaagattaacagccacgataaacgcatggccattaagacccctagctccggactggggaacagcctgatattggaaaatgctaacaagcaaacacttgacgacgcaaatagcgttctgggcaatattaacggcctcaccgatgaacttacaatcagaatctacaactgctccgacagccagctcgagcaggtaaagaatagctacaatattaccaacatacggaccttttga

SEQ ID NO: 10222 - DNA, 156 bp, synthetic construct
  source 1..156: mol_type = other DNA
atggaagagtgcggagtttgtgaggactgcatcgatgtgtgcgtcgaagaagcaatcgagcggaaagcctacaccgtaacaatagacccagagaagtgcgataactgcggcgagtgtgtggacgtctgtcccgtgggggcgatttatgaagagtga

SEQ ID NO: 10223 - DNA, 561 bp, synthetic construct
  source 1..561: mol_type = other DNA
atgattaagatcgctacagccgagtgcttcacccacggaaaaatcggacgggagctccatgcactagcccagaactacgaggggaattttggaatggaatatatccaaaattctaagcagtatggtaacttcgactacaacgaactgaatgtcacctgcagcctcttcatcccgacgctggaggccgttaaaaaaatcttgaacgtgaagaaccctcccaaaccagatactctgatcaagggcatcaaggtctacaacgaggaaaaggacaaaactgtatccaagattatggccaaggcggtgaaggaactcagcgactgtgatattgccattggcacaagtgcaggcataggtcgcgggggcataacgatcctgactaacaattttgagatcacaaccaccaccgatatttacgctgaccttaccgacaacaatagcagtgatttattcaagaggtcagaatccgggattaaaaaaacattggagatcatactccttctgctgaataacaattttgacagaatcaactcgctggagaacgtggagattatcaagaagtga

SEQ ID NO: 10224 - DNA, 651 bp, synthetic construct
  source 1..651: mol_type = other DNA
atgattgatgaaattcaaaagatggaagatctgcaggtgccaaaaggccgaattgacctgatcggttgtggccggctcggattgaggatagcaattaacctcatccaaatccacagaggagggccgaaggtcatcggcgcctttgacgggcagaagatctctgatggcgacattattttcaagctgtatggggcggagcttgatgagtccaagcccgacttcataaaacgcttatgcacgcatgacaaagagttccgcaagatcgaggtgcataacgaatacatcaacgatgataacctggacctgataacgggggacgtgataatcattgttatcgccggcggcaacacaatacctactgctagcaagatcatcaagcacgcgcagaagaaaggtgccaagaccattagtaccgccggaattttcggctttgggaacgagcacatcgagatcaaggacattagcgaatacgataacaataatcccgctatcgaagagttgagggcccagggagtaactgagaaccacctcgtgctgaccacaaataaactgatccgggacaatgagcccgtcacaccatacaccctggacgaagtggcaaaactcatcaccatctgctcactaaagctgcttaaagatcagaatgactga

SEQ ID NO: 10225 - DNA, 696 bp, synthetic construct
  source 1..696: mol_type = other DNA
atgaagcttaaggagatcatcagcttcatcaacgagcgcatacctgaggacctggccctcaaacacgacaacgttgggctaaacggcgagtatgacctgaaccaggagatcacatccatcaagattttcatggatctgctgccggatgacgacaacggggagaatacattgattataacccaccatcccccactgtttatccctaagacacccacgtacaccatccattcaaattgggacgtcattaagggcggctccaatgatatcctggccaagaccctgaaattagatgtgattgatgtgctggacgagaagacaaacattggacggatctgcaagactgactattcgtttaatcagctgaaaaagatcatcctggacaaatacgaaaacgtaaggattgtgacgcagctcaatgacgattacatcttaaacaagattggcaccatatctggattcgggcttaaaaacagtaagtatgtcaagttggcgaaagaaaaagaactggacatactgatcagcggtgacttgacccaggaaactgctatccttggcaagaatctcagcatcactctcattgatctaggacaccacgaaagtgaggtccccggtctgtaccaactcgcaaacctcctcaaagagattaacattaatatcgaagtgattgataagaccccaatcaaagtgataaagtga

SEQ ID NO: 10226 - DNA, 798 bp, synthetic construct
  source 1..798: mol_type = other DNA
atgaatatcgacacgggaattacttcagaagtattcacaatcaaatctcagattcgcttgctggacatttttaacgagattatcaataagaagtcccaaatcgtctatgagtacttgaagtcgctcaacctggataataatgttaagataatcgtgatcggcacgtacttcactggactggggatagtgaagaagcttagcgaaaagtacaataacattatcttggtggacatttatccccacctggaacagctgttatacaccaaaatcggcggggagctgaagaataacatcaagttcagcagcgacctaaatctgatctacaacggggatgtggtgattgataccacgggctttggcggaatcaatgtcgaacagagctccaaatttaacgttaatacattcataatcgaagatccgattgctgagaacaacgacatcctcctgaagcataagaacaacatcctcaacagaatcaacgtggtgaacagtcagaataaagcgattataaaaacaaaaggcatcaacaccaaaactagcgggaccatgagtctgaccatgcggatactcacaaacgccctagacaactgccttaagaaggagggtgtcctctatagcgcctgcgaaatgggttttttcgaggagatcatcttcaaggagaaaaatattgataaattcattgaactgaccaatatgcctgcaatcaaagtctccacaataaaaccatttaattgtaacgagattatcaacagggagcttgacaagatcacctcaaagatgattctgaacgagacttga

SEQ ID NO: 10227 - DNA, 486 bp, synthetic construct
  source 1..486: mol_type = other DNA
atggcattcgaaaagatgatacacgatgcctttgaggagagccggaataacagccgcctcggcgatacaacggacgagataaacgagatcaaggagtacattaagaatgcgaaaaaaatctatgtgccaaacaaaaacgggattaaggtcaaagtgttaaatgaagtactcaacaaatatgggcttccagaagctgagatcctacaaatcaacaccagtaccgccgacacctcgcgcatccccgccctggcgaaggcctacatggctctggaccagagcgatgctgacctgattatcgcccggggccgactgggcatcccgggtagcggctcactgcttatcttcattgacaataaaggaagaatactgacttgcggaacatccccttcccatcccattcacaagaagagcctcgagcaggcagtgtacgaagaggcctgtgaggcactggaaaagatcgggttcgataagaggttgaagaaatga

SEQ ID NO: 10228 - DNA, 999 bp, synthetic construct
  source 1..999: mol_type = other DNA
atgatcgacgacattctgaacaaagccaagttagggaaaaaactaacggacgaggagtatctggagctattgaagattgacaacaatgactacctggagaagctgttcagcatcgcttgttacatccggaatagccaatcaaaagagataaagctgacaagtactgtccatatcaccaacaaatgccaaatccagccaaggtgtgaatactgcggattcgctgagaagaccagcagaaccggatattacgatgcgttctacaaaagcaatgaagaaatccttaatgccatcgtctccatccagaaggcccacattcctcgcgtgagctgctctggcggctacggatataaaggcaggcaggcagtcaacgcatgtaagatagtaaaggaaaactcgaatctggagatcctcattaacgtggggggcgacctgactgaaaagtccgttgaagagctggccaaattgggcgtggatacagtctgctgtaacctcgagacaatcaatgaggacatatttaacgagaggaaacccggtgatagcttgaagcagcgcattctcacgtgcagacgagtgagttccgccggaattggtctgtcaagcggactgctcctgggcattggagagagtgtggaggatcgcctgaaacacctccggtacttatccagctttaagacgcttgaggagattccgattatgggtttcaacccctatccagataccgcaatggctgactatcctagcttccccctcaaggaacagttgaagatcgttgccatcacccggataatgtacccctcaatccgtatcaccatgcctacaccgaccgtggggccagaaaatgttgaattttcgctgaaggcaggggcgaacaacctcgctactgtgatcgccgataattacccccttgaagtgaagggggtgggctccccagaatatggcaactacacagaggtaatcaacgtcatagagaagctggggcttatccctcagactatttga

SEQ ID NO: 10229 - DNA, 1014 bp, synthetic construct
  source 1..1014: mol_type = other DNA
atgaaagtggccatccttggggccggatgctatcgaacccatgccgctagtggaatcacaaacttcacaagagcctgtgaggtggccgaggcgacaggcaaagagaacatctcgatgacccactcaacaattgagatgggcgcggaactgctggagctggctggagtggacgaggttgtagtgagcgatccaacctttgacggcgaatttacggtcgtggatgatttcgactatgccgaagtcatagccgcacacaaggccgggaatcccgaggaagtgatgcccgccatccgcgcaaaggtggcagaactagccgagacagtgcccaagccaagcaaaggtgcaattcacttcacgcacccagaggacttgggcatgaaagtcactactgatgatagtgaggcagtggctgatgctgattgggtcatgacatggctgcctgaaggcgggatgcagcccgacatcatcaagaactttgccgacgacatcaaggagggggccatcgtcacccatgcttgcaccatcccaactaccggcctgaataagatcttcgaggacctcggcaccaacgttaatgtagcctcctaccacccgggggcggtgcctgagatgaaaggacaggtttacatagcagaaggttttgcggaccaagattccatcaacactctcatggatctcgggaaaaaggcacggggatctgcattcaccttgccggctaacatgataggccccgtctgtgacatgtgcagcgccgtgactgctattacctatgccgggattctggcctacagggacacagtgacgcagattctcggcgcccctgcaggcttcgcccaatccatggctaacgaggctctcacccaggtcactgcgctgatgcagaatgagggaattgacaagatggatgacgccctgaatcccgctgctctgcttggtacggcggattcaatgaacttcggtagcctagccgaaattgtgcctaccgtattagactacctgggaaaggacgaatga

SEQ ID NO: 10230 - DNA, 1497 bp, synthetic construct
  source 1..1497: mol_type = other DNA
atgtacgacctgatcaaggaggccgttcacagtgatgaagcggccatcgaaatatccaaaatgaagaaagatgtagggtctgtggtggatgcaatatccgagctatcattagacgacaccatgaaactcggaatgagctttaaaagattccctctcggctgtgatctgacagaggtggtggtgggcacatgtgcttcggacctcgaactcatggatctgctgggcaactgccggctatctgatatgatcggcgcgccaattcatatttgtgcttatgccttttctgatatcggcgagaagttcggaatgactgggtttgaggtaatgaaaaaggtgcacgaaattgtggatgttcctcttgatctggaccatttcggcgagaacggggcaatgcgcctcccaaagaacattacaggttgcgggggtgagtgttacagcaagggaccctccttcacggagtgcccccggggacgcatccatgaacgactcatcgacaaggagtttgaacaaaaggaggacaaggagaattgggttaaactgtcgtcatctgttgccgtgaacgtgtccagcgaacagacgggtgatgctcatgccgcccccctgagtgaggctaaggacattgccgtcctggccaagaagtacggcaagggcctggagagcataatgttcgttggtgacggttatgacgaggtaatcaccggcttcgagaagtccatcgacctgggggccgacgtcatcgtcgtggagggagggcccttcaatcgttgcgagaacaccacagaatcattcgcaaaaaccatcgccgcggcaagaattttaagccctggaaaggtcgtcgccacgaacggcgcttatgagcacgaacttcgaatgggactgaggagcgggcttaatatggtaatcaccggcttccctaagaaccaccacggctatatgtgcggatacgagccgggaactgcaagaagggggaagttcggcctcccacgggtcgtgcagataatcaacgaagagtttccaaacatgggcctgcccgtgcagaaacaggatttgatcgccatcgccgctgcagtcaagttcgccggcagcgaaaatatttaccccaacaaaataggaagttaccacgtgggggatgcgcactgggcaaccttggtcaattccaggatgtaccacaacattaaacttaaacataccctgaacgacatcgtgaatttggttgaaggtagtactgtctccctgcacggggggcgctttgtgtcgtgggtgattgccaaagaactggacaaaaaggtggaggaaataattatttccgacgtcgatgactgggtgctgagcaacaccgtgaataatctgcaagacgaactcaatgctacaatcatcgctgagaatgacgacaagcgggccagcagtcaggcaaactttagcatcgcttcatcaacaatgatcagcattaaggagaacattttgaagaaagtcccgcacgcgctaactatcgtgtga

SEQ ID NO: 10231 - DNA, 900 bp, synthetic construct
  source 1..900: mol_type = other DNA
atgaactataagaagctcgtcctggtgggctgcatttccgcattcgtggctatcctgacttcagttatgggagttgcggggacaattatcggtagcgtgatctcatctgttctgtacaacatgcttaccgaggtcttggaaaacccgattgggaaaaagacattcagccccagctttgaatgggagattgcctacgtatttccactaatcgtcatagccataatccagttcattctgatcagcgctctgctatccgaggtgggcattctgccttacacctttgtaaatgtttacctgagcattcaggagatcgccaacaacaatctgtaccgcattctgggcttggcattgctggtgatgagtgtgtatccctttgtcctgaagaggggcattgtgaagaagtccaacggaacggtgattgcattcgtcgggctgatcttcctcgcccgtgggtttgtggatctcggaaacaggatcaccgagatctatcatgccgtgttcgtctattttgatcttccaatcgctatcatcgcgttcgtgcttttagtcttcgtgataatcaacatactcatctcagccaagtctgtggaaaatgagttcaaggtaatcagccacagtactaacgaagagaacttttcctctcccaatgttcgacgggtgcatcactccagaaaacacaatgacttcaactatgctgaacgcgacataagtagacaaaattaccagaacatgaacaagcacaaacatggagataacgtacacgaggtgaagttcaaaaaagtcgtgaaacaggagtctgaccggagcaagtcatcgaatagtaaccaagaagccggcatcaatgagtcgagcggcaatattcagtttgaatccaatgacctcctcgacgattacaaatga

SEQ ID NO: 10232 - DNA, 885 bp, synthetic construct
  source 1..885: mol_type = other DNA
atgagtaaaaaagataagactctcaaggacatcctggacattatcttatacgacaacccgagcactcaagatgagatcgcggtaaagctgggaataacccgccggtacgtgacccaactcttgcagccacttgttaaggatggaacagtaaagagggcatacatgatcgatctgaaaagctatgagaaggtcgccgagtccctgagtgactatgccggctctaacgagacaaaggggaacgtgatagtcaacgacatgatcgcaaacatggccagacatgttcatagccagatcgaggtgtcctttgatgcggtgctcgagtacgacgaagagaaagctaataaagccctcgagatggattatgccacaaacaacatggtggagaagataaggacctccgtcgagacaatcgtgagtatgaataagcactcggagatctccaagtcaatgttgtacaatgaactggcttatgacctggagcgcattggtgactactgcggccacattgccaaatttgtcatcaatgacgtttacgaaatcgatgagaacgtgctaaagaaactgaaaaagatgtataagattgcccagaagatgattcggctggccattaccagctttattgaaggcaaaactgagcttaaggacgacctcatggaacttgaagagtccatccacatcctgcagaccaaagctattaatctaatagcagaacagatggctgaaaattcattcgacgagaaggagcgtagcaactacttcatttacctgttccgagtggtcaaagcattcgaacgcatgggggatatctctgtggaaatgatggatgtgtcaatcgaatttcacgagaatatccctaggagcacgacgcccagaaacttccggtga

SEQ ID NO: 10233 - DNA, 843 bp, synthetic construct
  source 1..843: mol_type = other DNA
ttgattaccaaagatactatcaaagacactgtctatgagctgtacaaacaggccgtgatcgtgctgggcgatgacgtaaagaaaagccttaaggacgctctgaaaatcgaggaacatgacctggcgcggcttaacattgaggctattttaaagaatatcgaacttgccaaggagaagcagattccgatgtgccaggataccggtttgcccgtcgttttcgtgcggctgggcaacgtcgaagtggagaacctccgagaagggattgaggaagggatcaagaaagccaccaaggagatcccaatcaggccaaacattgttgaccctctgacccgcgaaaacacgaacgtgaacgtcggcgactacatacctccaatcgacatcgagctgatcgacgaggactacctcgagataacgatattgcctaagggcttcggtagtgagaataacaacgctctcaaaatggcactccccgccgagggaatcgagggcattaaagaatttgtcgtggaatcagtgctgaaggctaagggaaaaccctgccccccaacagtggtaggggttggaatcgggggaactagcgacctgtgtctcaagctgggtaagaaagcgctgctgggcgaagtgggggtgagaaaccccaatccccagatcgccaagctagaacaagagatcctcgatgagatcaataattccggaattggcccgatgggactaggtggcaagacaacctgcttagatgtcaaaatactcaaggcacacacgcacacagccggcctgcctattggggtgtgtatccagtgctgggcagataggcacgccaccacaaagatatatgataattga

SEQ ID NO: 10234 - DNA, 246 bp, synthetic construct
  source 1..246: mol_type = other DNA
atgaggatcatgtactccggaaactgtacaaactgtacgacctgtggtagctgccagcaaacacagaacgtagacactcctatcctgttctgcatgcactgccagccgagcgatgcgccctgtctgaaagtctgcaaggagaatgcaatcgaagtgctcggcggcgccataaccatcaatggggaaaagtgcaacaaatgccgggactgtgtggaggtctgcccaattaatgtgataaagatttga

SEQ ID NO: 10235 - DNA, 501 bp, synthetic construct
  source 1..501: mol_type = other DNA
gtggaaagtatcctagtaaatagcgacctctgtgacggatgcatgaactgcgaaaacatgtgtgcatcagtccacaacgcgtcgaggataaaaattattgagcacgatagcagcttttattccattgtgtgccaacattgcgagaatgctccgtgtataaagatctgcccaacggaagcggtcacagaagagggggtggataccgaaaagtgtattggctgtggactgtgcgtgatgatctgccccttcggggcaatgaccttccagtccaaggttgccgagaagtgtgacctgtgcgctgaccgcgaggagggccctgcctgcatcaaatcctgtactaagcgagccatcagcatcgccgaccccgagaaaattcggtcaaagaaccagcagaagtacctcgctaaaatggccgggatctacgagccagatagtaaaaagggcggctttgtccacgtgatcacaggtcaggcccgggcaagactggtgttcgatgagtga

SEQ ID NO: 10236 - DNA, 867 bp, synthetic construct
  source 1..867: mol_type = other DNA
atggacatacctgacaaggacctgttggccccgggacacaggggctgcgctggttgcggagcctcgattgctgtgaagctggctcttaatgccctgggcaagaacaccgtcgcgatttccgctacagggtgtcttgaggtcatgaccaccccatacccagagacgtcatgggaggtcccctttatccacgttgcattcgaaaactccggagcagtggcctctggtgttgagagtgctctcagaatccagggaaaagacgatgtgaacgtggtcgcgttcgggggggacggcggcacagtggatataggtctgcagtcactgtctggcgctatggagaggggccataacatgctctacatctgctatgataatgaggcctacatgaacacgggcatccagcggtccggcgcgacaccctatggtgccagcacaacgacttccccgaaaggaagtgcaagcttcggggaggacaaaccaaagaaaaatatgccaatgattatggccgcccacggcatcccctacgtagccaccgccagtattgcatatcctgaggactatgtgaagaaggtcaaaaaggcagctgaaactaaaggccctgcgtacatccacctgcagcagccctgcactaccgggtggggctatgccagcgaaaagaccatcgagatgggacgattggccgtggagaccggaagctggattctgtacgaaattgagaacggggactttgagatcacataccgccctgaagaacggaaacccgtgaaagattacataagcgtacagaagcgcttcaagcacctagatgaagaacaaatcaataagatccaaaagtacgtggatgcacattgtaaggagctcgggttatga

SEQ ID NO: 10237 - DNA, 1146 bp, synthetic construct
  source 1..1146: mol_type = other DNA
atgataaaggaggtcatgaccgcaaacaaggcagttgccgaagcggtaaggttggccaaaccccaggtgatccccgtgtacccaatcacgccgcagactaccatttctgaatacctggcacaatacgtggcagatgagaaaatcgacgccaagtatattaaggtggagtcagagcactccgcaataagtgctgccgtgggagctagcggggccggagtccgtgtctttaccgccacctcttcccaaggcttgatgcttatgcacgagatcctgtttgcagccgcagggatgcgcgtgcctatcgtgctggccgatgcgaatcgggccatctcggccccgctgaatatatggaacgatcagcaggatagcatcgctcagagggatgcgggctggctgcagatctatgtggagaacgctcaggaggctctggactccactttgatggcctataaaattagtgaaaattccaacgtactgctaccaagcatggtctgcttagacggattcattctgactcacacagtcgagcctgtcgagattcctgaccaagaaagcgtggataagttcctacccccatacgtgcccgagcatgctttcctcgatccaaatgagcccatgacaatcgggagtttcgccgacaccaactattacattgaggctagacatgacatggagattgccatgaacaacagcatagaagtgattaaaaagacgtgtgacgaatttgccgaaatattcggaaggaagtacggtcttgtggacccatacaaaaccgaagacgcagacatcatttttgtggccatgggttcactctgcagcacagtgcgcgtcatcgtggaccagctgcgagaaaatggggaaaaagtcggtctcctgaaaatccgggcctaccggcccttccctgtggaggagatcaaggaggttataaaggactgcgaaaagcttgctgttattgataaaaacttcaccttcggcattggcggagctctctatgcggacatgaaggttaaaattgataaggagatctatggctttatcgcggggctgggcggcagagacatcacgcccgacagcatcatggagatctacgaaaagacaaaggagcctgtacaggatgttacatggatcggcctcaaggaggaatga

SEQ ID NO: 10238 - DNA, 243 bp, synthetic construct
  source 1..243: mol_type = other DNA
atggtaagcatcggttgcgtcatcaaaaccccaggcaatagtaagatcaacaaaacggggagctggcggacatttaaacccatcctggacaaagagaagtgtattgactgcgacaactgcatcatattctgtcctgactcctcagtgaacaagcagcatgatatagattatgattactgcaagggctgtggaatttgtgcccacgagtgcccgtctgacgcaattgaaatggtgaaggaatga

SEQ ID NO: 10239 - DNA, 558 bp, synthetic construct
  source 1..558: mol_type = other DNA
atgattatacacgataagtgcatggaggaaaaactgatgatcgaaattcgctttcacggaaggggtggccaaggggccgttactgccgcggagcttctagccaaggcagcattcaaggacggcaagtactcacaggcttttccgtttttcggggtggaacggcgaggagcccctgtgatggccttcacaaggattgataccgagccaatagccctccggtaccagatctacaatcccgaccatgtattagtcctcgatgacggcctgttgaacgttgtcgacgtgttcagcggcatcaaagacactaccgaggtgatcatcaatacaaagacgttcgaagggagcggggagcacaccgtgaatagcatcgacgcaacgggcgtcgcccttgacatgctgggacgcaacatcgtaaacactattattctgggatattttgcgaagaaaacccagatcgtcagtatagagtccctgctggaggtgatcagagagacattccccggtaaagtgggggagctcaacgtggaagctaccaaaaaggcttatgatatgggctga

SEQ ID NO: 10240 - DNA, 1605 bp, synthetic construct
  source 1..1605: mol_type = other DNA
atgaaagtgctgattatcaccggggagctagcctaccctctgataaaagaggtagtgtcaaattccaaagaggatataatcgtccacatcgccgacaacacccaagttgccgcatttctgactcccaaacagatcatcaaggaggtaaagacttgtttttccaaccagttggatgagattgatatgatcctggtcccaggcctgatcaaaaaaggaacaaaagagataaccaaggagcttggcatccctacatttaaaggatcgaccgatggggcggaccttgccatggttttaaatctcgtgggtaccatcgagctctcggaagacaaacccgcagacaagttgatcgatgaggagaagagaaaaaaagccttcaagttcatcgacgagtttgaaaatgacaaggaaaacattgagaaacttctaaagaagccaaataacattctgatcaagaaccttccagtgggggaagatttccctatgcgggtcttgtctgagattgccaatgcaccctttctgtccaaagaagctttgattaataagtgccagtactttgtggattcaggagccgatatgatcgatatagggatggctgcaggtgaagatttctcagacaagatccccgaactgatcgacacactgcgccccattgtcggaggcaggccactgagcattgacaccctgaacaccaacgaaatcaaggtggcagctgagaacggtattgatcttgtcttaagcttggatctgggcaacaacagcgaggtgaaggagattctcaaggaaaagaacatccctgctgttctgctccccaccaacttctcccagggtaagagccccaagtctccggccgagcgcgtggaagccatgaaccagctgatcaaggacacggaaggcctcaaatatgtggctgacctgatccttgacccggtcaacagtagcagcattgttgaatccataatcgcgtgcaatgaatttcacaagacaaatcctgcccccatgttcttcggggtgggcaacgttactgagctcatggatgcggactctggcggagtgaacgtgctcctcgccggaattggtatggagctgggcgtaagcatattgttcacccccgaagagagtgggaagacacgaggcagtgtgtacgaactcgctaccgcatctaaaatgatgttcctcgccaagcataggaagtccattccaaaagacctggggattaacctggtggcattcaaggacaaacacaagagaaacgacatcatattaaatgagagggacggcatcccagagacgatgcaagagaagcctatgaaattcatccgggacaaggctggcagtttcaagatcaatgtggactacggaacgacggtgaagcacagcaagattactgccacccacttcaagaagaacaagccggatatagtcattgtcgggcataatgcgcgggaaatctatgaggagatcatcacaaaggagctggtcacacgtatggagcatgccgcctatctaggctcagaactgcagaaagctgagatcgctatgattactggaaaggagtacgtgcaggactttgacctgttcaaaaatcctgatgaatttaaaaaatga

SEQ ID NO: 10241 - DNA, 405 bp, synthetic construct
  source 1..405: mol_type = other DNA
atgaaggctgataatgccatcataatcgtactggtcgtgctcatcatactgtgcggagccgttgccctagtgattacaaacaatggcatttcatttaacaatacaagcgacagcgtggtgaacaatacaaccaacaccaccaacatcacggccaacgatactgacgagacgggggcgactcatgacaccggcctggtcgcttcctcgagcgatgacggttccagttacagttccagcggatatagcagcagttcaggcagcaacagcggttctagttccgggcaccaaagcgacaactctcagtcgagcagcggctccgaatccagttcaggatcagaatccaattcggagcccgagtctgatagtgcagggcagtccgaaggctcatccgcagacttcgagtga

SEQ ID NO: 10242 - DNA, 855 bp, synthetic construct
  source 1..855: mol_type = other DNA
ttgcaagcggaaaatatcagtattaaggacattgataagagtcttttggacagcaactacgtgtcgaacaatgaaattagcacgactctttatttatcactgctgctgggcaaaccgatgctgatagaaggaccccccggcgtggggaagacagagctagccaaagtagtggcaaaaacattcaatcgggacttcttccgcatccagtgctacgaaggcatcacctttgagcagattgtgggcgagtggaactatcagaaacaactgctccacctcgaggccgcccgaaacgactccgtgcgggaagacaaaatctttgatgaggagttcttcataagaaggcctctcctaaacgcctttcttaatgacaacgattccgtactcttgatcgacgagatcgacaaagctgatgaggaagtcgagagtttcctcctccaggcactgggagagcaagaaatcaccatcaacgacctgggtaccttccagctgaacaatgatctgatagtcattttaacatccaactctcagaggagcctgcttgatgagaccaaggacagatgtttgtttctgtacattccatatcccagcattgagcgtgagatcgaaatcgttaagagcaagctgcataacgccgatgacgaaacggtctcatacgtggtgaagctagtgcacgacatacggaacctcaacctgatgaaaaagccatctgttcgcggaactgtggattgggtgcagtcagttatgaatctcgggactaaaaatctggaccagtccctgaaggactccgtcggggtcgctatcaaaaccgagagcgataagaagagggtgctgaaggatatctttaataagcgctga

SEQ ID NO: 10243 - DNA, 1155 bp, synthetic construct
  source 1..1155: mol_type = other DNA
atgttaacaaagatagcaaccctgtccgcccagctgcgagagaaagatctgcccgtcagtgtgaggagtacgcaggccgccgtgcaaatatataagaacctcggggaaagcgacaggaacctactaaagaccgcgttaatggccatctacgtgaaggatcggtatgacattccgaaattcaacaagatcttcgacgaagtattcacggtgaataaaaaggttgaaatgcctgaacagcttcagaagtccaaggcatacgaggggaccggccctaaatccaacaagtacgtcatcaagaagcaaggcagcatggccagtaaagttcagaaggagaagatcaccaacgagaagcttaaaatgctttccggccagccgcttctcgacgaggcgaagaagctcgagcgggacggggagctgatgaacaaggatctcacaaagctgaaccgttttgatccccgcatgctggagatttgccaaaggctcggcaaaagaattgctaacaaacggagccgaagaaagacgaagacaaccagcaataagatcgacatccgccgcaccataagagcgaacctgaaatatggtggagtgcccttcgagctggtaaaagccaagccaagacctcacaaaaacgagcatttgttcttgaatgacatcagcgggtcatgcgaatggattagcagctggtttttcatgctgatgttttcagcccagacagcattcaagcgatcacgcacattcgaatttgacaacaaggtcatcgagactaccgatgctctgaaagaagagtacctgatcgactcattcgtcaaagtgaaagatctgcgggtgaagaatctgatggttcacggtactagcgatatgtactcctcgtttaagagctttcaggaacaagctaatattaataacaaaagctacgtgatcatcctcagcgactgccgggactgggccggaccaaaggtgaatggcattccagctagtgtggaaatcgtggaggagatggtcaaagattcgaagaaactgataattctcaatcccgaagacaagaacaaatgggacgtggtggacagctgtgtatccttgtatagggatgctggagcacagatctttgaggttaatactttgaaccagctggcccagttcgtcgagcagatgtga

SEQ ID NO: 10244 - DNA, 918 bp, synthetic construct
  source 1..918: mol_type = other DNA
atgcaatgctccaagtgtgggaacccgaaggtgatcattaagaaggaacagtctggccagctgctgtgcaaggactgtttcattgaaagcattgagaagaaggccataaagactattcgtaaagagaaactgctggacaagggggataaagtgctggtagcactgtctggcggcaaggatagtgtcaccacgcttgaaatattgaatacattccgccaaatgcacatcatcgagctttgcgccgtgacagtggacgagggaatcgacaattataggcaggacggcgtggatatcgctattaggcacgccgagcgcctggggattgagcacaaggtcgtgtccctgaaagatgagtacgggatcaccctcgacgaaataatgcagaaagagaaccataaagggtcctgtacatactgcggtgtcttcagacgcacgatcatcaacaaagcagctcgagaaatgggtgccacaaaaatagcgaccggccataacctcgacgatgaagtgcagggaatcctaatgaactaccttgagggaaacatcgataatttgactaaactcggcgcaaagtcagaatcgaaggccgaggagtttaccgtgaagatcaagcctctccgggagattcccgagcgggagatcggcctgtacgtggtcgccaaagaattggaggttcacttcgacagttgcccatatgcgatgcagagctttagaggtgaaatcagcgaggttattaaccatttagctgaaaaacaccccaccatcaaatacagcactctccggggatatgacaagattaaaaatgtactgaagaaggaactgaagaaggaatttaatcacggcaggtgttcaaaatgcggggagccagcagctaacgagctatgcaaggcctgtagcttcctggaggagctcggaatgtga

SEQ ID NO: 10245 - DNA, 204 bp, synthetic construct
  source 1..204: mol_type = other DNA
ctccagttcatactaaagtataaaagcattaatgagaaacgggtcttgcccaacgacaattacacaattaaggatctgctcgacgagctgcagctttccgcccagaccatcgtgagcaagcaaaacggcgaactggtaatcgaggatacggtgattgaaaacggagacgagatccagctggtgcagatcatctacgggggctga

SEQ ID NO: 10246 - DNA, 864 bp, synthetic construct
  source 1..864: mol_type = other DNA
ctggatatcagttacgagtgtgggccttgttttctcagacaggcccgggaggccttagacttgagcaccgatgacgaaaaccttaagatggaggtcatgggggagatcttcaagttcctgtccgtgaccttcagggaaggtacaaatagtaacagcaccggttcttcaatgcacaacatcatcaaacagaagactgggtgcatggacccatactataaagaaaaggttgagggcaacgagatcgctattaaatacctgcccgaggtgaagaagatcctgacggaagatgactcgttggagaattatgtgaaaatagcgattatcggcaacatcctagactttggcgcgttcacactagacgacgatattgagtccgtaattaagaacagccttaaaaaagatctggccgtgaaggacattgaggaatttgaaaattctctcaagacacacgacaaagtgctgtacttagtggacaacactggcgagattgtcttcgacaagctcctgctcagtaagatcaaggagtacgatctgaatattaccatcgcagtcaaatcagagccgattctgaacgacgctacaatggtggaagcattggaggtgggactcgatgaatttggagagctggtcgacataggggctggaactgttggctatgtggattccgagatcagcgacgaatttcgacagatcttcgattcccatgagtttataatcagcaaggggatgggcaactatgaaggactgacggaaatagatctctctgacaaagatatttacttcctgctgtgcgtaaagtgcaataccatcgcccgccacatcggcgccaatctccatgacatgctgcttttcaaaaagcaatga

SEQ ID NO: 10247 - DNA, 735 bp, synthetic construct
  source 1..735: mol_type = other DNA
atgatcatcggtctgattggctttggaaatgtgtcaaaaaatctcgtaaagctcatcaagtcagacgacattacattcatcacttcgatggaagaccgatctccgaagaccattgacgcgattgagaaatccaaaattaaggtcctggatacctttaaggatgtggccgttgcctgcgatattctcattagcgccaatagcccaaaatcggccctcgaggctgccgagaactacggcaagttcacaaagggcatctacctggacctgaacaacattagccctgacactacgtttaagataaaccagcacgtggagaacctggtggatggggccatcatcggcaagatcgacagccccaatccctacctgtacatctctggagagaaagcagaagaacttctgttcctcaatggattcttgcagaccaagaaaatcagtgacaacgtcggggatgtcgcgatcctcaaattgctgagaagcagttataccaagacattgagcgctattctgatcgagtccactgagctatccagggagtatgaccttgaagaagagttctttgacatcctgtcactaacggaaggggataacttccgcgagaaatctatctccaggataaacaataccttaaacaactccaagcggaagagcgaagagatcgaagagataataaattatttcaataagaacaaccttagtatggtgcgggcagcactgaaaaagctgaaccaatga

SEQ ID NO: 10248 - DNA, 1269 bp, synthetic construct
  source 1..1269: mol_type = other DNA
gtgctgatattgatcggaattagtgcagattttgaccctgttcataaaggccacgaaaagctcatcaaagaggccaggaaactggctgacaatgagaacaagaaagtggttgtgtacctgaataagggattcagtgctaatcacgctcctttcttcgtgaacttcgaggcgcgtcgcgacatggccttggctctgggggtggacgaggtgaagagctttgaagggctgcaccaccgactggtgctgtcttacagtgtgcccatcaggctcaagcaaatgattgatgacggaatcacggattacattacctccgccagcatctcacttgatgagattaaatcaaaggcccaaaagttcatcgatgagggcaacttcgttggcatgccaaagagttacactaacaggaacgaaatccggtggtatgctataaatcagttcctcgggagcaagcttaactatcacgtcgtaaaagaatttaacaaagacaaatattccgggcgcctcattcgccagtccattatcgataacggaatggtcatcacggacgacgtgaagaagttactccccaagacaacgatcgagattcttcagcatgaaatcgacgccgaccgcatccctgagaaccgaaattgggtcgagatctacaagaagatgaacacctattccaggggcaacctggaaaagatcgcgtaccttaacggaaacaccataaacgagattatcaaacggcgcgtctaccgagacccggaatccatttgggccgtgtttcggagatctaattacggtcccgtcatgacccggctggcaatctcgtcaatcgagatgggcgtgaccaaaaaggaggtcatggatctgatgaaaggttatgaaagccagggcgtgatcccagataaccagaaagtccagcgggtcattgacagagcatggtatgtggccactagcaggctcgacgcacgtgaagccaatgagaagttcagaaatgagaagatcgaggttaattctcccctctgcctggaggccggcctaaacctgactaaatttgagaccaagataaccaaggaggggctaaaaacagatttgtacgtagataagaatggtaagataagcgtgcagttcaaatccgaaggcaaaaagatcaagacaaatttaagactgccagcggaagaagttacatatctgagatacatcatggacagccattttattccggtgaacggacacataaagaagtcggagaaaggcttcaaagtgaaggtaattattgggtga

SEQ ID NO: 10249 - DNA, 483 bp, synthetic construct
  source 1..483: mol_type = other DNA
atgaaaacgaagtttgttagcctactgtccatactcctcggcctaatcatcgtcatcttcccaatcatgggcgtcattggcgtgggttccttgattggcttgtccgcacttttaatgtctatttatttgctgatcgtgggaatcgcgataatcgattataacaatagcggggccatcctggaccttgtgctgggcctgattctcctcttcctgagtatctgcctgattttcaatccctcgcttctgggatttcttaccgagatctcaatgtacttcgccggcataatgttaatcattgtggctgtagtcagcctgatcaataaccgcaacagcaggtacggattttatagcggcatcattgggatcatactggggctgctctacatcattatcggaacctacctctcaaacccgattattctggggacactcatcggtatatggctggtgatcagtgggattttgaagctgatggaccggtga

SEQ ID NO: 10250 - DNA, 1083 bp, synthetic construct
  source 1..1083: mol_type = other DNA
atggagattgaaaatctgaccaaggacatcagagccagagcctttgagaagaaagatccgaaaactcccgagcaggtgggagcaagttggtataatgacgatttaacttatgaggggattagcaaaacgctcttcatgatcttgccaacccccggatgcagctgggcacttggcgatagtggtggctgcacaatgtgcagctacgtgtctgattgtaccctggagccaatcgatacggagactattcttcgcatctttaacgaccatctttcgcgacaccccatcaatgaggaggacaagatctcggtgaagctgttcgccagcggctccttcctaaacccctacgagctccccaaggatgcacgtgacgagatcctgaaaaccttggtcaacctgggcaacgtgacagaaatcattgtcgagtctaggcccgagtatgtgaaggaggaatacctggacgaaatattcgagatcatcggagatactctgtttgaggtcagtattggcctggaaaccagcaatgactacacccgcctcaagaagataaacaaaggttttacccgggacgacttcgaaaatgctaccaagctcatgcagcaccaaaggaagacaaaggggtacaatttgaagacaaaggcctacatcttcgtaaagccgatcctcgtttccgagaaacaggcgatcacagaggccatagaaaccgccgagtactgcgactccattaacgtggaccgcctgagcttctgtcctgccacaatccatgggggaacggtcatcgagaggttatggagaaaaggggcttaccaaccaccttggatttggtcctgcgttgaaattataaacactgtacgggatgaactgagcattcctgcgctgctggacacctcaggctttggctcccgacgggggccatacaactgcaagaaatgcaataaagacctcaaacagatcatcatagctaacaatctcacacagaacaagattgaatatgaatgtgaatgtaagaacgagtggctagctgaaattaacaattcagatatgaacaactcaacggtgaaagtgaagcacatccctctgtattga

SEQ ID NO: 10251 - DNA, 960 bp, synthetic construct
  source 1..960: mol_type = other DNA
atgaagttcgggatagagtttgtgccaaatcagcccctggacgagattgtcaagttagtgaaactggccgaagatgtgggctttgagtatgcctggatcactgaccactacaacaacaaaaatgtctacgagaccctcgcactgcttgccgcgaacacagaaaccatcaaaatgggtccgggggtgaccaacccatatgtgcggagccccgccatcgccgcgagcgctatcgcaaccatagacgaaatctcggagggaagggcaaccttcggcatcggtcctggggacaaggctactttcgacgccctgggcattgagtggactaagcccgtgagtacaatcaaagcagccattgcggacataaacacgttgctcgccggggacaagacagaagggggagcagcactagggggcgtgaaggccgtccaggaacacattcccatctacatgggggcccagggacctaaaatgctggaaacagcgggcgagatcgccgatggagtgctgatcaatgctagcaacccaaaagattacgaagccgctatgccaatgatcaagaagggcattgaggccgcgggcgataaggagtttgacgtgggcgcttacaccgcaacatcaatcggacctgacagcgatgccgctaagaatgctgcgaagattgtggttgccttcattgccgctggatcacctccacaagttatcgaacgccatggattgccggaaggattcaacgagaaaatgggcggattcctcgctaagggtgactttggtggcgctatcggtgccgtcacggatgaggcactcgatgccttctccgtctgcgggacgcccgatgaatttattcccaaaatagagggcctggctgagatgggcgtgacccagtatgtcgccggttcccctgttgggaaaaatgtagaggagtccatcaagcttctgggcgacgtaattgcaagtttctga

SEQ ID NO: 10252 - protein, 64 aa, Methanobrevibacter gottschalkii
MTVPETSEILASFGFKNLNKQVFTFKIIFISMLFGLDIPFILSELESKEKLRKYFNISEVWSAD

SEQ ID NO: 10253 - protein, 82 aa, Methanobrevibacter gottschalkii
MGDKLLIMYKQNNCLPFLILEDKTYNFVGDFVDPIRHENKCEILDNSVQIILPIQSILDNNFFVNSDGVIEYRERHCCKCGS

SEQ ID NO: 10254 - protein, 350 aa, Methanobrevibacter gottschalkii
MYSIKSVKEIQDLNPFIVVGCGGGGEKFSNLEGVETVGFIDDNVKKQGKEFCGYIVAGSLDESLKHAKNAKSLVIMLPIGAEGSALKYAVQAIDAGLNVITSFRSLSITENISLKKFADAKGVVIKDIGPRLDVVKTIAGVAPKKSCEVLPKISYESKAPVIFVGGTSQECGKRTTTKKLGIASMKRGLTPAIISTDEMGLEEPTDFNFRAGSLSAMDVPAAVLSAIKYAEETKQPDIIFIEGQSSLTEKGNPHPRGLSAAILIGAAPDAVIVGHRPNHPYREPRGIEEEIRAIEAVEPTKVVGLSINLKNADLDLCPEFFESKYNLPAEDVYNNGADKLLDAIFEYLGE

SEQ ID NO: 10255 - protein, 177 aa, Methanobrevibacter gottschalkii
MSFMDNLKRSLGYEETEDSEKKEGGSFNFSEFVNDFTKSVKNSREQYKQSKQQETAQQQYRPAPEPQQAHRTAPVYDDFDDDFVITPEQSFYEIVLIRPKTLDDINYMVDQILEEKNPIIVDLSFLEKESEANFKLAGDKIRQMRTKYGAQALLLTRSEDKNLIILSPRKVKLVNKG

SEQ ID NO: 10256 - protein, 304 aa, Methanobrevibacter gottschalkii
MLIKKIPIPIAGLALALLSLGNLLQDMNPNVKYLFGAMGAIIIVLTILKAIFYPEDVKDDFKNPVIASSSGTFSMSLMLSSTYALEFMPNISYIVWIIGISLHILLMIYFTYHFIIRNFNITDVYPSYWIVYVGVSMAAITAPLHGHKEIGFIFLVISFISMLITLPLMIYRYVKYSEMPDANKPTTCIFTALMSILLVGYINSAPAISTAFIICLYCIACLFYIFSFYKLVEYRTLKFYPSFAAFTFPFVISALATKDIVKIVGSNTLLSSVQTVETLIAVIVVFYVLFEYCEFLKNSKKSRN

SEQ ID NO: 10257 - protein, 251 aa, Methanobrevibacter gottschalkii
MIDTHIHADARSSEDFKEMYLSGIDCAITCSYYPYKIDAENILLNHLNRILEYDTLRASQYGLDLKVALGIHPTNSIENPQMIFDEMYNWIENKQIVAIGEIGLEDLTETEIDIFKKQLDIADETNSKVIIHTPRKKKLEVLKVILDIVPQHLDESQAVIDHVNQEVIGEVIDRNYMLGITVQPQKLDVDGAIDILDNFGFDNFLLNSDMSNKPSDHLSVAKTIRELSRLGYKKSSIDKISHRNASDYFKI

SEQ ID NO: 10258 - protein, 299 aa, Methanobrevibacter gottschalkii
MFLIVGSLYAVSLFHIFSLQEILYFLVIKNNDVSNTRLVINLENNENYLKSYDLISEEVKYLTNSIIRLKILATLFKCPLNMKDINGITSLSYSSISSNLHNLELKGHVYREHNKYFLSNSTKLEVEQVLKLGNLINLLNDFFNILDKHLVDMIPNQSVAELYLLGNACLMESDGVDVYRIYKYIEDALNAAEEVKCVLPFYYETFNDKLNDLVKNDKKVEAMVPLSLFEVFDEKSEIGKLSFFSNDKTFLLIITHELMILGLFKEDGYFDQNRLLTSKNSDSIKWANNLYENFKIKNK

SEQ ID NO: 10259 - protein, 564 aa, Methanobrevibacter gottschalkii
MNHDKMSNISSKRGFLWPSFEIYSGVSGFTDYGPLGASLKNNIMQKWRKQYVSGEGFYEIEGPTVMPKEVLKASGHVDNFTDPMCKCEDCGEVFRADHIIEEVIGEDVESLENEELDQIVIDNNIKCPECGGNLSNIWNYNLMFKTEIGAKGDKIGYMRPETAQGIFILFKRLERFFRGKLPFGAVQLGKAYRNEISPRQGVIRLREFTQAEAEIFLNPKEKTHPKFSQIENVILRLNSQEVQEKNLEPLEITAREALDKGIVANEMLIYQLYLARKFLTEIGIPEDVLRFRQHLKGEMAHYALDCWDVEVKTDKYGWVEIIGIADRGDYDLSSHSKYSNDELNVFIEYDKPKKVQKTIVKPNLSKFGPIFKGDSPKVKQAIEDANVEDIKSAIKSEGKFTVELDKVYEVPEDLLIFEDVEEEITGEKIIPHVIEPSFGIDRITYSVLLHSFTETEGKDYFRFDKSVAPVQLGIFPLVNKEGPREIAQELTEQFRMNGFKVEYDATGTIGKRYARADEIGIPIAVTVDFDTLDDNQVTVRDRDSEAQERIPIAELADYVEKYYK

SEQ ID NO: 10260 - protein, 194 aa, Methanobrevibacter gottschalkii
MAILSDKDIKKYLEEGKIGIEPLLDEKQIQPSSVDMRLGDEFKVFKVIRKPYIDPKDEEDIASYMESTTVNEGEAFIIHPNEFALATTLEYVKVPDDLVARVEGRSSMGRLGVTMHVTAGFIDPGFEGKITLEISNIGAMPVALYPGQRVCQIVFETMTTPSEVPYGHPDRQSKYMGQTSPESSRVKLDYELKK

SEQ ID NO: 10261 - protein, 276 aa, Methanobrevibacter gottschalkii
MRRIRFVDISIFVLKYIFNWRFWIAEITKKSKIYKKFIDKMLFEEDEIVVVPNTVNINKKIESEGSEFLPTDIIKEVVKRSEDIVIMNTCLCRESNDCQDYPHDIGCIFLGPTTRKIPNHIGKKATVDEALAQIDKADEAGLTHIIGRNKIDTIWMNIRPGKGLLTICHCCPCCCLWKVYPNLDEDISDKIEKLNGVEIKLHEDNCKHCMKCLDDICMYGSISLENNKITIDYDTCKGCGLCVNACKFDAITIDYTAKTIDNIVNRIDDLIEIKEL

SEQ ID NO: 10262 - protein, 302 aa, Methanobrevibacter gottschalkii
MIKIGDTAVSEEKVVETTSLNSPKEKEKSDDEKKSTSTKKAKSTSQSRGTARAKLIKKQEKKEISLFKENIYIVFVECETPGNIGFLARTMANFGLKNLVLINPPTLTNEAYYQATHGKYIVENAKIYPTLDDFYQSQRIDFKVASTGMAGGSYNLSRIPIRPEELGRSMNVSNKIAILFGREGNGLTNKEIEDCDICVSIPTDPTYPIMNISHAAAIIFYELFRNKHDYGAEGLDESSDLEKEFLLMDMKEIINSLDIPDHKKRNGLKTFNNIISRAFITSREAHTFKGILRRMKNKFGEQ

SEQ ID NO: 10263 - protein, 491 aa, Methanobrevibacter gottschalkii
MIKVYVSRFNRGIDTEPHLECYDINETPNMKVLDALQAINEKYDADISFRSSCRAGQCGSCGILFNGNGALACQKEIKDGAIIEPLKFPVIKDLIVDTSSIEAKVKDLELSLQCSHECSELDSSITKKDTADTKKVRNCIECYSCYSTCPVVNIATEEFGGPYLMRYINKFDTDPRDNFDRLKEALDEGLYNCTSCGKCLSVCPKNINTFGDAIEKMRAIAVANGSGPLPKHVAFKENILKTGRSVKTDKPTFIEETKNKTGSKIAFFTGCMVDYKFPEVGHKLVKILKENGIDIDVPEGQVCCGSPLLRTGQTDIVQDLVDKNKEVFKDYDTIITVCSGCGATLKNNHPEFGSKLNVMDISEFLVDKLDESKLKDVNMTVTYHDPCHLARSQGIKDAPREIIEKIPGVEFKEMLYPCQCCGAGGGIKSGKPEIAMELAKSKAEMVKDTGADAVVTICPFCELNIQDGLNEIGYDNIKCIHILELLDKAYE

SEQ ID NO: 10264 - protein, 259 aa, Methanobrevibacter gottschalkii
MKIKAVKLFENGFMTQPFAFGGEKGAENFDASVKYRSSLQNYVIDTGDEVILVDTGLPSELPEQPRDDNAPIWSGDKIKDYVPALKEAGYDIEDITKILVTHKHLDHTGELKKFPNAEIFMSKTEAGEVDLESDNIIGVDFDDGEYYNFKKSQKIANGVYLIEAKGHTLGNSMVIVECDDVFYMLHGDITYTDEALYENKLSIVFEDIGAARETLDNVREFIKNNKTVYLSTHTPLGYENLENNKIIDLENPPESIYPN

SEQ ID NO: 10265 - protein, 628 aa, Methanobrevibacter gottschalkii
MNLKELVTGDSGEKRFLLGNEAAVRGLIEAGISIAATYPGTPSSEIGNVLSVLAKDANIYFEFSTNEKVAMEVAATAAVSGLRSFTFMKHVGMNVAADSFMTTAYSGVNGGMVILSADDPSLFSSQNEQDTRNYAKLANVPILEPSNCQEVKDMVKYAFDLSEQFKLPVIVRTTTRVSHMRGVVEFGDVRDNSSNNDNHWKRGHFNKDPSKYVPVPAFAGDMHVRLWDKIRKIEEVSNKSKFNCEWGTGKKYGLIASSSAFNYACDVVKFNNLDIKILKLGFSYPFPQNKVIEFLSDLDEVFVVEEVDPIIERDTLVCIGSKNLNVQVHGKLDGTFPIYHEFNSDIVAEGLNKVLNFKENKSVQFTQSLEKLSEDIPSRAPVLCAGCPHRAMYYGINIAIEELGLKPEDVIFASDIGCYTLGINPPYNAADYLLSMGSSVGDGCGFSVSTDQKVASFIGDSTFFHSGISPLINAVHNKHNFVLTVLDNRITAMTGGQPNPGIPVDGMGDDAPEVSIRKLALACGCDFVRVINPFNLEQVVKTYREAFERKDAAVIISKAPCTLIKGLTRKPPVKFIESNCNNCDKCVKELACPAISKINGKITIDESQCDGCTACIQVCKYGALEDGR

SEQ ID NO: 10266 - protein, 215 aa, Methanobrevibacter gottschalkii
MDVQHVFRYVNMVPWKMVGEKMDNHYNIYICGVGGQGIIKTSTIIGEAAMNQGLDVVMSEIHGMSQRGGSVSTELKIGGYNSSIIPKQGADMLLSFEPVETIRGLDKVNSETKIVYNTHPIIPSSTDKQYPNVDSITKTLKENFKYVLPIDGTQLAMDAGSVLALNMVLLGAVTADDKFPLTKESVIEAMKNNLKPKFHEMNLKAIESGYNSIKS

SEQ ID NO: 10267 - protein, 92 aa, Methanobrevibacter gottschalkii
MAYKIDNAIIKKDRNGKVTLIDPENVFGDEDAFIAVKSDDLITIQLLINAIMKNDFKSWKELGAIPETEPIKSLFVRLGYSREDIANMLKEF

SEQ ID NO: 10268 - protein, 143 aa, Methanobrevibacter gottschalkii
MAVKQISVFVENKEGRIKKAINTLAEENINIRALSIADTTKYGILRLIVSDNEKAIAALEKDGFIVKENEVILLAVPDKPNGLNSTLAIFDEKGINLEYLYAFVSSKTDAAIVVMRLENMEKAIEALQDSNVKILKTEDIKDL

SEQ ID NO: 10269 - protein, 434 aa, Methanobrevibacter gottschalkii
MFWDEKAECMSKEEKEKIQLKRLQKSVKLAYENVEFYKKRFDEIGLKPEDIKTLKDIEKIPFTTKSDLREAYPLGLLAVPREDIVEVHASSGTTGKPTVTAYTQNDLDIWGECIARGLKMAGAKKDYIIQNAYGYGLFTGGFGIHHGGNMMGTITIPISAGNTQRQLDTMVDFQSDILTCTPSYAAYIGESREKAGISLDEINLKAGIHGAEMWTDEMRKRIETSLGIKTHNIYGLTEVMGPGVAQECGEQNGMHIQDDHFYPEIIDPETGETLGYGEKGELVLTSLTKTGMPILRFRTKDLTSLIGEACDCGRTTVRMTRITGRSDDMLKIKGVMVFPSQIEKALLKIQGISHNYMIHVTRPDILDEVEVKVEASKELFFDEMKEMEKVEKQIQASIRSETGLRVDVTICEPESLPRSEGKAVRVIDERNFED

SEQ ID NO: 10270 - protein, 291 aa, Methanobrevibacter gottschalkii
MISIFHLFFKKTIYSSLILNLIGDILNFKFKECKTEFDGGNFEEALDILGEIENDDEDYKFALMLKYNCLMGLGCYGDALTIINMLIHENPYMSLFWFDKVKCHYFLKDLTNAAGALYHVEHIIDLKDVVEIIDFVKLCNMIGEHVIALKYCNIVLDTDENQIDALLEKSLISNIIDDKNMMNECGDKLFELSGDNLSLLMVSFALKLFSGMYRDSFNIILNINCMDSKMGLILKKIIYNQMLCDLNIQIVMESNAELTIDEFILLLFDYRYYGVESGEVKNVRYMIVKQD

SEQ ID NO: 10271 - protein, 536 aa, Methanobrevibacter gottschalkii
MNVMILAIVFIIYIFSLVFVGYYAYKKTNSSEDFMIAGKDTHPFIMAMSYGATFISTAAIVGFGGVASEYGMSVLWLAFLNIIIGVFIAFVFLGKRTRRMGHALNSLTFPEFLGKRFNSNFIHYFSGLVIFCAMPLYAAVVLIGAARFLESSLLIDFSIALLILSIIITFYVLFGGIRGVMYTDALQGSIMVVAMVFLLVFVYWLLGGIDIANTALTNMVNLYPANAIATGGTGWTAFPEFGTPFWWSLVSSTLIGVGIGVLAQPSLIVRFMTVKSDKELNRSVLIGGIFIAIMPTTAYIVGSLSNVYFYDKLGKIAVDVVGGNIDKVIPTFITMALPEWFVYIFLLSLIAAAMSTISSQLHTQGTAFGVDIYGTLRNKSKQKLDQVSISRVGILIAIISALVMAFSLPGSVVALGTSLFFEICAAAFLPVFLGALYWKGITRLGAISGIISGTLVSLFWLMFVFKKTALGLGICKFVFGVETLLPVAPWPFIDVMLIAVPISAIFTIVVSLLTKPLEQEVIDKAFENIDEKGSDA

SEQ ID NO: 10272 - protein, 37 aa, Methanobrevibacter gottschalkii
MMILGIEDPMIWGVYVGIILSTLLCVVYGIVNWNNGD

SEQ ID NO: 10273 - protein, 239 aa, Methanobrevibacter gottschalkii
MKELFSNFGRIQKNDPEFHEIFEKFAYGEVFEYSNLSEKESILVTLASLLACQSPKAFKKILLAALDMDLTAEEIKELLYQSVPYVGFARAHNFFGIVIKVFNKKGIELPLPNRSNTNPENRHKKGRELQDKYFGAEIIQMMNDNTPADQQHFNRFLEGFCFGDFYTRDGLNDQERELITFVFLASLGGCESQLMGHIQGNLNAGNDKEKLISALTVVMPYIGFPRTLNALSIVNESCE

SEQ ID NO: 10274 - protein, 144 aa, Methanobrevibacter gottschalkii
MNISNRSVKMSNIEKVDEILSKAEVFYLATVYGEKPKVRPLGFHLLIDGKIYFGVGTFKEVYKQIESNQNVEIAAWDGEHFLRYYGVADLTKNDAIVEKAFELMPEIAEMYEANGWEMGVFYLNDATAEIRNMMNVEETYEFKY

SEQ ID NO: 10275 - protein, 358 aa, Methanobrevibacter gottschalkii
MLIILIVLGVATHLFLTPSSVETEGSKNITDMLNRTVEVPNGVNNVIATSPPMTTVLYMLSPEKLKAVNFQWTEDELKYVPSEYANLPVVGGWYGTQDGSYEEFIAAEPDIVIESIDEGGDGDAFTVQERQDKFGKIPVLAVKDTTNVEKIGDSISFMGEVIGTEDKANQLNEFNTKYLDIVHDKSSKLVDSNKKTVYYAASSDGLQTYPSGASHGQLIDLIGGKNVADSLNQGNTTSGVQVSIEQVIKLDPDVIITNDMHFYNKVYNDSSWAHLKAVKNKKVYVSPQSPFKWFDKPVGANMIIGVPWTAKVIYPEDYKDINMVDVTKEFYSNFYHFDLNDNQAKEILLDSGLKESNL

SEQ ID NO: 10276 - protein, 337 aa, Methanobrevibacter gottschalkii
MDNDSKDVISIILLIFLPIILFFTSFLLGRYPISPIDVINTILCPIFPQLEVSPTITTIVFEIRLPRIIAAIVVGAALAMAGAAFQSIFKNPLVSPDLLGVSNGAGFGAALAILISGAGVVTQIFAFAFGIISVSVTYLISRAYKAGGILILVLSGVAISAFFSALISAIKFIADPDDKLPEIVYWLMGSLASITMDQLIMIIIPIIVGMIILLTLRWHMNLLAMGDEEAQSLGLNPTRVRLLIIAGCTLLTSAAVSVSGIIGWIGLVIPHMARMIVGPDNKILIPASLSFGASFLLLIDNISRAIISIEIPIGILTAIIGVPIFLYLLKRGYSEWA

SEQ ID NO: 10277 - protein, 267 aa, Methanobrevibacter gottschalkii
MGITNNFYEVKNISFSYDGNEIFSDISFSIEKGDVLCILGPNGTGKTTLIKCLNGLHEIGSGEILIKGKNIKKLSFKEISRNIGYIPQNHAPSFPFKVIDVVLMGRAPYLNLIDAPRKKDMGIALNSLKTLGIDNLKDKEYTNLSGGEMQLVFLARILCQQPDILILDEPTSHLDFGNQIKLLEIIDNLAASGLSIIMSSHFPDHAFLSSNKVAIMKDGCFIDFGSPNDVVTEENLKKAYSIDVKLIELENKRKVCVPLKTNFELSL

SEQ ID NO: 10278 - protein, 189 aa, Methanobrevibacter gottschalkii
MNEQDYDEQLAKAAKFHGHICGGIAIGTKLAMYGLELLGMEFNQKHKNLIVFLEIDRCMSDAVQSVTGCSMGKRTLKQMYYGKFAATFYNQDTGEALRITDADANKKFKDEETKEEMIDRFRRTLPEELFKVNKVKIELNPGDMPGKPYTTTFCSVCGEKVSDGRHILRGGKPICRSCAEGSYYELIED

SEQ ID NO: 10279 - protein, 686 aa, Methanobrevibacter gottschalkii
MRKCFVIILVLCLLFSLNICFAQDISNSTDFTFQNSNFDYLEKTDSVNLISTSDKISTHIDVVSNTTFDGTVDYFKIKLSDENNKSVPNAKVIFTVNGVSYDKNTDSQGISSLQINLADGSYKVISKFVGDSNYKSSSKSTTITIDNTRIVEDGLNNAEIQNIIDDAKEGNVILFKGNSYSNINLVINKRLTLISTVNTVLKSSSSSPTITIKGKEASYSIVKGFKIQGNGDGVVVDGSNYVRILNNDITADGVGITAFNVKYINITGNNIVKNGKCGIILYSTEKSYIINNVINNNNANGIVLTKSDITYIDSNTISNNARYGILLTNKFNGNSYKNGPENVYITKNTINNNKWDGISVNNAEDNINIKGNTIVGNDESGISVNVVGSYKIQSNIITNSYTGVRFDEDHVQKKNQEITYNAIYGNAHVQIEAKSYNGVNPLSVGDNWYTDDGLLCPKIKTNNLKFTVTQIGKNQFQATFVDSNGNIASLLPDRELKYKTNDGKIATVMIKGGIGTFTVTASDADIIKSTVDRTSRKNVYDSNSPTKTPQNGQSPTYDYPNIDYGGGQGNGNGQGGNANNGNGSSQKSSDDSGNSSNSKKMEPNSNPVNQANDVSQSYDTSQSMARADASEISGGANSGSQSIAKQIIIEDDEFFIVKGLSLIVLLILLTIGFYYRDDINEMRSKL

SEQ ID NO: 10280 - protein, 485 aa, Methanobrevibacter gottschalkii
MSINDNLGDASSDLENEIINSKNGDIILIKPGTYNIHNITITNKTITLQGIGNPSDIIIDGGKQSSIFLINNITTCVTFKNLTFINGLSYNFGGAICINTGSVYIDNCQFINNTALNNTNAGAISNYGNEDNKAYLLVNNTLFMNNHADHDGGAVTTCYANSDMYNCVFINNTAVRDGGAVRVSVYGYGHVEDCIFMYNHADEWGGAYYSWSGTSKINRCIFMNNTAGTNGGAVMVSGNLDLENSIIVNNSGGKTGGSFYIQEPMYQAKTYINVNNNLITNNSSPKGQEIYVKWRHSQNLYPDFNDNDWGSEDPNDYKINDPDNVTARSKVKTTTDKSNLLDELNFNALNKYYDLIKDYFPENYLENIKKQAESKANQNKENNKNNTPNNKDEHGLKDSNNTKNSLNDSKIILSNKTTENIETENYLISSNSTTPIGDDEKAYELNETKSVSKSQSPRLLYLVICLVITIIALFIGYGKENSKDK

SEQ ID NO: 10281 - protein, 954 aa, Methanobrevibacter gottschalkii
MIGVVCAEDNNVTENATNEDFQAIQILIDNANPGDSIYLENKTYQGSGSPIIVNKSVNVYGVDSSKTILDASNKSSIFLISKDVKVNFNGLTLTNGYNETKGGAIYNLGILNITNSKISSNYAESGAIRNEGTGKLTISNSLFDKNCGSFGAAIDNYVGYLNIVDTTFTNNDCLEGGAIYNRFGEFLVYNCTFINNSAARGGGVYNNRGGMYIYNSRFIANNVYDLGGGIKSWGSCEVYNTVLINNTAKQGGGIYVSEFTLIAENCFVENNSAHWGGGIAVEAKATAKIKNATIINNLADRGAGIDINMGSIDLQDSIVNNNVAKYGAGGIYFALLSSTVKNTYICNNIANTSGGGCYIYGFRGVVVNFTNVIINNNSASKGGAIYSTGTANIQNSILNSNNAYKGGAIYNELNLTVKDSQFFENTADSWGGAIYNNLNSFIDNVVLNSNEVKQFGGAIYNEKLVNAKNSLFESNKALQAGAIYSTNDLIIDNSQFIKNYVKRNYCVLMLSKGDVNITNSLFKFNTNADEGGCIFNYNANLLIDASQFISNDARSYGAAIDNSGNLTIKNSLFYKNKAYGAAAIDNSGNLVIIKSNFTDNVATNNGGAIDSNGKLIIIGSIFKNNLAGNNGGALILRGDTTVTHSIIYNNHDKNGYAIFNKGVENISLSNNWWGSNNPDFEKLLNMGTSDDFNWIIMSFSSNNQLIQYKNSILNINFDNVKDKMGNVYKINSTELLPIFKIALSNYGEVTISNGFKSMNKNIPLITSISAKIDNQSIILKITPTNKRIIDNKNIVVDYNGKVTYKVRVVGVDGKIVGANVAVVMKIAGKKYTVKTNKNGFVSKLFSLTPGKYSIITTYKGFTVKNSITVKKVLYAKSITKKKSKKITYSVSLKISNGKPIAGKKITFKIKSKTYTAKTNKKGVAVVSFKNLKVGKYSVIVNYLNSKVKTTLKIK

SEQ ID NO: 10282 - protein, 1472 aa, Methanobrevibacter gottschalkii
MKINKILVLLSFILVVLICTNSVSAFSDDSNLTDDLSSFASDFDKSNLGQNIEVNLDKLSFSEDSPLSDTIIVEEVEKDHNEMDDSTIQKAINNAKAGDTIIINGTSYVHCHFIIDKKLTIISNVGTTMEPCGSDAVSGHRGIFYISPEASGTVISGFTIRNDVAKADDYGILVRGADDVKIQNCVIYNNGLSSDAIRVENTKNTVIENVSISKAFNGIRILDSENVNISDSFIDNAKYCINVIDSNKINLVSNNITNNKISGIAISGSSKNINILSNNISKGHVGINLTVANHVYIISNYIGLSDKYGVYTNCNITKMEIKGNFIDRNGNYNIFNDHRVKNLFVNGGENKQVINNNYMIGGDNQDRPVWHQVYEYRPGKGDNTYNPETDTYTYVGEDNGDYYGHQSGTFMGYVLAINQFLQCPNIYFTFPTNGVTPWTKTGNYNLYLSEITQVKKGVYSISIVDVDGNLAEEISSVPVTFYLMKNNTDNNGKQKAPQEDDVSKVVMMKNGTATVRFYPDEFKESDNILLASFPGIGNNIYSNMYSPYKLFSIDDKFIPGNVTETKVTVSNLNTYPNSNAIFKVILIDLTGNAIANELVNFKINGKSYGATTDVNGVAKIKISQSKEGTYTIAVNYIGDDIDYTSSSAQAKVAVKKISTKILSSNVYMIPNIAEYYSITLKDASGHGISYQKVTFKLNKKIYTVKTNKNGVAKLKLKFTKKTTYYIHVNFEGNSKYKAVSKTNKIIVKYSSKIAKLTVPKVTILPKTYKYYTISLKNTNGKGIAKQKITVKLNGKTYIKTTNGKGNVAIKVKFSKLGAYKVSAIYKGSKIYKKTSSNGKIVVAKSSTKFTAPKVTILPYEKKVYTTTLKTSAGKALSKQKITIVLNGKTYSKTTNSKGQASINVKFSSENVYSVILKYSGNGYYKSSKATGTITVSKISTQLISYNKTFAIDSTKNFTISLKDKSGKTLSNQNITFLFNNQNLTKITDENGIASVNLDANVGSFEIISKYCGNNQYKSISNTNMITISNKTNVVFVDASLPNSEIQKIFDDCKNGSNVEFLGNSYNDISLNINKPLNIYSENRITLNAKSMSPVFKVLASDVKICNLSIVGNSYDGIEINNAVNVVIFENNILNRLDQSKIGEYMLSTISLPGYGINVIDSKNVEISNNSINTFESGIFVSNSNNLSINSNVLKENNYGIKYGFNVSNSNITNNMISESIGLYTNLVPEGPRGYGVFLNNSAVNVTIAKNNISWNHLGISIDANYSTGILITSNLISDNVLEGIRFNEGYDLAKNAIEPVVTDNAIYRNGRGPSMMILGELSANPAGIYGPGAFNDSLKLKLGANWYGKNLIVTWDNDTGVVGYGTMCPRINTTGIAFKEITCVNPGTYSITFYKNDEVASKLPVFNMYATLNDNVEIVFDVINGVGVFTFDTQKFTTGENVIKVSSGSLNDSDRIFKVEMSKTLDDSEVPI

SEQ ID NO: 10283 - protein, 182 aa, Methanobrevibacter gottschalkii
MTIKRCSWVTDEEIYIKYHDEEWGVPTHDDQELFEMLVLESFQAGLSWITILKKRENFRKAFDNFDYMKISEYKEDKVNELKENKGIIRHKGKINAAINNAKIFMEIQNEFESFDSYIWGFSNGKIIKAEFKTESELSKTISKDLKKRGMKFVGPTIVYSYLESIGIIDNHQKSCFKFNKTD

SEQ ID NO: 10284 - protein, 450 aa, Methanobrevibacter gottschalkii
MNNALKLKLSMFFLMMFVMIFYMLVFGKVNIVIGLMVVVAALLNLGNDLSYNPKLSFIKVFSLLMILGFASYLNNPITAFGCILTFFIVFGTTFTSYHLFGTHVYLPFLMIYFMMVVIPVPLEALPMRLLSLAIGAIFIVGLNLKVNGKKYSKLSKFTISSLINELLEAIDLKLDGKEVSMDSFNVANGFYRSIFSKFEYKYFPNQKHECILNILKSFQYIGWSLSNYELSVNELTHIKRILNDIKNFKFSEIEEITGETKEMNLILLNLKIIVNEASKKNIEKEKKIPNKYVVFNVLKHLIKRQFSFKSAKFTFAFKMAVVLTLWEVITLIFNFPYTKWLYFASIPLMLPYIDDVAHTAKSRMGGTLIGVSAFAVIMIALQYIPISSYIAMIIVLIASLFGMVFSLQNKLKLSSFTTLMSVTVSLMYITPPKAIKNTVGYCCNDCCNLY

SEQ ID NO: 10285 - protein, 141 aa, Methanobrevibacter gottschalkii
MIVVTFINYGFLPFSVEKETKNNLKTSYVLNRCFVNLIKLKCEGKNINKTSLLAVSSMVHENIELTNNNKELYQMQTKTTNISNSILNYIEIYGISSEMKVKIIKVIENKGNFDNHENIILYSINYVVNLLNEEKNLIESI

SEQ ID NO: 10286 - protein, 380 aa, Methanobrevibacter gottschalkii
MVELGLGMMRLPVLDENDFSSVDYDQITKMIDALMDAGFNCFDTAYPYHEGLSEVALRKCLVERYPRDSFKVFDKLPTFAITEESQLEPIFKEQLERCGVEYFDYYLMHNVSGYSEKGWLDVDSFSFANKKKEEGYIKHLGLSTHANAEFLDNMLTIHPEMEFVLLQINYLDWEDEGIESRKCWEVARKHNKPIMVMEAFKGGFLSDVPKEAEKLMKEYAPDKSVVSWAMRFVANLDGVFLVLTGASSLEQVEENIVEFNNATPLNDEELNVISEVSEIINANITVDCTKCRYCVDSCSEEIDIAKLFDLYNKEKILGENDWSPIGNAYVNYSKIPGVGIASDCTECELCIEECPQEINIPEVLKDVAKTFETEGYGFTN

SEQ ID NO: 10287 - protein, 116 aa, Methanobrevibacter gottschalkii
MIPGMNKRQMKQMEKQMKKMGMKMEELEGVREVVIRFDEKELIIDNPSVSLMNVMGQETYQVEGKAHEVELDYEIEIPEEDIEMVANSAGVSANKAKEALEECRGDLAEAIMKLNQ

SEQ ID NO: 10288 - protein, 247 aa, Methanobrevibacter gottschalkii
MTLIVHISDLHVCENEFDEDIFMQAVSEINNLKPDMIILTGDITNSGYYYEFQQATKYLEMFEAPLFAVPGNHDARNLGYQTFEELIGERSWKLTMGGNLTVIGLDSSSPDENRGHIGNPQHMWLEHQLDECTINENFSIVALHHHVISIPQTGRERNVLSDAGDVLKTLTNHEVDLVLSGHKHVPNIWKLNNTIVVNAGSLCSKKLRGKIKNSYMIYNVTEDEIEIFLNNINGEKFLFGKYARNVL

SEQ ID NO: 10289 - protein, 341 aa, Methanobrevibacter gottschalkii
MKVVVDASNVAFSVKNEMGQPQMSNILAAVKALEEGEDEFVIIADASLRHDIDDKETFLKLLESENVEEVPAGNDADHFILDIASREKAKVLSNDKFRDYAAEFRNISSIRIPFIIENNRLTFGKPKKAKKDKNILQHICDEIIKELNFKKWEIYTGKEGLEISPLNIAKQAIIRIDNENNTESKLENIFSKIPMFNKIVEMVDDVEIAAPYVIFVLVHPKDYKLAVKNAGNISVTVADRLGLEKKPLIAVRNDLFTKQGNFELNIMLADEVTEYAPYNISVRVCDSDEIFIKRNSRNIASTIAGRLGSWKFPFVSVKPDMLLEKPGDFEIELEKGGGLDG

SEQ ID NO: 10290 - protein, 400 aa, Methanobrevibacter gottschalkii
MVNPLTKSLIKVTTNLTPISVGTKFFPTNSLETEYVELFNYTQTILFELDKAEITSDSILENLIRDVGVENLPKDYNFYELKPAENRIEEYALVSNIIMGNDRYFYIELQNPSHLINIFVKIIENEKGEVVEKTATELVAKMLSKNDAIRVAIELIGIGLSEGIQVISAVGMTGAASIERAIHYTQNVGSFPGIAFTKLGGEYALVFDSPFLLQESRPVDLENYLFIDLIDSTKFIDKNGRNQLVDLMTGIKNFIETECNGELEGYREGGDDFIARFPSKDLAIRAGLDAAWFALDNGAKIRAGVGRSRREAGERAQLVDDLKSTAPLSLVVFELANGLYAYNIPSEFTRTLINLIENEKAKLIGVFVFVFIFAFIMSILGLGVFSFIGVIIALVYAFVA

SEQ ID NO: 10291 - protein, 125 aa, Methanobrevibacter gottschalkii
MRRKKDDKRVLFSPNSNRPKHSNKRKLNLPNFQRQPQRSRKQSKWGNVTVFLIILALVAFVVGAGMGVSLSFDNDDGPHWKNVTEEMTTNLNETDNFTYDEEVDGVDFNSNETLTELNVTVKPSY

SEQ ID NO: 10292 - protein, 407 aa, Methanobrevibacter gottschalkii
MEFIKDLSGGFSVIENLMVSGAREGKFGVAIIYSPNSTASAVFTSNKVVAAPVNYTKNVLKKGIISAVLVNSGNANCFTGKKGFKDCETLAELVSNDLNLPKDEIAISSTGVIGREMPIDIISKVAYESLSKLGNGPENSLAAAKAIMTTDTFPKECAIEVTLTTGETVKIAGITKGSGMIAPNMGTMLSFIVTDAVIPSDEINKALKKSADISFNMIVVDGDESTNDTCLMMANGTSNVEVVNEGKLDSNFQEALNYICIDLAKKMARDGEGATKFIEANVYGAKNETDAKLAAKSIISSNLFKSAVFGGDPNWGRIVSAIGYSGCDLNPDIVTIAIADDSDDVDLVCNGKILAFENTPNLKRAEKIMQSKNVKVNIDMHLGDGEATAWGCDLTYDYVKINAEYTT

SEQ ID NO: 10293 - protein, 34 aa, Methanobrevibacter gottschalkii
MAKVKGTNRRTRQKRSYTKPGSKRGRGVKQTWKK

SEQ ID NO: 10294 - protein, 196 aa, Methanobrevibacter gottschalkii
MNGHRAHGFSSVHFLDSDEILNELNLKGDETFMDAGCGDGHIAIKVIEDYLPKGTVYAVDVYGASIEDMETYKNENNVENLINIEADIPKGIPGVEDESVDVVLMVNVFHGFKASRTIDDAIEELKRIIKKDGKIAIMDYKAWDVPKGPPTAFRSSPEELEEIFNKHGLKMTYLNEEIGEDIPEGKSHNFIVFQKE

SEQ ID NO: 10295 - protein, 267 aa, Methanobrevibacter gottschalkii
MKSMKTVAVAIIAIVVIVAVGLYLTGSVGTSNGDLNGQDVQLAAAASLKNVYDEKLIPMFEEKYPGVKVTPTYASSGDLQKQIENGLKADVFMSAGNKQMDALINESYVDNDSNVKFLENKLVLIVSADSNVNVSSFEDLKNVNGTIAIGDPESVPAGQYANESLHNLGIWDDVESKLSLGTDVTAVLNQVAQGSADCGLVYTTDAKSSDEVKVICEAPEDSLKDIVYPVAPIKDSEHADAANKFMEFLQTPEAQSVFEDYGFTIHE

SEQ ID NO: 10296 - protein, 224 aa, Methanobrevibacter gottschalkii
MMDWTPILISMKTASLSIFITFFLGLIVAWGIVKIKKDSIKIVLDGIFTLPIVLPPTVVGFFLLYIFGVRGPIGSFLIDFFAVKIAFSWSATVIAAVVMSFPLMYRSARGAFEQVDSNLLDAGRTLGMSEWKIFWKVLFANALPGIISGGILAYARGLGEFGATAMIAGNIAGQTRTLPMAVYSEVAAGNMGDAFNYVIFIIIIAFIAIFIMDFVSIRKEKQWK

SEQ ID NO: 10297 - protein, 394 aa, Methanobrevibacter gottschalkii
MRCVGTVVRGIRTPIIKENDDLANIVVDSVMAAKESEGFEFKNKDIVAITEAVVGISEGNYVTVDDVAQDLQNKFPSKNIGVTNPILSRNRFSIILKGIARGMDKITLLTSFPADEVGNGILDEEVLDASEYNLASVISEEEYKKTFGSWKHPFTGINMIDLYRELIESEDCEVEFVFSNDVKTILDYNKDILTCDIHTREKTTKLLKSEGANVYGLHNVLSEPIGDSGFNPDYGVLGSNKATEEKLKLFPKTGNKLVNEIQKRLNNITGKQIEVMVYGDGAFKDPVGHIWELADPVVSPAHTSGLIGTPNEIKLKYVSDNKFANLRGEELKDAIKEEIKNKDKDLTGQMITQGTTPRRLTDLIGSLCDLTSGSGDKGTPVIFIQGYFDNLAND

SEQ ID NO: 10298 - protein, 197 aa, Methanobrevibacter gottschalkii
MEHKHHGKSSAKFLDSDEILSELNLKGDEVFMDAGCGDGYITKKAIKDYLPNGFVYAVDSYDKAIELMEIYKKDNAIENLINIEADISKGIPDVEEDSVDVLLMVNVFHGFIESSHRDAVIEELSRIIRNDGRIAIMDFRPVELSFGPPIEIKCGPDELEKLFNEYHFKKIHLNEKMGPKGPNGNSHYIIIFGKEQF

SEQ ID NO: 10299 - protein, 236 aa, Methanobrevibacter gottschalkii
MIFAAILAGGIGSRMGGTDTPKQFLTLGNKPVIIHTIEKFVINEKIDKIIVLTPKNFINHTNHLIEEYILYKDDIIVIEGGRTRNDTLMNGIDYINEHYGIDEDSIILTHDSVRPFVTHRIIEDNIDAAKKYGACDTVIPATDTIVESINGKTIESIPVRDYYYQGQTPQSFNIKKLFNLINSLTEEESNILTDACKIFALKDEDVYLVEGELTNIKITYPYDLKLANTILEDIHD

SEQ ID NO: 10300 - protein, 338 aa, Methanobrevibacter gottschalkii
MINIVYRLKSPKFFEEAIDEIELEGVIVRPTYLSICQADQRYYQGSRPAEILEKKLPMALIHEGIGEVVFDESGKLKSGDKVVMIPNTPEGKDVYRANYSYDSKFRGSGFDGFTSDLIKLQSDRVVKIPNEFNPHVAAFIELMTVSYQGISRFSEIAITPKDVLGVWGDGNLGFITALFLKEKFPESKVYVFGKHLENLNLFSFADGIYQIHNVPKDLLIDHAFECVGSSASQSAIEQIIDLINPQGSINLFGVSEYPIPLNTRMVLEKGLTIQGNSRSEREDFVGVVETLKQNPKLFEYLGKLVTNICEINSLNDLKESFDKDYISNFGKTILKWDK

SEQ ID NO: 10301 - protein, 174 aa, Methanobrevibacter gottschalkii
MKKQDFLMKTKLIQETFNDKRKIKCQIPIQNLKLENHIHQEGSIFITENDEIIDLELQLTNFTEDELVKYVELAEALYETNNKYVSIYIICPNTVNICVKECEIKSEAEFSIKLAAVEENPAEILLNIIKNKIIKGEILDNEDLYALSMMPLICKKEERNYFRKEYFKIINNLN

SEQ ID NO: 10302 - protein, 454 aa, Methanobrevibacter gottschalkii
MVNKNVALMRGEPEIAVKKLAIPIMISMILTALYNIIDGIWVAGLGPTAIAGIGFVTPIFMVLNGASVGLGNGATSSISRFIGAKNHEMANKSATHSLFIFLIASIILTIIFMMMQKPLLVSYGASGQTLNEAIAYATPLFLGLIGFMFSNGCSGILRGEGDMKRAMYVVILTVILNAILDPLFIYTIGLGSAGASLATIASSSIAALVMLYWILVKKDTYVNVTIKKFKLDMNLTKDILKVGIPSSLDMLIMAIAMSIYLIVISQVGGDYGIATFTSGQRLYLFAIMPLTAIGSAVIAVSGSAFGAKNGDYLSRTHIYGSKFGLILGTIITLILVIFATPLSTLFAYTPETTNLVPGIALYLQVVCPTLILTGIGIPSSFFYQGIGKGIYSLMFTILREIIFVVPLIFLFVYIFHLDILGIWLGLCIGRAIASTLNYIFARYEVRRIRSKFGN

SEQ ID NO: 10303 - protein, 611 aa, Methanobrevibacter gottschalkii
MSKINFGNIVEIIKHDFKASFSNPIVTIVLIAIIILPSLYALLNIQACWNPYENTNEVEFAIANLDNGSTFEGTYLNVGNEIVKDLKNNTKFDWKFVTEDELRKGVHDGDYYAGIIIPKNLSENIASITSDNPKQAELEYLVNIKSNPVATKLTDTGANTVYTTVNAKIVQIINLAAYGKLGDLKDGLSSGAGQLYSGGSQLSAGAAKISSGAGQVSSGVSDVQNGASQVQSGANQVQQGSSAINNGASDVKQGSASIKQSASDLEKGSQQIQSQVDPSTLPEPMKQYVEGNIKLANGSGELAKGSSQLADGSVKLADSSSKLANGASNVAGGANQVAGGSVELAKGSLSLAAGAQMLSGSASQALFSAAGALSSSANSLSSITGINETELGDYFYSPIKLDRQEVFSVPDYGSNVAPFYIVLSMWVGAIITCVMITPGTSQGTKYKPVEMYFGKVILFVVMSMLQAAVTISGAYILGIYISNSPLFIFSAILVSVIFMILVYSIISALGQVGKGIGVILLVLQISGTGGIYPIEIMQDFFQTLYPYLPMTYAITLIREAQLGVVWSNYLPALVVLVSIGIVTIIVAALIKQKADKSSKYFEERLKESGLF

SEQ ID NO: 10304 - protein, 67 aa, Methanobrevibacter gottschalkii
MNLILSNEKDINMKFCPKCMRELKKVFHGEPTTELAIESLENEIIIGNSCMGNYNYYCEYCDEFFQL

SEQ ID NO: 10305 - protein, 308 aa, Methanobrevibacter gottschalkii
MSEQKLEVFNVLNFLDNGYEIDDILNEGKFGTFPSAQDCIKYMIDEGYLKGEFNAAIHNDGKSLTAEEVSKKYTVAELKDLLRENGLKVSGKKQELVERLLPALSGEITVEPDNGESVDLALTDKAQEFLNENDWMDLYMFALVAFRFEDYETYRKNSSEDNIQTALKFCDEIISRALIANQFLVFIDALSAKAHVYAYDKDYESFLDYDLQRFILGLNPIVMDSQTYANYDAINYANVINLKNVIEQLDLGSLKKRFDKIWDKSNIKSITVPKKTCYKILQKALAGSDVEELNFNVTQKYFVRKFGV

SEQ ID NO: 10306 - protein, 196 aa, Methanobrevibacter gottschalkii
MRNKVAGIVFIVGSLYYVLAEAVSATFFNASLFNTYSFHTISELGIPNVNSPLFWLMNSAFILIGLTLIFGNFYKFKDFLVKNRIIIYILTLMTSTGVIMVGWIHGGNPFTLGYHMLGAMMAIFGGNVLLIVISRSMSEYSKFQKTTLVLGIFGLAVFWIMFFNMESIYMPVFERLSVYTMIIWCFLTGCYIISRE

SEQ ID NO: 10307 - protein, 82 aa, Methanobrevibacter gottschalkii
MTNLDKSVEEEILAIIEKYQKEDTKLLNYLITDDEITFFSPLANGNSITAEDLHKVADILKGTFKGMQIVNQEYRFTFEIGL

SEQ ID NO: 10308 - protein, 225 aa, Methanobrevibacter gottschalkii
MSEDNDLKNFLIKKGASKVGFANVDGLAEGFIDLPYGISLVLKIPKKAMIYIENEDYESYWSCFHSLIDRLTEISIKGEKYIKNHGYDAFALTMSRNECDMKRLLSILPYKTIATKSGLGWIGRSALFVTPDYGSAVVLGGILTNMPLTFGTQITDSQCDDCENCQKACPVGAINPQKWNTKLNRNDIIDIGKCREYIVEQYKNGLGCTKCMYECKLTKKYLGRL

SEQ ID NO: 10309 - protein, 287 aa, Methanobrevibacter gottschalkii
MKDIDVLIEALPYIKKFHDKKILIKYGGHAMVDDKAKSSTARDTVLLKYVGMKPLIVHGGGPEISRSMNKLGKQAKFIKGLRVTDEETMEIIEMVLVGKISTEIVSELIKHDGQAISLSGKDSSLIFAHKKGASKIDEELVDLGLVGEVDCINTNLLEMFLDNDYIPVISPVGIAEDGTSLNLNADTAAGEVASAIGAEKLIILTDVPGVLRDPSDPTSLIQKIKVDEIPSLIDEGIISGGMIPKIETCINAINNGVGSCHIIDGRKKHSILLEIFTTNGIGTMIYK

SEQ ID NO: 10310 - protein, 489 aa, Methanobrevibacter gottschalkii
MLNITTFLDANSKRLDKDVLFNPTTGEKYSSGEILSIVSEIGRILKELGIKKGDRILIYLKNSEEYLFSLFAIWRIGAIAIPTNRVFTANELEYIVSDSKAKLMITDEEAKDLINVETYIPKNISSFKNCKVLESENTDWDDLCQLQYTSGTTGQPKGAMLTHGNYFTAIHNECDVLTLKQDDVFLGIYPMAHVGLSWAIAALRAAAYYILIEKFNMDEYLELCEKEKVSVLTGMPPVIHSLTTIDARKQLKTVREIISGGGPLHKKIWKDFHQTYQIPIINAYGLSETIVIGTGTVIRPEDYWEADRFESVGHPVCFSEVKIVDEHDSDIILPKYEQGEIALRGPAVAKGYWGNEEKTKSSFLDDGWFLTGDIGYLDEDNRLFITDRKKDMIVMSGWKIYPTEVEEVLIKYPAVKEIAIFSINDCHRGEIPVAAVVWKDGEECEGLVSYARKNLSRYKVPRKIFTLNELPRVNGWKLLRRELRKMFKE

SEQ ID NO: 10311 - protein, 352 aa, Methanobrevibacter gottschalkii
MNYHLNIINAILLIYEQIVVSEIMYDIAVISGDGIGREVMSACEYLLDKLDLKLSFKYGEAGFDCFNKNGTTLPEETIKLANDSDAVLFGASTSTPGQPSPIINLRKELNVYANIRPIKSYKGINSIHDDIDFVIVRENTEGLYSQAEYGDENKVIAERIITRRASERISKAAFNLCVKRGQSKVTCVHKSNVLKKTDGVFKESFYKIAKEYPQIKTEDFYVDATAMYLITQPQNFDVIVSSNLFGDILSDESAGLVGGLGLAPSGNIGDHNGLFEPVHGSAPDIAGKNIANPCSMILSASMMLDYLGEWEISNDIKGAIEKVISDCKIRTPDLGGDSSTMEVTKAIVKEII

SEQ ID NO: 10312 - protein, 154 aa, Methanobrevibacter gottschalkii
MESTIEELIELLNDKDDYVVEDAIGQLELKGADALEPLMDALSHRKKNVRLHAATLLGAINDEKAIPSLIETLKDNNKLVRREASTALSRMGAPAVDPLIETLAAEDWRVRGAAAWALGNLGDKKAIHELEKLLDDESAFVKAGAKSAIESIQK

SEQ ID NO: 10313 - protein, 296 aa, Methanobrevibacter gottschalkii
MHYTGPVYRPPPEANTPLLEVTYGCSWNECSFCTMYDTQKFGISPIEDIEEDLAELSQFYPKDLKRIFLVNGDAFALQAKKLFAISDLIHEYFPEVECITCYASIKNIKPKSDEDLEKLRQKGFNELYIGLETAYNPALNQMRKEYTQKDEYEQLERIQNVGMDYNALLMLGVAGRGNYKENIDATINLLNTFKPKIVGPLTTSVQNPSPLHEMKLKGEFVEATEREMICEELMLLENLEMDDDCFFFGGHPYNLIRFSDSFKNKDKMIENLKNQVFQIDELRQGILDTVLPRGNL

SEQ ID NO: 10314 - protein, 175 aa, Methanobrevibacter gottschalkii
MRICLYGSGSAEIDEIYTDAAYELGCMMAQKGHTLVFGGGDTGMMGACAHGVQDTNGKSIGIAPKWIENFEPLCKECSKFIYVDSMDERKNKFLENSDAFIITPGGIGTLDEFFEIITLKKLEQHDKEIIVFNIDGFYNKMFDMIDDMAQKGFLYNQYEIFKIANTLEEIFNYFD

SEQ ID NO: 10315 - protein, 184 aa, Methanobrevibacter gottschalkii
MESEYILIELKELSSHDTITKKELMGLLKKYASIISVYDLMMATAHMRKDGEYVHANYREKYLEVYIKYFIMRMKEVLENEDYNYKTNIDKKSFDQSFPMLERTFEKERLTASKDDKFPLIYVITALYTTFILEEPIHPVGSEFPGSLKVEKRNGEFYCPVKDNQKDNTNAICHLCLAEQTPDI

SEQ ID NO: 10316 - protein, 214 aa, Methanobrevibacter gottschalkii
MSENFMEITKEDIENIENALKSNADYKLNNTKFDIKSFEKGGDISLIQYVADVENELVFQTKEENGKYYISEIFGLFMDNIINGNVSRDVFQSVSDYFHEVIAGEKNDFEDEKEELINFLVLTEEYDANKLEMDLNPSKIREDYKKDYGEIYGDDSLNRVQKSLALKELLHMSICQVVNDIDLFFTRPYDLTPEENAEKNKQEQKALENELQMS

SEQ ID NO: 10317 - protein, 155 aa, Methanobrevibacter gottschalkii
MITITKKEEVVLDQVKIFNLEYSDGIPVNILRKELGFHEYDLVHILEELQDKDLVIFRDNKVSLSESEKEINTVNSKKDIEQLELNLKEKESYNLIKSLVDDKNLISKYTLEGHLLYGDLKLTNFRMYHIILSLQNKGLLKPIDKSDGEYYLLVE

SEQ ID NO: 10318 - protein, 145 aa, Methanobrevibacter gottschalkii
MSLPKKLLADFDEVLKDRGYQSRSKGIRDALQDYIVRYQWMNSMEGQRIGIVTIIYDHHYTGVMENLAEIQHSFRNEINTSMHIHMTDKYCMEIVVVNGDIAEIRDLTERIMRLKGVEHVKLTSTANGEEFSEPGHSHDHGYHHH

SEQ ID NO: 10319 - protein, 255 aa, Methanobrevibacter gottschalkii
MKFKTTSYHFDLLKDNDRVSAFFEAINDYEGNNNLAYDLGCGIGVLSYFLKDHFGEVTSLEIDKKAYCCAKENLKSFDNVEVVNEDVLKYNFTKKADLIVCEMLDTALIDEEEIPVLNYAKQFLKEDGKIIPQGIINTAELVNLERHYVHWDEEVNYEVYSKPIVYSEFNFLNEINPEFGAYLTLKTDKSGIINGLKITSYTKLNDKLIVGPSPMLNPPLLIPLDEKSVNVNDLINVKLKYIMGNGIESIRTEYY

SEQ ID NO: 10320 - protein, 160 aa, Methanobrevibacter gottschalkii
MSFDLELNDFIMDFKKLVVLGVGNELKSDDGVGPFIIKKLIEENIVNDNLILINAETVPENFTGKIRKEQPSHIIIVDACLMGAQPGDIKIVDKDDFANIGISTHSMSLSYFVRYLERSNDFKIIFVGIEPETMEWGENPTEKVENTAYYFIDLLKECIL

SEQ ID NO: 10321 - protein, 364 aa, Methanobrevibacter gottschalkii
MKLLFIGSRLYDDIDWYVKRKNIESVLTESNENAINLDLPDQVFIVPRGMDGPKQVALMQKVDAIVPLIGIDPPLMDVALMKEEIEEKYGIPVIAAGVRAVELTSNKIETKKFYKEIGVVTPDYQILNDPEDLTLDFPVVLKQGEGQGGKDIKIAKSIDDVNEYFENFNQALCEEFIEGSEISIEVLGFNGEYVALPPIYKGETTLEGTHPLNKIKTGPCMVQGLDNNLVQHTAYKIAKNLASDGIFEMDFMYSAKKDQLYAIEVNTRPNGTRYLTTATCGVNSLCELVNMAIGEFSLHNISDKLGYYYSTEIPIGNYEGPAPIKPEKSFENNDFVVHGPAGYQRVTARADSKDNLESLVSKLV

SEQ ID NO: 10322 - protein, 356 aa, Methanobrevibacter gottschalkii
MNNTDMLILFLITLCATIFFTWYIKRILIKARIADNPIVSEHRHKSGTPTMGGIAFLFTISLIIALYYQNTPILLVSFIMLAGGIVGLVDDLIGLKVKEVQKIVVNTSSDVITLGRLDVEPNEEVRVATPKAKAEVDDLLKDGKVEVVGEVPIKTEPGELEKIICQIVLGLFFALTGIITAVGGFKLGVLAIPVVVIAILGSINSINLIDGMDGLAAGIVGIASIACCVYGYLFGPASIIPPFLILSGLCLGFLVFNKHPASIFMGDTGSFVLGTGYAAAVLVCDIPYFGVLALGVPIISVVVSLLHRAHIIKLPVEPLHHTLNHYGMSETRIIVSYWGITFLLCIIGILAKMYVF

SEQ ID NO: 10323 - protein, 476 aa, Methanobrevibacter gottschalkii
MDIQELVRLVEGELVGNVDFFSIDGFSGRFTFLNDAHTGDIVVRHWIDGNGVAMAFKKNIACLITQTPKDDAIEMAEKLNFPLVITNKIELANALALSHTIDKYSHNSTNVVITGTNGKSTTSHLIYHILNNAGFHVLTNTDSESEFNTLIDPMVSKLISDEVKKNGKLDYLVIEVSEVQGWLGKLMKNHAALMSEAIKPQVGVITNIAMDHIGLVNSIDDVFNEITAVPKAIGDGICILNHDDELVRKLNAKNPFYTSMSKIDGDNAVYFDDGTIYYNDNPILTIGELPFTGKHFIQNILSAIGACISLNLPIEDIVDGVRSYKALNRRFTKLNDEPLIYDDFAHNPDGIKATISETLKLLPDNQKLYVVCAIRGSRGVEINQLNVEAIVESMDDGIELVLSSSNDVVNNLNWVNENEKEVFFNVLNQNNIDYVHFDNLKDCLNEVYNKADKKDIILLIGAQGMDHAEFLLKDII

SEQ ID NO: 10324 - protein, 146 aa, Methanobrevibacter gottschalkii
MFIKIRRDTLIILLLAFILILCGRLITYVAFASSDEINDGIAISGVIIKGNDIVPVDTIRSNVMQAGFRDGSVIYGDILKTSKREVSLQDAIQTAQEFATRSTVPGTSVQPITAADVQVDKNTGVVTVTVIEDFSSVELDNKTSGG

SEQ ID NO: 10325 - protein, 419 aa, Methanobrevibacter gottschalkii
MNKLKLSLVFFAVLLLTMSSVAATCNIIVITDPSGNDPNGAAAGSMSFADNMFQSTFLLSRSNHFAVLSGGTGSSDTRLDSIVDAVASLENNASAASAASLASQFKGARLVVGGPNIGAAVGGSFNAYVITVDDSSNDIKVTPYNSGVATLQPGQKGAIIHLRNTAGNPLYGTADSVRKETAMNIGKMIRDGYPATTILAEAMGEVAKDSGEKYGGGGVNLVSGISTSDMFTPKELNSTGYPMDEEYSKVCDSCGWAMGFPAAEAYEKCPVCGGDLRTVYAYQALGDALTVSSKAVSVSVYGSDRPGLAETTKEIVEASVSKYGYDASAISGSINRGINNGLLVGVDHVEPKDINVKQGSKAVGVYYKSLPSERSSPAWDLPIDGNILTILGSIQTAVGIILILLVLFRSRLLKSFQNR

SEQ ID NO: 10326 - protein, 143 aa, Methanobrevibacter gottschalkii
MALILIRGETNSKLLNAIADMERHGNLNLITKPKVVDSKFADSLVEKILNSKLRTKSKVATAFFVKEDTTLSIMQVKKIHPPAHVVVVSDEYEGYHKLKKLLDNAKVFQGYYSHKAKNDGLIDYSIKGKKRHVKNEKLNSYIK

SEQ ID NO: 10327 - protein, 164 aa, Methanobrevibacter gottschalkii
MECEICGKTVPENNPIRAKIEGSVMVVCKECSKLGTIQKAPQQPKFRQQPKGKKAKNTKNTGNYSRRDEPSEELIEDFNLKIRKARETKNWSREDLGKKINERVSVITRIETGKMTPDTKLTKKIEKTLNIKLLEKVNNIDLNQFINTSTGERALGSIMKIKRK

SEQ ID NO: 10328 - protein, 418 aa, Methanobrevibacter gottschalkii
MDDFNDLENSSKEQLMEKVEDLQNEIDLLKEEKSKAKSNLMWKVRKLEKDKVLIENEKIRLERETKSLRSEVDRFRSPPLVLATITEVLDDNRMTVKSSTGPSFLVNYSKFLDEKLLVPGSRVALNQQTFGIVEVLPSEKDANVSGMEIETKPDITYEKIGGLEEQIREVKETVELPLTEPELFENVGIEPPKGILLYGPPGTGKTLLAKAVANETNATFIKIVASEFVKKYIGEGARLVREVFELAKEKAPAIIFIDELDAVAAKRLKSSTSGDREVQRTLMQLLAELDGFESRGDIGIIGATNRPDILDPALLRPGRFDRFIEVPLPNVDGRREILKIHTKNMSFDEEADLDLLADLTEGLSGADLKAVCTEAGMFAIREKRDKITVTDFMDAIDKVMSKNKEDEMFNTEAGVMFG

SEQ ID NO: 10329 - protein, 319 aa, Methanobrevibacter gottschalkii
MLFNKNENKANERIIYKTKSNVILGCKKAIYGLVLLIIVLSISPIMIKFIAKMQVYLISQIQLPLTRYAAIAFFVIILIIVIYIIWHIIGWYSLEYTLTDSRIMVKSGVISTKKNYMPYATIQDVTTSQSILARLFHIGTVSVFSAYDNNRLELKNISNPSEVEEIIFSNMRGSRTFQPQQSRPINYHQQDNYLDNGSYLGRNEMYDEFEPITPITHEKDSYQGRDYEYYPEDRGFENSDQIRHEYEYEPYDDIDRFVEEFEPHKNYPNEIYDDELDEDYYEFGSKNHYDEKRNEVIDNDSNSLSSEKVIRRHFDKFKK

SEQ ID NO: 10330 - protein, 344 aa, Methanobrevibacter gottschalkii
MELLCIQSQEHPELPLAELKAVMECENISAEIDVITEGLVILKNISNDNIDSYYEILTRRLGYTHEIHEIIKESNTDNFDEDILSINWSEYIDGTFAVRVKRFNTEIGTVATERRAGSLILSNSDNIKVNLSRPETLIRIVVHKNDFYIAIERIKLNKKHFEDSKPHKRPFFYPGSMNPKLARCMVNLSRVKEGQLLLDPFCGTGGILIEAGLIGCKLVGSDIYWKMKNGTSINLDYYGITDYRTFNIDVRELKMYEKVMAVVTDPPYGISTSTGDIEGEDIFKEFFKSIYNNMRDDAYLCMASPHYVDLKPMADEIGFDIVEQYGIKMHRSLTRIISVICKKH

SEQ ID NO: 10331 - protein, 46 aa, Methanobrevibacter gottschalkii
SIKRITYTTFVETKEELIKLFKKEYYKIINNESFFNKWVSKYILKS

SEQ ID NO: 10332 - protein, 301 aa, Methanobrevibacter gottschalkii
MFKDRIVNYYIDKSMEYGHNHLNKKAIDCVDKILFLDKNNARALSFKGLYYAFLFEKEKSFECFSEILKNNPDDVHCYYRKGLACMELEKYEQAINCFKKVLDVDPHHPIVLRYISSCYLYLEEYDLAFNSINDVLKEDMENPELLLSLSLYYDVLEMYDESLNILNKIIEKNPNEDNALLQMAIVYRNQEMYDDALKYIELALNINADCIVSKSIKYNLLAYVGDFEHSLQGFDEISKTYFDGWGVIESYYSYYGESLEVMGKYEDALKVYDEYLEKYPNFPKKMIENMKTDVKKLIKQC

SEQ ID NO: 10333 - protein, 67 aa, Methanobrevibacter gottschalkii
MGSAEEVGKYLKKLYKNYKDAKSKGEVLKFVKSNIKELFALSLYFESIETVNLLINLFLYELEKDKG

SEQ ID NO: 10334 - protein, 250 aa, Methanobrevibacter gottschalkii
MIEIHDKLGTLDELLVIIDDLLLDERYDYNELLVQKGNILSIQGKDKIAMKCFDKVLQDDSTNLWAYYFKCYVLNKSDDLSNFDKLFSMVKSQSPDEYYIWLLIGVLFSRNDRFDDALYCIDESINRYDGQEDSWLYKGLIFYEMGKYDEALSAIDIALKINPKDSYLYLTKSVILNAMEKYDGAIFYSNKCLELDKNNVLCLYNLSLSLYNQNKFDESLKYCESALKIDPNYCLSLNLYAEILRHKKKV

SEQ ID NO: 10335 - protein, 299 aa, Methanobrevibacter gottschalkii
MFKDRIVNYYIDKSMEYGHNHLNKKAIRCVDKILFFDKNNARALSFKGLYYAFLFEKEKSFECFSEILKNNHDDVHCYYRKGLACMELIEYEQAVDCFKKVLDVDPHHPIVLRYISSCYLYLGEYDLVFNSINDVLKDDGENPELLLSLSLYYDALEMYDESLNILNKIIEKNPNDNDALLQMATVYENQEMYDDALKYIELALNINVDSIVLKSIKYNLLAHVGDFEHSLQGFDEISKTCFDGWGVMELYYIYYGGALEVMGKYEDALNLYDEYLEKYPNFPKEMIENMKEDALKLIK

SEQ ID NO: 10336 - protein, 1346 aa, Methanobrevibacter gottschalkii
MLQAKKTITVTVKSIPTSLTVNDLTCNYGEDNSYLYATLKDTKNNKFLNGQTITFKINDKIINVVSDNKGRAKIKIDEKPGLYNVIVSFTKSPYASISKKINVNVISFNPTVNYDGGFYNKSYLNLSLNINNAKLIKYCLNNDSWSQSDKSVSFILTNGIYDLYYSNGSGSIFHEHYLIDNNCPVVWSNFGSDLYDSSIIVNLSSWDNLDANPKIYYSLDESNFKLYENLLNISRTTLLKFYSIDFNGHKSETKTCNYIFEKIGNLNSGRGFTTIQSAIDDSNTHNGDIIKISEGLYNEPLTVNKFVTMIGINATLTSRDPSRPVIGITGGGSNSVIYGFKIKDSEHGVVIYHADNVSVINNQFINVVKSIEIDDDKNTLVAYNSIDSDKFLNFMSGVAIRKSDNLMVFNNNISLNSDTGAGGIVVTNITSNNISIVNNRITNKNNLNGIGLYVICSNVSIDSNNVSNFNAGLYVVSSNSHVTHNEFKNNNHGVFLRVSVNNTYAFNNIHDNILCGFVLDTSLLSYNDSCYLNRLCDNSQYDFYSEANSDYVINDNWWGENTPKISINRSILANIYNATGNVIMNSWMVAHLFSSSYKINENNNIERAKFYVDLTYNNIGNDLSYKGYIPNNLKSFIGVFNGDGAKKSNISYLHEGKSFVDFELNDLFKNHENITVMSIFDNVKILNSFNKKVTIDIMLFSSAWDFENNYFVNKTYQIPFSNNASWITFCWSETGLFTGKIYVIVNGEILDEINIHNLFYQKFKNNYSTNVFEAIKLLDTVFASTKEGVWAPNGYYFSFAKAANIDFRDYNSVYNRFLNYIKLYYDLTDSDLNFVKNYKGFFIDFIDMTIDFHGDMTPDINFDYNGVHKLLKPPSSYAHRISNIYYTDIEDENNISIGYEGMRSFAIVKDNLTNDDLQFWLNQKELYAPGLMKAAYGTFLTSLLVIYENDRVADESAIKFNVTWSRISPVCVSLCNDYNCLYVTGESDHGMGREAIGNISDVWKFNFATSFSFSLVEQLVGNNIWNDTTIGSVTLGLIESYFNNETMEIFTSNGYIFIKCENDGNTLLFLDLKTGIVRDYFSYYGLLGTMPCYHDNITENAWKYGNNLLNNMGREFNDLKNIFGIGVISATLIGEVEFIGLEMSGIGSALIEGSEIGLLFGEISIAPIMLISLPIIMFLFPEQVNEVWMNFASLFNPYYKDYPDIPIYENTYPANIINPPKLVLDGKSSDDYIISQLKNNRNFNNKYKRYNSNVNKDNINFKIKIGPIPSGKGPKDMDNLGSAEEVGKYLKELYKNYKDAKSKGEVLKFVKSNIKELFALSLYFESIETVNLLINLFLYEIEKDKG

SEQ ID NO: 10337 - protein, 266 aa, Methanobrevibacter gottschalkii
MKKFYKAVLLLTFCFFICLDCVCAVSDNVVENDTLSVDCQVGELCSDTIEVSSDNYYIDNNVVNSSDINFTDVYSGNVVKKVKSTVKTSITAKDITKYFQDGTSVKAYLKNSNGKVLSGKKITVTYSGKTYSRTTDSKGCVSWDVKKGPGTYSVKFSFKASGYKSSSKTAKVTVKAMPTTLTANNLVFTYGDTNNKLKATLKNKKGKSIVNKTVVFNFSGKKYIKKTNSKGVACLTITAKPKTYPTAISFTNANYVTSKKNNNSNS

SEQ ID NO: 10338 - protein, 314 aa, Methanobrevibacter gottschalkii
MRKPYVILIGSASGIGKSTISAELAKALNIKHLIESDFIRAVVRGIIGKEYAPALHSSSYDAYKHIRNKSRYDSYDELVSAGFDDHASYVIPALEKIIQRAITDYDDIIIEGVHLVPGLINIEQFRDEANIYFFILISDEESHKERFVKRAIQIHRGGKQLDFFKENRIIHDHLLTQAQNNNVTIIDTESIESSLEGILSIINKSCTTIKLINTIDELEDVVDIISNKNNGTLEKITYNIKGFKEPLIRNIDVYDTKSANRFINSINENKDKKEYLSQLYELSEFREARICASNQDNLDKIIKELQNKGYVLDE

SEQ ID NO: 10339 - protein, 192 aa, Methanobrevibacter gottschalkii
MNEMEINEMIIKCPACSVEGVAKSIMKEIEIPHFGKVLETTIQCPDCGFKHSDIIALEQNDPARYVIEINKNNLSVRVVRSQSATVLIPELGVKVEPGPKSEGYVTNVEGILTRFEDAVKKALNLFDDDASQENGTNTLKEIQNLKKGNGTATLIILDPFGQSNVVSDNVEISEIPENELNTLKTGFSHIEE

SEQ ID NO: 10340 - protein, 144 aa, Methanobrevibacter gottschalkii
MSEEEMMEETSEEFIDEDGEKLPFAKAEVVRLMKENLDDDKMIRERVKVEMNKFLGDVLKNVCKQLNDYPYTTVEYEMLKESTYPYTNIERINQEKERILLHLEAIKADCNALAMDVQKTLKLKDVVEEDTFSFTAPSEEDEEE

SEQ ID NO: 10341 - protein, 1415 aa, Methanobrevibacter gottschalkii
MLNKIQKIVIGKPFLISLIFVCLIFTSLGVSIEHSYAADLNESDKLGSGVNVEDKLENSQKNKSMSDTNQNPALKAKTYSVNGGTFRDIQNAIDKSSAGDTIKLSGKFVSKGDDTISMSKKLTITSPSQAILDGKNSTTILKIFTGATQSKLSNLRFVNGYSDSKGGAIVISAKSIAFDKCVFENNYANLSSGAIHTPYRAIATQGMLIKNCNFTNNGAGIAAGALGIFGHDFLIENCAFSSNYVKGYGECYGGAIQIGLDTEPSYGNVRNCRFINNKAISSTGLGHAGAGCVRNGSSYYNCIFINNSADWGAALTYHASGNLNNCTLINNTATKYGGAVAIMMNYLNFMNLNITNSIFKGNKAPLGGAVKLDGLNIKIEESTFDDNYASEYGGAVNINATNVKIINSKFNRNIANIDGGAVFIKGKDTTVKNSKFISNEAIPDVKKLNDGLGGAIYVNSTKVLAQNNEFKLNTARNGSAIYFDRNGLEFKLVNNTLYQNQAWVYRLPIFAHDIYYGESENIKSVIYGGNNIADFDNLKVSNAIYNAASNNKIEIDGEHPVLGATTSGKLYQDDREYNVRVLMMVRHEDGTIVYNNSLNTNYLGAVSGKLDNLKPGKYYVTAKHFEDNYYKAIANTTVFNVLPKTDNKILKSSNGNSIAYKDTVIWTLNITNNGPNDSTGVVVYDVLPEGLIWVNDDSNGAYNPKTGVLTIGSLKVGETIVLNIMTKVNATGKIVNKANVTGNEYDINLDNNHDEKEINVPPTVDLAIIKKVNITTPNYGDSVIWTLTVSNSGPDVAHDVKVTDIFSDSLIWIEDDSLGKYNPKTGIWNIGTLNKGKTIELNIVSQVNQTGNITNNVSVTSREHDIDLSNNVANKTIFVIKSGDLSILKTVNVSDANYGEIVKWTLTAYNNGPNKVNGVTVQDILPKGLMLLNYTASKGFYDDGVWVVCCLEKGKTETLELICKVNRTGNITNIAKISGIEYDPNLDNNLDNESIIVPPASDISVIKQVDSKNPYFGDIITWIIEVTNKGPDRATNIRVTDELPEGLIFKDYVSTCGVYQNGVWFLDYLNAGDSEYLNISCHVGQLGIIVNDVSAIANEFDINLSDNHYNESINVLPVSDLSIEKFVNVSNANYKDLIKWTLIVSNNGFNDATDVVVEDILPDSLEFISANGDYEEGIWYVGDLGVGNSKTLDIVTRIIKTGDITNVAAVYCSEDDPDLSNNEAEDTVHVGPAADLSITKTVSKHAYEIGQILTYNINVNNNGPDDAVNVKVSEEFPKSLHLKSFKMSAGEFNAYSNVWSIDKLAAGGEEKLRMEFEALSEGIFKNTASVVSDTFDNDLNNNHDSALVKIIANTSDKIINDLTDNFTKSNVVKAENIKQPVYCLEKHSTANFIELLSISVIVSMIFGGGDIFRKR

SEQ ID NO: 10342 - protein, 382 aa, Methanobrevibacter gottschalkii
MKKQIAIILMILLIAAPIVQGVCASKTAFITSDNLIDEKTDTNMLNSIKNYVEEISNGEIQVIVDNEAPGPGEGWRSISVTSDVSIDIAASDAGNYIQLASAATAGNKQIIFINTGDFDLDNHSNFLRRAWDDNYSNESLAGVRDPGTLLNNAGIQYIQLAKDYPDNIDNNGLLDKYDDKMNHEIAEKIVNIVNNYDNSSTKELSDNLIVKNKISPKGMADASKMLVESGDKEMNGPYGSYSTPQLLYQTSTYLNGDGIDIPKDYKKPDNPLGISFLTKDTYSVYDYFKMAGIVKNYMDANGKAPDSIEYEGAHISYYDLTYNFAKIVQNHTDANHMGFESEYHFDKVNDSILLHILPFVLIFVVLFLAYMLMKRIKRFKRK

SEQ ID NO: 10343 - protein, 227 aa, Methanobrevibacter gottschalkii
MKRYISELIGTMVLVLFGCGSAAIAGSMLGTVGIALAFGLSIVAMAYVIGDISGCHINPAVSIGMWIDGRLETKDLVMYIVFQCIGAIIGIGLLAIIINSAPVLGGYEATGLGQNGFGSASSVGLNVFGAIIVEIILTFVFVFTVLGVTKKAENGAVAGIVIGLTLAFVHIMGIPLTGTSVNPARSIAPALFLGGQALEQVWVFILAPIIGAIIAGTLFKGLTSEDE

SEQ ID NO: 10344 - protein, 230 aa, Methanobrevibacter gottschalkii
MNFQEQIYIRKSCRKYMDDAIDMDLIHDFMESVKLLNSEINYNYEILTHEEVNVRNRWSAPYYLAIYSEKKENYLTNIGFIFQQLCLYLQSISIGTCWVGMDVPKNKSSDFVIAIAFGKSDEMTRDLSKFRRKELSKICDYEDEKLIPAQLAPSAINSQPWYFKHTNEGFDVYQVKQNILKRQVLKKWNPIDMGIALAHMYVSNEKRFEFEIKANFDSIEGHTYIGSIKI

SEQ ID NO: 10345 - protein, 225 aa, Methanobrevibacter gottschalkii
MKIVIAIGGSILLKEYDCKKFQEYSAILKDLSTEHELFVVVGGGKPAREYINVVRDLGAGEAQCDDIGIEVTRINAKLMLSALGDAAYQRVPHNFQEALEFSATGKIIVMGGTEPAHSTDAVSAILAEYIQADKLINLTSVDGMYTKDPNKFDDAELVSEITATELLNFLSDKDVKAGTYEFFDTTAVQMIKRSDLETVITNGFKPENLIKAVNGETVGTKIINE

SEQ ID NO: 10346 - protein, 262 aa, Methanobrevibacter gottschalkii
MDNLVDIGLNLMHSSFKKDRVELIEEAKKVGVNQFIITGTNVHSSQMAAEYASKYPGTLFSTSGVHPHDAKTCNGHTMFELEKIAKNDCVVAIGECGLDYNRNFSPQDLQRKWFEAQIEVAERINMPLFLHEREAHEDLYNILKRHDNVIEKSVVHCFTGTKQEAQNYIDLGCFIGVTGWICDMKRGRNLQEAVSAIPPEKLMIETDAPFLIPKNFEFKPKKNRNEPKYLPHILETIALCMGIDAEELGEQVSRNTKEFFKI

SEQ ID NO: 10347 - protein, 63 aa, Methanobrevibacter gottschalkii
MAVEPHKHCPICGTPIPLNELVCSPDCQKVWDARLAQTKRTRIILYIIIAIFLIIWAIMTFMK

SEQ ID NO: 10348 - protein, 107 aa, Methanobrevibacter gottschalkii
MILTSSNTLVNKQIVEYKGLVTGESLIGSNIYKDLFSGVRDVVGGRTSKYEEELKKARDIAFKSMEEKAENLGANAIIGLKISYDNLGGTMGNTILVTAYGTAVKCE

SEQ ID NO: 10349 - protein, 282 aa, Methanobrevibacter gottschalkii
MKFKVPEKPENLQERLICIIFGTFVGTAVYVLFLYLNIAILGWNLGLIFAPLLAGYAETMLAERMLSSDTGAISAFILFAGTTFYSFILVNPTLGANFITFGATAVILQAAFPTLINYILLVIIIGAIFYILRFVKKTLTRIYLKIKHIIYKYILKKPFEVKPKAIEYYDELRNNQEINSLGVIFMTSTDVPDKHVINLGQFQSTVILEKEPDLLDLNPKERENHTLTILKSGKDKCLIGLTDKIKAAGGNGIIDLDIQYIKIGFGGESYQISAMGMGVYIN

SEQ ID NO: 10350 - protein, 67 aa, Methanobrevibacter gottschalkii
MDKKMIVSIIGYIVALLIPIVGLVYGAILFFFKKEEPTYRKHGRLIIYFSIVIFVATLIAKLLIGGF

SEQ ID NO: 10351 - protein, 119 aa, Methanobrevibacter gottschalkii
MKENRKIGENFDVNDAEDIFDKLRNVKGKTKPKGESKFKNISYLMNEAQYLEKNGQLGEAVELYKQIIFILPDSIKAYEAIANIYQKQGDIDSEKEILKKAISNCKENDEFKKRLNEIT

SEQ ID NO: 10352 - protein, 269 aa, Methanobrevibacter gottschalkii
MFTIEYFVGLILIGIFAGFASGLLGVGGGFLITPLQFFLLKYIGVAPDLAILISFGTSLAIIIPTSLSGAYRHTKSMDNILKPGIRLGIFGVIGGFVGGFVASALPSRTLEIIFGLLLLFIAFNNIVNINKEREKARIPFNWTSIGLIGLLVGFSSGLLGVGGGIFLIAILTALLGFSMIEAIGTSSIFISLTAIGGFLSYMITGWGVSTFPYSIGYVNIINLVLIACFSVPMASFGAKMAHRVPQKKLKIIFSIVILYMALKMLGVLP

SEQ ID NO: 10353 - protein, 352 aa, Methanobrevibacter gottschalkii
MKVNKTILVGFLFLLIGAFIFVSDLLNPLIRPVTHLFLMGSSKGKDIIFFGLLGLLLILSQVIPRKIDATRYLKISIVIGFVLLVFGNLLEVVFRLQMGIKLNTVFCSMSSTMSSTSILHTHLLKSILGEVLTKIIGPFIQSNINTGVGLYAYVPDISFLVVLIIPILFITLILANQKRPWFTNFLIAFFSSCLLIGSFDGGLWATPSLVGLLGLWIVYRNGYYLNLHLGKIIKDKKLLKANENIQPSYRNIGLSEAKYLFNRFLPILIILIVIALRFTVAFAGAEPDYYTVEIVNMTDNVDFGDIPIEKISNETYHVDSNYNEMELINDLKVPLNNSCKYYTVSWNAYSYL

SEQ ID NO: 10354 - protein, 343 aa, Methanobrevibacter gottschalkii
MLNSIFKYSYGVIVCLIIAIPSLILGNLFPVIGGPIIAIILGMLIAFAWHEKESFDEGISFTSKYVLQTAVVLLGFGLNLNIILKTGIQSLPIIIATISVALIVAFIMQKILNIEEKSAILIGVGSSICGGSAIAATAPVINADEEQVAQSISVIFFFNVLAAIIFPFLGKIIGFSTVDGGPFGLFAGTAINDTSSVTAAAATWDNMWGLGSQTLDKASTVKLTRTLAIIPITLALSVFTSKKSEYVGGEFSLKKAFPMFILYFVIASVITTLAVSLGVDANVFLPFKELSKFFIILAMAAIGLHTDIVKLVKSGTKPIILGATCWIAIIIVSISIQFTLGII

SEQ ID NO: 10355 - protein, 295 aa, Methanobrevibacter gottschalkii
MKKIYFILPILAGIMFGSGGVFVRTLMVNGIDSTTLLFLRFSIAIIPIMIAILVTDKSLLKIDLIDISLFLVCGICIVGLNLCYNESMGNIPLSLAAVLLSLAPIYVIIIAYFTFKEKITRKKIICMALAIFGCILMTGVLETSLSNIPFYGITAGIGAGLFWAIYLMASKKSIENGKHTFTILIYSITIISMGLLPFTNFGQITNFISINPILVIIFLIMHSTFSFALPYIFSTVSLEHIDSGIASILLSGAEPFAALIFGLIFYSEIPTFLMFCGFILTIIAMMALSRKEEIK

SEQ ID NO: 10356 - protein, 631 aa, Methanobrevibacter gottschalkii
MILSIIIPTYNEEKYLPILLESIKKQSFEDYEIIVADANSTDNTRNIAQEYGCIIVDGGLPAIGRNNGANVAKGDILLFLDSDLKLTDEYLRDVVYEFKMERLGIAITRMEPLSNKVEDKLFHDFANFFMVSVENIKPHGAGCYGIISKRKLHEECNGFDESLTFGEDTDYIERLAKKERFRVLRKAKIGVSTRRLEEEGITTLIRQYGKSTVNDFLGKRTDANELNYKFDHGHDRIAESKMSGIEKSAEKINVIKETYDESKEKVNKARSLLNTKTERDKKIVFYCVCGEGMGHAIRTGVIVDKIKDEYDVYLFSSDRAYEYLKSKFNNVYKIGGFNTVYINNKVNNLKTLSNALKRNPGNIKTGYETLYKKARELRPDVIVTDFEIYATMVSKLLNIPLISLDNIHMITQTKIDYPKDKYVEMVKAKGVIKTYVVKPKVHILTSFFYPKLKPKKNAIIYPPIIREDILNLKPSKGDHVIVYQTSKESGKLVRKLKSLNNEKFIVYGFNKNEIDGNLTYKEFNEDVFYDDLASSKAVICNGGFTFISEAIHLKKPIYSVPAIGNFEQTLNGYYVQKLGYGEYHEVMNASKVKKFLSRLSKYQKRLDKVKKTNNDGIVRELKYRIEKYSKQ

SEQ ID NO: 10357 - protein, 484 aa, Methanobrevibacter gottschalkii
MLSKKLILITVLLGLLAISTVSAADNTESDIIGADGLNSTSNIPMDAPRTFTQLNEAITPYTSIDLEHDYRYDNETDSEFANGVPITKNITIDGKGHTLDGNYLARIFIIKEDCTAVFKNINFINGKASTNGGAIYGVCNAENCNFLNNTAVKDGGAIHLSNANNCNFINNYVLNGRGGAMYKGYATNCIFTDNSAVTGGALFENSATKCKFTNNFAKENGGALYGGFAVQCNFNKNSAKNNGGALYKGSAHYCNFSDNYAVNHGGGMYGGAGEYCFFKNNAAKSGHDAYRSSLKKTKTTIYIKPTTTAHYGDYVVITLKNIKNKVVSGVKVSVFINGKKYATKITNKYGQIKIDTRNGFVIKKYTIKSKFAEDSNYYASSKTVKITIKKSTPKITANSKTFKKSTKIKKYSITLKTKQGKIMKNKKITLNVNHRYYYATTNYKGIATFKITKLLYKGKFTATTGYAGSKYYNALTKKSTIIVR

SEQ ID NO: 10358 - protein, 98 aa, Methanobrevibacter gottschalkii
MIIVQAKAIPKDETSKNRIIEFAQDLIKKSKEESGNIDYNLFVNTDDNTLLFVEQWDSVEILKNHLKTEHFIKFGENISDLVVSDLEINVFDANSISL

SEQ ID NO: 10359 - protein, 358 aa, Methanobrevibacter gottschalkii
MATFKGFAMKKLNETGWVEKEVPECGPLDAIIKPTCVSPCTSDIHTVWEGAIGDRKDMILGHEAVGEVVEVGKLVQNFKPGDKVIVPAITPDWDDEAAQRGFPSQTMEPLGGWKFSNFKDGVFGERFHVNLADANLAHMPDGLSDEGACMLVDMWSTGMMGSENADIPLGGSVLVIGIGAVGLSAIAGAKLLGAGRLFAAGTRPISVKVAKKYGATDIINYKEGPIDEQVMELTDGAGVDSVVIAGGNLENTWKEAISSAKAGGTVSNVNYLSGADNVLIPRVEWGCGMSNINIKNGLCPGGRVRMERLADLALCGRQDPELLVTHKFEGLDKIEDALYLMKEKPKDLIKPVVMLDLD

SEQ ID NO: 10360 - protein, 86 aa, Methanobrevibacter gottschalkii
MDDETLKKFAYVNISSYRVKTMKALKDDVKTPTNIAKEAGILPNHISKVLRELKESGIAECINEEARKGRLYRLTDVGEEIVDKLD

SEQ ID NO: 10361 - protein, 311 aa, Methanobrevibacter gottschalkii
MAKAQEEELKEPTVCPECGSTELIGDYERAEVVCSRCGLVIDENLVDMGPEWRAFDHEQRDKRTRVGAPITYTIHDKGLSTMIDWRNKDIYGRDIPARNRAQWYRLRKWQRKIRISGATERNLAFALSELDRDSSRLGLPRSVREAASVVYRSAVDNKLIRGRSIEGVVAASLYAACRRCNVPRTLDEIAEVSRVTKKEVGRTYRFLTRELNIKLPPTSPVDYVPRFASELGLSGEAQSKAIEIIEKAMEKGLTSGRGPTGVAAAALYIASVLLGDRKTQRDVAEIAGVTEVTIRNRYKELTEQLEMGVTL

SEQ ID NO: 10362 - protein, 100 aa, Methanobrevibacter gottschalkii
MKLLGKSLHIANSGKLIARTTKTPSPGAIVFDSNKKKIGKVGYVFGPTANPYVSIRLFRQANREEIERNCGEKLFVSKPKSKKTRKRRMRSRQKKPQNKK

SEQ ID NO: 10363 - protein, 247 aa, Methanobrevibacter gottschalkii
MSISPKDLLNKNKNLNKRLDISEICLDNVTINDLKFNGDNYDEYINLHSLLENISTCQVSDAFNGISRQSGVIQKIKPINNRRVFGRIFTAETTSGDWGTSAMAIDEADEGDILFFKVDSEEMAIWGELASTCARDNGIKATVIYGSARDLDALLYMDYPVFASNYCPNAGLALGLGSLNESLDIEGFKVNPGDFLIGDECGIVVIPQELFVKTMFASLDIKIKESLIIDKIALGNTLSQIVGLGKK

SEQ ID NO: 10364 - protein, 419 aa, Methanobrevibacter gottschalkii
MGKGEELTTTKYLIHAQITANGIVEKPDVVGAVFGQTEGLLSNDLDLRELQRTGRIGRIQVNIHSNSGRAKGEIVIPSSLDRVETAILAASLETINRVGPCEAEIQTTKVEDVRAVKREQVVNRAKEIYKNMVESVGPTSIKMIEEVREAMRVHEISEYGEDRLPAGPAIHSSDAIIVVEGRSDVLNLLKYGIKNTVAVEGVSVPHSIGELSKKRTTTAFVDGDRGGELILKELLQIGDVDFITRAPKGKEVEDLEKDEVLVALRDKVPTAQFLATTNILNENPKKEHIKNRNNNRNNTKYDKKQKYNNNRREEQHVVDEPVIEDDEVSLMKDMLREFEGTGVGAILDEALNMTKEVEVENIYEEIKNIEGTADAVIFDGVISQRLVDAASEKGIKKLVAFKSVNIVKKPHNVKIITIN

SEQ ID NO: 10365 - protein, 203 aa, Methanobrevibacter gottschalkii
MNINIENYYSTRKNVFERIQDAGTATKVLMSLMMACFTGIMAQIIIPLPWTPVPVTAQTFAVLCSGLLLGKKYGCLSQILYVVLGVAFIPWFGGMTGGFETLLGSTGGFLIGFIIASCFIGTITEKYADARNFKKMAAVIGIANFSLIYIPGLLGLALWLNLTQGTSVGIVDLLMMGLVPFIAGDIVKILGAASVSKVFLPKE

SEQ ID NO: 10366 - protein, 132 aa, Methanobrevibacter gottschalkii
MKLILRGHHLLCLKGFQGYGYDEKFTKNMTDINSKRKSPETVIKLTNSPDDICKACPNLRNNICENEAQNDKIVLMDDQVLEKLDSSKEYNSVELFKRIEHIFNTKESVCEICFNCIWHEKCLFYQKIGKRI

SEQ ID NO: 10367 - protein, 269 aa, Methanobrevibacter gottschalkii
MKEKVNLSGVSETMLVPLYSRALESNRKNPAFYDKTAIGIVKNLDYNFKERFKESKNKMNFWGCAARTIILDDEVSKYIKNNPECSVVNLACGLDDRFSRVDNGKINWYNIDFENIISLRDKLIDKKDRVTDIPTSALDFCWIDKIENKDNVLIIAEGFLMYLSEEDVKNLFFKISESFGKVELLLELMTHWMVKNQKKHDTVKQTGAVFRWGINETEDFEMICPMFKMTGDYNLTNVMKRYSPIFITIASPFLKPRNNRIGKFEKLIL

SEQ ID NO: 10368 - protein, 74 aa, Methanobrevibacter gottschalkii
MFNSKFLILIIGVLIIGLALSCYFYSSDNFHESDSSLNERHDDVVYLWMLDDNGKLKLVPTTETYSEGSASDPD

SEQ ID NO: 10369 - protein, 762 aa, Methanobrevibacter gottschalkii
MENKINAGYGSTITLENDYEYEESGYSSGIEITQDITIDGKGHTIDAKGQTRIFDVEAGKVTLKNITFKNGMQNFFFGGGAILWKSLDGIITNCTFINNYAPSGGAIRLEAWDNTISDCTFIRNTANQGGAINLNTTNYASISNCVFVNNDIYSVQGDGCKINNNIFMSCSIGFDFTRNYNIDNNWFGNNASNYTYKPNEFCNNWLFLNATTDPNTVSVSNTADIIFKLYAYNSTSGNISKYDNAPFKNLNLTITATNGNIDKNIAKLGETIKYTASSVGTGNVSAKVENVEYTIGLDIIPIETKLILNSTDTIIDSISTVGINVTDINNNPLSGVVKLTIKDNKGNEYNTTVTVKTGITTYIYPADKTNISKIVNITGFYLGNDTLGYVDSPVAETKFRVDKLNATVNLVVNNYTIRNFSVNITVTGKNTDRIVENGSLIIYANREKIDEINITDGKAENILLNITKIGNYELSVAYSGNNVFNENNTFSKNVTAIKISTIISANNIITTYNTDKYLEITLLDSEKNPLNNATLSVDLNGAKKYTTYKNGQIKIALGSLVPKTYTAKVSFAGNDIYSPYSTSFKVVVEKATPTITAKTKIFKFEDKTKKYTITLKNNKGIVMKNTKVTLTINGKTYTATTNTNGVATFKFNKLNKKGTYTASITYSGDKYYNKLIKKAKIKIKAPAWKTVAKGSKNKAIVKKIQKTLKNNGYYLKYNGRYLKIDGIFQKYTQIAVKHFQKANKLKTTGKVDYKTAKKLKII

SEQ ID NO: 10370 - protein, 48 aa, Methanobrevibacter gottschalkii
MKEINIVEIIKNKDKLEKHEGYLPIPILHWIDIGKWEIFLEKHDKKLY

SEQ ID NO: 10371 - protein, 47 aa, Methanobrevibacter gottschalkii
MKLFKTEITVLGNENTKGLALNGRCSHGKFQDMLENMNYYLEKIHNI

SEQ ID NO: 10372 - protein, 394 aa, Methanobrevibacter gottschalkii
MEKLLLIGIDTRSMINSALQLDFELFSTSYFSTSDTPTIKNQKIILKEKYGESCGAFENQFSNLDILEFSKDYLDEVDYIIPISGVSPSDFSKRHKRKILGTTNVCDIENKFKFFKKIKNEFLTPMTFKLSDVDEAIEIDKSYPNSQFILKPVKGSGGYNINLLNNVSDFQFNDSEFILQEYVTGINVSSSILSTAHAAKTIMNSRLLTLNDFGKQDNFIYAGNILPLTNESVMAEFNGIDDIIKEMNETSENLALEFNLLGSNGVDYIINEKGLYVIELNPRLQGTFECVEKTLGINMLDAHIKACRGELVDIPEPKCYSYKKIIYSPTRMKYEKINLDNIYDLPHIGSITEKSEPLLTIIDSDKDFKKLYEKVELASELINKKAKLHQSDIK

SEQ ID NO: 10373 - protein, 77 aa, Methanobrevibacter gottschalkii
MFIFKISYYNLFTVINFFTRNFLKNGANMKRNPIDQFMKDPDNKAKIFIWMTRAMIITTFMITIGVILFILYLIGVI

SEQ ID NO: 10374 - protein, 227 aa, Methanobrevibacter gottschalkii
MAQDIIDGINPTRMELLSLKNRTKLAIKGHGLLKEKRDALIKEFFDILDRVKGIRENAEQSLKEANDALLEAQIAMGDLAVRKAALSVKESIDVEITSRSVMGVAVPVTNVKMEERSIIDRGYGFSDTTIQLDEAAKKFEESLKYLIELGEVEKTIFLLAEEIEATKRRVNALEHIMIPRFQNTEKYIDMRLQEMERENFVRLKMIRSTIEKNEKAAAEAAAAENAE

SEQ ID NO: 10375 - protein, 463 aa, Methanobrevibacter gottschalkii
MNTNIKTREYTTVSEVSGPLMVVEGVEGVGYNEIVDIETPTGEKRSGQVLEVTKDVAVIQVFEGTTDLNTKDTKTRFTGQTAKIGVSRDMMGRIFNGIGKPIDGGPEIIPDEELDINGAPMNPASREFPEEFIQTGISTIDGMNTLVRGQKLPIFSGSGLPHNDLAVQIARQAKVLGADDEFAVIFAAMGITNEEANFFMRDFERTGALEKLTVFMNLADDPAIERILTPKMALTTAEYYAFTLGMQVLVILTDMTNYCEALREISAAREEVPGRRGYPGYMYTDLAGIYERAGRIDGKEGSITQMPILVMPQDDITHPIPDLTGYITEGQIVLSRELSRKGIYPPVDVLPSLSRLMSGGIGGDKTRDDHSGVSDQLYSAYAEGRELRDLVAVVGEEALTERDQKFLEFAQAFEDQFITQSKDEDRSIFESLDLGWNLLKILPKSELKRVKEEFIEQYLPKDE

SEQ ID NO: 10376 - protein, 580 aa, Methanobrevibacter gottschalkii
MIIEGNIIKIAGPVIVADGMRGAQMLEMVRVGNEKLIGEIIELEGDTATIQVYEETAGIQPGEVVECTGGALSVELGPGVMSSIFDGIQRPLRIIREASGDFIARGIDVDSINKEKKWEFKPVAKVGDVLKAGDVLGEVQETSAVLHKIMVPPALEGEVTEIAAEGEYTILEDIAEVGGQKVQMLQKWPVKKSRPYVRKLDPDVPLVTGQRAQDTFFSVAKGGAAAIPGPFGSGKTVTQQQLAKWADADIVVYIGCGERGNEMTEVLTEFPFLDDPKTGNPLMDRTVLIANTSNMPVAAREACVYTGITIAEYYRDQGYDVALMADSTSRWAEAMREISGRLEEMPGEEGYPAYLASRLAQFYERAGRVETIGSEPHVASISVVGAVSPPGGDLSEPVTQNTLRICKVFWALDASLADKRHFPSIDWLQSYSLYVDSIEGWWADNVAADWRATRDQAMGLLQKESELQEIVQLVGPDALPETDQATLETTRMLREDFLQQNAFDDVDTYCAPTKQYQMLKTILLFYKESLAAVNRGAPIATIAALPVKEEIGKMKYIPQDEFDAKIADIQAAVVKQCSEA

SEQ ID NO: 10377 - protein, 105 aa, Methanobrevibacter gottschalkii
MSSVAVIGDIDTVSGFRLGGVKQAVVVKTSEEAIAAFDKFLEDEISIIIITQLMANEIREHINRKIGSSVLPMIIEIPGKDGSSEGSSDQINDLIRRVIGVEMVK

SEQ ID NO: 10378 - protein, 384 aa, Methanobrevibacter gottschalkii
MADQIATLISSVGLTQETFLVLCVISLLVVGAVVVIITSRPILDIYPYLNPSARVRARKGRLFDEKQISEIVETSNIEEVENYLKGVPEYADVLDEYPLDKALDVERANTYEFIARLAPKDIKAPFAVMSKKADIDNIKSLLTAKEVGYDADETKELLIPCGALYNDLESLADAENVTDIVTSLDNTEYAAVLEDALPQYENTNMILPLESALDKYYLGKLLRSTDVPSDENKQILYAYVGTQVDVTNLKLIIRAKEDGLDYDAISPYILDEGYQLREWKLKDLMESPDVTNVVSGLEGTKYSSALTDVVPVYNETGSVAVFEKALDVYASEYSKSLASKKPLGIGPIIGYLSQKENEIKNLKIIARAKREVDFPNAKIMEMLI

SEQ ID NO: 10379 - protein, 203 aa, Methanobrevibacter gottschalkii
MSSGTDKIVSSIMSEAQEKADVIIQEVNAEVSAIQAKADKTAEVEKTRILENGKKQSDMRYQQIISEAKMNARRAKLGAKEEVIEAAFSQAVGELKEKASSRSADYEDSLIKMIKEAADEIGGDDLIIQLNEADTNQFKSEISSGNAFEIEGIKFELGEPINTIGGAVLKTNNGDIEVNNTIEARLDRFKSILRSEVANVLFK

SEQ ID NO: 10380 - protein, 161 aa, Methanobrevibacter gottschalkii
MVEIALGTALAAIGAGVAIGFAGLGSGLGQGMAAAGSVGAVAEDNDMFARGIIFSALPETQAIYGFLVAILLLVFSGLLGGGQGLPTEAGIVAIGVGASIGFAGLGSGMGQGMAAASSVGAIVEDNDMFARGIIFSALPETQAIYGFLIAILLMVFGGILG

SEQ ID NO: 10381 - protein, 666 aa, Methanobrevibacter gottschalkii
MFKTARMRKIRIVTLDKYVAPTVDALHESGLIQVSDISESIQQDPELAELVTPSKATPYTGKLSSLLMKTNGISELLGNSISEGHGLKDTLMSFISPDMPVQKEVEKLDTPAFIEKAEETLAKVESKTSVIEGKLAALDSETSELKSNKSLAKRLSHFDMDLALLKDSKYTSTTVGRINAESTSEIKNELSNLTDELEIFTVPMDDDDGEVIAVVTLKEFSDDVYSTLRKFDFEKIEVANVEGTPQHIISSADSRLLTIESERAAVKKELRAVAEQWDDEILALKEQLENEKDKNEILSSFVQTKDAYVLEAWVPVKDTEEVEQLVEKSSEGHCAFETIEIEGTDDEDVPILQQNGWYAKPFEFLVDMYSPVRYNEIDPTIFVAITFPFFFGFCLTDAIYGLVVSAIGVVIIRGLGKVKESMRSFGWILVWAGLWAVILGLLTNGFIGDFPERIAGFRLPTVFAPVEAFKHPDTILLIAIGVGLLYTNVGFLLGAIDNLRYGNVKEAIGSQLCWFVFEAGIILLALGYMMPAIGMVGMALGGILIIATIGMLVWANGAYGVMDIFGYMGDVLSYARLLALCLATGGIAMTVNILAQMLNNMVPHVGIVLAIFVFIFGHIANFAFQVLGAFINSLRLNYVEFFSQFFMSGKGKFEAFKANRTFTKLK

SEQ ID NO: 10382 - protein, 104 aa, Methanobrevibacter gottschalkii
MAEISDAIAMIKKAESDAEQLIADSQAQSKDMIADANLKAEESVSEVKISAEEEAQKTVFDAEDKAKKEAQSISEQSKVEVKSLKDKAMGNVDEAASIIVKNIL

SEQ ID NO: 10383 - protein, 116 aa, Methanobrevibacter gottschalkii
MANIKMFKLLGVLVSLLLIIWGILPFLRHQPITTDVIATAIILIMIAVAYMIIMFNPSWTKAVFFFEGIIIAVAGYMLLAFPYNLEFALVGVIIIAIAILAYLQKLPPKILRLFYR

SEQ ID NO: 10384 - protein, 109 aa, Methanobrevibacter gottschalkii
MERAVWIILNNNFSLTLDSEIKDEKIVNKRFSPGSDLWTSELPQLSFSDENIQKDYDEFISDIISLFSEPSVDKIFIDAKIGEESEYVNAKNPLVIRKIEEYSVDEIIG

SEQ ID NO: 10385 - protein, 112 aa, Methanobrevibacter gottschalkii
MKLFILSANDSRDMDDISQKLSLKKFKITQTENNYILMCKKRYGNILIHAICLIIALSYVWPVLIVNVIYFTYSYLWASPNVLITTESLDDEGNPLEFSSMDEILKKATAIL

SEQ ID NO: 10386 - protein, 169 aa, Methanobrevibacter gottschalkii
MEFIDVINERYSVRGYLDKEVEQEKLEFVLKAATIAPTGVNNQPFKVYVIDSKKYKEKLSKIYKAKWFVEAPYVLAVVALRNEAWVRPWDSKNIADIDATIVMDHMILAATDVGLGTCYVGAFKKNYAHKFLGLNENEEVVLFTPLGYGNVEPRETPRKDLNDFVVYKD

SEQ ID NO: 10387 - protein, 267 aa, Methanobrevibacter gottschalkii
MQENNFKIDRHSLKTAISRVETDKIVTRGYNQRDLIEKIRYSDMVFLLLKGRLPSIIEGKIFNHVLVSFCDHGVTPPSTQTARIVTSSGSPVNSAVAGALLSFGHKHAGAIEKTMDLYQSKINSLYLTDDAEIDNKQIAGLAIEIYQEYILKDKKVPGFGHRYHNIDPRADKLMEIVIKEGFIGPHIKLALALEDLIYQKKQIRLNVDGANAAILSDLGFTPDLGLGIFIIGRIPGIIAHIHEEKMNEDEFRRFCDLDDVIYQQRGK

SEQ ID NO: 10388 - protein, 290 aa, Methanobrevibacter gottschalkii
MDILEDISKTIIDASTTLSQDKFNALKRSIDAEDNENAKWALEQILENYKVAQDIKFPLCDDTGIPHVIIEIGEDREISGDLLNQIHKGIELGLNNLPARPMAVIGDEVQRIEQSKGLFEKPGMLRPVSILIDTANDESTYKRDISSDTLNIHFLLEGGGPEIRANTFRVYHKRSFDNVINTACGWLEESLRMLGCTPSIPSIGIGRTHFESTSLLLKSIAYGNLDNQSEHEQKITQRLNETCIGPMGFGGKTTVLGTYLNIGNQRASGVRIVSVRPSCFVEPRVATLKL

SEQ ID NO: 10389 - protein, 300 aa, Methanobrevibacter gottschalkii
MENTKKFLKKIGIKEVYDDFKSDKRFDDGGQYRFEVPGIQSPKTMEALLTESIKQGIFIHRVTQTKGIMMLTDEEIGKMIDLAIDYGCELFLAVGPRATYDTSATVHTKEGSRIGYRLRGYDNLVYAIEDVKRACRLGVRGILLYDEGLLWALNQMRAEGEIPENVHFKLSAHAGHSNPASAKLLEAQGLNSLNPVRDLQISMLAAIRYACSMAIDLHTENPKSTGGFIRHYEVPKFIKVASPVYLKTGGSVAANHNWDTTEKEALARIKQVSLVKRIIDEYYPDAIVSPVKSSDLSIPE

SEQ ID NO: 10390 - protein, 468 aa, Methanobrevibacter gottschalkii
MFLQNISKFISNYRYEQATVESLTTVKAAFLDFFGVTYRGMSEEAPSIALNTIEEILPKRNSNLTASIIGQNFKTDILSAAFVNGIAAHVLELDDGHRGAQLHLGAVIFSTALAISEAYDLTGREFLEGVIVGYEVGILLGQLVNPKHRNKGFHTTGTIGTFIAGVVASKLLKLDEKQTLNALGLCGTQAAGLLESDHGGSMGKVLHVGKASYNGILSAFLARNGFTGSGTIFDGDEGFLKTMVLDNTNHDIDEFSFENALKNIGKVRVRDIYFKKYPFCRHLHSSIDTALKLKASIGDEYNHIQNVAVKTYEIAAEHNNFHPKNLEELKQSLPYAVAISLVVGEVSVDKINQLIEFGLLENYSTVDDVNAIKNIVNGMIILSDDKLNELYPSKRPSNVIIKLDDVFRNGIFQNITFLPKGDFENPLQLRELIDKFKGLNPHYDIKNLTVIDSLEDYNMKYVVRKLKG

SEQ ID NO: 10391 - protein, 162 aa, Methanobrevibacter gottschalkii
MVDIIDGSENISVHGILNWVLLLTIFSIITVVGNYIGYKHPIGDALIGMFLLSLITLIGVWMERYLPLDISSIIYISIIGIVLAFPGMPTSKTLLYYVSQVELISIVTVFLAYVGIGMGKSWDEFKALGPKAVIITILVIASTYLGLALVAQVILMLTGVQI

SEQ ID NO: 10392 - protein, 298 aa, Methanobrevibacter gottschalkii
MSIISKRNNDTEDIRHIYRDKTDRRILKKNPWKDYGLHISVLILVVIAELIGPMKIPVAKGVEISIMPLLYTMILGLIFYLAKPITWIQRKQSRVAEGAMMLFIGVLIAKLAVSSGQSIHLIFEMGPALMLQELGHLATILIALPIALLLGFKREAIGMTSSIGREPEVAVVVDKYGFNSPESRGIFALFIVGTIIGTVFISFLTSICVSVIPLHPYAFAMASGVGSASMNAASLAPTVAAFPQLATQIEAFAGFSNLLSFSVGIYIVIFVAIPLTEKLYGILEPKIGRDPIVDEEEG

SEQ ID NO: 10393 - protein, 422 aa, Methanobrevibacter gottschalkii
MIIINILHIGIDDTDSPDGMCTTYLASQIINKFEENGINLVDYPRLIRLNPFARFKTRGNGGVSFRIPKDDNVDLAKKIVLEEVEKLSMFDCDNTNPGVIFYDGEITEEMENYAFRAIYKFITIEEAEKLAKSVGCEIHKFKKGRGIIGSVAAISLPLKDYTFELLTYRASENYGTKRQIDYDSVYKMDKETFPDTFENIDYSEEYIAIEPKTPCPVLYGIRSNNVESLKIAKDIVQVSEPIADWCIFKTNQHTDMHIQKVSNISSMEQFGCYEIIGEVKNKPKIIDGGHMFFYISDDSGEIECGAYEPTKNFRKLISHLRPGDIIKVFGGIGEQNTFNIEKFQVVKLNDTEYKNPICECGKRMTSAGKNKGFKCKKCGNKIQSDKKVPIKVTRFLKNAQFYETPVSARRHLSKPICRMYLD

SEQ ID NO: 10394 - protein, 310 aa, Methanobrevibacter gottschalkii
MLTRGNLLQQTEKLLKSQGFKTSDIYEHGSFDIVARKNLLILLLKTFLNIDSINEQNAHEMNQLANIFLASPIIIGEKSRNGILEEGVIYERYDIPTIGFETFKNMILYNEYPEILADRGGYFVKIDGNVIKQYREEYSMSLKDLANLAHVSRATMYKYENGIVRANTETAMILEEILNTKVTLDIDLLKQPQKDKIEYSDDVKDLSKLGYGVLSTNKSPFDAVAKMKTSDKHSPLMANVEKNRTEKTLKRMAIPLKDLSLVTTSEPVFIINNDKIKESIGKIPVIKSWELKEFENSKELLKMIRERKEN

SEQ ID NO: 10395 - protein, 128 aa, Methanobrevibacter gottschalkii
MENLQITKMENHPIKWICNFKGQTAIGICGKTQKIAMFASDDRVSKILDDIVIGTDESQEGYGCEEKNRCCNFDCELCEISPRQYLQITGKKPSNKNIKDLINGLADLNNSLEEKNLVPFEEYEVVNF

SEQ ID NO: 10396 - protein, 264 aa, Methanobrevibacter gottschalkii
MFFDDLTFKEKIIPKTILGYSPFVAEPFLGHRSMLYKRDLYDNPQAIADVIVESYNQGVRAINLFNDSQLLKAYDIACDQGCNMKVIATIGKTEVDYLNPNYEIAKETDWDDDIELFNSYDCPLMLVDEFIVDAYDWRLTSKILDCINDTDSLSGLITAFPLRTTNLIPENLNMDLFDFYMVPFNAISYMMDITAFNASQREEFKQKLTSLNKKVIASRIFACGILKPKEAFEFYKKIDYIDLISIGVAKVEEAREDFTLLKEY

SEQ ID NO: 10397 - protein, 112 aa, Methanobrevibacter gottschalkii
MVSMEEFPISSANFISGYKIVENKGFVYGLTVRARGIGGDIGAGLKGLLGGEIKQYVTMMEDSREESIQRCIEHAKELGANAIISVRMDSDSISQNMQEVLTYGTAVIIEKE

SEQ ID NO: 10398 - protein, 524 aa, Methanobrevibacter gottschalkii
MKVLIADAINEKGIENLKEVADVVVNTSITPDELADTIHEYNGIVVRSRTKLTADIIEKADNLQIIARAGVGVDNIDLNAATEKGIMVVNSPESTSVTVAEHTMGLILSMARKISIADKSVKEGKWEKKKFMGVELRNKTLGVIGMGRIGSQVVNRCKAFGMDAMAYDPYLPEEVAKQMCVDLTDLETVLKNADFITIHVPLTPETKHSISTEQFEIMKDTAFIVNCARGGIIDEKALYDALVNDKIGGAALDVYEEEPPAEDSKLFELDNIVLTPHIAASTKEAQRDAAIIVADEIIDLANGNTPKNVLNLPRIDKNTYNELSPYMELCEKLGCFVSQGINGKLKEIEIIYSGELSEIDNLEILSRTVIQGAVNPFLSSPVNAVNAALVAKDRGISITEGRKNNSKGYESLIKVIAKSENETFTAEGTQLHESRILKVNDYWVDVIPKGHMFIAKYEDVPGSIGKIGTKLGEHNVNIGIMQVGRDEKGGRAIMVLTLDKEVPKEVISEIQALDNVYEATGIEL

SEQ ID NO: 10399 - protein, 226 aa, Methanobrevibacter gottschalkii
MSFISKLFGNNDDEFEEVRVDREVLNSVIYYSKQAYPNEFLAFLDGKIKNRILYITGLIFIPGETCETGAVIHSEMVPMNTKYFGSVHSHPGPSASPSDADLMTFSKNGYFHMIVCLPYSYNTFKAYDRHGESIDYIVGDYAYLVNDDLDEFFDEDDVLTDNDEFKPGFFDEDDDEFFKNLDEEKVNHYDEFEKRNQINNQLPNNVIKIELNNDGNVKKISRRFKD

SEQ ID NO: 10400 - protein, 240 aa, Methanobrevibacter gottschalkii
MKEYEVYSSLKVPINSKIIVRLDGRNFHQLARDLNLIKPYDENFYKVLSKVCEDLFKEFSPIFIYAFSDEISLLLDNIPFNGRIEKIDSVMASFASSSFVINYNAKFKKPPSFDSRVIPISDDDVLEYFKWRQDESWRNCVNSHGIFHLRSNYPENLSNNKIKGMNLSDIHELLFQNGINLNDIDTYKKRGIGVYRKNKKVVGFNKKENKKQISYRSYVCTDWNLPKFNKEFFKNMGVLK

SEQ ID NO: 10401 - protein, 254 aa, Methanobrevibacter gottschalkii
MKVGIIGCGAIANIITGSIAPENNGIEIAYFFDKDVERAENLASLAGGVAVLNFDDMLNDVDLVLECASPDSVKKYAPIILKKGIDMITMSIGAFMDKDFYNEVLKIARENNAKIHLPSGAVVGLDGIKAVAKFGLKEINLVTRKSPRSLGKNIDIEEVLFEGKASEAVKQFPLNINVAATISMACNRDIDVKIIVDPKVDRNVHEITAKGDFGEFKTTTMNFPCEANPKTSMLAALSAIRLLKSFNETISVGM

SEQ ID NO: 10402 - protein, 133 aa, Methanobrevibacter gottschalkii
MVEVSKLRSLDIYTNTGHYVGRVEDVVLNIRLGTISKLQVRAIEQERKPAGVLNSFLGSIRGEVPEENDMKSFQNDLLTVDFDKVQAIGDIMLINPRDIKKINPEPQVPDAVAPKQPETQPQETQVQFDAERL

SEQ ID NO: 10403 - protein, 240 aa, Methanobrevibacter gottschalkii
MWDTTKDYRILVASKARENYLNLIPTASFRGSWNKKQAIDLGKQMNSDFQSLIYSYLEGEELVNSPDVASLKEKGEKIIEYLGGPDWNKKFLSNAPKEDREKTQENIAKVRFFLDTIIGLKDRLSLGPINDPIIGVDIRVGEVMSVTKHPKNDKLLICNVNLGKRAITVLTNDLNVKDDNKVGVSLLPPQSFSDIVSEGMFLGMNGNILKSVEGELGEMPKGIPMESLNETRNLVENYLK

SEQ ID NO: 10404 - protein, 470 aa, Methanobrevibacter gottschalkii
MDMLIGGKHISSEDLEDVINPYTGEVIDTVPIAHRQTAELAIESANNARESLSEMSAFKVSNNLFNVVLKLKEKRQMFAESLTLEVGKPIIESLLEVDRSIETLKLAAEEAKRIYGESVPLDAGMGGKGFFAFTQKVPLGVVVAITPFNYPLNLTIHKIAPAIACKNTVIVKPPTEAPLTVMKFCELLNEEFPDGVVNVVTGYGSEVGDHLVVSPEVNKISFTGSVTTGLMISQKAGMKKTTLELGGNDPTVILKDADLNNAVKGIVNGAFLNAGQVCMGVKRVIVEDEIADEFAEKLVAATQKLVMGNPLDSKTTLGTLISEKAAIQVEETVNNAVSMGAKILTGGNRDGAFYEATVIDNVTTDMDLILNETFGPVAPIIRVKNVDGAIEVANNTDYGLQAGVFTGDYASAMRCAQEIETGTVFINKQSTFRTDNMPFGGFKNSGVGKEGIKYAVDEMTKTKLIGLNLR

SEQ ID NO: 10405 - protein, 193 aa, Methanobrevibacter gottschalkii
METTRFETFFDAIIAIIITVLVLKVPQPATPTIGAILKLNTIFIAYLISFLTLYNLWYANHNLLKIIDIIDNSAVWSYGAMTFILSLLPYFTLWLANDINSIPAETMFGLIFIFTHIFNRLATKSIYRSNPYNKQLIELNFDSHIQSIPLIILIIGFILTYTIYAPGIYVSCLLAVIFWISLSKIKRGCNNGN

SEQ ID NO: 10406 - protein, 190 aa, Methanobrevibacter gottschalkii
METERFEALFDAILAIIITMIVLEIPLASTGSWEALFDLKYEFLIYAVSFIVCFNFWNYNNNIFHLVNKIDYKVIWTMAITLFVFSFLPYLTSFVGENFYLFLPQFLYGLSFIITAILSMIIGNFLKQADPGNIALHIALSKHYPMYATIITVSIGMIIGYFIYPPAIIACCLLSILGVWFIPRIIFHMK

SEQ ID NO: 10407 - protein, 315 aa, Methanobrevibacter gottschalkii
MNLVFKFIEKYYCLILLFLVVIALIYPISFNWVLNSYGNLNILNLLLSIVLFTMGTTLKVDNFISVFKNPKEIIIGISSQYIIMPFLAFALASIFSLDAALTVGVILVGTVPGGTASDVITFLAKGDVALSVSLTAISTFLSPIVTPLITLVLIGNQIAFNPVDMFLSIVQIVIVPVILGLLLNYKFPSFCKILEEYLPGISAIVVCVIVAGIMGANKQAILTSSLVIMVVIITQYFLAMALGCLMGYLFGMKREHIITIAIELAFQNSGLSTSLAKTHFPNLLIATVPGALYSVWQNFAGSIIAYLLNSYFIEE

SEQ ID NO: 10408 - protein, 60 aa, Methanobrevibacter gottschalkii
MDDSAQTSAEFILLFGGIFVVVLLVIYMYNNYMDDLGGEIKSKEVNEFNNQLNALKVYFK

SEQ ID NO: 10409 - protein, 308 aa, Methanobrevibacter gottschalkii
MKFNIINNLTLFLDNNVPEKYLFKINEFLLSGSISTEASKVLSIIIIFILVTEIFLVIALTLFNLPFSILIFPFFIIPIIFTYIIVQQEKRAQEIEHTAPDFLRQLSSMLQVGLSFENAMEDMSHYSSGPLYDEIRRAIIEIRMGQNFDDAWRAMSKRLKSKELERIFGIILDGRKSGSSISTVLLDVSNDLRDLMALKRERKSAVMMSVMFLLISAIVATPFAMGMVSVYSNFMQSYGMESEMIISAPLVGEMYLIIHSFLVGFIISVIMYGEVKTGLKFSLPLVAASFGIFYIISTFGGTLFMGGF

SEQ ID NO: 10410 - protein, 338 aa, Methanobrevibacter gottschalkii
MNLHLNNILKDIKKDGVQAYLLTQFTNIEYISGYKPTSFAFCILKENPIIYVSGMDMEIANRDSTIEVKQYESYDLMIKELKEEGIKNLAIEPTLPYSTYARFKDDFEISDKSYVDKQRMIKTPSEIEKITKATEIAQKSFLQLDILNNNGTEREVAFNLVRYMIDNGASKESFETIVTSGANSSLPHAIPEAKKLERPILIDWGAIFKGYCSDNTRTIVYAESQQEIWDIVAEAHDKAIKSVKVGMKCCEVDKVARDIIAEYGYGDNYIHSTGHSLGLNIHETPGFSARDETVIEKGMVITVEPGIYLEGKFGVRLEDTVIISKKANVIGDLPLNIE

SEQ ID NO: 10411 - protein, 213 aa, Methanobrevibacter gottschalkii
MFKFTSSEIRDLIIAFIVISLSFAIVNGGRNPSAVLSILPIVMVGVGAGFILHELGHKFVSMKYGYWAEFKLWPQGLIFALVSSFLGFVFAAPGAVYTYANYMTDEINGKISIAGPVVNIILALIFLAICVAIYPSAFNSETSVLIFIICSVGYSINSFLAAFNLIPIGNLDGSKVLTWNAGIWTITIAIAGIMTVMSMTMGVETIVRIILGF

SEQ ID NO: 10412 - protein, 400 aa, Methanobrevibacter gottschalkii
MTEKLTYFEGTHRVIAPKKTIEINENKLRIAGITRIADITDLDRIGMPVFTAIRPTAEDGAISIYGGKGISKDHAKASAMMEGFERYSAEKQEADETLIATTSAITQKGKYANPKTLNLPQKYEKEDISKIPLEWNIATDLISGEEYYVPSNAVFHPYNHENNVQSLFKSNTNGLASGNILDEAILHGIFEVIERDAWSIFELTHKNYSQIKLDSIESELINTIINKFESNGIKIKLMDFTADIKIPTIAASADDTITKDAGLLTLGMGTHLDPEVAVLRALTEVAQSRATQINGAREDTVRADFAREAGYERMKRINKYYFREEEKQINFQDIENKSTTSINADLDIVKKELIANDIKQILYTNLTRPELNVSVVRVIIPEMEIYALDPTRAGYRFLRV

SEQ ID NO: 10413 - protein, 216 aa, Methanobrevibacter gottschalkii
MKIIIYTGLSIPFDEAKEILDSHDNIEVIYKKPIKRGDLGHDIKENPDIIAIIDGVFHQNSAVGHREILSVMKKGVKVYGSSSMGALRASELDTLGMEGVGYCYNEYASGNVTSDDDVAVMLDSDTLEAISVPLISMNYVFTNAVNENILTQEEKDELIRITKETYYPKRNYAQTLSKSGLNRDKKEKLINFIRTSEDIKKEDAKALLSHIKYVIE

SEQ ID NO: 10414 - protein, 336 aa, Methanobrevibacter gottschalkii
MRLEDKINIVRNILKDKNVAIGFSGGSDSTLIIYLASMFAKNTLAVTIDNHLMPTEFIEHAKRVTSSLGVKHEIIDIDFYKDPDFLKNTPKRCYTCRNLMYGEIKKVANENGFDYICDGNNISDLVDNRPGILITYANEFKTPLIEAKLTSKEIHEYLDKNNIPYSKSTTCLATRIKTNTPITKEKIENISYCEDYILSNTECETVKVRDLGSICMCEVDKIDEIINENKFKQINDELKKQGYEKVSLNLSEIKNNGEIILNYIDGSFSYKLPFTINIADTKKQLKNKIICQTKEKIEIENIDIFDTGLIKGNNFKNYEDALNKFMHVLTKLRRNI

SEQ ID NO: 10415 - protein, 152 aa, Methanobrevibacter gottschalkii
MAVNPVLVIKVVDNTSVGVRARLYDDFSEHNIVLNSVLTYWWANNMPPAVKFLELFDSVIKRTINEIMPHKTLNLKYEVKADDILENASQIEITLISISADGVGFKIDGKSVFLKDLRKVEEDFEPKEFSTTFDQCIETPDIVLKKYKEMKN

SEQ ID NO: 10416 - protein, 281 aa, Methanobrevibacter gottschalkii
MLVKRTMSKNVVSVSVPGNRDKVLDLMRKEKKAVLPVVKGDTDILVGIVTRSDLINNPDEEQIAMLMSRDLITVSPGDDVIDAARKMMDNDVRRVPVVDDDGKLVGIITSFDLVSNALTKTEINDVVENYMITTVPTTWEKAPLNVAFESMNQFGLKSILALDDDAKLSGILTETDFISEIEIISERSEHSSTVGTEGDKWSWDSTSVLYIEKNHLKFTDKTVCDVAVGNVEVANSKTKVSDCAKKMKTLNIEQIPVIGVEGNLVGLVRASDLIKALVPQE

SEQ ID NO: 10417 - protein, 140 aa, Methanobrevibacter gottschalkii
MYKKILVPTDGSEFAKKAQKHALFLAEISGAEIIAISVTENNFVNGLPLDDEVYQLNQILKERSEENLKEFDKLNENDLKITHIVREGSPAKVILEVAKEENIDLIVIGSSGKSGFDRFIMGSVADKVVNSAKCAVLVIH

SEQ ID NO: 10418 - protein, 384 aa, Methanobrevibacter gottschalkii
MFTIANGIILKGKDLVPTRENIVVDDGRIIEIGKGFLEGKIIDVDGSVVCPSFINGHMHIGDSIIKDEGYGLSLSEMVKPPNGVKHVALSDVSDDELIQAMKYSMWDMVYGGTTHFIDYREGGLKGVKLLRKASEDIPIKPIILGRDDSFYGDDPDLSKVKIAIRKLLKFADGIAPSGFGEITMDVAELISKECEKAGKISSIHVAESELNQIESLNACGLSEIEKGVINNFSQLVHLTNPKNEDLNSVSVSAQNVVVCPRANATLNVGIVPLNKMLDLGITPLLGTDNVMINSPNMLRELEFTLKIISVYYKKYIDPSNLLKMATTNICGFGINNVIDKSLITEDNLAEFNVFNSFSKNPYLNIINRCETKNILYRINRRTII

SEQ ID NO: 10419 - protein, 176 aa, Methanobrevibacter gottschalkii
MYRVKYNNKDYGEFKKLSDALYERDALFFCNFDYDLLVECDLENKYENMVLPPFPEKRPKGRIKGTKVNKKEREGEILFNHKIKKFYIQKGDETIGQYDTMTEAFYYKKILMANKWDKNILKTNITKKIEVNIIIDPAVEYEVQLNFCPKCKNRLKIGETECPSCGINIEEYLFNR

SEQ ID NO: 10420 - protein, 1058 aa, Methanobrevibacter gottschalkii
MPVDKDIKKVLIIGSGPIQIGQAAEFDYSGSQACKSLREEGIETVLVNSNPATIQTDIDMADTVYTEPLTPEVVAKIIKEENVDSILPTMGGQTGLNIATGLGDLGLLDGIKVLGSDVQTIKDVEDRDLFANLMDKIGEEIPKCHAVESVEAALEAVDDIGYPVIVRPAFTLGGTGGGIAHNEEELIEIATHGLDMSFINQVLIDESVLGWKEIEFEVMRDKEDTCIIVCTMENIDPMGIHTGDSVVVAPIQNLCDETIQKMRDASIKIIRALGIRGGCNIQFALNPETDEYKVIEVNPRVSRSSALASKATGYPIAKISSKIALGLTLDEIKNDITKETPASFEPAIDYVVIKIPRWPFDKFKGVSREVGVQMKATGEVMAIGRTFEEAFQKALRSLDMGFDGFEYIDYTEEDLAHPTDKIYFQIYSAIKDGMDIDKIREITNIDNFFLYKIRNIVNFEDSVTADKLNDEDFLRKAKQIGCSNKRLADLSGQTEEYIKNLLSRYNIKPSYKMVDTCAAEFEAKTPYYYSSYDKGNELVSTNKKKVVILGAGPIRIGQGIEFDYCCVHSSLALKEEGIETILINNNPETVSTDYDISDKLFFEPLTFEDVMGVIEQEKPDGVIVQFGGQTSINLSVPLANAGVKILGTPYESIDRVEDRELFAELLEKLHIHQAPYGTANSFEEAKEIAEKITFPVLVRPSYVIGGRAMEIVYDNNELEEYMKEAVKVSPEHPILVDKFLEDAIELDVDILCDGEDVFIAGIMEHIEEAGVHSGDSACVIPPQTIPEYILDTIRENSTKLALELNVKGLMNIQYAVKLDEEMVYIIEANPRASRTVPFVSKAIGVPLAKVATWIMQGAKLRDFDLTKEIKLNHVAVKESVFPFLKLPESDTVLGPEMKSTGESIGIDETYGMAFYKSQLSGGMELPKEGKIFISVKEADKKKIRPIAETAANLGFDLIATDGTADATGIDSVEKILKVSQGSPNIRDAILNKEIDLIINTSEGKQSAKDGYIIRRLAIELGIPYVTTLAGARAVLNAIKAIQNNEINVKSLNDYVGGE

SEQ ID NO: 10421 - protein, 360 aa, Methanobrevibacter gottschalkii
MVKIAKLALEDGTILKGEAFGYETTKLGELIFSTGMGGYTESLTDPSFKGEILMSTYPLEGNHGVSEKWYQSDKIQAEGFVCREVCREVSNFGPQKTLDDFLKEFKTPGISGIDTRDLTLKIRERGSLKAAITTENISDDELINLASSQPSIEDMDVVPLVSTKEIKMFNGDADRKVALIDCGVKKNIINSFLERNIGVILFPYDTDYKTVLDYSPNGLMITSGPGNPDRVSETIETMKKLSNRLPIFGICMGQQLIAKSFGARSYKMKFGHRGENQPVKDLNTGKVFITSQNHGFTIDKESLKETDLVLTQINLNDGTPEGISHKELPLHCIQYHPEAGPGPNDTRNIFDKFNQMMDDY

SEQ ID NO: 10422 - protein, 506 aa, Methanobrevibacter gottschalkii
MDAKSEEIFKKHLNNSKEYVKFKKLVNETRVYDIPKELTGELRAYQKIGYSWIVQNIKYNFGCILADDMGLGKTIQVLTAILHFKEQKHYDYEPSLIIVPPTLLSNWENEIKKFTPTLSYYIYHGANRTFPLDEYDIILTSYGVIRLDLDMFLDKKWFICVIDEAQNIKNPNTQQTKAIKSVPAFNKIALTGTPIENKLTDYWSIFDFVNKGYLSTLDNFKRDYVFRIERLEETSTLENFKTITKPFVLRRLKTDDNIKDELPDKIVNDIYCSLTKKQVLLYNAIMEGIFEDLEGKTGIERKGIILNIITGLKQACNHPAQYLRSDNPKINESGKMELLITILENILDVNEKVIIFTQYAKMGEIIKKLVSKKLKTDVLFLHGSLTQEKRSDIISTFQEDEDHKILVATLKTGGVGLNLTAAQNVIHYDLWWNPAIENQATDRVHRIGQEKDVMVYRFITKGTLEEVIDEMSKNKLNLAEKAISNDETFITEMSDEELKEKLSLRL

SEQ ID NO: 10423 - protein, 274 aa, Methanobrevibacter gottschalkii
MDRIIEYMLEEDKGFGDITSEALVEKDLEVNAYIISKDEGILAGMNIVKDLFEEFDVEVVYNLEDGSKITKKDLLMSVKGNARTILLLERTVLNLSMRMSGVASAASYYSSLVKNHDVRIAGTRKTSPALAKFDKYALKVGGVDTHRFSLDDMVLIKDNHIAVFKSPLDALLKAKANVSFSKKIEIEVETLSDAIECVKNKADIVMLDNMSGNEVKEVIDELEKLNIRQNSLIEVSGGITEDNIMDYVESGVDIISIGALTHSSRSLNFSLKIE

SEQ ID NO: 10424 - protein, 297 aa, Methanobrevibacter gottschalkii
MEIIFLGTSSAVHSYTRNHPAIILKAFGEIILFDCGEGTQRQLIFAKISPMKISKIFISHYHGDHILGLPGLLQSMNFRGRETKLTIYGPKGLNALKNAILNLGYCKIDFPIEFIEIGTETIECCEEYIIRSQHVNHQVPCLAYAVEELKKPRFLRQKAIELGVPVGPAFGKLHNGEEIEINGKIIKPEQVLGPARKGIKITYSGDTAPCEEMIDFAKDSTILIHESTYMNEDADKAEENFHSTSSDAARIAKKSNSKQLVLTHFSTRYATLDDLLKEAKKIFKNTKLAKDFMKIEI

SEQ ID NO: 10425 - protein, 251 aa, Methanobrevibacter gottschalkii
MNISVTLNNPAWTLIYILIVIIATSFLTRLIAFLMNKMKRFHNNEAAIYLTRDIINYIIYFIALMIILQFFGINLAGTLLSLGIAGIALSFAAKDLISNLFSGITLIIGKSIQVGDTIEINNKKGIVERITLRSTIISDDSGVKKIIPNSTLTNYPYLHFKTPEKYRVDIQTGLSLNIDVEEFEKYIVKKILEYDGILKNPKPSVYSKGITFEETQLKVSFWVKEFNSKDKYKLTITNEIRKFTKMGEKDE

SEQ ID NO: 10426 - protein, 305 aa, Methanobrevibacter gottschalkii
MSNTLQKEILKLKEEKNAIILAHNYQPKEVQEIADFLGDSLELCIKASEIDDKDLVIFCGVDFMAETAFILNPDKKIVIPTLEAECPMAHMLPEDVLLKAKEENPDAGVILYVNSIAEAKQHADTLCTSANAVKVAQSLPHDKILFGPDKNLGTHVADKIDKVIIPVPKDGHCYVHRLFHVEDVELKREQYPNAEIICHPECDIKVQKACDKVMSTGGMLKYIATSDKEEFVIGTEIDMITRINAEVPGKKLYPLLEGAICETMKLHTLEKIRDSLVNEAPQVTLPKDVADKSKKAVQHMLDVSK

SEQ ID NO: 10427 - protein, 342 aa, Methanobrevibacter gottschalkii
MWGVSIFRELNIEFSNFIMSSFEFESGRILKDVNVEYSTMGFPKYDEDGNITNAIVFCPTLKGERSVLANLHNALTMDNISNDDEFAFIRDKKYFFIRIVSLGSPESCSPSTTDLKHNFPNYTFRDCVNFKKQFLKEKFNLDSVLAIVGEGVGGCEVFTWACEYPDYMEFILSMNNLAKLSGTSYIFFKSMESVLESNDKIYSDVYDPSLSKLVVAVNKMLFLNYLSRNMLSNLSRDELDALLDNFVEDGLFRDVHDLKYLCDCLLEYDVNDKLSNIKAKTILIAIEGQFLVNVEKEVLPLENAIDDVEVMVIQLDEGEFDNGESYSSVFKIFSFLNEYGVE

SEQ ID NO: 10428 - protein, 92 aa, Methanobrevibacter gottschalkii
MIVKILNYGDVGNLKFIEYGIYGLLSTQIDYLMENLEEETSINEDVLIIKMYFESKLYPFQSGAAKFRLDDFVAREEIEMAMFLSSFLEDMV

SEQ ID NO: 10429 - protein, 336 aa, Methanobrevibacter gottschalkii
MWGIIIYDENYFISKNEYFTLNSFEFENGGVLNDVNVEYMSFGTPIYDDNGIIKNAIVYCHGSLGSYSSIKKLAPLLGENDAFDENKYFFICISALGSPGSCSPSSTDLKNKFPKYSIRDVVKFQKKFLAEKFNINHVLGMIGNSMGGFVCLTSAINFPDYADFIICGVSSYKVAGHDFILSQFVNEIIESDPDYNKGDLTYSLIRTLRIACLAEFNFGLSKKALRDMSKIELSSEFENFGNESIETDIYDLKYCNEACMYFDVEEELGNIKSKTLIIACNQDPHFPPELDAIPMSKMINGSKLVIMDSDLGHLCFNELDTISNELKEFMEGLGDC

SEQ ID NO: 10430 - protein, 260 aa, Methanobrevibacter gottschalkii
MKYKILEKPSCEDGYDLVQEALRKKTTILIFACCKVSYEGRALSELNWGERIIMIKPDGTFLIHQEKKVEPVNWQPPKSRTRSYIKNDNLFLESHRRTPKELLTVEIRKIQFINYANIEDFEELEQAGYEKDMGDMIMEKPHMIEEGFTPTAREYSVEHGFIDILGKDSDNNLMVLELKARKAGITAVKQLRRYLQDLENTDNDYLKECESQKKKIRGLLVAPSIMDDALELLENEGIEFVSIEPPRELKRDKKVTLDAF

SEQ ID NO: 10431 - protein, 159 aa, Methanobrevibacter gottschalkii
MLSEEMIDINDINYAIYKIGHWENNYEINQIGLSNEIPVTKNTLKHVKLSMVEIRTSRFELSDKIVNGFVAIAIHLNSNVQNMELDELIELEEKEYQNILKELDNLELLDDNESIPLDSEDYLIYKLEKDCHVTKSVPANLYTINYHNNELKKIEDALD

SEQ ID NO: 10432 - protein, 230 aa, Methanobrevibacter gottschalkii
MKKCPECGNPSYDGAPVCGNCGYKFPKAKNSVPKGEDIFKKEHKKEPSNDESTLTIIKQKKLIIGIILVITLILICGIFLTGSTNKSSPIQNVDTEKYSAGSFSFKYPGDWQELNQTDEEHPGAIFYKAANNTTVEYYNVSSSASSLKEINQNRITHAQSVGASVTLLETITLDGRNASNIILENADGNYTRYVSMFSNGELYVFRLSGDSVNSITSDEINSVINSADIA

SEQ ID NO: 10433 - protein, 275 aa, Methanobrevibacter gottschalkii
MTKIKLALCQMNVVDNKKENIKRAHSMIKESVSKNADFIILPEMFNCPYSNDKFIEYGEKENNSPTLNEISELAKTNKVYILAGSIPEREENKLYNTSYLFDKQGNVIAKHRKMHLFDIDVKGKVTFKESDVLTAGNKVTVAETEFGKIGIGICYDIRFPELARIMVENGALILVYPGAFNMTTGSSHWELLFRSRAIDNQAFCIGVAPALNKNASYHSYGHSIIVNPWGKVIAQASEKESLIISEIDLNEIKKIREELPLIKNKRNDIYKIILR

SEQ ID NO: 10434 - protein, 282 aa, Methanobrevibacter gottschalkii
MSNLSFDEAISNLSAEDVGVRKEAIKSLVGITDEKAIEPLIKATTDDNAQVRFKAAEILGNMGDLAVDKLINEFNNAEGKDKRFLAFALKETEDNRIIPYFVEATEDDDFGVRKVAVRALGELQAINELESISKCLKDEDWGVRLATIQALGDFATDESIKLIKDARKSEDDKDFKKSCNKAIKKAEKRQKAKASGKAIVKVIPMSTIKEMEKSNIQKAIKEYERYVEAKQAKDAPYKRLCVLYRKANDYENEVRVIETAIEVFADNDKKLSYFEKRLAKLK

SEQ ID NO: 10435 - protein, 256 aa, Methanobrevibacter gottschalkii
MKNYFDIKDKVAVITGASSGLGWQIAQAYASQGAKLALFARREERLQENIAEIEKEFGTEAIYAVCDVGNYDSITEAVAKVMDAYGRIDILVNAAGMGNNKMVTDQSNEEWERHIHIDLSGVYYMCKAVGEVMIEQEYGKIINIGSIHSRVIFPGGGISAYSSAKGGVMNLTKNLAVEWAKYNITVNAIGPAVFETELTVDSIEMDGFMDLIKAYCPAGRLGKPGELDGIAIYLASDASSFCTGQLICIDGGWTAI

SEQ ID NO: 10436 - protein, 865 aa, Methanobrevibacter gottschalkii
MIEEQTKIYSKKQIFKTLHPWVQKWFDLQFEDFTPAQKKSIIDIHKRNNILISSPTGSGKTLTAFLSIISELTTLADTDQLEDKVYCIYISPLKALDNDIEKNLEEPLKGIEEIAGKDLGIRKAVRTGDTSQYQRQKMLKKPPHILITTPETLSILLVAPKFREKLSGVKYVIVDEIHSLAENKRGVHLSLSLERLQHLIGQYTRIGLSATVSPLEEVARFLVGYEYGIERDCKLVKINYLKELDMQVMCPVSDIVIADEEDTRLGMYDLLDDLIQENKTTLIFTNTRSGTERFVYNLKKMYPMNYNDSNIMAHHSSLSKEVRLDTENKLKEGKLKVVVSSTSLELGIDIGYIDLVVLINSPKSVARALQRIGRSGHKLHEKSRGRIIVTNRDDLVECSVLLKNAKEGKIDNINIPTNCLDVLAQHIYGMSIENPWDIDYAYDVIKKSYCYKNLPRDDYEDVLSYMAGEYPELEERYVYAKIWIDYKENTFGKRGKLARMIYSTNIGTIPDSSGVLVKCDGETVGKIEENFMERLKKGDTFVLGGRIYRFNYGKGMTINVTPASGPPTIPSWFSQQLPLSFDLAMDIQRFRSHMETKFEYRRSKEEIMDFIFDYLYVDDFAANSIYEYFVEQYKYAKIPSNRLLLVEYYKGFGGRNFVIFHSLFGRKVNDALSRAVGYVVAHQYNTNITISITDNGFYLSSDGKIGGLESFKQLTPENFETILTNSLNKTETLASRFRHCAGRSLMTLRKYKGESKSAGRQQVRGKILLKFVQDMDDNFSILKEARREALEDYMDIKNALKVINMIDNESMEIKTINTVIPSPFAFNLVSQGYLDILNQNDKAEFTKRMHKAILDQIKDKLKDIY

SEQ ID NO: 10437 - protein, 153 aa, Methanobrevibacter gottschalkii
MKTLLVYYSRTDVTKKIAKMIQEKINCDIEEITDDDKYSGKLGFLKGGMNASMGRTSDINIISKNPTDYDLIIIGTPVWASNIATPIYTYLMKYNKDFKNVASFCTCMGNGYEKTLKNISEITGKEQISTMFFTAEDIKNPEEKINIFINEIK

SEQ ID NO: 10438 - protein, 122 aa, Methanobrevibacter gottschalkii
MTKWKAVIIGFILAVIVKSFFAQYEFIGLLFVGFITGYIAHDGALSGLWNAAVAGALGTIVCAILFVLVATLGGSLFGIFGGLTGFTLSGITSITIVLGYLIYYSIVMGITGALGGIIASKK

SEQ ID NO: 10439 - protein, 135 aa, Methanobrevibacter gottschalkii
MNMFSEINIKALVFGAAIAAACILIGYQYWDWLYPFSAIGLIYAGYGQSNIKIGTAMGALASTPVAILTLQGYLGTFKEGFFTTENGILAVTLTVIAVGAFIGFVGAWAKRDRIKALEQYNQKQKIGKNKNKKQK

SEQ ID NO: 10440 - protein, 363 aa, Methanobrevibacter gottschalkii
MGKVKKEDILDILAKYDKSEITIATLGSHTSLHILQGAKEEGFRTAIVCEKGREIPYQRFDVADEYILVDKFKDIVNEDVQQKLRDMNAIVVPHGSFVAYAGLDNVEDKFNVPMFGNRDVLRWEAERDKERQLLVEGGVRIPFKYNGPSEIDRPVMVKFPGARGGRGYFVASSTEEFDAKIEAMKARGWLEDKDVEAAHIEEYVSGCNYCIHYFYSALDDTVELMGMDTRYESSIDGFVRMPAKDQLDIDLSPSYVVTGNHPAVIRESLLPQVFDMADKLTESAKKLVAPGLNGPFCMQTLVNDNLEVICFEISARTDGGTNTFMDGSPYSYLTYGKPMSMGRRIALEIKRAIEREELEKIIT

SEQ ID NO: 10441 - protein, 176 aa, Methanobrevibacter gottschalkii
MLIGLISDTHIPDRAKEIPQKVIDAFKDVDLILHAGDLTSMKVIEELEKIAPTIVIQGNMDRINGIDLPKTKVITAEDLKIGLVHGEVYPRADTQQLLYIAKQLQVDILVSGHSHQPKIEQIEGVLLLNPGSPIVPRLADRTVMLLEINKQEVNVEIKKIGAPVCSALDFDKYKRD

SEQ ID NO: 10442 - protein, 212 aa, Methanobrevibacter gottschalkii
MGSRWQMEKHNDPYYKKAKQEEYRSRASYKLKQLDKKYKLIKEGNTVVDLGAAPGGWSQVALEKVGDEGIVVGVDLNRFKKFHEENYYGLRGDFTTPEIQEKIMTLIGGKAKVVMSDASPSLCGIKNIDQLRSIDLVNVVIEIAENILEEKGNLVMKVFQGPEYKNMLDSLKGKFRHVRTTKPASSRKKSSEMYVIGLEYMPNKRNRKKRKN

SEQ ID NO: 10443 - protein, 139 aa, Methanobrevibacter gottschalkii
MRKSRLSLFKSTSMMISVVGIIMIISTIIVVAYVGYSIVSSSITNDISSGTQYDELAELKAEYSNLSVKFDNIKSTYYAGDADDVKVYNDAKLELSRANSAIENVQSALDADKPSNDVDSRIVFAKEKLESAEKAYNSL

SEQ ID NO: 10444 - protein, 667 aa, Methanobrevibacter gottschalkii
MNSTTKSQTSIAKFEEFFATSYKDDVFKILEQYPDERSLNVDYRALEIFDPDLADLLIDKPEEVIDAAKIAIKNIDPLVKDADINIRFEHLSNIIPLKTLLSKYIGTFVAADGIVRKTDEIRPRIETGVFECRGCMRLHEVEQSSANRIIEPSLCSECGGRSFRLLQEESKYVDTQTARMQEPLENLSGGTEPKQMLMILEDDLVDKLNPGDKVRITGTLKTFREERSGKFKNYIYVNHIEPLEQEFEELQLSEEDEEQIIELSKDPNIYDKIIKSTAPSIRGYRDVKEAIALQLFGGAAKQLEDETKLRGDIHILIVGDPGIGKSQILKYVSRLAPRSIYTSGKGTTGAGLTAAAVRDELGGWSLEAGALVLGDQGNVCVDELDKMRSEDRSALHEALEQQTVSIAKAGIMATLNSRCSVLAAANPKFGRFDRYKVLAEQIDLPAPIISRFDLIFVIEDKPSKERDSKLAEHILKTHQFNTVDYEIEPELLRKYIAYARKNVNPRLTEEANEVLKEFYVSTRNSNPEEQGAVPITARQLEAIIRLSEASAKIKLKETVDKEDAEKAVRLQLACLKEVGVDPETGELDADIVSGGTPKSDRDKIQRVTEEIKQLEEEYAGQAPLNVLISNMSDKYGVSEDKTEQIVKNLVQKGVIYQPVNGYFKRVV

SEQ ID NO: 10445 - protein, 135 aa, Methanobrevibacter gottschalkii
MDKYEDLLERAIDQLPPEVFEHKRFKIPKAYSDIQGNRTFIKNFKDVAEGLNRDPQHLLKFLMRELGTAGNIEGQRAILQGKFTHYLINERIEDYVDKYVICHECNRPDTRIIREGRIFLLKCAACGATAPLKSL

SEQ ID NO: 10446 - protein, 347 aa, Methanobrevibacter gottschalkii
MFCPECGSTDKKMIGNICINCFLKDFQMIELPKRIEVQICSHCNSKLEEGKWSEEFIPEEEIIYRALERNIKIDDKVSNEIINLEIDQMKGTIAKCYVEIVGDVEGTEIEETQETEVKILKTVCPTCSKIQSGYYESVIQFRADKREIKSEEYDKADEIVEKTLIKQLKNDKLAYCPQIAKPKEGHDYYIGSLKSGRKVAEALKEEFGGTIKESPRLISEDKSTGKGLYRIWISVRIPEFEINDFIMFEDKLIQVTSIDKNRIVGNDIKTGKKQNIPLKNMEKIKLIKKSSDIETTTIISMSPSTIQILDPADYSAVDLEMKDEFANYNIGDEIRLIKIDNYTYLLN

SEQ ID NO: 10447 - protein, 320 aa, Methanobrevibacter gottschalkii
MNIEEKIQLIEEGTLEVIDTEELKEVLAKKEPIAYTGYEPSGKIHLGHAVTVQKLKQLQKLGFKIKILLADYHAFLNGKGTIEEIAETAEYNKKCFQALGLDEKTEYIYGSSFQLEPDYTDKVYQLATMTTLKRARRSMDQVSRADDNPKVASVIYPIMQTVDMAALKVDIALGGMEQRKIQMLARENLEKIGENVPICIHTPLLHGLDGDAKMSSSKGNYIAVDDSIKDITKKINKSYCPQGEIKGNPMIEIAETFVYPNEEKLLIKRPEKFGGDIELTHDELIKEFSEGNLHPMDLKNGIKDFLIEFFAPVREYMEEN

SEQ ID NO: 10448 - protein, 69 aa, Methanobrevibacter gottschalkii
MVEEKEEFEMGLPNGVGEQMLAHAFEKFDIKLEQTEFGPKLIGEYDELIKVKEFLETGIRDRLKELEGE

SEQ ID NO: 10449 - protein, 192 aa, Methanobrevibacter gottschalkii
MYIVFEGIDGAGKSTQIQLLKQWLEDNGFRVETLVEPTDSEVGKLIRKILQRPDATTDNVQKTLGLLFAADRMLIMDKLEDKSKIIISDRSFISSLAYQEPVDWIEVLNKYAKKPDLLVLLDLDVKKSVARTSGEDTFENEEFLIGVKDNYLKLAKNYTSEIIDANNGVNKVSSDIKKVIAPYLGICPDCIQ

SEQ ID NO: 10450 - protein, 844 aa, Methanobrevibacter gottschalkii
MNNQSRCKNKMVLKELLAPAGSYDVLVTAVNAGADAVYIAGPNYGARAYAKNFTIEELEKAVNYAHLNGVKIHVTVNTLVNNFEIADVLNYLFKLYQIGVDAVIVQDFGLIWLLKTFIPDLEVHASTQMGLNNYSSIKWASDNNIKRVVLPREVNINQIKKTYNQLKKDNISMDLEVFGHGALCYCVSGKCYMSSYNSGRSGNRGACAQPCRRQYRLKYRGYNIGNGFLLSTHDLATYKNIKEISNAGVKSLKLEGRMKSKDYIGTIVNSYRNIIDGNPGNYEKDLHLVFNRNFTSGYIMGDKPGEVMGRESSGHEGLYIGDITNIEGTKVTIEIKNKEIPVILEPGDGIAFKYNGKIKGIYLENIIKQDENEIIIDTTRLVKEGTEVFISYSSSTHEYLKQFEKETIKNHIGLNLSLTWDKELNLYTKVEYYVDGELINFRHKSLDMFEKAKNKPVDEKTIENQLNKTGETPFFIEKIQFNNMPNDMFIQIRKINQIRREILDNATELLMKHYTPTKKAVKEVRKNLTKFFEDYENNKGKIKQKTPKLSLFIDDLSQIRAASGFGLKRIYFDGTCHYNNPDDYFKNIKDTLMKGSLMASPTEFVWVLSSFMTQKDAIKCNEIVKELENEGIIISVMGDFPGMNDIFECPVYGNHNLNVWNSFCVRDLNEAGFKSLILSSELSGHEIKELIRRNHDRNIDLEMIVNGNLEVIVSKDDFTNLNDGKDFIISNDADYAILEDKKRKKFKYKVFFDYNRQSHIINKDCLCLIEEINEIKEFGLDSLILDCRYSNEKYTTQILSIYNESLHNKDQDELSKYKYQIMDFSQSYINKGNYIEGRLHEDKK

SEQ ID NO: 10451 - protein, 805 aa, Methanobrevibacter gottschalkii
MRIPELLAPVGSMDHLKVAINAGASSVYLSGKEYGARKYATNFTLDEINEAVDTAHIHNVKVYVTVNTLIKEDELEDVINYVSNLYAIGVDAVLVQDLGLVELINKHIPKLKIHASTQMTCENQLKLNYLEQKGIKRVVLPREMRKEEIKSLNTNMELEIFVHGALCYSYSGQCLMSSFKGGRSGNRGTCAQPCRQKYKIEGIGKENYYLSPCDLSLFNKLKEILELNIDCIKIEGRMRNKEYLAIVINAYRKALNKLKSKKEIENENINLVFNRGLCEGLFNDSPKRSLKAGHIGLKIGHVIKSEKNQIAIKLDDSIKTIPEKGDGLLIIKNNDDYGFEISQNPIITSLNHFKTGKNKPMKNLTRRDKILIVKKVWQNKKSTFNLNESDVYLTKKNKLTKKVKEIESKGSSFIKSKLVLTFSIKNKYPTLKGKLTLQNKKEVESEVIGNTPFEKPIKKSINREVIKKQLQKIDNYPYNIIQININYDGTLFIPIRKINELRRNLFERLEKEAINSFKHENKKIKLKQYNNETNESKYNISFYTNNLKHLEHIENVERVYLEIPNNDDSLILSEEKPNISYMINFIKQAYEISYDKDYKLIWKWPDITHDNLIKSLNKVRGILNKMHYTLPIMSNSFNGEYGFYSMNITNNETINSLKDYKILTLSPELTKKDYENIIKHCRYPKKVEILVQGSVELMKTRYPLLYGAEVKKNYKNYLIDKKNNKYPIHKSISSQELSIFNDSELSLINEIKHLKNINYSNFAIDGRYKDDEYYKMIDIYNCAINGYINEKELKKYSSKNTIANY

SEQ ID NO: 10452 - protein, 641 aa, Methanobrevibacter gottschalkii
MQREIITLQNIKGIGDKISEKIIKSVGGEKELQKIVDNADVEKITNIDGISQRKAIDIMNQLLNNPKSEFIKSDRAMEIYEDIINKILAYSNTSYSKNRILLLSPSKDIKKINSQLDFVMDAKEHVSKLPIIKLKGLMKNLKEVEEVKTEYDPSKVILVESEEDNSYLTDLGLNQYYPIITASDSPLLQEEMMNYDLVFYVYSQGILDFEGMPNLIMINIEDNDYEIVPEKIINFFIQNKDLFTRVHEIQKIRNKDSVLGEIVPIIDELNIIDKREVNIEKLVYSLKEDMDNELEKSIKQIDLEGNEILNLLNNNFPPKISKIFDDIINKRKDIIREKTGLSFDPFLRTYPIEIDDAEIQRITLEQSSKKENDIFDIKRSAAIELNSIKKKAIEEVEDAIKFDYEFSLGSFAYEYDLCRPKFSEEIQLTGALHLELALKKDKEFIQKINYQLTQKENISLLTGANSGGKTTLLETLTQISIMAQMGLPVCADNVQIKLFDEIYHFSKKRSLDAGAFESFLNVFIPIVTTNSEKLVLLDELEGITELDAAVKIISTFIDMIKESNSYGVIVTHMARELMNYTDIRVDGIEAKGLDEKYNLIVDRTPRMNFLAKSTPELILKRIYEKSDDNLKAVYSRILEKF

SEQ ID NO: 10453 - protein, 493 aa, Methanobrevibacter gottschalkii
MIFLNIKVFDTTLRDGEQTPGVSLTQQEKLRIATKLDEIGIDYIEAGSAITSKGERKSIKGIAQQGFNAEILSFSRPLSVDIDYCLECDVDGVNLVVPTSDLHISDKLKITRDELIQLSNNAVDYCKDHGLIVELSAEDASRSDTDFLKSVYLSAINHGADRICVCDTVGILTPDSSFELFDKLNEDINVPIAAHCHNDFGLAVANTLSALKGGATEFHSTINGIGERAGNTSFEECVVSIDRLLTNFSTNVNIHEIYDISKLVARSTGVYIQPNKAIVGENAFAHESGIHSDGIIKNSATYEPMTPELVGRKRKFVIGKHMGTHGLENRLKEIGLSVNKTQLQQICNDIKELADKGKTVTDVDLHVIADNVLEINHEDRIKLDELTIVSGNKIMPTASVKITFDDEEILNAGVGLGPVDAAINAVKTVDAFSDVELIEYHVDAITGGTDAFIDVIIKLQKGDKVVSARGTEPDIINASVKAYISGVNRLLRD

SEQ ID NO: 10454 - protein, 163 aa, Methanobrevibacter gottschalkii
MYMENIQILGLKGTIDSVSETLNLIDGIKEDSEIIQLLNADSIASRNHIIHGVNQAILAFDRCENLAKDLSVEIVLRCSAQRQISKAFEILGLKEGYMNLCAILVNSKNHTSELSEIFSLDDNVFIPDDEILMKIYKISDIEIKNMSLEDIIIDRITKLTVNY

SEQ ID NO: 10455 - protein, 317 aa, Methanobrevibacter gottschalkii
MFKFKTPSEKTRQTMSKVALGKTNINFEERCTEKIKRLTEKEEVKITSSGNNSIFIALSAIKGDIIIPDQGGWHGFKQIAKFLNKNIITLKTDLGLINPKYIDELDLREGSALIYTSFAGYCAEQDTKSIAKYCKNNNILTIEDASAGIGDSEKKLGKYSDIILASTGSPKIINVGQGGFIASNESEIFKEDLMPQKLSKTSEIVCSGIDSELDNIAEKLNLTVNATNYLKKYINNALHPNKRGVNVIILHDDAKAIGWNLKKKLTTDKSGFITTCPNYNRVKQKAISIEIKNLDYNCLKKEHLDKIIEEMEINNLQ

SEQ ID NO: 10456 - protein, 390 aa, Methanobrevibacter gottschalkii
MKTTKNAYLAKLTEQIQMKSVKVGKNLEGTTPPSVFIGRWSYPKVYAGPMMSSQMGDTSIMDTPEDWIGQNKTQDEIINYRMNLVRGKQLIKIDDLENPFIEKLQDISLASKSIDSEATFGRRPTGSVLTEDSMPHGPSAVIEKFDIDAVKWDRQLEKTFYDTDLKSTDAIVNLHNKDVPFTAMQKAFSVGAIGTKNKRKLVPTRWSITACDSTLADEFLKKVRKFEKLDTYRVFEFGALNNYYVIILTPTEWQYEWYEAFIRLMKNEELIFSDYETNGGKKEYSIVGGCYYTAKMVVLDYLMQIKKQSGLLILREAYDGYVPLGVFNVRENIKEAMQRPYIEFETLESCLEYAGTKLRIPINRYVKQGTLMNEMLHTKQTTLDMYFKSG

SEQ ID NO: 10457 - protein, 311 aa, Methanobrevibacter gottschalkii
MNKMLSPKEFIEDSIQKIKDQIGDEKAIIALSGGVDSSVCSVLVQEAIGDNLTAVFVDHGLLREGEVEQVTNTFKDRLNLKFVDASDEFMDALDGIEDPELKRKIIGKIFVDVFEREAIKSGAKFLVQGTIAPDWIETKGEIKSHHNLALPSGMKLKVCEPIRDLYKDEVREIGDELNIPASTVYRQPFPGPGLGVRVVGALTKENVEVCRKANKIVCDEIEAAGIDKDVWQYFAVLTNTKVTGVKGDQRDFGYLVVVRVVNSIDAMTASVAELPWEVIQTISKRITSEISEVTHVALSVSDKPPATIEFC

SEQ ID NO: 10458 - protein, 85 aa, Methanobrevibacter gottschalkii
MIDNADDLRDKANEFKIGLKKQSINVQIGDEEYSFRISGIGQKSVKLEKYVKFDEIFEAIESGNDNGLETIIKQFIEDYEEEDDE

SEQ ID NO: 10459 - protein, 185 aa, Methanobrevibacter gottschalkii
MTILVINNKGQYNHRIARSLQYLKIPSKLVSNNLSIEEIEAENPIGLILGGGPSIEDAGLSEEYIKYFDIPILGICLGHQLIAKVYGGEVTTSDTESYAQVKIDIKNDENLFEGLAPEIDVWSSHKDEVKTIPDEFEILASSNLCNVESFKHKDKDVYGIQFHPEVHHTPKGEAIFNNFYKICKK

SEQ ID NO: 10460 - protein, 48 aa, Methanobrevibacter gottschalkii
MELKDLIFVIAAILIAVVLLKIFFWLLPVIVVLIIAFFIYVYLQDRYN

SEQ ID NO: 10461 - protein, 304 aa, Methanobrevibacter gottschalkii
MNQYDIIIIGAGPGGLTAGIYAGRQGTKNLIIDKDLAGGLGREVPEMENYPGFDKISGLELVEKMKEQAIKNCDLHEMENVEEIIRTDDEYRFTVKTDKDAYQSKIIILATGSSHRQLNVKGEEEFRGKGVSYCATCDGFFFAGRDIVMVGGGNSALQEALYLNNLGANVTLIHRRGEFRAQKHLQDMIKKEGIKTILNATVEEIKGDMLVESVLLKDNETNEMKEVPTNGVFISVGYMPHTKLAYQLGVTLDESGHVIIDKSQKTNIDYVYAIGDVCIGLKQWVVACGEGAVAATSAFEDIQN

SEQ ID NO: 10462 - protein, 143 aa, Methanobrevibacter gottschalkii
MFCEKCGKEIPDNTRFCSNCGNQIKKPNNKITEEKNMYLALFLSIFLMGLGIYYAGNKKKGIILFIFILISNRMRKFQIFIIIAIILWIYAIYETYIDVKRANGEENPNLLEDINNFTTSKHFVHIIAIALLFAVSYFLISKL

SEQ ID NO: 10463 - protein, 249 aa, Methanobrevibacter gottschalkii
MKMCNRCGAENKDKSNFCSNCGAILNNPKPTHSYDKKLIERFMDANIILKLIIIIVAVFVFFVASAWIGHIFFGMPLEFYTEGDATYHLSQFNKLDLDGDGNLTFYEVKGLASDISQDNLSGIFDAADKNNNGVLKGSEFDGYLQFIDKYYKELGKQQKAERKNSAQQKSSSSSSSSNPSFQDEGHEICPVCGGNQFTEFYNSQYGEMNWQCDYCGEIFRSDDEFYIDYWESNGIKCILPALENNLDII

SEQ ID NO: 10464 - protein, 346 aa, Methanobrevibacter gottschalkii
MEDEIVCPKCHKRNDLHKFCIYCGHKLLDDDQIGLILDNPEQYCLNCGRLVKKGQKKCECGYEFSDINCPECNSKNSYTNRFCTTCGKKLWTSNVYNYKYSKHLFEKHILKEVLPYSLRNTSLYQRPKMDFTLNHLLYCNEYLNGLKSAKSKIDEYLCEIGSRWKVVSPNYCINCINIIKPDECSCTKCGSILFADKKRVDCLQTKNKYVKPKFDNVELKWTSKFSNDYLDSLAPAIGESQFEYRERLKWEFAENNYHKISIIGAIDRKRKDEGRKRQIEERKRLEEEYIRQFGGGYCSSSCRYHYEEIITPRGISADYTDDMYGVDYCCRLGHFVSHGSFCKDYE

SEQ ID NO: 10465 - protein, 250 aa, Methanobrevibacter gottschalkii
MTNKICFECGIEQDDAFNYCINCGALLSNENDDSLSNSNEYRLPEDIENQNDEYDNLNDVKTCPKCGIEQEIFAKFCRNCGASFSSENKDEITIRCEYCGAELNDEAFCPDCGKATGITICTNCRQKIVNEDFCSICGYQINHKIKICANCGSKIDAMAKVCAHCGAKIIKKNPLIALGFSFVFPGLGQLYNNQNHKGFILIIANIISFILCFIFIGIILVILIWIYAMYDAATSAIAINKGEILEDKLF

SEQ ID NO: 10466 - protein, 621 aa, Methanobrevibacter gottschalkii
MDYEKLGLKMGLEIHQQLNSEHKLFCPCKTELVDDDFDGIVQRKLRPTQSELGEIDRAALQESLRGLNFKYENFAKHTCLVENDDEPPHSLNEEALDICITIACLMNMHIVDEFHTMRKQVIDGSNTGGFQRTGMVATDGYLETPYGKVVIESLGLEEDAARRIETKDGFTEFRLDRLGIPLAEVTTDPSMHHPDQVREVAYMLGQILRSTNVKRGLGTIRQDLNISIAEGARVEIKGVQDLDLMAEIVNREIQRQLVLIDIKKELVARNAEVLDEIHDLDELFKDTESKILKSAETIKAVVLKGYDGLIGREVQPGRRFGSEIASYAKKRGVSGIFHSDELPAYGITQEEVDNVTDYLNIGEDDAFIIVAHDEDIAISALEEVKRRASLGLDGVVEETRKALEDGNTEYMRPLPTANRMYLETDIPLFKITADRIEPISNNLPELPDVKQARIIKEYNLSEDLATQLVKRQEADMFEAIIADVSIDATPVASLLAYDLREIKREGHDITALGLDHFKEIFTLLAEGKIAKDSVRKLAIETIKAPESDVAEIAEINNLTMLSEDDVVKIISEIVAKNEGMVKERQMGAMGPLMGMCMKQLKGKADGGMVNKTVRSEIQKLI

SEQ ID NO: 10467 - protein, 436 aa, Methanobrevibacter gottschalkii
MTYKENAEKFIETYGLSIGDKIQVNKEDITYTGILLDRPEDADDGYLVLKLSSGYNIGVAIENTAAELIEKGEKPKIGFGKSEIPADPKKQNISIVSTGGTVSSVIDYRTGAVHPAFTASDLVKANPELLDYANYNVKALYNILSEDMKPEYWVKAAREIANDISNGSDGVVIAHGTDTMHYTAAALSFMLKTPVPIILTGAQRSSDRPSSDANINLIDSVVAAKSDIAEVCVCMHGSLNDKYTYLHKGTKVRKMHTSRRDTFRSINAQPIAKIENKKININPDYAYTKRGVNGLELNANIEEKVGFIKSFPGISSDYIEYHIDNGYKGLVVEGTGLGHVPNDLIDSFKRARDENIPVIMTSQCLYGRVNMNVYSTGRNIIDSGVISGVDMTPETTYVKLCWALGQSDSYNEVKEIMHEDIAGEFSEKSSIKDFLN

SEQ ID NO: 10468 - protein, 481 aa, Methanobrevibacter gottschalkii
MSDKEIGKDYELKVRRNPQSLLEEYPRKGNNIQSTHYCAGCGHGIIHKLIAECMDELGIQDRCVMISPVGCSVYAYFYFNCGNFQTAHGRAPAVATGISRAEDNSIVMSYQGDGDLASIGLNETLQAANRGEKIAVFFVNNTVYGMTGGQMAPTTLVGEKTVTCQTGRDPNYTGHPTHMCELINTLKAPVYIERVSLANPLKIRLAKYAIKQALTVQKEGKGYSFVEILSPCPTNLKQDVKSAQKFIEEQMEKEFPVKNFRNDLYKRESIQRPVSDFSTETLDKVFNVNRDGNSGYVDDASISSTSIKVSGFGGQGVLSAGLTIAHAACDEGKHVSWYPSYGPEQRGGKSNCSVVISNETIGTPVVDEMDILIALNKPSLEQFSQDVKTGGTILYDSKIGEFETDRDVNVIAMPCVDIAEEHGNARTANTALLGGLTELTDALKRESYENAIRDMFASKPKVIDVNIDVLKAGAEWLKNNS

SEQ ID NO: 10469 - protein, 371 aa, Methanobrevibacter gottschalkii
MSNQMVKGNTAVIIGAMYAGCDCFFGYPITPASEILHEASKYFPMVGRNFVQAESEEASINMVYGASGTGHRVMTASSGPGISLMQEGFTYLAGAELPAVIVDIMRAGPGLGNIGPEQGDYNQIVKGGGHGNYRNIVLAPNSVQEMCDLTMKAFELADKWRNPVVVLADGTLGQMAEPLEFPAEAVKPEIDESWAVRGTENTMGNLITSIFNDFDELEDFNYKLQEKYAKIDAEEVIVDEYQVEDADIVLVSYGISSRIARSAVDKSRESGIKVGLLRPITLSPFPTERIKELADKGVEFISVEMSNGQLLADVQFAALRREKTHLVNRMGGNLIELKQILAKIYEIAGFEDHDLDLSKRSAEKASPNIID

SEQ ID NO: 10470 - protein, 96 aa, Methanobrevibacter gottschalkii
MIEEEISYPVINKEICKGCMRCIVGCPQNAILLSEDMNNAGYQFAYYSGNGCTGCKDCYFTCPEPLGLEVHQIKNITNNSIAKMIKAKVASKGGIK

SEQ ID NO: 10471 - protein, 557 aa, Methanobrevibacter gottschalkii
MTSLIGNFVERVDFNSYEDFMKNFKLKYEPDYNFGFDVVDKYAEIDPDKVALIWTNDNDENHTFTFKDMKEYSNKTVNLLRKLGIKKGDKVMLTLKNRYEWWFCMVALHKIGAIVIPATHMLKLHDIDFRLKQAEVKAVISVEEDSLLPDFEEAEKGLDWDLIKLVIETDRDGWINFNEAIEKESSVYERPTGDENPMADEVFLIYFTSGTSGNPKMVSHAHTYGLGHIPTAKYWHNVIEDGVHHSAADTGWGKAVWGNLYGQWIAGTSVFIYDYERFNGIKLLEKIIEHKVNTFCAPPTVYRFLIKENIEGYDFSNLTYVTTAGEPLPPEVSEKFYEISGLRIKEGFGQTETTLSIATFIWLDAKVGCLGKPSPLYNLKLLDESNNEVDIGEKGELCFDISNGPTPGLFKEYYKDPVKQAEQCHDGFYYCGDTAWVDEDGYVHFVGRNDDIIKSSGYRIGPFEVESAVLSHEAVLHCAITAYPDEVRGQIVKASIVLQPGYEPSNKLTKDIQNHVKNVTAPYKYPRMVEYVDDIPETISGKTRRVEIRENDQKKFN

SEQ ID NO: 10472 - protein, 220 aa, Methanobrevibacter gottschalkii
MNYHDFEKPLYNDKFKLSICYTINIIIKINYKKQVFILNEYNKDIGNRIRELRELSDITISEIASDLNIKEETYIQYENGEVDIPASFLYELAHIFKVDLGLLLTGEESRMSIFDVTRANKGVAVDRRKEYLHENLCSKFIHKKAETFLVVVDPEKNPVPSLNSHPGQEFNYVLEGSLKIYIHNNEIILNEGDSIFFDSAHRHAMVALNDKPAKFLAVII

SEQ ID NO: 10473 - protein, 123 aa, Methanobrevibacter gottschalkii
MSTNEIGTKVLFKKQLGLNYEIDQKYVGLKMKENNILSFNFRVPGDLKDEVEAYFKRFKLGEPILVDIGGTGDIKCDFKGISPVLKNKDEFDQYFISATLQEDKTYDPMEEEKCETCSGCGFH

SEQ ID NO: 10474 - protein, 129 aa, Methanobrevibacter gottschalkii
MFNLIDSTLFFASYGNIFGLANIAVSPIDIILAYVVAIVISIIMAFVLKVPLLPSKPYRYSFDVCAVYPTPIIAIGIFSIFLVLNYTFIYNGLVLAIIIGILSALFVKYLFNFVFPKPLNEDEGDEINE

SEQ ID NO: 10475 - protein, 165 aa, Methanobrevibacter gottschalkii
MNEVIGIIIAAVLCWLNFVIVDTYFGLPEQPGVRGAGIIGQDVEKRGGDIAGGFFQGNITCSPDASAGTLLASIGYLVLGIPGGIIAAFFVFIGNRLCADPGYAGTCGSLTATCIIFICSFLGMTPEMFIVGMVIAILTVMGISQTKASVILGKVAKKFNRHARE

SEQ ID NO: 10476 - protein, 82 aa, Methanobrevibacter gottschalkii
MYGEIIGVIVIFVALRALVTRNRAERLLYLNVIGFGVSAIVAFVINTPFALIVAAAFFICSTISANAIAYTLKRLDDEILLE

SEQ ID NO: 10477 - protein, 89 aa, Methanobrevibacter gottschalkii
MEFFVSIIAIALMIIGAFGIIFMKKPLDKVIMFSVLDAGFVLVIVLFKYLDVAMFAALADPLSTLVFILAIVKINEVRKKKIISGGTDD

SEQ ID NO: 10478 - protein, 86 aa, Methanobrevibacter gottschalkii
MISVPLFFYFGIFLAIVGSIATAWGPGVKDPIIRTFNTEVASIGVCLVLLCYNHVLALLTLLATTVIISLILFRAIIRLEEMGANI

SEQ ID NO: 10479 - protein, 197 aa, Methanobrevibacter gottschalkii
MRIGVLWNKLAEPKNIPRLFAFSLGIILILGLIVPMALNPDQLYVRPAPQEQIGDGLSIAPYDRGGEVLTQPGQINPQYPDNSRELGMITAYMSPISQWVSSISPYFGTSIYSSPGGLIDEILYYTRGFDTILESSILMMSFIIASWLSINYTMNRKNDESEIKKDVKKAIKDSTKVANEISVSDAKARAKQLRRDN

SEQ ID NO: 10480 - protein, 231 aa, Methanobrevibacter gottschalkii
MVFIPQFVPAAFLNMYLPAIYAGLIVGFIGSMAIALKREEIHILILTDIVGLAMIFIVSAVGTDLAEALILPGLVVELAETLAISEILITREMRIIENNPRKNLSNSSSLFPQLFALNMEILNTAPNFIALVLIAYGIFLTGFTGGAVAGGGIVLYALSKKARGLPVLVLDGIAGVSGIAWCLWIIGFLFFFVTPQYWLLSLFLAACGLLLKVASKVGLIGLLMREDIDKE

SEQ ID NO: 10481 - protein, 223 aa, Methanobrevibacter gottschalkii
MDFVTLGGNLLGTIPLGDIVLYLTPFNLFLFAVLLGFTVMIGLSKPETQIEATMHYLSNTEVKVGEKEFKQRRFLSVLCGIASAGAMITGDLFNFTLFMALVGMLNIGIVSAVRQTSVLNSAFNYGLIAMMCSLPLFGGASIILASTGTLSLAVLSQMPVSPMVVFGATLMLLGILGESGVAPFFASKAEMFRTAGSPFIVIIHLSSLFIIVRAVEILLLVLW

SEQ ID NO: 10482 - protein, 76 aa, Methanobrevibacter gottschalkii
MVSDSMDSQKSLCIILLVLSTIAIIACLVVNFEAWIVYTIAIFGIPVWVLSLGLLTMAKPRPEDAEERVKEPFTGY

SEQ ID NO: 10483 - protein, 290 aa, Methanobrevibacter gottschalkii
MNLMADILIQVIIAFIAGSLLLGLHRKIMARVQKRPGPPIVQHLLHSLKFFFKETAFPKTVSKLFYIGIVFILALIWIVGVIAGPVAHDSLLILFGVYAVYKIVEHNSGSSSGSPYGKLSCVRAVLSAATELPLFAAIIFVYLVTGSMNIGEIITYQSVNGPLVFTIPLAALMFFMLIITKSPYSPFAITKDKALISGFETEHFGFLRGFMLFSESIAWYVMLWVFLTIFFGPLNAVGYVIGMIVITFITGFINATTPILSPNHSVMTQITIGAICFFGTIIMLFGGVVL

SEQ ID NO: 10484 - protein, 84 aa, Methanobrevibacter gottschalkii
MNSEDVIVYFTALVAIGIVVVGLLTTVFHSSVIAPIVIIGIILSIFVLCTRSNFSHKIESIEKICFVITLIAIICSFILLYRPM

SEQ ID NO: 10485 - protein, 101 aa, Methanobrevibacter gottschalkii
MLDYMIYILVFAVGSILGLLYSYKLHGEPYVVDTEFNVLLAVVSVAGWCLGFLSGNIILSAIGFLLAGFVMGGRPGYGRRETAVGLIVAIVAYLLLKCGML

SEQ ID NO: 10486 - protein, 130 aa, Methanobrevibacter gottschalkii
MDENAKLKVMQERIIKSYAWQRDIIIPLSNEFNCTNEELEELFFDLLDMNSLESLHGTFDSARDICLYQKFNADLRLCWFIDSLEVISQEEGKKLKMRLVEEVKKGRSYDDVLKEGRLELFELLKKETNY

SEQ ID NO: 10487 - protein, 149 aa, Methanobrevibacter gottschalkii
MLDAVKDAVRKSSIHVCIVNCGGCNGCDVEVVALLSPRYDLEQYGIYVQNNPREADVLLLTGAVTEQWIHNLKRVYDKAPEPKIVVAVGNCPQSGDVFAQEGGHVHAPASNFIPVDAAIPGCPPRPSEILEAILSVGPQAIADRGREEK

SEQ ID NO: 10488 - protein, 374 aa, Methanobrevibacter gottschalkii
MIVPIGPIHPALKEPIRLKLQTEGERVVKAEIEYGYVHRGIEKIIEGQTWQKGIYLSERVCGICSYEHTQTFAETIEKISNVDVPLRAQFLRVITNELDRIQSHLLANSTFFKSMDHETLFMHVLELREYAMDSIELLTGNRVNMGWNVVGGVRMDADERHFKPILENLKKIEEGFDTTRALFAEGPALALRCKGIGHMSKKEAIKGRAVGPIGRASDIKEDYRIGHYTYDDYFDFKVIRRKEGDNYARTLTRFDEIPESISLIRQAIENMPKGEIRTPADLKSGYAMNKNEAPRGEVTYMIETNGNLIKHISIRTPSIANMDSCAKYMIRDVPTVADAVSTYASCDPCVACAERVAITNEHGKTELKNIYEVI

SEQ ID NO: 10489 - protein, 341 aa, Methanobrevibacter gottschalkii
MSSLMWYIFDFARKAWADAFTNAKTNPEIAEKPERFRDFPKVNKEYCIGCGACTVSCPSPNAIKIVREKDDETGEGSTYPVITPGACIRCGFCAEVCPTEPKTLECGLNHLILPEFNLIPSKRQFIVDDYLCIKCKKCIKKCPVEAISLIDGNVVVDQLKCISCGECLEVCPVNGAMKGVFVDNLQDQKELILLTVNYLEEFINSKEEDLRSLDHNGLLQYDVPLSNIWDEALKIIPDEEISLEIITNAVNRLKVRIIDWDKSKCKKCQLCIPDCPTGCISFDEINDTIVRDKDRCLRCSICYQTCPFSVIKYFIAKFAFDDGENIHVTVKASNLNEDIVE

SEQ ID NO: 10490 - protein, 452 aa, Methanobrevibacter gottschalkii
MIDSYTKTPRPLRHVDVEYLIDQTKCANCKDKPCLESCPIDAIYLDNEEGLIKIKSTCFGCVLCRNACPYDAISLEVHMDSPIKENVPNINVKLCKACGACVQACKKGSIHIVSDGKQPPHSEIDKDTCVRCGYCFRVCPTDAIKYGQLLPKTVKGGKAVVVNQDNCIGCMTCIRVCPSMGALNVARTNKLPYINPGYCARCEECMHSCPSGAIKYSSRKKAYKMYSEIKSFDIVSEIVDHDIKILSLDLISLNKVLQKVGKSIALEFNDQNFENFIEYKVNDLMERELSISLNSNIEVGEFTKLVGSYLMDRNIEIYNNKCIACGDCYNVCPVGAIELNGPNPISISDNCIYCGKCVEQCKFDAIGAYDDYFYSKDTDLYYARSYLRGQRLGDFTLSNSKCQACAICVNNCPTGALTLGDDIIEFDDEKCIYCRNCEAICPLDAIRIVNFR

SEQ ID NO: 10491 - protein, 348 aa, Methanobrevibacter gottschalkii
MFEKSFITDCEGPLTLNDNAFELAANFIENGGKLFKILSLYDDYLVDIVKKENYKAGNTLKLILPFFIAENLKNDDLIDFSQKHIYSVEDSKFLLTYLQKVMNTYIVSTSYGQYIEAISNYMNLPFKNTFYTKVNLDNITPTVQEINKINEFKQLILENPKDYDLFDDIFFSRITKMDIYEKIKNVEVVGGQGKKLAIDQIIERDNIDKDEIFYIGDSITDVEPLDFACINNGISVSFNGNEYPLKVAEIAIVSPSAVATAVIANIYVNYDKNKVMEFIKGYNNLNDYEKLFDDYNVDGEIKNRFFSFFNSGKYPLIEIINESNFDEILKASKEMRNNIRGKDIGGLG

SEQ ID NO: 10492 - protein, 296 aa, Methanobrevibacter gottschalkii
MSYEKVKDTFFEAFEGKYVRALITGPSEKIVKWAAYDSTSTPSAVIGRVEGGVEGFLDESQTPDGRFGAVVQYWLGGDDVGKFAFELSYRLRQDVLVKPFTRIFDYSASNSDECIEMMDIVGHCGDGYEWIVEEYGRKMINVPIAVPDFQIEEKFKINNGIMGGNFWYLCTTAQAVIEAGEAVIDAIMNVEGATTPFDICSAASKPETNYPEIGPTTNHVYCPSLKESLGDISKVPEGINYIPEIVINAVDEKSMNKAVKAGIDAALEFEGVVGISAGNFDGKLGDKNINLLDILK

SEQ ID NO: 10493 - protein, 315 aa, Methanobrevibacter gottschalkii
MEILDDDINAEVVGFGALNVDKLYSVANIAGKDEESFIKSETDTPGGSAANTIVGLSRLGCSTSIIGKIAEDNDGDLIEYNLAINGVYSNNLIYSETGSTGKCLGFVDDEGERCLYINPGVNDEIQLGEINPLNIMRCKIMHYTSFVGDSFKTQIELLDLLNENTVLSFDPGMLYVQKGFDELKPILDRTGILLINESELRLLCNNYKSSLKELAIGFLDLGIETVVVKQGAKGVFAINNSTDCFVESYECDVVDTTGAGDSFNSGFLYSFLKGYDLEKSCRIGNWVASKSIEGFGMDKFPSAKDLEDFLSEFNY

SEQ ID NO: 10494 - protein, 275 aa, Methanobrevibacter gottschalkii
MNVSFIKQMKDLEREVLLKSVELDDDSDDFQFELDDFSANDEIIAVAPKCVRCNTCVGECPVNAIEPANIFRIAKITDKCVKCEICVQSCPVSAIKLIDNSIVYDGENEENIIEYKLSNISSRHRVVRMNNISIDYSCDNNWDDCSKLCPTNAFTLEFKEFFDDLDMDLGIELIDDELYPYVNEKMCIGCGACAEISLNDNAIELDRYIGPIIHSRFIDVNHDLCVNCYLCEENCPTGAIELVDGKVVLDDDKCIRCIECTRHCPVVALKRVEIE

SEQ ID NO: 10495 - protein, 211 aa, Methanobrevibacter gottschalkii
MRAKELMDKNFVYLNANDSVIEVSKVMEEIRRFTCPVVNDNKQLIGWVTSFDITKGLREGNEKISDIMSGYEEIGTVHADDPARKAVILTANNKFVTVPVVNDDKQIIGMVRACDIVELLSELYDIKVSKLYEAMQNQLKGVTWEELMAASALVSQKTTGVKISPEAYEENIMNSTFGEAIWSTGGLEKFFAGLISVGELVIARRVGKARR

SEQ ID NO: 10496 - protein, 213 aa, Methanobrevibacter gottschalkii
MNLNFDFTEKRVIITAFFCMAFTIANLITVKVINIGFLGMETPAGVLIYPLVYILTNVIADVYGEKIAQRTIILGLCVDILFVFMTTLILFLPSPAYYTGDSSLAFVFTQTPRILVASYISYLIGNFVNARITAKVNEGKEYSSTKNLGILAFSELIDNFVFIGLAFVGVFAVTDILIMIVSHWILSLIWSAIAQPFTKMTVKWAEKGKPAEA

SEQ ID NO: 10497 - protein, 121 aa, Methanobrevibacter gottschalkii
MELKYIIVLFDGEFMKFKSKFFISLLIIFVLSIVAVPASDVNSTDFSQLNDTVLDSSFNDNLSTVETSNNSKTVNNTNNGDMVQIIKTNPKITVKSTYLKSKDKLEFNFKNASGNPLKSKS

SEQ ID NO: 10498 - protein, 523 aa, Methanobrevibacter gottschalkii
MVFIGNKKYSVYTNSKGVANLNINLVAKTYKLTISFEGDDNYNAVNKIMYLRISKLSTRITCYKNFVVKGNNLYFYLFDSYYNPVSCKKLIVKYKGKTVTKTSNKNGRISYKIKSSGSKHSLHVKFKGDGQFKSSSKYHKFYITTFSPLKIGNSKLLTNGYLRIYLNGLTKSSISKKTIVIKVASKKFSKKSSSEGIVVLKPNVCAKAYTVSAKFGKYVVYKKMKCIEGNVKDPLKYNIPTKSGVPDIDVMPGNYVMGDNNARYTLTKIQYNEVIKRDSYCLFLNNKLSKYTFFKTKNNPNTNHIIQREKWNVIERAINLKIVGKNKANYWLSEISVLLKGKSYKYPEVRKTQSTNYYCGPNSASVCTQVLKNYYCEKYLAKLMGTNRREGTKCQWIIDGLNKLGFNATYFYKASFDNALNELKKGGAALVFHAPRHYVSILDISSDGKKVLVSNSYGSYDNIPTKWTKISYMKTKFSKWEESVIVRSNYKLSDSVNDSVNCFYNSMGTNWYRHSTSQKMGLV

SEQ ID NO: 10499 - protein, 429 aa, Methanobrevibacter gottschalkii
MVEENSNMLLGVRDKPPALRWVLLAIQHVCAMFGATILVPIVVNTTAGADVLSIPVALVTSGIGTLIYLVCTRGRSPVYLGSSFAFIAPMVAGYALAGKSSVFSALMLVGLVYVAVSCIIRISGKAWINKLLPPVIVGPMIMVIGLSLAPTAISEIGLDLAVVPWKNLVVALIAFLTTAFLAVRGKGILRVIPFLIGIIVGYIAAAALGMVDFTQALTANVVEIPKFYLPFMNYNLNFAAVLTIVPIALVTMVEHIGDHKVLSEIIGRDLIEDPGLDRTLLGDGLATFLAALLGGPANTTYGENTSVVGMTRVASVYVIALAAIIAIIFAFSGHLTSLLTAIPAPVLGGISVLLYGFICVNGLKILIHNQVDFNNTKNVVVAATMLVLGLGGATLSVVYGNLSLAMSGMSLAAVIGVILNLVIPEEKHE

SEQ ID NO: 10500 - protein, 208 aa, Methanobrevibacter gottschalkii
MNEFVLNHPLITHKLAFLRDINTGTKEFRELVTEISTILVYEAMRDAQLEKTTIETPLEKMETGTLNENNYAIVPILRAGMGMIDGVLNVIPNAKIGHIGLYRNEETFEPVEYYYKMPEGIKNREVLVVDPMLATGGSASATISRLKQDGVTKIKLLCIVAAPQGIETIENDHPDVKIFCATVDRELNENAYILPGLGDAGDRVYGTK

SEQ ID NO: 10501 - protein, 330 aa, Methanobrevibacter gottschalkii
MVSKEFIEKEWIKAYNALNPFLDVNGAYELRKLLCDLRNNEKFIFISDNVDYTCIIELDELKDDIPIFKYASDCFKIFGIFSKSQLSKLHFASVYDIIVYSCVSELKRDLSYNERKKIYYCNLIHKLTLNQDISSNFNQNFKYNNELFNQMKKIRWNSSANKLKNIIYRDLMGTLTLELNTDSGVTSSFGECAEYLACCNVFNDNRLEVMPDDVVKSWLLTLNLFLMDLRPYIKDFNSASDMIADTGSEFKPINISEGQSNNKSSSIIRKVLAGVLSIIIVFLLLIVMSTILILIFGDALDNFIGLLRPVGIIGLALAAALGKKIYDKLV

SEQ ID NO: 10502 - protein, 330 aa, Methanobrevibacter gottschalkii
MFEFYYEKDIQKNFGDLDKFDDVLNLFELKNLINDFINNEKYVFIIENIDFEMFETMEKSRKYSTFINNAFNGLKSFKYWIQPSIMNFNSFTSVYSIIVYSCIIAYGRMLSNDELESIIFSDFPIKLTLVMDDFYNINNVPLLDKDFFRTIRDVKLDKSAKKLDKFIYHGFLLNLAEPGNHYVAVVVEFSYCASYFSRCYAYSRKNKFVTINDIADGWILTFKLFLNDIRGYIDGLESNSPCAIVPSLKSHKKIKVEEENNGSFNIKKIIAIFLSILFFCFLILVVEDISYILTGSYYYSGAPTTRYAIFGFILFLTSMFYSLVKNILKF

SEQ ID NO: 10503 - protein, 329 aa, Methanobrevibacter gottschalkii
MFDYNFKKSIEKNFNELEKFNYLKNFNELKNLLLTISENERYIFISKNIDFNAQPLMDKPKNHSKFIINAYNGLESFKYWIKLSIMNYNFFVGVYSIIMYSCSCSYGRPMDIIEFEHVLNSNLPYKLTVYLDDFDKYDDFSSLSEEFFRTIRDMKLDKKANEIEKIIYRKFWSNLTINYGTENRVDVQFAYCANYLSRCYAFNRGRNVVSVEDIADAWILTLKLFLNDLRPYIRGLESNSPCASLPSVNSYKNIEVDNDNGSVNVKKIFAILLSILFFSLIIMVFQYTANLLTGDYYYPNSPQDRYVLAGIFLFPTSMFYGIIKKILKI

SEQ ID NO: 10504 - protein, 330 aa, Methanobrevibacter gottschalkii
MVQFPQKTIDEWINEDYEKLDVFMDADSMEDLRELILSFKYDDKFAFLSENIHYQTDINNYSDNNNLYLDANDVLGDFGFIFSNSHLSSVCIDSLFFVIECSCIGELRRELSNIEKEKVYYSDLGYKLTLGQENFLKIKNYEVINKTFFKKLSKIKWSSNSKNLDKYIKNFWDTITLQYDTYYHIVSSFSVCANYFACCRALTSGRLEVSNEGVIQSWLLTLNLFLMDLRPYIKDFNSASAMISDTGSEFKPINISEGQSNNKSSSIIRKVLAGVLSIIIVFLLLFAMSAILILIFGDAVDNYVDSLRPVGIIGLALAAALGKKIYDKLV

SEQ ID NO: 10505 - protein, 319 aa, Methanobrevibacter gottschalkii
MKQENTYSPVSSLFSKQLNLSDFGFEKPALKKIKEINKEIKPNKLLKFIKYTFKYSKIVLNKYSSHFSKHDFTQPALFTLLAVKIYTRSTYRQITDLLELSDKIQEHLHLKKVPHYTTLQKFFQRLPTSILQELNKLILQNHQITGKIIALDGSGFTNDYADKYYAIMRRKERKSYIKNHISIDVDTRLILHFAAQRGPRFDTRFAIPAIRNIKKYNPKYILADRAYDTEPIRKCINEEAKAEDQIPLKTRAKNGHYRLKSKKQFKQEIYSRRNNVESIFSVIKRIFNGTNRSRSLQLSNKETKLKNTIYNIYRSTQIQ

SEQ ID NO: 10506 - protein, 258 aa, Methanobrevibacter gottschalkii
MEKGIRFDENFISEVIFRIEFPTIKKLTGNDEEVVKDFANKISGTFPISEVIPHNKINLDIDINSGQLPKITREGDLVWIFKSHNNKKIVTLTANDLVLEYRDRVYSGFTNFLDEILLLMDAFNQFDYQKLNFLGLRYINQITDKNVNNNVSEFFSLDLTNMAIINNLEKNNENLVQIFTKVNFKKDDYLMTMQYGLFNPRFPNVDADKMFILDYDCVLHNISHVGEIKDNLIDMNHLIFDKFDYSITAKFEKIIKGE

SEQ ID NO: 10507 - protein, 148 aa, Methanobrevibacter gottschalkii
MSPPEVIRDDDTYITLPASLKDEYFESKPISYSKYFESFEFKFNELSNDFNLINIMEIQDFILLHDDLFDYLSQIKLLLQKYFSEYDYCLEFYSDPEIQSLNQLVIYINGDESSFDEDWSSLKRMNSEINDLCNFPNSVKHLISVDLW

SEQ ID NO: 10508 - protein, 424 aa, Methanobrevibacter gottschalkii
MVVKYLPRILDDDLEKCLTMIGAILIVGPKWCGKTTTAEQHANSVLKLQDKDNYKSNMMWADIEPSRLLKGDKPRLIDEWQVAPVLWDSVRTSVDESEDYGLYILTGSTVVDEDSIMHSGTGRIHRMLMRPMSLYESGESNGQISIMDLFNNPDININECESDLTIDDLIFAACRGGWPDSLNQKTREGKLFVAYNYLENICNTDVSAVDGVKRDPDRVRLLLRSLARNNSTLAKDQTIIDDMNANFMDISRPTYYSYVDALKRLFVIEDNRGWSPNIKSKSAIRSGNKKVFIDPSIAVAALNANPESMINDLNTFGFIFENLCIRDLSIYTNSHGGKVSYYHDKSGLEIDCVVHLRDGRYALIECKLGNDGIEEGSQNLLKINGLIEKNDKLDNPTFLAVLTGGKYAYTRPDGVKVFPIGCLR

SEQ ID NO: 10509 - protein, 31 aa, Methanobrevibacter gottschalkii
MVEKQNLSTTEEGRASISERFLEKLLGKIHS

SEQ ID NO: 10510 - protein, 73 aa, Methanobrevibacter gottschalkii
MAETTDKVIVIVGYLLAIFIPILGLIAGIVLYFVKKEDPFYQKHAKYIIIVSIVVWALSAIFVGMLNVGLDGF

SEQ ID NO: 10511 - protein, 371 aa, Methanobrevibacter gottschalkii
MNKSDLKRDFYMLKGPLAKKGYDWWWHSLTAYDKETGEEKPFFIEYFVCNPELAEEEPTLGQLPENQKAGKKPSYCMIKAGTWGKNAKQIHNFYSMKYFECPDDELNIKVGDCSLTETHMSGFARVSEEESRDHPEYMSDAGDMMWDLDIDKQIAFNVGYGANGLFRKLNSFEMFWHAEGIKTQYSGTIWLDGREYEVIPEKSYGYADKNWGGDFTSPWLWISSCNLTSLKTGKKLNNSAFEAGGGRPKAFGISIPRKLLIGFYYEGKMYEYNFARFWNMVKIDFDFEEGEDVHTWHVNASNKDSKMELVLYCKREDMLLINYEAPTGKKLHNRLWNGGNGWGEIKLYKKDGTLIDHVKMENTGCEYGEYC

SEQ ID NO: 10512 - protein, 232 aa, Methanobrevibacter gottschalkii
MVFTDIIALIVVYIYVAIIFVVAEMVLKTRPEISRKFLHIMVGNMIFAMPFFANPWNMVWFLTLPITIALFFLTDYSPIKIENSVTESGHALGLFFYAGIWTILIAIFTIIAPASDSKLFLWIVALAIVPMVYGDGFAALIGQKFGKIKYTVFGGTKSLEGSLTMFVVTSVMGVFVWMVFYSIGCTMPEFNIVSILAISAVATACEAFSYGGIDNLTVPVITSILYFLVAIL

SEQ ID NO: 10513 - protein, 139 aa, Methanobrevibacter gottschalkii
MKVKLIEKFALGAFVGCFIVMCVMVLISLYQGPQNIRFSGIDIINSFFGSIVAGWGFTFSGFIYDKEDLPLTFQVIIQMGVGMTILLLIAIYLKWMPINLGIGPIVTWIAIACIFAIIFWFGFYIYYYLVARDLNNKLK

SEQ ID NO: 10514 - protein, 592 aa, Methanobrevibacter gottschalkii
MDNKKIFLSFILFILIAISVSAVSAVDADNATLAEDAIPTDADVVQTKVNNANSGDTITLEDKTYDFANQTVTIDGRDKITIRGTGNTIIKGHGGQNSKTGALFIVSESIGVTFKDITFIDTNPNNNFTYDGNVEGYGITFDGSGAENGVVDNCSFADFNTAVNVKSCNYVTVKNSKFSGGYATKLINDPTVNKEKGSKVVSAGGSLFLSVLNCTFDGPMLDAVSIYGGSGDAKIIGNTFKDNVYAIFFGGASTEGTFINDNTFIECGQFVKDANTTWGGYPVISIEKASDSVYMNNNTFYAVNNNKLIAAESANTAHGAPSTLGDINITNSNVNLANDNVVAGSVTFLHILSRTGDINPKAPITLTGNKYAKGVKAVVVWYNDWGVEDSENIVIPQAPEPTPAPVAVSTSISSANLAIYAGNSGKIKLTLKDANGVAVANKTVNIVIDGVAKTVTTDDNGIAILSVKYSNSGTHYATLAFTGDNDYTGSIKTVKISVLKKVTALTITKKTFKVKTKNKKVTTVLKSGKTVLKYKKVTLKVKGKTYTAKTNSKGIATFNIKIAKKGTFKALTKFAGDGAYKAASKYSYVYVR

SEQ ID NO: 10515 - protein, 216 aa, Methanobrevibacter gottschalkii
MDLIGGYLLVILLLFTANIALILGDYKLDNIKLVALSSICFIVSFILMYASSFLNVSLSFLIDTFSYVFFIIFLALVVVIIKYIKNNNFKHALYLTLVTFLITIFLFASQSNLNVFNIIVYSLFIFIILFVVYQLSKLLHHAKMQYNVITSEYMFLFSIVIFIFALTYDSTKSLNYTSFKAFLILTPTYQLIYVIIAFVVILIIGVFINEIKGGNS

SEQ ID NO: 10516 - protein, 213 aa, Methanobrevibacter gottschalkii
MIIQGTETLTSIIHIFSESLLTPVVVLLVVSGVIIILALGGLINEYISRKPISSNDLENLVRRISFSNNVDQMKSEITNSNLFNYQKEILIRIANNYDIGCDARKAFASELISAEETILIKKTNKTDILVRVGPSLGLLGTLIPLGPGLAALGTGDIATLAQSLTIAFDTTVTGLTIGALAFVVSKYKKQWYEAELIDVETLAETELEVINNW

SEQ ID NO: 10517 - protein, 99 aa, Methanobrevibacter gottschalkii
MLRKKRRISESVDDDPMGGLNNLSDAMLVLALGFLIFAIMALSVNPDMITEQTQTKEVSTANTFTQNYTDAGGLEDSGYSEVGKVYEDPSTGKLVMVSG

SEQ ID NO: 10518 - protein, 133 aa, Methanobrevibacter gottschalkii
MKMPETLDSKLLAPCGINCISCEKYQNPCSGCLISNDGKSKASLKCKIKTCFDSKSFSYCGRCSEFPCPLMKKHSKKYVKRHDLNTLESAKRIKTTGIGRMMSQDHDEWLCPECGGVIKFQTKKCSECGIKKE

SEQ ID NO: 10519 - protein, 246 aa, Methanobrevibacter gottschalkii
MSIIISPEFKKLKNRLSDLILIHHELLLQICPNIEREYLLKFGSLEYELYKKDVKLSMLKRKLQLIQIQISTEEEIDIELIDEILEEEFFKYKENIKKHMDELNGAMEEQHICLLSKKDTKRLKLIYKQCVLKLHPDLNPNLSNREKDLFIQITEAFKNGNLNALESLYYFVPNKKVEFESEIERLQELIECEEKEIAEIKEKYPYNKKELLLDDNEIYEYEVMLNNLITQFDDDIQRCMDEIDLI

SEQ ID NO: 10520 - protein, 185 aa, Methanobrevibacter gottschalkii
MYKYIRDAWKNPDESYVRELMWQRAPKWRRQKVVQRIDRPTRLDRARSLGYRAKKGFVLVRTRVRRGGRRKTRRFNGRKPKRMGVNKITQAKSLQRIAEERVAKKYPNLEVLNSYWVWADGKYKYFEVILVDPQSPSIVNDKKINWICSKKHTNRALRGLTSAGNKGRGIKSKGKGSEQARRRKL

SEQ ID NO: 10521 - protein, 140 aa, Methanobrevibacter gottschalkii
MIHNIKFRAFVYENESVDEISQAILNLLPEAEINVEEAEGLLEDRILILTGVVSKKRYTKTFFNKLLESADLDKLNNDLECKMDEKGNWFLRFDKTDALDEKLTILDKGDSIHLKIKIAAFPAKKQIAVDKVRKAISGCV

SEQ ID NO: 10522 - protein, 125 aa, Methanobrevibacter gottschalkii
MEKQSKILIVLLIVFLICVGVFWFQFNNNVSTFMIVNETHVTENSSFSGMLVDSYGNGVANQTIAYHEPGGNVGTLTTDENGEFTVELAKYLSNSTSDNYYGDFKFSGNGKYQGCAYEGNVTVGI

SEQ ID NO: 10523 - protein, 396 aa, Methanobrevibacter gottschalkii
MTDLPWGNNQNLTDEEFYNRESELINIKNILHSTGQGHAPDLLLTGIRGVGKTVFLKKLKRELDGEYLVVYIDFSKSKCYQKNQMSIIGLMGHFFKELILESKNKGLNTLDKQIEKYFKSNDFKIREFIRLDKIPIPIFSKETNEEKLIDFALNLPEKIYDENQDKIKGVLIFIDEFQIIKELNNYKESFLWKIRSYIQNQRNIAYIFSGSMSLQDKLISEIASQNGAFGGRMISININPFEKETVRNYLSKKTPYIQFTDDGFDRFYKFTSGVPSYVNIFASLLPINEQLDDDAIKMYFDKKIQAISSHLINIWARLSFREQTIIITLLEKPLRRIDIANEFGISTGSLSNYLNNLQNQGLISLNNGLYEIAEPILKRWLELEFKEKGIYPYRNI

SEQ ID NO: 10524 - protein, 115 aa, Methanobrevibacter gottschalkii
MKGEVFYGKGIRELEGEYPDLYELVTDINDTVWNGKVLDYKTQKLIAIGITASRADPRAIKKQIRSAIEVLGITKEEIVDVLRVVLLTSGMPAFSKSLQILNSVTAAIEEEKQEE

SEQ ID NO: 10525 - protein, 310 aa, Methanobrevibacter gottschalkii
MNSNKKFFSRIGFNYLIYAVFSLVITMILANIIAYTSPEILNNINTSTTITAICNYILPLPVFIYLMGKLDSKKLEIHKINARTFLKYLCITFTLMWIGNIIGVIITTALSGAIQSDISNPIQDLINSTGIWLNIVLISIIGPVFEEFFFRKLLIDRTIKYGARTSIVLSAVMFGLFHGNLNQFFYSALIGGFFAYVYIKTGKITYTILLHMIINLLGSVVSLFLNSSVTNLITGTINPFDLIFVLLYLAILIITLIIGLTNLLNYKQAKFNGQKTEISLQKPLKTIFLNLGMFCFIIFFTIKMVLQVIN

SEQ ID NO: 10526 - protein, 88 aa, Methanobrevibacter gottschalkii
MVHRNILKKCVEHKHALLFAAGIATAVVGKKVIESKSVKNAATKGMANVMSIKKDAEECFQDMKENAEDIVVDAHKEDKKEIYDESQE

SEQ ID NO: 10527 - protein, 709 aa, Methanobrevibacter gottschalkii
MKYEVVYDNGSRLRVRSGQWAFTKEEGYGLASLLLNQNFIHEVLTSHRNGSILMYYDEGIDNKDKIFDILDKIGLDDLFEAEPTQIQISKEISEDFYKKIAKMILNRGIYKLFLPIPVRNALTVYHAMKYIWNGFDSLTSFNVDVALLDGAAVAGALLNKHYKPASSMMFLLSISDALEDYTLQKAKSTLKDSLALNIDTVWVVGEDGEEKQCSAVEISKGDKIKVHMGDVIPVDGKVIEGEGLVNEASMTGEPLAVHKMNGKTVHAGTVVEEGNLIVEVYSMNKETRLNKIIHLIENSEELKAESQSKAEKLADSIVPYSFIATALTYFITGSPTKALSVLMVDFSCAIKLTTPLSIISAMREASDNRMMVKGGKFLENYANADTIVFDKTGTLTNAAPKVVDVISMSKKYDCDEILRMAACIEEHFAHSIATAIVKEAEKQGLKHEEDHSEVEYIVAHGIVTEYEGKRAVIGSRHFLFDDEKVKVTKSQEKKINEKIKEHSVVYLAIDGKLEGIICIDDPIRKEAKYVIEELKSLGIENIIMLTGDSESGARAGANALGITDYRSQVLPEDKSRIVEELKAEGRIVIMVGDGINDSPALAAADVSVSMKHSSDIAREVADISLLSDDLYDLVTLRKLSTGMLDKINNNYHNIVAVNGSLLVLGVLGIIPPATSSMVHNLSTMLFGLLSTRSVLTDEEYIKDIEVKAI

SEQ ID NO: 10528 - protein, 249 aa, Methanobrevibacter gottschalkii
MLDNYKNKFIPLILPVVLIFFWYIITNALALFSSYILPGPLDVVNSALVVIENGKLLTNTIDTLYKVFAGLILASIVAIPLGIVLGWYKTLEDICTFVISILRPIPPVAWIPFSILWFGIGTFPAVFIIFMGCVFPILVYTIDGVKRTDKVLVESAQTLGANDWNILRRVVLPSTIPYIVSGLKVGIGIALMCTISAEMIGSSSGLGYMILIATNLFDTGTTVVGMVVIGLIGLVFDFVFSRAQDKIFW

SEQ ID NO: 10529 - protein, 250 aa, Methanobrevibacter gottschalkii
MSIEVKDIYKKFETKKSENLSVLENINLTIDDGELVCLLGPSGCGKTTLLRLIAGLDTPTSGEIVANGEVVKKPSGDRAVIFQQYSLFPWLTVLQNVTFGLEMTKPGSKEENIAAAERYLTSVGLIDFKDSYPHELSGGMKQRVAIIRSLLNHSPILLMDEPFSALDMQNRHSLQEQLIGVWKRFENTIVFVTHDVDEAIYLADKIVILDKNPGRIANIVEVDLERPRKRESQEFLALQESIVSQLNMDE

SEQ ID NO: 10530 - protein, 123 aa, Methanobrevibacter gottschalkii
MNRDDLEDYIEDNYSAEPEFPWLKFPNYEVFRHDDNRKWFALIMDVSKSKLGLDGDEILDVVNFKCDQILIDSLTTEPGFFPAYHMNKENWITVALDGSVSDEKIIMLLDISFELTASNKKID

SEQ ID NO: 10531 - protein, 270 aa, Methanobrevibacter gottschalkii
MNILISNDDGVNAAGILAAKQAVEDLANVYVVAPDKNNSSVGRRISLFKHLKIDSCELEDGSPACSVSGSPADAVIVGADYIMDEKPDLVITGINQGLNISCDITSSGTVCAALEAVSLGIPAIAVSLFIDPKTSYKQDENGEWYMDYDFNFAKKVLHDLVLKIIDEGFPKGVDLFNLNIPTNYKSQEVKITYLSHKMIDKKVIDNTNEEKKELFNYPLDENQESDDLIMIASDLIKEYEEGSDGYALLVEKCPSLTPLNVNMTSKKLNW

SEQ ID NO: 10532 - protein, 244 aa, Methanobrevibacter gottschalkii
MIVMSIAGVDPSAGAGIYADLKTFQAIGVYGTGIVTALTAQNPYKFFSASPVLPEYIEEQMDSVLDSYEVEFIKTGMLYSPEIIKLVSKKIKEYDLKAVVDPVMVATSSGNLTKEDIADAFNKYLLPNSILTTPNIAEAEKLTKFEIKTKEDAFKASKRIVCNNIITGGHLDGLNTINIDGEITTIKQELIKTDNLHGTGCNLSSAIVAYLAKNNELDTSIIKALNYVYEGIKNGNYGTLIAKI

SEQ ID NO: 10533 - protein, 223 aa, Methanobrevibacter gottschalkii
MDNIYAIIPVSKFKNAKTRLSPFLSEEEREKLLKVMLQDVTDTLKKHVDKIFIISRDEDVLKYAKSLNLDTILENKDSNLNKALKQAMKECKGKVRKVIIVPSDVPLIGKTNISILIEASKNLDFIIVPSKGGGTNMIIMKPMAIPTKFEGFSYREHVNVAERKKLNPQVHDSFFMALDVNTAQDLGEIMIHGEHTHTRKYLKELKVKVEPYRGTERLKVTRG

SEQ ID NO: 10534 - protein, 467 aa, Methanobrevibacter gottschalkii
MVENFDEWFHDILENANITDSRYPIKGMAIWMPYGFQIRKHSMNIIKKLLDKDHEEVLFPMLVPESELAKEGIHVKGFEDEVYWVTKGGQRELNEQLALRPTSETAIYPMYSLWIRTHMDLPIKYYQIVNTFRYETKHTRPLIRVREITTFKEAHTAHSTKEESDEQIQDFIAIYKEFFDELGIPYLISKRPEWDKFPGADYTMAFDVIMPNGKTLQIGTIHNLGQTFAKTFDITFEDKDGEHKLVYQTCAGVSDRVIASVIGIHGDETGLRLPPKVSPNQVTIIPILFKKGKEEVLAKCAEIKAQLEETGLRVNIDDRDIRPGKKFHDWELKGTPLKLELGPRDLENNITVAMRRDEGKKIEIALDSSLSDNVIDLLNKTQENLSESAWNFQKSHVKFTERLDEIKDLVETGNVVKFHWCGDEAIGRDIEEKTGYDILGIQEEISEGECISGKGNAKYIALMAKTY

SEQ ID NO: 10535 - protein, 347 aa, Methanobrevibacter gottschalkii
MTNRKIQMPREVYIDPGIVHDTAEICNSLHLGNDFLIVTGSHTYDIGARPVIESLEKNNLSYDVIKVDVASEESISEVEELITPETTVLGVGGGKVIDVAKLSSFNQGVYFVSMPTTASHDGIVSPLASIKNPNTSISATAHSPIAVIADSEIIAQSPFRLLAAGCADLIANFTAIKDWELAHRLKNEAFSESAAALSIMSAHLITDNIANIKPNLEPSARIVMKSLFSGGMAISIAGSSRPASGSEHLFSHALDKILDKPALHGEQCGIGTIMMMYLHGGDWRVIKNALESVQAPTTAVEVGISDEEIIDALVMANKIRPERYTILGDNGVSREAAYELAYKTEVI

SEQ ID NO: 10536 - protein, 145 aa, Methanobrevibacter gottschalkii
MITLIGKDLAKEGQEFVFLGPADECENCRFKSSCVGNLELNRKYVVVNVKENEQKCPIHSSGLVIPVEIDRAQIDVLTASKNIFEGSTFTFNAPDCDEVCEFHDLCFPEGLQEDDKCLVLNNNGKHNGECKKGFKLNKLTLGFVI

SEQ ID NO: 10537 - protein, 229 aa, Methanobrevibacter gottschalkii
MMKNTSGNSSSKKNAGYKAAEYVEDGMVLGLGTGSTTHFFIEKVGMRIKEEGISIKGIPTSFQSLLIAKQWNIPITTLEENDIDLSVDGADEVDREFNLIKGGGAAHTKEKIVDYAAKQFIVIVDESKFVDKLGDFPVPVEVLPDASRMAIKELEDMGAECEIRMAQRKDGPVITDNGNFVIDAKFDKIESPRHLEIDINTIPGVVENGIFTQMVDKVIIGTDEGTKEL

SEQ ID NO: 10538 - protein, 73 aa, Methanobrevibacter gottschalkii
MPIGAGMPFDLKDMSYKIAIIFGALLVIYGVLWLLAELKIIPAILFVIFPQIVLILIGICIIYFAFDRKKKYY

SEQ ID NO: 10539 - protein, 994 aa, Methanobrevibacter gottschalkii
MNKKGYILVISLVLIMLFCLSTVSAKDTDLNANTLEKSNDVTILNEGDSNVSQIHSQHTVKVGSDSDSIQNTIDCMNDGDILNFETGTYKDICIYVNKSITINGNGAELIGYDTPSKSNTPEIIYNDTGKGGYAIGNFATLYIVKADNVVINGLKITGGANSTSTYSNALIYAMNSKNLTFKSNVLEGSSWGLYFQYCTDGHVTNNIIKNQAVTGFLNFGSARTSIENNKVINAKNHGIDVRHGTGPNVKIINNTVIGSKEGIYLMHSTGHVAANNTLINCTISSISCYGSKNIKLNGNKMQKSRIGVLLGGGYENITVGENMFTLDNLPYPPTFAYYIAEAKSEYQNDEDIMGTFSDSSLYTPNFVAFTGIDVPKDIGINYDPILEKTGPEWIVPEGASSSEIQNMINNMNNGDTLSFTQNAIYNEISIYTDKNIKILGNNATLVGCSGINFNNTHYLDNVAEKVRKSTNEGGYAIGYNAVLYILNTTNVVVSDLNIKAQYPKYDSSKVETTTNEYKTVGIYADSNSGLVITGCDVTGASWGIFQQYCKNSTIIRNNIHDIYTTGIMNFGSPNGIIAGNTVTDAANHGIDVRHGTGPNVTIFNNTISGAKEGIYLMHSKGHSAYNNTILNCKISGITAYGSGNEVLFNNTISGSRLGILLGGGYYNITIGKNTFKLDSLPFPPTFVTYLARADNKYQSEDDVIRTYSDKETAAVDANDITVGYKKGEFNITLIGQNGDKLSYEDLSISINGANFTAKTDEKGIAVIPLSLTTGIYNMTIKFAGNDNYAPINVTKTVTVNDDRIKTILSATSKTLYLTIISKGYSYKVTFKDMNGKAIANKKISFKIDGKTYSATTSSTGIANIKIKATTTGNKKATISFKGDDKYAPVTKTLTVKVIKQSSKISAYKKTFKVKIKTKKYTITLKNNKGKAIYKGTVYIKVKGKTYKAVTNSKGKATFKITKLTKKGKFTATIKYYGNKYYSSTSKQVLIRTRR

SEQ ID NO: 10540 - protein, 571 aa, Methanobrevibacter gottschalkii
MNKSLNILFICFVALLVISCVNAANDNPNNSDDISNYQISSDLSNTEIQTMLDNAKEGDQFEFTDREYKNISLVVDKKLNIVSKKNSNIHTSNKIADKARNLGLNNSFGFYFTSNSGGSFLYGLTIISNSDYGIVVDKSDNTTIKNVVIKNGNVGILVKNSNNADIIQNNISKANSNSIHLENVSKSIISKNTISYNGRSGIHASNIYYCNVTNNTVHHNKFNGISLYNKTTGNIIKFNLAYENPNGIYINSQSDFDVVNSNTFTKNRRNTDYELGAFESGNGLLFGADFKTAKEGKSSRLEVKYNVLTHNEGYQAKNNPDLPTFKLGDNWFDSTDDENTFVCPMLLAGIMKMGTISVKNGFGLQMYDTNGEAVTEFGTFDTTVNVNGNQYTAKFVNGKAIIDANLDPDKEYEIEVIIGDKPVKFTYRTSSGDKNDESDSQTSTDGDFGINHHDFIDAMGNDASKGVGNSENGTSSAHFANSEQSGAHGTNASGNFQDSSDNGDSVLTNGNANAGDSSKGEQSEEGKAYEIVPQSKISKEITDTSGIIVLSIVSILGMIIYGYWRKPEIEN

SEQ ID NO: 10541 - protein, 134 aa, Methanobrevibacter gottschalkii
MKVKSVSLKISSNEKFEIIDITSKINELIEIDEGIVSIFSKHSTSAIVVNENEDGLLKDLEVSLDDIISDKFSYSHDMIDNNARSHLKSFLLSSSENLPIKNGRLDLGTWQSVFFVELDGPRYDRTIILTMVGE

SEQ ID NO: 10542 - protein, 552 aa, Methanobrevibacter gottschalkii
MPVITFKYQDLKDLGINMEKNELIDTLPMMSSDIEDFNDEEIKVEFFPNRPDNLSVEGVARSFKGFIGQEVGFPDYKIEESGEYVIVDKDVAAIRPYIGFAKINNVDFSGDKLKYIMDFQENLHWVIGRDRKKVAIGIHNADAVNGPFKYIATPKDANAFVPLEKDIEMTPDEILTEHEKGKDYAHLIRNFDKYPLILDKNNNVLSMPPIINGELTKLKEDTHNIIVDVTGTDAKAVNQTLNIICSSFAEVGGQIKSMEVKYEDKTLVTPDLTPQEMNVHVDTANELIGGTDLTAEDIRELLLKARFDAEIISENEIKTIIPSYRVDILHEVDIIENIAVQYHINDVIAELPDINTVAYENNWFKSEATIREVMIAMGFQEVMSLMLTNEEAHYKKMNQEEKPHVQVARPITIDRTMIRTSLINSLMEFLEDNKHEDLPQKIFEIGDVLYLDETKENKTVSSKKLAALVCHSTANFSEIKSIMSSVLSNLGYTMDISDSENKTFIEGRAADVVGEAQKGIIKGFFGEVSPEVITNFTLDYPVIGFEIEFINK

SEQ ID NO: 10543 - protein, 118 aa, Methanobrevibacter gottschalkii
MQMIWFYVAIVLAISDILHTTLMWKVLNNFYILLGVFIQQSTHSTWQTWVIHEIMEAAFHFIILSIVFLNPTIGLLAALIHFVIDVSHTVLIRNMGELEHRALHFVVESLFFILIYGL

SEQ ID NO: 10544 - protein, 903 aa, Methanobrevibacter gottschalkii
MSNEEIPKDYDFKKEKFWEKKWEDEDIYRYIGDGSRPRYIIDTPPPYPTGLIHLGHVLNWVYIDMNARYRRLKGHDVLFPQGWDCHGLPTEVKVEETHGIKKNDVSRAQFREYCVDLTTKNIASMKSQMKAMGFSQDWNREFITMTPEYRKRTQYSFLKMYEEGLIYQGIHPVNWCPRCETAIAFAEVEYSDNTTFLNYVNFPPAVDDSYDDIVSSQSSGKQASPNDEGILIATTRPELMAACVAVVIHPEDERYTHLLGKYVEVPLSHQKVKIIADEEVDPEFGTGAVMICTFGDKTDVSWVNKYDLEIIDIMDETGILTEAAGRYAGMDLPSAKKQTIEDLDAEGYLLKQEQVDQNVGQCWRCKTPIEILVKKQWFVAVRELIKKTKDAAEEMNWVPEHMKSRMVNWADSMEWDWCISRQRIFATPIPVWYCKDCGKVILPDVEDLPIDPTQDKPKHACECGCEEFIPEEDVLDTWMDSSISPLSIAGWPNEDYINHFPADIRPQGHDIIRTWAFYTTLRCLALTGQKPFSDIVINGMVFGEDGYKMSKSRGNVIGPEEVIEQYGADALRTWAANSVPGSDVIFDWKDIKHGYRFLRKFWNAFRFISMQIFDEKVSYDEIKDDLGPLDLWILSKLNNLNKNVDKAFAEYNFADTISSIEGFFWHDFCDEYIEAVKYRLYTDVSDESKRAAKYTLRCVVETSLKLLAPIVPFFVEEVYQYFDNQSIHTTSWPEVIEELISEEMEVKGETTVELIDEVRRFKSASKIPLNAELSEVNVYTSNNDLIDVFNQFDDDIKGTLKINNLEISSGKPEVHEKTIEVEPDMSQIGPKFKGDAGKIIGYLKSTDIEEIANVLDESHELTIGEIVVPEDMLNIKKEIVGASGKKVDILQSENLDMIVEVIR

SEQ ID NO: 10545 - protein, 209 aa, Methanobrevibacter gottschalkii
MRYLVHVQEAVSENKKLILLMSVIFIISVAVGFIFQDIIYKEISPIFEKMVREFVNDPNSNLGFEIFINNIRASLLTYVLSVFFALMAVFSLILNGIILGAVGGAYMSADPVYNGIMFLALILPHGIFEIPALIFSSVAGILLFKFIFKYLKTFVKRDDLSLKEILDMHKVIIKHSIILLILSFVLFVIAAAIEGNFTGAFAKWIQTLF

SEQ ID NO: 10546 - protein, 54 aa, Methanobrevibacter gottschalkii
MTKIKIRLFGIVRNLGLLDLCVHFYPELNQKTTECKKIGDIIHNRNIKIKFESI

SEQ ID NO: 10547 - protein, 134 aa, Methanobrevibacter gottschalkii
MGLLDKVVGHAEVGGDTQIVEEYLAPGEEIIQSFHFLRDAVILTNYGIYDIDVQGLSGKKVQVKFYPKKTIKTISFESAGSFDFDVDIKIGVSNNPVVLMEGGAMNMPISFKVPKAQAEEAKQIIHLVKEHYLL

SEQ ID NO: 10548 - protein, 438 aa, Methanobrevibacter gottschalkii
MILKVKNISNIGGEVKAPPSKSYSHRAVILASLAKGTSKLYDMLFSEDTLASIRVCKALGAQINKKDGYLEVIGTNGRLHNSCDGPIDLANSGTTLRLMTSVSALSDNEVILTGDESLKTRPMGLLMDALKPLGVETESLNGDDKAPILIKPGYLGGETNIMGNVSSQFISSILISAPLSKCGVNLYVLPEFKSKPYVYMTWDIMRKFGIRSVKAYYLKHDSCNQEHQSCRIDEFKIKKQEYIACDYTVEGDYSSASYLLALIAINGGSARVKNLFRTSKQGDKFILDILQRMGATIVRGDDYVEITSKGNLKAIDVDLSNAPDLLITVAVLAAMAEGTTNITGVAHARVKETDRIDTTCRELEKLGCCLEEHEDGMSITGGVSSGVVDSHGDHRLAMAFSLIGLKHDIKITNGEIFDVSFPDFIETMAKLGFELELV

SEQ ID NO: 10549 - protein, 209 aa, Methanobrevibacter gottschalkii
MNKEERIIRLVECLDNTFEIRTFQNHDPYQVLIRTILSQRTRDENTDQATNNLFSKYKDIYEVAEAPIDDVKELIRPAGFYNVKAARIQEVSQILIDQYGGEVPNTVEEMIKLPGVGRKTANCVMVFAFELPAIPVDTHVHRISNRLGLVDTKNPEDTEVELTKIAPKDLWIKLNDLMVQFGQNICKPMSPQCEICPCSEICDYFKENI

SEQ ID NO: 10550 - protein, 315 aa, Methanobrevibacter gottschalkii
MVNVPELKRGVLDSVVDAIGNTPIIKLNNLTKDLDAEIDVKMEAFNPTGSVKDRVAVAMIEDAEEKGLLKDDSVIIEPTSGNTGIGIGFAAAAKGYNVILTMPETMSVERRKLLAIYGAEIVLTPGSEGMDGAIAKAEELHRENPNSVILGQFDNEANVAIHYKTTGQEILRDTEGNVDYVVAGVGTGGTVTGIGKALKEVLPDVKIVAVEPEESQTLAKGAKGPHKIQGIGAGFVPSIYDSDVIDEIIPVPSDEAGKTLIALAKEEGIFAGISSGAATWAALQLAMRKENKGKRIIAILPDNGERYLSVEWLFE

SEQ ID NO: 10551 - protein, 237 aa, Methanobrevibacter gottschalkii
MFNNLRAEIKAIKEKDPAARSTLEIFLCYPGFYALLMHRISHWLWNRSLKLLARMNSNLARFITGIEIHPGATFGKRVFIDHGMGVVVGETAIVGDDVLIYQGVILGGTSTEKTKRHPTVEKGVIIGAGAKVMGNITIGEYSKIGTGAVVLKDVPPESTCVGVPGRIVKRKGVPHEKVDLDHNKLPDPVADAIITINKHLQENDEHIKILFDKNEICLTDDIRDEQETLEDLFKREE

SEQ ID NO: 10552 - protein, 124 aa, Methanobrevibacter gottschalkii
MKPPCEIVVWYVIPAIRSELAKELLNLGMKQKDVSELMDITQPAVSQYITDKRGSGIKLDDNVRDMIKNFARQLSVGEATKADLISTTCKICNHVKLSDVLDQLNIDKSELGEDCQSCLGSEVN

SEQ ID NO: 10553 - protein, 448 aa, Methanobrevibacter gottschalkii
MDVYSTLTRSKENFVTINKNRVNLFVCGPTVYDDAHIGHGRTYISFDTIKRYLEYKGYAVFYIQNITDIDDKIINRSKESGIPASILARKFEKRYIEDMHKLNVNGVNLFARATDHVDEILDQIQRLIDKGFAYETEDGVYFEIDKFPEFGKLSNRNVEELESHRDIVETTKKNPQDFALWKKRIDVDEPTWPSPWGEGRPGWHIEDTAITEYYFGSQYDAHGGGLDLIFPHHEAEITQMEAVSGKAPMVKFWLHTGFLNVNGEKMSKSLNNFITIRELLEDYEPDTFRFFVLSTHYRSPIDFSKESLHQSEKSLDRIRKYYELLDVEVDENKYECDVLAPHMEEFFNSMDDDFNTPKAIAAIFGLINDTKKELSEFSSEDKRAIKSFLDDASHIFGVSFEAEEVNAGLDDLLNVISEVRSELRASKQYDLSDKIRDELQKLGYEIND

SEQ ID NO: 10554 - protein, 69 aa, Methanobrevibacter gottschalkii
MLKVRIWKLLLGVLILSKSFEKEIISEDTANSLWIAMVNNGIHLPKDLFLDYCSRLYEIDCEKFLMDYF

SEQ ID NO: 10555 - protein, 432 aa, Methanobrevibacter gottschalkii
MNNKDYGLATLGVRAGQQPDPATGAQAVPIYQTTSYVFKDASEAARRFALQEFGQIYSRLTNPTSDVFEARIAAIEGGNSGLSTSSGLAAISYAILNVTGPGDNIVSADNLYGGTYQLFNYTFKDLAREVKFVNSQDLQAFEDAIDEKTKAIYVESIGNPKLDVPDFEALAEIAHSHDIPLIVDNTVGVGLVRPLLHGADVIAASATKYVGGHGTAVGGYIVDSGKFNWGNGKFDNFTKADPSYHGLVFWDAFGDVPELGNIAFTVRARARLLRDLGATQAPVHSFIFLQGLESLDVRVKRHSENALKVAKFLESHPKVNWVNYPGLESHATYENNKKYLKNHFAGILGFGVKGGEEAGKKVIENLKLFSILANIGDAKSLAIHPASTTHQQLTPEEQEATGVTPDFIRLSIGLEDADDLIEDLSQALDCID

SEQ ID NO: 10556 - protein, 401 aa, Methanobrevibacter gottschalkii
MYLDNSATTQVSKEVFEEMKPYFREEFGNPSTLYKLGRESKKALDQARQRVANAINAKPEEIYFTSGGSESDNLAIKGIVFKLAKKGKHIITTEIEHPAVKRTLQFLESLDFKVTYLPVYENGIIKIDDLKEAITDETILISVMHGNNELGTIQPIEEIGKVAREKGINFHTDAVQTFGKIEVDVEKLNVDLLALSSHKINGPKGVGALYIKKGTRLEPLIHGGGQEKGIRSGTENVPGIVGFGKACELAADQLDEHYEKLTSIRNEISDKILNTIPEAYLNGDAEKRLPNLLNFRFKAIEGESLILLLDAKGYQASTGSACSSNTLEASPVLTALGLDPVDVHGSLRISLAPESEEFDVDDFVNTVAESVARLREMSPLWNQEIDYDGVMCRKNDNCKRC

SEQ ID NO: 10557 - protein, 123 aa, Methanobrevibacter gottschalkii
MDYSEKVMDHFANPRNSRKMEDANGVGTVGNPTCGDLMTIYIKVEDNIIKDISFQTFGCGAAIATSSMITEIAVGKTLEEALKISRNDVAEELDGLPPVKMHCSNLAADGLQAAIENYYENNQ

SEQ ID NO: 10558 - protein, 123 aa, Methanobrevibacter gottschalkii
MANFVKCDKCGSILGMFVKGEGEVCSPDLLEIPVQTEGDKAPKHKPVVEVDGDKLTVKVGEVAHPMDDDHYIQFVAVEIGSELYAKCFKPGDVAEATFTIGADKSADAVAYAFCNLHGLWSSE

SEQ ID NO: 10559 - protein, 172 aa, Methanobrevibacter gottschalkii
MSSYSKLIIFILVLLFISAAIFFIDSSMDSINRTMPGVSDSIVNGDKEYNEAVQLVNDKSFDEAKTKAVSAENNYNNSLIKLNGIRNNFSSDINEVQEEYIGTVIKELELKINAVNNLKEAIDCFKINSNYTGTNYASKANDLMYEATEYQHERNSIVKNNSNLFKQQNFVI

SEQ ID NO: 10560 - protein, 760 aa, Methanobrevibacter gottschalkii
MTKEFLKLKTKCPKCKGIGSVVVDYKECKACGGTGYEDDAFNIGNHFKGVNSNAKAKFDLGGEEDIPCEACNGKGQIEVFEECSHCHGTGQINVCRDCGKSIGDQHDLCAECEEKRKLEKAKHDKFEARRSAARDVYILDSLCKMSDIDKDKLYKGRITRVEKYGAFVTLNNNVWGLMRGDNFGYNVGDDVIVYVTAIKSRERKIDLAPAHVESYNIKKLTKTFPRTLIGKLEEKKGRMVRIDGEVQQIQQTSGPTIFIISDETGSSEIAAFDKAGERSYPEIELGDAVQVVGEVNEHGGKTQIESSSMVKLNEENTAKLHKLIDDALNKKAEPQHVDFLVESDILNRLKPKMREAAQKIRRAILDGRTILLRHHNDADGICSGVAMEKAIIPLIEKVNPSNDAQYYYFKRSPSKAPFYELEDVVKDLSFALEDQERHGQKLPLIVLLDNGSTEEDIVALMQAKIYDIEVVVIDHHSPGELLTKNIQDGKIYGATVAVDEYVDCHVNPYLVGGDSQLTAGALATEVAHLINPDVKEVIKHLPAVAALGDKAECSEADQYLEIANQKGFEREHLAKIAECVDFEAFFLRFMNGRGIMDTILAVDNIDKHEKMIDALYKEYQKRVDTQLKATLPNIKRTQFENGIYFNLIDVEKYAHKFTFPAPGKTCGFVHDNVKQELGEDKPIVTLGHGPDFGVFRATDAVNEQYGFNVNEIVSKMMDSVPQAGIDGGGHECAGSIKYIEGLGEEVLSKVIGEIQSLSKN

SEQ ID NO: 10561 - protein, 297 aa, Methanobrevibacter gottschalkii
MTLENYCKKCGHRILPNNPYCPGCGCKTIYTENDESYVFTPPVHDIGFFNFSIDFSPYIMSNRDDFKYDICHCGYLNDVTNEFCYMCGAKRFHSKLARFLKNRSKPKFNLDNVLCECGAVNSKENSFCEMCGKQLHEHETKIYKSNNYSNFNLEFKNSVFCFCGEENEESSQFCRNCGLPLINYGHLSDMALLCVCSTLNDINSSFCIECGLNLKKENSLIVCVCGHKNPISAKFCQNCERPLNPKRLINSKILCSCGEILDWNTEFCPNCGKNIKNRMIIRNSINNTVKSLKSIFR

SEQ ID NO: 10562 - protein, 325 aa, Methanobrevibacter gottschalkii
MKKCDVCGTLNFKDNNYCTHCGNKFIFEHVCPYCGSINEDYANFCANCNGQINPISINDFDILFSEFNENCLLNAKISDEKYNDLLRNIFLRADFTEIHGNTIKDKILNLASIFTQCKPKSRGYERGFIFLGNYIYYDDRLDESVQIATIIHELAHYLIFSIIESLLCDIFNVKTSTTLQSFIWYFLMIPEFKIMNEYCAHTVEGRFIPYGYQNYGSFNLLVKNTSFDEDSIKTMEMFGNSFANEIIIYLEKYIGNDLRQEIKLQYKMDLKSPSYDSILMETDECFNLNDKNRMLLKILYDVFKEASNPNVICELKNIKEGIDLN

SEQ ID NO: 10563 - protein, 98 aa, Methanobrevibacter gottschalkii
MGNEKDELLKLTSYVQISKYREKTLKSIGDDVKIPTNIAKDSGIRTNHISKVLSELKSKEIVECINEEARKGRLYRLTDTGKDVLETIKVKEEKENKD

SEQ ID NO: 10564 - protein, 203 aa, Methanobrevibacter gottschalkii
MKCKYCGIENKKSAKFCTSCGKPLNESPEPTGGNSKLIIIALIAIIIILVGTIGFFVLNNNFNSHDSEIPNNTVSSQESNSANIQDSDNGGDVKTQVTSSQTTNSKSWEPIGSYSGSGSGSKTITVPEGKIKVEFSAYPIKNYATNYLTVSGSNGESGGVDWGSHSAVKTKSDSFIYTSSSSETFTIDYYETVSWEVHFYRYQ

SEQ ID NO: 10565 - protein, 236 aa, Methanobrevibacter gottschalkii
MFFDLNIKGSTLENNIKLAKEASFYGWNHINFSYNANNFLNALNFKDELNKALGDIIDFDYTLEIKSSNINDIRKSVNKFRNRSSCISVVGGDLKVNRATLENIKIDVLSRPYLRRYDCGLNHVLAKEAEKNNVAVELCFKDVLKSYLSYRSKILSNFKDIYTLYRKFDFPLVLSSRAESVFDIRTTHDFITFFKQTGLTDAEINKSFKTADNILKYNKNRENLILKGVMRVTDET

SEQ ID NO: 10566 - protein, 118 aa, Methanobrevibacter gottschalkii
MKLKVLPPTLRKNNRYLTVDVKVTCQITKDDLVAIVWDACIRFQGELNTANFNLWVMKFFEIEKRDDYYRYRSIIRCQRDYVDEVRSSFALTNRYGNNMISITTIGLSGTIKSSGKYI

SEQ ID NO: 10567 - protein, 255 aa, Methanobrevibacter gottschalkii
MQPLQNAGYDRAITVFSPDGRLFQVEYAREAVKRGTTSIGVKSSEGIVLAVDKRTTSKLVEASSIEKIFKIDDHIGAATSGLVADARALVERARVEAQINKITYSEPIRVTSLSKKLCDMLQLYTQNGGVRPFGSALIIGGVYDGVCKLFETDPSGALIEYKATAIGSGRSAAMEIFEEKYEDDLTLDEAIELALTAINEATDHDTVSNNVEIAVIKVDGEKYVKLSQDEVQKYIDEVLVEEEEEESADSQEDEE

SEQ ID NO: 10568 - protein, 233 aa, Methanobrevibacter gottschalkii
MVNIDEAIIAKYEYCGEHFEILVDPDLAADFRNPDGPDVAIEDLLAVEEIFKDSKKGDKASDEAMNKIFETTDPIEVSKIILEKGTVQLTADQKRKMQEDKRKLVINKIAKEAVNPQNGLPHPVQRIENACDEARVKFDPFTSVDQQVQTALKAIKPLIPIRFERVKVAVRLPGASAGSAYSIIHGFGEIINEEWQQDGSWIGIIEMPGGLQDKFSAKMAEISGGNAETKTIK

SEQ ID NO: 10569 - protein, 306 aa, Methanobrevibacter gottschalkii
MIYVENKDLVIPGQILADDEYYSGRGTFKENGKVCSSLMGLVSLRNKKLRVIPLKSKYVPKKGDVVIGKISDVRFSMWNVDINSPYSGILPAFEVFGREKKELNKVYDIGDVLFLRVVDVDEIKKAKLGLKGRGMGKFKGGIIVDIAPTKVPRLIGKKGSMINMIKDKTNCKIVVGQNGLVWVKGDKDMEQLTKNIIHLIEAEAHTSGLTNKIKNKLYLAIDGELPPEEAEEEQDFVLEKPKLQDFKEELEQEERAKHEAKEIKEKGDKPNIAEVIEELKRKNKSKKDNGLSYGDNSNNSFILNNK

SEQ ID NO: 10570 - protein, 231 aa, Methanobrevibacter gottschalkii
MSEFIRKDGRKYDELRPIKIEAGVLERADGSAYLEFGGNKILVAVYGPRESYIRRLLKPNTGVIRCRYNMAPFSVDDRKRPGPDRRSSEISKITADALRPALMLENYPRSMIDVYIEVIEAEGGTRCAGITAASVALVDAGIPMKDIVVGCAAGKVDDEVVLDLSEYEDKEGQADIPIAIMPRTGEITLLQSDGDLTEEEFQKAIDLAMEGCLKVSELQKEALMKKYSTEQ

SEQ ID NO: 10571 - protein, 261 aa, Methanobrevibacter gottschalkii
MDIVPEITRQSIADLIKNDKREDGRDLTEYRDITIETDVISKAEGSARVKLGGTQVIVGIKPQLGTPFPDTPDLGVLMTNCEMLPMADPCFEPGPPSEDSIELARVVDRGIRESQLIDLDKLCVEEGKHVWMLFVDLHIIDNCGNLFDACELAVMAALKSTKLPVANIVDDEVVISDDETFDLPINNELALCTFVKIADKMVIDPTLDEQRVACARLNVGVTKDGHICSMQKGGEEPLTKDEIFYCVNTAMGKVNELIENL

SEQ ID NO: 10572 - protein, 209 aa, Methanobrevibacter gottschalkii
MSNTIKNDENIKSCIILCGGQSRRMGQDKGSMIIQNKPMIKHILSTLNKHIDEVIIVLNDQVRVDKYAKFINPEEYTYSITFLKDKIKSKGPLSGIMTGLGEIKSDYALILPCDSPYVSEDYIQTIFSQIDSDYQAIVPYHDENNKLKTSEPLHSIYKKDTITEIEKLVNEDVLHIKGLIEKITTKFILIDNKKIEKKEFRNLNRPEDI

SEQ ID NO: 10573 - protein, 253 aa, Methanobrevibacter gottschalkii
MDEHEKWKIKFSLLMVVLIIIIYGSNYLVLGDGEHIISYVWTHLGFIPVDILVVAFLLEGIIERKEKEAMLEKLDMLMSTFFSELGNDLITQLSTANRHKASTASLKSIKNWDDEDYEDKLEELKNSPIEFTANIAPENREKFLEDLRELLVNKREFILNLINNPNLLEKEEFTSLINAILHLDEELEHRKDLALVNDIDFGHLNGDMNRVYNILVHEWVYYLKYLNKHHPYMIALMIRTNPFDEDASVYVTE

SEQ ID NO: 10574 - protein, 187 aa, Methanobrevibacter gottschalkii
MLDDKDFIKSCDVPGPTKEAIRAIILYKSEVTSKDKVVDCGCGTGGITCEFSQRAGEVISIDTDPEAIDVTSKNLKKFGLGDNVTLINDNGSKALKNIKDIDIAIVGGSGRQLENILDIINENLNSKGRIIITAILVDTKVEAINKLKDLGYNPKIMEVNVSNGRVLDRGVLMISENPIAIITAKKR

SEQ ID NO: 10575 - protein, 182 aa, Methanobrevibacter gottschalkii
MIVVGITGASGVIYGIKLLEALKELNIESALVISDLAKVVIESETDYTFEDVIKLSNTYFDFHDLTASINSGSFKTDGLVIVPCTMKTLSSIANGYGANTITRVADVSLKEKRPTIIVPRETPLRSIHLQNMLTLSQEGATILPAMPGFYSNPKTIDDQINFVVGKILDSLKIENNLFKRWE

SEQ ID NO: 10576 - protein, 408 aa, Methanobrevibacter gottschalkii
MSEKKKFIRDSVYGDINLNDFEVKIMDMPQFQRLRRIKQLGLISLIYPGATHTRFEHSIGTMNLGSKLAEELDLKKDEIELIRSSSLLHDIGHGPFSHVSEGVLSVPHEELTKFVVTKTSMRELLEEKFDVNEIVDIVNGKGYLGPIVSGELDVDRMDYLLRDSHNTGVAYGIIDYERIISNLKLENGLILDIKGVQAAEGALVSRYFMYPSVYQHHTTRIVNSMFRRALKKIIDEKIINEKDIYKYDDTDMISIFRHCDNTFANDIMNRLDNRRIMKRVKTIRLNNFKFPEKMYKIKAKTLRKAEEEIAEDYGLDKDYVFINIAEYPRFDEMKTQVNVDGKLYPLTKISNIIGALSKARFNIPDISVYVDNSERSKFDKFKLENYLELPEIDREKFHGIHYDQIKLI

SEQ ID NO: 10577 - protein, 95 aa, Methanobrevibacter gottschalkii
MKGSVKAKLIVFMVIALLAFGISSAFASLIISDSPDSYKLIPIKNDSFEPNYINKVPTILPKVETNNTTNITTNKTNYNMTNLNYTNQWVETYEN

SEQ ID NO: 10578 - protein, 405 aa, Methanobrevibacter gottschalkii
MVMFSAGDTAWVLVCTLLVLLMSIPAVAFFYGGLSKRKNVLNTIFLTFIAFSIISVIWVIFGYQFAFGSDINGLIGSPTNFFLQGIGIDDLSGSIPTLLFVMFQCAFAGLTCAIMSGALVGRMKTKAWVIFTVLWVCLVYVPIAHWVWGGGWLMQMGALDFAGGAVVHINSGISALAVALVLGRRKNTSLIPHNLGYAVLGAALLWFGWMGFNGGSGLAANGLAANAIIVSNVAAATGLIVWTIIDTYLVGKPTVLGAISGAVAGLVGITPAAGFVDVYGALIIGAVAPLVSYFAVYYLKPKLGYDDALDVWGIHGMSGVWGAVATGIFAVPAVNEAAGLIAGNANQVVIQVMSVVATIVYAFTISFILAKVLDKAMDGIRVEESDEIGGLDNNLHKESAYNFNS

SEQ ID NO: 10579 - protein, 112 aa, Methanobrevibacter gottschalkii
MKRIVAIIRPEKFEDVKRELIEVGCEGMTVSEVKGRGSQKGIRESYRGSNFCIDLIPKTRIEIVVNDDRLDLIVDKIIEGAYTGNIGDGKIFIQSVDNVIRIRTNEHGDEAV

SEQ ID NO: 10580 - protein, 203 aa, Methanobrevibacter gottschalkii
MIQMAKKNILALIILILIIIIFGMNLFNNTVNIYLDGENVSVETQTFEDIDSNSLNKDICSYTLNVMNNTTSDVETLKNGVEKLCYQHGLEDAEINIDSSLGHDQIPIIVHVDGTSMLPTLQNGQTVLVNKTHDFEVGDIVVAESKEYGGIIKRVDKIDENKVHLISDNKNISYEYIDGALYQIKGITTWVDISDVNGVVIDY

SEQ ID NO: 10581 - protein, 225 aa, Methanobrevibacter gottschalkii
MYSQTKIAIPIFQNDYKNVIEVANDCIKKGADVLEFRIDALENPNIREIKQTIEEINFPIIATNRIITEGGFFKGTEEERFNILYECCDLVDYVDIELQSNDEYINKIHDTGVTTIISYHDFEKTPKLSEITYIVEKEQELGDIAKVAFMPQNLDDTLTILAVLSHCKDTIAISMGELGSYTRIMASKFDSPITFAAGSDVTAPGQIDIETMKALLNMNLNIMDE

SEQ ID NO: 10582 - protein, 241 aa, Methanobrevibacter gottschalkii
MKITAIGADISKNDVSCSTMLVENIEKSLYKVKKLGARDVALTNVTGDDVVVSAFVEDDLLEIVNEGIVNVLKESAENLGDLSGISQTPEGAGEGISYAESTVRKDRYPDAIVLGFDTYGGEPFVADVANSTIDAAKGMKNLTDVSDYIESKIRKIPGVGYVSPETDDPVVVATVENIESVGVIASAMIGAALGNKNVYLVKRGTTCNVLPGSVIFSATAFMNGNIIDLAVPFENKTRILR

SEQ ID NO: 10583 - protein, 287 aa, Methanobrevibacter gottschalkii
MILLNKDTKCLVQGITGKQGSFHTEQMLNYNTNIVAGITPGKGGRMFLDQIPIFNSIEEAKEETDINASIIFVPAKFAKDAAFEAIRHLDLVVIISEHIPVHDSMQIMAYAKQMGTTIIGPNTPGIISPGIGKLGIMPTHIFKKGNVGLISRSGTLTYEIANELTNAGIGQSTAVGIGGDPVTGDNYVDILKRFDEDKDTDAVVLIGEIGGTAEERAGKFIAEEMTKPVVSYIAGRTAPPGKRMGHAGAIIQGNSGTVESKTRALNEAGVEVAAKPSEIVNLLKKVM

SEQ ID NO: 10584 - protein, 400 aa, Methanobrevibacter gottschalkii
MSNQEIIDKLLNGEMKLYQVDREVSAKEATDIRREFLEQKYSIKLDNISNYTLDMERASARNIENSIGVLQLPMGIAGPLKINGECCSREVFVPLATSEGALVASINRGASTITASGGANVRITSDIMTRAPVIKCEGVGDALKIKQWFIDNFDELKSIAESTTSHGKLIKIDPILIVGSYVYPRFVFSTGDSMGMNMVTIASEKILDKLAQDTSAVHVALSGNVCVDKKPAAINIVEGRGKSVIADILVPKDIVLKKLKTTAEAIVEVNMAKNLIGSAAAGSMGFNAHYANMVAAIFLATGQDPAHVAEGSLGITTAEDRDGDLYFSVNLPDLPVATVGGGTSLEVAHEGLEILGVAGSDKAREFAEIVACTVLAGELSLVGALAAGHLARAHQELGRG

SEQ ID NO: 10585 - protein, 68 aa, Methanobrevibacter gottschalkii
MDDFLDELYPEITLETEDIVMTISLKKDYSQTKDVNVRKKEFIKDLNDFIKEFEETSESLEFMRYFDD

SEQ ID NO: 10586 - protein, 212 aa, Methanobrevibacter gottschalkii
MIFDSFYTFLGQLVVFLAILIIILFIVILVLGVLIARKNEIKFPRFILFVVDSLYFPFKSIANFLKLDEYLIDDISIKVRDELNKEKFRSIPSEKTLIFLPHCLRHKNCPATLQKEGLNCTECGLCSIGVVKKKAEPMGYKMYIVPGSSFVKKIVKENKFKAVLGVACHEDLNQMMMLLSDFCPQGVLLEKTGCFETKVNIKKIFEKLDSKY

SEQ ID NO: 10587 - protein, 150 aa, Methanobrevibacter gottschalkii
MNIDFKNNEILFLEGETGIVGIVKVAHDNKMLFIATHDNQEIVQFLESDDIIAVSNFKKDKRTIRSQAYLSREESSPLIILNKDHPSTKRLETVISIGDEVNLNCNIIPGTHPEQNVLCSCDSLSGLKIIKTPTGIKLNKEFDNFTIEKF

SEQ ID NO: 10588 - protein, 51 aa, Methanobrevibacter gottschalkii
MCSGGGPMADIDIKKLKTKKYFCKDCGNSFKGLGKKVVCPSCQSENVELVE

SEQ ID NO: 10589 - protein, 338 aa, Methanobrevibacter gottschalkii
MYEKIINNIKLNLGENKDLNRKYLASQIENYKDHPYNLEITKEISRMMWDCLSDEEKREFIEISENETPVIDILEEIYPMIEMGKYDNALDKLNGFMKTFQPMFEDDAVNEYHFFTNQLEEEIFNKYIGAKKEMRYIPNNHPLLDLYYVYGFLLLEKHELKEAEFYLKKALKINPVSSRILLELSDIYKTKAPNFNKFYMYTIQALEYAYYPQDLARCYRNLGQFYMEEMNFEMAAALYNYSMKYELNPIVYSKLQYIKSKGTNIELELEECLNTLKDKKIQIDVNPFILKTLEELSDKYDEKQALHQALYFYELQYDLNHEQDILEKINNIKRVMNH

SEQ ID NO: 10590 - protein, 547 aa, Methanobrevibacter gottschalkii
MANQPIFILPEGTERYSKRDALRMNITAAKVLAGIVRTTLGPKGMDKMLVNSLGDVTVTNDGATIMSEMDIAQPAARMLVETAKKQEEIVGDGTTSVVVIAGELLSKAEELLDDGIATSVVVKGFRNATEKAVELLQGIAIDADDKETLKKVAVTAMSGKGSDYAKEHLADLVVEAALRIEEDGKSDIENINIQRVSGDSVEDSFLAEGIVIDKAPLSKAMPKDIKNAKIAIMKYPIELKDINTDAKIDITSPDQFEMFLKNEEQMIRDLVDKVVDSGANVLFCQKGIDDMAEHYLKKAGIMTFKRVKKSDMERIAKATGAKLVTDIEDLSEDKLGSAGHVYLDKLFDHELTFIEECENPKASSIVLRGSTRYVTEQISRAIDDALGVVAATIEEGKVLIGGGACEIDLVKQLRDYGETVNGREQLAILKYAEALEVIPRTLVENAGLDTINLIADLKAAHEESNLIGINVFTGEVVDMKEAGVIEPLRVKIQALQSAGAASEMILRIDDMIAARNALNSTGPDESGNDASGMPPMPGMGGGMPPMM

SEQ ID NO: 10591 - protein, 1312 aa, Methanobrevibacter gottschalkii
MNKQLLLTFLFVLAVILSVSAISASDVNVTDSYTTSVADGASNVSVPIENSDDSSVLSLSSESDVGNVSSKNSESVKSNTLSTNSDTNSLSNRGNDVLEVNNTASPTINASETIASKDITKYYKGSTGYTAKFLDMHGNPLNGSDVKITVNGVTYTKKTNSVGVASLAINLKPGTYKIVSENLITGYKLTNTIKVLSTINANDVTKVYTDGKKFYATFLKSNGKALANAYIKFKINGKTYSKKTNSKGVASLSMTNLKKGTYKMVSYNKDGLTKTNTVKVVSKTSSKLNTNAYTFLKSDSKNIKVTLLNGLGYAPGSGKIIKFTVNGKTYSAKTNSKGVASLKLPYLKAGTYTVKYKFSGNTFYTASSASNKLYILPSKTATFTVKSTTTFGKGANTPFKVALTSGSVPLVKKTITLTVNGKSYDKTTDSNGIVSIPIDLQNGKYTVTYKFNGDSKVNAKTGSSSIIVKERTSTKVTWKSGTSFYQGAQSYKVLLQDSNGKALASKVVKLTVNGKTYSATTSSNGYATFNVNLAPGNYSISLKYPGDNSYAPSNGNVKVSVEKKENTGYGYWVYGEDMSNVDLKSLASKGTSDLFLNFKAIELHGQSKVESWIASANKLGMRVHIWMQIFYEGGKWVNPVKNGKPYEAFFEKKITEAQGYAKIKGVAGIHFDYLRYSGNGESAAHKTPGGAAAISQFVEDATEAIHNIDSNIIVSAALMPETTSILKYYGQDYSVISKYLDVVIPMIYKGNYGKTSAWITTTTKWFVDNSNGAQVWAGLQGYKSDSNVTKLSASTIKTDAQAALDGKAPGVIIFRWGVTNFVDFSSLSDKSTSPSTTGSVTIADIIAAANNLKNVINSKNTIPATVSVGGSSYSTAQFLYMMTEAVKKINGGKTSSQILPISVGVPTNPSGSFKSGNIASSEYVNMAISINSFIMENGRAPNFASSSSLGTIDYDSLVEMFADILTDYKDNNKLPTSVKVDNGTKSEVITAKTISIKDIVTGATNLKKYYNDYKKLPSTVTAGKITFKLSEFVYLMSKAINQIGKSNTKAITIITGIGNPTNPSGDNINSKYLSKSEYLKVALNVTNYINKNKVAPNYVSSSLGKIIYSEYVDAFSRILAFYGNENRLPNTVTISYSSGSGSNSGTGATGTGLNEALKNGTELSQYLKATKNCQVDNSKIKDIVNKVTKGLTSVKDKATAIYNYVRDNLDYSFYYNTKYGAVGALNAKKGNCVDHSHLLVAMFRTADIHARYVHGKCTFSSGSTYGHVWVQVLVDKKWTVADATSSRNSLGKVANWNTNKFSFNNYYSELGF

SEQ ID NO: 10592 - protein, 237 aa, Methanobrevibacter gottschalkii
MANGKISENIEEYLEVLYCNGSNGEQVSTTKLSDELGIAPGSVTQMLKKLEKLGYIDYTPYKGATLTHEGMKIARKITRKHRILEKFLLDVLKVKEENIHEQACEMEHALSDEAERALCNMLQHPDVSPDDNVIPACNFNFESCSQCFSQKDFDQIINREFNLLSISELTSDTEGTISFIRGNTDLLDSIADLNIKVGCQLNYAINDNKDEDSYLVFIDDEEFNIPKEMANNIFIRI

SEQ ID NO: 10593 - protein, 171 aa, Methanobrevibacter gottschalkii
MRGSLSNDIVSIKIEEGSKKPIALHEKSLFGKIEADSLNLSLIEACYLLEKGRLNIYEDDFECSVGYIIDLLKEQDLFGKYVVYRDLKDRGFVIKTGFKYGSEFRLYNRGRGPGQGHSDYLVKIIFENYEINALDFASYVRVSHGVNKKLLLAIVDDDFDITYYNIEWTRP

SEQ ID NO: 10594 - protein, 371 aa, Methanobrevibacter gottschalkii
MSVGDNMGNLIDPWASFSLDYDKLVNQFGIGKFSDIINEIKNPQRLMKRGVIFGHREFSEINNLINQNKDFAVVTGMMPSGQMHIGHKMVVDQLKWYQEKGAMLSLPIADLESYAARGMSFEKGREIAVNEYLTNWIALGLDLEKDNVNVYLQSQNKALQDLAFMASSKTNFNQLKSIYGFTPSTNIAHIQAPLVQVADILLPQIEEFGGPKKVVVPVGIDQDPHIRLTRDIAQKLHEDLGLLTPASTYHRFLTGLTGDKMSSSKPSTAIYLNDDTKEAVKKVRSAKTGGRESLKEQQELGGEVDKCVIYEMLLYHFIDDDGELEKIRHECLSGTLRCGDCKVRTAELVEKFMDELKEKQVEAREIAKTLL

SEQ ID NO: 10595 - protein, 398 aa, Methanobrevibacter gottschalkii
MIRCVSCGEEYGDDEVIYTCEKCGSVLELVNEIDVSKDIFDGRKDTLWKFKECIPVDENKIVSLEEGGTPFCKCDKLGKELGVNLYVKVEGSNPTGSFKDRGMTVGMTKAMELGVDTVGCASTGNTSASLSAYAARAGLRCIVFLPSGKVALGKLAQAMFHGAEVMSIDGNFDEALEAMTALALEKHLYLLNSINPYRLEGQKTIGYEIVRDLGWQAPDRIILPVGNAGNISAIWKGVSEFYNAGFIKDLPMMTGIQAEGACPVTNAFKKGDRKVVPVENPETIATAIRIGAPVSDIKALNAIYDSNGYSETVTDEEILDAQKLLARTEGIGVEPASAASIAGLKKLVDEGVVDKGETITCVVTGHLLKDPNTAIEACTKPTQVDADIDTLRKILMNK

SEQ ID NO: 10596 - protein, 66 aa, Methanobrevibacter gottschalkii
MAELPFAPVGRILKNAGAQRVSDDAKVALAEAIEDYGNDIAAKAIGFARHAGRKTVKAEDVKLAIK

SEQ ID NO: 10597 - protein, 122 aa, Methanobrevibacter gottschalkii
MANIYVKFDTPEELAKQAEEALETAFTTGKVAKGTNEVTKFIERGDAALVVIAEDVDPAEIVAHIPVLADEKEIPYVYLPTKEQVGGAAGLTVGTASACIVDAGDAEAAVAEIVEKVAELKD

SEQ ID NO: 10598 - protein, 68 aa, Methanobrevibacter gottschalkii
MEEGTPAEVIKVLKRTGMTGEVMQIKCRILDGRDKGRILTRNIMGPVREGDILMLLDTIREAKEIRTP

SEQ ID NO: 10599 - protein, 53 aa, Methanobrevibacter gottschalkii
MRTCSFCGKEIEEGTGKMYVKRDGSIYFFCSSKCEKNMIKLGRVPRKVKWVKE

SEQ ID NO: 10600 - protein, 150 aa, Methanobrevibacter gottschalkii
MIQKSFVMMKPDAVQRRLMGKVLSRFEQKGLKIVACKLIQIDEELAKTHYGEHADKPFFPGLVEYITSSPSLAMVIEGDEAITTIRKLVGATNPLEADLGTIRGDFGMDTGRNIIHASDAPESAEREIALFFNEDEICDYQIVDNDLIYE

SEQ ID NO: 10601 - protein, 596 aa, Methanobrevibacter gottschalkii
MKIRSPIVSVLGHVDHGKTTLLDYIRGSTIADKEAGGITQHIGATEIPNDTIEEICGNFISRLTIKDLIPGLFFIDTPGHAAFTSLRKRGGALADLAILIVDINDGFKPQTYEALNILKMYKTPFIVVANKIDRIFGWETHEGASFSESFNQQAQSVKQELDLKLYELVGTLHKEGFQSERFDRVSNFASQISIIPISARSGEGIIEVLAMLLGLAQEYLTEQLEINEDAPAKGTILEIKEEVGLGLTVDSIIYDGVLRTNDEIALINSSNEVVTTKIRSILRPLPLEEMRDSKKKFRKLDEVVAAAGIKIAAPNLDDVVSGSPLRVLSEEEDVEEQLLKEIEDITINTEDEGLLVKADTLGSLEAVVKLLRDLNIPIREADIGDVSRRDIINSKIALNENEAHGAIIAFNVDVHPNSLDDLSNSDVKLFKGDVIYQIIEDYQEWTDEIERAKKKAFYDAIVKPAKFVALPKLVFRQSKPAIIGIESLSGTVKQGQVLINKNGEYVGVIASMEDKGETLPSIPRGQRVAMAIKDAIVGKHFDEGDELYIDVSEKHYKFIEREFKDKLTEDEFETLYELVEIKRKKDPDWGKFGLFE

SEQ ID NO: 10602 - protein, 127 aa, Methanobrevibacter gottschalkii
MAFKVVVSQGAETHQIEVDETKAFNGLTIGEEFDGGLVGLDGYTLKVTGGSDKNGFTMKKDVTGTRRIKSLLTGGIGYHPKADGVKRRKTVRGNTIAEDIVQINTVVTQAGNKSIADIIGAGEEEEE

SEQ ID NO: 10603 - protein, 404 aa, Methanobrevibacter gottschalkii
MNVQSDVNIGLVGHVDHGKTTLTKALSGIWTDTHSEETKRGISIRLGYADIEFRKCPECGEPECYTTDDKCPICGSETELIRKVSFVDAPGHETLMATMLSGAAIMDGAVLVIAANETCPQPQTKEHLMALDVIGVKDVIVVQNKIDIVSKERAIESYNEIKEFVKGTCAEDALIIPVSAQQGANVDILIEAMLKQIQPPERNVDDTALMHVARSFDINKPGSGADKIKGGVIGGTLIQGKFKLGDTIEIRPGPTNDGKRMTLTSEIIGLEANGEQVEEIGPGGLVGIATKLDPSLTKSDSLSGTVAGEEGTLPDVLDSFKMDANLLDRVVGTKEERDVAPIKLKEPLMINCGTTTTIGVVTSTKKNDVEVTLKLPVCASPGDRVALSRRVGARWRLIGYGIIK

SEQ ID NO: 10604 - protein, 130 aa, Methanobrevibacter gottschalkii
MNSKEVVIDTNFFMVPFQFNVDIITELEKLLPSYNLTTPSFVINELKGLKRNKNAKTRLNANLALKLANSSKVEIKDISLLENETVDDALLRVSEVLATNDIELKNRAKDKGITVAYLRQKKYIAVDGKI

SEQ ID NO: 10605 - protein, 194 aa, Methanobrevibacter gottschalkii
MYYRTKIKDTVRIPPYKFESPINEVAIETLNEQYAGRLDKKLGLLICVNDILEIGEGKLIIGDGATYHNVVFEAIFFKPEQHEIFDGEVIDIVDYGAFVRIGSMDGLIHVSQVTDDYITYDAKRGALLAKESNKVLEEGDLVRARAVSVSIKDESNNNIENSRNSKIPLTMRQTNLGRFEWIEEAKQKSKKVKE

SEQ ID NO: 10606 - protein, 58 aa, Methanobrevibacter gottschalkii
MKACTVCKMISNKDHCPNCGNPTSDNWSGLLIITDPEESNVARELNITVAGEYCLRVR

SEQ ID NO: 10607 - protein, 168 aa, Methanobrevibacter gottschalkii
MLRLDTENKDIMSELKRPLGKLYPNFEDAIDEIKSSEFLISVGDATFGNLTKYELYPNIGIIDNVIQRKNHTHEIIRAEHILKAENPAGTITDDLWETIGHALELSNSGECYVIEVAGEEDLAVLPCIIMANPETTILYGQPNEGLVLLKVSDLKNKAKKLIDGFIKE

SEQ ID NO: 10608 - protein, 104 aa, Methanobrevibacter gottschalkii
MEIEFIEEKENKLFNRKEIKFYVDYDGEATPKILDIKSKLVALLNTKKDLIVVDNVQPHYGEPKALGYAKVYATVDDLKYIETNHVLAKNEEPEEAAEEAEDEE

SEQ ID NO: 10609 - protein, 50 aa, Methanobrevibacter gottschalkii
MVKKSDLYKVDGDKIERKNPICPRCGEGVFMADHGDRFACGKCGYTEMKK

SEQ ID NO: 10610 - protein, 473 aa, Methanobrevibacter gottschalkii
MDNIRNGRFKTGMTDEAAIYTSSLEADKLLFEADIKTNFAHTSMLKHEGIVDEEIADKILCALDSLKEEGYDALVFDPSVEDVHMAIENYVTSKIGPDAGFMHTAKSRNDQVACDVRLVLREEIINIQVGILEFMEGLVEMAGEHLEDVFIGFTHLQHAQPITIAHHLMAHVQALKRDYERLNDTYKRVNLNPLGSAAMATTSFPINRQLTTDLLGFDAYLENSMDGVSTRDFIAESVFDLVSLCTTLSKICEELVLWSTYEFGVIEMADEYSSTSSIMPQKKNPDVAELARGKCAIVNGELVTILTILKAIAYTYNRDLQEITPHLWNSLKVTKDTLSIVTKMLLSVEFKTERCAELAGKNFATATDLADIMVREKQIPFRTAHKIVGRIVNEATTKNMVEEDITSKFIDDISAELGFDKLNLADDLIQRALNPVENVRIRSVPGGPAPEMVEIARENIKEFLNAEFEKHGI

SEQ ID NO: 10611 - protein, 62 aa, Methanobrevibacter gottschalkii
MMHKICPRCGSRKVKWIIPQNWSQWVCYDCDYTGPVIEGNDDLAEEIHENYLKSKNKKNKND

SEQ ID NO: 10612 - protein, 338 aa, Methanobrevibacter gottschalkii
MYTEEFILNEVNSIREDIGHDKVNIYIEEIYFNENTNELWIITEDRPDKSAIIGKGGWVVGKLREKLGLESIHVESYGDFLNKKYKLDLSKKTILNLNSDSVGLKNLEKVIDDKISSIYSFNFENYLSENEFKKSYKHEAVVALSGGVDSSFSLILAKKLGFNPIAVTVDPGTIILPKQFKRNIKKICDELDISHEYLRTDYSEVINESFTGKVHPCGRCSKNTEELVREYAKSKEIPIIIFGDMLATGSQCINSQYDSLYRLNLPASLSTSKQEIKSLIEKYNLSTFKGFGCPLLYEVHRKFPHMKKFSIQRILRETRSGALEPGEALDLIWSFYKI

SEQ ID NO: 10613 - protein, 682 aa, Methanobrevibacter gottschalkii
MGRGFKLKIDKFLLLILIFFILLSCVSLVSASNTVDTNLTHDASSDANIGINDIESYSSGVFSDDVKSTGNVIVNQRNYKMYFDDSNVLKKEYGGKIIAFSGKFTDKGVITIDSENTKITGRNTLFNNTVFNIKSNGVMLTNLNFVLNKEFSDNEGACVLINGDNVTVYNVDIDYNVPKNVTGFGIYSNGLDESLSDVKLVNNTVRLHGNALNDGYNYGVVLTNTRDAIVYGNIIDCQLPLRAVNWMAEIYGGISMDAVSGLAAGSCNGLRLSNNYIRCVVNGVAQGEPTLDAVLIYACHNSTIENNTIIENDYVTKKGDVNYLYGLDLYLSNDVVIYGNDIHIRTSGGKEAHGTAYPIQVTGQAENILIAFNNLSSYSNGPNIGIYSQNYYGVTHLDIISNFINVTGHASKHSWALVAGIEVQDSDDRIMNNTIIVDTVNKFEKGYNVYGISYSQRTDGDHNYNIQYNNVSTNSDHAVALKGSGSSTVSNSIVANNILKGRKYGGNRAAYITGGTGNVIINNTDGSRPVHKMTDDEYSDNLKFYLSSPFKGNGLGLGWLDGDGNSIIGNGDRNGNSLNNGNSGLVNNKVYGNNLNYSESQARNGVLNSTYYTYGSSGTDIASASSSSGSGAGSSNSESSDVKSYEVTKKINDNLIHIPIVIMAVIALILLIIGYKRKEHKE

SEQ ID NO: 10614 - protein, 1099 aa, Methanobrevibacter gottschalkii
MKLNKIIVLSLFLVLICFIGAASATEDVNDTAIADSEIDEVSAVDIEQSVDDNEITEIQSSDESNKVLARGTPTTAKDWNTLRTKCEKTTDQYITLTGTSYPIGTYITFKNSATIVGSDVSYITGGSTSNTPFVNNNSALTLHFINVKFLNVNAKNLLELDGTVYLDNCTFDNVQTATGHNSVIYNTNNLMYLTGCNITNCHTGYGAVSNYNSGSTTSPVMYVDDCRFINNSASVEPGAINNCGILYVNNSEFDGNHANWWAGAIHTHTNAQTEIENTNFRRNTAGWNGGALFTYSKLKIKNCTFEDNNCTTNNGGGAIGAYNYGSGYNITIDSSRFNYNTNLCYAYTNISTTSVGRGGAISVLNGGYLTVYNSNFTGNYAKIGQAIAAATYNYENGTGGNPHIKICNNKFTDHTATGIDTVVITGNDYIFNNNVFINSYQNTIYTGTGNTYNSAALPGNLNSKLNLKTKLRATNTEILSDYQDHDVVYVNVSSDKDAEDDNVHGQSWDDAYGGLECFVMAINYLHNNGIIYIADGRYNEDYGYEYSIAHGNFTMIGQGPKTNIEKIITTVYGGSDQNSTHNFINLSFTGKDFGINANFINCTFLGSISISKGLTYHDPNHVVEYGYAQTYFMNFNNCVFKDVNTTNALVTLYKYGAVNFTNCIFENITADSIVYRNDINYFEEDGISFKNCTFTNCKYNGIADSLANFDDAVVIEDCTYDSEVALGTTEVNGHYYINATKLKVTAVGTSISIKSNENNVIVNLTDVNGNPVANAGIIYSIAGTNASATTGADGTFTLSNLKGIVNITVYYSGNESYLASNKSDNFIFKYNTAVSSAVNGDDILIILKDDENNPIANANVIYTVNGIDYNATTDENGTVTVSNLKGKFAFNVLYKGDTLHTASNASNTFIFKYGTKITAKKVTATYNVAKNLVITLKDENGIAIAGKKVTVKVGSIRKTLTTNAKGQATLKVSNLLPKTYSATVTYAGDDTHIKSSVKVKVVVKKATLKVSAKAKKFKKSLKTKKYSIVLKNNVGKVLKKTKVTLKIKGKTFKAYTNSKGIATFKITKLTKKGKYNAYIKFAGSKYYNSLNKKVKITLK

SEQ ID NO: 10615 - protein, 119 aa, Methanobrevibacter gottschalkii
MRKIKSLINLRIVNCTNNELKSELKNILTDDKLDENKIYNKLKEENTLETLKNEFNEFISNSNSSEKQFLVKIKNKANKLNPEKHTNIENIQKEIIIKLLNKDNIINNLQKKKICTNIG

SEQ ID NO: 10616 - protein, 1864 aa, Methanobrevibacter gottschalkii
MKNSDDVLNIDVLNQNSTVNYPRSHKTIEITQDNYENYFNIRTGKIIDASCISKGDTLKIGNISNRAFVIDRQLILMPISSNDKISNGFIHLIKGSDGSTVTNLTINNTKDRLNILGGNVGQLHGIWLSNSNNNLISYNTIRIANAAGVYAMPMGWSSNNRIIYNNMKTYITCNMVMGQCHYNLISHNSLELLSYSDTSVTNLIYFNPFGHADYSGSGLCKYNMISFNDFKGFSNGPMSILLQSVYENHDGTVIANNTFSKGSYAIHLFGNNISVYGNVVLNSGIGISVFGRNFSVHNNAVIGDSQGYGIMAEANGGSLCNVYNNNITFIDVYNAIFIGNHVKAYNNYINIKEYGVSIFIKGNCSNIHDNRINNKHDAGISVLGNNNTINNNIINTKNIGITLPARSTNCRYYNNTFTNNKINSESYGIYIDGLVYNCIILDNIIETNSTMGIFKDITDELSNIEENNMVNGVILDSTYIIVNNTNYHKYFDKYGHLTFKFEKNKTKIIFLTFLTNKNLIFQEKINVISNKMNNLLINVTITFETNASGSLIRDFNFINHDKEAIILNGVNDVTVTRNNITNLFRNGSLSNSAVLIQDVCENLIISYNNIYVNSRTHCYTYAINAPSINPATHKMNNKLSKRVNILDNTIIMISSGITEAIYTDTLSESNFISNKINIISKNYGYGIAVSNMIGRLSDINVSNNEIVIHSEQMAYLIELLQVDNSTIENNKLYGKSNGVYAIGIYWSDNISVNNNAISVFGGNLSKILEISDVLGIGNSAIAILRNSSKIIISENIIYANLSKTIFDNTTDGIINASFNSFIIDNENYNCYFNEVGELYSNVVIKNSTLLIHNLTKNQLLIINDLVKISSYDLNSPSSISIIFKNNASNSIISNASFINSSIDLINVSNINIINNTFNSSNSCILNINGGEKNLFVNNELFINSTDISVINLNKTLLNIIKNNNIKFNTSNSKIITINNSNFTLISNNVIIGISDSLIFICSKGSSYDNIYKNILNANASSICGYLASNAKWSSISYNNILINKSTNQSAIYYCNNSSNNTINENYIISYSLNANDYAVSVISNESLSNLIIKNYLISSNGFKRANFAVYAPFDLVKDNSPFDIYVSCNGSDVVGDGSIDNPYATIKKAIENSLNLYVIHVFDGNYTESNIIIDKNLTLVAVNLGKVFIDVQINQLFDILEDNTLSISGFLIGNAHNVDGGSVFINNGKLFINNVVIFNSSSYFDNSHPIFDQNITYHEDNLIDKAHTVDCSNTGKGGAILNNGELIINSSIFFNNFGHRGGVIADYGKTIINSSIFYNNRGIHGGCIYSDSKNNLFVINSIFNNNTAVTSIDFCKIMLHSIGWSIGENYIYNYKSECDSPIGAGGVIYTKNTSVLIKNSSFIYNSARIGGVIATQCDIFTQLSNFISDVNLYIDNCYFNSNKANDTRFKDDPLYLKNYDYFNDYNGGVVYGTYNKLYINASNFYYNQVINNGGVLYAKANDGKIIDSIFNNNRAGSNGGALDISKNFLIMRSIISNNSARYGGAIEYDSYTYYGHIQDNFNIYNSTISNNKALNAGGAFNIGSGNVSVHDSNIVNNFAPSGTTINSHGIKYAIDMRYNYWGVLPNGHIGPDDSVWNVNHNLFKPWYKQWVEWKPKVIESNNSGFNSNSSNHNPYINPNSNSGGNNHNNPISTGSSSSTTTSIGGANGNNHGYGNGKYFGSGDGNNLGPSSGNGGFYLAIPGYNKYNGQNVNSNTSSNSHKSQNRGNVDSDSLSKSNSSKYNPDLVSAGFTVNAASSPSSSQRGIERASKESGSLSDSASYEITKKIKEVFYDENHITTFILFIIIILFLIILGYKYGVGKFDE

SEQ ID NO: 10617 - protein, 2193 aa, Methanobrevibacter gottschalkii
MSYTKFILILSIIFLLFASIAFVSAADTNTSIVEEPMDVKHNLCDINNSLENQEIYVSPLGDDDANGSFQNPVSSIHHAVAMAKNNSKVILMEGEYKGANNTFILINKNLTIESFSNNVVINGENKHAFFKITPSSSLILNNIKFINGYTDSYSQLGIINNLGTLVINNSSFNNMNSIMGTFFNEGTLKIENTKVTNAVSLTMAQILTNIGNTTILNSQLIENNEYSSIDVVVYNYNRISIVNSQVNNLFSNKKYSEDSYNLASILINNSKLDNIDLEDAFVCIHNSQITFKSIFNGCNVSVDESTFLYNKSLFSIINVMNSNFTAIHSVFNSPISTKRSHVNITYSAILRSISGNAYKCYLYAPYNWWGINSGPSYQYFTDVNVSYWAISTFEYESDYIPINPNSTFTTTLNKWSDGNSTFEFKTEEYLPFRHLKFESQNGKFLYSSANIEKVFSNYLIGNNLDCQVHVIIDFQRLTLRIGEGLTNYNYFVSTEGHDGLGNGTFEHPFKTINYAVSKVGNGNTICLLEGIYKGNWNSNVTITKNITIVGLGNVNLLRSNDYSIFNIKEWGSLSLKNINFSVDIIDYAHPLIILNGGNLSIINCSFSNITSTNVIHTSNGIEHNGIVNISDSYFADISGSILIGSAKVSVSNSLFEKIKCYRIIQGYEYYNVLFAISSSIEIYSSCFQNNLMGIVNLHPFFYSSSKLRYSQYSNAYSRYAYIKNTKFENNVFFDKNSYYSSNGIGLDIYNENEHFYGIIDNCSFINNKGQLAIATSVNSSIFMNNFESRYGYSMVYADLINNSVFINNKNLYEDYNNVFIGNGIASAGCILESIFMYNEAAFGGAIADTKEAHYCVFVNNTSKYGGNDIYSYSGDVDYSSNWWGDNQKPNSDKVFIFLGTLTLNNWVIMTFESVSNSIIKASLNALNNGEGNICKINHNMPSRMVYFKINHGSLSPENTLLINNSAYTNMTYNLNLDFKVYARIDNQLLELDIRNTKTLLIMEDVIFKGKSNNFAVDLININGYKIFNQTLVVEIIDENNTQNIFTIQTDDNGHAEFNVDYPVGIYQVNINYLGNGYFDKCNSTSIMKIIKSNTYLISYNQTYYGKNNLFKSVLFGEGNKKLSNMTIKFTIIDSKGNLREIYSLTNQDATSEIIINLDVGEYTIRSEFLGDLWYSYSSSISHILVNPVSSTLIVSNVTLYGVGDVYNITLKDIHGSLIRGENIIVTITQGASCDKFTLKTDNNGVAKLTINYLPGVYNVKAQFLGDSIYAPTSGEGVIKVEKIFTIISGFHHCILPLNGIYTVVLSDMYGRRVNNESVTLSLYKGNLIKKYTINTDANGEADFVINLEEGTYLTTFEYGGNKWYCDATNAATIVISKKVNLSNININSTDLVQYYGENKYFIIKFNDPNAYSQYGKKIGVTISSGSWSQSYEVFTDIFGLARLKINLNPGEYNITYKYSNSHYNIFGTSSNTIHVYKMPAVLIANNIVMKSNEQQLYEINLRDINNNPIKNMLVNIDIDGVKYNSTTNDEGIAKILLSLGVGKHIISYNFINPNYLSSNSSSVILVVDSDKIPSNLYSQDINAFDNQILNFTIRLSDMLNNSISSSEVILELFTFYGESIINITGITDSNGRISFDLNLDYGKYIANLHYNGNALYLASYSTNTINIESADNRTKTILFNVETKLTNSKYYVILSDINGTLLVNKEIKFIIGNKTITSITDEKGRAYLELNLNPNYYIIKAIFNGDKDYKSVSSLKKIFISGELTHLYAIPLVKYYRNGTQFHARLVNSKGVPLINKILSILLEGNYYNCTTDENGWITLNIDLKPGFYDVECYYYSNNTDENSFDKTNITVLSTVLGQSEVKYYGDYPYLTIKFLDGAGNLIKNTSFVIDIDGKKYSAQTNDEGIFNFNLNLNSGSHLISVNNPYDGLFVTYKLDILTTICSNNLVKVFNNGVSYTAQLLDSFGNPLKNKNVKIIINGVLYYKKTDVKGILELNMDFNPKIYLVTVFNPVTKEYIENTVKILPTLINNKNINMYFSNCAFYKVRAIGSDGKIVESGVIVKIKVNGKSYKIKTNKDGYALFKINLKPGKYIITAEYNSYIVSNKINVKSLLTAKNIFHKKAKKIKFSSKLVDIKGKALKGKKITFKFKGKVYKVKTNKNGIATLTIKNLKVGKYTIMSIWNKFRIKNTIKIKK

SEQ ID NO: 10618 - protein, 1911 aa, Methanobrevibacter gottschalkii
MSKILKINKIILVGIVLLTILSLNAVSAYDNSNNTEEYLSSENYEEILSADSFNDNNILASASYNKTIYVNYTGDDSGSGSQNSPYATLNKAISNVNDSDNAVVYLSAGRFSGENNTDLSINLAHRNYNSSLTIIGAGNGQTILDGNDESAIFTSISADSIVTLINITFTHGKSEIGSVMTTSGNLTIDNCIFDNNYATSSAAIYAENTEDIKITNSVFKNNYGHEGCADFYCEGSESTIIDIINSTFINSTTPYLYSLPSFLIQYSNANIIGNKFENITGVYHSGTFELKYGYGKRKVINNTFINCNYTGNNDGGIIYISNTYLKNNQFINCTSKKALIYSLTEFNAYLKFKNATINGTEFKLYCEVTDDLNNSVSTYGEVHFFINDEKIKSSRSNNGTASISVIKLLDNGDYTLSGTYYYYENPFEVNVKNATLHVDFNHDPLELWVSNDGNDTTGNGSENNPFKTLKHALNYGFENTIDLTIHMKDGVYTGSDNKDLSYSNVGKLTIFGESYRNTIIDAENTKKIFNFGEYLNVTLANLTLRNTSGNVISAYILKIYDSVIEHADSLNGEYSDTSKIIFNNLTYTNSGGIYIYNAEIYNSKFKNCNNTKNNCLLRIGSLGNNIIHIENTTIINNTVNGRHGSSIVSISGNSVLINNDYINNTVISENSKYIFQSYSNKLISVNETFIGNNVSSYIAYYDINGNNVEIIIENITFKNNYVKTDGSGLAIKTGRIKGAKFINNTALNNGGAIIILPHYTGSQVPKCILENVFFENNSANNGKDIFIEKANIGYENGQLDNITVTFNSLITHNLQDIVIANISHVSGAVIGGGMIEFDLNGSYMGVAEVINGVAKLNYLGFTKNGNYTLSGSYNYESNTTIYNSAVVNVILNPLKENITSYVSDSRGDDENGNGSYENPYKTIENALNEGYKQSKVIFIKVLEGNYTGKFNNNITIYDSLNITIIGEGIDKTIITGNNTKNNWFITVLHAGNGFLKLINMTISEINYNYKNMNSQKSAVVIEKGANVFIDSVKFTKNRGYNGGAINNQGTLNIINSIFYNNGDSSYGGSIYNKGITIIDNSSFIANHAKYCSDMFNEGILNIYNSNIQDSMRTNGWTGNTLVIGGLGNISIINSKIFRTGKMPLELIDPDDTYADNPAFTISIGTIGSITLINTTIDGHDAKYTGPNFYITNNAAISWSVSTNIKIHNSSFLNLNNILNNQMGNLIIKSSFIKNVSNLIMSTSNYNLTVINSYFADGTISTEKYDISNIYLNNNWWGSNSKPTYKVDNVDTTPETWLILTLNQSNKESLLKDIILSFKVTDGENITDYTGYLYPRPFTMSAINATLEYANGNIINHLINQINMAKNATSYYIEAKIDNQTVNLTSNITHNVTIIANDIEFDYGTKTITVNVLFDNLSADDEIITLKVNNKEYSTKINNGIAIFNIDTLVRGTYTLNYSINATELHDNVINSSTLIVNGIDPNINASSKAVLVGNNVTVTITIPSDLTGTINVILNNKTYVAEIHDNKAIAIIPNLAQGNYLANVIYSGDEKYLAKNTTLNIKVLEINISAPNVEKYYKGSEKLRVIVIDSEGNAIVGQSVQIKLNNVNYTEITNQEGIVSVNLDLNVGKYSATILVNDKKINTEITIKSTIQGFNMIRGYNSGLDYQATLLNDDGTPLDNTLVKLKIGNSIYEVRSNANGVVKLNKKLAIGTYTVLITNPSNFETQTATLKIVSRINNNKNIIGDYLSGFSYKVRIIGDNGKSVGAREIVKFKINKKTYNIKTDKNGYASLKITLTPKTYQITATYKGQSVKNKITVKQILKTAKKINIRKSAKKLTLKATLKKSNKKPLKNKKITFKFKGKTYTTKTNNKGIAKIIIKKNVIKKLKAGKKYTVKVTYVKDIITGSVKVKR

SEQ ID NO: 10619 - protein, 383 aa, Methanobrevibacter gottschalkii
MKYRKLGNTGVEVSEIAFGAEFLVERPYRDTEVLIKACEEHGINFVDCWMSEPDVRSHLGKAIKPNREKWVIQGHIGATWQNNQYVRTREMDKVIPAFEDFMERFQIDTLDFGMIHYVDQIDDYNEIINGQFIEYVRKLKEEGTIAHIGLSTHNPDIGLLAAQNPEIELLMFSINPAFDMFGPMEDIEEYRKEDAYGDEKLSSINPQRAELYESCEKSGTALTVMKGFAGGNLLSAETSPFGVVLTPVQCIHYALEQKGVSSIFVGVKTVDELLESLKYCEATENEKDYAEILRTAPKHSFEGQCTYCGHCTPCTSEIDISMVIKLFDLAKNHDEVPASIREHYNNLKYDATDCSACGDCEERCPFDVAIVDVMENIQCLFSQ

SEQ ID NO: 10620 - protein, 483 aa, Methanobrevibacter gottschalkii
MYEKEEIISDYIKEELSDVPNILDNELTLDGRSFEHRKEFEFIKHHIDEFLEKTTNNRYFALPGLRGVGKTTLLYQTYEYLFKSKNINPNQILFISCENLNDIVDFKIIDVVKQFLETYHNTTLRRLDKKIFLLIDESQHDKKWALSGKRIYDKTKNIFMIFTGSSALNLEYDADSARRLLKENITPLNYNQHLKLKYNYNAANVSASLKKLIFEGDITDAVSCEQQINQDLININGYSTTDWNEFLKYGGFPTSLFENNPHIICKNITGMINKVISHDMGTISSITSTSQTHANRLLRFLALQKPGDISQEKMGTYLGTSKGNVRNILDILEKTQLIFHCEPHIASPKRSIKSWEYFFATSSIKHILTSSIGNLNSNKNAYLGVLLENLVASTLFYLSNEEGNYFTLYYDPEDRVNVDFVIQGEFQKAIPIEVSMGKKKKRQIATAIERYNADYGIIISNTTKTIAKKDNIIYLPPKTFSFL

SEQ ID NO: 10621 - protein, 281 aa, Methanobrevibacter gottschalkii
MQFLILNNGIKMPILGFGTYQIPPEETKQAVLDAIDVGYRLIDTAQFYKNEKEVGEAIKECGVDREELFITTKVWINNYGYENCLDSIKESLEKLGLDYIDLVLIHQPFSDYYGAYSALEDLYEAGIIKAIGVSNFYPDRLTDICLFNRRIIPQINQVEVNPFNGQYAAQANMEKNGVQMQAWAPFGQGRHGMFENETLKKIGEKNGGRTPAQVILRWLVERSIVVLAKSTHKERMAENIDIFDFALDEEDMMEIMNLDNGETLFFNHQNPEVVERFEDIS

SEQ ID NO: 10622 - protein, 428 aa, Methanobrevibacter gottschalkii
MAYEIKNKKNISTIGVHAGQEEVDETGSRVTPIYQTTSYVFDSPEQAANRFALKEGGNIYSRLTNPTTEAFERRMAAVEGGTSAYATATGMSAIFYAIINITSVGDNIVSADNLYGGTYELFENTLEDLGRSVTFVDSQSPELFEEAIDDKTKAIYVESIGNPKLDIPDFDRLAEIAHSHGIPLIADNTVGIGSVRPFDHGTDIIASSATKYIGGHGTTLGGIIIEKGDFDWMSGKFPSLSEPDATYNGLVFGEAFKDSAFTTRIRTVVGRDTGAVPSPFGSFLLLQGLETLGLRIERHASNAMAVAEHLEAHPKVAWVTYSGLESSPNHKIAKKYAEKGYGGIVSFGLKAGYDGALKFIENVELISFLANIGDAKSLVTHPASTTHSQLSEEQQLSTGVTPDLIRFSVGIEDLEDILADVDQALDKI

SEQ ID NO: 10623 - protein, 1703 aa, Methanobrevibacter gottschalkii
MKFFRKKPRIFLILLIVMICFCLFSQLAFAENINESEVVGNAEIENNLSSTNDNFEVSKDIGYNVSKKISTDNSNENLRNSQHMTLFIISDNPGTNILDKAILELSNENKINGVNLIIRNGNQVKSMNENELSYLLSDCDAFIGEWISSDVDSVLTSVLVKNPDLSNKKLFLVLEPPSGNLNSGSSSLNLIRNNTLNYNKIFTNYSNEELINYFKNTKRGNSYSNINNYLTNGNGKNFDSIFNRLVLYKDLNDKNNLKNQILFILNYLGVDVSYEQPTFTGVKNYGIYRDRWYSLDEYISTFFKATNNRTVGILESKMYIESQQLNTCYSIINSLESRNYNVIPVFADGGSAEQLKVMVESWTSAGDDISGFLSNSSNFDVYIDAIVSMVAYGVGGENFTKATSFFEEAGVQVFRAVHSDHVSNEQWELGSTGLTTEKSDKWWHITIAEAQGIIDATFIGGNSSYISNLTGAQITTYIPHEGNIGLLADRIDSWVDLKYTLNEDKLISIIYYNYPPGKQNIGSSYLDTIKSIYNILYTLKAAGYTVGSLPVDVSELEYLMLTCGINVATWAPGELEKIANRSCITLLPVSEYNSWFNSLDEIVRIQVSNGTVAYIGELTKRAVELDYTKTIGSTIDDWYNQVVSLLPDEKSVEAKEVLSNIVRALKDYANTHSQDYYRLYLKYFDEFKELNIQGLNGWGETPGNVMVVNKNGTDYFVIPGLTFGNIFVAPEPQRGWESDIKNLYHCTAVAPTHQYLAAYYYMQTRNPNAMIFTGRHATHEWLPGKEILLSATDYGSVVVGDVPQLYFYISDGLGEAIQAKRRGFAVIISHLTSPMSYTHLYGNLTFLANLINDYQKAGSSSEKNKIGEKIQDLIISNDYSTNLGLNKSQIKSISIDSLIEKINIFLKSTQDTLHPLGLHALGEYWSEEDIASTVSAMLSHDFVLENNQGTLNLFTELSNYYYSKSYGDLTPFEREFVLNKSYDICKALIYWDVNSVSNVLINGNVKFNNSNFYACLNLAKSYINLINQSISNELNAMLDGLNGRYIPTGEGGEIVVKPSILPTGTNIFQDQSSELPTQDAWNYAKILALLTLADLNDTTEKIIMGIWCVETARDDGALVSTVLYLLGMKPVWTNSSSAGFDDEGNPTGKKVGAMPEVIKLNDLTRPEGWNKKRIDVTIITSGLFRDLYSSQSVLMDNAFRVALARSYLTLINNKTLMNGKYGKELRQALDCVMEGINYYRASNEALKDNYVAQHWIKDCLYYLSIGYNASYAGECAITRIFAPPNGDYGAGISKLVSMSWTWNNTDELAQFYLGRMGNMYSKNYWGDTNPLVFLKALSNSDTIITSRNTNQYGVMDNDDFFDYWGGLSMAVEHVSGKSPKMNVLMYADKDNAYISSLEEVMYREIASRYDNPEWIKGMMKEGYSGARYMSNKFVSNLLGWQVTRPDSVSDDLWNRVYNTYYKDKYNLGVKDWLMSGNNAYSLISMSGTMLSSIHKGYWNADDATIRDIANTWAQATVKNGVACCDCSCGNVAMMQWAVQYVNPDILAQLLPKLYDATENPVFLNNTHNPNTKPENNNDPQVEPSTPNPTDGSSSSSTISNNATSTNSNQHSLSNSQNSQGNAVSDVGDSSSSDSGTFSSEGADVKKAIEINPITQQSASEVGMSLLAVLGVICLILIVGVGYFRDNGKEKKGSNLDELFNEKL

SEQ ID NO: 10624 - protein, 235 aa, Methanobrevibacter gottschalkii
MDVINILWQLGILSAVLIFGIKLGLATGLANMSKKYLALVSIGYGGGVLILTEISSFFTEQITGLIYSYNFEFFLIMAIIMILAGIFTIREYKVFEKNTAAATCMAVVAPCPCCFGSIIVSIMLVAPAVGLGLLNLSVYVAAALVLTIVLTYFASNYLIKFINKPYPIVLGNFMLFLGIYFLLSALFLPNITSMIQNPMDAIEIASPEYLVAVLVLMIIMMFLGGFYFKNNSYLD

SEQ ID NO: 10625 - protein, 214 aa, Methanobrevibacter gottschalkii
MVTTIPGSEILTSGLNMISQSLQVPVIIFLVIFAFFAVVTLGSLIAEYTSRKKVSPDLLEKLIYSISRADSVEELMSIIKNAGIYENQKVILVKILRADSLPNKTRETLARKLIEFEETELGKTIEKTDIITRIGPTLGLMGTLIPMGPGLAALGAGDVNTLANAIIVAFDTTVVGIGAGAVGYFVSKIRRRWYEEDLSNSDALADALLDKLNR

SEQ ID NO: 10626 - protein, 111 aa, Methanobrevibacter gottschalkii
MARRKCKKRFSDNEEDPMTGTSNLVDAMLVIAVGFLIFVVISWNMQSIVFSDTSHDQSQSVQDSHMNVTEVSEGQELNDTLDSVESSGQGYMEMGKVYKDPSTGKLIMVEG

SEQ ID NO: 10627 - protein, 846 aa, Methanobrevibacter gottschalkii
MIVLSISSVSADDLQTKYAGEVSGDVNVVTVNPWTTSGSLTYDIPSEAKDIRSADVYVNVYGGSAKNTYGANANVSLKTANGENQIANESLWIEEGSSDGTIYAVNDHINKCYSDYQMHYDITNSIKGLNGSSITIKVDTFKMENKSFDGKIKLIALILAYDDGDSDVINYWVDATQKWTKTNVTTIFNTEKLSNINGANLINVALSSGDGSFKVNGEIIGDPIVHDSGNYYQYNSWDISDKMKKGQNTELLSMNVGSGSYASLKNVLSVLKVNPIKANVSLATEYADTCYAGTNNTISINVISDKKEKYSIELLADGNVVNSTEIELDGENQTILFLTDPTVREVDDSTVNGADNVKVNYMVNVRFNDVVVSSANKTVPVLYNGNLGKDLSYPSSGFASFENISFTGDIVIDIKNESSYKSGSTGTIEIFNVNLGKDSTIVKGFIYVPYNWFNGKKYVENETMFNVTFNNQTICPAGFHRDQSNLGNYGKYGYGVVVYDVTNSIKNGNNTFVLNKINPTPTIYPSTLIYMYNTTGSEVIKNIYIINGADLLSNTSNNAGRVVQANSNININSKDILDAKLYVFASGAQTNEGNIIINNNVFENVWNGTSKTTDLFATDITDIVKDSNDIRFVATGSTILALQQFIVTTKDAPIKTSVKPTKLSTTYDSGKYFNIKVLDNHKKSVKGLKLKLKVFTGKRYANYYVTTGSNGVASFKKASKLSIGTHKVEITTNNKNYVVKKTISYIKVYKAKTIVKAPKITVKFKKSKYFKVNVKNKATKKAVKNIAVKLKVFTGKKYKIYKIKTNKYGTAYLKTKYLKVGSHKVIVYSGNSKYSIGAKSSIKVRW

SEQ ID NO: 10628 - protein, 246 aa, Methanobrevibacter gottschalkii
MAKNAIITGGSRGIGKAMALKLGELGYNVAINYRSDSSKQLTEDLIEEIKSEYGVDAIAVQADVSKFEDCKKLVEAAVDAFGDEIDALVNNAGITNNSNFIDLEPEKYGAVINTNLVSMMHMCHLCLPYMVDRDTAIVCTASVGGLTGVINQADYCAAKTGVIGLCRALALEFAPRKVRVNSIAPGMIMTDMLRGVNQDELNALAATIPLGHIGEVEEIAGALEYILTAGYLTGQVISPNGGFVLQ

SEQ ID NO: 10629 - protein, 601 aa, Methanobrevibacter gottschalkii
MSPRPIKRRPPEKAVDNKKAIMNILSILKCHKFKLALTIVCAVISTAFTIIAPLIIGKATTTIFNGINSISKHTGTMDFNTLFNLLTIVVILYIISSLFSYLQSFFLVEVSTKISYELRERLMDKILSLPMESVDENKRGDILSRITNDVDSLQHGITQSFLQLTTAVITLIGVFVMMLTINIWMTLATVILIPIAFLVIRSITKFSQSYFLKQLVFKGSLNGQIEETFTGHDIIRIFNQEEISMNKFESDNENWFDQEWKSQFYSSLNGPLMNFISNFTYVIIAVLGAIFVLQKAIAVGDILAFFQYTQSFTRPIQQITRVMNQIQTAMAASERIFEFLDYDDEENPSDKQLTEIKEGIAFENVSFSYTPNEKIIKNMTFDIKKGQKIAIVGETGAGKTTIVKLLMRFYEIDSGSIKIDGVDIEEYDKHSLRSHIGMVLQDSWLFSDTIESNIRYGNLDVSDHEIIKASKQVYVDNFVRKLSDGYKTILNEDSDNISHGQKQLITIARTILSSKEVLILDEATSSVDTRTEKLIQKAMDKLMENKTSFIIAHRLSTIKNADKIIVIENGRIIEKGSHEELLRLKGYYYNTLNTQSEDSPI

SEQ ID NO: 10630 - protein, 568 aa, Methanobrevibacter gottschalkii
MKKLIAPLKNKIGQIFAIFLFLVVQVYCDLTLPQYTSDIVDIGIQNANFQFIIDTGMMMLLMVAISALATVGVSYFSSRVSSGYAKDLRKIVYSKVLKFSNHELNKISRSSLITRSTNDINQLQSVLAMIFTTILFAPLLGVGSIIKAFELGTNLSWIIFVTFIGVVILLVIVIVRVLPYFKVIQEIMDKINRTSREILIGIPVIKAFVRQDYEEEKFRKINEEFYDVNIYVFRNMLIMLPLMTLLMNLMIVLILYFGAYDAMRGSILTGDIIAFIQYSTQVVTSFLMIGAFFIILPRLLVSGRRVNEVLTTDLTITDGELTDISENPTIEFKNVSYKYPNSEKETIKDISFSLKPSKTTAIIGGTGSGKSTILNLIPRLQDPSSGEILIDGKNIKLFKLKGLRDKISFTPQKAILFQGDIKSNMLTGKNDATDEEIENALKMAQVDFVSNLKEEVSQGGSNYSGGQKQRLSIARAIIGKHDFYLFDDCFSALDMNTERLIKNNLKNLKDSSILIVSQRISTIIDADEILVIDNGEIIDRGTHSELVGSCEIYTEIVNTQIDSMEALS

SEQ ID NO: 10631 - protein, 214 aa, Methanobrevibacter gottschalkii
MKKLAIFDFDGTIFNSITDVIICFNKALSTNDFPTLTYDEYVEILGGNIDELVSSCLKDNNTPQNMELVKNTYNTIYGKSNKENSLPFDGMHDVLLKLQEKGILLTINSNRNNDSIRTFVDKYYSDIDFQAIEGHNPVYPSKPSPFGINKILNQLNVSKKEALYIGDSSTDIKTTQNAEVDCIIVKWGYGNQNDYGNEYVLNVIEKPYDILNYF

SEQ ID NO: 10632 - protein, 116 aa, Methanobrevibacter gottschalkii
MLFVQYPKCSTCRKAKNWLDEHNIEYESKHIVEDNPTASELREWWKISDLPLKRFFNTSGMKYRELKLKDKLPEMSEEEQLNLLATDGMLVKRPIVVTDNFVLVGFKVKEWEEKLL

SEQ ID NO: 10633 - protein, 123 aa, Methanobrevibacter gottschalkii
MNANAQLMNFPIDNVIQLIRKKWVVQIINDLFFGKTRFHEFKENKPKLSNRVLSSCLKDMEDNGLIQRIVDKYDKKNVRYYLTEKGQSLNKIIYEMAIFSVDSENYTDKTKTELKTVFKEKLL

SEQ ID NO: 10634 - protein, 425 aa, Methanobrevibacter gottschalkii
MLDIKLFRENPEIIIDSEKKRFRDTINVEKVIEYDNLWREGERKLNSLRSEKNKLSKSFKKAKEEGNFEEVIAKSKQVASDIKELSAKNVEYLKLRDDYRYKVGNLLDEDVPISDTEDDNVVVRTYGEIPEHDFELLNHVDLIKKIDGADLETAADIAGARFYYLKRDILHLNLALIQFALSELEAEGYIPMQTPFFVKGEVAAETSELGEFEETLYKVENEDMYLIATAEQTLAALHRNEIISPEDLPLRYCALSTCFRKEAGSHGKDTLGIFRVHQFEKIEQFIYSTPEDSRNQHDHLMEVTEGIYQKLGIPYQVIAIVSSALNDNAAIKYDLEAWFPGSKAFRELVSCTNCKDYQARKTKTRYGRAGSGDAQVLHTLNSTAIATERTMCCILENYQQADGSVKIPEVLVPYMNGKTVIEAKY

SEQ ID NO: 10635 - protein, 210 aa, Methanobrevibacter gottschalkii
MKTIIVNASPRKKWNTAEIMQSAQKGAESVGAETEYFNLYDLVFTGCRSCLACKLKEKTKGKCYWRDDLTEVIEKILDADALLIGSPIYFGQPTSEFRALVERLIFCIMSYDDGSSYFTGNVNVGIFYTMNAPLDFYEQAMKESLSSTEFLFSFLNGEIVAYPVCDTIQVSDYSKFNMAGFSQEAKEKQWILQFPKDLEKAFEIGANLSK

SEQ ID NO: 10636 - protein, 291 aa, Methanobrevibacter gottschalkii
MYTFYKNEYIYISCHYNIVLYTKIYFVIQDGCDIVTNQKRTRKFAFGNERFGGSYTPGEFEFNFPEDMTREEFEKIFTSRMQALHKKGNDLAEEMFDHKSRKENLKPLSIRVKQHTKEFFKSQSILSPRDVLEMYEEYNNGSEAFINSLIEDQKELENELTEIQEKLHNAKLFRDKLSEMKPPSEISTDEDNIIKLQNKYQNSEIKSIGNETSVGKAESDIIRDIQMYNTLDVHIRNNQYLIITVYTNAQPILYYFKNEYCEEDILNVISRIEEYCESNGIDFSRSENEEI

SEQ ID NO: 10637 - protein, 744 aa, Methanobrevibacter gottschalkii
MRKLSNSTKVLLLILVTFLSLTVVSAHDANATELISDNSNGTCIVSSAAVAEDNQILGEVDKPDLVVNITSDNIDDYFIRGRLKSIYAYATLCISEDIDDLGILTIKSNNVTINGNNHTLKNTVFSIEANGVTLNNIILNITEKFEDNENSAILIWRANNVNIYNTNINYIPPQDTTAYGIYSEGTKRSLNSNLKIINNTINFEGNNPSEGRDYAVCLEYSPNCIFENNTVNARLPLRTIAFDLTTAYLYSEFALAMGISNCNNSTFKGNIINCDVNERPECSFPTLDAIFICDSKDCEFIGNQLTLTDFKSYKNQPNYLYGLDIYRADNLLVEGNNIHVETSGGTFAAGTAYPIQLTGPASGIIIKYNEIFSKCNGPNIGIYSQNFNGENYITILNNHINVTGLAGNHSWALVAGIEAQDDNDIIMNNIIEIHNIRKTTKEDNLYGISYSQETKGTHSYKVVNNTVISDGYYLSHMLDADNTTVTNNTLVRTYKYADTNYDPFKRGDAIGKDTDEIKNNDFSGNRVITIFEYEIEQQGDEIDEGDEFNYEPPTNTGNHSNIINGSGISPLKPGFPGGNPLIPGSNSGGTINTGGNGNVGGFTNPDVADGDKGYIGLPDLSGDDGKSLSRKFNQRANVKTVNSFNNQGDASNSYNNLVSTENSTSSESPSVNGVTASGTISKSASSAGAAGSSGAAQESLKAYEITKNIVENGPYDMIRFIGLAIICELLLIVGYKRKETKNLD

SEQ ID NO: 10638 - protein, 1855 aa, Methanobrevibacter gottschalkii
MEAIIKMKIKKYMLIIFILLTLVNITCIAAMDNDTFTTNVSQNISNINTDEQINILTQKTENINEIHQTTENDQLSFSMHPPDDNYYNNKKGEIYHTQLILTIENFTTFSTANTTMNVHLDWDLYMSKDYYDTCQIRIYENNTKIHAFNVSDQNNAEYEHNAHQTLDVTFPYTIKDRTELKAVILQIESNTLSFEEIKKINLTNLNNNNIIVNNTYFSNENWTNQIKYLKKAINDAPTNSIIYLNNMEILNDEDITITIDKNITIIANNTIINGLDHGTIFTINSQATLTLINLTFTNISTNYIMQNNGNLKIVNNNFNNNIGRLISNNGNLTIEDSIIENTTKYYALFLNNIKTTSENGLIYNKKTLNIKNTTFNNINLNPLTNNNKKLDWNAIIVNYGKAIVTDSKFTNINYRTIYNNAILEIKNTIMENITSTDIFSHTIQYTRQLNNTGKYFSYIRATSSLEGGAIYNIKHSTITNTTFQKITGKSGAIYNKKTLNITNTTFQSINNGAIYNNEDLTISNSTFQTISGEAIYTKNANITNSRFQTISGKALYNIGTLNINNILINKSTGIHNDGILTINNTIINKCGGIYNNNQLNVNNTLFNRCSGVGAAVYNNNIANIENCEIIENHGDADTKWRYVEQPNGQVFSYIVEVYSGVIYNYKNAKINITKSIIKNNDISEESNGNWDTYYGIIKNDGEMKITGCILDGNKPREWIAFWGGDGSINIYNTGKLTYKYNYLLNTQYYTGNIHKPSSFLFNTGNGACDVNYNFYCLKPSSIFANANYNYYFVPYFGEYIPIKLNETRNITLSLGLTNGADYMTFNDWDKLLTPGLNATITTIDENGEYKNITTLLKDKYTFNFNYTHVKGEYIIYSNILNFKSSALVDVGKEFAEMEVNYNNITYKEGNITFHIKIKGNLTTQPTGNITLRYNNEKIILNLTDSECSFTIPEILKPDNYTMRIDYDGDDEYFKILNQYFIFAVYKIPTNITVVAPEVKYGQTGLITITITPGEAKLKGKLYINGIYTKNADTQGHRILRINRNPGVYNISVVFESDEYYMGGVANTTFIVSKWKTNLTLTGKDINAGEDAIVNITIDPGDVRGDAILIINGVNQTIFINNTVTPITISNLQNGTYHVSVYYPGDKKYAPSNASTTFTVSMKTTKLTVNITNNDDLTGNIHVNTDYNDCTGEVGVYINNDNVLIMNLTNGSCNFPVKFKRGNNYIYIHYIGDKYYSYASWNTTRFIEGKAIINTNYNHTIDEQELGYYIIKIFDSDNNPYEYTNFTALFQNKEIHLTTDENGVAKLPIQCRAGTYNITVKYKNTVKKSTVVVNATRMDIDIKDILAGENETITIRLPYNATGNITFKVDNTVISKRLSNGLAIVNISALTLGEHKLTVFYSGDNNYTDQKIEKIFSIKHSLSQIIASSSGVTYGEDVIVTSKVTSGASGSVTFVLNHETITVNLTDSQANAAFTNVPAGNYVITTRYNGDKTYKGSVCDVKINVKKAVPNIMVNTSPLLLNENIRIDALLNNDAMGNVTFHIQGQYSPRNRTVNNGVSSWLISPLSKGSYNLIVTYCGDRNYESITTSKILVLNQNETVLNVNIGDVNADDDLMVYATLNSDNKYKITGNITLEINDKYYKVVVSDGVGLRNLGEFKAGRYTYTATYTGSDLFSMSTIKGSFNVRCNSYKITGNKNIVQYYGTYKSYKVRLLNNNVPVKKAIITVKINKKNIKVKTDNKGYATLKLKLKAGKYSITASYKKVTVKNKVTVKPILITKNMVVKKGKTVTYTAKLLNKYGKKVKNKKVIFKVKGKKYIVKTNKKGIAKIKIKKLKVGKYKIQSIYGKVKNTNTIKIK

SEQ ID NO: 10639 - protein, 862 aa, Methanobrevibacter gottschalkii
MKYKNILFFSIFILFIVGISCVSAQNIDEIGNSSSDDTISLDDDISTINIVDNEISTNVDGEVICDGKSTRDTYSWADFKSEVENANINTIELNKGNIAPSSDSSNQISINHDINIIGGYGYYIGGDSWSSSTKYNYIPIITSGSNLNVKFENVTFQYLSDNVFMKLMGNGNYTFKNCVFSNINATGSHQSVIWLNYGHALIENCSFIKCNCSFGAVTNYYSSWGTAVNNARMTVRDSTFKDNYATTEPGAINNCGQLVVYDSTFENNEAVWWAGAIHTHSNANTTIIRSKFKNNYAGWNGGALYTYSYLTVINSTFTANTAKTNTGGGAIGASSYMSTPKVVIKNSEFKYNTALTGNGGAIVISSGTLNVESSEFTNNTALELNGGAISSSSCTAAISNCKFINNTLNKTAGKGGAVYGTGKGRLTVDKCEFINNAAKDNNSGHALAYYYTGNSNTAAYLTYTNNIFRGKDNGTGSVFVANDKVNIVQYNNSIDDITNYIEPENNTNGTSSGNITIPIGTDILSSSWDVILGDNLNGTSVIAGNYILIPASHDLYCYNYITQDLVWNFTTEFGYFHELLVDGNIVYAPASWDALYIFNLTNGESLTYSNIYQGSSLYKPVIYNNTLYVSSEYGYGINSNNWISMIKHDSDYYYYGSILELNNVSYGTPAILSQPYIHGNTLYVNTIQGLIAYNLVDGTSHNVSGTVGNPIIDANGNICILSNNGAAISLLNSNLEVVASTTLDGTCNKLISDANGNIYTVDNNGYIYYATYTSSSITCSKTKFNINPVSSAMACYDGKLYIGDNNGILWAFNTSKLDEPVLNNAVYRVFDAGSAIVGNIAVDNDGTIYIGTDNGHFYAIEY

SEQ ID NO: 10640 - protein, 1525 aa, Methanobrevibacter gottschalkii
MRLNKSVLFVFMIIFLLSLNFIVAKDINETNLNADSFEIDYDDSISSSYDTNLQKLNQNDIEKTDESLEKSDNSSNRLLNEDNNNGLLGDGDGLKHLYVAPNATGSGLDENDPGDFITILNNTEDNTVIHMLEGTYLLSNITPIYQDGYYHFISIKSKNNISIVGENPDKVKIISNLTPKKRTSFIFSLHNTNNFKFENITFSAIKKDPKKEKTKSYFLLNKNNYIFENCKFIDAYSKFAIIELDEGTHLTINNCYFTSTDGHVGREISPRLFCSVLLNNTIFKNCCRYSDYKIGVMGNYSIFNSQFLEYDDNPLLYFQPYCNLIFENNYVDHPYNFVFFQPSDHYEGSNRMFCSHTTLTFLNGEDSVNVNCGDVINLNASLVDDLGNILSLYKLKFNLFENDLTYTNGVYQKEVTVPDVPGEYYIDVSDEMFTKYLGNCTVKAPIFIVKEAPEFLFDDKNSSTYGEDVIINVDSLDIPDGKLTFRFNNSEIIKNITDYRCSINLGVLPAGEYAITAYYAGDEVYGAKSYTKTFNVTKAKSTISLTKGHVDAIKDNGDVGFYFSTTENGNENTIGIILPDNATGKLTFKLDTDTYSIDITKRKVLLGNLDYGSYIIAVKYDGDNNFNESEECTFTLVNSKPSVDLTLNYSNINYTNPFNVNVTLNQDVVKDTIIFEVRDLEDNLINSTTGIISNKSANATFTGLNAGEYNIIAIYEGDETYCNSIASQRFNVNKIDLEYFTLKADKTISIHDNIKVEALIPVNVGGSITFRINGQDMTVEIFNNRAEAIFDNPGLGNYTVYATFNGDDNYNPHEENINITVIKADANLSVSAENVDWGEELVVVVKTDTRFTGNLSVKIDGVEKIVEITEGQGNVSFSNLKAGKYNVAVEFNESEFFTSSQKDINVTVNKIDSALTLDNDEMVFDYGGSASVTFGYDGAVNVTAEVVNHPEAVIKINEDCIVVSDLDAGQYTLKVTTVPDENHTGVDKEFEVTVNKIDSALTLDNDEMVFDYGGSASVTFDYDGAVNVTAEVVNHPEAVIKINEDCIVVSDLDAGQYTLKVTTVPDENHNSVDKTISITVNKVNANINIEDIVLDYGSHDITVFTGEGIESVNANILNQSYANVIVSGNNISIYNLNVGEYVLQLIVNPDENHNSVSKNVKVTVNKIDSVIDIRNEVVFTYGDAGYCDVYSEGAVDFTVKVINHPEAVININKNGIVKVSALNAGTYIMEVTTNPDTNHNSVTGRVNVTVNKADSKIIIPDIIFDYGNSGSVNILVYNATGIGNVNVVGHPEAITTINGTKISVGGLNAGSYILTATALTGDNYNPVNVSANVIVNKLTTIIGVKKVNGVYGSSGKLIVTLKDSNGNLLTGKLLRVKVGSISKTLTTNRHGQVSVNVAYLIPKSYNAKISFAGDNDLVESSNTAKVVIKKATPKLTAKTLKTKVKTKNKKLKITLKNKKGKALKNTKVTLKLKGKTYKAKTNKKGIATFKITKLNKRGTFKGTVKFAGNKYFKAINKKVKVIVKK

SEQ ID NO: 10641 - protein, 161 aa, Methanobrevibacter gottschalkii
MERENLSGIFSIVLGLIFILFPMFSSNLISIIVGLSLLFFGLSAAFMGFTMRRNGIPYSLISIIIGIVAVILGFGFIFYLDALSFLVGFQLYIVGFIMIVFGITGLISKLNRISSFTSILVLLMGIVSIALAIFALNQPIYIAIIIGIVLIIEGVSFLLND

SEQ ID NO: 10642 - protein, 172 aa, Methanobrevibacter gottschalkii
MSDFEEIINTRRSVRQYQDKDIAEELILKILKAGMQAPGSRLGAEPWEFVVIKNREILSKLGEIKPRVTNAPVAIVLVANIGRAFYKTVWQQDMGAAAENMLLEAVNLGLGGLWNGVAPDEEKMAKIGNIIGIDDIADLKPFCIITLGYPAEGFENKFMDKFDESRIHYEKY

SEQ ID NO: 10643 - protein, 391 aa, Methanobrevibacter gottschalkii
MKNTDYDFESVIDRHNTNCVKWDYFDDELPMWVADMDFKVAPAIENAVLKRAMHPIYGYTIVSDELFESYINWWDRRYGFKMYREDMLYSIGVMPSISSMIRCLTDIGDGILIQSPVYHVFYHVIEENNRKVVENELVYENGRYNIDFDDLDKKLSKVKMMIVCNPHNPIGKIWSREELAKIGYLCSKYDVILVSDEIHCDLTDPDIRYNPFEISSGYEKAVTCLSPSKSFNIAGFKSSIVHTKNTELFEKIRTQLHIDNSDSCNVFAASAVIAAYNESEEWLNQLKEVLFENKQIVKEYLEKELPVIKLVDCDATYLLWLDCSALNAPSKVLSEFLRTNHGLFLSAGIDFGQNGDNFLRMNIACPQILLKDGLERLKAGITALSYINNGL

SEQ ID NO: 10644 - protein, 266 aa, Methanobrevibacter gottschalkii
MIEKSIYENYQIDFNEEMTPADDDYIFIFNHDRELYLNKDKQLANSLDDFDVNFCLYIGKYNNKKAFVANVNTSDSFYQLMEVYEFNKSLYLMGGKAVLVNDWYISHQYCGRCGTKTQIDEKDMMLKCPECGQNHYPRIAPAIIVAIRKGEELLMANHSYHETIRYALIAGFVEPGESIEEAVKREVSEEVGIEIKNLEYKRSQSWPFPNSLMVGFTAEYENGDIKVDGDEILKAKWFKKDEIIRYDSDISISDWLIQDFIDSANP

SEQ ID NO: 10645 - protein, 168 aa, Methanobrevibacter gottschalkii
MVSKNMEKALNAQLNAEIYSGYLYLSMAAYFEDEDLAGFANWMRVQANEELGHGMKFYDYIIRRGSSVTLTAIDAPQTEWDSPLAAFKHVLEHEQMVTGLINDLVNISIEEKDHATNNFLQWFVEEQVEEEENAMDLLAKAKLADGDNRLIYELNKELATRVPSESQD

SEQ ID NO: 10646 - protein, 215 aa, Methanobrevibacter gottschalkii
MNYPDGPTSEAQVDSTEFDADLLHENDLGSVHIHGHFGNVESEVKIAYLIGMHPLESKSHRALFEKLISKEDLKYCYYLYNINVSNKNSESEGRNEGQLLAQESVQKDIISKNYDLFLDIHSNRGPDGPGDYKITNFLFAPGFDDKSSKFMNEILDQIDEIVYYAPKFRSSPSYITEPTAEAGIPTLVYECYSSEPMEYTLYLAEKLISVVDTLF

SEQ ID NO: 10647 - protein, 326 aa, Methanobrevibacter gottschalkii
MIIRAPSRIHMSLIDLNGSYRRVDGGIGLALADPQFVLEVKQIENGIELEFADNVTDEEAIEECREKIPDAARKTIEHFNIDSGFKFIVHETYPPHSGFGSGTQIAISTAHLITETMDIEVESRVLSSVVGRGGTSGIGTYTHDLGGFILDGGHSKEEKPLFLPSGASQAKPATLIARYDFPEEWNILIAIPEIEKHMEGDDEVDVFQTYCPIPKEEVEQVSHLILMNLVPFMLEKDIKNFGWAVSELQKVGFNKLEHSLDASYLPTMQAIEKAGAYGVGISSFGPVLYTFFDESNEDIVEKTKEIIGENGTVFVTKAQNHGFTIE

SEQ ID NO: 10648 - protein, 330 aa, Methanobrevibacter gottschalkii
MENNRTVFIDYLKVIGLLCIILAHISTDESILQIRNFDVPLMVIISGFLAVNSFKRNLKQNRSFLRYYWKRISRLLFPTWTFLIIFFIVMAFLPINGIYHYDADFILNSFLLLDGLPYVWIIRIFLICTFITPVIYYFDKIENDYIQFLILLLIYILYELSIFLKINETNIIFEFILAYVIPYGIIYLLGMISTKTSPKMDRNVSIICLIAFIIQAVIIYLNTGIFQPTQIMKYPPTVYYISYALFVSFMLLSIFKRIDLKPNRVIEFCSKSSLWIYLWHILFLTVIPLIFGELNWILSYIIIVVCAVGATYIQNKILDLTNADIKVLRG

SEQ ID NO: 10649 - protein, 143 aa, Methanobrevibacter gottschalkii
MKIKQLSIFLQNRMGSLSKPLEVLSKNGVNIRAMCMADTSEFGILRLVVDNPEMGKEVLEEHNFLVKITEIIGVEMNDTPGGLTSVLKVIKDNGIDLEYLYAFTHDKEGKAILLLHADDIDKLISSLQDNDIVIVPSDEVYNL

SEQ ID NO: 10650 - protein, 433 aa, Methanobrevibacter gottschalkii
MFWNEEIETMSRPDLEELQLKKLQATVKRAFNKIPYYNKRYSEVEVYPEDIETLKDIEKLPFITKDDLRESYPFGLFAVDIKDIKELHSSSGTTGKPVVSGYTEKDLDTWAETTARGLTMMGLGENDIIQNTHGYGMFTGGFGVHYGSHKIGAAIIPISTGQTRRQIEIMSDFGTTGLIFTPSYGIHIGEVALDDGIDPKKLGIKAIGFGAEMWTEEIRQRVEELFGAKAYNIYGLTELMGPGVGVECEAQKGLHIAEDIYYPEIIDPNTEKVIGGDKPGELVLTNLEREGMPIIRFRTKDLTTLTYEKCSCGRTHARMSRITGRSDDMIKVKGVAIFPSQIEKALLKVGDVEPHYMIIVTRPGTLDEIEVKVEASQDIFFDGVKEMMAIQNKIGKSIENETGIRVKVTLVEPKTLPRFEGKAKRVIDERNLH

SEQ ID NO: 10651 - protein, 236 aa, Methanobrevibacter gottschalkii
MDMISVLWQVGIFASVLVFGIKIGLASGLANLPKKLFAVICMSYGGGVILISYIASFFAEQLVQAIYSYNTIFYIIMASIMIIAGLFTIREWKIHDKNTSTATSLAIIAPCPCCFGSIIASVLIVAPTIGISSLNLSWYASAALVAVMVVTYFASNTIIRFTNKPYPIVLGNFMLLLGAYFLLSAIVIPNIASSLTKNTSPITIASPQNILMVILTFVILLVGGMVLNKKGRNILD

SEQ ID NO: 10652 - protein, 214 aa, Methanobrevibacter gottschalkii
MVLNIPGGEFLTGSLDVISQSLTIPVLVILLVIVIISIITLGGIIAEYTSRKKVPIGTIRDLIYDINLSESIDGLKNIISKAKIPNSQKKVLIEIASAESLGVNSREALARKLFEFEEEKTMETLKKTDIITRIGPTLGLMGTLIPMGPGLAALGAGDINTLANSLTVAFNTTIVGIGSGALCYFIGKIRSSWYDRYLSDLDALIDSVLDYMDK

SEQ ID NO: 10653 - protein, 107 aa, Methanobrevibacter gottschalkii
MVRKSNRRRSKRVEEDPMAGTSNLVDAMLVIAVGFLVFVIISWNMQAMIDPDQSIQEKMQQQKTTEVDQGQQLNETPDTSNSSGQGYTEMGKVYKDPATGKLIMVEG

SEQ ID NO: 10654 - protein, 105 aa, Methanobrevibacter gottschalkii
MEFCPDCGAMLMPKKGKIKCTCGYEKSLSDDDLVEQYHMKGETNPETKVIVTDSNNVALPTTKITCYKCGGTKGYWWTVQTRSADEAPTNFIRCAKCGNTWRSSN

SEQ ID NO: 10655 - protein, 271 aa, Methanobrevibacter gottschalkii
MKNTKKIVIVAIIIVIVAGIALLSGVGSSENIDIVGSTSVQPVAEKLVETYKQTHPDANINVQGGGSSVGIKSAQDGSADIGTSSKELKEDEKQGLTEYNIGQDGIVIAVNNENTVNDLSKDQLKDIFSGKITNWNQVGGQDGEINIITREEGSGTLDAFENIVMGKDTKIRSDAVVQSSTEAVKQSVKQDSNAIGFVSFAHMSNDVKALSIGGVSPSTDTIADGSYELQRPFLFLVKGTPSGDLKEFIDWVNSSEGQKVLNEEKIIKSTN

SEQ ID NO: 10656 - protein, 287 aa, Methanobrevibacter gottschalkii
MSEQFIEKGLLITAMFSIFIILIILGFIIIEGLPAFQDYGFIQFLFGQTWSPNEGQYGLFSMIIGSICVTIFALIIAVPLSILCSIFMAEVANENIKNFLKPVIQTLSGIPSVVYGFFGLIVLVPIVRFYFGGTGFSIFTAGIILSVMILPTIISVSFDSLCAVPNEYKEASLGLGATNWQTINKVIFPASLPGIVTAIILGMGRAIGETLAVIMVAGNVPGIPNSIFSPVRTLTSNIALEMSYATGLHHNALFATATILFVIILLLLVIANYIQRKYKMDVGGGTL

SEQ ID NO: 10657 - protein, 283 aa, Methanobrevibacter gottschalkii
MKFNYISPKRSQKIMNGIFIFSGVLTLSILIIILGYILINAVPILSFDFIFGQVIDAGKSGGISPMIVSSLYVTFISILIATPLGVGAAIYVTEYSKNGLLIRLIRFGAETLASIPSIVFGLFGLTFFVVFLNLGWSILSGGLVLAIMAIPTIFQVTEVSLSSVPSSYKEGSFGLGATKWQTICHVILPAAIPGIVTGIILGLTRSISEAAAVMYAVGSATTIPISMFDPGRPLPLHLYVLATEGVSLPNAYGTAAVLVIIVLIITFFTNYIVNRYQKKIMGN

SEQ ID NO: 10658 - protein, 250 aa, Methanobrevibacter gottschalkii
MDRIIVKDLNTYFGNSHILRNINVTFPENNVTALIGPSGCGKSTFLRSINRMNDLISTFHHDGYIYIDNKDIYDSDVDVVELRKKVGMVFQKPNPFPKSIFENVAYGLRIHGYDDEDFIKERVIESLKASAIWDEVKDKLDQSAMGLSGGQQQRLCIARTIANNPEVILMDEPCSALDPISTLKIEDLMHELKKDYSIIIVTHNMQQASRVSDYTSFFLNGEIIESGKTEQIFVNPKEEKTEEYITGRFG

SEQ ID NO: 10659 - protein, 218 aa, Methanobrevibacter gottschalkii
MDKEYPSISFKNRFKKIESDIEELNDLAIKSNMDVVKLFEEFNENLYFDILNRSNEMDIKTIDLERECIKFMATEQPVAHDLIFMESVIRVISHIKRIGRLFLKIAQSIKNIKDVEIPELIIKKLCYMGDYIEVMLKKSIFAFLNKDTQKAKELSHDDDEIDELYEFILNDSIDMIEDRKILIEIISIARHFERIADKTVNIGSRIFFVMDFKRPDIE

SEQ ID NO: 10660 - protein, 432 aa, Methanobrevibacter gottschalkii
MSRNAYINKDIPLSKIHEVKADLKHYIEVYEKITFIEDIYAGETVKYAIEKRGKTIPTGHTWLKSWNEEGFDGLLRKEGSGRKTKLTENQFKQLKENIIKKQLTSVREVKHEIFEEFSVSYSDRQIRRIMKKLGFGYGKPYVIPAEAPKNASEQLKKNTEKIDLKKDILIFTDQTAVQNKDNTNRIYYELGTKNRQTKITTRIKLNANGYQAVNGNSLILFQQNTHTFEEIKSLINLRIVNCINKELKSELKNILTDDELDENKIYNKLKDENTLETLKNEFNEFISNSNSSEKQFLVKIKNKANKLNPKKHTNIENIQKEIIIKLLNKDNIINNLQNERKLVVVLDNYSVHKANLVIQACEILNIKLIHLPPHSPHLNPIEQVWKSIKKYMAYYLFDTIKFMEELFEKEFYRIVNRDSYYKNWISKFIMVN

SEQ ID NO: 10661 - protein, 295 aa, Methanobrevibacter gottschalkii
MTRSNKTLEDILDVIFYDKPSTQEEIAETLGISRRYVTQLLKPLIEEDIVKRSYVIDLNKYDEIYGSSNPIFNSKQHSAYFLIENMLKNMAEHVKKEVQMSFDAILNNDEKMAEEALELDFTTNNMFEKVRSSVETVVNIDPHSKLSKILLFNEAAYNYERIGDYSGHIAKFVINEKTPVDEELLDILKKMHKYAQKSISYATDAFVSEKLELRGDLMDIEEKMHEKQHDALNLVASQMAENSFEDIEKYNYYIYISRVVKSFERMGDIAVEIIELAAEFHKDIPRPTTPRSFRK

SEQ ID NO: 10662 - protein, 353 aa, Methanobrevibacter gottschalkii
MKGLARIDQDVMDWVEKDKPKCGPYDAIVRPIALAPCTSDVHIVWGNAYMSDAPNRILGHESTGVVEEVGDFVTDFKPGDRVIVPAITPNWNRVPSQKGFGQHCDGMGTGMTFITFKDGTFAEYFNVNHADGNLAHLPDNVSLDQAVMISDMMTTGFYGAELAEIKPGETVAVFGIGPVGLMGVAGAHFMGASRILAVGSRPVSVKVAKEYGATEIVDYHEGDTVEQIMDLTDGEGVDKVVVAGGNANTVGEALSVLKVGGILGNVNHYDGVESIPLPALAWGAGLADKTIRGGVCPGGRARMEQLVKLVEYGRFDSSKLITHRFTNFDDLYEAMILMRDKPRDLIKPAVILE

SEQ ID NO: 10663 - protein, 518 aa, Methanobrevibacter gottschalkii
MKNLEKTLKSVTENPKYIFRLTVQGLMVGIFAGLMVCLYRFLLYGSEHILRDYLNIIHGNILYIILFFIALAIMGLLVDWLIKWEVDSAGSGIPQVYAEVKGHMEANWVKILFSKMVSGVLTALGGLSLGPEGPSVQIGGMAGKGVARLFKGSKTDELRLILVGSAVGITAAFNAPLAGVLFVLEEINHGFDKTLVFIALVSAIVSDFISKVIFGQSTALTFPIHNIPLGNYWLLLVLGVLIGLLGYVYNIGMIKSSDFVNQLKIPSWLKFVLVFMVSGVVALLIPEISDGGHFMMDMLDVAMPSLGVLVFLLVLKYLFSLFSFSSGAPGGIFLPILVLGAYIGAVFGVVIVSVFGLEHTLIYKFVVISMAGFFAATVRSPITGVVLIAEMCGSTESLIAMIIVSLIAYVVPTLLGNEPIYESLYDRLLLKKNREFVKKPSKHVLSEYLVPLDCNYINFKVKDIPFPKNAIVVSVIRNGKYVIPTEDFKIKYSDQIHILADVNDYPFVREEIEELFGG

SEQ ID NO: 10664 - protein, 166 aa, Methanobrevibacter gottschalkii
MSLIFKRKSVRKFKDEKVSEEVITNLLKAGMQAPSSCNSQPWEFIVVSKKEDKLAISQMHQFAKPAANASHLIITVGNLNEAKVIRMIEQDLGACNENILLQATHEGLGAVWLGFHPIEDRTLKLKEYLNIPDHCIPFSVICVGYPAHESEIKIRYDESKVHFDKY

SEQ ID NO: 10665 - protein, 237 aa, Methanobrevibacter gottschalkii
MYKRIFSILIVMVFLMFSVSAVFAESDAVQDTGGESTSRIINVKVIWNDDGQTNNRPDSVTVRLLNNGSVVDSVILNESNFWNGTFKILDNGNYDVEETGDLSSYSISLTGDMDNGFVITNTIKQAPNNGSDDMIVDENSTDNSSDDVNGIIDDSNHTVDQNDAKDENQTENISQAKNTTYNNNDKEKQVIKKENKSVKKNNTNITGIKLKNTGLPVVVLVVVLFIIVITPISRWKK

SEQ ID NO: 10666 - protein, 323 aa, Methanobrevibacter gottschalkii
MVSVNIEAKKTVDVMIEKADALNIAVETLKNGATVLDCGVNVDGSFKAGELYTKVCLGGLADVGISIPGDLSEKFALPSVKIKTDSPSISTLGSQKAGWSVSVGDFFALGSGPARAIALKPAETYEEIDYVDSEADLAILTLEADVLPGEEVAQYIADECKVDVKNVYLLVAPTSSLVGSIQISGRVVENGTYKMLEAIKFDVTKVKHAAGIAPIAPIDPDGLKAMGKTNDAVLFGGRTYYYVESDENDDISDVAAKLPSSAADGYGKPFFDVFKEAEFDFYKIDKGMFAPAEVVINDLTTGKIYKEGFVNVELLKKSFGLDE

SEQ ID NO: 10667 - protein, 281 aa, Methanobrevibacter gottschalkii
MKVFNMEIIDIIKEAFIFPSNNLEKLAIYIVLTFVMGMLVVGGIFSFVFSSQSSALLIVGLILCIAAIILALIISGYQLKIMKSGIDQDEEAPAFDWKNDGINGIKVIVLGIVYFIIPAIIVGIVALITNVPGNLVQIIQEYSTSINATAAVNSTASAMPAVSSASWAALGTSLAITAIIAFVLFIIFAFIQTMGQARLANTGSLGNGLNIVEAAKDISRIGVGKVIAVILLVFIVIMVIQGILGYIYGQIPQLSIISIIITPYFVFFTQRAYGLLYSDIA

SEQ ID NO: 10668 - protein, 181 aa, Methanobrevibacter gottschalkii
MSDLKGTKTEENLKAAFAGESQAHTKYQYFAAKAKEEGYVQIHDIFMETSKNEREHAKIWFKLLNDEAIPDTIANLNAAADGENEEWTSMYKEFAETAKEEGFPMIAFLFEKVGAIEKEHEARYRTLLDNVEKETVFNKAEDIEWKCENCGFIFSGPNAPEKCPVCGLPKAHFEERATNFK

SEQ ID NO: 10669 - protein, 181 aa, Methanobrevibacter gottschalkii
MADLKGTKTEENLKAALAGESQARVKYEFYASQAKKDGYVEIKEIFQESSDNEKEHAKIWFKLLNGGKVPDTKINLADAAAGEHEEWTSMYKGFAATAREEGLDDIADLFDAAAATEKAHEDRYNALSDKIKAGKVFKKDEEIAWKCNNCGYIHYGKEAPEVCPLCDHPQAHFRKQDTSYI

SEQ ID NO: 10670 - protein, 469 aa, Methanobrevibacter gottschalkii
MIENNICLLTDSYKVTHHYFYPKGTEKIYSYLESRLGSEFNKTIFYGLQYIIKKYLEGSVVNQQKIEEADKLISNHIGEDIFNKDGWYYILDNYDGYLPIEIKAVPEGTPVNVSNVLMSVENTDKKSFWLVNYLESLLLQVWYPSTVATLSAEVRKLSKFYLEVTGSSKDNLDFMLHDFGYRGASSTESSMLAGSAHLLSFSGTDTIPALLIPKNYYNDSNLYGFSVQATEHSVMTSLGPKGEFDQILNVIDNAKNGILSMVIDSYDYKNFLTEAGKSDSQLNKAINDFLAVEGNKVVFRPDSGEPVSTTIDCLNILGKGFGSYLTDKGYKVFDSNIGLLWGDGLDYHKIRDILFAMKSNGWAAENIIFGMGGGLHTYVNRDTQRNAFKCSAQLRDGKWFDIYKNPLDSSKKSKTGRFKLINENNSFKTISIDGYGDDCLRTVFKNGKLLIEDTFADIKSKTLNYSNFL

SEQ ID NO: 10671 - protein, 1218 aa, Methanobrevibacter gottschalkii
MHKIRKAIIICLILLIVFIPTAYAADNQTNLGLNSNDVMLSDSYYFDANVDDDLGNGSLDFPYKQLKSNRVIDNSTIYLNDGIYYGFNKEFSNLTVIGKNSEKTIIKNIQFDIKGSLIIQNVTLINSKITNNANITLVNSIFKDSSSFIGGVLKSNPNTFVTITNCTFLNNHANRYAGVIYSNNSNLNICNSSFVGNYANYYGGAIYCEKNSKLTIINTDFTNNHAKNDAGGAIYGMDSDILANYLSISNSSSTFGGAITALNTNLNLTNFNAWNNKAKYRGGVIYSVYGYYIVMNSTFENNTASDGGALFIDSPHSVNVSSNKFIKNNALNIGGAVYIISNKNYFIPDNLFLNNSASFNNDFYKTMLSNLTIGNNNYVLINYNGSHIGNLPSSYDLRELNQTTSVKNQGSGGNCWAFAAIASLESCILKATGNAYNLSEENMKNLMTLYSNYGWKVSPNDGGYTSMGIGYLTSWLGAINESDDSYYESSALSPVLDSFIHVQNILFLKRNSYTDNDEIKRAIIEHGAVSTSVFWKVEKYANGENYYNYEYASGSNHAVVIVGWDDNYSKNNFIKKAPGDGAWIIKNSWGTGSGDGGYYYVSYYDARLAPINTSSVTYTFVLADSIKYDKNYQYDIPGMTDYLLNSSDRVWYKNKFTATDDEYLTAVSTYFQKETSWDLSIYVNNKLMLTQSGNSSASYSTIELNRFIILKKGDIFEIEFKITVDGDAGVPISEIASLNNLFYGENISYVSYDGKKWIDLFDVRWTYPGHTYNDSQVACIKAFTVLNKINSTIVLTITDENNPVEITAKVLNQYGNPIKTGKVTFNIEGKDYIAKINNGFAKLIHIFNGNENKLIIASFSGAGFIESFSDITFCPEQVSIKASDMVSYYNKNSYSITLLDIYSKPVADKEVKFKINNLEYVAITNENGIAAITFNLYPNVYDVIIGFNSINFDNYNVTKKITIKSTISIPENTVYTYNSKYPIKLLNNNGNPLSNCKFKLVINGITNYAHTDSNGAFKYNINLKPGKHTITVINTKTGEKSTQKIKVVSRITQNKDFSMYYGAGRNYKVKVADDYGKVKKNLKISFRVNGKTYYRYTNEKGYAYLKISLKPGKYTITANYKGYKVSNKIRVKPTIITKSIAVKKGKTGKFTAKLLNNKGKILKYKTINFKFRGKTYKVKTNKYGIATLKIAKKYKITRYSIITSYRSEKIKNTIKIKR

SEQ ID NO: 10672 - protein, 232 aa, Methanobrevibacter gottschalkii
MLTINQCYLDFVDKILKQGKETYKDSNHHLIESLGNFYIIDDPLDLKFRAKYQHYTTKMMLDDIKSGKFDIEGCPIKSDALYEYVKSAENPDDQGFVYTYPNRIFAHFDVDQFNTMKKRILTATGSNRAVAVTIDPELDADREDIPCLQFLQCIVRDNELTIHCIFRSNDIFGAFYSNMFFIAYLGLKMKEEVNKEIVGEKLNFGGVHYHSTSGHIYNTDLKAARKLIKTNK

SEQ ID NO: 10673 - protein, 190 aa, Methanobrevibacter gottschalkii
MELEEYLEYVNSGKRIYAGSTQHLFMHESLNNALKITHKINSEYHTPEEIQKLFAELTNKPINKTLGLIPPFNTDFGKNIHIGENVFINSGCKMQDQGGIFIDDEVLIGHNVCLLTLNHAKEPENRADMYPSPIHIEDKVWIGSNVTILPGVTIGKGAIVAAGAVVTKNVEPETIVGGVPVKFIKNVSDD

SEQ ID NO: 10674 - protein, 190 aa, Methanobrevibacter gottschalkii
MTNENFAKKIKDIRARQNMTIEDLAERSGVKLEVLKAMESGEVIPSLTPLTKMARALGVRLGTFLDDTPELGPVVTRNGKTENSLYFSGREDVTNATNLEFHSLGAGKIDRNIDPFIIDIEFEEGEKELSSHEGEEFIYVLEGEIEVIYGKDSFTIGKGDTIFYDSVVPHHLHASGENKAKILAVLYTPY

SEQ ID NO: 10675 - protein, 51 aa, Methanobrevibacter gottschalkii
MFEIELKQQKISNGLIRFFTSILDLHSLLLCLQEYFTSMNNVEIKKMEVFQ

SEQ ID NO: 10676 - protein, 554 aa, Methanobrevibacter gottschalkii
MSELFTELPLGKFFESMVEKQPDHEFIIYPDRNLRFTYKEFDERVDNLAKGMLAIGIEKGDHVGIWAKNVPEWLTYMFATAKIGATIVTVNTAYQSHELEYVLGQSDMRALAMTDAFRDINYFDIISELVPELKTCARGHLVSEKFPHLKFVFHVGQEKHRGMYNTNELLLLGMSYDGEKYQEIKDSVSQNDVINMQYTSGTEGFPKGVMLTSRNIVNDGYYIGENMNYTSNDKLLLQVPLFHCFGTVLGVMAVITHGSTMVVLEEYDPLLAISSIQKEKCTAIYGVPTMFIGMMNHPMFDMFDMSSLRTGIMAGSTCPVETMKDAIEKMNMKEITSVYGLTEAAPGFTQTNAADSFEKKINTVGRKFPNIEVKIVDPETGEEVGVGETGEIMCRGFNVMKGYYNMPEKTAETIEPDGWLHSGDLATVDEDGYYSIVGRIKDMIIRGGENIYPREIEEYLFTNECVQDVQVAGIPDEKYGEIVGAFIIKEDGFDDVTEADIRDFCIGSIARYKVPKYVFFVDEFPLTTSGKIQKYKLGDLGLRLLDERRQRGEL

SEQ ID NO: 10677 - protein, 1202 aa, Methanobrevibacter gottschalkii
MRKNNYLVFLLIFSLFLTISSVSALNVDDNATIEDTNLNSMDVNFDISNGEFNSINIDKTFDTNIDADAGKDTNIEEKTISITNSNNSILSTKENNVKNNFKLNSGSLRAGNIIYISSDGTGDGLTSNNPTNWANGYINAQSGDTISFLDGTYNLVNVNLNKDLVLKAFNEGNAIINANRAGNVFSINNNRNITINGLTFINGKSTGNGGAISFNSGALTVINCRFINNTASSYGGAIYLRDGKLTIVNTTFVNNSADVGGAAIADTISITHSDFINNTADGSGGAIRAYDNLTIVDSIFTNNTSINGQGGALYTPNVDINNSIFVNNTSLNGGGAIYSSNEYLINNSVFVNNSAIDGDGGAVSSYRTGNINNSNFTNNSAKKSGGAAYARESIEIDNSSFNKNYAGAGGAVRAQSEVNITNSNFTNNVANNEGGAIYSNGKIVVNNLTFINNSAIESDGGAIFSVEDVEVDNSNFINNYAGELGGAISAYNELTVNNSNFTNNNAKYYGGGVYANVLNSNRDNFVNNTAEYNGGGAYVFSNANINGSNFDSNTAVNGGGLFSTGNSSVNNSNFINNNAYDGSAIISGNLHLNNNNLENNTSRGYGIVYAENATIENNKFIDNDALEDKEIYVLNELSQSNNTLSPNQIENINANTVKVNTINGTTYLVDLEDGLKGYCLQRTLNFPDYVYLLNNLSLAHNQLTGEDVSEYLKILIYKYYFSDKKDNITYSLWDFTDSDFRNSNNNLTKKVIALYNSGFRVPDSNASLILDNGTQVLFDFYSAGSSTTQNLFLFNITYMGNNYDMKVEKITLNKSVINGNKTKFIIRVTNIGDTILHGVTVFEKEYDGLVYDSYIDEGNNWNYNNGKWIYKKQLNINESAEFTVVFKTIKSGNFTNIIISSSNETTNKTTNNTTTVYTPNLTVEKLSLNRTVYVGNQTVFTIVVRNTGDCDLGEVFVVEKAPEGLAYSSFKGTDWSYNNGKFTYGKTLKVGESVSFEIVFDAVSSGNWTNVVVAGSNLTGNKTGNNTTKVYNPGLKVEKITLDPVVSVGEITSFEIIVTNTGDCKLGDVFVHEDSYEGLRFHSFRGDMWKQKGDTFYYQGVLNPGESASFVILFTTLKPGNFTNIVTAGSNVTNNTTTENKTKVIENHTNNNTNGINKTVNNETKEVNVHKVDTSRATGNPLLALLMVLLMISVTSVRKFKK

SEQ ID NO: 10678 - protein, 321 aa, Methanobrevibacter gottschalkii
MTFLDNISDKINYETLNNIIKFEFDGVSTNWMDENDPFIERIQKSSLNKVFLKEHILKEIEIKNILDEGIDFLNSQKYVNAIESFDEVLFYDEGYAEALINKSYALFGQKHFVKSLRYYKRAIKVNNDLKDVEYHKLLLSCSNKERSNFSKLKLNIYSGDELFAKGEYKKALERYDGALANPSLFKDKILFKLLNKKATTLLKLNDFENALACFKESLNAKISDYAYYGCGVCQYELKLDGASESLSHANNVKKNQLLEKGLIFNEIGLYENALSTFNEIFNNHFKVDELYIKSLNGKMHAMRSLKMDMDEIEDIYSILLN

SEQ ID NO: 10679 - protein, 124 aa, Methanobrevibacter gottschalkii
MKFSGFMNVYQLDDMSWEYQFGGKSLKAQTLKELEVLVGLYGLKWGVLDKNLVEKSLEIDKNNVTGFLNVYKKEGFWHYRGTDLKSHSLEVLKKKVLSENLDWVETDRELAYKNWKLDLRKFKK

SEQ ID NO: 10680 - protein, 280 aa, Methanobrevibacter gottschalkii
MSVFVPGHVTGFFNIENHESKLKNGSCGVGFLLTKGVMTTVIESDNFEFEVNLGDDTIVCEVLRILNLDNSNFKIIQDIQLPIGAGFGTSAASALSLTLALNDFLNLGYSKELCGQIAHMAEVNLGAGLGDVIAQTGSGLVLRTKSGAPGIGEIKSFNQDVYIAYKTFGPIETSEIITDANYKKIISEVGLKYLELFEEKPSLDNFLIFSKKFSCETGLMSPEVKKQIEYFESIDDVLGSSMAMLGNTVFALSYNEDTFKKLNIEELHIDKLNNNGIVYD

SEQ ID NO: 10681 - protein, 177 aa, Methanobrevibacter gottschalkii
MIKLSYDIKNYRKQILDLTQNGDTIIELGCHVGNTTKILLDNFRDSKIMALDNSPEATIKMNEILCDNLEFINADVRLHETLLEVFKRIQKCDILSIDLGGGYHPDTVFKVFYIWSSTFKPKHTLIRNRGILEFFNSAGSSDEDYESCEGFLDSYHDSGIPPQIKEFELWTPNLGKY

SEQ ID NO: 10682 - protein, 263 aa, Methanobrevibacter gottschalkii
MIGKKIRLERIINRNTGRTVIAPMDHGVSSGPIPGIINMDETVEEIAQGGADAILMHKGIVQQGHRGYGKDIGLIVHLSASTSLAPDPNDKVTVTSVEKAIQLGADAVSIHVNLGSETESLMLQELGQVAETCDYWGMPLLAMMYPRGQKVENEHDVEFVKHAARVGSELGVDIVKTNYTGDPDTFKEVVEGAIVPVVIAGGPKVETDEELLQMVRDSLDVGGAGVAFGRNLFQAENPGKITRAISEVVHHDLDVEEALEFLK

SEQ ID NO: 10683 - protein, 376 aa, Methanobrevibacter gottschalkii
MQNKFAWISTPDELWDDKKEMITTALESGIDYVLDFDDIEEIRKLGNVKIIANTDDADIYLVGINGEGDGFVELNDDFTDSIDIANAKKAKSEGKTVCAYIKITDKAHEQLAVRLGSIVDYIILIGTDWTIIPLENIIADLQKLDVKIIAAVRDVDGARVALETLEHGTDGIIFEANDFNNIKKIAQNVIEASQVKYELKLATVTKVKPLGSGDRVCVDTTDMMKPGEGMLIGSYSKSMFLVHSESLESEYVASRPFRVNAGPVQAYVMVPGNKTRYLSELVAGDEILIVNTEGETRTAYVGRSKIERRPLLLLEAKYEGKTIRTLLQNAETIRIVDENNNPLSVADVKPGDKVKVYIETNARHFGIAIDETIIEQ

SEQ ID NO: 10684 - protein, 185 aa, Methanobrevibacter gottschalkii
MSQLRAFLAIDLDDGLKPKINKIIKQFKQIDAKIRYVELNNMHLTLKFFGEIDTDGLELLENKIADVVSEFKPFNIKIKGCGAFPNYSHIKVIWIGIDEDSIIKELHDNLDGEFVKLGFGKDKNFSTHLTIGRMKSAKNKVQVRSTIGEFSDIEIGEMTVNSITLKKSTLTPSGPIYEDLKVFEL

SEQ ID NO: 10685 - protein, 451 aa, Methanobrevibacter gottschalkii
MDYSLILNDIKPTTDETKEINEVSSRIINFLQVLCDENNINAKVNLVGSVAKNTALKGKSDIDIFIAFPLDTDKLYLKETGLDLAHKCCREFKSVPEHHFASHPYVTADIEGYEVDIVPCYAIEDGSQLKSAVDRTILHTRFVKSNLVEGQEDEVLLLKRFMAMTGTYGSEFKVGGFAGYLCELLIIHYGTFENTLKSAINWQYGHVIDLENYGTSRLFNDPLIVIDPTDMNRNVGAALRINKLSEFIQSARNYIFSDNKKNYFYPIKRNLNKNELIKEFNTRNSDIIAIKFNVPNIPIDTLHPQLKKTTEALERKLNDEEFNVFKADYWSDELFSCVILLEMASSNLNDIKVNVGPKIFFNKACENFVKKYGRENCYIQEDFLVHTQKRDFNNALKLIEHIFTSEHIGLIKVGKNLKKSIINTYEFIDLDEISSEEFLDDFIHPGQHIIR

SEQ ID NO: 10686 - protein, 183 aa, Methanobrevibacter gottschalkii
MSEIKKLTADVDVGEYFEKYVDFEKFSKLCIEEQEELGYNWNYPPFDFDVEELWKSYNKLKIIAFKIDFSKEELDHTFEEKELEFVLKRFERIKGRLMNDVYMLENEDSMGLYMGKCNLCMRCTREFGMPCKMPVKMRYAFEGLGADVDKTIEDLFGYKILYAHNGKLPEYLIFVGGLLYDKK

SEQ ID NO: 10687 - protein, 228 aa, Methanobrevibacter gottschalkii
MIVSVIGGTGPQGLGIAERLAIAGLEVIVGSRKEEKALDIVAKAKEEFADYDLNMTGMANEDAAKAGDVLIITVPLAAQKPTLEGIKEFCNDKIVMDATVPLETAIGGKPFRFVDLMEGSAAERTASILKGTGAKVICAFCNISNSHLANIPEEIDCDCLIAGDDKESKEIAAEIIDKIPGVKTIDCGILEKARIIEKITPLLIGLNIKYKSHYGGLRITGIPALDKE

SEQ ID NO: 10688 - protein, 207 aa, Methanobrevibacter gottschalkii
MKEIKFNLDENPFINFLSARYSMSAKINVEKLWKWCHENNKSFFIMSLGCLMNAVNSVPELKRRIINGKAIEHDYLDGVSPIMDEGNKIYREMRVKTPQEFNDILKWHDYIKDYSKNILSGKEEGFTIEMEKRDLENIANFSCIPWVDFDMITNCVLSGNQIQPLITWGKVNEKYEMSISITVSHIFVNGRELGYFYENAQKEFDKF

SEQ ID NO: 10689 - protein, 443 aa, Methanobrevibacter gottschalkii
MKVIIVGGGAGGISTASNIRKLDENIEITVITRDNKVAYSPCAIPYVLSGTIESFDDIVMRTPEDYKNKNIDVIIEAEVTAVDSNKKTVTYQKNGKETVMDYDKLVLATGGNPFIPPMQGVDLDGVFRIRNIDDGMKVQEALKDAKCAIVTGAGLIGIEIAFALKKRGLNVILSEMLPQIVPRSLDKDMSDILVKYLEMEGIQVVLGKPITKLIGDGKVEKACFGDEDIYDADMVIMATGVRAELDLAEMAGCEIGRWAILVNDRMETSVEDVYAVGDCVESKDLILGSNTISQLGTTAVRESKTLARTICGKKSKFNPVLNSMVSKVGDLEFGAVGYTTSFAQQNRIMPVVQKVQALTRARYYPNAKPMDIKVICDGNGTIIGCQIIAEERVAERIDTMTLAITEGLTCFDLSNMEFAYAPPVSMVTDPLILAVEEVSKKFS

SEQ ID NO: 10690 - protein, 326 aa, Methanobrevibacter gottschalkii
MAAHGHGHHGHGGQMTPEQQKQMIEQDLRLAKNLGQIKHKIVVMSGKGGVGKSTVAANIAETLQKLGFKTGILDADIHGPNIPKMLGVDLYGEQFNEYQFKVFKEITESGMADKDFKNDEEKLAFIEAKKEEYKHSMFPVVAPSGLKVMSMAFLLDGIDRPIIWRGPQKTGAIKQLISDAHWGSLDYLIIDNPPGTGDEPLTVLQTIPDADAVIMVTTPNVVSQEDVLKCVKMVEMMNIKQIGLIENMAYYICPHCDEKLYIFGEGNGEAFAEEMEITYLGDLPIEEKVSDAPNNEGAISVIDPNDEVSKRFVEIVKDIQKEFIKE

SEQ ID NO: 10691 - protein, 131 aa, Methanobrevibacter gottschalkii
MKLKEIKHPELKNHINMIYMHGENQNKTAINKTEEEIKGYIRNKEFIISIENGKPVRIPYANDGEYLVPIYTDEKEYIIAMDYFSLNDMAENKEYIIEKLDYFKKLKKDPNFLGYIVNIARVSYIINPTLL

SEQ ID NO: 10692 - protein, 289 aa, Methanobrevibacter gottschalkii
MFANQKVIYLAGGCFWGVEAFISRLKGVNQTEVGYANGRDLAPTYEKVCSGKTGHAETVKVTYNPKIITLEEILENYYKIIDPFSENRQGNDIGTQYRTGIYWQENPQKNIILKFIKDKQKLESNRISIELSPINCFYAAEEYHQKYLEKNPQGYCHVDLNLINNEEFNHLTKEEYEITQLSMTEAPFSGKYTNFFEDGVYVDVVSGEVLFSSQDKFDSGCGWPSFSKPINKEAVIKNRDYSHGTTRIEIRSAKSNSHLGHLFYDGPGGSPRYCINSSALRFIPKDEIE

SEQ ID NO: 10693 - protein, 64 aa, Methanobrevibacter gottschalkii
MFYSTIMKIDSIDRLRDIRDALLVEQGINPTRQGEQAIKVVVERIDEIQATLDKSATKNLNRNR

SEQ ID NO: 10694 - protein, 91 aa, Methanobrevibacter gottschalkii
MIRRVTSGRRLLRKRMYKSPHARHKNATYHRENKSLVKIHQNKFKDMNGPNIKPKRRPKREVLDGFKMSYRYKYYNRDIVEETEESDEKSD

SEQ ID NO: 10695 - protein, 102 aa, Methanobrevibacter gottschalkii
MCRDKKLLEKIAYVQGSEHRKNIILYMEYNLYTPKELGDAIGVRTNHISNLLSQLKKQNIVYCATPNIHKGKLYSLTDEGKHIFEYLKSKEEDKINRINNSI

SEQ ID NO: 10696 - protein, 87 aa, Methanobrevibacter gottschalkii
MDNSVKYILKSSYRVRVLQAIGHDVKTPSQIAKDSSVLNNHISRTLRQLYEHDLIELINPEMHCGRLYRLTEKGLVVLSIINNESVQ

SEQ ID NO: 10697 - protein, 1609 aa, Methanobrevibacter gottschalkii
MKLFNNNFISVLLILFVLVLAVNSVSATDNNITDINNVNSNLSNVLKSSSSLNDGDAISYDLMDNKDVISQKFSSNSNTNDKSNMSDVVDSIESVAEPTSLDSPILRSVVPSGITFDGVFHVGTGQQYSNIQDALDQCRRGGYNYQIIIHEGTYTGYGNKNLVIEPTTWWNPNFGYLDIRTANDGDVVILNAERSPSILTINSRNVHITGLTFMNAYNYGSGGTSGAGVAINIRKGTVSIDNCSFINNEARNLWGGAVHIDSSITNRISNIDITNSLFVNNSAEVGGAFRSERYSSNINIINTTFINNTATEHGGVACLFSTDVTFANCTFINNSAPSSGGIHFHVGGSHIDNCTFINNSAYGTGSSEEGYGGAIALVYSTSDGVIISNSSFSNNFAGKYGGAIDVNGSGSNAKILNCNFENNTAGYGGAIRVQGSNTVIDNNSLINNKAINTDGGGIHVEGSNTQISNTIFRNNSAAANGGALAIVAGDNTFVSNSVIANNTAVNGAGAYIQGRRVTISDSIVANNTADQNGAGVYIDGSYATIKDSTIYNNNATVNGGGAYINGRDATISNVNFVLNNAIPDEEALDDGLGGAIFIAGSNSYIEDSNFTYNTARNGSAIYIDPTSSIANNYIYNCNFTENQAWSYWLPIFYNDVTKTIESNLTGGNNILNAIYNNGSNLHIFIDGVNPVLGWENSQNGTIMYQDNREFNQTIVTLVWDRHGNLVFNETAVTDLAGNVCYDIPQDTHLWFIVSMTHLEDTYYKEITNITGININPGLTITDVTMYEGNSTPQTIYIVLADDDANPIPNEGPIMIYVMVNGNKILLGSGNTSKNAVLILNESAVFKTLNPGNYTIIAECTYAYYNETTQSISNKTVSTEGILEVLPYIWSLNKTISHVNGIPYIEGMVIQINDNVTFNITVFNEVNTTLYGLKLIDLNTEGLSYVSTLPSNWNYEGNNVWTLDNLVNYGNSSLFVTFKVLKTGNLTNIVNCSFLDGFKNKSANITFAVNLTADLGVSKVVNVSNPNYGDFIKYTVVVSNAGPDDATGVVVNETLPVGLVYVSDDASVGSYDHVAGLWTVGSLAKGDSATLIVVVRVGGTGNIQNFVNVSGAEYDNNTGNNKANVTVAVNASADLGVSKVVNVSNPNYGDFIKYTVVVSNAGPDDATGVVVNETLPVGLVYVSDDASVGSYDHVAGLWTVGSLAKGDSATLIVVVRVGGTGNIQNFVNVSGAEYDNNTGNNKANVTVAVNQLKTYIIVFNNTVYPGDDVTVIVTVTTQNGSLFNGNVNVALNDTANTTKVVTIVDGTGSFKVTVDKNLVNGYVIGINASYDGNDTYIGSKGFGWIKVLPVKFHVEKTIVKGNEFFIGDEIIFNITVYNDCNGTLYNLVVSDVLPNGVVLINSGFGLWTYDGGSSWSYGDLSAGASATLIIKSSAVKAGSFTNDAKATVNDVLDNSSLVDFSISKLNTSISVSNVTGHPGDVVVITIKVSTGDNVPFNGDVDVILLDGKKIIVHVTNGIAKFKWTIPKNAKNNTIFSIFVSFAGSSKYFGSNNTGFIKVIDNKQNKTNHTDNNDFTDKCNKGIIKNTGNPLLVLLISIVILVISLKRRKDY

SEQ ID NO: 10698 - protein, 89 aa, Methanobrevibacter gottschalkii
MNFICPTIGEGHEKDFLVTGSLDDFKIIVFSNMEEYKKGFEYLKLADYIPYEVSIELFKKLANNDDEFSGIILDIHSKNKIILKEELLK

SEQ ID NO: 10699 - protein, 147 aa, Methanobrevibacter gottschalkii
MNIKDYEDYQKNNVKASKSQLKEYIQIYADMAKKLKSENALELEVIKKNIKNTFPNEIYFTLVDESGKPVKLTLTEKSKKYIIPIFTDIREYAIGSAKISKLFLDKLEMNVLSPEDISKLADEDEYFQGFVINPHSQNFNMDRNASF

SEQ ID NO: 10700 - protein, 182 aa, Methanobrevibacter gottschalkii
MFICFKKKTYFNDYYTYGDIMSELKELVKKFIEIDDDLNEKIEAALSESEELDDTFEEEHKEQIEQLGNIYHDIEHIVFSEEFIIVSNAKSEQKEIVALIISEEDEEVEEFVIPVFTDEEEANKAIELFKEQFEENEFVCDKKTGNEIVSEYAEDEEFIGLAINAPQWDFVIGGEDVHECCE

SEQ ID NO: 10701 - protein, 580 aa, Methanobrevibacter gottschalkii
MNINNNMKLGLIAAISIIALFVLSLWISQTPANDDNSIRFGILTLLPPLVAIGLAFITKETILSLFMGVFVGEFMLCVNDLNIVSTAINAFLQMGSQIISCMADPWNAGIILQCLLIGGIIQLVTKMGGAKALADTFARRADTPRKAQLFTWFLGLCVFFDDYANSLIVGPIMRPVMDKLKVSREKLAFIVDATAAPVAGIAIISTWIGLEISLIAAGFESVGVTNVTGFGIFLQTIPYRFYNIFILLFIVISSITLYEFGPMKKAEQTARKRKENEEIIVPNAPGFDEVKPVEGIKLSIWNAIIPIGTLIIGALIAFYWSGYTTILGGEDQALIAIMKSSPLSFNGVFTALSQSDASVALFQAALLASIVAIVMAVGERILTIEDAISEWIGGMKTIVITGVILLLAWSLGGVIGDVGTANYLVGVLKNTLPQFIVPALIFILGALISFATGTAYGTMSILMPLAIPLAWAVGSGDMSFTIVCTSGVLTGAIFGDHCSPISDTTILSSMGTSCNHIDHVQTQIYYAIFVASVAIFIGYIPAGLGIPWFISIPIGVVVMYVGLKILGQKVDFDEVEESSS

SEQ ID NO: 10702 - protein, 236 aa, Methanobrevibacter gottschalkii
MKLSKSKVNTYLKCPLEFKFQYIDEVEVPQNKYMALGSDVHLIAEKFAKKFGDNLDNIDIDNELLKIVHEEDIGYDLTPHVDNLSSFFEEVFVENDFKLYSQEEYLLDEENRFSGICDIILEDENGELVVIDYKTSNSSSFSKYRRELCYYKLLVENVCRKPVSRVGVFFTKNGRLRLLDICDEENKRKYLNYKEIDEAIKTLHEVRNNINNEKFPAKKQFLCKYCTYKHLCDAYF

SEQ ID NO: 10703 - protein, 168 aa, Methanobrevibacter gottschalkii
MKRLYALLIILIVIYIGINSFSLIFNDNGTNDANDVNESMITVGASSLPEIENFTDNTLNDTTISLVDSNKNMTILVSEIDNSQSISDIFNNFVSSNDISSTQTIDQNGVTTYLAYSSGSDSYNADIFFNKNGQNYCISGDNILSSDSDYFINHCKGIIDAISINSTS

SEQ ID NO: 10704 - protein, 180 aa, Methanobrevibacter gottschalkii
MKIVALQASPRKDGNCDVLMDEMIRGIEENGGKVTKYYLENQEIAPCKACLYCAENPECVRADDGNKILDEMIEADGVIFATPVYYGQMSAQGKLIIDRFYSIGQNPNKSLSGKAALIFTENQPEHTYDSYIELTKASPFEFMGYDVIGHVDAGNAGPAGIVAEEQKDKLKEAYELGLKF

SEQ ID NO: 10705 - protein, 79 aa, Methanobrevibacter gottschalkii
MGLSSFFKRVKKDAKNEEIVECHIDINTDDCDGCEKCGIACPNNVFMMVDNVSKVRDSQVCKNCKICMAICPNDCITVN

SEQ ID NO: 10706 - protein, 98 aa, Methanobrevibacter gottschalkii
MDFLLVLAKIQPKEGCQDSILELAEELIYESLLEEGNIDYQLLKSSEDDSLTFVEKWESPEYLKKHMASPHFLNFNADCEEFIESNDIQLIEANKIEI

SEQ ID NO: 10707 - protein, 230 aa, Methanobrevibacter gottschalkii
MIYSTEIENMCLVRKGANHDPAPIPEEGKWVKAKEISDISGFTHGIGWCAPQQGCCKLTLNVKDGIIEEALIETLGCSGMTHSAAMAGEILVGKTILEALNTDLVCDAINTAMRELFLQIVYGRTQSAFSEGGLQIGAGLEDLGKGHRSQVGTIYSTKEKGPRYLELTEGYITEIGLDGDNEIIGYKYINLGVMLDFIKEGIDPLEAIKKATGQYGRFDDAVKKIDPRSE

SEQ ID NO: 10708 - protein, 333 aa, Methanobrevibacter gottschalkii
MSLFESYERRINQITPVLEKYGIKDLEEAKQICLDKGFNPYDIVKNVQPICFENACWAYTLGAAIAIKQGCVKASDAAKAIGEGLQAFCIPGSVADDRQVGLGHGNLASMLLSDESECFAFLAGHESFAAAEGAIGIANSANEVRKKPLRVILNGLGKDAALIISRINGFTHVETEFDYFTGEVKIVKEKAYSDGERAKVRCYGADDVREGVAIMHLEGVDVSITGNSTNPTRFQHPVAGTYKKECILQGKKYFSVASGGGTGRTLHPDNMAAGPASYGMTDTLGRMHSDAQFAGSSSVPAHVEMMGLIGMGNNPMVGASVAVAVAVEKAMKQ

SEQ ID NO: 10709 - protein, 139 aa, Methanobrevibacter gottschalkii
MSTLWGLTARGICQFNDKILLLKIRSNSAHDAEKWEIPGGKVKKCEFFDDALKREYLEETGLEIDVQELYNVVRNDYTACKTKEDVKSIQLIMKVSCDNDEVKISGEHDDFGWFSWNEIDEMIAGELLTPAAIMAFSKD

SEQ ID NO: 10710 - protein, 265 aa, Methanobrevibacter gottschalkii
MQKIINAHCHIYPEKIASKAVVGIKDFYDLDMSLNGKVSGLIEDGNKVGVTHYLIHSVATTPKQVKSINEFIAESVNTHPDIFTGFGTLHPDSEDIQGDFDYLIELGLKGVKIHPDFQQFAMNEERAFKIGDVVNKGNVPLMVHCGDFRYNYSNPDQIKPFLDKFPNITFIGAHFAGWSVWEEATEKLAGTPNLYVDLSSSLYDLTPETAVNLIHAYGADKVLWGTDYPMWESVSEMEYFNKLDLTEKEKSQILYENAAKILGLI

SEQ ID NO: 10711 - protein, 216 aa, Methanobrevibacter gottschalkii
MTNNELKLETKCYDANEYGYLYGLNKKIPDEEFEKVKPFFKDFRRMDFVEGNVQVTGRPEGYRCLEKDVSKVEEILGITNTLEKRQNKVKEAFADPVKKANLIDQSYEWLKILFDKGGTRPEQDLSRLAVHSTKIYDPKDSFKRGCEKGEGELFIYTPHGMWYIINNCGEFSDKSLNNVQTPQGGAVGYRLMYYDLIDRLIRIYSEENIYSGKQLY

SEQ ID NO: 10712 - protein, 315 aa, Methanobrevibacter gottschalkii
MVKVSIFGSTGTIGKNVAFTLARMDTVDEIVMVSRPKSLDKVKGETYDMYDALAARDIDCKLIPTCDFNEIRGSEIVLIAAGIHRQPGMNRLELAIPNAKIVRYYSKQIAKYAPDSIILVATNPVDVMTTIALEASGFNKMKVIGVGNHLDSLRLKNYFSRKININSSEVHTRVVGEHGNHMVPLLSSTSIGGIPLKYFEFAKLDVDALVEQLKNAGNTIISKKGATEYGPAFAISNLISTMITDSHKVLTVSFYLEGEVEGVRNVSLGVPAITSKNGIEMIVPIHMNDVEKESFIEAANVVRDTTYKVKENLNI

SEQ ID NO: 10713 - protein, 147 aa, Methanobrevibacter gottschalkii
MKLVVQRVTHASVEVNNEVVGEIGNGLMVLVGFGVNDTKNEADYLSRKLVKLRIFQDENGRMNKSVKDIGGKLLLIPQFTLYASNKKNRPSFHKALTPDIATKLFDYFASKCSEEVDVETGEFGAYMKVDLLNNGPVTILLEKEADE

SEQ ID NO: 10714 - protein, 380 aa, Methanobrevibacter gottschalkii
MTEFSLNVDEIKENVETTLKEEEKKLEDSNIKNQAQDNAVAIFDADLNNPQAREKILKPLDNFGLNEMSRSAAHNEMLATRFVDLTKGGKESDNIGENLMELNREIKDLDPSKINFAKKGLLGNLMNPVRKYFAKYEKAENAISDIVQSLDKSSKVLQNDNTTLLNEENYLREVTNKLLADIELAKQMDASIEAQIQTAEIEGIDEEKIKFVREEILFPLRQRIMDMQQMIVVNQQGIVSLNVIRRNNKELIRGVKRAQNVTVSALRTGVMVASALYDQKIVMDKINIINSTTEHIIESTSHMLKEQGSEIQKHSAETMISPEVLKVSFSEAIQAIEDVSTYKEQALPKMKETIVMFSDLATEGQKVVEKIETTNENLLK

SEQ ID NO: 10715 - protein, 152 aa, Methanobrevibacter gottschalkii
MRRIKQQLTQEECIEILTNEPRGVLALLGDNEYPYTVPISHVYADGKIYFHGAQEGHKNDAAKKYPKVSYCVIDKGVKKKENWWYTFKSVIVFGKIKILTNNNEKRDRLTYLGDKFFPTHEETIDEINKLLDRTEVYEITIEHMSGKLVREK

SEQ ID NO: 10716 - protein, 219 aa, Methanobrevibacter gottschalkii
MINNDWDLALNDEFEKDYFLKIKDFVSEEYNSKTIYPPYEDIFNSFKLTPLSNTKVVILGQDPYHEEGQAHGLAFSTPEGRPIPRSLKNIFKEINNEYSYPIPESGCLEKWAKQGVFLLNTVLTVEKGNANSHSNCGWQTFTDNVIRILNNQTRPIVFLLWGKQAEKKKELITNPNHLVLITSHPSPFSARRGFLGSNHFKLANKFLKENNIDEINWKL

SEQ ID NO: 10717 - protein, 188 aa, Methanobrevibacter gottschalkii
MEITADEMKKTIRKIYDRLDKVSPVDFDCGKLCGEICCVYDADDYHNEDLALYLLPGEELMYEDSDSYKLYYIDSSEIKYPHSWKGQIYLVKCINPPKCDRSIRPIQCRTFPLIPHLNKKGEFHLIFDESEFPYKCPIVQNHIKLNDDFIQVTYEIWSILIANPLVYDLVDMDSRMRDNRKTDYEIII

SEQ ID NO: 10718 - protein, 461 aa, Methanobrevibacter gottschalkii
MKIEFETYVIFVSFITSFFAVFLSNGIIIGVPAIAQDFAMNNVIQNWVPTIFFLVVAVFTVPAGQISGKFGVKKSLLAGITVFLLGSIGACLAFSTESFLIFRIIQGAGVAFLNVSAMAMVVHAVKPQNRGKALGFTVTGVYLATSLSPVICGFLVHNLGWRAMFYFVIPFLVLCIILLILKIPQEWKTYQHDTIDKVGSIIYAIGILLFIYGFTTLITTNGKILTVTGIILLVIFGAYELRQKSPVFNMNLFKNKKFTSSNIAALCSYLAIMVVTTILNYHLQYVRGWDAQMSGMILIITPIIMAIMAPNAGKLSDKIHPQKLAATGMAIATIALGILTFLNGETPIYFVIIAMILQGIGMGLFSSPNMNAIMSSVPPKDAPTASASQATMRTIGQTMSLGLLTLVFAWIMGNLELSPQYTTMIIQASQTICGICTAACILAIFASLIGIKSSDKFNTGR

SEQ ID NO: 10719 - protein, 147 aa, Methanobrevibacter gottschalkii
MDKSPDVFDNAPIIGWIHNISKNQLKYLNSQIQELNLGREVRYIMLIHDNPNCSQDDLVNIYGESKANVAKSLKKLENNGYITRNMNPENRRKYMLKTTKKADELIPKIRKISLDWEIKVGIDENDYELKEKIRQIAINGMKLIDNN

SEQ ID NO: 10720 - protein, 99 aa, Methanobrevibacter gottschalkii
MNKIEIELTDEQLEKVKQLEAQNISVGQAIDMLFEVKEKALFEIEKIEKSGLIDKVSNINVNNKTENLEENYGDSEKTYEMEVQDIKHRIKWGKDFFKF

SEQ ID NO: 10721 - protein, 228 aa, Methanobrevibacter gottschalkii
MNRKTKIIIIAIFLIIASILFVGNRFFIPHYETIADTDIGTVEVATYGNANATKCIALITGIHPRETLAINPEIDAAKQFANDDVKIIHYKVTVTKNAQDYSKGRANGESLVHNYVNPNVTASDADAVIISHSHIPEYGEGFYVATPAMDNASVKIGENINQSSDFNYYPVTGNETYKSTSAVLVSKPIAEAGYPTFVYEVPENVMEFIITGKTKDLFQLIIENTYDN

SEQ ID NO: 10722 - protein, 484 aa, Methanobrevibacter gottschalkii
MDYDVIYIGSGNAAWQGGRFLRKAGLKILIIEESLFGGACANRGCNSKALLDAPYEIKALADNFEGVGKSGNFEVNWPDLMKFKQQRISGMSKFLDGKFKEYDLDVAHGKGILVDEHTVKVGDDTFTTDKIVICTGLKPVIPDIKGKEYLHDSTDFLDIAELPKHTIIIGAGFVGMEFASIIAEAGLEADVIIRGNMALKYFHQPYVQNVIEILKKKNIRFHFNQTVKEIIKDNNVIIDDPESKVSNVENSMNSDELLRDPQAKINNKAYENAFTVNLDSGCSITGDYVIAAMGREANVEDIGLENVGLTYTKKGIKVNGHLQTAVSNIYASGDVADVGIAKLVTVAIHHSKYLAKELLGKADEITYPVIPAVAYTIPRIATVGVPAYIAEESDDYDVHTIRYGNSYSLELKNDRTAEAKVIVDKDLNIVGAEIYAADAENVANMFTFIINKKITLKDLDEMIYAFPSSSSVCLYKLHNIHYKL

SEQ ID NO: 10723 - protein, 984 aa, Methanobrevibacter gottschalkii
MNKKILILLLIAILTFSVATVSASDNTTDDSVIDSSNRDVVSVDDNNVVSDEYAVNKVSNGALADVNGEENVNNDVDMVIDPINNVSVLQGDNVDVNITVKNIGENNASNVTVNFELPDGFSLIDSNNVSDNTWHIGDLQSSKSTNITVKLNNSGINNGDYVINLTLRANEGIEEIFKQNVTVNVIKKLIQTNLTIDFDKESYVYGDDVGIDVKLPDDATGNVTIKINGTENNASINEVLILSNLTPGNYEVNVTYSGDDKYNGSSGKARFTISKANTTAAIDIVSIKVDDELNITINYDSEINGNATIYVDNIKNQTIEIIDGNGNVTIKGLSKGMYDIKVAFDGNDCYNSSETNKTIEISKNTVNMLINVGDIVYGNDLVINLKLPDNLTSNVTVSLGDINRSINCSGNVTFKDMNAGNYTAIVSYGGDENYFNETKYVDFKIYKASTQTTVNTSDINIGGVLNVSVDPKIDGTATVYLNGTKYSDDIVIVNGSGNVVISNLIEGTYNVLAVFNGNDNYNSSLTNKSIKVSRNVFNITVNVTDVCYGQDVIINITLPGDVTNTVDVVFGYNSQNINLENGVGTVKFSDLDVGNYNATVIYYGDAKYLKSTQIISFNVTKAKPTVDVNISGNKLGQDLVINIALPSDVKNNVTVGIDNISQDVKVTNGVGKAIFKDLTIGEHVLIIDYSGDSNYLNTTEGIYFNVSKAIPVIDIDVKNIYVKGKEVIDIALPDDATGSVTIFINGVEQKTVNDNISSIVLTKSGLAAGTYNVMVSYTGDSKYESANTTVQFKVSKYKAKLTASSKTYNVKVKTKYYYITLKNNKNKVMKKIKVYLKVNGVTYSATTNSYGKASFKLSKLTKKGTYDALITYKGTSYYNKLTKKVTIAVKATPKLTAYSAKLKKSVNAKKYSVTLRTDKYKAMKYTKVTLKVNGKIYTLKTNSLGKATFKITNLNKKAKFLAVISYSGSKYYYSATKKVILTVR

SEQ ID NO: 10724 - protein, 160 aa, Methanobrevibacter gottschalkii
MSQFSIRFAEKEDVSLVLQFITELAEYEKMLNEVIASEELLNEWIFDKKVAEVIFAMEDDKEIGFALFFHNFSTFLGRGGIYLEDLYVKPEYRGKGYGKNLIKRLAEIAVDRGCGRLEWWCLDWNRTSIEFYLSLGAEPMEDWTVYRISGDTLEELGKKE

SEQ ID NO: 10725 - protein, 95 aa, Methanobrevibacter gottschalkii
MNSNKIKIEFEKEDNSSIAYDGNRQIGQCHFARLKQNWIITLTDVEKDYQGQGIGKKLVEKVINEARKEKVKIVPSCSYAKKLMFENPKECKDVL

SEQ ID NO: 10726 - protein, 78 aa, Methanobrevibacter gottschalkii
MSKQEELEQKGYKTYSNDEINVFWNPKLCQHATECIRGNNKVFDVSRRPWVDVSQAPAKEIAEIIDRCPTGALLYELK

SEQ ID NO: 10727 - protein, 549 aa, Methanobrevibacter gottschalkii
MKVIASTRNDDLKRLNEIYKVLKKNDFGYLIEENTFFRKFPFLRNYKIEKEDNFSDESVPLRIRKVLEELGPAYIKLGQMLSTRPDLVGLEIAEELQQLRDNTPITPFDEIKEVIEEELGKPMEDIYSDIDQNPLGSASIGQVFKAQLKRNGEEVAIKVQKPNSREIIESDIKIMKFLAKRIDKYISSSKTFNLPTIVNEFERSILKEINYLEEVMNMQNLSKNFKNVNYIKIPNVYIDYCSEKIITMELIKGITVTELIEGDYPHINKRLIANYGLKSYFKQIMIDGYFHADPHPGNLIVTRDNKLCYIDMGMMGILSEDFKENLAEFMLLLISGNTDNIIKQLIYMNIISPSQNTPELRADINDLLNLYYGAELKNMDGAMEDLLNAMVKNNVVLPNEFVMIGRGIALIEDTGKKLDPNFNAATELKKLSRKIVVNKYKPERLAKVSLNYLLQLEHLAKDLPDTINSTISKLEEGNIEVKLKHEGIGHLINQLSISLILSSLIIGSSLALITDVGPDLFDFPILGLIGFVFSGVLGAYLVLINVIER

SEQ ID NO: 10728 - protein, 445 aa, Methanobrevibacter gottschalkii
MLNEFFKLSENNTDVKTEVIAGLTTFLAMSYILGVNPGMLAEGGMPATGVFFATALASGIACIIMGLVSKYPVGLAPGMGMNALFTYTIILGMGNTWEAALAAVFISSIIFLLITVSGLREAILNAIPHNLKLAIGAGIGFFLAFIGLKGAGIIVADPSTMVTLGSLFSAPALLALIGIAVTLILYVRKVPAAVFIGLVITAILGIIFTAAGFGVGDIAMPSVPTEFVSTTIDTSVFGAFASGFSQLFTNIPNLILILFSLLFVTFFDTTGTLIPLANQCGFIDEEGNADGIDKAFLGDAIGGIIGAILGTSTLTAYVESATGIGLGGRTGLTAIVTGILFLISIIFAPTVLALFTSSVTAAALVIVGILMMIQLKDVDWDDLVVVASVFMTIIMMLLTYSISLGIAFGFVTYAITSIAAGKAKELNWLVWIMVLVFIIYLFFGL

SEQ ID NO: 10729 - protein, 692 aa, Methanobrevibacter gottschalkii
MLNMYYDMMINKYINQIDTSIDALELKLRVWDFINSLDKTDLSEEEIKNIVSNIGNLGTTLEESNSPKFEWYLNTIVDNDLCAKCGACSIVCPNHIVEFEEKPFIVKECLRKGNGMCQEVCPRVNAGSYEIRTRLNSFEEYYYGKSDIKGQSGGVVTKFLEYLLNDKKIDGAVVIGGSHWKPSSMLVTNSQDLLNLHKIDIDSTPKSRYSISSLNAIMEAGEMGFEKIAVVGLPCQVAGLRNIQYHQFNSKHDAERGWNGRPAKIPKIEYVLGLFCTEKFEYSKILDKINTLGINVDDIVKFDVKGPNFLISTETEDYEIKLNEMEPSPGCLMCRDFDAELADISFGEKGSPKGFSTVVIRTEKGKIIKDYFDFNNDVDIEEIEFMRNFKEKRFQKEIKHRKESGKANSYYYLWRFGGVGMGQKGRAYLRFRTTIGGYYDADLLMEISAIAKKYGGIIKLTSREEIEIQGIKLDDVEDIVYDCKDLPLVNGTEGPLVRSLMSCPGKERCLLGLINTSEIAEKIEEKYAEKPANYKFKIGITGCPNKCLSVSTTDFGIHGVKTPLTNDNCNGCGRCEDVCKINAIEITGKNAITDYDSCISCGKCIPACPNNAKDIKYKGYCLSIGGKGGRETILGHEMYVDSEDEIYKTLDAVFEVYNKHAKNPQRERLASTIKRIGQLNFFNEVEKVKLSK

SEQ ID NO: 10730 - protein, 461 aa, Methanobrevibacter gottschalkii
MIYKCLICGHIHNEEATGVLLKDLDKCPTCKQDISNFVEFENSDSDYKIQNEPTDLSYPKEFAKSDKDIRHMDTIHQIAISGESIISSMYTELPMPNWDDILILGCQLNPQPIESNIDVNTTTVIGKNAKIPLVIESPIYITHMSFGALSRESKIALAKGSASVKTAQCSGEGGILPEEMENAYKYIFEYVPNKYSVNDENLKNSDAIEIKIGQSTKPGLGGQLQGVKVTPEIAKIRNKPVGQDIHSPATIPEVNSKHDLKELVSYLRKKSRGRPIGLKFAAGRIEEDLEYACYAEPDFITIDGRGGSTGASPKIIRDSTSVPTIYALSRARKYLDEHDKDISLIITGGLRVSSDFAKALAMGADAIAIGTGALIASACQQYKICQTGHCPVGVATQDMENRERFKIESAAKRVENYLKVSNEELKQFSRITGHDNVHDLNMNDLCTINSEISNYTNIKHT

SEQ ID NO: 10731 - protein, 1061 aa, Methanobrevibacter gottschalkii
MLITLLCLFTVSAKEIYVSSDGSDDLNGTDLNNPCSFHKAINISEDGDSIKMKAGNYSISEEVDKSLNISAYSDDVVNIKNKFSYVFKVKNNNSLVLNSLNFKNFNTAIESYSYPNIMIKNCLFEKSSYMCLNMRGGTTIITDSIFRNNTGSQGSAINFQNTLYKNRSYLHINNTIFDSNHGTNLGGVIYISLSNMYLYNNTFINNKAGYTGGVIFNDVSKVYDNRSRYINNGALYSGGAIYIRGDKDLGSYYGDHVEFINNSAPYKNGDSGGYGTSGGAFTAVDGGEIVLKNSVLEGNKAMSRGGAIWSDQKVSIINTLISNNSAYNETGLTVGGGLYCPLLKVNIINSTFSNNHAKEYPDIFNDITFPSVDIVENINNTDGKKISIKNLTKPVSYCLQPGILNIASSPIIETGTNKLLGSGGYFNGKPIGELLKIFIVQNYQRVLDKKISENTFKSMLGFISSGCSSLPSPFNDSYYLSHRLIKETLDEYEKGVRYPDVNATGPINWLTKKYLTFDFYQFSNEDHQDLIVFTFNESNTTLNPPINVTKKSNTTNPDFNTVVSYVITVKNTNKTSMVFDALVIDTLSEGLVYNGASHNGVYNNTTNTVTWILNIPADSEINLFVNATVEKFGKLNNTVNVFNKTANVTVNVPNTDVTKAVNVTRPSFNDTICYTITVFNRNPNVDLMNLVVRDVLDDGLVFNGASSGGVFDPISRTIIWTINITKGGQAVIYVNVTVNKYGMLVNKVFVDNKTANSTVYVPIEPPVNPDMTVVKLSLNRTVYVGNQTVFTIVVRNTGDCDLGEVFVVEKAPEGLAYSSFKGTDWSYSNGKFTYGKVLKVNESAGFEIVFDAVSPGNWTNVVVAGSNLTDNKTGNNTTKVYKPDMAVEKLSLNRTVYVGNQTVFTIVVRNTGDCDLGDVFVVEKAPMGLVYNSFKGTDWSYSNGKFTYGKVLKVNESASFDIVFDTISPGNWTNVVVAGSNVTDNKTGNNTTKVYKPPVNPPVKPPVNPPVNPHKIEKPDNEKDKIIKKDSSINIRKTGNSIFLMMLSVIISIPLIRRNQK

SEQ ID NO: 10732 - protein, 449 aa, Methanobrevibacter gottschalkii
MKTKYDVVVIGFGKAGKTLAAKLGKNGKNVALIEKDANMYGGTCINVGCIPSKRLITDSLNAPKGEFSLKSEYYRNAIDEKRKLTAALRKANYDKLAQSGVDIIDGIASFTNENHISVQTNDGIRSIEAEQFVINTGSAPVIPKIDGLTESQNVYVAETIMDLEELPSSLTVVGGGYIGLEFASMYANFGSRVTIIQRGNIFLPKEDEDISESIREVLEAKGVQIITGAKTTKIQDGSLYYDANGESHVLKGDAILLATGRMPNTDGLGCENAGIALTSRGAVVTDEHLRTTANHIWAAGDVCGNLMFTYISLDDSRIILDDMNGNGKRTTENRGAFSYSVFIDPPFSRVGMSEKEAEDAQIEYHVTNLPANSIPKAKVLRETEGMLKAIIAEDGTILGAELFCAESPEIINLIKLAMDHQLKAETIGDFIFTHPTISESLNDLFSNAK

SEQ ID NO: 10733 - protein, 81 aa, Methanobrevibacter gottschalkii
MQLITKDNNYRRINELLEKILDKTVKRKHGISQEQPIFMGDDKPITWTELKESETGTTWSQGNITLTALFKYNQGGFPRFI

SEQ ID NO: 10734 - protein, 191 aa, Methanobrevibacter gottschalkii
MNKKVVVAIVVVVIVAILAILMFIGSSNVTLMAGDSCITLPSDYMLDNKGIAYKNDIGIFFISVSGNSPKDQKELFDAIKSNGKSSGYKNVTKDKVNGFKLYEYEANPDKLKNVSSDRKISGSYETWKTYSPYTPYEDVSDMDVTKFRYIAYVNENTDDISELYIFTNNTNVDLYSGEITKIIDSIAVVEE

SEQ ID NO: 10735 - protein, 118 aa, Methanobrevibacter gottschalkii
MMIITTILGTLVALEFFYIMYLETFATNSDRTSKVFDMDKSELERESVNTLFKNQGVYNGLLAVMILLALFVFVSKTALSVLMAYIILVAIYGGITSNPKIIFMQGGLAIITLISCIF

SEQ ID NO: 10736 - protein, 73 aa, Methanobrevibacter gottschalkii
MFNSKFLILILGVLIIGLALFGYFGLSDNALESDSSLNESHDDVVYLWMLDDNDNLKLIPTTETYSEGSGSNS

SEQ ID NO: 10737 - protein, 342 aa, Methanobrevibacter gottschalkii
MINKRFILVFVIIMILHCSAVSAYENYDDFVFNNITIDDSGHDDTKLIDEKSFYYYEEDSGYLSDNIVGGKNIKNTTGVVMADDEYSCGAASFATVLNNLGNNITLYEAKIATNTTLNGTTMKGIIDATKKYDLMGVGVKLETVQLKENYIVNMNILGITHWSVVKEINEEFIILADSNLGNYKFDIMEFNQYYTNQTIVILNKQQYNNHISIVSNNTNYISNIDQKYISGNGYAFYVSKSMSYINANPKGYAFKYTIIVPKWGGKVVKLSTKKLTKHRITVKVIYKIKVYSKSHFKGKVETIHQPAIFNLAHKAGTKFSVSRPTSFPIQSIKYTVSYSHFP

SEQ ID NO: 10738 - protein, 503 aa, Methanobrevibacter gottschalkii
MILAVAFPESFRQITNSIRDFLGIHFGWFYLMVVFLCVVISVIVIFHPMGKIRLGDPNSKPEYSTFSWIAMLFSAGMGIGLVFYGAAEPLSHYAVMAPETTVFTQQAMLDALKYSFFHYGISAWAVYGMVALAIAYFKYRKKEVPNISSTLKPIFGKYTEGNIGYVVDALTIFATVVGVATSLGLGAVQINSGLNYLFGITQSINVQIIIIIIASILFLTSAVSGINKGVRILSNTNILLAILLMLIAFVIGPSLDIANFFIESIGAYMNDFIRMSFRTAASGTVAQQGWVQSWTIYYWAWWISWSPFVGVFIANISKGRTIREFLTYILLVPSIFSFVWFSIFGTLAMNGTTPGSPIIKMPISNMLFGIFNQYPLAIILSILAIILIIIYFITSADSATVVLAILSENGNEETSKKIKVIWGIILSSTATILLINGGLDGLQNILIITAFPFSIILMLIVVSVFKELVYEKDEMRLFVKAERHPTVDRPFKSYENQNKEDEE

SEQ ID NO: 10739 - protein, 133 aa, Methanobrevibacter gottschalkii
MKIFLDSSFLIALINDNDSLHKKALEYVKLTEDNECYISNLIINEVITIIGNKLGLTVAISSYDLLTSVFNIVNEYKLADFNSKVMLIYEVYNTKLSFTDSSIIHIMEKEKINNLLSFDKEFKRVEDINLISL

SEQ ID NO: 10740 - protein, 78 aa, Methanobrevibacter gottschalkii
MVNIGTTKIYKNNQITIPSKIRKELNISKESVIIWSLNPDKTITLKVENKKPSVKDLIGLGSSKEVTNAVDLKRSLYL

SEQ ID NO: 10741 - protein, 110 aa, Methanobrevibacter gottschalkii
MAEYTSIRIRKDLAEQMQIIKKQNNYKSINELLEKTLDKTVNENMEVIQEQALFYIGETPITWTELKQSTNGTRWNQGNETVTILFKDNQGAFIRFEYENEVEVEYYHFI

SEQ ID NO: 10742 - protein, 401 aa, Methanobrevibacter gottschalkii
MMNIETRESLFQPGQPVSADRFKGREEIIEEILKYFPSVKSGNPHHFFITGKRGMGKTSLANFISDFANKNYSMITAHIMNDGVHSIDELIVQIIEGILNSIKSEKWSEKIFGFLEDHIESVGLGGMNIKFKPSNQELKNIKDNFAFYLSDLVNNFKDKDGLFIVIDDINGLSETPDFANWYKSFVDTLATSVDNAPICIMLTGYPEKFIKLHEQNPSVNRIFHVHELNRLDDDEIKNFYTDIFLIYDINVEGMALEAMTKYSSGMPTMMQEIGDATFWSDTDGFIDREDAFKGIIEAGNRIGLKYLQPLLDQKIRSENYLSLFKKIGNELAASPNSTFTKKTFSDVLNDNESKVFKDFISRAKKLGIIELASSKKQGEYQFTNQLYPMYFMIQTFKEEAL

SEQ ID NO: 10743 - protein, 78 aa, Methanobrevibacter gottschalkii
MSGTDELLLKIFFRNYDEEERRNGLIDNKNSQMIVLTGTMLTLQATLFSVGLLNEFVYNKIIINPVKFWIYAVLNNST

SEQ ID NO: 10744 - protein, 114 aa, Methanobrevibacter gottschalkii
MEKVYCTECGNELEGGSKFCPKCGNKVDDETFSIEVSPSKSYKSYIIIGYILAILGIILPILAIFGAIVGFYLIYRNYGDLLSGKFNKTNVNALLILIFSIFAIVFMFNVGFIR

SEQ ID NO: 10745 - protein, 171 aa, Methanobrevibacter gottschalkii
MKIGDFEIGLKTIILVIVALIVIFGIISFFSGGDSVNVTDVGMTVNYNYKTNVAFTIIPTDTITEVNNVQLKNIEVTYHNGKTQHLEDVTFNSKNTYVKDNEYGFKFDYTISDDCIDGLDEYDFGHATHHIKGDIVINTVGGNEKVVGHIDYDVPASATVYKYSSGSGSVI

SEQ ID NO: 10746 - protein, 158 aa, Methanobrevibacter gottschalkii
MSKKIFAILIVVMAFVSLASVFAVETTTHDFDGLFNMSVPSDEEFVTLDSNITGASVFGYNFNYGDPIGDNIIVYYFNESIVDDNDTNITEYVINILDENSTFKHPSVEDGFTVLYNQMVQHDGGYMLIASNDNETEVVGIVGDNLDDLKTYANSIEF

SEQ ID NO: 10747 - protein, 92 aa, Methanobrevibacter gottschalkii
MSENESEPNFWSLIGYIKVSPARLNCITCIGTEYKMPKEIVDATGMRITQISNALHDLKEKKIVVCLNEENIKGRLYQNTELGLQLLEELKK

SEQ ID NO: 10748 - protein, 183 aa, Methanobrevibacter gottschalkii
MQREMDEQKEQYEKKIRHVESVNSALSSQVLDIQNQLDNLANANDLKRIQEYISGHELVEKYNLASTIIGYYKEDVKKEDFTGVTDYYIEDLITQAFNTTSAFQSTAIRDEYYRTDDNWKRIYSEIGLYEHDYIESNGYVLSKSQSKKITDELESYSIKLWEDNEKVKKSKVQSIIDNIVLRH

SEQ ID NO: 10749 - protein, 331 aa, Methanobrevibacter gottschalkii
MKIIIDGYNKSIHKKDNMIIIEENSQTIDAIKANMITDITITGKGYVTFDALNLMAQNNIKLMAINPRGQLNYILESPDWRNVKLKKQQYMLSENTLGLELSKELIKSKMKNQKATLTTLNKNKQLKRVFNHRLKIDEMIAELEKINLNGDNEKIRMKIMGLEGKASNEYWRAIKYFIPGEIGFDGRTKKPTDLLNSMLNYGYAILASEITKNILYAGLDPYCGFLHYDMDKRTSLTFDLIEPFRQQIVDKTVISLINKKQVTNNDLDKRNNTIKLEARKLIANKILKKLFSTITYNDETVTYSDLIRKQSENLVSALLYGEKFIGFYLRW

SEQ ID NO: 10750 - protein, 89 aa, Methanobrevibacter gottschalkii
MLVSFDIKFKTNREKIERVFECLGLRKIQNELYIGEMDNKEQNNLVEKINAIIKDYDSVLIMPICQNCYLKKETCGREIKFQNDLYRVY

SEQ ID NO: 10751 - protein, 360 aa, Methanobrevibacter gottschalkii
MIEVNELTDYLDEYLEEKQEVKNLTEETIKKQTFNISKFIEYLENEGIDELNNSNVKKQLRHYRRYCLKQRGNKRTTVKTYMMNILEFINSEDVQEEIQHDPIKMKDIIEVKAEDPETAKKRIEKISLTWPQSNFFLDTIKQSGNIRDYAICRTFIDSGMRLKELVLLNKDDIQVPIDDNGFYILPEDTNEFIDVYLRAETTKGELKDRTTFITYDTLVSLNDMMMNRITKLRKNTHNVYRPVVQRNKAAEEVNREELFTNIKGNRIGKRGVQDIIKKHARECDERIESEGIDCPVNYGKNVSVHILRHTALSHYAEILTVAEVQSIAGHSNSQTTDKYIHIDREQMKQKLKVNSMRFNN

SEQ ID NO: 10752 - protein, 85 aa, Methanobrevibacter gottschalkii
MSNIVYLYNYVLIYIYVFYKEIHFRHIKYFTNRIHSKDNDSMKLFFDNMSKYLIFSLILLYLNELNLIIIISFVLTHINVYAFKN

SEQ ID NO: 10753 - protein, 184 aa, Methanobrevibacter gottschalkii
MSFNIISISLIAVALAMDAFSVSMTKGFTQKNLSKSQILYYGLFFGGFQALMPVLGYFCGNAIASIVETLASIIGFILLLGIGLNMIRESLSSDDEEITDVFSFKEVTLLAIATSIDAFAVGIAIALLKDPILISSIIIGAVAFIFSVSGIFIGKKIGHFVGDKFQILGGVILILIGIKILLGF

SEQ ID NO: 10754 - protein, 114 aa, Methanobrevibacter gottschalkii
MNAKSIFSIFVFFVILIACTNVAFASENIDDSKFSEESDLDEVDSDLDEVDSDLDEVDSDLDDLNDDSDLDDLNDDSDLDEFDDDSDLDEFDDDSDLDEFDDDSDLDEFDDDSD

SEQ ID NO: 10755 - protein, 119 aa, Methanobrevibacter gottschalkii
YTPHRNTKFKKACKLLNIILVHLPPYSPQLNPIEQVWKSIKRITYTTFVETKEELIKLFKKEYYKIINNKSFFNKWVSKYILKSKVFNYKLRTMGLGLSEKYFLDIIISLAMLKCLMKP

SEQ ID NO: 10756 - protein, 64 aa, Methanobrevibacter gottschalkii
MITINPELTKMQKEFEQNLKKMDLNLSDNQIKEKLALSDLVLMFSFVDFCTSFDPSDVVKFYSD

SEQ ID NO: 10757 - protein, 59 aa, Methanobrevibacter gottschalkii
MKQKTNSPVLFNAEEIYKTFFCNGRCLIDLDFPMTFLYFLNNIAQDDDKIILINVNQEK

SEQ ID NO: 10758 - protein, 887 aa, Methanobrevibacter gottschalkii
MAVVMPAYNSAKYIQKALDSIIDQSLDFRDIQIIVVNDASNDSTKSVVEEYIKEYPKNITLINNDENRGPAYSRNVGLQNVNAEFVNFLDSDDCISRNAFEKAYLFLKNNEEIDIASIPIYYFGIKNRPHNLNFKFSKTQVINLDEHPEYIQLSGPSSFFRFEKLKHYRFNENLRVSEDPLLINQMLIDNPNIGFINGAKYYYRQDTLQNSLIATSTSHKSYFTSRVDNYFIGLINYAINKKGYVPRFIQHILMYDLQWIVEIRFIHLLLSQSEIDELYDKIFFILKYIDSDVIYHQLSLPIELKHHLALLKDHGTAYRLNKDNFQEDFNLNTVYIDNYEFLDKDKIYISGVLTNFLRSTDVYAIADGKIYNTNKLNFTQRRNFSLDFDYGYNHSFDVVLPVKPGMKISFKTNASNLLIDYNQTSRLSGTSRYRFSKDYLSIDCRNHIQIIEKTITKGVKLELSVLKQILKEKKQGWRTGILLRILYFMFYFYFRNKHIWIFMDLPNSSGDNGYFLFKKAIKSDKLKNIKKYYVFSKSKNLHETFAEQENKYVASSKFMKARTLSGFITPNEEFERLKKIGNVLQYKSIKHRLYLLFADYIIASHPDNGIIYPFWGNYHHLSGLARSKTIFLQHGVTKDDISYWLNRYDKRIGLIVTVSDLEKESFLNPKYGYDESCIQVLGFPRFDFLKKGEDKKEIVLMPSWRRQHSQLSEDEFIQTDYFKSINELMNNEYLIKFLKSKGYRLIFKPHRNVLKFIDSFDIPDEAELGIEMSYNEIFNHASLMITDYSSVAFDFAYLKKPLIYYHHDDDYHFNLDDSYFKYDTMGFGPVATQIDELKDEIIRLVENDCQMDEKYIKRVDDFFKYTDKNNSKRVIDKILEFDEMFYY

SEQ ID NO: 10759 - protein, 172 aa, Methanobrevibacter gottschalkii
MTLIDIMLKRRSTRTFADEPVTKEELDKILQAALLAPTSMNRKPCNFMVVERSETLRQLANCKDHGANLLENADKAIVVLADTMIADTWCEDSSVALTYMHLMATELGLGSCWVQVHLRSKDKIPAEEVVREILNVDSHYRIVGMLAIGRSDNIPKPHSLDELDKSRIHFLV

SEQ ID NO: 10760 - protein, 131 aa, Methanobrevibacter gottschalkii
MSEKSLIVNHDAIDEDLTEKFINMHDGLPVLLMNILDDFDDGIWIRRYELYLKYPELENLDGKEMEITSELLKEGKIKEAEDFQINYALDFLDKHPQFKQMIDGVHRQGSKDLEILLNSIKEAFIGDFDYF

SEQ ID NO: 10761 - protein, 96 aa, Methanobrevibacter gottschalkii
MHVKDVLDDLDIRVKLPQHWYSTDVSNEFEDAELVRNDEIIKIRVEGEKNTKVIIIDVDDGMSVVSLLPDKKVIGVKYLKNKDDFEYIGKPSELYF

SEQ ID NO: 10762 - protein, 182 aa, Methanobrevibacter gottschalkii
MVDKKAPAEGWPPISGDYIVGDPESPVAVTTLASHIEADLSGAAIAGPCKTENLGIEKVVANVISNPNIRFLILAGAEVQGHITGQSFKALHENGADPDKKKIVGATGAIPFVENVPLEGVERFQQQLEIVDLIDTEDIGNIQSKINECIEKDPGALEEDPIVMEVDEENQKLVIVNDDAED

SEQ ID NO: 10763 - protein, 117 aa, Methanobrevibacter gottschalkii
MNNCQSSSVNWSEKVRILDEKIRREIGLEGESEAKHILIKVQTKSAETIEPAFIVGEDETFLDLFVLSPQESNIISTAVLKNNIQSIGVIGGMSAEKTDASEIPDRPALDDASTLYQ

SEQ ID NO: 10764 - protein, 202 aa, Methanobrevibacter gottschalkii
MKQKLIAKAQELRQHGFTTGEIADELNVSMDTARWLTLQKAEEKTEVPVDFAINWKSIGGNSTRLSYVSGALSDMALSHGEVDTVVGIAVSGVPFATVMADFIEDMTGIDTSIAIFHPNKHRKNQDSSDDEGAISTNFGTVEGKKVVIVDDVITSGKTVREVIHTVKDLGGEPTCVTVLIDKAGLSEIEGIPVESLIKISRL

SEQ ID NO: 10765 - protein, 317 aa, Methanobrevibacter gottschalkii
MRTVNVGVIGVGAMGENHVRVYHKMEEANLVAVSDVSERALKKIEKKYGATGYTEYSELLENPEIEAVSICVPTTFHHAAVMEAIKHGKHILVEKPIAFTLEEAEEMIAAAKEAGVLLATGHVERFNPAVRKAKELIDDGVIGDIVTGFAKRVGPLPPRIKDVGVSIDLAIHDLDILNYLFEEEITQVYGTMNSILDDCDFEDHAEIMVNFDNESTGIIEVNWLTPYKRRELELTGTAGIISVDYIQQSIEVYGKFAQDIEIKHEEPLKSELTSFLNAVVTGSEPEITGEDGLKALKMVIAANRSSKEHKPISFDEL

SEQ ID NO: 10766 - protein, 289 aa, Methanobrevibacter gottschalkii
MIVGTRGSQLALAQTKQVCAWLEKITGEAIDLEIIKTKGDKITTSQLYNMDSKGLFTKELDIALLEEEVDFAVHSFKDLPTELNEDLEIAAVPKRESPNEVLISSKTWAELGPGSKLGTSSLRREAFCNHYEKEFELKPIRGNIETRIDKALNSDLDATIMAEAGLKRLNLTKYIKEVFPIDYITPPAGQGALAIITRKDSDKKEIIQKLNDHISMQEVLAEKMVLEELGVGCQWPIGAIARVNNKEFKLYSILLTKQGEILKKETQKGSIKDAVELGRRIGEHFQNYV

SEQ ID NO: 10767 - protein, 472 aa, Methanobrevibacter gottschalkii
MNHLVIDLTHGGVKIAISLAKKGKNVLAYDIYNTLNDIEAKMLSIYKIDLIQLSDLASFKGDMNIIYPIHMPISFKDIAKHNPDLNYTFQTHHEIICELLEDWGGDFPKVEVTGVKGKTSSVFMLKEILIDENPLILSSLGAMLYEDRKKIMLKQNISIAPANIKETIDLAYKISNPLCKIAGGIAESENPRRYNSAIFESSLGVSGIGDVGVLLNIAEDYPIAKGKSSASKAKRQVFRCGTVVCQKEAYDTYYNDIKHDKVNTFSLSDENSNLYLDDVKYTPDKTKMDIIFSHVETINGNIISGEISMTAFAPGKHNVSNVLGAVLTALSLEIPKDKIINGIENYKGIPGRTNKKQIGNITVIEEINPGINTKSIEESINMICNLNDYLIAVGGDYGITCEEIDEEKVSELLDNVSCNIILTGDVGSSIQKKMSKKCQLIENYNDVYDIALKNNKNLLFIYRSDYRKLKQR

SEQ ID NO: 10768 - protein, 623 aa, Methanobrevibacter gottschalkii
MDAKDKQIATDLAYEIIREVSRVIRPYVGKPESGEKVKIGADGTPTSLIDIIAEDKMINILKNAPVLSYIVSEEIGELKLGRGTKRSIKLTDELRRTDLKEDEIPKFIFLVDPIDGTNNAIKEIPAFGISIAVSSVNQGRLATLNDVELGFISNFANGNFFEAEKGKGCWLNNEEVHPSNIINISDMTLGGFTKSGTSQASKLVDNARRMRVLGSVVLELSYVASGRYDAFLDLRGSRIIDIAASKLILEEAGCIITNKYGQKLNNILSIYEKTIIVAANNIILHKQMIDILNDNQTDFIGKVGIVSRIDQTRPILFAAKIIDYLLTNGREVTIEEGLAHRLTELKENPEIDKIINEVKEKHPEMADSFEDLNLNINFKQLGEKIFDFDCDMAIILGGDGTLLRAQGKMNPEIPLFGINMGTVGFLTEIETPHTFEALNSILKGDYYKEKRSRLVVSHENNQYSVMNEVVVMTNKPAKMMHFEIQVDGEIIEEVRADGLIISTPSGSTAYAMSAGGPIVDPKVAGFVIIPICPYKLGARPFVVSDSSEITVKLLKKGKTAVFVIDGQINEEAAYEEEIKFKKSDKDAYFIRTSTKYFYEKVKDKLSEGGIPKIQGANNESSCH

SEQ ID NO: 10769 - protein, 153 aa, Methanobrevibacter gottschalkii
MKIAIVSGKDEGPSKLNAFDNALTDAGIGDVNLIKVSSMLAGNAEINKLPKLKAGSMVNCVLSEVTSDNPGDEITAVIAVAIGEELGCVVETTGINEDPNELIEEAEMMVNYMMDKRGVKIKGDLIVESSTATVREIASVVASVVYLKDELIE

SEQ ID NO: 10770 - protein, 117 aa, Methanobrevibacter gottschalkii
MILNKYLSMILSACFFMLLMMIVSAVTVVFFNGGSIPYVGIVFVVIFYFMARMFYNYLRNDELYKNNKNYTSDAPDEEYMIKGPRDAKKIFIIFWVIIVLILAAVSLWLYSFNMGSV

SEQ ID NO: 10771 - protein, 132 aa, Methanobrevibacter gottschalkii
MSTKVVEIKTLKVGKYIVLGGEACKIISYTTSSPGKHGAAKARIEAVGVFDNQKRSLVKPVDNKVDIPIIDKRLGQVISIQGANVQLMDMENYDTLDLPMPEDLKDSIVEGIEVEYIVALGNMKIMRIRGSN

SEQ ID NO: 10772 - protein, 288 aa, Methanobrevibacter gottschalkii
MLLNTYEPWKFAFSSENENIKENSFGIIGVPFDSTTSYHSGARSGPIVVREASFGFEKYNTIFNKELNTVFYDFGDVNVVPGNCSKTCRIIEDTVNELSDLKIKPIIIGGEHSASIGAIKALSEKYERLTVIHMDAHRDLAFDFIGEKCSHATVMRRAHELGVNLVQIGIRSSSKDEEDFVKSTYNIQTFKNKDVHKHMDAIEYYLTNIDGPIYISVDMDVIDPAIAPSVGNPTPGGLFVSEMETLLKTLSHKNVVGFDVVETASDRLGDNTAVVAAKLIYDFLTLMD

SEQ ID NO: 10773 - protein, 406 aa, Methanobrevibacter gottschalkii
MNKRTIELSGHIIDSLTLTKTMGIIMDKGGEFDILEIDVGRKKSDISHAKIEVSADSPELLESILDELSVLGAAIDEIKEVNLVASVKDKVAPEGFYSSSNHSTHIFYDGDWIPVEEIEMDCLVVVDEDEKRAFVKPIADVKVGDKIVVGLDGVKVTPPHRSRDEQQVFEFMNSEVSSEKPLMNLIKGIASEMKEIKAKGGKIGIVGGPAIVHTGSGKYLAALVKEGYIDVIMAGNALATHDIESNLFGTSLGIEVETGKIVAHGHTHHMRAINRINRSGSIKNAVEDGTLTGGIMYECIKNDVPYVLAGSIRDDGPLPDVITDTAESQKLMRHYAQEVDMVIMIATMLHSIATGNLLPSRVKSICVDINPSTVTKLSDRGSAQVVGIVTDIGTFLPLLYNALHEE

SEQ ID NO: 10774 - protein, 571 aa, Methanobrevibacter gottschalkii
MEFTAYILDVLTDSAYPARIKIEDGIFKEITPISADCEIELDVEGLLLPGFIDSHIHIESSMLTPAQFAKIAVMHGTTSVVCDPHEIANVCGIEGIEFMIENASQVPFNFYFSAPSCVPATSFETSGAVLDSEDIEFLLKKDEVVALGEMMNFPGVIDGDVEVIEKLELARKYKKPIDGHAPLLSGKELDKYLEQYIITDHECSNFSEAIEKKQKGMKIMVRDGSSAKNMEALFDFSQRIEYLRNQDSFGIIPSEVLERRIHSPIFDFIVSDDKHPNDLIKGHLNKSVKKAAELGVDIIKAIEMVTINPAAHYGLEAGSIVTGAKADFVVIDNLIDFNILKTYVAGRCVFDGEKVLFDAPEVDARNSIKTTKKTEEDFEVYFDGDECEVNVIECYNGELLTSKSGANLKVINGVVKPDIYDDILKISVVERYGKNNMTNAFIKGFGLKKGAIASSVAHDSHNIIVVGYDSAMMAEAVNTIIENKGGFAIASEDFSESLSLPIAGLMSNEDAFVVANKLEVLHKMSQALGCKLDSPFMTMAFMALLVIPSLKISDLGLFDGDSFEFIDVIKN

SEQ ID NO: 10775 - protein, 208 aa, Methanobrevibacter gottschalkii
MKTDLALIGMEKGRQYETIITTKNCENIKNAAPIGVICAGRDKILNRIFKGSQTLENIISQREFIVNITHNPELFTVSTIGKLPQDYFSEDNSLKCADAYFKCEVISLTDAIKQSDPIKKNGAAVVIKSKVTQLMINKPTQAMNRGFGYVIESLADLSRFDMAGEDKKEEYLKKFREANRVVTKVGYREDIKAMGEIKKELIRKGYKP

SEQ ID NO: 10776 - protein, 336 aa, Methanobrevibacter gottschalkii
MNYKMYDEMMEQPESLSKTFKSELSKMEDVSKLVSDADKVYLIGCGSSISTCYSVRDAIRMSSTNINIEVFTGYEFYYNKKLVENENSVAIFTSQSGETADTLASLRRCNDLGIHTVSISNESESSMTKEAITSIITRCETETAILGTKTYITQLACLYQILFAVSDYENKTELLAELRDLPKTLEKLLESTEYENKALAQEFKDEDILYCLGSGPNFGLAYKLAMTMLMEGAIKHACPLYAAEFRHGLIERAEKDVPAIFLKSGIESDEVTDKAIEFSKNLELKYLVYDLDSYAGLDRLLSPFVLVIPLEWFVYYLAHFNGEDPGATRHIGKVRY

SEQ ID NO: 10777 - protein, 193 aa, Methanobrevibacter gottschalkii
MVKSETIDAEFSEKKEKFDEKKEETKERINETKEKFDEKKEKGKNIADNVINDFYKSIDEFKDSIKNMQKTADQRYSEYKKSTVQTIDIDLVETKEMYFIKAAVPGVTKEDVSIEAGDNDLTIETTFKPYIEEFDEEEGAEVIVSAIKSGRCVKTVRFSNSIDIEKITAKFTNGIVKITIPKLIIPKHKVNVE

SEQ ID NO: 10778 - protein, 387 aa, Methanobrevibacter gottschalkii
MKHNPFRKRTGILPSYFTGRENELNELNEIYCSTKRGIPGHLILYGPKGIGKTSLLLKFQDEISNFDDVYSVRIPLMEGNFDDIYTLIIEKCSDALNINIGHFWEKINSLGINIPLIGGISFSREIPKTSPAVAFEKILNVIYDELDSDNPVLILLLDDLQRIIGDDETMKILSILQNALVELNLQGKNIMFVATGSEDIFYKIQDKLDSAVRIFEPYLIGPLSYDELCEAINVPNKKQNVSFEEDVLKEIYYLSNGIPYYMQILAYSCFEEINADNKVTMTEFKKASVHSLNILAQREFKVLFSKSTTEERKILCLMAESDKTVLSYSYIKDNANLNSEPSALLKNLINKNMIIKPSRGKYKLKNNLFKLYLQNLRINQDTGLINE

SEQ ID NO: 10779 - protein, 342 aa, Methanobrevibacter gottschalkii
MMIPTIPTPQELLDKGFSRGKKQADLLRGQKIPKHLKGKRIEERRVVTSCQVIKDKLKSILDAVPEIESLHPFYQDYIDITVGVDDMKQALGALNWAYGIITQLEKEYGSKIRKNPSERATAIQKQAYGRIASVVNKIKKDLDFLDFAKQNLRNMPTIDFDATTIVIAGFPNVGKSTLLRQITGADPQVANYPFTTKGIQIGHTERHWKNIQIIDTPGLLDRPVLEMNDIEMNAIVALEHLADAILFIFDGSETCGFHLDNQYNLLKQIEKIFSEIPVIYLFNKMDLVEDAEYLKEYIDDEENSIFISAIEGEGIDKINAKIDRIKKIDRTPAEEEDEEGYY

SEQ ID NO: 10780 - protein, 1171 aa, Methanobrevibacter gottschalkii
MLKLESIESSIFEELSNSIIYFQYGINIISTGLNREGKPIKCPIDAIGTIKNDDKTEFVFIEATTTQVNSLKDKWLSKSDDKPGDIIKTYKKAKEFFNLNKNSSFKLFLMTNRDLSGDKGLDLITEVENENFDIPLKIEIMEQGSIKQFLDYDSDGQYLRKKFLQIDVERLSKPLLHKICDENLQAYENFINTTGFNNLIEREELPSIEKHISNNNLSFLIGESGYGKSVISFQILKRHINNGGYGLWISEEFLKNSSNLNYTLDELLHQYCPKLEKNSGFKALNFNSNDNFLLIFDDLNRSENPKKLIDKIINWSKNIKSGKENTDENYHDKIRLICPIWQKNMKNYGSNLDNDSNIIIEKLKDEDGIKILKNTAKDKGIVLSDLEVKNYLKKLDNDPFYIGLFISELNKFKNWDDLINNAFQIFLNRKFEELDEEEFLPQDYERILLKLSQNMLENYILTPNLLEIDSWFVSDRDKKILRILIKDRKICYLNNNQNLYFIHDRIKFYYLISACTKIINDNPQSEIFKEPFYAEIIGASLYNIGKNKKFIEFLANNNLLALFASIKYIDDANENYEQILGILTEWSNEKHESYPSFQEEVVKTLYTYDSELVVTLLGNINSLFTSIPCFRNGSTIHGIKKALNIFGYNYPLFKQTIEHVKIHYKSKIIEDIKRILSSDKLDDDLLCGTFLLAGYLGFEELEEIIKSSVKLFEIKEDNLYIILFAAFRCINNDMDFIKNLLEKWDMFGKKDDEIRFPFIEELRLTFRDYPVTDNVLNYLGFNFQEFSNIKHSIWYICSELNKPLSFKMTLDYLSDNEYLFDILPFFRRIQISSESRIFLENYYKKEDIKGHSKKYAFRLWAMNCNENDLPKLQKIDKDNILFSESLITRIRLGDLTALNSFIKNFDENVVLNEIHNVWNDEAKLFVEKCFKDMELNENKEIQDGYDYVHLMQCLAKIPLEDAEYYIKQYWDKIKYYRIFIQLNFYLCTNLSIGLNNELFVEIKPDETLFEHFTINFLYMEGYDKFSTESHFNEIIQYLVYFKNSDLDLIFRKAEELGYCRWIRKACRNLDKNQFSKYCKTDKNIVSDMELYDNYSFWQINFENNCLNKNRINNILRLYLNNNQNIESFINVAKFIKENGNRDDLKILFESNIKEDNMLYDVEFSVKCRTLD

SEQ ID NO: 10781 - protein, 436 aa, Methanobrevibacter gottschalkii
MIIMGITDYIKTRLLNNRVEQYNTKRSYCGEDERQPRTDGINTGLDLPDALPPVINKTITNARYAVKLDGYTSGILKNRIDKANVNMVLVDKENKLSQEQKLTLILWARKIDISQVAKNILQGGMVDGEGLIKPVQRWDKSIGKYIKPVFLEIGAHGYGLKKEFNDDNEVQLYLHEMPKDIVNGSPEEFDNYVSVEEGTLTVKYEPEEVINFMYNEIYCEAQSIILNCLDDIYHKCNLERNQVERINKDNIIEVKPAMDANGQPYITELSSTAKENLYADYGTTAGSNVAIVPPGIESKILGGNNYQSDYTRQTEIFRNNILRTFVTPQSQAGNEKSNQNVAEYINDSAITGFIVNVANDQKWVLKYCNQLLNLQLELMGISETLDIYFSYSRDDVLRYIMELSSEGDEIYKNYLSNFEEEQPVGERILSENGVEV

SEQ ID NO: 10782 - protein, 632 aa, Methanobrevibacter gottschalkii
MKEKMGIYQRYNLGPQHYHSYFEFDFKNKKAQLISQDITEDFRKDNALIYTDDSNLKIANSLLIAEENKIFDLNEDDCQKLYSEFDKIKYSHDEEIPGIWQLSNITFSEKNFYDDAPEIFKIHESNYQYVNNYPKNWIPLGNLIIDLLGFDLLNINLNNLITPLYYNITSEGVYEKQTNNKLNLKKLNFNIVSFEEPFNPFNFSIDSEDSDFEKIIELLEDYGVYKWYDKDYAENIIESDDFNDFKGNSWFIELIFENGRVLNLRGDNAYPDTYIHLGNEILNFKEDLLRINEIDKEQQNFIKSFGENKLAKKRNIIKKIEISQTILLDDRKHYEFTLDCENSVIIPYDNYDLYEPREHISRDLSKKNYSVSKLFYENIVKEEIKLDEQKLDNFLNEINELKFIDEKPHMWFYDKNYYQNLITIHTPMGEKSYNLTNNYELWKKLGSLFEELLGFDVLNIKNFKNIINPFDYDICNDGVYDKETGDKLSLEYIEYGHEAVLHFGIGYNIYVDLLKGTTSGLIEKDDLSNDEIEKIVSLLEKNRVYEWVFDEFWNKAIYHKWCGFDGYNWYLSLVFEGNKVLNIGDGNDYPDTFVNLAEEVIEFSGKDILKLKTVYEDDIKIYKKYAELHLNG

SEQ ID NO: 10783 - protein, 317 aa, Methanobrevibacter gottschalkii
MQCYNCNGIYNDYLSYCPYCGIEKVEFNVCSNCEEKLTKDILVCPKCGGKPIEETNEMKSDRLNREGLMHGMTSSPSDYFNEAIKFNKYNIDAWVNKSEFLNDRTMHKAKKCCDAGLKINKDNMKLLLSKSKALKKDERRSDENNAEIILNNLLKRCNQELQENELNEEIWILKGEVLNELDKKEDAIECYSKALEINPKNEELWIRKAFLCYLNNDYYCEIESYKKAIELNPTNEKYYEKIGDVYHLYIHDNEKAIEYYNKSLELNPDNKQLWDTKGRLEKEIGKYEEALKSFTVDAELNPIMMEHYYLKQKYFVN

SEQ ID NO: 10784 - protein, 78 aa, Methanobrevibacter gottschalkii
MMRHELFEVGSYDYSDLDDRLDKPVIWSEDDLKLIAENYRGGIPLTSEHDNIYVGIGNNIEYEKGKLFIEVPDELDME

SEQ ID NO: 10785 - protein, 220 aa, Methanobrevibacter gottschalkii
MSLIDVGVTKNPRKITLLNSEITGNTGATGNPNPAPQGQPQPAPSKDANVATSLLLEKLQGKDVEIGKLQDEINNLKEESKKYDEIKKAIEENKEFIDSKDDILKELSELRKAENERKIKEYEAKYNFNYNENAQDKEIIDKLLSGDVDMELMEKLAERRIKIEASNDGSTPGGRNPSNSGDVGETGETGSTGNEDAPSFTTREEYNKILKDMGFNRTRI

SEQ ID NO: 10786 - protein, 652 aa, Methanobrevibacter gottschalkii
MVSNNIFISPIEFKDWENWKNKINNSNDNEELCHIAETDREWYIRALAVNKINDESILADIAINNSNSYICRLAVSKVQNDELLKEIVDKSPIYEVWEDALSQIDDEYILMDFAENGRDFHIKWHAIKKIKNENLLVNFVKKRLKHTRKDFIDKSKSFDESREYSLCTIAVENIHDESLLKEIVINDYNQAMGIEALKNIHNQEFLIDVALNNYDVHYKLSAIRNITNDDVLIDIAKNHPQRFVREKAIEKISNQAIATDIIANDHEIEVDKLDIQHIDDSLLFNLVKKDNNWLRRTYFVKAIQNTDYLKEVVCNDVDSHVCKAAVEKIHDESFLKDLVNRDFSSEAFAWDVIPAALKNIHDDSFLKDIVNNTKYGRYALKNITDESFLIQIALNCRDSHCRSEALENIYDESILTQIALTDPQMHVRRKAVSKISNDFALINISIMDPGFQEYDRPYCVIYLVRQEAESRLKVLLENPDIKTNTEYVDVIQRIRYELDEKRKTSTQKGIIHIPYNEMKDFTQNKTIIKEKNKKRKITKNKRDEKSNLEVEINKLLENYKNDVLITIISFNNKSLFKKGSIFNIVKEPDNPYDMEAIAVKSDNITIAYVANSVRTVVKGTMSAGRIYDKFGEDCEIEVIFVRDQIIAKLIFD

SEQ ID NO: 10787 - protein, 90 aa, Methanobrevibacter gottschalkii
MIIHFTRQNHYVIKIIGKLSYYINDSQDEKGIKIEKLKNKMRNYGLNDLEFDALINKLIDIGYLNKSNECNISLCEDNYYSLYDVLTLHK

SEQ ID NO: 10788 - protein, 338 aa, Methanobrevibacter gottschalkii
MLNIINKNQEIKEEFFYLERKALRFYKRKKYKQSFEYYKKVLKASNEFKNNSNESHFKWYDEILSNCLKKYSDNYDEFFKCIYSMNIENYDAWFDKAKLYGNNNKRNEAIIYCYKLLKIRPDDLDLLEFTGHNLCFSHRYDESLKIYDIALSIDKNNKDLIQDKWYVYYTSDRIYDTLEFCKNLENTDDITSTDYQALGFRFEEKEEYETALWCYKKGFEIEETDHKEFDTDSVDAIKRMLLKLSIDDYSYINEFYLEWISKIEHKFETTNCSKCGGKLTPIIYGLVVGDEVFEEQEKGNIIVGGCSVDESSPTHYCKKCDEEFNFRFNGLKIDYPFY

SEQ ID NO: 10789 - protein, 555 aa, Methanobrevibacter gottschalkii
MTLQKKLQINIVMSNYNQRSSSYSSGHDYIFLDNLASSSYSNYFRSDLKNLKIKTSNGTECQVVYIPSYGSQGAAILARVSVGQISQNTKLLLDVHDTGTAFASTLSTGNEVLMFDANNDTYSQFFMNYSGLSSNNDSTDGGQFLRARFVPNLEGTSPTDLFTTFASGQPLANNRVVVARFKYINGNVFVNDNATYHGSTIGGIMMQIDGTLSPDESNVKATVNYWGGEKDYCMFTGAKTLVLASSFDAYNQGSDEEGNWKQYHFHNRVGTGTSNTSDYIEGFSRNNPTKIYLGCFKMIIDYDVNSTIGHGRGYPTGLEHTEKMDVIACLLDEGERTYVNDEHTAWICSNQCAVGDMVTLDMSSTMEHTIVRKAQAGELAFGYLLGKVQVKTSGLTLVAVAVLGDVFRLKLKRPVAEDILPNTRIYIDSAGECNPVEGHDLRLLSIVNLQNNEDTDYIRVYRQMSEVEMYRESQNCIDLGDCSFEQDEITHVVNMIVPSESNIMAQANYVKDADGVTYCELPDVAIVNNVRFVWEDNKLYMEWEGCDDGQNVYFI

SEQ ID NO: 10790 - protein, 63 aa, Methanobrevibacter gottschalkii
MTIRKLVGTLENKGPYIDQSTGHWFYWNGTRYVDSGYPYAVKLIIEFKIENGILYYSITWEAQ

SEQ ID NO: 10791 - protein, 49 aa, Methanobrevibacter gottschalkii
MKYIKYFETIEEYESWMKVEENAEEVYQSEEKILVDGVIISHTYKEEEI

SEQ ID NO: 10792 - protein, 83 aa, Methanobrevibacter gottschalkii
MIYEFLEANRKDIDILTSFLVTAIPIVMLYSEALGITENTIPYCILMIILGIASHYASRIRGEGDVEDAKQKAKRVLGFPEEK

SEQ ID NO: 10793 - protein, 89 aa, Methanobrevibacter gottschalkii
MNKIKKKIFICNFTKTISSAVLTAVAINIIMTNATKYALIEGLLPFTLAIVIVGLIDLYEYRCEREDKINLDELEERIEKLEGNVDGER

SEQ ID NO: 10794 - protein, 118 aa, Methanobrevibacter gottschalkii
MWMEKGKILIAVPTFENIKPQCFKSIYGLTNPKDFNLYFDYVKGYDCARARNEIAKLAIKHDFDYVLMVDSDVSVQKDALVKLLECETDIALGWYFKKRTRTDESVIFDFGKDYSNQR

SEQ ID NO: 10795 - protein, 200 aa, Methanobrevibacter gottschalkii
MMKFMITITINNIENKELKSKLKKIINNDELLLENILNTINKEKNYNKLLLTFKNLSEKNNTIKKLYERLEKNPLSFKTKSKSVLENLQKGMLLAFFSDNELKHELILEKPIAVILDNYSVHHAIFFTELCKILNMDLIHLPPYSPKYNPIEQVWRTIKAKISRKYISSIAQLKYLFKTEFKKVVDNSSFWKNWEENFLQ

SEQ ID NO: 10796 - protein, 162 aa, Methanobrevibacter gottschalkii
MSNQKLIKEYLGIISEIQAEIKKLENDTRVLNKLYVILDVLHDEPIPYIVEKHGISQGTVYNWIREWNEGGMEGLKRKKGSKGQSKLTDEQLILLDEIIQEENLQTAREVKDKIEKEFEVKYSIRSIERIMKKLGYSYTKPYKIYAKMPADAEEQLKKTLDI

SEQ ID NO: 10797 - protein, 127 aa, Methanobrevibacter gottschalkii
MFKTTYVSNFGEINHILNYCYEELEWGELIKLSNELLDIEKNHQNNRRSDNIQYSVILIAIVTLCSQLLIYYSNFKDVILFIGGIAFLFFLSLIFKEKIYYVWQILKLVPKFIYNLIVLLLKRIKDL

SEQ ID NO: 10798 - protein, 330 aa, Methanobrevibacter gottschalkii
MIEGHYTQKLTNGECPYELVYFEVDLLRNIIDNPRYVISNNSFKYNISITEKYDNDETLDEKFKFILDNVGLGFDENNERIFAVLLKELSELHPEMQKRFSVYEVKKKSYVDPSYIKSMNDGEWPDPSVFSAILYQIEQLNNLCSDNEIKLFKSNYKKKPPIEFNILVLSTKKEYDNFIKIFDIMLSDNINKKFFEGKLDLIEFTNKDGTKKKDKGTITLFKEWLGEIGVSPATIKKTIKIINKVRSERSKPSHNIRDNEFDIKYLQKQNKIVLEVYNTFRLLIDELSRINQIKVKHSKWYVENRIAIQSLDEIKNEDNENYQLKICQSK

SEQ ID NO: 10799 - protein, 189 aa, Methanobrevibacter gottschalkii
MDLNFISIILDIILTIVTGFMAFATYKMARSTNESVEEMKKTRVEANSAEVIMYFKVENNRMYLIVENIGNTVAKDISIEVEPELKDSHNKDYEHLKEISFLPPNYQIKAFFDMGFNYLKNEDNPVKYKFIITFTNIYNTKITREYISDLSYIKSVSYLTSESDSIEMSLTKIKDELKNTNDYLKKLNN

SEQ ID NO: 10800 - protein, 54 aa, Methanobrevibacter gottschalkii
MKINEETKVRNQGEISLITTIPKTYVKALNIKSGDILEWILDTEKETLELKIIK

SEQ ID NO: 10801 - protein, 333 aa, Methanobrevibacter gottschalkii
MIKVIELCAGAGGLALGFEKAGLEHEVLVEIDKDCVATLNKNRPDWNVLHADIKEVDFTQYHPDIVVAGLPCQPFSYAGKKLGFDDTRGTLFFDYARCIKETNPKMCIIENVEGLVRHDKGRTMETIVNVLENELGYDVQYKVLNAVDYGVAQKRKRMFLVGTKKGIIFNYPKKVKGNPVLRDALKDVPESEGTEYSDKKKEVLELVPPGGCWVDLPEDVQKEYMGKSFYSGGGKRGMARRISWDEPCLTLTTSPCQKQTERCHPEEVRPFTVREYARIQSFPDDWEFEGGITSKYKQIGNAVPVKVAEAVGKEVIKALNGENKRKEGQTTLF

SEQ ID NO: 10802 - protein, 242 aa, Methanobrevibacter gottschalkii
MNKYVTFVSDEIFLEEVKKVVDAYATDEDLSKTPWEVLSNSRETIDQFKTLFDIYSNRFSLSEWINFEIPRQHDKTASNRVGDFHQNLLGRVDGWVNLGRGHPSGMDLKKEDDTIWIELKNKYNTMNSSSLRDTRFKCEELAEKYPNAKIYWAYIVSQNYESFDKTWVYRDNKENVVHEINDNIRNIAGKDVYTLVTGDETAFEQLFDALPNAINDIKKSKHILTPKDQVVFEKYKQLIFKD

SEQ ID NO: 10803 - protein, 164 aa, Methanobrevibacter gottschalkii
MADSIILLEERKEVTTFLLDEGTITATTVTTPTGETPGYEYAGTKIKVDDVVTLSVNSDIGKPTVKKFTGAEGEIILGIAVNDPVTMTGGKRKTAILVLGHLFRLKLASGISNIAVNNRIALTSTGAIKSDEGEYIAMHPVTSSDDYKYIEVFRPYDIGTTGST

SEQ ID NO: 10804 - protein, 312 aa, Methanobrevibacter gottschalkii
MITKGNDTKVQNEVIAQTITDETAKRLKLARLFPKQEIKENSDYYTYFRQNINLDEAIKKGLLGEAKDIAPGASLQELNIRKPVTDTISIDTVGGVLNVNKDVFDSDIVSFEDLLGDVATVIANRIEYNIYDTLISSPNVPQYNTTQTDDTMDAFGNFVIKAQEAFKGNAGAGADLTIMAESYKTLSYVKQLAYSSNKLVQPVEDIKEYYGIDNIDLLGTTQADGGSLIGEKQYIGFDLRNAPLTVLYSKSSGTTVAPITSDENIADFYPIIEIMRKDIYDELPQYTKLFIQSKVGILLNKPGLALKGTCRP

SEQ ID NO: 10805 - protein, 308 aa, Methanobrevibacter gottschalkii
MLTKGNDAKVQNEVMAQIVADTSAKWMKFTRLLPKQEIEENSQYYTYMSQRVNIEEAIQSGVLGEAKDIAPGATLQELNVRKPISETISIDTIGGVLNVSAQMLDSNLISVNDMLQDVGILIGRSIEKAAIDMIMNSSKVATYNFESGDDTGMTILKAQEKFKESAGSYANLNSMAVSYKSLTTLKSDIFSSNRQVEPVELIKSYYGVDNIDILGTAVCDGGSEMGDKTYIGMDYINPGMKLLYSRTTGTTVAPLGPDGEMYDFYPLIEFMRKDIRDELPMYTKLFILSSVGVLMNAPNRIIKGNFRA

SEQ ID NO: 10806 - protein, 138 aa, Methanobrevibacter gottschalkii
MKLILDTENSHPTTITVKGKEITLLLIESSILIDSSQIAKIFDKKEKTVVTKVLKSKLEKYETENVKLLKNYGLMHPDAVKPRPFYDLRQMLEGPAYYYFKKEDEVDIIKVIIRVAIGKHREWIHNRCIDKFRVGCVR

SEQ ID NO: 10807 - protein, 545 aa, Methanobrevibacter gottschalkii
MLGIKEFLKPSVLGYYKRCEVTQISFYKDNHEEESNLLTLFIFDEENFQGRNEIFLTGKKNKINSKYKLCIKRFYLSIEESIELFNCLNQGVSKTSSLKKYIFNDNPLKLLPQQFITTNEDIRFNKILKNNFHSGSYIFEFFDEEKDFELLFGLNKSGRLKKISKMIGEVVPIDLLSCTDCLGNYIFQLPITILNVHTNKNKNILGIDFYWHNNLINEVKPNCLINIYSKVDNNYLFDIFEEYNKENHQKINILPSGKNYVLKIWNNDLKILLYEMNSKYFEKFRVSLSMSECERKFIEDNGESEVTIMSNPKLSDDISYLNYRNDAMYKKNLKELEDNLKFNTYMQNENALEDIKTLINEYGKNGVNIIDPYLEPNDLIRTVVHLKFYDAPIKAITSLKNSFNELLIMKEMLEQLPNQNIVQNFKNVLNEKIEKEKKSNLECIEDYKKELDEKIINSCGLNLVFRAQFDRYGQPFHDRFLIFPGDDEKLLEPIVFSLGTSLNAFGKHFHILQEVSHPQHVADVFDKLWGILEQKEECLIWNSKE

SEQ ID NO: 10808 - protein, 506 aa, Methanobrevibacter gottschalkii
MGDIRTKRGVSDLEFKGIIDNFDEFNMILVNEELILLFESLHDFSFDELMYFEDPLHYENIGVQKIMSQIDEIISVLFYNIDIKTTDDVISIVKSDILLFKRAMDQIDLKYFIFFSYLNSYLNVDVDYLINHFNYELNMIKMEEKINELFNQIQVFPKPNDNNLSPLLKNVLFKSLKKDDIMHSSLKLLNISKDPFIFYNFKIYCPKLLTSMLILIKKINYDFFLRNMFDVNNLIMAVLFCKELDISEILECYYENDISNIDLLFTFLKKSIDSNELIDDNIVFIKDILLDILELNENLFRKIIRLFKHKKLFNRSIGLLLSGINKWEVELIVNEFDLNFGANNHLINLRENILINLDKKSDNFKLVLKLVYKNWDLNLNSLIDDDENGWDLLCSDFNSFILEYYNQFYDDDMLVEEMKLNFNFLEKINSTWSSNFTNYKNRIHVYYTKLYLLSSIYKKRNINNIEILGCYENFFKNKYLIEVLLRDKAKKSIIDFKKDYNMMKIQ

SEQ ID NO: 10809 - protein, 495 aa, Methanobrevibacter gottschalkii
MFKEGINTIIIESYDELACIIKGKHEKNKMDLREDFIFWGLSNIEYELIPSALRRNKLNQLEINELIESDHIFKVSIDENDAKMFNLEYSESINDGEVIIGVDKYGNLIHDVKSDYKVLECDLQRERENYLLLKFFNCADKSGLKVKSEGFLRELIHNYSSKRLEEYWLDFDILETISLAQHYGLPTKALDWSYDYKVSLYFAVKDVIESNLSSDGVLWALNYKLIENHNFNEEYYVNLHIHRPEYNTNPNLNAQKGLFTFLERYVGDYDKPLNKIISDELNKTLDQMPWDNLYESKIRTIPDDISKNDTIFYKFIIPKEIKQNILNELYLEGYSEEYLFPGYKGVCESVINRVKLNEILKNNDEHIKKSILLSVDWNLNEIINKNQLYVFVNLDFKEEIDKIFIYHNNDVVGYFRGNEIIKDSLNVLWEQFGEHSGLSEDKFDECFKGNDESFAIRINDLNIFKHSIKLCDFELENDFCFVEDNEDLKFLLNFN

SEQ ID NO: 10810 - protein, 272 aa, Methanobrevibacter gottschalkii
MSDNKNNNISWTSFCQAMNSIAYWLLQNKKKYKKRDHYQILTLKGSCSDIEKKAKKLGNDKLVSMYTMALIKDNTSLDFLPNYVTLKNGEQIDKAEYVDMAIRTEAYIRANKRLPAIVYRMSTLPDYKDSTMKLFINVFNFKGNTIDEALAIISKMKLYSKYFDSQKTDKKTINDASLGKGSNCVDWGQVYYRIAKSLGYDVQFVHVKCRVSGTGHIKLRLKHKKHTGGNWINRDPAAVADTTSGNVKSIWCEDGYLIAYDPSWIFTDLYSS

SEQ ID NO: 10811 - protein, 262 aa, Methanobrevibacter gottschalkii
MGAFEDYRKRIRKEIPDSTEYFNYFFNNDYDNAIKVVKRDMDKYNQKYGIVPLELERRLEDAKMMKYSNIYYKNNEKAEELEKEGKIDEAIEVLESNILIHTDTPFTYYHLSSIYQDRNEIDNSIRVLKHGIKNCRKIPNKSHVNSLKRDLEKAKKIKKETKSQRLPSANEEHKQRDKEADDLLKQGKQDEAIKLYEINLNERTISNNSYSKLFKIYFDSEKYDDAQRVCEQAIEIYKPINAAKVSQYRQYLSKVYNKKEDL

SEQ ID NO: 10812 - protein, 65 aa, Methanobrevibacter gottschalkii
MANINNTSSYMDEDKKQIIKESNYTFRDALEVSSYLIEVGKFERFYKEMQIHDLQKELDEMDDGE

SEQ ID NO: 10813 - protein, 82 aa, Methanobrevibacter gottschalkii
MLLEKTNISARVDITLKKIVEDSTFTHKDAYELGAKLIAMGNAEETIVLINTNPDFERIMKQTEYSLIEARKLELERELRVL

SEQ ID NO: 10814 - protein, 270 aa, Methanobrevibacter gottschalkii
MGRGNSDIIYFLEQHEQEIINCCKKGMSNNEVIELLKTKYGRDVADITYRKFKAGLNLTKSDFLETLLDEIMVMKTSGATDANVRRWLEEEHEIEVSRSTFSRFKKKYHITDKEKDPRARDKDSLTNRAITQGQIIDNEVHTDNIDLAIDTILQQQVTDIKTGLDNLDKITKNAVGIEIDFAKLDQEVRYNANEKSLARYLIDLTELKIRYLELSVKAFEAKNRLFKDEMDRLFKNRVLELEDKKIEISQKDIMNEIEILAKQIDDNNVQ

SEQ ID NO: 10815 - protein, 472 aa, Methanobrevibacter gottschalkii
MITMYNENNEFYLDARDKVILQKCVYENPYIPFSPFPKQAEMILAREKEVLIGGAAGDSKSTSLLMRALFYVQDDMNEYHALILRRTLSDLKRKGALIHKASQWLNRKEIQNNASIKPKWDGTEHSWTFPNGNSLTFGYLRNINDLDTYQGSEYQFIGIDELTQLERFKYIYMRSRVRKTKDNKLPTQLMASSNPGKRGNKWVRERFIEKIDTDIQDKSQIRFISSSYLDNIYLDRNDYEEYLMGLDRVTREQLMNGNWYASVKGQLFDESDFHIISQDECLKIPIVRVIRYWDLATTEVLNDDKLRGSDPDYTAGVLLAKDLNGNIYIWDSYEFQLESRNLINEILNTAARDKSDVQYIELDGSTGKNFGLLIIDELNRRGFTTGTGNSRENKVDRARRVSADIQKNGIFLVGKDRTGFTKKWAMEFLEKITAYPNEAIHDDCVVAFTGGYEKIVAEKQSQRVNVDKWYST

SEQ ID NO: 10816 - protein, 88 aa, Methanobrevibacter gottschalkii
MTDRSAEISKINDENQEEDEELFNSLDEIISQNIDEIDGVVISFPEKINSKNGIAHTARAFMWICDLALKSILDEKYSQPVWILMNNL

SEQ ID NO: 10817 - protein, 592 aa, Methanobrevibacter gottschalkii
MKNAPKNWSLAEPSEDYGNDYFVKVFDKDTDEATKISFIIQLKGTEDYKKDEKHVKFSIRTDYLKYYYSKVDMPVFLVVVDTINEEYCWLFVQKYINEELNVEKPNWHSQETVTLYIPIENDFSNPKIIEQTAEKGSQYCNILVNGTPTQELIWKVKNIIDNPLEKSKDLKKQYSEIFNAETKVGFEFIHNQNNPQNAKKHFRSVYDKTKDDNDYVLAHLNSIIGLTPFLDCQNKIEAEKLFEYIKEGETLSKKNNIKYLEHYFYGLRLEKLCFILQSQLRDLLVTQKISNLGKTILSFVVDPETTEGIKEIFEILHKLYADFCKNLIETLDDKDLFIFLELLRMLIGMQLHHIEAVFTSTDDNTKKALFNQMDQLLSIFRDLINFTSEFDIFRYDLLSFETTYLYLIGDKQYNETVDEYINFAKENKSQYHLKRAESLKEKLSKPLNRQKDISEMSDEEIHDLFKTLILIIEKIDIDVDETDEAMVLRCAVRDLNPKRVLDNCKHLELHYGHGGQYAKFFGLASDGLKTIYCEHGGIITNRNLDNTYEEFYNKYCKECEHKIKQDFKWNPDKLSYVKSKKFKEILDKNPFI

SEQ ID NO: 10818 - protein, 115 aa, Methanobrevibacter gottschalkii
MTNIEINAETKNKLEAIGKILSPYLDIGYDDFDEIIGILINNFNNHKLKAEYDEKENIIKIGYENSKIYSIPILIFELKKGCYEKIGIWMQKNNFIPEINTDVTEYIKKCEDTFL

SEQ ID NO: 10819 - protein, 218 aa, Methanobrevibacter gottschalkii
MKGYVGPEFKKDAFNCPYCEVYAHQKWRYRLMIFNSNGEHPADPIYDQLGVRGWSTSKCDHCGEISFWHDEQLIYPKSSIAPLPNDDMPNDVKEDYIEARNIVNDSPRGACALLRLALQKLMPHLGESGKNLNEDIGNLVKKGISSEVQKAFDSVRVIGNNAVHPGELDLKDDVQTAISLFRLINYIVDNQISSKKEIDGIFEGLPQINIEAIKRRDK

SEQ ID NO: 10820 - protein, 328 aa, Methanobrevibacter gottschalkii
MEYKLKKYFIHDVLTPWMHLEDIYLNENHPAHEDLKYDLDAIKEQEVLTYYKKHEERINFLNRKIKNKIIYSKILLFGELLANSIFEDRLEALLKNEPYDRKEFENFYDKENLIKVDKFSKVYDSIIINGNRYGLCLPINAFNSSYWISQELNKLNLDDVDLKIRVDPFLKNFSLICQKSTVFSKPLNWNKIRDLKTVDKGQFRNYKTGELTEYMWKPRKNNRVVFTCEELPSEDLINLRGSRYFHAIFEKDSGRFIHCDGSIKIYNKNSFKKRCKYTINNNEINDIGKEVKIFRVDKNIPKEMFMSLINSYFYWNYDLIDYFLKKTI

SEQ ID NO: 10821 - protein, 138 aa, Methanobrevibacter gottschalkii
MFRCGCYPNHEICKNKNTCEFWIPLNQKLKQLNQQISYELKILESLNQRKRDYFRILSEIQQGRYTEIVAIDGRLKRVPKKNARGESILKPDDVQVGLNFNVISKEITDTETIIHELRIREKNILKILKKQYWTIACK

SEQ ID NO: 10822 - protein, 212 aa, Methanobrevibacter gottschalkii
MDSPKDCLFHHLKYLADFVVNEINEDIELLRLPWQELSNQLIKRAYAQCERECPDWLLTFAESVTPEDLDDEEIEYLRMFFIDEINKHNKSIKVYSAEDGYPIKYHDYFTDSVKDSNDFYERVFNIINERLVPYMVLHHGRDGLDYVCFTSGLKKALKNANEVCYDVKGIAELLGWEYKSVKIPKSTKVMVVRFDKFLTFLYPNLSEKEVNK

SEQ ID NO: 10823 - protein, 226 aa, Methanobrevibacter gottschalkii
MSEGSSAIQIKKAIGNVYKPDYEFTYFKNIISAFYLQGTDPEVVEKILTELYNQLPSHEKTLDEIIKLFEDIYLGDENPNSGIKGIERFISDKYDKKTSILVGRELNRAIIPYDTNKIYKLQTGSNKYIVMDYRNNEVTTQTIEWKKGNEVADYTRVLFCYPMRITIHDNPISEAGITFSIEWRTTDGGHFHTKDMNIVEIEHYLIEHGYVLSRYQSKDVVPGLIQ

SEQ ID NO: 10824 - protein, 166 aa, Methanobrevibacter gottschalkii
MSFENSKQTIFTGTQLDYEEIVEIPEGYEKAELKDFEDGTLIRGRPEMASVSSFTFDDDGEEKTVNRFKLYIFQDADKIYVEINVNLKNDGDIHKNVRKGSVLFDFLTSILELENAGSVGKSNILRNVDLSEYREFVNRLSEMTIQVKERSGTYTFYSFIVRDVQV

SEQ ID NO: 10825 - protein, 182 aa, Methanobrevibacter gottschalkii
MVKAELIENPQETEIVKVDTVPDVDVAIEQWDAYQRLCKGLLNDNDYQEIIVKEKDENGNYVKVKRHFKKKSAWQKLSRAFNVDTEIVDRDIERTKMGRVREAYYCVRASLPNGRSVESDALCSRSEKGKDKVSDHTIMSTAKTRATNRAIAELIGAGEVSAEEMSAEKIAGQSKFLKEDNS

SEQ ID NO: 10826 - protein, 99 aa, Methanobrevibacter gottschalkii
MDSYLPDCGIEHNQFEDNYHGILTHSGEIKVAKGDVEQEILYIDDDGIVLVDGGKKAYQTLIHTKLLALIQYAKAGDIGLIKFIRGEAFIVGFRKKRSD

SEQ ID NO: 10827 - protein, 34 aa, Methanobrevibacter gottschalkii
MLEQEVNGKTHVLVPKDIWDDIMAMFNEHLNKGE

SEQ ID NO: 10828 - protein, 52 aa, Methanobrevibacter gottschalkii
MCEVIKPRMNEIIIFNNFRALEEVIAEIQETENIRNEREFFQSYKIKIMKLD

SEQ ID NO: 10829 - protein, 345 aa, Methanobrevibacter gottschalkii
MKKYCEFNGMSLQELLDEAEKEEADNVKWKHRRVKTKLLKYRQFLLDNYSINTVRIHMSAVSKFYRFYDIEINPLPRLNMKAVKKPTSIYYKDLPDKEIIREALAISPPVMKAIILFSCSSGCARAETLSLTIQDYIDALSEYLPNKRMDIYQIIDYLNDNDNVIPTFNLRRIKTNKYYTTYCSPEAVKAINAYILTRTDNVTPESQLFKMYESYFIGYFQRINDELGLGRVGHYSRFRSHMLRKFHASALYNDGMSLDNVNDLQGKAKNKTDQAYFMINPDDLKYEYIKHLPAITINTDVEKLSIKSPEYMQMEKENNEYKQKVERMEANIANIMERLGQEEAK

SEQ ID NO: 10830 - protein, 185 aa, Methanobrevibacter gottschalkii
MISDKAGQYLVKLAGNAIRQYLETGEKIKKSEDYPIELDEKLGVFVTLNKNSNLRGCIGYAEPIMSAIEATIDVAIAAAVNDPRFPQVSLDELETLDLEVTVLTKPELIPVAHYNQYFDEIEIGRDGLIIQKGYSRGLLLPQVATENRFSVEDFLEHTCMKAGISTDSWMDESCDVYKFQGQIFK

SEQ ID NO: 10831 - protein, 464 aa, Methanobrevibacter gottschalkii
MINLLSDKMEEYIDLFEKVIAKTSSQIDYIDIRAGIGDNTSILMKDGNVDEINTGMSLAARVRVLNNGAWGFAYTTDLSKINEITDTAIRFSNSLKGDVELSETDIIKDKISVDVKIPFSDISIEEKKDIMKQANDAAIIDKVNSTTVSYGDSEVNELFMSSEGSEIQVKTSRVRMALNASATNGEIIQFGHGSLGGVKGFEAISDKDLEEFGRTIGQKAVRLLDAKPAPSGNFPVIADPELTGVLVHEALGHAVEGDLILQNDSILKDKMGCQIASDIVNIFDDASLKEGFGYYPYDVEGVKTSPNQLVKDGKLVSLLNSRETSSKLNMKSSGNARSLIADQPIVRMSNTYLQPRDNSFEELLEDIQDGIYLKGSRGGQVDTGKGIFQFNAAEGYLIKDGEITTPLRDVSLSGNILETLKNIDAVGNDFKLSVGFCGKDGQTAPVGDGGPHTRILNALVGGMG

SEQ ID NO: 10832 - protein, 401 aa, Methanobrevibacter gottschalkii
MIVIVGTGAGGGILAREIAKEGIDVTILEKGPYIHSKDAFNYYDTYSGDVDLLTTTCIGGSTIVSMSNMVRALDDELLDYDIDLSDAYEYVEDLINVHPIDDSHIGKGTKAFLDAGNELGLQTMKMPKAIREEECIQCGKCAFGCPVDAKFSGKDFIDEAVEYGAALICEADVREVTSNDGVVYGVKYIKDGKEEIIKADKVVLSAGAIGSTLILRKSGISKAGREIFFDPFVSVGGYLKDVNFNSEVQMAGLIIGKNFVLAPHYSSFIPGNIDDDSVTENDILSIMVKTSDECKGYVTDDGDVVKINTIQDIRYLAEGTATAGFVLERAGVDPNTIGSTVYRGAHPGGTAKIGEIVNSNLETEIDNLFVCDASVLPISPGKPPILTILALSKRLADYLKN

SEQ ID NO: 10833 - protein, 158 aa, Methanobrevibacter gottschalkii
MANNKSELKIKAIENGTVIDHITANKTLHILKILGLPDNETKNITVAMNVSSKELGRKDILKIENRELGHEELNQVALIAPEATINIIRDFKPIKKNKIVLPKKITSIIKCTNPKCITNYENEPITTIFNVVTENPPVVRCHYCEKLIKTEDIYKQFE

SEQ ID NO: 10834 - protein, 164 aa, Methanobrevibacter gottschalkii
MATLIIYYSQSGKTELVAHTLAKNLRANVLRIQDLKNRNGFKNKFIASISAFRESKTDITPARVDLTDYDTIIFGTPTWAGNPTPAILTIIDRCNLTGKDVILFATMDGSRGDTNIERLEEKVKMRGARVIESFTIATKDKDSEKLITDTEAVIEMKDLKMYTR

SEQ ID NO: 10835 - protein, 340 aa, Methanobrevibacter gottschalkii
MKNVAIVGASGYTGGELLRMLSVHPEVEVTEITSRKLDGQPVHKTHPHIRDTGLVFKDKKPSDIDADVIFTATPHGASMKIVPELLETGAKVVDLSGDYRYRNTEVYEKWYGMKHTDKKNKGAFGLPELYRDEIEKANLVSNPGCFPTGAILSSYPLVKNDLVEKIVIDSKSGVSGAGVTPSGTTHYPNIADNVNPYKISAHRHTSEIQQELHGFDDVKVSFTPHLVPVNRGIQTTSHSFLKEEHLDITPDEIRSLYEEEYGDEYFIKLMDEGEIPHLSSVRGSNFVHIGGFEIDETGRIVMLSCIDNLVKGASGQAIQNMNIVLGLKEQLGLQHLGIYP

SEQ ID NO: 10836 - protein, 150 aa, Methanobrevibacter gottschalkii
MKVMATGTFDILHPGHVLFLKKAKELGGEDAVLAVVIARDSTVEKRKRTPIIPQEQRLEMIKSLKPVDEAYLGHAGDMFKIVEEIKPDIIAIGSDQDHNVDKLQESLDKRGINAKAMRVEDYMFGELDSTCKIIKRIKHTDFKDKTGELY

SEQ ID NO: 10837 - protein, 245 aa, Methanobrevibacter gottschalkii
MSFKKDEMLIMPAVDIKNGKCVQLVQGEPGSEMVELENPELVAKHWEDLGARNIHVIDLDGTINGIASLDTIEKILNEISIPIQLGGGIRSLDYARQLLNLDIERLIIGTMGIQHPETITELSDEYGSDRIMISLDSKDNKVVIKGWREKIDKSPVELSSEFKEYGAGSILFTNVDVEGLLGGFYTDPVVELKESVDIPIVYSGGITTIDDIKKLNESGVDGIVIGSALYKDKIDLTEALKYQKR

SEQ ID NO: 10838 - protein, 316 aa, Methanobrevibacter gottschalkii
MNEKLYELFDVVLKSEFSIKEYDDKTIIELGENSKYGKMETYSLFPGIILAYIDVNIENVEDVFIEEKMESRLLEINHCARGRYAYAVGDDKIIYFGRGDLCVSIYDLTKSLSEFPLGYYEGLEIFIDVDMADEYIKDYVPDFDLIEFYETLEKNNGFVLLRANEKIDHVIGELYDVDERIKQSYYKLKCLELLLFFSITNFTKTESFSLSKKQVKIIESVKNDLTENLETKITIDQLANKYGMSKTTLKNCFKEIYGKPIFKWRKEYRLDYACHLIEEGHYSISEISKIVGYSSHSKFSQAFREYVGCAPSKYKN

SEQ ID NO: 10839 - protein, 596 aa, Methanobrevibacter gottschalkii
MSNNQNKNKFIRLLNYSGNYKYLTILGMIFSGLSAISLLVPFIYIWNVVNALLVVAPDFAKAQNLESYAVGAFFYAFLGIALNFCGLMCTHLSAFKNEKNMKDATINHLLNLPLGYFSNHTSGGLRKVIDFSTAKTEGFLAHNLFDLVGAIVTPIVFLILLFSFDLLLGLICIIPIILCFLFMYPMFSKDSQNIMAQYQSYLEKMNSEAVEYVRGIPVTKAFQQTVYSFRNFIDAIKNYGKFAADYSLSTQLPMTAFTVSINGFFALLIPAGILIAGTLVDVKFLANFIFYVIFTPICAVMMNKIMTISQDWMLASYALDGIEAILNEKPLAEPANPQKPKNHSIKFEGVFFDYEESNSEEHILNDINLKINENDSVALVGPSGGGKTTIASLIPRFWDVDEGSIKIGEVDVRDISTKDLMENISFVFQNTRLFKDSIYNNVAIGKKGASREEILNALSLAQCDDIIDELPDGIDTVIGTEGTYLSGGQQQRIALARAILKDAPIIILDEATALADPENEYMIQKAISEITKDKTVIMIAHRLSTVKNVDKIYVVENGRVVEEGNHSTLVENEGLYSKMWDEFNRSIQWKVKSEVI

SEQ ID NO: 10840 - protein, 581 aa, Methanobrevibacter gottschalkii
MLSELFIERFGLTKEGSDNLIKGIIYTALQNISFMFPVGLYAALLYIWINPLMGGEIISPDLGIFILGILIILGIIFAFSWKQYHFVYNTTYVESTNRRINLGENLRKLPLSFFERRDLADLTATIMNDCTDLEHVFSHAIPQLLGSILSLILVSIGLLIFDWRLAVALLWVVPVSFIILYISKRMIYRGSKIVTNDLLECGDSMQECIDSIRDLKSYNYENEYLSKLNDITSKIEKSRIKSELMLSSGVITGKVILNLGIVSVILLGSNLIMNGQVTIYTFLIFLIASATIYAPVENGLMFLSEILMMDIKIERAKEIEMLVTEEGLKDYSLDGYDLEFRNVKFNYDNLKDVLSDIDFIAKQGEVTALVGPSGGGKSTVSKLAARFWDPVSGEVSIGGQNLAELDSEKLLENFSIVFQDVILFNNTIMENIRVGKKDASDDEVINAAKLAECEEFVQKLPNGYNTIIGENGELLSGGQRQRISIARALLKNANIVLLDEATSFLDVENESKIQKAISTLIKNKTVIIIAHRMRTIANADKIVVLDDGRIVEQGSPDELLAQNGLFKHMVELQKLSGKWEI

SEQ ID NO: 10841 - protein, 193 aa, Methanobrevibacter gottschalkii
MSEILNVKDLITVGIFSVIMVVLIFLFGMLGYIPILMLALPIIAALICGVPYMLFLTRVTKFGMVTLLGLVLGIVMFLSGHTWVPIVIFTLFAFVADCILKMGDYSSVKNSIISYSCFIVGIMGNMLPFFVLRDYFIGSIRNSMGNDYVNVIAPFLNYEVFIILVILTFIFGLISAYLGKIVLKKHFERAGIA

SEQ ID NO: 10842 - protein, 240 aa, Methanobrevibacter gottschalkii
MELKLNNNPGLNVDPRTKIILLIIISFMVFNEAPLYVSGILVLIPFFCLFFSDYKKVALIYIAVYSMAIYVQIYLIPTSTGILSIILITFSYTSSRMLPIFMMGYYTISSTKVSEFITSMENINVPKEIIIPLSVVFRYVPSVYDEIKSITNAMKMRGFGLTVKSLKSPLKMIEFYMIPILISAVKTSDELSAASLTRGLSNPRKRTHLLEVKFSKIDYFLIMIAVIGFIIFAYYFIGGH

SEQ ID NO: 10843 - protein, 477 aa, Methanobrevibacter gottschalkii
MININNVSFSYNDDINLENINLNIKKGEVILLCGESGCGKTTLTRFLNGLIPNFFDGNRKGSVYMNGNLIDEMKIYEISEYIGSVFQNPKTQFFNVDTTSELVFGCENLAIDKDEIERRLEMVVNDFDLEHLLNKNIFELSGGEKQKIACASVSAVFPDILVLDEPSSNLDSQSTWYLGEIIKKWKSQGKTVIIAEHKLFFLENVVDKVIFIKNGRITNIWPISEFKNISHKDWGLRQLNLGNLTAKCGEYYSNAQEFLEFKNFKFKYKKIPVLDMGNFKVPKNEIIAIIGKNGAGKSTFANCLCGLKRSFNGELIFNNNSLKRKDRLKKSYMVMQDVNHQLFTESVLDEVLLSMDEEDIDFAESILTNLNLIHLKDAHPMVLSGGEKQRVAIASAIASKKEILIFDEPTSGLDLNNMMKVSENLKYLQSLGMTSFIITHDFELIMEACSHIIHLEDGKLIGNYKINGEKLSEFFLN

SEQ ID NO: 10844 - protein, 234 aa, Methanobrevibacter gottschalkii
MSTIIEFKNVCKEYKSGDHILKAMDNVNFTIGEGEFVVILGPSGAGKSTLLNLLGGLDSVTSGQIIVNDNHVESFTDNQLTEYRAKNVGFIFQFYNLIPNLTALENVELMKDIVDVKINGLDVLNSVGLEDHANQFPAQLSGGEQQRVSIARAVAKQPTMLLCDEPTGALDSKTGVLILNLLQDMSNNKNTTVVIVTHNAILADAADKVIRIKNGQIESIAINENPNKVTDLEW

SEQ ID NO: 10845 - protein, 756 aa, Methanobrevibacter gottschalkii
MLAKKMLRDIKKHKTQFLSIFLMAFLGVFVFAGVGGESVGLEVNVNNYYNDTNLADGWIYSPNLDMNFIDDVNNLTPTTQSERQLVLDSIADFSNNPEIKLHFIENNTISKFYLMDGEPLNISDEDGVWLDKSFADAKNLKVGDNITFEFNGFKIKKEIKGIGYSPEYVYHASTSSVIPDFNKIGFAYMSYKAFPTDNIPYNVLNVKFTGSPEEYNNLLSDKLDGEYNSFVEQSEHSSVSQFSEEINQHKMMGDIFPVVFILIAMLILLTTMTRIIAHQRTQIGILKASGFTNKSIMIHYVSYGFWLVLIGSILGLIIGPVTLPQLFYPSMSSTYKLPSWNPAWSMDFVYVAVVMIIMSLLVSYFAVRSISKENPADTIKPKIPKISSSGLVEKIGFWKHLSFNSRWNYRDAKRNKFRALMTIIGVIGCTALLVSAFGMYDGMNDLKEWEFNQINHYDSKLVIDNDASLSEIDDVARDVDGDKIMESAIEIESDSAKKSGSLIALNHTDLITPTDYDWNKMEIGDDEVSISQKMADMLDISVGDTVKWHIIGSDKWIKTKIDKIHADPTSQGIVMSSDKLENLDLNYTPTSIVTEQHVDKNYSIIKTVNSMKDITSSWDELTESMWLLIYILIFFASLLAIVVLYNLGLLSFTEIEREIATLKVLGFKTGSLRKLLLTQNLWFTFAGFILGLPVGYYVLKMMWDSSGDSFYILPSISPMNFILTATITFTLSILVNLMFSRKIKKLNMVESLKSGE

SEQ ID NO: 10846 - protein, 73 aa, Methanobrevibacter gottschalkii
MAKITADSKYMELLNKYPLLKRDLSQKNWKFEFLVTPMGKISLWEANLEEVSKHAELSVDETVTLFQDLVDSY

SEQ ID NO: 10847 - protein, 752 aa, Methanobrevibacter gottschalkii
MSLSKKMLRDIRINRTQFIAIFLMAFLGIFAYCGICSEYYGLEQTSADFYNETNLADGWIYKTSFDNADLDKINNLAMQTERQHVISSVGEFDNDPDITLHFVENNTISKFHVFQGKDFDINDESGVWLDKRFADSKELNVGDNITFKFDGKTIEKEIKGIGYSPEYVYESSATSITPNFEDVGFAYLSYKSYPDNVEFNRLLVKYNQSDDSFKEKLDDSISYLSFTKQEDHVSVAQFSEEMAQHKMMGDVFPILFILITFLTLLTTMTRVVTYQRTQIGILKAVGFKDRTIILHFISYGFFPVLIGSILGLIAGPMVIPKMFYPSMTTRYTLPSWNPGFDMSFVYVAAALVISSVIVTYLTCRRISKENPANTMRPKAPNVSSNSFFEKSKLWNHLSFNFRWNWRDARRNKFRALMAIIGVMGCVSLLIAAFGMNDSMDDLKTWEYDDINHFESKLVISNNASQEELYYVINGTNGSFIMQMPIEIKSNNHENTGVLLVSNNTDLISYTDSNKNPIEIKEGDISISTKLAQDFNLSIGDKIKWHIVGNDDWVKSEIGQIHAEPISQGLIMSPDTLEDEGLNFTPTSILTSEKFGENINSIKSVSTLEDMEESWSEMTSSVMMMVYVITVVACLLAILVLYNLGILSFTEMEREVATLKVLGFKTNFLRRLLLTQNLIFTAIGFILGIPLGFYFMTLMMDAAGESLYYVPMLTWGNIMLSAVITFSISIAVNLMFSDKIRDLNMVEALKDVE

SEQ ID NO: 10848 - protein, 238 aa, Methanobrevibacter gottschalkii
MKRSKKLIIAILLVILLGLVAFIVGTLFMTPDLSHETKNILVLASDKEEQPNGGVDMAFMIRLENGSLKNYTPIYPGGMTHPTKSAPGGLQGPMMLHDCLWNGLGEGMQNAKEIVEVRTGMHADAVVVVYDKGIDSIIDSIRPLKINGTETNLSATDIIRQNDAYNGYPGNEHVQGTMSRSDAVMVLAKALANTAKDPVKKSTMVQTALKEYSNGNIIMEPQGSFTKLLATKGFESIT

SEQ ID NO: 10849 - protein, 125 aa, Methanobrevibacter gottschalkii
MTMENNNLGNKDDLCEVFDSHEDVVNRVKERIPDESDFTELSEFFKIFGNPTRLKIISLLSIEDLCVCDICEALDLNQTTVSNQLRILRANNIVKYQKEGKMARYSLTDLHIEMIYKVGLEHILE

SEQ ID NO: 10850 - protein, 784 aa, Methanobrevibacter gottschalkii
MVKNRCYDADCDKDNCHNPEHYNYICFDPNCDEIKCNDSDHYDKQLLRDYQKNTDLSVYDHGEEIDYDEDVDISLCGCPDCADDHDHDHDHHHDHSHDHHEHDEDDSCSDESCSCHDHDEHDHHDHDDVDISLCGCPDCADDGHEHGHGDEELLAEGKPLIANRPIQIIVSSGILFVLGHVFEWLSFSPAVVTIIYMLGALIAGYEIAVLAYNSLVKRHTVGPAMLMCVACVASFIIGHPEEGAAVTFLYYIAEFLEDYAEHRAKRSIKSLVEIAPETARVKLNDSEELRNVDDVDIGEIVIVKPGDKVPLDGEVVLGSSSINQSSITGESVPVLKETGDEVFSGTVNEDGYLEIAVTKKAKDSVISKIVTLVKRSQLNRSETESLVEKVAKYYTPIMMVAAICVALIPSFVFGQNLVDWVYKALSLLVISCPCAFLISTPVGMVSAITSATKNGVLIKGSTYVEEMRDVKAVIFDKTGTLTEGKLILSDVEVLDENFSKEDIIRIAASLENQSSHPIAQAIVNYATVNGIKFSEINDFKNVPGKGIVANIGEEQYYAANESLIEDGSFEVSRDEINRYSAEGKTIVFIGNSKNVLAIITVSDKIRPNAHEVISDLKEQGVQTIMLTGDNKLAAKSVASEIGMDYVYSNLMPEDKLNILDTIRNKFGDVAMVGDGINDAPALARANIGIAMGAAGSDVAIETADVALMQDDISKLPYLFTLSRKTMGIIKQNITVAIAVKLLCVILAILGIITLMMSVGFGDLGLTMLVILNSFRIGMVKDPLF

SEQ ID NO: 10851 - protein, 456 aa, Methanobrevibacter gottschalkii
MLSNDLVNGVELMLQNPKKALIEMSIPLIISLLITSFYNLIDAAWVSGLGADALAGVGFFTPIFMILVGFGNGLGSGAAFALSKYLGGNNKQKADNAAIHSIIIDLIASLIITLALLVLLNPILNAMGAGQTIGYATDYGMIIILGSAFIILSNALYGISRGEGDTTRPMYAIIASAILNMILDPIFIYNLNLGVKGAAIATIVSSVFVILILLYWFYIKGDTYLKPNLSNFDFKKDISIDIIKVGVPASIQLLNNAFFAAVFSALLTFVGSTDSVAVYSTGWRIVTIGTTPLIAIGTALISVIAANYGAKNYKNIQIVHRYAMKVSIALAIIVAILTNVFAGDISSVFASSGSSVRIAAELTGFLSWIVIYYPTMAVGVASTYVFQGIGKGITAMFQTIIRETGFTITFAVLFAVVLNYGVWGAWMGIVLGEIVSNNLTMLWADYLVKKLIDISG

SEQ ID NO: 10852 - protein, 204 aa, Methanobrevibacter gottschalkii
MELKGSNISFKYPSTKKYILKDIDICIDNTKITALVGDSGSGKSTLCKILSGYTNNFEGAVTLDGKELPKKEFCPVQLIFQHPEKVMNPKWKMNHILEESWMPDDNLLKEFGIQKTWLTRFPQELSGGELQRFSVLRALNPKTQFIIADEMTTMLDAITQVQILTSVIEIVKKRNMGMLIVSHDMPLVETICDEIIYLKDINGI

SEQ ID NO: 10853 - protein, 319 aa, Methanobrevibacter gottschalkii
MEKLLDVENVSISFIQYTQGLNQRDLKVITDLTLDVFEGEILAILGSSGSGKSLLAHAIFGILPENANLNGTIKYKGKELSQKDKEEIRGKEIALIPQSVNFLDPLMKISDQAIGETKDDAEKKEKKQKQREIFEHYNLGPEVDDMYPFQLSGGMARRVLVSTALLSNPKLVVADEPTPGLDQKTVKETLNHFKHMKEDGVGVLLITHDIHAALEVADRIGIFYSGYVIEIAENKDFSGNGENLLHPYTKALYKALPANGFELTEGHQPLHGEIPKGCPYYDRCEMRMGICKEERPELTDLGNKKVRCFKYEGGLKNGT

SEQ ID NO: 10854 - protein, 284 aa, Methanobrevibacter gottschalkii
MNNSNKSIYSPISKMNLRTKTLLTIGLTVSLLIIVMITSLLINSTDITTNFSAMNLPPSFEHLFGTDWLGRDMFIRTLKGLGLSVQIGAGASILSSLIAIILSFVCSINKKFDSFVAWIVDLFLSIPHILLIILISISLGGGAFGVTVGVALTHWTTLTRVLRAEIKQIKTSDYVKLSEQFGKSKFWIARKHILPLVITQIIVGTILIFPHAIMHEASVTFLGFGLAPHEPAIGIILSESMKYLATGNWWLALFPGLALLILVLLFDIAGENIKKILDPTSANE

SEQ ID NO: 10855 - protein, 331 aa, Methanobrevibacter gottschalkii
MLKNEKILKFLGKKIIRFIILLIFVIILSFILIDMSPINPVKTYISALGSVSSEKIAILEAYWGVNEPITTKVISWLGKIVQGDFGTSLIFRMPVIDVIKERFIASLVLMLTSWLFSGLLGFILGTIAGFKKDTIIDKAIKVYCYILQSAPTFWIALLFLMIFSVYLGWFPTGLGVPIGTLSENVSIWEWLHRLILPMITLSVVGIASITLYTRDKLIEVMNSDYFLFAKARGESGWNLIKRHGIRNILLPAITIQFLGFSELFGGAVLVEQIFTYPGIGQAAVSAGLKSDVPLLLGIVIFSAIFVYCGNLIADILYNFVDPRIREGEEDE

SEQ ID NO: 10856 - protein, 542 aa, Methanobrevibacter gottschalkii
MEQKYIIGIIVLILIAIIGGTLFMSGGNTSTRADNELVVSAFVHGSEPETGYDPMYGWGDRGEPLIQSTLMKMNRNMTYDNDLATSWSSNNNFTEYTVNIRDGVKFTDNTTLDAEDVAFSYNQAKSTGNTIDLSSLDNVSAINKTTIKFKLNKPDSTFTDKLLHVGIVPSDSYDNNTYGSNPIGSGPFKLAQWDKGQQVIFEKNPNYYGKQPKFDKLTISFQKNEASFNAAKNHELDIAAVPLSYANETIDGYHSFLSESNDVRGISLPMKNNTGETNEDGIALGNNVTADKSIRLALNYGINREDICKGALNGAGVPNYDGIAHFLPWYNNDSTIKDADIDKAKDFLKKGGWKDTDGDGIVEKDGKKASFNLYYSSDAPERQAIAVAVSEQAKEFGIEINATGSNWDEIDKIKFSEPVVWGFGSTDPYVMYGEYYSNQAGIGYNNPSLVNNSAVDSHIDKAMSEPREQSYADWSAVSWDGQTGISPKGDAAWLWISEIKYTYFVDDSLDISKDTFKLQPHGGDLFGNIYDWTRISPINATN

SEQ ID NO: 10857 - protein, 539 aa, Methanobrevibacter gottschalkii
MEQKYIIGIIAVILIAIVGGAILIGGPSTERADNELIVAAYSHGGEPEAGFDPILGWNYYSEPLIQSTLLKMTRGMEYENDLAKSWEANSDFTEYTVKIRDDVKFTDNTTLDAEDVAFTYNEAKKSGASLDLSSMENATAVDKQTIKFELNRPDSTFVDKFAYIGIVPSDSYNNETYGANPIGSGPFKFVQWDKGQQVILEKNPDYYGKEIKFDKLTILFEQNEAAFNAAKNKEVDIAAVPLSYANETVDGYNMHLMDTIDVRGLSLPVQNNTGKLSEDGNPIGNNITADKSIREALNYGVNRTAICKGALNGIGVPNYDGIAHLLPWANNESAIDDGDVDKAKDILKKGGWKDTDGDGIVEKDGKKASINVYYSSNAPERQAIAVTIAEEAKEFGIEVNATGSNWDEMDKIKNTDPVVWGFGSTDPSTMWSEYYSDQATVGYNNPALINNSAVDKHIDNAMKSDRESSYAEWSAVSWDGQTGISPKGDAAWLWVGEIKYGYFVDESLDISNNTELIQPHGGDIFGNIYDWSRVSSIEK

SEQ ID NO: 10858 - protein, 204 aa, Methanobrevibacter gottschalkii
MELKGNNVSFKYPSTKKYILKDIDICIDNTKITALVGDSGSGKSTLCKILAGYVQNFEGEVTLNNNKLPKKEFCPVQLIFQHPEKVMNPKWKMNRILEESWMPDDNLLKEFGIQKTWLTRFPQELSGGELQRFSVLRALNPKTQFIIADEMTTMLDAITQVQILTSVIEIVKKRNMGMLIVSHDMPLVETICDEIIYLKDINGI

SEQ ID NO: 10859 - protein, 319 aa, Methanobrevibacter gottschalkii
MEKLLDVENVSISFIQYTQGLNQRDLKVITDLTLDVFEGEILAILGSSGSGKSLLAHAIFGILPENANLNGTIKYKGKELSQKDKEEIRGKEIALIPQSVNFLDPLMKISDQSIGQTENEEEKKEKKQKQREIFEQYNLGPEVDDMYPFQLSGGMARRVLVSTALLSNPKLVVADEPTPGLDQKTVMETLNHFKHMKEDGVGVLLITHDIHAALEVADRIGIFYSGYVIEIAENKDFSGNGENLLHPYTKALYKALPANGFELTEGHQPLHGEIPKGCPYYDRCEMRMGICKEERPELTDLGNKKVRCFKYEGGLKNGT

SEQ ID NO: 10860 - protein, 186 aa, Methanobrevibacter gottschalkii
MDVIIKELGKNSKEIAEVQEFLFKMIKLEFGYDYVPQWHQDIINLEKYYIDPKRNNFFIAYTKTGEIIATIGIRAYDKDFPEFRHLYSIDNTSSIWRLFVDRRYRRCGLASKMFGIVENFANTLGYDNIYLHTHKTLDGAIEFWTKMGFVVALDSNDELETVHMDKKIQGVNISDNIVDYKYAVKL

SEQ ID NO: 10861 - protein, 230 aa, Methanobrevibacter gottschalkii
MSLSLKLKQYLTDQGADEVGFADITNFTPKKNLNKGVVFYITYQKETLRQMQNAPTKEYLNELINLNLKLDELGMKCEEFLIERGYNAYAQTKKRLGYDFGEFNSFELPHKTIATRAGIGWIGKSALLITEKHGCALRLSSVLTDAPLNPGKPILKSKCGKCMECKTACFGGAISGKKWNYKINRTDFYDDKKCEKYALKISKENLGKSDTVCGKCIYACPYTQKYIKKS

SEQ ID NO: 10862 - protein, 538 aa, Methanobrevibacter gottschalkii
MDKKIIIGAIVVVLVVIIGAFAFMGGSHDSDPTHLTVAAHSNIKEPEAGFNPLTGWGCGHQNYNPLVQSCLFKTDKNGSIVPDLATGYSVSGDGKTWTVNVRDDVKFSDNSTFDAEDVAFTFNTAKQTESELDLTNIANVTAVNNTCVKFNLVEARSTFIYDLRYLGIVPSDSYDNSTYGENPIGTGPYVLDHWDKGQQAIFKINDNYYGDKPYFTQITLLFPEEATWLELAKSGEIDVVPVATSALNQTVDGYQFIEKSAGRAQGVSLPYLNDTGIMYNGTMKVGNNVTADKSIREALNVGINRQTMCDEIFAGHASPEFTGVDTRTYANPDAKVADGDVSKAKQILKDGGWTDTDGDGIVEKNGLKASFDLYYPPDYLDRQSMSTVFAEQAKELGIEVKLVGADWDTIYKNLYSSAALMQQTSPDPYKSIYQQYHSKEMDGFYMNPNLYNNSASDRLMDEAMHTSDLNQADSLWSQSALVNGGGWGPAGDAPWVWIANYDYNYFIKDGIDIGKQPDGLGNDVLINICDWSRTNSTA

SEQ ID NO: 10863 - protein, 329 aa, Methanobrevibacter gottschalkii
MNKNQLLKFFGYKLIRFLILMIAVSIFSFVLLDLSPIDPVNAYLKQAAVSEAQRQILQEYFGTNVPLTTKIFHWLIDLFQGNLGTSLIYRAPVVDIILEKASASIVLMAISWLLSGIIGFLLGVVAGKNKGSWIDKAVKVYCYAIQSAPSFWVGMLILMVFAVYLGWFPIGFGVPIGVRSTDVTFAEWATRLVLPTLTLSLVGLAPIAMYTRNELIQVLSSDFVLFAKSRGEKGWNLVKNHGIRNILLPAITLQFLSFSELFGGAVLVEQVFSYPGIGQTAVAAGLQNDVPLFLGIVLFSAIFVFVGNLLADLSYYLIDPRIKEKEFND

SEQ ID NO: 10864 - protein, 283 aa, Methanobrevibacter gottschalkii
MIKKADDKKQWFLYPANLRTKTIVIIILSALVILSIFISGYFIRDIPTSFINANQMPSLEHLFGTDWMGRDMFQRTIAGLGLSLMVGFIASIVSTVISIILGLFSSFNKFTDEFVAGIIDLFGSIPHILLIILISMMFGGGVIGVVMGVGLTHWTPLARVLRSEVKEIRTKEYISLAENLGKSKMWIAIKHILPLVISQIIVGVILMFPHAIMHEAAITFLGFGLPPHEPAIGVILSESMNYLSSGYWWLAFYPGMSLLIVVLLFDFIGENVEKLLNPETAQE

SEQ ID NO: 10865 - protein, 230 aa, Methanobrevibacter gottschalkii
MDLTQKLRKYLIKNGATEVGFADIINFTPITGLNNGIVFYITYPKETIRNMKNAPTKEYNEEYDKINYKLDELGMKCEEFLIKYGYNAYAQTRQRLGNDFGEHNSFKLPHKTIATRAGIGWIGKSALLITKKYGSALRLSSVLTDAPIKTGLPTIKSECGKCMECKNACSGGAISGTEWNYKLNRNDFYDDKKCEKYALKVSKENLGDEKTICGKCIYACTFTQKYIKKA

SEQ ID NO: 10866 - protein, 288 aa, Methanobrevibacter gottschalkii
MKRTALKIGYIGTNFHGFQRQPDLRTVEEELIYHLRKLNYIDDLKKSRFRIAGRTDAGVHSLGNVISFQSEKDVRINEINNSLPDDIQILASAPVRYAFKPRYAQMRQYRYMLFQDLDIDKLKECADIFKGTHDFTNFTKRFQKTTTRTIDDIKIKKFDLEDYHKKGFPNLHDTLSPIFVDIYGESFLWNMVRKMMRVFVDVAIGKMDLDEVERLLNPEENESRANIKVMEAEYLILMNIQYDGIKFRYDDYACERFKRDLVDSLSDLQKRYAIRESMIKSLQDLHEW

SEQ ID NO: 10867 - protein, 440 aa, Methanobrevibacter gottschalkii
MKIATILGTRPEIIKMAPIIDEISKRNIDQIVLHTGQHYDEEMSDTFFRDLDIRTPDYNIQVGSGTHGKQTGLMMKGIEKVLLDEKPDIVLVQGDTNAVLAGALVASKLHIAIGHVEAGLRSFDMTMPEEINRRAADVCSTMYFIPTAESAINLLAEGYSRKNLFITGNTVVDACFRHLKIAKKRGIKEKSLKELNIDKMDNILTLTMHRAENVDVKERVVGIIEALKELDDADIIFPIHPRTKNTLEKFGLFDELNNLEHVHIIKPLGYLDFLLLTSASTLILTDSGGLQEEAITLSVPSLTLRYNTERPETVTAGGNILVGSDREAIVSNARKILDNKNFADKMKNAINPYGQGDSAKLTVDAIEDYHARGLLDIVAPEDIMNSFKRKMKNIREDISVKDFERKENALVHMVFDGKNMQFPTDELNLNGMVINYDKRE

SEQ ID NO: 10868 - protein, 362 aa, Methanobrevibacter gottschalkii
MTKENESILVFEYFTASGEKDKCIISEAEALLFSLLDDLKEFNVDLIINESYGSVVKNYGNVNPILINQDVVSWLEENADQFNKAIFISAENNNNLYNITKILEENDVKIYNSSAEACLKSSDKYETYEALPNTIPQPRSFRFKIDSKGYWKRAIENLHERWQAEDPLTPLKLIIKPLMGVDCEDIVIIEKIEDLTLDLDKIFTPGSRVLVQEYIEGSDISVSLISDGKNALPISLNEQYVELKENKGIYMGGRLPFESKFKDEAFDIATKAIESIEGMKGFVGVDLRINSDEKDIYSLYLLEINSRFTTPYVGLSKIANFNISKTIIDLIDGNINIGDLDISLDGEIEFKKSGNSLEIRRI

SEQ ID NO: 10869 - protein, 340 aa, Methanobrevibacter gottschalkii
MKVAGFDIGGANTDLAVIDFDGEEIKNIEVDFAYLPMWSNNDDLSRVLTELIENICPVSEIDAVGISMTAELVDAYDTKKDGVLDVVKKCEKTFDCPIAYVGIDGMLSKEEIIKTPLKAAAANWIATAQIATLISDNCIFIDTGSTTTDIIPIKDGVECAIGKSDFDRSATGELVYTGTLRTNLTSFLDKIELNGKEYRVASELFAQTADVYTVLDLITEEDYVCDTFDGEGKSKIECAKRIARVVCADLEMMTMDEIVGMSKFIHQKQVEQIADGLKQVVETQNLDLIVTTGLGKDILDKKAAELLGLEVKSMGDILTDEECVVAPAIGTSVMMNKYLN

SEQ ID NO: 10870 - protein, 188 aa, Methanobrevibacter gottschalkii
MTINIQILLIACVTTLYFILPAYFSNGAGLLFGGGMPVDFAKSDRYGIRWIGDGVTWRGLFAGTIIGIITGIVQGFIAPHILPAYGQYIITPIVTNINSGILIGFLLGFGALLGDAMGSFLKRRLGIGRGKPAPLLDQLDFLIIALILVSLVVKIDLLFIAISIILTLVIHLIANTCAYLLGIKDVWY

SEQ ID NO: 10871 - protein, 502 aa, Methanobrevibacter gottschalkii
MKIKSTKSLCPECGKPIDAEVYDEDGKVFIKKTCDEHGEFINTYWGDDELYNRANNYLPSITSIENPCIEDTASCPSNCGLCSKHETSTVLGLIDVTNRCNLRCPVCFANAAAAGYVYEPTQDEIRQMLKNLRNLKPNPTPAIQYAGGEPTVRKDIVELIAMAKEEGFTHVQIATNGIRLAKRENLAKDLKAAGLNTVYLAFDGVTPEPYINNRGKDLLPFKLEAIENCRKAGLGVVLVPTLIKGINDHQIGEIIKFAFDNNDIIYGVNFQPVSFSGRTPADQVEAQRITIPDFVKIIEEQTEGQVKTTDFYPPSAVEPVARFISALDGEERPPVTLNCHQHCGVGTYVFREKTEGSGRDKLIPITNFIDVEGLFEKLDEYADKLIEGKFGARKKVIASVTKNLPKLIHPSKTPDYLDIKKILFDVFAKRSYSALGDFSKDAMLISCMHFMDPFNFDEDRVKKCVIHYATPDGRIIPFCTMNSIYRQSVEQNFAKPLKQKKE

SEQ ID NO: 10872 - protein, 161 aa, Methanobrevibacter gottschalkii
MDIIKGKTWTFGENIDTDVIIPGRYLRTFNPQDLADHVLEGERPDFTQNVQKGDIIVADENFGCGSSREQAPVAIKTAGVSAIVAKSFARIFYRNAINIGLPVIVSDIEAEDGDVISIDLSEGKLVNETTGDSKNFEPFKEFMLNILEDGGLVNHYLNESD

SEQ ID NO: 10873 - protein, 209 aa, Methanobrevibacter gottschalkii
MECPICGSDNVEILNAKQKSSKKKLMEEYLLKCEDCGHVFKDIFSAKKPKPYRLIISAHDKSHKTTIDLSPSDELKSGDVLLSDLGQVEVTSIEVGDKRVNKAKIEDINTIWAASTEIPARIGFSVDLHGEVDSYKLDLERDFEIAPGDIVKIDKHIVKVHVIKTKDRKLTSGFAKAEVIKRVYSKPVKFNNFDYDLTKDIFKKTKKSS

SEQ ID NO: 10874 - protein, 425 aa, Methanobrevibacter gottschalkii
MKVYIESYGCTFNKADGQIIAGNLQENDIDIVGSMEEADVIIVNTCYVKLPTENKVTYRIQKLQNDFPDKKIIVGGCMVEIDPEKLDKVAPNASWIGPHQLNKSAEVVKSTYCGEVVRESGFSKESKVDVPKVMDDSLIHIIQICEGCLGACTFCCTRFARGPLNSYPIEDIKEEARKAIEQGACEIQLTAQDTAAFGKDSGEKLSDLIKEVANLDGDFRIRVGMMHPKNILNDVDEIIDAMKHPKVYNFIHLPIQSGSDKVLSDMRRGHSVNQYLDIVSKFKSEIPSLTLAVDIIVGYPTESEEDFNLTVELLEKIKPSLIHLSKYQHRKGAVSSSLPEIPHETMKRRSKFLSEIKSKITEEENKELVNSNQKVLVIEKGSKGGFIAKTNSYIPVIVDNVSLGTFVDVKITDATATYLKSELLG

SEQ ID NO: 10875 - protein, 66 aa, Methanobrevibacter gottschalkii
MSELPIAPVGRILKNAGAQRISDDAKIALAEALEEKGDEIAQKAVNFARHAGRKTVKAEDIKLAIK

SEQ ID NO: 10876 - protein, 240 aa, Methanobrevibacter gottschalkii
MTYNIKNSKELAGLINYTNLNNIITESEMVEFLEKAKETNFNSVVVSPTYVKLAKETLKDTNIKVGSVIGFPLGFEDTESKVEAAKSLLDKGVDEFEVVLNLSYLKDEKYELLENEIKQIKEAIGDKVLKVIIETKALEDYQKANAAKLAEKSGADYVKTSTGFVSPSHIFENVNDINIIQKHAPTIKIEIYGGINNYKFANQILTGGADVIGSDQGYEIVKRYKDLRENTQVKPKPITL

SEQ ID NO: 10877 - protein, 557 aa, Methanobrevibacter gottschalkii
MEKACRIIINDILNGEISTRRDLEVAKRQLCRDLNLSRFMSNADILEFAKPEEKELVSGILKKKPTRTMSGVAVVAVMCHPHKCPHGRCFYCPESDIAPPSYTGEEPAALRGRMYEFHPYIQCFNRLKQLKKIGHPIDKVELIIMGGTFPSRDLCYQEWFVSQCLKAMTDFGLILENKPTNYEYNLDFNEIRSFEKGILKTYPPNDYVLISDVQKANENSKVRCVGMTFETRPDYCKKDHINRMLDFGVTRVELGVQTLSDDIYSKIKRGHKIADVIESNQLLRDSAIKVAMHMMPGLFSDEKQDLKMFKQLFHDDNFKPDMLKIYPCLVTKGSELYDLWAEGKYAPYTDEEAVELIVKIKKILPKWVRTMRIQRDIPSTLIEAGVKKSNLGELVYNRLDEEHINCQCIRCREIGHKKTSKQYSLDEFELFNESYKACGGVENFLSIEDINEESVAGFLRLRFPSKDHFRDEISDKTALVRELHVYGNMIKIGNRNPHIGQHTGFGERLLKEAENLAIDNGKEEVAIISGIGTRNYYRKFGYEKVGPYMVKKLYKNI

SEQ ID NO: 10878 - protein, 91 aa, Methanobrevibacter gottschalkii
MQIKEFLGSVVLDKNAYEVGKVSNVEFDAATGKINEITLTLQKNIFSKDELVISFDDIATIGAYVILNKEIPKDAEFEEAEAVEVEIEEDK

SEQ ID NO: 10879 - protein, 98 aa, Methanobrevibacter gottschalkii
MVFDARDIEIPLNSHVRYVDTGTMGEVVDERITDGIGWVKLGKTGLWYKSSHVELLAEKDIKKSSWGAGKDLDVEDLKEKAISFEELELSSDAGNGGG

SEQ ID NO: 10880 - protein, 689 aa, Methanobrevibacter gottschalkii
MENLDTDIKKIINSAYPYIKDFNPAQKAVIESGYLEDNSNYIISIPTASGKTVLGVLPALKTILNGGKAVYAAPLLSIQNEKVKEFKAFEEYGINVGKHPSSADLSVMVFESFDALTRFSWNVLREVDTLIIDEFHMIGEYSRGPTLEAAITRAKIINPNIKIIALSATLRNIEEIEGWLDGTCVEHDYRPVPLHKEVLDAEMFNTKNKNDVIVKIVEKAMKDSSQALAFVSTRRFTESLATYVAKKINKKIDKKQREKFKEVAEKLLDVPKKKGSLPTSTCLKLAESVELGVAFHHAGLFNEQKEIIEDEFRNGNILMITATPSLMYGVNLPSKTVVIRDHTRWTSNGPQPIPVFDYEQMSGRAGRPQYDDVGYSYLIAKTMDEAQNLEEYYVEGEIEKTNSKLVDNKDAIYKQIIAQIASSLSKNLDELVDFFGKTLYGYQMNNNPSMSSFAEYTIKYELETALEFLLQNGIIRATPEGLKTTDFGYLIAKSNYAVETAVKIKEYISNMNEINVEEFIYALSETPDLPLISFKGRKSKDPVRDRLSECGLFAMDIGVSEATTVSLIEWIDERNEYEIENKYNVYSASTRRSAYEASRLVKFAKDTSEILGDYSNLKEYDILSARLYYGVKTDIIPLVIGVKRLGRKRARNLVKLFGNNLSNISENELQKVEGIGPKLAEKIRLFVKN

SEQ ID NO: 10881 - protein, 87 aa, Methanobrevibacter gottschalkii
MAIKVEVFSTSTCPHCPAAIDAAMKAKDKLGNAIDVESVKIDGNMDNRQRAMDYQIMAVPTIVIDGEVAFVGAPAESELIEKLESML

SEQ ID NO: 10882 - protein, 358 aa, Methanobrevibacter gottschalkii
MTNDNYTCVTTGTVATACSLAALDAILNTPDIACVKVETPKKVLNIIIDECKCISNNKAYAIAHKNPYNDPDVTVNLDIISTVELLDKNDEESNVIITGGEGVGVITKPGLQIPVGEYAINPVPRRMIIKNLSSKIPKGKVAKVTISIPEGRKIAKKTMNPKLGIVNGISVLGTTGIARSMSSEAYKNSIVTQIDVAIASDIDDLIFVPGNIGEKLALKQLDVKKEQIIQTGNFVGFMFDEAAKRGIAKFTFFGHIGKLIKVAGGIFDTKHAIADGRREIMVTHAALCGVDKINLQKLFDSKTTDEMMSILDGLGVSVEVSNSIASAIHDRCMQRFDLDLNVILVDMEGNYLNNNFII

SEQ ID NO: 10883 - protein, 360 aa, Methanobrevibacter gottschalkii
MKIAMVGQFPPHVGGVGVHIHTLSKKLVDEGHEVYVITYPHRNIEDIDGIHVIGTKGLNLPGVRGLMFKMNAKKALEDLLEKEDIDIIHGHYLFPAGAAAVEVGREHNIKTYVTAHGSDMFELYKKQPFMRSPIKKVLRDADGVFAVSNALRHEIIATGVTGIANKTKLSWNSVDINKFSSKTNDLFKKENKLEDKPIVLFVGNLIKRKNVDSLLDAKKVSQSEYYLVIVGDGPQFKKLNKKVEEENIHDVIFTGSRNDVENIIPSCDVLILPSFSESFGLVLIEALACGKPVIGSDVGGITEIINDDVGLLVNPNKISSIAKAIDTIIQDDDLRLVFSLNARNRAFDFSEVTIPYDEVN

SEQ ID NO: 10884 - protein, 288 aa, Methanobrevibacter gottschalkii
MKTIVRSPGSATIINAIATGFGSAFGIDLDIKCIAKTTDKGITCLNDVGADIGFMELCVQRVFNHYNIDTSEFGIDLKTESNLPMASGLSSSSASSNAIVKAVSSVISEEFNLKPLDDLELINMAIDASLEAGVTITGSFDDATASYFGGVVVTNNKNREFIIREKMEEYPVLVYMPNYYSKSGDSNSDRMKLLAPLVETAFEFACNKDYFKALNLNGLLYSAALGFNSSIAIDALESGAIASGLSGTGSSFVAVSNEDTIDDIIYSWEKYEGTVIETKIDNVGCKIL

SEQ ID NO: 10885 - protein, 423 aa, Methanobrevibacter gottschalkii
MKKIYSMLLLIVMLCSLSIVSASENLSTSDNPVVVDNVDMSSKNIGSIPDVTSASNDVVVSENSSVEWKSYENEKDDNVSDNQSNSSSNSTSNGSYKEESVVSNVVTKNVSSSYGTVVNYNIKVLDQFKKPMVGKTVSVTIGKKTVEKITDSDGMVTFTLNCQAGKYVIKYKVDNINGSNSYIVKNKISLTVLNWNLKGDVSKINLIKKNMPNNTWVKKAVAATKKGIPLLKFKGGKGKIVFMTAGVHGNELSSQVAAMKMIKYLSDNPISGTVYIMPFVNVKAIAKKVRYTDKDYNRIASSSGTIPNKIVKLVVKYKCNSYGDFHTTKPGGAPGKDIVMGSKSLKSKSADLTNYIAKKCKVNKRIYSHIGQEYPGALFENVNKKGITSVICEVALPHNTVTTKTVKTSFNMMKYLLKYNSVI

SEQ ID NO: 10886 - protein, 116 aa, Methanobrevibacter gottschalkii
MIFLNRSYEIKSFKNKKEAEELLKKSRKSIDEIDNQLFDLISQRTALAKDIASSKEYLEIPIFDKSREKVIHDKIRRLSEEKGLDVDIINQIVDMLTILNKNAQKEILRRNVDGKY

SEQ ID NO: 10887 - protein, 65 aa, Methanobrevibacter gottschalkii
MGNIRTSFVKRLAKELIETHKGVFTTDFEQNKKLVQEYSTVSTKHLRNKIAGYVTRLIRLEQTRE

SEQ ID NO: 10888 - protein, 406 aa, Methanobrevibacter gottschalkii
MDLIVVKFGGTSVGDGSRIKKAAQSVVNEYMKGSQVVVVVSAVNKTTDELIGLSNDAIGTGLTDKQKAEIMAMGELTSARLFSATIESLGVKSEFIDPYNKLWPIITDSNSLEAKIDLNTSNKKTEGIKQLVNQGVIPVICGFLGKGPSGEITTLGRGGSDITAFLMGHCLDANEVVIVTDVDGVMSTDPNKIEDAELLDTISVEELRDLATHGAQVLHPHALKYKDPLISAKIINFANEDLSSKGTRIVGPFEGEMLKCVTLYKDPISLIAIVGEAMLKKVGLMAKLTTALADDGINIFGMSAGQNSITVFVNKVDSNKAYLLLHQLVIDTDVLSSLSLGRDTAMITFVSPDIIETPGIISDITEPLRKNNINILEITSSQTAVVLFVDWEDGEKAHKLITEVLE

SEQ ID NO: 10889 - protein, 297 aa, Methanobrevibacter gottschalkii
MNFEGTYVAMVTPFTKDGTFDEEGFRSNINYLIDQGVNGLVGAGTTGESATMTHEEHHKVIEVLVDEVDGKVDTIAGTGSNSTSEALSLTKFACDAGVDAALLITPYYNKPQQHALVKHYGTIAEACDLPIIAYNVPSRTGCDIEVETAVELAKIDGVDAIKEASGSVDKVSDIYRALANEDLESEFNILSGEDSLTLPIMSVGGTGVISASANIDAKRMVLMVDSILNDDYTRALELHYEMLELIRAIFVESNPVPVKTAMNLMGLPSGPLREPLCEMKDENLEILKIALKNSNLI

SEQ ID NO: 10890 - protein, 273 aa, Methanobrevibacter gottschalkii
MIKVAVTGAAGRMGSGIIKKITEQDDMEVVAAIEMPNTPLAGKDAGLQAGIGEIGVGIVGSERLEETLKSSGAEVLVDFTIAPAAVETIKTATSCGVNVVVGTTGFTDDQMALNIKNVEDNKVGAVISSNMAIGVNVFFNTLKKLAPLLYDFDIEIIEAHHNQKKDAPSGTAMTAFEVITDALNRNPEEVGVFGRKGLVGKRTPEEIGVHAIRGGDIVGDHTVMFVGEGERFEVKHQAHTREVFIAGVIRAVRYVPTAQKGVVSSMNDVLGLE

SEQ ID NO: 10891 - protein, 349 aa, Methanobrevibacter gottschalkii
MVKVGVLGATGMVGQRFIQLLENHPDFEVTALAASSRSAGKRYEDATTWYLDSEMPNSVKDIIVCETNLEDMDNDIDIIFSSLPTEFASKVEKKFAKDYVVASNASAHRMKKNIPLVIPEVNPEYLDMIDAQQKENNWDGFIVTNPNCSTIALTLTLKPIVDNFNVNSIRVSTMQAVSGAGYNGVPSMAIVDNLVPYIGNEEEKMESETLHLLGSYDGNVVTNADFRLSASCHRVPVIDGHTEAVFVELDDEFDIGDVKNKMANFKALPQKLNLFSAPENPVIVKEENDRPQPRMDRNAGNGMAVTVGRMRKDKIFENSFKYVLVGHNTIRGAAGASILNAELINDKIL

SEQ ID NO: 10892 - protein, 385 aa, Methanobrevibacter gottschalkii
MELGMDVEKDTLQSLIRSCLLELNKLKYDLTELEVERANDNTPQRIKELEKDIVDKEKEVSVIKFKAEDEINLLKKQLGEKDILIKNQEDRIYELDYVNNSLDEIKEYFAEQLRDYKKKELADVNERLTDSFKSIAEKEATINTLSRTIDDYKIKVIKLENNVESQAQILELEKQLELKENEIRIKDSEINKMDGELDNLKQQTIPKDEYVNLQSKFKSEITAMDAEITNLKQETIPKKDYEHLQSKFDSEIKNLDNQINSLKENTIPKDEYVSLQTRFENELSARNSELEYLKERSIPKEDYLTLKTQLQNEISSRENELRFLKEQTVPREDYLKLQNELTKKDGKIKRLEEINAFFNELQEEQEAYETQETTPPFRLEKKQGR

SEQ ID NO: 10893 - protein, 536 aa, Methanobrevibacter gottschalkii
MAQGQPIFILPEGTNRSVGRDAQRNNILAGKVLAETVRTTLGPKGMDKMLVDGLGDIVVTNDGVTILKEMDIEHPAAKMLVEVAKTQEDEVGDGTTTAVIIAGELLKKSENLLDSDIHPTIIAMGYRKAAEKAQEVLDEIAIDDVDSETLVKVAMTAMTGKGTEAAREPLAKLIVDAVEAVAEDGEVDIDNIKIEKKDGAVVEESTLVEGVIVDKERVHPGMPSEIKDAKIALVNAPLEVKETEVDAEIRITDPAQMQAFIEQEEKMVKDMVDQIVAAGANVLFAQKGIDDLAQHYLSKAGVLAVRRVKKSDIQKLSRATGANVITNLDDLTAEDLGQAGIVEERKVSGEEMIFVEECSGAKSVTLFVRGSTKHIVDEIVRAIEDAIGVVAATVEDDKVVAGGGAPEIAMAKKLKDYAESISGREQLAVNAFAEALEVVPKTLAENAGLDSIDSLVDLRAAQETSHYMGLDVFTGEVADMKEAGVIEPKRVKKQAIQSASEAAEMILRIDDVIASTKGPEDAGMDPSAMGGMPPMM

SEQ ID NO: 10894 - protein, 72 aa, Methanobrevibacter gottschalkii
MENLSFEESLEKLERIVNNLENGNVPLDNAIDEFNNAMKLVKICNEKLNAAEESIAKIVKENGELVEFNPTE

SEQ ID NO: 10895 - protein, 418 aa, Methanobrevibacter gottschalkii
MEKETITVSQINSYINRKLKTDPNLKNILIKGEISNYKSSFSGHSYFTLKDEKSQIDAVMFKGNKDRFLKFEPENGMKVIVKGKIEVYEKTGKYQLYATKITEDGIGNLHLAYEQLKKKLDKEGLFDNAHKKEIPKYPKIIGVVTAQSGAAIRDIITTIKKRYPVSNILVFSTLVQGDQAAQQIVKQIKYAQEFNIDTLIVGRGGGSIEDLWPFNEEIVAHAIYNCKIPIISAVGHEIDYTISDFVADKRAPTPTGAAVLAVPDINEVKNNLNNLSNRANKNITNRIKQNKTKLTHISEKQILKNPESIYEIKGMGLDNIVNKLHFISKNIINSNKTKLFKLENSIVLKNPIEITKSKRDACLRNIEKLEILNPLLTLKRGYTLAKTNDKVVSSAKDVKTGDQLDIEFDDGIVNTKVI

SEQ ID NO: 10896 - protein, 76 aa, Methanobrevibacter gottschalkii
MRIKEELFGKEVLDAEIQIVGKVNDVIFDKDTFEITDLVIKKTGLSEQIKASENIVPIELVKVIGDKILLKGEDDI

SEQ ID NO: 10897 - protein, 175 aa, Methanobrevibacter gottschalkii
MVSREYLINLLKDNNVFLEGDFTLSSGQKSNYYINMKKAITEPEILSTISKLITSKIDLDDIDKVAGPALGAVPIATAVSLESKIPLLMIRKEKKGYGTSKLIEGELNEGDNVIVVEDVSTTGGSLLKAIKAINDNGGNVIRAFVVVDRQEGAIEKFEKEGIKLEPLINVNEFFD

SEQ ID NO: 10898 - protein, 168 aa, Methanobrevibacter gottschalkii
MKSKTTIEHQKMSSNDITCGVITLSDSRKSKKVDLSGQYMAEEIEARYTLKSRSLIPDEKEDLINTIETMIDDDIDVILTTGGTGLDSRDITVETVESLFEKKLDGFGEMFRAKSYDEIGAAALLSRATAGIYKKTVIFSMPGSPNAVKTAFNIIIDEIPHFVHHVKK

SEQ ID NO: 10899 - protein, 112 aa, Methanobrevibacter gottschalkii
MFNTELISKMGKIKDKKLSNLLIGRKGGATTIKITDQILHQPSNANQLSKRLHLDYKTITYHLNIMIDHKYVEKEKITNSYIYYPSKKLYNCIEEYSLIRNFLKIEYERYKK

SEQ ID NO: 10900 - protein, 266 aa, Methanobrevibacter gottschalkii
MTNIQTKKELNEEYKNVKYILTSSMRTKLLLALYEHSKKLEEIRKDLKKPSATILHGLKELENKNLIRKIQKHYELTSNGYILTTNMIKLIENWYSINKSKQFWNKHDLSDIPKEMLKDIYLLKNVEYETSTTSDLSNAFNKYIKLLLKSTELKIILPIYSENHFKHMIDFLNKHEQAKLELIVNEKILNSIKQNKNLERKLLENEKVIVKCIEQDLKLFLTCSDNFMSLTLFLNDGHYDDSQILIGKDKNAIKWALNLIQCFSHN

SEQ ID NO: 10901 - protein, 263 aa, Methanobrevibacter gottschalkii
MDIHNEINNNIKFLAKSEIRLKILSELQNSPNSVHGLVKKTKITYSSVSSNINKLEQNNYIKKIKSKYYLNPMTKIYFQTLMDFKNSVEIITSYSEFWDKHNLNQINIDSLKNITDLKDSKLIETTPLDIYKPHNTIKSQISNSKSLKAIFPYLHPEYPQLIENILKDNGQVELIIPKSISNAITSKIDLKTRKTAIKEKKLTIYPIENNLKIYLTICDKSMSFGLFKNDESFDQNRILISDSEKSQAWADNLFKNIKYDVIK

SEQ ID NO: 10902 - protein, 168 aa, Methanobrevibacter gottschalkii
MEICYILDASAFINGFKLDSNNNFTVPEITAEIKDFESRLMFDMAIDECKLTIQDVPNKYTNCVNKIISESGDILRLSFPDKKLIALAYMFSKEGRNVKVISDDYTIQNTLKIMGIPYSGIITEGIKGIYNWKKVCEGCKKEYDDDYPFDDCEICGSKIYKKRIKVSK

SEQ ID NO: 10903 - protein, 371 aa, Methanobrevibacter gottschalkii
MRIGIVVHGPNIIDSGYALKLIDLLKNYGNISVRLGGTMGRTAVIDASLENIIDITRKLVPSDSLKIFSDEGVDLIFLLNYGKSNVTGQVFGYKVYNHYADKVTENNVPVIQIERPGEEDGSIIPWNNDLDIVHDLSKKLNLAIVYPNEVYENHIKQDNANVNQRIVHGVSPDENIMVNSVVIGKTNSDKLTLIARDNHIVDIIGGELKQHGLEKLGEVDLDSAIVKTGLLRHAKVTPRVISTNKSNDYKITFLDHAGEDVYKFRDSSLVITVGDDTTLISSDILYRFDIPVIGITDGDLDKVVEDGFKVKNSIIFEVERGFDDVVGRDIKRIMFDGAQESFNYLNIEEVRDKIIEIINNINCKYKISYIE

SEQ ID NO: 10904 - protein, 324 aa, Methanobrevibacter gottschalkii
MNFKNLVKEIQEFKGVSRKSSINNVISLLEESYNVSGDVVIEIGDDASAIDIGNNQVMLIAADGIWGDIMNVNPYWAGYCSVLVNVNDIAAMGGKPLAMVNIMSISNDEIYEDLLKGIKDGCLKFGVPMVGGHLHPDGEVDSLGVAIVGIAQKDKIITSFGAEVGDKVIVAIDLDGKPHEMFNLNWDTTYDKDSQLVRDQITAVQYLAEHDYIKSGKDISNPGILGTLEMLLETSKKGAIVNLEDIPRNETLGWADWLRSYPGSGFVFTADEDKCEYIREYLAKYSIEAAVVGEITDSNSLYLNYADEQAEIFNQDKNPVFIFR

SEQ ID NO: 10905 - protein, 246 aa, Methanobrevibacter gottschalkii
MAITKKHVFSLLIILIIALGTISISSAYVGTGFSHDIPTSKYHDLSASDILNKYNTTNCHVEENGVCTKVVDGDTIYLDNGKKIRFVGVNTPERGVEGYITSKNFVQKLCLNKKVGLDIDDSKFTDRYGRTLAVVIVDGKNVNEMLLKEGLAEIMYMPPSEFNPFEWGTTNTHVDTTHSSSSTTHTSTESTSSSDSAKYIGNANTGKFHTAGCSSVNHMSEHNKVFFSSRTDAINQGYTPCEICNP

SEQ ID NO: 10906 - protein, 515 aa, Methanobrevibacter gottschalkii
MLIKINGEEMDVAEASTIQDVIEETNAPYTPGSIVCLIKGKKELEKNISKYKIRTNKGSIVIQLDESDEAKPLVDIWKNQYDEFVDLNIRWSTTTEVAIGPIVTDLEPTSEEYKYYEGDVVLSLSSFSNESTHLILLKDNTTNVYSVPPFNKGIFARVIGGKKTLDNLTDDDSVSSIEPIIERSTTKDIVSVSDLTTVLEEGNELYTYMSFDIDEESPVCVEHLFALIKDGKMKVSYESESFLGFYELASLEKPKEHVTKRNRGTITVRSDGVGVGKLFIYRENRVLSPNHTTVGNVVKGMELIDAAKENEFITVKAEQGRLMLLNKTQAEATEMLSAAGVEHMIDGLVDDNAIIVEQTPQHTIDILKEGKVITKAINKDDLCTIKFTDNAPRSVRYFKLLSGLLENPVGQIKIHFAVPGMHIVIFEGDKKAAKGLVPENNPVDKVIRGQIGITNMASKSAGLIGIRFEDNSDFGPTAETFDATNIIGDITSDYDYLENLKEGVVVYVAESNNES

SEQ ID NO: 10907 - protein, 157 aa, Methanobrevibacter gottschalkii
MLPNLTMSPNLGTEDWDPDVITRMIFIGPGAHVSEQQVVNEFHMLGLPLTIKNTCYGSMISGKSEDVYKAIKEIRKLDPSHIFTKERGFAPGDPRRCRGHRFGPREGFHQMEKEYKILGFVSEALENPKEVEIEEKKPIDVDEFKKIMNKCLDKKNR

SEQ ID NO: 10908 - protein, 151 aa, Methanobrevibacter gottschalkii
MVKIALYPPNSLILADLLERKGHVPLVLQKQIRQKIKDPEIDSPPMNITEEDPLNGLKYAAIEVPSGVRGRMSLIGPLIDEAEAAIIVDGAPYGFGCIGCARTNELSIFLLRNKGIPVLELKYPDNQDETYVMVNAINEFVDSLEETIGEE

SEQ ID NO: 10909 - protein, 413 aa, Methanobrevibacter gottschalkii
MVKIALVSCGTEYSGIQKEIEKAANKFGAEIILPEIDLDYIDESYVKFGFSAQSSSLKLMIARAMAIVEGRCRPDAVFIATCFRCAEAALVRNEVRRFIQNNTRIPVVTYSFTERTKADELFIRMEALATTVTRRNILAREKQEGLTLGLDSGSTTTKAVLMENNNVIGTGWTSTKDIIESANIAAAEAFEGTGYTWDDIDGIGTTGYGRFTMGEKFGAELVQEELSVNAKGAVYLADCQKGEATVLDIGGMDNKVITVNNGIPDNFTMGGICAGASGRFLDMTSRRLDVDITELGPLAVQGDWRNAMLNSYCIVFGIQDLVTTLAAGGSKADVAAAACHSVSEQVYEQQLQEIDIREPLIQVGGTSLISGLVEAVSETLGGIDVIVPEYSQHIGAVGCALLVSGMGHRQDDK

SEQ ID NO: 10910 - protein, 186 aa, Methanobrevibacter gottschalkii
MLVECYDERGAEVYEIIIKQIFQDLVLGSSVDDLKAYVNPDDPVFVLAIKMRKTSNVIKFEDVANLMYNKQNDVTTILIDNENYLPNILKELWKRFSRDEIYQPNRYQLEIKGDFTELGSIVVDDPHSNLRRRIYDAVFRILPEGFKIIKDLSTEDIVTVVATDELIKDAWIEKALEFIDELNKGI

SEQ ID NO: 10911 - protein, 288 aa, Methanobrevibacter gottschalkii
MNEHKGSRFAHITRAHPCFNEKMHDKVGRAHVPVAPKCNIFCNFCTRDINNEEDRPGVTSCIMQPDDAINHINDVTADGPISVVGVAGPGDSLANDETFEFFEKLATEQPDLIKCMSTNGLLLPKYADRLAELGVNSVTVTINAIDPDIAVDIYSFIKYEGKVYKGYEAVEILIKNQLEGVEKAAANGLVVKVNSVLIPGVNDEHIVEIAREVEKRGAALMNILPLIPLGKMKHLQRPDCSMMEKVREEVEEIIPVFRACTQCRADAYGIPGKKSEDHHLGMTPQSHY

SEQ ID NO: 10912 - protein, 306 aa, Methanobrevibacter gottschalkii
MVKTYVFGHKSPDSDSITSSLVMTNLEKELGNTEVQAYRLGNINKETEFILNYLDIDAPELLENIEDDANVILVDHNSPSESVENLENANILKVVDHHKLALKTSYPLFLRFEPVGCTETILCKLYEENNVEITKEMATLMLSAIISDTLLLKSPTTTEDDKKAVTKLSKIAEIDVEEYGLKMLKAGTDLSSFSIEEILALDAKQIDFKNVKSIVNQVNTASIPDVLEMKDELEEGMNKIIEKENLDLFMLLITDIVNSNSQVIALGKNADLVEKSYDIKLEDNMVLLEGVVSRKKQVVPIMTENA

SEQ ID NO: 10913 - protein, 309 aa, Methanobrevibacter gottschalkii
MKTLEWEDNKLKLIDQTKLPDELTYVYCENYQDVIIAIKDMIVRGAPAIGVSAAFGMALADIEGVDLNKAALEIKTARPTAVNLFWAVDRVLNSDDALTEALRMYEEDMATNRAIGKFGSEIIDDGDTVLTHCNAGALACVDYGTALGVFRAAHEQGKNINVICDETRPRGQGASLSVWEMQQENIPVKLIPDVASGFLMSQGKIDKVVIGADRIARGGVVNKVGSFMVALAAKHHDIPFYVAAPYSTFDNDISIFDTVIEERDGDEVRYYGGARICPKNTEVINPAFDITPKELITGIITEKGIIDPI

SEQ ID NO: 10914 - protein, 148 aa, Methanobrevibacter gottschalkii
MNKKIVILVIVVIIAVLLLFLVYANNDSSSNSNRTILNVSSEGPIELSKITDDIKNNSYYEGYDVETLRWMESLGDKYVFKSNDEIVIMDKWDADKIPSAYVCDAYFREIFSCNVLENRTLGDGNHFKDVLFIKNVEFIDEEVHYIQI

SEQ ID NO: 10915 - protein, 332 aa, Methanobrevibacter gottschalkii
MKCVKVPLRQLNDTRIKLMENGLMNMEYKIKTDDKWGYIPVNEYVNDYEIVDVELEAMKKFPHNFAELLKDELSSEEIENLRTSFDTIGDIVILEIPENLQDKKQIIGDAALEFTKRRSIYMKKSAVKGTTRVRDLEFLSGVDDTVTIHKEHSARLKLDVREVYFSPRLATERKRVMESVEDGEKILDMFCGIGPFPIVIAHNKNVDIVAVDINKSAIKYLDENIKLNKLKGNVKTYCGDIRQVSDDFNLKFDRIIMNLPGLAYTFLDVAVDLIEDGGIINYYEFSDSYDRGVKRLTDACSAVGKKVDIINCRKVKSTSPGEWHISIDGKIN

SEQ ID NO: 10916 - protein, 263 aa, Methanobrevibacter gottschalkii
MFYLVGLGLFDEKDISLKGLECLRNVDKIYAEFFTSRLFGSNFNAIEELVGQKIEILVRGEVEEESKFIEEAKTQDVALIMGGDPLIATTHSDFLVQCSKKGIDYEVIHGSSILSSAPAISGLQGYKFGKVTTIPFPDYNFYPKSPYEAIEENLKMDLHTLVLLDIQAHKDRYMTVNQGLEYLMNIHDTLDRDGLINENTLAVGIARVGSKDVCVKAGTINELIDFDFGGPLHCIVIPSKLHIVEAEYLVEIAGANSKLLDIV

SEQ ID NO: 10917 - protein, 171 aa, Methanobrevibacter gottschalkii
MCSIYNIYNCLYKLYLMKFEKTMGFYDSNRMGDILFIFHKNHKKYLNDELSKYNMSLIHALCIIMIHESDELNQKDLSDGLHLTKSAITKAVKKLEDEGWILRERSIEDKRHFILKLTDKGNDFIPIMNDINKKWESEMGLYELDPNFMQIFNELTHRAINLNLKKEMKKD

SEQ ID NO: 10918 - protein, 311 aa, Methanobrevibacter gottschalkii
MSIKKVVVAGGGVLGSQIALQTAYCGFDVTIWLRSEGSIERAQPKLERFKNIYVDTLEKMKTDASAYCRGLSKKADLSSEELDALKEQAQNAYDSLKLTTSYEEAAKDADLIIEAISENPEQKIAFYQELAKHMEDKTILVTNSSTLLPSMFAEYTGRPEKYLSLHFANTIWANNTAEVMGHPGTEQKYYDEVVKFAEDINMIPLKLKKEQPGYILNSLLVPFLNAGQALLANDVADHETIDKTWILATGSPAGPFHILDIVGLETAYNIVIMNPESKDPETTPGKIAKMLKEKIDAGETGINAGKGFYEY

SEQ ID NO: 10919 - protein, 174 aa, Methanobrevibacter gottschalkii
MVRPRRMRRVVECHKYNLNENRKPIELSVDEFEAIRFKDYRNIKQIDAAEFMGISQSTFHRILNSARHKLAISLIEGRRIVVVRGDTMIDQNKYLCNDCGFQWSNPEKTYEKCPDCGSKNIQRLNRDKLRGSSPDKCRCPECGYEEPKVKGVPCRTKICPECGSSLQGRGMCRI

SEQ ID NO: 10920 - protein, 94 aa, Methanobrevibacter gottschalkii
MNDNLKYNCNECGFTWITLNGQHSICPKCHSEKIEYLGEVEDLDINSILEHNKRRGGCCGSARGKGPLTCGKPYPDHHDPNIPHDPSRCCGHNE

SEQ ID NO: 10921 - protein, 76 aa, Methanobrevibacter gottschalkii
MNHVKTVKNETNVAQPHKHTEPSQNTDHKMQKAMNQKMEKNRNIKDEYTKRSSVEEPILENIKRTIPNRKRSSHRK

SEQ ID NO: 10922 - protein, 305 aa, Methanobrevibacter gottschalkii
MDNEELRTVRVYTKKYTSKDKEGNIVEKESQQKQVSLKKEDPFEDNDLVKVLAKREYESLLDNQFSDSKLDEFYNRLEAKDAEIEKLNSQIQTLKGSFFDDVNSLKEQLTYKDELLNAKDEIHKLNKKITKIDDERVAIFKELDYKNKMILAYNVELNKSILNAINVVIDEARDNINRRNAQLVEDLEKSIEKSKHDVNEKNKAIAYEIKSTVEDMNEQIRNTSTLKMILNKKRINLRVPTDDLLKPFDFDFDVEQLLSGQALELDAAEILKEVMPKLPEPFSKYIDTIEEEPETIEVSSTKQGE

SEQ ID NO: 10923 - protein, 138 aa, Methanobrevibacter gottschalkii
MRTFNAGKITFEYPDNWEVEKADILSNPDCIATLSKGQDNLFNAVSFPTATNLDDYKIFMEDVISDDGGVILSSDFVQIADKNAIKVHANMDTPEINFDIHTYVFIENREIYIFELRTLDVSGESEREFKNMISSLRF

SEQ ID NO: 10924 - protein, 247 aa, Methanobrevibacter gottschalkii
MIKKFEIKSHDGPGRIGKVDGELTPRIFFKEELKIAPNQGSAHNIDREIAEFNVKETLKLAKENAETCNIAVIQGSKYIDLRIECLKKLEEIGYNGFIIANGDALLTNSRELVDIIISLKKEAKKTSYFIFPFAELSFMPLLTYMGIDGFLADSANYYSYMNVLQTPTKSYDLNNYPIYENISQKDLEKKNLENMKFVIKEIHVHMKNKSLRNLVEERSGTTPQNISTLKILDKNHMNYLLEYTQIF

SEQ ID NO: 10925 - protein, 316 aa, Methanobrevibacter gottschalkii
MIVRGVFLMSIINRLKSLFKGDIDKEETDINNDVSNTSDDVEVTSSKMEESISPEMEDSKKDLTFKKDIEIVEDSSEIAEEVEAFEKTIPEEQEIVAEEAKTIEDEEKTTDEDVVEEVEENSNDKDKKRDTMTLLTDKELLNDTNRDPDFTAEFIDAGIETVKHCFQCGTCSGSCPSGRRTPYKVRQIVRKCLLGLKEEVIADDALWMCTTCYTCQERCLRSVKIVEIIKKARNIAAHAGYMAKSHKMTGVYVLNTGHAVPINDKIKALRVKIGLPEVPPTTHTYPEALEEVKKLCKITAFDELIGYDEATGGLKE

SEQ ID NO: 10926 - protein, 295 aa, Methanobrevibacter gottschalkii
MEIAYFLGCIMNNRYPGVEKATRKLFEALDIELKDMEGASCCPAPGVFGSFDEETWATVAARNLTLAEDMGVDIVTECNGCFGSLFECNHILKEDEDKKAKINANLAEIGREYKGTTNVKHIAQVLRDDVGFEKLASLIEKPLDLNVAVHYGCHFLKPTETIGIEDQAENPSILDDLVEITGAKSVDYKDKMMCCGAGGGLRSRDLDVTASYTKEKLEHMSEAGVDAIVNVCPFCHMQFDQGQVEVNERYGTDFAIPVFHLAQLYGLAIGLPVEDLTFDAQKIDATSAVKKALGE

SEQ ID NO: 10927 - protein, 88 aa, Methanobrevibacter gottschalkii
MFVATLDGIFKYSDLPEEYEPYVQFKATIDKRELKPTDEMAILNIAGTSTHHVLFLDAYSSIAEIEAELKEADAKINHTTLKIIGGHL

SEQ ID NO: 10928 - protein, 175 aa, Methanobrevibacter gottschalkii
MSLPSEQNWLVLQNLIIDLTKKGYEIPNGINPEMGLIRSSISSYKRDPSHPELINGLAKAEMALNNIQGTLLTIAEEEGENYVDYWLDLLKQVMKGEELFEFAKSRSKFLVNTPPGLTTGKINLKVPLAEERVQEIAEWNGLIIEFEDDMTVQLHGDQEDLKTGLKEMGSFFLDD

SEQ ID NO: 10929 - protein, 229 aa, Methanobrevibacter gottschalkii
MTKILAISDIHGEENENLYTYLGNNDIDLVLILGDITDFGPLDFVETFINKLYEYDVDVIAIPGNCDPQGICNAINDVAFCLHNNIVAYGDAILFGYGGSNPTPFNTPGETDDDHIYKSVYDLLANYDYVYNTEVPKVKILATHAPPFNTDADRVSNGEHVGSSGIQKSIHEFEPEINVCGHIHEAKSLSKIGTTTDVANPGMLKDNGAVLIDIKDGSNYDISIVSLDE

SEQ ID NO: 10930 - protein, 300 aa, Methanobrevibacter gottschalkii
MIWVTSNVDGEEYKEPFSKGIMSRSLNISYIGSKRAYELASEIEEELIKKDMSVISRDELADIVLNHLITVDPKIAEKYKSLRLLRNSKKPLIILIGGSSGVGTSSMAFELANRLRLKNIISTDMIREVMRKIVSKDLSPVIHKSSYDAYESIRTPSLKMDKIVEGFITHADVVNVGIEAIIERSIKEGISIIIEGVHVVPGFISKDLMENNNIIMFTLMIDDEELHKQRFYLRCSQPWVKRSLENYMENFESIRKTQDFFVEQAKIYDSHIINNIEINETINQMVSAILEKFVGVNDVR

SEQ ID NO: 10931 - protein, 128 aa, Methanobrevibacter gottschalkii
MLDKKVKEIMTSDVLTTTSDVDVVFAFEKLMENKISSLPVVEDDELIGIITATDVGHNLILDKYELGTSVKEIMITPVVTVSPDSTIEEAVCIMKDNVSSGILNQLPVVENGKLVGIISDGDIIQEIF

SEQ ID NO: 10932 - protein, 302 aa, Methanobrevibacter gottschalkii
MDELRNKGGKKAVTVAIIANTFLTVFNIIVGMLSGSYALISEGGHTLSDITTTIIAYIGFKIGQKPADKEHPLGHGRAEAISGLIIMLFLTMVAYEIMSGAIEKLFNPSTITTPDIYAAVMAIFGIFINYIISEYIIRLGKQINSPAIVADGKHQKTDIFSSIAILIGVLVSNIGYPILDPIIGLIIGFLILKTAYGIGKENLDNIMGKIPSEKFVNEIRKIANESSDYANNAHNIKVDYLGSYAAVTLHIEIDGNMTLNESHKIVHIVQNNIIERIPDVKYVNVHACPKGLDYNHNQEIDK

SEQ ID NO: 10933 - protein, 373 aa, Methanobrevibacter gottschalkii
MINPASRTKSIELSLIRKMFEVTNPNAINLGIGEPDFDVPENIKNAMKRSIDENDTHYTPNKGYIELREEISKKFKKENDINTNPDDIIVTVGASEGLYMCTQAFVEKGDEVLLPNPSFLSYESCIKLADGNIVPVDCKMENEFKLKAEDVQEKISNKTKAIILNSPSNPTGAVMEKEDIKAIADLSIDENFLIISDEIYEKIIYGKKNYSPAKYSDNVITLNGFSKTYAMTGLRIGYLATTNENYTEQLLKIHQYNIACANTTAQRGAYEALTGPQDEVEKMVFEFQKRRDLIIRRLNEMEYETVNAEGAFYVFPKIEDEDFVMKAADAGVITVPGIAFGTNGKNHVRMSYANSYENIEKAMNILEERVVNG

SEQ ID NO: 10934 - protein, 516 aa, Methanobrevibacter gottschalkii
MLYEKNIFQKNIKNMNIHMGLAYPNIYRTAMSSLGYNILYNKINERENTWCERIIFPNTNSIESNTPSKYFNIISFTVQFEEDYFNVLKMLKDAEIPLKREDRSESDPLIIAGGPCVTANPMPLYDYIDIFVIGEGEFVIDEILNTYKKHGKNLEKYLGLLGVYIPKYNNRTKINIIPNMDNTYHITEHIVSKSDDENYQTIFNNTIMLNVSRGCTRGCRFCMSGYLYRPMRETKYKKLIDIAIKNRENTGLNKITLIGAAVSDYSDLKNLIDGLEKEGFQISTPSLRIESITKETLESLKRSGLKTITLALESTEKLRKVINKEILEEKIFTVIKNAIELDFKIKLYFLIGIPGETMEDIEELCQYMKKIANMHKSIKNVKFSVNPLIPKPHTPLQWEPYDFKDIKKKTRYINKEMRKYNVKCESPKKGLIQYILSCGNRSIGAIIEKTLTKNPTLKEWKELLPKYDIDDVLPWDNIDVGVNKRFLKIENKRLRSLKQTPWCETNPCYNCGSCEK

SEQ ID NO: 10935 - protein, 958 aa, Methanobrevibacter gottschalkii
MFFLVLGVVGATEFNNASNTEDSNLMTDNVDSLSVENKLEVSNEDSISEANLVNSHDDNLNNYSDSDVLSNYEDDYGNVQASNYAEIGNTNSVRSDVLSVSNDDNLAASSKVSAKVDVVDTHYSKSATYFKVTLKDTKGNSISNQKISFKVNGVTYTATTDKNGIASVKTAALSVGTYTVAIKYAGSSKYAAVALSKKVKVLSSVSGSDITKYYGPVVQYSVKFWKNYNALANTKVSFKVNGITYTKTTDKNGVAKLPVNLAPGKYVITTINPYSGEKLSNKCISLRDGTTLTHGSTNTYITPNKKHSFTVTLKSKHGILIKNKNVVFKYNNKKVTVKTNSNGKATLSIPALSKGTYYISYSYSGDKYYSGSSGSGKLYVKNPTTKITSSKLKMQYKDGSKFAVKLTKNGKVLANKKVKLTFNGKTYTEKTNSKGIAYLTVPTVKPATYNIKYQYLTPSYFNYCYGSNKIVVSKQTAKVSAGDLVMNYKDGSVYKVVVKNKFGNPLKNIKVKFTINGKTYTKTTDSNGVAKQSIGLNIGYYSVKTVLSNNYYAHGAIYKHISVKGTKFVGGNIHVAVGKTAYYSVKLLDYKNNPIKSTEVTFILDGKKYTATTSSKGVAKVNLGVLSAGTHNVKYSQGEYSGSSNIYVADKVTIKQIIAASGNVQKYIQKNHRLPSTVNIGGVTYSTNQYLYLVSKAIVNLKSNVKSAIYVKNVDGPSNPSSTYAAGNLYDYLSVANSVVKNSDSKGSVPNTVSSKVGTIGYKSLVYAFARVVAFYGDDDRLPSFVEIKSLSGTSSDSNINSKNTISNLKAYLAASTNCQVNNAKIKQLVGKLTNGLKSEKSKATAIYNYVRDTISYSFYYDTKHGAVGTLNAKSGNCVDHSHLLAAMFRTAGLATRYVHGSCTFSSGSTYGHVWTQVLIDNTWTVADATSSRNSLGKIANWNTKSYRLNGYYSSLPF

SEQ ID NO: 10936 - protein, 152 aa, Methanobrevibacter gottschalkii
MNSKKYSKVAVGGTFDKFHDGHKKLLTTAFELGNQIEIGVTSDAFGGLKGDIDPCKERMSNLKAFFSDKSDFVVIPLNDPYGTTIYDEDFDAIVVSEETEPTAVEINEIRISKGMKPLDIVVVSFVLAYDGNPISSTRIRRGEINQKGNVVE

SEQ ID NO: 10937 - protein, 63 aa, Methanobrevibacter gottschalkii
MAVKIDSDLCGHIKDCPVQGLCIKLCEQGAIIEKDGDVSIIPENCDDCDLCIQNCPNQAISKV

SEQ ID NO: 10938 - protein, 336 aa, Methanobrevibacter gottschalkii
MFNIERNGEEHRNLSYNDINCVGCGICTDICPTSSLRLGPIVPVARGLIEMDLVSIKEDSCVFCGLCSIACPFDALSMSVDGEYIKNIESYPIWNKESVVDDGECMYCSKCYNICPSDAIIFERNLPNPADLVRGEIEINEEDCIYCSFCADMCPAEAITIKNIPISSVDKLNNFIDVDSSKCIFCGVCKKVCPENAIKQICSTCMLNEEIEVPEITGNVMILEDLCVYCSWCSEVCPVDAIDITKPFDGTLELVESEEKICKGDSCHACQDVCPCNAVSIVDGKSVTDLSFCNLCGACVKACPQDIRILTRTDLNLENINSESWNDILTSILVGK

SEQ ID NO: 10939 - protein, 60 aa, Methanobrevibacter gottschalkii
MFRKRIDSKGQGSAELILIIGGLIVVVLLIASYISNITEKTQTNIQNLLKTERDFLINKI

SEQ ID NO: 10940 - protein, 68 aa, Methanobrevibacter gottschalkii
MKNMKKLIKENSGQGAAEYILLFGGVLVIALLALTIYRSYMETSDVSLKAKDDIIDVRNTILDNRTHV

SEQ ID NO: 10941 - protein, 382 aa, Methanobrevibacter gottschalkii
MGNTIKLVSGFILFVIGVLIAYEASVYNLLDILLIIGLIIAIVGIIMMISHFVESNADRTTNKIKEFLESKESNSSFERKNFTGEEPLKIRHDYNDFDDAEYDDLGIEDYNDSTPSEYYGDSFEDNPNRVLRTVPRQEKELNLDNQLVFTPNYGRPLKVTRTPKKRQSDYFEKEMPPFVVETDKSDEIKRALEEPTPVEKAVNNHTLAPEVKQPRDIKIDINDPESLPVPKSLSSHILCNDSVITSQEAFDQLAIYVNKEIMLEIPSLNELSDRFLSHVPTSYSRVIIDEFDTSDMSYMFLISSLLKQGVHIKTVPKVHTVNLITDDSHAMIISEGQNDMEYGAIYDDRKSISNIRASFEKTWNIASNLDENIIMGSVGGSA

SEQ ID NO: 10942 - protein, 239 aa, Methanobrevibacter gottschalkii
MEIRWLGHSAFEIISDDNVRILIDPFISNNPTCQVPVEELNPDIILLTHGHSDHFGDALEISNSTNAPIACIHEISLFLAKQGIRNISVNIGGSFVYRNIKFTMLEAKHSSDIDMVEEIAPGGTAASFLITFEDGTKIYHCGDTGLFGDMKNIIGAIYKPDVVMIPIGDKFTMGPFEAALASMWMNPKVVIPMHYNTFPPIEQDPAIFANFVSQFNPNIDIVVMNPDEYFEYNPEDYQD

SEQ ID NO: 10943 - protein, 668 aa, Methanobrevibacter gottschalkii
MKSMSNVDIYTISDELNNLLSGARVDKSFQPANDIVVIRFHVPGTGRIDLVMQCGSRIHTSQYPLENPTIPPSFPMLLRKRIKGAHVESIKQHEFDRVIEIKVKKDKYYTIIVELFDKGNIILLDDENNIIQPLKRKQLSARDISSKREYKFPEKRGINPITITEEELKKLFKNAESDVVRTLAMNGLGSLYAEEIIQRANGIIEIDKNTLTSQLTDTQTAEIYKCLKELFDNLKKGAIKPQIVKKDSKEDVIPLDLVKYADFEKTFYKDFNEACDEFYSKKVNSTIKNVKEAAWNKKVNKFEKRLKLQQETLDNFTRTIEESQHKGEVIYSNYSTIENIINVINTAWSNDYSFKEIGKILKKAKKEGMPEAQIYESIDKMGILTLNIDDTALNINPKSTIPENAEIYYEKAKKAKRKTKGAIIAIENTKKQLDDIKSKKDIAMEQVELPKKRIKKDLKWYEKLRWFISSDNILVIGGRDANSNEMVVKKYLEPNDIYLHADIHGASSTAIKLNGNELNDNIIKESGEFAAAFSSAWSMGFTTQDVFWVHPDQVTKTPEAGEFLSKGSFVIRGHRNYIRSARVKLAIGIVDYEGKRIMAGPVEALEAHCDNYVVLKPGFAKKEAIAKKIINKINEDDLLTLDDIIRVLPSGKCDIDEEYHLRKKYEKN

SEQ ID NO: 10944 - protein, 90 aa, Methanobrevibacter gottschalkii
MDITVKVTSIHIVAGIIAALISTGLTLGWFGFKNDIFAFFIAVIILYFVGQACQKIAGDEISGFSQWLWDGIAPFYFTWVIAYTIFAIYL

SEQ ID NO: 10945 - protein, 606 aa, Methanobrevibacter gottschalkii
MSSMSSVAGLSKYIKTLPKTKFSIIGMLIISFLIGSIYYLIDLNPTMGILEDFIAGGLFGLIVFGISSIMSGALNQQTISVVHGINLKIKHSMFLSVLSMTILGIIIIIGCIISQILKIDLFLNSMLFGCVLIYGFGTLVFWATSKVRFVTAAITGLIQPLLILAMYTLITFLFIDTSFIGPAILQITLKAIVAAIIFVMAIYAFIKVIASPFKKNLGIGVLDLLSLFIAHMNEGSNSLEGLFENMSEAIDTIVTFVSFKTENGIKALFISPSVHPGPLGDLGGSNMPTLLANKFDHFTMVAHGPSTHDFNPIAVSEIDKIEESVRNGLKTVEYSSNASRFIRYNVEKANIGVQLFNKGMVILSTFAPDAVDDIEFGVGLTMMAQSRSRCNVEDSIIVDCHNSFTPESGEILPGNSEVFQLIDVIDTINPKQGRYDVKVGCYEDNLESLDKHDGVGDSGIKTMIVEVGNQRTAYVLFDANNMEIGFRQEIIDAVSDLEIDEIEVMTTDTHTVNTLSRGYNPIGIAKRPEIIEYVRISIEEAIKDLEKVEVGTGTEKIENLNTFGPKNSTELISTISSVVAVSKIIAPVLLITALLIAFIWIFFGGL

SEQ ID NO: 10946 - protein, 173 aa, Methanobrevibacter gottschalkii
MERKLNVPIKDENLNELKAGDVVYLTGNILTARDQAHKRIIEQGAPFDISGAALFHAGPIVTKEDENYKMVAIGPTTSMRMNPYQSDVLDMGAKIIIGKGGMDDTVREALVRNNAIYVVATGGCAALYVDAVEKIEGVDWLDLGMPEAIWNLKVKNFGPLIVAMDSEGNSLYD

SEQ ID NO: 10947 - protein, 109 aa, Methanobrevibacter gottschalkii
MADINELAEKKLKSRMTKIRKCNREPEEKAKFSEKLGVSFDVEFHNKNPDKLADGITFITTPEGRILLAEYYYEIPETQEYTSLPIDEKKLKSILEFFDEYKLEFDDSD

SEQ ID NO: 10948 - protein, 384 aa, Methanobrevibacter gottschalkii
MIVNNSLDEVKKRDNALTIIKNLVETKGRSSLFDLTGLAGGFIASSSEISLLETYVGPAIFEDAIQEVGKEHMGGEKVLAVNRTSSGILATILSLVSKDSNVVHYLAELPAHPSIPRSCNLVGANYFETDVFEEFSIPNNTSLVVITGSTMDHKVIDEEEFKQIIEMAHAKDIPVMVDDASGARLRTVVFNQAKACDLGADIAITSTDKLMPGPRGGLMSGRAELIDEIKIKVNQFGLEAQPPAVLAMVNGIKNFKEENLIKSFKRKDELYKLLSLKFSNFKKSPTGVMIYPEGLSSEINVPHKLSDDDLAYVFSFILLRDYGIITIPPVSMPGASATIRFELSSSDAVNLDLNSLGKKIVSAFEKLQDIITNEEKCREIVFNS

SEQ ID NO: 10949 - protein, 305 aa, Methanobrevibacter gottschalkii
MKEEIMNLLKKEGKLSTETIDEIKQVDINDFKNLVEEIGKQKTEHIIADEISKNLNTKYIGKNLYVFNEVKSTNTIAKFLSTNNIADGSVIISEKQTAARGRSGKSWKSPLGGVWLSIVLNPHVDHSKLPLITLATGVAVAKTLEKVGIKNPEIKWPNDILINGKKICGILTEAVAKFNTIENVIIGVGIDANVDIEKFPEELKNGSTTLEIELGRKENENLLIKLFLEEFEKISELFDHEGYEEILKEWRKRSYSIGKIVEVREPFNKYYDGYVLGISREGALVVEKIDGTLEKVISGECIIKN

SEQ ID NO: 10950 - protein, 497 aa, Methanobrevibacter gottschalkii
MFEKVLIANRGEIAIRVMRACRELDIKSVSIYSDADKTSLYTNYADESYPLGNPSPAKSYLNIEKIINIALESGADAIHPGYGFLAENSKFGEECKKNGIKLIGPSGDVINKMGDKITSKALMKKAGVPVIEGTPEGITDIEEAKDIARQIGYPVIVKASAGGGGIGMRAVYEEDELVRAIESTQSVASTNFGDSTVFIEKYLEKPRHIEFQLLADEHGNVIHVGDRECSIQRRHQKLLEEAPSPIMTEELRDEMGGSAVKAAEYIGYTSAGTVEFLYDNGQYYFLEMNTRIQVEHPITELVTNTDLIKQQILIANGDELSYEQKDIKITGHAIECRINAEDPLNDFAPNPGKITGYRSPGGPGVRLDSGVYMNYTIPTFYDSMISKLIAYGRDRNDAINRMKRALSEYIILGVKTTIPFHKAILRNPNFISGDLNTHFIDTYKKGIEKEMENVIAEDHEYVNRLKSTFMPGKKIAAISAAVGSYQNMARSHNMQKK

SEQ ID NO: 10951 - protein, 275 aa, Methanobrevibacter gottschalkii
MYKDELSIFIPNSFLSESKDLKIRTYKVGILGRALAIFQADNVIIYNDDNVKNEDGEMDGEFIAEILNYMNTPQYLRKKAFPIRSELKHVGILPPLRTPHHPINSQPDVGDYRQGFTVKRNKKGTYVDIGMDKLAFCKEQLSVKRIFDFKITKIAKKEVIVTPDKPDDVYWGYNVISSTKSLKNSLKLIKPDLVVETTRYGDYINSIFDELKSKLNESKSIAILFGGPYSSIQEDVSNPNWDLFKLNTIPGQGTETVRSEEAVVATLSLFNCMRF

SEQ ID NO: 10952 - protein, 336 aa, Methanobrevibacter gottschalkii
MVRHHQPRKGSVAFSPRKRAAKETPRVKSWPQIDEPKLLGLAGYKVGMTHVLMTDSDKNSPTNGMEVFTPVTVLEVPPVVVMGIRAYEKTSRGLKVITEVLADNLDKELSRKISLPKEYNKSEAIAKIQGALENTEEIRVLVHTNPKVTSVPKKKPDIFECGIGGSNPEEKLNTALELLGNEVKASEIFNEGEFVDAIATTKGKGFQGVVKRWGIRIQYGKAVRAGKGRHVGSIGPWTPRRTMWTVAQAGQMGYHKRTEFNKRILKIASADEVDQINPDGGFIKYGLVKNDYVLVKGSLPGPSKRLVILRQPIRPNNKAEDIPQINYISTKSKQGA

SEQ ID NO: 10953 - protein, 254 aa, Methanobrevibacter gottschalkii
MKVNVYSINGEVKEEIELPAIFDEVYRPDLIKRAVLSAQSARVQPWGNDPMAGKRTSAKGWGSGRGTARVPRIKNGSKAAFVPMAVGGRKAHPTRAEKNHHEKINIKERRFAIRSAVAATTNKEIVENRGHKVADLEQVPIIVEDEIEAVKTAKQTREIFQNLGVYDDILRAKEGKRIRAGRGKTRGRKYKKVKGPLVVVGENKGIHLGARNHAGVDVVVAENLNAELLAPGTHAGRLTIYTKSAVEKLGGLFQ

SEQ ID NO: 10954 - protein, 86 aa, Methanobrevibacter gottschalkii
MNAYSIIIKPHVTEKTMNLIDQNNVITFVVNRESNKSQIKRAFEELYEEKVAKVNTHITTKGVKVAYIKLVEEEMAEELAVRIGVF

SEQ ID NO: 10955 - protein, 241 aa, Methanobrevibacter gottschalkii
MGKRLIHQRRGRGTPAHRVASHRFKDKIRYRSYDALEKEGSIKGKVIDILHDPARTAPIAEVKFENGEKKYILAPESIQINDEIECGISAPIKFGNTLPLAEIPEGTPIYDIENTPGDGGRFVRSSGTYASVVTHDANQAVVELPSGELKYLNPNCRASIGVVAGGGRKDKPFLKAGKRWHAYKAKGKKFMTVRGVAMNAVDHPHGGGNRQHPGRPTTVSRHAPPGRKVGSIAAKRTGLKR

SEQ ID NO: 10956 - protein, 136 aa, Methanobrevibacter gottschalkii
MARKIFKYKGYTLEELQQMSLEEVMELFPARQRRSLKRGFLPRQQIVLDKMRKLNKEGTKDGRPVVIRTHCRDMIVIPEMVGTTFGIYDGQNFVEVTIAPEMIGHYFGEYAPTRKRVQHGDPGMGATRSSMFVPLK

SEQ ID NO: 10957 - protein, 154 aa, Methanobrevibacter gottschalkii
MANKYAYNEEVDEAKTARAMAKSLKISPKHSVEICSAIRGMDVGKAKDYLEDVIEMKKAVPFKRHNKKVGHRKGLKGWASGRYPVKAAEQILKVLENAEANAEYKGMDTEKLFIEHISSHKGVVIPGYIPRAFGRMTPFNTPTTHIQIVLQEAN

SEQ ID NO: 10958 - protein, 251 aa, Methanobrevibacter gottschalkii
MIEKDFVTEGLKRTRIDEYLEKELERAGYGGMDVQITPLGTMVVVYAERPGMVIGRGGKNVRAITNTLKTDFGLDNPQIEVKEVEVPELNPKIMAYKISNMLQRGMHFRRVAYSTIRRIMGAGAQGVEVTISGKIRGSRSAVAKFVEGYIKKCGEPSIRLVEEGFATAQLKPGVLGIYVRIMPPETVLPDSVEILPPKIIIEEDGEVTEEEIDIETEEVIEEDIIEEVEDLDELEEVVEEESTEEVEEDDS

SEQ ID NO: 10959 - protein, 68 aa, Methanobrevibacter gottschalkii
MAILRSKEIWDMEVDEIQDKLVELRAELSKNISKSAAAGINENPGKIRELKRTIARVLTIMNEKQKEN

SEQ ID NO: 10960 - protein, 112 aa, Methanobrevibacter gottschalkii
MSKICDVCGLPEELCVCEEIAREVQSLKVFTVRRRFGKLMTIIEGIDEHDIDIRELTKTLKAKCACGGTAKNGQIELQGDHKVKVKKVLSDMGFSSDTIEIRESKKNNKKRR

SEQ ID NO: 10961 - protein, 92 aa, Methanobrevibacter gottschalkii
MITSNNLVHHEFIGLRIHAMNPKNPSLNLKGTVIDETKNTIIIEEEDNNEKMIPKNGTFFVFELPNGEKIKIDGNILSIRPEDRIKKRFKKI

SEQ ID NO: 10962 - protein, 105 aa, Methanobrevibacter gottschalkii
MVGLNVQEPETTCNDPNCPFHGTLSVRGQVLEGIVVSNKAERTITVERSYYKFIKKYERYEKRKSKINVHKPDCLNVNVGDSVKIAECRPLSKTKHFVLVEVKGE

SEQ ID NO: 10963 - protein, 132 aa, Methanobrevibacter gottschalkii
MKPLTSSVTKALPIGATLQCVDNTGAREIEIISVKGFKGVRRRLDVAGVGDLVVASVKKGTADMRREVVNAVVVRQKKEYRRADGLRVKFEDNAAVIITPEGILKGSEIRGPVAKEAADRWPSVGSAANILV

SEQ ID NO: 10964 - protein, 116 aa, Methanobrevibacter gottschalkii
MSIQPRKQRKARYTAPAHARGKYLSASVSKDLREKVGKRSLPVITGDKVRVVRGDFKGHEGEVLTVDYTSYKVTIEEVTLSKPDGTVTFLPVDPSNLVIIDANLKDDRRIKNKGDN

SEQ ID NO: 10965 - protein, 242 aa, Methanobrevibacter gottschalkii
MAKMGSRKHLKRYKAPKSWPIHPKEDTWTVKPSAGSHSINDSIPLTLVIRDVLKLADNAREAKRIINSGNIFINGIIVKDYKFPVGFMDVLDIPKTEESYRVLLDRKGRLQLKLIEDASAKLSKIVNKTTIKGGKTQLNLHDGKNVIIDEDAYSVGDVICLKVPEQEIVEAYPLQEGATILVTGGKHTGELGTVSEIIENKSTNPNTIIIENSAKDEFLTLKEYAFVVGNDAPVIDLLEVNK

SEQ ID NO: 10966 - protein, 170 aa, Methanobrevibacter gottschalkii
MNPMNEVRIEKATVSIGVGEAGEKLSRAITLLENMFDQTPVKTFSKVTNPEWGIRKKQPIACKLTLRGEKADKAIDMVLEGISRNIKPTQFDAQGNLSFGIKEHIDIPGMRYNPDIGIFGMNVSVTFEKPGYRISRRKIQQKKVPQKHRISKEETMKFMEENFKVNYVTE

SEQ ID NO: 10967 - protein, 47 aa, Methanobrevibacter gottschalkii
MPRKYGKAAKKCSRCGDHSAMISRYGLNLCRQCFREIAPKIGFKKYN

SEQ ID NO: 10968 - protein, 130 aa, Methanobrevibacter gottschalkii
MSLMDPLADALTNIRNNELQVNGSCVISPASKLIGQVLSTMQKENYIGNFEYVDDNRAGKFTVELIGNINKCGVIKPRHAVKKDEFEKFEKRYLPAKNFGILIVTTPQGIMTHNEAKERGIGGRLLAYMY

SEQ ID NO: 10969 - protein, 178 aa, Methanobrevibacter gottschalkii
MVVAAAIREEIAIPEGVEVIIENNEVSVKGPNGEDSRKFTYPNVNIKEEENVVILETVFPKKKDKAMIGTTRAHINNMIVGVTDGFTYHMKIVFAHFPMTVKVQKDTVVIDNFLGERHPRTAKIVGSAKVAVKGDEVTITGINKEHVGQTMANLEQATKIKGRDPRVFQDGIYLISRE

SEQ ID NO: 10970 - protein, 109 aa, Methanobrevibacter gottschalkii
MANKRFKRQEYARYKKLGIKWRRPRGKTSKMRRYEAGKPDMPAIGYRTPRAIRDLHPSGFKDVLVHNMQELEDLDPATEAARISASIGKRKKDLMLAKALELGIKVLNK

SEQ ID NO: 10971 - protein, 151 aa, Methanobrevibacter gottschalkii
MNLTTQKRLAASILKVGLNRVWIDPERLEEVSMAITREGVKQLINDGAIKAKPQKGISSYRSKKIKEQKAKGKRKGRGSIKGAKKARTPKKKAWMTTIRALRKDLKEMREDEVIDVTTYRKLYKMAKGGAFRSKSYMRNYARDHDLIKGDE

SEQ ID NO: 10972 - protein, 193 aa, Methanobrevibacter gottschalkii
MAHGTNYKVAFRRRREGKTDYAARMKLVSYDKPRLVVRVSNSHATVQVINYAPEGDLTVASAVSKQLAKYGYLGHTGNLTSFYLTAYLCAKRALAKGVESAILDIGLKSPIKGSKVFAALKGAVDAGLEIPHGDFIFPEDDRINGGHIAAYAESLDAEEVAKKFSKYFERGLNPKDLPANFEETIKNIDEAGE

SEQ ID NO: 10973 - protein, 213 aa, Methanobrevibacter gottschalkii
MSFNIDEWEPKTKLGRLVKDGTITDIDEIFEKGLPIMELEIVDALIPDLEEEVMDVNLVQRMHKSGRKVNFRVIVAVGNKNGYVGLGQGKAKEVGPAIRKAVDNAKYNLIKVRRGCGDWGCVCGREHTVPFKVQGKTSSVSVNLIPAPAGVGLVIGDVGKTILKLAGIHDVWSQSFGQTQTTVNFANAVFAALKELSNVKASQEDLKKMGVNY

SEQ ID NO: 10974 - protein, 152 aa, Methanobrevibacter gottschalkii
MFLVIRVRGTTGVIKNIANTLDMLRLNRISHAVLVEENPSFEGMLQKAKDYITWGEIDAETLSALIAKRGRLPGNVKVTDEYVAENTDYKDIADLAQALIESKVKLADVGIKPVFRLHPPRKGYKDIRLSVQEGGSLGYRGENIKELAKKML

SEQ ID NO: 10975 - protein, 145 aa, Methanobrevibacter gottschalkii
MIRTKRKINKQRGSRSNGGGCTKKRRGAGNKGGKGKAGMGKQHWTWTVIHDPNHFGKHGFKRPQKMINKVNAVNLNYLEEQADKLLANGKASQDGDAIVIDVTELGYDKVLGKGKITKTFKISAPQFSASAVEKIEELGGEAIEL

SEQ ID NO: 10976 - protein, 453 aa, Methanobrevibacter gottschalkii
MSSLEFLEPVFKIVPEVKSPVHREDFNEKLKWTALVLVLYFILTQIPLYGLAPGAIDSFAQLRAVMAGSFGSILTLGIGPIVTASIVLQLLVGSNLLDLDLSSHKDKSHFQATQKILSIVFTFFEASVLVLTGNLVPIDGSYTLILIIQLVVGALVIIYLDEVVSKWGFGSGIGLFIAAGVCQAIIVGTFSILNGSDGLLAGIIPKFIQLATGGTFDFSILVPLIATIIVFVVVLYGEAMKVEIPISHGQVKGHGRIRGSVGKYPLKFVYSSNMPVILTSALLVNVTLFANVFQKIGVPILGHLQNGKAVDGIAWLLSTPNLTMFITEPIHVLVYALFFIACCILFSYLWVEISGLNAKKISEQLHKSGIQIPGFRSSKRQLYKILKKYIPALTIISGVYVGLIAFLADLTGALGGGTGVLLTVGILHKLYEEMAQEQLMSANPVLRKVLGGD

SEQ ID NO: 10977 - protein, 191 aa, Methanobrevibacter gottschalkii
MRGIKLKLVVLTGIPGSGSTTLLNKALEQVDYVHLNYGDIMTEIAINENIADNRDSLRKLPAETQKKIQAKAAKEIKQRSENDNVIVDTHCTINTPAGFLPGLPNWVLEQLQPDLFILIEANADEIIYRRLNDDTRQRDVQKAKEIQLHQEMNRATSMAYATLTGATVKIVENHDNHLDSSVSKLVDVLNL

SEQ ID NO: 10978 - protein, 192 aa, Methanobrevibacter gottschalkii
MFDIMGMIYGVLNTIFDPILAMDPNPSNPALTVLIIAFIVSLITTIANKYLVDQDALNEKQAKMKEFNKELRDAQKRGDGKKIAELQARQTEMMKENTAMMSEQFKPMIVTFVPIILIFFWMRASAIHDLVIILPTTVYWVTLTPLWHVIGSMFYGGQATIPYGIGWLLWYMICTFGMSQILRKFLGFKQGF

SEQ ID NO: 10979 - protein, 88 aa, Methanobrevibacter gottschalkii
MPANRFRSRSYKRVHKKTPGGVNVLRYKKKKPSKHVCAECGAVLHGVPRGRPYEIRKLSKTARRPSRPYGGYLCSACTRKHFKKEARK

SEQ ID NO: 10980 - protein, 173 aa, Methanobrevibacter gottschalkii
MIITIGGLAGTGTTTLAEVLSEKLNVPYISAGFIFREMAAERGMSVLEFSEFAEGNAEIDKEIDKRQAEKAKSSDNLILEGRLSAFFVENADLKICLMTPFEVRSKRIAQREGKSVDVAKNEIIIREESESLRYKEIHNIDIRNMEIYDLIINTDSFNPESISEIITTTLKVI

SEQ ID NO: 10981 - protein, 73 aa, Methanobrevibacter gottschalkii
MASIEVGRVCVKTAGREAGKKCAIVEIIDENFVEVIGEAVKNRRCNVAHLEPTADSIDVSGDAESIKAALADL

SEQ ID NO: 10982 - protein, 321 aa, Methanobrevibacter gottschalkii
MKFNRMVKSKSFTSPDFGCKPEEREISEYISKGVINLDKPSGPTSHEIDSWVKRILSLEKSGHGGTLDPKVTGILPVGLNDATRAIQLLLTAPKEYVCLLTLHQDVPEERIREVFAEFTGKIYQLPPVKSAVKRELRTRNIYYATIYEIDGRDVLFRIGCEAGTYVRTYCHNIGEALGVGAHMAELRRTQVGSFNEKNNLVTLQDVTDAYHFYIEDGDESFLRQAIMPMEMAADYLPKVIVKDSAVDAICHGADLACGGIAELTDNIQKNDIVAILTLKGELVGAGSSLLTSGEILESDSGFAVNVSKVLMKPGTYPRFWK

SEQ ID NO: 10983 - protein, 588 aa, Methanobrevibacter gottschalkii
MNVKNTFVIILLFLILFSTVTFVSADDDRSYSIDQVITDLTVKNNGLLHVEEQYDYSFDGAFNGVYRDIPLKSGESIENIKIHVDGAYATYEESDDDGYKHVKIYLYSDAAHTKGIKDCNVKVYISYDLIGAVTIFNDVSGLQYKLWGEEWDVGANNLKATVHLPGNNGNEYYLTPSEYNDTSSLKGNTITAESSYIPKGEYYELLVLMPVDDFNKSPNAKHVNQNGHDMIMKNLKNTINERDFWNTTYLVLGLLTLISPISAIIVYLKYGREPEVNYDGIYERDLPTNDPPEIVNALIENKISIGHPNIKGFEASIMNLIDRKFITLSSQENIESNTKDLMLTLNNKAGLSASEQIVFDTLNHFSTNNILNLSTLNGQLSSETNGKWFMEKIREWESSVENDMDVSRFFDDRGSSIMNVIGLLGIPFAIALIVLGFITNLNNGLYSIAGGIFLIIFSIVITMSDDDIFGRWTEEGRVYYLKWKNLKNFLEDNSLIKEHPPESIIIWKKYLIYGAALGVADKVYESMKLQVPNISDYDNDGLFMYHYYGGYGMMNMAFSTGEISANPSDSSGFGGSGGGSGGGGGGAF

SEQ ID NO: 10984 - protein, 185 aa, Methanobrevibacter gottschalkii
MDFILTIVIIIVVLFIIVTLIHMYNNLVGLRNRVKNSYAQIDVQLKRRNDLIPNLVETVKGYASHEKGVLEEVTKARNSVMNASSIKETSVADNQLTGALKSLFAVAENYPDLKANSNFQQLQNELSETEDKIAYSRQFYNDVVLKYNNACQQFPSSILARIFGYKIEDYFEAPEAERTVPKVEF

SEQ ID NO: 10985 - protein, 149 aa, Methanobrevibacter gottschalkii
MEDDFKHLVRISRKDVNGNKTIEQALTEIKGVGISLSKTMCRTLDLDLDAKIGYIADEDVLRIEEILENPQKFDIPRWMLNRREDYETGDDIHLIESDLDMTLRDDLNRMKKTRSYKGRRHEVGLPVRGQRTKSTFRKSSSVGVKRSRG

SEQ ID NO: 10986 - protein, 179 aa, Methanobrevibacter gottschalkii
MGQPRKSRKKYNTPPHPWNAERIKNENKLMTKYGLKNKKEIWKADTLVRRYSREARYLLGFSTDQMQEEKLELLGHLARTGILPEGAALEEILDLNVEDILRRRLQTIVYNKGLARTPKEARMFVVHGHIALNGKKINSPSYVVLKGQEDDIGFYRSSPVAKQIEEYNNSKSDKVNTEE

SEQ ID NO: 10987 - protein, 130 aa, Methanobrevibacter gottschalkii
MAKDEKWGIANIYSSFNNTIITVTDITGAETISQWSGGKVVRADRQQASPFAAMAAATRIADDAKEKGFVGLHIKVRAPGGNGPRSPGPGAQATIRALARAGIKIGKIEDITPIPHDGTGRPGGKRGRRV

SEQ ID NO: 10988 - protein, 272 aa, Methanobrevibacter gottschalkii
MEGFNMEIEVKSQKDDEIVFIVRDAEVPFVNAIRRCAMVNVPKIAIEDVNIIRNDSAMFNEVLAHRLGLTPLVSDLDALEGLSLPEDDDWEEYTNGIMFTLKEEGPKVVYSKDLISSDSKIKPVYDTIPLVKLKDNEKLNIESVAKVGYGKDHAKWMPTTVCAYKQYPEITFNDDLEIDYDCASACPRGVLKSDKRSKKIKILDIENCSMCKSCVRASTNGYINVGYRENDFIFRIETDGSMPPKEVLLKACEVLGEKADKFIRFSEEGGSK

SEQ ID NO: 10989 - protein, 121 aa, Methanobrevibacter gottschalkii
MAKKIIKTNPNLIELINKLYEQSRNENAAIWKDVAKRLERSNRRTAEVNLSDIARHAEAGETILVPGKVLSNGNLTEKVDVVALKFSAKAQEKIESAGGECIAIDEIIESNPKGSNIRIME

SEQ ID NO: 10990 - protein, 140 aa, Methanobrevibacter gottschalkii
MIIDGEGCVLGRLASVTSKNLLEGEEVIIINAEKIMLTGNKDWAYAKYKQRVDRASISNPRDLGPKYPRRPDDIFRRTVRGMLPFKKSKGKTAFKGLKAFVGVPAEYADVELTAVPEAEYKNIKKGIELGEISKLLGATF

SEQ ID NO: 10991 - protein, 133 aa, Methanobrevibacter gottschalkii
MVKVIHTSGKRKTAIARGTVREGTGKVRINRIPLELYSPELANLKLQEPLTLAGDLANEVDINIHVIGGGVMGQAEAARMVIAKGLVQWSQDMDLKEKFTQYDRTMLVGDPRRSEPKKYGGPGARARKQKSYR

SEQ ID NO: 10992 - protein, 56 aa, Methanobrevibacter gottschalkii
MIPIRCLSCGKPVSAVFDEYNKRVAAGEKSKDVLDDLGLTRYCCRRMLISHVQTWE

SEQ ID NO: 10993 - protein, 60 aa, Methanobrevibacter gottschalkii
MDVEKKLTRFERARLLGARAIQISMGAKPLVEIKDSLDPIDIAYEELKAGVLPLDVIRYE

SEQ ID NO: 10994 - protein, 414 aa, Methanobrevibacter gottschalkii
MVSIIEDVQVRKILDSRGNPTIEVDVITWNSKGRAAAPSGASTGSYEVVPYPKGGIDEVVSEMEDLIASELIGMDAEDLVTIDEVLKEVDGTDNLSAIGGNTTVAISMAVAKAAAASYNMPLYKYIGGNLVNELPFPLGNMMNGGAHAGINAPDIQEFLVVPVGATNISDAVFANASVHKRLKELIQSKDSNFTGGKGDEGGWVPNISNDAALEIQARACEEVGDELGIEIRPSLDIAASELWNAAEQKYIYAQDGIKRDTGDQIDFVKDIIDTYNMFYVEDPFDESDFGGFSQLTAKVGDKCLICGDDLFVTNKELLAKGIEMKAANAIIIKPNQIGSLSETYATVKLAKENNIVPVVSHRSGETTDETIAHLAVGFSSPLIKTGAIGGERIAKLNELIRIEEELPNPTMNKF

SEQ ID NO: 10995 - protein, 64 aa, Methanobrevibacter gottschalkii
MAKVTIDYDKCDGADCAECSDVCPMEVLVLKGDKIEIVDPSECSYCEVCMDVCPNDCIKIEDDF

SEQ ID NO: 10996 - protein, 200 aa, Methanobrevibacter gottschalkii
MANDELLIDLDNYLAAGLHIGTQQKTSDMEKYIFRVRSDGLYVLDIQKTDERIRQIAKLLAKYDPEDILVVATRQYGQAPVKKFGEITGAKTIPGRFIPGTLTNPNYAKFIEPKVIVVTDPRSDAQAVLESKQNGILVVALCDTENLLSFVDIAVPVNNKGRKAIALVYWLLARQILRERGDIPEDGDLDIDSTDFELKF

SEQ ID NO: 10997 - protein, 282 aa, Methanobrevibacter gottschalkii
MLRQPAVAGSFYPNDAENLKKIIESCFLDKSGVGFIPELNKFNGKDYPINVMVPHAGYQYSGAIASHSYCDIVRNGFPEVFIIISPNHTGLGSEISVFNEGEWITPLGDVEVDNEFANEIISISDIASSDFHAHVHEHSIEVQLPFLQYFSSDFKIVPITMGTQTFATSNDLANAIFEAGNKLSKSYCVIASTDLSHFNNQEKANKVDGFVLEDIEEMNEFKLFEEVVQYNITMCGYGPVMTNISLSKRCGKNSCEILAYQTSGDVTGDFSSVVGYASGVFK

SEQ ID NO: 10998 - protein, 320 aa, Methanobrevibacter gottschalkii
MIAKASAPAKTILFGEHSVVYDEPAIAGAVNKRAYITIKESKSDKSIFRAPDIGFEAELLSKQKKYILTKGKPGIIRYILESLYRAHDHSPIDITLSSNVPIGSGLGSSAAVTVATLAALYRYHNIRFNKKSLAHDAHMVEQAVQGVASPLDTLVSTYGGLVYLSRNKKVEHFKVNFNAPLVVGFTTKHGNTGKMVKDVKNLKNRNPKIINPVITAMGNLTNYAKQAILKKDYNKVGELMNINHGFLDVIGVNTLELSRMVYNAREAGAIGSKTTGAGGGGSIIALCPGKVDEVANAIARDDSILKVRFTRRGVSSRVYK

SEQ ID NO: 10999 - protein, 266 aa, Methanobrevibacter gottschalkii
MIILKIGGSSLTNKDSSKSEVNSDSLKRIALEIKSSLDNSAKELIVVHGAGSFGHPPAKKYKIGEVFDKSEYPQKRIGFCETQNAVKKLNMYVCEAFIEQGLPVVAIPASSFMTATNKRITHGDLDSFNKYLEKGFIPVIYGDVVLDDELEFCVISGDQLIQYLAMNLNPNQVILGTDVDGVYNKNPKTHDDAIFFDKLSSLEELDAFEGTTNVDVTGGMIGKIKELLYLADLGIESKIINAEVEDNIFKVLENEDVKGTVISRGK

SEQ ID NO: 11000 - protein, 348 aa, Methanobrevibacter gottschalkii
MISDRKLEHLLICENYDVSFKNKTNGFEDIELIHNVLPEIDKQEIDLSTSTFGKKLDSPLFITAITGGHPAAKEINKQLAIAAENNNIALGVGSQRAACEHPELEDTYTVVRENAPNCLLVGNIGAPQLNLAEKAVEILDADILAIHLNPLQESIQPEGDLDARGYLDLISQITNSVNIPIIAKETGCGISAESAEALVEAGVDFIDIEGAGGTSWAAVETYRAEDRYLGEIFWDWGIPTAVSTVEVTNAIDVPVISSGGIRSGLEAAKAIALGADAVGMALPFLKNSTSQEQLNKFISRFNESLRIAMFLVGASNIDELKESKLVIRGKTREWLNERGINTKNYSRR

SEQ ID NO: 11001 - protein, 447 aa, Methanobrevibacter gottschalkii
MSVEVIAIGGYQEVGKNMTAVKVGEDVIIFDMGIHLDRISMHEDTDIDRMHSLDLIERGVIPDDTLMKDVDGKVKGIIFSHGHLDHIGAVAKLAHRYDAPLIGTPYTAALIEKQIKGERKFKVNNPIRPLNAGSKLKLSKDITLEFVQSTHSIPQAVFPVLHTPEGIIVYALDFKFDNHQKVSPPPDYKRLRELGREGVLALIVETTNSTNYNEVKTHSERIARNILEDVMRGPLQEKTGMIVTTFSSHVERVQAIADIAKKSHREIFFLGRSMERFCGIAQKLGILKLPKNASIYGSPKAINRALLRADEDRANYLLVTTGHQGEPDALLPRIANGRTPFNIKKGDNVIISAPIIPNPTNAANRHIMERRLKLKGARIYPNAHVSGHAGREDHREFLRMLKPQHIIPAHGDLTMLSAYAELAEEEGYRIGYDIHILRNAQAQVFKS

SEQ ID NO: 11002 - protein, 326 aa, Methanobrevibacter gottschalkii
MSDVKKILGNYSTDITRTIEEELSAITPNNLAEASVYLTRAGGKMLRPALTLIAAEAVGGNRESALKSAAAIELIHTFSLIHDDIMDQDDMRRGMPSVHKVWGDDVAILAGDTLFSKAFEIIIGNKGTTSDQNNKSLATVADACVKICEGQALDMGFEERFDVTEDEYMEMIFKKTGALIAAATKVGAIMGGASEGVIDAMYEYGRLIGLAFQIQDDYLDLVSDEETLGKPIGSDIGKGKMTVIAIKGLASDDTGRLLEILKDDENSNEDITEAIDILTKCGAIEYARNLALESIKQAKEVLEILDDSSSKQMLVDIADFVLERSA

SEQ ID NO: 11003 - protein, 337 aa, Methanobrevibacter gottschalkii
MLEIKHTLCPSCSVGCGINVVLKEGNVVGTFPYKRHPVNSGKNCLNGRNSIECYLNKFEDINVDDVVADVLKELKSADASSVTVVCSGNNDVEEIKAIKEFAESNNFNLAFYADNLKNFDDVATYDDVADASKIFVIGDLLFENPLIGRRIVHAKQNGAKIYALGKTEKSVTFNIADETFNTSVVDFLDANDSNIDESSVIVFNYVDSAEDLDKIESIGCKSFPVFSKSNSKGALDIVEVKSLDEMMELLENTKVLLVFNDDIADEIDFDFTKISKIISFAPCENNTTKISDIVVPIKTWLEKDGSFVNAMGDTQTFTTVIDSDVLSEIEVIEKLNS

SEQ ID NO: 11004 - protein, 380 aa, Methanobrevibacter gottschalkii
MSYVLAKSKDDDILSAGECGGAVTSILKYLLDEKLVDGVLTLRPFDDIYDAMPVYVTDSDDLISTAGSYHCAPTMIGDIIERFIDDDTKIAVTVKPCDMRAMKELIKRHRINDDNVYFIGLNCGGTVSPVSGRKMIDLFYEADPNDVVSEEIDKGKFIIELADGGEEAVKIHDLEAEGYGRRNNCQRCDVKIPRMADIACGNWGAEDGWTFIEINDEKGQKLVDGAKKVGILETKTPNDAAVEGRSKVENIMIKMAKKNQDATYPLVSERDEWSRCIGCYACRDICPVCWCFENCELNKSYFKDEANAFSSPIAFQGVRLSHMSFSCCDCGQCEDVCPMDIPVSLIFDKLQKKYYGRTGYVAGVSEDIKPPLYSPEKTEL

SEQ ID NO: 11005 - protein, 133 aa, Methanobrevibacter gottschalkii
MSEDLKIVGLLCNWCCYGGADTAGTARMQYPSNIRIIRVMCSGRINPSMVFKAFQEGADGVFVGGCHIGDCHYDAGNYKWSRRSKIVEDILEEFGIEKERFRHEWISASEGEKFQTTMEEFHKTLTKLGPLEL

SEQ ID NO: 11006 - protein, 121 aa, Methanobrevibacter gottschalkii
MEIYMQKIGLIRQSLNPKNSSLDLDIDWNIEYVHRNQNEINFDINLRSIENFNLNFKIEGVIVLDLFEIFIQEDVSQIIFHRACNVLMDMISLTRQSSHILSNEDKYPDIGSEHIPKTLYN

SEQ ID NO: 11007 - protein, 338 aa, Methanobrevibacter gottschalkii
MLEIKHTLCPSCSVGCGINVVLKDGDIVGTFPYKRHPVNSGKNCLNGRNSIECYLNKFEDINVDDVVADVLKELKSADASSVTVVCSGNNDVEEIKAIKEFAESNNFNLAFYADNLKNFDDVATYDDVAGASKIFVIGDLLFENPLIGRRIVHAKQNGAKIYALGKSEKSVTFNIADETFNTSVEEFLDKNANEFDDSSVIVFNYVDSVDDLDKINELNCKKLPVFSKSNSKGTLDIVEVKSLDEMMELLENTKVLLVFNDDIADEIDFDFTKISKIISFAPCENNTTKISDIIVPIKTWLEKDGSFVNAMGTCQEFTAVVESDVLSEIEVIEKLNGN

SEQ ID NO: 11008 - protein, 380 aa, Methanobrevibacter gottschalkii
MSYVLAKSKDDDILSAGECGGAITSILKYLLDEKLVDGIFALRPFDDIYDAMPVFITDSEDLISTAGSYHCAPTMIGDIIERFIDDDTKIAVTVKPCDMRAMHELVIRHRINDDNVYFIGLNCGGTVSPVSGRKMIDLFYEADPNDVVSEEIDKGKFIIELADGGEEAVKIHDLEAEGYGRRNNCQRCDVKIPRMADIACGNWGAEDGWTFIEINSEKGQKLVDGAKKVGILETKTPNDAAVEGRSKVENIMIKMAKKNQDATYPLVSEMDEWSRCIGCYACRDICPVCWCFENCELNKSYFKDGTNMPPSPIAFQGVRLSHMSFSCCDCGQCEDVCPMDIPVSLIFDKLQKKYYERTGYVAGVSEDIKPPLYSPEKTEL

SEQ ID NO: 11009 - protein, 134 aa, Methanobrevibacter gottschalkii
MSEDLKIVGLLCNWCCYGGADTAGTARMQYPPNIRIIRVMCSGRINPSMVFKAFQEGADGVFVGGCHIGDCHYDAGNYKWSRRSKIVEDILEEFGIEKERFRHEWISASEGEKFQTTMEEFHKTLTKLGPLELK

SEQ ID NO: 11010 - protein, 551 aa, Methanobrevibacter gottschalkii
MGLENKKFLSALNKKFKGEDQENDHTSFYCFDGWKQSARKREFNEAAEKLAKERNIPFYNPDIGVPLGQRQLMAYKISGTEDYVEGDDLHFCNNSAIQQLVDDIKRTIIVGMDTAHSVLQERLGVEVTPETINEYMENINHALPGGAVVQEHMVEVHPGLVDDCYAKIFTGNDDLADELDKRLLIDINKEFPEEQAEMLKSYVGNKTYQVSRVPTLVVRACDGGTVSRWSAMQIGMSFINAYKLCAGEAAIADFSYAAKHADVIGMGAFLPSRRARGPNEPGGVAFGTLADMVQTSRISDDPCEVSLEVIAAAAALYDQVWLGSYMSGGVGFTQYASAAYTDDILDDFLYYGKDYVEKKYGMCQADLSMDTVRDISTEVTLYGLEQYETPTLLETHFGGSQRASVVSAAAGCSTAFATGNSNAGVNGWYLSMILHKETHSRLGFYGYDLQDQAGASNSLSIRSDEGLIHELRGPNYPNYAMNVGHQPEYAGIAQAPHAARRDAFCTNPLIKIAFADHHLTFDFRHPRKEIAKGALREFMPAGEREIIIPSR

SEQ ID NO: 11011 - protein, 264 aa, Methanobrevibacter gottschalkii
MEYKAQYCPGETIIAENRRKHMNPEHEFKKIRSVSDEGLVKILGHRNPGESYKTVHPPLAEMEDDGDIIKSIIEPTPGAAEGIRVRYIQFADSMYNAPAQPYDRARTYMWRYRGVDTGTLSGRQVIEIREQDLEKISKELVETDIFDPARCGMRGATVHGHSLRLDENGLMFDGLQRYIFNEEDGHVYYIKDQVGRQLDEAIDVGVPLDEEYLKEITTIYREDNIGMRQDKEALEVIENIHTARTEGGYGMGVFFKDLKKKLGE

SEQ ID NO: 11012 - protein, 164 aa, Methanobrevibacter gottschalkii
MDESEQINVIDVKITPYRFLKPKTTEKILNEIYKLKGQQRVLIHGPSIPKKVFYGPGKGHVVNHTDRKEINVKGCDVELRVMVGEIIVTVDMSELKEFMNNLKDILETHMPCDYYILIGVFTRTKTTISDYLKYGNNFENSIDRRYIGLVDSHSKTSETVKVIK

SEQ ID NO: 11013 - protein, 443 aa, Methanobrevibacter gottschalkii
MKIYDDNLDLYGPDGKIIEESVPLESISPLKNSAIQQMIYDIKRSAAVNLVGIEKGLKSGAMGGKSTYIPGRELDLPIVKNAELIATKIKKILQVNEDDDTTVNLINGGQQLLVQLPFERLNVAADYSVSTLQTSAATIQSIIDSFEINMFDASTIKTAVMGAYPRTVDLSGSNISALLGPPVLLEGLGYGLRNIMANHVVAITNKQTLNAAALSSIMEQTAMFETGDATGAFERMHLLTLAYQGLNANNLVFDIVKENGKGTVGTVIQTLVGRAIEDKIIKVAKKMPSGYNMYEPIDWALWNAYAAAGLLAAVIINVGAARAAQAVASTVLYYNDMLEYETGLPGVDYGRTEGVGVGFSFFSHSIYGGGGPGTFHGNHVVTRHAKGTAIPCASAAMCLDAGTQMFSVQRTSALIGTVYGTIDNLRNPIPNVAKIAGEIKDKL

SEQ ID NO: 11014 - protein, 273 aa, Methanobrevibacter gottschalkii
MSCYKYWGKLEEIANKLSSYGDLDKYGDSALDDVDINEIIEILDDVEIIAHDKTIDFDSAKHILDDEKMNKALKLIRKFYVYVGARLETEKAIEMLESDDLDTNLESFEFYDRYVGLLNNESQLAKFNENKTFVFLGSGPLPITLMMFNELFGCKCIGIEQQEDVAELSRKLLKKLGLENEIEIIVGDETTIESLEYDILMVAALAEPKERVFSNIWQYVDEKTPVIYRTYTGMRAILYSPVLDKDTRGFHKEVMILPTGNTNNTSVLIRKIV

SEQ ID NO: 11015 - protein, 261 aa, Methanobrevibacter gottschalkii
MKGILGAICGDIIGSTREFNPIKTKDFKLFKRKSTFTDDTVMTLAIANWLIEDTASESILIKQLQYWGNKYPDSGYGGRFRNWLKEIDPKPYGSWANGSAMRVSPCPWVANSLQESQKLAKLSAIVTHNHPEGIKGALATSDAIYLAKTGAGKEKIKHHIESHYSYDLSRSVDEIRTNYSFDVSCAGSVPESIICFLEGVSFEDTIRNAVSLGGDADTQAAIAGSIASAYWDIPKNISYKSINRLNYDLLNVLVNFEEKFM

SEQ ID NO: 11016 - protein, 260 aa, Methanobrevibacter gottschalkii
MDENIAILKGIGLTMYEAQAYVTLVSLISSNATEISEKSGIPRSKIYDVLKGLIQKNYIDVEDGRPLTYNVKSPVEVLSLEKNRLTTELDDTITRLTNVYENGMSQVQAPIWRIYGVDKIINQELEIITRAKHSINMRIGFLFEEEGEALVKILKKRKNLNINILASPTCCINNKTFNIIKFFKDNDMPVHKADIPFVKVLISDSKEMMHTYTKFSEDKRTVLPETAIGIWNKYEDIARNYDERFMNQLHKIQNKKKKTT

SEQ ID NO: 11017 - protein, 435 aa, Methanobrevibacter gottschalkii
MADGLDMFCYQCSQTAHGTGCTISGVCGKKPTVARLQDNLIFTMKGISAYNYNANVLGKYNPEIDAFLTKGLYTTLTNVNFDAEDLVALALEAGKISVDVMRLLKDAHIEAYGEPQPVEVKVGAQEGPAIIVTGHDLKALEELLKQVEGTDVKVYTHSEMLPAHGYPGLNKYENLVGQLGGAWHDQRTIFKKYNAAIVGTSNCVLPALDAYKERMFTMDVAKLEGVKTIENYDFSEVIECAKSLGSLEPEELTTLTTGWSAGAIVEHADAIKKLVEEGKIRRFFVVGGCDKASKHNNYYREFVQNLPQDTVILTLACGKYKFNDLDLGDIEGIPRLLDLGQCNDTIVAVDVALALCELFDMELNELPLTIVLSWMEQKAAAVLWALLYLGKTDMWLGPILPAWCNEDILNVLVENYNLTPTSGNALVDIKKIMGE

SEQ ID NO: 11018 - protein, 109 aa, Methanobrevibacter gottschalkii
MNEDIKAKSLNIQFLLDYQKDSVVSREIIKKELGTVTFFAFDQGQGLSEHSAPFDAMVQIIDGEAEITISGKKNTVCAGEIIIMPANEPHALQAENCPFKMILTMIKSD

SEQ ID NO: 11019 - protein, 270 aa, Methanobrevibacter gottschalkii
MKQCIDNPNDVDWVNFWAERLKNKKNKDWDKAAPGFYKRTRKDDYQDALFEKLILDENDTVLDVGCGEGSVTIPIAEKVRKVIGIDSSPKMLEYLKKRAIENNINNIETILKPIEDITYDEIGNVDVVICSRSLNGIVPIDKTLSELNKIANKYVFITIFGPENKKIEKDFEKEIGIKTEDFPDYNFFFNILFNLGIYANIERFDLSNYREYDSIKEAMDNGKFRLDLYNDKEKELLEKYLERILTYNRKSKKYYNVKDKADWILIWWRK

SEQ ID NO: 11020 - protein, 339 aa, Methanobrevibacter gottschalkii
MVIKMRLGKTNFKVNKNGFGALPIQRRNEKDSIEILKKAYDNGINFYDSARFYTDSEGKLGKAFEDIRENIYIATKTGTETPEEFWNDLETSLKELKTDYVDLYQFHNISFCPKEDDELYKAMLEAKEEGTVKHIGITTHKITHAHEALDSGLYETLQYPFSYLSGEEELNLVEKCRQLDVGFIAMKGMGGGLIKNSQASFAYMNQFDNVLPIWGIQELEELDEFLSYDANTILTADLKEYIEKDKEELGVNFCRGCGYCMPCPEEINISLCSRMSLWLRRFPTEPSLDEKTQKIMEKTKDCTECYSCVDKCPYELDIPELLKSNYEDYQNVLSGKTKV

SEQ ID NO: 11021 - protein, 334 aa, Methanobrevibacter gottschalkii
MNTDINKAQKYIDDENYKDAIILARKKHSKDDVETYLSILDLLIEADYIIAIEEKGMYYQYYDKTHDNGDYGEKYFDEYLKKQPKSINALCDKAMSRFNKGQIDESLKYMDTAYKNYKNYSKIEKPRISKKELLIAKIELLMQAKRYDDALKYLNNYENQFGGNQKSDLYKGQMLQKNGKNKEALVYLNKSLLEEDTLVGFNAKGDALFDLGRYEDALKEYKNCLNYESKIEGDLELITNFNYKSAFCCVNLGDDGEAIKYLNKTINMLNEHGRLPRNIEAIYQKCSFEKERIMKKGNVTDEEFRKSKFFSTKTSLIILFIIFIFFIILKLNGY

SEQ ID NO: 11022 - protein, 556 aa, Methanobrevibacter gottschalkii
MNDLEKIVFKHALLNAAKHKGSANPGAVMGSIMSNEVELRSKAKEIGSLAGKIVAKVNALSPEEQASEMEKFGVEVQDKKPKTKDSGLQELPGTHENIVLRFAPNPSGPLHIGHSRAAVPNAEYVKRHDGKLILRIEDTDPKRVFEPAYEMIPEDLAWLGIEPNEIVYQSDRFEIYYDYARQLIEKGAAYMCTCDGETFKELKDNCKPCLCRDNSVEENLALWEKFDTMESGEAVLRIKTDINHKNPAIRDWVAMRLVDEEHPRVGTKYRIYPMMNFSVSVDDHLMGMTHVLRGKDHLANSEKQKYLYNHMGWDLPEFIHYGRLKMEDIALSTSKAMAGIEDGTYSGWDDPRLGTLRAIARRGIDPRTIYNLITEIGVKMADSAISWKKIYGLNRNFVEPIANRYFFCEDPVEIKIDGYNDGEVSIERPLHADHIDRGNRILSFDGSAYLAKEDIADGIFRLMDAVNVEIDGNKIIYHSTSFEDAKKVKAKIIQWVPTKDNVNVKIVMDDASAKTGVGEDTLRDLEVGDIVQFERVGFARLDEIKDDKLVFYYAHK

SEQ ID NO: 11023 - protein, 160 aa, Methanobrevibacter gottschalkii
MHISSDKMTMFSNGYSTLRMPEDFEPVNAKDEFNDLYLVNTKIPMSIKFSTTPTLVGLPSIKEDIEKNINDNPRINVILSDFIPINEDIYYLIVSSFSDGEKEIRRNEFLYVEDNNLYIFEFTYPYADRELDDFYLNIIRSFKISVPKYIVEDGNYKLNE

SEQ ID NO: 11024 - protein, 491 aa, Methanobrevibacter gottschalkii
MNGITILIWITIVIIGVIACILVKLHYKGNELEQDEGSIIPSTDKLNGILSQGKEKINSKNLTNSLSSKTTRTQNSQNTKSLYGNKQHTSQDYDVYIVPEVNNKKTYEYESENQVLIDYGDKVKKFQEPIKQSQMDIMNQNKDDKTELKDLFTIDELIKESKRKDNEREKEQPKVEDSELTELKESIAKKQENTIEKSSSEEDIGEFETIESLLNEEELNEDETSEEIETSTTSQKTIEEAISSASQEKKEEIENLSENENITDVLLHADDDQMDIPNEEIKEPTLKTPTKVDESNDSEFNSPLKEDNEETMDLDYRKDLDKFTQKIKGSKLFKDVKEKLTAEPEEYIEEGIPKDETYIRNVKEYDDFEPIINETHADYVDPIGDIEPAFEDNQSLKLENKPKAFEVIKDSSKPEVTQQKIPTIKSKPSRNNIKIKLNNNEVVLKKGDEIIFNHLGETYSSQVYAINGDDISVKYRRQNIIIKPADVKKIY

SEQ ID NO: 11025 - protein, 409 aa, Methanobrevibacter gottschalkii
MVVKINENYLKLKSSYLFVEVARREAEFVKNNPDVDVIKMGIGDVTKPLVPSVVKAFKDAVDEMGSADTFMGYGPEQGYEFLAEAIVKDYEKYGITLDTSEIFISDGAKCDTGNIQEIFGIDNKIAVTDPVYTVYVDTNVMAGRTGEMNDGMYEGLTYLKCNAENGFVPELPSEPVDIIYLCYPNNPTGTTLTKDQLKVFVDYARENKAIILFDAAYEAFINEENVPHSIYEIEGAEEVAIEFKSFSKTAGFTGTRCAFTVVPKQLTAYDSEGNEVEVNPLWNRRQTTKFNGVSYPVQKAAQATYSIEGQKEIQEVIDYYMENAKVICESLSNLGLEVYGGINSPYIWVKAPNNMDSWTFFDLLLNEANVIGTPGSGFGPSGEGYLRLTAFNTLENTKEAMDRISKLEF

SEQ ID NO: 11026 - protein, 230 aa, Methanobrevibacter gottschalkii
MKKIEKPVEIEDGDSFKVILSKYGALALDKQENLAELIGETIGDLDIENEVISFDDIKMPIHVLGFYSQDLNQWSWAWDCEEIFGNNLIASAVEIKKLGDKFDVPEFNSSLIKTDFNFCHTIAMTATTILGFDGYYAVSEDGLDIFVAIESDLVKENNDVKKFRDTFYTFQKNFNIFPKIAFESYTKLKGYGFKPQDGFYLAKIGESRVMAGFTERGNVTRILMFGEDEQ

SEQ ID NO: 11027 - protein, 203 aa, Methanobrevibacter gottschalkii
MNSDIMNQDLVDELEYMEELLTKSGFFDSEEILEILEDQFIDEDIDISQYSVSSNDFSNENFSKLENAFTNLASEKIVAIHNCGYDISEGVNDAFELYVHLHNNKFSVEGFSFYTFEDIEESICECKLKITFGDFENNEEMALKIGKIVFKYLKEENFNIAWDGTINNQIEIYPFKWDKSYDSEKEYEIEGAYEVFIKNQVLK

SEQ ID NO: 11028 - protein, 194 aa, Methanobrevibacter gottschalkii
MNTRSLKLIREVMINSGKWSSIEISQDSIYLQFRDVELGTPKIDEDFSLVVRFADDSFFTVFYNNIWDIDFLSKYDFKNQLLSEEVSFNIKDIKFIDFEYLNTFFTNYKKEKSVSVVEDFNIHNIRNDFFMLLETDEIAIVVGGNQMDFFSPFERLDDASLRELSNDWMLYFLRYHQKRNIVRDPMCENHPLKL

SEQ ID NO: 11029 - protein, 340 aa, Methanobrevibacter gottschalkii
MTCNILVGGAWGDEGKGKCITYLCDNDKPDIIARAGVGPNAGHSVEFNGEKYGLRLTPSGFVHTGAKLMIGAGVLVNPDVLFKEFEDLKKYNVKERMCIDSRCAIINEEHMTRDKGSEHLAKKIGSTGSGCGPANSDRVLRTIELARDIPELEDYITDVSLECNEAIDEGKDVFIEGSQGFALSLYYGSYPYVTSKDTTASTFAADVGVGPTKVDEVINVFKSYISRVGEGPFPTEMTQKEAESHGWEEYGVVTGRRRRIGYFDMDLAKESCRINGATQIALTCVDKLYPDCARTQDYDELSAETKAFIDDIQSATGVPVTIISTGPDLKDTIDLRKELL

SEQ ID NO: 11030 - protein, 164 aa, Methanobrevibacter gottschalkii
MYIRKATLDDLSKIMSIYKIAQDFMIESGNPNQWGHNNPSEEKVKEDIDKKNSYLVCNGEDIHGVFVIFKGIEPTYKHIENGRWLNEDEYITIHRIASDGTQKGIFKFLIDYCKSKSENIRIDTHHDNKIMQKLIERNGFQKCGRIYVTDGSPRIAYQWMNPLH

SEQ ID NO: 11031 - protein, 200 aa, Methanobrevibacter gottschalkii
MTDQYMKPHGEEGLQTIKNMNENHKNISEFAFKCAIIGDNDKILDAGCGGGVNIEKFLKITKNNVDGLDYSEIAVTESIKRNQKAIDDGRCRIIQADVSNMPFKDECYDFISAFETIYFWPNLEETFKEVSRIIKPNGQFMIAQETDGNNPNDETWVNTVEGMRIYTAPELEKYLLNAGFRSVEVFKKEDEYILVVIGKK

SEQ ID NO: 11032 - protein, 312 aa, Methanobrevibacter gottschalkii
MDKKIIAIIVAFIAIVAIGGYFLLGGGSDNVTIGYLPSDHDAALFVADAQGQYAKNGINTKLVQFNNGGDLMTAMASGEVDVGYVGITPVLSSIEKGVPVKVISAAQTEGSGIVVAKNSGINSVFDLEGKKIATPGEASIQHMLLQYYLKQNGIDIKDVKVSAMKVPSMNDALKTNNIDGMITFEPYVSIAEKNGAKVLVDSSEILPNHPCCVVVASDKFLDEHPNETQKILDIHKNATDYINNNTDEAAELLPSDIVSDVDVEKQALAGFPFISGLNDTYKQNVMEFMNLEVELGVLKKPLSEDKIFWNGS

SEQ ID NO: 11033 - protein, 468 aa, Methanobrevibacter gottschalkii
MELINLSKISSEEILAGSFGIEWESLRVKSNGELALTPHPSVFGDKLKNPVVTTDFSESQVEIITPAFDTVDEAFDTFSALSDVVNSSLPEGEYLWFQSLPCILPSPNQIPIAQYSQEGEESQKYRENLASKYGVKKQLISGVHFNFSFDDGFIEKLRKITKSDLSFRQFRDEIYLKITRNYLRYCWLIIYLTGCSIGAHESFSSECINLMDMQDGFGGYYSTKGPSFRNASSGYKNLKKLYPSYNSISEFTRDVTNFIDNGDLSEAKELYTQIRLKPKNPSDVLNSLNETGIEYIEIRTLDINPFYKCGLVKHDMKFLHLFLIYMFVKNESDYPDWQREANINEERVAERAFDESMRLLKDGNEVTLKEWAYDLINEMYGMCDVFDINEYNTLKLMHDRVLNPELTPGKKLLKLIKRDGFINAHMFSAITHKQTSKNLIKNVDKEEYGRLKKYLNIALYRKKSDKNS

SEQ ID NO: 11034 - protein, 348 aa, Methanobrevibacter gottschalkii
MRQYIYNNVPNIKYYNEFKLIDGEKMNKKITFVLVFALAACLAMGSASAGLFDFLGGGDDTVKIGYLPSDHDAALFVADAKGMYKDNNITTELVQFNNGGDLMTAMASGEVDVGYVGITPVLSSIEKNVPVKVISSAQTEGSGIVVTDDSGIKSPADLKGKTIATPGEASIQHALLVYYLNQSDLTVDDLNVSAMKVPSMNDALKTGQIDGIVTFQPYVSIAANQSNAHILENSSEILPNHPCCVVVASDDFIKNHEDQAKTIVKIHENATKFINDNVKAGNADKIVKLLPEDIVSDANLEADSLASFPFISGIDNDFKADVDEFQALEVSIGLLNNTIPQDKIYWEA

SEQ ID NO: 11035 - protein, 208 aa, Methanobrevibacter gottschalkii
MKFDLSEIGIKSGLQYECITTTVNKEGVKNAGAFAFEYLGDDKVKCHIFEGSKTLKNILDTNEYVVNITQNPLVFTYATLDCLGDEYYTDDESIAIIKNTPAYIIVDVENVEIKTPENFPIKGDSNIYFIYGKIRKLVVNDERAAAFNRGMSALIESLVNFSRYKIVDEEKRKEYMDKLIENQRVINKVSDEKTKKAISDLKSEYEKY

SEQ ID NO: 11036 - protein, 124 aa, Methanobrevibacter gottschalkii
MDGEIDLELYTISIIRLNSIFQKIEDKKIVTDIISDINDCFNDLNQIYEDILNELSKEEININEYDPFFENGMVMFPEYTKSIDETIGKIDDENLKVALNSLSDLFVKLIKVGNEYFEKRGAFK

SEQ ID NO: 11037 - protein, 698 aa, Methanobrevibacter gottschalkii
MVDLNKMFKPESVAVIGASNTPGKVGYIIVDNLINDGFKGEIYPINPKGGEILGKKAYANIEDVPGKVDLAIITIPSVFVNAVVKECGEAGVEHMVVITAGFKEVGDEGAKLEAELTAIGKEYGINIIGPNSLGITDSHTPMNGSFSQMMPPTGNMAFISQSGAMMVAIIDWSVTSGIGFSKVISLGNKAGVNEIELLQYLADDDETKVIICYLESISENEDFVRTMRETARKKPIIILKSGSSSAGAAAASSHTGALAGSDLAFDTAFRQSGIIRVDTMAELFDLGLAFSKAPLPRGDHVAIITNAGGGGVVTVDAMEKAGLKLVQFDEETTERLKKCVTEEGSAKNPIDVLGDAPVSRYKESLEIVLSQDEVDSLIVMVCPTASADPDGIANAILEERKEFDKPIIVVNMGGPSFEKANDALRENGVPTYVFPETAVTALKAMTDYAKLEDKSYDDVVENIDDVDKDAVKAIFEKVKADGRDTLLGSEAYAVAEAYGISAAPIKLSTNAEEAASLAEEMEFPVVLKIASDKILHKSDIGGVKVGISSAEEAKSTYDEIIANAKAAHPDIIPDGVEVQKMMDSGEEVIVGMIRDEQFGPMIAFGMGGIYVNLIEDVSFNLAKGMSSQEIDEQINTTKVSQLLAGYRGEAACDVEEVKEAIKRVARLTLDFPEISELDINPIFVYEEGSSALDIKIKL

SEQ ID NO: 11038 - protein, 306 aa, Methanobrevibacter gottschalkii
MSLIIAYIGKKGCVMAADKRRIGYFGDKKNLDLLEEELYEGSIGNDEEFLARASELGISIKITDDANKLKTVGNCIRGEVSTKGTLETKRRRIYGTTNGYQIIELLGSDTKSRNAGENGIVIFGNNFAKQLAHNLISKKLKGSKSLRYMGEVFEDILKEVSSKTPTVGKNIDVLMQQPDFNKTEAQKHLNLTIDHDIKVLTKFRQELTEQIVQQSIEIEMANKIINKGSVGHVVNVDGNMLFIQLNDKTQAMDGNWKQLAAPGQNVLMFSESSNVEIGDEVVIENEELCLKKDKSSLKCDIILCSL

SEQ ID NO: 11039 - protein, 307 aa, Methanobrevibacter gottschalkii
MKITFLGSGGGRFSSISQRRMTGGFRIDNLGGKNYHIDPGPGALVRTYQFGFDPRNLSGIFVSHAHTDHYNDAEILIEAMTKGMTKNNGTILGSVSVLDGYKKWGPCISKYHQSKSRTVILEPGETNEFDSIKVKGTKTQHGDPVGSGFQIDYNGFKISYTSDTGYFDGLAKDHEGADILIASVLRPGEKSIPGHMCSRNFIDLIEEVKPKVAVMTHLGLKMISNNPVVEAKKISKKTGVKTIAAFDGLSFNINYNNPRKFRLISLKDVESSMHSTSHSLFNSGRRNSYQTSFRNKEFDELSIVKRN

SEQ ID NO: 11040 - protein, 366 aa, Methanobrevibacter gottschalkii
MSNSIGEKFKITSFGSSHGFGVGAIVDGCPANLKLTTEDIQKELNKRKPGTSSVTTPRKENDEVQILSGIFEGKTDGTPITGIIFNKNQHSKDYSMFKNTPRPSHGDYSWMVKYGNYDYNGGGRGSGRVTIGHVIGGAIAKKLLKTQKIEIISHVVQIGDIKAKPQDYSTIKKNIEKNPIRCGDLKASKEMEEFILSKKQEGDSVGGIVETIAIGVPQGLGEPVFERLDGDLARILMNIGSVKGVEIGLGFDVATHTGSEINDEYQITNNKITTKTNNSGGIIGGMSNGMPITSRIAVKPTPSISKCQNSINLEKMENEKIEIKGRHDPCICPRVTVVAESSTAIVLADHMIRSGFIHPTNLDKSI

SEQ ID NO: 11041 - protein, 875 aa, Methanobrevibacter gottschalkii
MKRHGLFILILLIVVLAIMNSASAENSSADLISDTQYENSVDIDVADDNLKSYQSVSSDLEDNNEVYNLKLNDNSQVDNTFLKDNASVSDSKIYKLGYDVTHVADKLLNFSSADDILVITTAGMAWIDNKTTESALGGIVDASNNYVSYGKGNILTLSSTRNDPTNIAFFIKKDNSLTMAFYKNGSLTPIFHGNAGPTLSAGEWKKLQKALGDEDAYSYISIANAWSAGMPNDVLTQATYHGHVCTGLISGQAMIQTLLTYYPPKDEFGLPLEHTAYYVLGVPGGSEDDAFTWSLDITPGKRAYIGIDTMVNKAMTGFIRWNTTSNTGIIIIMSYNETAIKESFKKVSGLNPDASATNDLKYQNWLISTLHTNPTSLVTILYEFKGLTKDNLEYLMGLEIGKGNVVKSAHGLDMNYILGLNLTKANREANVNIAEIKLSDAKLKQIGIDACNNAIEYFSSQGITISKDLNNLYVLTSAGYVRINGTPTSMVFDGIYEVLGSALYKKTLFPVHTPIWKDLVFDFYWVDPNNVTNDSSFSLKYDVAKDELIVIGNTTRNANYILQNAIKYDPPYDVLIGWLFHNHVCGGSAPGYLIADYIYENFPTNENESYIYLTTNANCKDDVISRVLGVSPGMGTYYNLRYDNNKTNSTNVGIAIKWNSKTKTGELIIINLDNWGSGAIFKKGSNMYEEYIKLYKKDYSSPNLISRPQISITARKEINEEMLNKIIGGATDTKEGNSIAYIMNLPDKLPINNGENNNKKDNKKTKITGNKKKTDGKHINNSSSSSNSIDSNSPTTGTYGKSNAGLSVGISKNIINANSNSESSDESSGDGKTYEISKKSPNKKINSNNAIFAILAVLVLGGIVGYGYIRKNRGK

SEQ ID NO: 11042 - protein, 159 aa, Methanobrevibacter gottschalkii
MISTVLSVSYAHPGHGHYVDEITSEDVGHSNHPSSDSHDSSGKELSSKSSSNSRIASSHSNSKSNKVSSSDTSNSDLSNKHTSSQSIKSSKGDVEPINSQNEEMPNNTQVKNTSNITNHTITEEAENTNLLTQSNILLFILVAIVGFCIVVLFDKFKNR

SEQ ID NO: 11043 - protein, 334 aa, Methanobrevibacter gottschalkii
MEFPTTRLRRLRKNAKIRDIVRETKLLKEDLIYPIYFKEDLQGLEKEEISSLPGEFRYSLDSGVEFAKELESKGLKSIIVFGIPKEETKDEIASPDYSATGIVQKAIRRLKNETNLVIISDVCLCQYTSHGHCGLIKENEDTDDGIEILNDESLPYIAKVALSHAEAGADIVAPSDMMDGRIKSIRETLDENGYYNVMIMAYSAKYASAFYEPFRVAACSSPHLGDRKSYQMDPGNAVEAIRECELDVVEGCDFLMVKPALPYLDVVRMVRDEFMLPLVAYNVSGEYAMIMAAIEKGFLTERAITESLLSIKRAGADLIITNFAPYLLLNDVIE

SEQ ID NO: 11044 - protein, 293 aa, Methanobrevibacter gottschalkii
MNASEIAKIAQIASALEVSGYPKPGNVHRIRDYDDMEFEDFVISGIVIGDTIREACDDVDVKNPKLGKYILQAVSETDKWIKNNTNLGIVMMIIPIAVAAAISNSFDEIRDNIKVLMKNTSVDDACDLYDAINIADAGGMGDQDEYDVASDNAKKGLKENKQTMYDVLKISAPWDMLAREMTSDMPAVFEIGYPTYHELSKKKSKNETCILTFLTLLSQVPDTLISRKYGSDEALKISMMTRDLLNLKNESDFKDKLKEFDDFLFKNKYNPGTTADLTAASIFVSYLKDNFMI

SEQ ID NO: 11045 - protein, 107 aa, Methanobrevibacter gottschalkii
MEIEYNKHATYPPLIEDLVNELLKDDFVHFKILCANEVHHFNKSDNSIIKFETTYVKETCENGDMLYIAYPDIFRVKLYRDATQYIKDKEKIDAFNDVDWTGNRIIF

SEQ ID NO: 11046 - protein, 514 aa, Methanobrevibacter gottschalkii
MSEDIKKTINELHIYEKKLLKELEASANANPEKIAEKTGMDIKAVMSAAGSLASKDIIEVDKEVEEVISLSDVGLEFVQDKLPERKILDVLIEKKEIHMKDLTDISGLDKKESNIAIGWLRRKNWAQIDKGVVKLTDDGIAFKDKLGDDEELLNILSETKNIIKENLSGDLIDGFNKLNERKNILNIKKNTSHSFKLLDKGEAILKQGFTIQKQATQLTHQQLKDGEWKNLQYRPYDINAEAPIVFAGKKHPLRVIIDEIREIFLNMGFSEDNGQYVESAFWNFDSLFQPQDHAAREMQDTFYLKNPLTCDLPDMDLVKRTAETHETGAGTGSVGWQYDWSEDIARQSVLRTHTTGISTKHLFEHEPPIKMFSVGRVFRRETFDYKHLPEFHQVEGLVCDEGISFQNLLGTLKEFYKKLGFEVRFRPAYFPYTYLSTETEIYLEEKESWIELGGAGMFRPEVLKPLGINQPALAFGLGIERLAMIRYDVEDIRMLYKSDIKWLRELPIDRGVEL

SEQ ID NO: 11047 - protein, 257 aa, Methanobrevibacter gottschalkii
MSIKLVSWNVNGIRALSKKEEFWEWFDNTDADIINFQEVRSTKEQIPEKLADVEGFHKSFNEAEKKGYSGVGTYSKIEPVDVVKGLGIEELDGEGRVLRIEYPNFILYNIYFPNSGTGAKRLDFKVEFCNALLKQIVDLKNKGKNVVVTGDYNIAHNPIDVYNPKNCEGKSGYLPEERSWLDELENAGFVDTFRMFDEGENNFTWWSYRTRARERNAGWRLDYFYVNEEIKGNVKSAKILNEVFGSDHCPVTLELDF

SEQ ID NO: 11048 - protein, 231 aa, Methanobrevibacter gottschalkii
MINNDNDRVVFFDIDGTLLDTSNFAETARKAAIGLMVDNGLPLDKDEAYGVLKTIIREKGSNYNKHFNILTQVVLGHEDPMLVALGMVTYHNVKMALLRPFAETIDTLIYLKSRGYRLAVISNGITIKQWEKLVRLNVYSFFDAVITSEEVGKEKPDNLIYDVALRKMRGNPEKSVMIGNKLKEDGLGAVNAGMSAILVNSDVTEEDREFIKKNKLDIKIIENIGDVDTIL

SEQ ID NO: 11049 - protein, 227 aa, Methanobrevibacter gottschalkii
MVSETKEQLELEAEIKEQAQIFLKYLNSTLPESMELEYEGFYRRGFFVSKKRYAVIEDGEIIAKGLELVRRDWAPIVKKTQEAVLMAILKEGDADKAINEVKKVLKNIKKGNVDKKEMIIHTQITKPLDQYKQVGPHVIAARKIEEHGIKVSRGTIIQYIIVKGKGSISQRAVPYEYSEGYTYDKNYYINNQLIPAIERIMYSFGYTKRDLEDMAKGEVQQSLDAFF

SEQ ID NO: 11050 - protein, 114 aa, Methanobrevibacter gottschalkii
MKKRLISSYDEINDIFVGKVDGENGFYADFDISDGIFLGINKDNCPNSIYVSDASRVLNVSKQTLENSDVKITVSCDSTCLYFSMFIGNLHICSYRCKNIFKIPFIDFEMDSNY

SEQ ID NO: 11051 - protein, 91 aa, Methanobrevibacter gottschalkii
MDNPKINVNSEDEIVIVVPKDVDEDELVIDLDELGIDIEQLGDEVNIVIQVEGDDELESDFITDEDFILEPNEWYFDDDPYGIVYYEFPEE

SEQ ID NO: 11052 - protein, 76 aa, Methanobrevibacter gottschalkii
MDKEIPYYVLDENGQIGSINEPYIDDGDLKELLLSILGDDIPQEEIQKILDASADEKLTEDEFDKLVDEFILKNKK

SEQ ID NO: 11053 - protein, 124 aa, Methanobrevibacter gottschalkii
MAISQGKSTRSPSGARNVANRGKRKSELGRDPAETRLDAKRLRKIRTRGGNEKLRLATGNRINVTDADGKTKVLDILNVVENTANPNYVRRNIITKGAIVETAEGKAKVTSRPGQDGVINGILI

SEQ ID NO: 11054 - protein, 459 aa, Methanobrevibacter gottschalkii
MKLKKSDYIIIISFIASFIAAFISAAPAVALPQLANEFNLNNIMQNWVVNIFLFTVAITAVPLGKFSGKNGIKKTLNLGLILFLIGTIITTFANSYITLLIFRAIQAIGTAMIYNTQTSIVVLAVEEKNRGKALGIIISGVYIGLAIAPFISGILTYNFGWRTIFYFTIPFTLLALFLSLYKVKDEWNMYEDESYDKFGSILYMIGIFFFIYGFTILNQTKGVIFTVIGIVLLIGFAVIDLKIKNPIFDLKLFKNKRFSSSNIASLISYIATFVVTYILNYHFQYILSLNSQTTGILLVVTPVIMAIISPFSGKFSDKIDSQKLAAIGMGFVTIAVFILIFLDYSTPLWVIIIAMALQGLGYGIFSSPNTNMIMSSVPQEETPSASVSITVMRVIGQTMSLAMLTIIFSVIMGNVPIIPEYFSLLTKSSQTACIISTLLCFIAVIASLVGIGGKNDLTN

SEQ ID NO: 11055 - protein, 340 aa, Methanobrevibacter gottschalkii
MSEDKISMNHGAGGEVMANLIASTILDNITKKSVNGGISLDALDDGASIPIGEDYELVLTTDGHTIDPLFFPGGDIGRISAAGTINDVSVMGARPLAISNAIIMQEGFPIEDLDRIIKSLNEACEEVDVAVITGDTKVMPQDKLEGIVMVTTGLGIAKKGEVVRDSTLEVGDKIIVTGSLGDHGMSLMSFREGFGFETDLKSDVAPMWNIIKKALEIGGVTAMKDPTRGGFANAINEMASKSGVGVVLEQEAIPIKEEVHAVSEMLGIDPFEVANEGKVVMGVKADKAEAILEAIKNEKYGENAAIIGEVVEGDYVVVNTPIGGERILEAPIADPVPRVC

SEQ ID NO: 11056 - protein, 131 aa, Methanobrevibacter gottschalkii
MVSIFSRRIIAYFVDFFVVSAFMWIVSYLLSLVIGTNNPIYHYFIYLVPILIMIYFVLCEKIVGASVGKSLLYLQVRSQNGAHISWSQAIVRNLTKIYWIPIIFDWGIGKVLKKDRLFNSITKTVVIDELN

SEQ ID NO: 11057 - protein, 149 aa, Methanobrevibacter gottschalkii
MNKKSISVILLIIFSITIIFTTANILINDNTPLENQAGTLKINNKTIHYEKSGKCLEVIDGNTIKVYGIGKVQLTQVGSPSSEAKDFVENNCLGKTVYLDIDDKKVEDEYGRALAIVYTDTVDVNKELINNNLSEISYFTPSEFKKGDI

SEQ ID NO: 11058 - protein, 228 aa, Methanobrevibacter gottschalkii
MEQKNITQYSINYETKQHPSVKGLQIIEGKNNFPISWLNKQGYCEYQLYLEHVKNIKSPTTPEMTHGSEIHKQLEDIFKQESAQVSFEEVIESSKSEASMSRECFVISPKYGIRGHIDEIWMKPEEIVIIDDKPGRTPYKSTMNQVRAYCLAFKDMSGDDRKIKGALRERGTENLFWIEPFTEDVEKEIKFTIDRIHGLFNGSKPFMPTKNPKKCHSCRFKHDCEHAQ

SEQ ID NO: 11059 - protein, 286 aa, Methanobrevibacter gottschalkii
MHYINSKTILSPKNGMNLYRGCTHGCIYCDSRSDIYNMNHRFEDVEVKKNALVLLKNELLKRPQSMIGTGAMTDPYIPLEKHLEYLRKSLNLIYRYGFGFTCITKSDLILRDLDLLKKINEKTKVVVQMTLTTSDDDLCRILEPHVCNTTRRVEVLKILQKHGIPTVVWLTPILPYINDNIENIESILNYCIDAGVKGVICFEMGMTLREGDREYYYKKLDEYFPGLKDKYIEEFGNSYSIPSPNNKQLMSIFNEKTDKHDILNKPDEVFDYISYFPQKSVQSRLI

SEQ ID NO: 11060 - protein, 427 aa, Methanobrevibacter gottschalkii
MNFNELNISDNIKNGLKGMGFTKATPIQEQSIPVTLKGKDVMGQAQTGSGKTVAFAIPIIEKIFIDDKSPQAIVLCPTRELCMQVADEISKVASNIKKLKILSVYGGQPIGRQTRVLKKGVHIVVGTPGRVIDHINRGNLDLNGIESVVLDEADEMLNMGFRDDMEFILKNTPKTRQTLLFSATMPDEIKKIARKYQRNPKFIKVKANKKNSPKITQYSFKCNAKYKFDDMTRLLDVFDVELALIFCNTKKGVNYVAKHLKKRGYSVDGLHGDMTQKMRDKVMNKFRNDNIDILVATDVAARGLDVDNLDVIINYDVPQNPENYIHRIGRTARAGKLGYAFTLVCRDETRRFAAIKKANNTKITEKQIPSYKEVETIKNKLILDKVINCIERGELEDSYINSIKDSMNKKINAQQLAAGLLKMVREN

SEQ ID NO: 11061 - protein, 268 aa, Methanobrevibacter gottschalkii
MMKAFKKRGALTHFQILSEISKQDPHLKQKDLANKLGITIQAVSENIKTLIEQGYISSKDGRSPYKITQKGIEKVKKDAISLRKYSDAVLETMNHYKTIWPAIAREDLQKDDIVGLFMDDGVLYAHKKEENATGIVMDNTKEGMDVALSNLTGTIDVSNGEVTIINVPTIKDGGSKASDLELIKKVYENGTNSGEPIDKIACAGTVSRAIINKLELPLDIEYAAPNATANAARKGLNVLAICVGDMSKAFTRELESEKIKYNVIDGKK

SEQ ID NO: 11062 - protein, 468 aa, Methanobrevibacter gottschalkii
MQIPQLMHEQYRQAKELIENAEDIKVYSHIDCDGICSGAILSTILDRQNKEYEIEFVNLDVLDDIELTHELTIFSDLGSGQKIDAKAQKNQKILILDHHPPLRDLDYKNNKDYTYLEINPNHHGIDGSYYVCGGGLCYFLAKRFGYDDLSWIGVLSAIGDMQNTKTGHFEGLNKIIQQDAIDGGYLEIIKSDINIYGRNTRPLFVALSYFSDVKLPITNNTNETMAILEELGIDEKHNRKTLNELTMEEKGKLFQRLMSMLTQAVPPKYIQYLPQLILGDSYTFLKEDEHSFLRDGSEFSTAMNACGRNHEEQIAMEVLKGDRFVALDELEVVSKIHRTNLAKGISSVAENDETNIIELENLQYFDGTGIAPEIVGTITGMILGYCNWKKPIIGFTQTDSDGLKVSLRCSRLLSYDGIHFGNIIREVASDVGGSGGGHAMACGAYIPIDKKYEFLEEFNNRLDGKLTK

SEQ ID NO: 11063 - protein, 89 aa, Methanobrevibacter gottschalkii
MITVWPQYLNKKLSLNEGRKISKEDCVKDPTINDIERALKRLGLNYELEKDKSYPGKWYEKSGRALVEWDKSKLELIKEISLKIKEIRN

SEQ ID NO: 11064 - protein, 364 aa, Methanobrevibacter gottschalkii
MADYKYVIVGAGLSGLTIAERIANELNEKVLIIEKRDHIGGNVYDFYKDGILIQKYGPHIYHTNYKKVHDYLSKFTEWTDYVHKVLSYVDDKLVPMPICIDTLNKLYDLDLDENSMKEWIEEHKEDIDEIKSSEDVVLKNAGRDIYNKLFKNYTEKQWGTSAANLSPAVISRIPFRFNHDDRYFSDTYQGMPKEGFTKMCENMAKSDNIHIGLNSDYKDYIGKINYEKLVYTGPIDYFYDYKYGELLYRCLNFVYEVLDEDSYQEAGVVNYPNDPYFTRITEFKKLTQQKVGGKTAIMREYPGFNGEKCYPYPTQEYLDKFKLYESEMEKEENVIFAGRLAKYKYYNMDLVVKDALEIFENEIK

SEQ ID NO: 11065 - protein, 367 aa, Methanobrevibacter gottschalkii
MNDKISIILPIFNVGDHLRGGIDSLINQTIGNENLEIIMVNDCSTDGSDKIIDEYAEKYDCCIAIHHEKNSGAAYTPRNTGIDACTGDYIMFLDPDDRYTPDACETLYHAAKKNNADVAFGRFRRIFEYGGKVQKSFSPYIDTLENSYPNETFDTANFLDVPDFIWDNFVERFLYGKTLEVTYPRDVPIDTIHVENIEQEPDLLKMAPAVWSKIYKRELITDNNLRFQPFVSGDDMAFSLEALLKAKGIVFLNNFMCYNYYIRDLPNDKSITNTVNVRLLYELMESYIYCRQCTEGFSKEVQTVSINPHLLHWTNSWKSSPFTKEENKLLLSEVNKLKSIHNTDLKTKILLSSISTAIESKIQIQKE

SEQ ID NO: 11066 - protein, 256 aa, Methanobrevibacter gottschalkii
MSKPVVAITRPEDRAKKACDIVEKLGGEPFLAPTLDLEPVNSKSLKDLIKRKDELDWIIFTSPTTIVSLNKFYPDFLGSLNCKLAVIGNKTGKLAEENGLKVDLIPEDFTAEGLIEEFKERKITNQIIGIPRTLSARPVLPEELEKMGNTVILAEAYKSLFPMDKKAVKELISKIENKEIDAITFTSPLTVENFFKIIENKEKIAKLLSDNILTVCIGPITAKVLKKYNITYIHPDTYTVPDMMELLFKKWREQNE

SEQ ID NO: 11067 - protein, 101 aa, Methanobrevibacter gottschalkii
MHDRIEIAREFANAIKSDKIIKIILFGSVAREDDIEDSDIDILIISNEWEQIDSLITDEVFKVVLDTQELISPHILSEKQFEETKNFNFLTNVLKDGVEIG

SEQ ID NO: 11068 - protein, 120 aa, Methanobrevibacter gottschalkii
MVLKLDECEAFIKKAKSKLTSSRALYEIGQYGDSVGRSYYAMFLSAKALLVRDGYDVSSHKSLIGIFGRDYVKKGDFDSNIAKYLSGTQSLRDNADYDAIDAISKEIAHGRIKQAERFIA

SEQ ID NO: 11069 - protein, 155 aa, Methanobrevibacter gottschalkii
MTNVLIAYFSASGVTKNLAEKIANDNDYDIFEIVPEEIYTPEDLDWTNKQSRSTIEMNDKSFRPPISESCDVGEYETVVIGFPVWWYTAPTIINTFIESVDLTGKKIKIFCTSGGSGVDKCVNDLKATYPELNFTKGIRFTGNVSNAKEWIEQDL

SEQ ID NO: 11070 - protein, 322 aa, Methanobrevibacter gottschalkii
MFSNIGVVGAGAMGTAISQTICDNTQKVSLYARREELVDSINTTRFNKDYFPNIRLKDNIIATNDLNDLKDAEIIFLTLPSSTIREVCSQLKYIISQDCVLVNTAKGLEKGSQKRMSEVIMEETGRPACVLSGPNIAVEMVERTFSSASIACENKQYLEKVEKALSTFRFKVSASCDVIGVEYCGVIKNIIAISQGICEGMKINDNARFSVFTKTYNETKDMIEKFGGNRNTVDDYCGFGDIITASTLNVSRNHTLGVLYGQRIVIDEKASGVLFEGKNTIVIMKKLCKKHNIDCATVDFTYDVIINRINPKKAFEIFWDKL

SEQ ID NO: 11071 - protein, 231 aa, Methanobrevibacter gottschalkii
MICAAILAGGIGSRLKQGKPKQFVNINNKPILVHSVEIFLSVDELDKIIVSSPKECVDKTNDLMDEYFPKNDKIIVIEGGETRNGTILNSIQYMKGQNCEKDSILVTHDASRIFVSKKLIKDSIKYAIEVGAASAAIPATDVIFETEIDGKLTGVPLRKYLCHAQTPQSFNIDKFLDIYEDLSEEEISKLDEAMVLFHLRNADVKLFPGDQNNFKITRPFDIKLAESIFKN

SEQ ID NO: 11072 - protein, 355 aa, Methanobrevibacter gottschalkii
MDNFKCGSMDFKISVIAPVYNAVDSLEIAINSIINQTIGFKNIELILVDDKSNDGSQDIIKKYADKYENVIGIFLKENSGLPGKPRSLGIKYASAPYLMFLDADDEYLPNAFELLYNTIVNEKSDFVMGSHFWNMNGERMKINILHDCNDKSDVININPFLNQRNFILLSYNHVAPWGKIFNKELILKNNISFPEDTLAEDTYFYFKTLINSKKVTLLPNDSLYMYNVFENKDSVIHTHNLSKFNYFLKGFANVMELIKDIPFSKERILISNMGSLLLIFSNLSMKEKKEAVPKIYYFEKSLDEEVVLKRKELILLNKLILKKHFYLAIIISDIYSILYNNEKIKNLYRKWGHKE

SEQ ID NO: 11073 - protein, 332 aa, Methanobrevibacter gottschalkii
MKTKKERIFYYDFLRAFAIIAVIICHVDYFFGPLTSTTQIIVQMTFHDIGRIGVPIFLMISGALLLNREYPDLSQFLKKRFVRIIYPFIFWIILILAQIYYYGGNPTYLWKVFIGEPSITWYFWVLIGIYLFLPILNSFVKEYGEKGLKYFLAIWFSIIILQTFNVYPLWTNLDLSYFAGYVGYPVLGYYLENKEFKLNNEKICILGVITLLISLSCFVYLNYINSTAIHSIYQNIPIVFMGLGLFISIKYADKLNKFKAIKDNFIGKSIISLSICSYGMYFSHVIVTKFLSYYNPHSNLMFPLMFIMIIFLSWLMPYILSKIPYVRTFSGI

SEQ ID NO: 11074 - protein, 360 aa, Methanobrevibacter gottschalkii
MNLTELYYKLPKKIRYSERFILFCIKLAKPFHKKKTHEKEINYTLNYLFKSSDVKIEGTLRNIQLLYAELLRFIDNICKKYNLDYCLAYGTLLGAIRHDGFIPWDDDCDIIMIRNDYNKLIEVLPSEINKHKFLKENIGLTKLVGFRENYFNNVKTLYDEELGHDVYFHDYNKAPKQFDSKYNEKLPNLCKSLFLQIGWLKPMVRLDIFPYDYIEEKSLNHYDKHYRPAKVSFRNFFADDDFSYEKEFNKHFDKLGLTLEKTKYVGEGIDGSDEYVGSYDSSMFFPVKTHKFEGYDLKCPNKSEELLKRWYGESYMSIPQAIVMHGYSEYNSRFFDSIEDMNESFKLAINELKKINDEFE

SEQ ID NO: 11075 - protein, 277 aa, Methanobrevibacter gottschalkii
MFRTKRYDDETLKHLQKVQMCILKYFIKLCEENDLTYFIYGGSLLGTIRHKGFIPWDDDIDVIMFREEFEKLNKIIEKDIDDKYRFINVLNEETYHYTWGRLMLKNTVINEWWADQVDYTQNIFIDVFILDNIPNNSFKRFIHKWVSFSLNQLTMYAFIKYDNQSKLKKILQQTIHYLIKIIPISAYGIKKRCVNSYRKYQNDDCDDICDFPAICQMPIYHKTDWLPPKKAQFEDIEVNIPNNYDKVLTRTYGNYMALPPEESKWSPAPDEIDFGEY

SEQ ID NO: 11076 - protein, 435 aa, Methanobrevibacter gottschalkii
MKSDNPIVYTCFCTDIIHDGHLNLINEAKKYGDVVVGVLCDSEMVKYNRFPLKTTEERIELVKEIPDIKDVIVQNKIMYDDVVSELKPDYIIHGDNWSEESMKVIRRNIISVLDKYGGKLIEVPYTFNEKIQKVDRQMREKLAMPELRRARLRKLLNMIPVVKTIEVHSGLTGLIAEKTVVADDEHIDQFDAMWISSLCDSTEKGKPDIELVDMTSRFRTINDIMEVTTKPIIFDGDTGGIAEHFVYTVRSLERMGVSAVIIEDKIGLKKNSLFGNEVKQTQDEIDHFCEKISAGKNAQLSEDFMIIARIESLILEQGMDDALKRAFAFRDAGADGIMIHSRRKEPDEILEFCDKFRAEDKETPIVVVPSSYNTITEDELKAHGVNIVIYANQLLRAAFPSMQNAAKSILKHHRAHEIDEKLLSIKKIITLIDEL

SEQ ID NO: 11077 - protein, 243 aa, Methanobrevibacter gottschalkii
MSRYAILSDIHGNLFALKEVFKDLSTQKTDYIILLGDLIDYGMQSNEVVEFIRDNLSSKIICNIWGNHEMAILTKDFKHFSSSRGVESAKFTDSILTNDSRSYLNNELVKEGKLDFEICEKQVLAVHGSLTDYYWKAIFPDNLNGNYIDYDIVLSGHSHYPHVFQKFYEVDDPDMRNKKSVLFINPGSVGQPRNHNPNAQYAILDTDLMNIELKSVKYPKYDAMDLYDGNIDDFYRKRLKNGI

SEQ ID NO: 11078 - protein, 334 aa, Methanobrevibacter gottschalkii
MNILYIISGVTGMTGNELVRQLLNQNEDEVKIIGFDNFYASSIDTVSDCINDGRFDFYEYDLNSNDDMDKIEALVLSIKDDFDELVYINCAAVVHTEHFYKVYETYQTNVASMNDFLQQAIRVGAEKYINCSTSEVYSMNSWNEEGGVKESDFITMADAEHSQRTSYATGKLLTEFFMKDSVDNGKIKGCSIRFANVYSKDEKYPKHIIPHIIDSFKNKGEVVLLENSKKNCRTFLNNYDSCSAVIELAKTDSALDGTIYNVATDEEISIIDLAILIAKKMGIDKPVIKFEGYRESDPERRLLSTEKIITRTNWKPIIDLDKGLDECIENYTKN

SEQ ID NO: 11079 - protein, 256 aa, Methanobrevibacter gottschalkii
MKISIITVAGVSSRFNKDISEEEKMLKCIYYEENPKDTLIYKMINKLSYCDKIVVVGGYKYSDLTEYVNKEIPIELQEKIMLVENDRYADLSSGYSLYLGIKESLNNFDGIEELLFVEGDLDIDSESLTKVIDSDKNVLTFNREPIFSNKSVVLYQNENDEYHYLFNSNHGMLILNEPFKAIFNSGQTWKFRDIELLKIANDYFYENCIDDTNLGIIQKYFDSVENKDTIEIIGLEHWVNCNTRADYQYIKEYWGK

SEQ ID NO: 11080 - protein, 393 aa, Methanobrevibacter gottschalkii
MKNLDERLKIVEKHVKDDEITIMIIGLGSVGTYLLDFLVSKNDAAIKLVVVGRNQEKMQSDVNIVRVAGLIREVNKSQIVVEAGVDLNDIDSIQKAISKHNPDFIVNSSRAYPGLKYGSISWSNVRAYGIWTPLSIKFTKNIMEACENVDTDAVVINTSYSDAVIPWLKSAEKAYPDFGSGNLNHLIPRMKFAVANILGVDDFWNVDFNFAAAHFHDVCISKEGQTEGVDLPLKIYYKGDEQDIPHDEIYNACSISMPVDQKRNMMNASSNYRIISAIIDAIRTGENQKIFSPGAFGHIGGYPVIIGYKEGKISAWIDESVFTFDEMDKANRKSLALDGVEDILDATLIYTDDLIKKVEKAFGEDLPKKVKYDEIEKTAEFLIEKIITPQLNK

SEQ ID NO: 11081 - protein, 372 aa, Methanobrevibacter gottschalkii
MKVEDFVDVLDCEFYTGVPDSQLKALCNYLINEYGIDEKHHLIAANEGNCTALAAGYHLATGKVPVVYMQNSGEGNIINPVASLLNDQVYAIPAIFVIGWRGQPGIHDEPQHIYQGKITCDLLDLMDIENFTVSPETSVDELNDVMIKFNNVLKSGKSVAFVILKNALTYDGKTIYENDNELIREEIIEHIVNVSDSDPIVSTTGKASRELFEIRESKNQAHKHDFLTVGSMGHSSSIALGIAINKPDKRVWCIDGDGALLMHMGSMPVVGNVNPDNLIHIVINNGAHETVGGMPTAAAGTDLVAIAKACGYSYAVSVDNIDDLDEELIKVKNMGNLCFIEVLSSIGSRADLGRPTTTALENKKSFMNFLNQ

SEQ ID NO: 11082 - protein, 280 aa, Methanobrevibacter gottschalkii
MKYNEYDDKTLKHLQSLELMILKDFIKICEENNLTYYMYAGSLLGTIRHNGFIPWDDDLDVIMFRDDFEKFKKIFISSQSDKYELLSNETEKDYFHLLSKLMLKNTKFEEDWVNQVDFHIGINMDIFVLDDLANGKFKRNYQLKKSFLYNKLLIMSKIKLNDLPFSTKVITHACYHILNLFGIKPSKINKRCLNFLNKYKNPDAEFVFDISANADEYPQIFRRDDFKSIIKVKFEDIEVNVPVNYDHILKSLYGDYMSLPPKEDRYNHITETLDFGPYEL

SEQ ID NO: 11083 - protein, 495 aa, Methanobrevibacter gottschalkii
MSDKNEWGSNMSFILAMIGSAVGLGNIWRYPYVLYSNGGGAFYIPYIVAILLMGIPFLILEYGVGYNYKSSFAKAIRKINAKWEYLGWFLPVAVFMIMIYYSAILGWDGIYMVLSFFKGWGADPNTYFATTLLQSSDSMNGLFTFIPVIAIAMLAGWVIIWFISHKDLESGLGKVSKILVPLLFLIMVVIVVFSLTLPGSSIGLAELFNPDWSLLTHFEIWMAAFGQIVFSLSLGMSIAFTYASYTKDGSDLITNTISIALANSIFENFAALGVFSILGYMSLQSGTAVADLVTQGTGLVFIAYPTVFNVLGDWALVLGPLFFLTVYLAGLTSILSTIEPLSFSIQNKFGLTRSRTMTILCVVGAVVSMLYATAYGGSLLGYVDTFINQIALLIGVVAECIVFAWIFEAEKLIDFLNARSKTIKLGKWWLGIVKYILPIFVTVIWIGGMVDVVNNGTMDQLIFTIISAAVLLIATLIFTVLPAKTPEWDNAEDRV

SEQ ID NO: 11084 - protein, 122 aa, Methanobrevibacter gottschalkii
MKNYVIILIGVIIALVIVGGAIAYTSMHDDTSDNNNTTIKSCIPNITNATNDAPNATGDDKNTTSSEPYVVSEVVKFNAQQGEGYYREVTYSDGNFRQYDVDTGKLIGSSYDSDQDKLPSME

SEQ ID NO: 11085 - protein, 94 aa, Methanobrevibacter gottschalkii
MIFSELLKHFNIKEEFPPYLLDQSFNEVFLDGELFRIDKNYKIVVKTRQDVVHKMFIKPDDMYPVIILSKLPNGLLNGMKFGHAKDDVIYINKL

SEQ ID NO: 11086 - protein, 242 aa, Methanobrevibacter gottschalkii
MNKKELINSGKVKSVFNTDNDDEVIIEFRDDMTAGDGARKEIMANKGAYNAVISSKIFRVLEENGVATQFIDLPEPNVMVAKKLEMIPIEVIVRNIATGSLVRKYPIEDGTKLNPPIVQMDFKDDEYHDPMLNDSIIKALGIATQEEIDILTEKALRINEILTKFFADSGIILVDYKVEFGKDKDGNILLGDEISPDGCRLWDSETLDMLDKELFRKGKDDEVMTAYMEVYNRIMPEDEKVI

SEQ ID NO: 11087 - protein, 88 aa, Methanobrevibacter gottschalkii
MLFDIEVKISLKRGMLNPEATTIERSLDLLGYKVKNVKTDEIIKFQMEGEDREVIRSNVTDMCERLLCNPVIHDYKINVIPQNMACGK

SEQ ID NO: 11088 - protein, 214 aa, Methanobrevibacter gottschalkii
MKIGVIRFPGTNCDRDVAKACELAGLEPEYVWWSEEKLTDFDGIVIPGGFSYGDFLRAGAMASITPVIDGIKELVKEEKPVLGICNGAQILGEIGLIPGIFITNENPKFNCEWSKLKVATNRTPFTKAFKKDQIIDLPIAHAEGRFYTKDVDLLKDQDQIVLQFEGKNPNGSIEAITSVCDESGLVVAMMPHPERACESIFGSDDGLNFFKGFL

SEQ ID NO: 11089 - protein, 239 aa, Methanobrevibacter gottschalkii
MVVYLIGAGPGDADLITLKAVKALNKADVVLYDYLANEEILAHAPETSQRIYVGKKAGEHYKTQDEINDLIIKQARNNENVVRLKGGDPFVFGRGGEEILALMEHDIKFEVIPGVTSAIGAPTSLGLPVTHRGVATSLTIVTGHEDPTKPESQVHWDYTADTLIILMGIGNIRENTAEIMKYRSADTPVCAIESGTLANQNLVFGTLGDISNKKINTPAILVIGDVVSMYKDIYNYQGD

SEQ ID NO: 11090 - protein, 595 aa, Methanobrevibacter gottschalkii
MCGIVGCILKNDDDVAPILFDCISKLEYRGYDSIGLATYSEDKIHIKKDKGKIKEVDNKLNLSDMPGNYGIAHVRWATHGDPSKLNSHPHVDERRDVAVVHNGIIENYLEIKEKLISEGHVFKSDTDTEVIPHLIEKFTNEGFDLEHAVRKTVDIIHGTYAIAAISINEPDKIVATRKDSPLIVGIGGEGYYLASDSPAILKYARDIIYPEQGEIVILDKNGVVVHDEFDNPVSKEIETINWTPEMAEKEGYNHFMIKEINEQATSVRNTLTQREHIQEIIDDIDEGIQRICFVACGTSYHASLTGKYLIESLAGIPTDVILASEFKYSANTLNDKTLVIFISQSGETADSLKALDVANETSKTLGIVNVAGSSITRRAEYVIQTQAGPEIGVAATKTYVAQLTSIYLFAALLAKNTELLEELEKVPDFIDEALEDIDFIKEISKRYNYARDFFYLGRGYSYPTALEGALKLKEITYIHGEGYAAGELKHGPLALIDEGIPVVVIAPPGDSHRKTMSNLEEVKSRGANVLAIGSADDDALKTKADDIITINPEVNEIIAPLVYVVPLQLIAYYITLEKGHDPDKPKNLAKCVTVE

SEQ ID NO: 11091 - protein, 631 aa, Methanobrevibacter gottschalkii
MFNKKISLILLTLVFMLSISAAVATDTNSTDDVISSDEEAEPPSVVSQDISINEGNDSNPQENYTLKGSDVSMYYNSGSGYEASLSDGNDSVENATINLNINGVDYNKSTDASGKVFLIINLKPGDYVITASYGNLTTENKINVLPVITGNDVSTTYKHSVPYSATFLKSDGSPLSNTYVKFKLNGKTYSKKTNSKGIAKLYVGSKIGTYNIYAMHPNGYSISNKITVKNSIISSNLKKHYRSSKTFKATFYGKNGKLLTGKTIKFYTKGSYFYKKTNSKGVAYIKVISKPGTYKITSINTNTGEKKSNTITVLSTLEAKSMTVFTGTTSKFKVKLYKGENIAKNTKMTVYVDGVKKRVTTNSNGVATVKFKLDKGIYNIKSVDPFTGYVLNKKVTVKLASISAINVNAIEGKEGLFPAKLLQQNGKVASGTYMEMTIDGVKHKVKTDSRGIAGYKFTFKDAGVHTVVCKDLSTGYKVTKKINVVKKGEGKSYDQFGVSEDGKTMLVIGRPSASGETAKYGYTYYKTEVDRTCPICGSNELYWSIFWASGNTDGGTFPETPSRPAHYDEGNLDGIIICMHYTGDDEYCDADWSVFGHNHDGSGRDLKLVSKPVRSSEIEAYLLKSGYYVKV

SEQ ID NO: 11092 - protein, 408 aa, Methanobrevibacter gottschalkii
MSYENSARIINDDIFDLVNECFGQEKTSQNNESRLNFFDTYKNYFVLTDDGSYSINSKEINHKVETLHTSTGAISESFEKFIKPMKFDYTKDIAILDICAGLGYNSSAAIADFIKNSFDSNLKVDMVEISKATFACGLLVPSPIPEHDITKKAIEDELIRLDYATLSLEECEIPENIDINVFVEDARQTVQNLEDNTYDAIFLDPFSQNMTPELFSLEFFKEFKRIIKDNGIVATYTSSAPVRAAFIEAGFYIGLGPIFGRKQGGTLASPNPEMLDYSLPKNDEIRIALSDVGIPFRDPDLNKSSDFILSERSEERHNARHNTKISSAVKTPIFLGDAMENDEKLKRRVERNLIKMNIPSTTSPEAFYIIECEKKYSEKQDRENNSTARILDMKKRLEKVKDGDYTLT

SEQ ID NO: 11093 - protein, 658 aa, Methanobrevibacter gottschalkii
MFEIKAKDNMGRVGVLKTKHGNVKTPALMPVIHPRKQAIDVGKYGADIVITNAYLIYKDEELKQKAIDEGLHKLINFDGPIMTDSGSFQLSVYGDVEITNREVIEFQESIKTDIGTSLDIPTAPFVDREKAESDLKITLERAKEAVEFKKENNIEMLLNSVVQGSTYLDLRQDCARQLSKLDADLYPIGAVVPLMESYHYKDLVDVVMNSMKELSDSVPRHLMGAGHPMIFALCAAMGCDLFDSAAYILYAEDDRFLTTRGTYKLENLHEMPCSCEVCTKYTPDDLRAMPKKQRRDLIAQHNLHVSFAELRRIRQAIYEGSLMELVEERCRAHPALLDAVRQLGMYACDLEKYDPRSKKSAFFYTGPESLGRSEVLRHIQKLMAMPKKRDLILLPPSRKPYSKFISGKLGDFYRYGEEHDIDLDNADFMVVDVPFGLIPLEVDEVYPLSQNSTPKIRDVDAVEFLQEFVDEFSGYYEQVLIHSRVLKDLEIEGENNLVDAEIRYAKDDVKKIKAIADYQFGVGAGEALFDGNINIEKSKKTGKIRHIYDGKTLIVNMRASDSFLVLSKEGARRLHAAMPSLSNRVVVNKDSEPFALDGKSVFCKFVVDCDDNIRSNDEVLIVNEEDELLAYGKALLGACEIKELKTGQAIKTRKGMKK

SEQ ID NO: 11094 - protein, 222 aa, Methanobrevibacter gottschalkii
MVDNDKVNTGHNIEDKELIKNARKPVGELGHQILDRMNKSHESMAQWGVSHFEVKEDSKILDIGCGGGKNIERFAKQISQNGRVVGIDYSEVSVEKSAKLNQKFIDGGIVNVLQGSVSDMPFHDETFDIVTGFETIYFWPDFINDLKEVNRVLKNDGIVFFCNEAVYREGEMEKYDDLVELLDMKIYSEEVLRNSLEKTGFKDFKAYLNDENDWICVTARKI

SEQ ID NO: 11095 - protein, 475 aa, Methanobrevibacter gottschalkii
MANQVKTIFANMSFMLVSQIIASVCAFVWTIVTAWYLGPSDYGVFGAAVSFAALFGIVIDFGLSTYVVRAISTDFANEHKYLDNAISLKLFLSVFYVIAVYLSVLVMGWQPKLVLACVFLAFENVIKSYHAILFTSFQAHEKMKYQAVTNTVINVFTLIFILLVACTDYALVGILMAYIVANALGLFYEVYALRKHIIKPKLSFDFSFYKALLKAGLPFALTGLFYTVYYSIDLVMITQFSTTYATGLYNSAYKLITVLTLFYTIYTSVIFPVMSKLFTDEKDLLNLSFVKSIKYLMLVTIPIAVFTSFYSYQIIAIYGAEYIEAGGVLQILIWTVCFLFVNGACSLVLNASHQEYSVTKIYTIAALFNVVLNLALIPKYSVYGASVATVLSEILILVLELYMLGKINQLPDRHLIHDILRIIFASLVMGTVLYVLDLNIWAAIAVSVVVYFAVIVLIKTVDSEDKLIIRQIINR

SEQ ID NO: 11096 - protein, 345 aa, Methanobrevibacter gottschalkii
MVGIVGYGAYVPSYRIKVEEIAKVWGDDPVALSRGLIVNEKSVPSSDEDTATIAVTAARYALARAQIDPKNIGAVYVGSESHPYAVKPTASIVAEAVCATPKLTAADLEFACKAGTAGIQMSMGLVQSDMVDYALAIGADTSQGAPGDALEYTASAGGAAYIIGNDNTVADIEHTCSYTTDTPDFYRREGEPYPSHGGRFTGEPAYFKHVLSAAEMLFDETNTAAEDYDYACFHQPNGKFYLRAGKKLGFTSEQIERGLLTPNIGNTYSGAVPLALSNILDVAEPGDKIFVISYGSGAGSDGFAITVKDEIEERRELAPKTEDIISKKTYVDYAVYAKFKGKIKM

SEQ ID NO: 11097 - protein, 385 aa, Methanobrevibacter gottschalkii
MRDVAIVGVSQTKFGELWDSSFRDLIAEAGVKALVDAEIDGADIEAMFVGNMSSGLFVEQEHIAALISDHVGLNPIPTTRVEAACASGGLALRQGIMAVASGFHDVVISAGVEKMTDVVDATPAIATASDKEWEAQQGATFPSLYAMIAKRHMYEYGTTREQLAQFSVVNHKNASKNPNAQFPFEITVDKVLNATMVADPLTLFDCSPVSDGAAAVVMVPAEDAKKYTDTPIYVKASAQASGTLTLHDRKDLTTIESTKVASRKAYEMAGVTQKDIDLTEVHDCFSINGLLAVEDLGFAEKGKGGIAIEEGQTEIDGDFPINTSGGLKARGHPLGATGIAQAAEVVWQLRGEAGARQVDGAEIGMTHNIGGTGGTAAVHIFGRDL

SEQ ID NO: 11098 - protein, 307 aa, Methanobrevibacter gottschalkii
MIINTGSRTDIPAFFSKWLLNRIDEGSVCTRNPYNDDIYKYPLDSKIIDCLCFCTKNPKPMIASLDKLDDFRQYWFVTITPYGKDMEPNVPGYKNVMKSFKKLSEHLGIGKVSWRYDPIFISEKYNLDFHIEMFDKMASELGDYTNDCTISFIDLYQKVLRNFPNSKEVTQDEQLIIGREFSKTANEHNIKMKTCVEGTLLDQFGFDSRGCMTQEVIEKAIGKNLKIPKGKYRIRECDCIFGRDIGAYNTCLHGCKYCYANTNMKLVKKNQKLHNSNSPLLIGDVKEGDVVKEVREPSYIDTQQRFI

SEQ ID NO: 11099 - protein, 400 aa, Methanobrevibacter gottschalkii
MIIQRKDYIDKINPFVNKHIIKVLIGARRSGKSTILKQIIDSLIKQGTPKENIVWMNFELSDYFEMDNIKKLEEFISNKTENIDGKIYLFFDEIQIVPQWEKLINSYFAKENYDIYITGSNSKLLSGEFATYLSGRYVELNIYPFSFREYLEYYEITSDFKSHFYRYLEDGGMPSTFDYRGDDKRLILIDLYNSIVLKDIIQRNNVKNVDLLDRIMRFVMYNISQPFSANKIHKRLKQDMVNLSVNTIYNYLKFFENACLIYQVKREDLQGKRILKHDEKYYICDLGFRQAIIGNNQRDITRAIENIVYLELLRRGYEITIGKVDNLEVDFVCKKQNKLIYIQVSYLLASEETIEREFKPLNNISDNYPKYVITMDDADMSHDGIIHLNLIDFLRDNEVI

SEQ ID NO: 11100 - protein, 396 aa, Methanobrevibacter gottschalkii
MDEIASITDTNLTETQFFNRRDEINILSNLLISTEFNSAPTILLTGIRGVGKTALIKKIRNKFEREYLVVDIDLSRSSAYQQKNLTRASMIKIIYDSIIRSSKEFGLKTISNQIEKYFKTKNFKIDKLLSYEHIPIPIFESEDNYERLAEFVMELPQKIYEDNNDKIKGVFIFIDEIQLIKDLGDELNGFLWYMRSFIQTQKNVAYIFCGSMSLKDSLINDLNGNKGAFGGRMLTIEVQPFSKKTTENYIKSMRRNIQLDHGGFERFYKCTRGIPYYINIFAKYLPENLTLSENNISELFKDSIDYLAIHFVYMWSKLTFQEQKIIISLLENPKKRIEVANSLKVTSGSLNRPLNRLLDYDLIEYANDKYQITDPIFGYWLKNSYEKNGIYPFRSI

SEQ ID NO: 11101 - protein, 305 aa, Methanobrevibacter gottschalkii
MPIYNIDGETLTPIKQVKFKNERELQILTEKNLEELFGLKFIATEFQVDNLRIDTLAFNEETNSFVIIEYKNVKNYSVIDQGYSYLSLLLNNKAEFVLKYNLVCNAALSKDEFDFSQTNVMFISPSYTTYQLRSVEFSDIAFELWKVVKYSNGTVLFDKVNNTDTQASIKQITKENTSKDKVNKEIKKYTEEDTLMNKSDDIKSLYDNLKELILSNYDDIEINHWKYYVAIKVNNKMVATVSVLSKSLKTWINLKETELRDSEGKVRNVSNIGHHGVGDYEYVISSEDDLYYFNKLFKQSYDEKI

SEQ ID NO: 11102 - protein, 231 aa, Methanobrevibacter gottschalkii
MKIVTWNANGKFSEKFPAILEKDADIYVIQECENPEIINLKEYSEFSSNYYWVGENQYYGLGIFAKDNVKLELVDLDDKGLRYFIPFTVNDDFNLLGVWTNPDMDGTKTIYYPKEITKYYEEHKDSGFFNEDMIICGDFNCDVRLKGTHAKNVYEVIEKLSECGLVDIYHHLTGENEGEETTPTFYMYRHLDKPYHLDHIFSSSDKVKALEIGDADKWLQLSDHVPLIFKI

SEQ ID NO: 11103 - protein, 483 aa, Methanobrevibacter gottschalkii
MFEKEELITNFIKEELTDVPNILNKELSKNNEKFNSREELDEIKGYMDTFLNEDTSNKIIVLPGLRGVGKTTLVLQAYEYLLKERDIPPSNVLYISFDDLNDLVECSIRQMVEIYLKNIFHANIRNLDEKVFIFVDESQTDKNWALSGKVIYDKSYNIFMIFTGSSALHLERSDELARRMRKKSVTPLNYTQHLKLKYGIDVGSLSDDLRELVFTGNIDNAAASEFEANNLLTNCLDYSSTDWDEYYKFGGFPILFDKKSHREICEDLVEITERVITKDMPQIKEISSENQSNAKRILRYLALQQPGELTQANLANYLKTSTANVNKILDLLEKTHLIFHCEPYGGSAKRVKKSWKYYFAAPSIRHALSAKIGNPLLGTDDYEGLLLENLVASNLFNLSNRQFTNFTVYYDADKKRNVDFLIHKDSENIIPIEVGRGKKKKLQIKHAINRYDCEYGIVVANNYSSLKKDDDVIYISPKTFSFL

SEQ ID NO: 11104 - protein, 479 aa, Methanobrevibacter gottschalkii
MEDVIYNYLIKQLSEVPMILNRRLSYKNIKFNNKNEFDKLRLMIDSFLDGESEERYFVLPGIRGVGKTTILYQCYEYLLKEKNFNSSDLLYISCETTNFAGETDIKKIIEIYLDEIHNTSPALLDRPVFIFIDEAHFDMNWAMNGKTLYDESPYIFLILAGSSSLHLNYNSDAARRLNILPVMPLNYSQHLSLKYNYQTDIGNDLIDLIFTGNIEAAQEKELKIQKDLISLNSYPLNDWNIYLNYGGFPATFNIKFEDIIVSKLWTIISKVITVDMANVFNLNKNNQNLAYKTLVYLASQKPGEISHDKLSNYLDCGKTTINNIINTLEKTQLIFHSEAYGGASKKVKKPWKYNLATPSIRNCINIKFGNSAGSKSEYEGILLENQIASNLFNLNNNNTSFDFNVYYDSQKGGVDFIVKKLFGNAIPIESGIGSKTRRQIKKAMNKYDADYGIVVSNKTDFIEKEDDVIFIPPKTFTFL

SEQ ID NO: 11105 - protein, 151 aa, Methanobrevibacter gottschalkii
MSKLLIDSSFIIALFRKNDGLHQKAIENKDMLNNDCYITDGILAEVMTIIGQKTKDIGLVRTVYNYLKDNFTIIHESEISMYNDNVLSVFEKYNQNSFKVSFIDCSQVIIYNHYNLDYVISLDNGFGLFEEIELKNLSEQKRTIQFIKYNI

SEQ ID NO: 11106 - protein, 80 aa, Methanobrevibacter gottschalkii
MDNILATTTLYKNYQLAIPKVIRSQFKELNSKDTVIDWFINEENEIIIKPRKKVSLEDVIGIIEDDDPRNAVELKRSLYK

SEQ ID NO: 11107 - protein, 39 aa, Methanobrevibacter gottschalkii
MKLVKRNQKLHSPDLPLLIGDVVKEVSEPAILTHNKRLF

SEQ ID NO: 11108 - protein, 412 aa, Methanobrevibacter gottschalkii
MVKRELYLEKIYNFMGKNLIKIITGMRRCGKSYLFKLIIHELKKRGTKDEDILLIDLELPTYNHIKTREQLDEIVVPFIESHENKVYLFFDEIQNVKEWEVSINSYYKLENTDIYITGSNSKLMSAEFATLLTGRYVNIELYPFSFNEFLDYKQELNHPPSITNELNSDLENFFEEYQKYGGIPLTISSQHDKELVLNGIYSSIILNDIVERYEIRNVGLFNRIVKYIIENTGNLISANAVYKYLKHEKLRITKPTIYNYLEYLENAYLIAKASKEDIAGKKEIIGSEKYYLLDTGFYKSQLEEKQRNIDHILENIIFIELKRHGYKITIGKVNDYEIDFICKKNNQKIYIQVTYLLENDETIEREFRPLLMIKDNYPKYVLSMDRTVQPQNGIKHMNIIDFLKNFNHDEIF

SEQ ID NO: 11109 - protein, 395 aa, Methanobrevibacter gottschalkii
MSIVPLHIPINEIDRYFYNRTEDIKKIEYYLNSLEIGISQSLLIRGVRGVGKTFLLQKLKQDSKKNFLVSYIDISRIVGIDDTQLTAQSVLLELLDEMNNTIYDKIHDGKKVTFLLKKLIDKLKIKDFSFSKGIHMAEIPIPATEDNYKKISKFVMEYPQNVVESIDGINGFIIIIDEFQMLKKLKNPESFFWLMRSYSQFQSNVSYVMSGSISQTSDAIEMLNGATGAFGGRMMQINIDPFTKHETKSYFNDRFPEIKFTDDGFNRFYEYTKGIPMYINSFYNALSSHETYDEKSIDYIFLNNMDQILVMWIRIWGTLNKYEKKIICAMLNKENISWSKLERSLDMSPATLTKYIKTLQDKGIIKYHDGNYNFEDLMLKTWLNNEKERTGVYPQ

SEQ ID NO: 11110 - protein, 509 aa, Methanobrevibacter gottschalkii
MTNCIMVQGTSSNAGKSMLVAALCRIYKNRGYKVAPFKSQNMSLNSYTTKENGEIGIAQMLQAEAAMVEPSIHMNPVLLKPKGDFTSNVIIQGKSIGDMDFYDYQHKYHDTALEAIKESFNILKEEYDVIIIEGAGSPAEINMRDQDIANMEIAHLADANVILIADIEMGGVFAAIAGTYVLLDDYDRSRLKATVINKFRGNLDILKPGLDRIEEITGEPVLGVLPYDETLKLPEEDSASLTTHSFAEDKDITIGVIRLPKIANFTDIDPFEYEDDVALKMIDINDNISDVDAIIIPGTRNSTEDMFELRKSGLADQIIKKADEIPIIGICGGLQILGNVIYDDEKRESKHGTVNGLGLLDIESEFSRADKIVTQSEATIPDNLDGIAGAIFKNIAGESITGYEIHEGTSELLSSKALLNVKKGQGNNDEGMIDGACNGNIFATYFHGIFHNYNFRREFLNYIRTKKGLEARYGEDPYETQKDYSLNRLAEIVEENLDMDIIDDLLFSK

SEQ ID NO: 11111 - protein, 659 aa, Methanobrevibacter gottschalkii
MKFEEVEITEDSPQELVAEPVVEKEDHGEETKPMLDYDNIKSSQDIEVPPLLIDQVIGHEDSIETIKKAAKQRRNVLLIGDPGVGKSMLAKGMAQILPHETLKDVLVYPNMEDNNHPLIRTVPAGEGKKIVKATKGSAKSHEEKKTIITMFAIGGILVIGFMYGRLLESIIAAALILLISIQIKPKNSNMSPKLLVNNQDSRFAPFMDATGSHAGALLGDVRHDPYQSGGLGTPAHERVEAGMIHKANRGVLYIDEIGTMSMKTQQELLSAMQEKQYAITGQSENSSGAMVRSQAVPCDFVLVASGNLQVLEGMHIAMRSRIRGYGYEVFMKDYMEDTTENREKLVQFVAQEVKNDGRIPHFATDALDEIIMEAKRRSGKQNALTLRLRDLGGLVRSAGDVAIEKGANLVTAEHVFEAKKYARTLEQQIADRSILQRKDYSMVSAQGGRVGLINGLAVIGDRSGIVSPIAAEAAPTQSKTGGKIIATGKLGEIANESVQNVSALIKKYTNKDISNYDIHVQFIQTYDGVEGDSASVSIATAVISAIEEIPIDQTVALTGSLNVRGDVMPIGGATAKIEAAAEAGMKKVLIPKSNLKDVMIEKKYEDMIEIIPTETLSDVLENILISGSSKDKLIAKMKNLSSKVADKVPQTGLNNPTIN

SEQ ID NO: 11112 - protein, 160 aa, Methanobrevibacter gottschalkii
MNIYETIKNIRASCDNYVDPNLLAFIIDDDNHMGDNNILEIKGYDIRDNDAYEERLFKIHKNENIFLPCGMITFIPVLNECDIFSTKDYSLKLSPEEFDKYCEQEEKLFGILIKKDSTDYKIGQTDVCNCSITASFKEFKKADGKFYKKIEEIIESKIID

SEQ ID NO: 11113 - protein, 301 aa, Methanobrevibacter gottschalkii
MKVKDGIIGLVVGDALGVPVEFYRREDLEKNPVTGMKSYGTYNKPAGTWSDDTSLTIATMASIINKKCIDYSDIMEEFIEWRKNNKYSQEETFDIGITTRNALDSYTPGINPLCGMGGEGDNGNGSLMRILPLAFIGNIDYETIENISSLTHRHERSRIACVLYVEIARSMISNSNLTINEHVKNASAKIIEYYKDSEELSNFKRIFDDDYSKGVSGKGYVISTFEAVIYCLENTNNYKDAVLKAVNLGDDTDTVAAICGGLAGIYYGFDEIPIEWISEIRQIETIIDLCEKYEVACDEYL

SEQ ID NO: 11114 - protein, 169 aa, Methanobrevibacter gottschalkii
MIFKTANLTLRPWQISDAECLYHFAKNPNIGPIAGWPPHESVEDSLNIIQTVFSKKETYAVVIDNVPIGCVGLLFHPDCNHYWGDNSAELGYWIAEEYWGNGYAVEGSEVLIKRAFEDFNINQIYATYRCENTRSKRVLEKLNFKYFDNLTNVNYLGDQFSEIAMVLKK

SEQ ID NO: 11115 - protein, 122 aa, Methanobrevibacter gottschalkii
MTRLCKNCGFENQDDYDFCAKCGTPLVEGLKPNQFRVYRTQDLEINKKALIAAYIATIFLSWSGFFIGLISKNTVFATFTFFGFFMPFFLVQSKHPALKKHGLIMMAISFVGVALSFYVMMH

SEQ ID NO: 11116 - protein, 170 aa, Methanobrevibacter gottschalkii
MKKLNVALIALVLIVVAFLASTIVSPVLIVAEDASEDNGIDMAATIGLTGFNWIYPGNSVNAQGQTLHNVYADYPDNPYGAARDIMSYTYHVTPHIIISINNDAAAAIFGENIIDDIRANDGYNGYAGNDKVSGSMDRGDAVGTAMAENGINIIEIPIQFLIGNISPHFV

SEQ ID NO: 11117 - protein, 305 aa, Methanobrevibacter gottschalkii
MIIGGSSSQDLAASVARELGEELCYVETRKFPDGERYLKINGHVEDEAVTVIQSTGYPQDENLMELLFIIANLKDLGAKKVKVVVPYMGYARQEKRFNPGETISAKIVCDLIQTVGADEFITFNIHEACVLDFFDIPARNLSAMPAIAEYLDKKFFKKEELKPLIVAPDKGAYGFAQEISEIIGCDCTYLTKVRLGPDKVETKIVDVRCDSESENTVNIDSVKGMHAIIVDDIIATGGTIVNAVNILKQYGASAVDVCCVHPILTNNGVTRIYSAGASKIIGTNTLSSDTSRVSIAKSIAQALRE

SEQ ID NO: 11118 - protein, 96 aa, Methanobrevibacter gottschalkii
MDKETIKKELADKSNELLAKYGEQDLVEDISVMNMATKTVFLGSLRVYNYDNAGKIKNDLEKKIKNYGEIAIRDEKIVPCCAPSYIHVSFNVSINK

SEQ ID NO: 11119 - protein, 654 aa, Methanobrevibacter gottschalkii
MKEFKLNSPYKPLGDQPKAINSLAEGIKKGIKEQTLLGVTGSGKTFTMANVIEKVQKPTLVISHNKTLAAQLYEEFKEFFPDNAVEYFVSYYDYYQPEAYVPRTDTFIDKEASINDDIDIMRHSATQSLLSRDDVIVVSSVSCIYGIGSPEDYGEFAFGISVGDIYDRSEILARLVFMQYERNDIEFARGQFRVRGDVIEINPVHGTPPIRIELFGDEIDAISIIDKVTGKKQESLKRYMIFPAKHFVVGQDKMDEALSKITSELDERLSELNAMGKLLEAQRLEQRTRFDIEMLKEMGYCPGIENYSMHLSGRHWGDKPYSLLKYFPDDFLTIIDESHVTVPQIRGMYNGDRARKETLVDYGFRLPSAKENRPLRFDEFESSVNQVIYVSATPAAYELSKSRNVVEQIIRPTGLVDPEVIIRPVSGQVEDLLKEVKATAEKNERILVTTLTKRMAEDLTDYYARIGIKVRYMHSEIDTLERIEIVDDLRRGKFDVLVGVNLLREGLDLPEVSLVAILDADKEGFLRNETSLIQTIGRAARNVNGRVIMYADEMTDSVRNAYDITLKRRKLQMKYNEVHGITPTSTQRTLKEKLAEEDERYKIAGANIEKMPKDELRLLIKDIEKDMKDAAARLDFERAADLRNKLYALKGMDK

SEQ ID NO: 11120 - protein, 962 aa, Methanobrevibacter gottschalkii
MTEDSKKQIIIRGAREHNLQDIDVCVPRDEFIVITGLSGSGKSSLAFDTIYAEGQRRYVESLSAYARQFLGQMKKPEMESIEGLSPAISIDQKTTRENPRSTVGTITEIYDYLRLLFARVGIPHCPNCGKEISQQTLGQIGDSIIEEGEGLKIQILAPIVRDKKGQHKDVFEDLRNKGFVRVRVDGEIRELEEDIGLAKTYRHSIDVVVDRLKTRRDVDFKRRLVDSLETASEFSEGLITVLFTKDDEDYEKKYSEHFACVDCGINFEELTPRMFSFNAPQGACPECNGIGSKMEIDPDLIVPDKTLTLSEGAIAPWSKSSTKENYYYQMLEAVSEYFNFSMDIPFNELDKEYQNTILYGCNDKIPFTFKRRNKSYMVNRKFEGVIPRMERLYVETKSNYSRKYLSKFMSDRKCHVCGGKRLRPEVLAVTVGGKSIIDVCDMAIKDSYQFFQDLKLTERENFIAKEVLKEIKERLSFLVEVGLDYLSMSRSSGTLSGGEAQRIRLATQIGSGLVGVLYILDEPSIGLHQRDNIKLIDALKRLKDLGNTLVVVEHDEETILSADYVVDIGPGAGEHGGKVVAQGTPLDIMNNPDSITGQYISRVKKIEIPKQRRPGNGNFIRIVGAAQNNLKDIDVDIPLGKFTCVTGVSGSGKSSLINEILYKGVQGKLAKKFTFAGKYKEIEGLENIDKVIAIDQKPIGRTPRSNPATYTGVFTDIRELFANTPESKARGYKPGRFSFNVKGGRCEACSGDGIVQIEMHFLADVYVPCEVCGGKRYNEETLDIRYKGKNIYEVLEMTVEEALEFFENIPKITKKLQTLYDVGLGYMKIGQPATTLSGGEAQRIKLAKELSRTSTGKTLYILDEPTTGLHFADIERLLDVLARLTDAGNSVVVIEHNLDVIKTADHIIDLGPEGGDGGGQVIATGTPEDIAKAGTYTGEFLEKMLNENITPYAKELVEDIGK

SEQ ID NO: 11121 - protein, 402 aa, Methanobrevibacter gottschalkii
MVLSTGNTAWMLIATIMVLLMSVPGIAFFYGGLSKRKNVLNSMFLSLIAFAIVSILWVMYGYQFAFADLSFAGLIGIPKTLFMEGIGVGSLTGTIPTFVFAGFQLTFAGLTAAVVSGAIVGRMKTKAWVIFIILWATFVYIPICHWIWGGGWLMNIGAIDFAGGVAVEVNSGFSALALALILGKRKDTSLLPHNLGYSILGAGFLWFGWMGFNGGSALAANGLAGSAILVSNTAAAVAMIVWLLLDVLNDGKPTVLGAITGAVAGLVAVTPAAGFVSLSGGIIIGLGASLISYYAVFYIKSKFGYDDALDVFGVHGLSGVWGLIATGLFAAPSINGVAGLFYGNPEQLIIQLIAVVAAISYSFTVSYFIGKVLDILIGLRVDDKEEIMGLDSALHEESGYRI

SEQ ID NO: 11122 - protein, 112 aa, Methanobrevibacter gottschalkii
MKRIIAVIREEMFDPVKLALLAAGCEGMNVSTVKGRGRQTGIKESYRGSSYCIDLIPKTRVELIVNEEDLDRIINIILENARTGDIGDGKIFVSDVEEVIRIRTGERGSDAV

SEQ ID NO: 11123 - protein, 499 aa, Methanobrevibacter gottschalkii
MKELYEKMIDEAMAAQKADVSVVSKNRYNDFKIVDAKPYADAVSNMKALDNQAESVINLHKESVKNHYEILSSITKTLKCEDDPFIEHFQTPPVFEILCDEDGDFADSVDKFVQAIADAEALIAKESIRRYGGFYGPTCVVDFALMPGSTSNVVNQILKTVDIPVHHKQAILSAKSWGMNTSYGIGDAFAHAIEDGLTAAQATEKEIETLQMIYKTPIEGQGTLMDNANHSSFDVRDHMNKYKKAMTKSVKAAMDDGVHYGNIVTVPAYCVGDIGHHIGQSTYNMCKDDVIMAIIEATTGVIENSLRNNIDKFKTPFDVLKLSTGAPACATEFLLELDGFTAPMIVDLLNKRFHNYVQQYPTRGAAAELHNCDFMDMIYRGFNAMSNARKMRSSAGFEIIPRIKGMEIDFTPILENEVLMNPQRYTYPACAISVRFSSLMRLADYPCLLTSEPITATMMTNIIALDKKTPGSPVRGCKQCASACLADNTHEYCQWREAV

SEQ ID NO: 11124 - protein, 257 aa, Methanobrevibacter gottschalkii
MPCNIRKKFFAELLGTFFLVFFGTGSAVVTLLVSQSINPANVGIGVLGGLGDWIAIALAFGLTVMIGIYAFGRISGAHFNPAVTIGLLVTKNIPLVDSIYYIVAQLIGACLGSLALFLCLGAQAVTIGGLGATAPGLGIGYMQAMFAEFIGTFFLMMVIMGVAVDKKAEPGFAGVSIGMTVTAVIVVLGSFTGASINPARTFGPYLMDMILGGQNLWGFFPIYLVGPILGAICAAFAYAYLAKNSGVCELPQPFKDE

SEQ ID NO: 11125 - protein, 593 aa, Methanobrevibacter gottschalkii
MNKEIIAAVMASTIDMDNMSSDRLEALTKGHGMLNIAAICSANVIAEEVLRGVNLQLTDENIGELPIDDLLRKSIEAAENAGADAANAALLSATLCYFAGSNAQAGVPAGNRKLGAMARMIAGVDRCGVLAIPTPKANNRISGYAAVKAVYDEVFNNSLTPIDGSILPLGVGGGPLYGHNALGEDIGFSQLAINGAKAGTKGMLQAFANVGMPPSPIIAAILGVAAILEIVHPDSEVAEEYGEFFVANSAYVAGLGACEVAGLPEKLHIRGTGEEYDTANLVGDLGVIMKDIGGPSVVGMIAFEEMLSAFEESLDIGAGFSGGPLQPPLGHMTADAILALKVLLSTNGDIDQAAEKIKEIKTNFWLEPEIAKIATNTIARKSEQVRRGPVTRAMILATEGALTKETLRIAEFTQEKITEGMDLSDITKALDDEKLNNVCKAASSLFSGMMDKDIKIMITKYAGRSRRKENPFLDNYAGFDTNVDVEIEIEGEKIVMEKLANEIIPDAVVNKKQDVLEVLPLASVPVTELQLCGHTIVNVIVPAAVAGAMGVDESEVIAKKATKGAYITSSIPGGIERARDVAKRAANIMKDLN

SEQ ID NO: 11126 - protein, 282 aa, Methanobrevibacter gottschalkii
MFLIFVRGVLMGSADIVPGVSGGTIALITGIYGHLVEAISNIRFGFLKPLFKGDFDGFVNSILDEIDFKFLIPLILGIGVAFLTLAKVVTYCMDVYTAFTYAFFLGLIIASAVILFKKLNHINFKNILFALIGCILTFIFVSLNPIATNHSLLVLFISGMIAICAMILPGISGSFLLLLLGQYKYMLNALHNFHLSEIIVFVVGALIGILGFSKILNYLLKNHEEITMAFLIGVMIGSLRVPCVEIANSISINIASLFPCLIVAVIGFAIIIVLETRFDYID

SEQ ID NO: 11127 - protein, 858 aa, Methanobrevibacter gottschalkii
MIKKQWRLYPIGSPKGALNRKREPDFVGNIKFSRNGDVLSISRFVADYNFNDNSTLNEKLMPPGEVIKLLRSQAVFLATPDDDVEKFLRSLNIKVRKTQVCDFCAYEGDITIVNSSYSYKYHNQLICRNCAFDTIKQEIKLQGFDKKIFRNLKSTLEKTGNLEKTLSVLDPHFDPLGNTNLTLFDKTKKSKHIIPPVDMKRLKIPKNFKKVLLESGNTKLLPVQYLAIKEGLLKGEDLLVVSATGSGKTLVGELSGITKALKGKKFIFLTPLVALANQKYRDFKKKYSKLGLKVSIKVGRNRVKAKGELNLPDSDVSSSDIVVATYEGIDYLLRNGNSQALSNLGVVLIDEIHMIDDEDRGTRLNGLIKRLKNLYPKTQIIGLSATVKNPEFLASEFNMKLVQYSQRPVPLERHLVYTRNESQKRHLMRKLVQKEHNTKSKKGYSGQTIIFTNSRRKTHQIANYLNNKRVNAQAYHAGLSYYKKEIIEKDFDKGKISCVVTTAALAAGVDFPASQVIFDSLVMGNKWINPNEFSQMLGRAGRPSYHDRGVVYLMPEVGNDFAGESEEAKALDLLESNSEDVYIEYDEESSYEQILADISSNSIKSRNELNDFYENIDVPISLKTATDEMEDLGLIRYASSNKFEITKYGRATSVSFLSVDEAEFIKNTLNNKEYLNRYVAHSPMYKKKKKYDKLKVLVLAMALDLEMFENAYLSSVIHNQIANALKIKFSTRLFAESTLDIISSGEAIEKVDKKFQDALIALQSDFMQCKCQDRPFCTCMQKGISEVIIHERLKGKDPQDISNKLFRKYQIQVYPGDIFSWLDNFVKNLDAIKRIAKSFNRSNVVKKTSYLIKKIENG

SEQ ID NO: 11128 - protein, 139 aa, Methanobrevibacter gottschalkii
MKGCYCLIINVDSKKTIKIGKLGKIQFEKGYYIYVGSAMNSLMARIKRHLSDEKKLHWHIDYLLKNAEITDVIYNSSTKKVECELSEFIGSKTTGITDFGCTDCDCKSHLYYFKNRNKAIHCVLNAYDSIDIPCEFFKE

SEQ ID NO: 11129 - protein, 137 aa, Methanobrevibacter gottschalkii
MIFKLQTKGHKNVTSLHKSTFEITEDVEIGLAADCIIGTSMDKSMSDFPEEFKDKIANSNTKITVILDTENGHDEIVGFGHENLTLTHPTDMVSRTSDYTCSRTLMIKANKAARDLDDNLIEDLKNEKIMDVTIKLE

SEQ ID NO: 11130 - protein, 283 aa, Methanobrevibacter gottschalkii
MKAVIPAAGFGTRFLPATKAQPKEMLPVFDKPTIQYVIEEAVASGIDDILIVTGRNKRSIEDHFDKSFELEQTLQSAGKDDRLKQVRAITDLADICYVRQKEQKGLGDAIYCAKKHVGDEAFAVMLGDSITKGPTPCTKQLIDVYRKYGASAISLEAVPREKVERYGIIKGEEVEKGIYNISKLVEKPLAHQAPSNLAIMGRYVLTPDIFDRIDETEPGVGGEIQLTDALQKLDAIYGVIFDGKTYDIGNRLEWLKTSIEFALDDSESKDILIEYMKEMIDGV

SEQ ID NO: 11131 - protein, 421 aa, Methanobrevibacter gottschalkii
MQYRLIKKTGDEISSIGFGAMRLPLKNGKIDRTEARKLIFHAIDNGINFIDTAYLYGDSETFLGEILTEDIRSKVKICTKLPAINVKKYEDMESFLNEQLRRLNIDCIDYYLIHGVDLKNMNRLLKRDLIKFIEKAKSDGKIKYIGFSYHGPKEEFQTVVDCYDWDVVMVQYNYFDENVQASIEGIEYAASKNMGIFVMEPLKGGILAGNMPKEAEKVFRKSNPDKTNAAWALEWVLNNRNVTCVLSGMDSFEQLDENLAVANRTTPMSMTFEDLETVELVKRVMRNSLKINCSTCGYCMPCPQGVNIPECMKIYNEKYLFNHKGIANLYNDVYLFNPKGLINQSFIDYYQYVGGIMGNSGNAGKCNACGKCLRKCPQKLDIIAELEKVKKEFEFPGVKYMLLFVKHVGFPLYKFINKLLN

SEQ ID NO: 11132 - protein, 69 aa, Methanobrevibacter gottschalkii
MKLEELLAPCPKCGSKDKIAHRKMLDNHRAHAEMDTVKCEECGYIFFVNENMEEDEKKQLLNELNKIYG

SEQ ID NO: 11133 - protein, 370 aa, Methanobrevibacter gottschalkii
MIIPTLNCPSKCKYCWGSENKKEMMDIGIIDQIITWLSDFRDDKVHFTFHGGEPLLAGYDFYKTALEKLSLLPNLDGFSLQSNIWLLTDELIDLFVEYNVVVSTSIDGPKEINDYQRGEGYFDKTMARYEAAKNKGLLINFVLTVTDYSKDFSDELYDFFKNEKMNLKIHAALPSLRGDNADSWALEQEEHGKLLVEWLDKYLYDLDKFSIMDLDHISKSSLRRRGTLCTFADCIGTTFAVGFDGSIYPCYRFVGMPDYILGNVGDNPSFDDLKTSDAWVKLQEFRDYVDENCKKCKHVKYCEGGCPYNAIVAYQTPKAVDPQCRAYKMIFDEVSKRMNKEFARSAFGLGGSEPKGEGEAFSIMDLAMKH

SEQ ID NO: 11134 - protein, 682 aa, Methanobrevibacter gottschalkii
MIDEITDFLFGLKMTIVSGIFLLIAVIFMIFGVNTPIYLNPAWGTVIISGIPMLTLAMSRLIREKWISSALLIAIAMVASLLIGEVFAAGEVAWIMALGAILEDWTVERAKKGLKNLINLTPRTGRRIINGNEEMIFVNEIKIGDILRILPGESVPVDGEIVRGTSSLDQSIMTGESLPIDKEVGDEVFCGTMNMYGAIDIKATSLDENSSLQKLIDLVKAADEKQAPTQRIADKWATWLVPVALIIAVVSWIVTGNIERGVTVLVVFCPCALILATPTAIMAAIGQATKYGVLIKSGEALETLGGLNTLVFDKTGTLTYGNLEVSDVISLNEHLTDEDLLKITASCEKLSEHPLAKAIVNNANEVKIQIEEPEEFKMYPGKGVTCINSYGRVYVGNSKFLSENNIHINIDSQLDKLKHEGKASIIIALNGEVIGLIGLSDVVREDSKSMIDKLHDLGNETILLTGDNTETANYFAAKVGISRVYGNLLPHEKLDRIEKLKNDGKNVCMIGDGVNDAPALKTSDVGVAMGSVGSDVAIEAADIALLGDDIGKIPYLKKLSNSTLFTIKANIAISMTINAVAIVCSVLGLLNPVTGAIVHNAGSCLVVLNAALLYDRHFDDSVKIMDTESVEHSHYHFHNDGEHTHSHDHVHIINEIRTDNGIKHIHAHKHAFRRQICKTYHS

SEQ ID NO: 11135 - protein, 300 aa, Methanobrevibacter gottschalkii
MLTSVQKEILQTLINLYQSSNGKSIKGEDIAEVMGRNPGTIRNQMQSLRSLGLVKGVPGPRGGYKPTIEAYHSLNITVSDKDSKVPIFKNGNRVEDISVAKIEFTSVPQPSECEAAIKVLGSIKDLTLGDTISIGPTPVNNLGILGTIVGRDDMDNILLLDTKTIRSIPKQSVGEIASRDVISFKMNCTIKDAAKRLAENEIDGAPVMKDGKVVGVFTVSDLVHAIAEDKDNCTVGELMSTNLIIVNEDLKIANAIEVMLKKSISRLIVADNNQDLLGIVTRTDLINIIANLDQFPIITN

SEQ ID NO: 11136 - protein, 307 aa, Methanobrevibacter gottschalkii
MKVNQINVESNMNVSDLIDNFDASGVLGAGRVARARNILVDMIQDKDMNVFMSLGGPLIPGGMRNVVSKMIKEGHVNLIVSSGANLTHDLVEAFGGAHYRHEGKDDEELNEEGIGRIADINVGSDDFTIFETEITKIFEKIASKRKVISIQELLYEIGLLVEDENSFIANAAKNNVPIFAPGIIDSMIGLQLWIFSQDHDFTISAAGDMPYLSDIVFGSEKVGAILLGGGLTKHYTLASNVITGGLDSAIQITMDRPEAGSLGGAPLEEAKSWAKAKCGSNLASVVGDVTVIFPLIYASALDKINSD

SEQ ID NO: 11137 - protein, 159 aa, Methanobrevibacter gottschalkii
MKYSDDLFDDKKDLKFASVFGVLCAIASAGATIYSTEAAYIFIAILLGNLIALKVDGIHHIITLLLFVLLCLVFGIPELSYVILLICILAALGDEVGHELISKVTDNKFLNLFFEYRFVMKVVILLLAIGGVFSIWIFLCFLSFEIAYEFAGIIFERFN

SEQ ID NO: 11138 - protein, 81 aa, Methanobrevibacter gottschalkii
MANEVTKLVMETILGLITTAFAFVAGLAWNDAIQKLIATIIGTGDALPSLFIYAIIVTIVAVVVTVLLARVAGKMGIELGE

SEQ ID NO: 11139 - protein, 215 aa, Methanobrevibacter gottschalkii
MNIKNNLILALDVMNESDAIEICDSIKEYIDTIKIGYPLALAEGLEIINKLKNKFGFKVICDFKVADIDATNSKICDETFKAGADAIICHGFVGEDSVQACLNMANKHGKELFLLTEMSHPGAKMFLQKNADAIAQMGVDMGITNYVAPATRLDRLSEIRNIVGNESYIISPGVGKQGGDGKKTLEYSNAIIVGRSIYESEKPKTACKNLIESLK

SEQ ID NO: 11140 - protein, 221 aa, Methanobrevibacter gottschalkii
MHIMEGYLPLTWCIVWFVISFIIVAFGIYQIKKIVDETPESKALLAVSGAFMFILSSLKLPSVTGSCSHPCGNGLGAALFGPAVTAVLATIVLLFQAILLAHGGLTTLGANIFSMGIVGPFVAWIAYKGLTKANISSTIAIFFAAFLGDLLTYVATSFQLAFAFPAPTFSAALGKFLVIFAVTQVPLAIGEAILTVIIWDRLKAYKPKLLNKLGALAPNEA

SEQ ID NO: 11141 - protein, 95 aa, Methanobrevibacter gottschalkii
MKTSTLIILAVVCIILFVAPLAMYNGHGEDDGYFGGADDAAGEAIEESGFEPWFSSIWEPPSGEIESLLFALQAAIGAIIIGYAFGYWRGKGKEE

SEQ ID NO: 11142 - protein, 229 aa, Methanobrevibacter gottschalkii
MKFDMDYIAHNNALTETNPYFKLFLTIILLIVTLAFDNLYFDVTVFVIMSIVILTIAKINYKSYLKFLSIPMAFLVITCIFLIFFFGKGDVIYETGILGIVVTTDSWHYGVYTFMRVLGCLPCLGFLALTTPIAKILNCLRTLKVPKILIEIALLMYNSIFIFLNEIDTMQKAQETRLGYHSYWSSFSSLGALVSIIFLRSLDKSETLQYSLDSRGYSGELPVYEPKKR

SEQ ID NO: 11143 - protein, 280 aa, Methanobrevibacter gottschalkii
MINMLEVKNIKYSYNSNYQALKGVSLKVDKGEMVALLGKNGAGKSTLFLHLNGIYRPDEGKVFIDGEELKYDKKSLLKFRQKVGIVFQNPDDQIFAPTVEEDVAFGPLNLGLPMEEVQDRVEEALVRVGMSGYEKTAPHHLSGGQKKRVAIAGILAMKPEIMVLDEPTAGLDPQGVVDLSKLLRELNDEGITIIISTHDVELVPNYAQRVFVLVDGLLIAEGTPKEIFAKPEILEKANLKVPIVTELFQKLEDEGFDMEGNYPLTIDEAKDKFLKLLHEN

SEQ ID NO: 11144 - protein, 152 aa, Methanobrevibacter gottschalkii
MRIGICDTTFARFDMAGAAIDELKKNAYDLKIIRQTVPGVKDLPVTAKILIEEENCDIVMALGMPGPMKKDKMCAHEASTGLINAQLMTNKHILEVFVHEDEEDNPVELAKLAENRAREHAQNLIKMMYHRKAMRKEAGMGMREGKENAGPL

SEQ ID NO: 11145 - protein, 235 aa, Methanobrevibacter gottschalkii
MGFEVTEEDKKATYVILPAYNEATRIQPVIEEIAEKGYNMIIVNDGSSDNTLDVIKESQNKYPDKIFIYSHMINRGVGVAMQTGFDAVLRYNPRYIVNMDSDGQHDADDLENVLEPLIMGRAQAVIGVRPLKDMPLTRNIANAIMNLLTKVFYKVDVSDSQTGFRAITIDALRKININARGYLISSEFIREVNDNKIPFEEVEIRTIYTPETRAKGTNVAVAFKILIQMIKHRLR

SEQ ID NO: 11146 - protein, 115 aa, Methanobrevibacter gottschalkii
MLFYSILFPIISLIAIIWLLWRYLNEKDSLITVILWAVFLIIVSVFAIFPHASTTFAKLFGITRGLDFIIIIVFAVLVYTIFKLYYKIDKLEDNINKIVKEVALSNEISLKDKED

SEQ ID NO: 11147 - protein, 223 aa, Methanobrevibacter gottschalkii
MLYFRGCTAREKLNNIQSATEKLLKLADVDYHILDDEKCCGSVLLRTGFLKEAEDQIKKNTEILKGETIITSCAGCYKTLTEDYDGLDVIHISQLLDELIKEGKLKLSKMDLDVTFHDSCHLGRHCAVFEEPRDVITSVADIVEMKNIRENSLCCGAGGGVKSAYPEIADQMAKSRIEQAKETGCKTLVTSCPFCKLNLENGDLEVLDLTEFLVKYGGLNERQ

SEQ ID NO: 11148 - protein, 400 aa, Methanobrevibacter gottschalkii
MKDSELETMRNSFNTVKNRSNSLIESPSAKRLISRGREIKKYSIENNDELLNQVCESFKRNDVDFKIAETAEDALSIIDDLLCEYDCNTIAKAKSNTLGEINLKRHLANENIDVVETDLGDRILQLKKIDNKPVHPTGPASHLNVDNITDIVNESLDVNVNPVPREIMEAVRYDVLKRLENANVGISGANAIASEEGSIVMVHNEGNISLVSLKDLHIIVAGIDKIVPTLEDAISIVKLETIFATGNYVTSYMNVISGPSKTADIEKKLLKNMYGAERVVVILLDNGRSDATQECLYCIGCGNCVVHCPVYNAVGNEFGFNNYLGGRGVAMSKFIEDDETCYNSGLYMCTLCGLCTLNCPVDIPTNEIIENMRKLSADAGFYPKAHGIIKDNVSSKDSPY

SEQ ID NO: 11149 - protein, 237 aa, Methanobrevibacter gottschalkii
MLLLISPINREEALESIEGGADIVDVKNPKEGSLGANFPWVIKEIRELTPEDKLVSATLGDVPYKPGTVSLAAMGAHVSGADYIKVGLYGTKNHDEAVEVMENVVKTVKEISEETIIVAAGYADAHRVGAVEPMEIPKIAKDAGCDLAMLDTAVKDGHTLFDYLDLNQLKEFVDEAHGYGLLTALAGSVKKDQLKPLHDIGCDVVGIRGAACVGGDRNTGKIHHTAVAELKELCDSF

SEQ ID NO: 11150 - protein, 494 aa, Methanobrevibacter gottschalkii
MSFSKKVQEARMSYTFDDFLLTPNASYVEPKDIDTRIELGKGIRLNIPVLSAAMDTVTEADLAIAMAQEGGVGVIHRNITQERQVEEVKKVKNAEDLTIRDVITITPDSTIADVQTKMQDELISGLPVVEGDKIIGIISKRDIRPVLKSEPDKTVKDIMTSDVVTVEEGVSAEEALNIAYENKVERLPVVRDGKLVGILTIKDILNQAQYPNAARDKNGNYLVAAACGPFDLDRAMALDQAGADIISIDCAHAHNMNVVKFTETIKDNIDAELCVGNIATAEAAEDLISMGVDALKVGIGPGSMCTTRIVAGVGVPQLTAISDVADAVEDTGVPVIADGGIRYSGDVAKAIGAGADAVMLGNLLAASLEAPGDIVVMNGKQYKKYRGMGSMGAMTSEYDGGADRYFQGQKSKMNHTKYVPEGIEGAVPYKGTVAEILFQLVGGLKSSMGYCGAKDIAAMQEKANFVRITSSGIKESHPHDLLITNESPNYPTLD

SEQ ID NO: 11151 - protein, 89 aa, Methanobrevibacter gottschalkii
MARTKKVGITGRFGARYGRKAKRSVKIIEENMKKNHVCPKCARPYVKRQAAGIWKCRKCGAVFTGGAYIPQTPMAKSATRNIRDIKVEE

SEQ ID NO: 11152 - protein, 43 aa, Methanobrevibacter gottschalkii
MYRCPSCGAEVDHKSYMENKCPKCRYRILFKNVPETTRIIKAR

SEQ ID NO: 11153 - protein, 161 aa, Methanobrevibacter gottschalkii
MLISTSRKPSQKTRKFCKNLAHATGSISVNRGKMNMRELLIKALEVEEYNLAIVNEIKGNPSRISFYSNKGKLLLTLIIGASEEKEKMNIAPSQLKIVSEVKELNILSEILDMDLVDNAESNYILISEDEDSLANINFINKFGDMNNFKINVKKILEVSND

SEQ ID NO: 11154 - protein, 88 aa, Methanobrevibacter gottschalkii
MIDESPLERVRSNIVIEFEDNAQAKIIYDSIILEFSTAPDFRSSMTIDLDESNIIINIDAEDSTSFRASVNSAIKWIKLALEINDLTN

SEQ ID NO: 11155 - protein, 115 aa, Methanobrevibacter gottschalkii
MEIPENIQQQLNQFQQLQQQAQAISMQVQNVEIQIQETEKALEELKKTDESTEVFKQAGTLLIKVEYADALSDMEDKLETLGLRKQTMSRQEERVMKKLEEMQASIQSVMQGMGQ

SEQ ID NO: 11156 - protein, 94 aa, Methanobrevibacter gottschalkii
MSKLKTLSQDDLSSISDKFGEILEKEISKSISMKELEDLDLDIILNYENEQLDVDVNVGVLFDELSEITQDQVMQSIDEAYLKFDSYIDDNFRM

SEQ ID NO: 11157 - protein, 229 aa, Methanobrevibacter gottschalkii
MIKKIPVIDLKQHQAVSGKSGMRDKYQPLKTVFAKSANPVEIAQGLKLNGATEMYIADLDLIESVGHNINDIKMVNTILPVIFDGGVKNCEGFEFFLNYAYKIIIPTETLESIDEMRKIFEKYPKERIVISVDVKNGELLAKHLNLNLSEFKEILKELDPNDIIILDISSVGTERGYNKKLLEEFGDLKEKLIIGGGLNKDSLVELESLGIKKVLIGTSLHSGEVKLLD

SEQ ID NO: 11158 - protein, 59 aa, Methanobrevibacter gottschalkii
MAIVGTTIFSHILPVICGFFGIVMIISGSLEKSNSKLGLGIVLFIIACIFPYLILSVLV

SEQ ID NO: 11159 - protein, 282 aa, Methanobrevibacter gottschalkii
MRIDTHHHHKKAGENLAFVFFMNLTFNIIVIAGGLATNSMAILADCIHDMSDTISIAFAWFLEHVAQKDSTDKYSYGYQRFSILGAVIISIFVIIMALLILQEAIPRLFAPESVDANGMLLMAIVGLVFKSISVYRLHGGETFNEKAILLHQLGDVLEWITILILSLVLMFWDGAPYLDPFVSIGIALWLIFNLGMNLYKSVEVLLQKTPNHFDVKEFKVNVLNIEGIKSFDDFHVWSLDGIDSVLTLKVSIDDWNNQEKIKNDIYNIASKYHIVDITIEFD

SEQ ID NO: 11160 - protein, 294 aa, Methanobrevibacter gottschalkii
MVEKGTDVLKEGFAKMTKGGVIMDVVNAEQASIAEDAGAVAVMALEKVPADIRAAGGVARMADPTIVEEVVDAVSIPVMAKARIGHIAEAQILETLGVDMIDESEVLTPADEEYHINKKEFTIPFVCGARNLGEALRRIDEGAAMIRTKGEPGTGNIVEAVRHMRMVMGEIRTVQGMEEEEIWKYARKIEAPIDLVKKTAELGKLPVVNFAAGGIATPADASLMMQLGSDGIFVGSGIFKSNNPEAFAKAIVEATANYDKPEVLAEVSKGLGQAMKGIEMSTLTEADRMQDRGI

SEQ ID NO: 11161 - protein, 270 aa, Methanobrevibacter gottschalkii
MTLVIIGPVTQDLVVIGEKSTHKIGGATYFQSFVFEKFYNDYLAIVNCSDEKIANEFPSKDKVKVILKEFTHFFINNYPDVNNKDYREQLSNFVQIPIFKSDLEKILPKKIDGFVINPLNRHDFPIETIDYLKSFNVPIFISIQGFLRIPDVEVNGKYAIKLGTFDKLSDILEGVSSIFLDEGEANITGIDFDVDEVVITDGSNGSRIISDNHETKINAVKCENIADATGCGDTYMAAYISKRLNDYSIRSSGEFASDISSKKLTKFGHY

SEQ ID NO: 11162 - protein, 194 aa, Methanobrevibacter gottschalkii
MVKIGILNLQGAVSEHYNITRKAVKNMGVDVEVESVRYAEDVETCDGLIISGGESTVIGKLIKQRGIDKVIKENNIAVFGTCAGMVLLSKKTDFNQPLIGLMDIAVKRNTYGRQKDSFECPIDIFGKKYLGVFIRAPALDSYNHSKEDIKVLSVLDDEIIAIQQGPHIAISFHPELTEDTLIHEHFIDGVINRS

SEQ ID NO: 11163 - protein, 2391 aa, Methanobrevibacter gottschalkii
MLNKSSNIIEKEFKNLRKELLDLTLRNQLLNFKSRAKTITIVNQTPVNLFQTLVLQDNKMYFVANKKDKKEDKSSVWDHIPFDFSKFSEGDKKLATELTPKELQKRLYYINNQAKTMLQEQGYNILYLAIGFLEWTDKSKPKQRNNAPLVLIPVAMERKKVGESFNLEWTGEDIQTNISLKAKLLEAGIDFPDFEFKRYGEVIDHYIASVRRSVSKMDGWTVNNNVALGFFSFTKFVMYNDLNPEAWEDNVDLTKNELIQAIFNPAKNDHESFREEDIDSRLEYQNMYQVLDADSSQIAAIQDVKAGRNLVVEGPPGTGKSQTIVNLIAELLAEGKSVLFVSEKMAALDVVKDRLTGVGLGKFVLELHSHKTRRKKFLKELQKATNVQSQEPLNIDQTIRKLETLRRQLDDYSQIIHKPVFAVNLSAFQLYGMKESADDHFATKNALMPLVRFDNPESITLKDLDDMKIALENLAELYQTISKENPWSKCSPKSLLPADLREIEMLIGDSLYALDNFLVERGRVYDIYGIKKPDTLNEFQNSLSAFEIIKSQNAELIDGNILKSGAWNNNNDDAFKLIQELQRYQKYAETLTKFNQSIFQADIDGLVYELRNISNKKFRFFNNKQHIELVERYYSIPVSGSVDDIIRELQEAKTIINIRKSLEANNALGQKYFGGYWHLNANIDDLNAIAKWMHEFTALVHEGTFSENTIELMSKDLFDIKPERDLSDYIDAGEEFVHVLSRLKDKLNPRSKLIFKRETGDVPFESWKEQLYNWRGQLSSLHLWSQYLNTKNSLKSSNAKMFVDSIEKRNIKKEDIEALVDGNFADSLLNILFVENQELATFVGELHENRIREFKDLDKQILVLNRKRIYQKLNSNIPKIFGGTENPQAKILAGEFTRKSGHMPVRKLLEKTGGMIKQIKPCFMMSPLSIAQYLDPTNEELQFDVVIFDEASQVKPEDALGAFMRGKTAVVMGDTQQLPPTSFFDQMSDAESDEEEATSLDMESILHLCKLSFPVKMLKWHYRSRHESLITVSNREFYDNDLLVYPSPSHNDPELGLKFHYNPNTAYHRGSSSANPLEAQDVVEEIFNHFEKYGDTKSLGVGTFSVAQKNAILEALEVKRKERPEFEPLFSDNKDERFFVKNLETIQGDERDVILISVGYGYDQDRKMSLNFGPLNQNGGERRLNVLITRAREKCVVFSNFKAYDMKLTANPPYGVKSLKEFLEYAENLTLGTDNQDSYTREPFEDAIASFLEENGYTVDRQIGCAGFRVDLAIVDDENPGKYILGITTDGKMYSSSKVARDRDRLREQVLSGLGWKLYHLWSTDWYRNRDLGRKKLLDFVQKSIRQTREEEKRKSEEEKKLAEKRRLEAEKKAEELRIAREKEEAERKAKEEQETNNEINIGDIGPADFVEVEKVDDGDFLEKPIDVSSINPSEFFEEEPSRNSINEDKTTKETPSEFVSIEHPDKDVDFKNNSSEVANQYSSDDESFEVRNNDFKDIESEHPKSDEDDDEVKIESLDDLNADEYNEENESYEEIHKENTSKVMENDEDYSDESDSISKKLSDKFKSILKSDGQEQEENTHSFFSSSKFAKDLGKNSDLNDEKSFEVNDEFDSKINEYTDNEILEENPVDLDSKEDTSVNEEDTSDFKTPKFSNKIDLESDDFIVVDHEDNEVSKSSSENIENDDFIVVDHDNDEVSKSSSENIENDDFIVVDYEDNEIDENQKYSSVGSDLDDEVIMDYNEVPKNKSYSDKTEDISNETTDDKVDLDPEEDYIYVDHSHDDERVLDEDDVEKFSFKSDEISEEPEFEVDKKPQGQKQYHRKGSTFVKSIISDVVMGESHLEQEEVETVKGEIIEEDEDYDYKDAPSDDSVVEAEIVYDDEELNILNDNLPDDALEKPTPKHVYDDEELNIFNDNLPDDTLEKPAPKRNHDIENDDLDKPTPKMDYTEGDELNIFTDDLPDLNKEEINRNATDIVTKAMEEFLEDVFENDDDIEKIELENEIKEDIPQDNEMVIEDKGITEHNIEETSNDIGDGVTYYQGSNDVRSKLRKNNFYYEEEKPKSVRESIKGIKKDMEYINKSLKEIENPTKIDYVSVVDRTEEYDPMDYLNIPSDDDSDKIIEKEEELTFAEKEELRIEKEMMMDDLKKEIKEEKDVIVPVHEQDRREELKDQALENIILSANEDYKEIERERRRKDNQFKSFDDNKLPGKRKMEDEIVDYVHIEDIGLHSSDELYRQSIDKIAKSINDIVDIEGPIHVSEVTKRVKESCNIKRAGANLKKRVNEGISEAEKLGYIIRIGNFLYDSSNNNIVIRKRNKPNIELISDEEIAKSIETVLLHKQNVTTKQIAKEASRNFGFKSTSKKTATRINSILDLMIANNKVKLDKDIVELK

SEQ ID NO: 11164 - protein, 583 aa, Methanobrevibacter gottschalkii
MSTKVKSPDNLPNKPGVYIMRDNTDTIIYIGKAKNLIKRVKSYFREKLDRPKTQVLMSHFDSLEYIVTNSEKEALILEANLIKKHRPRYNVQLKDDKRYPYVKITDEEFPRLVITRNVTKNGVYFGPFTDVGSVKQTVKFLKSLFKIRTCRNMNGPCLNSQIDLCYAPCDGRISKKEYSEIINKIDLFFQGKYSTIVKNLKKEMADAAGKEEFEKAAVIRDQISSIEEIMEKQFVDLVDDDLDQDVIAMAMGKNEVVVIIMPIRNGKIVGRDDFLMSGSKYDSPSEVMFSFIQQYYGYNRHIPKQILLDEDINDKKLLEDWLSDLRGNKVRIKIPQKGVKLRLVKMAKKNAEIIKHQKKKMENSLIELKKYLKLERIPHVIEGYDISNISGKFAVGSKVSFKDAKPNKKMYKHFKMETPGPNDFAMMEELLTRRLKLIDSDPEPDLIVIDGGKGQLGMACGVLEKLNLTHIPIIGLAKEFEEIYIPNSKRPIIIPKNNRALHLLQQVRDESHRFAITYHRKLRSNDIQASSLDDIVGIGKKRKINLLREFGSVDNIKEASIEELAKIDGMNLKTAKNVYNYYH

SEQ ID NO: 11165 - protein, 179 aa, Methanobrevibacter gottschalkii
MVKCPRCGYENSSTAVYCDNCAYLLTDSEGNRIDNSPRVSSWNISFAKKIVIVLGIIVIAMLLFSFIYNNTQPSHEDSLNLITDNGTVHKTASYPYKAVIEYEGSWGAKMGDPNYLVSEDGYGTKSFVLDCAAWDRVSISAQKYDYGEGELHVKLLRNGEVVAENSTTNVTGAVVVNYN

SEQ ID NO: 11166 - protein, 101 aa, Methanobrevibacter gottschalkii
MIKVASEDKIQEYQNILEEEKLMIETHFVNIERILKEPEKIEKDKIFALMNSYNTLNIQYEQLCSDLIEFIKIFKGSDQEIRLYKTDELINLLESKINQMD

SEQ ID NO: 11167 - protein, 567 aa, Methanobrevibacter gottschalkii
MIKVENVSKDYELADGTKITALKNVSFEVKEGEILGIMGKSGSGKTTLLRALRGVEHIDNGIIEVGKAKVTSESSQFYYNNLKKETAIHLQRSFGIWPDTVRENVLRKLYARRYFDEGDTNFEIAESEFGKEADELLELVSLTDKQDHYASVLSGGEKQRLIMARQLAKQPKALLLDEPATMACPKTKQEILDAVKKINKELNITVVVVSHLPDVQKYLADRVILLENGEIAEEGSANEICDKFMDEMDDIVDIDNIATDEDVIQVNDIYKRFFLLTGGEVLQIEDVNFTVQKENILSIIGPSGAGKTVLLRMLGGLEDPDEGEVLYNVDDEWSDIDIPGMGRMKIRSKLGFMHQEFALNHYSTVLNQLATRLGYKNQNIVKEAQQRARKIGLSEELLDSFYLLTDLPEIEARDRLKKVGLDSDILDDLFPRFPETATKEAVADIFESLDLDMSILHRKSYELSGGQKVRVMLALILVSRPKFLLLDEPFGDLDPVTLRDVTNALKKISKDYGITIVMISHNTDFIKELSNRAVFMDDGKIIDDSEDIDKIVDNFIDFCHADYLKGE

SEQ ID NO: 11168 - protein, 141 aa, Methanobrevibacter gottschalkii
MFDIIAVPVDGSDYGYKAADVAIEIAQKFNSKIAAVHVLEEFSFSSYDSEEDEGNSILSKITKKANDVGVEVTEHLLTADPLRDMKFIVDQTRADLVVIHAHGSNNNRFVSFEENNVSDTQIGSVSERLLRTSEVPVLLIR

SEQ ID NO: 11169 - protein, 55 aa, Methanobrevibacter gottschalkii
MIVKDWCSFCGECAGVCPRNLIQVREYSLVFNDDDCKDCNTCIKACPIDALEKED

SEQ ID NO: 11170 - protein, 392 aa, Methanobrevibacter gottschalkii
MIETDVIVVGSGPAGSSAAKHAALGGAKVILMDKKSEIGSPKRCAEGVSIQGLEKLGIEPSPRWVTQEIQGVRIQTPDGTDTWLTKDEVKLPEAGYILERKVFDKHMAMDAARAGAEIRIKTLVTGIEKIENGYLVFTESMGKEEVFKCKVLIAADGPEGHIARWAGLRPAAKAKEMESGVQYEMCNVEFEKPGVIEFYLGSCAPGGYVWIFPKGDDIANVGLAILPHKAEKTAIEYLDDFVAKSPYLKNAQAVEINVGGDPVGGMTKKLYDDNILVCGDAAGQVNPLTGGGIISGMTGGMCAGQVAAQAIKEDCSKKFLKQYDEMAHAELDHEIKRYKKVQEYLLTLSDEELNEIAHAFEGETFEKISTTEIVKKLIKLSPKALLKLGKFI

SEQ ID NO: 11171 - protein, 322 aa, Methanobrevibacter gottschalkii
MILITGGAGYIGSHTNKALHNAGYDTVVVDNLCKGYENFVKWGNFENYDFGSKTLREVFEKYDIDGVIHFAAFSSVAESVEMPQKYFKNNYKNTLNLLQIMREFGVNKFILSSTAAVYGNPDKVPITEDQDLKPINPYGHSKFITEKALEREAEKNDFNFVSLRYFNAAGADFDCEVGEFHDPETHLIPLVLDAAIGKRESISIFGDDYNTADGTCVRDYIHVNDLADAHIRAYEYLCDKNESNIFNLGNGQGYSVREVIDMCKKVTGRDFEVKIDERREGDPDILIADSAKIKEKLGWTPKYNLEQIVESAWKWHKKINVI

SEQ ID NO: 11172 - protein, 297 aa, Methanobrevibacter gottschalkii
MENESHESKIDVRIIVSGLDIAQLVSKAVNNIHLENDYNIVVSSIIPTVELSIVKKVASGADILLIGGYGSDETYNILFNELKTDFNHIGLFDYNNIIVEDESIDFKLAEKEILNSIIKSTLSYSLNLINVHTLENKLMKVTHNYNNLLDDYNQVLKENEVLSQENNELMEDIKELKSDFNAFKLRYEDIYSKEILEIFSLDDLWQETFRQDLLDGDRIVIATDKFKPDDILVGQGFIASQSKEKAIEWLKIIRTALIFVDDNAGDLKKESGIGEEENIPEDKDDYDMSNTFENFWD

SEQ ID NO: 11173 - protein, 473 aa, Methanobrevibacter gottschalkii
MQGEIEDKCGIVGIHCPDESKNVASFVYYCLYALQHRGQESAGIATFNPEKGLNYYCGMGLITDVFKDYEIQNLKGNMAIGHVRYSTTGQSRLENSQPFVTDFDDGFIAMAHNGDIVNSAELRNELVKEGYEFKSDTDSEVICYMLKREHYDNNKNIIDSIESVSKKLVGSYALTILVNGDLYGVRDPMGIKPLAVAKRGDEFILASETVAFDVINAEYIRDIEPGEVVFFENDEINSHMLEIAGDCKISHCMFEYVYFARPDSTIDGINVYETRMNIGRQLHELYPIDADVVIPVPDSSIPAAIGYSRASGIPYGEGLIKNRYVGRTFIMPTQEERELAVRLKLNPIKDAIKGKRIILIDDSIVRGTTSKKLLDLVKEAEPAEIHFLVGCPPVISPCFYGVAMATKKELIAANYSIEEIQDQLEIDTLGYITIESLIEAIGMSKDDLCLGCINEEYPTEIPEGLEAETYYKP

SEQ ID NO: 11174 - protein, 415 aa, Methanobrevibacter gottschalkii
MVELLAPAGNFISLRAVLENGADAVYFGLDDYNMRANAKNFSLNDLKEVSKIANEYGAKTYLCTNTILNERLACSLDNKLGDIASSEIDGLILSDIGLIENTVSNGLEAHISVQQNVTNSYMLKTLKKLGAKRAILSRELSLREIMDLAKKSPIETEIFVHGAICMAISGRCFLSYGLYGRSANCGDCLQPCRKNWTLTYEEGDDNVINFSDAEEESFIITSSDDGSYRTNFFSPKDLCMIEYIPELMKSGVASFKLEGRARSPDYGAMVTGVYRQAIDSYIADPLNYKVKEEWMEELENVFNRGFDTNFYFNTPFEISEDNQSKYIKKDIGQVVNYYNKVKAAELRIWDDLKTGDKIIIQGKTTGSITHTIDSMQIDGKSVSSVKKGSNVAIAIPTKVRENDFVYKLVERNVDD

SEQ ID NO: 11175 - protein, 264 aa, Methanobrevibacter gottschalkii
MIKKIAIYGKGGIGKSTTVANLSAVWGSDNLKCIVIGCDPKADTTRTLHGSRIPTVVQTLKDNRKPEREDLVFRGFKDILCVESGGPEPGVGCAGRGVIVAMKRLENLGVFDEELDVVVYDVLGDVVCGGFSVPLREKYADEVLIVTSGEYMALYAANNIVKGVKKLKGNLSGIVCNCRNVENEEQIVNDFAQRIGTHVIGTIHRSNLIQDAELDAKTVVEKYPESSEAQEYRDLASSIMSNEKISTPEPMDDEEFESFFKSYL

SEQ ID NO: 11176 - protein, 159 aa, Methanobrevibacter gottschalkii
MYYSTNYNSPIGEMLFVSDGEAVCGIWFCNQKYFKNNIDKTVRKDDLVIFIKLKKWFDDYFNGLNPKIDFKLKPQGSEFRQKVWKILCEIPYGETLTYGDIASMISPNMSAQAVGGAVGHNPITILIPCHRVLGANGKLTGYAGGLDRKIKLLKLEKIL

SEQ ID NO: 11177 - protein, 179 aa, Methanobrevibacter gottschalkii
MNLPLNIVIGNAISLIAGIFILFSMWVNDEKEVYKHQFSNAFILTISSAFFFSWTGVVTMAIAASRNAMVYKDRLTFNWTIFFIIVSLTVGCLVNTMGIVGLLPIIALVQITLSNYYLKSIKAIKISFIVNSIIYIIYFFAIWDFSSVAIESVTVAVGMISLLRLINLNKPIFCNNEVS

SEQ ID NO: 11178 - protein, 267 aa, Methanobrevibacter gottschalkii
MQSNISEELEMKFPPIVLIKSNTKPKDVKEPKPGKGGCVMSFVAQTIAKRITTCFGREHISCGGISVGFGWGDGFRDENAMDFQASFLSCGVDSAPNKEKYLEKLSHMSKPTREMFEHGERIYSDFKTAKENIKSRPVYDSEDYVIFKGLENLNYGEIPDSVIFTVNPIELTALIQINTSFRLKDTYILTPQASGCQAIGCFTFREDESDDPKPVLSPIDFAGRSKMKHFIPNNYLIVSMPWKLFLKLEEVSEKSVLQTGMWKKFID

SEQ ID NO: 11179 - protein, 141 aa, Methanobrevibacter gottschalkii
MFNSDENNTIKVVVDYVKECSEYDLSEELYNKIELMPKIEEKIGITYEALSIRVLYLEFLKNYSIYVYGDIVENNKETLNKLGPYRKIETNVNLYDENGRIIETAQHEFAVKDFLGMHTFKVSFNNIKSIDKIDKIRIFPT

SEQ ID NO: 11180 - protein, 180 aa, Methanobrevibacter gottschalkii
MGDIMITFEVDSQLNENCGIVLRNLSFNSEISNSEEYKCNVYGEFSLKNHEDYDNLELKSIFYDDESNIINIERDYINLDGFLGSGTFDFWVYLNKDKLIKTHKIKIIPSKLRRKILKRSVCNNKISIESENLSININLKKDYSEVEKRDRKKELIKDIDETIDALSKSDEIINLINYYD

SEQ ID NO: 11181 - protein, 60 aa, Methanobrevibacter gottschalkii
MEKYYESIMKNLEIYRNIANFVSNFNIYGTSEGKYLIILWQKTVGLKTEKSHNKLAVPKL

SEQ ID NO: 11182 - protein, 285 aa, Methanobrevibacter gottschalkii
MRKISILVLLLILVGMLIPTGFATDSNVVITYGETTYSNSNYKSFVDNFFVNQANVDINNVGVKTITADQVNQVSSGITGKSYNSNQILSSALVDLNDNGNLKVSVDKSKITTITGDMYISALKSAGITSGHVYVTSPVQATGESALAGIMNSYEEVTDVQIPDSVKEAANDEIYTQAEIVNNSGVNADDLSNLVNQVKDEVSGGNVTNHDEIVNIINSHVENNNINITNNDIENLADSIEQVQNVQGDVNYYKTQVNEFLDDNSTGGFSLDGLFDWIKSFTDGI

SEQ ID NO: 11183 - protein, 202 aa, Methanobrevibacter gottschalkii
MVVKHCPKCGNDIDDEDIEFCTECGHKLSNKIIKNSSKGFFDNLNEKTSFSVIIFSFIIFGVFLFIGSVVWSSFMANGSIDLVTYLLLVIVFSVFFGGIFVGYFGCMDESYIIPNFSIYLGSIFSVVLCGIGLIFTFLMGVISILSSIAPFGSSNSISQTSTSSYAQSVDLSFIFKLVLFILLIPVASYIGVYLGYFLKKNI

SEQ ID NO: 11184 - protein, 151 aa, Methanobrevibacter gottschalkii
MKVRKILVMLLILVTLGFTLNAVVASSPDPIKLGDIKNDDLVITEVGQNKLNFEYSVEVDISDLSSEDKKLFEKALNNNNTSFILNLTSSTPTKIAITMHSLPKKAEIIGNTLYIKNNNMFRLINGIQLDNLKISAVSFNTTSGQLFIARK

SEQ ID NO: 11185 - protein, 318 aa, Methanobrevibacter gottschalkii
MNLGKLVGNTPMIKINYEYGGKSGSIYSKLEFYNYSGSIKDRIALYIIETERKNGNLKEGQAVVEVTSGNTGIAFSAIGALFGHEVHIFMPDWVSLERRKLIRMYGAHVHLVSKEEGGFKRALELAEEFAIKHDAYMPLQFDNKLNIEAQYITGQEIIDEIPDIDAFVSGIGTGGTLMGIGKKLKENNPDFKLYALEPSTLSILKMGMEEGTHMIEGIGDDFIPGIVDKNLIDDIVLIDDLDAINMSKRIAKEFGLGIGISSGANFLAGVLINTSDIKIATVFADDNKKYITTKLSEEIDDDPNLISNKIKLINFEVI

SEQ ID NO: 11186 - protein, 294 aa, Methanobrevibacter gottschalkii
MVQYCRKCGKELEDDAEFCDGCGFNLNNHPTEDKQELNKKIKQTSQKDKNDFITKLPLSLAIISIIVVIAEGLGTPMIMGWDNIMLAIAIGIIGGIIGIILMEKIDEPLIASVEFIATGALVYSFIGRFGDISLIIFIITAILTLYFKGHSANNKKLWTIPILTIVLLFVLLIASGALYQINAENSVIVGNLSQNITNDGYGYYNGYVTGDIKVDSSFDYLCVNVNFLDNNGKVIDSTIGWNDLNPQSGKTYKISAWYFEQQAPEKAEISVVDSADSTTPLYTENITISTSSGV

SEQ ID NO: 11187 - protein, 907 aa, Methanobrevibacter gottschalkii
MSTQSEAVLENNLIKRLSENGYEFVKIRNENDLLANFRVQLDKLNKCKLTDEEFNKVLLFLDEGSIFDKAKKLRDHYYIDRKDNPFYIKFLNQKDWCKNIFQVSNQITMESKHKNRYDVTLLINGFPLVQIELKRRGMPLKEAFDQITRYTLHSYKGLFNYIQIFVVSNGINTKYFANGLKNDLQFEFTFYWKDEKNNNILSLDDFANTFLEKCNLAKMISKYMVLNESSKRLMILRAYQKYAVEAVIHQALDIKQNGYVWHTTGSGKTLTSYKVSQLLAEDESIYKVIFVVDRRDLDIQTNKEFNSFCDGCVNTTKHTGALIKNLTTEGKGKLVTTTIQKLSKAVKTAGDKVKLQKIKDKKIILIFDECHRSQFGEMHNVITEFFSNSLSFGFTGTPIFAKNSDGTRTTKDIFGKKLHEYVIKDAIADNNVLGFSVDYVGGAKSHTDIDKEVKKINTKEYLESDNRLNQIVDYIIESYDSKTRNREFNAMFTVSRGGVIHNYYELFKKKKHDLKIVTIFTFKANEDLSENEHSQDLLDKYILDYNKMFETNFTSDDFKQYHADVSKRMKNREIDLLLVVDMFLTGFDSKLLNTLYVDKNLQYHGLLQAFSRTNRIVNKRKSQGNIVCFTNLKDNVDEAIALFSDPNAIEDIILPPYETFVKWFNEDLKRLFKLVKTATEALDLQSENDKKKFVLIFRDLIRNKNKLDIFTEFNWDDVKIDEQEFNDFKSAYLDIYDEFKKDNEDGESVLGDIDFELELLRNDQINVDYILNLLADLDKNSTSFKHDKQRIISLMKEHENLRSKIDLIEKFINEKLGNIDSKVTNINEEFDKFMKHERKQAMCEIVDEENLNEDVARQIFEYFEFSGKIDEELIKQSLVEKLKFKERKAKVNTIKFKIFELFEKFDY

SEQ ID NO: 11188 - protein, 184 aa, Methanobrevibacter gottschalkii
MIVKKLEDIAEVFSGVQISRFIDLNENKFPVIKNKFVEDEILDYHYENISKNINKKYYSKKGDIIISLSQPNTVSLLQKEGFIIPMYFAIIRLNEGYDSSFIYHLMNSDLFHNKLHVLLEGGTLRVIKVADLKKMKINIPNFEKQNDYGKFLDLIDKKCKLLNYKKSCNEKIKEYLIQTQLKGE

SEQ ID NO: 11189 - protein, 514 aa, Methanobrevibacter gottschalkii
MSDYQNNLESKLWAIADELRGNMDANEFKNYILGFIFYRYLSEKLELHMNEELKEDELSFTEAWDDEEYKDDLMDEGISSLGYFLEPQYLFSTVIEKAKVNDFILEDLIKSLNYISNSSIGTDSQDDFSNLFEDVDLNSSKLGKSDDDKNKLISKILLNLNDIDFKLGDDESDILGDAYEYLISQFASSAGKKAGEFYTPQEVSKILAKIVTLGKKKLRNVYDPTCGSGSLLLRVAKEVEVGDFCGQELNQTTYNLARMNMILHGVKYVDFDIKQGDSLKYPQHIDMNFDAIVANPPFSAKWSGDKSFLDDERFSAYGKLAPKSKADYAFVQHMIYHLEENGTMAIVLPHGVLFRGAAEGTIRKYLIDEKNYLDAVIGLPANIFYGTSIPTVILVFKKCREEDQEVLFIDASNDFEKVKNQNKLRSEDIEKIVNTYANREEIDKYSHKATIDEIRENDFNLNIPRYVDTFEEEEPIDLNEVVSELKMINEEMKKVDAEIKKYCDELGIEAPIFD

SEQ ID NO: 11190 - protein, 374 aa, Methanobrevibacter gottschalkii
MSEERLVPKLRFSGFSDVWESYKIGDISKTYSGGTPSTSKREYYEGDIPFIKSGEICKDKTEHYINEIAINNSSAKKIKKGDLLLALYGATSGEVAISKIDGAINQAVLKIDNNMDNYFQYNYFLKYKDKIVHKYIQGGQGNLSANIIKKLEFKFPKLDEQKRISQFLLLMDKKIDLLENKLQYYQDFKKYLMQRIFTQNLRFDFDNVKLKNISKINKGKQLNKDDMVETGIFHVLNGGKEPSGYTNAWNTPENTITISEGGNSCGYVNFNTEKFWSGGHCYYLDNLAEKVDGYYLYSYLKFIEPKIMRLRVGSGLPNIQKGDIENIKVKIALPTEQQRISNLLYSTDEKIINIANQKDNFELFKKGLLQQMFV

SEQ ID NO: 11191 - protein, 386 aa, Methanobrevibacter gottschalkii
MEFTDNWQTYKLGDILTFYSTNSFSREKLNYEFGNVKNIHYGDIHTKYPTIVSLQNNKDVPFINEDIDLSKFNEDQYLQDGDLIIVDASEDYDDIGKAIEVMNVNDEKFLAGLHTILARDEKNITVNGFKADLFSTNTLKTKIKVIANGISVLGISKKNISKLEVKIPSKREQQEIVSFINTIDRKIELLEEKHQYYQDFKKYLMQQIFTQNLRFDFDKEWENIRLKDFLKSSSSSLSLNDLEENHGEYGLYGATGIVKLINFYEKTEPYLSIVKDGAGVGRIFLCEPNTSIVGTMQYLTPKEGVDLEFSYYLLNTIEFRKYVVGSTIPHIYFKDYSKEKLLVPQIEEQQEIASILSNIDNKLNLIQDRINHMGQFKKGLLQQMFV

SEQ ID NO: 11192 - protein, 331 aa, Methanobrevibacter gottschalkii
MKTRIINKIKSKMKLYLDENQLVILDETLRNILKDYDLVETESEFTIKESKENSILLMNFLASKHVEGCSERTITYYHTTIAKMLESISKKIEFISTDDLRKYLADYRKVNGASKTTVDNIRRVLSSFFSWLEDEDYILKNPVRRIHKIKTKKVVKEVLSDEHFEVLRDNCDNIRDLAMIELLASTGIRVGELVNLNIDDVLFNERECVVLGKGDSERIVYFDAKTKIHLLKYLESRKDNNPALFVSFKKPFKRLGINGVERRIRELGNGANIKKVHPHKFRRTMATNAIDKGMPIEQVQKLLGHVQIDTTMQYAMVNQNNVKIAHRKFIG

SEQ ID NO: 11193 - protein, 556 aa, Methanobrevibacter gottschalkii
MDAGKLQLLYFLSQNQQLSIPIYQRKYSWSEKECSQLLEDILRVGESDEQNHFIGSIVYMNQKGHIASPINSLMIIDGQQRATTITLLISAIVEFLFKNPNDNVMSPENFISYYLLNDREKGETRYKLILTQDDKRTLIKIIDYLETSDEIPFDSNDSIRIKENFEFFKKKINTDNIEILFNGLNKLLIIFVALEHNIDNPQLIFESLNSTGLELSQVDLIRNYILMGLVPEEQEKLYNDFWHEIETLFEKNEGNFDKFIRDYLTVKTDKVPVFRNIYSDFKKYSAQIDVKELVKDIHKYAFYFNSIAFGAEENPKLKESLDSLNSLGYDVTDPFMLHLYRDYKENKLSTDDFCEIIKYTESYLLRRLICSIPTPSLNKTFAGMYVQIDNTSHLSSYKAILRSKENYQRMPSNREFVANFRQRDIYNLRSKNRDYIFDKFENWGSKEKTNIQNYTIEHIMPQNPNLSQDWKLELGEQWADIQKTYLHTIGNLTLTGYNSELSDRSFNEKRDMAGGFKDSAIRLNIYLQDLNNWNENEIKLRTNRFVEKAKTIWPYP

SEQ ID NO: 11194 - protein, 274 aa, Methanobrevibacter gottschalkii
MVRFSQTLDDKQSKNREKSYRQVMENPYHASENRQSYSAQNEDRFYSQPSVQRSNYHEDNFHSQKDEVIYEMSVIEKESVKPDYSKPELKFPADQNIQFGVEYAPNSKPPVIGRNYTIRSNSIIYNDVVIGDNFRTGHNVVIRENTNIGDDVLIGTNTVIEGDVIIGNDVSIQSNVYIPTNSVIEDNVFIGPCACFTNDKYPVRINYELQGPKVRRGASIGGNTTFLSNVEVGEGSIVAAGAIVIHSVPPFYLAIGTPARIKPLPDHLKVPNKF

SEQ ID NO: 11195 - protein, 53 aa, Methanobrevibacter gottschalkii
MAKYKCKICGYIFDEDNIEEGLNIPEGTKFEDLPSSFKCPKCGMPKSMFMKMD

SEQ ID NO: 11196 - protein, 39 aa, Methanobrevibacter gottschalkii
MAKFKCKICGYVTEEFEELPEDFKCPMCGATADMFEKIE

SEQ ID NO: 11197 - protein, 36 aa, Methanobrevibacter gottschalkii
MAFICKVCNFVLEEDELPEDYICPVCGVGAEHFEEQ

SEQ ID NO: 11198 - protein, 199 aa, Methanobrevibacter gottschalkii
MKTIKNAIQSEINVKKSQFICSLVPTETKAESKAVIQKFREQYSDATHNCTAYIVSDGEGFDDDGEPGGTAGKPMINVLRKNELHNVTAIVTRYFGGIKLGAGGLVRAYSKSVMEAVGEAEILEIEEYDVYKLIFEYSNIRIVDSEVRNNNLEVINKEYSDKVSYDIVSKDGRDILKIFEKYSGKINTGFKNKQFLENK

SEQ ID NO: 11199 - protein, 139 aa, Methanobrevibacter gottschalkii
MIFLPGSKSATFLVIFIVAIVAFCIACVCASMTGQISILPNDNESESILDNLSAITNDTGNSGQSYGSKDYSSSSSSSSSNDDSQVETTTDHSGDNQGDSQKDSDDHDHENSNQNNKDKDTKTDSGHAGQGSGDANDFD

SEQ ID NO: 11200 - protein, 230 aa, Methanobrevibacter gottschalkii
MAELRYRAGNIRNPEVHKIGIIALGSHLENHGPALPIDTDAKIGAHIAFQSSLQTGAKFLGIIFPAYELDTIDHGVHVSLETLKENVIRTLNDAKKFLDIEKVVIVNSHGGNIPLMSELWDIEDKTDMIVVFNNKVISSEGPHGGSGELSMAKVLGIVNENELDNQTNVNEYEEVGLYGFKQARRDDPNIEEGARDVEENGVYIDEEYGERLFTLAISSVLFDVEKLLDF

SEQ ID NO: 11201 - protein, 160 aa, Methanobrevibacter gottschalkii
MVVKVKKRNFLKKKKIKEIKAELGEYGNLLQGKKNVEILEAEPNSFILVDGEPYIILIDERPFPTLKAALDNEIDAKTVTVDMGAIRFVANGADIMSPGIVAASEGVKEGDVVLIIDETHGKPLAIGVSLLSGEEMVRNDSGKAVETKHYVGDDIWNFEL

SEQ ID NO: 11202 - protein, 165 aa, Methanobrevibacter gottschalkii
MNFNREKYIDLIMYILLKCYSKPNLGKTVLCGILYFIDLNYYEVYGKFLTCETYIKSKKGIEPKHFKEVTEELIATDKLFLRREAYYNRIIHRYYLTIIPQFKFSKKELEIIDASIKRLKDNNASSITRYAIKDPPLHIANFGEDIDYKYVFSRNSAYSAIKNFL

SEQ ID NO: 11203 - protein, 76 aa, Methanobrevibacter gottschalkii
MSGQNVQRPLDALGKSVDAPVLIKLKGDREFRGILKSFDLHMNLVLNDAEELQDGEVTRRLGVVLIRGDNIVYISP

SEQ ID NO: 11204 - protein, 62 aa, Methanobrevibacter gottschalkii
MSKGTPSMGKKNKKTHIRCRRCGRNTYHIRKKVCASCGFGKSKKLRRYSWQNKKPTTRQRLV

SEQ ID NO: 11205 - protein, 463 aa, Methanobrevibacter gottschalkii
MKYDKSLIVLFIIQICEGFSFYGLGAILTLFMTQFLNLSLSFAFLVYGTYFGLVYIATLFGGYLSDKYIRSRCLINAGIILMGLGFIVLSYFASWANPLVQTHSYFYFNTPEIMLIISLMSIILGEGLLRVNISSTVKQVYEDNEKKVESAFTLLIMALNIGAVSSAIILGLTIGEGNLSLYKYGFLILAVSLFIGIIIYNLFRNKYLVNSKGEIVGIKPSIKLESVMDNAEEKLTKQERNHVKAIIIILSISLIFFIGFEVIDSSLMFFAKDYVANTIPFVPFRISPEIIKFIEPFGVIIFSPFILTYFNLKDGDENESLIFRIMLGIIVLLVTYAVFFIPCMMVDNNMTDVSIIFIIIMELIRSTSEILILPIGLSIVSKLSPAKYLSRLLGLFYCSLAGAYVVSGYMAGFYPNAESMAHKLFGLIQINDFKIFASVFIVMYLTLFTATYISRNKIRDLME

SEQ ID NO: 11206 - protein, 332 aa, Methanobrevibacter gottschalkii
MNNPNIILKMIFMKKMKGVLLEASAIDKGDISWEELSEHVDLTIYENTTERNKFEHIGDAEVIFDNKVIIDEEVFRKCPNIKYVGVCATGYNVVDMTAARKRNITVTNVPAYSTDSVVQLTWALILEQTCNLELHNQSVKNGDWINSEIFCYWLKPISELSGKTLGIIGYGNIGKKVATIAKSFGMNIIVNTDHPEKYSEENINFVDKDEIFAKSDIITLHCPLTEDTKDIIRKENIDKMKNGVRIVNVSRGGLVRENDLADALNSGKVLSAGVDVVVTEPMSEDNPLLDAENIIITPHIGWASIDARKRLVDEIIKNYKAFINNEKRNVVN

SEQ ID NO: 11207 - protein, 304 aa, Methanobrevibacter gottschalkii
MSKENIEKNEINNSNAPILYKRHEDYIPRVAAIHDLCGYGKCSLGVAIPVLSAAGCDVCPVPTGLFSNHTGYPTWYMHDTTEILNDYLNTWKEIDIDIDAVYSGFLGSDEQVEVIKSVYETYPHALKVVDPVMADHGQVYPTYDDDLCQAMASLACEADILTPNLTEAAIILGEPIGEKWRGANIDDEEAHRILNALLDHGAKYVVLKGIQREDGIIRNFVGGKDMDISEASNEFLPYMLHGTGDLYASSLLAAVMVGKDLFESVEFAGNITHDAMIVSSKQPNFQDRGVNFESLLGQVTDLFI

SEQ ID NO: 11208 - protein, 279 aa, Methanobrevibacter gottschalkii
MMRKVTHKTKGQKAIDGAGVHLVRVLGNTTTDVHDPFLMLDAFDSTNPDDYTAGFPMHPHRGIETITFVSKGQMLHQDHLGTEALVGDGEAQWLTAGSGAEHAEFPGGERMLGTQLWLNLPAKDKITAPPAYHSITTDEIKEFSLDGGFLRLMAGEYNGEEGWQGKYLPVDFYDIHLEPNTKVEIPVKEGRSAFVFTLLGDVVISGDVVLEKTAAKLSDGDHVIFETKDNSAEILLYSSKRLDEPVAWAGPIVMNTREELNQAFEDLANGTFIKKQAEY

SEQ ID NO: 11209 - protein, 135 aa, Methanobrevibacter gottschalkii
MVELKDIAQENEVDLENCVVFVRGEDDILAVDVSNAKIRQRSDDTMGFTFSITPEQTLKFEEYFNKFANGEKFYFDISQTGYRPAYYRGLSQINKEVSEEYDTKFNVTLFAQKAIVEPDDSYFAPTCACCQFCHL

SEQ ID NO: 11210 - protein, 150 aa, Methanobrevibacter gottschalkii
MIHILHQLVLVANSVIYKGDIMFDSPFSNYIVLTRNKTNESIKLDQRRVKLRENKNGLMALSYIGPLFEIMDLEDFFDDMISSEKLSMDISETGEFRVSFRGIIDGKGKNFPQNLDHKIILLQEPTCLDERVNIQETGFSKFKLKNEVSE

SEQ ID NO: 11211 - protein, 134 aa, Methanobrevibacter gottschalkii
MLSQFIYMFIKTKLKIKTRILVNMIINWQEEITRIDPEMKFRAEGGWLKTIEKLDKSVKNGYSLVGDFVKAGDFEENYDEGIYLDCNKEKTGRKTQQDYRLFRFRDGKVRLLDMVIDGENGWAVDLWDAVEDEL

SEQ ID NO: 11212 - protein, 223 aa, Methanobrevibacter gottschalkii
MNLYEKFGIKTDNKVLYDTAFTHGSYSTKHDLKYNYERLEFLGDSVLSVIVSEYLYEKYPHYEEGKLTKLRANYVCQFALIYYSHELGLDKYLKVAAKESNLTKNEILSITADIFESFLGAMFLDQGWYFVKRFVSNSIFKFIDANVIFFADYKSAMKEYGDAKDLEVSYKILKECGVPHNKTFITAILIDGEEMGVGKGKNKKEAEQAAAKVAIEKLNIKVF

SEQ ID NO: 11213 - protein, 488 aa, Methanobrevibacter gottschalkii
MNKESVGIVETEYHDISNPIILDSGETLDEVTVAYETYGELNKEKSNAILICHALTGDAHAAGWHEGDKKPGWWEMVIGPGKALDSEKYFIICSNVLGGCKGTTGPSSISPKTGKEYGVDFPVITINDMVKVQKELIDSFGISQLAAVIGGSMGGMQVLEWMVSYPRMMKKAIAIATAGRSSPQQIAFNTVGRQAIFSDSKWNNGNYYDTCEIPSNGLSLARMIAHITYLSDESMDIKFGRGLQDKDEISYDFSVDFQVESYLKHQGETFVKRFDANSYLFITKAVDLFDLSANDSLIDGFKNVEAKIKIISVDTDWLYPTEQSMELVTALNANDVDVSFSEIKSNYGHDAFLLERGQLNYIFSNFLSENVVDDLMIEDIATIRENADIVEAAKLMLDKHLTHIPVVTDDCKLIGIVTSWDLSKSIATNSNHLKDIMTKKVKYCHANDSIEEIARKMRKFDISCLPVVDEEMKVLGLITTDQISNLLS

SEQ ID NO: 11214 - protein, 207 aa, Methanobrevibacter gottschalkii
MGIGYAAIAIKAGMTPLQTISMSVLVYAGAGQFIAASMILSSASVLAIVLTNFVVNLRYFVMSTCVLNQIEDSNLPLNVLAAHTTVDESFAVFSLSEDSSIWVYLGIAVTAWLSWILGAAIGVVVLDLLPVIVTNSFNISLYALFVAILTPAIKENKQIAILVAITAVLNIILSQFLGNWSLIVSTLVGAAIGMYIVDDEYLLSGDA

SEQ ID NO: 11215 - protein, 104 aa, Methanobrevibacter gottschalkii
MDYMMLVIVGCTLVTFIPRLIPALFIDKLNFSPKFEKFLDLIPYTALAALICPGVLTVDNQLWYIGLIGAVVAACLAWKKAPMGAIVIITVVVLIAVYSIVPFF

SEQ ID NO: 11216 - protein, 78 aa, Methanobrevibacter gottschalkii
MRTMIKYLRQELKMSQKELGNKVGVTRQTINALENGRYNPSLFLAYDITQVFNKMLFKGDKEQYFVMEDIFIFDEDYY

SEQ ID NO: 11217 - protein, 243 aa, Methanobrevibacter gottschalkii
MILDIYKDAFEYSAKDWKTLLILGVICLFSFLLIPVFLLAGYNYRVVGTAVRGIINGKDPLPEFDDLIGMFIDGIKVVIVQIVYLIVPAVTFIVFVLIANHLSGVLASAVVLLGCLVTLILGIIACLMIQMGICHMAYNDGAFTKAFAAEEIKAVINEIGLFKCLLTYVGIIIICVVFGVVVTGIVGIIFTIFGLSGAMLGVDAGGILVLGTLVNSLITTFVVGPYLSIFTGRSIGLLYTMQI

SEQ ID NO: 11218 - protein, 274 aa, Methanobrevibacter gottschalkii
MTSITDCVVEGLKYPFNDLKKVLSFGVLFALINLISLDITTKFIDAVIKYSKLYPSASNVFHLSQLPANDIYMIIALLIISFIIVLFINGYEWNIVRFSIDKKEDLPEFSNVLKMFVNGVKYFLVNVAYNIIPIVLLIIGLALFNESYSPIIILISVLLFLIAYFILIMALNNMVAHDSIKKAFDLREITKNISNLGWGKYIGIIVFTLIVYLVIMVAVGVILFFITVFIISAITDQSMIISIFLAIIEGLFILPYVEIFFSRVFGSIYRESIK

SEQ ID NO: 11219 - protein, 210 aa, Methanobrevibacter gottschalkii
MDVFQHPIFLLGELMNINVELFYLFNHAFQNPFFDYIMPVFTHFGGFKFLILVLIAIVLYAHLRNKRTLRKIIFLTLIALLFSDGIAFVLKHLIHEPRPFLSLDNVHLLIAEDDPLSFPSGHTTSTIAIVTFLVFNMKELAKKHYKIINVCLIIFAILIPFSRMYIGVHYPGDVLAGAAIGIVGAVIVNHFKCEILNRIDILNKIKESIS

SEQ ID NO: 11220 - protein, 91 aa, Methanobrevibacter gottschalkii
MNNFENQKFCQSCAMPLESSDFFGTNADGSKNEDYCIYCFKDGEFTSDMSMDEMMNFCIDKMTEVHPDIDKQQATAMMGEIFPKLKRWADD

SEQ ID NO: 11221 - protein, 481 aa, Methanobrevibacter gottschalkii
MCSIVGLQGNVKAEDILKMLKVSKSRGPDSSGIYLDKLYKNINLDEFEDDNTYPIAFGHNLLSIYDLNNRISKLQPVTDDNLVLLFNGEIYNFKTITNLLSKVGVEKEILSDAEALLYLIDFYNKGDLVKAIQNTTRLFDGDYAFAVFDGENLALVRDPLGVKPLFYGENDKLKGFASSKQSLKEVGITDINTLKPEHILFNGQDISPAQAVHEKVFEGDVAKIEKMLRLSVLKRVEDINEIGVIFSGGLDSSYLALLLKEISENVPLKIKLYAVGVKGSKDVEAAVYASKFLNLDLEICEVTEKLILEALPSVVKAIGDDNLMKVGVGLTTYFATKMVACDGVKVAVSGQGADELFGGYKRYLQSFVDGTLNYDLREDMSNMYHVNLERDDACSMLNGVELRLPFLDKTLVELVLNIPDNKKIVSMHDDMRKSILRKLAFEGGLDYEIAYRPKKAAQYGTGIDKILRKKIIKDMDISQFL

SEQ ID NO: 11222 - protein, 71 aa, Methanobrevibacter gottschalkii
MTIEKDAEDIIEKFSKILEDIPDSDETWYITDNLNLTRDDKSQEKNPEKILRNARIDKEGNLIVKKADWTN

SEQ ID NO: 11223 - protein, 161 aa, Methanobrevibacter gottschalkii
MRINLVLELLDAPGQLVKALEPISTYGANLVTIIHKRDYKNDNGMVPVQLTIEGERNDLKNVVDKYEELGFTIIEMDGVVKKEKITTILFGHIVDQDLRDTMDKINQIDGVIIVAFDIKLNGEEKSTALINIEADVGLKQNVFDRIAEIAEEKELLVINEV

SEQ ID NO: 11224 - protein, 339 aa, Methanobrevibacter gottschalkii
MDECKVIIMGFGSVGQGVAKAISMKKDLIKDKTGVDIKVVAAADSSSSAISQEGLDEELLVKTKKEEGKLSAYPEFGSDKNGADILDAVEYDCLIEATPTNIVDAEPALSLTFKAFEQGKDVVTSNKGHLALKFREVVEAAEKAGVEFKYEATVGGSMPIINFTKETLASCEIKSIKGILNGTTNYILSRMTSEGSEYEVILKESQELGIAETDPTQDVEGIDAACKTVILANSLLGIDATYSDVKVEGISKINSQAIELAKKDDYLIKLIAEVSPDNLQVSPRLVKRGSSYDVSGTLNMATIKTDLANEVSVIGLGAGSLETASAMLTDLISILKNKI

SEQ ID NO: 11225 - protein, 403 aa, Methanobrevibacter gottschalkii
MKYVIFIPDGSSDLPLDEINGQTPLKVANTPNIDKLAKAGYGGLTNNVPEGYTPGSDVANMSIFGYNPADYYTGRGPLEAGSVGIETTPCDVIFRCNTIFEKNGKMEDFNAGHITTEEADVLMKGLNRYFNDKYPGFKGKFYTGISYRHLFVYSCDNVEDAEILANLKTMPPHDISGENLVDNLFGDCELAREIQNIMFESKEFLKTQEINQKREIPANMVWLWGQGVTPKLLNFKEKYGLDAAVITGVDLLKGIGVFAGMEIIDVPGATGFFDTDYEAKGKYGIEALKRNDVLFIHIEAPDEAGHAQLLDEKVKAIEQIDKFIVGPILDSLEGQDYRAAILPDHPTPIDIGTHTRDDVPIIMYASDMEGDDCVAFDEVSVLNGSITKKEGYKLMQRLIDGDF

SEQ ID NO: 11226 - protein, 211 aa, Methanobrevibacter gottschalkii
MKVLLVNGSPNRKGCTYTALSEVANVLNEHDIETEIFWIKTKPITGCTACGTCATIGKCTYDADSVNEFVEKAYEADAFVFGSPVYYASANGSMVSFLDRAFYSNSHGKGAEAFKHKPGAVICSARRGGTTATYDQLIKYLGISQMPIISSFYWNMVHGNTPEEVLQDEEGLGTMRQLAHNMAFFLQCLEAGAEKGLKVTEEPKPRTNFIR

SEQ ID NO: 11227 - protein, 451 aa, Methanobrevibacter gottschalkii
MNIFKTPEGYIYSNKALLALFIPLLIEYALEFFVGFADSIMVASLGEAAISGVSLVDFLIQLLIFSFSALATGGAVVAGQYLGNKQIDKAQDSATQLVWFSTILSVILMIIVIILRQYLIGILFGQIEVDVWQNADKYLYIVALSIPFLAIYNAGASIFRTTNNASLPMKILFICDILNIVGNAICIYYLGWDVHGVAIPTVISRLLSAILILHFVVNEDYKLHIKRTLIHKFDFKILRKVLQVGIPYGIENGLFQLGRVLVLSIVSTFGTMAIAANSVGYAVGIFSVLPGFAINLGLTAIISRCVGANDYEQVRYYNKKCLIIVFVSHIVINLIIFAALPLILNIYNLSAKTAAMTSEMIIWHGIFGIIIWPLSFTLPATFRGAGDSKSVMYISLIVMFTCRIALSYVIADFMGVGVFGTWIAMFIDWYVRAAIYIYRYFSNKWTEYRVI

SEQ ID NO: 11228 - protein, 135 aa, Methanobrevibacter gottschalkii
MDGIVYKNTHNFSKRELEELFLSLEWSAGHFPDKLIIAMKNFKTVFSAWDGEDLVGLACAMDDGIMNAYVHYLLVKPEYQLKGIGKELLNRITTHYKDYMRIVVVAYSDEIKFYEYCGFEKADDASPMFITKLWA

SEQ ID NO: 11229 - protein, 257 aa, Methanobrevibacter gottschalkii
MVLFRGDIKCKSLQRRTSISVILPADNIHFLSDTEEIVPQPYKTLYLLHGLYGSDDIFLANTSIQKFAEDHGIAIVIPCGENSFYLDNKKAHAYYGEYVGQELLDITRNIFPLSDNREDTFIAGFSMGGYGAIRNGLKYSKNFSKIGMISAALITDEIVDYTDDDNVLWSNSFYKSCFGDLDKIKNSDKDPKYLIENTADIPDIFMACGVDDFLYDKNVEFYEFLESKDINAEFMQSPGEHTWDFCDRYVKEFIKRL

SEQ ID NO: 11230 - protein, 147 aa, Methanobrevibacter gottschalkii
MKCPECGNELDEDNYCSECMEFIDNPIGGRLCPYCGEELDEDNYCNSCMQYYYEEENTQELEEIDYDSMVNNGDSICLNCTFWSVSPYGSAHGMICRKGQISDGPGDSCGLFVQEYNFANYGDAGQYQFNETNRAISNKLYHWKNSG

SEQ ID NO: 11231 - protein, 538 aa, Methanobrevibacter gottschalkii
MERIFLTKYIIITGGVVSSIGKGITSASMGRILRSYGLNVSAIKIDPYLNWDSGTLNPYQHGEVFVTSDGMETDLDLGHYERFLDVELKGLANITTGKVYESVIAKEREGGYLGECVQVIPHITNRIKEMIRENSESADYDVVLVELGGTVGDIESQPFLEALRQLRNEEGRENVMFVHVTFIPYLDAAGEFKTKPTQHSTKELRSVGINPDVIVCRSQKPIDDGLRGKIAHFCDVDFEAVVNTPDADTIYEVPLVLEEHSIGELIVKRIGLNIKPDSSKLNEWREVVKSLKIKEPKVNIGIIGKYVELEDSYISIRESLLHAAASIGVKANIIYLSSDVEELDQDAMSELDGILIPGGFGERGFEGKLDAIEYAIENNVPLFGICLGMQSMVTQFARRNGFSGANSSEFDDDLKFPVIDMMEEQKKIKNMGGTMRLGSYGCKIIEGTKTYEAYGESDIEERHRHRYEFNNDYRDGLQEKGLIISGTSPDDFLVEIIELPNHPWAVGCQFHPEFKSRPNRPHPLFKAFLEAIHDYSKN

SEQ ID NO: 11232 - protein, 288 aa, Methanobrevibacter gottschalkii
MIITTIFLIQIIITVLFSIMAAIYDIKSNIVPNKLNYSLIFFGLFSNLILSIISNNIKYILASFISMFITYAVTYMLWKLNIWGGGDVKLFTAIATVIPSGLNINFLNIFPQLSVYPFSFSVVINSILVSFPFLVIFVTHLIFKNKVFMGNIDFLVNIFNIESLKYIKNSTLNKLIPIKDLKEGMIVNDYYFNNEHIIELLSEMGGNLEIYKSNRNDFKYYFKSQSAGGITNEEVWQLKIMNSQDIISDNISIKLSFPFAPAIFLGLVIAIVYGDMMMLIIKNIFLVI

SEQ ID NO: 11233 - protein, 142 aa, Methanobrevibacter gottschalkii
MVKESGAQISLEYMLIFSISLVILIVFTLPLAENSIRNTLDVSDSLNVKSDLSKIANAIKQVYGEGQGSRQTIKIESNKKLKINIANSHVSTSFKLKSNSKKDIKEHVMSNIGKTTISLNKGENVIIVEWPVNSKNMLIYTV

SEQ ID NO: 11234 - protein, 267 aa, Methanobrevibacter gottschalkii
MDIITTIIYLVLFIVMMVFVFSIGMLRQYMPKREVILVILVAFLIGSIGGAFFLDPIYDELPNVASVIEKNMPNNEETLYLDLSSSINIDDLKNNLSATDGFISFDEKSVNIPMWTFNEREHNYFDEIVGNIDSNYKAYNISTSEIQITLADNYTSAQALKSFSDWYKLVYGETISYAQVHAVLVVDSSSLDTFEHILLQKGIVASKIEGPIQDTVNNTNSSMLTNIEFTLVCGGIGVVVAFMGIYVDSVVPAYRKFRKFLREKRRR

SEQ ID NO: 11235 - protein, 229 aa, Methanobrevibacter gottschalkii
MNVAVLFSGGKDSTMALYNALDSKEDVKYLLSMKSRNDESYMFHVPNIHLTDLLSQAFDIPIMSVETDGIKEDELKDLKQAFENLKDLGVEAIYTGALYSQYQKSRIEQLCDEVGLVAISPYWHVDELEYMRKIVSLGFKIIISGVAAWGLDESWLGRIIDDETIDELMEIHEKYHVDLAFEGGEAETLAIDGPIFKKRIKILKYKKEWHNDSGVYIIEDAVLEEKMNL

SEQ ID NO: 11236 - protein, 179 aa, Methanobrevibacter gottschalkii
MQVMGISGLPGSGKSLVSKIAIERGAKIVSMGDIIREESKKRGESTKETAQNLRAEFGQYIVSELTIKKIKKLQEEGFESKIIVEGIRSPHEVNMFKKNFENFIILSIFANPTLRFERLKNRMREDDSTDYVEFKARDQMELDFGIGDVISLSDKIIINETDLESYTNSINKFLDEIEL

SEQ ID NO: 11237 - protein, 245 aa, Methanobrevibacter gottschalkii
MIPKSHPRYESLLLRDKMVKASKEGYLADSALIAHGRGEAFDYLIGEKTTYPAKRAMYVAVAALLLSNNPVISVNGNATALAIDEIIEFANAINAKIEINLFYKTNERVKIITKLYEDHGYRNILGGLDDDIEYINDIENNRASASKNGIYTADTILIPLEDGDRAEILKKSGKNILTIDLNPLSRTSKMSDVSIMDNIVRAIPFMTQIANDLKTQDKKILVELVNEFDNEENLKESLEQIKVKE

SEQ ID NO: 11238 - protein, 127 aa, Methanobrevibacter gottschalkii
MKIKLAIIFGVLIWILTFVLSATFNPIFTTNVRNVNIVVPIITIIVTGFFGILYIRAIDTNEIVEGFLVGIIFVIIDIILDYIFIISLQKNLYIIGNYTLHVFSMITITLLITTFLGYLAQMTIDLK

SEQ ID NO: 11239 - protein, 344 aa, Methanobrevibacter gottschalkii
MNAYIEHEKYLKNTLLGLNNSSDSKQKEKSLSSHYFKDLKEKLLIQYENKSLKDVMDCNICNTSFGDALKITTKEKIDFNIYDNNFKNQINHNLKLLPKIGLKTEENLKNKGYMTIESLKNHDKYCDTASKFLNKIDDMSFHEIMDLLDNNRYSKKCRDNLLKCISLTDVENFKFMDIETKGLSNVPIILIGVAEIKKCKIISSQYFLRDYTEEQNIIEAYLNHLDEDSIHVTFNGKSFDVPFIRNRCIYNRINHNLELPHLDLMYFAKNLWKGSLPNFKLQTIEEEIFGITRYRDVPGQYIPGYYDTYLSKKNIGPVVPIIQHNCQDIISLASFLEKMYEDVN

SEQ ID NO: 11240 - protein, 500 aa, Methanobrevibacter gottschalkii
MGLFDRFKKSDKKEKKLIPDNPEIEDEELRLKEIAINHKDRLERAQAADKISNEFLALDMAKTVKDRAIRLIAANKLKDEDLLMDAALNSQFFDVRSFAWERLGENNKSIAEIVINTKKNSHVDEIFNKIVDEETLKWIAIEAVDKRYRTRALNKIDDAGILYDLVFKSNDSSIKKAAILKDSFVSEDILKKVAIEDKDEGVKKIAIGKIKNEDSLVLIAQNEDNAKVRSFIFDKINNPENLKHIILDSKKADVKTELINKITDSDLLAKIALEDNDNIVRSEAVKKITDEEILIKIISTEKDRFVRQIAVKNINNPKELIKIALNDDDQFVRNHAISNSALADEKDFKYLAINSIHEDVASEALNHINDENDFIDILKNAKLTSIRKNTLDNISDLETLIRIILSNEDEEFSLKALDKIKVEKCLIKIYEQNISENISIRAISLIRNQKYLGEVARNDSSWKVREAATKKVVSRKVLKEISNNDENEYVRNIAKKKLKL

SEQ ID NO: 11241 - protein, 252 aa, Methanobrevibacter gottschalkii
MKKITRIFFSPSGTTKKIVDKIATNFKYEKEICDLLHFNDTKEFTDSDIVIVGMPVFSGRIPKTARNRLLKLTGNNTKAIAVANYGNAKVGDALIELVDILKENNFDVIAAISTVSHHSIFNGVAVGRPDTADMEKINEFGQKCVEKLESGESLNSEVPGNRPYADYKQLPFIVSCDQNKCIFCYDCVTFCPENAIPDEDPADVDLDICSRCTACIHICQEDARSFTGEAFETKKPVFESENSERKEVELYL

SEQ ID NO: 11242 - protein, 343 aa, Methanobrevibacter gottschalkii
MMELMRELSLTPGVSGSEEKIAEIITRELKDVADKIETDSMGNIIATKKGEKKAPTVMLASHMDEIGLMVRYIDDDGFIKFSNIGGINDQMLMNQTVTVHSSVGEPIVGVIGSKPPHVTTAEEKNKVVKSTDMFIDIGAKDKEEAEKMVRIGDKMTFNSLFAEYPNNLIMGKALDNRVGCYVMMEVLKRVDTRATVYGVGTVQEEVGLKGAKTSAFRLNPDLAIALDVTLSGDHPGIKPEEAPVVMGKGPAIILADASGRGILTQQSVKDLLINAGDENEIPYQLEVSDGGTTDGTAIHLTREGIPTGVLSVPTRYIHTPVSVCSMDDVEATIQLITEAINNL

SEQ ID NO: 11243 - protein, 161 aa, Methanobrevibacter gottschalkii
MNIELESIGTIHTEFKEIEGMPIQPTGAKGIKGTIEIKDKFVDGLKDLKDFSHIHLIYLLHKVEGYKLEVKPFMDTKTHGVFATRSPKRPNRIGMSVVKVNKVEGNKVHVENVDILNGTPLLDIKPYVPQLYEDTIDELKIGWFESKHQKAKSQKSDDRFK

SEQ ID NO: 11244 - protein, 68 aa, Methanobrevibacter gottschalkii
MQLSARNQLNGKVTGVEKGAVMANIKIEVSEPSTITAIITKESAEKLGLAEGDDVTAIIKSTEVIIGK

SEQ ID NO: 11245 - protein, 145 aa, Methanobrevibacter gottschalkii
MVVRVIESKEDKITTADLIDELKKNSKVDYCGAIFSFEGFVRGKEENMNLQKLILTTPDKEKTKSEIEKIVENAKIKYNVAEISVVHYIGEFYTGDLLFLVAVLGYHRDESYKALKEVIETVKFDVDFKKEEISDEGTKVILAGG

SEQ ID NO: 11246 - protein, 177 aa, Methanobrevibacter gottschalkii
MNKVRGIFIGRMQPVHNGHMQIIDKILEEVDEIIIGIGSAQLSHSLKNPFTAGERVVMLNQALAERGVDPSRYYIIPMQDINFNALWVSHVKMLTPPFSIIYSGNQLVKQLFSEEGFEVRQPPLYDRLRLSGTEVRTRMIEGGNWEELVPNATINLINEINGDERIKNLSIREISEI

SEQ ID NO: 11247 - protein, 236 aa, Methanobrevibacter gottschalkii
MNKKMQYQILLIVLIAIVIFNLSIIVSSMMNTPDNVYNITNVGHNANGTVYKIEAGNMSSNETVGLILGVHPREHEIHEAVNNTIYNITSENGTNNLTKKYVIYYIKTKDNLTSREDTRPAGEELANKFIVPNIVKDKPFIVLDVHEINPDYEYSNFIFSLSNRTNTVDSYISHIANDVNLVDYQFSEGTSPEKVTKPIASKGVTTLLMETSITDALMEKQKTADNLIKSLDSLEP

SEQ ID NO: 11248 - protein, 224 aa, Methanobrevibacter gottschalkii
MENKNMIIIFAAVAVVIIAIAGILFATGFIGGNDVETTPFKMSFMEGSFIGNVSLENDKEKFMHSYEDKENKITYNISTVDNSSVLMEIYQIQGLGNPEVRSFNGNEWNIYFTQAVPNNNSSTNSSNGDDAMNIIIGESQGKKQGYLIYMIIDGKSKINATGKMYGEAYTNYFEPLLESLTLKESKNVPHIYDEFGLTKEQFDYQIDLIRQYKSGNTSALQGAQ

SEQ ID NO: 11249 - protein, 176 aa, Methanobrevibacter gottschalkii
MRITVFHANECDRKKCTSIKMEKMGKCRLVYDINKIPGGAVVLNPYAEKAVSYEDYKYVQRRGVVGLDCSWNEVSQSKKFFSLSKYHRSLPFLIATNPVNYGKPCILSTVEAIAATLYITRFKDEAYDMMDGFKWGHTFLELNQDLLEAYSEVDTSAEVVRLQNEFLENSKKEVND

SEQ ID NO: 11250 - protein, 48 aa, Methanobrevibacter gottschalkii
MARFEEAENRMFNVKICLKCNARNPAGATTCRKCGYKGLRYKAKEPRG

SEQ ID NO: 11251 - protein, 250 aa, Methanobrevibacter gottschalkii
MKDVENYIRDILKSRKIHFTLIDPDEQTPEEALEIATQAIEGGTDGIMIGGSTVNGDDVNNTCKILSENIAVPIIIFPGNTSSVSEYADAIFYMSYVNSRDPYWINGAQALAAPAVKASGMEILSMHYMVVSPGGTVGWVGDANLVPRNKPKIPAAYAMSAELFGIKFFYLEAGSGAEEPVPPKMVGYAKMAGPKNILVVGGGIRDGKAAYMAAKAGGDVIVTGTVVEEVDDVKTKIQEITGAILKASME

SEQ ID NO: 11252 - protein, 357 aa, Methanobrevibacter gottschalkii
MLNSLYEKAIAKRGFIHDIDSQTDVESQLEYKWFNRDILEIDNGFSIAAGDGSFNKKKFLTTNFCAVGAESIIYDGKIKKIDDSDIFDIPHVSFLDELLSNYMAIYELKCALRTIKEYNVDYYMIDGSILGDLQNPFPRGAKLPSKLKNNLDDILLKEFERRLNIKKYGLIFPEIRDSLNLVEFPKNENSNKIEEYNLHLASIEKIILLKEILQFRKKIISISKTSSDNDLFHWNIPDIAFLDKFTEKQGISLIKHKTVYKKTAFPYFNDFFKSITFTIFYIRLQDNKNVLKVELPYKASKEDVFELIKKINALTVQGYPYLLNKAHNDVVITDKNIKELLKIAKIYETTNREVMSW

SEQ ID NO: 11253 - protein, 495 aa, Methanobrevibacter gottschalkii
MVVGICIGETSLTEVTFISDKMPKVGEYVTIEYDGKKVLGMIENLIRGNDSLNVDINDFNAIQKISRIGAEDNYIKGRVKILGDVNDNLKLPRTPVLPGTEIHLADGEILDKIFNVKNPIKLGCLVNQSDVDVNVEANPILSRHLAILAMTGAGKSNTVAVLIDQLLGYNVPIFVFDMHGEYKDAEFPNGNVNVIMPKINPHYMNFYEIKKLVNIGANSFIQERHFRRAFKQAEKNISDGIAQTNNFLQIMYDILDKDSHVEGSDKQIVDVMNKIDDAMERYSNLFDKNIGNILSNVKRGYVNVLDLSQVDESVASVLVSHILRNALKRSKDAAHTGDKKDLIDNSVFFILEEAHILAPNKRESDSKRWIQRVAREGRKFGLGLCLVSQSPKTVDHDALSQMNNMIILRLVEPEDQRHVQSASESLSQDLINQLPSLNVGEAIVLGLMSKIPTLVKIDMFKGRRHGDDMDLISYFKELGEDSDYNDETVDMGYDY

SEQ ID NO: 11254 - protein, 413 aa, Methanobrevibacter gottschalkii
MKFAHLADTHLGYRQFGLIEREKDFYEVFEKVIDKIIEEKVDFVIHSGDLFETARPSPNALLVFQKGLLKLKGAGIPMYAIAGNHDSVMRQGAIPPQVIFKKLGLKVISPINTDYMHGDIFIAGLPYYPSSQSKTLKSKLAELSKKAANHEKSILVLHQGIDKYLGYQYELEIGDIPDNFTYYAFGHIHKYINESFGNGRLVYPGSVEIWKTDEVEDYKKNGKGFVVVDLEGPKPIVKRVKIDVPREFIKRSLDYENLESGIAGIKETIKDFDKQPILNLTIKDVESDTSGVYDIINEDLGDLSLMIRPKFNIKGEELIDEDNIKKNGLGAKEILVEQLKKYNDDNVTQLAIDLYEYLSKDKIEESKDLIEQFYNDFYNSTKDEVELQTEEIEPETAQVKSEDVQATFNEVLK

SEQ ID NO: 11255 - protein, 915 aa, Methanobrevibacter gottschalkii
MIFTKLRLRNFKSHEDTIIRFEKGISVIVGENGAGKSTILEGISFSLFKQHTAKKIDDLVRNNAQSMFVELKFISNGKKYKIVREKKSNLKSVLYKKTSLDGEYVHVCSGDKEVANEIYQILDIDSDLFLNAIYIRQGEIAELVDKTPAEKKQLIAKLLGIDSLEKSWKHLLPFINDYENQLSELKGKLYNSKELADDLTRKREELNSLKQRGYELEENIEEVSVLLKEISESKRDMEREKEIYETQVNNLENEEKTLSKLEQDKHVIQNNLDNIREAEEQISRLEKYVSKLDVYLDFEKSVLSIQNLKQKEQEIEDKIKSIAQQKQLVADNKENYNKFLASDEEINKYNNQKVNFEKELATMAKLDKDKKDLLKEVQNERNEVNQFFARAKDKLDDYGLDQDRLAKINDINSIEDATNNFFDEISGKIKSLSDDIIAKNEEIVVFKQNIKSSQKPLKDLKDVDSKCPVCQADIDDNKKSELIKQYNAEIEENTKLISEYEESVRLLTKNKASFEDKSDKLSELSKQIIEYKHKFSHLENQLVKLNKLDDELVSKDFISGKLGELILIIANKKENRESYKEFYDAYNQAKGALEVLGSEIDAQYKLKQVKNEIDNHVTNIKLAIEQDPHLSRDITAAELQDRITDLKHKNEEYNQLKGFIQNKKSYLTQLDSVKEDIGMSINQIDILKNKIKASVYDTEKYEQIIYHSDIYERRFNKFNNELSGIKGQARETITQVKDLTGKLESVKVFQKQYDDISDYINLLNHFRSLYSKNGIQKDLRNISRPLIQKYTKDFFNEFNFNYSDLTLDDEYDVTVYGPEGESSMSMVSGGEKIAIALALRLGITQAMANGELDTILLDEPTIHLDSSRRHELINLLKEMSVLPQMIIVTHEPQLENAADNLIKVEKVNGVSKVIM

SEQ ID NO: 11256 - protein, 131 aa, Methanobrevibacter gottschalkii
MFEDERDNKIYNLIITNGFDTNKEYNQFTEKLYSKTDFLWKESMSGAYSTAGEEFYQKVDRIVLLAGLYNDNKELFEDLLIVSEKYEIPIVLVRPLGVEEVPIKLEEKAATIVGWNANCIIDAIKDAAETM

SEQ ID NO: 11257 - protein, 426 aa, Methanobrevibacter gottschalkii
MKAAVIGLGVEGKKAVNSLLNHGWEVYATDLNINVDLSGLNLPNLSLDVIDETQTVSIVGDGITLDLGFTNPYDIDQCDAVAISPSMFGGEFATKLLKNSNLLSDVVDKHKDIFTIGITGTNGKTTTVHMLKEILENAGKNVLVGGNGGGGFSGYYDLILEANEGEYDILLVEVCDMTLDFCKYCFDFDMIGLTNIGNDHMNVHKTIANYKNSLVRFFEGKTVFTAFNQDFNTDFKESSDKNIPYFEYQDELKLFGKFNLLNAGLATAIARELKIPKDVIKSTLSEFNAVEGRLDVYKINNVSVYVGKTDNSDALTSILSEKDFYAIFIGTPRHNEIHRLDILDAAVRYNPEVIVLFPGLDDTLDMAVYRLNSLGYMGNIITVNSLDEIIELVAEYSHEDAILIGGNGQDTLINIQERIKLISENL

SEQ ID NO: 11258 - protein, 395 aa, Methanobrevibacter gottschalkii
MSSGWRRISITICLALIVLSILFVAFSAATNAPYTAQSVADEYNLPIGQSMFENQSILGQQDSISVPLISNVGFLQHQITALDIQGLLMTLTTGMVPFDFSTVSSEGIDSYGDVVNVEGPGFLTFEGDKLAVKSPNNYVWGYSTPYKWLVKTDTGVDVVENGTVVKSVPENEIKNLDYHNDYYNSSTIRSWYNYDAHNGSTFTLEKGMKGFSDGRNNISAADVPVIFGHDVVDYASEYPTGSPILLYSGNYTEEDGEAYGTSLGSHAEYGDSIREVNARQFVDAWNGTVIPPNSTSSGKDYVYFESAVDPTAPGGSAAHGVCPPARALRAAVTAEGFGLPVGMTWDEDAVLFGYNPAQDITVTNNHDYPVLIKMWTEGEGTGMGIYCQIVRYIPK

SEQ ID NO: 11259 - protein, 217 aa, Methanobrevibacter gottschalkii
MSISTIITAAGKNSRMRNDQISRNIELTNKLILPFKNKTVIETTIDNALSADIDECIVVLGHYANEILESIFDNYKDSVKFVINNPVDVGLSVSLYNGLSNISSDFALCITADQPTVSTETFNRMIEASQNSKNPNRTISILRRRKIGLLDSAEGLGMPFVAHRLNLMNYLENEDDNINPILRKIFNDGYTFYGIKEKNKKELLNINYYDDYLALLD

SEQ ID NO: 11260 - protein, 224 aa, Methanobrevibacter gottschalkii
MTNLEKNKKYCEVIESKIKLDAKPVAMKLIKTEDDLPEGIDLIDEKIRHCEMVRKASLGNTFYSTIDQQLCLGGAGAIGLRDMPEKLANGEKYFSLGRFQDLETAKKLTSKLSIVKDIHWGMIYAPLDEADFEADVIQIITEPVGGMKLAQSIVYKTGEKINPSFAGIQSLCGDAFADPYITNGVNFTLGCDGSRKAADIKDNEMTVGISKAKIEEVISGLESI

SEQ ID NO: 11261 - protein, 411 aa, Methanobrevibacter gottschalkii
MKLPSRSKSYMIPEYSVTGDLLSYLTCNLQYRYQNKGTLPPSKPVQRWFGEFIHGVIEEAYIQWEQNNMHFPWDWKKDIRPIEDLIDLRLQVRGLYPFDEDLFFSIHNQSDEELTIDDLNEHDHKKLASARAEKAINIWGKDLFPLIDASEHLIKGIRDMPNYDENTSRSNYYGINGVVDVSSSVKINKTLEQSNFDNYNNRIIEYLKKDENFQKRIAKFDKDDEYEILIDYKGMKRPPEKVNNPKVENKWETHEQQILTYSWLRSEQKSSKPIIAGIIFYLNELVPSKEDLILIKDELNNGLTDIGYEYDKDIELINSWQEDDKAPELSDNFKIDRSIRIINVDEYEREKALLKFDSVVSNIEESLIKEMKGCKIQDAWKGDSDERTCSACDFKTFCKNNSVKTKDFKIP

SEQ ID NO: 11262 - protein, 812 aa, Methanobrevibacter gottschalkii
MISYEEFEDMVVNILKRDISSNKEQKNAILAPCNKSLFLVAGPGSGKTTVMVLKILKYIFVDDIEPNEIIATTFTRKAADELYSRILGWGDMIKNHLLNTIHDFNNITKITRIDFNQIKIGTTDSIAEELLREYKKPGENQAIVIEGFVANSAMIKIIIEDEKYLNKNLVEYLKEVSGKEKIEEPSKLSEILIEIKNRIYYDQVDFNELYNKTQKDSGARIALDCIKKYEDKLQNRNTIDFAMLESEFLKKLKNNELETFLNETKIVLIDEYQDTNLLQEDIYFTIARSAIANNGNITVVGDDDQSLYRFRGATVDLFTTYQERINEKLGIEVEEINLRTNYRSTENIIEHCNQFAELDSEYQNARVENKPKIIAPDFDNDKMPILGMFRNNPEMLAKDLSKLINQLVNKGEAEIKVLQVLNKEYYEKVNGVIDIARLQQIKAENVKAGKEIEKITLKLDSDYGSASDIAILSYSPKETYYGNRSFLHYLRKNLKKLRQPIEVFNPRGIELQDIDIVGIFCGLMLECIDPDSTVQKSDKTIPKLATHNMRRWRIKAKDFIKLNPEPHEPITLSQFVTYWQLRRPRGHEEWPKTASLMELAYKITTWIEELQEDVEGIVYLEAITQSITQTGFFNDYHSNISFRTQKQERESILEAIWNIFIPLSTGGIQIDESLLETLPDNRINVLSIHQSKGLEFPLVIVDVGSRFKQNDIRTQKLRFPKSIKEETTLEDRIRRYSKIGQSKRGEKDKSFDDLTRLYFVAFSRAEKVLLLIGLNPAIEGYNKKNNHFNIPNVALGWSRDEKYIGFNEIYLI

SEQ ID NO: 11263 - protein, 956 aa, Methanobrevibacter gottschalkii
MSEVNNIDMFKNDVRYRENIAHIETIPAKKASFKKVDNLNENIVNYLYSKDVKLYKHQAETYEAIKNGENVIITTPTASGKTLAFNLPIMETMIEDDNATALYIYPAKALSNDQLHVLENLEKELDITINPRTYDGDTPRNEKRGIREKSRIVLTNPYQLHLILSWHHQWTRFYKNLRYIVIDESHYYKGVFGSNVSFLIKRLKRIANFYGSYPQFILSSATLANPLELANRLTGQDFVLVDNDTSPSGEKDFILYNPFQNYVRNKVYAQNAPSVHMETENIFMYLMLKNIQTLCFTVSRKTTELIAMWAKKDMTQVKGKLAHRIAAYRAGYQPQERREIEEGLKSGKYLGVTCTNALELGINIGSLDAVIISGYPGTMISTWQQSGRAGRSNQKSIAILIAFENQLDQYFMNNPKFFFDKPHENAIIDLTNPILQEAHLLCAAKELPLKRGEAEKYFDISQDVIDELVSKKDLYENHRGDFMYPYDDNPAMDHSLDQISSEEFKVMVNGRLLETMERSQVYREAHEGAILINKGDTYVVNSVNLKKGYVNVSKEVVDYHTMVLNKTETNIKKKLSKTKYGDLTIHFGELTVSEDYFKYKKMHFSKPIGTFLLDLPPLTFNTKGLWFTIPKEVKDAVEDMFPNDEEVFAGGLHGAEHALIGLFPLHTMCDRFDIGGLSTNYHEDTQEATIFIYDGYEGGIGITEKAVDVFVDLLNSTIDLLNNCKCKKGCPACIYSPKCGNDNKPLHKGATKYILEYMKKLISDEVDGQKEDIIDVQSTVDDSKEFEEAYQLYENGDYSASKDILNNILANDKKHVRSLALMAQILYDQDQKDIALLFTKKALAIDRSNEMANNLEVLLTNKSKTKENHSDLSSLDDVDTLFEEAYDMYSQGDLDASLNILEKLLDFDSKNAETLALMGLIHYHSGFFPKAVEYYRKATKINKNGEMVKELKIRVS

SEQ ID NO: 11264 - protein, 379 aa, Methanobrevibacter gottschalkii
MNFKSKFGFGCMRLPTTDENDPSSIDQDLFNKMVDIYMEKGYNYFDTSYAYHNGKSEVAIRKALVERYPRETFKICDKMPTWALTNSEDNEKFVNEMLERLGIDYFDVFFIHNINGPWLKNAKNADTFEYVKKMKENGIAREIGFSFHDKSDLLKEVLDEYGDIFDIVQLELNYLDWEDPAIEAHKCYDLCVEHGLDVYVMEPLKGGVIVNPNDEIKNDFKEFNPNKSIASFAIRFCASLEHVKMVLSGMSKMEDLLDNCDTYENFKPLNREENEFLEKMAQKLSDNLAVSCSECGYCVDACPEMIPIPEYFNLYNTSKNQPESNIYRLYFDKLGDEKVPADECTYCGTCLDYCTQKIDIPEELEKVVEHFQEGFSPYE

SEQ ID NO: 11265 - protein, 125 aa, Methanobrevibacter gottschalkii
MHELSMAQGIINAVLDTAKENNATEVNKVTIEVGRLAMINPEQLQFILGVLIENTIMEDAEINFEEVPVEMKCFDCDFHGNAVLDDSDHYAPLVKCPKCNSLKIDILNGKDIIVKNIVIEKPDDA

SEQ ID NO: 11266 - protein, 216 aa, Methanobrevibacter gottschalkii
MHQVADVEVAKNIMDANKRLADKNLKNLEDKNIFCVDFVGAIGSGKTTLVEDIIDNTDYKIGVLAGDVISKFDAGRIEKHNVPVVGLNTGKECHLDAHLVGHGLADLPLDDLDMVIIENVGNLICPVDFELGSHLRIVVVSVTEGDDTVEKHPIIFQTSDVVVINKIDLADAVGADADKMVADAQKLNPKIKIIKSSLKEGKGLDEIISTIEEAMN

SEQ ID NO: 11267 - protein, 343 aa, Methanobrevibacter gottschalkii
MKVWIDISNAPHVRFFKNVIKYLEAEGEDVIVTARQFGDIHKLMEMYDIDFISVGKHGVSLYDKLKESTSRVYNLVDVIHDENVDVALSKHSIELPRISFGLGIPSLYVLDNEHALAANKLTLPLCDRIITPKIIDMWKLMKFGADPNTIISYDGTSELMHFKDFKYNDNIFDDLNLNLTHPKTILMRPEPSLASYLDADCRKSVLSPIVDELKNVANILILPRFKEQAEIFEGIEGVSILKPPVDTSNIIKKCDLVIGAGGTMNREAAILQTPVISCYPGKTLSVDQYYINKGLMYRSQDTDEVIHKALEFIVNPHERIDVKTDDLFQIIIDNLYDLAKNGK

SEQ ID NO: 11268 - protein, 360 aa, Methanobrevibacter gottschalkii
MLLIAQNHLQLILEVGLMLFVTLVFCLNLIPLSLSIVTFLSLFIMGGLTLLFGADIALLVLFSSQAEFTHPFGPIALLGAVTALASLKVMSESGVDIRPLRRFVILFLAGITVFGGLMHRSFLILWLLGLFLGYLMISKSFREKSVFTLKRIMMFFGAAGAGFIFLEVLARVSGMTIFSPLLRLGRIEQYSLSSIKMVLNNIQLIGHNANASYWGADGTAFAEGYITLPMQLILFFGLPFPLFFGVLVNQKDTIDYMLPGIFGWGFDFGILGLIGLMIFVLGTIIIGFKVLNMYREKREKNNKKYLGREVLLTGALAAFCAQSLIGLFIFNRSINGMALLTFLFVGALILANVVSLKSRS

SEQ ID NO: 11269 - protein, 152 aa, Methanobrevibacter gottschalkii
MKALILLGCPETPAQTPMAVYVFNKLTKMGYDTTIAANPAASKLVKISDPEGLYNLNLIDLERTLGEINEGDYDLLVGFVHKDAAASFFVTFDQILNTKSIALVFSRDADEVAEFVNMIEESGSKALISAVRAFHNPSPIKVKFDKAIKEFE

SEQ ID NO: 11270 - protein, 104 aa, Methanobrevibacter gottschalkii
MSFCLDTYLQQSDDYEIHASKAGFKDCAMIIRFKADDLVYVKPGDEVLGVRVIGIPPIPIGFDHNKGTVFIPYTKPCHGTSVVELPINEEEIEKIRKLDTGNKK

SEQ ID NO: 11271 - protein, 314 aa, Methanobrevibacter gottschalkii
MKSTVVGSFPAKESSPSNFKDKILNTLGLYDPFREAIRSSVIAQLDAGVDIISDGQVRGDMVSIFTKYIPGMKIEDGNTVIVSKIRNPIKEISIKDMQYAKKVMKEYYNGNIPDGKGIKGIITGPNTIVHSSRIESFYKNKEDAIIDLAHSLKFEVDSIAKKVEPVYIQIDEPFLSTGMVDMNTAREAIDIIHDGLDIPLGMHVCGILSNAFKDLAKFNIDILDMEFAGNNINLGVLEKNASLLTNKKVGFGCIDSSVHTVDDIGDIDMLVSRAIEIVGKDNLLLDPDCGLRRSPKDVAFEKLKLMNEIKDKYA

SEQ ID NO: 11272 - protein, 143 aa, Methanobrevibacter gottschalkii
MYFGFSFIGLLFLIMLFIPNVLWNKFQPTDYEKYSKRENIILLAFERVGQVLVCIFSLFCGVNFNLSICVAIPFIILILYEFYWIKYFKSNKTMGDMYSDFLKIPLPGATLPVLAFVFLGICSDNILLIFSTIIWELVILVFI

SEQ ID NO: 11273 - protein, 243 aa, Methanobrevibacter gottschalkii
MKFLVINGSPRKQNTYNVIKQAKVNLNGDFEEINLIKENIPMCNGCFKCILESETECPHYDKIDPIIEKLHECDGLIIGSPVYAMNVTGLLKNFFDHTAYLYHRPEFFTKKALVVVTTAGAGHKKVAKYIDETLRHWGVNKVYKISFACGGNDSLDNDKVNKVSQKFAFDLISNKLHSPKFTDIIFYNVWRAMALSKDPIKADKEYWFNTGLVNHDFSPEVKLNIPKIVFAKIVFNVLKKAIK

SEQ ID NO: 11274 - protein, 342 aa, Methanobrevibacter gottschalkii
MVLRENRIFYLDELRAIAILCVIFAHTIQNFPTNMDYLTSPTLLSYLTVARMGVILFFMISGALLIGREYNLSDFLKRRFARVLIPTIFWQIIGYLSVLIFIGFTYDNLVQASVQVGFPWFVCAILGIYFVIPIFNSFIKEYGIKGAEYFLIIWVFLVILTNMQLNETYYIDFIFNNVGIYIGYAVLGYYLANKEFNIYSFPMVVICSVLFIISLALNSYYAFNFSHVFYIESYSIIVQCALLFLILRYMSKLAKFRPKFVLSKLHSFVQNSFIGSFIYYLSIFSFTIYLMHGFIVNAIIKYMPVTQFSMIPAIFLLIAVISIVIAAVLSKMPIISKLCGIY

SEQ ID NO: 11275 - protein, 250 aa, Methanobrevibacter gottschalkii
MKGKVIFIGAGPGDPELITVKGRNVIEKADVIIYAGSLVNPDVLSPAREDCEIHNSAYLNLDETDAIITKAVDEGKLVARVHTGDPSIYGAIAEQIRELKKHDIEYEIIPGVSSLFGTASVLEAELTLPEISQSVIITRPEGRTPKPDGESLASFSKHHATMCIFLGIGMIDKVVDELLVGYEKTTPIAVVKKATWPDQQIIKGTLEDIAQKVKDANITKTAMIIVGDVLDPGDFNASKLYDKNFKHEYR

SEQ ID NO: 11276 - protein, 131 aa, Methanobrevibacter gottschalkii
MNDRGFVSVEYIFTLFILFTIGCGLLFYSSSLINSSINIEDSVSHRIILNDVSCVISQVNSNGVGYSKYIKLPSDKGYFEITVDKSKLTIEYDNKKGETMLPLLNMDSKYKLISGRGYYISKSDDGKIVIT

SEQ ID NO: 11277 - protein, 165 aa, Methanobrevibacter gottschalkii
MTGDNGQISAELLFLFGTLIIVLMISIVFISDENELNIAMAAAHSGVIEGLATSSSGIYPADAYSDYSNSKMNVLEPYSVEIVNISYTELGGDNNYDKKQIQFKVYAKTSDRFNNKELTSIGDRINYNLRKSIAVSFNSINATNKLYNPVFSPHYVYTTANVKWV

SEQ ID NO: 11278 - protein, 131 aa, Methanobrevibacter gottschalkii
MGINTYIDFMYSEDEKKQLMEDLKEMETFKVDTGDEGKILQNDLEEYFINGNGDREDLTFRIELYFYAFKIFCRKPVVIDRNQFTIFFNDSLLDWNLIKLIMDDLSDFELEIEAVKEERDVLINLNFTLHY

SEQ ID NO: 11279 - protein, 253 aa, Methanobrevibacter gottschalkii
MIDTHCHIDFEDFDDDRDEVIKRAKDKLDNVIVSGYSNDSNMDVLKLSKDYEGFIYPTFGFHPVSSQNATDDEIKTAHENIVEHLDDIVAIGEVGMDYFYVTDNSLRKRQQKIFTGFLELANEYKKPIVMHVRDCEKKAVNIIYEYEDIPYFVFHCYGGSLKTAKRIMNMDNAYMSFSTMLCYSKQHQDLIEKIDLDYILTETDSPYLAMTKEERNEPANVVNAVYKIAEIKNMDIGTVDEITTSNACNIFKI

SEQ ID NO: 11280 - protein, 254 aa, Methanobrevibacter gottschalkii
MAENILYRLYEWYISRNLVPEKMPKHVAFIMDGNRRYSKLQGNIDVVKGHEMGVNILEKVMDWSIELGIEIITAYAFSTENFNRSKHEIDGLMNLFVINFKRLVDNPKIHKYEVKVKVVGRTELLPDNVKEAIKEAEDATAQYNKRFLNLAIGYDGRLEIIDSFKKIIKDVQDGKISIDDVDEELVSKNLYTAGLDDPNLIIRTSGEERLSGFLLWQSSYSELYFCETLWPELRKVDFIRAIRSYQARERRFGA

SEQ ID NO: 11281 - protein, 238 aa, Methanobrevibacter gottschalkii
MKTIAIGVGKNENIIQACHIFKEKHPKTDLKLIYRDEDLVRAVLDNKIHGVVRGSLPASNIMRELKEIYPEITRATYVNGDEYEFLLTPVGIDEGNSVEDKLNIVKNCIAFYKRLGKTPKIAVLAEGRKDDFGRGEEVSKSITDSEKLTKLIQETTGEEVKNYYILVEKAIKDDCNIIVAPNGRVGNIIFRTLVLLNSWPSYGAITFGMDKIYIDTSRDQSIEGYVRSLILANTLDNF

SEQ ID NO: 11282 - protein, 459 aa, Methanobrevibacter gottschalkii
MKAINKMLCLVDGEHYLPVTQQAIDTLNNLEHIDVAGAVFIGGTEKLRDDSEETYSQKLGVPVQFAEDKDIPYDIIVSMIRQYNIDTVMDLSDEPILDYPKRFKIACSVLNEGISYEGPDFKFEPVSQYDIMKKPSITILGTGKRIGKTAVSGFVSRLIDKNNYEPCVIAMGRGGPSEPEIVHGEELEITSKFLLEQSEKGIHAASDHWEDALMSRILTIGCRRCGGGMAGEVFLTNMKKGAKLANEVDSKLAIFEGSGAAIPPIKTDKKITLVGANQPIETVTGYFGPYRISLGDLIILTMCEEPMASKDKIAKIEEFIQEINPDAPIISTVFRPKPLEDISGKNVLFATTAPEGVKDKLVQYLEKNYKCKIIGTTSHLSNRPLLREDMKKYMDNADVMLSELKAAAVDVATKDAINAGLDVVYCDNIPIPINDTYPDLSKTIINLVNSAIDNFDNQI

SEQ ID NO: 11283 - protein, 238 aa, Methanobrevibacter gottschalkii
MDISEINLDETHIRLTTDLSCHDLKRYIFSIRRDLKNYIFKNQEFALSLEPIKSEDNLPLIVKTMIDASNIADVGPMACVAGAISQLSLNYLIEQDSKYSIVENGGDIALINDSSLLCGIYSNNQVLGNDIAFKIKPRKKPLGICTSSGKIGHSISFGKSDSVTVISKSSAISDGIATRVANEVNGSNSEEKVSKGLECGEDYSEFFDGLLIISENNVGTVGRLPKIIETKEFDVKIV

SEQ ID NO: 11284 - protein, 95 aa, Methanobrevibacter gottschalkii
MYKDEMIQLHQFLVYVLKYLAEDDQITNDCSEYISLKISPHHIHKTKAEHKHAIFVLCKIIAQVVADKENNSIPDNVRNSLGDLVTRSQVELSAK

SEQ ID NO: 11285 - protein, 256 aa, Methanobrevibacter gottschalkii
MKSFEFLSIKREKKPRTSGLTMVLDKGLGLETASSLMDISGEYVDYLKFGWGTSIVHEQDIIKSKVEMYKSHNITPYTGGTLFELAYTKDKLEEFFDEAHNLGFPAIEVSDGSTDIPHENKLECIEKAKESGFEVLSEIGKKNPILDKELSIDERISNMADELNAGSSLIIVEAREGGKNIGIFDSKGNAKEDEIDTILNSIKGEKILWEAPNKNQQVFFILKLGNTVNLGNISSDEITSLETLRRGLRGDTFGKL

SEQ ID NO: 11286 - protein, 417 aa, Methanobrevibacter gottschalkii
MKNNRTIGEINEKITNGEANIYTAEEFKKLIKNDETPSFNEVDVVTCGTCGVMSGTAAILNFVVSEPGKFIRANEVYLNGVPAYAGPCPNEWLGSVDVIIHGTAHSIHNENYGGGFLFKDILEGKEIDVRVESADGKTINNTITKEDIIRAQIIGTRMAFKNYTAFTNPNKEDISSIFAAKPLGGNLSGLTFSGCGDLNPLQNDVPQNVIKEGTKILINGTQGYVLGNGTRSSAEKPNLMLTADLMQMDSYYIGGFKTGQGGEVYDTVAIPIPVLNEEIYNNLLITDDKISITVSDIKGRHLPLTETNYAKLWGEYSLRPQYDRANCYKCDSCTVEEVCPTNAFANERLDLTHCFGCGMCANYCRHDAFDMNMGSVDLTIDNEDVNIPIICRQSDRLRGNKLSLKLKKLIQNQEFKL

SEQ ID NO: 11287 - protein, 202 aa, Methanobrevibacter gottschalkii
MQKITDSPIDFAEEIIEDVKNSKEEGVLKCVQCGMCTSTCPAALHSDYNPRDIIERVLDGDVSIIEDDCIWNCFYCYTCHSVCPVGNSVCEVNQILKQFAIKNEIGHDKLYEYMGFADSYFTAAIGAIPEIFFKDIDRDVPGWWDFRLHLDEIRKELDLNPPLMPSKEVIDEVSKILTITGFKDKIETIRSTQEDKNESNSR

SEQ ID NO: 11288 - protein, 313 aa, Methanobrevibacter gottschalkii
MKVIPDSDILLFRSCLVSVEYPGIESSTKFVFDKLGIDYAISENQTCCTGLGHYSDVFDQIDTTAIGARNFKIAGNLGRKNLVMMCATCYAINKKSVKLLNKKDDLRNHINKLFDDNDLSHLKYEKDDLNPTENIFHVVDILYGKKDEIKDNIKYDLSDYAIATHHGCHYCKVHYEDTIGGVRDPNILDELIEACGCNTIGWYDYKRATCGTGFRQRYSNPDLSFTATADKMNSIDDENVDILVHLCPNCHIQFDRYQHLIGEREGRKFRAIHLNIAQFIALAMGGDFDKVIGVKAHTVPIDSVIKELKEVNK

SEQ ID NO: 11289 - protein, 769 aa, Methanobrevibacter gottschalkii
MRDNLKIGVFLCECGGNIADTIDLDEVRDALDVEFIGQFENLCSLNGRKIIRDAIFDHDLDRVVVAACSPISHEKTFQDYIKPLNPYLMDMANIREQCSWVHSDNEKATHKAITLINASIEKVKQSDAVDPIYCQTPDEVAVIGGGIAGMNATLSLAKQGTKVTLIEQSPSIGGHMAKIGKVFSPVKIAEECGMCLLNPILNELVWNENIEVLTNTKVIEAERRAGTYNLILERSPRYVDTEKCIACGNCAEVCEVEVPNDWNDNLSLRKAIYRPFGQSYPEAYVIDMENCSKCGDCFRECTMKAIRLKGKPERIPLQVGSVIVATGHKLFDMEKRPEYGYTRYDDVITQSELGRITGVNGPTKGKLLKSNGEVPKRVVMIQCVGSRDEKPEGHRYCSKICCTIALKNANIIKHKYPDTDVLICYTDVRTPGMFEKYYKHTQENEVRFIRGRPGEVVKKGDNFIVRTEDTIKGEFVEIEADMVVLSTAMEPSEGTIEIAEILNVGTTEDGFIKESHPKIKPVATDVQGIFVCGTAQDPKDITDSIMQATAAASKVNEYNYGGVEIEPFIAEIDTEKCIVCGDCIERCKYKSMSIQNDEIYIDPMSCTGCGKCLVGCNQRAITVNGNIDEKIMSTIKGVLSKKQEGQRTILVFLDNIGYTAADNIGVNRLSYPESIHIIKVISVNRVRPRHIQYALENGADGVFIGEFPGDLMYDEVERKIQRVKDRIYEMGENPERVTFSKVYIPYFSGLARKFVDFDKKIEELDEAEL

SEQ ID NO: 11290 - protein, 189 aa, Methanobrevibacter gottschalkii
MYYLKLSIGDNMARREAIENIINCIDDELVVCNIGFPSRELYDIKDRKENFYMIGSMGLASSIGLGLALAQPNRNIVVIDGDGALLMNMGSLVTIFANNPKNLTWIVIDNGAYGSTGNQDTYAQKLDLVDVARGVGFKNSYDFEDINLKEFIKSDDASFIVYHTEPGNSKAPIIDLSPVEIKNRFMDIV

SEQ ID NO: 11291 - protein, 163 aa, Methanobrevibacter gottschalkii
MDSSEAIFDGLKDAGINFIVSVPCVNLSKLLNMIDKDPDIIHIPVTREEEGIGICAGAYLGGKKAAILMQNSGLGNSINALKSLTELYEFPLLMVMSHRGTEGENICGQVPMGESTPLILEAMNYKFFKPGTPEGAYEDVKEAWELSVEEGKPVSVLLEIKYW

SEQ ID NO: 11292 - protein, 372 aa, Methanobrevibacter gottschalkii
MFDRLPISSKTEKILTKSLDEQITVGEANYLMNIKGADLYPLLATADYLRQKIVGDNVTFINNCNINFTNICTVRCGFCAFGKDADNPDAYILDDEAILKKAQSAIKKGAHEFCVMGGVLPDADIEYYEHLMHLLKDEYPNVMIHGFSPTMIADACKVSGISIAEGCERLKDAGLDTLPGTAAEILTDRSRALICPEKVSVDEWINIIKTAHEVGIPGSATIMYGHVETLEERVEHIDIIRRIQEETHGFTEFIPMTFMHEYSPIFLEGQSNLGASGTQDLKLYAVSRLMLRDLIPNIQVSWVKMGYRFAQVALTAGTNDLGGTLGGDELSEASGAPDGVEASIDTLSRMVKDLGRNPIERNSKYSEFYPIE

SEQ ID NO: 11293 - protein, 194 aa, Methanobrevibacter gottschalkii
MKKFIVIDGLDGSGKDTQVKLIAEMYEKQGRNVVIRSHPCFDNRYGRKSKEALLKTGKINHLLATVYFGLDAIRSVVKYTHDDNVDVLIFSRYILAVMYLPNGINTIVYKIVAFILPTSDCMFFLDVSPEESLRRIGSRNENTEMFENIECLRKNRLKSQKFTYNWNVIPGDDSAEVISEKIKMKCIETDKLLN

SEQ ID NO: 11294 - protein, 85 aa, Methanobrevibacter gottschalkii
MDKVLRDILRNNQYFEEINPDRYVPEFLGLIVNGVVVYHVNWIDIIENEIVFMHKDIQTHPIVSLVLENLNSLMIITNEGIKEVL

SEQ ID NO: 11295 - protein, 325 aa, Methanobrevibacter gottschalkii
MFSKATLKERRQYYREEWSVKDLPEFIATDLKKREFGFDHNGRGPNDRYKVFRGPESLGKFLKFKSPFAAYISVAFYNNPRRREDWLKAEYIFDVDAKDIPIRTCQCNGVCEVCLGEALEIVNSLIDTLQSDLGLKNIHLIYSGRGYHIRILDEEMMSANSELRSEVLKYAAGAEVPKSQFINPEISNKSFNFEHFTIPVGYSKIFTDKVKFNIQHLVGNEKIDGINPKLMKDILSSRHHLDNDNWGYFKRDIGPRRYKNLVAAMARVNLSTIDAKVSIDLKRILRLPSSLHSKVSMKCMEVKNRENFDPLDKAVPKFVYERKGV

SEQ ID NO: 11296 - protein, 171 aa, Methanobrevibacter gottschalkii
MEEVVKVIGIEHLKVILSSLTPEDIVKPAYENWQTGMKTGYTRLNLETGEIYGIGVELNNLPLPNNIFIDLFKIDSYDDPIDEEEFFSSSEYNEFLEFSSSEPSEYIPDIITEFCELKGIDEMKRKIGLLAYNFEKNERSNYNMWESSILNKYYDAIYEDHNPFMFSQNSL

SEQ ID NO: 11297 - protein, 441 aa, Methanobrevibacter gottschalkii
MTEVSYINPLSNEGRGIIRNYGDLNQIFKEDDSLIEICTHTANQKLSDDYIPKSYHDLALKRIQWAIEKKNNKNFTQAEFEFLTNDELYLQDVVTFHILCQAIAVQFNTGSRETRLFVQSQGTLILERLAKIPPMSRAEIIDDVLDEVKIDGSIKWKSLKDIVASKRLKLTDLLIDRGDIVLQQDDFLNRFADRFHDRSPDRMYSILIGDSVKEQILSRLVMQKTEEYIKRIKEMSSRIEIHPAIIKIGEELKEFIPDETGKYNQYYAGNGGIYGSVQAGKLNPDAFPPCIQETVNGVSSGGRNDAIVLLLTSFASYARLYPRIFASEENVKVSDMDPDLTITENEILPLIFDAADNCTPPLFEDQPQEKINIISKLGFGMHDRLDINHEGETKWYTPMSCEKIKIHLPNLCHPDKSCKGINNPLSCYGRKKFQLDNAQKE

SEQ ID NO: 11298 - protein, 267 aa, Methanobrevibacter gottschalkii
MFNEHVIKIKEVFRIPKVLISGRGGCGKSTIVSLLARKLKNNGNRILVVDCDESNFGLNKILGIEKPKKTLMNNLGGKLAVRDKLLEIVQKDENHLNIFDVMSLDDLSNDYVTWDDNLGFLEIGKIEHSMEGCACPMGALSRDFLNHLTINENEWILVDTEAGIEHFGRGVLEGADFIIAIVDPSEDAILLANKAYKLSFENNKNFGVILNKIDDNLEEILKSKLDSNIAILGIINYSSDIAMLNLQGNSVESVSIGVLDDIITCIN

SEQ ID NO: 11299 - protein, 209 aa, Methanobrevibacter gottschalkii
MKLKNFKRENMIPLPVTLISTANKEGIRNIAPYSCVVTILRPTNLVCIASAMMRDTYVNIEETGEFVINMISADMVDAVIPTSSHVSFEVDEYELAGLEATESKKVSAPGIKGAYSQMECKLTKIYKDKDPIGIPYLLIIGEVVHLEVDDDCLDEEYGVLDLNKVKPLMMLESDKGMHFCTIEDLNKFETFGAMFSDGKDPLEWMYEGD

SEQ ID NO: 11300 - protein, 181 aa, Methanobrevibacter gottschalkii
MKIESITDFENLDSPRVQRIPGFYGEKLIDGVVIRKLPMFSDERGFLCEFIRLNDEELKASNIKQMIASYSYPGMIKGWHLHSKQEDHLFCVKGMVKVVLYDFRKDSQTYGMINEIFMGDKSPIIVYIPPGIFHGTKNIGIDMSIVIGMPSLFYDIDDVDERRVNPIDNDIIPYEWDCKME

SEQ ID NO: 11301 - protein, 908 aa, Methanobrevibacter gottschalkii
MNKKLLIISVLVIFIFINAVSAENSTDINLELNHNNDECIKEISDESSTDIDLKINYEYGDEINPEISISHCNNNMNYTKNIIHSNNYRITMNKLNDGAECSVSVSALGYITQIQNITINSQSNKTTIFNLKATDIYKMGYDMTKSADRLLNFSSADDVLVITTAGMTRINDITTENALDGIYNAADGHITYGKGNLLTLHAIRTDPTNFAFFIKKGNRLTMAFYQNASTTPVYTGIGGVGLTTNQWKKLKGLIGADDAYTYVSIANAWNAGLYSDILTLASYHGHVCTGLISGQAMVTTLIKYYPPRGETGAQPLENTAYYVLGVPGGSDDDAFTWTLDITQGKMSYIGFDTMENKNMNGFIRWNSSSNTGLLIIMSYDEAKIKNTFKSLYPNINPDNSVTEDLIYQNWLISTLMSNPESLVTIEAAYKDLTLEQKNQLIGNQLWSASNITARGLDLDYINSLNLPDAEMETGIFNNVHLSDSQLKQIGVDASLKAVDYFKNINVTIEKDMSNFYVLTGAGFVRINDTATSMVFDGIEDIFGARLSRGNLLPVHTALWKDLIIEFYWLNTSDIYNSVTYSLKYNSTTGQLYECSQQYNIQDRSLRYDPPYDALMGWLFHNHVCTGSSPGVLLADKIFDDLPLGENESYVLVSTYTYCKDDMLSRLLGVSPGMGNYYNLAYSNSDVNAGALWTADSDIIIRWNSETNTGTATIIKFGYPIFKDGADEYAEWMRFVKGDYSSENIVSLPTLSFEVTKPITRDDYNKIISGKSDDEGINVLSYIRALPDKIPAVLIDNNGISNGNDGNSINKYPKKSNNNSANTNSIFSSSNNYNSPSKGLNPNVGVSSYSLSGDSDVEDKGEASSNGKSYEVSKTPATKSIDSNSLIYALVGVLAIGILIGLGFMKRRK

SEQ ID NO: 11302 - protein, 662 aa, Methanobrevibacter gottschalkii
MSKIFISCALPYANGPCHLGHIRSTYLPADIYARYNRMAGNDVLMVCATDEHGTPIAVKADKENKKPIEISKRYHDMIVRDVESMNISLDNFSRTTDEKHYEIAQNFFKELYEKGLIYRQDLEQLYCPNCKKFLPDRYVEGLCPVCGAEARGDHCEKCGRALDPTELDEPHCITCGTTPVIKDTYQYAFKLSEFEDELKEYIDNNENLPSNVKNYASNWLKEGLKDWILTRDMDWGIPVPLDEAKGKVLYVWIEAFLGYISSASQWSAQSGKKWEEYWNDFVVHFIGKDIIYHHSIFWPGLLKAAGCKLPDMIYAGEFLSLEGEKMSTSKNWVIWIDDFVKEYDPDILRYFLTINAPLNKDSDFSWDDFQKRNNDELADVIGNFLHRTFTFTRKFFDNKIPEYANPSREDEEFRKSIESLPKVAGEFIANFEFREGLLEIFKVAKKGNKYFNDQEPWKAVKEDMQKAANCLYLSNQLAKTLAYTLKPYLPTKADAIAKILNIDELSNWADAAVFLPSGYEINKAKPLFKKIEDEEIEAQKEKLQKNLKNNEDENMSDLITIDQFDEVIIKIGQIKEAEKIEKSDKLLKLQVEIGEDKPRQIVAGLAKFYSPEELISRKVCVVANLQSAKLFGTLSEGMILATGESGALLTPDVKAEVGERIQ

SEQ ID NO: 11303 - protein, 525 aa, Methanobrevibacter gottschalkii
MPESVLVNKAENYLKAIANDAISLDNIEDFEYFKDLYFKLDDRLNFLQELKEDMDAQGYTTPFTSLNKYGSKAVADIDVEEMGENSRHNKIFRMKANAKKNILDRVKSAIDSHKIAIGNLEQFGYVKCDSCYKKYSMSEYKQIEGKCSCGCTIFSFKIRKDATHRIEIIPYLPLSGNYMVLRNQLNTFGRESLKQVLNILKQERRGVVKTIALVIRFRDKNNRLVRKNITLDSEYINNYEEEVRRIYGKRVRIEALRFHRTKPAIIDDKHARTALAIGYVRYSEQIIDDIKDEILKRKLSDFKRINTYDEIFAEYENKTPNFIDKYDLEAIDKWRKSQIKENFKHLGFYDKYGNINRSLSRDLKKRENIYKNILRNIASALIIWDIFRYYITTSNNSRKIDISPFPYIRVELDREQRKVFQTTHKKVIETLNTYTNIKIIPVCEMDLLLHDKFKFEKQIKNSNIKFNHVALGAALIHENSDIELEDISNALNINESKIKKEIKNIENIKNPKSDKSKKFLDLIKK

SEQ ID NO: 11304 - protein, 154 aa, Methanobrevibacter gottschalkii
MDEDVKTVHITKALSSAVIVNLIENYPNLEVITCSPSVYDRTSSKYIDALSQLDIEVKKKYNWGAKSQTNGAEFEVLELSDNGLKPKEIAQKLDLKLNRVYYLLKKSNAKYDNRKRKHDHEEIKELKNEGLSAKEISQKLNIPLRSVYYILNKK

SEQ ID NO: 11305 - protein, 337 aa, Methanobrevibacter gottschalkii
MMILPQIPLYGIAIICGLLSFFVSRLTMPRIIRKLEAADIVGKDIHKSWKPVVAEMGGFGILFGFIIGIFSGIYMHDILTFNLVVVLVVILLVGIIGIVDDLLALSSKEKFFLLFLAGLPLIWVAPPNVGLLYLITIPIALSVGSNLTNMLAGLNGIESGLGIISMASLTIACIILGKYDVTIISMSMLGALIAFLYYNRYPAKIFPGDTGTLIIGAAIVCIAFIGRVKLIAFIVLMPNIIDAALKFYSAGFMNRQQQKPTQLNDEGKLVRPDVGFKSLIRLILRKPIAEKDAVRLIWAIGFVFGILGIAVALTMPGVLESKTLMNFLQIKEMLYHI

SEQ ID NO: 11306 - protein, 222 aa, Methanobrevibacter gottschalkii
MMPYVILSAAMTLDGKIATKTGSSNISGKKDLLRVHELRKECDAIMVGIGTVIADDPRLTVHKVDAKPDDNPVRVVVDSKFRTPADARITNSDAETIIACAREYKDELIASDKYETFKKRGVKFFYSGSKRVDLKSLMSYLHEEGIDKLMLEGGSTLNFSMIKAGLIDEIRICVAPMIVGGCDSKTFFDGEGFDLMGEAVKLELTDSYQLDKDLILTYKVLK

SEQ ID NO: 11307 - protein, 154 aa, Methanobrevibacter gottschalkii
MKASELLEAIKENIRYYPIEYLKNKVADDRYKDPLTKKLAEYNSNAYDDIYETVIIDDFDINDKVVKKIREDIAFYFDKYGGGEDEHKIFAENISLYLALIAKKPLHPYGENKKDEVYYSNGSYYCRGRIKYIHDEKSLCRYCVCKNVGFMDLF

SEQ ID NO: 11308 - protein, 221 aa, Methanobrevibacter gottschalkii
MNKRIDLHMHSLFSDGELLPSELARRALKLNHEAIAITDHVDWSNVEAIPTIQDAIDDINANWDITVVLGAEVTHAPVESIDGIAERAKELGAEIVVVHGETLNEPVTPGTNRAAVESKHVDILGHPGLITKKEAEIALKNDIYLEISARKGHCLGNGHVANIACEVGNKLLVDTDTHAPDDIITFEKSYEIALGAGLNHDDAMKAIVDNPRRLLKSKGIL

SEQ ID NO: 11309 - protein, 407 aa, Methanobrevibacter gottschalkii
MKAKAFKIADGVYWVGVIHWNSRTFHGYGIPGTTYNAYLVFGEEKNVLIDNVYRGLFDQFDARVKDAFEQEGKEFKIDVFVQNHSEMDHSTFLRDTIAKYNPDAEIYASQNCINFLEAQYHNFSDLELNAVNTGDELDIGGRTLKFISAPMLHWPDSMFTFLAEDGILFSNDAFGQHLCHSKRFDRDYPLEYVLGEAQKYYANLVTLGSPMFRMKLQELTDNGILDEIKMIAPCHGQIWTNPAPIVEKYSEWASGVCKDKITVIYDTMHHSTEKLAFQIAEGIMSEGVEVKMYFMQEDGPDDVITDILDSKAIAIGAPTMMNKPFPRIGNMMYWLDCVNFKGTGSEKNALIFSSKGWGGGAVDKLQKDLESAGFNVTDTMDILFVPDEDMLAEAFEKGAELARSIKE

SEQ ID NO: 11310 - protein, 168 aa, Methanobrevibacter gottschalkii
MSDLIIYFSRDGENYFSGEIKSIEKGNTEVIAEYIQEFTGADIFKVIPKKDYPSDYMKCIDIAKKELKANARPEIKEELSDISDYDIIYIGFPNWWGTLPMPMWTQLEKLDFTGKVIKPFVTHEGSRFGKSGKDLKRLCKDAIIKKGLSISGSDVYDLADIVKIWLEE

SEQ ID NO: 11311 - protein, 1348 aa, Methanobrevibacter gottschalkii
MKIKSIYKILIFSIVLLISLSAVAAEESMDNTTSNDDVLTSDSHDDVLTLNSNDDILTSSEKTWYVGKNTTVGGSGTQEDPFNNIELALNHSSSNDTIYINPGVYDGPHNTNLKIDIDNLTIKAKPNSVLLNANINNTRVFEVTGNDVSISGLNFSNVYMEYGGVIKWDGNGGSLTDSTIKNSKSRVGSIRWEGNNAIINNITILNSTSENGILVISGTSSNITNSTIRDTKGYYGAVMFGGKFNIIDNCTFINNTAWMNGGGVYDWGANNTVSNSLFIANNGTRGGAILTYENQPNRMNIINNTFINNIGGQAGAIVVRRAGANIDNCTFINNSAGSAGAVLILSEANITNSIFENNSASTVGGAVYITGDGSTIDNSIFINNTANNDGGAIYWSGENGTVTNTIFINNTVNNGTGEAIGYINNVTLNNVTLVNNNIEQVIVNESTPTFEYVFKLTEGYSNVKLTDNYTAFCTEKTKWSSSPRTPLIPHNDLSILKNHITGESVAEYLKILIYKYLKDPDRIRNLQQKIWIFTDDNYIDSTDSIIKEVISDYNSGFRIPNQGFSEIINDTTVLRIDFKSYNITKQIQNMIGFKSSIENITYNMSVVKNTLTPAVILGNQTTFEIKVTNTGSYYLTNVSVIEDGYDGLIYNSFSDPSGKWIFSRNSDGKPMWTYNGTLYVGISYSFNVTFNTTKTGNFTNFVVVTSNETDNKTTNNTTKVYKPDMTVEKLSLNRTVYVGNQTVFTIVVRNTGDCDLGDVFVVEKAPEGLVYNSFKGTDWSYNNGKFTYGKVLKVNESVSFEIVFDAVSPGNWTNVVVAGSNETDNKTGNNTTKVYKPDMTVEKLSLNRTVYVGNQTVFTIVVRNTGDCDLGEVFVVEKAPEGLVYNSFKGTDWSYDGNKFMYGKTLKVGESASFDIVFDTISPGNWTNVVVAGSNVTDNKTGNNTTKVYKPDMTVEKLSLNRTVYVGNQTVFTIVVRNTGDCDLGEVFIVEKAPEGLVYNSFKGTDWSYDGNKFTYAKVLKVNESVSFEIVFDAVSPGNWTNVVVAGSNETDNKTGNNTTKVYKPDMTVEKLSLNRTVYVGNQTVFTIVVRNTGDCDLGEVFIVEKAPEGLVYNSFKGTDWSYDGNKFTYAKVLKVNESVSFEIVFDAVSPGNWTNVVVAGSNLTGNKTGNNTTKVYNPGLKVEKITLDPVVSVGEITSFEIVVRNTGDCKLGDVFVHEDSYEGLRFHSFRGDMWKQKGDTFYYQGVLNPGESVSFVILFTTLKPGNFTNIVTAGSNVTNNTTTENKTKVIENHTNNNTNGTNKTVNNETKEVNVHKVDTSRATGNPLLALLMVLLMISVTSVRKFKK

SEQ ID NO: 11312 - protein, 262 aa, Methanobrevibacter gottschalkii
MDNRKVIIIALIAVIVVLGGLIAYSLFTQNQVQYQTIAVSNATTMEVPVSKNSTFFNDALGIKYYQDDKSGVQVISWNGQEQASAKGAVNIASQFEKQKAGTTQSIENGVPVYENKKLRCFIIEVKNATTNDNIIIVAKDKNVALHMLKSIKFGVSNITNAAQVEPYAESGGNHLNDNNDTVFVFYPWYVYDEGDYDAYDDYSSRDSEYADDSYYDYSSSDSEYADDSYYDYSSSDSEYADDSYDEEYDESDEDYESSEDFN

SEQ ID NO: 11313 - protein, 104 aa, Methanobrevibacter gottschalkii
MDELKSEIIKFQKERDWKKFHTPENLAKSISIEAAELLEHFQWGKDYSINEVADELADVLNYCILMADALDLDIKEIVLNKMKKNAVKYPVDKARGNAAKYTEL

SEQ ID NO: 11314 - protein, 622 aa, Methanobrevibacter gottschalkii
MIVYEATKAEFIDSVFSGSITDEIYEIYQQKIGKSGKSQIMSWENSMQYMYRVLEDPEIPDDSGVAIEFTIPTTSKRIDFILTGLNQFHEDSVVIIELKQWMEAQKVEGKDGVVKTILGGGLRETTHPSYQVWSYASLIKNFNQTVDEDEIGLYPCAYLHNYDFTDADDLSDEIYKPYYDKAPLYGKRDALKLRNFIKKYIRHGDNSDILYRIDNGKIRPSRKLQDSLSSMLEGNKEFVMIDEQKIAYEMAIKMARESYLDDKKRVLIIEGGPGTGKSVVAINLLVDIIADDMLSLYVTKNSAPRNVFFEKLRGDKYSLSYLKNLFKGSGSFTKSKSNEFDAIIVDEAHRLNEKSGLFGNLGENQVKEIMNASKFSAFFIDKHQKISLKDYGSVEAIRKFAQEFDAEVEQIKLTSQFRCNGSDGYLSWLNNVLEIEETANFDGFDFDYDFRVVDSPNELKNLIFEKNKENNNARLLAGYCWNWIKEGKNNSDVHDIEIDDFSMSWNLGNSDTWAIDDNSVNEVGCIHTSQGLEFDYVGVIIGNDMRFDGEHIITDFNQRAKTDKSLFGIKKKHKENPDEALKVADEIIKNTYRTLMTRGMKGCYIYCEDMLLQAYFKERFGN

SEQ ID NO: 11315 - protein, 402 aa, Methanobrevibacter gottschalkii
MIKRKLYLNQIERLMDKEPIKIITGVRRSGKTYLLKSIQEELKNRGINEENIFIISFESMKYNKIENFRELDECIINLTRNTKGKIYLLFDEIQNVKNWEKSINACRVDLDCDIYITGSNSELLSGEMATLISGRYYQINIYPFSFSEFIQYKKEIEKTDIDDLEELFKEYVEYGGMPPIQQVATEDKYSYLGDIYNTILLKDIIARHNIRNTDMLNRILDYVIMNLGKNFSATNIVKYMKYERRKISKDTILDYILYSKNACFIHQAPREDIKGKKVLKHNEKYFLVDHGFYQAKYGEIENMGSILENIVYIELLRRGYDVKVGIINKKEIDFVCTKDKKRIYIQVTYKLENDETIEREFSGLVKINDNFDKYVLSMDKLDFSGSGLKHRNIIDFLTSDYI

SEQ ID NO: 11316 - protein, 981 aa, Methanobrevibacter gottschalkii
MEFNENQKRVIAHEKGPLLVEAGPGSGKTTVIVERIKYLLNNLNIAPESILVITFTRKATENLRNRLNDYISKDDLSKMHISTIHSFCLEYLKSKEGFLKLLDDDNSEKKELFIQKHKRALGFVGSATLFDYQIPAIIDKFGEYTSFNVNTDKLINYIKETKPISKDYLDFIESEIYFSKKRIEDNDFKDDWYNARYLQTPKAYLKYLEVLDNNSYVDYDTLQLKTLKHLTRDPKTQFNAVLIDEFQDTDPLQIRIFEILLKQSDYFTAVGDVDQHIYAFRSSFRDYFKDMKERFDAEIISLDVNYRSTANIVRVTDSFIKHQRSDYTQKHLVSNNDNYDNDTFLIESEDSQDEASKIFNIIAELKRLNKIEDYGEVAVLYRKHNTRTIANLIELLDENNIEFVIRGQNDLADQNEIRSILLLLWYLTRNMDEGHVLSGDELDELNLKAFCGEYFEPTFWSLEDETKTYLTTLQDLFYENILKVENEIRSLQGKRPVKSYKRVRVNESYENLIRIFNKVTPPVIDLRHVHEADREFFNNLNNLRKRILNNELTILDVYYELISLNFNKLSQDKVRNLSMLTRTIYNYESFISQTDVKGLFYFLNRIIKNYGSNYSSQNGVQLMTVHAAKGLEFPVAIVASLEKDKFPMKIKDPKREKRTIFMKDTFYTPNEFLKYKEVTLDEENELDRQEEERIIYVAMTRAADLLILSCVGKTPDVINNIKNYLKKPNLNNVIINRHFTNNDTEKLKLNYSSFSTYNLCPYMYDLVYNYGFKVSSEKVTNFGTVFHEVMETVNLKLKDGEKISKEELILITQDIYKSMFDIKETEDEFNMLIDSILNYYNTYSLNQEVVECELPFELEHENYILNGEIDLIYKIKDSEIAILDYKNAEHDDNKIAHYEKQLYIYASALKEMTEFDKYEIKKGITHFVKTDYRHEVDITDEKINKQLYKLNEVALKIQNNEYPKRESGFCNVCKFQVICQN

SEQ ID NO: 11317 - protein, 168 aa, Methanobrevibacter gottschalkii
MNTTKNQSIVYDEKTIFKVKEMIVAGLNKLKLFKCKKSGNLDFYNDLKETFTEIALNLKELKLWNELDYFLSISLYIEYIVYKNSIDSSFGHCSFAIELLNFYINLIKTSSDYYLNLTEMSIKDFGIYQNETKTRYRQYRRKFHTDVYVLSGNFTEDQMYEIHASLRE

SEQ ID NO: 11318 - protein, 221 aa, Methanobrevibacter gottschalkii
MYFLDTNVPIGYTIIHDRWHENSKNFIDNNKNSIFWSNFVKSEYYNKLDNILDYIVKFLKSIVCILKVNEMDFYSYNSFEEHILNETRFCKLDYFKKQKILENFWNEYDFIVGISTKLYDCFYNYAFDFVNNYNNRDLRLNEIMRLHDCGLDNYLKYYDYALKLYKNGIHPPDCKIIIDAHDCGLTHDDLKFISNDNKLIDALSKIDTSNLRIIEFGLCNS

SEQ ID NO: 11319 - protein, 335 aa, Methanobrevibacter gottschalkii
MSVKELLKECGFLYFKEDYKNLLIKCEEVLKIDEKNPIALNYKAIAFYYFDMDDIALKILNDTQKLYPKNYYTLSIKSLVYIALKEYRKALDCCNEGLKIKNFDLLEINKIKALIYLDKIDDAYNFYNTIECPNFKFEEILIECEKYSEALNSYNSKLKENSQDLELIDNVKTLMVKYDLNVKPNWDEEFYISWIYHIKHNDNKNCPKCGSKLIPIVYGYPLEEALKQEKNGEIILGGCCINDEMGNLHCPNCKNDFYIDALHIDAKGPLYDYIVLKINNLDELLFDEICCSIYKIREDIEYFDDDEFKAFINHLISIGYLYEPVKGYIKLVDIH

SEQ ID NO: 11320 - protein, 630 aa, Methanobrevibacter gottschalkii
MDWQYSDYSKINPNAKKHFPFDNPRDNQLETVSEIADAINHGYKYIVLEAGTGTGKSAIAATLSNMSDSSYILTITKQLQDQYLRDFKDFKVVKGRSNFRCQNYINKSCSEGKCLTEGFECRFSLKNRENEIRKDNTCPYYYQKYLALHAKTVVSNYYYMFLELNYVKDFQKRDLLIFDEAHNLESTLMDELTLEFSKSDLEEYLDYNLRCEKIEELNSNNYLNWIEFINEIKEGYLEELNKLERLDKLELAEKIAFIKHQINDCSRFIEHLTHDPKIWIFDWDDDYQTAQFKPLKVDNYAKNTLFDYADVCIFMSATILDWKLFSKWLGIPEDEIYAIRHKSPFDINNNPITAYDEYNLSRKFIKVNAQKSIGSINEILDKHKNEKGIIHTVSGKCRDFLIDNIADERLIAHDRHNRSEMLEEFISSDEPLVLISPSMSEGVDLPGDLCRFQVIYKLPFPDWGDKQINQRAGIDREWYDYRTCLNLVQTHGRGVRYDGDYCHTYVIDSRFRSYIREAFPSKFLPDTFKESIEGREFDLKEKKRLMEIGDFHIENNDYESAIIFFKELLNNELFKNDIYPYLKLSNLYHETGLFECEVQVIMRFLSSGAEYNHFEKRLKELADMGYFDFN

SEQ ID NO: 11321 - protein, 483 aa, Methanobrevibacter gottschalkii
MLEWNICKNCGAILDNSQNTCLNCQGDVEKVNIDYLKKYLDNLNFVVKTLNIFTPYCTLTKDMGNIALESLIMDDLFKYFSYLGLGDNEITDNEVEFINSLLDTNFSKEDIQTLTDAELDKSLPASFKCLQEIDEYGQNFDMYQLNSCSELFNCFKLFGKFFITADNELDGDVLKIYSQYINYLESSLKSKNTALKPIDHLNYKPSKKEETHSLDEYLNELNKLVGLEKVKKDVNSLINLVQIRKLREKRGIKQPPMSLHLVFSGNPGTGKTTVARLLSKIYHEIGLLSEGHLIETDRSGLVGGYVGQTAIKTQEVIQSALGGILFIDEAYSLTSKSENDYGLEAVDTLLKAMEDHRDNLIVIVAGYPALMEKFLYSNPGLESRFNKFIYFEDYNEEELYNIFWLMCEESNLTLDEAGDNYIKEYFKRIYDNRSNNFANGRAVRNLFEEVITNQANRLAPKKEISDVELNTLTYQDFLVDENE

SEQ ID NO: 11322 - protein, 352 aa, Methanobrevibacter gottschalkii
MSEKICSNCGNKVDGSANFCPKCKSQSFRNINEVAKPKSGVVHKLFYKYQGGYFAVSKSKIAAITTFILFASLGFESPNLIISSVIIAFLVYIIGFAIRRINIINQNSKMFFRNNNLGLITDLMHLFAFWQDRETGKFALSKTKLISILIFFVFATSGLSLPNATPILAAVFGLIFALPVFVVGYGIHRLTTSRPVKKIVKQAEPDTGKKHDDASNAKKDIHIHEFDKYRAKLNELKVRYEIKEKNARNLIAKRFTPPQLTYDKFIASVDKSTMMFNSHAEVISNILDLASQDSKKIDDELNDRFDILEALVEKIDELIDELVLSLNDDEKEGNPSNLLNDLDDLIDSVKNY

SEQ ID NO: 11323 - protein, 172 aa, Methanobrevibacter gottschalkii
MNGAGAIDSANWTSADVGYETFKIPPQYENPYSSDFDMYEFDEDIDVFTIRYVNPNLMDLYGHFLNEYHGKKVNVAGHDAVHFTYYDRHDKTNNSVLWFSAGEEFYYINWIGSNITPAIKEVVKSSLKSNYTHKEFYSILNDNIKITILSIPLNLKGLIILLSSTHTTSEMV

SEQ ID NO: 11324 - protein, 296 aa, Methanobrevibacter gottschalkii
MTNHKHLRTVIEDIYSNGNKLTEELTARLIHEFRYSNLYIPSKKEDNKLNFIIYEDDDSKLTPLFTDLDEFRKFYKDEDVRALQNPFELYQNVLKTTDIEGYILNPASEKYLFKKEFILAINNIPKTDFYTTNPYSEEELLNMKRSVDNKNLERFIENRANIGDFEGLFEQMANSQLFALMLSDLKLNKEMISLKKSGPVAAMYTDNVGGIYATLFTSERKMDAVKTKKYKYSQLVNLATLVNFILTEDMDGLIVNPESDNVLVPRTTLLRYSLGFEMYANDERLSESMFYLFRIE

SEQ ID NO: 11325 - protein, 201 aa, Methanobrevibacter gottschalkii
MSELSQLIQINKNIEKQNEEIIRLLKVIACEKQEGENSDKSVIDLGELYLEDDASFEAEPKEGEIENLWRVGSLLDNSIDVGEVYFIEGTDIFRLSVKNNETSIDNLTGDGQANIFALEETIANESVKNNKSLEDSTVILSSEHSQNLPETLKICVEQGAKKVYMHLFASSQLVGAPQSLMELIKFDFYKNNEHLVEKLFK

SEQ ID NO: 11326 - protein, 101 aa, Methanobrevibacter gottschalkii
MSKFCPKCGEELVDDAKFCKNCGETIKTEQETQNNEVQNVENDHKIALILGYVCAILIPLFGLIFGIYLVTRKDSSKANYHGKIIIGIAIVIWIISFLLMM

SEQ ID NO: 11327 - protein, 88 aa, Methanobrevibacter gottschalkii
MREISIDSDFDVGEITSKINKLMSEWPIQLLDIIGPNWIVFGYDMKVKFVLIFDADFNDLETQIKLEDLRLNVIHHIESLKGLHIGIT

SEQ ID NO: 11328 - protein, 112 aa, Methanobrevibacter gottschalkii
MKNKNILLIAIAVLVVALIAVGAYTMFNGNTHLNVTDNTTGIDNSTGIDNNTTVVGDNSPLENLTNNNTTYKVYNPQSDSYVPVIGEKFDEEVNRWYTYDDQGVRYYNTRIN

SEQ ID NO: 11329 - protein, 363 aa, Methanobrevibacter gottschalkii
MTRQEKIIKTSVIGIVVNLILVAFKATIGMLVNSIAITLDAVNNLTDALSSIITIIGTKLAGKAPDKNHPYGYGRVEYFASVIIAAIVLWAGITAFMESWPKILNPDATSYTAVSLVIIAVAVLVKFALGKYVKNVGEDINSQALVASGSDAFFDAVLSLSTLIAAVISVFFHVSLEGILGVVISIVIIKASVDMLRETIDSMIGSRVDSELSRKLKEYICEIPEVYGAYDLSLHNYGPEDMRGSVHIEVDDDLTAFDIHSLTRNIVYKVYDEFSIVLTIGIYARNNDYKDVREDLYNIASKYEEIIEIHGFIVNKDEDYATFDIIVDFDADREKVKERIYSEIKSKHPELDYYIIDDYDISD

SEQ ID NO: 11330 - protein, 179 aa, Methanobrevibacter gottschalkii
MSIYDFEVKDGEGNTISLSQYKDKVLLIVNSATECGFTPQYTQLNEIYSEFNEDGFEILDFPCNQFGGQAPGTTEEITEVCRSKWLVPYAIFDKIEVNGENESPLYTYLKKEQPFKDITGEGSEEFKKILESINPNYMDNDDIKWNFTKFLVDRKGNAIQRFEPTEDLNDVKEAIKALL

SEQ ID NO: 11331 - protein, 895 aa, Methanobrevibacter gottschalkii
MESDNVSKNISTSLNKTQNKTLINNETYKKTTLEFSPIITEYTSGNIIYTVKAYSLLNYNGMKYKDPKYNSLIKIKLYTGNSFKSYSSHIDNNGIASIKVPDLSIGYHKVEIFIDNVQGATSYIKVIKSTTKVYAPTTIIKFKKNMNYKIKVVDSHNNPVKNIILKVKVYTDSKYNIYSIKTNSKGLATLKINKLSLKTHKIVITTNNKNYKINKNSKILIKKTIPKKIETLTVSSPNKTIQRGTSFTIKLTDDYNDIVKKVSIKVNIYTGKKFKTFKITTNNNGVAKLKTDKLSLGTHNLKIASNNKNYKFHKTFKITLVKTIIHDDIKTLVLKNITYYQTKDGKFNAKLGWYSKVGSSYQILRKTNENYNIISTVKSNSSFTTFYDKIDGNASYTYSVREIIVKNNDIILGPYDKEGLKLLKSPNITADFQNLKAEITWNKVEGATKYIIFRKIGRDANFKAIGIVNSNVLNYTDFYYKTPKQLRSILNSNTFVDPSFNNLFYTVRACTVKNTSGINQISYGSYLIDGDFHLEAPSIISLKDNEIKWGKVPNADGYLILKKNSDDDEWTIINQVAQNESNTITLKLNNIENSSYYSVKAFAKKNGEIIYSKFDSGFSLKNYSKDNSKYKILYFGDSITYGSPYKSNSNKHIFSIPYRVGELLGCVYYNPSIPGSTYHDLGQKDGKNIENTKYYRYRICREVVDQISIGELPGNWKELDNLKNSEGITNTYIDDYNIVVLAAGTNDYLDNSILGSINSVDTHTFNGALNHILNKIETASKTRVERGESPIKVIFVDLCYSDRAYDKTIKENRDVTKNKIGLTLNDYQNALNKQYNKWKNNNFLTLYNFKTRDYNIVNQENCPYTTSDNLHFSKFTYGQYGNAFASFLKENIFYN

SEQ ID NO: 11332 - protein, 438 aa, Methanobrevibacter gottschalkii
MKKIITYGTFDLFHKGHYNILKRAKMYGDYLIVGVTGENYDIGRGKLNVNDSLATRIENVQKTGFADEIIVEEYLGQKIGDIIKYDIDSFVIGDDWKGKFDHLSKYCNMIYLERTKGISSTQIREETFNQYTIGIVCDFVDDNQIINEAKLVNGFEVKNIFCEDEEIKNKFQEKYHLENSCEEFSELLELSDIIYVRCNISKRFNYIQKALNAGKHVIYDPPATFNYNELDELIHLAEQKNVILMENIKMVHIYVFNQLLWMTQGGLIGDILSFNCSISKIDINRPNLFYDLSVYTLLPMLKIMGQDYEKYDFIVKKDGEDIEFASMNFVYSNGRSIINVGNKIRVDNQLEIIGTEGTIRMKGEWWRSRNFEIHYPESQEIQLYNTNFEGNGFKYLLRELSRMLDNNRIDTRSIFKDESLKIVKILEQVKKIENNNGD

SEQ ID NO: 11333 - protein, 355 aa, Methanobrevibacter gottschalkii
MKHLFTIGPVEMYPETLKIGGKQVPYFRNDEFSNIILSINKGLKKLLFNKNGEIILLTSSGTGAMEATIMNCFTKEDNLIIINGGSFGHRFTQICDVHGIPYESVNIIFGETLTREMIEDKLNNGKFTGLLVNLDETSNGQLYDIKMLSDVCKKNNLVFVVDAISAFLADEVNMDKYSIDAVILSSQKALSLAPGLSIVALSEKMLKRVEVIDSESIYFDFKDYLKNAERGQTPFTPAVRVIIELEDMIKRLEKKGIYNIIKHTNDIASYFRKRVNEIGLEYPSYPLSNAVTPIIFPKNNADLVYKRLIEDYGFVVNPSGGNFAKSMFRVSHVGNQSIEDCEELILAISEIIKKL

SEQ ID NO: 11334 - protein, 552 aa, Methanobrevibacter gottschalkii
MSNMNSIQKNLFQLLVEFDEICKKYDIKYLLAAGASLGAVRNHRFMPWDDDIDLYITRENWNKLRHILETEKDVLPNGRSFVYKENTPYYSNPLPRYINDTTTTMYRNQALAGKACGQHLEIFIFDPIPRGEKEKQKYLDLLHVYTELLSPYFIVNKHATYEDWEKHYKLYKKYCDRIDKEGEEKVLNELENTLQQYSIEDCDEYCMCWGTKDYIYDKELFQEGQMGLFEGKEFPIGKHPEGILRIAYGDSWMYIPEIDEQIVHGGIKYDNISFKEYTDKYLHKINRDSAFEKFKINKRNNVDLYNVREKVRMLIAKEKVQVGCMHFKNNLKENEELLRSLLENGDYLELSERFEEYSILQSMNEVQKFKIFVPITDKNLATFLLNLLKQGKYYQINKYLNIRKLNESPLTKELITIENEVEFCRKLSIARYDNKDEELVQSIIDKYDGIFSDLLDIYRAKLWIKEINAKSSKDYKDINNLCNEILKKYPFDGETMAIQAKAKSELGQENESLELYKKSILNTRNGLIWQKVEDESGISRMEMERELIEEEN

SEQ ID NO: 11335 - protein, 400 aa, Methanobrevibacter gottschalkii
MKSKQDIQLELLQEIDDICSKNDLKYIFVGKNAFNAYVNHTIKNNNAHVSVAMTLGDINRFCNIIEKQNNPNRYVESMFTNPKYIPLYISYGNENTTDYHMIILNNNLHHGINIRIYPIIKSVTLDDEKIKIMDSKIYKEYKFRKFLNKKIINKKFLPIKIGISLLNNIYNISGFRKKYPDKIFNKIYIDNWDDIQNYSKVRIGKKIINSEYFKELTRYKVDNIELNYPKDTDNYFKQIYGRNIENVNVVLKPERKNAIVDTEIGYKKIINETKDLLDEIRSTHEELVWGRFKVRREKKCVDDVWKLVKMTNSQIKYIDFFEENIDYLLSLDLNDKSQFEEMEIILNPIIKKLQKYANKGMTFSIDEKTDSLIRKFLLLKNNEKLINKIDEINKLKYFVE

SEQ ID NO: 11336 - protein, 263 aa, Methanobrevibacter gottschalkii
MIIECTNDNIKTVFNYIGEDYGKCLYIFIDLKKYGLDDDNFNVWIQYNNDKICAIISEYYNGIQIYSKFEDLIIEEIVKFIKQKDVKTLFSIKPIINKINEFLPNYKQETGIVGELKKLIFEPNVHAYSAPISELEEIVKLVSEDENIGKPYGYDSLFSQYYERKTSNFGRNFVLRDKINNEIICHAGTYAELPEFAVIGGVITSKQYRGKGFSKGTLSALCHQLKSENKRVFSYYYIPSATKMHTSVGFKKIEEWSKLSKID

SEQ ID NO: 11337 - protein, 141 aa, Methanobrevibacter gottschalkii
MYKKILLPTDGSGYADQEIDRVTRLINEDGEIIILSVAPKLSTSAFQRRKDIEQLNKTFFEEAEDVVEKMKNKFPENYNIKTITKYGFPAETITNTAKEEGAELIVISASGKSGIHQFVIGSVAEKVLKLSEIDVLLVHNK

SEQ ID NO: 11338 - protein, 128 aa, Methanobrevibacter gottschalkii
MDLKKIAIVVSILLIIAIGSFAYISLNTQETKVDIITQNTIHNGDIITVQLKDLYRNGIPNQAIDLKILDDSGWAHNYNATTDELGIGQIQILGLENGNYTAHAKFNGTLFLKESANHVSFEVTDGYF

SEQ ID NO: 11339 - protein, 869 aa, Methanobrevibacter gottschalkii
MNIINSTSDLDYDFTIVLYNIENCIEDSIKSVINQKYDFKKVEIIFINDGSDKNHKIALNYQKKYPKNFFIVENDEKDMAESLNLGLNHSKGEYINFLNSGDILSNDTLSEVNSFFSKVTSSDVVGIRVDEGREKFSIDYSFIKSNQIIDISQYPEVINSILSSFFIKKESVNVNFDINPYEKSDLLFIDELLINSKIGFVIQPKVQKSSSNYLIKNKSTLNQFKHYYDSIYTFCNEQLGYIPNYIQYKIAIELASIVEIEDIDDILIDNMTASDAYSYINKVLNHISLSNIKGNIFINQHTQNFLLYLKNKDFHIDVDGNEVIFYCGSYVLNVLTRQNLWLDIIEIKEDYINFSGSITSYCEYDHISIEAIKEANGETEIIPVKFIDYSTTERKVKKFLSVPWVYSYNFDAHIQISDCENCKISFRYTYSEKETGITVMPNIKFRKFASLSKFSHYFIKDSRIVLFTQNSFLVMPYSLKKVFKFEFSSIKKILQSTAKNKIKTIGYKAIYLALFHYMKNKKIWLMGDRKEFADDNAEYLFKYCIKQKDDVNKYFVVNKNSPDYKRLNRECGNIVAFGSLKHKLLFTFSDKLISSQVNKFILNPFLRSNQFLYNGVLLHDECFIQHGIILHDLSSWIRKYIYNLSLFVTSAEAEWESIANTNYNFDTERIQLLGLPRYDNLVNNADKQILFVPTWRRDLDDPQLLVNSEYFNNINSILNNEKLIKLARDYGYSLVFRPHPELWRYLDLFDISDEFRISNESYSTLLSESSVMITDYSSIAFDFAYLKKPLIYYQTQDFENFHYEKGYFDYETMGFGEIIKTQEELINKIEFYMKNGSVLEDKYKQRSAKFFRFHDRNNSKRIYDWLIKH

SEQ ID NO: 11340 - protein, 867 aa, Methanobrevibacter gottschalkii
MADNFKFSIIVSNLSGYKDSIDSIISQELDFRQNVQLIIIKDSNILTSDIDEYITEYPNNILVLENKDNLNSRNFALRHASGEFINFMKAGDTFDKSCLKTVNDLFNSNTDINLVSIALFDPIYKNIIYKTPLSENRLIDINKVNNKEFNYYFHLPIYASFIRGTDYYFEDKNIDENGISVTSKILIDDDKFGFVKDIFCYHNPESEFSENINYRNVMGKLKLLNNIMQYADDNLNKNPEFLQHIVAKELEYIVRIEDLSQISTDLNKLNEFWNLMDAVLKNVSKKAIKSNNFLDNFVISFLLFIKNKSFAIDCSQHKVFFKTENYSMLNLHNQKLHFDVIEIKKGILNLSGYLKSICYSDNISVEALLKDENGDVKYYKGKFVEYPTTNRKTVTFLSHPWIFSYNFDFKIPINEKKIEKISFRTVYHENSEYVIWNNKISPRKYSNLSKFSHYSVKENMLVLLKDNSFYSMPLNAKSKYKFDLRAIFQILKERPQYYRGGIFYRTLIMLLYPFWKNRKIWMFMDRQDFADDNGEHLFKYALNQKDDVDKYYVLDKNASDFKRLSKSFKNVIAFGSFKHKLLFLFSQKIITSQPAVSLYNPFFSKNITMFAGFYPNVYFLQHGVTKDNVSSWLHKFNRNLSLISTTSDLEKKSFLDVGYNYDEDIIQTLGFTRYDNLNGENAKKQIVIMPTWRNYIKNEEDLKNSEYFKRWNSLINNNEFIEYAGKKGYEIIFKPHPNLYKFIDLFDKNNHVIIDYVKKYQEIFNESALLITDYSSIFFDFAYIKKPLIFYQYANDYHFDSENGYFNYESMGFGEVIKNEDDIVNKIKYYLDNDCVMEDLYRKRVDDFFKYTDRNNCMRTYEWIYKN

SEQ ID NO: 11341 - protein, 356 aa, Methanobrevibacter gottschalkii
MYKVVNGRKRIFYLDFIRALAIILVVLAHVTRAFFQNSPAGSFNMCFVSQFIDFGVIGVPLFLMISGALLLNKDYELGDFLKRRYSRVLVPFLFWAMIFPISKILFEGQVATVANFIKMYFDSNFWFVWMILGVYLFIPIINSFIKEYDMRGVEYFLLIWGGVMFLNTIGQYPFHQLELSYFAGYLGYFVLGYYLANKKFRLSDSKLLVISLLIFLTFTFINIDYTITMCILKNKLLYYKYETIVTVVQSAGLFMFIRYFALVSSNKPESIKNRIYLFFKDSFMFKIIFSISTFSYGIYLAHYNPLFFLKYEYKILFTFNPIIWLPIMMIAIIGSSWFILWIFDKIPGLRNINGAH

SEQ ID NO: 11342 - protein, 272 aa, Methanobrevibacter gottschalkii
MNKKIGFILALVVISLMMCSTVSAGLFDFMGGSDSSNDDNTFVVGFDAEFPPYGYKDDSGNYTGFDLDLAKEVCERNNWTFKAQPIDWDAKDVELDSGSIDCIWNGFTMDGREDNYTWSNPYFDNKQIIVVKSNSGINTPADLKGKIVETQKDSSALAALQGDNKTLADTFGTLTEVADYNTAFMDLESGACDAIAMDIGVAEYDIKNKNATSDYQILKESITSEKYGIGFKQGNTDLKDKVQSTLDDMFKDGTVAKIAQKYGISEDALIQP

SEQ ID NO: 11343 - protein, 216 aa, Methanobrevibacter gottschalkii
MILSNVIGQLLGGMVTSVEIFLLTLLFSLPLGLVVAGGRMSKFAPLRWLMKIYISIMRGTPLMLQLIIVFFAPYYVFGMSLSADYRFIAVIIAFTINYAAYFAEIYRGGIEAIPKGQYEAAQVLGYNKFETFFIIVLPQVFKIVLPSITNEVITLVKDTSLSFVIAIPEMFTVAKQIAAADASIAALLVAGIFYYVFNVIVAFVMEHLENRLDYYD

SEQ ID NO: 11344 - protein, 227 aa, Methanobrevibacter gottschalkii
MSLLEIKNLKKSFGDNVVLKDISLNVDKGEVLSIIGPSGSGKSTLLRCITDLEQEDSGIINFDGAFGLVFQDFNLFPHHSVIKNITNAPLRVQKRDRTEVFNHARHLLKKMGLEDKEDAYPCELSGGQQQRVSIARALAMNPDILFFDEPTSALDPELTGEILAVIKQLAADNMTMVIVTHEMNFARKVSDSIIFMENGVIVEEGSPEEVFTSNNKRMQEFLGKFND

SEQ ID NO: 11345 - protein, 503 aa, Methanobrevibacter gottschalkii
MENNDVDYLVISYYFPPRLETSGLVVARKIMEKNLNVDVIQSAYDESSDFNEIINKHINNRFPIDIKTKPDYIPFIFKYIDLGLKAIKKNYKKVYSRSYIYSNHFLALEYKFKNPNAEWTAEFSDPLLLNLYTGAIKNYPRAILDNSDYINKLNEKIEKFNEVSDTDFKALDNPNNTFFMAEYLTFIFADKIIFTNENQREVMLSVYDNELREFVMNKSKLEAHPTIDKKFYNFKDCEIRLDNNNINIAYFGTYYYIRHFESLFYAFEALNHKYKDKIKLYFFTSRAELLKVATGSLKISNNIIIEKPLKYFEFLNATTKFDILLINDTITKGHFKVNPYLPSKYSDYIGSGSDIWGICEEDSILSKKELMYKSSMTDYQSSCDVLIDILNDYGYEDQDYYFEDNIYEKRINELNWRFGFEFDERKKYLSRYNNLKEKNMTLNGELQTLMNKNKKLKAENDVLRKKNKNLKKENETLESKYNEIVNSNSWKITEPLRKLKNSK

SEQ ID NO: 11346 - protein, 240 aa, Methanobrevibacter gottschalkii
MVKVSVILTAFNEEKYIGKAIDSILKQTLTDFELIIVNDGSTDNTLNIINSFEDERIKLISHDNIGPGASRNKALNIAKGEYIMYLDGDDWYRVDGLEIAYSEAKDKDTDFTFYQMINYDEKTGKTYENDWFNLNIFDESFENTVFNINDFKGSIFDLSVGVCQKIYNTSFLKRIDAKFPEGILFEDMPFFYYVLLKADKISIIKQQLYYRRKHDGSITHVVDEKFLDTVPAGQELIFHY

SEQ ID NO: 11347 - protein, 90 aa, Methanobrevibacter gottschalkii
MENGWYDTYKFDLLAYKINGPRFALRDIEENYKIPLYMLIKKDYHSIKQSKYYQDYLDNLGPVKKKFFLDIIKSKNYNDYLALNSDKDNY

SEQ ID NO: 11348 - protein, 323 aa, Methanobrevibacter gottschalkii
MNITVGVIGAGALGTAISQNISGNVAEIILLLRNKELCDEINNCRYNSQYYPNYKLKDNIKATLETGDLSNCDIIFLAIPSSAFRKTLKDLQDIVKKDVIIVTTAKGIEYPSLKTMGNLIEEYFDENYVALSGPNFASEIMLNLPTVTNIASKSYENSVKVKKVLSTKQFKVKIIEDIYGIELCGILKNINAIANGICEGININENARFAVLTKGFNDTITIIKAIGGKSETVHEYCGFGDLILTSTSRESRNHTLGILYGQRLIINENANGVVFEGKNSIKAIRDICLKNNIHSDIVNFVYDVMIRKVTPTIAFNNLWENME

SEQ ID NO: 11349 - protein, 255 aa, Methanobrevibacter gottschalkii
MMIGVILSAGMGTRLRPLTDEIPKPLLEINNTTLLERMIRNCINAGIREFILIVGYEKEKVFEIAPKLEEKLDISIRIIENMEYDATNTSVSAYLASSYIEKENLDDFILINGDNVVDPEIITRIAKTDNTSLIVDNFKDLNGESFKLILKDVKKADNSIANGIISEIGKEIDIPSSTGEFIGVSKVIKEDVSRFNEILIRLIDEDRQNYYDFAYKPLSRDRKIDFVLTNGLKWTEIDDYNDWKTANGLIKEFEN

SEQ ID NO: 11350 - protein, 565 aa, Methanobrevibacter gottschalkii
MALIGKINNLKECLDNTKIYDSYYSAEIDESIIYLESRNGMDFTGNIFRITEELSTGKYGNFKIYVYAAKSIKAKIELFKRNYNLKITKIITDEDEATKILHKAKYIFTDSGIRYKYVKKPGQIFVNTWHGTPLKLMGFDNPSEKHNVGIIQRSFLFSDYILFPNEYMLDRMSHAYMIDKVYGGTFLLEGYPRNSVFLKDNSNYKEKLNLKDKEVFVYMPTFKGIVNNRKDEKQKNDVNKFLNKLNSKLNDNQILFVKFHPYNQSKIDFSKFNHIKEYPKNFENYDILNAADVLITDYSSVFFDFASTRRKIIIFNYDQDEYLKDRGLYFPLEDLPFPKVQNINDLVCELNSPKNYDDTKFTEEYCKYDSTNSAEHICETVINGKIECDYKIISNANKNILIYLGSMENNQAKSQLIQILENTDDNINIFLSFKPWNKNIKENHLNLLKDIPNTIEFLPLSYNLTPTFKEKVELNRFIKKGTDLNLELTEMFNRNYKRQYGDFKFDLIIDFISNDPEQSLTYACSNSKNAIIINEETQPKVYNQFNKIYRLSEFNIKNICDEIIR

SEQ ID NO: 11351 - protein, 284 aa, Methanobrevibacter gottschalkii
MNRLKAAKTISAITNPPIICIPLFLIICIILSNGNFNSFIVLESISLVFTSILPMIIIVYWAKRLDTDRDISNRKDRFTPLIVGIISYFIGFLVSLILGTNDFLTALLLCYSINTGVVLLITVKWKISVHTTGLSGPVGALILLLGPTGALFGIIYPILIWSRVTLEKHTSAQAIAGGVQGFFLTVLEMYMFISLFNFNVGNLVPLTDCIWYILAIISAPVILGILSYAHMNKIVFSAAVIIGFTVFLEYAPLSASVIYILVCLTSCLISLYAGEDYEWSDVLI

SEQ ID NO: 11352 - protein, 192 aa, Methanobrevibacter gottschalkii
MKVNLKPHAMMYPSPAVVASAYDNDGKVDACTLAFAAMCSHRPPAVMIAINSTLKRKTLASILKTKEFCLGFPSIEHVREVDYLGIESGYNLDKIDKIRFTAKKGEFVNAPIINEFKVSIECRVMDIKEVGSHTQITGEILNIQAEESVLDDRNKVVLGLLNPIAYDDISHSYFKMGGKIADGFKVGLKFRE

SEQ ID NO: 11353 - protein, 149 aa, Methanobrevibacter gottschalkii
MKSLVTYYSRSDITKKLAEDIANQLNCDIEEIKPKVDYHGKLGYARGIKDGRAGKIVELESLKYNPQDYDVVYVGGPVWAAKAANPVISYLKENEGKFNNVKFFITAGSKGFESSLEQMENTSMKPLKTLQLRAKEVKNEDYDLTSFLE

SEQ ID NO: 11354 - protein, 156 aa, Methanobrevibacter gottschalkii
MINEEFRLIDASELPISKLITIIAKCQSFYLNNMLNESGINSTQLHILFEISHQNNINQEKIAARCSINKGAVARSIKKLEDMGLVIREIDENNRRQNKVSLTQKGEELLNKSIKILNDLEQEVFDDETINKEELQNVLKEITIKIMEITEREVKN

SEQ ID NO: 11355 - protein, 461 aa, Methanobrevibacter gottschalkii
MSKNDNIKIITGDPKKAIVKLAIPMMISMLLIMMYNIADSIWVAGLGADALAAIGFITPLFMVLVGLGNGIGAGANSLIARNIGAKNYKQANNSGLHAILLSVIVSVIFTILIEGFMVPILQFMGAGDTIQYAMDYSYIIFGFLFIFVYSGVASAIFRSEGDMKRSTIAIAITAVLNIILDPIFIYILNLGIAGAAWATVISATMSCVIMSYWIWGKKDLYLDLSLKNFDYQTSLMVDTLQVAIPSTLENIVFSALAIIINSMLVLAAGTTAVAVYTASMRIVQLAMIPLIGLGTAVLTVAGVAYGAHNYKNLKTAHSYSIKVGFLISIILGAIMFVFSSPIATIFSYTAASASLSPQIATAISVLSLFVLAIPHGIMSSMMFQGVGKGTYSLLITLLRSLILETVFAYLFCFTFGWGLTGIYAGVVFGCFVGGTIGYVWAKLFIRRFKQIAIRKYAPQEN

SEQ ID NO: 11356 - protein, 146 aa, Methanobrevibacter gottschalkii
MEFILNNKKYSILNHELFINYLMVDNYFRNHYSKYDYEIRFDFITPLLNKEKIKFEDILAGTKNLEELIEREEINFIPPGLKINQHTNGNFKITYQDLDFNNITVGEAIPFLIALNSLLTYKPIVTLSQIEEELENFIEKFRSYNK

SEQ ID NO: 11357 - protein, 216 aa, Methanobrevibacter gottschalkii
MYCPNCNSENNDSAKFCKKCGTPLKKEVSHKKIINSINDEKSSKDDITKYIIIALIIIAIALAGAFAYIGFGNHNDDGQTQVQNNASSSPNPVQSTQSSQPQQSSSAQSAAMDILGGSFSTGSSLSAKTYASIYVGSQHSGEKVIIQIKYSRDGSSLNNGNMVPKTVDSSGYINVKSADSFKYYPDFAEINLFDTNKNLLDTQSVSLSPDSSTQTF

SEQ ID NO: 11358 - protein, 159 aa, Methanobrevibacter gottschalkii
DSDLDDLNDDSDLDEFDDDSDLDEFDDDSDLEDVDDSDFEDYDMENYDFKHNLLNLNITYKACSSRLGATSNLNNHSVNETKKDSNPNTESIEHAKKAKSVLKSINLPSENQSNYDKNISGNNNEKSNNEENKQGNNYLTIISIILVLILVIIACKKLY

SEQ ID NO: 11359 - protein, 165 aa, Methanobrevibacter gottschalkii
MSGIPKKEIKKHIPVKDLDKRIKKLEKDVKVLNRLHFIKACYSGMSIKEAAELNGISYSNAYVWFNRWNEEGPEGIIPKYAGGRPSYLTSDEKIELEKLLQQEEVITTEIVHKIIKDNFGVDYSHKQVRIIVKSLGYSYSKPYPINIETDSQKVEIFKKNSHNSI

SEQ ID NO: 11360 - protein, 54 aa, Methanobrevibacter gottschalkii
MIIGEGHIFSDNDFKEDLLNVGFKIVKFNRGEATYDFAFIKSDYFNYWPLLKRE

SEQ ID NO: 11361 - protein, 459 aa, Methanobrevibacter gottschalkii
MQIIDKIKLKLLNSSNSYNFYKNNYLAQNIQLKLLNEELEDKNSEINKFNEIVLEQGNNLKLLNEELEDKNSEINKFNEIVLGQGNNLKLLNEELEDKNSEINRVNYRIDKMLSFDLLFKENLTMFNTHIKEIFDNQRDFASNLNEYYEKLSYRSNEVNESLIKFETMLSKSNRGMDEKSDVILDFIKNENIRINNHVEMLFNHHVKEFNKFNKNIKNSMDFIENNYKNCRKYFFKGNESLLEPYLDTDFMFNFCYFNNIELLSYSPKENLILLKNKDGIVIGTNNHLWTIMEIYGLNEYMIPILFYFDDFVVFDIGMNRAYASLSFANMQNCSSVFGFEIDEFVYSKAIDNISLNPNLANKITTYNFGLSDEDGIVELYCYEGFDGLNTMMYDFLEANPSLNLYKDKLDVKKVHVKKASEVILDIISKNNITSNIVLKIDTEGAEYKIVYDLIKIRFN

SEQ ID NO: 11362 - protein, 464 aa, Methanobrevibacter gottschalkii
MVPIKEFTQPKISIILNLNDVTEKYFEKCFDSICNQELDYVEIICVENENYKFDKFQKYLLEYEFIKIFDEYYLQNNFNLIINSDYILFLNAKDWLLFVGLKHAYNLAIENDMDILINSYNIFHEFSGEIEDPYQEEYAQLNNLNSFSGNDFKNILFNMPKYSFNLYKTDFIKKLNLKIPLDLTSQISFFINSSMMTSRIGYNNKPLLYNRLNEENDNLNYYNLICNDFNFGICENNLEINMDSIIDTYFNILYFLEKEGIYNCNKYYLWNYIFRVFRRIYLQNFKNNIVIFKNIHDFCTNVFSKYHNDLVLNLKIENLTFYRSILKSNSIYELELLYENNRLVLQNEGKDKIINEKNNLISNLNNDLANSSKKLDVEIKKYLNILDDKDNRINILEEKYSYQVHENNLLIAKLSEVETSRSWRLTKIFRKIGMFKSIIVLVTVGFIIFLVMYILIIMLMLIIK

SEQ ID NO: 11363 - protein, 856 aa, Methanobrevibacter gottschalkii
MGFKVSIIIPVFNVEFYIESCILSLQNQTIGFENLEIIFIDDCSTDNTSIIIEYYAKKYKNIRAIYCNENSGVAGKPRNIGMVNATSDYIMFIDPDDTFSKDACEVLYDKISKSKVDVVSGLHSKKIHGDTDIIFPGLLISTFTNPNDSWQIRKKQLAEYLKDFDELYFESLDEMPYLLGNFAIMSKIYRKSFLFSNNINFPEEIPGEDSVFLLNVFLNAKGIIFINKIIFSYYTSRDDEDNASLTHQSDLSRNLGRLKAYKMMLKLSKDHDKLDEFVNYLLCGKMNYFLNQYVNNKNLSKKEISIIINESYDLFTLINNSNCKFDSDYKKLVELIIDKNVDELYKYSENDVFHIVTNNHETKYIKDIKVAVIMDPFTYTSYSNEFEDIIIEPSSWLETFENEKPDLFFCESAYSGVNKKSVINGVAIEDNITPWQGKIGLNLISGNDNRKILFDILNYCNNHNIPTIFWNKEDPTSFDIKQYNFIDTSLHFDYIFTTDEETIPRYNARGHDNVYPLLFASQIKLFNPIEYKKRTNDIIFAGSWYNQFSERSNVMREFFNKIINSDYNLKIYDRASEINSINRKFPKEYSRYVFPKVHFDKMPSVYKESKISLNINTVTNSYTMFARRVFELMSSNTLVLSNYSKGIFDLFKDNVIYLDKLSSLNLDKIDIENICENNLYDVLENHTYYNRFKYILNIIGFKFKEENNNLIIIYGLNNKNELEIILNDFESIKYVNKTCLIYVKDNNLLNSLNERFIEDVKFIGIKELIMISEEFNQSYFFIIRDLFHPLEKDFIRRAFLHYNYLDKNIGVKQGNPKYNLAKTIEYKNILFNIELLDKVLEGLLKYRLNKLTILNI

SEQ ID NO: 11364 - protein, 411 aa, Methanobrevibacter gottschalkii
MKICILGQGYIGLPTAALFSLNHCEVIGVDIFEDMINNLNKGIIHIEEPGISKIIKKAIESNVYRASLIPEKADAFIITVPTPYIVENYSCDLSYVTTACKSILPYIEKGNTVIIESTIAPMSTDDVIKPIFENAGFIIGEDLFLAHCPERVIPGKIIDELIHNDRIIGGVTPKCAVKASEVYDQFVEGELILTEAKTAELSKCMENTFRDVNIALANELTKICTEIGVNVLDVIEMANKHPRVNLHSPGPGVGGHCLAIDPYFIYAKAPKTAHIIKLARDTNKSMPDFVCENVEKIISKGKIAILGVSYKGNIGDDRESPSYEIIAKLCSKYEISIHDPHIDNPNFVSLGTAVNGADLILVLCDHNEFKNMDYDLIKDKMEKAIIFDTKNIIKEVPDDIKLFNYGNLYSI

SEQ ID NO: 11365 - protein, 145 aa, Methanobrevibacter gottschalkii
MDKKWIVLTIFLVIFGFLILNGLNNSIHVGDSYFSLPEGYVEGNIVKYNDVNITNGTTSLRIIEYNDNNIQEHIDKYVNYSTNHNYSTKINNFNVDGMNVYKSEIIQNNKTFHYWFIKKDKVYEIVTWDGNSYTDNTVFNLIKSN

SEQ ID NO: 11366 - protein, 288 aa, Methanobrevibacter gottschalkii
MKNLIKINVDFEELDNYKFIMDEPFSLEVNYNHVKYNFIIKFSSNNNNLICCAPGAQDRNKRTSQGELIKPPYFDRWSWFKYFEESFIAFSDPIFYYDKEITLGWCVGDKNQWYAENISLIIQKLAKNQEIINENILFFASSGGGFVSIILATLIKGSKCVVNNSQFSIFNFYETHINRLFKFLENSFRLNKSEITDKIDYRLDLIKLFKKENYMPSITYYVNACSKYDIKYHAMPFIENVMFIPQFKDNLNVHYYHEYKDFPHNPMSTDKILVILKNFIKINLYNNF

SEQ ID NO: 11367 - protein, 177 aa, Methanobrevibacter gottschalkii
MPTWRLQLESEDLFLNSKYYETLNNFLNNKELLELLNKNDYKLVFKPHAELMEYLDLLNVDNDVYISINESYQDLFNESAILITDYSSVFFDFAYLKKPVIYYQDNNDYHYDEGYFDYETMGFGEVISDENLLIEKIKFYLENNCQMEYKYKCNVENFFKFNDKKNCERVYNWILNN

SEQ ID NO: 11368 - protein, 641 aa, Methanobrevibacter gottschalkii
MKYNFKFSIIIAVYNAEKYLNEAIDSIIDQSFDFEKNTQLILVDDGSSDNSLEIALQYQKDFPDNILVLSKENGGQASARNLGLKYATGKYVNFLDSDDYLSNNTLEEVYNFFENHFDEIDILAIPMILFERVNKPHRLNYKFNENKIIDLIEDPNNPLLSSSSSFIKSDAIRDYKFDINLVNLEDALVINKILLDKKKYAILNTCKYYYRQRNLRNSTVDTINSKKEYFTDRLKSFYCNIIDYCLSKEGNIPKFIQYLMAYDLQWLLKLPNLDVLETEIEVQEFWDCLYYVLGFISTNVVYGNKNILNDVKPFFLYLLGEEKYISLDDDGSVLLNVGTHNVDKLSRHKIWLDIIDIKKDILNISGIFLTNFPNQNISIKVIKESEKHDKEYFCQYKKYNSFERKNRTFLGFDWIFPYNFDVKIPLVKNESSKLRFVVNYQDDEHLFSFESSLGLNYGVRLSDFSACISKKHYIVLFKYSKLFILPYKYSSMLRYEFSNIKKTIKDKPNFFLSSIFIRLAYYILYPLFSNKKIWIFSDRPDFADDNAKHLFKYAINQDDDVKKFFVLNKDSNSFNDMKNENKNVISFSSLKHRFLYLYAEKIISSYVNEDFINPFFNYNKDLFDGLITSQRVFFTAWSNQR

SEQ ID NO: 11369 - protein, 268 aa, Methanobrevibacter gottschalkii
MELVKKLDDVKNLTNNKLIGAPDLINSEIQFHGRNNILVCEGTINLVNSNIVFQGNNSIIYLSYTKHDYKLMVFVRSDSTIFLGKNNEIGSKFNINIQEHQNLIIGDDCIIGNDVTIRTCDTRAIYDFNTKKRINFSESIFIGDHVWIDHFSYISRGVHVGSGAIVAVHSFLSPYCKVHSNNYVMGNPIKVFNDNVFFTKEFTGSYNVEDTMNFSSYKSDIFHYDFVLNETLAMDNIDKILKDLTVDERLDFLEKLFIKNKRKNRFYY

SEQ ID NO: 11370 - protein, 355 aa, Methanobrevibacter gottschalkii
MGVNMVSEFTVFGSCTCRDIFNSTINKNYKDYFHINPSGIRVSYISLMHPPVDYTEESLIIHPETKKNINFSNWIKQDLDKSFLNELKKNKSEYLIIDTYYDVNFGIIEFENKNYITNNLHIDKTEFYKNLNYKKVMTIQSNKNEYLKLWKENCNLFFNFLEKYCPDTKIILNPTRHVTNLIRADGTISEMGIYKKISEKYNPYRDLLDSHIIENFNVDVLYFDENTLASENSIWGASSLHYNTSYFMDVTKQLNEFIKRNKILDNANEKRLNNLFKKQNRNLLTFKIQLNNNEKINKIVHKFKQNNTYKNLLKNNNEITNNITELKDILTSNEYAFLNSINNSKLSQIKQLKLK

SEQ ID NO: 11371 - protein, 256 aa, Methanobrevibacter gottschalkii
MSLIKENEIFLFEEIVKKNFASKYKGSVLGILWSVLKPLLIMILLTIIFSTLFGGSIKNYPVYFLSAKCIFDFFTAGTNSAMNAIKGNKNILKRTAAPKHAFVLGSIIAEFINFLITLVILVAVMIVTKAPFNINTIPFTILPIISLLMMITGIGFILSILCVYYTDIQHLWSVVTLMAMYASAIFYPMDIIPEPYHQYMILNPIFWIIDQFRHMTLWQSMPSTLNLINSLVLSTIILVIGIIVYIVYEKKVAMRF

SEQ ID NO: 11372 - protein, 369 aa, Methanobrevibacter gottschalkii
MNKRDKIKTNLIKKYNISPEESEILLTKIEKRIAKENARKREILSKNMFNESKEEFNQPEHKIRNINSETNKYNDFETITQNISSKESEKLKKEENNNVDTILSNIIPNYDQEISIELNNVDLIFEVETDKIDNIKENIIRTLKRNKSKKTKFQALNNISFKINKGEKVGIIGYNGAGKSTLLNVITGIYPINNGTVTTHGKISPLLSLGAGFDHNYSGRKNIYLNGAVLGYSKKFLEEKEEEIIEFSELGEFIDFPIKNYSSGMLAKLGFSIATIVEPDILIIDEILGVGDVNFQRKSSDKIKSLMDGGTTVLLVSHSIPQIREICDKAIWIDKGKVREIGEVNKVCDHYLKDAEKASNKQLANIKFR

SEQ ID NO: 11373 - protein, 397 aa, Methanobrevibacter gottschalkii
MDLIVAKFGGTSVGNGKRIRKAAESVAREYKKGSEIVVVVSAVNKTTDDLINITNDAITCNLTEKQHAEIVGMGERTSVRLFSATLESLGIKSLFIDPYSELWPIITDSNYMEARIDLDKTKEKVNNLKSLLDQGIVPVVCGFLGKCKNQVTTLGRGGSDITAFLIGECLNATEVIIVTDVDGVLSTDPQKISEAELLESITVDEMKTLATHGAQVLHPHALDYKHPKIDAKIINYNKEDLKAEGTYITGPKDYKPIDLYENPVASITIVGKSLLNKVGIVSALSNILLENGINLFKMNPHHNSITVFIDSEDADKAYELYHDHVVKSEDLSSISRDKDTAMFSITSPEISEITLANLLTENDIDAVLINYTKTEILLFVEWEFKYEVSKLLNTYKN

SEQ ID NO: 11374 - protein, 260 aa, Methanobrevibacter gottschalkii
MENMINSLKKLGLNRYEALAYIGLNKIKTGQADEISEVSKLPRSRIYDVLKELNRKGFVEIEGGKPLKYKIIPPSKIFKEEKNKLIEELENTEKKLEKLYNDELDEIQAPIWLIHSSENIIEKEVGIIRKARKTITCSIGFLLEGEGKAMIKAFNEIPRNVEIKILANQFCYVNNHKIDIIKIFKDTKLDNLEIIPSDLPMMKLLIVDEKELIRTFTRFTGENNEILPQTAIGVHNTYEDICKNFSRHILKEFDKNRQEN

SEQ ID NO: 11375 - protein, 139 aa, Methanobrevibacter gottschalkii
MANFNSLKEAREFFYKDKFAINTGVTLDELTEDKAICSLMLNDEHRNAYGGVMGGVIFTLADFAFAVLSNQIHQLTVAQQVSINYLSAPKGDMLIAEAACRKSGRTSSIVIVDISDDLGCDVAQFVGTGFKLKNSKIRD

SEQ ID NO: 11376 - protein, 158 aa, Methanobrevibacter gottschalkii
MSELTFKIAERKDSRLILEYIKKLADYEKRSDEVIATEKSIEKWIFDEKQAEVLFALEDRHIVGFALYFLSFSTYIGNVNMHLEDLFIDPEYRRRGYGKALLKELGKIVIDRDYGRFEWTCLSWNRPSIDFYLSIGAEQKDWDVFHFTGDALKDFVKE

SEQ ID NO: 11377 - protein, 244 aa, Methanobrevibacter gottschalkii
MYLLSNIDAVDWSIDDGYDAVDVCPFCEMPVPDYVRSCVVCGLSIRDIDFEENSINKYTDFRESFDKLFDDMDSKLGNMIFIKDDDELFEFKTFYNSFMLNYDYHEFLEFYNRADKNLEMQQIAELFINDKLNKSLGTESEFDDYAKYLIYYCNYYIANDDLDDAFIYYAQMLLLMSNYSGDNNGELLISVYLFDSFSCYNCLYGSQHSFDISKLFDEAINTFRIEEYNKNHKFILEKLEAMFG

SEQ ID NO: 11378 - protein, 149 aa, Methanobrevibacter gottschalkii
MKNDYAIKLTSNFILSYLKFIVDTDEIYKNPKIKKFYKKSEHTIPYKANLFDMDLCGVMFRDPAGNFIKYTDFFAVTIPRKYDLKKYKCRKKLKKVTESYLDDKYSVWTDSVDIINEFVDLKDREFDEMLNIENMIGMRRSYARTLLIV

SEQ ID NO: 11379 - protein, 111 aa, Methanobrevibacter gottschalkii
MDEGLFQDKNLKDKLFNEYPHILKAIEKEGYILDYLSFDVFTEIRFEDDVVGFISFSRFDIVENYFAIDEAYIIPEYRGNNLLFEHLNNLFLLDNFRYFPRKPTKAFINVC

SEQ ID NO: 11380 - protein, 444 aa, Methanobrevibacter gottschalkii
MSYVDEVIETIIEQNPGEAEFHQALREVMESIRVVVEENEEEYKKNALLERLANPERQIKFRVPWVDDNGQVQVNTGYRVQFNSAIGPYKGGLRFHSSVNIGIIKFLGFEQIFKNSLTGLPIGGGKGGSNFDPKGKSDREVMAFCQSFMTELYRHIGADTDVPAGDIGVGAREVGFLFGQYKRLSNLYEGVLTGKGLTFGGSLTRTEATGYGLLYFTNAMLKANDIDIAGKTIAVSGAGNVAIYAIEKAQQLGGKPVTCSDSTGWIYDSEGIDVELLKEIKEVKRERLTAYAKARESAEYHEGKGVWTVKCDIALPCATQNELQLEDAKSLVENGVLAVAEGANMPTTIEATEYLQENDVLFAPGKASNAGGVATSALEMAQNSQRLSWTFEEVDAKLQNIMENIFANAAAAAEEYGLDKNYVAGANIAGFKKVVEAMNAQGIV

SEQ ID NO: 11381 - protein, 83 aa, Methanobrevibacter gottschalkii
MSVEKLTKSQYNDLKNSYLTKNRTMHSLYAEINKENKVDKHLFFKLINKIRQEEGLNDFYTMKKEKKRNNIIENLDKSPKYYN

SEQ ID NO: 11382 - protein, 414 aa, Methanobrevibacter gottschalkii
MAEVSSKELYEFKKTLKELSGKRGRGTELVSVYIPHDKQLSDVGKHMRDELGQSANIKSKQTRKNVQSAIEVILQSIRLYKQPPENGLVLFVGMIPKGGPGTEKMEKYILEPPEPITTYWYKCNNEFFIEPLEEIIEERDTYGLAVVDRKEATVATLKGKKVNILTHLTSGVPGKHKAGGQSQRRFDRVIDLAAHEFKKRIGEHMNDDFLELKDDLKGIIVGGPGFTKEEFIQGDYLQYELKDKIIATVDTSYTGEPGIREVIDKSADILDNLDVMHEKKQVQRFLKELTKDKGLCSYGENQVRNNLIMGAVDTLLLSEDLSSMRKTFECTNCGTQIEVTVKTQAEADKFNERCPNCNDTFKEVASKDLTDEFVEKAEEMNTNVEFISTETEEGMQLFRAFGGIAAILRYYVEY

SEQ ID NO: 11383 - protein, 355 aa, Methanobrevibacter gottschalkii
MKAAKNIKIIKRNKNVMKWKIGNVKISNQIVLAPMAGICDYAFRSIIKSMGCGLIETEMVSDKAIMYNNFKTQEMLFMKDEERPISQQIFGCGTDSFKIASKYIYENMKPDIIDINMGCPVKKVAIKSKAGSALLKNPEKARSIVETVVDSVPIPVTVKIRSGWDKSSINAVEMAQIIEEAGASAITVHPRTRHQRYDIPADWSIIKDVKNHVSIPVIGNGDIKSCYDAKRMLDETGCDAIMIGRATLGNPWLVKQCIDYIDYGMEPEKISVEEKINMAKRHADIIEKTQAEKLAISRMRTQTAYYMKGMYNTADIKPKLFKMNSKEEIFSLLDEYLASHKQHLREFVKQNQILS

SEQ ID NO: 11384 - protein, 322 aa, Methanobrevibacter gottschalkii
MIEKIEITQRFNFKRLNRHYECFTIDFSNNSAYYKISERGSGDKFLSESDLCDDSWIEILSGLRRNMTSEICHFNLKQADKFLNDFNKLNLFKDFRSENFSYFEKIELIYSCNIIIYSTDNYEEYAFKNNFPINWIKFGEILKELLNFDVLHLDYQKQMVTPLFYDVCLDGVYYDGELLKLKAIEFGHYRTYPYDIPKPRLIIDFNKKRIDGYIDKNLSSGDENAILSLLEKYHVYNWIFDEYHNKSNTRDPDDLEGYDWYLEMVFEEGIIWHLFGYNDYPDTYVCLAREVEKLTGMDLLEINTISGEDLVLFDKFSKMLLM

SEQ ID NO: 11385 - protein, 172 aa, Methanobrevibacter gottschalkii
MVFRRCPQCGSTSDDQYGFCIKCGWEFAKIDATKNLCPLCGHENPNEADFCVKCGAPLVFKNHPNEEQRNITPIVINKEVAGTPIQKNSGGWIKWIIILGYIFSILGGLLGLIIAVYLVTRKEATVRKHGIIQLAIFAFYIVLIAALYATGMIPADAITNYQQLIAGNMTLP

SEQ ID NO: 11386 - protein, 151 aa, Methanobrevibacter gottschalkii
MIIRKFNPNDLKRVFEIENMSFDQSYGIKMFQQLYEMGIGFLVAEHEGHVIGYVMFWIKYEFNGHIISIAVDENYRRLGAGTKLLVKAISILSMLNIDNIYLEVNEHNDGAIEFYRRFNFQIDRTVPNYYASGDGAVIMYLPLRKGHISSN

SEQ ID NO: 11387 - protein, 129 aa, Methanobrevibacter gottschalkii
MWQDFGDYILSEAGDDPVKIAEIGVGKFDKISEILSEKKNITVLKTDIHPKDSTVIKDDVTNPNLELYKDVDIIYSIRPPSELQPHLINLAEKINSQLIIKPLTNEDLNTGRVKMKLKNYKKASFYILR

SEQ ID NO: 11388 - protein, 809 aa, Methanobrevibacter gottschalkii
MEKLLKKYNTTPDGLSESEVLKRHERYGLNELDEKKPTPPIILFLSQFADILIALLIIAAIASFAIGDTIDAGVILLAVLLNVIIGFIQEYRSIRAVNSLKDLMVKKAIVKRNNEVLEVDARFLTIGDIVILEEGNKSPADLILIESNDINCDESFLTGESEAVIKEEKDAVFMDSNIISGHGLGIVTDIGMDTEIGKIAEIVHEEDEKTPLAVKVGKLGKILSAIAILVCTVIFILELIQGAGIVETFMTAVSLAVAAIPEGLPAVLTLTLALGMSEMASSDALVKRLLSVETLGSCTIICSDKTGTLTDNKMSVVESYLLNKDKLLLISKLCNNAIIKDNALIGNQTDGAILRFAQNYETSLERIDEIPLDSNRKMMTTIHRLDSENKIVLSKGAPEIILNNCKYIDNNGSIEILDEEIKETVVKRIDEMSDEALRVIGFAYKINDDERPEENLIFTGLLGLIDPPKKNAKKAVKECINAGIKVRMITGDHEKTASAIAKQLGILTDGRVITGKELEKISDEEYLAIADDIQVYARVKPAQKMRIVEALKDLGNIVAMTGDGINDAPALKKASIGIAMGDGTDVSKESSDMILQDNDFSTIVKAIKEGRKIYDNIKRFVKFQVSTNVGAILTIVGTSLLNLPLPFNPAQLLWLNIVMDGPPAQTLGMEGAEKDTMARPPETGDILTKKTLTEIFLLGLVMATGTILVFSWEIYSGAPTEKAMSVAFTLFVVYQLFNAFNGRSNSTKSSKYLYIGLALSFMLQLLIIYIPQLQIIFRTTAIGIAEWTIIIIVASTIIAAQKIMNKVIK

SEQ ID NO: 11389 - protein, 261 aa, Methanobrevibacter gottschalkii
MKIFLLGGTKDSINIIKFIKKNYDAYILTTTTTEYGAKLAKEGGSDDTIARPLPKEEIIDMIISKNYDILIDATHPFAEHITQTSASIENELKIPYLRFERPITNLENIDTSNVYYVNSFIEAGKLIASEFSKGNVLHFAGANTMEDILKNIPTDRFYPRILKVEKSVEKCNELNINPNHIIPMTGAASTKENIELIEKYNASVIITKESGEIGGVIDKIEAANAKNIAVVMIRRPQIKEINKKNIVSNLDELDVELKNFF

SEQ ID NO: 11390 - protein, 102 aa, Methanobrevibacter gottschalkii
MNQARIKLTGTDPEKLAYVCDQLKKIAERTGVDLSGPIPLPTKKLVVPTRKSPDGEGKASWEKWELRIHKRLIGIGADERAMRQVMKINVPDNVSIEIELKG

SEQ ID NO: 11391 - protein, 413 aa, Methanobrevibacter gottschalkii
MAKEKEHLNLAFIGHVDHGKSTLVGHLLLKAGAIAEQQLDDGENKFRFVMDKLGEERERGVTIDLAHQKFSTKKYDYTVVDCPGHRDFVKNMITGASQADAGVLVVAADDGVMPQTKEHVFLSRTLGIGQLIVAINKIDVVDYSEDKYNELKEEVANLIKTVGFNPADVPFIPLSAFEGDNIKEASENTPWYKGDSLMDALDKLTPPEKPTDLPLRIPIQDVYSITGVGTVPVGRVETGIMKKGENVIFEPAGASGEVKSIEMHHEVFDVAEPGDNIGFNVRGVGKNDIRRGDVAGHTDNAPTVAKEFDAQVVVLQHPGVITVGYTPVFHCHTSQVACTFLELSKKLNPATGAVDEENPDFLKTGNAAIVKIKPTKPMCLENAKEIPQMGRFAIRDMGQTVAAGLCLNVTPAK

SEQ ID NO: 11392 - protein, 727 aa, Methanobrevibacter gottschalkii
MIAKIKELMYKPDQIRNIGICAHIDHGKTTLSDNLLAGAGMISEELAGDQRFLDFDEQEQARGITIDAANVSMVHDYKDDEYLINLIDTPGHVDFGGDVTRAMRAVDGAVVVVCAVEGIMPQTETVFRQALKENVKPVLFINKVDRLINELKLEPEELQKRFINIYMEANKLIKNMAPEDKKDDWSLDFTDGSVAFGSAYHNWAINVPTMQETGVNFNDIIQYCNEDKQKELAQKVPLSDVLLGMVVEHLPSPKEAQVYRVPNIWDGDIESPAGECMVTTSPDGPLAVMVTNVSVDKHAGEIATGRVYGGAIEKGTEVYLVGSHGKSRVQQVGVYFGPERVNTDKVPAGNIVYVAGAKGAIAGETLCDPEHKIVEFEGLEHISEPVVTVAVEAKNTKDLPKLIEVLRQVGKEDPTVKIDINEETGEHLVSGMGELHLEVIGYRIGEKGVDITTSEPIVVYRETVRQLSPQVEGKSPNKHNRFYITVEPIEPELYTAIQDGDIKEGKVKGKEGANDFMEHGLEKEEARRVWAVHNRSIFLNMTRGIQYLDEVKELLIEGFESALENGPLGNEIAMGLKFKLHDAKLHEDAVHRGPAQVLPAIRNAILGSMMLAEPALLEPMQKVVIDTPNDYMGSCTREIQNRRGQIVNMGQETGDMARIESKVPVAEMFGFAGDIRSAAEGRCLWSTEIAGFEPLPREMQNQIVKEIRQRKGLSAEPFPASHYLGDL

SEQ ID NO: 11393 - protein, 186 aa, Methanobrevibacter gottschalkii
MSKLFDKWDLNEVKVEDLGLVKYICLDETLVPHTSGRHVKRQFAKSKVSIVERLMNKIMRTHLNSGKKNKAYNIVKESLEIINKRTKQNPVQILVKAVENTAPREETTRIKYGGIGYQVAVDISPQRRVDLSLGFLTRGTLQSSFKNRKSVAECLADELILASEEDSRSFALRKAEEKERVAKAAH

SEQ ID NO: 11394 - protein, 141 aa, Methanobrevibacter gottschalkii
MPGLFAAKKLKKNRQNFKWKDVDYKRRALRLDVKADPLEGAPQARGIVIEKVGIEAKQPNSAIRKCVRVQLIKNGKQLTAFAPGDGAIGFIDEHDEVMIEGIGGPSGRSMGDIPGVRWKVSKVNNVALSEMVSGKIEKPVR

SEQ ID NO: 11395 - protein, 143 aa, Methanobrevibacter gottschalkii
MSIKLSANEIRFIALFESMTGAMVKDCIIDDEHGKVTFIVKKGDMGLAIGKGGSSVSKVQRAVDKSVEIIELDDDPIIFIKNVLSPAKLQSVKISQKQSGEKIAIVTADNTNKRIAIGKNGINIERAKLLANRQHNIDNIILK

SEQ ID NO: 11396 - protein, 98 aa, Methanobrevibacter gottschalkii
MDVDRGIRVAVDTGDVTLGSEKSIQSLKLGKGQLVVVAANAPKELIEDVEYYANLSEIPFVVYDGTSVDLGSVCGKPFTVATLIVNDPGDSTILDDLR

SEQ ID NO: 11397 - protein, 392 aa, Methanobrevibacter gottschalkii
MDEIITKIRGMITEINETENLGIDFADSYIKDLAEHYISKNLTDDELRKLIIKLKQAYDRAHVEAGEAVGTVAAQSVGEPGTQMTMRTFHYAGVTELNVTLGLPRLIEIVDAREKIKTPTMDIYFTEDKRDDEEFVRTLANKIGKSTINDILSDFNLNYGTMEVEAVLDNKKIEEKRLNREEIDAKILKTFKKATINGDNIVLSSNKTDSDFIIRELRLLADKFRDLQISGIKNIGRVIIRRDEEWIIHTEGSNLKEVLTMDGIDQVRTTTNNIHEIGQILGIEAARRSIINEAQKTLSEQGLSVDVRHIMLVADIMTSEGVVKSIGRHGISGEKSSVLARAAFEETGKHLLHASIRGEVDDLTGIIENIIIGQPIPLGTGSVGVKMDYKKE

SEQ ID NO: 11398 - protein, 1001 aa, Methanobrevibacter gottschalkii
MKAFIKKIQRINFGLMSPEDIRKMSVVTVEYPDTYGDDGFPIDKGLMDPHLGIIDPSLVCRTCGSKGGVCQGHFGSIELARPVIHVGFGDVIHKILRSTCNECGRTLLTDEEIEEYTQKILELKAQNESISSILKEIYDAAKKDGEECPHCGTIQDKIVLDKPVSIVQRIDPLFEFKKVFYETASSDSITIEEIGPMAREIVENKEELFQNKLLINSNLLERLCERLHDVDYIINILDLEDEDGSYEVNNTRLNNIFKTAISDNNLTEDYKLTASEVRERLERISDEDSFVLGVNPEVARPEWLVLTVLPVPPVTVRPSIILDTGERSEDDLTHKLVDILRINQRLLENMEAGAPQLIVEDLWELLQYHVTTYFDNEASGVPPARHRSGRPLKTLTQRLKGKEGRFRSNLSGKRVNFSARTVISPDPNISINEVGVPEMIAKEVTVPVHVNEWNMDEMRTYIENGPDVHPGANYVINGDRKRRVTDETKEYILETLEPGVIIERHLKDGDMVLFNRQPSLHRMSMMAHEVRVLPYKTFRLNLCVCPPYNADFDGDEMNMHVFQTDESRAEAKSLMRVQEHILSPRFGGPIIGAIHDHISGAYLLTRDGVEFSEEQALQIIRKSHLKIPEFKSNQWILKYDSNGNEDSFIYKEKGEKWTGKELFSLLLPNDLNLSYSAEISKCPVVYPPEDAEVVIKNGILIQGVIDESAYGSFSGKILDKIVKEYGPGRAKEFLDRSTDLAICGIMKTGITTSLNDEEIPEEAQDRINEHLQNKMDEVDKLVEAYEEGYLEALPGRSLEETLEMKIMQVLGEARDMSGQIAEHYLNMGKQYPDDPYDHVMAVENHSVVMARTGARASMLNLTQITACVGQQAVRGGRIERGYINRTLPHFKKGELGAKAKGFVHSSYKSGLDPIEFFFHAMGGREGLVDTAIRTAQSGYMQRRLVNALQDLQVKSTGLVTDNQGNVIQTMFGEDGVDPAKSDFGKPANLDKLIDEIRMEGK

SEQ ID NO: 11399 - protein, 741 aa, Methanobrevibacter gottschalkii
MLSEDYKKPETDEKKAFYYFGFERLAPFNEVDVIITQLKEKLGDDEEALEKINKHVEFIESYFDSDELKADDSLNVPFKKDKRRAKWESYKKDFPEIDLTEEVDTEDSIEPAEEETVEEAIVSDDEIETVGEQPNVFNKKHPQTKIYINGELLGYCDDPINFTQEMREKRRNGEISHEMNITYYADNQEIYIFNDPGRARRPLIIVKDGVPLLKEEHINKIANGKLNWDNLINDGLIEYLDAEEEENAYIAMNLADLSEDHTHLEIDPATMLGICAGIIPFSDHNSSPRNTMEAGMTKQALGLYVSNYALRTDTRAHLLHHPQTPIVKTRIIDSTNYDLRPSGQNFVVALMSYEGYNMEDAMVINKAALERGLARSSFFRAYDTSEKKYAGGQVDKFEVPDKNIKGYRSEEAYRNLDNDGVVNPESYVKSGDVLIGKTSPPRFLEENFGSVADRRRETSVTVRHGEKGIVDAVLLSETVEGSKLAKIRVRDTRQPEFGDKFASRHGQKGVIGLILSPEDVPFTEFGVVPDLIVNPHAIPSRMSIGQVLEMVAGKAGCLEGERVDATPFNQTLEDEIQQLLVDNGFESAGCESLYSGVTGERLDAEIFVGVAYYQKLHHMTTDKVYARSRGPVQVLTRQPTEGRAREGGLRFGEMERDCLIAHGAALTLKERLLDESDKYEAVVCENCGMLAVEDTSKHKKYCPICGDVETYPVEISYAFKLLLDELKSLCIFPKLVLGDKA

SEQ ID NO: 11400 - protein, 516 aa, Methanobrevibacter gottschalkii
MTVNNWKLVDAFFDKYDLVDHHIKSYNDFVNNRIQNIIDITDPISLDDGKYTLKTGKIRIEKPSNKEADGSRSIIDPTEARLRNLNYSADMYLEMALNEEGEDNPLEEVYIGELPVMLKSDICHLNGLSDEELIAKHEDPQDLGGYFIVNGSERAVVTMEEIAPNKIILERIGEVEERHAKAVVTSIKSGFRARITLEYKKPRKNKAFLRISFPYLPGEIPLVVLLRALGLSTDQEIITAISDDNNFQMMIADDIQVSAEELDKFIDQNVIKNGDKDEVKQHLQDAAIKYIGNRVAKNMPKDYRYKRAKDVINRYLLPHMGIEEERCYDKAIYLAEMTEMLLEVIEEKREPHDKDHYTNKRLRVSGDLMEDLFRVAFTNLTRDMSYQLERSLSRGKELSIKQAVRSDVLTENIKHAIATGNWVGGRAGVSQLLDRTSYMGTLSHLRRVVSPLTRSQPHFEARDLHPTQFGKICPNETPEGPNCGLVKNLALLCNISEGSDEQEIIDVIGQMDVELI

SEQ ID NO: 11401 - protein, 79 aa, Methanobrevibacter gottschalkii
MKSEFDIQKHMLVPKHEIMTDEEISNEFSNLDYSFKNLPKIKVDDPVAESIGAKPGDVLRITRESQTAGVFVTYRIVEE

SEQ ID NO: 11402 - protein, 288 aa, Methanobrevibacter gottschalkii
MTNNKIEILDKIEENLIKIREKNALTHCITNSVTINDCANAVLAIGGSPFMAEDAEELEEVVAIADVLVINIGKLSKNQIKAMEISCKKADETNTPIILDPVGVGVTELRNKITMNLIDNHNITAIRGNISEVKSIAKLSGVLDESNTAKGVDVNVDDIITKQNLKTNGELISTLASKLNTVILASGPIDILTDGKTTIAIDNGDDMMPLITGSGCMLSSVVGSCIGGSNPLEGSLIAILAMNIAGEKARAKVDEKDEGTGSFRTYLIDYLYKTNSESLINESNIMIL

SEQ ID NO: 11403 - protein, 206 aa, Methanobrevibacter gottschalkii
MKNIDLSLYLVTDKSEDIEKFLKTIEESIKGGVSIVQIREKTAETLDFYNLALKVKKITTKYNVPLIINDRIDVALAIDADGVHVGQSDMPCDVTRKLIGKDKILGVSASTISEAKKAQEDGADYIGTGAVFPTATKDDAPSITKQDLKKIVDAIDIPVVAIGGINHENASELIETGISGLSVVSAIMNAENPKKASEELLNVFNA

SEQ ID NO: 11404 - protein, 258 aa, Methanobrevibacter gottschalkii
MNKQRRMPVIFVGHGAPTNAIGDNIYIPEWKKVGEYLGKPNVIIAVSAHWYSEKLYVRTAKKNKQIHDMYGFPDELYQVKYEPKGSPRHAEKVLELLDIAEENNDWGIDHGVWSVLSNMYPEADVPVVMVSVNGNLTPVEQFEIGRKLEPLRHEGALVLGSGNIVHNLGMVDWRMNGGYKWAYAFDNDVKKAVLNGDFERIVNFRNIKFNEIAIPAPDHFYPFLNVLGAASKEDNVKIFNDVCELGSISMTSYIFEDI

SEQ ID NO: 11405 - protein, 96 aa, Methanobrevibacter gottschalkii
MLLYINFLTQVHFQFNNNINVQADIQEGKSESKLEDGDLTWIFTDENTKQVELNSKSLILAYRKGDYEGFKEFLNDVSLILAALRWCTPFNLTFLG

SEQ ID NO: 11406 - protein, 91 aa, Methanobrevibacter gottschalkii
MLKDDYQLTFQYGFFNPEYPSANAKKDFILDYDCKLIKVDSANSQFEVEEELKKMNKIIYDKSILKSNLMRILKKLLRKSIILIILKLKAD

SEQ ID NO: 11407 - protein, 404 aa, Methanobrevibacter gottschalkii
MAKFNTIDDFDVENKTVLVRVDINSPVDPGSGIILDDTRLKLHSKTIKELSKKGAKVVLLAHQSRPGKKDFTTLSQHADALSDILNLRVKYVDSLFSNVAKEAIRDLKPHEILLLENARFFSEESLSRTPVEQSKTLLVRHLSPLIDYFVNDAFAAAHRSQASLVGFTVNTPSAAGRVMEKELTVIQDALDNVQHPCVFLLGGMKPDDSIDVMENVLNNGTADAILTTGIVGNIVLWASGVDIGQVNKDFITNRGYEDMVEKSRVLIEKFGDKVKYPIDVACEIDGERVDIDIGEIPDESIFDIGVKTIAFYAKEIRDAKTIFANGPAGVFEDPKFAMGTEDLINAIANSDGFSIIGGGHIAAATAGLGCEDQMSHVSSGGGACISMLAGKKLAVVEALKNNKK

SEQ ID NO: 11408 - protein, 222 aa, Methanobrevibacter gottschalkii
MDTPIVILNYKTYLESSGIKALELANDLESAASESGITMVAVPQAADIYRVSQETSLPIFAQHVDSISPGGHTGSNLINTLIDAGISGTLINHSENRMKLADIAEVIKSCRDYEIESCVCTNNIETSKAVAALNPVAVAVEPPELIGTGIPVSQAQPEIVEDTVKEVKSINKKIKVLCGAGITTGDDMKSAMDLGADGVLLASGIIKAESPKDALLDLVSKL

SEQ ID NO: 11409 - protein, 292 aa, Methanobrevibacter gottschalkii
MVKKTQTASFGSVLRQSHNSRKFYNSKLYENLKIPENIDFKEFKIKKEDLNKLYCKSSENMDEIPDNSIHLMITSPPYNVGKEYDDDLTLDEYLELLTSVFAQTYKKLVSGGRACINIANIGRKPYIPLHAMVIEIMLNLGFLMRGEIIWDKSASAGGSCAWGSWMSASNPVLRDFHEYILIFSKESYSKNKSQEKKDTISHDEFIQWTKSIWTFPAVNAKKIGHPAPFPTELPHRLINLYSYEGDVVLDPFCGSGTTCIAATKNKRNYIGYDIEEKYIQLSKSRLSNQKFI

SEQ ID NO: 11410 - protein, 310 aa, Methanobrevibacter gottschalkii
MNNIVIYFLKLFICLIIIVVIMRLWSKNQEKIFFINSRKVAFPSQLFYKTDDGRYLAYWPKDYRGRKSTLQSRNSLIGKFTEEWVCKLFGRLIVDDDLYLVKQAIIPSLGITSRSPVDLVISTANRKILKASEVKVIFEVKMSIVWNWQYFDDSNNVVEIGDFRTHQGKPSFTRSDSILKAIGKCIGIRVSSFESSKIPIVVIGNAPLSNGFCKKADHLKRVGVIQGFWSLNPFPLNHGNTRKTTPYGGYIRFNNTSELKRNLDNLFSQDLNFFSGMENPKTLGKYIEIANNENNYEDKGLKFLKLIRRY

SEQ ID NO: 11411 - protein, 305 aa, Methanobrevibacter gottschalkii
MSFNENQIQKLEKSGYRFVGKHRHAAVKTCHWTRQSIVEKGVCYKEKFYGIQSHRCLQMSPAVPNCQQECEFCWRDLTHTQTEWEDNEYDDPKTIVDEAIEAQNNLLCGYYGNDKANKKKLEELKKPTNAAISLAGEPTLYPKIDELIGEFNHRDFTTFVVSNGQCVDRLRNLENDPYQLYLSLDAPNEKIFNEICRPRINDAWNNLNESLETLSSFNSRTCIRNTCVKGRNMEQPEKYAELIKKADPDYVEVKAYMCVGSSRDRLTLDNMPTFDEVKSFAKRIGDECGKELVNESEISRVVLLE

SEQ ID NO: 11412 - protein, 372 aa, Methanobrevibacter gottschalkii
MKFFENVAKQIFNKEGIPILEGHVAYSPEEAMSISSEMGVPVVIKAQVLTGGRGKVGGVKFANNPGEALKVADEILGMQIKGETVKHLLIEEKAEILNEFFVTVSIDRGARRPVIIASKEGGVEIENLAKTNPEKLIKYYPNPLIEFLPYEAREIARKMGVSSDLISPLGSIIWKLYNVFTKYDCDTAEINPLITTPNGLIAADAKMVVENDSLFRHQNLVKRLHYKRKAVDFVKLNGNIAVIGNGAGLTLTAMDMIKLNGGEPATFLDIGGGASEQVINQALNIVLNYEPVKVIFLNVLGGITKADDVARGVIKALKQSERHVPIVIRLTGTNEEEGQKLLEEAGIPYETSMEKAAKKAVDLCNELKQEMK

SEQ ID NO: 11413 - protein, 182 aa, Methanobrevibacter gottschalkii
MRTEIRICGFGGQGIILAGIILGKSACLFDGKEAVQTQSYGPEARGGASKCEVVISDTEVDYPKVQSPDILVAMSNEALIKYIVDLKDNGTLIVDPGTTDIEDVRDYIEEHNIKVYEAPATKTATDDIGLKIVANIVMVGSITKITGVISKEAAIKAIEVSVPKGTEKKNISAFEAGYALVE

SEQ ID NO: 11414 - protein, 287 aa, Methanobrevibacter gottschalkii
MNEGKQNRFLPYLRDDRLPHIFCPGCGNGAIINAFLAAMEKAEMDFDNIAMVSGIGCSSRIPGYLKCDSLHTTHGRALSFATGLKTANKNLDVVVFTGDGDAASIGGNHLIHAARRNINLTVICINNNIYGMTGGQISPTSPKGSFGTTAPYGNLDSPFKLAELVAAAGATYSARWTTVQIENLVTSIKDGLKNPGFSFIEVATQCPTYFGRKNKLKTPTAMAAVMKANTVFKSAADRMRPKELEGKIVVGEFANSQRSEFTENIEKLSVEKSGNKTSINSAYETEL

SEQ ID NO: 11415 - protein, 391 aa, Methanobrevibacter gottschalkii
MAIILTLILDSQKEKVGVKMAEEFFIQGNEACAKGALAAGCRFFAGYPITPSTEIAETLSRDLPKVGGSFVQMEDEIASAGAIIGASWGGAKAMTATSGPGISLMQENIGYAFMTETPIVFVNVQRGSPSTAQPTMAAQADMMQARWGSHGDYEPIALSPSSVQEFFDFTIKAFNLAEEYRVPVFVMADEIIGHMREKITVPENIEIVARKRPEKTDDYLPFENIENGTTPMPAFGDGFNVHVTGLTHDERGYPDTNTPETHEKLIKRICNKVLMNRDKICSVRSENCEDADIVIVSYGAPVRSVVEAVNKTDKKVGYIKIDTPWPFPDEQIKELTATASDVLVVEMNLGQMYYEVDRVVKDKNVHLLGKIGGALPTPDEILDEINKIGGN

SEQ ID NO: 11416 - protein, 90 aa, Methanobrevibacter gottschalkii
MIIIDENLCKGCHLCLFMCHENVYAISSEVNKKGVQLPFVKFEERCIKCGTCEIACPDQAITVDLPENWWMKDGNNINFNPRFTKGKSGC

SEQ ID NO: 11417 - protein, 163 aa, Methanobrevibacter gottschalkii
MKDLNTPITDEDLLNLNIGDQITISGTIYTGRDAALPQLVELIKEKKVPFDLNGSVIMHTAFSNAGIAPTTSSKVEIESTIPYLSENGIKIHIGKGMLSDETIKELDKNNSIFVITPPVAALLTSKVLDKKCVLFESEGMEAMFKLKVERIPGIVAIHNGLRI

SEQ ID NO: 11418 - protein, 244 aa, Methanobrevibacter gottschalkii
MAVDNGDFVRVNFTGKVKETDEVFDTTYDEIAQEAGLFDENKTYKPIPIVVGGNHLLPAIEEAIIGLEEGETKHIEVDSDNAFGPRDPKMVQLVPMKEFKKQGMTPFPGMRIQSEGSNGKILTVNGGRVKVDFNHELAGKDLVYDVEVTEIIADEEDKIKSMIELHYANPNVDIDKTEIDIVDGVANIKLDEMAKFDQKSYMDVTFARFRIAKDIWDNVEGITKVNFVDEFEKKEESDDEVEEE

SEQ ID NO: 11419 - protein, 364 aa, Methanobrevibacter gottschalkii
MKRRGVANLPLHGGHPPKWLFTRMVDLSGALASVIIEEYSLNEFLNRISNPYWFQAFSCVLGFDWHSSGTTTTTLGALKASLSPEEHGIYLSGGKGAKSRKTPQGIEHAGEIFNLKTETTEKLVETSKLSAKIDNSCIQDGYTLYQHDFFITEKGDWAVVQQGLNTYTKYARRYHWLGSEVEELLNDPHSGISCDKKTPDTLNMSSKDSANAQKVSVDLINDNPNHLRQYFKRKNSQMLLDDFTMPSHHPILDMDISDKEFEVLTRAYEIQPENYEELILLQGMGPKKIRALALISDLVYGEPASWKDPVKYSFTHGGKDGFPYPVDRDVYDNSIQTIRDALDQAHIKKDEKLKAIKRLDDFIL

SEQ ID NO: 11420 - protein, 179 aa, Methanobrevibacter gottschalkii
MNVNVLRLDHRLKRDTRITTHVCLTARAFGASKIYLSGERDAKLMENVRDTASRFGGNFEIEYSESYMGVIKKWKSDGGKVVHLTMYGSQAHEIAPEVREDGSDILIVVGGSKVPGSVYKAADWNVSVTTQPHSEVSSLAVFQHLLMNGKEFDLKFENPVLEVIPTAHGKNVNIHNENR

SEQ ID NO: 11421 - protein, 260 aa, Methanobrevibacter gottschalkii
MEDDSYFENEEFSPIKSLLGLLTFSTILPINVYTSIEYMTKLTWCWPFLHVLVGILAAVCGYVSFEVLHLNALFTAVIVYAFLMLITGYNHLDGVMDMADGVMVHGDPERKISVMKDSSVGAGGVATLFLVASLTIAGLYNILDYYFILGIIVCEMAAKTSLITTALLSKPLIPGIGSYFIKETTIVNYLVSTILVICIAFLLGNLIGVVGVLGAIVGGIIIATISKRNFILANGDVLGMSNETGRLFALLFMAIALYFI

SEQ ID NO: 11422 - protein, 704 aa, Methanobrevibacter gottschalkii
MTTEFIIRMDDMPKIIHNDLSDSLDVESILKKDYKYIYEAIQNEGFIIENNSGDLFKEILFDSKVVGFAFYELNALTSFVLNEVYILPEFRGNSLFLLEINVLLSAGNTLSILQPTKNLVEILIHYGFASKLSENIVASAIGFDFKSENILSNSSEEFDNDDQILSSNIYDLDIRSCLFLKDISTPGKNIIYYHEELKNDFKEYGERKSLNKNYFNEIKDLFLQNSDEFTQILFDLKEELPKSQLGFDVVIGNDDGFSEYMQDIIDDGIISEDKAKKINNILKEEYERGEVTDDGIITRLNFFINDLDSQIDPFNIFEIGANLCPYCCNFINLTDESCPICGYNLFYENDFDFEDDDNFEDGIFINKDNVLSVMSGLYERFGRKYKLEDINYGKQYPTSYDLDQYRILKFIDEYHNLEVAFYFLNNLKLPQEIFNDLLFEEEYVTYEITEETWSDFANYSLTVNDLKDILRDNGLRVSGRKQELIDRIGKSDISVSEFSSDKLFLTRKGKDYLNEYSWIGLYNEFLKNFDFDDFYRFYESNDGNFNEIVSKYLDEHIKIAKNNKDFDYLINCFSSKAIFSGLDKNPNDALKWEMRRFCLTINPIYSRGVYHDFYLHLNSENINNLRSLKDEFSSEEMLDSFEESWDYFEFNKSIVSKKDAKIIFERLLINNEDLKLINMELKDRYSGRDAIDNTFSADLNDYFK

SEQ ID NO: 11423 - protein, 360 aa, Methanobrevibacter gottschalkii
MELNITKKDYGICINNPNHFLALSDFTVSDGIDIVENVNVVKAKDEFKATAKKAEAFNQSKGSYIAQASDSIDYFQNNYDDLTIFTFMANDVVIEDFTEYLKVANSPKGFFDARINLSHIIYIDSVVSPKDLLKIFKIVTNTKAKVLANMCLPAHIQNIINTNDFLAVLSNINVSESQDLDINNAEYEEIDWDDLKIKMEDAVEISLEDAFSYLELTFGILDYLVSEGILIGDLVDTGMELANGVKITQELRDKMETQILKSLTDINVVSLIIAGMRMEQDLTGNHIREFDVHDDSDYLYTDEVLGLAISNQIAGTKATFNFKRYHEAKPGIIAGLPPILDDIFAGLIAGCMSKIFEELL

SEQ ID NO: 11424 - protein, 389 aa, Methanobrevibacter gottschalkii
MAIIIDPQVSGIAGNMLIGAFVDLGADANKLKEVMEKSAECFGKVEVTFKKINKKGISSTYCHVEMLEHKHSICYPKFIEKIKKLDLDKKVKETSIKVFERIAIAESKIHGKTLDSVHFHEVGASDAVADVIGSIYAYYSLNLDNQKIIGLPIAVGGGRVETAHGIIPVPAPAVVEVLKNAKMIGGPVDSELATPTGAAVYMEICDEIKEFIPLIKAKKTGYGAGKKDFDHPNVLRIIESSDIAESDKIDVIETNMDHLTGEEIGYLFDKLLDIGARDVSVTPIIMKKNRPGNLLKVISRKENREKVIEAIFKETGSLGIRIAPNMHRGISKREFSKQIFNINDKDYEVTFKIGYLNGEIISKRPEYEDLKKIAQDSGLPLKKISEMIR

SEQ ID NO: 11425 - protein, 225 aa, Methanobrevibacter gottschalkii
MKKAISIFSGGLDCTVATSVFSKSHKIHAITFNYGQKAFKRELKASKEICKKMDWTHEVIDLPWLANISNSSLNTNEKIPELSAEDLDNLKISQESASSVWVPARNTVFTSIALSYAESIGASSIIVGWNGEEGATFPDNSKGYMKKFNELIKEGSPENIRIEAPLIDLDKEEIVKLGVEYDAPMELSYSCYKGKKKQCGICESCMRRKRAFKNLGIKDKSEYEN

SEQ ID NO: 11426 - protein, 332 aa, Methanobrevibacter gottschalkii
MAKEDRSEINPFTGRKHYDKINDDKFLKESYKEYYSMIDQVQLLDNTQNGQIVINVALNLINAVNSYLSEIGRLDYVEDYYDWDVHLVGDNAVNAFCMPGGKIVMFSGILSVANTEEKIAFILGHEMAHALLDHARTRISAQNTQNAITSAAWIGSIAMDFFGLGELGSLTRAATNVASIGSQFLLMNSWGRDQELEADRLGMMIIHWAGYDVSRIPAFWRDMSMQNSNEHDFFSTHPADSKRIATMQQLIVEIANDNDFYSKPVIGDVNQTNVKSVSSEGGFCSNCGNPVDIDAKFCTSSGTKLDVGLRCPNCGSAVGNNDVFCINCGFKL

SEQ ID NO: 11427 - protein, 332 aa, Methanobrevibacter gottschalkii
MKDIFDNVQFGDLKLNSRIVRTGTWETETSEGGFLTPDIYDRYEKIASSGTGLIVSEMFALDHKDRFYPYSTNMNYRGFIKDYQMVTDIAHKYDVPIFGQLAFFYYDDGENQKVEANDIAQEGIRKLQAEVIMAAKKFSFAGFDGIQINMGNNFYLSRFMNPYFNQRDDKYGGNTENRVRISAEIIKVIKKTMDIHVSCRINPWDARKDGMTADESIAIAKELEKAGADSIQLTARTISQIYDKGEKHPFLVYVEKLIDAVDIPVVLGGSLRDMKTINDVLNSSTVEYISMSKPFVAQADFLADWKANGEGVSVCQSCNNCYSKKTSTCFKF

SEQ ID NO: 11428 - protein, 71 aa, Methanobrevibacter gottschalkii
MVNPIIAAIISFFLPGIGQIIQGADVKKGIIMFVIAIILGWLLVNFLGSLGNIIYCIYALYAAYDAYKIEA

SEQ ID NO: 11429 - protein, 571 aa, Methanobrevibacter gottschalkii
MMAKVRFTETALRDAHQSLLATRMRTRDMIPVAKEMDKVGYFSVEAWGGATFDTCIRYLNEDPWERLRQLKSEFKKTPIQMLLRGQNLVGYKHYPDDIVTKFVEKSYENGVDIFRVFDALNDVRNMEKAITVAKDQGAHVQGTISYTISPVHTIDGFVDLAKHLEALDCDSVAVKDMAGLITPAAAYELVSKLKEETDLLVDLHCHCTSGMTPISYYAACQAGVDILDTAISPLAWGTSQPPTESMVAALQGTEFDTGLDLKLLASIKEYFEDIKEKYLGILDPISTSIDADVLLYQIPGGMLSNLISQLKEQNALDRYNDVLDEMPRVRKDMGYPPLVTPTSQIVGIQSVMNVLGGERYKTVSNEVKDYMKGMYGKPPAPVDEKLSKKILGDEEIISCRPADLLEPEFDKIKADGKEKGFVKSDEDALTYALYPPIAPKFLKGETVEEELKAPHAFSEDEAIGIPTQYNVEVDGDMYEVKIMPTGFMEIEEADNGNFHPVEGGVTSSMNGMVIKLKVNVGDKVTKGSTICVIEAMKMENDIQSEVDGVVEEIFVEPGDAVNAGDTLMVIK

SEQ ID NO: 11430 - protein, 364 aa, Methanobrevibacter gottschalkii
MNKIKIAIVGIGNCASSLIQGIHYYDGKNPEDAIGLMHWDIGGYEPSDIEVVAAFDVDARKVGKTIDEAIFAKPNCTTVFQEDIPKYDAKVSMGHVLDGVAEHMSNYDDEYTFVVSDEDPVDVVEVLKESGAEILVNYLPVGSEKAARYYAQCALDAGVAYVNCMPVFIVSDDEWDVKFKAKGIPIVGDDIKAQIGATITHRTLASLFMDRGVKLDKTYQINTGGNTDFLNMLNRERLDSKKESKTEAVQSVLKERMDDRDIHIGPSDYVPWQNDNKLCFLRMEGRTFGDVPMNIELRLSVEDSPNSAGCVIDAVRCCKIGLERGIGGQLTSISSYTMKHPPIQYTDDEAFENVEKFISGDLER

SEQ ID NO: 11431 - protein, 281 aa, Methanobrevibacter gottschalkii
MNPYIEILRPGNALMGAISIILVALIDKTISIPVILAMIAVFFETSAGNVINDYFDYKIDLINKPERPIPSGRISLKNGRNYGYSLFAAGTVCGFLISYITNNWIPFGIVLFADIILYLYAYTLKTTPLIGNLTVGFMTGFGFVFGGFSINNPNIIITSLFLGFFAFVMTTAREIVKDIEDIEGDKTDGAKTLPILIGEKKPAILAAILIIIDSALCPLLYYYHIFGILYLVVIAFAVMLFIYSAILILKSQKREIAAKVSKNLKIGMLIAFVAFIFGSLI

SEQ ID NO: 11432 - protein, 525 aa, Methanobrevibacter gottschalkii
MFKEFNINRKDKYYLIAILIFSAILVGYYINFNNAIGISCSDVYIYLINSLYYTGEKVNITNFIHISPVVCFLTSLFFRVGFVDKLAIYVVTGFFAIIGNIGFYLLLKKFFNEELSLTGTILYSSFSLYLIWLANGTLDIPATGVIIWIALFTMIAVRENPKYYQYLIPLMVIGLYTRYTVILTLPAFFLFYVLENGFKIKPEDWKYIKRGIIIATIIAITVFLIVFTMGNGRFDAASQMANGVKGTNGELTDPAYNPDSSYYFMNYINYISNSHTVFEINPTLYSPTILAYAIYALLFIGAGFWLYDHKKVNFRKTDAISIIIILMGIISFTRVTSVITSILIYIGIYLLARDREYNDGVFMLGWILANAIFLSFNIVKVNRYIIPTFPPFIFFVLTAIETIHAHVKINKNMIPLALIVLFVIQAFAFTATVEPTDKYMSPEEISNYIIDSNPDYENMTIGVYNIRPYSWWVGSNTIGIPSSHQSEIEQSNISYYIVNKPMDNLTNFTEIKNINELYLYKNNNF

SEQ ID NO: 11433 - protein, 524 aa, Methanobrevibacter gottschalkii
MFNEFNINKKDKIYLIAILIFSAILVGYYINFNNAIGISCSDVYVYLLNALYYTGTNVHSIDNIFLSPVVCFLTSLFFRAGFVDKLAIYVVTGFFAIIGNIGFYLLLKKFFNEELSLTGTILYSSFSLYLIWLANGTLDIPATGVIIWIALFTMIAVRENPKYYQYLIPLMVIGLYTRYTVILTLPAFFLFYVLENGFKIKPEDWKYIKRGIIIATIIAITVFLRVYGMGNGQFEAGSQIANGVKGTNGELTDPAYNPDISYYLTNFPNFISNSHTIFESNPVLEYPTPLSFAVFALLFIGIGFWLYDNKLKAEKRDVIPVILILIGIISFTRVTSVATTLLILIAFYLIGKNSEHKNELFMLIWILANAIFFSYHIIKVNRYILPIVPPFIFFILLAINTIPEHININKNVIPIVLIALFAIQAFAFTATVEPTNKYLATEEISNYIIDSNPDYENMTIGVYNIRPYSWWIGPNTIILHADAPGEIDQSNVSYYISQSRIDNLKNFTEVKNSGGLHLYENNNF

SEQ ID NO: 11434 - protein, 514 aa, Methanobrevibacter gottschalkii
MKVVCCKNCGAKYQLDDDDDISTFECSSCAGDLEYLENYSNGKESNQSFVSSTKYNDSYIVQCQECGLKYKIKSSDSILDYECDSCGGSLRYLDDEMNKELDSYLEERHAELQNIRKESKPKEPTSEEINTEDNTPSIKSITDKLENFFSEEHMLQIADIEKKEEEEIQEQVISKTARTTIPQSVLSRFGKEFATPKTEDYDILKNFLKTEFFKGMDEYYPKDNKLKSNKSFLDKISLKEPDNGESKPVKSSIINNNSKFNLENFNVENIESNNTIIIIGVVIFILSIIEVLTINSGIGIIALFIGVIILCYGIYKTRDVKQDEERTRIIREHLLSLPEEFYVFYNVKIPTSTSGINHVVVGPTGIYALLSQKYNPKLRLESENENLNLIGSSESEENKLEEFSSYGNMRKFRYTTKQAKFSQDNKVKQKALSLGEDLINFLNENNIKNCFVEPLVGFINNEVVVINMPLTDEDLFIEELLNKIQNTTIKLDSETIDKCAVLINKYSADCSSEF

SEQ ID NO: 11435 - protein, 333 aa, Methanobrevibacter gottschalkii
MKLFNKYPFLIGEISFNYYDLAKKEELSYFRVAKLLIEKCSECGINGVNFHVGDSEYLHCKYEEDSNQTDQLSFDEYKELAEYCKKLGLVFIITPANIEIVDKLNDVVDVYKISSSDLTNLPLIDYISNKHKPILLSTAASNLREIKSAVKCIEDNSNFKIIIMHSVLSYPTKLEDANLLMIKDLSEQFKDYDVGYSDYTVSDNFMFILTTAYQYGAVVLEKYFTLDKSFEGHEFAMDEEDARIVRLSANVLSKINGYKNKQPLICESFSKRNVRKSIVAKRDIKSGEIIDNSNIDFKRPGVGISPSKVDDIIGKNANRDISKGSLIEYDMLS

SEQ ID NO: 11436 - protein, 554 aa, Methanobrevibacter gottschalkii
MFNNNKILVVIPAKGVSKGIPRKYVRLLNNKPLIYYAINIAKSSQYVDDVVVTTDDSEIASISEKFGVSVIRRSKELSGEDIPLDAVVFNAMVQKEKSAFDEYDIVITMLPTSPLLKTQTLDNAIENFDDFSLESVISVVEDKQLFWGYDDDNKIYFPKYIERCNRKDLPSSFRETGAIIATRRGFINEISCIGENIDVIELSDEEAITVDDFKDWWIVETILQRKRIGIVVNANNEIGTRRIDNCLAFASKLVSHEFLFILDEKHKLGQNLVEKFGFNFKIYNGHDAIYNILEEFAPQIIINDVSDTTEEYMSDLKERGYFVANFDDLGVGSNLADVVFDSLYEHDLSDTNVYTGQKFHILKDEFYFQPHKVITQDVDNILIMVDGNDPKHLSEKFLEAILSTTYEMKINIIVGRGYENIEQFISNYESNPLVQIYQNVPNVSDFMFKADILVTSASKIMYDACALGVPTICVYQNDLETSHVFANSANGILNLGDVESLTKQEFVNQFLELVNNHDLRLNMHNKMKSIDLQHGYENICAVVTEEYRKFAMNK

SEQ ID NO: 11437 - protein, 349 aa, Methanobrevibacter gottschalkii
MNMKSMSDKLLKKINELSTPVKIMHVCGSHEHTIMENGIRSLLPDEIEIIAGPGCPVCVVPSREIDEALELIDRGVTITTFGDMLRVPGSERSLADAKAEGGDVRVVYGINRAIEISEKEDNDVAFISAGFETTAPTTAAELLATPPENFSVLSCHRLIPPAIDFLINSGETSLNALIEPGHVCTIIGTRPFEYFSKEFGIPQAVAGFNPLDILMSVYMILRQIHNETPKIENEYTRAVREEGNTIAQEKMNQVFEVTSREWRGFPKIPNSILEIKDEFSEYNAREKYDIEVKDVNEAPKGCICGPILRGLARPEDCKLFRKTCNPLHPIGACMVSKEGTCNIAHRYSR

SEQ ID NO: 11438 - protein, 234 aa, Methanobrevibacter gottschalkii
MTIEAIAVDIDGTITDEKRQICISAIEALRKAESKGIPTIIVTGNVVNYAYATEVLIGCSGGLVAENGGVVFKEGENNNAVETLVERAFVTSAEEHLKDKLGDKFDKHASHDNMYRLTETVFYKTLDIKELEDALKDFKYLDELEIYDSGFALHITDKRVNKGTSLKYLCERNGINMENVMAIGDSQNDEDFLKQAGYKIAVANAEDKLKDISTYTCENMFGDGVAEAIEKFVL

SEQ ID NO: 11439 - protein, 437 aa, Methanobrevibacter gottschalkii
MIYEIAQEAKKAIENNCDAYEIYIDESKSIQLDSRKEELNFAKEEIDRGVGIRVIKDNKIGFAFTSNMDKIAETAKHSIENTKLNKTDENYAFAEVEEIPSVKKVYDKKFNELDLDESIEFLKNTIDTTIDQGCDITGSGFSASEGKSLILNSNGVSIEDEGTGFSIGLSVNIQKDGKIATAYNSQSSRFFDLDGEKLAIEVCNLAKSSLDTKPIETNNYDVVLDYYAATGLLQTFMNAFNGENVMRGRSILKDKINFQIANPNLSIIDNPLLEKGMYTSKCDGEGIVSQKTDLIKDGILNSFIYDIYTANKSGVKTTSNGLRGSYLTTPMISPTNLEFKFSDMKDLSEIKNGVLTTSVLGAHTANPISGDFSVEASNAFKIENGELSEPINKAMISGNIFEIMEKVEGLQSEIKQYGPFIIPKLLVHDLRVVGQNQ

SEQ ID NO: 11440 - protein, 83 aa, Methanobrevibacter gottschalkii
MPKNEEFDLDKEIERISRKTNINMRNSEFSFENQIRKLDKEIDKIMEDKLKEFDDNKKLTSDYFSIDYNESTISRYREKLKKI

SEQ ID NO: 11441 - protein, 153 aa, Methanobrevibacter gottschalkii
MESEVKVIPEQKLAVINCKTPITDLEIFLSMLMGWVDAEEIETAGEPFIVYFSPRHQVNKGDAVFDVSIPIKEDANETDRIRVVDMISNKVLSGIHYGSADSIMETYEKLVDIAQENHYDIIGSPKEVLIKNVHNCDDEKEYITEIQLPIIEM

SEQ ID NO: 11442 - protein, 407 aa, Methanobrevibacter gottschalkii
MGTEFLKIKECDEATEIIQKLFDEKLNQQSEEILVTESYGRILFEDVYSKMDFPPFDKALKDGFAILAEDSFGASEESPKTLDVIDFLEAGATTDKKVEKGKCIEISTGAAMPEGAESVVMVEYAEKSDGKVNLLTTATPTQDVARKGSDIEEGKLILKKGDFLNPGKIGVLLSQGFETIEVYKKPILGVISSGNEISLQGEGLTYGKIYDVNGGMIKNAAISCGADAHFLGIMRDNYDEVKHKITDALKEADIIICSGGTSAGLGDVLNSVLEELGEVYIHGISVQPGKPTIIGVIEDKLVIGLPGNPVSALMIFNAFIAEPLTKLAGIDKDFELDTVKGKMTRRIHSPVGRMQYQLVKVDGKDIHPIFKDSGAIFSLSTADGYVKVPKSVELLDEGEEVEVYLFN

SEQ ID NO: 11443 - protein, 101 aa, Methanobrevibacter gottschalkii
MSKPNQNQQQEYRRVRTPKKGEIPGVVEQIMGHGKLKVRCADGNMRMTRIPGKMKKRIWIREGDVILVKPWDFQSDEKADVIWRYTKTESNWLERKGYLKM

SEQ ID NO: 11444 - protein, 256 aa, Methanobrevibacter gottschalkii
MDSKIAKADAKHEKLHSQKRKKDSSDRKVGNEIFDKITLETLYKLANQGHIDILNGAISTGKEANVLTGITDDGKFIAVKVYRIATSDFKKMDYYLKGDPRFNLKTKNKRKIIYSWVTKEFKNLTRLESAGVKVPHPITSANNVLLIEFIGDENGNPAQPVKNQPPKNSEEFFKKLLINLKLFVNEAKLVHGDLSNYNILNKDEEPVIIDVSQSVVLDNPISRELLERDINTLVREYTKLGVKTSFEEIWEYVNPR

SEQ ID NO: 11445 - protein, 82 aa, Methanobrevibacter gottschalkii
METPPCKSKINRIPKPPSAKICVKHSQKKKHMTGMTKFYRSYDFEIQKLPMINENTMQKPQQIYFKDLPDKEIIKEDVILFF

SEQ ID NO: 11446 - protein, 438 aa, Methanobrevibacter gottschalkii
MGEKYKKVINMKKYLPRYTDQELKESLEYMGAVLITGPKWCGKTTTAKQQCKSLKELQHPVHGKSYLKLADTNPIELLKGEKPMLIDEWQMAPELWGTVRYLVDESDEDGLYILTGSTIVDESKIVHSGAGRIKRIVMRPMSLYESGESTGEISLIDLFDNDDLNIDGVTSNLTIPDLIFAACRGGWPESLNKKTKKQQLAIVSNYIDIICNSDVSEVDGVKRSPQRVKTILKSYARNISTLATKKTLMKDIKTEYADISLPTFNSYIDALERLYVIQNIPAWSPNIRSANTIRKSYKKEFIDPSIAVASLNLTPEKLLKDFETFGFIFENLCIRDLLVYSSSVNGKVLYYNDDSGLEADCVIYLNDGRYALIEFKLGNREIDNGAGNLLKLKDLIKKSVENKKIDLEEPSFLAVITGGELAYTRADGVKVIPIGCLR

SEQ ID NO: 11447 - protein, 312 aa, Methanobrevibacter gottschalkii
MFKFDKEQEVFDFAGVKMGGQPGEYPTVLAGTIFYGGHNILNDELTGDFDKDKAETLVNDMASISDVTGNPYIVQVFGQTVEALPKYIEYIGEICDAPFLIDSTSGDARVAGAQYADEVGLTERAIYNSINMAADKSELDALASTDISASIILGFNPMNATVEGKMNMWENGDDGAYEKGLLEVAADCGIDKFMMDTAVTPLGQGAGIAARTSFAEKAKWGYPVGSGIHNVPSAWDWLRDYKKEGNKTAFTVCDIGANIVQVMCGGDFVLFGPIENAKIAFPAVAQTDMFISEAAKPLGTEPVDYHPMNKLL

SEQ ID NO: 11448 - protein, 206 aa, Methanobrevibacter gottschalkii
MPETDYLKIPQNRIGALIGSNGGVKKSIEKATGTILDIDSDEGTVYITPGENMEDPLGVWNANHIVKAVARGFNPEVALKLVSDDYYLEVISLPLYIGKSKKALARHKGRIIGKDGKTREIIMEMAEVNMAIYGKTVSLIGEMDNIMVAKEAIEMILKGSRHKSVYGFLEHKKEDLKMKEFKDLVGIEDDKIEFKDGIEFDEKTLQ

SEQ ID NO: 11449 - protein, 567 aa, Methanobrevibacter gottschalkii
MQEQDVGTDWRNDFKNLTPSEFFRKNKQMLGFTGKIRSLTIVFHELITNSFDAAEEAGILPEIDIELKRVEKEHYILKLKDNGPGIPEDYVMRVYCSMFAGSKFRNIQSRGQQGLGCSGCVLLSQMTTGKPARVISCYKENGDIKGVKMKFQMDVKNNRGILMEREDYPAESTGVCIELQFKEVSYSLAEQGAFEYIRRTMIGNPHAKITFRDPSGHKYIFKRAADIVPILPKEVLPHPKGVSADDLMTMAQNTDSRRYKSMLTSSLSRMSNKRVDEISELTGIDMNKRPKDLTFPEAETIVHCFKKMKFMAPPTDGLIPIGSEQIEKGMKQILKPEFVTTITRKPVTYQGGVSFIIEAGLAYGGDSGRVVKEQRKSEIMRFANRVPLTFDAGSCAITEALKSIDWKRYGLKDLDNTPLTLFVNIISTQVPYLSTGKQSVSPEPEIVHEIRQSTMKLARKLQKHLRAKKAAKEKEKRSKVFEDYMPVIIEEAAKLGETGVPEYQEVLAKVTKRALAELLGEKVEEEEEEEELDAIIMEEVDERGYAVDGNSTLDSFEEDDVDDEFED

SEQ ID NO: 11450 - protein, 364 aa, Methanobrevibacter gottschalkii
MTEIKENQKAHREKRKEYTYNKLKGLGQEIIEDIEKQKVPSVKVPSRGTGNIVYDNAKRYYVLGDRYGRRSLGNVKQIRKLGQMVYVANFCKDLVAREKTATIREMYYVSEGWGISFKTQQESNIVGEDLEVTLGTTREDLGLMPEEDGASVYGDITLLDDGVEINAAKAGKSGYTISPTIDQVEFLDCGVERVIAVETMGMFHRMVQENANKRFNTLIVGLKGQAARATRRFIKRVNEEIGLPVYICNDGDPWGFHIAQVIISGSAKLAHVNHDLATPDAKFMGVTASDIINYDLPTDKLKDVDVMRLKELSKDPRYKSDFWQTEIKKMLKIGKKAEQQSFSKYGLEYVVDTYFPQKLEELEN

SEQ ID NO: 11451 - protein, 90 aa, Methanobrevibacter gottschalkii
MKQCMDTENLHRRLKKIIGQLNAIDRMIEEDIPCEQILMQVNASKSALHKVGHIIVEGHLEHCVKQAMEEDDVDEALVDISSILEYYSRL

SEQ ID NO: 11452 - protein, 622 aa, Methanobrevibacter gottschalkii
MNLKFKNEEKLEIIFIIVSSISLVLGFLLSIDYLSWISIIICGIPIFKECIEGLITEFDIKADLLVSIAIIASIIIGEIFAAGEIATIMAIGGFLEEYTVAKAQNQIKELAKMTPKTATRIKNGTEEKVPIEEVKIGDILKILPGESIPNDGIIINGETSINQATLTGESIPVDKTRNDEVYSGTINLYGSFTMKTTKISEDSSLQKLIKLVESSKPENANIVRAADKWATMIVVIAFTAAILTYLFTFEITRSVTILVVFCPCALVLATPTALMAAVSNLTKYGILVKNGESLEELAHIDEVIFDKTGTLTYGNPTVIRVISENPQEMMYLAASLESKSEHPLAKAIVKYYNNNDLAAVNEFKIHIGKGITGYINGVQIIAGNKKFLESKNIPLGSNENSSNGEIEIFVAKGNKIIGKIFLADTIRSNAKATIKNLKKLRIKTTLLTGDNENTAKSIANQVRIHNIKFNCLPEDKIQYIKDEQIRNHRVAMIGDGINDAPSLRKSNVGISMGNIGSDLSIESSNITLIKDNIENIPHLIEVSKKTIKTINISIGFALTLNIIAMALAILGILNPIEGALIHNIGSVIVIIYSSILVNYKSSKIDYRTQQFDVNKALNITMF

SEQ ID NO: 11453 - protein, 67 aa, Methanobrevibacter gottschalkii
MAEKEIKVVGMHCSSCVNAVELCLKDVDGIDDAKADLDSGITTLTLSGNVSDEDINEAVKEAGFEVE

SEQ ID NO: 11454 - protein, 338 aa, Methanobrevibacter gottschalkii
MKTVAINGYGTIGKRVADAVAAQDDMKVIGVSKTRPNYEARTAVEEKGYPLYIGIPEREQMFKDAEIEISGTVEDMIQEADIVVDCTPGTIGPQNLEMYKKAGVKAIYQGGEDHDLTGLSFNAMSNYDESYGADYTRVVSCNTTGLTRTLSTIDPIANIKKVRAVMVRRGSDPSEIKKGPINAIVPNPPKVPSHHGPDVKTVMKDIDVTTMALLVPTTLMHQHNIMVEINNEVETEDIVESLEKRSRVMVVSAEDGLGSTAELMEYAKELGRNRNDLYEIPVWRESINVVGNELFYMQAVHQESDVVPENIDAIRALLEMESDNEKSIAKTNKAMGIL

SEQ ID NO: 11455 - protein, 277 aa, Methanobrevibacter gottschalkii
MKQKVIFGPAGSPVDYKGAAYKAPKYISEEGLDSYEYQSPYGVRIGESSASTLKEESEKHDVLISMHAPYYINLCAKEESKLDKSIDHLIAAARAGEWMGAYRLVFHPGAYLNRKPEKAMEISRNTINRLFEELESEGIEEFTFAPETTGKRTQLGNIREVVELCASFDHFEPTIDFAHIHARGRGFLNKKEDYNCIFSTIENQLNIDILHCHFTTIEYGKGGEIKHHTLDENDYGPNIDDLLSNLIDNGWNANIICETPLRDIDSLKMKKKYEEMI

SEQ ID NO: 11456 - protein, 169 aa, Methanobrevibacter gottschalkii
MTINDNHNHFCIYCGAKLDFGQHFCTKCGKEVVHAEPTYEIVSRYYDLLYDIEQEYDAKQERAKELVNKLFDPAHMSYNKFLSSINKSNGLFNNQLDVAKRMIEVYDGTKDFIEHEIDNKIRTLQTFVDKMNDLIDEMVIHLSSNKQDTGDINNLFEDMDDLIDSVKDY

SEQ ID NO: 11457 - protein, 355 aa, Methanobrevibacter gottschalkii
MSFRTRRILIMTPFYMIFQFFLLKYLLLLFGGLDDGYLIIIAIIVGLLHCMPMFFESKKSTVAGRFLTTIGGVWMWMSLMFLFDLMFIYLIKMFVILPFEIIVDLVLIVPFLGIYNFYKSHKLVINEKILELNNLSRDINIVHLSDVHFGSVRHKKIINLLVNKLKELEDTCELAIISGDLADGSSAVGTDDFLAFKDVDMPIIFTPGNHDFYPGIDNVINACKNAGIIVLDNEKKEFGDLSIFGLTFSFEDRCVPKIDESWINPNLINIINYHVPYYWDEFSKLGFDIQLSGHTHGGQFYPAIWFANILFKYNKGLFKNNLGKYLHVTTGVGSMDTPMRWGTDSEIVILKLKKA

SEQ ID NO: 11458 - protein, 374 aa, Methanobrevibacter gottschalkii
MKNDNKKAEIKTTNQKQKLKKAESKECAECVILKPVGYPFEFNLMDEHIEITNKKLFEEYAREQWLGLVVKENSHLFDQKIIPDYGFEVIKAKPNNSIISETTRIQLITSDLENKNDKLTFKSNISISDIVGQTNAKNKVKVIMKYLEHPGKFGPWAPKNILFYGLPGTGKTMLVKALANELEVPLYLIKATSLIGDHVGDGASKIHDLFKKASENSPSIIFIDEMDAVALHRSFQSLRGDVSEIVNSFLTEMDGISENEHVITIGATNSPNSLDYAIRSRFEEEIEFKLPDDEERLTILKNNLKSMPLDYELDLEKIVKLTKGLSGRDIKEKILKTALHNAIANDSDSITMKNIDYSIESSKIKNKDIKGMFE

SEQ ID NO: 11459 - protein, 396 aa, Methanobrevibacter gottschalkii
MILNLRVDHKIADIQSMEVIAKDIDDLFAELQEKYSIGEYIEISTCNRKEYYIHNNNIPEDDELLSHENVSIVIDYGQSAVMHLLRLTSGLESMIIGEDQILGQVKDAKNNAIKNHHCGKVLDTIFTKAIHVGQVVRNKTRINKGSVSIGSAAIDLAEKHIGSLVDKSVLVIGAGKMGKLVAKALAEKDLKAIFVANRTYYVAVNLAEDLGGEAILFNDLEKYLTTADLVISATSAPHPVITKDRLLKCGRNYETLMMVDIANPRDISEDVCELGVKSFNIDDLREIAEINTNLRRKEFVEAESIINEEFILLKESFKIMEFDKLLGNLRASMEDIRQRETQKANVKLAVDGSVKILDNLTNSIVNKIFYDISKKVKKAAKDENEDILAACEYIFN

SEQ ID NO: 11460 - protein, 206 aa, Methanobrevibacter gottschalkii
MDWTSLYLKTFDFNVFILGTGEVATRRANKFLDHGANVKLVGDSLPKELKYKGASLCSVSDVDDLIDWSDLVVIASGDRELSDYVSGIAKNKLINRADFPQEGNVIVPTSFNIGEIEISIFTGGKSPLMARQLRKKIQSIITEEDILEIELQDYARKNLKKLVENQKDRKKYLYEIFEDEKVNVLIKNRKIDEAKLYIDNLIRGLI

SEQ ID NO: 11461 - protein, 160 aa, Methanobrevibacter gottschalkii
MTWEDAPSHICRGGDIRGLAFCCPPVKPCPILNALQEVNLTPKEYIEIKTQFAKETRLGEGAGTCFGSLVWCCKPSKPCPLRDMTLKNMGMSHDEYLDLKKELSERLVGVKKPDPDEKAEALAETFNVTKLEAMNILNECNDDLRAAVKVLHARSLENSD

SEQ ID NO: 11462 - protein, 228 aa, Methanobrevibacter gottschalkii
MKEKLIVEDITITLERKNIKNMYLRVLPPKGDVKLSVPLFLPNNEVIMFIKSRKNWILKKQEFILNNNIQPPLKFISGEKHQLWGREYTLQLIKNDNIEHVLIDEDTSIMYLPLPKKSTIKAREEILIDFYRKELQNAIPQVLEKCSLIVGQKPSEVKVRKMKNWGNCRQDRRITLNLNLAKKDPKCLEYVMIHELCHLIEFNHGEKFKKLIDKFCPDWKKIKKELNE

SEQ ID NO: 11463 - protein, 533 aa, Methanobrevibacter gottschalkii
MDFITLKNITKTFDGVDVLKNINLKINEGETLGILGRSGSGKSVLINMLRGTSDYKPDAGQILVNVAVCPDCLAVDSPSHVGEKCSCGATLEAKEVDFFNSERKLFASIKRRISIMLQRNFALYDEETVIENVMRAMPEGKDYDEKIYEALELLEMVQMNHRITHIARDLSGGEKQRVVLARQLAKSPMMFLADEPTGTLDPQTAIKLHNTLKEGVKDKGITMLITSHWPEVMIELADSVIWLEEGQIKEEGEPEKVVNEFVATIPIPEKPEIPEFGEPEVVLEDVKKHYYSIERGVVKAVDGVSLNINKEEIFGIVGLSGSGKTTTTRMLMGLTEPSSGNIQIKLGDEWIDMTKVGPLNRGRIMPYIGLLHQEYSLYPHRTVLGNLTDAISLNLPAEFGKIKAIHALTTVGFADDVAASILDKYPDQLSVGEKHRVALAQVLIKEPNLIVLDEPTGTMDPITRVIVSDSILKARTELEQTFIIISHDMDFVLDVCDRAALMRGGKLLDIGTPEEIVDKLTADEKEDMLKENR

SEQ ID NO: 11464 - protein, 243 aa, Methanobrevibacter gottschalkii
MLKVVAPMAGITNAAFLNKVIPYGFNVATLGGYSLDSPTIEASKKIIQRGRKEFDFPLDVIFNHIENEVDLIKKYHKNVKVSANVRASNPQPIIHVGNIKKLDIVEINCHCRQKEILDVGCGQEMLKRDDLKKFISQIVDNVDSEVSVKIRANVDGIDTLEIANIIADAGADYLHVDAMKKGVFEADWELLRSICNDVDINVIGNNSVNSEINVRKMIGTGVDGFSIARSVISGNLEFDISDF

SEQ ID NO: 11465 - protein, 259 aa, Methanobrevibacter gottschalkii
MERGYSMIQMTLIQIDNYGPWTVTPRPRTESDLQILQARLFADLNSYFGSKKGLVFFTRFDNLLAISNGIDEEDHLRIQRSIRNKYPITVSMGVGAAETPHEAQKLATIALQKAGSAQSGERKEILAIDSLVDEENSFVQAAHIDINSVTETFTDIESAFDTSFSVNKAQHYLMTKLIKKGSLLFFIGGDNFMAPCNGLSEKEIENLMIEIDEEIGIKLKAGIGRAKNAEDAAYMADIGLEEIRAHNNGMWTWVVEKED

SEQ ID NO: 11466 - protein, 301 aa, Methanobrevibacter gottschalkii
MITVLSGGTGTPKLLQGLKEVVDPKDLTIIVNTLENDYFSGVYVSADIDTVLYTMADIINDEFWYGVKNDTFITHNRLEELGCSELLRIGDIDRATKIQKTQLMEKYGLGKACEIQAKNMNIQSKIIPMSEEDSDIKIITDIGELEFHDFLIKHQSEPEVSDLKFSKVSPTEGVIEAIENSEAVIIGPSNPITSISPILSLDGVCDALKDTYVVAVSPIVGSDSVSGPANKFMKALNIDVSSYGVASIYEDFLDTIVIDVQDNDKKDEINQIVNKVIITNTIMNNLDAKKNLAEIIIDSIP

SEQ ID NO: 11467 - protein, 254 aa, Methanobrevibacter gottschalkii
MSIELFGLENIPIIDGNSDISKIIKEAIEKQGCNLCHGDIILIAETLISKAEENFIKLDELTPSTQAIELAKKAKKDPKLVESIIQQSNEIVAVGPKFIITETVHGFVCANAGIDESNVGDGLVTLMPNDADISALNIRKYLENEFDEEIAVIITDTQGRAFRFGAVGTAIGCSGISPIWKRVGEKDLYGRELETTEIATCDELASAASLIMGQADEGLPVVVIRGFDGFDKLRDVDSNIKSVLMPKEFDVFRN

SEQ ID NO: 11468 - protein, 208 aa, Methanobrevibacter gottschalkii
MYTGRILSTGMNCEGKPFIAYRVSSRSFPNRQCLKFENRAAIVPKEGFEKDIFENPYITYNCIRIVDDVAIVSNGSQTDVISDKISLGMNLRDAMAYSLLTMDYEKDSYNTPRIAAVVTASTDEDGYGCYIGIVNDNKILVEQVPHGKAAFISTYGSQVPDTVDFDAKTANECAKFIFDEGAFADYEKPVTSSAAIFDGEWAIDVYNP

SEQ ID NO: 11469 - protein, 136 aa, Methanobrevibacter gottschalkii
MAIDVGKHKKKISDSKPSINLVPFIDILFTIMIFLVVTSNFSADVQTDDSDVTDGGSGKPNVTSVSGDSEYYVMPVANLHKVTVNGVDKSDTILNSAVGVQANVIDNGKITIKPGEIDITTPDGVSPDKAVQRPQL

SEQ ID NO: 11470 - protein, 279 aa, Methanobrevibacter gottschalkii
MIIESIMPFVDGIVDIFTQGGFITYIILFIGIYGLIIGLRKIAYLRKISKVDTTEIFGVVTASMERGGAVEALKQINGFKNPISRIISETLKIGYKNKTEVEESMEQIFIVEVGKMTKGLSTIKTLTELAPFLGLIGTVIGIWLTFKSLGVHPDSAAMAEGIYVALTTTIMGLLVAIVLLPIHTYIQGLIEVEMDKIELATKMTNWGYAVVKVRVDSNVECALEALQEAEGVVNTRLISDPYANIKVSFKPSMLDKSISNIILEKCNVNAEITESKLKQ

SEQ ID NO: 11471 - protein, 204 aa, Methanobrevibacter gottschalkii
MDILGIDEAGRGSVLGPMVIAGVIVPEKMDKVLERMGVKDSKRLTPNRRTILSRKLRKMFEYEIVVISAREIDELRANGINLNEIEKNAMESIILKLKPEKTIVDAVDVKAERFQENLCNDTCCNVVAEHKADDKYIEVSAASIIAKAERDAHINEINMDYVNFGGIGSGYPSDPTTKKFLTNYTYDEMPDFVRKSWATVAKMK

SEQ ID NO: 11472 - protein, 357 aa, Methanobrevibacter gottschalkii
MNIFGKEEEEPQINDTKVISNSLGIDLGTLNTVIAKPSGDKFDLYQIPSVVAVKKDDPSEVLAVGEEAKKMLGRTPEDILAVRPLKKGVIENVVQAQALLIKAMQIGINEGESVGRIVIGIPGDASEVEKNAAEEIGRKAGAQNILVISEGLAAAIGAGLPIAEPNGTMVVDIGAGSTDIVIISLGGINDIETVRCGGDDIDNKIVELVAEKYDVAIGIHDAESAKIEVGMVHCSEQLENLSVEIIGKSLETNRPKKVIIDSMLVAEAVEPYMQQIISGLNIVLERLSPELMMGVYNNSVAVGGTSRLRGMKERIFDEISIPIEVSDDPMTVVAKGTAIVAAEPLALEPEVRLRAMK

SEQ ID NO: 11473 - protein, 214 aa, Methanobrevibacter gottschalkii
MIEDNIRVLRQAAKVSSNSGYEIEKNWCVIAGNAEIIDKIAYKAIASNHRVKIIFREHVMLNDGKLDKKFDFIMLYGNSIVIDEFKKLADQYGGAYVRILHKYLIEEPNLMVFVAPDNVIKKTVSVIEKSKISFAILQDSQTTAFIDVDLSNEVKLPNFIKSALKPFYNANEVVLSTILISVDKKEEIKKVQSIATSNRIFVIDFKDIVTEDYS

SEQ ID NO: 11474 - protein, 231 aa, Methanobrevibacter gottschalkii
MKIENTNMKRFIALSDIISLLNMTSGFLSIIFSFNHEFNIAAILLIIAIMFDSADGWVARKINRQDELGFGKNIDSLSDIVSFGVAPAIFLYSCINTTPGIFQIIVTIVCLLIVVCGVLRLTRYNVIAGKINTNDFIGFPIPGMSLMIGSFYLSGIFNPHIAILLSIIVSLLMISNIKYPKFDNMALIGISCILIIILILPIDMILFNINIPAILLLFFCLYYLIINLIKK

SEQ ID NO: 11475 - protein, 389 aa, Methanobrevibacter gottschalkii
MNDKKPRDPLYPKGFEETRKLKNQLTKEYSKPNKKEDELTPLKKLNHKLGVYLSPNSVEISNDEKKKKIGIIITTLILITLISSAYYFLIYEPAQEELTLAKTTKLNELHEIYNGPLTTSQNSILLENQINDGKTPEEIERINILTPATKDWQSFHKKSIYTNKDKYNRTMAIYSNESKNIILSTTKAIKIVNENNAEVLSKIKFEEPNTVSVPILISRLQAGAGLVNVGSVVDIYTNNNNTNENYTPNNTSPNISGCTVLAIMRYEDNGEIDSKYSKSNTIIKGNHTNPKENTKEFSSDVLELIKGSIINGYDEEKTIEILKNYGIKLSNYERQINLGDLNAQYMLLIETPQDKVEYVINNMENIILTIPTTKAPNWMVNEISSTYQD

SEQ ID NO: 11476 - protein, 239 aa, Methanobrevibacter gottschalkii
MNKPTISTIVIIICILIIGLYAMGEVNYFSSKIAVERNIDSPTILIPSIGVNEKINNVSLNQGVLSDPGENIPTKDYVALYGHRTLQGSPFFRLNELSIGDSILLEWPGVGELNYTITNTTIVPGTADVPIGGNDSLFLITCDPIGSTANRIIIEGTLEKQNPINNEIIKENPQESNAIIITAIFFIVGCIFSYFYPKDNRIYILAVILIISALLFYSCINPIPSEIIYEKIIFLNGGL

SEQ ID NO: 11477 - protein, 124 aa, Methanobrevibacter gottschalkii
MDVDKKYFSNITTRERAIFEGAISMGALFHQFVGTPVNKYTKNGLEKSMEDSLRLQPAIEDVNVKIRFDKLKESMTEFDYTSLNGDMLDVKIYAKVDNVKAIIRIEFIEELNYPLMYVENITED

SEQ ID NO: 11478 - protein, 385 aa, Methanobrevibacter gottschalkii
MDEKSIDKDVILKELDELHNLDHNYADGRILGSMCTEAHPFAKEIYYKFLDTNLGDPGLFKGTKLIENKVIESMGEILSIEKPYGHVVTGGTEANLMAIRAARNHARKYKGIVDGEIIIPESAHFSFKKAADMLNLKIVEADLDDNYKINVGSVKRLISDKTVAIVAIAGTTELGLIDPIEEISKIAYENNIYFHVDAAFGGFSIPFLRDMGYDLPVFDFSLDGVCSITIDPHKMGLAPIPAGGILFRKEEYLDVMAVDSPYLTVKTQSTIVGTRSGAASAATYAVMKYFGKKGYSKLIKELMDNTQFLKENLEKIGYEIVCEPELNLIAFNHPNMETNEFAEKLEGFGWKVSVAKCPVAIRVVLMNHIKLNHLKELVEDLKEIF

SEQ ID NO: 11479 - protein, 758 aa, Methanobrevibacter gottschalkii
MYVKKFEDLNKSDIPIAGGKGANLGELTQAGIPVPPGFVVTAQTYEKFMVETGINDQVLSILDEIDINDTKALQAAAEEIKAIINEVPIPEDMILIITEAYNQLCQRCGEEDVEVAIRSSATAEDLPEASFAGQQDTYLYVSGTDSVLEYVRKCWASLFEARAIFYREENNFEHSKVLIAVVVQKMANADKAGVMFTVNPSTGEDIALIEGSWGLGESVVSGDVTPDNYQVAKKDNDIINVTVSDKKVMYVNDENETSVKVDVPEDMRNERVLSDEELIELTEMGKRVQAHYGEPMDTEWAFEKGELFLLQARPITTLGDVTGESVETSSDTGEVLVRGLGASPGMASGNVKIILDIDELDKIKDGDIMVTTMTTPDMVPAMKRSSGIVTDEGGVTCHASIISRELGIPCVVGTGDATTILKENTGVTIDGKKGLVFDGISEIKEEAVQVKVSAEAAPVITVTEVKANVSMPEAAAKAAATGADGVGLLRTEHLMLTAGIHPGKFIADGREDELIDTIAENVMIVADEFYPKPVWYRTLDAPTDEFITLEGGENEPEEHNPMLGWRGIRRELDQPEILKCEFKAIKKLHEKGYTNIGIMIPLSQSPEELKQAKSLCSEIGLEPHKDVDFGMMVEIPAAALTIEDYIDVGIDFVSLGTNDLTQYTLAVDRNNEYVAKHYSEEHPAVMKLIEMTIKKCVEAGVKCSICGQAGSVPRIVEKLVEFGITSVSSNTDAIAEVRKTVARAEQKIILDAARKRLE

SEQ ID NO: 11480 - protein, 160 aa, Methanobrevibacter gottschalkii
MVRAYTRRDYIRKTPNSRIVQYDMGNLKDEFPVSVSLVVKKPAHIRHNSLEAARIASNRLMQRAAGRLGYHLKLRVYPHQIVRENPMATGAGADRVQSGMRNAFGKPISVEAIVKKGQRIVTIDCNEKNFEQAKVALKRAGMKLPVPCRIVVDKGADLVK

SEQ ID NO: 11481 - protein, 75 aa, Methanobrevibacter gottschalkii
MNVKGKIYLDYNNKESAELIFNSLEIDNKNYLKSKLKEDKIIYEINSETLGSFLATADDLIASEIVIEKILDATQ

SEQ ID NO: 11482 - protein, 378 aa, Methanobrevibacter gottschalkii
MECYYHPEKESTANCAICGKSVCGECSLEIAGKVYCKECLEKIVGLGIQNNIPEENKSDEQNPIVTESPEVNAQSVDDNIYQPQEETDFEIPYTPQEEVPSKEFKGISDDSPYNIKENIEYTGGLESSYTIDSDIYQKPQVEQQPQVAQNELDIKQPTLNSMNKDDFIYPDHDYEPPTTSARQELEDKYEKYLDDLYFDENEVPLGEQLAKDEAQYGSLTRKEYASKPKNIVEPQIPTQKDEPIIETPEEMEARIRAEILKEQGLMTDTQSIDSTLKEELESSKGKKLFGLRRNKNNEEELITASEDKNIHNLNYKDEKEPMGVVDILLTIILVIVILIVIYYIVYLFLLSSTYPTFMDAVFAIRNPQNVINSILTQL

SEQ ID NO: 11483 - protein, 360 aa, Methanobrevibacter gottschalkii
MSQVLDILKRDKELFFSDVEMECNNSDTSSDMNLIADFTEYNPLHNGHFHCMKTAKHMFPDSLFVAIVPGLFERSGRGIPYILPREIRAEIAISVGADIVVEGPPMGIMGSGQYSLCLCKMFKSLNTDYIPRGYKPKEGFDEILKRINLGHHIAPKPYKIVDKTAHETILNDKLEEDNYVITSFSNSLSKIGFDYTNKFIFVKRIEGVSGTLIRESIQKDNFDNVLNMMPSETIEVLKREIKNNSIIYGIRDVESILDTANTFNFEELSALNLFNEKLAKNIVNNKPYENLDELEKVILHGFSSHFHQRVLSILENPIPKKIISKYIEKYPSNIRVLGYRNKEILEKFIKKVNNENISLL

SEQ ID NO: 11484 - protein, 418 aa, Methanobrevibacter gottschalkii
MDLVIKNCKLVNKIGEYSIKVENGKITKISKTPLKADKVIDIKSNYIMPGFIDPHIHFRDPGLTQKEDFKTGSKSAANGGFTTVIDMPNTIPKTNTYEALKEKIEIAKKKSVVNFELQAGPNNLEEMKKMIKLNPISFKIFMDLENDESLEEIFKNLSILKENTKYNGLVAVHCEKKSIVENETAKLKEKKENIPIDYTYARPTTSEDASVIQSIELAKKNDLKLHICHLSSAKSLHIAKNASKNMDVTWEFTPHHLLLDNTAYNTYGTFIKTNPPLRPKNESVRIEDLDETSIIGTDHAPHKIEDKTKGVWNSSPGIPNLETVVPLILTEVNKGNIKLDIIPKIFSKNAAMAYGLKNKGEIAIGKDADFTVIDLRQEGKFNIDEFKTKATYSPFDGWNYIGKPVMTIVNGNPVMDKL

SEQ ID NO: 11485 - protein, 411 aa, Methanobrevibacter gottschalkii
MIVFNDDGCIKCGACQGTCPTSAIEVTPNAIVHCDTCGEEPKCADVCPNGALKVEEYEIAEGISQARLVFNSILCDQCGKCEEVCPQETIKVTGTKLKEVEGFCVMCQKCVDICPVDVIGVPGVKEPAEYDLDLKGKGPVYIKDCVGCGTCVDPCPVGAITLDEVGSPVTVNDDCIRCGLCSQTCPWNAIFIAEKKPIKRTKEIKSFTFDSAKCIGCNTCVEACPGDFIAANSSSLTVAIPSVCAACSLCVNLCPVNALEIDVEWGEGSPVDAEGIGRDVEKCDFIGACANKCPTEAIRVVTKTGMSCPALVETDAEPSFTSCIRCGACASVCSNDALKVEQYEVTINGEAVARDRIAFNPSKCNQCGDCIEACPYDMIHKTENPKLPIAGFCTLCGQCLEACPEDALCYK

SEQ ID NO: 11486 - protein, 475 aa, Methanobrevibacter gottschalkii
MVKLTMEPVTRIEGHAKITVHLDDAGNVEETRLHVMEFRGFEKFLQGRPVEELARIVPRICGICDVQHHLAAAKAVDQIFGFDDYDILPAAYRMREIMNWGSYMHSHALHFYFLAAPDLIIPNGTRKTRNVFQVIKDMPEVALQAINIRRNGLEMVRKIGGRPIHPTSSTPGGISTELDDETQKDLLNRAKQNVELAQATLDLAIPVFEENIDLISSLGNFGDTRHCGLVKPDGTWDVYNGNVKIKDKDGSDLLEYRNEEYTDIVAEHVKPYSWLKFPYIKELGYPEGIYRVAPLSRINVCDDMPKEAPLARDALKDFRSAFGYAQAPLLFNYARLIELLASAECAAAALEEDLSGQKFPEELERTEGKGVGIVEAPRGTLIHHYESDENGLTTKANIVVATIQNNPAMEMGIHQVAKDYIKPGVEVDDKIFNLMEMVIRAYDPCLSCATHSMDSQMRLAEVDIVDSEGNLIKKF

SEQ ID NO: 11487 - protein, 308 aa, Methanobrevibacter gottschalkii
MADKVKIGTMWFGGCSGCHLSIADFHESLIDVMEFADFEFSPVLMDTKYDEVPELDIIIVEGGIRNDENRELSEMLNEKSNMVIAYGTCSCYGGIPGLGNLWTVEELEEEAYINSVSTVNPEGIIPHEDVPHLESRVRPIGETMDIDLMIPGCPPRSDVVAEAILTLLKGETIELPSTNLCEVCPREKPPAGLAMDFIKRQFELGAPEPDLCLISQGLVCMGPATVSLCGAECPAIGIQCRGCYGPTAKVLDQGAKMISAIASDYGVQEDKTVDPETVADQLDDIVGTFYTYTLPAALVPMKMQKGGE

SEQ ID NO: 11488 - protein, 141 aa, Methanobrevibacter gottschalkii
MADDVKIVMFCCNWCSYGGADTAGTARMQYPPNIRVIRVMCSGRIDPQFILKAFKEGADGVFVAGCHMGDCHYDAGNYKLDRRMRLVYKLVEDMGIGKERLHHDWISASEGEKFSEAVKMMVSRIKGLGPAPLKKQLNAEG

SEQ ID NO: 11489 - protein, 411 aa, Methanobrevibacter gottschalkii
MRNVYEDAERAKDKKAAIGADITIENFTDETINAIDMIDDLDDLSKQTKKDLLKVGVDTNEENRAGSFLQVDQSNIFTNNSISDSIEVMNMGIALEKYSWLEDYMWNVVKPDADKYTAKTALREKEEGVTSGYFVRSLPSTKEVMPVQACMFISDADIMQTAHNVIIAEENSELHLITGCATGDDISSAMHVGVSEMYLKPGSKITFTMVHNWAEEVEVRPRTGIKLEDNSTYINNYILTSPVSTIQSFPTAYCDGKNSRAIFQSIQGGKKDSIIDVGSRALLNAEGAKAEVISRAVAQDESKIYARGHLAGIVPNVKGHLECHGLVLSDDSFIYAVPELEASSTNLEMSHEAAVGKISEDEINYLTSRGIPEEEAESMIVRGFLNMDITGLPDELAQQTQNMIDMSLDGM

SEQ ID NO: 11490 - protein, 251 aa, Methanobrevibacter gottschalkii
MLLEIENLAVEVAGKRVLKGVNLSIAEGETHVLLGPNGAGKSTLFLTILGFPQYDVVEGSIKFKGQDITNLTTAERVQLGIGVSFQTPPAIRGISVGDLLKIISNQDVREELNPRMKELANQLKFSDEFLDRDVNLGFSGGEVKRSEILQLLAQMPDFTMFDEPDSGVDIENVELLASEIGTLLDKDKPQRIRQRSGLLITHLGYILNFVSADKAHVLIDGVISCSGNPNEILEDIRKSGFNGCVECAQCL

SEQ ID NO: 11491 - protein, 88 aa, Methanobrevibacter gottschalkii
MENKQIPRREEKLWSEIKNYQVATNNARILGVLDELIINEKTGKIVDIAIRVESDRNIHVKGAKRNGDLLLVPFAKVEKVGEFIIVTE

SEQ ID NO: 11492 - protein, 202 aa, Methanobrevibacter gottschalkii
MIYAILMAGGKGTRLETPCEKPLFRLHDKPLIKYVLDNLKESKLIDKIVIAVSPHSCETTKYLKSLNDDFEILDTSGKDYLVDLSYILDYFEQRSKEDILLFINADLPFISAETVDIVLEYYLKSDKDALSVLVPVEIFNDLGLDYSYEFDGNVPSGLNVLKSMNIIQDENQIVIPKVELALNINTLLDSKVAEELYKEYYI

SEQ ID NO: 11493 - protein, 489 aa, Methanobrevibacter gottschalkii
MSFLSKIFNKGPKPVIAKSREGNLATLTAQKAGPASPGVVKKPDTFYVTASVELGNTTTKCIVMATNLNTSESYLLNKTVKMTRDIRQPKPGEKVFGKTVWGIELSKEAVTELVKDTVLESLRKCNVDKDKDLDFVVRSTGVTAGFATAEEAGQLIIALADGCLEADIPPRKMSPAMSISQLPERLQKHSLLENIMFDGAVVSVVPPEGKETVANEMEGELVTAGIKLGAKWTDVDYRNPCVSLDFGSTLAGRIVNDHEPYANTIGNFLGLAGVVSDSLAKGSGLIDKKNGAALDLYSDKAMKKANHKKAQVNALEAHKLINIRKVPMDVERFGTVPLNPEAAEKAGTTLIGCDVGFNGDKLDELMELGAQFYDSDGLPTLLSTLDYVSTNIVTRLLDVAFEEDVIVPGSSLGITGRAGITGRKPQLILESVQDKFENVVFVEDGLALGSAIMARCMNSMGTPKVPIGGKQGGRCILKDRMKMNGGKFA

SEQ ID NO: 11494 - protein, 310 aa, Methanobrevibacter gottschalkii
MFRFDKEQLVVDVAGMKMGGQPGEYPTVLAGTIFYGGHNIISDEKAGVFDKDAAEERIKTMEEMSDVTGNPCVVQTFGATAEAMVKYLEFVGDVCDKPFLIDSTAAAAKIAGVEYVQEVGLTERAVYNSLSMAAEPAEIEAVKNSDIDASILLGFNPMNPGVAGKIEIWETGGDVIDKGILEMAEECGITKPFMDVAVTPLGQGAGPAVRTSFAVKSKWGYPVGSGIHNVPSAWDWLRGYKKEHKEAWPVCDIGSNIVQQMAGGDFVLFGPIENARLAFPACGMADIMIAEAAKDIGTEPVEDHPINKLL

SEQ ID NO: 11495 - protein, 79 aa, Methanobrevibacter gottschalkii
MSEENSIPQVMVSSDEFNDVVAKLDAAEEKVDFTVGEYYQRLGQQTGRDVGILYGIILGLMILIVAIKFGVASMLSTLL

SEQ ID NO: 11496 - protein, 68 aa, Methanobrevibacter gottschalkii
MVQISNKPNIGGMKTAADDAEYSSKLLAREGKLFAGLLATRFKGFAIGICIATLLIVIIPFIAKAAGL

SEQ ID NO: 11497 - protein, 238 aa, Methanobrevibacter gottschalkii
MADKKAPADGWPVISGDYIVGDPESPVAVTTLASHIEAELSGAAIAGPCKTENLGIEKVVANIISNPNIRFLILAGAEVQGHITGQSFKALHENGADPDKKKIVGATGAIPFVENVPLEGVERFQQQLEIVDLIDTEDIGAIQSKINECVEKDPGAFEEEAMVISVEGDDADEEEGEAIRVVSAETGLIEARIRDINTKIDMVGAVQRNMAGNYAGKVQGIMIGLAFTLIIGVLFLLF

SEQ ID NO: 11498 - protein, 109 aa, Methanobrevibacter gottschalkii
MAQMLPMVQVVPEMNFAYDPVSGVIGSSLGSGVVLLSMDEVNEQVAKVELAADELMASLDPYTSPVGSYPGREGSYVTAGLLTNIVYGFLLASFIIFAALPILQAMGVL

SEQ ID NO: 11499 - protein, 271 aa, Methanobrevibacter gottschalkii
MSAGGSADGAAAGAVDSMHLLVLGIVGGLLGIYLTAFLGETIGSLFAGLGAVCAIVWGADAIRRVASYGLGTGVPSIGYMSLSVGVISAFAGISLAAILKMPMVGPIAALLVAVIIGAVIALVATKIVGMKIPIMLQCTIEIAGAAALSILGFSAAIAGSFDMAAVYENVVATGFIAVLFILCTMAIQHPFNACLGPNEDQLRTLKCAASTAFLSMTIVGLMSITTGGLGWFIVFIVGLIGWIISFKAFVVASMNDAASTKWAGLWPKVEN

SEQ ID NO: 11500 - protein, 233 aa, Methanobrevibacter gottschalkii
MDPISLILFIAIGGIMIGAGVHFIPVGGAPAAMATATGVGTGTAMLAAGAGLTGLITAATMTGEPFYIIGIGGAIGAMIMMGITMLIANIIYIFGVGIVPAASKVPVDWITKRNQEAYKTPGTEGHGVPVTSFVSGLIGGLLGGFGGGLVYYGIDTAINQSSFVSDPAVSIGLAAIIGVGVFFINSVIASYNIGGTIEGMHDPKFKRIGTGAIACAIASIVVAIFCIILTGGI

SEQ ID NO: 11501 - protein, 292 aa, Methanobrevibacter gottschalkii
MDPVTLGVVALMGAVATIGGAAEDLESDIGSQSNPNSQVQLAPQMGHLHRMINKAASGEPVAYGVWCGVAGAIAYIVMSLGMLPIVAIAMGACVAAFVHAIYTVTSHMGRIVGQSQFEQPLFMDVLTQSLGPIVGHGFITSFCIVGISYLMTIPINGTALHVFPLPLLAMLWGIALGAIGSSTGDVHYGAESEYQKFEFGGGTPVAIQGDIVTKAPMGAKNSMDVVNFCAKFGGPLTGFCFGLVVFFSFWNTVVFGVYGGIIVGIIIVILLVIMDNYLEVFARNQYGPYEEE

SEQ ID NO: 11502 - protein, 555 aa, Methanobrevibacter gottschalkii
MVINMADKKFLNAMKQKFSEDPTEKSTQFYNMGGWTQSERKTAFVNEGKEIAEKRGIPMYNPDIGTPLGQRALMSYQLSTTDTFVEGDDLHFINNAAIQQAWDDIRRTVIVGLNTAHNVLEKRLGIEVTPETITNYLETVNHAMPGAAVVQEHMVETDPLLVADSYVKVFTGDDELADEIDSAFVLDINKEFNEEQAEALKAEVGSAVWQAVRIPSIVGRVCDGGTTSRWSAMQIGMSMISAYNQCAGEGATGDFAYASKHAEVVQMGTYLPVRRARAANELGGVPFGFMADICQGSRVYADDPVRQTLEVVALGAALYDQIWLGSYMSGGVGFTQYATAAYTDNVLDDFTYYGKDYVEDKYGDLCAAPNNMDTVLDVGSEVAFYALDQYEEYPALLETHFGGSQRASVISAAAGCSTAFATGNAQTGLSGWYLSMYLHKEQHSRLGFYGFDLQDQCGAANVFSIRNDEGLPLEMRGPNYPNYAMNVGHQGEYAGIAQAPHAARGDAFAFNPLIKIAFADKNLSFDFSKVRAEFAKGALREFEPAGERTVITPAK

SEQ ID NO: 11503 - protein, 252 aa, Methanobrevibacter gottschalkii
MVQFYPGTSQVAQNRRNFCNPEHELEKLREISDEDVVKILGHRAPGEEYKSVHPPLDEMDEPDDIVRELVTPIDGAKAGDRIRYIQFVDSMYFAPAQPYLRARSYLNRYRGIDTGTLSGRQVIEARERDIEKLSKILLETEYFDTARTGIRGAGVHGHSLRLDENGLMFDMLRRQVFNKETGNVEMVKDQIGKELDEPVVLGEPLDEETLKAKTTIYRVDGEAYREDVEAVEVCQRIHVSRSFGAYDPNAGW

SEQ ID NO: 11504 - protein, 199 aa, Methanobrevibacter gottschalkii
MIGRCTHVVDCRETSGMGKGGSLAQRGTFAECGTDVCAVAMSPGRRHITKPVCEITFGLRESNVLTSTVVLNAGAGVPHDAPASGGTLFGITEKEIDQLNNFKLLVIHLGGVANHIIYKARLILRNVNKPCVIICESPVDCEDFAKIGVKTSKVMPADEDIKTQGTIKDIVTGVIRGETISQEKLDEIIRKVKLALGDA

SEQ ID NO: 11505 - protein, 151 aa, Methanobrevibacter gottschalkii
MDIEIFPHRILGSDTTELLLNELESIDDVQRTVIHGPRFPKGEATLPDKYKERRVININGEDVVLQVKTARIFIELTMESTIKEIEEVCKKHIPFGFDINQDRANYIRKHKTVTDRIKYGSADLPDDLVGMTDQYSDFESHVNIIKRDNLD

SEQ ID NO: 11506 - protein, 443 aa, Methanobrevibacter gottschalkii
MAKFDDKVDLYDDRGSLIASDVPIEAISPLRNPAIQSIVKGVKRTVAVNLEGVEKSVKTGSVGGDKSKILGRELDLDIVSNAEAISEKIKGTIQVSEDDDTKVEPISGGKRLLVQVPSQRIDVSAEYSVAPLATATALVQAIIDVCDVDIYDANFVKAAVLGRYPQSVEYKGSNIATMLDIPQKLEGPGYALRGVKANDFAAATLKNTFQATALASIFEQTAMFEMGDAIGTYERLHLLGLAYQGLNADNMVMDLVKDNAAEGTVGSIVQATIARAEADGVIAPQKDLTDFSIYNTDDAAKWNAYAAAGAVAATMVNIGAARAAQGVPSTLLYFNDNIEFATGLPSIDYGRAEGVAVGFSFFSHSIYGGGGPGLFNGNHVVTRHSKGFCIPCVAAAMSLDAGTQLFSPEATSGLIKEVYSQIDEFREPINAVAIAAEEIKGDI

SEQ ID NO: 11507 - protein, 414 aa, Methanobrevibacter gottschalkii
MQIVADVGGIPGKDCNGFCKYCYFRKVKKVKSFGCAYCPPNKIGCERCSKGVSETQSEFKSPLQVMNEVRNSLMMNMHGGKVTANISGGGDISCYPHLETLTSNLNQISIPSVLSYTCGKGITNSEIASKLINNGVEEVSFTIFSSDPKLRKEWVKDQHPEEALKACKIFCENIKLTGAAVIIPGVNDGEILRQTCNILEEWGAKGMLLMRFANTFNEGLILGNEPILKGIESQPVEDFAELVRQINSEYSFRVSGTPLCDPETGGPFAIAKDENEIFLQFIKPITGEATIITSKIAAPFISKIFNKLEVDSVNVVAVEKEIACLITKEDLEKLDLNEIKDVAIIPGRSFVHQLDAERILSADGIERLVGRGPDTLSVDGELSIDMTDENVIETELEQFNDLADAINFFGMRRI

SEQ ID NO: 11508 - protein, 307 aa, Methanobrevibacter gottschalkii
MYETLTFTGGVHKSEEFKELIEDLGGFILQENIQQMELVLNMAVPLEDVDKVEEKANELLAKISIAPMAGSEIAIVSPTLARHHLPHAACDISEYLREFGAKDNMLGLARGDGKGTSGITEEEKDLINEHDIAIFSLGSFENCIKEKAFLYDDIDIPVIVTGAPDIPVEELPGADAYVGGLGRIPRRLRRGPDVRALDKLVETCEKILNDKKREMALDPPLVPSIVVKNAIENQVREIKDVFSPAPVTSQLDGVRVKLNYDDYADVISNVIIDDKKLSELAEIKKSFMYDYILVKINSESSLVENSN

SEQ ID NO: 11509 - protein, 172 aa, Methanobrevibacter gottschalkii
MKIVTTPMCEEIVKLAGISDYSINKNPDDEKGDLAILLSESNVKMDSLTIKINTPSQVFESIKKVSKITKNELSDEEVLVFFEDYRLCKKYLTSNFKRDINVKVYSNFLKDILLDMGFNIVFTDFKYVVYPDYLKDKVVESENLVEIQSHDNISKNPFEKIEIRYSILENLI

SEQ ID NO: 11510 - protein, 227 aa, Methanobrevibacter gottschalkii
MKVTLSFEKSESSDVSIMVDALRASSTITLALNNFEKVIPCFTPEEAFKLKEKLGGIVAGERDGKKINGFDLGNSPADIKDYTSDHLILTTSNGTRILENMKSTVLIGSIINACEVANKSIEIANNHIDVVMAGVKGEFAIEDFLAAGEILYWILQELPDCNLSEYAKAAVLASRNYESLKESFFNSRSGKRLIELGYESDVELCSLKNISNNVAIYENQELTLLKD

SEQ ID NO: 11511 - protein, 390 aa, Methanobrevibacter gottschalkii
MKRELLTIIGTAHVSEESVNEVKDAIYEQHPDIVAIELDRGRYAKIRNKMHGIEEDDNISVTRIIKENKVGLFLVSTLLGYFQSKIGAEVDVDPGSEMIGAIEASKDLGIPIALIDREINTTLQRALNKMGFMEKAKFAYGLIASILGFDNDEEEIDIEELKNSENIDDMMEMFKDEAPSVYEVLVHERDAYLAGKIMQIPYDKVIAVVGAGHKPGIEKYLDNPETLPDLKELEIINDKKGIPWLKIFLALIPILFVVIFFLAYFNGINITGNIYEFIVISVIMGFIGSILSGSKIQSAIVGGIVAPLTIIHPLLAAGWFSGLTEAKYRKVKQSDIKNLVKIEGFKDLWNNNIFRILLVVIGTNLGVSIATLVILPSKVFIPLFMKIFGG

SEQ ID NO: 11512 - protein, 70 aa, Methanobrevibacter gottschalkii
MYFIFRCDCGRALYAKEGVATRKCVCGKTIKVKSRRIFQKVATREEASLAVQEMQDKIYGNTGFMKASDL

SEQ ID NO: 11513 - protein, 439 aa, Methanobrevibacter gottschalkii
MIGTTLKIVIIIILIILTGYLSMAELAVVSIRKAKMQKYLEDGNKNAQIVFDLLEDPNEFLSTVQIGISLIGVLTGAFGGITLAEPLAKIIYFIPYSDMISVVLVVLVTTYLTLVIGEIVPKVIALNDPEKVSLKVAKSMVILSKISKPASFVLAKSSSFLLWVLRIENKNDEIVTEEEIELMIKEGREDGTIEKEEEDIIKRVFKLDDKKVESIMTPRNEIIWINLEDSRDINKIKIVESKRSIFPIAKGELDDFIGVVQAKDILSVMFSEEEFDINTIIKEPLVVSEHLETLELLKEFKENQGYVHMSLVIDEFGSVEGLITLNDLLEGIVGDIPGIDEEDEPEAIKREDGTWLIDGRYPIDKFKKLFKFEDPLPDEEEDNYTTLAGFILSISGTIPDEEDKYECGRFIFEIIDIDGHQIDKVLVTDLGPQEDIEEE

SEQ ID NO: 11514 - protein, 314 aa, Methanobrevibacter gottschalkii
MDSGIIIQVVLLIVGFVFLIKGSDIFVDGSSSIASLLKVPTIIVGLTIVAFGTSAPEAAVSIISSINGNNAMAVSNIIGSNIFNILIIIGVGTLLGDLLMEKNVLNRDLPILIGVTLLLTAFIIIGWNISTIEGIILLAIIVVYVFSLIHSSKKDSHAHDVDKPKLSTKKSISFIIIGLVGIILGGDLVVKSASTIAISFGMSETLVGLTIVAIGTSLPELVTSLTALKKGENQLVIGNVIGSNIFNMLFVLGASSAISEIPLDSSLLVDVMFMIFITLLCFIFGKTQEKYDKKEGIIFIALFIAYMAFAILRN

SEQ ID NO: 11515 - protein, 291 aa, Methanobrevibacter gottschalkii
MSKLNKDEFNDYIFTRINTLIHDYELIREGELIAVALSGGKDSVLTLHALKNYQNQLDFDLVAISVDEGIEGYRQHGIDSAVSNANELGIELIQKSFKEEEGFALDDIYQDFKSACIPCGVFRRNILNKTAYEIGAVKIATGHNLDDEIQSFLMSFARGDTIKFSKFGPELDVIHPKLVPRIKPLWNTPEKEVGMWAIINDINIHLDECPYSHLSLRAKIKEFLNVSEDKYPGVKNNVMESFQKILTFENDISANLNECELCGEPTSSNICKACELKELISQDCESHICNK

SEQ ID NO: 11516 - protein, 101 aa, Methanobrevibacter gottschalkii
MITCDFAILPVGTETTECKEYVTAAVQSIKDSGLSYQLTGMGTQIEADDLEELYTAIAKAQEAIFKLGIGRVYTVIKVDDRRDLENRTLDAKVSTVEEMLK

SEQ ID NO: 11517 - protein, 368 aa, Methanobrevibacter gottschalkii
MVSNIKVPIAKPIIGEEEIENVVEVLKSGMIAQGPRVAEFEQKFADWVGAKYGIAVNSGTAALHVALLSCGIGEGDEVITTPFTFIATGNSILYTGAKPVFADIDLKTYTMNPESIEALITEHTKAILPVQLYGQSANMDKINDIAEKHGLMVIEDAAQAHGATCNGRKVGSLGDMSCFSFYPTKNMTTSEGGIITTDDEELAENAKIFRAHGASVRYHHDEVGYNFRMTDISAAIGLAQLDKIDGFNDKRIKNAAYLNEGLKDVDGIITPYCAYDSKHVYHQYTIRVEGNRDDWVDIINECGVGTGIHYPIPLYNQPIYKSLGITGNCPRAELAANSVISLPVHPSLTKEDLDLVIEAVKMASEKLA

SEQ ID NO: 11518 - protein, 388 aa, Methanobrevibacter gottschalkii
MEEYKIKTIEEGLTKIEFPEFDKVSSDAPVFYNPHMELNRDLSILAIQVFQKEQKREINICDLFGGSGIRGIRYKNEIDGVGEISINDISETANHYEKHNIKLNNLEDIEVYQHDASMFLRMKRGEFDVIDIDPFGTPSPFLDSSGYCAKRNSLLCVTATDTSALCGTYKEPCIRKYNAKPYKSEYCHETGIRILAGFVALTLSKYAKCIDVKMSHSTEHYMRLYLEIKKGSKRTDETLNNIGYISHCKNCLHRQTSNGLASSIDAICPVCGEKLIHAGPLWLGPIQNGEFIQKMIEETENKKINSEKEALKLLNKCHDEANAPATFFDIHLICKTLKISAPKFDLILDELKKEGFIAVKTHFKPLGMKTDASIENIKNILIQLQSKI

SEQ ID NO: 11519 - protein, 158 aa, Methanobrevibacter gottschalkii
MVKTKDNVIKLDDTDIKILKIINEDVRTSYRQISRSLDVSVGTVHNRIDKMVKSGVIKKFSPVIDHEKLGFVLTTIIGVRVKGGKLKNWEEKTFFNKNVVGIYDVTGEYDAFLIAKFRNTNELNGFIKELLKDPIIERTYTQTVLDVIKEDMGSSNIL

SEQ ID NO: 11520 - protein, 312 aa, Methanobrevibacter gottschalkii
MAVCLPDTQDDAPSIPIKLTRVGVTGVKKLLQLDRTNKRPIILLPTFDAFVDLPNDQKGVHMSRNPEAISEVLESVAKDPTVDIESLCAKIVEKMMTKHEYAKRVEISMTTDYMFMKESPVTKNKTQEMSKLIAKAIGFRDEKGNIKIRKSVGAEVIGMTVCPCAQESVRESDKNKLLEFLDEETTQKVLDTVTFASHNQRGIGTLLIEVPEDKKVKAEDLIDIIESSMSSPVCELLKRPDENATVMNAHRKPVFVEDCVRNMMEKIANKYANLPDDTLITARQENQESIHRHNAYAEKVTTMGELKSELDI

SEQ ID NO: 11521 - protein, 146 aa, Methanobrevibacter gottschalkii
MKKSYEIAGQVMGFFESFKGSRPAINNDRILIVRGRSRKIIPINEFDSKLSEIGEILGGTELNASSEKISEILQYGDKNIQKSEGNTTSIDEHGFTRMKDELESMGLVVAYKVFELLGFDVVIAIWEDRNELPPLYVEVTVSEHED

SEQ ID NO: 11522 - protein, 370 aa, Methanobrevibacter gottschalkii
MKIKMQNKLNKEDILHILNATDNEIINYMLKTVQYRENHLITYSKNVFIPLTEICRNDCGYCNFKKKSDDPEAIILKTKQEVLESLKEAEKYGCKEALFTFGEDADKEEVVKLKLAEYGYEKMIDYIIDICQMTLDETSLLPHTNGGNFSFDDLKRLKEVNASLGLMLENTSNRLMELPAHNKSPGKNPKLRLETISNAGKLKIPYTTGILIGIGETKEEIAESLIAIRDLYDKYGHIQEVIIQNFTPIPGIEMENWPEPSFLDMIKTVIAGTLLFGDTDVSIQVPPNLNNETAQIFLLCGADDWGGVSPVSRDYVNITSPWPGINELKKLTIDAGFKLTERLCIYEKYINSEWLNDNLLKKASNLSKHQ

SEQ ID NO: 11523 - protein, 242 aa, Methanobrevibacter gottschalkii
MKYKKIGDILILDNKYSDNNFDELSRKHNVKTIMKIDHIQGTKREPIYKILYGEETETIHRENGCLFKLDLSKVMWSKGNNNERLRIAKLVDDDETVLDMFAGIGYFSIPIGVHSNPKKIIPIEINPNSYHFLCENIRLNKLTNVTPILGDCMMKTPKFKADRILMGYVKTTHHYLKIAIDSLNKGGILHYHETVPEKLINTRPIERIKAQAGNRDVELLKINKIKRYAPGVEHVVIDALIN

SEQ ID NO: 11524 - protein, 204 aa, Methanobrevibacter gottschalkii
MKDKIVEGTTTVGITCKDGIVFATERRATMGNLVAHKVAEKIFKIDDHIATTIAGSVGDAQSLMKVIGAETSLYQMRNNDEISVKAAASLTANILRSGPMYVQILLGGMDEDEPSIYSLDPAGGMIKDNYISTGSGSIVAYGVLEDRFRDDLSVDEGLELAIRAIRAAAERDTYSGNGFLVAKVDKDGFEMLDNEKVKEILDKI

SEQ ID NO: 11525 - protein, 637 aa, Methanobrevibacter gottschalkii
MASDILEDIKKEILQKLPNKIQVSKVEFEGPEVVVYTKNPEIITENGDLIRSLAKELRKRIIIRSDKSALLDNESTINKIHEIVPDGAEITDIYFDTVTGEVVITAKKPGLVIGKYGVTSRNIVKNTGWAPKILRTPPISSDIIGKIRTIQKNSSKDRKKLLQRLGRQIHQGSKYPNDWARVTSMGGFKEVGRSSMLLQTPNSRVLLDCGVNVAASDNKNAFPYLNAPEFSIEELDAVIISHAHLDHCGFVPYLFHYGYDGPVYCTTPTRDLTTLLQFDHLDIAHREGNPLPFTSKHVKQAIKNTITLDYGEVTDISPDIRLTLHNAGHILGSAISHMHIGDGAHNLVYTGDFKYEPSRLLEPATIRFPRAETVIMESTYGGKEDIQPSRNNAEKEMMKTIYKTLKRGGKVLVPVFAVGRAQELMVVLEEYMRHGLIEEVPIYIDGMIWEATAIHTARPEYLSKDLRDQIFHMGRNPFVSDMFNKVQNHDQRKEIVESQDPAIILSTSGMLTGGNSVEYFKWLCEDERNTLIFVGYQSEGSMGRRVQKGWKEIPLEDDDGKTRIFNVEMEIKTINGFSGHSNRRQLMEYVKRLNPRPEKVITCHGDPYKTVDLASSIHRSYKIETKTPINLDCVRIH

SEQ ID NO: 11526 - protein, 339 aa, Methanobrevibacter gottschalkii
MVTYSESGVDIDLEAITVSKLADKLKSTLECRDIITDSGHYAALVKLGDKAIAMSTDGVGSKILIAEMMNKYDTVGIDCIAMVVNDILCVGAEPIALVDYLAVEKPDPERAAEIAEGLVKGANESKIAIIGGETASLPGIIKDFDLAGTGIGFVDIDKIITGESIQPGNVLIGINSNGIHSNGYSLARNAIFDKGGFSVDDKMPNGETTIGEELIRPTELYVKPIVALFKKEYNINGLAHITGGGFTNLRRLKKGVGYEINSLPEVPEIFKLIYEQGVDIKEMYKVFNMGVGFVVICDEEEAGKIMSTLDEYCNCQIIGKVTDDETIKVKSFEGSELEY

SEQ ID NO: 11527 - protein, 343 aa, Methanobrevibacter gottschalkii
MMKIMMDNETALVKEILKELGASKEDQELVAEATVDADLKGFTSHGLGRFPQYLISIKAGTINLDENITIEKETPAMALINGNSGFGQAVSYKAMQIAIKKAKEMGIACVGVHNTNHFGVTGFYSDLALRENCIGLVIANTDPAIAPIGGKVPLIGTNPIALGIPSDSYITVDMATSVTARGKILESKRKGLDLPDGWALDANGNPTNDPEEALKGSILPFGGFKGYALSLLIEILTGPLVQAGYGHEVTGTASPDKNCTKGDLYIVIDPSKFGDFDEFKANTEDFISQVRSTGENIPVPGDLEVKRVKEAETNGISIDEKLYEQLKRICDDLNIDLDSYLEE

SEQ ID NO: 11528 - protein, 789 aa, Methanobrevibacter gottschalkii
MYKCISAYKIKIINIKNMTNFTKNDSFKEENKVMKLKDSYILLIAMAIFLLMSIGSVCASEISADDTIGLADDGSDVVMDDKPIEPSNPTTPHKVDTMIVSSDTVSINEKEKIKSIDLTVNDTNKSKVIAGITVKNLTVKEGTKTIKFDYNNSKVIIKDALVLGKHDLLVSYLGNENYTNSSKNIVLTIFGNYTIQAPTSVDVNSTKIVEVPINVTNGIDPKELVKDDFNVTLTYKDGNITKAINITDFRIINNTIIFNYPLSRNITTSTITLVYTANETVKSKNVTINRIYNVKIEGINTKNQYKNGNFTFRLTDIDNATENLTGFKLNLLIGKNVINQITGTADKNGIVNFKTSKIFGYDFNNNTIVIKYLNVGNNTVELKSGDNVKLTTNKVNLTIEKAKINITIDKYNEQYGSNKNLTITVINADNGEPVPGIILHLNMPQTAGKNYYIQTDTNGIGIISVKGLIPGKYNLTVSNNDTVNIINNKASSKIIITPKPVTIKITSGLTINYNTGNTAAIKVTDKKGKGVSGAYVLVQLYTGSKSANYLFQTDKYGNIKFKAPLSVGKHKIVVSGAVGYSSSKVTKYIKVKKATAKISAPKVTAYYKQGKYFTIKLINTKKSNAPIYAAKVDIRVYISNYKYYKFNGKTGVDGKLKLSIDLKPKTYKVEVRGADSKNYAASKVVSKIVVVKAPTKLYPAKLTAKKGTNKYFKVTVKNTKTKKVIPGVKVKIKVYTGKKFKTYTVKTNSKGIAQFNVKSLSVGKHKAIVSSANKYCIAKSAKNYIKITK

SEQ ID NO: 11529 - protein, 598 aa, Methanobrevibacter gottschalkii
MQRNVVILDIDYVTYENKPVIRLFSKDGDKNIILLDDTFEPYLYVMADDLDKCIDEIQNNFDVVCIEKVNKKDFQIEKEFLKVTFNHPQELAKNRDALRDLESVVQIREFDIPFYRRYLMDRDVIPMTEVVAIGDKIDSFLDLDSNKQDIEIIKLTDELKRSPDYPREFRILSFDLEVRNPHGMPNSEIDEIIMIGVSSNFGINQVISTKTNSDCRDDFVNQMNSEKEMIEEFVKIIKENNIDIIVGYNSDNFDFPYLKDRAKILGIDLDIGMDGSDIRFIRRGYANAASFKGLIHVDLYLVMRRYMTLERYTLERVYYELFGEEKIDVPGDRIWEFWDNGGEELDNLFDYSLDDVVSTLKIAEQTLPLNLELTRIIGQPLFDVSRMATGQQAEWFLVKQAYFDNEVVPNKQGANFANRAAAEDNEGGYVREPEKGLHENLVQFDFRSLYPSIIISKNISPDVMYLGDVDNEEDYNISPEHGLKFKKEPQGFIPSVIDKILQERFRIKREMKASDDDTEKKALNVQQQAIKRLANTMYGIYGFPRFRWYSFECAKAITSWGRQYIKSSIKKAEEYGFYAIYADTDGFYAKYKKKDKRN

SEQ ID NO: 11530 - protein, 340 aa, Methanobrevibacter gottschalkii
MGIEIEKYLNFPVLLICFLLITSLIFIFPALKMIVLGAILAYLVRPVAFKIQSKLKFSSVSILIAMVIVLIPLIALVGYISYELSSVASTMLASSSTADINESILKLITYLHIDVNPNEISQSIISSFETIASYVMNYGVSFLGKFANLTLDLFILVCSVFYFVRDGDNCLNFIKSFVPEGSVEFFDKTVDNIKDVLKSIFYGHFLTAVIIGIFGCIGYSILGYPFGIFLGVLTGILQLIPIFGPWPIYWTLFFIDALSGNYPRAIMVLLFGFFLSTIDMYIRPALSSHYADIHPLILLVGFLAGPLVYGIVGFIVGPLILGITYTVLDSYRKEYLMRVE

SEQ ID NO: 11531 - protein, 266 aa, Methanobrevibacter gottschalkii
MINEPKIVEITDIIDETPTIKTFKFDWNMKSLGKPNPGEFVMIWNFKNEKPMSIAQINDNELAITVKNIGEFTSQLHDLKIGNQIGVRGSYGNGFNNSFEGKKILAIGGGVGMAPINAIVSDLIKKGNKIDVVAAAVTKNELLYATSLEELGANVHHCTDDGSFGFKGFATDCTRNLLQDSTYDYAFVCGPEIMMKGIFDILEEAGISAQYSLERYMKCAIGICGQCCVDSEGWRICVEGPVFENDKINKITEFGKYRRDASGVKY

SEQ ID NO: 11532 - protein, 303 aa, Methanobrevibacter gottschalkii
MLKTNICGVEFRNPLMLAAGIMGSNASSMNWILKSGAGGVVSKSFSLNSHPGYVNPTTVAVEGGIINAIGLSNPGVANFKEELEKIERKNSVVIASIYGATPDEFSSLVCEVQELVDMIELNISCPHAMDGYGASIGQDCNLSHTIVSAAKDASDVPIIAKLTPNVTDITEIAKTCEDAGADCLSLINTLGPGMKINIDVARPVLSNKFGGMSGRSIKPIAISNVYSVYESVDIPLIGVGGIYNWEDVVEFIYAGARAVQIGTAIMDEGVEVFDHINEGLERFMTEKGFSSIDDMVGLAHREL

SEQ ID NO: 11533 - protein, 204 aa, Methanobrevibacter gottschalkii
MVYEDLIYLKIIELVYCCCLFGFEIMSDGSYKDLKYELELKNAEIDELNIELENKKEEINKLRLYATKLKYEKKNLEDKLDTKIDYDKATMSELDDLSDKIKEKEVIIEDKQDQVRYLRSLIDDYKIQVSNNTENLEIQLRKISKTYGELLKQKDSIIEKQDEQISNLLKSKEEIIKSNKTNIIGLKLQNEKYQEIIDKLTKTN

SEQ ID NO: 11534 - protein, 383 aa, Methanobrevibacter gottschalkii
MECYITYSVKGFLAFNSENELISEKLFPEDKIIDRLAEIDDKKIVEEELEIIEEVSSDYDEIIIESNKRRSDYDNEKIIVKTPNQGGEYLRNNYEKFKLDSEEITSIYRNLAIYKIKKESASEDKHLIQAINSIDEIDESISKLIERIREWYALYFPEMDVIHNNETYIKLISQNKTKEKIIEAKPDAFPNDIIDLEEDINPLDLEIMNNYANSIYELQKSRKNIEDYIDKKMESIAPNLKLLVGSSLGAKLISHAGGIKRLAVYPSSTVQIMGAEKALFRHLKSGDRPPKYGLIYQHPQVRGAKWWNRGKIARMLAGMISLAVRRDVFTKTFDENVADELTSKIEEIEKNNPFPTKTTKRRNEERSKSKKSKKKGKKRKKRR

SEQ ID NO: 11535 - protein, 213 aa, Methanobrevibacter gottschalkii
MNVYFKDGNVATKNLNPGTSVYGEELIQEDVEYRIWNPRRSKLSAALLNGLENLKLEDTSKVLYLGASTGTTVSHISDVLINGRIYAVEFSPTTAKKLVQLSRKRFNIAPILGDATKPKEYLNIVEKVDLVYCDVAQPTQSELFMKNINMFAKDNAQGLITIKARSIDVVQKPKKIFKEQEKKLKEKGFKIIEKVKLEPYEKDHIALLVEKNF

SEQ ID NO: 11536 - protein, 182 aa, Methanobrevibacter gottschalkii
MKNNVLKRSLIIISFIFLIICAFSCVNAQEDNSDITMMTLSKGGIVIHYPSNWGYSQSDSNYSIMSISKLDSVDSAGVGQVNINFEKKAIEGDFYTYLNNTYRSMQRDSSFNLTSSGEVMVSNIHAYEYMYSSNQNGTVKEHKAVWFEKGGQAYVMLYSAPVNDFEDNLYVFDYILSDIQIT

SEQ ID NO: 11537 - protein, 241 aa, Methanobrevibacter gottschalkii
MPNDRDKLLKIMDSLEVDYRSGKISPEKYSYFRSKYEDKLNSIDAKEATQRIRSMQGKSNQTTSIKRSRKPTKNKKEKEQDLVQKYIINPKKGDAKYNKKEKKSMSSGTFKLVLLLVLVVAFTVGVGYGVFNLDFNNISETSTVAMVHDTAFPDITEDIKNTTKTTSSSNTNYSSTSYNVKTTEDSSSDSDYSDGGRNSGSSDSTYSGSDSGSGSSGSDSGSGSGSSSNSGGSESNGRSDE

SEQ ID NO: 11538 - protein, 266 aa, Methanobrevibacter gottschalkii
MQIKNLMSENLITIDKDQNLSDALKLLRKHNISRLPVTNNKELVGIVSERDIANKLGSSKSEGMPASRFHISSVMVKDVITVLETMQLGDVAELMLENGIGSVPVVSGEGMIGIVSKADFVTLAVGIAFDKITVKEIMTGDVVAVSPTDRLIHARRLMIDAHIGRVPVIEEDELKGIITSKDLMRAFIDFRKNVPEKHQKSQIKEVLVEDIMSSNPSSVSKKMSISDVSKIMIETGFNGLPVVEDGKVIGIITQTDILRLIAKLES

SEQ ID NO: 11539 - protein, 311 aa, Methanobrevibacter gottschalkii
MKDKTSINRKSNTGAVEHVTKVHDREGDIMALATKEVISIPPTKSIKDTAKVMMEHEFRRLPITDPGSGKLLGIVTVMDILDFFGGGKKFNIIEKKYEDNFLAAINEPVKEIMTRDLITLSTKVSIGDTLKTMLDNQLGAIPLVDADGKLAGIVTERDIALSLAGMAGKETVHEYMSPKVFTTTPGTPLESACKIMVRNGLRRIPIVGGEADISKANKKLLGILTSTDVIRFLNAKELFDNLNSNLASDVLKITVSEIMVKDPITVEQTMTIGELCQLFAEKNIGGVPIIKDDEIVGIITERDVLNSVRRA

SEQ ID NO: 11540 - protein, 232 aa, Methanobrevibacter gottschalkii
MKAPVIEIFSSFQGEGLLIGERQIFVRFAGCNLNCKYCDTEDSKSEKSGKLMTVDEVCREINKILTPDCNTISFTGGEPSLYPEFISEVSKNFNLNIMLETNGTLPDNINKIEQLDVVSLDIKLPEHFNGNFNEDILLNEIKSVNLLREKSISVYCKVVILPSTKIESFKEVIEKLSKNISNKSNLKIIIQPSSPLKDWKDINFRLFEYSEVVGQYFDVSTIPQIHKILDIE

SEQ ID NO: 11541 - protein, 171 aa, Methanobrevibacter gottschalkii
MKILVNGIQSNLRFSSAHVIPGHESCGFIHGHSYFVDVEIEGERTGKFEFVVDFKDVKGFTKEFCNELDHRLLIPVFNELIEFKDFDKKTDSIDGLKENKTIQFKIDGKGYSIPSVDCVLLPLPYTSAEELSKYFAEGLAEKLSESYDNLKYVAVCVNEGIGQGAEYRKEL

SEQ ID NO: 11542 - protein, 198 aa, Methanobrevibacter gottschalkii
MSIIHKHIDEIFEYDGSQINPSWAFQEFGVYGSSIITWIGPVNITPDNLKDFADVGLEIKSNYMVNFICEFFDQQPPNMRIAYLRQRLIVMIFREILTEYGIKTKREGDDIFVDDGKLSISIASISLSSAKIHFALNLEDKGTPDDVETIGLFDIKDENGTQIFNKDNLSDLINETASRFIDELQTIENDISKTKVLG

SEQ ID NO: 11543 - protein, 357 aa, Methanobrevibacter gottschalkii
MEQVRTRDFIYTSDDLYFASTNYIHPEDRVISFLRYIPDPEGDREKDGKKYRKVGSAEAYEYLRENHPDYLYFCDVTNVEMMGVPLDKVKRIIKPEKRLLGLKDTFDNGGEVKNPELIAKLMDVADFFHFMANIPYDHLGISGSILPGLQKSDVSDLDFVVYGLDNHRRAISAFKKHRGKEVYIKEVDKHITVEGITNDYWDFVYNKRMSDESLTKEEFRWYENRKANRGTINGTLFDILATRDYDEIEGTWGDTVYEPQGIAQIECDIVSSLGAFDNPSSYTIENLKILEGVEAPIKEIVSFTHTYAGEVIDGEHIIAKGKVEKVTIQGKEDYYRIVVGTTRESIDEYLKLKESPA

SEQ ID NO: 11544 - protein, 492 aa, Methanobrevibacter gottschalkii
MSEKRIEWNSNFAFMMAMIGSAVGLGNIWRFPNVLYSNGGGSFMIPYIVSLFLLGISFVLVEYAVGFRFKKSIGRILFSISKKLEPIAWFIVLIVFLITTYYVCVVGWDLIYVVLSFTKAWGANPDTFFASNVLQATDSISGIFQIVPIVLASVFAIWFMIWFIVKRDLNDGIGNVSKILLPTLCLMVVIIVVFSLTLPGASIGYTQIFTPDWNALTNLNVWLAAFGQIVFSLSLGMAIAMTYASYLPEKSRLIDSAVTVAFSNSAFEVFNSIGIFSILGFMALSTKIPFDQLVTEGTGLAFVVFPQVFNTMGPMGSIIGPLFFICILFAGITSAIALLEVVTYAISEKFNIERKRTVTVICIVGFLISTMFATGIGSTILGAFDAFLNNFALLLGILIECIIFGWIYDFNKLIETLNKDSRIKVGKTWKAVIKYILPICIAVLWIQGVYSTITSSDNLSLTIMGILTVILIVLPIVFAKLPAKNEDYYKVD

SEQ ID NO: 11545 - protein, 247 aa, Methanobrevibacter gottschalkii
MGKLDGKVAIVTGSTSGMGRDSAKLFAEEGAKVVVTGRNEERAKAVVDDIKSEGNEAIYVIADMANVDDIKKVFDTTMEEYGTVDILFNNAGLLSVTPLLEMTKEEWDKVFDVDVYAALYLTQLVAPVMKEKGKGTIINTCSVASYAAHFGFVGYISSKHAIAGLTKSMAFELGPEIRCNGIAPGAIHTAMVDSIGGVEALQMMVDGAPMKRVGQGEDIAALALFLASDESEFVDGQIIRCDGGFEC

SEQ ID NO: 11546 - protein, 264 aa, Methanobrevibacter gottschalkii
MINLSSIKMHMYCPMSLYLKTHVDIDENDMYNCYLEIKNLKIDIQDLMQKNIRKIKRTMSLEEIEKILSQNIYEYIENTTKSMKSSNIEITSEQISEINDETYFNIKILSIKSKKAMTILNKDGFGITEMFFPNCLYSYLIKDTQLELIGICDKIEIIDGRYYPISIKSSNPPIKGVWDQDAIELVANAILLEEEFDTEIFVGFVDYKKIGDRRPVIMDVNLRKSLFSVIREVKEIIENKKLPNIKRNSKKCRNCEYENICMKK

SEQ ID NO: 11547 - protein, 219 aa, Methanobrevibacter gottschalkii
MNDYTLTIKSDEKKGVLYDITDVITAYGANISYVHLFVEKNNMGSINLELEHVENIEDLIKDLEKIKEIKSVELHGSQLDIYGKRIIIIGGGAQVSQVAMGAITEADRHNIRGERISIDTIPLVGEKSLAEAIEAISRLPRVSALVLAGSLMGGEITRAVKKVKEESNLIVISLNMPGSVTDYADLIITDPIQAGVLAVMSIADTAVFNIKRLDGNIRF

SEQ ID NO: 11548 - protein, 87 aa, Methanobrevibacter gottschalkii
MKFVMRPYHIISLGGYIVEWDFPYRNLIVVNKTSEPIKIEIPVFNEEWIQEHRDLGLDIIPVNKYDNYLSMWKKAHAELDKIRPKNE

SEQ ID NO: 11549 - protein, 332 aa, Methanobrevibacter gottschalkii
MYSNILTNSIVAVILTVIVCFVISTLLPGIERKYVHARIQQRVGPLVFAPGIMAPLKFLFKENVEVSSPVPKLYKILPILCFIVILCVFIALTPQAYKIPALSSLVAIVGFLKVEEICYVLMGALSKSVMSVRMPFPDRIKGAAHIKAPLSFIEDISAKRSLRMITYGSFPLYLALFAPVTAARSIFLKDIVAFQQVHGPFLFTVAGGIAAIVFFIGYMIILNEYPFSIIKAKSDVIEGPYMEYAAKYRSIVFITRGFFMFVLGSVFSVLFIGVPPSIFSLGILVNIAVALIFVFMMGIFSAFAPVFTNKQLLPTILGTTLLGILAIALGLL

SEQ ID NO: 11550 - protein, 376 aa, Methanobrevibacter gottschalkii
MDEKLPTNNIIETEIPMGTVHPAALEPYKVRFFVEDEIIQEAEITIGVNHRGIERIMEGLPVQKANSLTEKICGICSNSHIWNSCRTAEIGLDIEIPERATYIRVIMGELERLHSHFLYLAHGCEVLAHETFSMRVFYLREIVMELLAMIGGNRVQYGCSVLGGVRPRCELDANKIQRLKDDMDKLEGGLSDFADRFVADPIVLSRITGVGVLPQKQAIKLAVTGPSLRATGIARDLRTTMFEYDNFDYNIVTQQDGDVKSNLLMRVLESFESIKIIRQAIANIPDGKLVNNDWDMVDTEDIAESYIEVPRGTLYHSYALETGRIRHCIIRTPSMANIGAMQYACIGNHLTDGQLCIVQCDPCFTCTDRAIEVIRR

SEQ ID NO: 11551 - protein, 148 aa, Methanobrevibacter gottschalkii
MGIKSFSRARAIHVMLVYTGGCNGCDIEIVNSILSPRFDAEQYNVFLTWNPREADVLVVTGPVTHLNRKPLEAIYDAIPNPKLVVAAGSCALMGGVYKNCHGDIPSEEIEGPVDKIIPVDAKVPGCAVRPQDVLAGVVSLLPTLLDAD

SEQ ID NO: 11552 - protein, 163 aa, Methanobrevibacter gottschalkii
MRNLIKIALEGAFTNFKRIFFAADRVTDMDMKKQIATLSVEVDDRVDESACIGCSGCANVCPTNAIVMKPLAHPVKLTEGWVKDQVPEIILEKCVVCYYCHDFCPIFSLYGQKGAIHPSCVGDQEVDVSEFLEQPFKISDDKLKIIAQYLSDKTVLKNKEDGD

SEQ ID NO: 11553 - protein, 468 aa, Methanobrevibacter gottschalkii
MFLTTSTCEGKRECINQCPTKAIKFINGRAFSCLTCGICYKNCPNDAIFQNSYGGYVVDRAKCNGCGMCMYNCPTNNITIEDGIVYGICSRCGVCHEVCSNRVDGYELEKDKQLNLIRSLQILNPPLNDVPYKKESETKVVTRNYFGTDVENCILCGRCQEYCPTGAIHVKIDWDEGICSGCRLCEDVCPNDSMNKHQIVNKKSCTLCLNCMKACPHNAISVEDSSIVVNKLNQKPNGSIISCLNCGLCADLCENESHKKVDGKLRYDPTLDMENVNHDVAISHCPVHTLTEDDEMFIYDEFNDEELPILSGFCVSCGNCVQVCNEYGARQSMTQSWDGKVSEDCISCGICAEVCQEEAITLHRGSISVDLDKCILCENCAVHCPVDVIPKSTMYKNEIKDGFNFIEQKLCMHCGLCYKTCSYDAIEKINDEFVVNEENCTYCGACKNACPARAFLFERNFKDSLEGI

SEQ ID NO: 11554 - protein, 83 aa, Methanobrevibacter gottschalkii
MMLSLGPIIFGIILGVIIGSQIKLKCCDSNFTWTSFVIIIIAGIIIAWQSGNYPFYTDLPISTAFVSALIGIFVGKLLFARSK

SEQ ID NO: 11555 - protein, 158 aa, Methanobrevibacter gottschalkii
MSQSSIILKLVSLPISMILICLGIMTILGGHITPGGGFQGGAMIAGGVILSVLVYGLDNSPLEFSHLYIEVLESIGALGFIILGLIGLFVSGFFLYNVGTDLLNVVPPTIQNVLHYPDVTNAGIIPYLNIFVGLKVFVGLSAIVIAFAGFKKITEESK

SEQ ID NO: 11556 - protein, 93 aa, Methanobrevibacter gottschalkii
MSSHTTVRNLIASVMAAIFSVTLLDAVFHLSSMINAGVSNIYNVLGTKIAPNMVTVVIFDFRAYDTLGESIILLTAGLVVLLIFGRGLLGDKQ

SEQ ID NO: 11557 - protein, 111 aa, Methanobrevibacter gottschalkii
MSLYDKIFDVVKQFRKLFSPGPVTNADVSGSITAEIFLIVSLVLATILLRHISVLLAGLVILFVAVVLIINIPLIPKFKIEQEDSLDKMLFYAIVTLAIIGVVMYWGGNLV

SEQ ID NO: 11558 - protein, 484 aa, Methanobrevibacter gottschalkii
MNELIPLMVIVPLMAALIISAFSKFNKATKIFAFVIAICLPLIPLLSNYGLHYFGGYEPILDNVTNVVYHPAITYSFTFFQQIFIAMIGLLTFLVVFVYLTKYKEISGPYLFLLFLGTAAVTAMILTDDIFHMFVFFEILALAQVGIVAASSIDYSYEMALKYMILGSIGSPIMLLGIGFLLALTGSVNITDIVTAVHNGLVNAKSPVFLLSLGLIFFGWLYASGLPPFHTIKSGIYSKAEPHGAALLQSFTVISMISIVLIMYRIYSVLPIFEVLIVFFSILAMVLGVSLALTQTDFRRMIGFLAVGELGFIGLGIGLGTNFAITAGLFQALNEIIITALLFIGFGAIVEATNEVDTRKLGGLLAYHPKVSIMLLIGGLAMAGVPPLSGFQSKLMLVQASLSCGFPELSILAIMVSIATFVVFVKTFYTMFLKPKPVELDVENKEVPRAMVFVMGILLIIIVLLGLFPNLIIHGISSFVGGIL

SEQ ID NO: 11559 - protein, 128 aa, Methanobrevibacter gottschalkii
MAQTQLAILLTSVALVIVGLYSAIFIDNIIKKIIGISFIEEGANLFIVAIGYKAGGVVPIIMPGMDTSWFASNAAYPLPFGLVLTSIVIGASTLAVMLALVMVLYKRYGTLSTSVMLADTSKQEEYDE

SEQ ID NO: 11560 - protein, 77 aa, Methanobrevibacter gottschalkii
MIEFILCLITVLSAILALIQKDLLKAAILTGFSGGALAVLFQILLAPDVALTQAIVGAAIVPVFIALAVKKTQRVDN

SEQ ID NO: 11561 - protein, 140 aa, Methanobrevibacter gottschalkii
MMEYIQSALLIISAILTIISAIGLISLDKNTKDVVYARIHIVGVFDIACVIAMIAIGQYLLAGIYFILAPFIAHAIANAYWKKEDRENNLDLQNIGEDVGEDHPFLHPKEKIQALECEDSEKFKVDERFSVTTLEIEEDE

SEQ ID NO: 11562 - protein, 88 aa, Methanobrevibacter gottschalkii
MDILFVSNYIVVIALMIMMLAALRASAYESTSMGLLGSSIVVNAFAVALLIIGGLYNLEFFRDISLALIFFGFVGTVAFAVVLGGDDE

SEQ ID NO: 11563 - protein, 104 aa, Methanobrevibacter gottschalkii
MFLTRIGYGIIYFLDLIYEILKSTFDVAFNGIMRRNINPVVFDIETVLERPVSQTILANSISLTPGTLSVDLDSENNIIKVATISPRKKEDVIPFEQYIKKMLE

SEQ ID NO: 11564 - protein, 321 aa, Methanobrevibacter gottschalkii
MNLVEKLEPIIIFSAVLIGILASNINIAQHTNYLINIFLCLMIYGLFLEVNLNELKNSFRNIKFTLTSLIINFIWTPLFGYWIGSIFLNGNLDILIGFFMLIITPCTDWYLVFTKLAKGDLNLNLSILPLNLILQIILLPIYLIIFFSSKNSIDYTQIIYSILIIIIIPFITAQITKFVLITSLKERAINIISDLEIWFLSLAVFCIFSSQGKQLFENLNFLITIFLPLIIFFIVNSLVDLLISKKINFTYPEYVSLTMTTLARNSPLALAIAIISFQNHELVSIALVIGPLIELPILYIISKFCLWIKNTKLFSFHDYTI

SEQ ID NO: 11565 - protein, 234 aa, Methanobrevibacter gottschalkii
MSSYKGHSIFAFLLACMFFHNPLLISLTLIGANIPDFDHKFKKDNVYKMIILGLIIFISLYILKLPYYIGLIIVFLGITFYFSEHRSFTHSLFGVLTLTAAVSLILIWALQLITIVTTLNNHYLILAILISLLSFLFLNKKLLMVFLPIFFISLFVIKTGDIAYTEIVLSLLLGIFSHIVLDSFTPSGIKLFAPLSSKKVYKNFGLTVIFILAILSIFYHASSLFKLFEMYIKY

SEQ ID NO: 11566 - protein, 246 aa, Methanobrevibacter gottschalkii
MHLKKIGQFENLKMGYISDFSGGYISRNKDILNHLELSSLNQFILEKSVYGTPIFKLGNGGKKILVLSGIHGNELPPQIANVYLINELLNKKLTNTVYLIPFAAPKSSMNNERTFNELDLNRASHIKNSVSNLIMQAIEQLGIVAVGDFHSTSFNSNPGCESIFSSKSPSPESFLMANYISRNVGSELISFDFAGSMYKGAIEDVCNLNGIPSVTCEVLSPFGNVGRGTVETSFNQMISFLSYFGI

SEQ ID NO: 11567 - protein, 640 aa, Methanobrevibacter gottschalkii
MKKYIKRLIRLVNYERDAEIDLMTHEISTMSGKKREELGRAINKVKGKIIGKELGLQIVQFGRSERIETEISVGDMVLISTDNPLKSDLTGTVTEKGARFIKIAFDKKIPKWAMKKKVRIDLYANDVTFKRMEDNLRHLNLRGKDALEYILTERDPRKNKQIPYIDYIDKSLNDSQKQAIKNALSCENFFLIHGPFGTGKTRTLVELISQETRQKHKVLATAESNAAVDNILERLMNNKQLNLTRLGHPQRVSEHNITQTLAYKVEKHELNKKIKKIHRKIEKLIETRNTHTRPTPQFRRGYGDYDILHNASKGKGGRGISPEKMKSMASWIECNQEINESYDDIKRVENKMIRDIIECSDVILSTNSSAALDSIAKTKFDVAIIDESSQATIPSILIPIAKAKRFILAGDHKQLPPTIISAKSRDLEKTLFEELIKLYPYKSQLLNVQYRMNKALMKFPNKEFYNNGLKSDPSVEEIKIDDLLDHNHHEEALLFINTSNVYNNKEKRLKDSKSIINPVESEITINIVKNYLESGIDNEDIGIISPYADQVKVIQDNTPVEVKTVDGFQGREKEIIIISTVRSNNNGNIGFLKDLRRLNVAITRAKRKLIIVGNKETLKNSPTYKRLIEFIENENLLIDL

SEQ ID NO: 11568 - protein, 392 aa, Methanobrevibacter gottschalkii
MTEKVVLAFSGGLDTSVCVKLLEEKYDVEVITACVDVGQGEEEMERAKTMASKIGGLKHYNIDAKDEFANEYIARAIKANAEYEGYPLSTALARPLIAQKIIDVAEKEGATAIAHGCTGKGNDQFRFEAVILAMSDLDIIAPIRELNLTRTEEQEYAASKGIELSSDKLYSIDENIWGRSIEGDILEDPSNEPPEEIYAWTKSWKDSNDEPEKVTIEFEEGVPVAINGEMMPLIDLIRKANEIAGNNSVGRVDTIENRMIGLKSRENYEVPGAKLLIAAHQALEELVLTTDELRFAEYMSTLYADLVYRALWQEPLREDLDQAFDKMQERVSGEVVMKLFKGSIQPLVRKSPFSLHSIEQITFEDKETDQREVEGMIKYHGLQAANYQKLNR

SEQ ID NO: 11569 - protein, 241 aa, Methanobrevibacter gottschalkii
MSKLNQLQEIIDSSDNIVFFGGAGVSTESGIPDFRSENGIFESLNKYGKTPENIVSHSYYIDHTAEFFKYYKDNLVFKDAKPNPAHIALAKLEEIGKLKAVVTQNIDGLHQKAGSKTVLELHGSIHRNYCQICGKQYELNSVLESDGIPKCECGGTIKPDVVLYEEPLNSAVLNFSIDYISNADTLIVGGTSLVVYPAASLINYFNGKNLVLINKSETQYDNLASLVINDAIGETFSQIKI

SEQ ID NO: 11570 - protein, 238 aa, Methanobrevibacter gottschalkii
MDYVKGIFKNRPNRFIAEVEVGGNLEIAHVPNTGRCKELLVDDAVVWLKVADNPKRKTRFSLHFVENKNVLVSLYSQQANTIVYDAVIEGKIKELNGYSIYQREKTIDNSRIDIYLENETEECYVEVKGVTLIVDGEARFPDAPTERGSKHLKELIKLKKEGNRCVVFFLIQHPVGKFFRPNWENDPKFSQTLNEAYEKGVEILVYRCDNQLDGINLIPEALDFDLGKSFTDGIVNDK

SEQ ID NO: 11571 - protein, 508 aa, Methanobrevibacter gottschalkii
MMVTDYNCEYLGLSRLCLMESAGKSLAEEVGKIAVYTFAKPIKVVIFTGSGGNGGDGFVAARYLLNRGYDVDIYMLKDNIRSEDAKTNLEILKNMKPRLSRLNIFNLKTLDDINNCEVVSDETSDFIIVDCLLGTGIDGNLQTNIKRAIEVINESNGLKISVDVPSGMNPLTGVVDDLAVIPDYTISFHKIKTGVRNADEEAVGGIITADIGIPFEAEYFVNYGDFLRLKNRDSDSHKGNNGRLLIVGGSANYSGAPAIAGMAAIGAGADLVHVAAPEKAAEAIKATSPDLIVNSLEGDELSLEHGEEIIRLSENVDAILIGPGAGISDSTSKLFNLLVAKIKKPIVLDADALKQVELSLIRNREDIILTPHIFEFKSFFKVKNDLKLDIDSYDFKKVDENITEIQFITNQIKGTVIVKGKYDLILSENNFKINKSGNSGMTVGGTGDALSGIVVSLSAQGLNAFDAASLAVFINGLAGDRAFDEKGNGFSATDLVSFVGNVIKDGLC

SEQ ID NO: 11572 - protein, 377 aa, Methanobrevibacter gottschalkii
MRKITIRLLTRLPTKYVTIGLLLIIALFVYGILGSYFIMHLNIIDSIYYSIITMATVGYGDYTPHTGIQKIFATTLALSGVALLAYVFNIMLTSFQEKMSTYSKGARKMKTIEDMDDYYIICGFGRVGKVVFDELNKRKQNIIVIEKKEEICNNIEESSSVVSIHKDASEDNLISKLAGERCNSVIVSTGDDVNNLFIVLTIRETNPDAWIVTRASKVENIPRLKKAGADKVVSPEISGGQDMFFESTNPYLLRITVKHTVDQIYDEFKVINKYDCSLETIDYHIPGVETPLTREIYVTRLADGKKYYNYLQTHDDQRQALDTLYRTTNNIHSHLILGQDKESFENLIKDLKEIEEIIGINLTNEEIAKITRKEDSN

SEQ ID NO: 11573 - protein, 296 aa, Methanobrevibacter gottschalkii
MEINGVEIKDTYAEGFGIKVTRILVTAATEELAKIAATEATGYGTSVIGCPAEAGIDCFVPAENTPDGRPGYVIMICQGGKKALDHELMERVGMCILTAPTAAAFNCLESETTLKTGNKLKFFGDGFEKECEIDGRKIHSIPIMSGDFLVESEFGYKDGVAGGNFFILAKDQMTGVEAAQAAVEAISKVEGVITPFPGGMVASGSKVGSNKYSKFLNASTNEKMCVTLKGEVDSDIRDDADGVFEIVIDGVDEESVKAAMKAGIEAACEVDGVLEISAGNFDGKLGAYIMNLQELF

SEQ ID NO: 11574 - protein, 353 aa, Methanobrevibacter gottschalkii
MDKKSVFFLGISVFILIIMLWLVGIEDIIDALNVAKLELIALAIGVQIFTYALYTLRWQILNNLADINTSFKKLLPMILVGLAVNNITPSGRGGGEPVRAYILSKEEDYPMRETFATVVADRALDTFPFVVLTVITIIGMTFYFNFDLWLLIVMISAVICIVAFLLMIIYMSINPNFGKRVDGWIIKLVRRFYKKNSEELENKIHAVILDFQSTMKIVISSKKVTYYALPLSFIIWIFEILRVYIVFLAFGADISPIVIGEVFIIASLVGMIPLLPGGLGAVDGIMVVFYSVAGISASISAAATVIERLISFWMATILGMIILPHYGSSILDKISFGSSNDEIEEALENEIDN

SEQ ID NO: 11575 - protein, 477 aa, Methanobrevibacter gottschalkii
MRYITKTDLLVIGLNSGYLLIGIGIMCLIPLIFDLIYFEFDLISFILPGAISICLGFFLTKYLDEYSNKNVRLKHGMIISSLGWIWAALIGGLVFMLATNMPPIDAIFESMSALTGTGVTMYTNLEILPHSILFFRAFEQWIGGLGVVVMVISVLAKPGTATSTLYHSEAHDERIKPSTKATLEKTIEIYIIYTVVGIVLYAIAGMPLFDSLCNTFCIISTGGMNVKNANMGYYHNDLIYFISIVLMILGATSFLVHYKVIKTKGKSLLEDLQFKIIICVIAIVTLMLYYVSNIVPMELLFTVVSAITTTGASISSSLTMASWPSFVIICLICLMLSGGSNGSTVGAIKLIRLITFFKGIYRNIREILSPSGRVVPIKLQGRPLPENASEQSGNYITLYLMFIMFTWALFCFFGHDPFDSLFATVSLQGNNGLDLGIITNQIHPVLKIVSMLNMWIGRLEIYPVLITLRTVFEIFKR

SEQ ID NO: 11576 - protein, 219 aa, Methanobrevibacter gottschalkii
MDYVVIMGGGRVGLALANLLINEGYDITLIESDTKLCDEVASELDALVICGNGTNSKILEEVNIEDAKYFIATTGNDEANLLSCILVRKYNVEHIIARVSNPDHEEAFKEVGIEQVISPERAAASYLQKIVTRPNTAELMTIGQGDGEILDMTITNNKIVGKKFKDVSPTKDFMIIATYQNGTLIIPQPDNIISRGEKVSVLVKRGSFSKVSKKLENKS

SEQ ID NO: 11577 - protein, 203 aa, Methanobrevibacter gottschalkii
MSKIVFILGYNYDSNCYLIDDKILVDTGAGENRDYLFSKLRENGVEPDDIELVVNTHCHFDHIGGNYLFPNAKIAVHKLDATPIRNEDTLGTAGTAFGFDNINNSRVDIELEEGDKIADFEVIHTPGHTSGGISLWDGENLICGDTIFAGGGVGRMDIGGNYDDMKNSVEKLMALNVKRIFPGHGPIVENNGKEHIKLSYSYL

SEQ ID NO: 11578 - protein, 136 aa, Methanobrevibacter gottschalkii
MAKKGSAEERELVHKLWERNFAAMRAPASGGATKKSLPDVVAGNGKLYLAIEVKTTTKDKIYIDSIQIEELCEFSNIFGAKPYIGVRFKYTKWLFLEPDNTPRTKKGNYRVEKDYALEKGLEIDEITGIDRQMKFE

SEQ ID NO: 11579 - protein, 326 aa, Methanobrevibacter gottschalkii
MDSNIFDLIKKANEVTLNKHGDLITLERAVFLSWWCDKGDCAFCYMSTQKDKIRDPTKARRNINNIYAEAEMCKRLDWNIEFLSGGYESYTTQEIKEIATTIKDITGDGVWLNTGITDELEEYGSEIKGITGAVEVANPKIHEKVCPSKKLSDISNMLDTANDLGFKKAITIILGLGETLSDVDYIINYIQAHKIDRVIFYSLNPHKETIYANSSQPASLYYAQIVAQVRLAFPDIEIICGTWIDNLANIGILILSGANGITKFPLFKMFGTKYGKRVEEEVKWTGRKLKGTFTDKNQLGPKKSEISPELDKFIKRYVKESLKNKY

SEQ ID NO: 11580 - protein, 450 aa, Methanobrevibacter gottschalkii
MMCGLEIHVQLETESKLFCDCPTNYQDAPANTNICPVCLNQPGAKPHPTNKKALENALMIALMLNCEIDQDVIYFMRKHYDYPDLSSGYQRTSVPIGIKGELNGIRIREIHAEEDPGQYKPDRGIVNFNRSGIPLVEIVTEPDIKSPEEARNFLKELIRVLQYSGGARGEGTMRADVNISINGGNRVEMKNVNSIKGAYKALKFELVRQKNLMKRGVEVKQETRAYLESQMITVGMRMKEDADDYRFITDPDLPPMQISDETIQRILDTMPEAPHNKVKRFVEDYGIDAESAKVLTSELDLAIAYEEVVKEIEPIFASKWMRDELKRVLSYNKLDFADSGISVANLIEFLNMIQTKEITQKAAKKIIEQMPNNEKTPKAIAEELGLLGVVKDDEVLAAVKQAIEENPKAVEDYLAGQKASINFLMGQVMKLTRGKADPGETVKLLRENIE

SEQ ID NO: 11581 - protein, 268 aa, Methanobrevibacter gottschalkii
MVEKKSFVKDYMTKNVICVSPNTPTEEIIELMRTSRHNSYPVVVNDRLVGMVTAFDVVSKKWSDTVEGLMSTKLVVANPELSINDASRVMFRRGISRMPVVDENRKIVGIITNTDMVRSHIERSTPNKVEYFKKTLEQLYDIKATLRHMPVETNKLRPTQDRVYADELEGRTYELKRGLAEPAIVVKTGNRWILVDGHHRAVASSQQGYETVDSYVIDLGQDIKLGMEKTADKAGIKTFSDIEIIDDDKHPLIALTESLQDQERKSDD

SEQ ID NO: 11582 - protein, 95 aa, Methanobrevibacter gottschalkii
MNDKIIREVYEVLESRRDNPIDSYTSKIMQNSDKKAEDKILEKIAEEAGEVLIASKNDENLVYESVDLIFHTLLLLAYKGIDLDDVFDEFARRRK

SEQ ID NO: 11583 - protein, 255 aa, Methanobrevibacter gottschalkii
MFDTFTEKKFLLKELVKKDLTSKYKDSVLGILWSFFNPLLIMLVFTAIFSMLFGRQIENYPVYFLSGRIIFDFYNSGTKGAMKSIKRNANLLKKIYVPKYMFSVSTICYEFVNFLISFVILFIVMILTGATFHWTIVLSIIPMFFLVCLIFGVGLILAVCNTYFSDIGHLYNVFTLVLMYASALFYPMEIVPAIVQRIFTLNPVYSAISCFRECISYGIFPNTSTLAYLAIFSFTTLGIGLYLFKIYEKKLVLEI

SEQ ID NO: 11584 - protein, 474 aa, Methanobrevibacter gottschalkii
MNLINKIRNLFNDNTKQEKNKHIPLDAKFQSSRFKNIKIHAPDYVMSTENRYHMQILDNSNNPIKNEAITLVINGKCYEKITNKDGYASAKISPNKKKKEMKIYYLSNEEYCPCIIAKLIHPDNINPEENNENPKLYAPDMSIYSKDEPEYNARLLDSEDNPMIGETLIFNFNNQTYEKITDEEGFASIDLKLDEGTYSIETIFKGEKDSNPITKTSTINVKTRNIDRKIMIEVKHLAMEFKISKDKIDTLKEYVIRTIKRTKKEHEKIRILDDISFNIYQGERVGILGFNGAGKSTLLRIIAGIYEPTEGEVIINGRIAPLLELSAGFDKNYTGKNNIFLNGALLSMEEDFIKEKYDEIVEFSELGEHINYPVKNYSKGMRAKLGFSIATLVNPEILIIDEILAVGDIKFRKKSSEKIKSMMKEGVTVLLVSHSISQIRNICDRCIWIENGHVYMEGPAKKVCDAYVKSAKKK

SEQ ID NO: 11585 - protein, 166 aa, Methanobrevibacter gottschalkii
MILIFLIIGCCCLFYVVETSTTVGNAITVVNKTVVTLPNEFSIESRETGYGTLINKNTKEKITIKDLGKGNLALTKFKNALTDLTKNPDIDHVKNSTSNINNITAYKIDYQDITKENNSDLSNVYVFTCNHTFLIKLENYNNNVKSDNDLDYVITHMTPDFKQSQD

SEQ ID NO: 11586 - protein, 847 aa, Methanobrevibacter gottschalkii
MIKLDEIEFSVIIPTHNSELGIKKSIKSILNQTLNFENNIEIIIVDNNSEDKTQDICYDYISKYPKNISYIQLDTVNLHKSKNTAMKHAYGKFITFLKPHDYLSKDSLSHLLKFINTHENIDLAILPIFYYKNNRKERYINYKIKNNKKINLIEQPQYSQLIGLSTFFKKESIKNIEFLDTTNENITFFSEMLINNPYLGICSKGAYFAKNIEERIYPSDTTIYSTKEYEKFIKYNFNNLKNKCFNKFSKIPEFIQFSFINHLRWLLSIKKTEEKIDLKSLIDTISYINNDILLENRLLKQELTITTFLLKYNNDLSNDLMEKLDLNTLFIDIYDIIDNKIHILANIKNITTGDINILVNNKKIKFKKLTFPHKYAPSLGYNLLQDYSIECIIPIKTNEKFKLEFKQKDKLLHIDFSRPCNFSKSVGYAKTKHYLSILKDDHISIEKKTTLKWIKQELKSLKTMFKNHETGFIKAVPFRVAYMISYPFLRNKKIWFFMDRPDEADDNGLALFKYAVKQEDDISKYFILSSKNNDFNNIKKIGKVINYKSLKHRFLGMFVENIITSHPDNGIIYPFWGGYPFFAGLLRSSTMFLQHGVAKDDISYWANKANMNLSLFLTSTIQEYESILENHYNYDDYVVQLLGLPRFDNLKNQEEKRQILIMPSWRRDLNYKSKEYIKKNGFFKKFNSLINNKRLIETARENNYEIIFKPHPNVYKFIDLFDKNNYIEIDYGKTKYQELFNSGSLVITDYSSVAFDFAYLYKPVLYYHYDNDYHFNLEEGYFNYETMGFGEVVKKEDELVDLVIEYIKNDCKIKEKYSNRIKNTFKFNDKKNCKRTYDRIKEITLKD

SEQ ID NO: 11587 - protein, 189 aa, Methanobrevibacter gottschalkii
MINLRYVNFNPHIHDTYKVAELVYDVDFRTFDLLFKTPKEAISTIENDLRKHGPENTFKVILNDEMQIIGVLIMYISEKSFDLRLKSLRLILVDILDYFVLCDVKKDDLYLAELAIDESLRGQGLGRKVVLDVIDYARSKNLNRVIIDADFRNVGARKLYERIGFTIFNKKRVKIGNFERGMYNMELIL

SEQ ID NO: 11588 - protein, 253 aa, Methanobrevibacter gottschalkii
MKDILERLVDGEINIDEAERLINADNILEFNEVAKFDSKRKNRAGFPEAVFAQSKEYEDLLLIIKKYMQSNNDNLIVTRLSKERYENILNDLGENSFVFEYNRRAQILIIRKEIVEKPAIAKVGIMTAGTSDVNIAEEARVIVEEGGCEAITSYDVGVAGIHRLFPQIARMVEENVRAIIVCAGMEGTLPSVVAGLVDVPVIAVPTSVGYGVGEGGRVALDAMLQSCAPGIAVVNIDNGFGAGVFALTIVNSD

SEQ ID NO: 11589 - protein, 746 aa, Methanobrevibacter gottschalkii
MKALKILTQGIVQGVGFRPYVYRLAVDLNLKGYVRNLGNVVEIIIEGQNTELFVDRLPKELPPIAKINSMNVEEIEKTNYTDFKIIESGNSYSGISVVPPDIAICDKCLEEIRNPTDRRYKYAFNACTDCGPRFTVIESVPYDRIRTSMDEFPLCDDCSVEYEEPLNRRYHGEAICCSECGPQMEIYEGKHKINTDNPIKVGANKLKDGKILAIKGIGGTHLVVDAYNNKAIKELRKRLNRPNQAFAVMCKDLESLQNYAELSKKEIDTISSNKRPIVILKKKNNYPFPESLSPRLHNIGVMLPYSPMHYLLFDEGDIDTYVMTSANIPGEPMMIENEDIINGINDYSLIHNRRILNRCDDSVIRFRNNELSFIRRSRGYTPEPYTINYEVNDLNILALGPELDVTFSIAKDNIAYPSQHIGNTNKPKTLAFLREAIENMQRITKINEYDIIACDMHPHFFTTKLAYELAEKYDAEVQPIQHHHAHSVALSNDNAIDEMIVIAADGVGYGSDGTSWGGEILYTDIKNFERLGHLQTQLMPGGDIATKYPARMLASILNDENLIKNYSDYFKYGEIEIKNIFKQMDAGINVGKTTSTGRVLDSMAVALEICNERTYEGECSMKLESAAYYSNKNIEIPLNIENNILNTSEILKEVVKLYQDGEKKADVAAAGQNAIARGLSQLAINAASKKSIQEIGATGGVFYNEAITNTVKNYVENNGFNFIQHKNTCAGDGSVSLGQAIIAKKV

SEQ ID NO: 11590 - protein, 191 aa, Methanobrevibacter gottschalkii
MIRNDDIDNIKKNRKNVNSSNGHIEIRGNYNDQLGGIDKEDILDVMGCKTRRDIINLLREEPMFVSEISNELDIGQKAIIAHLRAMEDIGILNSSYKKILRGRPRKYYDLQNEVNIHITINRNTFDVNLSEDMLNTLQLPSGDEWSRLLDIEKRIDDGQLEAIDELKNQIRLYGNLKERAEYILERTLKNR

SEQ ID NO: 11591 - protein, 183 aa, Methanobrevibacter gottschalkii
MTDENKSETEAETQDFQEKYDELLEKLALKEEELKEVKENLEKQEAETQEYISLSQRLQADFENFKKITDKRNKEFIKFANEDIIKDFLDCYEDFGRALEIKNNDDLKEGVELIYNKFKDILTKEGIKEIPTKGEKFDLNKHEAMMVQESEDVENDYIIEELMKGYMYKDKVLKYSKVIVCKK

SEQ ID NO: 11592 - protein, 623 aa, Methanobrevibacter gottschalkii
MSDTKKEKIIGIDLGTSNSAASVLVGGKPTTIPSAEGASQYGKSFPSYVAFTPEGQMLVGEPARRQAVTNPENTISAIKRSMGTDHKVTVNGKQYSPQEISAFILQKIKKDAETFLGEPIEKAVITVPAYFDDNQRTATKDAGTIAGLDVVRLVNEPTAASLAYGLDKSEDDDMNIMVYDLGGGTLDVTIMEFGGGVFEVKSTSGDTQLGGTDMDNVLIKYLASEFKTQEGIDLMDNDQAVQRLREAAEKAKIELSTTTTTQVNLPFIAMGSDGTPKNLIIDLTRAKLEELVDSIVEKSGKPMQQALDDAKMNKSEIDKIILVGGPTRMPIVQKFVEKFIGKPVERGIDPMECVSMGAAIQGGVLAGEIKDIVLLDVTPLSLGIETLGGVSTTLIERNTTIPTKKSQVFSTAADNQPSVDINVLQGERKMAADNTSLGRFQLVGIPPAPRGVPQIEVTFDIDANGIINVTAKDKGTGKEQAITITSSTKLSDEEIEQKIKEAEMNAEADAKRQEEIEIRNNADSLIYTSEKTLDDLKDQVSEDEKTKVEDLVKELRELIAGDDVDAIKAKSDELSNVVQEIGAKIYQQAQAEAQAQQQAGADPNAGAQDKDDDTIDADYEVKD

SEQ ID NO: 11593 - protein, 381 aa, Methanobrevibacter gottschalkii
MADKRDYYEVLGVDKSADEKTIKKAYRKLARKYHPDVCDEPDAEDKFKEVSEAYAVLSDDDKRQRYDQFGHAGMDGFSAEDFYQNVNFEDIFQGFDIGNIFDMFGFGGGARSRGGRTGPQRGSDIYTEIPITLEEAFNGCEKEIKITRSELCPTCKGSKSKPGSNPETCKTCGGTGQIKEVSNTFLGQMVNVRPCRECGGTGKIITDPCDECHGRGSVRKTKTIKIEIPEGVDEGNHLRVSREGNCGDKEGLEGDLIVTVHVKKHKKFKREGDHLYLEQQISFPQAALGDVLSIPTIEGKEIEFKVTPGTQSETVYKLRGQGMNSVRHNSRGNLYVNVTVVVPKKLSSKQKELLKEFAEVSGDEIKHVEKGLFDRVKDAMK

SEQ ID NO: 11594 - protein, 1162 aa, Methanobrevibacter gottschalkii
MVLLSTGVAFAISENDVAVSNDVGIVNETVLEVSSDDSDLSEADVLETQTNVVTKDTFHNYFGNDGTLLDNVSSDELIFKGDFTGIDVSYMTIGKSVKLSGGNTTLNNVTFIIGADNVVIDGFVLDHSDVYLFDIENVNGVTLSNNIINFKTLEGTEGYAIFANTVNDFKIINNTINYVGNTKGTMVNNAIRVTGDEDSAIASKKIIVEGNVINIKIPSVDVGYDPVTWESKVFSEGIVFYYCEDVKFIDNRVDLKYNNFSGGFDTIYALSVRGNPYNFENTIVSSDIEIINNTINANGHNYIYTIFLSANDFKLFNNVINSTADFYYANGINIDGPASEGIVSNNLISVESPYDVYGIYSYQMNGPIEYISYVNNTIIGKSYVGCGMEIVECNPYIADNLIIMNGNYTFGVVASIRDNGTISNNSISSLGNNNGTDGTGDPLLPLNSLGISVKGSVLIEKNKINSGGIGLNLVEKGNITINDNNINVNTTGGVESYAIYSDKLSNLVISNNNILFTGNTNGTMVNNAIRVNGDENKKIIAKNIIVDNNNININIPSIDVSYNPVTYEATVYSEGIVFYYCEDVKFIDNRVDLKYNNFSGSFDTIYVVSVRSNPYNYVFDEEDNIIYSIVSSDILISNNTVNALGNNYTYGIYISAENFTVGDNFVNISSDGKYANGVNVDALSSNGVIKNNNVIVNADIIVYGVYSANFMGPIENITYDNNTIRVNAYAACAMELMEPNPYVFDNTIIAAGNYTFGVVASIRDNGTISNNSISSLGNNNGTNGTGDSILPLNSLAISTKGDVIIKDNEIVTSGIGVKTLKGNVDILGNDIRTTGNHTIEAINSNLTVKNNYLVSKKAVGTDSIVSDKEVISANNTPALKTIISAPNIFTEYIKGAVFPVAALDENGDPISDIVLFLTMDGIVYNVTTDANGYAAFLLNPDSGIHNVVVSFNGNEVYGPKSVNSIISVDASASKIVAKTSTTVYLTSVKSGSYFNIAVKDVNGKGLANKKVSIYFNGKTKSYTTNSLGVIKFKLSANKIGNYQLKMKFAGDKNYTASTAIAKIKVIKQATKLTVAKKTFKAKTKVKKYTITLKDNKGKAIKKAKVTIKVKGKVYKAVTNSKGKATFKITKLAKKGTYKAYVKFAGNKYYKVSSKSVKISVKR

SEQ ID NO: 11595 - protein, 1354 aa, Methanobrevibacter gottschalkii
MVKKFNISLLLFLIFISMATVCASDNMEDTLNNNGSILSNPSDESILLSNDDVLAEFTTHEINVEKYSIYFNNNGDLISSKVKSGDTLNFTGDWNEVSSKTFNFNKTLNIVYSGSKPMKNGVFTFYNGATGSSIIGLNIANTEDYNYGIFLNGASNCIVKDCFINNTGMSSYAICIANNANYNNVSNNFFCDYGMNYGGQGTRSTPPVLLSGAHHNYIANNHIECDDANGIYLSYYDGGPLHGGVSNYNLIYNNTVKYNVLPTSWGYGIQIMGGYNKIYSNRIIGAFRGISTSNGAFNEIFNNRIINITGADFNHPVVEVGGEYGIVGSANAIIINNSIENARILPGSGAIYAIDNAIIENNTIDVVSSGYGIQASGSNISIKNNSIITESGAGVFWKGEYFDLVVVGNNITSGNGVGVLVKKESVKKMPGNITIVDNYISTGNKYAIDAIEVNADTSYVIENNTIPKGKGIVATPEGSYDPSKPRYIFKGTTYSITPENYDDYFDVGGTLNSVVKNGDILYFDGNFENKGVIYINSAVKITGKNPNFYNATFRISEGVWIENLTIKNKDSERINAWGILVYNTGGAIISNCNIEVTDPNAAYAIYVVESSDIDVLNNNLTSNGNYLTYTLLAISVYDCNFINNSIHTIGTGIEHVFENSHCVDGNSNCIDGSTCVGGDTVCTSGNTITGNHVLNEVYRTYGILMAYSSGCNISGNKVNATSKLNKTSNTFNSSWGNNYHNNISTNSIVGIDLYFNSHNNTFSNNNIYVKSNDNYIYGMGVLGSNTGHDAPEGKDASNNQFINNNIVLEGDYFVQGLVIGHESKNTTLISNTVNAKSNNFSYGINLEGSQKSIIKDNNLKLTSDIVYGLEVFRSNGNFIKGNNLDIKAKQAYAIALSNAENNIILNNIVMNNVTGEEITYNVCDSLGVGVAGICLKFNSSSNNISGNNITSKKGYAIVIDKLAIKNNLFYNYLNSEMGIGDKAINNTNNNFVKGNYIYILNGLIPEVTINYLGTADIVLNVGVDGVLVKFYICGEEIGNATSSNGVAKLRYKFDDSYTPAGYSIKAIASKKDYLTKEFISYLTIEKGLLNINYNDVTAIPTSKGKFVVVVEDIFGNSVSGITVKFYRLQGRDVFIGKVKTDKNGVATLVAEVPSLGNYKLRADVVENDNFKSNSGKANLIVAYKPSIYQYKTKAVYYGNTIKYTVRVKGIDGKYVAGGKIVTIKVNGKTYRVKTDKYGKAYKSIKLKAGSYKVTAQYGVTKVSSKIKFKPILIAKNIVKKKSKKIKFSVKLVNKHGKILKYKKIIFKIKNKKYSAKTNSHGVAILSIKNLKIGKNTITSFYGGCTISNTITIRR

SEQ ID NO: 11596 - protein, 1604 aa, Methanobrevibacter gottschalkii
MYIDVKGVKITKRLDNKLLFTLFAVMFILFSLNCVFAQNNTTVTDVLSTVEDDVGIQQIQSFQVDEPLLAATNNNIQINVKHHYNETANTWDEDGYNLANATVKLYGANDKLISTHKTDSKGSVLIKNLKSTKYYVEVSYADYEPKKSKVLDFTKKSGTLKGSFDFIPDILLFVDYKSHNEKLNVLMNMSKRVAFISTGQDYDVSREWLVGYARFIHIDMFSEGAYAIFTAEKLKKLLAISPANANYNVAYTFGVYSNSILNATGLHIVGANSKNNTFNTIENTYIGSYFQAKDINLSDVLYHNMENYLKYVYYLINPSKYENPTLNDSNAPQMGPECGFYHPDLGIFTIYPEGSLINNWIKTNPGYGVDGIGSLNWMIQDYPKWFVDLLDPTTLFEQFENQFIDRFNPNKKFIAIVSYYCGGEVVDSLIRGYEEIGRPAFNVFKFSTDPSMSSILNKINNVSKIGISSITSLYSWSLSYANGSAEKDLSDIDVEILKGVNEISKYSYESELGPQVEWTYSVTYPSFEGVFSPVILSYLDEDKVHVIQSGVDKMVQLSSRWADLKDLNNSEKTIAIVLYNYPPGKAEIGASYLDVMQSTYDLLIKLYENGYAIGDIRKMMNITEFTNLLIDSGNKGSWAGGLLKKYVEKNWDELVKHNQLISMDEFIDLTSDLPDELYEEMVTQWGAGLGKSMVYTASDGKQYLVIPGVWFGNIFITYQPSRGWEEADIGEVIQNYHDLKLPPHQQYVAFYEWMDKVTKANAIVSMGTHGTLEWLPGKNIGVGSGDWSYELTRIPTIYPYIVSNPGEAMVARDRGLAMLITHMTPAIVSSELYGNYSILNNYINSYNNQIKLNVTSNANIYKEKILKLAPNLGFRKMSKGESFNHWLEELHLYLESMGDDLMTYGLHNLGKVLTGNELSEEVVTIVTSQTKIYNQIMEFLYPNLKGKDFYKDIQGDVKYLNERHTIQAFLRNYVDGLVNGSSVLDLVNKLGVNKDSSLFSSMKYAQDVIINIQNNNEWNAILTALSGGYVKAGLFADPAYGDSIPTGYDGYASDPTRMPSEAAYESAVNIVNLLLADYYEKHGKWPEMTALILWGTEISRTEGIGVAEFLYFLGCKPKWAENGKVIGVELLPLKDLKVKLHNGSVVNRPRIDVYASLVTSNKDWITWMVTATRLAANAGESENDNYVIKHYNEYPTLDRLFGLPGNILEGTGMSTLIPNTANWNISTVNVEGMNVYLDTVSFSWTIDEKGNINITKQKDTYKYLLTKTELITQNLDSTWRILDSDDYYDWFGGLYNAASILRQKAGLSRPDTSFVDIRDKNKYVTRTYEEEMEFEIRTTLLNPKYLKPLKGTAAGMNWIASRMQNTFGILTISGNKLNKELGNQMSNTLLDLASGVRDASTSYGIQSAIAHMIYLATQGTWDADSETLQKLADEYMRQVLKYGVACCHHTCKNLDFNNKVIQVSSLTPAQKAEFAKILAQATNTDPLYEVEKDSANNDNNAQGIVNGTTKDKQSDSESGDKTSFGGDSSQAGDAKSASQSQDSSDSSGDSGADAYELSQQSASKSTSGAESSMPIFVIIAIIILIVIFLVGYVRNQKDEDFDDY

SEQ ID NO: 11597 - protein, 280 aa, Methanobrevibacter gottschalkii
MHKNSIIIIILSITIIGMLIPAGFSANDYQIVITYGETTKNNAEYKNTVDSFFENQAHMDLKGVNSKIITANEVNKISSTITGKSYNSNQIFSSALVDLGDNDNLKVSVDKSKITTITGDMYLSALKSAGITNGHVYITSPVTATGESALAGIMNSYEVATDVEIPAPVKEAANKEIYTQAEIVKESNVSADDLSNLVDDVKETVKEENITDYQTIVNIINNTTINYNINLTYNDIENLAESIEQIQNVQGDINSYQTEVNDVLNTTDTSNTGFLDGLFN

SEQ ID NO: 11598 - protein, 107 aa, Methanobrevibacter gottschalkii
MEHITYDDVVEYNHLFTLVPSFVLEKMAKKNSNLVDKFESAIQSHINDLTVEQRIKLNIILDSDVSELQDLMYNAYMRTNKKQYQILANPKYKQFIELNLGELRKII

SEQ ID NO: 11599 - protein, 176 aa, Methanobrevibacter gottschalkii
MDAIEAVAILILVVAIFILVYYYLLNSPSSMDKLKNIVPESADAHMDEVLGKNNVDSSYDLSKEDVLGDKEESESMGKRIKVKLSDIDGSTINTSAFSHKLDAFLDQKSDQLIKDWSLATTNDLDNLQAKFDETTNNVDTLEKNFNEFKQSSEEFQKITGERLDDLDKRIESLENK

SEQ ID NO: 11600 - protein, 136 aa, Methanobrevibacter gottschalkii
MEAIPTIPDQIFYLIILVIVAIVLIVIVFQWKKVAQSKNSILILEKEIELKKMSMVEKDIESKRLMDNPIPLPQEQQDSLSAIRQSTTEVRSNVGYLHSEINERLARLEAETEQRKLEKMLKEIEAKEKKLSKMNK

SEQ ID NO: 11601 - protein, 305 aa, Methanobrevibacter gottschalkii
MMESYIKAGKIVSKIRSEASKMIVDGALVIDLVNYVESEILKTGAEIAFPCNVSINEIAAHYTSPIRDETAFKAGDMVKLDLGAMVDGCIADSAVTIIANGNIDENYSQDEINLHEEIQEASAAGLEAAIATARAGIEVSKIGAAVHEAIAEYHLNPIFNLTGHSLEQYNLHAGISIPNYDNHDNYILEEGQAIAIEPFATNGEGIVNDAPGHYIFSYMANKPFRMKSTQKVLKYIQHNHRDVPFSGRWITNEFGERKGSIALKQLSESMAIYPYAPLREKENCFVSQKEHTVIIEKEGCTVTTI

SEQ ID NO: 11602 - protein, 283 aa, Methanobrevibacter gottschalkii
MPLGNYKEAISARATEKKILDVSQDGGIVSALLCYALDEGKIEGAVVAGTPDDDWRPVPTVVTSSDEVIANAGTKYSMSPTLAVLKEATRQYGLEKIGVVATPCQIQGLRKAQAYPFTRFVVNKINLIIGIYCMENFPMASLDTFATAKLGFDKLTDATKMDIGKGKFWLTKDGEDSGLKLKETHGYEQSGCNICTDYVAEWADISTGSVGSPDGWSTVLTRTDDGNSIFKEAVSAGLIETKPVDDGKFGLPLLEKLAKGKKDKNGAEFERRAKMGVRVPTIY

SEQ ID NO: 11603 - protein, 280 aa, Methanobrevibacter gottschalkii
MFDKLKKAFGGSAEPAPKVDEKVEEVAPVETKAPAEEPKAASSKPRIGYIHLSGCTGDAMSLTENYDILSTVLTDMVDIVYGQTLVDKWIHGTYAEEMPEMDLCLIEGSVCLQDEHSVHELLEARKKAGLIAAFGSCAITGCFTTYSRGGQQAQPSHESFLPIGSLVKVDVALPGCPVAPEMIAKTIVALCEGDLDYLKPAMDWAACDKGCGCDVLTNVVRQGLCTGCGTCALACPTRAMGFSEGRPSCDKDRCIKCGSCYMMCPRSWLPEGRIKKETGL

SEQ ID NO: 11604 - protein, 189 aa, Methanobrevibacter gottschalkii
MPYDSDIIVIGCGNILFKDDGYGPIVINLLQKYFNDKNDYYDPAVTSYVEDEFDKNVLNQIKEKFEGVTLPDSVQFIDGGTAAPMNFFPLYKEYDWKKLIVIDVVESNAEPGTVGIFDPNAMQVGKYDNPHGMTVEEPLQKISEKCEVVIVGCKPASIPIPDIDVGLSESVEKAIPEAIDIILKEIGVK

SEQ ID NO: 11605 - protein, 404 aa, Methanobrevibacter gottschalkii
MKDRVVISPTTRQEGHAELVMEVDDEGIVTKGMYLSITPVRGLEKMVLDKAPESAVVLCQRICGVCPIPHTLASAEAMDMALGIEIPKNAKLLRKATLAAHNINSAAIHQFLIATDFVPENLFATAVDSVSEVRKTVQYVVDMIAGEGIHPSDVRVGGMARNITPFTKERLIERMTALRPKLEEHIELIKNCVVEKGLPDDLGVINRPLMATDATYGTNDFDMDVFSEVLPEAWYDDPEIGKKACSVIPLINGENVETGPRARMEKFAGFKGKGVNAQHVARADEMLKNYDACMEALDAIDPAAPAKVSYDKRGTGELGFGVIEGPRGTNVHMAKVVEGKTKFYSAIVPTTWNIPTMGPATEGFHHEYGPHVIRAYDPCLSCATHVMVVDDEDKSILKNEMVRI

SEQ ID NO: 11606 - protein, 175 aa, Methanobrevibacter gottschalkii
MDKANIIISIIIVLCVAAAVAAYGITNSDNPIFSDLSSMSANDNDAGNGIGNNTVTGNGSGNTIATTSGSGSGSSSSSSSGSGSGSGSGSGSSSSSSSGSGSGSGSGGGSNSNSRTHLSYSEAKSIANDAIEEAGCYAGSGSYSGGYWYFTVYDANGNNVDTISVNDNTGATGRG

SEQ ID NO: 11607 - protein, 392 aa, Methanobrevibacter gottschalkii
MLVNADFHVHSCFSMASSKDMLIKNMAAKSKLKGLNLLGTGDAFHPNWLDMIEESTVYCGDGIYNSDDMNFVLTTEVEGRNRIHHLIIIPNIDIARELSYKLPSKNKKIDGRPKTNLSGIELLELVRDYDCLIGPAHAFTPWTGMYKSYDSIYDCYEKRVDFVELGLSADTFMADRISELKDFPFLTNSDAHSPWPHRLGREFNQIELKDISFSSIKNAFKHNKIKANYGLVPNLGKYHMTACTKCYNLIDPMIAHENKMKCSCGGTIKKGVDFRISEIADYDKPKHPAFRPKYVHLMPLAEIISSVYEKGVTTKTVQGKWQKLIDNFGTEIDVLINVSLDDIEKIDLNIAPAINAFRNGEINVIPGGGGKYGQISFDKIKKQDKIVTLDNF

SEQ ID NO: 11608 - protein, 256 aa, Methanobrevibacter gottschalkii
MNTAEINILKEIELENPIFIEALPGLGHVGKLAADHMIDELNATKFAEIYSPAFPPQVLIKEDGIIGNMLNELYYLKDVGEDNLDLIVLVGNTQALSPEGQYLVCKDILDFVKGYGITRMFTMGGMAIPQPVENPKVYGAASDEATIELLKEAGIEIRSNDGGIVGASGLFLGLGIRQGIQGACLMGETPGYFIDAESAEAILKKLSLLLNFEINTDKLDERAEETRQMIAKAQQMEQDLINKANTGNADDLRYIG

SEQ ID NO: 11609 - protein, 53 aa, Methanobrevibacter gottschalkii
MKMNKCPECGIYTLKDSCPKCGGKLKVIYPPKFSVEDKYGKYRRILKKESMKE

SEQ ID NO: 11610 - protein, 266 aa, Methanobrevibacter gottschalkii
MVRKSQEWPDEGELIVGTVYKVLNYGAFAKLEEYQGKEAFIHISEVSSGWVKNIRDHVRENQKIVCRVLRVNPKKGHVDASLKRIREDQRTKKIQHWKIEQKAEKFLELSAKSLDKSLDDAYDEVGYELMDIFGDVYGAFETASEEGAGSLTEEGIPQDWADAITEVAQRNITPPEVHISGYVDIETFVPNGVEIIIDALKAAEDNGDEEEEIKVQCVGAPRYRITVKSTDYILAEKALKAAADRCIAVIEESEGNGSFLRELDNN

SEQ ID NO: 11611 - protein, 59 aa, Methanobrevibacter gottschalkii
MVSKGRGNFLKVKCLDCDNEQVIFDRAASDVKCIICGKTLVKSRGAKAKITAHIEKVLN

SEQ ID NO: 11612 - protein, 92 aa, Methanobrevibacter gottschalkii
MKIPKEKRTYCPHCKKHTMHEVHTAKKRKASELTWGQRQFRRVTAGYRGYPRPLPAGNKPVKKLDLRLKCKECGKSHIKQSFRTGKPEFVAK

SEQ ID NO: 11613 - protein, 291 aa, Methanobrevibacter gottschalkii
MDQFYQELRKIQKKERNNGTLARVDENFYASIHEYLDELRQEAIRDPFSNIHGMLKEAQIIATEICERREHKITDAAVVNIHRSYRLFTGKPKFDLVDTTPLNLTPEEEKFYFSLLDTLKNHRGNISLEKLSDDDEFVKPKETQTNTLVPKHDEIKPKVSNLTHDNESEDEVLNRLDEISRAKPLKKEPLEPKIESKTMSIPKTQAGNIPEKSIEINPNAFDKQDEFYDLESKKLARDTELVTMLVFDEINPIVGVDEKVYGPFRPQDLVTLPLINAKVFFKNRKGRQIKI

SEQ ID NO: 11614 - protein, 244 aa, Methanobrevibacter gottschalkii
MFKAELSDSSILKTSFDAISSIVDEVQIQTDSEGMRLDALDRSHITFVHLELKSSLFDEYVCDVPEKINIDTDEFMRILKRAKSQDRVLMSLDEGNFIITFEGDATRTFKIRLIDMEYDNPVPPQIDHPTKFKVRFSILKDCINDIDIFSDKIALQVDEDYFMASADGEFGDASIKYLHGENIQEHAKSLFSLDKIREMLKADKFSEEAEISLGNDMPLSLTLNMVTGDGKLSFLLAPRLETDD

SEQ ID NO: 11615 - protein, 257 aa, Methanobrevibacter gottschalkii
MSKIADAFKNGTAFIGFLTAGDPTIDKTVEYILAMEEAGCDLIEIGIPFSDPMAEGVVIQDANVRALKHNTTADDVFGIVKRVREKTDIPLVFLTYINPVFFYGYEEFFKKCGELGVDGIISPDLPYEEKGEIKDIALENGVDVISLIAPTSSERIKMIAGDATGFIYVVSSLGVTGMRSEIKTDLNSILKDIREVTDLPLAVGFGINTPKQAEDISKIADGVIVGSAIVKIIEEHGENATKYLKEYVSCMKKACNK

SEQ ID NO: 11616 - protein, 394 aa, Methanobrevibacter gottschalkii
MSKGRYGEYGGQYISETLMNELIYLEEQYNHYMSDPGFVEELDMLLKEYAGRPSLLYYAERMTKDLGGAKIYLKREDLNHTGAHKINNVLGQVLLAKKMGKTRVIAETGAGQHGVATATAAALLDMECEVFMGELDTKRQALNVYRMELLGAKVHSVKSGTKTLKDAVNDAFRDWIARVHDTNYVIGSTMGPHPFPMIVRDFQAVISAEAREQFLEKEGRLPAAVVACVGGGSNAMGAFYNFIDDDEVKLIGCEAGGKGIDTPYNAAALTKGKIGIFHGMKSIFNQSNYGQIAPVHSVSAGLDYPGVGPEHAYLRDIGRAEYVPVTDEEAVTAFEYLSKMEGIIPAIESAHAVAHVMKIAPLMDKEDIIMICLSGRGDKDVRSIAEYRGVELNE

SEQ ID NO: 11617 - protein, 199 aa, Methanobrevibacter gottschalkii
MVKIKICGIKRLEDIEIVNKYNPDYIGFVFADSKRKISHDLAKRLKDNLNSNILSVGVFVNSSKDEILGLFNEGIIEIAQLHGNESEEYIIDIKERTNYELKIINAIEMSQDIDLLKYDKSLADYLLLDSGKGSGKTFDWQLIRNDLKKNFFLAGGLNIQNVREAIHECNPYAIDLSSGLETDGFKDEMKIKEIMEVIN

SEQ ID NO: 11618 - protein, 258 aa, Methanobrevibacter gottschalkii
MLCEIVEKTKERVEQAKKSIPLDEIKKEVSSMEMTDEFPFKKALMEDGISIIAEVKKASPSKGLIAENFDHVNIAKDYEQAGASAISVLTEPFFFMGSNEYLSEISENVSIPILRKDFVVDEYMIWEAKLLGASAILLIVSILDVVQLKKYLNLAHDLGLSVIVETHDADEIRMAMIVGAEIIGVNNRNLKDFTVNIENSINLRRCVSGDVIFVSESGIKTKDDVTKLKENDVDAVLIGETLMKSNDKRSMISELKNG

SEQ ID NO: 11619 - protein, 335 aa, Methanobrevibacter gottschalkii
MIKEAILKVYKNQDLTHDEAFQTMDEIMSGEASEVQMSAYLTAMSMKGETITEITASAEAMRAHCVRLLNDREVLEIVGTGGDGSNTFNISTTSSIVISAAGVPVAKHGNRSASSKCGAADVLEQLGVNIYIEPEKSIKCLEKINLCFLFAQNYHLSMKYVANVRKELSIRTIFNILGPLTNPAGATMQVLGVYEKELAEPLIDVLKNLGVSSAVSVYGMDGMDEISASDKTFVCELKDGKTMSYEISPELFGMELASKDDLVGGNARENAEITLSILKGEKGPRRNAVLLNSAAGLYVAGKVESLRDGVDLAAEVIDSGKALKQLENFIEFTNS

SEQ ID NO: 11620 - protein, 194 aa, Methanobrevibacter gottschalkii
MILLIDNYDSFSYNLYQLIGEVMKDIQVYRNDKITVEEIKDLAPEAIVLSPGPGKPENAGICIDVVKEFHDKIPIVGVCLGHQAICAAFGGNISHAKRLMHGKSSKISLHYDFIFKGLPSEISVGRYHSLSLIEDTLPDCLEIISKAKDDGEIMAVKHKEFNVYGLQFHPESILTPDGLTIIENFAEKVERGIL

SEQ ID NO: 11621 - protein, 507 aa, Methanobrevibacter gottschalkii
MMMKILSDTMFSPSLEEVIEIGKNEEYKRIPISYELFSDIATPIEVLRILKGISNHTYMLESVEDSKKWGRYSFLGFDPLLEVTCHDNMVHIRGDKEFNELTDEETIIETNVPSDVIKDLVSKNKSPKLEYLPPFTGGFVGYFAYDYIKYSEPSLNLDAENQDQFKDIDLMLFDKVIAFDNFKQKIIIIINMKTDDLECNYKKACENLKNIANLIRTGKKAEIQPLNLKSEFTPVFSREKYCEMVKKAKEYIYEGDIFQVVLSNRIEADISGSLFDTYRVLRTTNPSPYMFYFSSNDIEIAGASPETLVKLTDNQLYTFPLAGTRPRGKTEEEDLMFEKELLADEKELAEHNMLVDLGRNDIGKISEIGSVSVDKYLSVEKFSHVMHIGSTVSGTLRSDLDSLSAIDSILPAGTLSGAPKLRACEIINELENNKRGIYGGAIGYVDLSGNIDTCISIRIAFARNNKVFIRSGAGIVADSVPDNEFDECLNKAAAVINALKIADGGIL

SEQ ID NO: 11622 - protein, 133 aa, Methanobrevibacter gottschalkii
MDLRKIGILLIFVGIFVTIFFINDDKLFVPALTVTVLGFFVTVVGFVIEIRKQKIKNDRLEKDIESILQPLITEYSNLNKQYRMDFQGDEYTQKRIQLNRDLEKEITDKIPYLESREIKKIVIQFSQEQDKMN

SEQ ID NO: 11623 - protein, 258 aa, Methanobrevibacter gottschalkii
MSSLNEKLKLVTLKGLLIFIFFIFLINVLLGSLNLIQINNAWIYIFVIFYFIFKLREGFSSFKHDFLKVFTFESLKIISAIVILNVFISYGLLYLSDFILNVFPNLNSIVMSSEYINNSLFVFYGVITTVFISPISEELIFRGVLLNRLNLIIPLDFSIVITSILFASLHSFGSITAAFIFAVCMAVLYLRTDNILVPIFAHFLNNLIAEIIVIADVGNMLFTNNVVMLIMSVLAIISTFLILILIKKQWNILNINKL

SEQ ID NO: 11624 - protein, 67 aa, Methanobrevibacter gottschalkii
METRIRKFRQEKGMTQQHLAELVGVTRQTINALENARYNPSLLLSYHITKILGKAAIEDVFIFNEDD

SEQ ID NO: 11625 - protein, 449 aa, Methanobrevibacter gottschalkii
MAIHPIEFRYGTPEMKNIWEEENKLQRMLDVESALAQAEGKLGIIPQEVADEISSKANTKYVKLTRMKEIEAATNHDIAALSKSITEVCENGAGEYVHFGATSNDIVDSSNSLLIKDSINVLKEKLEKLTKIMLDLASENKMKVCIGRTHGQHALPTTYGMKFALWADELHRQYDRLEHAESNVCVGMMDGAVGTTAALGEQGWEIHKTVAEILGLPAATITNQVVQRDNHVEFISVLANIASTLDKIGLEIRSLQRTEIMELGEYFDPEKQVGSSTMPHKMNPITAERICGVARIVKSYVNAALDNNPLWHERDLTNSSCERIMFPESCILTDYILNLTIKLMSNLVFYDENIERNLNFTHGLVMAERLMAELTRAGMGKQTAYGIVRKNAIKANKEKLLLGELILEDEEVKKYLTKEDVDKIMDPHTYTGSIPTIIDELLEKSKEWF

SEQ ID NO: 11626 - protein, 830 aa, Methanobrevibacter gottschalkii
MAYLKRMDLPIEGMHCASCVLSVNKTFGKIEGVEEVDADLAANRLHITINPKKISYEEMERLVKNLGFELHSDEMTLRIQGMHCASCTMNVENFLIRVDGIFDVKADLTSQTAKIRYDSSKLDMNEVEKVIESLGFELLGIEGQTEIDEEAIYQQDLKDKLTRIIVGVVFTAILMILMFSGWDPLMGPIASLNQVTGLHISAMGLLSLIVSIGPFIYISLPILKAGWNGLSHKNLNMDVMYSMGIMVAYVSSIFGTFGIVLDHTFMFYDSAVMLPAFLMIGRYLEARAKKRTSDSIRELIGLQPTVAISIEVDENGEITSQKEVSIADIVLNDLLLVKPGEKIPVDGDVVGGESCVDESMINGEPIPKVKKDGEEVFAGTINQDGVLYIKAKKIGKETVLSNIIRLVEKAQSSRPPVQKFANTIVSYFIPVILTIAIVVFLIWYFVLGETLLFSLTCLISILVVACPCALGLATPTAVTVGVGRAAEFGILIKNGDTLENAGQLDVAAFDKTGTITEGKPEVDDIIAYATSEEDLIKLVASVEQNSTHPIAKAIVNKAKELNIELDQTTSFENVTGKGLKAEINSKEILAGNLALMESENVEVSSKLADKYYELEKLSKTIIFLAEDKTVKGILSLSDKIKENSRRTIEELHKMGVQTYMLTGDNESTALNVAREVGIDNVKASVLPENKLEIVKDAQSNHTKKVLFVGDGINDAPALTQADIGVAMGNGTDIAMESGDVVVMEGDLENVVAAIQFSKKVMRRIKENIFWAFAYNSILIPIAAGILYPAFGITFEPALAGLAMAMSSVTVISLSLMLKRYVPEIKRKSNI

SEQ ID NO: 11627 - protein, 263 aa, Methanobrevibacter gottschalkii
MKLIIDTELCTACKLCSQVCIRDNIYVDDFAVEMGDNCFECGHCMAVCKVGAVTLKSFIGHEDRIQEYNSHEIPVKYDDLLQLLKQRRSIRWFKNKKVDKKTFEKLFEGAYYSPSAQNEQDVEFVVLDEKLDEFMDVVYDIIKVDEDKFFRIKEFGDYLKDNSKKKFHPLLWEGKQLILTFSTDKNNAVIANTRLELLAYSLGLGGFYSLFILKADEINHDKLMEFFPDIDKNKHMYSTFIIGYPKKRFRRTIPHRDITATYY

SEQ ID NO: 11628 - protein, 404 aa, Methanobrevibacter gottschalkii
MQTLIENVNIVNPGDDIKTHQNILIEDALIKEISQDKLSTKDNVKIIDGEDNYLLPGFIDCHTHIFAKGFHKEENMTNPLGIHFYNAVPHSLQTIDAGVTTIRDCGSADLSFKLAQQRKLFTAPKIHLSVTPLVITGGHFDLLLPSGWDMEIMYPGFPKGRCDGVEEVLKKTREVKRAGADFIKVMCSGGVLTTNNSPEFAQFNKKELKTIACEANANNMSVSAHCHSLKGMNNCIDVGFSSIEHGTFIDRKTACRMAENDVSLVPTLLVHQFLYKNGFPAWDNYAREKTAKLKEIVKVHKENIAAAYEEGVNILMGTDSGVIPHGHNLEELIHLTDIGMSESEAIASGTVNAAKFLGNDDLGKVRKNCIADLVLVNSNPFDDISILSDNDNILTVIQDGIVVK

SEQ ID NO: 11629 - protein, 129 aa, Methanobrevibacter gottschalkii
MITCRNIAKGKGKGELIVSSEPISFLGGVDPETGIVIDPTHELKGECIKDKVLFIPGGKGSTVGSYVIFQMMKNNTAPNAIICLNAEPIIATGAIMSDIPMVDSPAQTKDLTNGTLVEVDGDNGTIEIL

SEQ ID NO: 11630 - protein, 421 aa, Methanobrevibacter gottschalkii
MIIMLNANTYVTAQEGIGGTIRNQYEDFYVEEIPEIIPDGEGPNVYVWIEKLGRTTLDVVLDIARDLHISRKRMGFAGMKDKKAITRQWICIANMDSEEQFKQVEALDIYKTDFLKTVRGRKKLRMGQLRGNKFRILVKDLKDIEKSADVANEVLDELQHTGVPNYFGWQRFGKPRTITHLVGEALVENDLEKAVGVYIGNPQEDESEKNQKARQAYDDGNLEEAFNLMGKGMRYEKMMLKELVKASKKGELTDKDYMNALHALPKPLQRMFVHAYQSYLFNEAVSKRVEMGINKYIEGDIIIDTEEHIVRDKTPEEFQELIDNFQASPTCPLYGTKVPFAEDAVGKMEEDILTNYNITKANFEVPKMPRLGSHGLRRSMRFKVWDASATATDEGVLCEFSIDKGSYATAVLREIMKKDVI

SEQ ID NO: 11631 - protein, 145 aa, Methanobrevibacter gottschalkii
MLDEKGYFYIIDAILAVILVSIVFLVVNTAISIPSPDYSYDSCEFRTAQDVMEILSGKVNFTDRTFIGEISKILKDNKNSKESINLVSKICKNKFKSLNLTNYRFTENKILKEKILDSSGDYSKSNMVSVATRNYDDYSYTLSVW

SEQ ID NO: 11632 - protein, 454 aa, Methanobrevibacter gottschalkii
MDIEGFVRARIDDYDYNDLTELLAVRIREYKKISEKNSVEMAKAVIDEVSTTLKLQECGDEFLKEIANVNKADVLMGEMGVGSRGAGDFFVHRKIAEIVASTNTASLINPSEQDDGGVVKAKANNDDVYITTAVDGIHSRLSEYPFLGGFHVTRATLRDVCVMGADPVAILSDVHLADDGDVAKIFDFTAGVAAVSELVDVPIVAGSTLRVGGDMVLGDRFVSAVGSVGVSNHPPTARKGATDGDVILLTEGSGGGTITTTALYNGFFDVVWDTMNVNFVQASHALFEADLVKDIHAMTDVTNGGLRGDAHEISNTTGVGLEFYEKEIRQMVAPNVLNMLETLNIDPLGVSTDSLMLIAPPEIVGDIKKVVGKYDVSISEIGEVNTSGEPILIKEDSSEEKLVPLFREAAYTKIKKLVGETTPEDFEEMKEKVQRASDAAIAKKEKVINHIRAN

SEQ ID NO: 11633 - protein, 198 aa, Methanobrevibacter gottschalkii
MITIIDYKSGNLKSISNGFKKIGAEYKISDDKEVIANSDYLVLPGVGAFGSAMENLKPFRDVIHEHVSEDKPFLGICLGQQVLMSSSEEADGVKGLDLFKGHVELLSGDVKIPHMGWNKLKICNNSPILEGIDGEFFYFVHSYHVVPDDESIIAGVCEYGGKIVASLSQNNLFSTQFHPEKSGIAGLKILKNFTNLEL

SEQ ID NO: 11634 - protein, 357 aa, Methanobrevibacter gottschalkii
MHPRPSPIAASLYTLRDMNVDVIVMHGPNGCCFRTGRLLESDGVRVLTTAMAENDFILGAGEKLEETLKKAYDMFKPELMGVVGTCASMIIGEDLKEAIANADLPCTVIPVESHGGSGEGDNTVGAIMVLEAAVECGVIPQGEADRQIEMLEKATEVEKTRGMAQGKYIKPNFGDSKENVAKLVVRAIKDGKKVAFVHNAKKETAYLFADIINFDYKDIRRDNKPIIVANLDGSTGLERIRCHAKNIKEELPMEIDFITGGLDEYPITADVAAEYLKNMDLDLIVVFGVPHAFPIEDFDVESVAITDGPRLVEPLRDLGYNHVVAELDAHSKTLGTDEIVFSDFGGMIRSAIGWLDE

SEQ ID NO: 11635 - protein, 133 aa, Methanobrevibacter gottschalkii
MMKLDKKILEEKIREYRDFKSCSESTLMGLCEAAEYPMSKAEMCKIACGFAGGIGGTFDEGTCGAVTGALIANGLVLDNPVKIKENAKEIFNSFKEKYGTVCCGKITNNGKDKSPCVDCCVFIANKVADLWDE

SEQ ID NO: 11636 - protein, 161 aa, Methanobrevibacter gottschalkii
MDEKHLPLFGVGPYLMGLIIIITFLSIAASIYKIIPVYNINKLNIFLITLGIISIIFAIVLWLLAILNSKLMKNIKNNNLVTTGVYSFVSHPIYACFLFISIGLILISQNILLFFLPFLFWAFLTISLIKTEEKWLFERYGDEYIKYSKKVNRFIPFKKIF

SEQ ID NO: 11637 - protein, 301 aa, Methanobrevibacter gottschalkii
MIETIIIIVIFLVYIAMKYVKILRPYEKGVVERLGKYNRTVSSGIVVLIPFLENLERVDLREQVVDVPPQEVITKDNTVVVVDCVIFYEVVDPFNATYNVVNFYQAITKLAQTNLRNIIGDLELDQTLTSREMINAELREVLDEATDKWGSKVVRVEIQKIEPPKDIVEAMSKQMKAERMKRASILEAEGYKQSEIKKSEGDKQAAILEAEGKAESIKKMAEAKKQALILEAEGESMAIEKVYAAIHEGNPDDGLIAIKYLESLEKIADGKASKIFLPFESSGVLSSVAGIAELFKEDKKE

SEQ ID NO: 11638 - protein, 135 aa, Methanobrevibacter gottschalkii
MEIFIWIILAILFFLLEILTGSFILVWFGISSIVAAVLNYFKFDFYTQFGAFIVISIILLVFTKKFAIKVTPEINKKTTAERLIGRNAKVVRKIDDKNIIVKVCGEEWSAYAKNNVDIGDTVKVCGIESIKLIVE

SEQ ID NO: 11639 - protein, 71 aa, Methanobrevibacter gottschalkii
MGIIIKSLKYFIYLQIEAFNHEFFRWPKRMEYWKKALSIIIFFCIGLILMDMIACGDLPDKNTASSFMFYI

SEQ ID NO: 11640 - protein, 104 aa, Methanobrevibacter gottschalkii
MKKVKITVMRKVRHDDLIEEYENPLEHECSVEEGQVFIANGWARPDDFCDSAWESLSPFVMALANGASDFYDGWMKNKKSAMISCNDGFRPVSFLLETLDEDAD

SEQ ID NO: 11641 - protein, 396 aa, Methanobrevibacter gottschalkii
MLQIAVCGKPNVGKSSFFNSATASTVEMANYPFTTIDANKAVAHVIKDCPCKELEVTCNPHNSICIDGKRLLPIELIDVAGLVPGAHEGKGLGNKFLDDLMQAKVFIHVIDASGSTDIEGNPVDPGSHDPLEDIQFLEEEIVMWMYGILSRNWVRLIRKVGAEHLDISKVLFDQLSGTGITIEDIIEAKRNIEPDYNKWEEKDLIELTRNILRIAKPMMIIANKADLPTSAANIERIKEKYPYVIPTSAESEIALVRAAEAGLISYISGDDHFEILQADKLNPNQLKALEYIQTNILDKYGSTGVQKALNYGIFELLDRIVVYPVQDEHKYTDQKGNVLPDGFLVPNGATPRELAYIVHTDIGDKFMHAVDARRNMRVASDYELKDGDIISIVTRG

SEQ ID NO: 11642 - protein, 289 aa, Methanobrevibacter gottschalkii
MKNYDTDRPPAMKIRQGIQDAMTYSLPDKKFEPSEIDLVEVDIKLNNLGWNFHNFKILNLTDIHLGQWINPEYLDELIDYVNILNVDLITLTGDYFSYITEGYEKSLTDSFKKLKSRYGKFGVLGNHDHWMDASKIRDIFKSSKIIDLSNKVYTLEKEGEFLNICGVDSCTVCADNLDEVLVKIREDTPSILLAHEPDFAEESSKTNKFDLQISGHSHGGQFIIPKFETTPFRGPNSKKYPVGLYKVRNMIQYTSKGLGTNSFRMRINCKPEITIITLKTNRKQKIDVK

SEQ ID NO: 11643 - protein, 706 aa, Methanobrevibacter gottschalkii
MNTHNIITSTKNIINLILLVLLNILVIILMSDLYGDFSIGPWYNAFFIVLSITIANTLLWPIFKRFFMKFMIQTLGIGTIFINALIFYIACYFIPNVDVGFYASIKVPFFMSIATTVVTNMTNTNYYNRHLKNIVKYALNKKIDSKSYPGIIMLEIDGLSINILKKAIDNNIMPTIKEWIDSSTHNLKEWETDLSSQTGASQAGILHGNNENIVAYRWVEKENDNKIIVSGKLSHAPLIEKRISNGEGLLVDGISVSNMFSGDSKSAPLTSSKLGTLTRINHKTLNTVFLDTYNYQRIFTLFLWDILVELKSQIKHLIKNIQPRLRRTVVYAAVRAGANVVLREVTTDILTSEILKGEIDTAYATFMGYDEVAHHSGTQDEDVWPVLKQIDTQIQRLTNAIDMSNRGYKLVILSDHGQSNGATFKQKYGITLGNYVRRFLPDDLKVYRNEFNIDHFRDAVFSENIKLKIVKEKIGDFRDDIFDENTYFQNIRDELENKKPAIIFDNEQYQNLRKKYSNSLEYIKGHESIEQSTKKAKDSELIVLGSGNLGLIYLTEWKQRLTYEEIVMLFPELIPGLVKHPGIGFILVHSITNGGMVIGEDGIYYLDTDKIIGENPLINYGKNAARHLKRQNTFNNMPDIMVNGFYDEKYDEVNAFEELIGSHGGLGGDQTKPFILYPSEWEDPGKLIGASSIYEFLKKEINELKS

SEQ ID NO: 11644 - protein, 283 aa, Methanobrevibacter gottschalkii
MDNFKQRLNKSKEAIDNADYIIIGAGAGFSAAAGILYSGKRFEDNFKDFIEKYDMKDMYSAGFYPFKTQEEKWAYWCRHVYVNRYSVGKTELYKKLFNLVKDKDYFVLTTNVEHQFWINDFEDKRIFATQGDYGSMQCEKGCHDKLYSNEDFVYESLGKIEGCRIPSNLVPKCPVCGGNMDLNLRKDQFFIEDKKWHEMASNYQNFLSRIDEDKNIVLLELGVGFNTPTIIRYPFEQMTYNNKNMTLIRLNRDYPDAIDQNKDRTISFDEEIYEIFDYWLSRF

SEQ ID NO: 11645 - protein, 213 aa, Methanobrevibacter gottschalkii
MQTGKIFIIGIGPGASEYLTKKAIDTVKTSDYTIGSTRAIELFDDVQNKIAFNVKELLEKLNEGVQLACNGNTVSILSTGDPGFSGVLNTVLRISKEKEFPNENIEVIPGISSLQLAAAKCHIQWDNANVMTFHGRENIEDILPVINNGKTTIALPSRKVKDMAQFLLDHGVEENRKVVVCERLSYPDENIVEATLKDIAQSEFTYMCIMIIY

SEQ ID NO: 11646 - protein, 936 aa, Methanobrevibacter gottschalkii
MNAKLNTTCFILLFIFLITAVSAADNKNETLLTQKETDSSQKLCKSSVSKETSKKEKVTLKAPNLKMYYKDGSKFKATVKNKNKKAITKAKVDFTVNGKVYNKKTDSKGDAYLTISSLKSGNYPIKIRFAGTTKYTAISKKSTITVKSTIKSNDFKKYYKNTSPYTSKFYNQKGNILKNKAVKFKLNKKHYTVKTDKKGVGKLPINLKPGTYAISIINPKTSETVNKKITIKSLIKTKDLSINGQNDGKFNVKVFNNKGEVYPNQKVTFKINGKTYSKKTNKNGIATLDINLDVGKHSITTEYMGLKNTNKININKIVKSTNYIHTTLIPNYVNVTAKYVVNNSVYCLKSGINGIIKMPKNEIFKIQVGGKIYTFTTTSINGINSITLRYNNNYLVPFDGSGVKSYTNRNKLTSDGIIISKVNDYTQIDYQSKTKDNTALFGFYASKGLDKSETLTYVENDKITAKINFNTLSFDEFSLRYSLSALHGKTIYNFNYGNYNDTIRFANTNTPVTFSYFGNSIVGYASQETIITKFKVDEIKEVEKEENISYGLNKKYRTAMGFEVLQSYTLINEKINQKTLENWVLKNPDYLSRFGVMNIYGMHLASLEVAWIADIIADKSSKELNVNWKRNNTLTILGGINLEDTYLNILNADMGMKVTGKFDNAFLFKLLNSMNLPNIEEYALLKVAYRYLDKSSNSLDNVFLSILKNNFSIAQLDDMIYIFSEANSKSAIILNTSSGVSSVVLAQNSVYKGSSLKTTHDCCGVGIIPKDIIKGIKETFNIINNGLSNIYPNKTHPISKLFYMAANLLAKPLNGVGSLGMNLITTMALIQSGGTTYRNEMVEKSDWHEVMDKITFTRPGYLQSKKIYNIPNEKGGCDFIEVKIRDDMTLDRNNAIYISDGKTRKLSKTETYKYFIDDYWTPFSMPQKYWDKSWNR

SEQ ID NO: 11647 - protein, 109 aa, Methanobrevibacter gottschalkii
MIKIKKESKFTVSIIIILCALIAITLVYPKYSAIWDVAFLISIFYTSTQTILDTSKKSKRKLNINIVIIIIFATIIAFYEMSIGNPLIFSTALLILANLLDSTLNKKSN

SEQ ID NO: 11648 - protein, 336 aa, Methanobrevibacter gottschalkii
MSFKDYFKFDKDKTTFIFVGGKGGVGKTSVSSATALWLAEQGKKTLIVSTDPAHSLADSLEVPIGSYPREIKTNLFAVEIDPDVAMAQKQAQLEAQKAANPDDGGLLGMDFLSDQLDMASASPGADEAAAFEMFMGVMNSDEFDVVVFDTAPTGHTLRLLSFPEVMDSWVGKMMMLKAKLGGVTNSLKKIMPFMDAVDDPQTSEDLKRTKEQIDMAKEVLSDPDRTTFKMVVIPEEMSIYESERALEALGKYDITVDSVIVNQVMPDICDCDFCHSRHKLQQKRLALIDQKFPNQHIAEVPLFKDEVKGQDKLLKLAHILYDDEDNDEVVQDAIQL

SEQ ID NO: 11649 - protein, 269 aa, Methanobrevibacter gottschalkii
MIKVGENISEIPKLNCEKTKCNIVDFIKSKVSESKSKGIVIGLSGGIDSTLAAYLACEAVGKENVFGVSMPSTTTPTEDKIHAIEIAQELGIKYKEIAIDSVLNEYLSVTQLDNYNLAIGNLKARIRMSIIYYYANHNNYIVCGTGNRSEILIGYFTKHGDGACDIEPIGNLYKTDVFKLSEFLNIPKEIIEKPPRAGLWDNQTDEDEIGMSYDLLDQILYLSTEKYMKNNEIANRLNISAEEVDMIINKIIRSKHKSKVPESPAKTIL

SEQ ID NO: 11650 - protein, 951 aa, Methanobrevibacter gottschalkii
MSENIEKKWQKKWADAKLFESNPDEREKLYLTVAFPYPSGAMHIGHGRTYTVPDVYARFKRMEGYNVLFPMAWHVTGAPVIGIADRIKRKDKWTLDLYHNVHGVPKETLPKLEDPEYIVKYFSTEYHEVMEEMGYSIDWRREFRTIDPTYRKFIEWQITQLHEKGLVAKGEHPVKYCPNCDNPVGDHDLLEGEGVGVNELTLLKFPIGDKILVTATLRPETIVGATNIWLNPDVEYVLVNANGERWVITKEAHYNLKNQIKNLDIISEINPNDLIGQMAKNPFTGEELPVFPASFVSESYGSGVVFSEPADAPADYIALQDLKNNAELISKYNLEGIIENVHPIPVCTLKGYGEIPAADIIERLGITDQNDEKLHEATNELYKAQHSKGKIIDSIPDFGGMKVRFAREELKEKLINDNMATIMYDFAERPVVCRCGNNCVVKIMDDQWFMKYGNEEWTEKTLEVLDGETIIPKEIKNNFEYYLNWLDDWACSRKVGLGTRLPWDNQWLIEPLTDSTIYMSYYTIAKYLKDMNPDDLNLAFFDKVLLNKDSGEITVPAEKVKEIQDEFNYWYPLDWRLSAKDLVGNHLSFLMFHHSAIYPKDKWPRGTVVFGMGLLEGNKMSSSKGNVILLKDAIKDYSADVVRLFLMASAEPWQDFDWREKEVLGTKRRLEWFREFAARVEEIKGSPLDLSNIEEVELKRTIDLWIISQLNQHIKNATEALEVFQTRQALQDSLFLLKKDVDHYLYRVKHIIDAQDSAVIYVLSTVLEAWIRLLAPFTPHTSEELWSTYGGAGFASEAAWPEYNEELVSAEIEKSEDLVENIIKDIAHIKQMVGEDVEKVHIYLAPDWKWDLYKIADEVGKPDIGQIMGRAIGSKIHDDKKEIAMVAKKIGKEITKTRYIGKINEAEILSDALDYIKEECGNEVIIHTDDSYDPQNKAKNAMPYKPAIFME

SEQ ID NO: 11651 - protein, 243 aa, Methanobrevibacter gottschalkii
MKMILDERGKKYVLKSGEDFQSDLGIVSADVLNDADIGEEVKSHLNHTFKIIKPNINDFIDIMDRRCSILLKKDIGLVLAHTGLGSGSRVVDAGTGAGAIALNFGNVVGSEGDVFTYEIREDFAEVARKNIEKFGITNVHVKNKNIKDGIDEDKIDLVFLDLPKPFEVFEEVMECLNVGGWLTVYAPYIDQAEISYRIAKKLGFYDIEIFEILERGLEVRPQGVRPKTRMVGHSGYMVFARKL

SEQ ID NO: 11652 - protein, 318 aa, Methanobrevibacter gottschalkii
MKNTWKLKLRMILTSVVMFTIVYFLIMLVGLYLGVSSWKLYFGASLVIVFLQYWFGPSLVKRSMNVRPLSEAEAPHIHQMVQELADAAGIPKPEIGLSEINIPNAFAYGRSSRSGHIAITRPILGLLDRDELKAVIGHEMGHIKHNDMIVTAAVSVIPMICYYIALSFMFSGDNDNGGGIIIGILGYVFYLIGQLLVLFISRTREYYADEASVDFGNRPAALVSALYKLSYGAASCDKQTISEVNTNRAFFINDVNNARHDVSDFQQIDFDGDGKISNDELRRLANSDVKVSRKNGLMELLSTHPDSLKRVKRLAELE

SEQ ID NO: 11653 - protein, 315 aa, Methanobrevibacter gottschalkii
MSGPWVEKYRPQKLEDIVGQKQIVARLQKYVGEESMPNLMFTGPAGVGKTTTALALVKSILGEYWRQNFLELNASDARGIETVRNNIKNFCRLKPVGAPFRIIFLDEVDNMTKDAQHALRREMEMYTKTASFILSCNYSSKIIDPIQSRCAIFRFAPIKGEEIKERLKYICESEGFQADDEGLESIVYFAEGDMRKAVNVLQAATSEGETVTEDSVYEVVSKAKPQDIENMINKALMGDFMGARTLLRETIVLQGTSGEDMVTQIYQDVSKRVLEGKMDASIYMDLIESIAECDFRIREGANPRIQLEALLTQFL

SEQ ID NO: 11654 - protein, 481 aa, Methanobrevibacter gottschalkii
MLWTDKYRPQELSAVVGNKKEIKIITDWVNAWKSNNPQIPLLLVGPPGIGKTTLSQIIAKQFSEHIELNASDKRSQEIIKSTIGESSSSRSLFGDEYKLIILDEVDGIHGTNDRGGVKAIGDIIKSSKHPMILIANDFYSKRLQSIKPKCQVIKMKKSRWNSITKLLREIAQAENVDANPAALKEIALKSQGDVRSAINTLQALSSKDSTLEVQDVENMKTKDTRSDIFNAITGVLKSKTPAHVKEAMWIEEDPTLVMEYIAENIPREYKKKDEIKKAYDYISKADIFFGRTQRSRNYGYWKYASDFMGIGVSNSKHETYKKFTKIQTPTIFTLMSRNRGKRNLRDEIAEKMSVKLHVSHSIAISMFPYLEIMFKNDELAWEISDYLELEDNEIKRFRSKKIPKKVINKMEKQKAQMRVEERDRRAEELKNQMITAAVEIEDSYEISKPDETKAEDTVKKEPPKEKKEKKKTDKQVSLFSF

SEQ ID NO: 11655 - protein, 229 aa, Methanobrevibacter gottschalkii
MDLMFDVSGLAGEKEEFSTSKKDVLKFLKIIGVDSRFVSYTPDKIYINNLRFSKFSRKRQATFNKQYPEIEVVRSSLFQKICSKSSKHLALEIKPNSLVLMPKDNFIVELIMEPYTRKYGARLVYEGDYDLMVNPLILDDQVNDIFEGIFNGEGLNFNINSNEIYPLINVPLNWINSFLEMDGQKSIENKNKNRLAASFSEFLEDVAPQYKENVVKAAKYIEKKLETEQ

SEQ ID NO: 11656 - protein, 283 aa, Methanobrevibacter gottschalkii
MKIKGSTNIVGLIGHPVEHSFSPPMHNAAFDKLNMDYAYVAFDVDSNNLKSAIDGAKSLNIKGFNVTIPHKIGIMQFLDEIDEVASLIGAVNTIDFKNLKGYNTDGIGAVRAIEEVTNIKNKNVVVAGAGGASRAISFYLARYGADTITLLNRNVDRAMNLAEDILDSGLITEIKSDSISEINSYLSDADILVDTTPRGMHPHTDDEPIARAENMQEDLVVFDAVYNPNETVLIKEAIKAGAKPVYGIKMLLYQGAESFKIWTGRKAPIDVMEKALGETLNLE

SEQ ID NO: 11657 - protein, 431 aa, Methanobrevibacter gottschalkii
MEFTRPRGTRDFLFEEMRERKQAESTLRTVFESYGYQEIQTPLFEELKLFTTKSGEEIVNQLYNFKDKSDRELTLRPEITAPVARLYLNELEKTSTKPIKLYYYGSCFRYERPQKGRFRQFWQFGCELIGAKTPQGEAEVIALCCDAIKSLGITTADVNLNHLGIIRGLFKHFDISVETQREIMVVIDKGDKDLLIESLSGDEPVINNEELNQILLKLIDLVGDKSIIPEVEELISPYEESKAALEEFKELISLLDAFKVENYTLNLGVARGLDYYTGIVFEIYVPELGAQKQICGGGSYSLVKLFGGQEVESTGFALGFDRLMNAIEELADKEELPSHLDVYVAPISNDVRLKAFEITQILRKNGFKADVDLNGKKFKKLMNYADKIKVEKMIIIGANDLKSDKVTIKNMINGEQELVGINNIVDYLKEE

SEQ ID NO: 11658 - protein, 135 aa, Methanobrevibacter gottschalkii
MKVNFRHEINGVKVITAIAQDAKTNQILMLANMNKEALIKTIKTGKAHYWSTSRNKLWLKGESSGHIQEVEEILVDCDMDAIILKINQTGAACHEGYLSCFYRKINTKNEVDIDDLKDEDLEVILERLVNPEDVY

SEQ ID NO: 11659 - protein, 614 aa, Methanobrevibacter gottschalkii
MKCIIPDTSAVIIGAITELIEKENIDYPEIIVPEAVVCELEHQANANRSEGQKGLKELQKLQELQYDGELSISFKGRRPTNHDIKYAKSGEIDSIIRDLARSEMGTLLTNDKVQAETAKAQGIPVYYFEQEYKETPLSIEKFFDDETMSIHLKENVVPMAKKGTPGHVDFKILNEKRYTYKELKKIVDEILDKAKSDPKTYLESEKEGSFVVQSREYRISIAYPPFSEALEITAVRPVVSISLNEYNLSEKLLDRIRTSAEGILISGSPGAGKSTFVQAIAKYYSSKLNKVVKTMESPRDLQLPDEITQYSPLEGSMENTADVLLLVRPDYTIYDELRKNSDFNIFADMRLAGVGMIGVVHATRPIDAIQRIASRVELGVIPSIVDTSIYIEDGKVTHVYETKMTVKVPTGMKEADLARPVIEVRDFETGELKNEIYTYGEQTIVMDMDLVNGSQNSERQKTAVEKIAEKEILRKIRKILPKKAKVDVEVTSPERANIYIPEDFIPKIIGKNGKRIAEIEESIGISLGVEVIESKPINKHPIEVDIIHTKKQLILDLGRDKGRKNFDVFIDGEYLLTATTSKKGEIKIKRGIELSDFIIEAIEMGLEITAIQKM

SEQ ID NO: 11660 - protein, 249 aa, Methanobrevibacter gottschalkii
MKIGASTLAGIEYKLENTLEFIEDLGLNYAELVHQFPNESIDVELLENFNLKYSIHTPFMDVNIASLQNQSRINAINQIKSSFKLANKIDCESVVIHPGTIPFLANKYFRSKVIDVANKSMIELGGYGEDLGVQTTFENMPQFDNMIYSNIEKLHEFLTDNNLSMTLDIGHAKHAGYSSEEMYFDSIKHIHIHDNFGDDDTHLALGEGSIDLNHIVNTLEKNNYDGIYIIEVNNYDSIKKSYEYMKKNF

SEQ ID NO: 11661 - protein, 773 aa, Methanobrevibacter gottschalkii
MTSYISHPLLKENAIESRLYQQVLAGDVLKKGNTMVVAPTALGKTIVAVLVAADRLQKVKNSKILILAPSKPLAIQHEASFKEFITLPCASITGAIKPEERVKRWEESRIISATPQTVESDLLNGRYDLSSVSLMVFDECHHGVGSYSYVYLASRYVQESKFNLILALTASPGSDKLKIKEVCENLYIQNIVVKTEEDADVKPYFNPVELDWVRVKMSSEIEKIKGYVDKSLKIRLKALKNMGIIRTVSVGKVDILKARGKVQGEIARSTNPDKDLFQAISILSAVINIQHAQELIETQGVQTFNKYVARLRKKKTKAAKSLMWDDNFSRAIKLAREAEKHGWEHPKLGEITKIIKKELGESDGQLKLTTNRFDDKNDKNASKIMVFTQYRDTLEMIHQKLEKEGIKSVKFFGQASKDGEKGLTQKQQKAIIKSFKMGEYDVLISTSVAEEGIDIPAVDLVILYEPVPSEVRMIQRRGRTGRKRTGRVKVLMTNGTRDEAYYWTSVNKESRMKNQLIDPDVLEELNASAIERMENQRNVKVIEKPKKENNFPIVYADSREGNSKVIRHLTEMEIDVKVNSMAVADYQVSDEVAIERKTAKDFVDSIIDKRLFKQARELSEEFKRPLLILEGDDLYAGMVNPNAIRGSLASIAIDFGISIIPTRNAQDTAAMIKRIAVREQNGERTPIQIRTDKKPVSMLEQQLFIVESLPNIGPVNAKNLLAHFGSVGKIINASESDLQEVEGIGKKTAENIRKVIDSKYLYFEKEIKEKRLL

SEQ ID NO: 11662 - protein, 503 aa, Methanobrevibacter gottschalkii
MNKNKTFGVIGVCGANGNLIARILKQRGYNVIGTDLSFKKDCRFAKALEGYDIEVFYGNAPEAFFKKADYIIPPASLSKDSSLFKQMGDKPIFELYDVIEMIQSEKPVFGITGTNGKTTTTTLLKKIAYDNGIKPCEHDLEGMQGNAEFIPILQSRLDGDVGIIEVGTFGVPGTIGRIVKNTGMSGGLITNITPDHLNDLGSFMDYAKVKAEFISELGLGQLIVNGQDPTIMGLLRELDFKGEVITFGVDELPDSIGMKECVCGNEIAVKEIISGCGYYFCKCGLTTPQADYIATNIDLKNRTFDLHTPTEKLTVKMGVDGLHNVYNLTGVIIAAHKFLDLPYDKILPTIASFTGVSGRMEEVAKVKGKDIFVDYAHNPAGVETVLKEFKKLFGDFTTVITVSSESGYVGDIDIFNSALKFSKFIVPASVASQKIAIEKLKSKPELNDRIFLNHIDNFEKTGTLGASEDEVRDGLRKALNLDCEMVIAIGEAATKFKNAVFDL

SEQ ID NO: 11663 - protein, 461 aa, Methanobrevibacter gottschalkii
MNYLVVGAGNASRPVARLLNYLGHDVVVTDLKDISEFKIEFQRSLIEMEKEGVRLDMANKNPSVEGFDAVYMPPTLPETAPIAQKIYESDLKILTNEEFSKIVNDLIDVDIIGITGTMGKTTTTFITTSLFKQAGYKVWSCSSLVNNLVSEAIVDGIVKGKVNECDIAIFELPHGTIGLLNKLNIKIGLLTNIAEDHLSEFGGSLEKYQKRKLLLQAMSEIFISNNSCHDIIEKVRDDAIFYALDEDVDFKGTVGDKSLTIAYGDNEFTTPFNMMSYFFENSVAAASIALTYGVNEKDIIDALKAFKGLPAHMEDVGEYNGRKVILDSAFLYDGMKITLDYFKDDSVVLFLDHFDTLSVRDKAEVGNLISEYNLKAVIASGFNEVTQAVEMDAANEILDAITNINIEKVAVETIEKAAELTFKYSEPGDVILHMGPLIAYDRLTTVDKIIKGLERGSKKYE

SEQ ID NO: 11664 - protein, 395 aa, Methanobrevibacter gottschalkii
MFLTKKEEQMCDGEFGETIRKSMDILVALGDIYGASKLVDITSAQVSGVSYKTIGDAGLEYLEDLARDGSGKATINASLNPPGTDLDNWKELGFPEEFAIKQNQIVDAYANLGIYKTCTCTPYLVGNVPRFADHVSWSESSAVAFVNSVIGARTNREGGPAALAAAIVGKTPLYGFHLEQNRKANLIVNVDCKINGADFGALGYIIGKFVGGGVPYFNLMNSPNNNDLKTLGAALASSGSVALYHMENITPEHKNAGKDDVEDIMFVSRDQINETRQKLSTTDKKPDLICLGCPHASLDEIKQVASIVQGKTIKNKLWICTSVSVKATSDRMGYTKIIEQAGGNIVCDTCMVVAPIEDMGFEVIGVNSAKAANYVPSMCGLDVVYNDVENLIQFK

SEQ ID NO: 11665 - protein, 444 aa, Methanobrevibacter gottschalkii
MLNRASEATDMLKEHIENDDVIRIISHNDADGISSAAVLANALAEEDVQFHTTIIPRLKGDIVNQLRHEKYDLFIFSDMGSPFIKEFNTYKHDVIVADHHQVNDTEAESNVVHLNPHLFGIDGSKDLCGAGSSYLTIRGLDKKHLAYFALIGAFGDMQGQNGFTGVNKLIVDDAIESGTLEIHEGLKIVSKSSEPIFKSLAYTFSPPLPKISGDFEGAREFLERMNLSYGIKFTDLEDEEKDLLKEALMSINPDIFGDCYTVPKEVPLLRDLEEYSYILDACGKNKKQGLGLSIALGERDQALDTALKLQSQYRDQIVKGLEWIKKQGAEQLNSIQYLYSEDKVLKSVMGTIASIGLSVELLDDSKPVIGLSRLHKDIKISGRTTRNMVAKGVNLGKALQDSSNNFGGTGGGHDIAAGAMVAYEFKDKFLHLVDEMVEYQLTND

SEQ ID NO: 11666 - protein, 132 aa, Methanobrevibacter gottschalkii
MARPEWVTYSDEEIEEMILKFNKEGKSTSEIGIVLRDQYGIPSVKDVTGERITQILKRNDQAGQYPEDLLNLIKRAVNIRDHLSENPKDLHSKRGLTIIESRIRRLASYYVSEGALPEGWRYNPKEAALLVK

SEQ ID NO: 11667 - protein, 183 aa, Methanobrevibacter gottschalkii
MITFITGNEHKVKEAENIFKDYDINLEHIDLGYEEPQGTLEEVAISGAEYACRKLDKPVIVEDAGLFIKALKGFPGTYSHYVQDTLGNQGILKLLADTDDRYAEFRSVIGYCAPNSEPKIFLGKVSGEIAVEERGDLGFAFDPLFYVPSLGKTFGELTTEEKNQFSHRKNSLEQFIKWYSSQE

SEQ ID NO: 11668 - protein, 529 aa, Methanobrevibacter gottschalkii
MICLGIEGTAEKTGVGIVDGDGNILAMTGNQLFPEEGGIHPRMAAEHHAEWIPKLIPQAIEESGLSYEDIDMISFSQGPGLGPGLRIVATSARSLALSLKKPIIGVNHCIAHVEVGKLDTGAVNPVSLYVSGGNSQVIAHESGRYRIFGETLDIAIGNCLDHFGRETGLGHPGGPVIEKLSKQGSYIDLPYVVKGMDFSFSGLLSAALREAKKGTPIEDICFSLQETAFSMLVEVTERALSHTQKDEVMLCGGVAANSRLREMLNTMSEEHGAKFYMPEMKLCGDNGVMIAWLGLLMFREFGSMDLSQTGIIQKFRTDEVDIPWVDNVKTYLKLSDDLIAKGAESNIVKSNYLGEKAVLKDRIPKGYRIAEIDDKIRRARTKEEAKLLSDAKCAGVKTPILYDINLEEKSILMEEIKGKMVKDVMDEDLAFKIGVEIAKLHAADIIHGDITSSNMMLQDGKLVFIDFGLGKYSNLDEDKAVDLLVLKKSLQSIDYNLASKYFDCVLVGYGDENMVNKISDIESRGRYTH

SEQ ID NO: 11669 - protein, 166 aa, Methanobrevibacter gottschalkii
MGFYNANTPEQKRVKKLTGDINISDLFKNECKTRGIAIYNAYNIQKRLLHEVEQEQLHGVKEVDDRLMELLDERGKNKVTHRYVDFISNEDSASKGIIPQKTNEQNPLPPNQIRIPPRARDGKQFLNDDELPEIEMLKKIMLQNKKIINQNKIILEQLRKLGEKDD

SEQ ID NO: 11670 - protein, 356 aa, Methanobrevibacter gottschalkii
MKKMIDGIKTYGSTELIEKLQECDDPVFLLTIGTTDTSTIPDISGAGATPELTVFTPAADAEFLVLGEVHCTRTAAETVVDGAAAPTPARLTKAALQLSNIPFVIIDAGSKVKADVSYYSFGKEHGRDIRTGEGILNPLEIIENGKDLGNELSRRHEMLIIGESIPAGTTTALGVLKALGYEANEKVSGSMPHNPHDLKSKVVDEGLRNAGIIPGEADAIQVIGAVGDPTIPAIAGLVLGSDIPIILAGGTQMAATCAVIKSIQPNFDFSRINLATTVFVAADETADLFGILNQIDSSITVHVVDPKFEDSKHEGLKNYLTGFVKEGAGAGGMMFTALVLGSSVEELREKIEKVCK

SEQ ID NO: 11671 - protein, 277 aa, Methanobrevibacter gottschalkii
MDILQAIIIGIVQGLTEFLPVSSSAHLVFAQKLVGVESSLTFDVLLHLGTLIAVLWFFRWDIIKMLKSWWLSIGDLLQGRFKQGFYDDPYKRLAWYVILATIPVGIVGVLFDDAIESLFAGALYVPAFFLFVTGTILYLSQRMNSGKINMNNMSKVEALVMGLGQACAILPGLSRSGTTIAAGLVMGLDKEFAAKFSFILSIPAIFGAFIFKLKDIGSAMDVNFLPVFIGFIVSILAGYLAIKWMLDLIKNRSLDIFAYYCWLMGIIVFMGSISHIF

SEQ ID NO: 11672 - protein, 307 aa, Methanobrevibacter gottschalkii
MAWDDTASKIWVDGDMVDWKDAKIHVLSHVVHYGTSVFEGIRAYKNENGVAVFRLKEHVQRLFDSAKIYKMEIPFTQEEIQEAILEVVRVNDLNGCYIRPIAFKGYGQLGVDPSSCPVNVVIAAWEWGSYLGEEGMANGVDIGVSSWRKPAPDTFPALAKCGANYMNSQLAKLEAIDNGYDEAIMLDYEGHVSEGSGENIFLVEDEKLFTPAMSSSNLKGITRDSIMTVARDLGYEVIEEVISRERLYSANEVFFTGTAAEVTPIRSIDHRTIGIGKRGPISEKLQTAFFEIVEAKVEDKYGWLSYI

SEQ ID NO: 11673 - protein, 275 aa, Methanobrevibacter gottschalkii
MVVKIAIIKSGNIGTSPVIDLLLDERADRPNIDVRTFGSGAKMNPEQVEDVVPKIDAFEPDFAIFISPNPGAPGPAKAREMLSEKDIPAIIVGDAPGKGKKDEMDEQGLGYIIVMSDPMIGAKREWLDPTEMAIFNSDILKVLAETGALRLVQQTIDTVIEQAEAGEIELPKLIVTAEKAAEAGGFANPYAKAKAIAAYEMAGSVANLDMKGCFMTKGFENFIPLVAAAHEIAACAAKLAQEAREIEKANDTVLRTPHMKEGNLGSKTDLISKPE

SEQ ID NO: 11674 - protein, 192 aa, Methanobrevibacter gottschalkii
MTRNINVSRKTSETDINIKMNLDGTGKYNISTGVNFFNHMLESFSKHSMIDLDVQARGDIEIDDHHTIEDVGILLGEAFNKAIGDKKGIKRMAHSIVPMDESVATIAIDISGRSYCNMDLKFKNEKIGDMTSDVVIHFFESFAGSAKLNIYGTVEGANDHHKAEAVFKAFAKSIKEAIKIEHNQIPSTKGVL

SEQ ID NO: 11675 - protein, 63 aa, Methanobrevibacter gottschalkii
MLQILVDEEKCIGCGNCAEICPKSAKIWKVKDVAHILDLRYCHVCTLCAMECPTQCIKIERNG

SEQ ID NO: 11676 - protein, 230 aa, Methanobrevibacter gottschalkii
MADVNAGVEYKINVDGNLFLLDNKKYQLLQSILDTGSLTNASKEIKVSYRTALSYIEKMESALNVKIVNTTKGGKGGGGGTSLTDEGYSILKECKKINAIMELHKDVNEIEADIVDINVEKGVMTIKMNQFEINAPLNRNYDIGDKILALISYDNIFLMLEPQSSSIRNVLKGQIIEMSLQNEIIRVKVDVGGVVLCSDITVSAEKELNLNIGTEVYVGFKAMSVATLKL

SEQ ID NO: 11677 - protein, 518 aa, Methanobrevibacter gottschalkii
MANKLIRGSLIILIGNVIFRIGGYIYRFLMAILLGPTAYGILGITLPFQGIFQTLSAGGLPPAIAKYVAEYEAIDEKDMARQTIYTALKIMVFLGLFFGVLMIFIVAPYLAYGYLGKPEALIPLQIVGLITPFSVIVGAFRGAFQGVYKMEYIVYTRAVEQLGMILFATAFVLIGLSTVGALWGTVLGYSLSVVAAVYIFKYHMGNLIPEPSDDFVFTRRDELKLATVLVKFSIPVIITAIAEMLIYNICTIVMGKFLTFDDIGFFAAADPIARLPLIISISIATTILPASSEAFKLKDIGMLQKYVSEAYKFSLLFVVPMCVGLALFAEPTLRVLYFKNPAYVAGAMALAILSIGMTFYSIFAISTSIVQGIGNPRIPMYILVGGAVVTGVLNWIMVPTLGIAGGALATSVACFLMMVPCIYFVFRLTKTKAPVVAVAKILVASAVMGIVAYFIPKSTLFLFPGIVLCMVVYFFALILVKFFQKDDIESLRKFSSKFGPFSKLINKMLNFVERIEFR

SEQ ID NO: 11678 - protein, 194 aa, Methanobrevibacter gottschalkii
MKIFGICASPRNNTTEYALSKAMRRLNEEGFETEMFTCQSKDIKPCMHCDYCLEHKKCIIQDDMGDVYKGLLTADGIILATPVQNGGISSYLSAIMDRTRALEAIDYNILRGKIGMSITVGGDRTGGQDFAHLKNITYFMIHGIIPVSGGPFGSNLGASFWSKDSLDDIKEDYYGMDSLNRTLHEFENFLNKYI

SEQ ID NO: 11679 - protein, 112 aa, Methanobrevibacter gottschalkii
MIRRKKGKFLSQGEEDPMSGTSNLVDVMLVIAVGLLIFLVISWNMQNIVFNENMDEQQKEKVKNAIKEVSQIDQGNELNDTPDISKSSGKGFTEMGKVYRDSDTGKLIMVEG

SEQ ID NO: 11680 - protein, 213 aa, Methanobrevibacter gottschalkii
MVAIPGSEFLTAALNVVSQSLQIPVIIFLLIFAVFAVFAFGGLISDYRTRIKLNRDYKEKLIFSLVNSKTVDELKHAVDGSEIYNSQKEVLLKIADAHSLSCESRESWALNLIEEEEVVMAKSLEKIDIVTRIGPTLGLMGTLIPMGPGLAALGNGDVSTLAAAIIVAFDTTVVGIGSGAVAYVISKIRRRWYEEYSSNLQLFVNAVLENLND

SEQ ID NO: 11681 - protein, 227 aa, Methanobrevibacter gottschalkii
MSFSLLWSVGFAVSIVVFAISIGLVINSKINSNKNLVKLVFVLFISTLILIYSICIFKIQLNSIIGSYNYVLLFLIAFLLMFIGYIIIKENGCGRTFINVLLLSYLSFILVMLICIGSKESIFGLDDLQISLLATLLFNSLILVVFFACRKLKLIDRSYRSFGSLYLILGIYCLMISLLLPNIISLNMGDMKPINIVSIDSIAFIFILLIVIMVLGLLYYKRNTLLK

SEQ ID NO: 11682 - protein, 171 aa, Methanobrevibacter gottschalkii
MECKKLALLISVIFIMSFAASGVFAHPGHGSEYVEEVTSDDVGSSSNSGSSSGSSGSSSNSGGSTVPASSSSSSSSSSRSSSYSSSDPYSSSSSSSGAHDSNHDSYQGSSSNSVVKDNSSLKDANKTNENLTNDSGEIDNDELFTVNNILLLIIVLFCGFFISVILFKLFS

SEQ ID NO: 11683 - protein, 976 aa, Methanobrevibacter gottschalkii
MGGKNINKHLISLLFFCILVLLMAGGVYAEDIGNSDVFENPISTDIQQDDLSEDDLDISNLNVKVNYQYADDNGKINPTIKVNDKHIISKEFNSSYQNYNVIINSTNIADKLNISISAPGYLTQYKIVTPNMGKSILANVTFNMESSESYKLGRDVTAEADKLLDFKNADDVLAITTAGVAKYNGKTSEDAMEAMVNYGKISYSNILMLRQSAIDPIDFAFIVKKGNELKAIIFQNASTKYSYLGTISENMTKAQWNKYYKSLVGENSWAFASLANGWAAGVSREILQEAAFHGHICEGTLGGYSIIQALLKYYPPEQENNPGGIGSPADITAYKVLGVPGGSDDDAALFFLDDTIGKTGYAGMNTTNTGATENMIGFIKWNSKQKTGDLIIMSFNSTKLKKLFKKETKINADAGSLEELKYCSWWINKINNNPEKLVDFLYEFTGLNQEQYNYLMGTTENITYDGEPAEYGLDGHGLDLNYILSLNLPTAKRTINSVAHAKLTDAELKQIGIDAANKAKKIFNEELGVEIDRDDIDFLALTDAGYAFLNGQDTVVVRDGLHEVLGGTLYSQNLLSLHQAVWKPLWFAFAIRYPDSDLVDMIYLRYNPDTKDFFVGTLDGNRVVDIGFETLNNSDKLKAIAKSFVPDGNWFNIQSIVNAWNEHPLFDQMATFLYHAHVCPGVQPGFFITDYIQEKYPLGENESYTYIASSIYCKDDSLTYLLDLSPGLGTFYVQKLPKNETENGISQGVLVVWDKNLKIGKAVIVNFDDWGTIDTSMYVTSEAKRASQIKAYIDIYGNRNNPNVKSKPIVSTVNEKWITEEQFNMLKQGAGDDFNVLSYLKSLDDITKEDLLKSINQNSNSNSNSNSKPNINPNSNSNSNSNSSSNAIASHTNSNPSSSGSVGTSGAVVSSAYVGEFTKDAESEDSQNGPDDAKSYEVSKSPAAKSADSNSLIYALIGVLAIGILLGVGYMKRDKK

SEQ ID NO: 11684 - protein, 207 aa, Methanobrevibacter gottschalkii
MHLPDGIISFEQAIIYWTITLIIVSLFFYKFSNDENKEKRIISIALFSVFTIGITSLSIPSPLGVPIHFFIIPLIAMLLGPFSSTIVSFVTLIMQALTLNMGGITSLGANFIVIGFILSVATYGFYKLFLNLNKKFAIFGSTVIGIIIATFGQIGILLISGAMNLDVLLSTLLPFYVFISFIEGFANVIIITAIEKIKPEIIEINKI

SEQ ID NO: 11685 - protein, 160 aa, Methanobrevibacter gottschalkii
MKYLKISILLLILLLGISTVSSHGVDVTADTMVVANDSNGKMVKSIAESNNINISVYKFTSEDEVTHILEHSINNTNKRILFTAYQETANDFLKKHPDMSNRIIVIDNVNDNTTLEGLQNIMNVPVENVNSENNFGLPLTIGIIIGLLIGIGCGAYIMKR

SEQ ID NO: 11686 - protein, 279 aa, Methanobrevibacter gottschalkii
MKIGKGIVKKYSRKYNRTLKNGEQKKYTTEQIQITIPKNEDIYYNQEEVLIIPNSEIENFKSREEENEFLKIANYFYVEEVKQLNEQMDENLNSTSEYEKEIEELKAKITSLKDIEDKYNSIKKDNIDQLKQENENIRDKHSKLIIENENLKNKFVNIKTENENLKSKYSSIKEENRNLKIKCSNLKDEHSTIKDSYNQVSTKYDQLKQENLNTKTGYAEIYEINEELEKDYDTLRLEYNDLVDKINSLEEELYKIKAMKDHDTYIANKVKEFILKSGN

SEQ ID NO: 11687 - protein, 93 aa, Methanobrevibacter gottschalkii
MGFCNSCGRPIVKEDYGTNKDGSLNPDFCKDCYQNGEYTEPDITLAEMITRKTKEMMEKNPRLPETQATGITAVFIPGLKRWNPEFQDDYKTL

SEQ ID NO: 11688 - protein, 416 aa, Methanobrevibacter gottschalkii
MDPMYKIGEALIGDGPELAHIDLLIGDKFGPIGQAFANGLSNLSVGHTPLTSVIRPNLMTKPATLIIPKVTVGDLDDAGKIFGPAQTAVARAVADAVEDGYIPKEIVEDIVINVSVFIDPSAKDYRKIYQYNYGATKLAIRRAMEDYPSIEKVLAEKDRGTHPIMGFKVKKLWSPPYLQVALDLDNEDAMERIINDLPDNDRILLEAGTPLVKKFGVGIIGKIRALRPDAFIIADLKTLDVGRVEVKMAADETADAVAISGLGTVESIAKAIHETQKQGIYSILDMMNVAGFEEKLAKLPKDLKPDIVLLHRNVDMETYRAEHGEDTSDMTEWGNIKDIKSMLGDKGLVAVAGGIRPNNAEEAIEKGANIIIAGRYIIGSKDVRRAAQDFLEHFEPDPDNMRLAMDEDENIEVKDD

SEQ ID NO: 11689 - protein, 608 aa, Methanobrevibacter gottschalkii
MRILLIHSDYLNYNVKNKTPVAEDIEEAKKEGSFDDSLVVFTAVEKDDENNPEGIVKNLVSEVKKTNDQVKAENIVLYPYAHLSSSLSSPKVAIQILKDVEEALLAEDFNVKRVPFGWYKAFEISCKGHPLSELSRTITADDAEKAKVERKPSKWQILEGNKITQIEDFEFDNKTFKQLVDYELGQGASDEGEPPHVKLMREKEICDYEPASDVGNLRWYPKGRLIRDLLADYVYNLTVDHGAMPIETPIFYDLDNEAIYQHAYKFGERQYRTDTKKNLMLRFACCFGAFRVMSDSYLTWKNLPAKVYELSTYSFRFEKKGEVVGLKRLRAFTMPDFHSFCADVPASLEEFSNQTEMCMQTGNDLNLDFEVIFRATQDFFDEHEEWMYEVAEKFGKPVLLEILPERHHYWVCKIDLANIDALGRPIENPTVQIDVESGKRFDISYLGEDGEQHNPTILHCSPTGSIERVLCAMLEKTAIELNEKSPMLPTWLSPIQARILTVGESHKEFAEELYSKINASNIRVDIDDRDESVGKKIRNASKEWIPYIFVVGDKEVESGKFQVTVRETGEKVDMTVDELINEINEKCEGKPFRRLPLPKDISRRINFQ

SEQ ID NO: 11690 - protein, 451 aa, Methanobrevibacter gottschalkii
MRIILAGTGSAVGKTTIATGIMKALSEKYNVQPFKVGPDYIDPSYHTLATENISRNLDSFFMKEGQVRDSYLKGMEGKDIAIIEGVRGLFEGIDSVNDIGSTASIAKSLKAPVILIINSRSLVKSAAAIVLGFKSLDPEINIAGVILNKVKNKAHYLKTKKSIEEITNTEVIGGIIRDDNISIEQRHLGLVPARERESSLKFIELWSEVIKNSIDLDRLIEIAKTAPRITSNITPIWNKLNKQQVKIGVAYDEVFNFYYKENIESLEANNAKIKYFSPLKDEELPDVDGIYIGGGYPELFSKELNANQNMLSQIKNFHMEDRPIFAECGGLMYLMNSIHEDAVVNIYPYKSILTDRVQALKYTIAEVKEDNIISKKGEKFNGHEFHYSKVLVNDNNIKNKLAFEILRGKGSYNNQDGFMERNTLASYVHTHVAAMPNFGGNFCISSLEIGG

SEQ ID NO: 11691 - protein, 353 aa, Methanobrevibacter gottschalkii
MNIRKIDFFNPLIVVVAIVVFLLMGYAGSFDYRFEDPLNMNVFLTIIFACIVFATGFLVMENKIIVDKTKEINFISERLLIILVLIALILQTLNIILIGGIPLFNSVLKSNSTTNIWRIAYPLFLIMINLLLAKYYNKKYLILVALGALIFGLNGYRTSVLGILGSSFITLYYLNRISKKIGILFIAIIAIGFMAIGYIASQSIANQHWTLNPGQLVLYRAAFTLEVFEKIIPLAGSTNGHILSMIFSSGSPRTFIGEYVLHYNVCLTSTLFGPVTLDFGLIGLAIQMLFMGVFIGIIYKLKEGIGVGVYSIILTHTLIWIETGPTDIMIWFLYFLGLILIIINHNYIKLNKN

SEQ ID NO: 11692 - protein, 300 aa, Methanobrevibacter gottschalkii
MEKPQLINFIAKVMEDSGFKVYKNFKTSQRVIDIYAILPTTIGDFGVVVACKNYDKDFKIGVDVLREMEEVQQSIKASKVTIVSSSYFSDQAKNYALRKNIKLVDRDNLLELAKKYQDRTSQTTLDNTPYDGGASQYIEDEYPEYTYDASDMEYLMRRREQNPAVYKNTLYRQIDEDRHTGFSSILNRGSSRNSSLSGVTNLYNYQSRKSTFGQDSLLFNLVKNPIVLIILVVAVSYIISYIAGNLLKVDAGISGLIEMIVALFLSYGLSLYTDRNRDFIVKGTFIFFISLIILIILIFV

SEQ ID NO: 11693 - protein, 258 aa, Methanobrevibacter gottschalkii
MNALISNDDGITASGILASKKAMENLCDTYVVAPETQQSGIGHALTLFEPLRVNEYTLRDGSMGYGVNGTPTDAVTIGLFEILDKKPDIMISGINTGFNIGKAELTTSGTLGAAMEAASFGIPTIAISQEVTQDDVKFENGKVEVDFDFAVKMLNKLAKIVLKKGLPEGIDLLNVNIPVNPSDDEFEVVELGNRMYSPVVEQRLDPRGKPYYWIDGEPYEFNEPGSDGYELKIKQKTTITPLKIDLTGDMSLIKEWLK

SEQ ID NO: 11694 - protein, 47 aa, Methanobrevibacter gottschalkii
MAINQLESNLEAITRTIAQLKRDGCTDEKILNELREERDKILKDLNL

SEQ ID NO: 11695 - protein, 67 aa, Methanobrevibacter gottschalkii
MNQDKDNVNKMFKQFKNKYVTVDLRGNYQSEGKIIAIDNYLNIILENENGLETVKGGNIIFISVKEE

SEQ ID NO: 11696 - protein, 335 aa, Methanobrevibacter gottschalkii
MVFIGMDHGTTGISFCIMSDDGEVLDVFKLGREESKKGLVSATEEITKRVDLDSVKLMAITYAMGDGINQILPTDKVEDRGILSIDGAGKVTGGGTSVFSELESLDIDSIMIPGLHKDSNSLNELFRAAYSHQASPEKVSICYNGLKETGWSNFIVADISSNSVDILIENGKIKGAMDACLGAMGVVHGPIDLKMIRDIDEGKSSANDCFSHAGAIKIAGISGKVANVKDVLLEKYRNGDEKAKLAIDTLIMTVAMEIAGLDVICENEIEGIVLTGSIGSAIEPFNFEDEINKYFKNKYHLKVISKESGAIGAAQIAMDVYNGKEEILGIEVNIS

SEQ ID NO: 11697 - protein, 330 aa, Methanobrevibacter gottschalkii
MKMYYDADVNTDALKGKTIAVIGYGSQGRAQSRNMADSGANVIVGVRKNGSSWNLVQEDGMTVKTIEDAAKEADIIHILLPDEIQEKVYKEQIAPYVESGNTISFSHGYNIHFGLIDPAADVNIVMFAPKGPGSMVRRTYEEGFGIPGLVAVERDATGDALQLALGMAKACGLTKAGVLETTFKEETETDLFGEQTVLCGGITELINAGFTTLVEAGYQPEIAYFETCHEVKLIVDLIYEKGFAGMWNDVSNTAEYGGLTRGKTIITDEAKEGMKVALKQIQDGTFKKQFADENATDGANLKEMRAAEGQKEIEIVGERLRKACGLQKDD

SEQ ID NO: 11698 - protein, 175 aa, Methanobrevibacter gottschalkii
MSILENVLEDNKKFVENFEGEEMSHHAQKNLAILTCMDCRLINFFEPALGLKRGDAKIVRNAGNSIVGEDAIRSIGAALYNLGAEEVLVVGHTECGMAGADVEALKEKMLARGIKEEDIAKYDLSKWIGGFDDEEENIKNVVEKIKNHPLIPDVPVHGLILDVVTGELKVLVDGY

SEQ ID NO: 11699 - protein, 161 aa, Methanobrevibacter gottschalkii
MNKEYHVISTLVEDRPGVLQKIAGLFNRRGFNIDSITVGASEVEGLSRMVISVNADKQGLEQVTKQLNKLVDVIKIKDITQNAVNRELCLIKVHIPNEKARAEIMQYTNIFRAKIVDVSEENLIIELTGDIGKINAFISLIKGYGIKTISRTGLTAMARGV

SEQ ID NO: 11700 - protein, 565 aa, Methanobrevibacter gottschalkii
MRGGEAIIQSLKNMGVKTIFGYPGGQTIPFYDMLYDSDMEHILVRHEQCAAHAADGYARASGRVGVCLATSGPGATNLVTGIATAYMDSSPIVAITGQVPTHLIGNDAFQEADIIGITMPITKHSFQPKNPNYIPSMIKSGFEIAASGRPGPVVIDVPKEVQEGELSDFDDSLIDTPGYNPTTKGNLRQIRKACNLIKDAKKPMILAGAGVIISGACCELKKLAHTINAPVMTSLLGKGAIDETDDLALGMLGMHGRKVSNDYINESDLLIAIGVRFSDRTTGRLDSFAPDTKVIHIDIDPAEIGKNVDVDLPIVGDAHNVLTSLNNYLKEYKVSRDVTEWANMIKEKKQKLRPRVSYSDVPLKPQTVIKEIAEALTSDSILTTDVGQNQMWAAHFFETQKPRKFISSGGLGTMGFGFPAAIGAKVACPEYPVVSLNGDGGFLMVCQELATIREYDLPVIAIVLENRTLGMVYQWQSLLYNGRHSQTLLGNSPDFVKLAESFGVNGVRITEPGETKKEVASAIKDNEPVLLNIVIDSEEALPMLPPGAGISEMIGEYKLEKDVIR

SEQ ID NO: 11701 - protein, 110 aa, Methanobrevibacter gottschalkii
MELTKYICHRKPERSFHIKNHQFPVCARCCGFYTGLIVYLICYQFYNHNYDLNMLLISMILMIPVAIDGFTQYFSLRESKNNLRFITGLIGGIGLIIFLKIIIRWILYVL

SEQ ID NO: 11702 - protein, 302 aa, Methanobrevibacter gottschalkii
MGSLLSVTDIKDDVKYILELASKIKAGEIEEKPLKDKTLAMIFQKSSTRTRVSFDVGMYQLGGRAIFLSSNDLQMGRGEPISDTAKVLSRFVDGIMIRAIEHDDVIELAKHSDVPVISGLTNLEHPCQALADMLTIKEHFGVWKGKKICFVGDGNNVCNSLLLIAPLLGMNMSVACPKGYEPSETILKTAKEYAMENNTEIIVSDDIGVALENVDVVYTDVWVSMGDEAETKQREIDFAPFQVNSDLMSIANDEAIFMHCLPAIRGQEVTGDVIDGPKSVIFDEAENRMHAQKAVLYYYMKD

SEQ ID NO: 11703 - protein, 277 aa, Methanobrevibacter gottschalkii
MNNMPKDLDKIKFELSEKLEFLKENAESEEEIEKLNNFASYLADKYSQIDDEDIKTEKLNRINTGLSYYQRFKKALEKNIDIDPGRLMGLTDGIFGMVMTLLVFGIALPELQITYYSTFLSFFSSLAPTIGVTVVSFVLLSSFWIYHHEFIKVNNLNIPYLWLNVFFLICISFVPFTTSLIGHYSHFFLSEVIFGINILLTIISFLLMYHYANSMHFLENAPSKKERNYVYQTFGMIMGLTIVVNLLDFHVSSYFIYLFLLVPVISTIRDIRFKMNE

SEQ ID NO: 11704 - protein, 436 aa, Methanobrevibacter gottschalkii
MKVLVVGTGAREHAIADALKEDVELYCYMSKVNPGMSKIAEFKQGDEGEVEKVAEYAVEKDIDIAFIGPEAPLGKGIVDELQKNGISCVGPTQSAARIETDKSFMRKLFEDYNIDGSLVYKVFDNSADVSAFLDEFERDVVVKPVGLTGGKGVKIVGDHLKDNEEAKEYSCEVIDNVMGGFAQVIIEERLIGEEFTIQAFCDGEHLAPMPAAQDHPHAFEGDVGAITGGMGSYSDVGGLLPFLTQNDYDDAVKIMESTLKAIAKEAEPYKGILYGQFMLTADGPKLIEYNARFGDPEAMNVLPLLKTPLIDVCQAIVDGNLDKVEFKDKASVCKYVVPDGYPETEFAGDLVDVDEESIEKLGAKVFYAAVSAEDDGIHLSGSRALGIVASGNSIEEAEKIAEKACEFVKGNVYHRRDVGTTELVNKRVEHMKEILS

SEQ ID NO: 11705 - protein, 454 aa, Methanobrevibacter gottschalkii
MEKNSNIEMITGDPKKAINKLSIPIIASMFLIFANNIIDSVWVAGLGADPLAALGYVTPLFMVLIGIGNGIGAGGNSLISRYIGAEKRQSANNAAIHNLILGIILSIAVSIILLTFLKPLLIVMGASAVLKYAMDYGIVIFAFSFAMLLPPIFGGAFRAEGDVKRATIPLAISAITNMIIDPIFIYTFNLGVAGAAWATVIAHIFAVAAMLYWMLVKKDTYLKYNRESFKNDLTMYKDILVVGIPASLEQLILSALTIVVNFMLTIVSGPVAVAVYTAGWRIINIGMLPAIGVGTAAISVSGVAYGARKYENLRITARYAVKVALIASIIVCIILNIFANQIAFIFSYSESSAQLEPLIASFLQIMCLFILYVPFGASAGNVFQGVGKGSISFILTSFREFVLVLIFAYVLGFTLNMGEFGIYCGMLLGGGIGSLICYICIELYINRLMRSIES

SEQ ID NO: 11706 - protein, 138 aa, Methanobrevibacter gottschalkii
MKFNENKPSAAFISIIHKEHAKYINENVKDEDLSFGLHPILIIIYENEGINQEKLAEVLHLNESTITRNLKKLEDKGFIERIKNKRKKIIKLTSKGRKTAQKVINYDYKWDEKLKQNLTEEEYANFLEALRTICEELL

SEQ ID NO: 11707 - protein, 177 aa, Methanobrevibacter gottschalkii
MNQTINDLKSRRSIRKFKDKQISDEDLKTILETGTYAPTARGMQSPKIVVIQNPETIKELSKWNRSYFPVDVPEDMDPFYGAKTILIVLADSKMPTFVEDGASVLAVLVNAAHAIGVGSCWIHRARDEFSSEKGKALLKKWGIPESYEGIGHVALGYPDMESPKPLPRKEDYIHYVD

SEQ ID NO: 11708 - protein, 566 aa, Methanobrevibacter gottschalkii
MYFEIEKQAIDAINKALDQYDVEVDRNFKLEFPPNPNLGDLASTIAFALTKKLKTSPPEVAKGLVEKIEVPEIFSKVQNFGPYVNFFIDYSKFSKLLLEKVDENYGQLPAYGEKIVLEHTSANPNGPLHIGHIRNSIFGDSLSRLLKLAGRDVITQYYVNDMGRQIAIIVCGITECGLKIEDYDGDKIDHKIGKLYFDANKAVEEDEALNDKVDELIRKYEEGSDKKLNKIFEDVVAKCISGMKESLLRMNIVHDDFVWEGQFVRSGEVNNLVNYIQKEGFTREEDVLFIDLTDFNIDKEFVLRRSNGTSLYSTRDLAYHKYKATLGDTVLDILGSDHKLAAKQIKVIFEEILRQKAPEVIFYEFITLPEGSMSTRKGKFVSVDELINEAVSRAHDEIKSRNPELNEEEIAPMAEDIGVGAIRFFIAKLSPEKHLTFKWDEALSFERGCASIQYAHARACKLLAKSGKDINSLTVSDDWIPNEDEQELVRQIAKFPQVVEDCANKQRVHNITQYCQDLAGSFNKFYKSQQVIGSDLENTRLILVDRAKTTIKNALDILGVVAPEKM

SEQ ID NO: 11709 - protein, 141 aa, Methanobrevibacter gottschalkii
MEIDYKEIASYVVILIIVLIAAQHLNVVVSGSMEPAFYRGDIVLVEKADFFGIHEFNASDVKVGDVVVYDAAWYNQPVIHRIINITDINGTTMYVIKGDNNNAPDPYYVTSSQIKEKVVTVDDNLVVIPKIGYLSLWLRGL

SEQ ID NO: 11710 - protein, 424 aa, Methanobrevibacter gottschalkii
MNSEELFNESKNYFPGGVNSPVRAFKPYPFFVKNAGGSKLTDEDGKSYIDYCLAYGPLILGHANPKVVREVSNQLTIGTAYGTPTENEITLAKEVIDRIPSAEMVRFCNSGTEATMSAIRLARGFTGRDKIVKFEGAYHGAHDYVLVKGGSGAATLPDSAGIPVDTTKNTLSVPFNDEEILTDLIEREGDNIACIIMEVVMGNVGCIEPKPGFLEFVRKITEENNIVLIFDEVITGFRASRGGAQEYYGVTPDLTTLGKIVGGGLPMGAFCGKKEIMELIAPNGPVYQAGTFSGNPISVQAGISTLTQLNNAFYKELERKGNFLRGNIQSIIDDEEYNVQPVGFSSMFQIYFNPAPVYNYADAQESDRKKFLRYFKSLLKQGVFIPPSQFECNFISNAHSMEDLQKTSDAIEISLHEAFKKRRR

SEQ ID NO: 11711 - protein, 209 aa, Methanobrevibacter gottschalkii
MSDKMFMGASTKQGLDIANKSREIIRNLIGDDVKDLNPAERDIVERIVHSTADPEYAKLVKISPDFVDAAMASLKNKETILTDINMVKYGITRYEGEVECYIKNKEVIKIAKENQITRAAAAMRYAADNGFEGIVVSGNAPTAVFEAMDLYEKGEMNLKAIVGVPVGFVGAADSKEALHNSNIPNIIVEGPKGGTPIAVACVNSLIQHL

SEQ ID NO: 11712 - protein, 401 aa, Methanobrevibacter gottschalkii
MEEYEIAVIGGGPAGIMAAIAASQNSSSVILLEKNPKLGRKLLTTGGGRCNITNAKPIRELLKFYPQKNFLKHAFYTLSNEKLLSFFENKGLKFIEEANNRIFPETEKSIDILKILTDYLEDIIISYNFEVKSIDEDFVINDKLKADKIIIATGGITYPKTGCSIKNYSLTKQPITDIKYGLSPLITKKDLSDIAGITLYDVIVSYKKTKVKGNVLISHFGLTGPAIIDLSNFISESISYNLLENDNCDINFEIAIDLCPDFSREKLQEKFNQDFQVKGKTMIKNYLKLFLTNNFIDFFLDEINLDRETQLSRINKKSKNRLIKNLKSFNFKIKGFNNDLAKITVGGIDLNNVNPKTMQSTIIPNLYFAGEVLDLHGPTGGYNLKIAFSTGYLAGLSASEK

SEQ ID NO: 11713 - protein, 439 aa, Methanobrevibacter gottschalkii
MQGLLNDWRRTHYAKETTPDIAGSDVTIMGWVHEIRDLGGIIFVVIRDVTGRVQLTAPSKKVEAEILEDIRKFRKESVVAVRGLVQEAPKAPNGVEIIPNEIKVLNLSNQPLPMDPTEKVQAGIDTRLDSRFIDLRKENVSAIFKIKGQMFHTIRDYFYNNGFHEINTPKLVASATEGGTELFPITYFEKEAFLGQSPQLYKQMMMGAGMDKVFEIGQIFRAEEHDTLRHLNEAISIDAEASFMDDVDVMKVLNDMLINVLTDVNDKCSDELSILGYELDVPKGNFPVVTYDEAVDIVNSRGVEMEWGEDLSREAEKALGDSMGGFYFLTEWPSAIKPFYVMPQEGDEKYSHAFDLMYNNLELSSGATRVHQHDLLVKQIEERGLNPDGFGSYLKAFEYGMPPHAGWGLGADRLTMVLTGSENIRECVLFPRDRHRLTP

SEQ ID NO: 11714 - protein, 427 aa, Methanobrevibacter gottschalkii
MEILKYSDIDLVETIKRSEEDVNKVLGIVSDILDNVKNNHDLAIREYTEKFDGVTIENLKVSEDEIKEAYDTLDDSLLVALKQAASNIEKFHKKQIPHEWEIEVNPGIVAGQIVRPINSAGCYIPGGRAAYPSSILMTVIPAKIAGVKKVVCVTPPQKDGKILDAILVAADIAGANEIYKVGGAQAIAGLAYGTESIPQVEKIVGPGNIFVTAAKKLVYGQVDIEFPAGPSEVLILADETANPEFLATDILAQAEHDPNASCFLVTDSEKLAIEVDEFVKKLTEVAPRREIIEKSLSKSGKIIITNTFEEAIYITNEYAPEHLIISTKDDDDTLSHINNAGSIFLGSYSPVAAGDYGSGTNHVLPTGGGAKMYSGLSTEAFIKKPTVQRITKEGLKELSKTSVPIAEYEGFFEHANSFKTRLKDDWK

SEQ ID NO: 11715 - protein, 549 aa, Methanobrevibacter gottschalkii
MKSDSVKKGIQRAPHRSLLRACGLDDDDFKKPFIGIANSFTDIVPGHIHLRELVEFVKEGIIAAGGIPFEFDTMAICDGISMNHEGMKYSLPSREIIAATVESMTKGHAFDGLVLIPSCDKVVPGMIMGATRVNVPSIVVTGGPMISGEYKGKSADLITVFEAVGAHSAGKMSEEEVYELEKCACPGAGSCSGLFTANTMACITETLGLSLPTCATTHARTEENNQIALDSGKQIVKLVEENIKPSDILTQESFNNAIAVDMALGGSSNTALHIPAIASEVKDLNVNLELFDEISRNVPHIALISPAGEDSMMDLHLAGGIQAVLKTLGDKIDINQLTVTGKTIKENLETVENKNTDVIHTLDNPVHEDGGIAILKGNLAPNGSVVKKGAVADHLMHLKGPAKVYDCEEDVTKAIFNHEIKEGDIVVIRYEGPKGGPGMREMLNPTSALAGMNIKDVGLITDGRFSGGTRGPCIGHVSPEAMENGPIAAIENGDIIEIDINNRSINVELSDDEIEKRLKSVKHPERELDGWLRLYQKLVHSADTGAILR

SEQ ID NO: 11716 - protein, 370 aa, Methanobrevibacter gottschalkii
MSTLEKMKILTDSAQYDLCDYVSHHKSSQINLPGIYEAIGHNGCKIPLFKTLMTNKCKNDCKYCINQSKRNFTRLELSPEELARAFLGYYNRGLVNGLFLSSGISDDVDSTMEKQIETVSLLRKKYGYDDYIHLKVIPGASRDSIKRAMALANRVSINIEAATSSGLAELSSTKDYNKDILKRLSWINSLQHKSTTYPNSTHTTQLIIGANNETDKEILSRMEKIYKKSDLKRTYFSAFTPIEETEFKNKEACSTDRTSKLYNADTLINSYKYNVKELIFDESDKLSLTQDPKILAAKNMNIFPVEINSAPIRELIRVPGIGVKSAHEIVSIRKKKPFTHKEQLQELGVITNRADPYIKINGEYQTTFNF

SEQ ID NO: 11717 - protein, 206 aa, Methanobrevibacter gottschalkii
MARKSLGKGLASLIPDFYNEDFDSNSTQSLEDIMNETENNEEIKDSEEKNAPKEKSSNDVNNNSNEEEISKDETLEESGNDETQKNIFEEIEEEKNNQEKSIDSNETTLKEDVSENIKESENISIQNNEKNTSTTQETKIQEHIVEVKEIVDKNPRITLWSSRSSAVFRYLRKTEPEFSISKEASNLIEEAVAKKYPEIWALFDDY

SEQ ID NO: 11718 - protein, 280 aa, Methanobrevibacter gottschalkii
MSEIIAVMNQKGGCGKTTTVVNTATSLAVMGKSVLVVDMDPQANATTSFGIDKTKIENTIYDALIGDISVKKATIPTFIKNLFIIPSNISLSGAGMELSRRENYHIVLQETLKDVVPLFDYIFIDLPPSLGVITVNALVASDSVLIPIQAEYYALEGVADLINTIKLVEKRLRSPTPIKGILLTLFDKRTRLSKDVRKELKNYFGETNLLFKTIIPRNIRLAEAPSFGKPCLIYDPDSTGTKSYLKLAKEIIQRDENVQLNIAKTNIDKVKKDSEVAGGK

SEQ ID NO: 11719 - protein, 433 aa, Methanobrevibacter gottschalkii
MDYKITLNSNEVPKKWYNINADLPVELPMPKNSEGNDQISSLQKAFTKVGLEQEFSTERFIKIPKDVRKLYMQMGRPSPLFRATKLEEYLDTPAKIYYKREDTSPTGSHKLNSAIPQAYFAKKEGIERLTTETGAGQWGTALSLACNLLDLECTVYMVKVSFQQKPDRKSIMNIYNGNVFASPSENTKVGREILAQNPNHPGSLGVAISEAMEEALENEKVKYTLGSVLNHVMLHQTIIGQELKKQLEIAGEEPDIMIACAGGGSNFAGSLFPFIKDKIADKSDTQFIAVEPSACPTLTKGSYEYDFGDVNGFTPMLKMFTLGHDFVAPSVHAGGLRYHGMSPQVSLLTKEGYIEPRSAHQRDVFEAGITFARNEGVLPAPETTHAIKVAIDEALKCKQTGEEKTIVMNFSGHGMLDLKGYASYFEGSMPNSK

SEQ ID NO: 11720 - protein, 357 aa, Methanobrevibacter gottschalkii
MYTLIINNIKNNKKIMRILAIDVGTGTQDIMIYDTEKELENSIKLVLPSPHLFISQQIRDIENDIYFEGEIMGGGKIKKSIIEHIEKGYEVVMEPTCAKTIRDNLEQVKSFGIKIADESKKYRNYTKIKMGDINITKLSKLLLDYDLEFDFDKIAIAVQDHGYSENMGDRDFRFEKIREKISKPMSPLEFGFTDDLPEYYTRMNAVRRIVKHEGIDEIPLIMDTKFASIAGMCFDEVAEKLESYIVIDIGNGHTTAASIDEGKIQGVFEHHTSSLTGESLERYIKRLADGIITNEEVYNDHGHGAHVLNPISEIEKVIVSGPKRELIEKTNLDWHHAAPGGDVMMTGTVGLIKTILG

SEQ ID NO: 11721 - protein, 219 aa, Methanobrevibacter gottschalkii
MFKMDSHIHSEYSSDSNSKIDDILKKANKENINIISISDHDTVDGTSEVMRKTRNTDILAIPSIEISSSKGHILGFGCEEKIPKDLPPQETIDRIHDLGGLAIIPHPYCFYRHGLLCKSDNEKLKIDAIETKNARFIVGYCNRKARKLSIKKNLPALGASDSHYWKFVGDCYSLIDCEKDIDSVLKAILKGKVKACGKGTSNILLSKYLLEKNLLKKFK

SEQ ID NO: 11722 - protein, 91 aa, Methanobrevibacter gottschalkii
MENNTIFVGSKPVMNYVLAVVTQFNEGSDSVVLRARGKAISRAVDAAEIVRNRFVPASDVTDIKISTEEVENYNKEKTNVSIIEILIEKGE

SEQ ID NO: 11723 - protein, 513 aa, Methanobrevibacter gottschalkii
MNAKNIETLKKENMNLAEKIYIFDTTLRDGEQTPGVALTVDEKIQIAQKLNNLGVDKIEVGFPASSPGEMESAKRIKNRELDSRLVGLARSLTGDIDAVIDADLDYIHTFIGTSPLHRDYKLKKSKEDIIHSSVVAIDYAKDHGLTVEFSAEDATRTERDFLFEIFNEVVDAGADFLDIPDTVGVLTPIVTRELITDIKNNFKTPISVHFHNDFGLATANTLTAIECGANQAHVTINGLGERTGNCSLEELVMALKSAYNIDLGLDTTRLYSLSNLVGRLTGVKMPVNKPIVGDNAFAHESGIHVHGILNNASTYEPMSPEMVGHSRKIVLGKHTGANAVKAKLKEHHIDLNEKQFDKVFKNIKSLGDNGKCVTDDDLIAIAITELASARETPIVIKGLSISMGANVSPTATVKLEIDGVEKETASTGVGPVDAALNAIRELIQDTMDIELEEYNLEAITGGTDALAEVFVISSDSDGNKSTGRSTNQDIVMASILAVLDSINKLLLINRSIL

SEQ ID NO: 11724 - protein, 401 aa, Methanobrevibacter gottschalkii
MYKKLFIGILICLLVISPIAAANWNSFAGGVDHNAFREESSDFVTNLWTFNMESPIHSSPAVYKDFIYVVSTQGILKVINMETGEKDWDFDLESNTNSSPIINSNKLFIGTEDGIKAININNHNEIWDYDCDDVESTPFLYKDTIYFGSDDGHLYGLDKDNGKVVFNKKLDGELKSSPIVVDDTIYIGSTNCKLYSIGTDKDKNWEFTTGDEILSSPSFINDTIVFGSNDGNIYCLNESDGALNWKVDLNNKVLSSPTVDNHDNNIFIGSDEGNLTCIDNRDGTIKWSHSVGGKIQSTPAIKDNLVVFGSDNGNLYVLNKYTGSEEFTYNPGTILFNSAINSSPVINGNSLIFGDDSGNVYSLNIDKHEVPGSTQMYFSISVLIIIVIVALVIVHKVKGRK

SEQ ID NO: 11725 - protein, 384 aa, Methanobrevibacter gottschalkii
MLEFKKFWWMIKKEVLSLKRHPARLVSIIAFPIIMILLFGYGMGGEMTDLPILVVSQSHGNLTDLTLDTIKTTETYKVIEVIDDLDEGKKRVDSGEVKAAIILPSDYDDNSTQQKSVTLYLDSSDQMASQILDSSTQAIFSRLSNMVASQTNVENKDANINPSISNSFNNFKDDISLHINRIYGNIKYIDFLVPAILGMTVMMSCMMGMGATIAGERETGELARLFMTPTSVSTVIGGKIAAKLLIELLRALILIFMAVLLFNVSIKGGILQTFIVLVVGALCFVGFGMMLSARTSTQEDYVQMVMPFSMPMMFISGVFYPIETMPWILQKLAYIFPLTYLNDAMRGIMLKGQTLGDVWLDLAVLLGFTLLFFIIGVKRFNRDV

SEQ ID NO: 11726 - protein, 348 aa, Methanobrevibacter gottschalkii
MKNAIETNNLTKVYGNFTAVNSLNLKIPNNSIFGMLGPNGAGKTTTIKMLTCLIQPTSGKAVVGGYDVEKNPDEVRNLLGMVPQQVSLYKDLTVMENSQMCADYYGIPSDERDARIEDLMELVDIKYAKNKRVGQLSGGQKQKASLVASLVHRPDILFLDEPTIGLDPTTKRTLWDLIRDLNDEGHTIILCSHDMHEVDMLCDNVGIINTGNLVAYDTPQGLKDSLLEANKKKMTEALGKISDETKISTSTKEDIGNLGLRKMSILLKNQNEEIIEAIKTSDFVKTVEIAHNGRINLRIDSYDDMAVQNVLKDINSFGGVIKSIYTEEPSLEDVFIKATAEVDENARV

SEQ ID NO: 11727 - protein, 135 aa, Methanobrevibacter gottschalkii
MTDKEIYDTQTMLIKHYSNGLTRNLILWIISKEKIHGYGIMKKLDEFFNFEDVNYEIKNTSSKVYPILRKMEKNGLIIGEWDINENNKRVKYYSITDEGLIILDKIRSIINFISNNPAWLNFYGDMGVEINEKRN

SEQ ID NO: 11728 - protein, 237 aa, Methanobrevibacter gottschalkii
MKLGFTTLALFMEDNNKIIELAKQHGFEIIEILGEDPFYEKDKGEFKNCGIDMRIHAATVDINIASLNKGIRTESIKQMIQCGHYAESINANTITLHPGIIGRNEPRLRKWALEIAVESIGKIIDNTNIEISIENMPVRGKFLGNKVEEIEMIQEETGCSLTIDTGHGNTCGNLEEMLNLKNISYCHLNDNNGVKDQHITLGEGTLDLNLLKKIDTAIIELNNFNNILKSKKVIENL

SEQ ID NO: 11729 - protein, 264 aa, Methanobrevibacter gottschalkii
MKKAVVFDNSGTLIERYRVIKDVLNGNLFTDINSLDLIDAADALALVVLQFNTNKLLDLDQNTLISGVIREYNIDFDVSFSTNPISKAEVKEIIDNEKSATIADITDGFDILRDKVPNMELCNGSALIVDMDLGVIAYTITSAGKFFPKVFETIETLKSRGIEIFIASGDRKGAINRLANLLDIPEDNAFGTVSTRGKCEVVSILKDSGYKVMMVGDGINDLLAFKNADVSVLTIEQQEEISPKVMDKTDHIIEDIFEVTMIDF

SEQ ID NO: 11730 - protein, 456 aa, Methanobrevibacter gottschalkii
MNVIEKLNSIKNGEITAKENVENFIKVIDENNESINAFIELNYENALKQADVIDAKIANGEDVGALAGIVFGIKANINVEDLIISAASKTLENYIGSYNATVVKEILDEDGIIIGILNMDEFAAGSSTETSYYGPTQNPAAMGRIPGGSSGGCAAAIAGKMCDISIGSDTGGSIRNPASHCGVIGFKPTYGAVSRQGLLDLSMSLDQIGPLSNDVSGIALTLNTIAKYDETECTTLNWDKPDFTNVLDDTSLKGMKIAVCKEFIDVTDDEINKTVNQAINKLVEAGAELVEVSFDYINLCLPTYYLINYVEFFSATRKYDGREYGSRIEEVCGDEVLRRIKIGSHIAEAEFSGKYYKQALKARSVIRSEITSMLENVDLIVGPTVPKLPHEIGAELEPMEMYAYDILTVIANLAGIPAASIPAGEVDGIPVGLQLQAKPLDDLKIIKAMSVFENTQ

SEQ ID NO: 11731 - protein, 501 aa, Methanobrevibacter gottschalkii
MTRIGLVYVNGAVPGFEDFGNLPTDIVKENGLIDGFKASNELDALIIPGGTLIESNDINMDLNTEIKKMASDGKPVIGICAGFQLLSNQIDIGRKSPVPIVKEGLGIIDVNFSPLITSDRVKAKVFNNSFLVKGQKEDVDGFHTHTYGKVEGDAKPLFYSQVQRMNYGDTNKNGEYNIFSGACNDDGNVIGTMIHGILDENPILIKNLLEQIDAANIDDIYSRNIEIKKYLQSEVGINTNIKVPKLDIKCKKPKYLMIGSNGSDSGKTFIVTGLAGALRRRGYKVALLKIGPDVRDIIPGLYLTKGKMEKFSSIKIGHLGWSDIESTISKLNSSNYDIVLIEGVMSVFTGLLNEKVPFSAAEIAMSSKIPMILISGVNKGGIESAAVDLVSHSNMLEKFGIPVKAILLNKVYSEDIFNEVIPYIKNNTTVDTVLKLPKIKSADMRGFIPEVEIRYELFTNHAMDLIENNLNIDEIINMAREVEFEKIYNFNEIKNKMVNGS

SEQ ID NO: 11732 - protein, 227 aa, Methanobrevibacter gottschalkii
MNQETNLDKALEAIRNGEFVLVFDDDDREGEVDMIIASEFVTPKSIATMRDNAGGLICNCIHSDFCDEIHLPFMVDIMEAASEKYPELAKLAPNDIPYDERSSFSIWVNHRKSFTGVTDHDRAMTISECAIMMKEGRFDEFGSTFRSPGHVCLLRGADGLVKNRRGHTEIGLALCEMAGVTPVCVVCEMMDGETGQATSVADARKFAQENGLILLKGEDIINKYLED

SEQ ID NO: 11733 - protein, 126 aa, Methanobrevibacter gottschalkii
MKIDGEVTTGLGKAAYFLSQEFYTNEFKKNLGFVPFPGTLNVIVSDNYLDEINEIKNNCKNLIKPDKGFGAVKYIKAKLNDNIDGAIVFPAKTTHEENYLEFISKNKLRDELALNDGDIVSLEFQN

SEQ ID NO: 11734 - protein, 547 aa, Methanobrevibacter gottschalkii
MKIKTISTDVLIIGSGGAGSRAAIEVDNAGLKAIIVSKGLSFRSGCTGMAEGGYNAVFKTVDKDDSKEAHIYDTLKGGSYLNDEKLVEILVNESPQRLIDLENYGALFDRQESGEIDQRPFGGQTYRRTCYQGDRTGAELLNALKEEIIKRDIECIEEVMITSLITDKNQVIGATGLDLKDSSLIYFKAKSTILASGGAGQLYPVTSNTFQKNGDGYAIAYKAGAKLIDMEQVQFHPTGMVAPESKKGVLVTEAVRAEGGKLLNKDGARFMRKYAPEKMELATRDIVARSIYQEIIEGRGTEKGGVYLDISHLDDDYIDEKLETMVLQFNNVSIDIKHEPIEVAPTAHHFMGGLKINTDASTSLRNLFGAGEVCGGVHGANRLGGNALADTQVFGKIAGESASKACADTEIKTDYEQVKRESSRIENLIKKGNIKPQKFKENIKNLMWEKVAIVRDEKTLNEGLKDLQDMQKELNNLDVSDKKQYNTELVTALEVINMVEICILIVKSAILRRESRGSHFRSDFPESKDEWKKSIIFNKDKIEFEAR

SEQ ID NO: 11735 - protein, 434 aa, Methanobrevibacter gottschalkii
MNDNTILIKNALILSPNTNFENKQSILIKDNLIAEISPDIDESNVSKIIDATGKILLPGLINTHTHLSMTLFRGLADDLSLDSWLNDYIWPMEANLNGDYCYIGALLGAVELIKSGTTTFSDMYFYMEDVARAVDESGIRAVLSYGMIDFGDEDKRKNEINENLELFKSCEGMGNGRIKVFLGPHSPYTASEELLIQVRELADEYDMGIHIHVSETQKEIVDISSEKGLRPFEYLDKIGFLGPDVVAAHCVWLSDNEIEIIKKNNVKISHNPCSNMKLASGIAPVSKLIENDICVSIGTDGASSNNNLDLIEELKTASLLQKVSTLDPKVLTSDETLSMGTIKGAETLGLESEIGSIEVGKKADIILIDTNSANMIPDSSSLSSNIIYSANGLNVDTTICDGKILMENKKLTVLDEGEIYQKARQAIKELKEAI

SEQ ID NO: 11736 - protein, 68 aa, Methanobrevibacter gottschalkii
MSEIPKAPVARIIKESGAERVSEDAKAELAAYLEDVARNVAKEANAVAKIAKRKTVKAEDIKLAIKNL

SEQ ID NO: 11737 - protein, 287 aa, Methanobrevibacter gottschalkii
MMKIKIAIPSKGRISEPSINILEKAGLGLIDKNNRKLISKTFNEDIEVMFARASDIPEFVNDGVADMGITGVDLINENEADVIELLDLRFGQTKLVLAAPEESNINSVDDITEEMKVATEFPVLTKKYLDKKGLSLKIVKLSGSTEAAPFIGIADLITDLTSTGTTLKMNHLQIIDNILDSTIKLIGNKYSLKNKKELIEAVSTSIKGVLDAERKKLIMMNVKNDDLDKVKEVMPSMGGLTISEVLSNEKTVAVQAVIDEKEVFELVNCLRNAGAKDILVVPIERII

SEQ ID NO: 11738 - protein, 164 aa, Methanobrevibacter gottschalkii
MKIGIIYSTSKKSTKKACKILASKINTDVQLIPIEKAKTTCILKYNFIIFIASAYNGKFQSSLKRYIIRNIKTIKEKPIALVINSEENINTEDIFNKIFTEELVNSSCINSNFGYELNINEGNFFEKIKTKNKIKNKENLPSLNIDEINKFSDYINNLIEKRVD

SEQ ID NO: 11739 - protein, 311 aa, Methanobrevibacter gottschalkii
MIKIFRLKNIISVKDFERKDIEYILDEASKLENIAKSREISEELKGKILGLMFFEPSTRTKMSFETSMKRLSGECIGFENSGSSSVSKGESIADTAKMFEGYCDALVIRHELEGVSKFISDIVDVPVINAGDGAGQHPTQTLLDLYTIKNEIGEIDNLKIALIGDLKFGRTVHSLTHALGLFKNIKIYLISPPELKMPQEVLHDLNKTNVEYKEIGSIEEIIDDVNVLYVTRIQKERFADINDYLKIKGAYIINKNMLEGKDLIIMHPLPRIDEIDTNVDNTKYNKYFTQAANAVPVRMAILKTLIKNNPK

SEQ ID NO: 11740 - protein, 387 aa, Methanobrevibacter gottschalkii
MSNIFEDLENDETQGPTIFKDKRPLDHRWLPDKLVHREEQIRQIAKNWIDVLSNVTPSNVTLYGKTGTGKTAASKFAREQLIDIARKKNIFVKVEYIRCTDYTTEYQVIAELCNKLGRDVPNRGWTKGEVVNTFRDIFKTNAFGKKLHLIVILDEIDILLDKDGDGILYTLTRTENVSVLCISNYLDFKNLIKSRVTSSLNDKEIVFPPYGADQLSDILKERAELSFNENVLENDVIPLCSAMAAKEEGDARYALDLLKNAGELAFDEDSEKVTNNHVKRAKDKIEHNKVIEIISTLPLQQQRVLESILNLTKQKEEITSGKLYEAYTDLYKKDAVTYRRIFDFINELEMLGIISTNTISRGRGKGRTNIIKLQCDETLLETTLFSI

SEQ ID NO: 11741 - protein, 152 aa, Methanobrevibacter gottschalkii
MINEKTIEKWLLDEDMLREMKFDENADFHFIIEFPKDNIIDIVKPKQKDCIVFACATQVSQEHINLMVSADLKTKKDFILELNFGLNNFLVDYELQIHDEMLQQFIITDQIFEDGLTKDNFIKTIKRVFKSKLHCIWLIEKKFNNPSFSPIK

SEQ ID NO: 11742 - protein, 344 aa, Methanobrevibacter gottschalkii
MVYNELINNINLININNIISFYLFLFIIFALLLSLVIDVLFGELPGKIHPVVIMGSLINFFKKKFINIKNWASGLMLVLCTSVISSVLLLIIYTIIKNNIILLFLVFSILLSSTFSVKMLLQTAIDVKNDLDNDIKKARKSVSYLVSRNTEDLSECFIVSAVIESLTENITDSYVAPIFYYIIFAIFILFYPVHLKLYLLLLVPMLYRLSNTHDAMLGYKTQELIYIGFLPAKIDDILNYIPSRIAGLFIVMSAYLLNLDGKNSFKIMMRDARKCPSPNSGYTMASTAGALNIQLIKKDTYILGDNNKIITANDISSAVKLSKLSIILFTLTIICLFILIYVIL

SEQ ID NO: 11743 - protein, 337 aa, Methanobrevibacter gottschalkii
MKLAIISVSNKGQKLAFKLKEKLNEDSTILKVDLYHKNVKKYFQILFYEYDAIIAIMASGILIRTIAPLIESKVTDPAILNIDDNGNFVISTLSGHLGGANKLTDKIANLIDAIPVITTSTDVNKKLGIDILAKDLYLSINNTKEILFFNKSILEGEQLNFTINPNKNFDYLFNYLKNITLEIDVSFSYSNNINTDEIHVKLDNHKIILKERKIVVGIGCRRGKECSDIYKSLIKSINELNIDKSRINMFSSAEIKKNEQGILELSDKLNIPVNFVELDKLKLFESNDIQKSEFVYSKFGIYGVCEPSALITAGFDSKLIYKKTSYDGVTISIALSK

SEQ ID NO: 11744 - protein, 81 aa, Methanobrevibacter gottschalkii
MSSQIDEVCEILEYIADNNTVPRNIREAAGKSSTLLKDEEQDQSVKISTVLGKLDEISNDPNIPVHARTLIWEVLSKLESI

SEQ ID NO: 11745 - protein, 58 aa, Methanobrevibacter gottschalkii
MSDISRTTINLPVDLKKELKKLAIDEDTSLSGLIIKMINEGMENRKNSNISYSDEDNS

SEQ ID NO: 11746 - protein, 193 aa, Methanobrevibacter gottschalkii
MKKHINEIINVSNEIYNKGLVSGKAGNISKRIKGSTGDIVAITPTLKSLSYLKEEDIVLVDMDGNLLTRGKPSSELNMHLEIYKKRSDVNAIVHTHSTYATGFAFSSKKLKRLEGFGEIKNPYLNSIEYFKPGTSELAKNASEGIKNEDVLILKNHGVICVSDKLKEAKLLSIFVEESAKTQFVTCMLNSVED

SEQ ID NO: 11747 - protein, 573 aa, Methanobrevibacter gottschalkii
MSTNKILLKFAKKGINLSPEAYNKVINAKDPINYASSLIVKLKSDKFSPKDLISVSGEMVDEINGIKKEESNNQKSLTEDITHNEEIKIKKESIKETPSEIQPQIKVDTKAENKQDLSIIKKEDTIDNLKKESDTPEKYINKEILEASETIKDEKIKFKRNEQKTNVKYDFKIIQDTSKKSYTSGEIENLISYFKSRYEKLSNILSKRPELRNYTKIADIDDSQENLSLILMVREIRTSKNGHKIIEFEDDTGTISILFSHNNEELFAEAEKLVKDEVIGVIANKSDDPGFAFGQQIIDPGVLRVPDKEMDFGIVFLSDVHIGSLTFLEDAFQRFIDWINCEYGSEEQRRIAEDVKYLVIGGDIVDGIGVYPNQDKELAIKDITEQYNEAARFLGNIRSDIKIIIAPGNHDASRVAEPQPAVPEEYAKALYELDNVEFISNPGVVSLDGINVLIYHGRSFDDLVMAVKQFTHERNDLLMEELLKKRHLAPIYGERTPLASELEDYLVIDELPDIFHTGHVHINTYKKFKGIHLINSGTFQTQTEFQKIYNIEPTPAQVPVIHKGKYKHLKFIE

SEQ ID NO: 11748 - protein, 166 aa, Methanobrevibacter gottschalkii
MANKFVRIILIVVLFVIFFEVGLFSSYTIVTAEAPNIQGLIDMQIQKISSILNPETVNEALIKDPTPINITNKKDVALKMQDLSKVDGVNVDSMNISTRDNPSNDKNFTVIIEALGYASPNSTSGQIIISQEPSYKIIASAPASYRGEGIMADTNSMTITSVLKLY

SEQ ID NO: 11749 - protein, 357 aa, Methanobrevibacter gottschalkii
MIYVIGIGQNRENMTLGALKAIEESDVIIGYKKYIDQIEDLVQDKEVIKKGMGDEIARAEFAIQRSLNGQNVSLISSGDPGVFGMANVLYQIVSKYEGVEIKVYPGVSALNYASSHLGAPLNDFAAISLSNILTPLSEIEKKLEYALKANLVVAIYNPISKTCKEPFKRFKQCVFNIKGEDALIGIVDSTYEPPKASIVKIKELTEDMVNMSCTLIVGNDLTYVQDGKLVTPRGYVIRSKIHELSRNHYEKFLNGEIANGPNSECEFYPCHYEGQYCDFCYCPFYPCGDSSTGGEWIKGKNVWNCKNCIWLHNKESIECLRPPFENILEDIEDLKSKKKTLLKLRRACLLKNNPNNL

SEQ ID NO: 11750 - protein, 200 aa, Methanobrevibacter gottschalkii
MSIKNLLIEMKNMSELMVDLAYSAVLFNSKDAAEEVITLENEVNSMNYEIKKESLVAARSYEDAEKLTALLEIAEAAESMANAAKDLADLVITGFKPHPVFKMVMEESDKSIVRVTIDESSELANNTLGDLLLVNRTGMRVIAIRRGVSWIYGPDKNTMLLANDVLILKGTYEGAELLEKLASGACSLEDIPEELEEELE

SEQ ID NO: 11751 - protein, 423 aa, Methanobrevibacter gottschalkii
MIYVKKQQKKIRSSLSTRTFSEFFSEHDYVIKEGLIALLICAVGDLIAGIVLGKMTFFLESFPGLLVVIPGAIGMRGNIFGSFASRLSTSLHIGLISPHFEFSDDLNNNIFSSFVLTLVLSIFLGIVAKIFCILLHYHSMDLIDFILICTIAGLISNLIMLPITMFISFKSFEHGWDPDNITSPIIAAFGDLFTLPAIIVSIFILKSLNFNLIVKDVILAIILIAVLMSFIHCYKLSYETKTILRQSTPILLLCSFLGGSAGGILNSSVETLLSNPSLLTLIPLFSGESGSLISILGARISSGLHSGLIEPLSKPEGETIHNFGICYILAIVIFPLIGILAETSSISFGTIGVGFDKIILISGLSGIILVTVMVFLVYYISTSSYNNNLDPDNIVIPISTSVTDSISSLILISMSLLILGTLI

SEQ ID NO: 11752 - protein, 288 aa, Methanobrevibacter gottschalkii
MDNTGNMTIEITVVLLIVLLIISVTITSYENITDKLIKTQEKENMEILTSEIVDNLINNPGVPEKWFEYGKGTPGLAIINEGGEIIPNSVSYSKLISLKENYKKLVDDQLFKSKFHSSMELIPQKRTISSVKIGSNSESNNIFSVNRLVKCDFYKKYVLKDFKNDGKCNHNHDQKYHSCNYFKIFKGNLKNSDYYLLIEDSEKYDLKYIVDTTRVVKEKYWENAISNKIYLNDKINFYDDTSAIVFIHFNKPQSKVVLVSVPKNFDKNKLNYDYFITNECQFVLKVWY

SEQ ID NO: 11753 - protein, 312 aa, Methanobrevibacter gottschalkii
MKINSKGNLIVGTTAILIIALLFICIFVVTSINYIQNKNIGIESNDNFKYIIDDYTQNLELNCRDAIDEATQKVFNGLPVTNSENQIKKNLNKILDKKNKEYEEKYDVKINSETLSVENTKSPWKILFKIKLNIKKGDEKYSKIVEKNASVEGLRDPLPIAKLTIMSGILTYDNQIHYKTALSTYMLLHHLDSPESYIEATAPLYIKKCPYDPYIHHGDPGVIEDCLKHGYFHESADGSCYLCRLEGKGKCPHYGLEVFIQTHTPLKNESLSCPDHVVFADHYNGEKINPDDWNSLILDSSHRKKYGLINDG

SEQ ID NO: 11754 - protein, 132 aa, Methanobrevibacter gottschalkii
MSDTVRTWRHIQQRYNLIGTKCNTCGELFFPSRVVCPNCRRKGDLEPFQFSGKGKIYTYSVIRSAPDDFKKSAPYAVAVIELEEGAKLTSQLVDCDVDDLEIGDDVEMVFRKIREDGKDGVISYGYKFKVIK

SEQ ID NO: 11755 - protein, 299 aa, Methanobrevibacter gottschalkii
MDTNSKLSNNAGVILVSHGSTLPFAEEVFTEIKEKFIKKSGLATEIGYMKVSEPTIAGAVEILKEQVDDLDKIIALPVFLAPGIHTNIDIPQLLGLEPLEVDPRCPDGKYPAEHYLSIADDVDFDGEIRLLTSIGPRDELLDIIDKRINEALSESKLDDSAKTGILLVTHGSRLHYNKEFATELYDKFKKTCDLPSSFGFMELCGPSIPESINKLADENRLERLVVVPVFIAPGMHTTHDIPHILGFLDDHDHNHEDHGHDHTHDLTPVEFDGEILYPEPIKSDDILIDMLVAMVNEAL

SEQ ID NO: 11756 - protein, 159 aa, Methanobrevibacter gottschalkii
MSDKKTGILLLSHGSRLEEGKKVIEAYKNMYLEEFPEAIVDYAFMEIRKPGIPETIKKLTTENDLEKIIVVPVFVAHGLHTKRDIPDLLGIESDFDIEEVSCHHHDHGHSHGHHHHHHEHSHEEEEEEFEFDGEIILTDPLGVDKRMYEIIKDRVSEHL

SEQ ID NO: 11757 - protein, 141 aa, Methanobrevibacter gottschalkii
MIGRQTININKSRELEELYQIMEKKWDKEKYNTFFLGKPNPLSIEKYICLPATQRYMIIAYPRKGGKFFSRNDKVVLTICDTPDSMKNQIVTSLARDNIFKLTYQISESKSRNEERKGPTEETLQGYTAYMKQILEEEDLL

SEQ ID NO: 11758 - protein, 341 aa, Methanobrevibacter gottschalkii
MLFILLDYMILFLRQLKFIQRQNLFILKVILIFMSLKVSDIGEKELVRYIIANSKKITPDDAAITPFYNSNLISTCDMLIQSRHFPKNMSYYDMGFKSVTVNVSDLAAMGAKPLGFLLSMAIPKNLEVDNFKEIVGGVLKACDYYSIPLIGGDTNEASEIIISGTALGLCDNPLMKNNYKKDDLIAITGDIGLAALGFEIDDLDSIYVKHALRPKARINEGQILKKYGATSATDITDGLASELYEIKKDGFGFMIHEELLGITDEYKNLASNLNLDYLDLVFHIGEDFELLFTISKENLEKLPIEYKVIGIVSDSDVIELTLENGFVEQIKNKGYEHYVGE

SEQ ID NO: 11759 - protein, 290 aa, Methanobrevibacter gottschalkii
MLVSNDLYKKSSKTQKIRCEICANYCKIDEGNVGICHQHKNINGELFDESYGIVSSLSPDPIEKKPLNKFLPHTSTYSIGGFGCNMSCLHCQNYIISHEYGNYSRGIKITPEEIVENAINYNCKSIAWTYNEPTIHLLFNRKTSLLAKQKNLKVIYVSNGYFSEKSLEEVLCFVDAFNIDLKSMSSNFYKKVCGADLDIVLDNLKRIYFENKHLEITNLIINEFNDSIDEITQLCDFVVNELGPEVPLHFSRAFPYYKMNDISPTNTETLFKAKEIALKKGIQNVYLGNI

SEQ ID NO: 11760 - protein, 417 aa, Methanobrevibacter gottschalkii
MILKDKNIIEITEELSSEFEVAKVLRKYPKDTVLIKNVKGFDIPVISGICNTRDKIAKSINCEVSEITEKIIEAMENPIKVDKFTDFSDYDSLDIDLNKIPILTHYTRDGGAYITAGVVFARDPVTGIQNASIHRMMVLDNKRLVIRIVPRNLYTYFQNAQKAGEDLQIAIAIGMDPAILLASTTSIPIDYNEMDVANAFKNGELELIKCGELEVPQADIILEGKISVTETIAEGPFVDLTDTYDIIRDQPIINLEKMHIKKDAAYHAILPAGFEHKLLQGLPQEPRIFKAVKNAVPTVENVVLTEGGCCWLHSVVSIDKQTEGDGKNAIMAALSAHPSLKHCVVVDTDVNVFDAEDVEYAIATRVKGDRDIMIVPNVRGSSLDPVAKSDGTTTKIGVDATKSIKTLEKFERVSFSE

SEQ ID NO: 11761 - protein, 341 aa, Methanobrevibacter gottschalkii
MTPKIMIILGSGSDIAIAEKSMKILEKLEIPYSLKIASAHRTPDLVREIVIQGTNAGIEVFIGIAGLAAHLPGAIAAYTPRPVIGVPVDVKTGGVDALESIVQMPYPSPIATVGIDRGDNAAILAAQFIGLHDDEIRQKIINLRKNYALKVKNSNEEIIQKIEDKKFLQNDFLRIKDLNINDIEADESDPCCKNKNADVAIIVGRQTDVVTAKKVAVILDRLKISHDTKVVCPIRSTKKFTNYVKAMKNAKIFIGISSNSSQVTGGIVGLTDRPVIGVPCTNENGDDYMLTTVSMPPGVPVATVGINNGKNAAVLAGEILSINNPSITELLGKIKNKKINL

SEQ ID NO: 11762 - protein, 729 aa, Methanobrevibacter gottschalkii
MKITLIYLIKLREKMIAKTLEKELNLSNWQVKKVIKLIDDGNTIPFIARYRKDVTGSLNDATLRKFDERLKYLRNLEEKKEKIIKRINELGKLDDNLKNKIQNSKTLVELEDLYRPYKSKKQTRATKAREKGLESLASIILKQEIKENVKNIAKNYITDEVKTLEEAIQGAQDIIAEEISNNSEFRKKIRKNNFYTGQIETKTKNKDESTEYDLYYDYAENIKKIPPHRILAINRAEKEGIIKVKINCDNEEIIKYLNRHVLKNISGIPEKIEYNPYTTQIIKESVEDAYTRLISPAIEREIRNYLTKKAEEKSIEVFAKNLNQLLMESPLVGKTILGWDPAFRTGCKLAIIDKTGKVLDTELIYPTQPQNKVTESIKTVKDLIDKYSIDVIAIGNGTASRESEEIVAKIIKNTNVEYIIVNEAGASVYSASKYADEEFPDFSEGERSAISIARRLQDPLAELVKIDPKSIGVGQYQHDMNQKQLNETLTGVVEKVVNEVGVDLNTASVSLLNYVSGIGNTTAKNIINYREENGSFDSRKELLKVKKLGKKTYEQCAGFIKVNNPKYPLDNTTIHPESYDAAYKLLEKLNYSIDDIGSSNLKLDNINLEEISVELDIGQETLKDIIKELRKPGRDPRDDMPKPMLRKNVLSIEDLEIGMIMQGTIRNIVDFGAFVDIGVHQDGLVHISQLVENKFVKHPLDIVSVGNIVDVKVLDVDLKRNRINLSMIL

SEQ ID NO: 11763 - protein, 565 aa, Methanobrevibacter gottschalkii
MYWFFVILSFLLAGIKTQKPNKYKKVSVIIPAYNEEETVAKVVNVVKKVSFVDEIIVVNDGSSDNTEMEALKAGAIVINHEVNKGKGEALQTGYREAECDIIAFIDADIYNLTSSKVESMIKPILDGGADITKTKFSRASGRVTELTAKPLLNFFFPEISFEQPLSGQFAARKEVLKKINFESDYGVDVGIVIDADVLGISIMEVDIGAIEHDMSPLSDLNLMANEVVRTIIGRANKYGRVTMIDDIGYYIRMSIVGLSLVILGLFTIFFVKFVPLAIGVIISIIGLLIAIFYIFKVIIKSIVMFKKTPGRNLLKSFVKIHFPMIISIIILLLMISTFLGAAHFDHGVLSIEPNSRNLIIYADDSPRDTISVRGPYTIDTAIENESGQIRMPSDAMMTLGVNINDTIKLGANTYKVNETRLGEPDILRLPIEVKKLLQVENGEVIQNSRLKDVFDGSLITHAYEYNNTTIKEKYFITSNEKQSSTYEIFLDNESIVNSYGTFKDNGTYDISVDGNYLTSFSYKNNLTKSFKFDGHDLEIVFRDTNSTSIKQFSSGNQGVFLNFNF

SEQ ID NO: 11764 - protein, 311 aa, Methanobrevibacter gottschalkii
MEILKPNELRERFNDPWIAPYKKVLTMVDGNKVEIVEYHPCISGSHWLLNQYLNNSELIDSAYRDGNKHVYKCHVGKAPLDLKASFNAAGIDEIVVADDEVKVTHSGLAGAGVGAGMCRGMGEGVKYIELIQVGGGSKAGKATVVTPKLNKIVIGVDDTDVKDAGATWTMAHNLGVELANEGFEYLDHIIVQLYPHNPHKTQNCVSIALTFAVEESKKEKLIDRVIEILKRDTLSDKTAIAILEGLDIPEKLRKYSIATKSGMMDIETAESLAKELNIPLIAVTGEQGKVGALAALGLYDDVEEAVKAYDK

SEQ ID NO: 11765 - protein, 140 aa, Methanobrevibacter gottschalkii
MAKYEIAAVVAEFNYDITQMMLELAKAEAKNRGCEITKVIAVPGVFDMPLIIKKLLKSEKYDAIVTLGAVIEGATDHDQIVAQHASRKIADLALEYDTPVALGITGPGMTRLDAHRRVKNAKSAVEAAIKMCDRLSELDE

SEQ ID NO: 11766 - protein, 33 aa, Methanobrevibacter gottschalkii
MDFKKLTKIQFAALFIIFIMVLSGVAGFLLYII

SEQ ID NO: 11767 - protein, 335 aa, Methanobrevibacter gottschalkii
MNTSKTKDKYKIAVIPGDGIGNEVMEAAIYVLNALNINFDYVYGEAGDECLEKNGTALPDETLDIIRNSDACLFGAAGETAADVIVKIRQEMKMFANLRPVKSYPNTNSLSDNIDFMIVRENTEGLYIAGEESYTDEGAVARRIITREAEKRIIEYAFKYAKENNKSKVTGVHKANVLKKSDGLFKDVFYEVAKRYPEIATEDYYVDATAMYLITKPESFDVIVTTNLFGDILSDEGAGLVGGLGLIPSANIGEDAALFEPVHGSAPDIAGQGKANPIAMMLSAIMMLRYLGENEAANRFDGAILKVLNEADILTGDLGGSATTMELAEEVKNNL

SEQ ID NO: 11768 - protein, 159 aa, Methanobrevibacter gottschalkii
MKGTAWKFGNDIDTDIIVPGRYLIYTNEERLSQHCMEGLDPDFNKKCKKGDFIVAGTNFGCGSSREHAPIALKGAGVSAVIAESFARIFYRNATNIGIPLLEAPGINKLIEDGEEIEIDMNKATIKSQNGEIISFKKLPPFMLEILEQGGLIEYLKNKR

SEQ ID NO: 11769 - protein, 414 aa, Methanobrevibacter gottschalkii
MPTMSEKILAKASGKEKVEAGDIVIANIDVAMTHDLTGPLSVESFEKIGAENVWDASKIVIPFDHQVPADSIDSANNHIIMREFVKKYNIENFYDVNAGVCHQILPEKGHVVPGEVIVGADSHTCTHGALGAFSTGIGSTDMAMVFAEGNLWLKVPETNRFNITGDLKENVYAKDVILHIIGEMGADGSTYKACEFAGETISNMSISDRMVLCNMAIEMGGKTGLVEPDKKTIDYVEKHSNKPYEIFKTDLDSSSLNMIDIDVSNLEPQIACPHNVDNVKPISEVDQEIDQVFLGSCTNGRLSDLRDAAKILKGKKVAKDTRMLVIPASQEIYLKALDEGLLKIFVEAGALVSAPCCGPCLGGHTGIIGPDEVSLSTSNRNFRGRQGSPDGKVFLSSAAVAAASAIEGKIVSPE

SEQ ID NO: 11770 - protein, 402 aa, Methanobrevibacter gottschalkii
MSNSIFKRFKKKETPIIEEKLPILEDRIFWVSTLQKIAFPVLNNLARDSLSKNMPVESISAEGHSSAYFDAFVRIFNGIASWLELGADNSEEGKIREKYIYLTLKAISNAINPKSNDYIFVVEPKQSLVDVALFAEGLLRAKNQIWLNLPIKVQARIIRDLKSTRIIAPYENHWLLYTSMIEAALLEFTGECDKERLVYGVRKFRDELYIGDAMYSDGEDFELGYYNSLFIHPMLNDILGVMRKYGLEDGEFLDVQLMRSSRLASQLERVISPEGTYPLLGKFLSYRCGVFHLMSQASLLKILPKNIHPAQVRSALTKVLKTQFESYNNFNSNGWLIIGLEGSQTDISDETTNTGTLYSCCSIFLPLGLDRNDMFWKAPSAEWSSLKAWNGHPIQRDQPINF

SEQ ID NO: 11771 - protein, 412 aa, Methanobrevibacter gottschalkii
MKVCIIGQGYIGLPTAALFSKNHCKVVGVDISEKIINNLNKGIVHIEEPGIGDLIKNAVEKKSYSASLTPQKADAFIITVPTPYIAENYSCDLSYVIDACHSILPYLEKGNIVIIESTVAPMSTDEQIKPIFEEAGFSIGKDLYLAHCPERVLPGKIMYELVNNNRIIGGVTEECAKKASEVYGEFVEGELILTEAKTAELSKCMENTFRDVNIALANELTKICAEIGVNALDVIEMANKHPRVNLHSPGPGVGGHCLAIDPYFIYAKAPETAKIIKLARDTNNSMPDFVCDNIRKIIKKGKIAVLGVSYKGNTDDDRESPAYEIIDKLSNDYEIQIHDPHVENPNYVNFDIAVKDSDLILVLCDHNEFKDLDYNLIKKSMKNPVIFDTKNIIKEVPSEIKLYNYGNLYELN

SEQ ID NO: 11772 - protein, 279 aa, Methanobrevibacter gottschalkii
MKILITGSNGMLGYDLQEVLRRTHELILTTSETLDITDKKHTMEFISNKKPDIVINSAAYTDVDGCEENQDIAYTVNSEGVKNLAIACKEIDCPLVHISTDYVFNGKSDKPWIEEDNVDPISVYGKSKLRGEKYILEILDKFFIVRTAWLYGINGRNFPKTILELAKNHSEITVVYDEIGTPTYTQDLAKAISELIKTDFYGIYHLTNSGSCSWCEFARYIFEVANVDVKVIPVTASEFARSASRPNYSVLKNKNWIKNGFNPLRNYKEAIKEYIELII

SEQ ID NO: 11773 - protein, 149 aa, Methanobrevibacter gottschalkii
MNKKLILIIASIVALFSIASVSAGFFDFLHWDDDSDNINVVEDGQYCTVNQVSAYIKEFHKLPSNYITKKEAQSLGWHGGPLKKYAPGKSIGGDTFTNRQHILPDSDYKYIECDINANGTFRGAERIVYNTGNYKVYYTDDHYNTFTEV

SEQ ID NO: 11774 - protein, 76 aa, Methanobrevibacter gottschalkii
MLIDGKLIKTEGHDYLIKILNLPDYYGKNLDALYDCLCEMDCEIQLINPKYVNKDIIDTFLDASIENEFLKFEILY

SEQ ID NO: 11775 - protein, 288 aa, Methanobrevibacter gottschalkii
MKGIVLAGGSGTRLYPITKAVSKQLLPLYDKPMIYYPISVLMLAGIKEILIISTPRDLPMYKDLLGSGASFGIKLSYAIQENPNGLAEAFIIGEDFIGNDNVALILGDNIFHGHRFTEILERATKLDEGAIIFGYYTNNPEAFGVVEFDDNWNVLSVEEKPKNPKSNYIVPGLYFYDNDVIEIAKNVKPSDRGEVEITSVNGEYLKRGKLKVELLGRGMAWLDTGTHEGLLEAANFIETIQKRQGLYIACLEEIAYLKGYINKKQLLKTAEELKKTDYGQYLFNLAKM

SEQ ID NO: 11776 - protein, 186 aa, Methanobrevibacter gottschalkii
MGKFNFIETGIEEMFVVEPAIFEDNRGYFMETYNEKDFKDAGHDLTFVQDNQSKSRKGVLRGLHLQVKYPQGKLVRVINGEVFDVGVDLRANSPTYGKWFGTILSDKNKKQLFIPPKFAHGFLVLSDEAEFVYKCTEFYHGEDESGIKWDDEDIAIDWPLNDIDEIILSDKDKKWLGFKESQIKYK

SEQ ID NO: 11777 - protein, 335 aa, Methanobrevibacter gottschalkii
MSKILVTGGAGFIGSNFVRYMVNKYSEYEIVNLDALTYCGNLENLKDIEKNDNYSFVKGDIRDKNIVDDLVQQCDYVINFAAESHVDRSITDPEIFIKSNVLGTQVLLNAAKKYGVDKYIQISTDEVYGTLGKTGYFKENTPLQPNSPYSASKAGGDLITRAYSETFDLPINITRCSNNYGPYQFPEKLIPLMISNALEDKKLPVYGDGKNIRDWLHVYDHCRAIDLVLHEGKLGEVYNIGGNNEKQNLEIVKLILNQLNKDESLIKFVKDRLGHDRRYAIDSNKIQEELGWSPKYTFEIGIKETIQWYLDNQEWTSKVKSGQYKDYYNKMYSGR

SEQ ID NO: 11778 - protein, 105 aa, Methanobrevibacter gottschalkii
MIIVYGKYSIYLLGGMEMLEQYLPFVGLIIFGNIENLVLSSQGVVAGVNPVKLGIVSILFVMGWLFIGTVGTSMLMQYVDFIDFIGGLAIFILGLQAMVESIRGV

SEQ ID NO: 11779 - protein, 92 aa, Methanobrevibacter gottschalkii
MKELKPFLALLVFGNIENLILAAQGVAAHVDPIILSILSLIAVVCWLLIGTFGTKLAMKYSRYINFIGGFAIFILGIQAMIESLPGMLTFFH

SEQ ID NO: 11780 - protein, 359 aa, Methanobrevibacter gottschalkii
MRYFKHRIYGALFKLFKDTIIKKNRVSFIVDSKESFKGNLDYIQKEFENRGNFEFHYFYKNKLSIGSFRKLSSSKFIFLNDNFFPLAFMEFHPETTIVQLWHAPGASKKFGGSVDIQNREILEKISKNTDYLITTSVNIKDYYSEAFQMPLNKIKSLGIPRIDYYFENHDVNTLKSNFLNKYNISSNKKILLYAPTFRDEEKYNNVFNYLNLEEFNENLGDEYILALRLHPKIENFYKNDISDNGNYIDVSDYESEQELMLISDILITDYSSIMIEFATLNKPIIFFTYDLDSYLSNERGFYYDFKKTVPGPIVHTSQELIDVIKKNEFDKSKISEFLNTQFDLIDGDSSKRIVDFLLK

SEQ ID NO: 11781 - protein, 319 aa, Methanobrevibacter gottschalkii
MDNINVSVIVPVYNNCEYIESTLSSIINQNFDNFEIIVIDDGSTDNSLEIVKEKLSASDISYLIIHQENAGVSCARNRGIEVACGDYLVFVDADDYISQNHLSELYNGETDFSLIQLVKREGNDLSIPYHFSESSISCNDFIKMELNMEIPFNFCQLMYKTDIVKKNNIKFTPNIIYGEDTEFALKALSFGDRISISNEVTYYYIQHEQSAIRTSEFKRFEIVGIFENLAQYYKNQGKTDLANLIITSRIPKAIFGNMNYFFYNNYDFDDVIAKMHQLNLFTKLSKFEGDFKFKFKIRLFLLNPKIYYKIWRKVKNSID

SEQ ID NO: 11782 - protein, 319 aa, Methanobrevibacter gottschalkii
MKVSVVTPNYNGEKFLKTFLKSLNEDSQYIGEVIIVDNGSDDGSLDYLKNNSFSFPLVLIENKENIGFSPAVNQGIKISQNNLIFSINNDTEIKKGSIKSLVDLINSSDDIFSVQAKMLQYNNKNLIDDVGDEYNLLGWTKKIGENHHSNEYNKVKRIFSSCAGAAMYNKSILDEIGLFDDNFFAYMEDVDLAIRSHINGYRNLSCPDAIVYHIGSATSGSRYNEFKVKLAARNNVWVIYKNLPVPLKIVNFIFIFLGFLIKYLFFYKKGFGSTYLSGIREGLSAKSKISKVKFESKNTKNYFKLEFRLIINTIKFLKR

SEQ ID NO: 11783 - protein, 285 aa, Methanobrevibacter gottschalkii
MDLSIVILNYQTFELTKNTINSIFEYEYSFDYEILVVDNASGDDSLVRLKEYFGDKVNFIASKENNGFAAGNNQALKIANGKYILLLNSDTIVWEDTLENIYNYMEKHNDVGVSGCRVLLENGELDKACKRSFPNVKNSFFRLFHIPTSSKDNDYNLDNLPDDGIYEIDCLTGAFMFMRADALKDAGLLDETFFMYGEDIDFCFRVKKTGWKITYYGKSKITHLKGASSKKQKSKLIYEFYRAMYIYYKKHHADDSLFLLNWIVYFGIAILCVLKLFLNLFKKKD

SEQ ID NO: 11784 - protein, 467 aa, Methanobrevibacter gottschalkii
MIKENQKLLNFSLVLIDVIVIGLALLCSLWLRFKTTLFGPIGGHLGFFNYLLFFTFAVIPVYLILYFAFGLYKPRRTYKNIFSEATQLIKVNILAFITLVSILFIINQPDFSRIMLILLAIIASFFGIIERFTIRTILRKMRINNRNIKHILIVGDNELAFSFARKIRENPYLGFVVSGFLGRSEHIGREIDGCSVIGSFEDIDKILDKNRFDRVVLAIPLKYYYKINDLVESCERVGIKAEIIPDYIRYFPAQPSVDMIEDIPIINIRYVPLDDDFNKFLKYLSDYIISIIAIIITSPIMVVTAIAIKLSSNGPIIFKQERIGYNSKPFMMYKFRSMKVQDPSEEKAEWTTKDDPRKTKVGQFIRKTSIDELPQFFNVLKGDMSVVGPRPERPYFVDQFKETVPKYMVKHQVKPGLTGWAQIHGCRGDTSIKKRIEYDIEYVENWHMGLDLAIMIKTALKKNPNAY

SEQ ID NO: 11785 - protein, 874 aa, Methanobrevibacter gottschalkii
MQEKILKLYEKIKDQLSEDEFQAEMAEIRENNADVTFFDDLDIAHMVLQNHGIENTIAQKEEDTNQLSFESSDGTGFTMTEEILEKYNKVKDKISEEEFLAKMKVHAEKNEHASFMNDVTFADMVVGEFITEEVESVSQSPEFSDKAISDLEENSKDVTVSGRVISISNPRSFKTRKGQSGEVCNVELKDNSGSLRAVFWTQNIKLLKNVNEGDIIQIKGVDIKEGYSGLEANLRPRSILVHLEEDTSKFPEYKEDITDIADIKPDTKVNIIARIIRIPTIRTYEKNGKEGKVASIELQDYSGKITYTLWNKNVELINDLGLEDGDSVKIIQAQARERINRDGGSELSLTHWDGRIIKGEFDVPEVKQEFTPIGDVFEAQDVSIKGIVSRLQDIKTFLRKSDGSEGRLRNFDVRDITGEIRVTLWGDDTTLPINKGDIIKIIGGNVRYDEYTQSQYSMNTNFNTQITINPENLSTEELDELNTLREELRPTPIGEIYTIDDDGIEIDVRGRILSVDDVNEFQRDDGSVGIVRSIIFADESGKVRLSLWNERAEEEYIVGDAYQIENARTRLGMYSVDLNIGSGARLIKLSEEQASSMFIPELSTLEKALYDYKKIEEIDEDDQDIIIIGRVIELNDIRNFERDNGDTGSVRNIELADETGSMRVVLWDDDAKREFEIGQPIKLQNPRFDLDRDNRIEAIVNRSTAILEPSESEIEKLPTQDELMEAIYVPKPIEALTEDDVNVCVTGTISDIESDRVIRKKCPSCGNNIEESEDEYICDNCGHVFDEPRYLLMVPLRIEDDTGSIKVTFFDKLAEELIGMNKEEIINIIEDGYGIEDKLEDLNGQTIEIIANVSFDEYSEENRLNPKKILSKYI

SEQ ID NO: 11786 - protein, 311 aa, Methanobrevibacter gottschalkii
MVELSDLPGVGEKTAEKLRDAGFADMMRLATATAKELSVKAEIGEGVAEKVIEAARRSENIDFETALEVDERRKDVGHITVGSQEFNDLIGGGIETQSITEVFGEFGSGKSQISHELAVTVQLPEELGGLDGECVFVDTENTFRPERIRQIAEGFELDVEEVLGRIHVARAFNSSHQILMVDKINDLIQSGKNVKLVIVDSLMAHFRAEYVGRESLAVRQQKLNQHLHSLQQIANTYNVAVFITNQVQAKPDSFFGSPTKAIGGHVLGHASTYRIWLKKGLAGKRIARLVDSPHLPEGECVFKITSEGIVS

SEQ ID NO: 11787 - protein, 301 aa, Methanobrevibacter gottschalkii
MDAIAITIFSIIIMIGLGYFLKRIDFLSKKDMDPFNKIVMYILMPCMIFHAIYNADLSSLPKLSLLPFVILASSIVTGVISYFILKRLNLDDKQVWSVLVTVMIANTAFMGYPVTLGIYGQTGFLRAIFCDIATLSMFLLLSFVLILRFGGTVKTAIRKIAIFPPLWAVILGLIFNLLNIPIGDVCEYTVNYLGQGAIPLIMITLGLSIDFSALARSKSMIIFTSIMKLAFFPLVAFLLATKLGLVDLQYNVSIIEAAMPSGMMSLLLAITYKLDYELTSDCILINTVISLITLPVIISLL

SEQ ID NO: 11788 - protein, 663 aa, Methanobrevibacter gottschalkii
MAEEKRDNNEELRIGVYVCHCGVNVGGVVDCPNVAEYAKTLPNVVHSTDYKYMCSDPGQAMIQEDIKEKNLNRVVVAACSPRLHEPTFRRCVEEAGLNKFLFEFANLREQDSWVHMNEPEAATEKAKDLVRMAVAKARLLEPLEATKVAVDNKALVIGGGVCGIQTALDLGDMGFKTYMVERNPTIGGRMGQLDKTFPTLDCSMCILAPKMVDCAKHENIELISYAEVKEVDGYIGNFTVKVEKKARYVDEDLCTGCGACVEACPIEIPNYYDEGVGMVKAAYIPFPQAVPLCATIDKDYCIECMLCTQACGPDAIDHNQEATEIELEVGTIVAAIGYDPFDPSGIYQYGYGRYTNVITAMEIERMINASGPTGGHVIKPSDGIEPKRVAFIHCVGSRDETIGKPYCSRVCCMYSMKNAQLCIDHEPDTEVTCYYMDIRAFGKGYEEFYKTSQEKYGIEFIRGKPAQIFENDDLTLTIRAEDTLLGKVTEYTYDLVVLSVGLEHAEGSDELRQTLGVSKSADGFYMEAHPKLRPVDTLTDGVYIAGVAQGPKDIPDSVAQGSAAASRAAIPMAQGEVEIEPIIASNDEAICGACQVCVELCPYGAIAIATGVGGKEFAQINSALCKGCGTCVGACPSGAMNQQHFKTEQIMAQISAALEDIGK

SEQ ID NO: 11789 - protein, 412 aa, Methanobrevibacter gottschalkii
MIHSQKFNYYNENLSWIIGDTMNEIFRTFTSESVTQGHPDKIADIVSDAILDAYMAKDKNSHVACETCLTTDFCMVFGEITSAGHLSENEIEDIIRNTIIEIGYDNSDLKFDGHSCEILNKLHEQSADINQGVDRGDDETGAGDQGMMFGFATNETESLMPYPIDLARKLTNKLTELRETGEIPYLRPDGKAQVSVNYDKEGNVVSLDAVVLSTQHDESMSDNQEQLKEDIREKLFKAVIPEELMTENTKEHINPTGKFEIGGPHGDAGLTGRKIIVDTYGGYARHGGGAFSGKDCTKVDRSACYMARYIAKNIVASGLASKCEIQLSYAIGVAEPTSVMVDTFGTGANIGDLTFEKIVRENFKLTPDGIIETLGLRDITYKQTAKYGHFGIDGLPWEKTDKIDELRKYIKN

SEQ ID NO: 11790 - protein, 422 aa, Methanobrevibacter gottschalkii
MTNYHDEILNFEKIAKEHTEYMRNSVNLIASENVTSVEVTEALATDFAHRYAEGQAFERFYEGCQYVDLIEDRTKKLSCKVYDCDYANVQPVSGVTANLAAFFGFSNPGEKVMALEVPSGGHISHADVSAAGIRGLKTVFHPLDKDIMNIDIDAMNKKIIEEKPKIILFGGSLFLFPHPIKEAREAADEVGAKIMYDGAHVLGLIAGGQFQQPLKEGADLMMGSTHKTFPGPQGGIILSHEENAEIIDNAVFPGVVSNHHLHHLLGLGIATAEMLEFGEDYAKQIIKNAQALGQAMYERGFDVLCEEQGFTQSHQIAVNLTNIRSASDIARELADNNVILNKNLLPGDNRDNSDDPSGIRIGTQEITRRGLKEKEMDEVAEFIKRVAVDKENIADEVAEFMNQYTKLDYAFSDRDAYQYHRL

SEQ ID NO: 11791 - protein, 230 aa, Methanobrevibacter gottschalkii
MRIGFAFTGAGHLLKESVQVAEKLANDHEVTIFLSGAAEEVLKMYGLYERVKSLTGGKYRELATDSDQKFSYPITGRLSLGKYDLLIVSPATANTVSKIVYGIADTLVTNAVAQSGKGAVPVYMVPVDIHPGPIDTVLPSKMELSKCQSCDDCFASIACEQGAILPHEEIDLTKCIGCGLCRNTCPYDAISEGKIITIYMRDIDIENTCKLSSIDNIQIFENPHEILDKI

SEQ ID NO: 11792 - protein, 105 aa, Methanobrevibacter gottschalkii
MIYNNEQINIKITYANNFYKRFKGLMLKKDFDDGLLFTNLKDSSIHTFFMRFEIDVYFLNEKKYIFEKTSLKPWKFYKPKKQAKYILETRKNKLKLKIGDRLDFI

SEQ ID NO: 11793 - protein, 220 aa, Methanobrevibacter gottschalkii
MIIEYLSDFNCPYSYIGLNRIMSVCNHLNLDVIWEMKSFELEPELNNIPTCSIDRYAIRNRLSIKDAENEIEEIEKIAQDEGLNINYKNMQLSSSKDAHRLVKYVERNYPTLTQEIVLKIFESNFIKNENISDYNVLIKIAISCKLNEKEIYEFLKKETYSIEVDLDMDEAISNGINTIPYYFINYNDERLIIPGVFEKEDFKTALEDLVNGEMKNKTFI

SEQ ID NO: 11794 - protein, 36 aa, Methanobrevibacter gottschalkii
MGFYRKYNTIIRTIDNFVKLYKVAKKDSEKSKDDKK

SEQ ID NO: 11795 - protein, 1078 aa, Methanobrevibacter gottschalkii
MPIHEAEKSYEHDKIEKKVQKFWKEEDTFKKVNELREKGPKYSFLDGPPYCSGKIHLGTAWNKVIKDSYLRFKSMNGFGLRRQAGWDMHGLPIENKVEHLMGIQSKQEIEEDIGIAAFVDKCREFAIENKIAMEQEFDQLGVWMDWDNPYMTLDPKYMESSWWTLKRANEQDLLVNDQRVISWCPHCGTALAAAEIEYEEKADPSIYIKFPVRGEENTYFLVWTTTPWTLPANMAICANPEFDYVYVSKDGETYILAENLIEEVLGKQVKIHRTEISDDSEDGENQIIEEKEIMYEIIKTVKGEDLIGMSYDYILADEVPIHDKFDEIDAVHTVLEGNHVELGEGTGLVHTAPGHGPDDFEVGQANNIPIFCPVGEDGCFTEEAGKYNAKFTKDENSQIIKDLEDKGLMYKSETIEHRYGVCWRCKTPIIYRATKQWFLKVTDIKQKMLDEIGRVEWVPKWAGEGRFYDWVDNARDWTISRQRYWGIPIPIWECPDCGELKVIGSLNELKEESLNDINVSDAELIHRPYVDEVEVKCDKCGKVIKRIPDVLDVWIDSGVAGWASLYYPEEKEKFEEWYPYDFITEGHDQTRGWFYSQLGTGVISMGKSPYKKVLMHGFVLDEHGNKMSKSLGNVVSPEEVIEKYGADVLRFYLLWASKPWDDLKFVWDELLNINKMFNILWNVYVFSTTYMSLDNFNPIGLTEKDMILRAEDKWIISKANTLVKEVTEDLDKLFFHKATRKINNFILEDLSRWYVRLIRGRTWVESDDPDKLGAYYSLYTALVKLISVLCPIAPHVSEEIYENLVKGVNPDALESIHMNDWGYDDDAIDTELESKMDVVRNVIDASIRARDIAQYKLRWPVSDITVVSQDENILKAIEELTDIIKDQSNTKDVLCASEFEKLSFNAKPNLKTLGPRLKGDMGKVMKALKESDGNQIKEDIEANGSITVEGHELSNGDVLFDSELPDDFVSSEFEGGNVFVNTNVTLEIKQEAMARELIRRIQDMRKDLDLDVEANINVDVETSDEFKELIVPQSEVISHEVRAKSLIISTSEECSKYSKDYTKEWDIEGEKVIISIKN

SEQ ID NO: 11796 - protein, 712 aa, Methanobrevibacter gottschalkii
MTLADSEIEYIEGILGRKMNELEEGMLDVMFSEHCSYKSSRPFLRAFPTEGKNIILGPGDDAGLVSITDKYALAVGMESHNHPSAIEPYGGAGTGIGGILRDIISMGAMPIALLDSLRFGPLEDDKSRYLFEHVVKGISDYGNRVGIPTVAGEIEFDESFRTNPLVNVMCVGLVEKDKIVRAQAPNIGDVFLLMGGTTGRDGIHGVTFASEELTSDSETEDRPAVQVADPFTKKRVLEASLEILEKINVSGVKDLGGGGLTCCISELVDSSSNGALVDLRSIPLRETGMTPYEIMLSESQERMVFVIGPNDVELACQICDKHEISSSIVGEVIEGNNMIISDEGNEIANLPTILLADPPSINRPIVEISADTEKIDVKEPSILKSLPALLSSSNIASKEWVYKQYDHEVQVRTVVKPGDDAAVLRIDENTAIALTTDSNTIHTKLSPFDGAAGCVAEAIRNVISMGATPYAVVDCLNFGNPETPEILWQFKTAIEGMSLVAEKFDAPVISGNVSFYNETEGVKINPTPAVGVIGVEDIENIRTLDFKNEGDKIILIGKTYDELSGSEYHRTVHNIEKGTAPKIRIEEEVANGKTVLDLIGKDKDKNITAVHDVSAGGLAVALSEMVIKSGLGCEVTLRDDELDKIQLLYSESHARYLLTVKADAVDDILSKIDVEANVIGEVKGTSLFINGHEFKFEDLDDAYHGVIEQYMA

SEQ ID NO: 11797 - protein, 405 aa, Methanobrevibacter gottschalkii
MFLSKLDSLANAIKLVKDNQKFTEVEEVPISEAHKRVLAEDIMAFHDSPPFDKSSMDGYAVIAENTFGASQSAPKKFKIIDAIGAGDFSSKIVNSNEAIIIATGAPIPDGANAVLMKEYTTSDEDDLTIYSQVTPGENISPKSEDIEKGQKVLCKNTFIRYQEMGLIASAGYDTVKVFKKPRVKIIITGNELVEPTKEEIDKAKIINSNQFTTKAMVEDSGAIAEITHAGDTFGEVREAILEASLEFDVIITTGGTAISKGDVVLDALADLGEILFHGVAVRPGKPVGAGIVNGKMIFTLSGQPVASMSQFDMVVRKYLFEMQGRPFEFHLQKRVSELKVPSQLGRTDFIRAVADDECAKHVLNRGSGIIRSMVEANSYIIIDENDEGYQKDDIVDVVFFDSLLW

SEQ ID NO: 11798 - protein, 376 aa, Methanobrevibacter gottschalkii
MNGIYYYLIAFVIIWMLVTIFHDKLSNHGFELNFPIIMWKTQKLKGLISKISNFSPTFWKWYMNVGIVVAFGAMILVTGSIISSIPSIFETPSVSILIPGVDIPGSQIYVPFIYGLIGLATVVIIHEFSHGIQSVCEKIPIKSMGLLLFFILPGAFVEPDEKSLKNSKNASKLRIYAAGSVANITLAVVALMLISLISIGIPHYFAEDGISIDRIVSDSPSEGILKEGMILQAIDNHKINDSESYVNIVKSFKPGDNVTVQTNQGSYSVVLSKNPNNDSVGFFGIQAAKHYVLLNDSLGPIPWILFELFELFNWVFILNLGIGLFNLLPLKPLDGGHMLETLLSYKFKEQLVKKFVNALSGVMAIIIVFSIIAGFL

SEQ ID NO: 11799 - protein, 408 aa, Methanobrevibacter gottschalkii
MKANAQKIADGVYWIGVLDWDLRTYHGYTLDGTTYNAYIVFGEDEVAIIDNAYPGKTKEMMARIDDAFAQEGRDVKVDYIVQNHVEKDHSGVLVDLHKKFPEAPIYCTEIAVKGLLKHYPALEGAEFVTVGTGDSLDVGGRTLAFLDAFLLHWPDSMFTLLADETGILFPNDAFGQHLCFTKRFSDEIPENVLMDAAQKFYANLITPLSKLVLKKLNEVVELGLLDSIKMIAPSHGQIWTDPMQVIGAYQNWATGVCEDKITIIYDTMHYSTQQMAHEIAEGAISEGYDVEIFYLHEDERSEIVKSILTSKGVAIGDPTINDAPYPSIGDIMYYLKGLLFNRTGIERKAVTFGSMGGKGGSPAKLAEELGNCGFDVVDSQEIYFVPTADEENASFDLGVKLAKACKEL

SEQ ID NO: 11800 - protein, 258 aa, Methanobrevibacter gottschalkii
MSEQKPIQIFSDSTELRVNVVKSPVKLTILEMLRDRDMEFDEIVINTGKSKSTVSVHLKNLRENGIISYRMHPIDNRKKIFYLNSKYLGSVNFSEPKELEETQSDYLIRNIVEGDGQFSTLLFHTLKAMLIQEGINIDPILKSTGNQIGKSIFYKLYNEDLDIFMDNLSKFWEKKGLGRLTFEIGQIIKIIIYDCFECELLPKTGKPACFLDTGIMEGLFTEFFKLPVSVIETQCYTMGDGKCVFEVEPQSIKLTNHL

SEQ ID NO: 11801 - protein, 234 aa, Methanobrevibacter gottschalkii
MVKKGKLIGIGVGPGDTELLTLKAAKVLEKVPVIFSPKSAKEKESIALSIVRPILKERKDYKKIMIVEPIFPMIEDKKELEKIWDSASELVAQYLNTGRDVAFITLGDTSIFSTYSYLQKRLMDRYEIETIPGITSFTACAAAKNEALVEQNDILTIVPKIDSRIENILEYTDSIVLMKASRNSTKLELKIKNDKREKEIYSVQNCTRENEKIIEGFSHEKPYLTTSIIKFKDD

SEQ ID NO: 11802 - protein, 600 aa, Methanobrevibacter gottschalkii
MLKSNCTCGKYPKKESKGPTNLFSFTKSKSRSSSILDDEIPEVYYVDDHKQDEGTAAYLKELYPNIDDDIIENFPFDEPRIGQLEIIQDINDAIKKGYKYIILEAGTGTGKSAIATTLAKMYESAYILTMTKQLQSQYSDEFEFPLVKGRGNFACLHDNLESTCDIGACKTSPTSSKFFCPYGVAKNPTLDAELAFEDSFGGTVFYQSSGHCHYWNQKANAINSPITLMNYDYAIVELNYVKHFGTRSLLILDEAHNIESKLMSTMEVTLYNRVLEKDINKQISPQTLKDGELEDWIMEIDAIREAYEDIDLKDVSKNKSERIRSTIGRLKTLRNNLEKEPKNWVIDTDESGVTFKPLRVHHYAKNNLLKYGDVVIFMSATILSHKMFSKWLGLNPNEVYHIKVDSPFTKEKRPIVLNLAGKMSANRIKKTAPKTIPILQEILKKHEGDKGLIHTHSYKCQQYIINNLYNSRLISHTSKNREQILDFFEKDENPLVLVSPSMSEGVDLPYDKCRFQVIYKMPFPYLGDKQVNMRMKRDKKWYAYKTVMTLMQAYGRGMRAEDDSCYTYIIDSDINMLFKSPMYRSLIPNFFKEAVVRVKK

SEQ ID NO: 11803 - protein, 320 aa, Methanobrevibacter gottschalkii
MKDSKEKEHRISNLKDLIDNVKEEDSNIDSQEDSELINYLHEDTVDFDELEINDEFIYHPDDDEDYVINLEESPIDEEFIINTPKEEELKNMSDDLEEPEDIISDVSENFDQFFNAKIGKTPVLAIVSSVLGIIFIAISIIIFESRSDRVIDNVVSGETNFISVIVLGLGILLLIYGIYKVFNIKSPLNGITESINSIDGKEKVKTNASKEKETEKIIPKSNIPLDKDSYKIGEFDIGDIKNKFKKSTTSKKPKPRPEDTNNIPPAKEKEENKKELTIEKIEDIEYKQAKLDNETIDDIFAEVEDIDEIPIISIDSEEKE

SEQ ID NO: 11804 - protein, 103 aa, Methanobrevibacter gottschalkii
MEFCPECGAMMFPNNNVLKCNSCGYIKEDSDNNDYKVSKKIEAEETVKMLGEDVDVGPRTEETCPECGHNIATYKLLQTRSADEAPTRIFTCVKCKHTWRAYD

SEQ ID NO: 11805 - protein, 140 aa, Methanobrevibacter gottschalkii
MNKYKKPSVTTDIFIFDEDFNFILIKRKNNPFKNYWALPGGFVDYGETVESAAIREAKEETSIDVELKDLVNVYSNPDRDSRGHTISITYTAKGDFNERKANDDAIDIGIFSAEKLDEINIAFDHNKIIKDCLNIVKNEK

SEQ ID NO: 11806 - protein, 93 aa, Methanobrevibacter gottschalkii
MENFEIIEDKTLELTFIVKDESHGVCNALRHILMQNPDVEYAVYNIDHPLTGKPEMTIKTKRGKRPRNALQKAAEQLQKESDEFKKLIDEALE

SEQ ID NO: 11807 - protein, 189 aa, Methanobrevibacter gottschalkii
MKIEEDEIVMPGDKLGIIEQYLPGEGTYDDDGDIKSSVLGNVKINQKMKVISVVSDAKPALLKVGDIIYGQITDIKPQRANVNIECIKDNARPLALPYMGAIHISQAKKDYLEKLSDAFRIGDIIQAKVVKITGDNVDLGSTDDDCGVLKAMCTRCRDYMHTTQKADELQCNTCNRKEKRKVSKNYIND

SEQ ID NO: 11808 - protein, 334 aa, Methanobrevibacter gottschalkii
MSMYNLDLDKVIRKITSMDAQTVGLQFPEGLKMQAIKIARQIEEETDATVVISGDPCFGACDVSDYKMKGSVDLIVHYGHTPLPLKYEVPTLFIEAYSNIDIKKDLEKSIEYLKDYYRIGLVTTTQHLHLLNETKDYLEDNGKEVVLGSSPSTRKGQVLGCNFSSIKNLDAEVILFIGTGNFHPLGIKLFSNTPVIALDPYNSEIRSMDEFADRILRIRFARITKARGAKKWGILVSTKEGQYRMTLAKEIKKILEDSKMEAYIILVDNVSPDVLLPYLELDAFVVSACPRIAIDDSQMYKKPLLTPQELEIVLNKRKWENYQLDEILFHEHYK

SEQ ID NO: 11809 - protein, 189 aa, Methanobrevibacter gottschalkii
MLEEVKKSLEASPIVKKGDYNYFVNPISDGVPAMDPKMLRELSLAVYKHADLDVDKIVAVEAMGIHLATALSLTTDIPFVVIRKRQYGLEGETEVYQKTGYGSSNLYVNDLHEGEKILLIDDVVSTGGTLIALLNTLKDLGLKIKSTVAVIEKGEGKNIVKKETGVDVISIIKLDVINGKVVIEKTIED

SEQ ID NO: 11810 - protein, 447 aa, Methanobrevibacter gottschalkii
MLGNLGENLTNTMKKLVGMSVIDKKTIKEVVKDIQRALIQSDVNIKLVLELSKKIESRSLEEKPPKGITPREHVITIIYEEMVNLLGSETVGLDINERPYKILFLGLQGSGKTTTIGKLCRFLQKKGFNPAVVCTDTWRPAAYVQLKQLTEEMDVPLYGDPENKDALDLARKGLQEFKNRKVIIFDTAGRHKQEEDLIAEMDELDDIINPNEAILVIDGTIGQQAGEQAKAFSQATDIGSIIITKLDGSAKGGGAMSAVAETGAPIKFIGTGERIDDFELFDPERFISRLLGMGDIKSLIEKAEENIDEDIAEKTMTNMLTGKFTLMDMKNQFEMMNKMGPMQQVLNMIPGMGNKISKEASKMTEDKIGLYKVMMSSMTEEEMLNPKIIKQSRVQRIARGSGVEESEVKELLKYYNNTKKTMKGIGKRGGRLGGGAMNRMMGQFMNR

SEQ ID NO: 11811 - protein, 402 aa, Methanobrevibacter gottschalkii
MYELAKQILEETGGRICKNCLGRKLSKTIEGTNNIERADKVCVELNISLDDVDCVICNNIFDKLNDKLYKKINDKINQLGLEFDTFLVGSKVPKDVQERDDCLSEKFNLPVETIKKEINRLIGLELWKIYDKEAEFESQDIVFNIDLIDNPKVRIQINPLYIEGKYNKFKRGIPQTKWPCTKCKGKGCCECNFTGKQYPESVEELISEHILKLTKGKEAKFHGAGREDIDVLMLGSGRPFVLEIKEPKIRKLNLAKVEDEINKINEGKTSYHNLHLCKRNRKAEIKQSSPDTYKVYNAIVECDERFDESKLEELLKLDEIHQQTPLRVLRRRADKVRIKHVKELSYEIIDDKHFSMRIKTEGGLYIKELISGDGGRSHPNVSEILGIKAICEQLDVIEVSEK

SEQ ID NO: 11812 - protein, 155 aa, Methanobrevibacter gottschalkii
MAEEFTHLTETGVHMVEVGGKPDQKRRAIASGSIFLDKNTINLIQNDEIKKGNVLTTAQIAGIQAVKNTSSIIPLCHPLALTGIELDFDVKKDEIIATCAVNTLGKTGVEMEAITGVSVALLTVWDMVKAVEKDENGQYPDTRISDINVIKKEKI

SEQ ID NO: 11813 - protein, 53 aa, Methanobrevibacter gottschalkii
MAKKDNKISMPQTGAGLVRYFDEESLGPKLSPEHIIVATVIVAILCFVLRYSA

SEQ ID NO: 11814 - protein, 274 aa, Methanobrevibacter gottschalkii
MLTKRIIPCLDCDLQVPEGRVVKGVEFKEIKYAGNPVDLATKYYEEGADEIVVLDITASHERRATMADVIDMLTENVFMPICVGGGIRKVEDYIKMLRAGADKCSTNTAAIKNPELLTEASKVVGSQAVVIGIDAKRRYISNPDDAPDKVVVETDKGFCWFDSSIYGGREFTGIDAIQWAQKCQDLGAGEILLTSMDGDGTQNGYDIELNKAINDAVDIPVIASGGVGKPKDILDVFKKTDVSAALAASIFHFNQYSIGDVKKYLKDNNVAVRL

SEQ ID NO: 11815 - protein, 304 aa, Methanobrevibacter gottschalkii
MIIESPIDLELTQISGQTSQPPWTKVDNSYREVVLVNNNPVIFDVEQSGEFFNFNYIGNISKKEAVSSLKYIFDLEFDLNKFYKYLNGHAELAEMSKFCHGLRLFLAPNPFECIISSICSANNSIKRWTKSISDIKEKWGINHNGFHTFPEISTFQEIFLDAEEELDLTDAGDISNCKNNLKSCGVGYRASYMRKASELFSLEMDISEISKMNYDEAFETILQVPGVGPKVADCILLYGFNFREAFPSDIWIKRIVSYLYFDGKDISVPKVREFGMDEFGDNAGYVQLYMFHYARKSGLMAKLK

SEQ ID NO: 11816 - protein, 116 aa, Methanobrevibacter gottschalkii
MKIRYATMIVNDMEESVKFYTETLDFTVDEVFDVPEGKITLLDGEGFAGIELIESSNFGSGLYSIGMDVEDIHKEIENLEAKGANIAMKPIKIQVGYMAKVIDPNGINIVLVQHNR

SEQ ID NO: 11817 - protein, 458 aa, Methanobrevibacter gottschalkii
MKLEKIVLIVATLTSFFTVFLSSAVMVAVPTLASEFGMSNIIQNWVTMLFFLAVAIFTIPSGQLSGKFGLKKSMIFGSSVYILSSIAAIFSINSEIFLICRLVQGIGVSFLNVASMAMVVSAFSPQERGKAIGINVTGVYLATSTSPVIGGFLNFHFGWRSIFLTSVPFLILILVLLITEIKEEWVTMGDVPIDWKGSIVYSLGILLFIYGFTRLDESTGIILTVIGLIVLGVFVALELREKYPVFDVKFFKNPKFSSANFAALTAYLATFAVTTIVNYHLQYIRGYDSQMAGIILLVAPLIQVIMAPISGRLSDKINPQKLAAIGMFFGAISLAMLSMLNVSTPLWFLIIAMVSHGLGFGIFSSPNTNAIMGSVPQKDTPVASASVATMRVIGQTMSMGMLTLVFAFVMGNVPMIEKYFPLLITSSQITCLICMVLCAASVFASLVGIKSKEMLEFN

SEQ ID NO: 11818 - protein, 143 aa, Methanobrevibacter gottschalkii
MKVATIETDKGNIELELFPNEAPGTVANFEKLIKEGFYDGLTFHRVIPNFVIQGGCPKGNGTGGPGYTIKCETEGNPHRHGTGALSMAHAGKDTGGSQFFITHSPQPHLDGVHTVFGQVIKGQDVVNAIRQGDKMNKLTVEER

SEQ ID NO: 11819 - protein, 386 aa, Methanobrevibacter gottschalkii
MNTQELIKIEDDYFINTFTRQPVVLDHGEGVRVTDIDGNEYLDMFAGIAVNSLGHNNPKLVKAIQDQAAKLIHISSIYYNEPALIYAKRLIDLTSFDRIFYANSGAEANEGAIKLAVKYTGKSEIISTVDSFHGRTIMTLAATGHEEYHEPFKSIMPQGFINVPYNDLEAIKNAITENTAAIIVEPIQGEGGVHVPDVEYLKGIEAICREKGIVFIVDEVQTGFGRCGTLFAHELFDVKPDIMTMAKGIGGGVPMGGILATEKIASAFVPGDHGTTFGGGPLVCAAANAILDEFADKNILDNVNEVGGYFISELKKLDKDIIADVRGKGLMIGLELTKPGAEYVDKLRKAGFLINCTAGNVLRFVPPLIITKTDIDEFVEALDEIL

SEQ ID NO: 11820 - protein, 427 aa, Methanobrevibacter gottschalkii
MDLNIKVNDKNHLDIGGADAIDIAEEFGTPTYVIDENRIRDNYNRFYSAFSKYYPDFKVFYACKANTNLAVMKILESEGCCIDAVSPGEVHISKMLGFSGDRILFTGNNITNDELKYVHDEGAVLNIDSVSALNRLSKMIDPEGVKISFRVNPMVGAGHHDHCITGGIMSKFGIMESEAVEVYKKAEKLGFNPVGMHSHIGSGILDPEPFKLAIESTMDIAGKVHQDAGIDFEFVDFGGGVGIPYTPEENVVDLDKFAEVNVGLFKEKLEQYGMGNPTMYLEPGRFLVGDACVLLVTVNSLKQSYRKFIGVDAGFHTLLRPAMYDSYHHIVDASRMNAENTQTVDIAGNVCESGDLFARDRLMPDVEEGDVLGILNAGAYGFTMSSNYNSRPLASEILVTDGECSVVRERETFEDLYAKQSIPPHLK

SEQ ID NO: 11821 - protein, 286 aa, Methanobrevibacter gottschalkii
MVDLKGLKFSKMHGIGNDFPIIDETKGKVISEEDKPEACRILCHRNFGVGGDGVLFVEPSDVADIGYRMFNPDGSEAEMCGNGIRCFGDFVYRKGILKKEKMTVETRAGIKTIEITLEDDEPVLFKVDMGLSTFKTPEIPMISEMDEFLDCELEVLDTTFNLTAVSVGNPHAIIFVDDLDEIDIDKYGPAIEAHEVFPEKINVHFVEVISKNEGKMRTWERGAGVTLACGTGATSTAISGYKLGLFDSNILLHLPGGDLKFNVYEKDDALGAFMKGPAELVYDGEF

SEQ ID NO: 11822 - protein, 194 aa, Methanobrevibacter gottschalkii
MPDFKINIDDNVYIPAEDSYLLADNLQIKKGQSVLEIGTGSGIVAMYASRLTDNITVTDINFDACELACKNFEANNIENIEILFGNLFDPVQNRKFDVILFNTPYLPTEKGEVLDDTINYAFDGGLDGRKVIDAFLNEVGNHLNDGGIVQMIQSSLSDNEETLKKLDKLGFISEIAKKEHFFFEDITLINAYKI

SEQ ID NO: 11823 - protein, 290 aa, Methanobrevibacter gottschalkii
MNSENSISLSKTTKSILNQNGIKLNKNLGQNYLIDKNKRDQIINFGNINENDVILEIGTGIGTLTIELAKKAKKVIAIEQDKNICDILAKRLKEEKIDNVELLNEDALNIEFPKFNKIISNLPYQISSPITFKFLEYDFDLAILMYQKEFADRMNGEVGTKNYSRLSAMLHFKCDVKKLTDVSSESFIPKPKIDSTVVKLTPKKNKISLEDFKIYSKFTKALFQHRNKKIRNALIDSRHIITNLDKKEMKKCMNEIEDEKLNNYLKKRVVVVTPEEILFLSKDLNSILNG

SEQ ID NO: 11824 - protein, 210 aa, Methanobrevibacter gottschalkii
MVDNKKRNGKKPTVKKEQYAVVLDYLSRGYVKSDMSKFGGKPIAQAIGTEQFTLLELAPKNGVDLEIGDTVFIGQGKKDKIYRVLGRLNFERLTATSRIELDYTIRDIVESNEEKYVNFFNTTGAVSTRLHTLELIPGIGKKYMWDIINAREEKPFESFKDITERLPTLTDPAGMIVNRVKQELDRNAIKRGKSKYYIFTQVPKKPRNPR

SEQ ID NO: 11825 - protein, 117 aa, Methanobrevibacter gottschalkii
MISMIGKEIIESEPISSAEVKKVLEDFSEDNELNYEQNITLNHLARFKRYSVEDSEEIIEKLQEEFGLRDKVAVRIVDLVPKDLADLRLIFAKEAIKIEKPDMEKILELLEQYNIEE

SEQ ID NO: 11826 - protein, 96 aa, Methanobrevibacter gottschalkii
MQRSRGLKSRSRKKMTKTQRPGRTNPITNRMQRFEDGDLVHITINPSIQKGQPAPRFHGKTGKVTGQKGKAYIVSLKEGNKAKELIVRPDHLKLQK

SEQ ID NO: 11827 - protein, 772 aa, Methanobrevibacter gottschalkii
MERTSELGKNLHESTKINVEKNNGIKERFSYEKLLKSLVMVETPFFESDKIVATVVSQLYDGIKTKEIKKIVHECLEDIDSEIANKYLASTRLKVRTSRDTIEAFDLSKIANTLIEETGASQETAFEIATETWKELKKLNVEYLTAPMIREIVNTKLVEYGLEDLRSRYTRLGIPVYNITNLIENGNRDNANMIHNPESIHKHVADEALKQYALLKMLPAHLADAHMSGDIHIHDLEFFAGRPLNCMQHDIRTFIKYGLKVDGTGDHTSIAGAPNHMETLMNHTGEIMLAAQQNMSGGQGMSLWNVFVAPFARGRTYEEIKQSVQMLVYNLNMAYAARGSQVPFTSMALEFGVPDFLKEETAYGPKGQVVGTYADFEEETRLIQRAFTETLLEGDNEGKPHLFPNTIYTLRKETMTSEYEEDIRLVHELSAKYGSSYFVNMFPKYRGNMANYMGCRTCLQDTWTGDWDQDCLRTGNLAYVTLNLPRIGYQSKDESQVFEYLDEYMDLAVETLMLRREQGLKCLNDFHILPFLKQQVAEDSYYRIQNSTLSFGFVGLNEMLSSLFGAGIENADANKFGVKCIEYINDRANQLKDETGLRWSVIQTPAESTAYRFATLDKKQYGDQAIVQGEGNANYYTNSSHVPVDTGLSLIEKIKIEEQYHSITPGGHIFHAFMGESYSDPDSLMSLTNKIAKKSDIGFWAYSSALSFCLKCKTLMKGLNNVCPTCGEKEDVEWYDRITGYVQQVGRAKSASGGWNPGKRQELIDRRRFEDN

SEQ ID NO: 11828 - protein, 1098 aa, Methanobrevibacter gottschalkii
MDYFDRLEADTHHLYDIANKARSRGLDVEIETEVPLAKDLAERVEGLVGPEGVAKRIKILEQNITREEVAFEIAAEIASGKFELTGEKANWDTEQRCDQGLRTALAILTEGVVAAPLEGISDVKIKDNFDGTKYIGVYFAGPIRSAGGTAAALAVLLGDKIRQAIGIDAFKPIDDEIERYVEEVELYESEVTNLQYSPTPEEVRFAANHIPVEVSGEQTDKVEVSHRDLERVETNNIRGGALLAMVEGVIQKSKKIKKISNKLGLDWNWLEEYSKPKKDDSKEDSGDSEIVSEPKYIQDIIGGRPVLGYPSEKGAFRLRYGRSRNTGLATMGVHPATMALLDFLAVGTQLKIEYPGKGNCVVPVDSIEGPTVKLKNGDVLILDSVKKAREVKKDVVEILFLGDMLVAFGEFLRNNQTLYPSGWCEEWWIQLLMRSDKFDAENTDLDLYKLEYEYLSATEAFNLSKEYNIPLHPKYTYCYNDVTIEDLNSLIDLIENGKSTFNKDEGMKLDLSYQKRILEIIGVPHIVRNDKIIIDKDHSYSLLETLPKKLPENETTIEAVNEISPIEIKNKAPAYIGTRVGRPEKSKERLMKPAPHGLIPIGNNGGSRRLVATAAKKGSVKVDISRRKCTNPECGISSFGSLCPKCGSPTEVGKPSQKTIPLATMLKKASDNVKVRRVDEVKGVVGMISESKLPEPIEKGILRAKHEVFTFKDGTIRHDSTDLPLTHFIPKEIGVTVEKLLKMGYEKDCYGNPIENENQIIELKVQDIVISDNCGEYLLRTAQYIDDELERYYDMDPFYNVKEKSDLIGHLVAGLAPHTSAGVLGRIVGFTKALACYAHPYFHSAKRRNCDSDEDAVMLLLDALINFSKSYLPNTRGGSMDAPLVLSSRIDPEEIDDESHNLDIFERFPVEFYEETYTPHKPAEVLKYIDNVEMHLGTPQQYEGLMFSHHTSSIHAGPTVCLYKRLPSMREKVEAQIALAETIRAVDQRGVVEKVLSSHFLPDIMGNSRAFSKQKVRCPKCGAKYRRMPLTGKCKCGGNLILSVSKGSVTKYLEISQELVNRYPVSHYLKQRLEIQEFGINSLFESDKSKQSSLDIFF

SEQ ID NO: 11829 - protein, 317 aa, Methanobrevibacter gottschalkii
MSNDKPINAMYGSKMKLDLDKLKNNRKKDDEGKVIETKHILEGSEEPVVEDAPEEVVEETVKKEAMEEAVKEKPSKNVDSSVVDSLKVKLGEREKKLSNQSSELNYLTNKLIPKLKKENANLKSLKIELTDALEKSTRKYFDQLDINADLSNKIGKIGAEGAVNKVRADKFEAEINSVKEELQDKINQYKEKLDSVNIDGLKKENNELSCELRDIKTELDKTKKENMKLSEEVKSLRDEIIEIGNYKQEVDNQNKKEIEEYKEEISSISTKLRLKESSYDKLFNESSKTISNLRKQVAKLEEDLEKESNRGLFNRFK

SEQ ID NO: 11830 - protein, 163 aa, Methanobrevibacter gottschalkii
MTNDNYFMDEAIVEAQISLNEGGLPIGAVLVKDNEIISRGHNRLIQNNSVVLHAEMDVLEKAGRLNYEDYIKCTLYTTLSPCPMCSGALILYNIPRVVIGENTTLMGAENLLESNDVEVVILNNLECRELFLKFVKDNPGVWEKELKKVGNNTTVKYGDYCNK

SEQ ID NO: 11831 - protein, 125 aa, Methanobrevibacter gottschalkii
MEIIVTNEMDERFIEICNSFECFSDEPQVVLLLNNFGKIVGCASFKVYDADSAEITTLFLNSHDNCEKIAYKLIRQLEKIAIDYEFKSIVVNFDSYEDILIEIFEKLDYKFIDELLMKKEFKSLI

SEQ ID NO: 11832 - protein, 527 aa, Methanobrevibacter gottschalkii
MTHWIENVAKELAERDVEEHVIASGTSISGSIHIGNSCDIFIANAIGKKLRKLGKKAKTIWIADDHDPLRKVPFPLPQDYDKYLGMPYSVIPCPDGCCANFVEHFEKPLLSVMDDYGIEMETKSGFEMYKNGVYNDYIRTSLEHTDEIKEIFNEYRREPLADDWLPYNPICDECGRVNTTYAYDFDGDIIKYRCECGHEGEMDIKSGNGKLTWRVEWAARWKIFKTTCEPFGKDHAASGGSYDVSSIISEKIFDYPAPYPVPYEWITLDGEAMSKSHGVFFAPEEWLKIGPAESLNYYLFRSKPMKSKDFSPKMPFLDFIDQFDTVEKVFYDEEEAPSEKEGKKFKEIYEIVQINEGSPLPFRPSFRFLVNAYQIAGNDLEKIYGILKRNSQLSKSFKDKEFGDLTEAELAQYRERVDNVIYWLDTYAPKFVKFQVQEKNIPKLPLTDEQTKFLTDLADLMENNEFAEATQLHDAMYEILESQELKPQKGFQAIYKMILGQKQGPRAASFLLSLDKDFVVKRLRQEA

SEQ ID NO: 11833 - protein, 445 aa, Methanobrevibacter gottschalkii
MTVLKLIGLWCDKMTQISDARKGILTEEMKHVAKIENVSEDFILKSVAEGTIVIPGNVNRDVEAAGIGAGLRTKVNATVGTSTDIVNFDEEVQKAKIAIDHGADCLMELSIGGDLDEIRRRVLDMSPLPVGSVPVYQASIESIREHGSVVDMTEDDLFNAIEKQAKDGIDFMAIHSSINIETLTRLKRQGRVTGLVSRGGSFMSGWIVENEKENPLYSNFDYVLEIAKEHDVVLSLANGMRAGSIADSTDRAQIQELIILGELIDRSREAGVQCMIEGPGHIPINEIPTNVMIQKKMCSNAPFYMLGPIVCDVAPGYDHIVSAIGAASSAKAGADFICYVTPAEHLALPNPDDVREGVIATKIGAYAGDLATGQIDGSQDLAMAEARKNLDWEAQYSCAMFPEAARAKRDQRPPEEEDTCTMCGNYCAVKIVNEWLDKSDSDLIK

SEQ ID NO: 11834 - protein, 304 aa, Methanobrevibacter gottschalkii
MAKNRDLLAIGHSAHDYIIRVPEFPKANFSAPITNMKTFNGGAAANVACVGAKLGLKTSLVSAVGGDFKKTEYYEHMQNLDIDTDSLIIVPGESTPTAFVLTDDNEDQISYFYWGAAREFAESKVPASAIKNTEAVHLATGDPNFNWRCSEEAKNEELLVSFDPGQDLGMYDIKKLRDVIENTTILFGNHHEIGRILESLEVDLDGLRTLGPKIIVKTCGAKGSEIYSNEDKIKIDAIETEVVDPTGAGDSYRAGFLSRFLNGESLEASAKFASTVSSFIVEHQGCQTNMPTFDDSFERMNRFY

SEQ ID NO: 11835 - protein, 288 aa, Methanobrevibacter gottschalkii
MEFESKGLISLEIEGEVYGYKLYESLDSLTKTKSQRKSAKELNISHTVFNRRILRAEKKLGFKLTEKLGNGTELTKEGLDLLEEFKKYAIQIEKTPTINIVGGHISTGLLESIELPFKTNIYSSNDEDAFELAKRGVVDILTLDDPLIAFERDINFYPIAYDYLVLISSPDSEKIESISDLENLDFVSVSGSAQRLAWNSLKHYDIHVNIKENVSSQFDAYKKVRNSKNLHTFLNASYFKGNELLKFNTQHVISLIKVNEDKAKVDEFIKYLTNEAQESIEKQGFTPM

SEQ ID NO: 11836 - protein, 196 aa, Methanobrevibacter gottschalkii
MEIMKTSIKAILDNIKNAEDFLDEKAIDEFENIIIGSKNIFVTGAGRSGLAAKAFAMRLMHLGLSAYVVGETISPAIYEDDCIIAISGSGETNTIVSAVKIAKNRGSKVLALTSYPESSLGQLADAYILVKGRTKKEVDDENYMKRQIHGNYTSLTPLGTAFELTTLVFLDAIVSELMEKMQQTESDLKARHTVLE

SEQ ID NO: 11837 - protein, 249 aa, Methanobrevibacter gottschalkii
MKIEKVNAIKYKNNQHEEVKENVVKDETITLTINGEISRSLSAIEDSLKEFAVGYLFNENMVKSLEDIKKIEIDGVQINAEIDDTLLKTNETVLCSDSAGGWRSKIKEVNPVESDLQVNVKELLDRIEELKNNAEIWQATGGTHVAGIVHNGQFVVKEDVSRHVAVDKVIGYGLLNGFNLNQSYVIYSGRMPADMVIKMSRAGVPILASNAAPANSGYNIAKKGNITLVGFLRGQRCNIYNNQNRVIFD

SEQ ID NO: 11838 - protein, 189 aa, Methanobrevibacter gottschalkii
MNIDDYDEQLQRAVEFHGELCGGIAIGTKLGMYGLELLGMELNQRHKNLIVILESERCTSDGIQSVTKCSIGKKSLKLVYYGKFAATFYNMDTGEAYRVSDADANKKNKSNETKDELVERFRITPPEELFNVERVHVKPFKGAQKPGGNHKTRWCSVCGEKVTDDYHKLRAGKPICESCANGSYYEIIE

SEQ ID NO: 11839 - protein, 267 aa, Methanobrevibacter gottschalkii
MSSFKSPVDTAKAISKTAGAKNSANIVNVILLSFLAGAYIAFGGLLAIVSSAGMIKAGAPLGLEKFVFGAVFPVGLIIVVLAGSELFTGNVMFMVMGVLDGSASIGGLAKNWVLSWVFNFVGALFVAYVIAFMGGLCPTDASVPAYAITAKAIAVAEGKVTMPFTVALIKAIGCNWLVCLAVWLANVSDDAIGKIVGIWFPIMAFVTLGFEHSVANMCFIPLGMFLGAKGVTWTTIIVNNLIPVTIGNIIGGGLFVACIYWYTFLKE

SEQ ID NO: 11840 - protein, 721 aa, Methanobrevibacter gottschalkii
MVEIKYVPTICPYCGTGCGLNFVVKDGKIVGVEPLKRSPVNEGKVCPKGNFGYQFINREDRLTTPLIKENGEFREASWDEALDLVANKLKEVSDEDPNKVGFYACARSPNENIYITQKLARVACGTQNVDHCARICHGPTVAGLANTFGSGAMTNGFDSIKEADYIFCIGSNNMEAHPLFGRKMIQAKENGAKLVVLDPRFTPTAKIADEYVQFETGTDVALMNAMIKVIIDKDLQDDEFIANRTKGYEEMKETVQKYTLDKVSEITGIKPETIEHLAVEYASADKAAIVYSLGITEHSHGADNVMSTANLAMLTGNIGRQGTGVNPLRGQNNVQGACDMGALPSDYVGYRKVKDPETTAWFNDYYSGDGYEVNLPTTPGLTLVEMMNAAHAGDLKVLYIHGEDPVLSDADVKHTKEALENLEMLVVQECFLTDTAQCADVVLPAAGWGEQEGTFTSGERRVQCLHKAQEPPEGAWLDWKIMEEIAVRMGVPRSLFHYETSEDIFNEIRECAPIMAGMNRERLDTPEALHWPCPSEDDPCQPLMHKEKFAHPDGLGVFQALEHKGPVETTDEEYPLVLTTTRVLFHYHAAMTRRCETLNNEVKTGFIEINTKDAEERGIINGEVVRAYSRRGEIAIPARVTDDIREGIVNIPMHFVECAANVLTNSDSFDPKSKMVELKACAINVEKLPEKVVMRGEVYKDGTDTEIKAENMATTTIKVGK

SEQ ID NO: 11841 - protein, 401 aa, Methanobrevibacter gottschalkii
MSAKINDMYYAYSAIEDIKEKGEYGGVVTTIMKYLLEEGIVDGVVGVTEGHDMYDGVPILVTDPADVIKTAGSVHCGTLNIAKFVSKYLDGARDMKLAVACKPCDAMTIRELMKKGKIIEDNVIMIGVNCGGTFSPVPTMNMIRDVYELDPKDVIKEEISKGKLIMETADGEKGIAIGELEEQGLGRRENCQRCNLKIPSNADMALGNWGVIGDLAGKATFIEVFTEKGADALGKVIDAGLIATEEPLEKGIKIRENINNFMLKESLEKKDVDYAGTTGDIIDVFHMYEDEFSKCMKCYGCREACPLCYCDDCCLETEGPEWVPGGYTPAAPFFHLTRLVHMVDACTNCGQCSEVCPCEIPVAKVWSIVNNKVRDIYGYIPGMGSDDPLPFTDHVSKAKWI

SEQ ID NO: 11842 - protein, 311 aa, Methanobrevibacter gottschalkii
MLKNVVKDKYERPILSLRITITNRCNENCIYCHHDGMVSSKDEMTPDELYKISKIARKIGVKRMRLSGGDPLVRKDIVEIVEKIASLDFNDISLTTNGVLLEKYAKGLKDAGLDRVNVSLDTLNRDTYKYVTNMDYLNEAKSGILKAVEVGLYPVKINMVIMKDVNVHEIKDMFEFCKEHGIILQLIELIESENCEDDKFSAEHHYSLDSLEKKLTDMADKVHERKFMQGRKKYYIGEGEIEIVRPVDNAKFCASCSRLRITPDGKIKPCLLRNDNLVELISHIRNGKSEEELEELFINGINNREPFNKED

SEQ ID NO: 11843 - protein, 345 aa, Methanobrevibacter gottschalkii
MKIVSIVGRKNTGKTSLTVKIIEELTKRGYNVASIKHSHHSMEMDKENTDTWKHKQAGSNVVVGIGSTTFFNARKEMDLNRLLFLIKHMDPVDFVVIEGFKKYNYPKIATSPDVVDEYTIKEINSFTIDDKGLKELVDIIEERSHDIVDTLFANNCGYNNGENIASEIREGNLTVDELDNVHSYLSIDNKVVGLNRFVSDFLKQNVLGVINTLNLDDYNIEKISNIELIIPNEVDKTPINAECTVLINGNNLKINNFAKNLVANSIKGMINSIKTEDNAKMIDIAISNIKNNELKKATINLKVNNHNVEINRFTQKILKETIFAIVNSLRINEEIAELRIKVEER

SEQ ID NO: 11844 - protein, 149 aa, Methanobrevibacter gottschalkii
MPKHIASGLKYLAAVKLKMAGKSHQEIADELGVDRSTISHYLNGRNLSWNSIDVARTIIDLCPKDFLTMTEAIFNNPEQSRKIVNICRERNFEAKVEDSCIGCGLCVNACTMKAIKLESLKAHADSMQCCGCQLCEDECPTNSIKILEI

SEQ ID NO: 11845 - protein, 365 aa, Methanobrevibacter gottschalkii
MIRNLKEVKDNNFDITRSADEVRNLSFNDHVCLGCGICESTCPVEAITLNAVAIDARNRLSNDIYFSGHEKIAQNFREDFDVQRISIDESKCVLCGMCSGLCPVDALVLTIDDVPIREIEAYPHYNAFSEIDDDECIYCKRCEIACPRDAIVIERVLPDRADLVTGEINVDDDECIYCGICEELCPAEAIVVDHETGKESIVIDKDKCVYCLVCKKSCPTNAINAICRLCNYGEYDLDSSKSVVKGNSIIDPDLCVYCGWCEGVCPTDAAKVKKPFKGSIEVDDEKCQACGACVDICQCNALAFPVSTGPGSRMAHVVANDDYCVRCKACAKACPNGAITVKRTEVDHTPINSATWKEALDAIKD

SEQ ID NO: 11846 - protein, 76 aa, Methanobrevibacter gottschalkii
MELKVNQDNCLGCGICVIACPVNAAISPENAGGNGAKTEEVIMMVENGFIKLFSPEKCELCGTCQMFCPVNAIWLE

SEQ ID NO: 11847 - protein, 189 aa, Methanobrevibacter gottschalkii
MYYANTYLEKPVVPDVKITGEGNTEVLKCMLNTGSDIYQGACKKRGSTLKQEYKNVSGTCYMDPRDMAKLGVNNWDTVLVKTDFGEVVVNCAVSRDAPHEGTVFICKGPWANTIVSHDTYCCSDPTYKGIKCTVEKTDRKVLLMADLMRWVYKKYVDEEDDDVVENMESLGELPVYHGRKWEELIDHDL

SEQ ID NO: 11848 - protein, 458 aa, Methanobrevibacter gottschalkii
MTYEPPVTDYDHIVENCTCAFCGCNCDDLDYLVKDNHVVAVRHACRLGASKIMEDMDQRLLVPMIRDENGELTEVDWDTALDKAAEYIANSIRPVFYGWSETSTECMKEGVALGEYIGAVLDNQATICHGPSLQAVQNAGYPIQTLGEVQNRADMIVYSGSNAMNSHPRHLARYAAFCRGYFRQRGRFDRTVVTMDPKFSDTAKCSDKWIGFEQNGDYGFYNAIRAVLRGKELYQDVISGIPKEDIYELAEEMKQAEFGVLFFGLGLTHTLSKQRNIDIAIKMVQDLNKYSKWGLTPMRGHFNVNGFNIFMAFECGFAFGVDYCRGYPRYMLGETNTIDLLVRKEPDCFMVIAADPGAHFPNGANQHLADIPVIQIDIHWGPSTELADVVLPGSFIAVECDGTSYRMDGVPIYMKKAIDKPETCRDDEWIVRELKERVMKLREEPNVAPKYVPNPNAL

SEQ ID NO: 11849 - protein, 571 aa, Methanobrevibacter gottschalkii
MEYILKNGIVYDPANEINGEKKDVMFKDGIIVDDVSSDAKVLDVTDKIVMPAGIDPHAHIAGPKLVVGRLYRPEDSRRGVTQKTKVLRSESGFSIPSCPATGYRYSRLGYGTVVEAAMPPLEAKHTHEEIATIPQLDIPALPLFGNNWFVMEYAKDNNIEDIAAFVAAWLKISKGYGIKIVNPCGSEAWGWGMNVHGVNDKAPYFDVTSKEVVVALAKANEMLNLPHSIHIHPNDLGHPGNVPTTLETMDAVKNIKKGSKAAEIRDQVMHLCHLQFHAYTGNSWKDAASGAEELTKYINKHDHVTCDVGQITFDETTTMTADAPMEYDLFKLSGLKWTNKDIECETAAGIIPCIYSPKNPVNTLQWAIGLELFLQIEDPWKVCLTTDHPNAGPFTRYPRIISWLMSNQRRMEMIENREVHKWAEKRTTLATLDREYDFYDIATITRSAPAKIYGFTDRGALTPGYRADIAVYDINPNEIDPSRQAADIEKGFNIADYTIKDGQILVKDKEIVKVKESQNMWVNVKGWEQNEQKVIDNIMPFFTQYYSVKWENYPVHDHYVSNPIRIDVDGK

SEQ ID NO: 11850 - protein, 288 aa, Methanobrevibacter gottschalkii
MKTITFDQIKTSSIALEFDEVIPDEIFSWTEADFAKYQVPIGNSRFPITDFFDITVEGDAAGPDEVKMILNGDLNRVKYIGCKMSGGDIVCNSSVDLHVGAEMSGGSILVKGNAAAHAGREMSGGYLEIEGNTKEFTGASYIGEWRGMTGGQIVVGGNAGKQCGECLTGGRIHVKGNCDILAGIHMTKGIIEIDGDVNRWPGGQMKNGNIIIHGFLGRLLEGFVLDGVVENPEIEGTTFEGKYIKYTGDIGLNGKGNLYLGAEANKEKLASYGEIDDEYTSIREYRNL

SEQ ID NO: 11851 - protein, 96 aa, Methanobrevibacter gottschalkii
MIEEIEMTFDEVLSYVKTKVDVGDVLEISYNRIFAPGEVLGFTEEDDMTGEGFRVGLQLNGEILNQSIEIDFNEIEDDLIEMRHITDEKELIIEIL

SEQ ID NO: 11852 - protein, 96 aa, Methanobrevibacter gottschalkii
MKELKLTTKEAVNYLKENVDIHDRIEISYNRIFAEGEILNMDFSEYFGKPGFKMLISLDESHLGATVEIDVYEVEDDIIEFNHYPKDGEEVDVTVI

SEQ ID NO: 11853 - protein, 560 aa, Methanobrevibacter gottschalkii
MSESEHRMIEILRILSEQEKPTGSKLIADELKNKGFNLGERAVRYHMQILDEKGFTERIGNSGRKITKLGLEKLEKGLIYDQVDFIYSKFEEMIYLTDFNYMTQEGKVVVNTSTIYNEESVDIIKNIIQSDLSVSPYVNLNRIGNNGEMEVTTLCGTTIDGVLLNEGIPSQPKYGGLLKIEDSEPVKFTELISYKKTSVPPLEAFSAKGCTSIMDVVENGEGIIPANFRLIPGIGREKAINIINKLDKIGIGGVIAISEEEKDILGLSVPEGMVGISIVGGITPFCAVQEQNQDIEIKIAEEIKDFKTLSPITSKIKPVLKDIKPTPQQKISFLLSKTWNLIQQVNFDIEKRKGDIISNVSFIDKDKIDKSLSVMEETYNDNPKYINPYYKLINHPTNDSKIGIATICSLSIDGILIDNGVMSNPKYGGLLELTEPPLFIDLISYNGSTEDPHKIFLAKNMTSITRNNGSNKILASFKEIPYISREHSVQLLEILNNIGFSIYKIGKPREVTYNAKADNYNFGIVTGSGLNTIGAIKEKGIDVEVKAIEKLLPFEKMDRL

SEQ ID NO: 11854 - protein, 452 aa, Methanobrevibacter gottschalkii
MSDIPEEKIERITEIMKEDNIKFIRLQFVDINGTVKNIVIPFNPEDDMSELFNEGMLFDGSSIAGFVGINDSDLVLKPDINTYSRLSWRPEESATCRFICDVWTPEKKPFAGDPRGVLKKSLSHIAKMGLKYNIGPEPEFFIVDIDENGYPMPYDNAGYFDVEPLDKGPDFRRELTLNLEDLDFEVEASHHEVAPGQNEIAFKFKDALKTADAVITFKQAIKAIVDNMATFDQLDYRVTFMPKPFFGVSGSGMHCHQSVFKGDKNLFSDPDSENGLSKDALYFMGGLLKHAPAVTAITNPIVNSYKRLVPGYEAPVYRAYGLRNRSALIRVPAARGKATRIEYRSPDPACNPYLAFTVMLEAGIDGIVNKIDPGEPVELDIYSMSEEERIERGIKVLPTSLWEAYHSLEEDPLILNALGSHVSEKFLELKYKEWDEYRVQVFGYEQKKYLDI

SEQ ID NO: 11855 - protein, 250 aa, Methanobrevibacter gottschalkii
MPTRYIGDGYWEIVSRQMSIVTRSEQQKFKDTKITVIGCGGIGGQTIEMLARMGVGEIILVDEDSFDMSNLNRQNFANLNGIGIAKSEVAKDKVRLINPYVKVTGFNEHVDETNIDKIIGDSDIVIDALDNVLTRVISSRKAIEKKIPFIHGAIHGTLGQVTTFLPNTKSYEEMFNLPSFGKDLTEEVTESLKNITSGTPPVIGPTPNLIGCLQAMEAYKIITGVGKVTVAPKILTFDLLDLGSFLLEEI

SEQ ID NO: 11856 - protein, 388 aa, Methanobrevibacter gottschalkii
MLYNTLGKTGLKVSRLGFGTMRLPTINSNADIDKQEASEMLSYGIENGINIIDTAYPYHSAGIDGNGNSEKFLGEFLKENNLRDEILLQTKSPSWLIEKKTDFEYYLDIQLEKLQTDYIDLYLLHSLTVPDWNKVHDLEVLDFLDDCLSSGKIKHVGFSSHIEIDYLIEILDEYPKWEVALTQMNYLDEYYQSGVMGLNYLKEINMGSMVMEPLRGGRLVQNIPNEVQELWSTAEKKRTPVEWALQYLWNRNDVDCVFSGMNSLNQVKENVRIASIEDKISENDQELIREVARTYRTFLGNSCTRCGYCMPCPHGVDIINCLTEYNIAHMMQNPKASAMQYFTLIDDDSRADSCINCGECIPFCTQMLNIPEELQKVYEYFGSEFNHF

SEQ ID NO: 11857 - protein, 416 aa, Methanobrevibacter gottschalkii
MSKVKDISLAPEGIRKIEWVQKHMPVLEHIKQEYLETQPFKGITIGSCLHLEPKTINLGLTLMAGGAEVAMTGCNPLSTHDDAVAGAADLGLNVYGWREQDDEEYYQTINMVLDHKPDIIIDDGADMIMVLHNERTELLSRIKGACEETTTGVHRLQAMHADGALKFPVIAVNDAYTKYLFDNRYGTGQSSFDAIMGTTNMVIAGKTVTICGYGWCGRGLALRADGLGADVIVTEVDPIRALEARMDGYRVMTIREAVKQSDLIITVTGNSDIISGDDFKYMKDGCMLANSGHFNVEINRPDLEAISTEVKEVRESIEEFTTKDGRKIYLLADGRLVNLSAARGQGHPAEIMDMSFAVQALSAKHILENDLSVGVTKAPDEIDYSVATMKLKAMGIKIDSLTDKQKDYMSNWQEGT

SEQ ID NO: 11858 - protein, 216 aa, Methanobrevibacter gottschalkii
MSFFKYIDNGEGPTKLFIGGLHGNEGTTSLKFIKRIKDENLSSGQFYFYNFDKTPYISTVDKEYYKSELGQKVLGLIEYLCPDFYTELHCYNLKNYDKLTSMERYKKTGIPPLIKLGNHVLVSSVSPLIRMTYFSTETVCKTLEFPCFEKLNSEIIEKYNFNKSLAIETYEELLNLILSSPSRDHFEREMLKKHENQVHIAMRYAEKVFGKDFPPY

SEQ ID NO: 11859 - protein, 111 aa, Methanobrevibacter gottschalkii
MNFLNNCIIVFHVTHRFVKDVQIKGILDMDYYGEIENPLQYFDEDKNLIWHIPPNPYRGGTKEYVAYKKLIEEFKPDDGFIELLAVCGEYPEYYHYDWYDIEMEALTWESI

SEQ ID NO: 11860 - protein, 327 aa, Methanobrevibacter gottschalkii
MGVKLKDIIEPESISFKDLEGRTVSIDAFNTLFQFLSTIRQRDGRPLTDENGNITSHLSGILYRNSSMVEKDIKPIYIFDGKAPELKSETQAKRREVREEAEKIYKDALSRGDAEKARKFAMRSSKLSPEIISSSKKLLTLMGIPYVDAKGEGEAQAAYLVQNGDAYAVASQDYDCLLFGAKRVVRNLAVNSNLGNLEFYQLDKVLRELDITREELIDMGILIGTDFCDGLKGVGAKTALKLAHKGQLKEKIAELQKESAHDLDEVREIFLNHNVNTDYKIKWEKPQKDKIIEFLCYEHGFSEDRVLKASDKLKNLNSSQGSLDAWF

SEQ ID NO: 11861 - protein, 187 aa, Methanobrevibacter gottschalkii
MSEPKNEANRGLIDKITQVEQEYGKNFSNTQKILLTTDGSITAILDVLYGKITLSTLDQHFEDADEYHAKLVNVNKGDEINYREVIMHRNGKPLIYAISHIPLSRCTKEVCADLIRADIPIGRILKNYNIESRREINNIYIEKPNETLKELFGTDEDMLARDYVIINHDKILMWIKEVFPISYFTEI

SEQ ID NO: 11862 - protein, 417 aa, Methanobrevibacter gottschalkii
MNITEKILSAKAGHEVTSGEIIEIPVDLAMSHDGTSPPAIKTFEKVAKNVWDPEKIAIIFDHNIPANTIGSAEFQKVCRDFIKTQNITKNFIHGEGICHQVVPEMGLVEPGMVIVGADSHTCTYGAFGAFSTGMGATDLAMVWATGKTWFMVPEAIRMKVEGELNPYIAPKDIILNIIGETGIAGATYRTAEFCGETIEKMGVEGRATMCNMAIEMGAKNGIMEPNREVINYICQRTGKNESELNIIKSDEDAVYSKEMHFDIEGMEPQIACPNDVDNVKGISKIEGTVINQCLIGSCTNGRLSDLKDAAEILEGKKINDDIRLIILPASREIYKQAMHLGYIDTFIDAGAIICNPGCGPCLGGHMGVLSEGESCISTTNRNFKGRMGDPKSSVYLSNSKVVAASAIKGVITNPKDL

SEQ ID NO: 11863 - protein, 392 aa, Methanobrevibacter gottschalkii
MIILQYFISHYNKEYELNFPEDLLIYDTTLRDGEQTPGVCFSFDEKLEIARKLDQFKIHQIEAGFPIVSEKEKETVKAIANEGLDATILGLTRTKTEDIDAALDCDVGGIITFVGTSDIHLDHKMHITRQDAINLCETAIDYAKDHGLYVAFSAEDATRTDIEFLKRIYSKAEECGADRVHIADTTGAITPQGIDYLVRELVKDLDINIALHCHNDFGLAVINSITGILAGAKGISTTVNGIGERAGNASLEELIMALKILYGKDYGFKTKYIKELSNIVSEASGLPIPYNKPVVGNNIFRHESGIHVDAVIEEPLCYEPYVPELVGQKRQLVLGKHSGCRAVKAKLTECELDVSDDELIQIVREVKKSREEGKYINDKVFKEIVKKISKKE

SEQ ID NO: 11864 - protein, 183 aa, Methanobrevibacter gottschalkii
MIEVEVKAKITSFSEMEKKLENIGATKSKKEFQEDIYFNSPIVNFAESDEALRIRTTKENDNVDIFITYKGPKIDKKSKTRKEIEMKIEDAEKCSDIFEAIGFRKVRTVRKNRQYYTYENFEISLDDIEGLDPYMEIEIGLKDGEDYSKAQKSIFDLFEKLNITEGFDRTSYLELLENLNITN

SEQ ID NO: 11865 - protein, 181 aa, Methanobrevibacter gottschalkii
MTDVEIKIENIVASASIGKDIVLTEVSQALEGVNFNREQFPGLVFKLKDPKTAALIFSSGKLVCTGAKSIDDSKLAIKKTVDLMRTIDTEIPHEFEIKIQNIVASANLESTLNLEAVALELENTEYEPEQFPGLVYRLSDPKVVLLLFGSGKVVCTGAKTKSDAKLGVERAYDRLSELDLI

SEQ ID NO: 11866 - protein, 513 aa, Methanobrevibacter gottschalkii
MIKLVVFDLDNVIIDGEAIDEIGKIANVEEDIAAITEKAMQGEIDFETSIKDRVQLLEGISIEDIEKVADELPLIPGALETIKSLKDNNLDVAIISGSFDVVAEKIKDKLGVDKVYTNSFTVEDGKLTGEVTGPLVSGSKLDVLNGLVEEAGITLDEVVAVGDGANDISMIESAGCGIAFNAKDSVKEIADVVIDEKDLCKVSEKILNQLTTDNAGNETVEKKAEEKNTLPKSDFVLADTMEGVRKQKDEKEAEIAKVAEERENFNRMAKEQRKIRDELNASLKENLNKAIEFRNERNEINKAVESAKKARNEANNKIKSLEWSSGKRDKIKIENEIKKIDKIIETRVLDIKKENQLVKNANDLRKQLMKIHEDESVQGESQELKKLSEEEHEKVITLSEKAQAAHEEMLTYFRKTDDIRTAADEAHKNFIEARKNASAKHEEFKNILSDIHVINKKLGSHRPKKRRNDNKPSSGSNRNREEKERAEEIFAKFKNGGKVSTEEILLLQKYNIG

SEQ ID NO: 11867 - protein, 48 aa, Methanobrevibacter gottschalkii
MTEEKIETCFICGKKFDMNKAELGYYRNGKYPICDFCADFYRFYNEEL

SEQ ID NO: 11868 - protein, 718 aa, Methanobrevibacter gottschalkii
MHEVIVCEKPTSAEKIAKALSPSAKKKVYNKKVKYWELKKGSKDITVVSAVGHLYSLTPDNPKDKVYFDLHWAPAYEVNKRGSGFTKDYVRAIKKLGRNADSYIHACDYDTEGTLIGYNALKYACGQENLDKVSRMKFSTLTKKDLLEAYDNRIELDMNQVDTGIARHVLDYYFGVNISKALMKSVSNAKHRFLKLSAGRVQTPTLSILVEREKEIKDFVPEPYWLIKAVVEGNIEVNHIDGKIFDRDRAEEIMTKCQGKDAIVDRISFSNSTTKPPVPFNLGGLQSEAYNVFGFSPKKTQTIAQNLYTSGYTSYPRTSSQKLPESLDFKSIFTQLGYDGEFKKHIDQLPSKLKPNNGKKDDAAHPAIHPTGILPQGLSKDDKKIYELIVYRFISVFFEAAKFETMSATLDIEGEKFRFKRRRVTHKGWMEHYPFRKIDDEIFPDIKEDDLMKVLELISDEKETKPPARYNQASLIKELEKRELGTKATRADIIDKLYDRKYITGTQQIEVNQLGENMIDTLSIYCNNLTSEELTRDLQIKLDGISNNKSTRREIIDEGEKDVKVILEDITKNSNEIGSKLYESYQESNIIGTCPTCGGNLVKRYSPKTKSSFVGCANYPDCTTSYSIPKGTNFLKKTCEKCGLPIISFGKPRQRACLDSNCGKDKTKIHKPTEVGKCPNCGKPLLKRSGRYGEFIGCKGFPKCKFTCSVDELESKLK

SEQ ID NO: 11869 - protein, 892 aa, Methanobrevibacter gottschalkii
MNKETKMTIVKSVFIILILLAVVFALKMPAADLPLITDEAKGEYVDSSGLPYFSEMDSYYNLRLTEDYIDHGYVGDQIINGSEWDMHRYAPTGNQINYELGIVYVTSFLHDIFGGDHSVREIAFWTGAIISTLAVIPAYIFSRRLTNEYGAIVATLIIALAPNYFAHTFPGFFDTDMFYYIFSLFFIFFFVESIRAKKIAYKLLFAILSIISIGLFSQSWTGYIFYIGLMGIFSIVYLIACYYFNIGEDSQDEYSSKLHWFINQNALKSILILGIIGFIGLAIFKGLDGVTGLFGSLLSLLSLQSASRVVGGFPNVLVSVAEMQIPSMLGSGMNSLFLANTNGAVNGIGGIGVLFAGLTVAYLFVRNIFRIKGNSVKTESNVKPQKSERLSSSKRLDNKRKLKIDLSRYNLEFVSDILSDKKLTLLYGTLFIVWLVVTALAVTRGSRFITTIVLPFALLTGIFVSIAMEYIRNKITDDRILLAITAIAAIFVAVPVSTVNSIFAILVFVAIVGIGAVSIYVLKPKATSGRKLPIKKHIAIIAIVLALVTPCICGAFLTSESVVPGTSDSMWNAMTWVNETQSDDTVLTSWWDFGYLFEIAADKQVTFDGGSQSGDRAFWLGQAMTTDNLELSAGIFRMLDTTGDKAVESLVNITEDTGKSVDILIDILPMKSDDAQKTLQSKYHLTAAQANEVVQYSHPKNPRPVIFVASSDMLQKAGWWSYFGAWNFTNQSSENYNYYVPTEQVKVNPGSTGKLALLDDQGMTVNAVIQRGSGNNSTTAYTEAVYTDSGKQIMVNDTPYNPLNISNLMVIEDGYVMKNQSVGNVKDANYTLLLIGEKNQYTPILMSNELANSMFTRLYLYGGAGQNIFENVHTENGVMLFKVNFNNTAAGA

SEQ ID NO: 11870 - protein, 364 aa, Methanobrevibacter gottschalkii
MGIEEKIKDIEDEIQKTPYNKATSHHIGKLKAKLSKLKEESLQRSSGGHKGQGFHVKKTGDATVVLVGFPSVGKSTLLNEITNAESKVGAYQFTTLDIVPGVMEHKNAKIQVFDIPGIITGASSGKGRGKEILSVARTADLILIVLDTLNPQHLDVILNELRNIGIRPNEKEPDVTVKRKKLGGIHISSTCPLTHLDEKIIRSIINEYGMHNADILFRDDVTMDQFIDVLDRNKSYVPMKILLNKVDLVDDSYLEELKKYIPDFIPISADKKTNIDELKDIIFDNLNLVRVYLKPQGRKADMNDPLVIKKGTTVIGACRKLHREFVKNFRHAKVWGTSVKFPGQKVGPDHVLDDEDVLRIILKK

SEQ ID NO: 11871 - protein, 181 aa, Methanobrevibacter gottschalkii
MSEAIFITGTPCTGKTTVSEVLSSKLNCKLIKINDLAIENDFVLGIDEEKGYRIIDIEALDEKVSEIISESDELIIFEGHLAHLCSGADKVIVLRVNPDILRPRLEARDYSESKIRENLEAEAMGVCTSEAFEEYGDKISEIDVSKLSIEETVNVISYVIEDKLDFPVGEVDFMDWLISNF

SEQ ID NO: 11872 - protein, 274 aa, Methanobrevibacter gottschalkii
MGETNVKILYLTDLYYEAKGRKYFEEDLYISGILKEHFDIALCHPKNSKDFENDVDLIVFRNTGPVTGFEEEYESFVKRVTSNDIRTFNEFVGKADMKGKQYLLDLTLDGYPVIPTIDDLENINLIPDCEEYVIKPKDGADSIGLEFLTKSELFEKNLVNMLIQPAIDFEYEVSFYFINDSLEYALYAPNKDKRWELEKYEFSQRDKEFAEKFIAWNDIENGIQRVDACRTKEGELLLVELEDLNPYLSILELDEKTKDDFMNHLIIALKNICD

SEQ ID NO: 11873 - protein, 128 aa, Methanobrevibacter gottschalkii
MNNDKKAEKCPMELAMELISRKWVIQILRDMFFGKKRFNEFKDGKPNLSNKVLSNCLKEMEENGLISRNNDEDKQIIEYTLTDKGKKLNKVVYELAMFTLTTDLGNEFYDDETKIELENIFKNTLINN

SEQ ID NO: 11874 - protein, 148 aa, Methanobrevibacter gottschalkii
MKFNAWNNNEKFFSSKIAQNVISTACGSDINTACGSDVAASACGSDINTACGSDVAASACGSDINTACGSDVAASACGSDINTAVAVMWLLLLVVLILTLLVAVMWLLLLVVLILTLHVDQISPQLVVQTDFKINSILNILFFYILFF

SEQ ID NO: 11875 - protein, 342 aa, Methanobrevibacter gottschalkii
MADFFAFQWHILDDCDQRCKHCYIFSEENDKELITMKYEDMEIVLDNCLKFCLKTNRTPYFSITGGDPILHPDFWQLLEMLHEKKIHYSILGNPFHITDEVAKRLKSLSCRQYQLSLDGLRDTHDYFRKPGSFDITLEKIRILQDAGVRASIMTTVSKTNIDEIPDLIDVVVENNACLFSFARYCPTSLEKAAQMTSEEYKNLLAKVWEKYNEYKDSKTFFTLKDHLWTLFLYEKGLYEIPENLNDDIVYDGCNCGNSHLTILPSGDVFACRRMDSKVGNALNESIYDIFMGDNMDEYRQFEKFEKCSRCELLRFCRGCPAVSYGTTHDMYSPDPQCWKVVL

SEQ ID NO: 11876 - protein, 321 aa, Methanobrevibacter gottschalkii
MKAVVLEKTCNADELKVSEVEIPKVKDGWVLVKILGFGINRAEVILRDYEADEDYIELPVIPGIECVGKVVDSSNTRFKNGDRIAALMGGMGRSFDGGYAEYALLPEKIVFKIDEDVFDKLTLEEIIAIPETYFTAYGSLMSLNLVKDDTLLIRGATSALGLSAMQLANSMGCEIFATSRSEERFGKLKSNGADECFADDGCLAEKLNCDKVLELIGPKTLEDSMKCINSGGICCVTGVLGGIEYMDEFDPIKIIPNGRYLTSFFSNYPTQEIMDNIFDFIIKNNIKPEISRVFYNLEDIGKAHTLMESNMAQGKIIFKLE

SEQ ID NO: 11877 - protein, 203 aa, Methanobrevibacter gottschalkii
MVTKEECFKQLRDVIDAVLSTVDDNGNPQSRIIDIMHIEDDKIYFLTGRGKHVYSEIINHPKVSYLSLKDNKSIRISGEAHKLDNQKYWIDLIFENNPFMNNVYPGNARYILEPFCIEDYEMEFFDLTQKPIFRQSFKFGDVEITVKGFEITGDCIACGTCQACCPQQIPVFVDDKFEIPPEHCLHCGLCYENCPNDAIVKRE

SEQ ID NO: 11878 - protein, 208 aa, Methanobrevibacter gottschalkii
MLKSENGIINQIGSRILTRKAILNNSINYIEKCVSSNNIFKRRGVIEAISVEFDAINDYSFLKQIISCFLNETDVEILSNLSKVMDKITRNNCSYFKDEILKYISKDLDNHYYLHLINSFYEISGGEEDEFILKAIKPFIDYFEKNSIDIRKIDASISTRISDIILKIYEENLGDNSIKNQCLDYIDIIVKDDLYYFENKLNEKFELL

SEQ ID NO: 11879 - protein, 193 aa, Methanobrevibacter gottschalkii
MDHKITDLQINALIGTNSKYEIFEIDRQYDIMSTSIKMDKSKKINFNNHMPHECTLLKNVIELNNKELYDKIKDYFCLYYISALENTIENSFRKFWSLSERIIKDIHGGMKDEKLVKYMGKLLKMCRYPDKIIQRVKFIKIKRNNLVHENIHGEITQSDQAIVKIIAENLILFLICYFNEVTDIGDYKSFYDL

SEQ ID NO: 11880 - protein, 214 aa, Methanobrevibacter gottschalkii
MNKIEYTTRKLNSLKQTLIKSFEAINSTSNDPKYYYETIWDLMNQKSNIKEMFVKATLSKQIYLINISSILRKIQNNDESDILDNFLVELNKMYLEYNAMDKEQINIIIYTNIPIKLKSNDNLIETLKYFNLKIFEFSSYNFENELDLDDEIKYKFNSSKFLMLKYAADARDYEFVKSEALNAIYSFFGYITYIHRLIMILKSGILMKLHWIIK

SEQ ID NO: 11881 - protein, 140 aa, Methanobrevibacter gottschalkii
MVDTFSKETRSYVMSRIKCKDTKPEIIVRSYLFSRGLRFRKNDERYPGSPDIVLPKYKTIVFVHGCFWHLHEGCKYARIPKSNVDYWEKKLYRNRERDKHNQKELEKMGWNVITVWECELKKDKVEQTLEDLYAQITSKL

SEQ ID NO: 11882 - protein, 57 aa, Methanobrevibacter gottschalkii
MSDIVKVRGRHGTKTLDITIPAKISKEYDIHAGDVFKVGIVKENDSIKIIYELVYKD

SEQ ID NO: 11883 - protein, 54 aa, Methanobrevibacter gottschalkii
MGQDGFENETLLMEALNNKRFNELNKNLKDVITFTSEKPINEKYADTRHCLKLS

SEQ ID NO: 11884 - protein, 101 aa, Methanobrevibacter gottschalkii
MPRHTPKSNICNKLSPVDCINKIKSVITEKRSIGHGNVYGISGDNQEITQINEAIKLDKGFQFVLNCESEAHLSQLEDLIKKELTSNEYICGDASRCRVFC

SEQ ID NO: 11885 - protein, 89 aa, Methanobrevibacter gottschalkii
MLPGAEFSVENVMGIHELIFKEVVTQKRDCGTAMVGSSIYHQGAESQCIEYVASANIRFDCNISNVNVLINEIVSDFADKGYGVSVEFI

SEQ ID NO: 11886 - protein, 83 aa, Methanobrevibacter gottschalkii
MVFNIDDIKKRVIPIVIKYGINTFSLFGSYARGDANENSDLDFVMDKCDLKGLQYVSLVQDLEKEFNCHVDVISKGSSNKKIS

SEQ ID NO: 11887 - protein, 58 aa, Methanobrevibacter gottschalkii
MNEKDNRWAETIIGYCNRIDDYLNRFDDDKEIYMSDSLYKDACALVIIPIVNLQIIFR

SEQ ID NO: 11888 - protein, 97 aa, Methanobrevibacter gottschalkii
MISSEEKEKIKEEIVEKINSVLEKNNESFRLDKINVLNKNETVKFMGNYRVYDRKKYDTVSREINSFLKKYGDVEIKSKKIRDSGMKFTTVSFNFEL

SEQ ID NO: 11889 - protein, 406 aa, Methanobrevibacter gottschalkii
MIKRELYLNQIRHLFGSDFIKVIVGLRRCGKTSLLKSIIGELQDKGVKKENIIYISFELVQYKNIFNAHQLDELILKLVEGLEGKIYLLFDEIQQVEFWEKSINSYQASFDCDIYITGSNSKLLSNELATLLSGRYVKINLYPFSFAEILQYKQEINGLKLNEMNLKELFNEYLLFGGMPGLLPIKDESTKINILHDIYDSIVINDVLSRYKINEIDLFMRFSYYLMNSTGQTFSKTSITNYLKNENKKTSRNTISNFTKYLEDSLFCKKVMRQDIIGKKLLKTEEKYYLADQGFHHALVDNNSDWLGRILENVVYNELIRRGYSVKIGKIKNKEIDFVCEKQDNKIYVQVAYLLSTPETIEREFSPLFDVPDKYRAYVLSMDEVNLSEGGIIHENIIDFLLDYEI

SEQ ID NO: 11890 - protein, 313 aa, Methanobrevibacter gottschalkii
MFKFDKEQHVFDFAGVKMGGQPGEYPTVLCGTIFYGGHNIINDELTGDFDHESAEKLLNDMISMSDITGNPCIAQVFGQTEEAIVKYLEFVGDLCDIPFLIDSTSADARVAGAQYADEVGLTERAIYNSINMSADKSEMDALKETNIDSSIILGFNPMNSTVQGKIAMWENGDDGAYEKGLLEVAEDCGITKFMMDTAVTPLGQGAGVAGRASFAEKAKWGYPVGSGIHNIPSAWDWLRDYKNETGNKTAFTVCDIGANILQVMSCGDFVLFGPIDNATICFPAIAQTDMFIAEAAKDLSTEPIETHPINNLL

SEQ ID NO: 11891 - protein, 121 aa, Methanobrevibacter gottschalkii
MDERSYNISEFAIEGEEAVKTVFYTTDSTSGSVWCVKPGQEVACHTHNNSDDIWICIQGEGVFYPELGDEIPIKKGQVAVTPKGLCHGATNTGNEDFIFVSIVAPVPADYNPLYSFLFFIN

SEQ ID NO: 11892 - protein, 121 aa, Methanobrevibacter gottschalkii
MSRGKRPKWMIEIAKERMEILFNRAEMEFINHPERSNRYVELALKLSTKYNTKIPEKWGRRYCRNCKSFLSPGRNCTVRLVNSEVNIFCGECDHVMKIPYHKEKKNKRRAKYESIKKRNDE

SEQ ID NO: 11893 - protein, 85 aa, Methanobrevibacter gottschalkii
MSQSKKEMMNRALSAMTINIGKNGINENVIDEIKRQLDSNEIVKLKFAKNIARDKDKFIDDIVSQTRAKLIDVRGHVAVIYKKKP

SEQ ID NO: 11894 - protein, 145 aa, Methanobrevibacter gottschalkii
MTTVFDVPADLLIKKVADEFKNNDKINSPAWSNFVKTGVHKERKPENVDWWYVRTASIIRRVYMDGPVGVMSLRTFYGGKKDRGVRPEVFRKGSGSIVRTSLHQLEDAGLVEKVEGGRVVTPAGRSFLDKLSAEIIKDVPGLEKY

SEQ ID NO: 11895 - protein, 118 aa, Methanobrevibacter gottschalkii
MSDLDEIRQKRMAELQAQQAAMQNQAQQQAMAQAQQQEAQAKFESQKKQIIAQIMTSEARNRLSNLKLTKPELVNQIELQLIQSAQSGSLRGKVTDEQLKVLLRQIAGQKREIKITRK

SEQ ID NO: 11896 - protein, 194 aa, Methanobrevibacter gottschalkii
MKAGVLYSGGKDSSFVAVMLKRLGLDVELCTANFGVYDSYIPASKSAEALGFKHNVLKMDYGILDDTCDMIMNDGFPNDGIKFIHARTVEKLADDFDIIADGTRRDDRTPKLNINQIKSLEDRKNVQYINLDSFGHKSVKLITSSLFEISHERSNKDNSSDFEVEIRTLIDEKGGNSLDIFPEHYQTRVIGYKK

SEQ ID NO: 11897 - protein, 51 aa, Methanobrevibacter gottschalkii
MSRNKPLAKKLRMAKANKQNRRIPIWAYAKTNRKLRYRPKPRHWRRNSLKL

SEQ ID NO: 11898 - protein, 81 aa, Methanobrevibacter gottschalkii
MERVYTIPLRNVKEIKRTIRAPRAIREVKNFLTKHMKAEEVKIDESINHAIWKRGIQKIPSKITVKAVKDDDGVVTATLAE

SEQ ID NO: 11899 - protein, 224 aa, Methanobrevibacter gottschalkii
MLKRVDIVGNPNIGVFILATDEYAIVPYNLLDEKADIIKETLDVDVVKSSISGCSLIGSLAVANSNGMVVSPHVLDREIKQFEDLGINVATVPGQYTALGNIIAANDKGALASPFLSEKAINIIEETLDVNVESTSMVGSDIIGSMIQVTNKGFLISSNAVKSEISFAQEVFGVEGDIGTVGKGISLVGACSIANSKGAIVAKDSTGPEMARVEEALGFLDDDF

SEQ ID NO: 11900 - protein, 74 aa, Methanobrevibacter gottschalkii
MITKIYRVKGTFVMGDEYHKFTKEFKATCEADIEEKIYERFGSKHRINRNQISISEIVEIAPEDVVDPIVKDIL

SEQ ID NO: 11901 - protein, 144 aa, Methanobrevibacter gottschalkii
MEDQQKLNSLLNEINVYRQQADLIQQQIELIRTSMAEVDALFSALDDIEGKESVEAFVPVGAGSFVKGELKSTDEIIVSIGAGLAVKKDADGAREILNGQKKDLTDSLDKMLANLQQCTDIVGSLQAQAEQIAAAAQGKMTQMG

SEQ ID NO: 11902 - protein, 2074 aa, Methanobrevibacter gottschalkii
MKKILIFLLILIFALSINITFASNTTNSSDIYISNEGSDFCGDGSIDNPYQTLNYTIGKVSNNSNIYLKSGTYNSTGYDIVNKSISINGIGDVTIDGLNGFISQSIFKINSNASLFLNNIKFKNGYCDLDNETPSCIINQGRLFITNSTFDNFKTSVGVITNENYLCISNVKTSNLSNSQLFSAPYKYNIPIQFIYNIWCCDIYNSSIGASYNNKNMTLTNSFIERFVSNKDYSNQTSYAYFNNSNVHLITANDCDMLIFNNTYINCYFDVDDTTHTIEYSNLIWDNVTLSKYNDLFYFSLKIGYSNLTAISSYFLTSILFLSSNATISYSCILSNIITAVVSNVNVNYNWWGDNKGPNVMNGEFSKITSNYWVVMMADYDDSLVKIDLSKYTNGLDVWNLNNPSKLRTRLVKLRTETGNLTKTSGYLENATFYSELNGNNINTMLYAMVDNQVLRIVVGEGNSDYDLYISDTEGNDYFCDGSLENPYKTLKKVVSKAISGNKIYILPGYYTLSWNANIKILKNLTFIGIGNATLSRSNARNIFIVQEKGVLNIENLTFTQATSGYHNYYDPIIHVIDGDVNLKNSNFYNITTYGVVFSDKSEHVTVNNLTLLNVEGPVVVGNSTKVSIYNSKFFNGSEASFYDSYYSFLIPVCSNLSVVNCTVDGYKGGLIKLNPRYEQIAARSYIYNSTFLRNYQYNYVYAPMVSTYSYNYMTGFSIIENCTFCNNIGNLVFSNIINNCTFVSNKRIRYEETNIHYNVNYPKALIYAKIIINSNFNNNSFISKNYEDMVIHGDEVYYSTFINNSAAFGGALSGSKEIHYSIFINNSAAFGGNDVFVYNGDLNCSSNWWGSNQKPDSSRVFVFIGTLVLDDWVILTMDYKNDRVIAYLDNLLDNNGNSYPLNHVLPSRAVIFSTEGGELTPSNTFLVNNKASTFLIRLTSSDFNVFAQVDNQITSLTVYNNTTQILMSNVVIYGKDVLYNLSLININGHKISNQDLNVIITHKNSIIDSFIVTTDKSGDASFSVDYAIGIYQVNVVYLGNGYFEECNSSATINVSSIKTKLQSYNQTYSGKNNKFYAILVDYHGRYLLNRDLILRIFDLNDNLVNTVDVKTGVGGRADVLLSLDVGNYKMKWDYLGNEWYEKSTCISFVTIRPIETNIILPNTTLYGKGNDYEFTFKDMYGNLISNEMITFKISKENESSKFSLITKKGIASININLLPGKYDLEAVYAGDKVYGSSFASAILYVEPIFVTMNHNSYQSLPKNGVFTVILKDMYGTKVSGENLSLELINKDIHKVYEAVSDASGQANFKLDAPEGVYFALINYGGNIWYGSSVSAVTIEINSNVPINPVYINGSNLVQYYGEDKYYLIKFNDTNAYSLEGKLVNVLINSEDWSNSYTLESNVFGEARIQIALEPGTYNITYNYKNEYYGLFAQNSSTIFVYKMPTSLIASNMILKKGDSKNLEVKLVNKNGDPIANLPVIIKIDDNEYNITTNQKGIAKLLLNLDLGTHNVTYSFNNKNYISSKGNVTILVVNDSKKTTTLVGNDVYTREDQTINYTVLLSDLLDNPISSSEIVLKIINSDDINIKTYKGYTDVNGVATFKFNLKFGNYFVNAYYNGNSVNLPSFTTNNLYIKVLENYTETILFGNDIEIHNGGDDYYSVVLSTVDGEFIKNQIIEFIIKNNSYFTNTDENGIAYLKIPFSPGSYEVLTKFHGCDNLTSSSIHNYISIYGDLFNFYSKDVVKAYNNGTHYYVALYDTNNEPLSNKTINFYVNNQTYQDVTNADGFVCFEVWLNPGKYIINATFKGEYPDEFTSVVNNITVLPTIMGENLDVYYNENTVFSLFLLDYNCKPLENTEVVITIGGAKYSTISTFGSASWKLKLNAGVYNVICKNPITTEKITRKINIKSTIISKNLVKYYKGSSKFSVTFKDRFGNFSRNSKVKFIINKKTYVKTTNSRGIVSLNINLKPGKYTIKTYNLKTGEIKTNKITIKTLIISKNKKVKAGKKINYNVKVFNSKGKIAKKATIKFKIKGITYKIKTNKKGIAKLNIVLKKGKYTLKTSYFGLSVKNKITVK

SEQ ID NO: 11903 - protein, 1903 aa, Methanobrevibacter gottschalkii
MKNKIFIIGLIILILFISISSVCANNENSTLNTSIKINNDLNQINLGNEINLIDEAPKEVLQDESEISITPQNYNKYFNVYTGKFKSDIVSSKITTVKIGNVSKCLFAFEKPVNLMPIDSSCQITNGVIHLLPGSDGSTISGLKIINNDSVGDIKYGGILISRAHGIWLTNSSNNLIYNNTIIIGNQKGCYAMPMGYSNNNRILNNTIISGLTSCIVMGRSCYNNISNNYIEICGYELFTTSNLIFFNPWGHADYDDGVAECNGNYIANNYLKNYGTGIWAITLSLGYYSGDTQVINNTIIKGSSGISTSDMLFTQPKNILIKDNTFIDCPISILTCSNNVTIEKNKIFGSSEDNAIYIQANDAQLYNHSVTISDNYIEFENLGCAILVHSDNVTVVNNEIHLSRYGTGIGISPTDFPKASSNNCKIENNKLYLSGDMGIRILGHNTTICNNYISTKDKGIVISSSGYKIYNNTIIANIILSDDVPIYIEGHVVNSTVMYNEIETNNSEGIHFNPSGDLSDYFGKVSENTINGIIENTETIIVNDTNFYDYFDLSGYLNYEFKPNSKKIIFFTFLTNKNIYFTDKIFLSSNKMYNLLHNVSIKFFENASGSLIQDLNFYNIGNNSIILDGVNDVSINNNDFTILSNKGKNISTISVIGGENCIISNNNIFMNSKSNFTTAISISNPNGAIIKKLSKNFKIFNNNILIKTNGIARGIYADSLVETNILENKINIISDSSAYGISIENTNEIVYNITIDNNLVVINSKEMSYLIKLQMIGTSDIINNYLVGSSNGICGIGAYNSLNLNINRNEISISGKKPINFPVFDELGRNNVAIYLKSTVINGFSRNIFDIENSTILIKDSSSIIKNFNVNSYVIADYNHDFYFDSQNKLKSNIINDNSIILFKNFTFKKITNINIPVIIKPYKNLNNFTATLILSENANKSSIYGFNFINANINLNGVDNVNIFNNSFKCSEITDNNGLNNIIFNNSFEFKLNNADGIIFNGCAGGIFTNNYILIDSKKSNFILIRKANGTKVNNNYINATGDSLVLIKSDSSENTQILKNIINVTSTGDFNVYNAFKTHFDNISNNEIKCRGTSNSAVIYYDSSSSCNKIEFNEIISSSSNGREYAVVFDTKHALSNTIANNYLITSNGYRRGNDAVYAIFELVCNNTPVTIYVSINSTEDGNGSFTNPYLTIHQALENSLSGAIIYILPGYYKESNLIVNKNITLTAINNDGAVYIDALNNQLFTITEKGSLTINALKIFNGFSVEGGSLFFNFGSLIINNSVIYNSSSYYDNSNPTFKFTNIQTPTLSYSYDCENLGLGGAILNYGNLLINSSTLFDNFAHKGGLLADFGKSTIKNSLIFNNTAVHGGAIFTDSSHEFNIENSSFLENLAIQTLDYCYIQRKSLDSGGYEYRSLCDMRPGYGGAIFSNSSLIISNCLFERNIAKSGGAIGHYSKIELNSNRQGPNYYAVNQNVYSQFRYVPKLKIENSIFRYNEAKDTSCGNLSMISDRMYNYYYSINYNGGAIFGSLSQLTIFNSLFEHNVANTVGGALCVQCENSVIESCKFYNNTAGEYGGAIEAFGTYRIFNTEILNNNAKNGGAIKYTSYNSYGHLQEMMSLFNVTVTGNKALSSGGAFITQVANFAITNSNIYDNSAPYGNTFYGKYGYDSSSNIDARNNWWGSVDGPDDSVWNSANSKFKNWLNEKVNWHVPHVSGGSSNNDESGIGNQNNGVNSYIPSSVSTGSGVHTGSTLTNNVKSSGASSKGFSFTGNWPSGTANGFNNGGSGEGNAVNSKDNSGNSRTSIAGNVKNLNSVSKINSSNVNNLFSVGMDANAADSSASSASSSQGGADESFSNAYEIINEVKKENNQKFSIFNILLIIAWIFFVVGFYRKYNDNEKEI

SEQ ID NO: 11904 - protein, 1753 aa, Methanobrevibacter gottschalkii
MKYSKLFLISFVLLFFIVSAVNALDASEITLNADNSIDEISNEDMGILNEVSPSNDIKHIYVNDTGDDSNIGSINSPYSSISKAIGDVNSSTNTTIYLSKGTFGKNNDTNFQFTNEINTYFDNCNVTFIGEGTDKTFIDGKSTYKFMTILEITPNLVFKDITFVNFRGRGSSVFELLEAGNLTIDNCVFKDSYSTSNGDTISSSNSGDLKIINSQFINSNGGIISLLYEDVSPGTLYLENNTFVNITNSENNGIAVTSNYAKAVIKNNKFNNITCINQNQVTLYLEAPDEGTLVLTDNNFVNCECLNEYFMAPVYLWAYEEYVIFERNIFLNSTGASGFNILLNGRMDNLNISIGADEINVHNNEINHGVNIPINITDDVGNLVLINSGIQLNLIGDNNNYTPYLSLKNKKLTFATVPESGIYNVTITYNDGLSTTEVLTIIKINISSSPVNIWVSPKGSDSNNGSEENPFKTIQHAIDTGFEKSFNVIIYLDEGIYYGESNVNLIITNKGSLQIIGKKYNKTIIDGEHSNWFLSVDTCDVEVKNLKFINGAGNKNLISGSNLLNLKDCIVDSNIASRNCYVLHQTLFDNLTYTNNTGTIYYNYNRNITKSNFINNKNIYDSTGIIYSSWAPIIILDCKFINNTALYDYGVIYSNNNIMSLNNYYYGNKAKNYGIFYASSYSSNKMILINDTYINNHVDGSYGIGISPYSSVVNCKFINNSAGTDAGIGSITITCSFKNCSFINNSATKGGVFVLNAVQHALGTTYEELISFDNVTFENNKASMGADIYLPPRSSNSYYSYTYPIELTITFDNITVTSLTDNLTASVYGVNGIIVGGAILEFYLNELYIGSSQIVNSNAILEYDGFSNGKAIVNGNIIHPSVKNNINNATLDIKLDNVLNHIDFWVSNIGSDENGDGSKTKPFKTIQYAVNKAFENCRDITIYLGEETYSGENNTNLTISSASNITIIGKGIGKTIINGGNSSYFVKILIGINKIIISDLTIINMTPDNRFDLPIGSTSPSGIHSIIKSGSTSPITVDKGATLYLNNVNITECRGGNAIIDGEGNIFIDNSILYKNGVSKGIIKCENLVINNSIIDKHLVGGYPIIGTNIIINNTKITDVFNIIRNGFYFISNAKNTTIENTCVLINNWENPLNILDIIEYYDTQICPAACIASTNAIIKNSSFKNEFELVYLWQSTTDYSYHNVYSGSNIEAVNSSFEGYQFIIYSRMLQNPIYKFDGCTFNNIANLMIMMQSRNSIVSFSNSVMFISGNKIASNNAFNNSFLFNNNYWGNNSKPVIPNSVSNFQIPSPDNWIILISEGEEPVFKLTDGKNVTEYICNLPAKISYVADENGEIIPVLNLNGNGYKFNVDENGNVVLNISAPMKNIVPKVPVDETVFANDIEVIVNSSSNFKAKFTNKWGDSLKGINVSFIIGENIINIITNENGTAILPVDFDLGVYFVKIVNPVTGQFIFKTIDVILENTVTANDIIVKYNDKSKFSVIFTDKFGNPLINTNVKFKVGKYIINRTTDENGIASFVINFNVGNYAVNTINPVTNQSIDKIITVNKIATKLTSPKLTVTYNAGKYLTLILKDFNGKALINQKVSIKINGKVYTKITNSKGRSSLKINLPVKTYITTLTYAGDRNHIKSSATTKVIVKKATPKMTAKKATFKLKTKTKKYSIILKDNRYKVMKKVKVYLKVKGKTYRAITNSKGKATFKITKLTKKGKYSARIKYSGNKYFNSITKYVKITIKR

SEQ ID NO: 11905 - protein, 163 aa, Methanobrevibacter gottschalkii
MSGKSKINVFNKMTKTALDEEISAYVAYHRYYQRLIAVKIVSEGNTILDAAKILGKSYQTVHRWIKTCESEGLEGLKPSFGGGRPSKLTYDQLMELDKIIEKTPNMSMKDVHILVNEKFNVNYSLKQIGKIVRKLGYNYSKACPKFSKSLEDAEEQLKKLKRT

SEQ ID NO: 11906 - protein, 78 aa, Methanobrevibacter gottschalkii
MPHDHLAINGNSTITITNSSTAPEIVMVILELRCANTKNKNSTKSLNKIIEEVKLTNEEIYKILMENNENNIVFREKL

SEQ ID NO: 11907 - protein, 441 aa, Methanobrevibacter gottschalkii
MFESLKKKFSRTSEKLEEELIEEAEKEDNLQEEEGKKFSFFSFGSKKENMEEDESNLLSEAEGTVGKETENEIPGGDSIEEDVDEKSGLLSRLRGSSAKENIEETSDEEKIIEESQDEEKSHFWSRNKDNEDNSVDGEAGGGIFSFVREKTIQEKHVEDILFELEMELLQGDVAMEVANEIVESVKEDLVGKKIKRSNDITEYTFLALKNAVSDIISIPSKSMTEMIEDKKAEGGPLVVMFVGINGTGKTTTIGKLANFYMKKGYTPVIAASDTFRAGAIEQVTYHADNVGVKIIKHKKGSDPAAVAYDAVEHARAQGKELVLIDTAGRMQTNTNLMDEMKKIKRVSKPDLVIFVGDALTGNDATEQAKKFNEAIDIDGVILTKADADSKGGASLSIGYVIKKPILFLGMGQGYDDIMEYDSEWMLNQLFSDNDESEIIED

SEQ ID NO: 11908 - protein, 360 aa, Methanobrevibacter gottschalkii
MKISKINLILSVVLAILITMATTASLLSNANDSFSKAEPKGNVSIAITGDVMFARNMPGVLSADSSPFSGVSNVTSNVDLLLINFENAATSSENAVKGDVPLKCDPRYVPLAKGNNNTIASLANNHAFDYGIDGMKDTIENLKNAGITPIGAGENEKTAHNAVTQEINGRNITILNYMDSDNFAEYSYDVMPYANGSNPGYSVFDLADAQKQIKENNGSDLIVVYMHFGNEYSNSPNDNQVKIAHELIDSGADVVLGSHPHVTQGIEMYNGKPIFYSLGNFIFDQSNPATHSAYFVQIDLVNNTGECSVYPIVISGYLPHYMDSDSGNSLLNELNPNADELEVSNGVGKLRFNLTEGDSN

SEQ ID NO: 11909 - protein, 579 aa, Methanobrevibacter gottschalkii
MISCVSAGDSEMQQVNNDSVDSANQYVEPVKNASFSKVSNTNYLKDSNFTVSLKDENNEVIVNKTVYFTIDDGLVINTTTDGKGSAKLLLNISKGTHTVKYIFNETGFTPFKSSTKVLVITTSNSKIKASAYKSYIGFKKHYSYAKHISFKNTYKITLTADGIPLSNRIVKFTINGKSYSKKTDSKGVASLPIGLKAGRYPIKFSYAGEKNIKKVSGSSIVYVIKGMPKKIIKANSLTYKNKVSAPFKIKLVNGRGNILKNKKVTFTLDGRTYTKYTDNNGIATIYLKLSWGTHSLKVSSAKTSYYKSVLKKYSIHIKSKAVNNGLWMFSSDMKKANLASLKKVGTKHIFLYAKAIDVWGRSDVEKFIKTASGYGIKVHLWMKVFNDDNDKWINPVKKGKINYGLIKSKINLAKEYAKVKGVAGIHFDYLRYPGNAYKYSNGVNAINYFTKAATSAIHAINSRFIVSAAVMPEPSDMKYYYGQDISTMGKCLDVIIPMIYKGNYNAGSSWIQKTTLKFVKKSGHAKIWSGIQTYHSDRSPIKLTSSALLKDADAAAAGGADGVILFRYGLTNLINFNKL

SEQ ID NO: 11910 - protein, 513 aa, Methanobrevibacter gottschalkii
MMNKLSVFIVIIIIALSISSVCAGDSDHNKTDDSILGEADTSTSSNITRIGVNSIYDDGVNETIKTNSSFVSSNVVTYETFSTKITVRLLSNNNPLNGKNIIISVGNVSYNKTTDANGKVVLNVKLAKGKYNAMFSYGGDENINPCQKTTTVIVKTPIKTKIYCADKNINYRQDLKNTFIVRLIDGNGKALKSQTVTFKVNGKMYIAKTDKKGYAEVCLNLKKGSFTVGFSFYKKSPYSHSHGSYKIKVKAPIGKGNGYWLWPAHMKHLNLKSLSKLGTKHIFLHVQAISVYGKSSVISFAKKAHRYGIKVHLWMQVCCIRGDKWVRPVNKDGSFKYSFINKKVKEAISYAKIPGIDGVHLDYVRFGGTAHLYKTSTQSINYIVKKTSLGIHKVKPNCIVSAAVMPEISKMISWYGQDIPTMGKYLDVIVPMVYKGNFNQKTAWITKIVSKYKSQSKSAVIWGGLQTYHSDNNVKKLSYSALLKDAKSSKAGGATGSILFRIGLTHYLNFKKV

SEQ ID NO: 11911 - protein, 125 aa, Methanobrevibacter gottschalkii
MNAFDKFLIGDTSSINWCFENRHFLDRLQDNGISRQYVVDCLMNEEPIKYEHIDSSTYAAVYDAPSNKDYKEIRILMAVSGNSIDLVTIMRNNETTTERQKRQYQSQKHKNIEKKRLNAISKRKW

SEQ ID NO: 11912 - protein, 484 aa, Methanobrevibacter gottschalkii
MSEQPQWDSSISFIFAMIGAAVGLGNIWRFSYVLYSNGGGSFFIPYLIAIAIMGIPFLILEYGVGFSFKESFSSIMRKIKPEFEVIAWILVLFVFVVTIYYLVILSWDLVYLFSSFTFNWGTDTASYFVNTVGGSSDLTNANFLLIPTTVCVLLLWISVWFISHRDVDSGIGRVSKILIPALFVIMGIIIVYALTLPGSVVGINALIHPNWNGLLNVNIWLAAFAQIIFSLSMGQAIAITYASYLPKNSKLIDNVLIVVFANSAFEVCTAFGVFSILGYMSFINGTPITDLITEGTGLVFIVFPMIFNIMGSVGRILAPMLFLAILFAGITSALGYFEPMLSSTSAKLGWSRKKAASVLSIIGCAFSVLLTTGISSYVVGIIDSFVNEFGILLLIGVQCIIFAWVYGVEHFLPLLNEYSSFTVGKKWIFVIKYLLPFVLIIMWVVGIVQLFTTADVFEIAIDLIIIASVLVSAVFLTKLKPSGE

SEQ ID NO: 11913 - protein, 73 aa, Methanobrevibacter gottschalkii
MVRNKRLNAVISFILPGLGQILNGDEKRGIKFLIGMVVLHIVIYYALNNVVGSMISTLYHAYSAYDAYKTCEM

SEQ ID NO: 11914 - protein, 243 aa, Methanobrevibacter gottschalkii
MQNTSKYFNLSDMMVEYFNFENKERDIPYYNHNPRLTKHAWIVLLSSVLISFIFYALFEDVSEFFASFIFCAILLVPLMYYSDWDFSLIFHRPTKSEIKLALILFIGYLIYAIILGGVIEALLSITTTTSELTVNAESLISLVFSMMAEELIKFIPFVFIMRLVYKSTSNRKLSIITSTFIVLIFFGLLHYDFETSIISVLLLQGLGSLFELYGYIKTKNLFVPYLSHLLTDAVIFILILFGL

SEQ ID NO: 11915 - protein, 144 aa, Methanobrevibacter gottschalkii
MNKKIIGVLLVLIAAVAFGSVVYAAETVTIGGFDFNVPDGFTEDKSHEIVNMEKEQGGIKYINNGKLFENDKGDVVNILVAKYDGHKVTNKIAKGIADEPKTIGGVDGYIVHNGTFTSFDYAKEGKLVVITTNNEDAIEGFIIE

SEQ ID NO: 11916 - protein, 208 aa, Methanobrevibacter gottschalkii
MNKKIIIAAIIVVIIAVVAGFMLTSSNSQDNSKITIMGNGSIHENGTIGIKLTNGENTALKNKTVHVCVKDSEGKIVVDKTAKTYVNGVVGVRLTNVSAGEYDVNVTFEGDENYTSSSVSQKLKIIAGESDDDPTYPVDEDTVTTTADASSTQSSQSSSQSQSYTPSRSNDYGGSSSSDDDGGLDADYDENGNEMLPTVDEEGNEVSN

SEQ ID NO: 11917 - protein, 158 aa, Methanobrevibacter gottschalkii
MSFNKKTIIIFLILISAFLIIGSVCAENLKDFKATKMLKKLTKQKTLTVKIYNFKPGVLWAPKAIKLKNGDAIAGYVEYKGNMQFEKGTGITSWYIGSGLDGDIEPHHTKLIKAKFFFKNKKGKVKTKTVKGNGGGHISTSLIKGYVPYKAKVSYKTY

SEQ ID NO: 11918 - protein, 561 aa, Methanobrevibacter gottschalkii
MNFEKSIGAHVIFFDGNYCVKGYNDSFANFFDIEEDLTGKHIDDLEMPADFADFILSGEEEIELSLNVKNRWIDVKKETINTNGALIGHFFILEDVTDQIINNQELIALNSVIGDVQDVMSMSIHFKDAEGKYHWTPETYALIDREPRLGDENNNIFDSITVQNLDNIADNRPNIDDDVYVEDFTIITESGKTKYLRGTAHNVFDDEGNFLRLIMTAQDLTKEHLQEANLKILDSLMSDSNYQLGVGSYVHEIGSDYFCISKEAVDIAELNENEDSHMQLKSLSGNFVDSDAFKKEVGKLISGELDKIDNVWEYKSPKTGQIKKLHVINSIKVVGGRIFSFGGIKDVTSEMEKQEKLKHHNMELEMLIRESNHRIKNNLNLLLRFISLEKRFNKNNPEKIIENTVGRIESFSLLHEKIYNVDNFKDINVEEYLNSLISGLYSIFGDDGSINYNSNNNELILNSEILVPLSLIITELVINSIKYGYVDYELDNKAINVSVDKFDNKLILHYSDNGKGLPKDFNPHKSIGLGWRIINSLISQLEGEYEVFNDDGMHFKLTFNI

SEQ ID NO: 11919 - protein, 142 aa, Methanobrevibacter gottschalkii
MDAAKYNIEENVMKTLNVVAAIIKKDNKILATKRGYGEFTDMWEFPGGKIENNETKEEAIIREIKEELDCVIEPTKFALDLEYQYPTFYLKMSCFEAIIKEGTPKLIEHNDAKWLTKQELDSINWIPADIQIIDYLKETMRD

SEQ ID NO: 11920 - protein, 49 aa, Methanobrevibacter gottschalkii
MIDKRLELAKNKKVELELKLKKVKGTPREEDFKLQIEKLEQLIEHLQKE

SEQ ID NO: 11921 - protein, 985 aa, Methanobrevibacter gottschalkii
MNMDEILNGARTAFIDEKLDSSLDFRPKLLHNGKETKVINSIRDELQNCDEFIISSAFITLSGLTPLLEEFRNLEQKNIKGKILTTDYLNFTEPKALRKLQQFGNIEVKIYSQEKEGFHTKGYIFKKDDVYKGIVGSSNLTMNALSVNKEWNVEFTSLKEGEMLSEIKSEFFALWREADDLNNVLPEYEKIYNDNKRFTDLRKITAEIKKKNITLTPNIMQEQFIENLRKLIKQGEKRAILVSATGTGKTYASAFAVNDFNPKKLLFLVHREQIAKQSINAYKNVFKDHENFGLLSGNSKDYDKNYLFSTIQTMSKDDVFRRYDKNHFDYIIIDEVHKAGALSYQKIFQYFEPKFWLGMTASPERTDGFNIYDLFDNNIAHEIRLQEALEEDLLCPFHYFGIADVEFCDGEIDDSFEDFNLLASDKRVDYLIEKSEFYGYSGDRRKALVFCSRKKEAELLSDEFNRRGYNSTVLTGDDSQEKRIEAIDRLTNDENPDKLEFIFTVDIFNEGVDIPEINQVLLVRPTESPIIFIQQLGRGLRKYENKEYVVIIDFIGNYKNNFMIPIALSGDRSYDKDKIRKYLMEGNKIIPGASSINFDEISRKRIYESINNSSFSKIGVFKEKYNNLKYKLGRIPSLHDFAINGEFNPELILNHSRFDSYHNFLDYVDNDYNSTLSDAEVASLKFISKKLIKGIRPHELVILSCLKFNNYFTVNQIEKYLNEKYGLSNQFKSIRNAINYLSMNFYRKETSDDYQANTVTSFVSKEKIIDYEDIFFNFDEEIYNDLENNKDFKFEISHYFKSCLINPVYLNHFEDAVKYAIFKYAQVYKSNDKFRLYEKYSREDVLRLLNWERFMNAQNIGGYKVKYNTCPIFVTYDKKDDISETINYEDQFLSKQLFSWMSRNNRKISSSELEPIVNYTDLDIELFIQKSNDEGIEFYYVGKLTPLEHDQLYREIEGKQHPIVNFKFKISPEVKDELYSYFIND

SEQ ID NO: 11922 - protein, 393 aa, Methanobrevibacter gottschalkii
MASLPLGNDNDLDDTQFYNRVEEISFICDNLELTKKGSTPTILLTGIRGVGKTALMKKLKKDFQNDYLVVYMDLSAMDKFKKNELTRFSFMKLFYESIIKALRHSNIITIDTQILKYFKTRNFKLDKLKSVDKIPIPILKSEEDYAKFTTFVMDLPQQIYDDCKDHIDGVLIFMDEFQMLKQLDEDVNGFLWYIRSVIQSQKHIGYIFSGSMSVKDELIADIAGQKGAFGGRILNYELKTFPFNTTENYLKEKANYLKFTDDGIERFYKCTNGIPYYVNSFARLLPPNEELNEKKIISEFKKALPYLLIHLTNEWYKLNNQEQRIITALVEKPLKRIEIANKLGVTSGAIGASLKSLQNKTLIELDKDGYMIYDSIFKAWLKKEYEEKGNYPY

SEQ ID NO: 11923 - protein, 312 aa, Methanobrevibacter gottschalkii
MDRKYLRENKNSFNIVKNSKIYAKITAYEDTIFIRDLLIKYDWNLDKMPSIIKNEEKYLVLAVIDEKLRLLAKYNTRPDSQVITKLIRKFKRNPNNSAYGLNITKVFDTYVIKKQIAGDEYIFGYYDNLDDAQFVRNILLDNNWDVNIFNEIEFDDETLNYRVISVIDSNVYVLGNFKAKDEIDIKKIREEFLAKISKHKYGLASYPHLDLLKDKISELEEKFNVKTKDGIWSFENISENESVLNQIIFNLTPFQQAVFDAIDKNTSYDQIKKSLIRYNSKNFDKKILRNLDGLIELKLIEKIDDGYSKTNL

SEQ ID NO: 11924 - protein, 62 aa, Methanobrevibacter gottschalkii
MPVITIAGNKGITIEKKREMVKKVSEVVSEAYGLPIEAITVLIQEYDFDDIGVAGELLSDRK

SEQ ID NO: 11925 - protein, 152 aa, Methanobrevibacter gottschalkii
MLGERELVKLFPDFADLVQPSGIDLELDKIYTQESGGSLIDNEKNLPEIKEMDGGIYTLKPHTAYLASIKRKIKIPKGYAMLYLPRSTLLRSFVSVQTAVGDPGFYGTLMFMIYNHGDYEYKIKSGDRIAQAVVFPVVGSGEYNGSYQEVEE

SEQ ID NO: 11926 - protein, 511 aa, Methanobrevibacter gottschalkii
MNVADNIVKILEEEGIENIFGIPGEQIMPVYKALSESNINHILTRHEQAAAHAADGYYRSSGKIGVCIATASPGALNFTMAVATAFKDNVPLLILTGDNELKYRGSDHFQSTPQVDIFKNITRASYNPLNGTEAMYVLRAAIYELKTIPKGPIHINLSKDILLQEDFDDFELCYLCEEDLSNISKAQELINASEKPLLILGAGAISQKENIEMLAHMYQIPVTTTFHAKGIISEEDEINLGIIGIRSTPRSKYAIENADCVIALGIKASERTLPEIPKNLIHVNINKDVLIGNCPIQGKVEDFLLKISFKKAEWLCEILEINNKIEIEGLDVDFKPQASIKRILDKFNDNIIAADAGSHTTWTTLLKKSLKPGQLLFSGSMAPMGYGLPAAIGAAIATDEKIIVINGDGDFHMNLQELATIRENNLNIIIFILNNSEYGIIRQWQESIYGMKPYQVKLNNPDFTKLASSYGIDAIKVDNLADLELILEKELTGPLVVEVIVESEDIPLPKN

SEQ ID NO: 11927 - protein, 85 aa, Methanobrevibacter gottschalkii
MKENIKSFILDIANIKEIIEYDFYETCGFTFVFKSEFLKVKNQINSATIAPIGIIYYENEEYYFAPLANDVNVDIIVKNYLKFKN

SEQ ID NO: 11928 - protein, 185 aa, Methanobrevibacter gottschalkii
MIILIIFFSIIVLLYFGVKISLIYDKTDSKLEGCLQISILRKIKIYTLNLSSLNKDKKNDENEKKTNNDIKQLFKLLKPCFGPFKLFLKSFMKCIKVQNLENHLIFGMDSYTDTAKYIGYIWSFIIIINSSHKNAKLSAEPSFNGIVFDVNGINELEINILKLIPPVLRLISKKEVRTLIKEVKK

SEQ ID NO: 11929 - protein, 134 aa, Methanobrevibacter gottschalkii
MSENIKTTVEELRKLINVENVVGQPIETEDKLLIPVMRMGVGFGVGENILGADKGDAAGAGAGVEPISMVVIPKKGNDSEGVRVLNLSKGNQTNKALSDLGLLISDLVKNYINNDEKIDESEYIEPEFTTADDE

SEQ ID NO: 11930 - protein, 380 aa, Methanobrevibacter gottschalkii
MNETLLMLPGPTTVHPRVLAAMSRAVVNHRGAKYGEILSETNKLMADVFQTSNDAYLLTGSGTAAMEAGISNTVASGEKMLNIVGGKFGERFMKIAQTHGIDAQELAVEWGTAVTPEAIKEALDADEDIKAVSVIHNETSTGVAAPIEEIGKVMKNYDALYIVDTVSSLGGDYVDVDKFGIDVCVTGSQKCIAAPPGMAAITLSDDAWAAADKIDSPTFYLDMKAARKSGNKVPPQTPYTPAVSLTYAMNEALNMVMEEGLEARVARHHKAAEASVAAVKALGLELFADEAVSSATVTAVKMPEGISDDQFRGTTRDKYGVELAGGQDHLKGNIFRIGHMGNISYKELTQAFAAIGMTLKGLGVIEDAGAGVASIAESYL

SEQ ID NO: 11931 - protein, 224 aa, Methanobrevibacter gottschalkii
MNFFSWGKINFKRMFRYAVGLFVMNIGIALSIKSNLGSTPVVAVPYAISLITSVDLGYCNMIFQGFLVLVELILLGRAFKPKHFLQFFVGVIFGIFTSLSMFILSFLPLANSLTFQIIFLISGIVLLAFGLFLYVPMNAVPVSVDGVTQALAILTNQSFAKTKIIFDISMISISLIVLFTFTGHINGSVGIVTIIAAVSIGATVKLINIVYAKISGNEADLKKM

SEQ ID NO: 11932 - protein, 216 aa, Methanobrevibacter gottschalkii
MWVKRILSFVIGLLIMSFGVAFSIVSLLGTTPISSISYSLALITNIDIGITTFIFNAALIVMQLLILRSKFHKKRLLQLINCVLFGYFTDVALYFVAFIPFDSSLWMSVLFLLISIFLTAFGIFIYMPANIAPLPGEGCVEAIAIVTGWRFSTIKIGFDASMVVMSLIMCGLWYTDMFGAVYIGTIISAIMVGFTLRQINNIYAHITGAQINVVNK

SEQ ID NO: 11933 - protein, 239 aa, Methanobrevibacter gottschalkii
MEFGLWEKYYKDIIEDFGFSRSGDEKSAKLLDEILSTEGCLTLDDLSQIVGFSDKFIVFGAGPSLKNHVLMLKENHDLKDYVLVAADGATTALIEEKISPDIVCTDLDGNVDDILLANLRGANMVIHAHGDNIDKVATLSSLFSNVLGTTQAQPIGNLYNFGGFTDGDRALFLSVALGASEIILAGMDFGDKVTKYSRPDLEVKVEGADEFKRKKLLYAEKFTNWITENEPVNVINLLE

SEQ ID NO: 11934 - protein, 369 aa, Methanobrevibacter gottschalkii
MGIEDILMHDESLFQNINAFDPDYVPQDYNFRDTQMEAMAISIRPAMIGGQPSNAIVLGSPATGKTTAIRKVFELVEKSTEKVVCVYINCQLHTTRFGIFSQIYKKIFGHIPPETGVPFSRIYDQIMQNLQKNNKSLVIALDDVNYLFQSKTANKVFYDMLRAYEEYPGVKTAIFAILSDLEFKYAFDKNVNSVFIPQEINFPLYTYSEIEDILKNRAKAGFFPNVLPEDILEQIAMYTYENGDLRIGINLLKSCGNFAEASASREVTQEHFEQAIDSLVSINIRETLNSLNDMEKDLLKVISGWEGVCKAGELAEMYREKTNSSYASFNRTLDKLEFVRLIDTKFTGKGVRGNSREIILRFNPDEYLI

SEQ ID NO: 11935 - protein, 59 aa, Methanobrevibacter gottschalkii
MFENNDTTIQVDLRKKNSLKEEIMYKNIDVQSCMVMLVVIAALLLSVISVVAAQNPYII

SEQ ID NO: 11936 - protein, 137 aa, Methanobrevibacter gottschalkii
MKKFEYFEVTADIGFKAYGKNLNEAFENAGLAIFNIISDTNYINPTKEISFEITSEDNVSMLYDYLEELLFYHEVEFMLFSEFSVEISEGFSLKATIMGEEIDWDKHERKSEIKAITFHKMEVLETNPVKLQAIVDL

SEQ ID NO: 11937 - protein, 106 aa, Methanobrevibacter gottschalkii
MKRTRIVSRNFEMVLGIIGSIIGSFSGSILLFLGTFYNVPTPFLGFVAIIASFLGLASSVYVKKDTEIAGVGFIIATMFVIVGSEYINIISAIFLLVAGVSALFRK

SEQ ID NO: 11938 - protein, 482 aa, Methanobrevibacter gottschalkii
MSIKDEIKKIKDNVYEIPGSFNKKMRASGRFYIADEYFDELEEGAVEQIVNVACLPGVQRYSIGLPDIHFGYGFPIGGVAAFSLRNGIVSPGGVGFDINCGVRLIKSNLTIDDIDGKLDELTEKLFKNIPSGVGSKGKIRLEENEINDVLDYGAEWAVNNGYGWPEDLEVLEENGRMVDADSSIVSEKAKKRGIPQLGSLGSGNHFLEVQIVDEIYNEEVAKVFGLEKGMIVVMIHSGSRGCGHQVCSDYLRVMDKAYKKYKVNIDDRQLACAPLDSKEAQEYIQAMAAAANYAWANRQMMTHWVRETFEEVLGKSAKEMEMDIVYDVAHNIAKMETHKIYNREEEVLVHRKGATRAFGPGCEEVPEKYRAVGQPVLIPGTMGTASYILHGTDVAMEETFGSTAHGAGRILSRSKAKKDYNADEITEDLESKGIKIKATSKNVIAEEAPGAYKDVDSVVRVSDETGIAKLVAKVKPLSVCKG

SEQ ID NO: 11939 - protein, 252 aa, Methanobrevibacter gottschalkii
MIGIIGGSGVYEITQKADSCSKKVVKTDYGEVTVSILEIFSKKIAFIPRHAQGHSIPPHKINYRANIDALRNVGVTQIIATNSVGSMNIDMAPGSFVVPNDFLDFTQNRIKTFYEDKVVHVDVTEPYCPNLRDILDRSGDVILGGTYVCTEGPRFETPAEIKMFKMLGGDLVGMTGVPEVTLARERGICYNSICIVSNYAAGISSNTLTIDEVFDIVSEKEHDLLELIYNFIKNAEDSPNCECHHALNGAEV

SEQ ID NO: 11940 - protein, 107 aa, Methanobrevibacter gottschalkii
MRLAVVSSDGENVDLHLGKGKSVYIYEYVENKLNFIERRDIEISDDSKHQGGKVIKTCEDCDVLISLQYGFKSKIKADDVDLKLVIDEGPIDEVLQRYIDHYNFMHK

SEQ ID NO: 11941 - protein, 185 aa, Methanobrevibacter gottschalkii
MSKYIIVTGSPRVGANSDAIAEFIKESLGTNDVEIWNIYEKDYTYCHADNACKELGHCSIDDDATDLVADLKEADGAFLISPIYFGRLPGPVYTIIDRFYGVFNPAKGLDVPSPDKKIGFVLTMGGDEEAVKNAEPVAAQAGFAFSVVGFGASDSVILGGNNDPTAFANSDEEQAKVKTLVDWML

SEQ ID NO: 11942 - protein, 193 aa, Methanobrevibacter gottschalkii
MAKAKARRRVRDTWKEKSWYTIKTPVNFEDKEIGETPAKDPELLIGRGVEVTMRELTGDFSKQYIKLRFEIDNVAGEVANTKFTGHKTTTDYVRSMIRRGTSRIDASTIATTKDGRKIKLQVLAVTVRRAKSSQQKYMRKVIEDLLNEAAAEKSFDELIKVVVNGKLASEIYHNAKKIYPLKRVEIIKSKVIK

SEQ ID NO: 11943 - protein, 69 aa, Methanobrevibacter gottschalkii
MKKIFQNLILQPRYETKTTNTINIANIGLAASFKLFTVTSFPLNLNPIDHKAKQAKINNYQVADNNMFV

SEQ ID NO: 11944 - protein, 231 aa, Methanobrevibacter gottschalkii
MYGIMINWLYVILLFILGFITYRRQSLDLFGSAVMIIMGIVIIFSAGTNWLLLIVLFLVLSLIATKFSKKYKLSLGEFEGRRTSKNVISNGVVACFMAAFGGYYSPFVGGFIGAIATATADTLASEIGVLDPHPRLITTLQKVDPGTNGAVSVLGTVSGIVGSAIIGIAAYFLGIMPNPFLAILVSIISGTIGCFGDSILGALFENNGWLTNEHVNLLATIFGALVGILLI

SEQ ID NO: 11945 - protein, 412 aa, Methanobrevibacter gottschalkii
MKGLILIMDGMGDRPIKELGNKTPLEAANTPNMDKMAEEGITGIMDSIAPGIIPGSDTAHLSILGYNPYEVYTGRGPFEANGVGVDVLPGDIAFRCNFSTADENLIVTDRRAGRIKEGTEEIVEELNKMVLEDYPEIKIIFKESTGHRAVLVLRGEGLSGKVSDADPKVEGNKPKEVKALDDTQEAKKTADILNKLVFKTYEMVKDHPVNLKRIEEGKPPANIVIPRGAGEVPVVDSLNDKYEVNSACIAETGLIMGIGRFAGMDIIEMEDVTGGIDTNLENIRDTIIDQVKNSEHDFFLVNIDGADEAGHDGQTKEKKEFIEKVDCVIMGELMKLDNVYIYLTADHSTPISVMNHSGDPVPVLIRGPEVRVDDVKEFSERACAKGGLNRIRGSDVMNIMMDLMNYAHKFGA

SEQ ID NO: 11946 - protein, 445 aa, Methanobrevibacter gottschalkii
MVAKKLFGTSGIRGRIGSEVTCELALNVGKSLAYYLGNSGTVVLGYDTRTTNQMLDQAICAGLLESGVDVIKIGMVPTPLVGYATEKLDADAGIMLTASHNPSQYNGIKLWNKNGMAYTSKQETEIEKIYANNDYISVNWDKIGKLSVNEEIKGQYVDDLVNLVDIKEGLKVVIDCASGAGSEISPLVFRKAGCEVTTLNSQVDGFFPGRNPEPNEENLQTLMKTVVAIGADLGIAHDGDADRMITVDENGNVSPFDSLLALISKEFDGDIVTTVDAGLCMDESVKGKVIRTPVGDVNVAEAIIEKDASFGGEPSGTWLHPDFCMCPDGILSGLRIASIVSRDGKLSDLLDSIPSYPNIREKIVCSKEAKIKVMENMENLLINAFDDVADVNPLDGVRLTFEDDSWVLIRPSGTEDYIRITLESRDAKRAEEIKEVCVKIINENL

SEQ ID NO: 11947 - protein, 57 aa, Methanobrevibacter gottschalkii
MTIYVCLHCEYRFDSEKGDPAYNIPAGATPADMPDDWVCPECAALGIEAFIAEEEEE

SEQ ID NO: 11948 - protein, 435 aa, Methanobrevibacter gottschalkii
MKAIILCAGEGSRMRPLTLTKPKTMLPVAGKPIMQYNIESLRENGIEDILLIVRYKEEMVRNYFGDGSEFGVNIIYQRQKDFLGTADAISYGKNFIDDSLIVLNGDIILDDEIISDFINKYDELKPDTLMLLTEVENPSAFGVVEIEDGYIKNIVEKPKREEAPSNLVNAGIYIFNKDIFDKIDKTEISQRGEYEITDSLTMQIEDGLKVMGHKTDKDWIDVGRPWELIEVNEELIGNLKTEIRGKVEDGAHIHGEVFLDEGSVIRAGVYIVGNVYIGKNCDIGPNSYIRGNSYFGDNVHVGNAVEIKNSIIMENTNVSHLSYVGDSVIGSNCNIAAGTNIANLRFDNKSVKTKIKDQMIDSGRRKFGSIIGDSVKTGINSSFSPGVKVGHNSTIGSGVLLYNDVPSDTRVLVKQNYIIQDKNIKNDIQDKNIKK

SEQ ID NO: 11949 - protein, 160 aa, Methanobrevibacter gottschalkii
MENIEDSIVICPGAQVFGDVELGENVSIWHGAVIRGDTDSITIGNNSNVQDNCVIHCTKGFPVEIGDNVSVGHGAVVHGCKLDDNVLIGMNATVLDGAHISKNSIVGAGAVVSEGKEFPENSLILGIPAKAVKQLSPEQVELIQNNADNYVKLSKQYMED

SEQ ID NO: 11950 - protein, 366 aa, Methanobrevibacter gottschalkii
MKARKIVDEMDSYVPGKSQDEIAQDFNLKKEDIIKLGSNENPWGPSPKAMDAIKQEINTINRYPESQLGELASEIARYSGVDDSQVIIGGDGADEIIDVLAKTFIDAGDEFIVPLPSYMYYEYLLKQYGASPIYARWDIEKNELDVDSIYNAITDKTKMIFLCSPNNPNGALIDQEVFIDIASKNPNILIVIDEAYFEYSEVTNKDLINEFNNVFIIRTFSKVLGLAGMRIGYGLACSEIIEYMHRIKPVFSITRLSFIAALNTLKDTEYIENSIKKGIESRQYLYDEISKIDGLFVFPSKSNFMLINIKETGFTASELALELMKQGIIVRDCTSFKGLDEYWIRISICTLDEDKKFIEILKEVLG

SEQ ID NO: 11951 - protein, 234 aa, Methanobrevibacter gottschalkii
MYIGGTVISSVEFHGNMSLVIFMSKCPLACRYCHNVELLEDNTEWPFDKVKQEIDYSADFLDAVVISGGEPLVQVDAVIEILTYVRQIGLKTKLDTSGIYPDNLKKILDLNLLDYVSLDVKTTFSKYKKITGANVGFQVRKSMNLINDAGVHLEVRTTYVPTLHTKKDIINLVDDIKADIYTIQQFRNKNVLDPALEKVDVPNPHDLVMLAQEIKPYFNGIVKVKSGEFGEQVI

SEQ ID NO: 11952 - protein, 378 aa, Methanobrevibacter gottschalkii
MPILSFSSNDIDVITGKKTRTIRKAWKTPLKVGDRLYCYWNLVSKEKMKIFEAFVTKIEDISFDELKGNDELARQEGFKDSKDMLKEFKKMYGGRIDPSDKFQIIYFEKIHIDDWKGDKIDEKAMISKRADILFDSGKFDKSTMCYDAALKLDPHDVYLLNKQGDNLSRLGRFMDAIECYDKALMIEPDNVYILNNKAIALLNSGNINEALKVSNIAYNYRPSSPIVLYWRGFILEMLGRYDNALKVYDKLIVIDGDNPEVWNSRGNLLTDMGMLEEAIESFDKAVEVCLDDSEMDASAINRMGNAYIDLGKLDEALDCFNKAISLEKNNIDFLLNKGVVLMELGKFKEAIDSFNKVLLRNPDNEDAFFLKEECLEYL

SEQ ID NO: 11953 - protein, 454 aa, Methanobrevibacter gottschalkii
MSNKKRLFGTFGVRRTANDVLTPEFATRLSACYGSVVKGKIAVGADTRTTSPMLKDAVIAGLLSAGCDAVDLGTLPTPAVQYAVRQYYDGGIMITASHNPPEFNGLKFLDEFGIGLPDDIELEIESLYFDSEPIRANWDEIGEKYTNDNIIDEYIQTAMSHVDVDAIKEANLKVVLDCGSGAGSFTAPYLVRELGCEVTTLNCQADGFFPGRDPEPIEENLQELISVVKELNADIGLAHDGDADRTICIDENGAFVLGDKTFTLVEKQMLKENGGGTIVTTVATSQAIYDIAEEYNGEVIATAVGDLLVARKLKDTDGLFGGEENGGLIFPNFVYGRDAALTVAKILEIIAKENKTLSQLVSELPVYYSAKMKTECSDDLKEEIMSKIAAEVKETTDYELDTTDGVKIFKDGGWVIIRPSGTEPIFRSYSEGNSQEQADEMAQWGISLIKKYRD

SEQ ID NO: 11954 - protein, 132 aa, Methanobrevibacter gottschalkii
MRITDEKLLRISLITALIGIIGLIIFTPSIEVKKIDIKDITRSMIDEKVSVRGIITDIKESSSKTNYFLTISDGESRITLIIFEKQVSEITSRNLDIGDFKNKKVEVVGTITEYKSDLELILSSGDSLRIIN

SEQ ID NO: 11955 - protein, 552 aa, Methanobrevibacter gottschalkii
MKYQELVDVYSALEATTKRLEKTEIISEFLKKLDTGTIEKVGLLILGVVFPAWSSEEIGIGGKLVERAVAEAVGTTQATVEDAVRDEGDIGLACIKLYAKKSQMTFFSQPLTIDFVFNSLRKLSQISGSRSTNRKIAVILELLSQASATEAKYLTRTITEELRIGVGDGVVRDAIAQAFDIDKKVVERAQMLTNDFSVVAKTAKEEGSSGLEKLNLTPGTPVKPMLAQLAPPLEEIIPEMGVAICDTKYDGIRLQVHRNNDEINIFTRRLENITHALPEIVRLFDEHLPHENYIVEGEVIATRDGKPLPFQNILHRVRRKHNVEEAIENVPLKVYLFDVMYYQVPMIDEPLKNRRTILESIVDTSVDEMNLSTMKIGTAENIKEIQELFETSIKEGHEGIMIKDASEPYIPGLRGKKMLKYKAEPETLDMIVIGGTYGIGKRGDFVGSYLVALRDENNEFKSVAYAATGLDDATLEYLTGKMKELELSTKGREIKVEPKIVLEIAFSEIVESPEYETGYSLRFPVVKNIRKDKGPMDVDTVERLISMYNTGN

SEQ ID NO: 11956 - protein, 424 aa, Methanobrevibacter gottschalkii
MTQKSEAQKGNITPEMEIVAKQENMDINKLVKLVDLGKIVIPKNINGHSKPCGIGEGLKTKINANIGSSSKIDDIELEINKAKLAQEYGADALMDLSTGSDLKLFRKKIMDAVDICIGTVPIYEAGVVTLGKNKEIIDMDPDDIFKAIENQAKEGVDFMTLHCGITEDLVQKLKDSNRMMGIVSRGGTFMASWINHNNMENPLYENYDYLLELSYEYDITLSLGDGLRPGCLADASDIPQIQELVNLGGLVKRAQDANVQVMVEGPGHMPLNQIKANMELQKTICHGAPFYVLGPLVTDLAPGYDHITGAIGGAIAASSGANFLCYVTPAEHLSLPSLEDVKEGVIASKIAAEAADVAKGLESSWTQERAMAQARKEFDWEKQFNLALDKSKPRTYREKCELDDDEMCAMCGEYCAVKIAKGDF

SEQ ID NO: 11957 - protein, 222 aa, Methanobrevibacter gottschalkii
MFTIKVIFFDTETTGLDCSRCKIIELAMLTVENGIVIDKYDEFIDVEEPIPPKISALTGITDDMIKNEGVSEEKVANDLKERLTDDTLMIAHNCQFDLQFIYYLLKRHFPNEADKIVSNLNWLDTVSVLKDRKKFPHKLIDAVKHYNIPEVNFHRAIDDTKALYKVTLAMKSERDDLRDYINIFGYNPKYGVSGRRFDFIEYKSQFYHQRIVAQEFTLPNRR

SEQ ID NO: 11958 - protein, 277 aa, Methanobrevibacter gottschalkii
MSEHIIEALGLSKVIIKDGKVIDVSEPQVEYCPLFDHHRGIKKLTSEIIAKNIKFRIDDFGMCMPNRQLRMKDFLNFGISEIMCTLLDEKIIDSVVMVLEGCGTLIVTESELVQGIGGRVSGLVKTSPIPELIDKIGKENIVQPETAEINQIKGLELAIKKGFKNIAVTITLASDIDEIERIKSENPNVSIYVFVVHTTKRNAKDARKLFDGCDVITSCASKYVREIGKKESIKTVGQSIPIFAHTEDGKRFLEMRLKKIGGEKPKIDNPDLPYPLI

SEQ ID NO: 11959 - protein, 733 aa, Methanobrevibacter gottschalkii
MAENEITLKVAEAISQKDVGQGVARLDPNVMDDLNIHERDLIEIIGEKRTAAIALPSQTDIGLEVIRIDGLVRKNSGATIGGEVQIRKIKAVEAKKVVLAPIENNIRVQGDVRGLFAGKVMVQGDIIGSQIRAPKPSMNMGFGSLFDELMDFTPAMKEIKFAVVSTNPKDIVIVGPNTEVQLYETPVDVSKIEGVGNLVDVSYEDIGGLKEEVKKVREMIEIPLKRPELFEKLGIAPPKGVLMHGPPGTGKTLLAKAVASESDAHFIAINGPEIMSKYVGGSEENLREYFEEAEENAPSIIFIDELDAIAPKREETNGEVERRTVAQLLTLMDGLKSRGQVVVIGATNRPDSLDPALRRPGRFDREIEIGVPDSEERKEVLEIHTRNMPLSEDVDLDKISNTTHGFVGADLESLCKEAAMRVVRRILPEIQNDEEIPKEVMEKIVVTGDDFKNAQKEIQPSALREVLVQIPDIKWDDIGGLEDVKQELKEAVEWPLKHPETFKRLGIRPPKGTLLYGIPGTGKTLLAKAVASESEANFISVKGPELLSKWVGESEKGVREVFRKAKQAAPTVIFFDEIDAIASTRSGNDTDSGVTKRVVNQLLTEMDGLEELEDVSIIAATNRPDILDAGLMRPGRFDRHIQVDEPDEETRLAIFKVHTKNMPLAEDVDLKKLAKNTEKYVGADIESVCREAAMLTLRKDLDAKEIPYKYFKEAIDKVKPGYSSNEEQLVQYM

SEQ ID NO: 11960 - protein, 448 aa, Methanobrevibacter gottschalkii
MKIKVITNLKLLMIKMNVGIIGGSDGLGKTIVYYLRDEFDVYITGRDHKKGKEVACNLNVNYIESNTDLAKISDIIIVSVPIHHTSDVIREVAQFMKAGSLMIDVTSVKEEPSRTMEEVLPDTVEYIPTHPIFGPRTTELDNQVIVLTATKKGEWYRKVYDYLNKQHMRIIETTAKKHDYMMSIVQVLTHFSFISTASAIEKLKIDISETEDYESPIYNLMIDMIARIVAQNPYLTYHIQSMNNNGPKIRNTFADAVIELRDVINNEDDEKFVEIAIKATKHMGDIKNALGRSDKAINGLNHEFTLLNKSIGTEVGLRHIYSGKIHVGILEKIENKTAILRKRNKVKKLRIANIEVLSDNELYEWKINNLDKKRESISCVFPKRVDAEVIQDTVMNIANIIDIKLTDTYNGPQISKNSISLTFEVIALSKEDIEKIKELFTGFGGVIR

SEQ ID NO: 11961 - protein, 1490 aa, Methanobrevibacter gottschalkii
MKNSKGKVLTGKKITVNYSGKTYSRTTDSKGCVSWNVQKKPGTYSVKFTFKAKGYQTSSKTAKVTVKAMPTSLTVNNLAFTYGDGNNKLKATLKDKKRKVLVNKTVVFNFNGKNYNQKTNSKGVATLTIGAGPKKYTTTISFTNANYLKSKKTVTVTVNSIPTSLTVNDLTCNYDDSNAYLYATLKDTKNNKFLSGQTITFKINDKSKNVVSDSNGKAGIKIEEKSGTYNVDVSFAKSPYASISKKINLNVQGALTPEINMHNGFYNVSNLLVDFTGDNAEYIVYCSFDNGASWYKDNHSLSFNLTTCNWSIIYYSSFRGFNSTINHVNYVLDGDVPLVWASHGSGIYNTNFQVNLTSVDLFDEKPIIYYTLDGSDPTVQSTIYSEPINVVKNTNLRFFAMDTFNHRSEIISVYYFIGNCIANLNNGKTYNTIQNAINDDKTKKGDIIEVNKDIIIENVVINKNIYLISNNVIWQSNNKSPIIYMKNVNNTFIEGFTFKSDNGSGIELNNVSNCVIQNNNFYNKYGFSIHNENKDNDNLNNICIQGNNFYDNYYNYINFEVLENSKIINNNFESNKNVSAITILNSKSNILINNQFTNLNYGILINKSYDDVFFGNNFSINNIGLYLNCVDSKVISNTFINNHYGIYSINASNLRINFNRIVDNSKFGVYCKKGIVDANNNWWGKNYITNNALNSGDINNNENIGINCSAYLVLNVYETNYKIDNGIVYNVSYVANLRSNNYGEIFNQYFIPNCKIVYNMYCEYLYDNGVVYRGVNRIIDLMLSEGSSIKEYRLGFLNNLTVTLDHQNISFFRESSFNAYATIDIVSSAIFNGSNLDISVRVPLVDNVDWFSIVCRYVGNFKSELLLIYNGEVRNTIVIESSFYNEAKNVFSNNFWNALDTYHSCFSGYRNKQICAYAYLYLNDPSLNTIELLDNKLSKSNIQFKLQDVYNLLANNNITLNDILLNLIKNSYSLSDLEMSFIDYANGNLFDTMSVSLKYPGNDRLFFAFEDTINKTFVWRGDSSVSLYNIHYVNGGYFDLTAPFPIGDNGDLIYDNGNIYSINYNCIYTFLSSDYDCLKTYTFANSKINNNALNYWLNQKNRTDVNGELYYNIGYMKAAYGSFLEGLLVIYCNDVVADVSADKFNVSWTRVNPMVMSVCDSLEGYYLTGESDFNFGREVVGDVNNIKSFNFACSASFSIIEKYVIDALFPNEGNKSSAMFSLIDSLFNNGTLEFIVEGNYTLIRSLNVSNVVFVYDETTGILRDCINGCYGAYCYASQQTEWGHNFGENSLKLEDLIVGIINGIDTSLDNMNNDWLGFAGCLAITIGTGLFLVSNPVGWSIAIGAGLLIGSGMLATYYADDLNKGWNYNRGAHFIFDVGTSMIPAGAPSSLIKWNVGSLGKIVLSDGHLVRHVTKNSINKGFDKYLMNLAKSHGGTIDYGSHKIIRYGTIESISNTMYGTTKKDFIYYSIQYYINKYIIGDIVINKIFSR

SEQ ID NO: 11962 - protein, 107 aa, Methanobrevibacter gottschalkii
MSFDTKRKKLIRHTILINIIVFLIMLFLSIFLNNEVYLQSCPFILLMIGGYISREYTELYFKYKHKYSYFQVFFKVCLFSVIVSIICCEVILRLYFGSSIFLFILNK

SEQ ID NO: 11963 - protein, 110 aa, Methanobrevibacter gottschalkii
MSFNEERGCLMKITICIYLLLLVIFTSLSILFSNKIFLELLPIIILVISIEHVRDYACIYEKYFKQNYSLFKLYLNVSTIPTILFAICCEALLRVYFNSSIILKYLKILT

SEQ ID NO: 11964 - protein, 127 aa, Methanobrevibacter gottschalkii
MEIQPSQFTNSSTAPEIAIALLEIRYANTKNKNTVKILNKIINEVNLTDKEIDEILIENNENNKVFTEKILKIIEKYKDDTTSTIARIIGKHCNRESIQNVKKRREIRRKITLNLLKKENILSKTKK

SEQ ID NO: 11965 - protein, 160 aa, Methanobrevibacter gottschalkii
MSGKSNINVLKNVKKTALDEEIAKYVAYHRYYQRLIAIRIISEGHSIAEAARIIRKSYQTVHRWAKTCESEGLEGLKPSFGGGRPSKLTYDQLIELDKIIEKTPNISMKDVHILVNEKFNVNYSLKQIGKIMKKLGYNYSKAYPKSSKSPKDAEKQLKKT

SEQ ID NO: 11966 - protein, 417 aa, Methanobrevibacter gottschalkii
MASYIIWSFYIVIIHIDILVPLNILFLQLLNQKRRKSRKKNFYDSKINQNSDHTSRKSQSIVKLMKIIKQDTKEGIIEIVPETLDDLWHLSHIIEEGDNASSKTTRRIQDNTGDKLRSDRGVKKTFYLGLDIENITFHLFTGKLRLTGTITKGPEDLIPLGSHHTLEVKLNTPIKIKKRFWPKWAIKRLNQAIDASKKLSAIIIVFEDDTATIGLMRQFGIEYYGPIKGYVSGKRIIDKNRQKNIVQFYDKVIESIEKFDSIQNIVIAGPGFVKNDFYEYIKDNYKNLAKISVIEATGSGGRNGISEVLKKGTVEKLTAENRVAQEMGAINRLLTEIGKNSSKIAYGIKQTKNAINLGAVSELLILDTKVASENMGELMDMVENMKGEVMVVSSEHEGGKQLESLGGMAAILRYEIV

SEQ ID NO: 11967 - protein, 320 aa, Methanobrevibacter gottschalkii
MFYSSIIIAFIIVFIITAVSTAILDIIFRFFGKRGYLGNLYPNVRGGIPRAIGIIPFIVLSFYMIPVCNSMILIIGVFALIDDILGRKKCVPLGIEWGQLSRGIGIVLVMITGILEGYWISAIFIALMVQPLNISDMQPGSACIVTMIMSVITMIFMLIAGSPMVNELPAVYTPLLIFVVCAAYSPLDFSGKIMLGEVGNHTFGVALGLAFYLVGGLWSVILLGFITVALIAFVRRNNLRVFFRQNLRILNPTFGDYFMDVLTGGGLGDLFRKLILKDKRFDIKNPLLISLGFRRLLFNPYASHAKEYAPKKIPKLGKGV

SEQ ID NO: 11968 - protein, 350 aa, Methanobrevibacter gottschalkii
MKAFFTVTGRGLGGDAVVALNTMAALRKRGVECIIGLDKTASSDLFEKNGFEVCKISIPHAGGHSATKLSAIRGALKLVTATFKARSAIKKSKSDFVVAVLGGGAIVGSLGAKFARKPCFSLISTPLDSKVCPKFNYCYALPELDAFRFDTLPKNMDRSFYPLTDDIGDGKEEIALQKLKEYPNFDENKKTIIFSSGSSIFKGMIDAINIVANSTDEYNLVLIGRPLREEYYDLIDDEKIIYVGFIDWINHLFKFADLTILTDDGVSLEEAMICGKPIIALTKVKWGRYQNMAGVFKGAIIESEVKDVCKSIMKAFENYNSLKENAEVYGKQCFEAADVLADKILKKVEY

SEQ ID NO: 11969 - protein, 433 aa, Methanobrevibacter gottschalkii
MKNIVIGSGPAGRLASLQLGKLGEDVTLIEKNHIAGTCLNEGCMVVCALTDITKFIDANKRFNSHGFLKSQLEISYEKIVERIVETQEKLRKLNQIENESVGNRIIYGEANIGNNIVEVNNESFEYDNLLIATGARPFIPNIKGNEFGLTNKDILKIDDVPEKLNIIGGGIIAGEIANIYSTLGSEVNIFARNTFLKEITPNTKKYILENLMTDVNIYENINVVEVFKDKVLLENGEELDGIPFFATGRTPNSEIVKDIVELNHDKTIKVNEMMKTSVENIYAAGDVTGGYQLTPVARKEGITAARNMAGYSNKITYNCIPQSLSLNMEVSFVENEKSECNEEDKQTIAMPAIAGPSAFWNILNEDTGYSEIEFDKRNNKINRINSISPSSVSDVAYLSYIMRMNYDLNDYDEFLEIHPSTDTNYKIIKNMWL

SEQ ID NO: 11970 - protein, 90 aa, Methanobrevibacter gottschalkii
MCIAAPAHVVEINREDNWLYADFGGARQQAKMDLLPDVEIGDYVLIHAGYAIEKLTEEAAKESLEAWEELLEVLEEEDKEMEKARMADLD

SEQ ID NO: 11971 - protein, 167 aa, Methanobrevibacter gottschalkii
MWEKINEKFKKYPARIRVAEKMIELGLSLNEDGKIYCGNLKISDKALATAADVDRRAIKSTIEVIQEDEELYNLFSNIIPAGTLLKNIAKNLKLGVIEIEVGSESEGILANTANLITKKGIGIRQAYAEDTELQESPILTIITEEVVSGDLINEFLKIKGVTRVSIY

SEQ ID NO: 11972 - protein, 94 aa, Methanobrevibacter gottschalkii
MSEELVNNIKDAITVINDPHMGISIVEMGIVQNIKVDGDQAEITLKPTNPGCMSITRIAADAKVKAEAVDGIEKAKIIVEGHAMADSINEMINR

SEQ ID NO: 11973 - protein, 302 aa, Methanobrevibacter gottschalkii
MKVICSSEESLYRPEAVRWRQRMEMMEPLGDSVVLLPCSMKKPYSNSKSHQKFRKIARSYQELIVTSPFGICPRELENTFPIQSYDVSTTGSWSQDEIEETGKLIAKYCEGKNIVANLSGGYLESCESYVDDFINVCKDGRPTSPDSLYNLRMELKKHQKINRKEKTLHELRSIAKFQFGENGDKFIPDNVKTKGMYHKRILSDGKQLALLNKDHGLYRLNLSGGEILKELNTHIVEIDFDLTTNTVFAPGIIKADPKIVPNDEVIVVKDDAVVGVGKAIMTGHEMEECRNGISVKLKHRVK

SEQ ID NO: 11974 - protein, 225 aa, Methanobrevibacter gottschalkii
MIDDILVKKLLSQIVEKDHEENLKKNFRERYPDESTPDGIDNLIRALELPPEDVQYIANDIRETVEKTISPIIKSLIDGVETDEEIAEKTGIKLNIVRKILYKLYDLKIANYKRSKDPETQWFTYSWKFEESELINRIKSDSETELSELNAKLENEEHNMFFVCPYGHVRFNFDTAADPYYEFLCPACGEELEFQDNAEIIEKLKNNIEIAEDNYNSFIEKIDNS

SEQ ID NO: 11975 - protein, 399 aa, Methanobrevibacter gottschalkii
MNIPFSPPDISEKEIEEVVAALKSGWITTGPKTKEFEKKISAYCGSDKTVCLSAATTALEMTLRLLGIGEGDEVIVPAYTYTATCSVICHVGATPVMIDSQEYKEEMDYSKVSDAITEKTKVIMPVDIAGILCNYDKLYEIIESKKELFAASNGLQKAYGRIIVLADCAHGFGAVQNNKTAGTLADFTCFSFHAVKNLTTAEGGAVTWKEHEGIDSEKLYKQLQILSLHGQTKDALEKTKKGSWEYDILLPAYKCNMTDVQAGIGLGQLERYDSLLKRRHEIIKKYDEGFKNSKIICPEHFSENATSSGHLYLTRIKDINLEQRNEIMIKMDEKGISTNVHYKPLPMLTAYRNLGFDIEDYPNAYNLFKNEISLPIYSTLSDEEVEYIIENFLDILKEY

SEQ ID NO: 11976 - protein, 628 aa, Methanobrevibacter gottschalkii
MNVDSFGKYRNFLLPLMDSISVILGYYLISVLITDSFLMDPISAITRNEILISIILAIIILQTIFRLTKRYSNIIRYENNQDYIMYILLSIISLLIVSLIEDIIGMKNPSIKFNLTTGILIGTLTVVYRLVIRYALLSDIANKGINYTPENQEKVLIIGGGYSANNIIKTLQTSLKGKYNIIGIVDDNKKRIGYSVAGVKIIGNRKDILKICENEEIDTIFFTIVNIDNKNKKEILEICNKTSANVKVLPDLREIISSENLYGSLRDIEIEDLLGREPVELDNNNIKSLINNKVVLVTGGGGSIGEELCRQIMIHHPKQLLMLDIYENSLYNIELELKDNYPNDDIKAIIANIRDKERMFEIFEEYSPEIVFHAAAHKHVPLMENNPTEAIKNNVFGTYNLVNACDKYNTKRFILISTDKAVNPTNIMGATKRLCEMIIQAKDKESETEFVAVRFGNVLGSNGSVVPLFKKQIANGGPVTVTHKDITRFFMTIPEAVALVLQSITYAKGGEIFVLNMGEPVKIYDLAKSLIELSGLTLGKDIDITFTGLRPGEKLYEEILMDEENLEGTGHEKIFITEPMNFTMRDVEEKLDAFREIINKEITDKQIIKETMKKCVPTYKEPKEVNGE

SEQ ID NO: 11977 - protein, 287 aa, Methanobrevibacter gottschalkii
MTSSNELKNIKHIINGDYIIIPIETGYIKPNESLDVIIKPAKELMKDNDYLVIAETPVSVSQGRLIDESKYSPSLTAKFLTTVWSKYLWGYILGPALGIKKRTIRNLRKLPKETYAHKELILQLYGLKHALKPASEAGVDLSNAPGTYVSLLPDNPEEVTKDLKKRIGKDVCVMIIDTDATYMKNGKYFTGLPIAIEGIDADNGFFGYVKGQLSENMGSTPLGCSEKLDVETALKIANIAEDYQKSLSTEMKTIHSVKDVLGTEFDEVTIEDLDSIIHTPAVIIRKI

SEQ ID NO: 11978 - protein, 189 aa, Methanobrevibacter gottschalkii
MARKFITYFDKEGNDYTDELIMAIKDKLDITDIKRVIIASASGESALKLYEAIGDEVEIINVTHHVGFSGSNESDISKGMIKKLEKVGIKTYFGSHAFSGAARGVTNKFGGYSPLDIVANTFRMFSHGIKVGVEISIMATDAGLIPAGEEIIAVGGRGHGVDSAVILTPVNSKDLFDLKIHEIIAMPRD

SEQ ID NO: 11979 - protein, 378 aa, Methanobrevibacter gottschalkii
MKFIDDAIKESEQRMEEKVPDKLSSDIDDDLIEMIKGAKTNIFVVGAGGAGNNTISRLNEMGIEGATTIAVNTDAQDLFYSQSAKKILLGRKTSKGLGAGGEPAVGEECAEESEDEIREELEGADMVFVTCGLGGGTGTGSAPIISKLSKKLGALTVAVATMPFSAEGIKRRENAEQGLEKLQESADTVIVIPNDKLLEVAPNLPLNKAFMVSDEILGRAVKGITELITKKGLVSLDFADIRSIMGGSGMAMIGMGESDTGDRALESVHEALSSPLLDIDISNATGALVNISGSSDLTLHEAEKIVQVVADKLDPEANIIWGTQIDESLQNTVRTTVVVSGIKTGYEEDNSPEIEYAEDNSENKSADDQLDDFIDGIF

SEQ ID NO: 11980 - protein, 59 aa, Methanobrevibacter gottschalkii
MNVQENFNKFIKDSKRVLKVAKKPDGAEYRELAKISVLGVAVIGVVGFVIVLLGSLIGL

SEQ ID NO: 11981 - protein, 156 aa, Methanobrevibacter gottschalkii
MEDTNSSIYALKTSAGQERNVARLLARKARTIDGIGISSILVPESLKGYILVESSTKIDLRNPDLKVQHLRGVVGGDATITFEEVKRFLKPEPIISSIQKGSIVELISGPFKGERAKVVRIDESREEVVLELIEAAVPIPVTVKADQIRIIQKEAD

SEQ ID NO: 11982 - protein, 159 aa, Methanobrevibacter gottschalkii
MAKDTVEVLIEGGTATPGPPLGPALGPLGINMMQVVEEINKKSADFAGMKVPVKVIVDRDTKDFEIEIGTPPTTALIMEELGIEKASHEPGLDIVNDLPIEAAFKITRMKFDSLLANDYKSGIKEVMGTCVSMGLSVDGKDPREAQKDVDAGKYDDILL

SEQ ID NO: 11983 - protein, 212 aa, Methanobrevibacter gottschalkii
MTQDVINAVKEAKEQSKPRNFTESVDIIINIRDLDVKKPENRFNEEVTLPNGRGKDVKIGVIADGELIVQAKDAGLDTVINKGDLEAFGKDRKSAKKMANSVDFLVAQADMMPLVGRFLGPVLGPRGKMPKPVPASIKLAPLLERLQNTVKVGVKQQPSIQIVVGSQDMSDEDIAENVETVLTVLDRNLEKGRSQIKSMFIKTTMGPVVRVI

SEQ ID NO: 11984 - protein, 334 aa, Methanobrevibacter gottschalkii
MAHVAEWKKEEVQEIKEIINQHEVIGIVDLMNIPAKQLQEMRKSLNGKAVIRMSKINLIDLALEDCNADKNNIVDLSEHMEGQVALIATEMNPFKLYKILEDSKTSAPAKPGTIASDDIIVPEGDTGFEPGPFLGELQQVGIPAKIDKGKICVQKETVVVKAGEEVSKQVAATLSRMDINPMEVGIDLKAVYEDEAIYTSDILAIDEEQTLADVQNAFRNAFNLSVNAAIPTDETISTIITLAYTRAINVGVAGAIMTSETAEPILGLAQAKMLAIASEVADAPGAIDDELAEKLSNVAVAAAPVIEEVVEEEEEEEEESSEEEAAAGLGALFG

SEQ ID NO: 11985 - protein, 100 aa, Methanobrevibacter gottschalkii
MEYIYAAMILHSAEKEINEENVKSIIEAAGIEAEDARIKALIAALEDVDIDEAMETTAMAAAAPAAAPAAAEAAEEEEEEEEEEEASEEEAAAGLGALFG

SEQ ID NO: 11986 - protein, 900 aa, Methanobrevibacter gottschalkii
MINMVEIFEKLGYKLQTCKTCGQEFYSQVDRDTCGDAPCDEYGFIANPATDKPYNLYEIQKVFKEFLESEGHTAIDRYPVLAKRWRDDVFLVGASIFCFQPWITSGLVKPPANPLEIAQPSIRLNDVDNVGRTGRHMTCFTMGSHTVINTEDDFIYWEDETIRLCHEFFKSIGINTEEITFIKSWWSGGGNEGPCYEVCCRGVELATLVFIQYETLDDGSKKEIPIKVVDTGYGLERIAWISQGTPTAYDACFAPVVDKLMELTGVEINEDIQGKNAQIAGMMDIEDIGDLKDLRQQVADSLGLSLNDYLEIAEPMEAIYIIADHTRCLAFMIADGIIPSNVKEGYLARLVLRRTIRFMKDLNMKESLADIMAIQLDFLSKFYPEIRDSEQHIMNIISLEEERYSATVKKGKSIVKRSIKRLKKEGKNEMPLNLLIDLYDAHGIPPETVVEIAGDDFVVNVPDNFFTQVAGAHEKDNSSKKSTFKVDFPETELLFYKYFYQQEFEAEVLGVLEKDGKQCLIFDKTIFYPEGGGQPSDMGEISIDGNVLKVSHAEKVDDVVLHHVDEVSQDIVGKTILGKIDWDRRITLARHHTGTHLVIAAARKVLGQHIWQAGSQNGLTRARIDLSHYRRITQEELNEIEKLANEYVMENIDLDIQFHTRDEAQELYGFVLYQGGIVPGKMIRVVKIPGVDVQACAGTHVLRTGVVGPIKINKTERVQDGVERIDFSAGLAAIDSMQHDNELLRESSSIFKVDNEQLPKTCDRFFSEWKAQKNEIDRLKTQIASLKMNSLAEDYEEINGLKVVSELMEADFKELQKIATDFTDNGKADVVIMGNNDGKIVGAASQNAIDNGIKINNVIKSAASILGGGGGGRLTLAQGAGKNTDKMNEAIQTAIGLIKG

SEQ ID NO: 11987 - protein, 1018 aa, Methanobrevibacter gottschalkii
MKLKNKILVLLLFLVLICCLGAVSAAEDINETITADSSIDDVNTVSVEDAVDETVSDDSDSDKGIVENQDVEKTTMLTDRGVNVNAATWSKLSQYAGVIGTDYIITLTGDSYATDSQIKFNNGATIIGSPNNYITTGSYTKTPFLNTNSALTITFINVTFKNMNVDYLLSLAGTNVLENCNFYNITAGTGHNAVIYNTDGTMNLTNCNVINSSAGYGVVSNYKSGTYTGVVMNVNHCTFINNSASVEPGAINNCGILNVDNSEFINNTATWWAGAIHTHYNAQTIINNSLFEGNVAGWNGGALYTYSTLKVYNSIFKRNKCHTNIGGGAIGASRWWSGNYDITIVNCTFEENENCNTNGNGGAITALNSGALNVHDSTFIANVAKNGQAISAFSQAFENITAGIPNLKVYNNTFYNHTLTTSDTVEISGNYTFENNTFINCYQTNLGTNNVFINPVTLNNNNLILKSNKEHLLMSNLSENILKNAPNVIYVDSNSDKDCDEDPNIDGHNWETAYGGIFALSSAIFNICDGGKIYLADGEYSYRTNGAITHPKNLTIIGQGANTIVDLISCGEETTYTCIFINLTVSGKDYGRNTNFINCTFIKPISISADINLNSVLKEHAVENGYANTYLINFDNCVFKDVVDDRIITLFEYGALNFTDCVFENITADSIVYRNSTGYFEDDSISFRNCTFSNCKFNGVVDSKTNFDDAIVIEDCTYDGDVALGTTEVDGHFYVNATKLKVVAVATNMSISSSQRGVVVITLRDAEGNAVSGVNVSYTVNGVNMSGVSDANGTITISDLTDEVTVSANFTGSESYLASNNTASFNFTIPKVSTKLYVSSVTTFYNAGKYLTATLKDSNGEVLANQKVTIKINGKTYNKITNAKGQATLKISTLLPKKYTATVNYAGDDTHIKSSANAKVIVKKATLKLTAKAKTFKKSLKTKKYTITLKNNVGKVMKKTKVTLKIKGKTYKAYTNSKGIATFKITKLTKKGKYNAYIKFAGSKYYNSLNKKVKITLK

SEQ ID NO: 11988 - protein, 384 aa, Methanobrevibacter gottschalkii
MNYDLIIARYGEIGVKSPKIRSRFERKLVKNIKATFDCEVDRNQGRIYIHPKDFEDGVKKLNRVFGVVSYSPATSTTATYEGIDETLTKYVGDLISEDLIDENTKFAIKCRRVGKHDFSSQEMAAHCGGVVRNVVLAPVDLTNPDLTIFVEIRDNNAFIFHEKIKGPGGLPLGTQGKVVALLSSGIDSPVAAYLMMKRGCEVIALNCDNSPFTTPKASELFDALVDQLNIYAKGSPIKKRVVHYGEYLQAAKDKAPEKMTCVLCKSGMYHIAEKLALKLGADAIVDGSSVGQVASQTLSNILATRYGVDMPILSPLIGLDKEEITQIAKKIGTFEISKIDDGGCSAVPRYPETQADLERVKLACEDMNQDEEIEKAFRNIVRFD

SEQ ID NO: 11989 - protein, 364 aa, Methanobrevibacter gottschalkii
MKTTVSVIKADIGSVSGHCVAHPELIDICDEVLNEALEAGIIKDYYISRCGDDIDLIMTHDKGEENEEVHKTAYTAFMKATERARELKLYGAGQDLLTDTFSGNIKGMGPGVAEIEFEERPSDPVLVFCCDKTEPGAFNLPVFRIFADPFNTAGLVIDPKLHDGFKFEVFDVIEHKKVILNCPEEMYDLLALIGSTGRYVIKRVWKKNGEIAAAVSTERLNLMAGEYVGKDDPVCIVRAQSGFPANGECVDPFAFPHIVSGWMRGSHNGPMMPVSEAEANPIRFDGPPRVVGLGFQVSNGELIGPVDLFDDPAFDPTREQAAKIATYLRRHGPFEPHRLPAEEMEYTSLPGVMKKLESRFEDMD

SEQ ID NO: 11990 - protein, 91 aa, Methanobrevibacter gottschalkii
MPQNEMRKSGVKMHKTYLLENIDEIHTTEMGIGRVQKNLQITSEPVSYCISKLKQEDSKVTKKGKNYYVKADNCIITINSSSFTIITAHKN

SEQ ID NO: 11991 - protein, 369 aa, Methanobrevibacter gottschalkii
MSFLKFILKNPFRRKNSAILAIVGIAIGIVVIVSLGGITDGLINTFEDTIHAGGADFSISGKETGNSAYGTNTIDSSWTEKIAKVPGVDEAYPIYVVLTSVGDDYMNTLIGIDPEGSELADISMKEGRIFEDNTSEVILGEIYAEDNNYSVGDSIIINGEDFKVSGIYETGDQNMAGGVFTSISKIGELMDDKDSISNIYVKVNKGEDAQAVADRIDTKYGDNITTVTSVMEMTQMADMLNMLQASTWAISLLAIVVGGLGIINTMLMSVFERTREIGVLKAVGWSNKKILTMIVGESLVITIVSAIIGSLIGFLACTLLGPQMGINPLFTPKIFIQAFSIAIIVGVVGGLYPAIKAVKLPPTEALRYE

SEQ ID NO: 11992 - protein, 232 aa, Methanobrevibacter gottschalkii
MNAVEIKELYKSYEGGKIKALNGINLTIKQGEFVSIIGPSGSGKSTLLNMLGALDIPDSGTINVNGHDLKTSKKLNEFRSKKIGFIFQLHNLIPNISVVENVEIPMYTQKLSSKEMRFRALKLLDDVGLSEKSKILPNKLSGGERQRVAIARALANNPSIILADEPTGSLDSKTSSKILKQLIDLHEDKNVTLIIVTHDMDVAKLADRVIEVLDGEIISAGDDSLINSKIDV

SEQ ID NO: 11993 - protein, 80 aa, Methanobrevibacter gottschalkii
MTELESPEKIAKDILKLERNLNQVADITFKGKEKEVYDRAIDYWNDSKYYLEKKDMRTAFGCIEYSHGLLDALRMIHGII

SEQ ID NO: 11994 - protein, 189 aa, Methanobrevibacter gottschalkii
MLQSLRPLLTRILNPIAKRLNINPNIVTIISPFVALLAAYGFANKLLILGTIAILLSGFLDVVDGAVARYHEKSSKFGAFLDSTMDRFADAIIYIGIIFGGYCDWLVGILAIHSAICVSYVRARAESQEVDCNIGIAERAVRMIILMIGAIIGYFAGDIYFTYIIYILVILSYFTVGQRILHVWRQLND

SEQ ID NO: 11995 - protein, 193 aa, Methanobrevibacter gottschalkii
MKVLKTSIDCVDERIINEAVNVLANGGVVLYPTDTVYGLGANIFDNKAVKKVYGIKQRSLLKPFSILVKDIESINLVAKVSSAQKNLFNKYLPGPYTFILNKRNIVPRVVTSGLANVGVRVPDCDIACNLAKIFPITTTSANVSDDEMLSNPREILEQLDCDVDLVIDVGDLDSNVPSSIIDLSGFKPKIIRK

SEQ ID NO: 11996 - protein, 234 aa, Methanobrevibacter gottschalkii
MKVLANFEDNHKIPSNSALDVMLAGGFEKGTITQIFGPPSSGKSNITLSVAVNVAKFNKKVIYIDTEGGISIDRIKQIAGVDFSNVANNIIVFEPTSFLEQNDAVKSIDAWLRSNHNDVDLIVLDSAVALYRVDDMKSSKLNKELGKQMGLLSKIARQYDVAIILTNQIYSSYDDEGNNDIKAVGGTILQYWSKVIIQLERGEEINQRIATLKRHRSIPEGKQVTFSITSKGII

SEQ ID NO: 11997 - protein, 389 aa, Methanobrevibacter gottschalkii
MRTDFDIKNPKKKFKKTERVPPKGYDNANDFFEDMYMDENMIWMGQNTNHLHDDTIANAMIDAIRMKTYCRYPAPEGFSELKKLVLKDLGFEDEEVLLTSGATESLYLCMQALLTPEDNVILSDPGYFIIGDFANRFANEVRYVPIYDEKYGYKLTPDLLRENMDENTRMAILIDPLNPLGSSYTEDELKEFAEIAKENDIYLLHDVTYKDFAREHFLVENYAPGQTLTIYSFSKIFGMAGLRIGGVVSSKPIIDAIKNAVVNDLGVNIISQYGAIAGLKSKDVWFEDMRQTCFENQRLIKEMVDTVDGIFLPVYPSDANMMVIDIYDTGINPKDLSNYLIQKGLFTREGEYTSDEFGERYLRVSFSIPTEEIKIFCEEFPKAIEALRK

SEQ ID NO: 11998 - protein, 244 aa, Methanobrevibacter gottschalkii
MINMDFKGFRYHKPLPNFYKTDNPLTPKREISDDLLLKLDNLAKKYNFTGISYSKLSDDFKKDFNIDFDNVIIFRFLMKNELIKMESSPEKSKLMDMEFQVYGIHIYEFADFLRENGFQADLLHPFDDDLSLKSIAMQSGDCIITRSNICLFKEGLHNGFFMIHTSIDNLPFKNENDMLWVKDFCSTCGVCIERCPNDAFDYEENLLRKFCTAHREGCSECILICPFFKRGYDKVKRRYDGMKK

SEQ ID NO: 11999 - protein, 125 aa, Methanobrevibacter gottschalkii
MNDKIALVSCSGLSPLGLVVRAASVELALENENIVAACITEYSAQPNNCSPILDDAKIVTITGCGDDCASVILKDKNIAAVKNISLDHVVKAYELNPLDAVRLDEDGEKAVVVLKKYILKELENI

SEQ ID NO: 12000 - protein, 592 aa, Methanobrevibacter gottschalkii
MTRISILDKDRCQPKKCDYLCINYCPGVRMDEDTIIIDEDTKKPLISEELCEGCGICTNRCPFDAITIINLPEAVGEPIHRFGQNQFELFGLPTLEEGTVLGLLGQNGIGKSTIMNILSGNLIPNFGDFENKPENWDEVIEFYKGSSLQKYFRDLSEGNIKTILKPQMVDQLPKVVKGKVKDLLTNVNERDKLDYVTQELQLENVLERKMENLSGGELQRVAIAATVLREGDFYYFDEPTSWLDVSQRLNAVKVIRSLADEGKSVLVIEHDLATLDALSDNINILYGQPGGYGVVSGRKGVRLGINAYINGFLNEENVRIRKNPIEFTIRPPTPEDEGDVLASYSDLKKEYDGFRLSADAGEIFYDEIITAFGSNGIGKTTFAKMLAGVEEPTNGEIDEEVTIAYKPQYIVSNFEGTVSDFLYMNAPSFGSKIFDSEIMKPLTLDEMLDKPVNGLSGGELQRLAIAATLSKDAEIYLFDEPTAFLDVEQRLIAARVIRKMVESRNAASLIVDHDIVFIDYISDRAMVFNGTPGLNGHASKPTDLRNAMNEFLGNLNITFRRDKETKRPRVNKLDSYKDREQKEKGEYYYLSD

SEQ ID NO: 12001 - protein, 112 aa, Methanobrevibacter gottschalkii
MKQVMIVRTDLKMGKGKMAAQCCHGSIGSYKKASPDKIKKWENEAYAKVVLKVKTLEELTELKKMADINKVPNYLVVDAGRTQIPTSSVTVLAIGPDEDEIIDKITGNLKLL

SEQ ID NO: 12002 - protein, 220 aa, Methanobrevibacter gottschalkii
MSIKQVVKIGGSLFPDYAIDLARHLKNTDSLIILGGGEFANLIRKYDSEINFSQKTSHWTAIDCMDIIAKLVNDKVESTKLAYSIDEVQKISDEGFTPIFVVSGFLRCEDPFECSWNVTSDSIAAYISHLLNANLLIVTNVNGIYTHEPKESGSTFISKIDAKTLLNFQESSIDVMLPSLLLKFGTDCYVVNGKYPERVLSLIDDNINDYNFDYTQIIGD

SEQ ID NO: 12003 - protein, 53 aa, Methanobrevibacter gottschalkii
MKTVECISCKQEIPLTGTFVEFKCPICGAKIARCEKCRTFGHAYKCECGFEGP

SEQ ID NO: 12004 - protein, 89 aa, Methanobrevibacter gottschalkii
MGEVLTTMKIMPDSPDIDLDAIKSTIENSMPESAKLHDMAEEPIAFGLVAIILQFITDDGEGGSEPVEDMVQSIEGVASIEITGVGRLM

SEQ ID NO: 12005 - protein, 242 aa, Methanobrevibacter gottschalkii
MGNIMDRTKKIIIALIIIVLIILVGIIASVWFIGHDVDLDEGSKTILVCAIDESEDRPGMGACDMAFLVHLENGAIKNYTPVYPGGMTHPTAQEPAEAQSQGAGSDLLLHDAFWDVDNSKGMNLAKEIVEYRTGSSVDSVVAINTKALDAILSAAAPLEVNGKIINGSGIDFIREDGSNGVSRGDAVMEIVKATANSAKDPVKKSAMINAAVDQYSKGNIIMDQQGSFVDLLASKGIETFFN

SEQ ID NO: 12006 - protein, 355 aa, Methanobrevibacter gottschalkii
MYKKILVPTDGSEASFKEVISASNLLAEDGEIIVLSVAKQLKQHPLQIKKDIKKTNETFIEYAKENVEEMKKKFDSNIKVSTKVVVGFPAEAICDVAEKEGVELIVISSAGERGFSKRIIGSVAGKVCSISNINVLLISNEEKELIKHSTTKKSDNKNKINRDYTRFRNDLYVLLRFISVEKRLNSDYPEEIIDSIERRIKYLDLIYKTLNTHSESEYVNVKEYFKKYSANFYSLYKNKQPGIEFVNKSEDNFNIPDNIITPLTAIINELIVNSLKFAYEDYDVEKKIITEKVTKNKDICEVFYKDNGKGLPDDFDKDNPTGLGWTIINALVKQLDGEVKAYNSDGMCFEMKFKL

SEQ ID NO: 12007 - protein, 304 aa, Methanobrevibacter gottschalkii
MINIIEEFFIAIGGISLFLIDFFKNFSLKEIEIEKTKDINQNIAQKLNLQKDIKLQNNEKDSIDKIRRLIIPYLTNKKIIGLLGLLFLLINLFISLEISGIYIVLVLMTYIFVFYYPQIQQQRNYSDINQELPYALRHIGIELKSGKGLHDTLRTIKNADYGSISQEFNRILEEIKFGKSTEESLLEMSTRVKSEGLTRAIHQIISTLRVGGNLSNSLDIIAKDISFDMQIKLKEYSQKLNSFILIYTFIAILTPVISLIMLMASSTVMGDILSSSLLFILYGVFFPSIVVFMGVFIKKLEPKI

SEQ ID NO: 12008 - protein, 472 aa, Methanobrevibacter gottschalkii
MNNNGIIPQYDIIKQEYTSEEKILLGEIRENLVDLAISTGENFQVNETKLINNIKNFLFERLNDNQQNNNGTNEYLDNLSRKLLRDIVGYGEIDPLIQDDELEEIMIIGINKPVFVYHRKYGMMKTNITFNDEQELIDLIDAIARQINRRIDQESPILDGRLIDGSRINATIPPISADGPSLTIRKFKKDPLTIIDLIKSKTISVELAAFFWLCFDGLGIKSANAIISGGTSSGKTTTLNALSAFINPKERIITIEDTLELQIPHEHVIRMETRPSNVENKGELTMNDLVKNSLRQRPDRIIVGEVRAEEAITLFTALNTGHSGFGTLHSNDARETITRLTNEPMSVPKIMIQAIDFIIMQNRIYTSSGVSFRRISEVAEVVGIEEGVVQLNKIFQWNPETDTIDNVSISSKTISQIANLSGKSLNELYHEIEKRELVLKHMVNYNIRSVDDVTAIIELYYKNPEKVLNNII

SEQ ID NO: 12009 - protein, 298 aa, Methanobrevibacter gottschalkii
MIDLNEQIKALDYCENCNDIQIKKFSPLKDLIDFDELNGEYMKCECGKRPLDIVMSHILKIMIEEKIVPENASLRRNSPVPLSNFYYSNLNPQFIGEGTLILLHPDFTSNVALKLFNEVQEVRCVLKGSPQSHIGQFDRNSQINHFEILIGDDEQINVMRTLLGDKIVLVKNQSKHHIEVAMTTEEKLLKLHNYLDNNKINKCVAIDGMCGLGALGIYLLKYGFKKVIFNDINPEMIENLNKNLIFNNISEGFEIFNESFENLDVGHVDLCVIDAFPGADTSEIVKKAEKIADDVLII

SEQ ID NO: 12010 - protein, 417 aa, Methanobrevibacter gottschalkii
MIEIVIACFIGILIGTTTGLIPGIHVNTAGAILFASSGLLLTQFSPEFLCVLMVSMSVAHALIEFIPSMLLGVPQEGTATSILPGHRMVLEGRSKEVIRIVAVGGFGAIIVTILMLPIFSIILPILHDILKPYTWIILLAASLYLTYRLTVNFRDFLWSLLLFILSGILGWTLFQSPITSGVTLMCTFSGLFGISTILFSLNDSSTMPHQNPFYELNIDYDKLKSIFTGGITGAILGFLPGFGPAQGTVIAQAVSGTNDNRNDDTVNFLLATSGLNISDCLFSLIAIYIIGNPRSGIAVYMSYLISEMNINHLIIFIFASLLAVSVSLILALKLGDSFSRLMGIVNYKKLSISVILLQIIILYIFIFYYKSPTCYMTLALITSTALGMLPHYIGVGKSHLMGVLIIPAIVIYMKMFI

SEQ ID NO: 12011 - protein, 154 aa, Methanobrevibacter gottschalkii
MIEYDDIIKDSPFLANHLITLNKTHDFYINKHIKSGTDILPSQYYMLMFLYYEMGTTQSDIAKACLMDRSGVSRAFKDFEKKGLIKRKVDNDNKRAYKIKLTQKGIETAEFLIKKEKEWDNMICEQLYISREDLLKLLSKISLKSLEFNRNQFQ

SEQ ID NO: 12012 - protein, 165 aa, Methanobrevibacter gottschalkii
MNKKEIIIILIFIGFCFVFAGPVFAKEKVKVNVSIDDHPLNNKGFIVIKLVDSRGKDIESNGTIHYKITDEFGNYKWAYKSYDGEIRLKYTAGIYKVDVKFDGDFHYNSAIKNKSVIVKTEKFNPYTYYDNHNWGLNQEIDDYIEYNYWDEDIYDDPTNYDGEGP

SEQ ID NO: 12013 - protein, 672 aa, Methanobrevibacter gottschalkii
MKKLIVGLAGNPNVGKTTVFNQLTGMRQHVGNWPGKTVERAEGHFTHGNYEYDVVDLPGNYALSAHSMEEIVSRDFIVDDDSDVIVNVVDAANLERNLYLTVQMMELGANLVLALNMNDFAKKKDHIIDIDLMSELLGFSVVEINAKNKDGFDVLLSAVEKAASKPKNTSAKLSYGDELKEHLGDLQELIERDNKLLDVPSIWTAIKLLEKDSIVIQKVQQSSISSQIMAETDKVAGHLHTIYKEGAEEVVANARYAFIDGLMAEAVKRPAVEKETITDKIDKIVTNRILAPFIFIILMWAMFQLTFTVGAPFQDMIDQAFGMLSEWVATFLGDGLLSSFVCDGIIGGVGGVLTFLPIIILMFLFLSILEDCGYLARAAFTLDKIMHKIVGLHGKAFIPMILGFGCGVPAIMATRTMENEGDRMLAMMLVPFMSCTARLPIYAIFVAAFFADNGGNVLLAIYLLGIVVALIVAAILKRTMFKGLSTPFVMELPTYKVPSLKGVLLHTWEKVKGFLRKAGTIILACSIVLWILQNIFPYGGSDPQMSLLGMIGTAIAPIFAPLGFGTWQAAVAIIAGLAAKEVVVATFGTLAGMEEDDEEGITNLIHDTFTPLSAFSFMAFTLLYTPCFAAIGAIKQETNSYKWALTMCAITLVTAFIVSFLIYNIGLLAGFG

SEQ ID NO: 12014 - protein, 75 aa, Methanobrevibacter gottschalkii
MKTLKDAKPGETVTLVKYHDTGDLDLRRHLLGMGFIKGAKITLKKVATLGDPIEMNVKGYDVCLRKEEAENIEVM

SEQ ID NO: 12015 - protein, 68 aa, Methanobrevibacter gottschalkii
MKCRMCGFEFDENELENRGCSSCGKHNCNQVHCPNCGFGNSPELGQEFEFITKLKNRFNKNESENGSI

SEQ ID NO: 12016 - protein, 280 aa, Methanobrevibacter gottschalkii
MEKIHLETKNLSFTYPDGTKALKNVNIQIKKGEKIAIMGPNGAGKSTLFSHFNGLTEPTSGHVEIDGEKIIFNREELLKVRQKVGIVFQDPNDQLFAPTVKEDVAFGPMNLGLDYDEVKNRIAESLKMVGMSGFEDKTPHHLSGGQQKRIAIAGIVAMKPEIMILDEPTAGLDPEGVDKVLNILNNLNNEGMSIVISSHDIEMVNHFADKIFILYNGEIIAKGNKHQIFSNKELLKKAHLKAPTTTEILYKLKENGLDVNTEKITVDETVEEILNIERIK

SEQ ID NO: 12017 - protein, 276 aa, Methanobrevibacter gottschalkii
MVDITQIMRFDELSSQNSPIHNLEGRIKLITTIFIILVSVISKELFIPIILEIILLNILKIADLSYINSAKRLLMLLPFGGAIIVFQPFIQPGNIIWSYSWLHITDFGLNWAILLLVRMIVCLTAIIIYSSTTPLQEMASSFRKLKMPRDLAMILSIMVRFLFLFVDELAAIRKSQKSRNFNIHSKNTTYKWRVKQVGYTIGMMFLKSYEQGERVHKSMVSRGFSDTSEMFDEKKSPEKSDYIFIISIIIVVIILEIIMFKYSGQLGYFGQNLSIN

SEQ ID NO: 12018 - protein, 101 aa, Methanobrevibacter gottschalkii
MDKKDMSLIIVAVVICIVISCLSPYIASGDPDGLEKSAEDASVPEDFQIEPINGIPDAIFPDYAFASAPDNQGLQIVALIIGAILTLGVGYGVATILKSRN

SEQ ID NO: 12019 - protein, 212 aa, Methanobrevibacter gottschalkii
MHIPDGFIPIAQCLVYYVILIVALYFSVKWAKSNLDEKRIPLLAVLAAGIFAIMSMNMPIPFGTSGHMVGGALVAIVFLAPEAAVLVFTVVLLIQALIFGDGGITALGANVLNMAIVGGFVGLYTFKTLNGKIGKYPAAGIAAWLATVLAALACAIEMGIAGTFPVNVGIPSMVLYHFFIGIIEAILTVIVLVALDKFRPDLLSWNKTEGSA

SEQ ID NO: 12020 - protein, 424 aa, Methanobrevibacter gottschalkii
MSIIYSKITSVINKISDEIHRSFLFTTIFSILRFIELQWINSYFKELYPNEKFLNFLNNSILKKNLFNPLIVLLLFSFFLILSIKSPSKSLVITLIVGFIAFFIGSTILPKYFLNNNIRIIEFNKKDIYSIGFCLILVSIIFFGICIASVGGIPLLKPSIRYLLKPIFTMPVFLIIPGTCLVASAYLKDFQMKNITRSQARFRFIFLLAIDTALLLLLGYRTPLVAAFLIIIIIGFYGNIISLWEVIISGLIGIGAIIGIGYFRSLSEMTITSSTNPFYTLQSRADFTLHVLNLLDFVGGNAGLTHGHLLTSSIPGSDLGPRMLIGKIIAWRTEVTVTPTLIGQMVVDFGKIGVAVEMCILGFILGIGFKIMQKTKNYFYIAIYSLILTYSILGIETGILDIQVLFYFATAIFIYLINIKKSQQ

SEQ ID NO: 12021 - protein, 257 aa, Methanobrevibacter gottschalkii
MKIKFTLIDYLIIILVVCAISFAFIHITTDNSSEVQKTVFDASTINKIPDTYFNYYRDGYIVGTTVDGFNASTGEKITLNGTIKWIGNNGGTDVKILVESDNTTYLVGLYKSIPEADIYIDKISLETNGSTYPNLVEIKASPENISTINDLNKNLSNSDFEISTIISLDSLDLVKIQEIANKINSHDKRMAIKTPSSGLGNSLILENANKQTLDDANSVLGNINGLTDELTIRIYNCSDSQLEQVKNSYNITNIRTF

SEQ ID NO: 12022 - protein, 51 aa, Methanobrevibacter gottschalkii
MEECGVCEDCIDVCVEEAIERKAYTVTIDPEKCDNCGECVDVCPVGAIYEE

SEQ ID NO: 12023 - protein, 186 aa, Methanobrevibacter gottschalkii
MIKIATAECFTHGKIGRELHALAQNYEGNFGMEYIQNSKQYGNFDYNELNVTCSLFIPTLEAVKKILNVKNPPKPDTLIKGIKVYNEEKDKTVSKIMAKAVKELSDCDIAIGTSAGIGRGGITILTNNFEITTTTDIYADLTDNNSSDLFKRSESGIKKTLEIILLLLNNNFDRINSLENVEIIKK

SEQ ID NO: 12024 - protein, 216 aa, Methanobrevibacter gottschalkii
MIDEIQKMEDLQVPKGRIDLIGCGRLGLRIAINLIQIHRGGPKVIGAFDGQKISDGDIIFKLYGAELDESKPDFIKRLCTHDKEFRKIEVHNEYINDDNLDLITGDVIIIVIAGGNTIPTASKIIKHAQKKGAKTISTAGIFGFGNEHIEIKDISEYDNNNPAIEELRAQGVTENHLVLTTNKLIRDNEPVTPYTLDEVAKLITICSLKLLKDQND

SEQ ID NO: 12025 - protein, 231 aa, Methanobrevibacter gottschalkii
MKLKEIISFINERIPEDLALKHDNVGLNGEYDLNQEITSIKIFMDLLPDDDNGENTLIITHHPPLFIPKTPTYTIHSNWDVIKGGSNDILAKTLKLDVIDVLDEKTNIGRICKTDYSFNQLKKIILDKYENVRIVTQLNDDYILNKIGTISGFGLKNSKYVKLAKEKELDILISGDLTQETAILGKNLSITLIDLGHHESEVPGLYQLANLLKEININIEVIDKTPIKVIK

SEQ ID NO: 12026 - protein, 265 aa, Methanobrevibacter gottschalkii
MNIDTGITSEVFTIKSQIRLLDIFNEIINKKSQIVYEYLKSLNLDNNVKIIVIGTYFTGLGIVKKLSEKYNNIILVDIYPHLEQLLYTKIGGELKNNIKFSSDLNLIYNGDVVIDTTGFGGINVEQSSKFNVNTFIIEDPIAENNDILLKHKNNILNRINVVNSQNKAIIKTKGINTKTSGTMSLTMRILTNALDNCLKKEGVLYSACEMGFFEEIIFKEKNIDKFIELTNMPAIKVSTIKPFNCNEIINRELDKITSKMILNET

SEQ ID NO: 12027 - protein, 161 aa, Methanobrevibacter gottschalkii
MAFEKMIHDAFEESRNNSRLGDTTDEINEIKEYIKNAKKIYVPNKNGIKVKVLNEVLNKYGLPEAEILQINTSTADTSRIPALAKAYMALDQSDADLIIARGRLGIPGSGSLLIFIDNKGRILTCGTSPSHPIHKKSLEQAVYEEACEALEKIGFDKRLKK

SEQ ID NO: 12028 - protein, 332 aa, Methanobrevibacter gottschalkii
MIDDILNKAKLGKKLTDEEYLELLKIDNNDYLEKLFSIACYIRNSQSKEIKLTSTVHITNKCQIQPRCEYCGFAEKTSRTGYYDAFYKSNEEILNAIVSIQKAHIPRVSCSGGYGYKGRQAVNACKIVKENSNLEILINVGGDLTEKSVEELAKLGVDTVCCNLETINEDIFNERKPGDSLKQRILTCRRVSSAGIGLSSGLLLGIGESVEDRLKHLRYLSSFKTLEEIPIMGFNPYPDTAMADYPSFPLKEQLKIVAITRIMYPSIRITMPTPTVGPENVEFSLKAGANNLATVIADNYPLEVKGVGSPEYGNYTEVINVIEKLGLIPQTI

SEQ ID NO: 12029 - protein, 337 aa, Methanobrevibacter gottschalkii
MKVAILGAGCYRTHAASGITNFTRACEVAEATGKENISMTHSTIEMGAELLELAGVDEVVVSDPTFDGEFTVVDDFDYAEVIAAHKAGNPEEVMPAIRAKVAELAETVPKPSKGAIHFTHPEDLGMKVTTDDSEAVADADWVMTWLPEGGMQPDIIKNFADDIKEGAIVTHACTIPTTGLNKIFEDLGTNVNVASYHPGAVPEMKGQVYIAEGFADQDSINTLMDLGKKARGSAFTLPANMIGPVCDMCSAVTAITYAGILAYRDTVTQILGAPAGFAQSMANEALTQVTALMQNEGIDKMDDALNPAALLGTADSMNFGSLAEIVPTVLDYLGKDE

SEQ ID NO: 12030 - protein, 498 aa, Methanobrevibacter gottschalkii
MYDLIKEAVHSDEAAIEISKMKKDVGSVVDAISELSLDDTMKLGMSFKRFPLGCDLTEVVVGTCASDLELMDLLGNCRLSDMIGAPIHICAYAFSDIGEKFGMTGFEVMKKVHEIVDVPLDLDHFGENGAMRLPKNITGCGGECYSKGPSFTECPRGRIHERLIDKEFEQKEDKENWVKLSSSVAVNVSSEQTGDAHAAPLSEAKDIAVLAKKYGKGLESIMFVGDGYDEVITGFEKSIDLGADVIVVEGGPFNRCENTTESFAKTIAAARILSPGKVVATNGAYEHELRMGLRSGLNMVITGFPKNHHGYMCGYEPGTARRGKFGLPRVVQIINEEFPNMGLPVQKQDLIAIAAAVKFAGSENIYPNKIGSYHVGDAHWATLVNSRMYHNIKLKHTLNDIVNLVEGSTVSLHGGRFVSWVIAKELDKKVEEIIISDVDDWVLSNTVNNLQDELNATIIAENDDKRASSQANFSIASSTMISIKENILKKVPHALTIV

SEQ ID NO: 12031 - protein, 299 aa, Methanobrevibacter gottschalkii
MNYKKLVLVGCISAFVAILTSVMGVAGTIIGSVISSVLYNMLTEVLENPIGKKTFSPSFEWEIAYVFPLIVIAIIQFILISALLSEVGILPYTFVNVYLSIQEIANNNLYRILGLALLVMSVYPFVLKRGIVKKSNGTVIAFVGLIFLARGFVDLGNRITEIYHAVFVYFDLPIAIIAFVLLVFVIINILISAKSVENEFKVISHSTNEENFSSPNVRRVHHSRKHNDFNYAERDISRQNYQNMNKHKHGDNVHEVKFKKVVKQESDRSKSSNSNQEAGINESSGNIQFESNDLLDDYK

SEQ ID NO: 12032 - protein, 294 aa, Methanobrevibacter gottschalkii
MSKKDKTLKDILDIILYDNPSTQDEIAVKLGITRRYVTQLLQPLVKDGTVKRAYMIDLKSYEKVAESLSDYAGSNETKGNVIVNDMIANMARHVHSQIEVSFDAVLEYDEEKANKALEMDYATNNMVEKIRTSVETIVSMNKHSEISKSMLYNELAYDLERIGDYCGHIAKFVINDVYEIDENVLKKLKKMYKIAQKMIRLAITSFIEGKTELKDDLMELEESIHILQTKAINLIAEQMAENSFDEKERSNYFIYLFRVVKAFERMGDISVEMMDVSIEFHENIPRSTTPRNFR

SEQ ID NO: 12033 - protein, 280 aa, Methanobrevibacter gottschalkii
MITKDTIKDTVYELYKQAVIVLGDDVKKSLKDALKIEEHDLARLNIEAILKNIELAKEKQIPMCQDTGLPVVFVRLGNVEVENLREGIEEGIKKATKEIPIRPNIVDPLTRENTNVNVGDYIPPIDIELIDEDYLEITILPKGFGSENNNALKMALPAEGIEGIKEFVVESVLKAKGKPCPPTVVGVGIGGTSDLCLKLGKKALLGEVGVRNPNPQIAKLEQEILDEINNSGIGPMGLGGKTTCLDVKILKAHTHTAGLPIGVCIQCWADRHATTKIYDN

SEQ ID NO: 12034 - protein, 81 aa, Methanobrevibacter gottschalkii
MRIMYSGNCTNCTTCGSCQQTQNVDTPILFCMHCQPSDAPCLKVCKENAIEVLGGAITINGEKCNKCRDCVEVCPINVIKI

SEQ ID NO: 12035 - protein, 166 aa, Methanobrevibacter gottschalkii
MESILVNSDLCDGCMNCENMCASVHNASRIKIIEHDSSFYSIVCQHCENAPCIKICPTEAVTEEGVDTEKCIGCGLCVMICPFGAMTFQSKVAEKCDLCADREEGPACIKSCTKRAISIADPEKIRSKNQQKYLAKMAGIYEPDSKKGGFVHVITGQARARLVFDE

SEQ ID NO: 12036 - protein, 288 aa, Methanobrevibacter gottschalkii
MDIPDKDLLAPGHRGCAGCGASIAVKLALNALGKNTVAISATGCLEVMTTPYPETSWEVPFIHVAFENSGAVASGVESALRIQGKDDVNVVAFGGDGGTVDIGLQSLSGAMERGHNMLYICYDNEAYMNTGIQRSGATPYGASTTTSPKGSASFGEDKPKKNMPMIMAAHGIPYVATASIAYPEDYVKKVKKAAETKGPAYIHLQQPCTTGWGYASEKTIEMGRLAVETGSWILYEIENGDFEITYRPEERKPVKDYISVQKRFKHLDEEQINKIQKYVDAHCKELGL

SEQ ID NO: 12037 - protein, 381 aa, Methanobrevibacter gottschalkii
MIKEVMTANKAVAEAVRLAKPQVIPVYPITPQTTISEYLAQYVADEKIDAKYIKVESEHSAISAAVGASGAGVRVFTATSSQGLMLMHEILFAAAGMRVPIVLADANRAISAPLNIWNDQQDSIAQRDAGWLQIYVENAQEALDSTLMAYKISENSNVLLPSMVCLDGFILTHTVEPVEIPDQESVDKFLPPYVPEHAFLDPNEPMTIGSFADTNYYIEARHDMEIAMNNSIEVIKKTCDEFAEIFGRKYGLVDPYKTEDADIIFVAMGSLCSTVRVIVDQLRENGEKVGLLKIRAYRPFPVEEIKEVIKDCEKLAVIDKNFTFGIGGALYADMKVKIDKEIYGFIAGLGGRDITPDSIMEIYEKTKEPVQDVTWIGLKEE

SEQ ID NO: 12038 - protein, 80 aa, Methanobrevibacter gottschalkii
MVSIGCVIKTPGNSKINKTGSWRTFKPILDKEKCIDCDNCIIFCPDSSVNKQHDIDYDYCKGCGICAHECPSDAIEMVKE

SEQ ID NO: 12039 - protein, 185 aa, Methanobrevibacter gottschalkii
MIIHDKCMEEKLMIEIRFHGRGGQGAVTAAELLAKAAFKDGKYSQAFPFFGVERRGAPVMAFTRIDTEPIALRYQIYNPDHVLVLDDGLLNVVDVFSGIKDTTEVIINTKTFEGSGEHTVNSIDATGVALDMLGRNIVNTIILGYFAKKTQIVSIESLLEVIRETFPGKVGELNVEATKKAYDMG

SEQ ID NO: 12040 - protein, 534 aa, Methanobrevibacter gottschalkii
MKVLIITGELAYPLIKEVVSNSKEDIIVHIADNTQVAAFLTPKQIIKEVKTCFSNQLDEIDMILVPGLIKKGTKEITKELGIPTFKGSTDGADLAMVLNLVGTIELSEDKPADKLIDEEKRKKAFKFIDEFENDKENIEKLLKKPNNILIKNLPVGEDFPMRVLSEIANAPFLSKEALINKCQYFVDSGADMIDIGMAAGEDFSDKIPELIDTLRPIVGGRPLSIDTLNTNEIKVAAENGIDLVLSLDLGNNSEVKEILKEKNIPAVLLPTNFSQGKSPKSPAERVEAMNQLIKDTEGLKYVADLILDPVNSSSIVESIIACNEFHKTNPAPMFFGVGNVTELMDADSGGVNVLLAGIGMELGVSILFTPEESGKTRGSVYELATASKMMFLAKHRKSIPKDLGINLVAFKDKHKRNDIILNERDGIPETMQEKPMKFIRDKAGSFKINVDYGTTVKHSKITATHFKKNKPDIVIVGHNAREIYEEIITKELVTRMEHAAYLGSELQKAEIAMITGKEYVQDFDLFKNPDEFKK

SEQ ID NO: 12041 - protein, 134 aa, Methanobrevibacter gottschalkii
MKADNAIIIVLVVLIILCGAVALVITNNGISFNNTSDSVVNNTTNTTNITANDTDETGATHDTGLVASSSDDGSSYSSSGYSSSSGSNSGSSSGHQSDNSQSSSGSESSSGSESNSEPESDSAGQSEGSSADFE

SEQ ID NO: 12042 - protein, 284 aa, Methanobrevibacter gottschalkii
MQAENISIKDIDKSLLDSNYVSNNEISTTLYLSLLLGKPMLIEGPPGVGKTELAKVVAKTFNRDFFRIQCYEGITFEQIVGEWNYQKQLLHLEAARNDSVREDKIFDEEFFIRRPLLNAFLNDNDSVLLIDEIDKADEEVESFLLQALGEQEITINDLGTFQLNNDLIVILTSNSQRSLLDETKDRCLFLYIPYPSIEREIEIVKSKLHNADDETVSYVVKLVHDIRNLNLMKKPSVRGTVDWVQSVMNLGTKNLDQSLKDSVGVAIKTESDKKRVLKDIFNKR

SEQ ID NO: 12043 - protein, 384 aa, Methanobrevibacter gottschalkii
MLTKIATLSAQLREKDLPVSVRSTQAAVQIYKNLGESDRNLLKTALMAIYVKDRYDIPKFNKIFDEVFTVNKKVEMPEQLQKSKAYEGTGPKSNKYVIKKQGSMASKVQKEKITNEKLKMLSGQPLLDEAKKLERDGELMNKDLTKLNRFDPRMLEICQRLGKRIANKRSRRKTKTTSNKIDIRRTIRANLKYGGVPFELVKAKPRPHKNEHLFLNDISGSCEWISSWFFMLMFSAQTAFKRSRTFEFDNKVIETTDALKEEYLIDSFVKVKDLRVKNLMVHGTSDMYSSFKSFQEQANINNKSYVIILSDCRDWAGPKVNGIPASVEIVEEMVKDSKKLIILNPEDKNKWDVVDSCVSLYRDAGAQIFEVNTLNQLAQFVEQM

SEQ ID NO: 12044 - protein, 305 aa, Methanobrevibacter gottschalkii
MQCSKCGNPKVIIKKEQSGQLLCKDCFIESIEKKAIKTIRKEKLLDKGDKVLVALSGGKDSVTTLEILNTFRQMHIIELCAVTVDEGIDNYRQDGVDIAIRHAERLGIEHKVVSLKDEYGITLDEIMQKENHKGSCTYCGVFRRTIINKAAREMGATKIATGHNLDDEVQGILMNYLEGNIDNLTKLGAKSESKAEEFTVKIKPLREIPEREIGLYVVAKELEVHFDSCPYAMQSFRGEISEVINHLAEKHPTIKYSTLRGYDKIKNVLKKELKKEFNHGRCSKCGEPAANELCKACSFLEELGM

SEQ ID NO: 12045 - protein, 67 aa, Methanobrevibacter gottschalkii
MQFILKYKSINEKRVLPNDNYTIKDLLDELQLSAQTIVSKQNGELVIEDTVIENGDEIQLVQIIYGG

SEQ ID NO: 12046 - protein, 287 aa, Methanobrevibacter gottschalkii
MDISYECGPCFLRQAREALDLSTDDENLKMEVMGEIFKFLSVTFREGTNSNSTGSSMHNIIKQKTGCMDPYYKEKVEGNEIAIKYLPEVKKILTEDDSLENYVKIAIIGNILDFGAFTLDDDIESVIKNSLKKDLAVKDIEEFENSLKTHDKVLYLVDNTGEIVFDKLLLSKIKEYDLNITIAVKSEPILNDATMVEALEVGLDEFGELVDIGAGTVGYVDSEISDEFRQIFDSHEFIISKGMGNYEGLTEIDLSDKDIYFLLCVKCNTIARHIGANLHDMLLFKKQ

SEQ ID NO: 12047 - protein, 244 aa, Methanobrevibacter gottschalkii
MIIGLIGFGNVSKNLVKLIKSDDITFITSMEDRSPKTIDAIEKSKIKVLDTFKDVAVACDILISANSPKSALEAAENYGKFTKGIYLDLNNISPDTTFKINQHVENLVDGAIIGKIDSPNPYLYISGEKAEELLFLNGFLQTKKISDNVGDVAILKLLRSSYTKTLSAILIESTELSREYDLEEEFFDILSLTEGDNFREKSISRINNTLNNSKRKSEEIEEIINYFNKNNLSMVRAALKKLNQ

SEQ ID NO: 12048 - protein, 422 aa, Methanobrevibacter gottschalkii
MLILIGISADFDPVHKGHEKLIKEARKLADNENKKVVVYLNKGFSANHAPFFVNFEARRDMALALGVDEVKSFEGLHHRLVLSYSVPIRLKQMIDDGITDYITSASISLDEIKSKAQKFIDEGNFVGMPKSYTNRNEIRWYAINQFLGSKLNYHVVKEFNKDKYSGRLIRQSIIDNGMVITDDVKKLLPKTTIEILQHEIDADRIPENRNWVEIYKKMNTYSRGNLEKIAYLNGNTINEIIKRRVYRDPESIWAVFRRSNYGPVMTRLAISSIEMGVTKKEVMDLMKGYESQGVIPDNQKVQRVIDRAWYVATSRLDAREANEKFRNEKIEVNSPLCLEAGLNLTKFETKITKEGLKTDLYVDKNGKISVQFKSEGKKIKTNLRLPAEEVTYLRYIMDSHFIPVNGHIKKSEKGFKVKVIIG

SEQ ID NO: 12049 - protein, 160 aa, Methanobrevibacter gottschalkii
MKTKFVSLLSILLGLIIVIFPIMGVIGVGSLIGLSALLMSIYLLIVGIAIIDYNNSGAILDLVLGLILLFLSICLIFNPSLLGFLTEISMYFAGIMLIIVAVVSLINNRNSRYGFYSGIIGIILGLLYIIIGTYLSNPIILGTLIGIWLVISGILKLMDR

SEQ ID NO: 12050 - protein, 360 aa, Methanobrevibacter gottschalkii
MEIENLTKDIRARAFEKKDPKTPEQVGASWYNDDLTYEGISKTLFMILPTPGCSWALGDSGGCTMCSYVSDCTLEPIDTETILRIFNDHLSRHPINEEDKISVKLFASGSFLNPYELPKDARDEILKTLVNLGNVTEIIVESRPEYVKEEYLDEIFEIIGDTLFEVSIGLETSNDYTRLKKINKGFTRDDFENATKLMQHQRKTKGYNLKTKAYIFVKPILVSEKQAITEAIETAEYCDSINVDRLSFCPATIHGGTVIERLWRKGAYQPPWIWSCVEIINTVRDELSIPALLDTSGFGSRRGPYNCKKCNKDLKQIIIANNLTQNKIEYECECKNEWLAEINNSDMNNSTVKVKHIPLY

SEQ ID NO: 12051 - protein, 319 aa, Methanobrevibacter gottschalkii
MKFGIEFVPNQPLDEIVKLVKLAEDVGFEYAWITDHYNNKNVYETLALLAANTETIKMGPGVTNPYVRSPAIAASAIATIDEISEGRATFGIGPGDKATFDALGIEWTKPVSTIKAAIADINTLLAGDKTEGGAALGGVKAVQEHIPIYMGAQGPKMLETAGEIADGVLINASNPKDYEAAMPMIKKGIEAAGDKEFDVGAYTATSIGPDSDAAKNAAKIVVAFIAAGSPPQVIERHGLPEGFNEKMGGFLAKGDFGGAIGAVTDEALDAFSVCGTPDEFIPKIEGLAEMGVTQYVAGSPVGKNVEESIKLLGDVIASF

SEQ ID NO: 12052 - protein, 301 aa, Methanococcoides burtonii
MEPLMGMGVLALMGAAATIAGTTEDLESDVGSQSNPNSQVQLAPQMMYPHRIYNKAISGEPPSNALICAIGGTVASVLMTANLSVIFAIAIGALVASAVHGTYCITAYMGRTASQKRFRQPIYLDILRSHTPVMMGYAFITTFCILVVSYIMVAVLAHPFPLTLLAFIWGITVGAIGSSTGDVHYGAEREFQNVEFGSGLNAANSGNIVRKAESGLRNGIDNSWFCAKFGGPVTGLAFGMTVFLSGWVTAVFNPAISLTMGWLSVAAGVILVLLLIIWNRKIEVAARKAFGPYKEEEEVAA

SEQ ID NO: 12053 - protein, 303 aa, Methanolobus psychrophilus
  source 1..303: note = strain R15
MEPLTSMGVMALIGAAATIAGASEDLESDVGSQSNPNSQVQLAPQMMYPHRIYNKAISGEPPSNALMCAIGGTVAAVLMSTGASVILALAVGAIVGAAVHGTYSVTGYFGRIASQKRFKQPLYLDIVQSHTPVIMGYAFITTFCILVISYLMTTVMGHPFSLPLLAFIWGITVGAIGSSTGDVHYGAEREFQNVEFGSGLNAANSGNIVRKAESGIRNGIDNSWFCAKFGGPATGIAFGMVVFLSGWITVVFDPSINETLGWESIIAGVVIVLLLAIWNRKIEVAARNAFGPYKKDEEAEVAA

SEQ ID NO: 12054 - protein, 293 aa, Methanobacterium paludis
MDPMITGLGVVALMGAAATIAGAAEDLESDTGSMSNPNSQVQLAPQMGNLHRIFNKAVSGEPVQMGVLAGIAGSVAFVLMGAVQLPVIMSIAGGAFIAALFHTAFATTSYLGRIVSESQFNQPVFMDVLTQTLGPIAAHGFIVTFCIVGLSYLMTLPLQGFGHPFPIPLLAVLWGITIGAIGSSTGDVHYGAEREYQTYPFGGGIPVSIHGDITTESELGPRNSIDVVHFCAKFGGPVTGFCFGLIVFLSFWTTLVFGAVGGVVAGIIIVLLLIVLNNRVEVFARGRYGPYKE

SEQ ID NO: 12055 - protein, 304 aa, Methanohalobium evestigatum
MDPLLGMGVLALMGAAATIAGATEDLESDVGSQSNPNSQVQLAPQMMHPHRIYNKAISGEPPSNALMCAIGGTIASVMMSAYGLSVVFAITFGAAIAAVVHGTYAASSFMGRVSSQKRFKQPLYLDIVRSHTPVIIGYAFLTTFFILVISYLMSSVLNHPFPLPLLAFIWGITVGAIGSSTGDVHYGAEREYQNVEFGSGINAANSGDIVRYGESGLRNGIDNAWFCSKFGGPVTGIAFGMTVFLSGWVTTVFNPGESITMGWLSVIAGLLIVAILIIGNRVIETWARSTYGPYQEDESEEVTA

SEQ ID NO: 12056 - protein, 301 aa, Methanomethylovorans hollandica
MDPLIGMGALALMGAAATIAGASEDLESDIGSQSNPNSQVQLAPQMSYPHRIYNKAISGEPPSNALMCAIGGTIAYVMLNANFSAVLALTIGSLVAAMVHGTYAVTSYMGRCSSQKRFKQMVYLDVLRSHTPAIMGYSFITTFSILVVSYLMMTVFAHPFPLPLLAFIWGITVGAIGSSTGDVHYGAEREFQDVEFGSGLNTANSGKIVRKAESGIRSSMDNSWFCAKFGGPVTGIAFGMTVFLSGWITTVFDPSKGPTAGWESVIAGALIVFIMIIYNRKIEIQARKAFGPYKEDKEEAA

SEQ ID NO: 12057 - protein, 301 aa, Methanothrix sp.
MDAFSMGLIAAMGALATVAGASEDIESDVGSQSNPNSQVQLAAQVGNPHRIYNKAISGEPPANALWCATAAIVAYTLITAFQMPALMALVAGASVAALFNGVFSMSSYFGRNSSQARFNQWIYLDIVRYTTPSIMAHAWITSFCIATISYIMVYMLPTPHPFPMPIIALIWGLAVGAIGSSVGDIHYGGEREFQNRAFGCGLNTMLSGQIVRKAEAGLRNSIDNAWFCTKFGGPATGMGFGLTVFLDNWRTTVFDPVTQASYAILMGVFFILVEVSYNHYIERSTRRKYGPYPEYKGDVAA

SEQ ID NO: 12058 - protein, 303 aa, Methanocaldococcus vulcanius
MDTTLIALGALALSGALATVAGCAEDAESDVGSQSNPNSQVQLAPQMGNIHRYYNKAISGEPVSYGLFVAVAGSIAYALIQAGINPILAIILGAGAAAFVHGAYAVSAYLGRIVGQSKNFGQPVYWDVVMSHLGPIVGHGFIAVFCMVLMAYLANTLLGDPFPLPLIAFIFGITVGAIGSSTGDVHYGAEREYQKYPFGGGVPVANHGDIDVEADYGIRNSMDSSYFCVRVGSVLTGLCFGLIVFLDGWRGVLGNILGGLSGGSAINASIISIVIGLIIVAAMAIINRKIEVFARNKFGPYTK

SEQ ID NO: 12059 - protein, 303 aa, Methanosalsum zhilinae
MEPLIGMGVLALMGAAAAIAGMSEDLESDVGSQSNPNSQVQLAPQMMYPHRIFNKAISGEPPSNALMCAIGGTTTAILMDSMGMSVLFSVAIGALVAALAHGSYSTMSFFGRPASQNRFKQPIYLDVLRSHIVAIMAFAFVTTFSIVIISYLMITALGHPFPLALLAFIWGIAVGAIGSSTGDVHYGAERQFQNTEFGAGLNAAQSGNIVRKGEAGLRNGIDNLWFCSRFGGPATGIAFAMTVFLSGWITLVFDPSISLTIGWLSVIAGLIIVLILIIFNRKLEVSARNTYGPYKADKEEVAA

SEQ ID NO: 12060 - protein, 295 aa, Methanocorpusculum labreanum
MQEIIIGIGVTALAGALAAVAGAAEDTESNIGSQGDPNSQVQLAPQMGYTHRIYNKAVSGEPPAYTLWVTLACGVAWAFLMLGVNAILAIIFGTVLATFVQGVYATTAYLGRTASLSKFGQPVFIDVVKSVTTVTMAHAFVAIFATVTVCYLMMTVIGHPFALPLLGIVWGLALGAAGSATGNPYYGKERQYQNQKFGAGVPISASGNIVRYAEAGQRSSIDNGFFTAKFGGPASGLCFGLIVFFELWRTIIFEDFLAGWGAVIVGAVVIIVFMIIDRYVEVWARKSYGPYTVEA

SEQ ID NO: 12061 - protein, 299 aa, Methanoregula formicica
MEHIVFGIGITALTGALATVAGAAEDTESNIGSQGDPNSQVQLAPQMGFLHRIFNKAVAGEPPAYGLWCCLGAGLAWAFMAMQFNAVLAIVLGSVLAVFVQGVYATTAYVGRTASLSKFGQPIYVDILKSMTTVTMAHAFIAIFATVAICQLINGALGHPFPLPLLGLIWGIALGAAGSATGNPYYGKERQYQNQKFGAGVPISASGNIVRYAEAGERNSIDNGWFTAKIGGSASGICFGLIVFLELWRTILFEQVAAGWGAIVVGVLIILVFTVIDRYIEVWARKTYGPYTEAKEASS

SEQ ID NO: 12062 - protein, 301 aa, Methanoculleus sp.
MEEIVFGIGITALAGALATVAGAAEDTESDIGSQGDPNSQVQLAPQMGYIHRIFNKAVAGEPPAYGLWVALGAGLAWAFMAMQINPILAIVLGSALAVFVQGVYATTAYLGRTASLAKFGQPVYIDILKSMTTVTMAHAFVAIFTTVAMCHLMISALGHPFPLPLLGLVWGIALGAAGSATGNPFYGKERQYQEQKFGAGVPISASGNIVRYAEAGQRNSLDNGFFSAKLGGPASGICFGLIVFFELWRTVVFEELNIWGPIIVGIVVILIFAIIDRYIEVWARKNFGPYTAPEAPEEASS

SEQ ID NO: 12063 - protein, 297 aa, Methanocella arvoryzae
MDELAVSLGTLALMGACATIAGAAEDLESDFGSQSNANSQVQLAPQVGYLHRIYNKAVCGEPVAYGLLAATGAAIALALATAFSLNIVISLALGATVAALMYGVYATTAYMGRITGQMRFGQPVYLDVLLVTTPSIIAHAFIATMAIATFSYLLNVIIGQPFPFPILALLWGIMTGGMGSAVGDVHYGAERQYQAKPFGMGLPIASSGKIIQKGEAGLRSSTDIAGFCVKHGGPLTGLGLGLTVFVDLWRHIIFIEFANGWGAMIAGLIIVLIIVAFNRIIELWARKNYGPYREAED

SEQ ID NO: 12064 - protein, 299 aa, Methanoculleus bourgensis
MEEIIFGIGITALAGALATVAGAAEDTESDIGSQGDPNSQVQLAPQMGYIHRIFNKAVAGEPPAYGLWVALGAGLAWAFMAMQINPILAIVLGSALAVFVQGVYATTAYLGRTASLAKFEQPVYIDILKSMTTVTMAHAFVAIFATVAMCHLIISALGHPFPLPLLGLVWGIALGAAGSATGNPFYGKERQYQEQKFGAGVPISASGNIVRYAEAGQRNSLDNGFFSAKLGGPASGICFGLIVFFELWRTVVFEPLAAGWGAVIVGVIVILIFAIIDRYIEVWARKTFGPYVAPEEASS

SEQ ID NO: 12065 - protein, 300 aa, Methanolacinia petrolearia
MEELLFGIGISAIAGALATVSGAAEDTESDIGSQGDPNSQVQLAPQMGYIHRIFSKAISGEPPAYGLWITLGAGLAWALMAINYNPVLAIILGSAIAVFVQGVYATTAYLGRTASLAKFEQPVYIDVIKSVTTVTMAHAFVAIFTCVTMCFLMVNALGHPFPLPLMGLVWGIALGAAGSATGNPFYGKERQYQSQKFGAGVPISASGNIVRYAEAGQRSSLDNGWFTSKLGGPASGVCFGLIVFLELWRTIFFEEFASGWGAVIAGIVLILVFMAIDRYIEKWARKTYGPYTEEKTEEAA

SEQ ID NO: 12066 - protein, 298 aa, Methanospirillum hungatei
MEEIVLGIGITALAGAFATVAGAAEDTESDIGSQGDPNSQVQLAPQMGYIHRIFNKAISGEPPAYGAWCAIGAGVAWALMQINYNPALAIILGSVIAVFVQGIYCTSGYLGRIASLAKFQQPVYIDIIKSLLSVTMAHAFVAIFCTVAMCYLMASALHHPFALPLLGLVWGIALGAAGSATGNPFYGKERQYQNQKYGAGVPISASGNIVRYAEAGQRSSLDNGWFTTKFAGPASGICFGLIVFLELWRTVLFEKMMGGWGAIIMGVVLILVFTFIDRWVEVWGRKTYGPYTTEEASS

SEQ ID NO: 12067 - protein, 301 aa, Methanoplanus limicola
MEELLFGIGISAVAGALATVSGAAEDTESDIGSQGDPNSQVQLAPQMGYIHRIYSKAISGEPPAYGLWCALGAGLAWALMAINYNPVLAIVLGSAIAVFVQGVYATTAYLGRTASLAKFEQPVYIDLIKSVTTVTMAHAFVAIFTCVSMCFLMVNALGHPFPLPLLGLVWGIALGAAGSATGNPFYGKERQYQTQAFGAGVPISASGNIVRYAEAGQRSSLDNGWFTSKMGGPASGVCFGLIVFLELWRTIFFEEFAAGWGAVIAGIVLILIFMIIDRFVETWARKTYGPYTEEKSEEASS

SEQ ID NO: 12068 - protein, 302 aa, Methanohalophilus mahii
MEPLIGMGVLALMGAAATIAGASEDLESDVGSQSNPNSQVQLAPQMMYPHRIFNKAISGEPPSNALIAAVGGASASVLMSAYSMSVVFAIAVGALIAAGIHGTYATTAYLGRSASQKRFRQPIYLDMVRSHVPVMMGFAYITTFCILVVSYLMTSVLAHPFPLTLLAFIWGITIGAVGSSTGDVHYGAEREFQNVEFGSGLNAANSGNIVRKAECGLRNGIDNSWFCAKFGGPLTGLAFGMVVFLSGWITTIFDPSMGANIGWLAIVAGLAIILILVLGNRRLEVFARKQYGPYKEDEEVTA

SEQ ID NO: 12069 - protein, 300 aa, Methanococcus aeolicus
MDPTLLALGALALSGAAATVAGCAEDLESDVGSQSNPNSQVQLGPQMGNIHRYFNKAISGEPVSYGLYVAAAGATAWALMGMNLNPILAIIVGSAVAALVHGAYSVSAFLGRIVGQSKNFGQPVYMDVMMGHLGPIVGHGFIAVFCMLFAAYLAVNALGNPFPLPLVALIFGITVGAIGSSTGDVHYGAEREYQKYAFGGGIPVANQGDIDIMAETGIRNGLDSSYFCSKLGGPLTGLAFGLIIFLDGWRSILGNIIGGDLITKAAIAIVVGLIVVITTLLLNRKIEVYARNKFGPYTDR

SEQ ID NO: 12070 - protein, 299 aa, Methanosphaerula palustris
MVDNIVFGIGITALAGALAAVAGAAEDVESDIGSQGDPNSQVQLAPQMGFIHRIFNKAVAGEPPAYGLWCALGAGIAWAFMAMQFNPVLAIILGCALATFVQGVYATTAYLGRTASLAKFGQPVYIDILKSMTSVTMAHAFVAVFTTVSLCYLMNAALGHPFPLPLLGLVWGIALGAAGSATGNPFYGKERQYQNQKFGAGVPISASGNIVRYAEAGQRNSLDNGWFSSKLGGPASGICFGLIVFLELWRTVIFEKVGGGWGSIIVGVIMILIFAIVDRYIETWARKNYGPYTTEETSA

SEQ ID NO: 12071 - protein, 300 aa, Methanocaldococcus fervens
MDATLIALGALALSGALATIAGCAEDLESDVGSQSNPNSQVQLAPQMGNIHRYFNKAISGEPVAYGLYVAVAGSVAYAIMQLGVTPLLAMVLGAGVAALVHGAYAISAYLGRIVGQSKNFGQPVYWDIVMSHIGPIVGHGFIAVFCMVLMAYLANTVLGNPFPLPLIALIFGITVGAIGSSTGDVHYGAEREYQKYPFGGGVPVANHGDIDVKAEYGLRNGMDSSYFCSRLGGPLTGLCFGLIVFLDGWRGVIGDVLQGGNVISASTISVVIGLIIVALLAIANRKVEVFARNKYGPYTK

SEQ ID NO: 12072 - protein, 303 aa, Methanocaldococcus jannaschii
MDATLIALGALALSGALATVAGCAEDLESDVGSQSNPNSQVQLAPQMGNIHRYFNKAISGEPVSYGLYVAVAGTVAYAIMQMGLNPILALILGAGVAAFVHGAYAISAYLGRIVGQSKNFGQPVYWDVVMSHLGPIVGHGFIAVFCMVLMAYLANTILGNPFPLPLIALIFGITVGAIGSSTGDVHYGAEREYQKYPFGGGVPVANHGDIDIKAEYGLRNGMDSSYFCSRLGGVLTGLCFGLIVFLDGWRGVLGDILKGGQGGSVITASIISIVIGLIIVAILAIINRKVEVFARNKYGPYTK

SEQ ID NO: 12073 - protein, 300 aa, Methanocaldococcus sp.
MDPTLIALGALALSGALATVAGCAEDLESDVGSQSNPNSQVQLAPQMGNIHRYFNKAISGEPVSYGLYVAVAGTVAYAIMQMGLNPILALILGAGVAAFVHGAYAISAYLGRIVGQSKNFGQPVYWDIVMSHIGPIVGHGFIAVFCMVLMAYLANTILGNPFPLPLIALIFGITVGAIGSSTGDVHYGAEREYQKYPFGGGVPVANHGDIDVKAEYGLRNGMDSSYFCSRLGGVLTGLCFGLIVFLDGWRGILGNILQGGNVTTASVISIVIGLIIVAILAVVNRKVEVFARNKYGPYTK

SEQ ID NO: 12074 - protein, 301 aa, Methanoregula boonei
MVDNIVFGIGITALAGALATVAGSAEDTESNIGSQGDPNSQVQLAPQMGFVHRIFNKAVAGEPPAYGLWCALGAGLAWAFLAMQINAVLAIVLGSLLAVFVQGIYATTAYLGRTASLSKFGQPVYVDILKSMTTVAMAHAFVAVFCTVTICYLINVALGHPFPLPLLGFIWGITLGAAGSATGNPYYGKERQYQNQKFGAGVPISASGNIVRYAEAGERNSIDNGFFTAKFGGPASGLCFGLIVFLELWRTILFDKIGAGWGAIIVGVLIILVFTVVDRYIEVWARKNYGPYTAPVKEAAP

SEQ ID NO: 12075 - protein, 293 aa, Methanobrevibacter sp.
MDPITLGVVALMGAAATIGGAAEDLESDVGSQSNPNSQVQLAPQMGHLHRIINKATSGEPVAYGVWCGVAGAVAFVFMSYLNVMPIVAIVLGAVVGAFVHSIYTVTSHMGRIVGQSQFGQPLFMDVLTECLGPIAGHGFIATFCIVGMSYLMIIPINGSALHIFPLPILAVLWGITIGAIGSSTGDVYYGSESEYQKFAYGAGTPVAIQGDIVTKEAIGAKNSIDVVGFCSRFGGPITGLCFGLIVFLSFWITIVFGTIGGQIAGIIIVLLLIYLNYKVETYARNKFGPYEEE

SEQ ID NO: 12076 - protein, 290 aa, Methanobrevibacter ruminantium; identical to SEQ ID NO: 6355

SEQ ID NO: 12077 - protein, 289 aa, Methanosphaera sp.
MEIFNMFLVILMGLFAIIAGIFEDLESDVASTSNPNSQVQLAPQIGNLHKLFNRAVSGEPLLVGSMATISGAVAYTLIYIHQPVLLVLIISSLVATIVQVIFSITSYMGRITSQALYNQPLFMDMLYKHIPTSAAHAFISLFSITTLSYIMVYSLTQPIQVALPIVTFFVGIMLGSIGSAVGDIFYGAEKLYQHHEFGSGIPVSVNGHITTKSALGSENSIDMAKFCSKFGGPISGLCFGIIIFLNFWTFLVFGIVGGLIVGLILVIFLIILNYVLERNARLIYGKYGE

SEQ ID NO: 12078 - protein, 295 aa, Methanobacterium formicicum
MDPTSMIAGLGVVALMGAAATIAGAAEDLESDVGSMSNPNSQVQLAPQMGNLHRMMNKAISGEPVQMGTLAGIAGSVAFVLMGSLQLPVIMSIAGGAAIAALVHAAFATTSHLGRIVSQSQFNQPLFLDVITQHLGPITGHGFIVTFCIVGLSYLMTLSLPGFAHPFALPFLAVLWGITIGAIGSSTGDVHYGAEREYQQYPFGGGIPVAIHGDITRNAELGARNSIDVVYFCAKFGGPVTGFAFGLIVFLSFWTTIVFGAAGGVIAGIVIVLLLIYINNRIEVFARNKYGPYKE

SEQ ID NO: 12079 - protein, 298 aa, Methanocaldococcus villosus
MDPILALGAIALSGALATIAGCAEDIESDVGSQSNPNSQVQLAPQMGNIHRYYNKAISGEPVAYGLYVAVAGGVAYALINMGLPMLLALIAGTGVAALVHGAYAISAYLGRIVGQSKNFGQPVYWDIVMTHIGPIVGHGFIAVFCMLLMAYIANTILGNPFPLPLIALIFGITVGAIGSSTGDVHYGAEREYQKYPFGGGVPVANHGDIDIKAEIGLRNSMDSSYFCVKLGGPLTGLCFGLIVFLDGWRGVIGDVIKGNDIMASSIISIIIGLTIVAILAIINRKVEVFAREKYGPYK

SEQ ID NO: 12080 - protein, 302 aa, Methanosarcina barkeri
MEPLISMGVLALIGVAATIAGASEDLESDIGSQSNPNSQVQLAPQMMFPHRIFNKAISGEPPSNALMCSIGAAVATVLISEFTMSPLFALVFGSLIAACVHATFAVTSTMGRCASQSRFKQPIYLDMIRSHITPIMGYAFITTFCILVVSYLMTVVLGHPFPLTMLAFIWGITIGAIGSSTGDVHYGAEREFQQFEFGSGLNASNSGNIVRYAESGLRDGFDNSWFCAKFGGPVTGLAFGMTVFLGSWITTIFDPAKGLGWLSVIAGIVIVFILIIWNWKMEVYARKAYGPYKEDKTEEASA

SEQ ID NO: 12081 - protein, 293 aa, Methanobacterium lacus
MDPMITGLGIVALMGAAATIAGAAEDLESDVGSMSNPNSQVQLAPQMGHLHRMFNKAISGEPVQMGTLAGIAGSVAFVLMSSVHLPVIMSIAAGGFIAALFHSAFATTSYLGRIVGQSQFDQPVFMDVITGHLGPIAAHGFIVTFCIVGLSYLMTLPVQGFNHPFPLPLLAVLWGITIGAIGSSTGDVHYGAEREYQTYPFGGGIPVAIHGDITTMSELGPRNSIDVVHFCAKYGGPVTGFCFGLIVFFSFWTTVVFGPTGGVIAGLVIVLAIIILNNRIELFARNQYGPYKE

SEQ ID NO: 12082 - protein, 299 aa, Methanotorris igneus
MDTTLIALGALALAGAAATIAGCAEDLESDVGSQSNPNSQVQLAPQMGNIHRYFNKAISGEPVSYGLYVAVAGAIAWALLNYGLNPVLALVAGSGVAAFVHGAYAVSSYLGRIVGQSKNFGQPVYMDVVLSHLGPIVGHGFIAVFCMVFAAYLANNVLGNPFPLPLVALIFGITVGAIGSSTGDVHYGAEREYQKYPFGGGVPVANHGDIDIKAEYGLRNGLDSSYFCSRLGGPLTGLCFGLIIFLDGWRGVLGEILGNDLMTKSVIAIIIGLLIVVVAAILNRKVEVFAREKYGPYTK

SEQ ID NO: 12083 - protein, 299 aa, Methanotorris formicicus
MDTALITLGALALAGAAATVAGCAEDLESDVGSQSNPNSQVQLAPQMGNIHRYFNKAISGEPVSYGLYVAVAGVVAWALLNYGLNPVLALVIGAGVAAFVHGAYTVSSYLGRIVGQSKNFGQPVYMDVILSHLGPIVGHGFMAIFCIVFAAYLANNVLGNPFPLPLVALIFGITVGAIGSSTGDVHYGAEREYQKYPFGGGVPVANHGDIDIKAEYGLRNGLDSSYFCSRLGGPLTGLCFGLIVFLDGWRGIIGDIIGSDLVTKSVIAIIMGLLVVVIAAIINRKIEVFAREKYGPYTK

SEQ ID NO: 12084 - protein, 299 aa, Methanocaldococcus infernus
MDTLLITLGALALSGALATIAGCAEDLESDVGSQSNPNSQVQLAPQMGNIHRYYNKAISGEPVSYGLYVAVAGSIAYAIIQAGFNPVLALIIGAGVAALVHGAYAISAYLGRIVGQSKNFGQPVYWDIVMSHIGPIVGHGFIAVFCMVLMAYLANTILGNPFPLPLIAFIFGITVGAIGSSTGDVHYGAEREYQKYPFGGGVPVANHGDIDIKAEYGLRNSMDSSYFCSRLGGVLTGICFGLIVFLDGWRGVLGNILEQKDPIISSVISIVIGLIIVVILAIVNRKVEVFAREKFGPYK

SEQ ID NO: 12085 - protein, 299 aa, Methanofollis liminatans
MESILLGVGVTALAGALATVAGAAEDTESNIGSQGDPNSQVQLAPQMGYIHRIYNKAVSGEPPAYGLWVTIGAGVAWAFMATGMNPVLAIVIASALAIFVQGVYAATAYLGRTSSLAKFEQPVYIDLLKSVTSVTMAHAFVAVFTTVSMCYLLNAALGHPFPLPLLGIVWGIALGAAGSATGNPFYGKERQYQSQMFGAGVPISASGNIVRYAEAGQRSSLDNGWFTAKLGGPASGVCFGLIVFLELWRTVLFEEAVGGWGAIIVGVIIILIFMIIDRYIETWARKNYGPYVKAEEASA

SEQ ID NO: 12086 - protein, 300 aa, Methanothermococcus okinawensis
MDPTIITLGALALAGAAATVSGCAEDLESDVGSQSNPNSQVQLGPQMGNIHRYFNKAISGEPVAYGLYVAVAGSVAWAIMHIGLNPILALIIGAGVAAFVHGAYAVSAYLGRIVGQSKNFGQPVYMDVILSHVGPIVGHGFIAVFCMLFVAYLATTILGNPFPLPLVAFIFGITVGAIGSSTGDVHYGAEREYQKYPFGGGIPVANQGDIDIKAEYGLRNGIDSSYFCSKLGGPLTGLCFGGIVFLDGWRGLMGDILGGDLVTKSSIAIVIGIIFVAIAAYINRVIEVYARKKYGPYTDR

SEQ ID NO: 12087 - protein, 305 aa, Methanobrevibacter sp.
MINLIKNMEEKIMDPITLGVVALMGAVATIGGAAEDIESDIGSQSNPNSQVQLAPQMGHLHRMINKAASGEPVAYGVWCGVAGSIAYVLMTLGITNDLFAIAAGSCVAAFVHSIYTITAHMGRIVGQSQFEQPLFMDVLTQSLGPIAGHGFITTFCLVGVSYLMTIPLNGTPLHAFPLPLLAVLWGITLGAIGSSTGDVHYGAESEYQKFEFGGGTPVAIQGDIVTKAPMGAKNSLDVGNFCVKFGGPLTGLCFGLVVFFSFWNSVVFGLYGGLVVGFIIVLILILMNDKLERFARKQYGPYEEE

SEQ ID NO: 12088 - protein, 304 aa, Methanobrevibacter sp.
MINLIKNMEEKIMDPVTLGVVALMGAVATIGGAAEDLESDIGSQSNPNSQVQLAPQMGHLHRMINKAASGEPVAYGVWCGVAGSIAYVLIMLGFVPIISIAMGSCVAAFVHAIYTVTSHMGRIVGQSQFEQPLFMDVLTQSLGPIVGHGFITSFCIVGISYLMIIPLNGTTLHVFPLPLLAVLWGIALGAIGSSTGDVHYGAESEYQKFEFGGGTPVAIQGDIVTNAPMGAKNSMDVVNFCAKFGGPLTGFCFGLVVFFSFWNTVVFGIYGGLVVGFIIVILLIIMNDRLEVFARNRYGPYEED

SEQ ID NO: 12089 - protein, 305 aa, Methanocella conradii
MEQLAVNLGALALMGACATIAGAAEDLESDFGSQSNANSQVQLAPQVGYLHRVYNKAISGEPVAYGFLCTTAASIAYAIAFVLAGNSAARINEFIVVGLIAGATIASLMYGVYATTAYMGRLSGQKRFGQPIYLDILLTTTPSIIAHAFIAALGISVFSYLLNIIIGQPFPFPILAMLWGIMAGGMGSAVGDVHYGAERQYQNKPFGAGLAAANSGKIIQKGEAGLRNSIDIAGFCVKHGAPLTGLGLGITVFADLWRHILFIEYWNGWGAMVAGLLIVLLWVIGNRLLEMWTRNTYGPYKSAEE

SEQ ID NO: 12090 - protein, 300 aa, Methanothermococcus thermolithotrophicus
MDPTLITLGALALAGAATTVAGCAEDLESDVGSQSNPNSQVQLGPQMGNIHRYFNKAISGEPVSYGLYVAVAGAVAWALMSTNLNAILALVVGSGVAALVHGAYSVSSYLGRIVGQSKNFGQPVYMDVLITHLGPIVGHGFIAIFCMALAAYLASTALGNPFPLPLIALIFGITVGAIGSSTGDVHYGAEREYQKYLFGGGIPVANQGDIDIKAEYGIRNGLDSSYFCSRLGGPLTGLCFGLIIFLDGWRGIVGNIVGSDLITKSVVAILVGLLIVGVAAYANRKIEVYARNKYGPYTNR

SEQ ID NO: 12091 - protein, 299 aa, Methanococcus maripaludis
MDPTLISLGALALAGAAATVSGCAEDLESDVGSQSNPNSQVQLGPQMGNIHRYFNKAISGEPVSYGLYVAVAGTIAWALINAGLNVVLAIIVGAGVAAIVHGAYSVSAFLGRTVGQSKKFGQPVYMDVLTSHIGPIVGHGFIAVFTMTLAAYLATTALGNPFPLPLVSLIFGITVGAIGSSTGDVHYGAEREYQKYPFGGGIPVANQGDIDIYAEYGVRNGLDSSYFCSRFGGPLTGLCFGLIIFLDGWRSILGNIIGGDLVTKTSIALLVGLLVVAVAAVINRKLEVYARNKYGPYRN

SEQ ID NO: 12092 - protein, 299 aa, Methanococcus maripaludis
MDPTLISLGALALAGAAATVSGCAEDLESDVGSQSNPNSQVQLGPQMGNIHRYFNKAISGEPVSYGLYVAVAGTIAWALINAGLNAVLAIIVGSGVAAVVHGAYSVSAFLGRTVGQSKKFGQPVYMDVLTSHIGPIVGHGFIAVFTMTLAAYLATTALGNPFPLPLVALIFGITVGAIGSSTGDVHYGAEREYQKYPFGGGIPVANQGDIDIYAEYGVRNGLDSSYFCSRFGGPLTGLCFGLIIFLDGWRSILGNIIGGDLVTKTSIALLVGLLVVAVAAGINRKLEVYARNKYGPYRN

SEQ ID NO: 12093 - protein, 299 aa, Methanococcus maripaludis
MDPTLISLGALALAGAAATVSGCAEDLESDVGSQSNPNSQVQLGPQMGNIHRYFNKAISGEPVSYGLYVAVAGTIAWALINAGLNVVLAIIVGAGVAAIVHGAYSVSAFLGRTVGQSKKFGQPVYMDVLTSHIGPIVGHGFIAVFTMTLAAYLATTALGNPFPLPLVSLIFGITVGAIGSSTGDVHYGAEREYQKYPFGGGIPVANQGDIDIYAEYGVRNGLDSSYFCSRFGGPLTGLCFGLIIFLDGWRSILGNILGGDLVTKTSIALLVGLLVVAVAAVINRKLEVYARNKYGPYRN

SEQ ID NO: 12094 - protein, 299 aa, Methanococcus maripaludis
MDPTLISLGALALAGAAATVSGCAEDLESDVGSQSNPNSQVQLGPQMGNIHRYFNKAISGEPVSYGLYVAVAGTIAWALINAGLNAVLAIIVGSGVAAIVHGAYSVSAFLGRIVGQSKKFGQPVYMDVLTSHIGPIVGHGFIAVFTMTLAAYLATTALGNPFPLPLVALIFGITVGAIGSSTGDVHYGAEREYQKYPFGGGIPVANQGDIDIYAEYGVRNGLDSSYFCSRFGGPLTGLCFGLIIFLDGWRSILGNIVGGDLVTKTSIALLVGLLVVAVAAVINRKLEVYARNKYGPYRN

SEQ ID NO: 12095 - protein, 299 aa, Methanococcus vannielii
MDPTLISLGALALAGAAATVSGCAEDLESDVGSQSNPNSQVQLGPQMGNIHRYFNKAISGEPVSYGLYVAVAGSVAWALINAGLNAVLALIIGSGVAAIVHGAYSVSAFLGRTVGQSQKFGQPVYMDVLTSHIGPIVGHGFIAVFTMVLAAYLAVTALGNPFPLPLVALIFGITVGAIGSSTGDVHYGAEREYQKYAFGGGIPVANQGDIDIYAEYGIRNGLDSSYFCSRLGGPLTGLCFGLIIFLDGWRSIVGNIIGGDLVTKTSIALVVGLLVVVAAMILNRKIEVFARNKYGPYRN

SEQ ID NO: 12096 - protein, 292 aa, Methanothermus fervidus
MDPAVASLGILALTTASAIIGQTIEDVETNIGSQSNPNSQVQLAPQMGNLHRFFNKAIAGEPFAYGTFCGVSGAITVAMLYLHLPAVIALAIGAAITTLIWLAYSTTAYLGRVSGSATFNQPVFLDMLTENLGPIAGHAFIVFFCITGVAYLMTLPVKGFAHPFPIPVIGMIWGMTIGAIGSAVGDVYYGAEAEFVHKKFGGGIPVASHGDITRKGVLGARSPMEVGNFTVKYGSPITGMAFGLIVLFTFWFDIVFEKWSILAAFLFVILLIVINNRLEKHAREKYGPYRRE

SEQ ID NO: 12097 - protein, 304 aa, Methanosarcina acetivorans
MEPLIGMGVLALIGVAATIAGASEDLESDVGSQSNPNSQVQLAPQMMFPHRIFNKAVSGEPPSNALMCSVGAAVATVLISEFTLSPLFALVLGALIAACVHGTFAVTSTMGRAASQSRFKQPVYLDMIRSHTPVIMGYSFITTFCILVVSYLMTVVLGHPFPLTMLAFIWGITVGAIGSSTGDVHYGAEREFQQFEFGSGLNASNSGNIVRYGESGVRNGYDNSWFCAKFGGPVTGMAFGMTVFLGSWVTTVFDPAVSISRGWISVVAGVIIVLILIFWNWKIEVKARNAYGPYKEDKTEEASA

SEQ ID NO: 12098 - protein, 304 aa, Methanosarcina mazei
MEPLIGMGVLALIGVAATIAGASEDLESDIGSQSNPNSQVQLAPQMMFPHRIFNKAISGEPPSNALMCSIGAAIATVLISEFTVSPLFALVFGSVIAASVHATFAVTATMGRCASQSRFKQPIYLDMIRSHTPAIMGYAFITTFCVLIVSYLMTVVLGHPFPLTMLAFIWGITIGAIGSSTGDVHYGAEREFQQFEFGSGLNASNSGNIVRYAESGLRNGFDNSWFCSKFGGPTTGIAFGMTVFLGSWITTIFDPAQGLSMGWLSVIAGVIIVLILIIWNWKIEVQARKAYGPYKEDKAEEASA

SEQ ID NO: 12099 - protein, 300 aa, Methanothrix harundinacea
  source 1..300: note = strain 6Ac
MVSMGLLAAMGALATVAGASEDLESDVGSQSNPNSQVQLAAQVGHTHRIYNKAISGEPPSNALYAALAAVTASVLMSGYGMNAFFAIAIGSVMAAIFNGIFSVTAYMGRNTSQARFNQYVYLDVLRTHTTAIMAHAYITAFCVVTISYIMTAPWLPIQHPFPFPLVAMIWGLAIGAIGSSTGDVHYGGEREFQNYIFGAGLNAANSGDIVTRAEAGLRSSIDNVWFCARFGGPVTGMAFGLTVFLDNWRTTIFDPATQGWYAVLTGIVIVILFIVYNRILEIRARKRYGPYPEYKGDIEA

SEQ ID NO: 12100 - DNA, 903 bp, Methanococcoides burtonii
  source 1..903: mol_type = genomic DNA
atggaaccactcatgggcatgggtgttctagcacttatgggcgctgccgcaactattgctggcacaactgaggatctcgaatctgatgtcggatctcagagtaacccaaattcacaagtacagctagcaccccagatgatgtatccacataggatctacaacaaagcaatttctggtgaaccaccatcgaatgcattgatttgtgctattggcggaaccgtggcatctgtattgatgactgcaaatctgtctgtgatctttgctatcgctattggtgcacttgttgcttcagcagtacacggaacatattgtatcacggcttacatgggccgtaccgcaagtcagaaacgtttcagacaaccaatctaccttgatattctcagatcacatacgccagtgatgatgggatatgcatttattacaacattctgtatccttgttgtatcatacattatggtggctgttctcgcacatcctttcccacttacgcttctcgcgttcatttggggaattactgtcggagctattggttcatccactggtgatgttcattatggtgcagagcgtgaattccagaatgttgagttcggatcaggtctcaatgctgcaaattccggaaacattgtaaggaaagcagaatccggtcttcgtaatggtattgacaattcctggttctgtgcaaagttcggaggcccagtaaccggtcttgcattcggtatgaccgttttcttaagtggctgggtaacagctgtctttaaccctgctattagccttacaatgggctggctttcagttgctgcaggagttattttggtgttacttttgattatctggaacagaaaaatcgaagtagcagcacgtaaggcatttggtccttacaaggaagaagaggaggtcgctgca

SEQ ID NO: 12101 - DNA, 909 bp, Methanolobus psychrophilus
  source 1..909: mol_type = genomic DNA; note = strain R15
atggaaccgctcacaagtatgggcgtaatggcactgatcggagccgcagcaactattgctggtgcctcggaggaccttgaatctgatgtagggtcccagagtaacccgaactcccaagtgcaattagcgccccagatgatgtatccacacaggatctataacaaagctatttctggcgaaccaccatcgaatgcacttatgtgtgctatcggcggaactgttgctgctgttctgatgagcaccggcgcatctgttatcctggcactggccgtaggagccattgtcggagcagctgtacatggtacttattcagtcacaggttattttggtagaatagcaagccaaaaacgtttcaaacagccactttatcttgacatcgtacaatcacacacccctgtaattatgggatatgcattcattactacgttctgtatacttgttatatcgtatcttatgacaaccgttatgggacacccgttctcactgccactgctggcattcatttggggaatcactgtcggtgcgataggatcttccacaggtgacgtccactatggtgcagagcgtgaattccagaatgtggagttcggatcaggactgaacgccgccaactctggaaacattgtgaggaaagcagaatccggtatcaggaacggtatcgataactcatggttctgtgccaagttcggaggacctgccacaggaatagccttcggtatggtcgtgttcctcagcggatggataactgtagtattcgatccttcgatcaatgaaacccttggatgggaatccatcatagcaggtgttgtcattgtactgttgctggctatatggaacaggaagatcgaagtggctgctcgtaatgcatttgggccttataagaaagatgaggaagcagaggtggcagct

SEQ ID NO: 12102 - DNA, 879 bp, Methanobacterium paludis
  source 1..879: mol_type = genomic DNA
atggaccctatgataacaggattaggtgttgtcgctctcatgggtgctgctgcaacaattgcaggagctgcagaggacttagaatctgatactggttcaatgagtaaccctaactctcaggttcaacttgctccccagatgggtaaccttcacagaatcttcaacaaagctgtttctggtgaaccagttcagatgggtgtacttgcaggtatagcaggttctgtagcgtttgtccttatgggtgcggtacagttaccagttataatgtcaatagctggtggtgcatttatagcagcattattccatacagcatttgcaacaacatcttacttaggaaggatagtgagtgaatcccagttcaatcaaccagtattcatggatgttcttacgcaaacactgggaccaatagctgcccatggatttatagtaacattttgtatagtaggattatcatatctaatgacattaccattacagggcttcgggcacccattcccaataccactactagcagtgctttggggtataacaataggtgcaataggttcatcaacaggagatgttcactacggtgctgaaagggagtaccagacctacccatttggtggaggtatacctgtctcaattcacggtgacataaccaccgagtctgaactcggcccaaggaactccattgatgttgtgcacttctgtgcaaaattcggaggaccagtcacaggattctgtttcggtcttatcgtgttcctgagcttctggacaacactggtgtttggagcagtaggtggagtagttgcaggtatcataatagttttattactgatagttctcaacaacagagtagaagtcttcgcaagaggcagatatggaccatataaagaa

SEQ ID NO: 12103 - DNA, 912 bp, Methanohalobium evestigatum
  source 1..912: mol_type = genomic DNA
atggacccactcttaggtatgggtgtactggcacttatgggagctgcagcaaccattgctggcgctacagaggatcttgaatctgatgttggatcgcaaagtaatcccaactctcaagtgcaacttgcaccccaaatgatgcatccacatagaatatacaacaaagctatttctggagaaccaccatcaaacgctctaatgtgtgcgattggaggtaccatagcttcagttatgatgagtgcatatggattgtctgtggtttttgcaattacatttggtgcagcaattgccgcagttgtacacggaacatatgcagcatcatcatttatgggtagagtttccagtcagaaacgttttaaacagcctttgtaccttgatattgttaggtcgcatacacctgttatcataggatatgcatttttaaccacattctttatactggttatatcctatctaatgtcatcggtactcaatcatccattcccattgccgcttcttgcgtttatatggggcattactgttggtgctattggttcatccactggtgatgtacactacggtgctgaacgagaataccagaacgttgaattcgggtctggtataaacgctgccaattctggagatatcgttagatatggagaatcaggcctcaggaacggtatcgacaacgcttggttctgttcaaaatttggaggaccagtcacaggaattgcatttggtatgaccgttttcctcagtggatgggtaacaaccgtattcaatcccggagaaagtattacaatgggctggctttcagtaattgccggcttgttaatagttgctattttgataatcggaaatcgagtcattgaaacctgggcacgcagtacctatggtccctaccaagaagatgaaagtgaagaggtgactgca

SEQ ID NO: 12104 - DNA, 903 bp, Methanomethylovorans hollandica
  source 1..903: mol_type = genomic DNA
atggacccgctcataggcatgggcgcgttagcacttatgggtgctgctgctaccatagcaggtgcatcagaagatctggaatccgatatcggatctcagagtaaccctaactctcaagtgcaacttgcgccccagatgtcgtatccacacaggatctataataaagccatttctggagaaccaccatcgaacgctcttatgtgtgctatcggtggaactatagcttatgttatgttgaacgccaacttttccgcagtgcttgcactgaccataggatcactggtcgcagccatggtacacggaacatatgcagtaacttcatacatgggcagatgctccagccagaaacgtttcaaacagatggtataccttgatgtgctgcgttctcacacgccggcaataatgggatactcattcataacaacattctctattcttgtagtatcttacttaatgatgactgtttttgctcatcccttcccgcttccgctactggcattcatatggggtatcaccgttggcgctatcggctcatccacaggtgatgtgcactatggtgccgagcgtgagttccaggatgtggagttcggttccggtcttaacaccgcaaactccggtaagatcgtaagaaaggcagaatccgggatcaggagcagtatggataattcctggttctgtgcaaagttcggaggacctgtaacgggtattgcctttggtatgacagtcttccttagtggatggataactactgttttcgatccgtcaaaaggccccacggccggatgggagtctgttattgcaggagctctcattgtcttcattatgatcatctataacagaaagatcgaaatccaggcaaggaaagcattcggtccctacaaagaagataaagaggaagcagca

SEQ ID NO: 12105 - DNA, 903 bp, Methanothrix sp.
  source 1..903: mol_type = genomic DNA
atggacgcatttagcatggggcttatagccgcaatgggagcccttgcgacggttgctggtgcctctgaagatatagaatccgatgtaggatctcagagcaatcccaactcgcaagttcagctggctgcccaggttggcaacccccacaggatttataataaggccatctcgggcgaaccgccggccaatgccctgtggtgtgccacagctgctatagtagcctatacgcttattaccgccttccagatgcccgcattgatggccctggtagcaggcgcatccgttgctgcactattcaacggtgtcttttcaatgagctcctactttggcaggaactccagccaggccaggttcaaccagtggatttatctggatatcgtcaggtacaccacgccatcgattatggcgcatgcctggataacatcattctgtattgcaactatatcgtatatcatggtatatatgctgccaacgccacatcccttcccaatgcccatcatcgctctgatctggggactggctgtgggtgccataggctcctcggtgggagatattcattatggcggcgagagggagttccagaaccgggcattcggctgcggtctgaacaccatgctctccggccagattgtgaggaaggcagaggcaggtctgagaaactccatagacaacgcctggttctgcaccaagttcggcgggccggccactgggatgggattcggcctgacggtctttctggacaactggcggacaacggtattcgatcccgtaacccaggcttcttatgccattctcatgggagtcttcttcattcttgttgaggtctcttataaccactatatagagaggtccaccaggagaaagtatggaccatatccagagtataagggggatgtagcagca

SEQ ID NO: 12106 - DNA, 909 bp, Methanocaldococcus vulcanius
  source 1..909: mol_type = genomic DNA
atggacacaacattaatagctctgggagcactcgctttaagtggagcattggcaacagttgcaggttgtgccgaggatgcagaatcagatgtaggttctcaatcaaacccaaactcacaggttcagttagcaccgcagatgggtaatatccacagatactataacaaggcaatatccggagagcccgtttcatatggattgtttgttgcggtagcaggatctattgcatacgctttaatacaggcaggcataaacccaatactggctataatactgggagcaggagctgcggcttttgttcatggtgcatatgcggtttcagcatacttgggaagaattgttggtcaatcaaaaaacttcggtcagccagtttactgggacgttgtaatgagccatttgggcccaattgttggacatggttttattgctgttttttgtatggttttaatggcatacttagcaaatacattattaggagatccgttcccgttaccattgatagcatttatatttggtattactgttggggcaattggttcctcaacaggagacgttcactatggtgctgaaagagagtatcaaaagtatccatttggaggaggagttccagttgctaaccatggagatattgatgttgaagcggattatggtataagaaatagcatggattcttcatacttctgtgtaagagtaggtagcgttttgacaggattatgttttggtttgatcgttttcttagacggatggagaggtgtcttgggtaatatattaggaggattaagcggaggaagtgcaataaatgcttcaataatatccatagttataggtttgataatcgttgctgcaatggctataataaacagaaagattgaggtatttgcaagaaacaagtttggaccatacacaaaa

SEQ ID NO: 12107 - DNA, 909 bp, Methanosalsum zhilinae
  source 1..909: mol_type = genomic DNA
atggaaccactcataggtatgggtgtattagcattgatgggtgctgctgctgcgattgccggcatgtcagaagatctggaatctgatgtcggatcacagagtaatcccaattcacaggtacagcttgcgccccagatgatgtatccacatagaatattcaataaagcaatttccggagaaccaccatcaaatgcactgatgtgtgcaataggtggtacgacaactgcaatattaatggattcaatgggaatgtccgttttattctcagttgctattggtgcactggttgcagctcttgcacatggatcatattcgactatgtctttctttggaagaccggcaagtcagaaccgtttcaagcagccaatatatctggatgttctaagatcccatatagtagccataatggcattcgcgtttgtcacaacgttttcaattgtaattatttcatatcttatgatcactgctctgggtcatccgttcccactggcattgctagcatttatatggggtattgcagttggtgcgatcggctcatctactggtgatgtccactacggagctgaaagacagttccagaacactgaatttggtgcaggcctgaatgctgcacagtctggtaacattgtaagaaagggtgaagccggactgcgtaacggaattgataatttatggttctgttccaggttcggaggacctgctacaggtattgcctttgcaatgacagtctttttaagcggatggatcacactggtctttgatccttccataagcctgacaattggatggctatcagtcattgcaggacttattatagtactgatattaatcatatttaacagaaaactggaagtatctgcaagaaatacctacgggccttacaaagcagataaagaagaggtggcagca

SEQ ID NO: 12108 - DNA, 885 bp, Methanocorpusculum labreanum
  source 1..885: mol_type = genomic DNA
atgcaagaaattataatcggcattggagtaactgcccttgcgggagctctcgcagcggttgccggtgcagccgaagatactgagtccaacatcggatcacaaggtgacccgaactctcaggtccagctcgcaccgcagatgggatacactcaccgtatctataacaaagcagtgagtggagaaccaccggcatacaccctgtgggtgacccttgcttgtggtgttgcatgggcattccttatgttaggagtcaatgcaatcctcgcaatcatcttcggaacagttctcgcaacctttgtgcagggagtttacgcaactactgcataccttggaagaaccgcaagtctttccaagtttggacagccggtctttattgatgttgttaaatcagtaacgactgtgactatggctcacgcattcgtagctatctttgcaacggtaaccgtatgttacctcatgatgacagtcatcggacatccgtttgctcttccgcttcttggtatcgtatggggtcttgctcttggtgcagcaggttctgcaaccggaaacccgtactacggtaaagagcgtcagtatcagaatcagaaattcggtgctggtgtccccatctctgcatccggtaacatcgttcgttatgcagaagcaggacagagaagctcgatcgacaacggtttcttcaccgcgaaattcggtggacccgcatcaggtctttgtttcggattaattgttttcttcgaactctggcgtaccatcatcttcgaggacttcctcgcaggatggggtgcagtgatcgttggagcagttgtaattattgtcttcatgatcatcgaccgttatgttgaagtctgggcacgcaagagctacggaccctacactgtggaggcc

SEQ ID NO: 12109 - DNA, 897 bp, Methanoregula formicica
  source 1..897: mol_type = genomic DNA
atggaacatattgtatttggcattggaattactgcattgacaggagctcttgccactgtagccggtgctgcagaagatactgaatccaacatcgggtcccagggtgacccgaactcacaggttcagctcgcaccgcagatgggtttcctgcaccgcatcttcaacaaggcggttgcaggagaacccccggcatacggtctctggtgctgtcttggcgccggactcgcatgggcattcatggccatgcagtttaacgcggttcttgctatcgttctcggttctgtactcgcagtctttgtacagggcgtttatgcaaccaccgcttacgttggcaggaccgcgagcctgtccaagttcgggcagccgatctacgtggacatcctgaagtccatgacgacggttaccatggcacatgcctttattgcaatcttcgcaaccgtggcgatctgccagctgatcaacggtgcactgggacacccgttcccgctgccgctgctcggtctcatctggggtatcgcactcggtgcagcaggatctgcaacgggcaacccgtactacggtaaggaacgccagtaccagaaccagaagttcggtgcaggtgtcccgatctcggcgtccggtaacatcgtccgctatgcagaagccggcgaaagaaactcaatcgacaatggctggtttaccgcaaagatcggtggctcggcatccggtatctgctttggcctgattgtcttcctcgaactctggcgtaccattctctttgagcaggtagcagccgggtggggcgcaatcgttgtcggtgtcctcatcatcctcgtcttcacggtcatagaccgctacatcgaggtctgggcacggaagacctacggaccctacaccgaggcaaaggaggcatcctca

SEQ ID NO: 12110 - DNA, 903 bp, Methanoculleus sp.
  source 1..903: mol_type = genomic DNA
atggaagagatcgtatttggcatcggcattaccgcattggcaggtgctcttgcaaccgtcgccggcgctgcggaagacactgaatctgatatcggatcacagggtgacccgaactcgcaggttcagctggctccgcagatgggatatattcaccgcatcttcaacaaggcagttgccggtgaaccccccgcgtacggcctatgggttgctctgggtgcaggccttgcttgggcattcatggcgatgcagataaacccgatacttgcaatcgtgcttgggagcgctctcgcggtcttcgtgcagggcgtgtatgcgactaccgcatacctcggccgtactgcaagtctcgccaagttcggacagccggtctatatcgatattctgaaatcgatgacgaccgtgaccatggcacacgcgttcgtagcaatcttcaccaccgtcgcgatgtgtcacctgatgatcagcgcactcggccaccccttcccgctcccgcttctgggtctcgtctggggtatcgcactcggtgcggctggatctgcaaccggtaacccgttctacggaaaggagcggcagtaccaggagcagaagttcggagcaggcgttccgatctctgcgtccggaaacatcgtccgctacgccgaggccggccagcggaactcgctcgacaacggtttcttcagcgccaaactcggcggccccgcgtcgggtatttgctttggcctgatcgtcttcttcgaactctggcgtaccgtggtcttcgaagaactcaacatctggggaccgatcatcgtcggtatcgtcgttatcctgatctttgccatcatcgaccgctacatcgaggtctgggcaaggaagaacttcggcccgtacacggctcccgaggctcctgaggaggcatcgtca

SEQ ID NO: 12111 - DNA, 891 bp, Methanocella arvoryzae
  source 1..891: mol_type = genomic DNA
atggatgaattggcagttagccttggaaccctcgcactgatgggcgcttgcgcaaccatcgcgggtgcagccgaggaccttgaatccgacttcggttcacagtccaacgcaaactcgcaagtgcagctggctccacaggtaggctatcttcaccgtatatacaacaaagcggtttgcggtgagcctgttgcctatgggcttttagccgctactggagctgctattgctctggccctggccacggcatttagcctcaacatagtaatatcgttagctctcggcgctaccgtcgcagcgctgatgtacggtgtatatgctacaacggcatatatgggcaggatcaccggccagatgaggttcggccagcccgtgtatctcgatgtattgctggtaactacaccttcgattattgcacatgcatttattgcaacgatggcaatcgcaactttctcgtaccttttgaatgttatcattggacaacccttcccgttcccgattctggctcttctctggggtatcatgactggcggtatgggctctgcagtcggtgacgtacactacggtgccgagaggcagtaccaggcaaagccgttcggtatgggccttccgatcgccagctcgggcaagatcatccagaagggcgaggctggcctcagaagcagcactgacatcgccggtttctgcgtaaagcacggcggtccgctgaccggtctcggtctcggcctgactgtcttcgtggacctgtggagacacatcatcttcatcgagttcgcgaacggctggggcgccatgatcgctggcctgatcatcgttctgattatcgtcgccttcaacaggatcatcgagctgtgggcgaggaagaactacggcccgtacagggaagcggaggac

SEQ ID NO: 12112 - DNA, 897 bp, Methanoculleus bourgensis
  source 1..897: mol_type = genomic DNA
atggaagagattatatttggcatcggcattaccgcattggcaggtgctcttgcaaccgtagccggcgctgcggaggatactgaatctgatatcggatcccagggagacccgaactcacaggttcagctagccccgcagatgggatatattcaccgcattttcaacaaagcagttgccggtgaacccccagcgtacggtctctgggttgcattgggagcaggccttgcctgggcatttatggcgatgcagataaacccgattcttgcaatcgtactcgggagcgctcttgcggtcttcgtgcagggcgtttatgcgacaaccgcatatctcggtcgtactgcaagtctcgccaagttcgaacagccggtctacatcgatatcttaaagtcgatgacgaccgtgaccatggcacacgcgtttgtagcgatctttgccaccgtcgcgatgtgtcacctgatcatcagcgcactcggccaccccttcccgctcccactgctgggtcttgtttggggtatcgcgctcggtgcagccggatctgcaaccggtaacccgttctacggaaaggagcggcagtaccaggagcagaagttcggagccggagtcccgatctccgcgtccggtaacatcgtccgctacgccgaggccggccaacggaactcgctcgacaacggtttcttcagcgccaaactcggcggccccgcgtcgggtatctgtttcggcctgatcgtcttcttcgaactctggcgtaccgtggtcttcgagccgctcgccgccggatggggagcggtcatcgtcggcgtcatcgtgatcctgatctttgccatcatcgaccgctacatcgaggtctgggcaaggaagactttcggcccctacgtggcccctgaggaggcatcatca

SEQ ID NO: 12113 - DNA, 900 bp, Methanolacinia petrolearia
  source 1..900: mol_type = genomic DNA
atggaagagttgttatttggcatcggtataagtgctatagcaggcgctctggcgacagtgtccggagctgcggaggatactgaatctgatatcggttcacagggtgacccgaactcgcaggttcagctggctccgcagatgggttatattcaccgtatattcagtaaagctatatccggcgaaccccccgcgtacggactctggattacgcttggagcaggtcttgcatgggcgctcatggcgatcaactataatccggttcttgcgattatccttggatcggcaattgccgtatttgtccagggtgtatatgctacaacagcataccttggaaggacagcaagtctggcaaaatttgaacagccggtctatatcgacgtgataaagtcggttacgaccgtgactatggcacatgcattcgtagctatttttacatgtgtcacgatgtgtttcctcatggtaaacgctctcggacaccccttcccgctcccgctcatgggtctcgtatggggtatcgctcttggtgcagcaggttctgcaacaggtaacccgttctacggcaaggagcgccagtaccagtcccagaagttcggtgcaggtgtaccgatctcggcatcaggtaacattgtccgctacgcagaggcaggacagcgcagttcactcgacaatggatggttcacatccaagctcggcggccccgcatccggtgtctgtttcggacttatcgtattcctcgaactgtggcgtacaatcttcttcgaagagttcgcaagcggttggggagcagttatcgcaggtatagtcctgattctcgtattcatggcaatcgacaggtacattgagaaatgggcccgcaagacatacggaccttatactgaggaaaagactgaggaggcggcc

SEQ ID NO: 12114 - DNA, 894 bp, Methanospirillum hungatei
  source 1..894: mol_type = genomic DNA
atggaagagattgtattaggcattggtattactgcattagcgggagcttttgccacagttgccggtgctgcggaagatactgaatctgatatcggatcacagggtgacccgaactcacaggttcagctcgctccgcagatgggttacattcaccgcatctttaacaaggcaatctccggagagccaccagcatatggagcatggtgtgccatcggagcaggtgttgcctgggcattgatgcagattaactacaacccggcacttgctattattctcggttcagttatcgccgtatttgtacagggaatctactgtacttccggttatcttggccgtatagcaagtcttgcaaagttccagcagccggtatacattgacatcatcaagtcattgttatcggtcactatggcacatgcgttcgtcgcgatcttttgtacggtcgcgatgtgttacctgatggcatcagcactccatcatccgttcgcactccccctgctcggactggtgtggggtattgcgcttggtgccgcaggatctgcaaccggaaatccattctacggaaaagaacgtcagtaccagaatcagaagtatggtgcaggtgttccgatctccgcatctggaaacatcgtccgatatgcagaagcaggacagcgttcctcccttgacaatggctggttcaccaccaagtttgccggtccggcatctggtatctgtttcggtctgattgtcttcctcgaactctggcgtaccgtcctctttgagaagatgatgggcggatggggagcaatcatcatgggagttgttctgattcttgtcttcacattcatcgaccgctgggttgaagtgtggggccgcaagacctacggaccatacaccaccgaggaggcctcgtca

SEQ ID NO: 12115 - DNA, 903 bp, Methanoplanus limicola
  source 1..903: mol_type = genomic DNA
atggaagagttactgtttggtatcggcattagtgccgttgcaggcgctctggccaccgtttccggtgctgcggaagatactgagtctgatatcggttcacagggtgacccgaattcacaggttcagctcgctccgcagatgggatatattcaccgtatatatagtaaagctatatccggtgaacccccagcatacggactttggtgcgctcttggagcaggccttgcttgggctttgatggcgataaattataatccggtacttgcgatagtcttaggatcagctatagctgtatttgtacagggtgtgtatgcaactacagcatatctgggaaggactgcaagtctggcaaagtttgaacagccggtttacatcgaccttattaagtcggttacaaccgtgactatggcgcatgcattcgttgctatctttacatgcgtatcaatgtgtttccttatggtaaacgcacttggacatccgttcccgcttccattgctgggacttgtctggggtatcgctctcggtgcagcaggttctgcaaccggaaatccgttctacggaaaagagcgccagtaccagacacaggcctttggagcaggtgtacctatctcagcatccggtaacattgtccggtatgcagaggcaggacagcgcagttcgcttgacaacggctggtttacatctaagatgggcggcccggcatcgggtgtctgtttcggacttattgtgttccttgaactgtggcgtacaatcttctttgaagaattcgcagcagggtggggtgcagtaattgccggtatcgtgcttattctgatctttatgatcattgacagatttgtcgagacatgggcacgcaagacctatggaccatacactgaagagaaatccgaggaggcctcatca

SEQ ID NO: 12116 - DNA, 906 bp, Methanohalophilus mahii
  source 1..906: mol_type = genomic DNA
atggaaccactcataggaatgggtgtgttggcactaatgggtgcagcggcaactatcgccggtgcatcggaagatctggaatccgatgtcggttctcagagtaacccgaactcccaggtacagctggcaccccagatgatgtatccacacaggatttttaacaaagccatttcaggtgaaccaccctccaatgcattaattgcagcggtcggaggtgcatctgcatcggtgcttatgagcgcctacagtatgtcagtggtctttgccatagcagttggagctctcattgcagccggtatacacggcacttacgcaacaactgcatatttgggaaggagcgcaagccagaaaagattcagacagcccatatatcttgacatggttcgttcacacgtacctgttatgatgggatttgcctatattaccacattttgtatccttgttgtgtcatatctcatgacatcagtcctggcacatcccttcccgcttaccctgcttgcattcatatggggtatcactataggagcagtaggctcttccaccggggatgtgcactatggtgcagaacgtgaattccagaatgtggaattcggatccgggcttaacgctgcaaactctggtaacatcgtgaggaaggcagaatgcggactgagaaacggtattgacaactcctggttctgcgccaaattcggaggacctctgacaggccttgcttttggtatggtagtattccttagtggatggatcactacaatatttgacccttcaatgggagccaatattggctggctggcaattgttgccggacttgcaatcatacttattttggtcttaggaaaccgcagactggaagttttcgcacgtaaacagtacggtccgtacaaagaagatgaagaggtgactgca

SEQ ID NO: 12117 - DNA, 900 bp, Methanococcus aeolicus
  source 1..900: mol_type = genomic DNA
atggacccaacattgttagctctcggagctcttgcattatcaggagccgctgctactgtggcaggatgtgcagaagatttggaatctgatgtaggttctcagtcaaaccctaactcccaggttcaattaggtcctcaaatggggaatatccacagatactttaacaaagctatctctggggaacctgtatcctatggattatatgttgctgcggctggtgctactgcatgggcattgatgggtatgaatttaaaccctattcttgcaattatagtaggttcagcagttgctgcattagttcacggtgcttactcagtaagtgcatttttaggtaggattgtaggacaatcaaagaactttggacagccagtatatatggatgtaatgatgggccatttaggccctattgtaggtcatggttttattgccgtattttgtatgctttttgccgcatatttggcagttaatgcattaggaaatccattcccattaccattggttgcattaatatttggtattaccgtaggtgctattggttcctcaacaggggatgttcattatggtgctgaaagagaatatcaaaaatacgcatttggcggtggaatacctgttgccaaccaaggagatatagacattatggcagaaactggtattagaaatggtttagattcttcatatttctgttcaaaattgggtggtcctttaacaggtcttgcgtttggtcttatcatattccttgatggatggaggtcaatacttggaaatataataggcggagatttaataacaaaggcggctattgctattgtggttggtcttattgtggttattactacattattactcaacagaaaaatcgaagtatatgctagaaataaatttggaccatatacagatagg

SEQ ID NO: 12118 - DNA, 897 bp, Methanosphaerula palustris
  source 1..897: mol_type = genomic DNA
atggtagacaacatagtatttggcattggaatcactgcattggcaggagctcttgctgccgtagccggtgctgcggaagatgttgaatctgatatcggctcacaaggagacccgaattcacaggttcaactcgcgccgcagatgggattcattcaccgcatcttcaacaaagcagtggcaggtgaaccccccgcatacggtctatggtgcgctctcggcgcaggtatagcatgggcttttatggcaatgcagttcaatccagttcttgcaatcatcctcggttgcgctctggcgacattcgttcagggcgtctacgcgacgactgcctacttgggcaggactgcaagtttagcaaagtttggacagccggtgtatatcgatatcttaaagtcgatgacatcggtcacgatggcacacgcatttgtggcggtcttcaccacagtgtcgctctgctatctgatgaacgcagcacttgggcatccattcccgcttccgctcctcggccttgtctggggtatcgcactcggtgcagcaggatctgcaactggcaacccattctatgggaaggagcgccagtaccagaaccagaagttcggagccggtgtcccaatatcagcatcaggaaacatcgtccggtatgctgaagcaggacagcggaactcactcgacaacggctggttctcctcgaagcttggcggccccgcatcagggatctgcttcggcctgatcgtcttcctcgaactctggagaacggtcattttcgagaaggtcggcggaggatggggttccatcatcgtcggtgtcatcatgatcctgatcttcgcaatcgttgaccggtacatcgagacctgggcacggaagaactacggaccatacaccacagaggagacgtccgca

SEQ ID NO: 12119 - DNA, 900 bp, Methanocaldococcus fervens
  source 1..900: mol_type = genomic DNA
atggatgcaacactaatagcccttggggctttagcgttaagtggtgcattagctacaattgccggatgtgcagaagatttagaatctgatgtaggttcccagtcaaacccaaactcacaggttcagttagccccacagatggggaatattcacagatactttaacaaagctatatctggagagcctgtagcttatggtttatatgtcgcagtagctggatcagttgcttacgctattatgcagttgggagtaactccacttttagcaatggtcttaggagctggtgttgctgcccttgttcatggagcttacgctatttcagcatacctcggaagaattgtagggcagtcaaagaacttcggtcaaccagtttactgggatattgtaatgagccacataggaccaattgttggacatggttttatcgctgtcttttgtatggttttaatggcttacttagctaacactgtattaggaaacccattcccattgccattgattgcattgatatttggaattactgttggggcaattggttcatcaactggagacgttcactatggtgctgaaagagaataccagaaatatccatttggaggaggagttcctgttgctaaccatggagatatagatgttaaagcagaatatggtttaagaaacggaatggattcatcatacttctgttcaagattgggaggtccattaactggattatgttttggtctaatcgtcttcttagacggttggagaggagttattggagacgtattacagggaggaaatgttatttcagcatcaaccatctcagtggttataggtttaataatcgtagccctcttagctatagcaaacagaaaagttgaggtctttgcaagaaacaaatacggtccatatacaaag

SEQ ID NO: 12120 - DNA, 909 bp, Methanocaldococcus jannaschii
  source 1..909: mol_type = genomic DNA
atggatgcaacactgatagcccttggggctttagcgttgagtggtgcattggcaacagttgctggatgtgcagaagatttggaatctgatgtagggtctcagtcaaacccaaactcacaggttcagttagctccacagatggggaatatacacagatactttaacaaggctatatctggggagccagtttcttatggtttgtatgttgcagttgcggggacagttgcttatgctattatgcaaatgggattaaacccaattttagcgttaattttaggagcaggagtagctgcttttgttcatggggcttatgctatttcagcatatttaggtagaattgtgggtcaatcaaagaactttggtcagccagtttattgggatgttgtaatgagccatcttggcccaattgttggacatggttttattgcagtcttttgtatggttttaatggcttatttagctaacactatattaggaaacccattcccactgccattgattgcattgatatttgggattactgttggtgcaattggttcatcaactggagacgttcattatggtgctgaaagagaatatcaaaaatatccatttggaggaggagttccagttgctaaccatggagatattgacattaaagcagaatatggtttaagaaacggtatggactcctcatacttctgttcaagattaggaggagttttaactggtttatgctttggtttaattgtatttttagatggttggagaggtgttttgggagatatattaaaaggaggtcagggaggaagtgtaataactgcttcaataatatcaattgttattggtttgataatcgtagctatattggcaataataaatagaaaggttgaggtctttgcaagaaataagtatggaccatacacaaaa

SEQ ID NO: 12121 - DNA, 900 bp, Methanocaldococcus sp.
  source 1..900: mol_type = genomic DNA
atggatccaacactaatagccctaggggctttagcgttgagtggagcattggcaacagttgcaggttgtgcggaagatttagaatcagatgttggttctcagtcaaacccaaactcacaggttcagttagcacctcagatggggaatatacacagatactttaacaaagctatatcaggggagccagtttcctacggtttgtatgttgcagttgcaggaacagttgcttatgccattatgcaaatgggattaaacccaattttagcattaattttaggagcaggagttgctgcctttgttcatggagcttatgctatttcagcatacttgggtagaattgtcggacaatcaaaaaactttggacaacctgtttattgggatattgtaatgagtcacattggcccaattgttggacatggttttattgctgtattttgtatggttttaatggcttatttagctaacacaatattaggaaatccattcccattgccattgattgcattgatcttcggtattactgttggggcaattggttcatcaactggagacgttcattatggtgctgaaagagagtatcagaaatatccatttggaggaggagttccagttgctaatcatggggacattgatgttaaggcagagtatggtttaagaaacggaatggattcatcatacttctgttcaagattggggggagttttaactggtttatgttttggtttaattgtattcttagatggatggagaggtattttaggaaatatactacaaggcggaaatgttacgactgcttcagtaatttcaattgttattggtttgataattgtagctattttggctgtagtaaatagaaaagttgaagtatttgcaagaaacaaatacggaccatatacaaaa

SEQ ID NO: 12122 - DNA, 903 bp, Methanoregula boonei
  source 1..903: mol_type = genomic DNA
atggtagataatattgtatttggcattggaattactgcattggcaggagcccttgccaccgtagccggttccgcggaagacactgaatccaacatcgggtcgcagggagacccgaactcacaggttcagctcgctccgcagatgggattcgtgcaccgtatcttcaacaaggcggttgcaggcgaacccccagcgtacggcctgtggtgtgctctgggagcaggacttgcatgggcgtttctcgctatgcagatcaacgcggtcctcgcgattgtcctgggctctcttcttgcagtcttcgttcagggaatctatgcgacaaccgcatacctgggcaggacagcaagcctttccaagtttggccagccggtctacgtggacatcttaaagtccatgacaacggttgccatggctcatgcttttgtagcagttttctgtaccgtcaccatctgttacctgatcaacgtcgcgctgggacacccgttcccgctgccgctgctcgggttcatctggggaatcaccctcggggcagcagggtcagcaacaggcaacccgtactacggcaaggaacgccagtaccagaaccagaagttcggtgccggtgtcccgatctcagcatcaggaaatatcgtccggtatgctgaagccggagagcgcaactcaatcgacaacgggttcttcaccgcaaagtttggcggccccgcatcgggtctctgctttggcctgatcgtattcctcgaactctggcgtaccatcctctttgacaagatcggagcaggctggggcgcaatcatcgtcggtgtcctgatcatcctcgtcttcacggtcgttgaccggtacatcgaggtctgggcacgcaagaactacggtccctacactgcacccgtaaaggaggcagcacca

SEQ ID NO: 12123 - DNA, 879 bp, Methanobrevibacter sp.
  source 1..879: mol_type = genomic DNA
atggaccctataactttaggtgttgtcgcattgatgggtgctgctgcaactatcggtggagctgcagaagatttagaatctgatgtaggttcacaaagtaaccctaactcacaagttcagttagctcctcaaatgggacatttacatagaattataaataaggcaacttccggtgaacctgtagcatacggtgtatggtgtggtgttgctggtgctgttgcatttgtatttatgtcatacttaaacgtaatgcctattgtagcaattgtattaggtgcagttgttggtgctttcgttcattctatttatacagtaacttctcatatgggacgtattgtaggtcaatctcaatttggacaaccattgtttatggatgtattgactgaatgtttaggaccaattgctggtcatggatttattgctactttttgtattgttggtatgtcttatttaatgattattcctattaatggaagtgctttacacatattcccattaccaatcttagctgtactttggggtataactattggtgctatcggatcatctactggtgatgtatactatggatccgaaagtgaataccaaaaattcgcttacggtgctggtactcctgtagctattcaaggggatattgtaactaaagaagctatcggagctaaaaactctattgatgtagtaggtttctgttctagatttggtggacctattactggattatgtttcggtttaatcgtatttttaagcttctggattactattgttttcggaactattggtggacaaattgctggtattattattgttttacttttaatttacttaaattacaaagttgaaacctatgctagaaataaatttggtccatatgaagaggaa

SEQ ID NO: 12124 - DNA, 870 bp, Methanobrevibacter ruminantium
  source 1..870: mol_type = genomic DNA
atggaccctattacattaggtgtagtcgcattgatgggtgcagcagcaaccattgcaggtgctgcagaggacttagaatctgacatcggttcacaaagtaaccctaactctcaggttcagctcgctccacaaatgggacacttacaccgtatgataaataaggcagcttctggggaaccagtagcatacggatgctggtgtggtatttccggtgctattgcagctcttgctatgggtatgggtattatacctatagtggcaattgcaatgggttctactgtcgctgcacttgttcacgcaatttatacagtcacatcacacatgggaaggattgtcggtcaatctcaatttgaacaaccattatttatggacgtattaacccaatccttaggccctatcgcagctcatggttttatagctagtttcggtattgtaggaatcgcttatttaatgactcttccattagacggacttggacacccattcccattaccattactcgctgtactttggggaattactattggtgcaatcggatcatccacaggggatgttcattatggtgcagaaagtgaataccaaaaattcgactacggtggaggtactcctgtagcgattcaaggggatatcgtaactaaagctcctctcggtgctaaaaactctatcgatgtaggtaacttctgtgctaaatatggtggacctttaaccggattctgttttggacttattgttttcgtaagcttctggattactgttgtattcggagctttaggaggacaaattgtaggtattgtcatcgttattttattaatcgctgctaattacttacttgaaaagtctacaagagcaaaattcggaccatatgaggaa

SEQ ID NO: 12125 - DNA, 867 bp, Methanosphaera sp.
  source 1..867: mol_type = genomic DNA
atggaaattttcaacatgtttttagttattttaatgggattatttgcaattattgcaggaatatttgaagatttagaatctgatgtagcatcaactagtaatccaaattcacaagtacaacttgcaccacaaataggtaatttacataaattatttaatagagcagtttctggtgaaccattacttgttggttcaatggctacaatatctggtgcagtagcatacacattaatatatatacaccaaccagttttattagtacttataatatcttcacttgttgctacaatagttcaagtaatattttccattacttcatacatgggtcgtataacaagccaagctttatataatcaaccattattcatggacatgctatataaacacattcctacaagtgcagcacatgcatttataagcttattttcaattacaacactgtcttacatcatggtttattcattaacacaacctatacaagtagctctacctatagtaacattctttgtgggaataatgttaggttctattggttctgctgtaggagatatattttatggtgctgaaaaattatatcaacatcatgaatttggaagtggaattccagtttctgtaaatgggcatataacaacaaaatcagctctaggttcagaaaattctattgacatggcaaagttctgttctaaatttggtggacctatctctggtttatgttttggaattatcatctttctgaatttctggacatttttagtatttggaattgttggaggattaatagtaggattaatattggttatttttttaataatactaaattatgtattggaacgaaatgcacgtttaatatatggaaaatatggggaa

SEQ ID NO: 12126 - DNA, 885 bp, Methanobacterium formicicum
  source 1..885: mol_type = genomic DNA
atggaccctacgagtatgatcgcaggattaggtgttgttgctctaatgggtgctgctgcaaccattgctggtgccgcagaggatttagagtccgatgtcggatccatgagtaaccctaactctcaggtacaactggcaccccagatgggcaaccttcacagaatgatgaacaaggccatatctggtgaaccagtacagatgggtaccttagcaggtattgccggttctgtagcttttgttctgatgggatcactgcaactaccagttataatgtcaatagctggaggagcagccatagcagctttggttcacgccgcattcgccacaacatctcatttaggaaggatcgtaagccaatcccaatttaatcaaccattattcctggatgtaataacccagcacttaggaccaataactggtcacggatttatagtaaccttttgtatagtaggattatcatacctgatgactttaagcttaccaggcttcgcccacccatttgcactgccattcttagcagtattgtggggaataaccatcggtgccataggttcatcaacaggagatgttcactatggtgctgaaagggaataccaacagtacccattcggtggaggtatcccagtcgcaattcacggtgacataaccagaaatgcagaactcggtgccaggaactccatagatgtagtttacttctgtgccaaattcggtggacctgttacaggatttgcctttggactcatagtattcttaagcttctggaccacaatagtattcggagctgctggaggagtaattgccggtatcgtaatagtcttactcttaatatacatcaacaaccgaatcgaagtatttgccagaaacaaatacggaccatacaaggaa

SEQ ID NO: 12127 - DNA, 894 bp, Methanocaldococcus villosus
  source 1..894: mol_type = genomic DNA
atggaccctattttagctttaggtgcaatagcattaagtggggcattggcaacaatagcaggatgtgctgaagatattgaatctgatgttggttctcaatcaaatccaaattcacaggttcaattggctccacagatgggaaatatacacagatattacaataaagctatttctggagaacctgtagcttatggcctttatgtagctgttgctggaggggtagcttatgctctaataaatatgggactgccaatgttattagctttaatagcaggtactggagttgcagcgcttgttcatggggcttatgcaatttctgcttatttgggaagaattgtagggcagtcaaaaaactttggtcagccagtttattgggatattgttatgacacatattggtcctattgttggacacggttttatagctgttttttgtatgttactaatggcttatatagctaatacaatattaggaaacccattcccattaccattaatagcattaatatttggaattacagttggagctattggttcatccactggagacgtccattatggtgctgaaagagaatatcaaaaatacccatttggaggaggagttccagtagctaaccatggggatattgatataaaagctgaaattggtttaagaaacagtatggactcatcatatttctgtgttaagttaggaggtccattaacagggttatgttttggtttaattgttttcttagatggttggagaggagttattggtgatgtgataaaaggtaatgacataatggcttcatctatcatatctataataataggattaaccatagttgctatattagcaataataaatagaaaagtagaagtgtttgcaagagaaaaatatgggccatacaaa

SEQ ID NO: 12128 - DNA, 906 bp, Methanosarcina barkeri
  source 1..906: mol_type = genomic DNA
atggaaccactcataagcatgggagtgcttgcacttattggagtggctgcgaccattgcaggtgcctcagaggacctggaatctgatatcggttcgcagagtaaccctaactctcaggtgcagttagctccccaaatgatgtttccccacagaatatttaacaaagcgatatcgggagaaccaccatcaaatgcattaatgtgttcgattggtgcagccgttgcaacagtattaataagtgagtttaccatgtccccactctttgcactggtatttggttcacttattgcagcatgcgtgcacgctacttttgcggtaacttctacaatgggcagatgtgccagtcagagtcggttcaagcagccgatttatcttgatatgataagaagtcacatcacaccaattatgggatatgcgttcataacaaccttctgtattctagtggtatcatacttgatgaccgttgtactcgggcatcccttcccgctaactatgctggcttttatatggggtatcacgataggtgcaattggatcgtcaacaggcgacgttcactacggtgcagaacgtgagttccagcagtttgaattcggttcaggtctgaacgcttcaaactcaggaaacattgtaagatatgccgaatccggccttagggatgggttcgataactcctggttctgtgccaagttcggaggtcctgtcacagggcttgcttttggtatgactgtattccttggaagctggataaccactatttttgatcctgcaaaaggcctgggatggctctctgttattgcaggcattgttattgtctttattttaattatctggaactggaagatggaagtttatgcccgcaaagcatatgggccttataaagaagataagactgaggaggcttcagca

SEQ ID NO: 12129 - DNA, 879 bp, Methanobacterium lacus
  source 1..879: mol_type = genomic DNA
atggaccctatgataacaggattaggtattgttgctctcatgggcgcagccgcaaccattgcaggggccgcagaggacttggaatctgatgtaggttctatgagtaacccaaactcacaagttcagctggcaccgcagatgggacaccttcacaggatgttcaacaaggccatatcaggagaacccgtacagatgggtacacttgctggtatagctggttcagtggcatttgttcttatgagttcagtacatctaccagttataatgtcaatagctgcaggtggatttattgcagcattattccattctgcatttgcaacaacatcttacttaggtaggattgtaggacaatctcaatttgatcaaccagttttcatggatgttatcactggtcacttaggaccaatagcagcccatggatttatcgttacattttgtatagtaggattatcatatctcatgactttaccagttcaaggatttaatcacccattcccattaccgctactcgcagttctatggggtattaccattggtgctataggatcatccactggggatgttcactacggtgctgaaagggaataccagacttatccatttggtgggggtatacctgtggctatccacggtgatatcacaaccatgtctgaactgggaccaagaaactcaatagatgttgtacatttctgtgcgaaatatggaggaccggtgacaggattctgttttggactaatagtattcttcagtttctggacaacagtagttttcggaccaactggaggagttatagcaggtcttgtaatagttttagcaattataatcctcaacaacagaatcgagcttttcgcacgaaatcaatatggaccatacaaagaa

SEQ ID NO: 12130 - DNA, 897 bp, Methanotorris igneus
  source 1..897: mol_type = genomic DNA
atggatactacattaatagcccttggagcgttggctttggcaggagcagcagcaacaattgctggatgtgcagaagacttagagtctgacgtaggttctcagtccaaccctaactcacaggttcagttagctccacaaatgggtaacatccacagatacttcaacaaggcaatttcaggggagccagtttcatacggtttgtatgttgctgttgctggtgcaatagcatgggcattattaaactatgggttgaatcctgttcttgcattggtagctggttctggtgtggcagcatttgttcatggagcttatgcagttagctcatacttaggtagaattgttggtcaatcaaagaacttcggtcaaccagtttacatggatgttgttttaagccacttagggcctatagtagggcatggatttatagcggtattctgtatggtttttgcagcatatttagcaaataatgtattaggaaacccattcccattgccattggtagcattgatatttggtattacagttggggcaattggttcctccacaggagacgttcactatggtgctgaaagagaatatcaaaagtatccatttggaggaggggttcctgtcgctaaccatggagatattgatattaaagcagaatatggtttaagaaatggtttggactcatcgtacttctgttcaagattaggtggaccattaacagggctttgctttggtttgattatattcttagatggttggagaggcgttttaggtgaaattcttggaaatgatttaatgacaaaatcagttattgcgatcattatagggcttttaattgttgttgtcgctgcaatattaaatagaaaagttgaggtatttgcaagagagaaatacggaccatacacaaaa

SEQ ID NO: 12131 - DNA, 897 bp, Methanotorris formicicus
  source 1..897: mol_type = genomic DNA
atggatactgcattaataacccttggggctctggctttggcaggagcagcagcgacagttgctggatgtgcagaagatttggaatcagacgtgggttcccaatccaaccctaactcacaggttcagttggctccacaaatgggtaacatccatagatacttcaacaaggcaatttcaggggagccagtttcatacggtttatatgttgcagttgcaggagtagtggcatgggcattgttaaactatgggttgaatcctgttcttgcattagtgattggtgctggtgtggctgcatttgttcatggggcttatacagttagctcatacttgggtaggattgttggtcaatcaaagaacttcggtcagcctgtatatatggatgttattttaagtcacttgggacctatagtagggcatggttttatggcaatattctgtatagtttttgcagcatacttagcaaacaacgtattaggaaatccattcccattgccattggttgcattgatatttggtattacagttggggcaattggttcatcaactggagacgttcactatggtgctgaaagagagtaccaaaagtatccatttggaggaggagttcctgttgctaaccatggggatattgatattaaggcagaatatggtttaaggaatggtttggattcatcatacttctgttcaagattaggtgggccattaacagggctttgctttggtttaattgtgttcttagatggttggagaggaattataggggatattattggaagtgatttagtaacaaaatcagttattgcaattatcatggggcttttagttgttgtaattgctgcaataataaacagaaaaattgaggtatttgcaagagagaaatacgggccatacacaaaa

SEQ ID NO: 12132 - DNA, 897 bp, Methanocaldococcus infernus
  source 1..897: mol_type = genomic DNA
gtggatactttgttaataactcttggagccttggcattaagtggagctttagcaacaatagctggctgtgcagaggatttagagtcagatgttggatctcagtcaaaccctaactctcaggttcagttagctccacagatgggaaatatccatagatattacaacaaagctatctctggggaaccagtttcctatggtttatatgttgcagttgctggatctatagcttatgctataatacaagctggatttaacccagtcttagccttaattattggagctggagtagcagctttagttcatggagcttatgccatctcagcatacttaggaagaattgtaggtcaatctaagaactttggccagccagtatattgggatattgttatgtctcatataggccctattgttggacatggttttattgctgtgttttgtatggttttaatggcttacttggctaatacaatcttaggaaatccattcccactaccattaatagccttcatatttggtattacagttggagcaattggttcctcaactggagatgtccactatggagctgagagagagtatcagaagtatccttttggtggaggggttccagtagctaaccatggagacattgatataaaagctgagtatggtttaaggaacagtatggattcctcttacttctgttccagacttggaggggttctaacaggaatttgttttgggctaatagtcttcttagatggatggagaggagttttagggaatatattagagcaaaaagatccaatcatttcatcagttatctctatagttataggattaataatagttgttatattggcaattgtcaacagaaaagtggaagtgtttgcaagggagaagtttggcccatacaaa

SEQ ID NO: 12133 - DNA, 897 bp, Methanofollis liminatans
  source 1..897: mol_type = genomic DNA
atggaaagcatattattaggcgtaggagtaacagcattggcaggtgctcttgctaccgttgccggcgctgccgaggacactgagtccaacatcggatcacagggtgacccgaactctcaggtccagttggctccgcagatgggctatattcaccggatttacaacaaggctgtatccggcgaaccgcccgcatatggtctgtgggtcactatcggcgcaggcgtggcctgggcatttatggcaaccggcatgaacccggtgcttgctattgttattgcgtccgcacttgcgatcttcgtgcagggcgtgtatgcggcgactgcctaccttggcaggacgtcgagtctggcaaagtttgaacaaccggtatacatcgacctactcaagtcggtgacctccgttacgatggcgcacgcctttgttgcggtattcacgaccgtatcgatgtgttacctcctgaacgcggctctcggtcacccgttcccgctgcctcttcttggcatcgtctggggtatcgctctcggtgccgctggttctgcaaccggcaaccccttctatggaaaggagcggcagtaccagtcccagatgttcggcgcaggcgttccgatctccgcatccggcaacatcgtccggtatgccgaggccggtcagcgcagctcccttgacaacggctggttcaccgcaaagctcggcggcccggcatcgggtgtctgcttcggtctgatcgtcttcctcgagctctggagaaccgtcctcttcgaggaggccgtcggcggctggggcgccatcatcgtcggtgtcatcatcatcctgatcttcatgatcatcgaccgctacatcgagacctgggcccgcaagaactacggcccgtacgtgaaggctgaggaggcatcggca

SEQ ID NO: 12134 - DNA, 900 bp, Methanothermococcus okinawensis
  source 1..900: mol_type = genomic DNA
atggacccaacaataattacacttggagcattggcacttgcaggagctgctgctactgtttctggatgtgccgaagatttggaatctgatgtaggttctcaatcaaaccctaattctcaggttcagttagggccacagatgggtaatattcacagatactttaataaagctatatctggggaacctgtagcttatggattatatgttgctgttgcaggttcagtagcatgggctattatgcatattggattaaaccccattcttgcattgattataggggcaggagtagctgcatttgttcatggagcatatgctgttagtgcatatttgggaagaattgtaggtcaatcaaagaattttggtcaacctgtatatatggatgttattttaagtcatgttggacctattgttggtcatggttttatagctgtattttgtatgctttttgtcgcatatttggcaaccactattttaggaaatccattcccattaccattggtagcatttatatttggtattacagtaggtgctatcggttcatcaacaggggatgtacattatggtgctgaaagggaatatcaaaaatacccatttggtggaggtattcctgttgccaatcaaggtgatattgacattaaagcagaatatggtttaagaaatggtatagattcatcctatttctgttcaaaattaggaggtccattaacaggtctttgttttggaggaatagtatttttggatggatggagaggattaatgggagatatattaggtggtgatttggtaacaaaatcatcaattgccattgtaatcggaataatattcgtagcaatagctgcatatataaatagagtaattgaagtatatgcaagaaaaaaatatggtccatatacggatagg

SEQ ID NO: 12135 - DNA, 915 bp, Methanobrevibacter sp.
  source 1..915: mol_type = genomic DNA
atgatcaatttaataaaaaatatggaggaaaaaattatggaccctataacattaggtgttgtcgcattaatgggtgcagttgcaactattggtggtgctgctgaggatattgagtctgatattggttctcaaagtaaccctaactctcaagttcaacttgctcctcaaatgggacatttacatcgtatgataaacaaagcggcttctggtgaaccagtcgcttatggtgtttggtgtggtgttgctggatctattgcatatgtattaatgactttaggaattactaatgatttatttgctattgcagcaggttcttgtgtcgctgcttttgttcacagtatttatactattactgctcacatgggtaggattgttggtcaatctcaatttgaacaaccattatttatggatgtattgactcaatctttaggacctattgctggacatggatttataactacattttgtcttgttggagtttcatatttaatgactattccattaaatggtactccgttacacgcattcccattaccacttttagcagtgctttggggtattactcttggagctatcggttcttcaactggggatgttcactacggtgctgaaagtgaatatcaaaaattcgaatttggtggaggaactcctgtagctattcaaggagatatagttactaaagcaccaatgggagcaaaaaattcccttgatgtaggtaatttctgtgttaaatttggtggacctttaacaggtttatgtttcggtcttgtagtattctttagtttctggaattcagttgtatttggattatacggcggattagttgttggtttcattattgttcttattttaatattaatgaacgacaaattagaaagattcgcaagaaaacaatacggaccatatgaggaagaa

SEQ ID NO: 12136 - DNA, 912 bp, Methanobrevibacter sp.
  source 1..912: mol_type = genomic DNA
atgatcaatttaataaaaaatatggaggaaaaaattatggaccctgtaacattaggtgttgtcgcattaatgggtgcagttgcaactattggtggagctgctgaggatttagaatctgatatcggttctcaaagtaacccaaactctcaagttcaacttgctccgcaaatgggacatttacaccgtatgataaacaaagcggcttctggtgaaccagtcgcttatggtgtttggtgtggtgttgctggatctattgcatatgtattaattatgttaggtttcgtacctattatttcaattgcaatgggatcttgtgtcgctgcttttgttcacgctatttatactgtcacatcccatatgggtaggattgttggtcaatctcaatttgaacagccattatttatggatgtgttaactcaatctttaggacctattgttggtcacggatttataactagcttttgtattgttggaatttcatatttaatgattatcccattaaacggtactacattacatgtattcccattaccactcttagcagtactttggggtattgctcttggagctatcggttcttcaactggggatgttcattacggtgctgaaagtgaatatcaaaagttcgaatttggtggaggaactcctgtagctattcaaggagatattgttactaatgctcctatgggtgcaaaaaactctatggatgtagtaaacttctgtgctaaatttggtggacctttaaccggtttctgttttggtcttgtagtattctttagtttttggaatactgttgtattcggaatttatggtggtttagtcgttggtttcatcattgtcattttattaattattatgaatgacagattagaagtatttgcaagaaaccgttacggaccatatgaggaagat

SEQ ID NO: 12137 - DNA, 915 bp, Methanocella conradii
  source 1..915: mol_type = genomic DNA
atggaacaattggcagttaaccttggtgccttagcgctgatgggcgcatgtgccaccatcgcgggggccgccgaggacctggaatcagactttggttcccagtccaacgcgaactcccaggtgcaactggcgccacaggtaggctatcttcaccgagtgtacaataaagccatatccggtgagccagtagcgtatgggttcctatgcacgacggctgcttcgatcgcatacgctatcgcgttcgtgctggcaggcaacagcgccgcccgcataaacgagttcatcgtggtaggccttattgcgggtgcgaccatcgcatccctgatgtacggtgtatatgcaacaacagcatacatgggcaggttatccggccagaagagatttggccagccgatatacctggacatattgttaacgacaacgccatctattatcgcgcatgcatttattgcagctttgggcataagcgtgttctcgtaccttttgaatatcattatcggacagccattcccgttcccgatactggcaatgctctggggcatcatggcaggcggtatgggctctgcggttggtgatgtccactatggtgcggagaggcagtaccagaacaagccgttcggcgcgggccttgctgcggccaactctggcaagatcatccagaagggtgaggcgggcttgaggaacagcatcgacatcgcaggcttttgcgtcaagcacggcgctccgctcaccgggctgggcctgggcataacggtattcgccgacttgtggaggcacatactcttcatcgaatactggaatggctggggcgcaatggtggccggcctgctaatcgtcctattatgggtgattggcaacaggctactggagatgtggaccaggaatacatacggtccgtacaagtctgcggaggaa

SEQ ID NO: 12138 - DNA, 900 bp, Methanothermococcus thermolithotrophicus
  source 1..900: mol_type = genomic DNA
atggatccgacattaataacccttggggcattagccctagctggtgctgctacaacagtggccggctgtgctgaagacttggaatctgacgtaggttcacagtcaaaccctaactcccaggtccagttaggtcctcagatgggtaatatacacagatacttcaacaaagctatttctggagaacctgtatcatatggtttatatgttgcagttgcaggtgcagttgcatgggccttaatgagtacaaacttaaatgcgatattagcacttgtagtaggttcaggtgttgctgcattagttcatggagcttattcagtaagttcttacttaggaaggattgttggtcagtctaaaaacttcggtcaaccagtttacatggatgttttaataacgcaccttggtcctatagtaggtcacggatttattgcaatattttgtatggctctagccgcatacttggcaagtacagcgttaggaaacccattcccattaccattaattgcgttaatattcggtattacagtaggtgctattggttcatctacaggggatgttcactacggtgctgaaagagaataccaaaaatatttatttggtggaggtattcctgttgcaaaccagggggacatcgatattaaagccgaatatggtataagaaacggtttagattcatcatacttctgttcaagacttggtggtccattaacaggtctctgttttggtttaatcatattcctcgatggatggagaggaattgttggaaatattgtaggtagtgatttaataacaaaatcagtagttgctattttggtaggacttttaattgtaggtgttgcagcatacgctaacagaaaaatcgaggtatatgctagaaacaaatacggtccatacacaaataga

SEQ ID NO: 12139 - DNA, 897 bp, Methanococcus maripaludis
  source 1..897: mol_type = genomic DNA
atggatccaacattgatttctctgggggcattggccctagcaggagcagctgcgactgtttctggttgtgctgaagacttggaatccgacgtcggttcacagtccaaccctaactctcaggttcaattaggtccgcaaatgggcaatattcacagatacttcaacaaggctatatctggggaacctgtatcatacggtttgtatgttgcagttgcaggtaccattgcttgggcactaataaacgcaggattaaacgttgttttagcgataatcgtgggtgcaggtgttgctgcaatcgtacacggtgcttactcagttagtgcattccttggaagaactgtaggtcagtccaaaaagttcggacaacctgtttacatggatgttcttacatcacacataggtccaatcgtaggacacggatttatagctgttttcacaatgactcttgctgcatatttagcaacaacggcattaggaaacccattcccattaccattggtttcattgatcttcggtattactgtaggtgctatcggttcatcaactggtgacgttcactacggtgctgaaagagaataccaaaaatacccattcggtggcggtatccctgttgctaaccaaggtgacatcgatatttacgcagaatatggggtaagaaatggtttagattcttcatacttctgttcaagatttggtggtccacttacaggattatgctttggtttaattatcttcctcgatggctggagaagcattctcggtaacatcatcggtggagacttagtaacaaaaacatcaatcgcacttttagtaggtctcttagtagtggccgttgcagcagttatcaacaggaaactcgaggtatatgctagaaacaaatacggaccatacagaaat

SEQ ID NO: 12140 - DNA, 897 bp, Methanococcus maripaludis
  source 1..897: mol_type = genomic DNA
atggatccaacattgatttctctgggggcattggccctagctggggcggctgcaactgtttcaggttgtgctgaagacttggaatccgatgtcggttcacagtcaaaccctaactctcaggttcaattaggtccgcaaatgggcaatatccacagatactttaacaaagctatatctggggaacctgtatcatacggtttgtatgttgcagttgcaggtaccattgcttgggcactaattaacgcaggattaaacgctgttttagcgataatcgtaggttcaggtgttgctgcagtcgtacacggtgcatactcagttagtgcattccttggaagaactgtaggtcagtccaaaaagttcggacaacctgtttacatggatgttcttacatcacacataggtccaatcgtaggacacggatttatagctgttttcacaatgactcttgctgcatacttagcaacaacagcattaggaaacccattcccactaccattggttgcattaatcttcggtattactgtaggtgctatcggttcatcaactggtgacgttcactacggtgctgaaagagaataccaaaaatacccattcggtggaggtatccctgttgctaaccaaggtgacatcgatatttacgcagaatacggtgtgagaaatggtttagattcttcatatttctgttcaagatttggtggtccacttacaggattatgctttggtttaattatcttcctcgatggatggagaagcattctcggtaacatcatcggtggagacttagtaacaaaaacatcaatcgcacttttagtaggtctcttagtagtggccgttgcagcaggtatcaacaggaaactcgaggtatatgctagaaacaaatacggaccatacagaaat

SEQ ID NO: 12141 - DNA, 897 bp, Methanococcus maripaludis
  source 1..897: mol_type = genomic DNA
atggatccaacattgatttctctgggggcattggccctagcaggagcagctgcgactgtttctggttgtgctgaagacttggaatccgacgtcggttcacagtccaaccctaactctcaggttcaattaggtccgcaaatgggcaatattcacagatacttcaacaaggctatatctggggaacctgtatcatacggtttgtatgttgcagttgcaggtaccattgcttgggcactaataaacgcaggattaaacgttgttttagcgataatcgtgggtgcaggtgttgctgcaatcgtacacggtgcttactcagttagtgcattccttggaagaactgtaggtcagtccaaaaagttcggacaacctgtttacatggatgttcttacatcacacataggtccaatcgtaggacacggatttatagctgttttcacaatgactcttgctgcatatttagcaacaacggcattaggaaacccattcccattaccattggtttcattgatcttcggtattactgtaggtgctatcggttcatcaactggtgacgttcactacggtgctgaaagagaataccaaaaatacccattcggtggaggtatccctgttgctaaccaaggtgacattgatatttacgcagaatacggtgtaagaaatggtttagattcttcatacttctgttcaagatttggtggtccacttacaggattatgctttggtttaattatcttcctcgatggctggagaagcattctcggtaacatcctcggtggagacttagtaacaaaaacatcaatcgcacttttagtaggtctcttagtagtggccgttgcagcagttatcaacaggaaactcgaggtatatgctagaaacaaatacggaccatacagaaat

SEQ ID NO: 12142 - DNA, 897 bp, Methanococcus maripaludis
  source 1..897: mol_type = genomic DNA
atggatccaacattgatttctctgggggcattggccctagctggagcagctgcaactgtttccggttgtgctgaagacttggaatccgatgtcggttcacagtctaaccctaactctcaggttcaattaggtccgcaaatgggcaatattcacagatacttcaacaaagctatatctggggaaccagtatcatatggtttgtatgttgcagttgcaggtactattgcttgggcgctaattaacgcaggattaaatgctgttttagcaataatcgtaggttcaggtgttgctgcaatcgtacatggtgcttattcagttagtgcattccttggaaggattgtaggtcagtccaaaaagttcggacaacctgtttacatggatgttcttacatcacacataggtccaatcgtaggacacggatttatagctgttttcacaatgactcttgctgcatatttagcaacaacagcgttaggaaacccattcccattaccattggttgcattgatcttcggtattactgtaggtgctatcggttcatcaactggtgacgttcactacggtgctgaaagagaataccaaaaatacccattcggtggcggtatccctgttgctaaccaaggtgacattgatatttacgcagaatacggtgtaagaaacggattagattcttcatatttctgttcaagatttggtggtccacttacaggattatgctttggtttaattatcttcctcgatggatggagaagcattctcggtaacatcgtcggtggagacttagtaacaaaaacatcaatcgcacttttagtaggtctcttagtagtggccgttgcagcagttatcaacaggaaactcgaggtatatgctagaaacaaatacggaccatacagaaat

SEQ ID NO: 12143 - DNA, 897 bp, Methanococcus vannielii
  source 1..897: mol_type = genomic DNA
atggatccaacattgatttctctgggggcattagcccttgctggggcagcagcaactgtttcaggttgtgctgaagacttggaatctgatgtaggttcacagtcaaaccctaactctcaggttcaattaggtccccaaatgggcaatattcacagatacttcaacaaagcaatttctggagagcctgtatcgtacggtttgtatgttgcagttgcaggttcagttgcttgggcacttattaacgccggattaaacgctgttttagcattaatcattggttcaggtgtcgctgcaatcgttcacggagcttattcagttagtgcatttttaggaagaactgtaggtcagtcccaaaaattcgggcagcctgtttacatggatgttcttacatcacatattggcccaattgtaggtcatggatttatcgctgttttcacgatggttcttgcagcttacttagcagtaactgctttaggaaacccattcccattgccattagtagcgttaattttcggtattaccgtaggtgcgattggttcatcaacaggtgacgttcattatggtgctgaaagagaataccaaaaatacgcatttggtgggggcattcctgttgctaatcagggtgacatcgatatttatgcagaatacggaattagaaacggtttagactcatcatacttctgttcaagacttggtggtccacttaccggattatgctttggtttaatcatcttcctcgatggatggagaagcatcgtaggtaacattattggtggagacttagtaacaaaaacatcaatcgcacttgtagtaggtctcttagtggtggtcgctgcaatgatcctcaacagaaaaatagaggtatttgctagaaacaagtacggaccatacagaaat

SEQ ID NO: 12144 - DNA, 876 bp, Methanothermus fervidus
  source 1..876: mol_type = genomic DNA
atggaccccgcagtggctagtttaggtattttggcacttacaacagcttctgcaattataggacaaacaattgaggatgtagagaccaatataggatcacaaagtaacccaaattcacaagtacagttagcaccgcagatgggtaatttacatagattttttaataaggcaatagctggagaaccatttgcatatggtacattttgtggagtatctggggcaataacagttgcaatgttatatctacatcttcctgcagttattgcactggcaataggtgcagcaattacaacacttatatggttagcatattcaacaactgcatatttaggtagagtatctggatcagctacttttaatcaaccagtatttttagatatgttaacagagaacttaggaccaatagctggacatgcatttatagtatttttctgtataactggagtagcatacttaatgactttacctgtaaagggatttgcacatccattcccaatacctgtcattgggatgatatggggaatgactataggtgcaataggttcagcagttggcgatgtatactatggagcagaagcggagttcgtacataaaaaatttggaggaggaataccagtagctagtcatggagatataacaagaaagggagtgcttggagctagaagtcctatggaagtaggtaatttcacagttaaatatggatctcctataacaggaatggcatttggattaatagtgcttttcacattttggttcgatatagtgtttgaaaaatggagtatacttgcagcatttcttttcgtaatattgttgatagtaataaataatagattagaaaaacatgcaagagaaaagtatggaccatacaggagggag

SEQ ID NO: 12145 - DNA, 912 bp, Methanosarcina acetivorans
  source 1..912: mol_type = genomic DNA
atggaaccactcataggcatgggagtgctggcacttattggcgtagctgcaaccattgcaggtgcctcagaagacctagaatccgatgtcggatcccagagtaacccgaactcacaggtccagttagctccccaaatgatgtttccgcacagaatatttaacaaagcggtatcaggggaacccccctcaaacgcattgatgtgttcggtcggtgcagccgtcgctacagtattaataagtgaattcactttatctccgctctttgcactggtcttgggtgctcttattgcagcatgtgtccacggtacctttgccgtcacatctacaatgggccgtgcagccagtcagagtcgcttcaaacagccagtttatctggatatgatcagaagccacacccccgtaattatgggatattcgttcataacgactttctgtatccttgtggtgtcatatctgatgaccgttgtactcggacaccccttcccgctaaccatgctggcctttatctggggtattacagtaggtgcaattggctcatccacaggtgacgtccactacggtgcagagcgcgaattccagcagttcgagttcggttccgggctcaacgcttcaaactcgggaaacattgttcgatatggagaatccggggtcagaaacgggtatgacaactcctggttctgtgccaagttcggaggccctgtcacaggtatggcttttggtatgaccgtattccttggaagctgggtaaccactgtttttgatcctgcagtaagcatttccagaggctggatctctgttgttgctggtgtcattattgtccttatcttaattttctggaactggaagattgaagtcaaagcccgtaatgcttacggaccctacaaggaagacaaaaccgaggaggcttcagca

SEQ ID NO: 12146 - DNA, 912 bp, Methanosarcina mazei
  source 1..912: mol_type = genomic DNA
atggaaccactcataggcatgggagtgcttgcacttattggagtggctgcgaccattgcaggtgcttcagaggacctggaatctgacataggttcgcagagcaaccctaactctcaggtgcagttagctccccaaatgatgtttccccacagaatatttaacaaagcgatatctggagaaccaccatccaacgcattaatgtgttcgataggtgcagccattgcgacagtattaataagtgaatttacagtatccccactttttgcactggtatttggttccgttattgcagcatccgtacacgctacttttgcggtaactgctacaatgggcagatgtgccagtcagagtcggttcaagcagccgatttatctggatatgataagaagtcataccccggcaattatgggatatgcgttcataacaaccttttgtgttctaatagtatcgtacttgatgaccgttgtactcgggcaccccttcccgctgactatgctggcttttatctggggtattacaataggtgcaataggatcatcaacaggcgacgtccactacggtgcagagcgcgaattccagcagtttgaatttggttccgggctgaacgcttcaaactcaggtaacattgtaagatatgccgaatccggcctcaggaatgggttcgacaactcctggttctgctcaaagttcggcggacctaccacaggaattgcttttggtatgaccgtattccttggaagctggataaccactatttttgatcctgcacaaggtctgtccatgggatggctttctgtaattgcaggtgttattatcgtccttattttaattatctggaactggaaaatcgaagtacaggcccgcaaagcatatggaccttacaaagaagacaaggctgaggaggcttccgca

SEQ ID NO: 12147 - DNA, 900 bp, Methanothrix harundinacea
  source 1..900: mol_type = genomic DNA; note = strain 6Ac
atggttagcatggggctcctagcagctatgggcgcccttgcgacagtagccggtgcaagcgaggacttagagtccgatgtgggttctcagagcaaccccaactcacaggtccagttggctgcccaggtgggtcacacccacaggatatacaacaaagccatctctggagagcccccatcgaacgctctttacgccgcccttgccgcagttacagctagtgtcttgatgtccgggtatggcatgaacgcgttctttgcgatcgccatcggctcggttatggccgcgatcttcaacggcatcttttctgtcaccgcctacatgggcaggaacacgagccaggcgcggttcaaccagtacgtctacctggacgttctgcggactcacaccaccgccatcatggcacatgcgtacatcactgccttctgcgtagtcaccatctcctacatcatgacagccccgtggcttccgattcagcacccgttcccgttccccctcgtcgccatgatatgggggctcgccatcggagccataggatcgtctacgggagacgtccactatggaggagagagggagtttcagaactacatcttcggggcggggctcaacgccgccaactccggtgacatcgtcaccagggccgaggctggcctgaggagctccatcgacaacgtctggttctgcgcccgattcggaggccccgtcaccgggatggccttcgggctgacggtcttcctggacaactggcggaccaccatcttcgatcccgccacccagggatggtatgcggtcctgaccgggatagtgatcgtcattctgttcatcgtctacaacagaatcctggagatcagagcgagaaagaggtacgggccctatcccgaatacaagggggacattgaggca

SEQ ID NO: 12148 - DNA, 47 bp, synthetic construct
  source 1..47: mol_type = other DNA
gggaaataagagagaaaagaagagtaagaagaaatataagagccacc

SEQ ID NO: 12149 - DNA, 47 bp, synthetic construct
  source 1..47: mol_type = other DNA
gggagatcagagagaaaagaagagtaagaagaaatataagagccacc

SEQ ID NO: 12150 - DNA, 145 bp, synthetic construct
  source 1..145: mol_type = other DNA
ggaataaaagtctcaacacaacatatacaaaacaaacgaatctcaagcaatcaagcattctacttctattgcagcaatttaaatcatttcttttaaagcaaaagcaattttctgaaaattttcaccatttacgaacgatagcaac

SEQ ID NO: 12151 - RNA, 42 nt, synthetic construct
  source 1..42: mol_type = other RNA
gggagacaagcttggcattccggtactgttggtaaagccacc

SEQ ID NO: 12152 - DNA, 47 bp, synthetic construct; identical to SEQ ID NO: 12149
  source 1..47: mol_type = other DNA

SEQ ID NO: 12153 - DNA, 145 bp, synthetic construct; identical to SEQ ID NO: 12150
  source 1..145: mol_type = other DNA

SEQ ID NO: 12154 - RNA, 42 nt, synthetic construct; identical to SEQ ID NO: 12151
  source 1..42: mol_type = other RNA

SEQ ID NO: 12155 - DNA, 47 bp, synthetic construct
  source 1..47: mol_type = other DNA
gggaattaacagagaaaagaagagtaagaagaaatataagagccacc

SEQ ID NO: 12156 - DNA, 47 bp, synthetic construct
  source 1..47: mol_type = other DNA
gggaaattagacagaaaagaagagtaagaagaaatataagagccacc

SEQ ID NO: 12157 - DNA, 47 bp, synthetic construct
  source 1..47: mol_type = other DNA
gggaaataagagagtaaagaacagtaagaagaaatataagagccacc

SEQ ID NO: 12158 - DNA, 47 bp, synthetic construct
  source 1..47: mol_type = other DNA
gggaaaaaagagagaaaagaagactaagaagaaatataagagccacc

SEQ ID NO: 12159 - DNA, 47 bp, synthetic construct
  source 1..47: mol_type = other DNA
gggaaataagagagaaaagaagagtaagaagatatataagagccacc

SEQ ID NO: 12160 - DNA, 47 bp, synthetic construct
  source 1..47: mol_type = other DNA
gggaaataagagacaaaacaagagtaagaagaaatataagagccacc

SEQ ID NO: 12161 - DNA, 47 bp, synthetic construct
  source 1..47: mol_type = other DNA
gggaaattagagagtaaagaacagtaagtagaattaaaagagccacc

SEQ ID NO: 12162 - DNA, 47 bp, synthetic construct
  source 1..47: mol_type = other DNA
gggaaataagagagaatagaagagtaagaagaaatataagagccacc

SEQ ID NO: 12163 - DNA, 47 bp, synthetic construct
  source 1..47: mol_type = other DNA
gggaaataagagagaaaagaagagtaagaagaaaattaagagccacc

SEQ ID NO: 12164 - DNA, 47 bp, synthetic construct
  source 1..47: mol_type = other DNA
gggaaataagagagaaaagaagagtaagaagaaatttaagagccacc

SEQ ID NO: 12165 - DNA, 371 bp, Homo sapiens
  source 1..371: mol_type = genomic DNA
gcgcctgcccacctgccaccgactgctggaacccagccagtgggagggcctggcccaccagagtcctgctccctcactcctcgccccgccccctgtcccagagtcccacctgggggctctctccacccttctcagagttccagtttcaaccagagttccaaccaatgggctccatcctctggattctggccaatgaaatatctccctggcagggtcctcttcttttcccagagctccaccccaaccaggagctctagttaatggagagctcccagcacactcggagcttgtgctttgtctccacgcaaagcgataaataaaagcattggtggcctttggtctttgaataaagcctgagtaggaagtctaga

SEQ ID NO: 12166 - DNA, 568 bp, Homo sapiens
  source 1..568: mol_type = genomic DNA
gcccctgccgctcccacccccacccatctgggccccgggttcaagagagagcggggtctgatctcgtgtagccatatagagtttgcttctgagtgtctgctttgtttagtagaggtgggcaggaggagctgaggggctggggctggggtgttgaagttggctttgcatgcccagcgatgcgcctccctgtgggatgtcatcaccctgggaaccgggagtggcccttggctcactgtgttctgcatggtttggatctgaattaattgtcctttcttctaaatcccaaccgaacttcttccaacctccaaactggctgtaaccccaaatccaagccattaactacacctgacagtagcaattgtctgattaatcactggccccttgaagacagcagaatgtccctttgcaatgaggaggagatctgggctgggcgggccagctggggaagcatttgactatctggaacttgtgtgtgcctcctcaggtatggcagtgactcacctggttttaataaaacaacctgcaacatctcatggtctttgaataaagcctgagtaggaagtctaga

SEQ ID NO: 12167 - DNA, 289 bp, Homo sapiens
  source 1..289: mol_type = genomic DNA
acacactccacctccagcacgcgacttctcaggacgacgaatcttctcaatgggggggcggctgagctccagccaccccgcagtcactttctttgtaacaacttccgttgctgccatcgtaaactgacacagtgtttataacgtgtacatacattaacttattacctcattttgttatttttcgaaacaaagccctgtggaagaaaatggaaaacttgaagaagcattaaagtcattctgttaagctgcgtaaatggtctttgaataaagcctgagtaggaagtctaga

SEQ ID NO: 12168 - DNA, 379 bp, Homo sapiens
  source 1..379: mol_type = genomic DNA
catcacatttaaaagcatctcagcctaccatgagaataagagaaagaaaatgaagatcaaaagcttattcatctgtttttctttttcgttggtgtaaagccaacaccctgtctaaaaaacataaatttctttaatcattttgcctcttttctctgtgcttcaattaataaaaaatggaaagaatctaatagagtggtacagcactgttatttttcaaagatgtgttgctatcctgaaaattctgtaggttctgtggaagttccagtgttctctcttattccacttcggtagaggatttctagtttcttgtgggctaattaaataaatcattaatactcttctaatggtctttgaataaagcctgagtaggaagtctaga

SEQ ID NO: 12169 - DNA, 118 bp, Homo sapiens
  source 1..118: mol_type = genomic DNA
gctgccttctgcggggcttgccttctggccatgcccttcttctctcccttgcacctgtacctcttggtctttgaataaagcctgagtaggaaggcggccgctcgagcatgcatctaga

SEQ ID NO: 12170 - DNA, 908 bp, Homo sapiens
  source 1..908: mol_type = genomic DNA
gccaagccctccccatcccatgtatttatctctatttaatatttatgtctatttaagcctcatatttaaagacagggaagagcagaacggagccccaggcctctgtgtccttccctgcatttctgagtttcattctcctgcctgtagcagtgagaaaaagctcctgtcctcccatcccctggactgggaggtagataggtaaataccaagtatttattactatgactgctccccagccctggctctgcaatgggcactgggatgagccgctgtgagcccctggtcctgagggtccccacctgggacccttgagagtatcaggtctcccacgtgggagacaagaaatccctgtttaatatttaaacagcagtgttccccatctgggtccttgcacccctcactctggcctcagccgactgcacagcggcccctgcatccccttggctgtgaggcccctggacaagcagaggtggccagagctgggaggcatggccctggggtcccacgaatttgctggggaatctcgtttttcttcttaagacttttgggacatggtttgactcccgaacatcaccgacgcgtctcctgtttttctgggtggcctcgggacacctgccctgcccccacgagggtcaggactgtgactctttttagggccaggcaggtgcctggacatttgccttgctggacggggactggggatgtgggagggagcagacaggaggaatcatgtcaggcctgtgtgtgaaaggaagctccactgtcaccctccacctcttcaccccccactcaccagtgtcccctccactgtcacattgtaactgaacttcaggataataaagtgtttgcctccatggtctttgaataaagcctgagtaggaaggcggccgctcgagcatgcatctaga

SEQ ID NO: 12171 - DNA, 835 bp, Homo sapiens
  source 1..835: mol_type = genomic DNA
actcaatctaaattaaaaaagaaagaaatttgaaaaaactttctctttgccatttcttcttcttcttttttaactgaaagctgaatccttccatttcttctgcacatctacttgcttaaattgtgggcaaaagagaaaaagaaggattgatcagagcattgtgcaatacagtttcattaactccttcccccgctcccccaaaaatttgaatttttttttcaacactcttacacctgttatggaaaatgtcaacctttgtaagaaaaccaaaataaaaattgaaaaataaaaaccataaacatttgcaccacttgtggcttttgaatatcttccacagagggaagtttaaaacccaaacttccaaaggtttaaactacctcaaaacactttcccatgagtgtgatccacattgttaggtgctgacctagacagagatgaactgaggtccttgttttgttttgttcataatacaaaggtgctaattaatagtatttcagatacttgaagaatgttgatggtgctagaagaatttgagaagaaatactcctgtattgagttgtatcgtgtggtgtattttttaaaaaatttgatttagcattcatattttccatcttattcccaattaaaagtatgcagattatttgcccaaatcttcttcagattcagcatttgttctttgccagtctcattttcatcttcttccatggttccacagaagctttgtttcttgggcaagcagaaaaattaaattgtacctattttgtatatgtgagatgtttaaataaattgtgaaaaaaatgaaataaagcatgtttggttttccaaaagaacatat

SEQ ID NO: 12172 - DNA, 297 bp, Homo sapiens
  source 1..297: mol_type = genomic DNA
cgccgccgcccgggccccgcagtcgagggtcgtgagcccaccccgtccatggtgctaagcgggcccgggtcccacacggccagcaccgctgctcactcggacgacgccctgggcctgcacctctccagctcctcccacggggtccccgtagccccggcccccgcccagccccaggtctccccaggccctccgcaggctgcccggcctccctccccctgcagccatcccaaggctcctgacctacctggcccctgagctctggagcaagccctgacccaataaaggctttgaacccat

SEQ ID NO: 12173 - DNA, 602 bp, Homo sapiens
  source 1..602: mol_type = genomic DNA
ggggctagagccctctccgcacagcgtggagacggggcaaggaggggggttattaggattggtggttttgttttgctttgtttaaagccgtgggaaaatggcacaactttacctctgtgggagatgcaacactgagagccaaggggtgggagttgggataatttttatataaaagaagtttttccactttgaattgctaaaagtggcatttttcctatgtgcagtcactcctctcatttctaaaatagggacgtggccaggcacggtggctcatgcctgtaatcccagcactttgggaggccgaggcaggcggctcacgaggtcaggagatcgagactatcctggctaacacggtaaaaccctgtctctactaaaagtacaaaaaattagctgggcgtggtggtgggcacctgtagtcccagctactcgggaggctgaggcaggagaaaggcatgaatccaagaggcagagcttgcagtgagctgagatcacgccattgcactccagcctgggcaacagtgttaagactctgtctcaaatataaataaataaataaataaataaataaataaataaaaataaagcgagatgttgccctcaaa

SEQ ID NO: 12174 - DNA, 785 bp, Homo sapiens
  source 1..785: mol_type = genomic DNA
ggccctgccccgtcggactgcccccagaaagcctcctgccccctgccagtgaagtccttcagtgagcccctccccagccagcccttccctggccccgccggatgtataaatgtaaaaatgaaggaattacattttatatgtgagcgagcaagccggcaagcgagcacagtattatttctccatcccctccctgcctgctccttggcacccccatgctgccttcagggagacaggcagggagggcttggggctgcacctcctaccctcccaccagaacgcaccccactgggagagctggtggtgcagccttcccctccctgtataagacactttgccaaggctctcccctctcgccccatccctgcttgcccgctcccacagcttcctgagggctaattctgggaagggagagttctttgctgcccctgtctggaagacgtggctctgggtgaggtaggcgggaaaggatggagtgttttagttcttgggggaggccaccccaaaccccagccccaactccaggggcacctatgagatggccatgctcaacccccctcccagacaggccctccctgtctccagggcccccaccgaggttcccagggctggagacttcctctggtaaacattcctccagcctcccctcccctggggacgccaaggaggtgggccacacccaggaagggaaagcgggcagccccgttttggggacgtgaacgttttaataatttttgctgaattcctttacaactaaataacacagatattgttataaataaaattgt

SEQ ID NO: 12175 - DNA, 3001 bp, Homo sapiens
  source 1..3001: mol_type = genomic DNA
atattaaggatcaagctgttagctaataatgccacctctgcagttttgggaacaggcaaataaagtatcagtatacatggtgatgtacatctgtagcaaagctcttggagaaaatgaagactgaagaaagcaaagcaaaaactgtatagagagatttttcaaaagcagtaatccctcaattttaaaaaaggattgaaaattctaaatgtctttctgtgcatattttttgtgttaggaatcaaaagtattttataaaaggagaaagaacagcctcattttagatgtagtcctgttggattttttatgcctcctcagtaaccagaaatgttttaaaaaactaagtgtttaggatttcaagacaacattatacatggctctgaaatatctgacacaatgtaaacattgcaggcacctgcattttatgttttttttttcaacaaatgtgactaatttgaaacttttatgaacttctgagctgtccccttgcaattcaaccgcagtttgaattaatcatatcaaatcagttttaattttttaaattgtacttcagagtctatatttcaagggcacattttctcactactattttaatacattaaaggactaaataatctttcagagatgctggaaacaaatcatttgctttatatgtttcattagaataccaatgaaacatacaacttgaaaattagtaatagtatttttgaagatcccatttctaattggagatctctttaatttcgatcaacttataatgtgtagtactatattaagtgcacttgagtggaattcaacatttgactaataaaatgagttcatcatgttggcaagtgatgtggcaattatctctggtgacaaaagagtaaaatcaaatatttctgcctgttacaaatatcaaggaagacctgctactatgaaatagatgacattaatctgtcttcactgtttataatacggatggattttttttcaaatcagtgtgtgttttgaggtcttatgtaattgatgacatttgagagaaatggtggctttttttagctacctctttgttcatttaagcaccagtaaagatcatgtctttttatagaagtgtagattttctttgtgactttgctatcgtgcctaaagctctaaatataggtgaatgtgtgatgaatactcagattatttgtctctctatataattagtttggtactaagtttctcaaaaaattattaacacatgaaagacaatctctaaaccagaaaaagaagtagtacaaattttgttactgtaatgctcgcgtttagtgagtttaaaacacacagtatcttttggttttataatcagtttctattttgctgtgcctgagattaagatctgtgtatgtgtgtgtgtgtgtgtgtgcgtttgtgtgttaaagcagaaaagacttttttaaaagttttaagtgataaatgcaatttgttaattgatcttagatcactagtaaactcagggctgaattataccatgtatattctattagaagaaagtaaacaccatctttattcctgccctttttcttctctcaaagtagttgtagttatatctagaaagaagcaattttgatttcttgaaaaggtagttcctgcactcagtttaaactaaaaataatcatacttggattttatttatttttgtcatagtaaaaattttaatttatatatatttttatttagtattatcttattctttgctatttgccaatcctttgtcatcaattgtgttaaatgaattgaaaattcatgccctgttcattttattttactttattggttaggatatttaaaggatttttgtatatataatttcttaaattaatattccaaaaggttagtggacttagattataaattatggcaaaaatctaaaaacaacaaaaatgatttttatacattctatttcattattcctctttttccaataagtcatacaattggtagatatgacttattttatttttgtattattcactatatctttatgatatttaagtataaataattaaaaaaatttattgtaccttatagtctgtcaccaaaaaaaaaaaattatctgtaggtagtgaaatgctaatgttgatttgtctttaagggcttgttaactatcctttattttctcatttgtcttaaattaggagtttgtgtttaaattactcatctaagcaaaaaatgtatataaatcccattactgggtatatacccaaaggattataaatcatgctgctataaagacacatgcacacgtatgtttattgcagcactattcacaatagcaaagacttggaaccaacccaaatgtccatcaatgatagacttgattaagaaaatgtgcacatatacaccatggaatactatgcagccataaaaaaggatgagttcatgtcctttgtagggacatggataaagctggaaaccatcattctgagcaaactattgcaaggacagaaaaccaaacactgcatgttctcactcataggtgggaattgaacaatgagaacacttggacacaaggtggggaacaccacacaccagggcctgtcatggggtggggggagtggggagggatagcattaggagatatacctaatgtaaatgatgagttaatgggtgcagcacaccaacatggcacatgtatacatatgtagcaaacctgcacgttgtgcacatgtaccctagaacttaaagtataattaaaaaaaaaaagaaaacagaagctatttataaagaagttatttgctgaaataaatgtgatctttcccattaaaaaaataaagaaattttggggtaaaaaaacacaatatattgtattcttgaaaaattctaagagagtggatgtgaagtgttctcaccacaaaagtgataactaattgaggtaatgcacatattaattagaaagattttgtcattccacaatgtatatatacttaaaaatatgttatacacaataaatacatacattaaaaaataagtaaatgta

SEQ ID NO: 12176 - DNA, 1037 bp, Homo sapiens
  source 1..1037: mol_type = genomic DNA
cccaccctgcacgccggcaccaaaccctgtcctcccacccctccccactcatcactaaacagagtaaaatgtgatgcgaattttcccgaccaacctgattcgctagattttttttaaggaaaagcttggaaagccaggacacaacgctgctgcctgctttgtgcagggtcctccggggctcagccctgagttggcatcacctgcgcagggccctctggggctcagccctgagctagtgtcacctgcacagggccctctgaggctcagccctgagctggcgtcacctgtgcagggccctctggggctcagccctgagctggcctcacctgggttccccaccccgggctctcctgccctgccctcctgcccgccctccctcctgcctgcgcagctccttccctaggcacctctgtgctgcatcccaccagcctgagcaagacgccctctcggggcctgtgccgcactagcctccctctcctctgtccccatagctggtttttcccaccaatcctcacctaacagttactttacaattaaactcaaagcaagctcttctcctcagcttggggcagccattggcctctgtctcgttttgggaaaccaaggtcaggaggccgttgcagacataaatctcggcgactcggccccgtctcctgagggtcctgctggtgaccggcctggaccttggccctacagccctggaggccgctgctgaccagcactgaccccgacctcagagagtactcgcaggggcgctggctgcactcaagaccctcgagattaacggtgctaaccccgtctgctcctccctcccgcagagactggggcctggactggacatgagagccccttggtgccacagagggctgtgtcttactagaaacaacgcaaacctctccttcctcagaatagtgatgtgttcgacgttttatcaaaggccccctttctatgttcatgttagttttgctccttctgtgtttttttctgaaccatatccatgttgctgacttttccaaataaaggttttcactcctctc

SEQ ID NO: 12177 - DNA, 577 bp, Homo sapiens
  source 1..577: mol_type = genomic DNA
agaggcctgcctccagggctggactgaggcctgagcgctcctgccgcagagctggccgcgccaaataatgtctctgtgagactcgagaactttcatttttttccaggctggttcggatttggggtggattttggttttgttcccctcctccactctcccccaccccctccccgcccttttttttttttttttttaaactggtattttatctttgattctccttcagccctcacccctggttctcatctttcttgatcaacatcttttcttgcctctgtccccttctctcatctcttagctcccctccaacctggggggcagtggtgtggagaagccacaggcctgagatttcatctgctctccttcctggagcccagaggagggcagcagaagggggtggtgtctccaaccccccagcactgaggaagaacggggctcttctcatttcacccctccctttctcccctgcccccaggactgggccacttctgggtggggcagtgggtcccagattggctcacactgagaatgtaagaactacaaacaaaatttctattaaattaaattttgtgtctcc

SEQ ID NO: 12178 - DNA, 2212 bp, Homo sapiens
  source 1..2212: mol_type = genomic DNA
ctccctccatcccaacctggctccctcccacccaaccaactttccccccaacccggaaacagacaagcaacccaaactgaaccccctcaaaagccaaaaaatgggagacaatttcacatggactttggaaaatatttttttcctttgcattcatctctcaaacttagtttttatctttgaccaaccgaacatgaccaaaaaccaaaagtgcattcaaccttaccaaaaaaaaaaaaaaaaaaagaataaataaataactttttaaaaaaggaagcttggtccacttgcttgaagacccatgcgggggtaagtccctttctgcccgttgggcttatgaaaccccaatgctgccctttctgctcctttctccacaccccccttggggcctcccctccactccttcccaaatctgtctccccagaagacacaggaaacaatgtattgtctgcccagcaatcaaaggcaatgctcaaacacccaagtggcccccaccctcagcccgctcctgcccgcccagcacccccaggccctgggggacctggggttctcagactgccaaagaagccttgccatctggcgctcccatggctcttgcaacatctccccttcgtttttgagggggtcatgccgggggagccaccagcccctcactgggttcggaggagagtcaggaagggccacgacaaagcagaaacatcggatttggggaacgcgtgtcaatcccttgtgccgcagggctgggcgggagagactgttctgttccttgtgtaactgtgttgctgaaagactacctcgttcttgtcttgatgtgtcaccggggcaactgcctgggggcggggatgggggcagggtggaagcggctccccattttataccaaaggtgctacatctatgtgatgggtggggtggggagggaatcactggtgctatagaaattgagatgcccccccaggccagcaaatgttcctttttgttcaaagtctatttttattccttgatatttttctttttttttttttttttttgtggatggggacttgtgaatttttctaaaggtgctatttaacatgggaggagagcgtgtgcggctccagcccagcccgctgctcactttccaccctctctccacctgcctctggcttctcaggcctctgctctccgacctctctcctctgaaaccctcctccacagctgcagcccatcctcccggctccctcctagtctgtcctgcgtcctctgtccccgggtttcagagacaacttcccaaagcacaaagcagtttttccccctaggggtgggaggaagcaaaagactctgtacctattttgtatgtgtataataatttgagatgtttttaattattttgattgctggaataaagcatgtggaaatgacccaaacataatccgcagtggcctcctaatttccttctttggagttgggggaggggtagacatggggaaggggctttggggtgatgggcttgccttccattcctgccctttccctccccactattctcttctagatccctccataaccccactcccctttctctcacccttcttataccgcaaacctttctacttcctctttcattttctattcttgcaatttccttgcaccttttccaaatcctcttctcccctgcaataccatacaggcaatccacgtgcacaacacacacacacactcttcacatctggggttgtccaaacctcatacccactccccttcaagcccatccactctccaccccctggatgccctgcacttggtggcggtgggatgctcatggatactgggagggtgaggggagtggaacccgtgaggaggacctgggggcctctccttgaactgacatgaagggtcatctggcctctgctcccttctcacccacgctgacctcctgccgaaggagcaacgcaacaggagaggggtctgctgagcctggcgagggtctgggagggaccaggaggaaggcgtgctccctgctcgctgtcctggccctgggggagtgagggagacagacacctgggagagctgtggggaaggcactcgcaccgtgctcttgggaaggaaggagacctggccctgctcaccacggactgggtgcctcgacctcctgaatccccagaacacaacccccctgggctggggtggtctggggaaccatcgtgcccccgcctcccgcctactcctttttaagctt

SEQ ID NO: 12179 - DNA, 729 bp, Homo sapiens
  source 1..729: mol_type = genomic DNA
ttggccaggcctgaccctcttggacctttcttctttgccgacaaccactgcccagcagcctctgggacctcggggtcccagggaacccagtccagcctcctggctgttgacttcccattgctcttggagccaccaatcaaagagattcaaagagattcctgcaggccagaggcggaacacacctttatggctggggctctccgtggtgttctggacccagcccctggagacaccattcacttttactgctttgtagtgactcgtgctctccaacctgtcttcctgaaaaaccaaggcccccttcccccacctcttccatggggtgagacttgagcagaacaggggcttccccaagttgcccagaaagactgtctgggtgagaagccatggccagagcttctcccaggcacaggtgttgcaccagggacttctgcttcaagttttggggtaaagacacctggatcagactccaagggctgccctgagtctgggacttctgcctccatggctggtcatgagagcaaaccgtagtcccctggagacagcgactccagagaacctcttgggagacagaagaggcatctgtgcacagctcgatcttctacttgcctgtggggaggggagtgacaggtccacacaccacactgggtcaccctgtcctggatgcctctgaagagagggacagaccgtcagaaactggagagtttctattaaaggtcatttaaacca

SEQ ID NO: 12180 - DNA, 847 bp, Homo sapiens
  source 1..847: mol_type = genomic DNA
tcctccgggaccccagccctcaggattcctgatgctccaaggcgactgatgggcgctggatgaagtggcacagtcagcttccctgggggctggtgtcatgttgggctcctggggcgggggcacggcctggcatttcacgcattgctgccaccccaggtccacctgtctccactttcacagcctccaagtctgtggctcttcccttctgtcctccgaggggcttgccttctctcgtgtccagtgaggtgctcagtgatcggcttaacttagagaagcccgccccctccccttctccgtctgtcccaagagggtctgctctgagcctgcgttcctaggtggctcggcctcagctgcctgggttgtggccgccctagcatcctgtatgcccacagctactggaatccccgctgctgctccgggccaagcttctggttgattaatgagggcatggggtggtccctcaagaccttcccctaccttttgtggaaccagtgatgcctcaaagacagtgtcccctccacagctgggtgccaggggcaggggatcctcagtatagccggtgaaccctgataccaggagcctgggcctccctgaacccctggcttccagccatctcatcgccagcctcctcctggacctcttggcccccagccccttccccacacagccccagaagggtcccagagctgaccccactccaggacctaggcccagcccctcagcctcatctggagcccctgaagaccagtcccacccacctttctggcctcatctgacactgctccgcatcctgctgtgtgtcctgttccatgttccggttccatccaaatacactttctggaacaaa

SEQ ID NO: 12181 - DNA, 110 bp, Homo sapiens
  source 1..110: mol_type = genomic DNA
gctggagcctcggtggccatgcttcttgccccttgggcctccccccagcccctcctccccttcctgcacccgtacccccgtggtctttgaataaagtctgagtgggcggc

SEQ ID NO: 12182 - protein, 14 aa, Bos taurus
MITLLFLLVVGAQA

SEQ ID NO: 12183 - protein, 15 aa, Bos taurus
MKFFIFTCLLAVALA

SEQ ID NO: 12184 - protein, 15 aa, Bos taurus
MKVLILACLVALALA

SEQ ID NO: 12185 - protein, 15 aa, Bos taurus
MKLLILTCLVAVALA

SEQ ID NO: 12186 - protein, 15 aa, Bos taurus
MRLLVLAALLTVGAG

SEQ ID NO: 12187 - protein, 16 aa, Bos taurus
MQGLLILSVLLGAALG

SEQ ID NO: 12188 - protein, 16 aa, Bos taurus
MKTVLILLSILGMACA

SEQ ID NO: 12189 - protein, 16 aa, Bos taurus
MKAVFLTLLFGLVCTA

SEQ ID NO: 12190 - protein, 16 aa, Bos taurus
MKCLLLALALTCGAQA

SEQ ID NO: 12191 - protein, 16 aa, Bos taurus
MFIFIFLSLWTLLVMG

SEQ ID NO: 12192 - protein, 16 aa, Bos taurus
MLGITVFTTFLAYASS

SEQ ID NO: 12193 - protein, 16 aa, Bos taurus
MGTWILFACLLGAAFS

SEQ ID NO: 12194 - protein, 16 aa, Bos taurus
MGTWILFACLLGAAYS

SEQ ID NO: 12195 - protein, 16 aa, Bos taurus
MRIAVICFCLLGIASA

SEQ ID NO: 12196 - protein, 16 aa, Bos taurus
MRCLVVLLAVFALSQG

SEQ ID NO: 12197 - protein, 17 aa, Bos taurus
MRAWIFFLLCLAGRALA

SEQ ID NO: 12198 - protein, 17 aa, Bos taurus
MVRKWALLLPMLLCGLT

SEQ ID NO: 12199 - protein, 17 aa, Bos taurus
MKTFIFLALLGAAVAFP

SEQ ID NO: 12200 - protein, 17 aa, Bos taurus
MWLQNLLLLGTVVCSFS

SEQ ID NO: 12201 - protein, 17 aa, Bos taurus
MRAASLFLLFLPAGLLA

SEQ ID NO: 12202 - protein, 17 aa, Bos taurus
MLLPVPLLLGLLGLAAA

SEQ ID NO: 12203 - protein, 17 aa, Bos taurus
MISPFLLLAIGTCFASS

SEQ ID NO: 12204 - protein, 17 aa, Bos taurus
MWLQLLLLLLAPQGGHG

SEQ ID NO: 12205 - protein, 17 aa, Bos taurus
MLLQGALLLLLALPSHG

SEQ ID NO: 12206 - protein, 18 aa, Bos taurus
LLLCVGLLLVLKHHDGAA

SEQ ID NO: 12207 - protein, 18 aa, Bos taurus
MKLITILFLCSRLLPSLT

SEQ ID NO: 12208 - protein, 18 aa, Bos taurus
MKTLLLLMGLLLSWESGW

SEQ ID NO: 12209 - protein, 18 aa, Bos taurus
MFSTGTLLLAALISPALA

SEQ ID NO: 12210 - protein, 18 aa, Bos taurus
MDLTLLWVLLPLVTVAWG

SEQ ID NO: 12211 - protein, 18 aa, Bos taurus
MRFPAKIVWLVLWTVCVA

SEQ ID NO: 12212 - protein, 18 aa, Bos taurus
MKLFTGLILCSLVLGVHS

SEQ ID NO: 12213 - protein, 18 aa, Bos taurus
MRSAAVLALLLCAGQVIA

SEQ ID NO: 12214 - protein, 18 aa, Bos taurus
MPPLWVVLALGCLRLGSG

SEQ ID NO: 12215 - protein, 18 aa, Bos taurus
MKWVTFISLLLLFSSAYS

SEQ ID NO: 12216 - protein, 18 aa, Bos taurus
MPRLPLLLLLLWGTGSHG

SEQ ID NO: 12217 - protein, 18 aa, Bos taurus
MPCPRLLAALFCSSGLFA

SEQ ID NO: 12218 - protein, 18 aa, Bos taurus
MLPQTALLLLMSLNLVHG

SEQ ID NO: 12219 - protein, 18 aa, Bos taurus
MKFLCVLLLASLAATSLA

SEQ ID NO: 12220 - protein, 18 aa, Bos taurus
MNLGVFPLLLALIGGASS

SEQ ID NO: 12221 - protein, 18 aa, Bos taurus
MKAVVLTLAVLFLTGSQA

SEQ ID NO: 12222 - protein, 18 aa, Bos taurus
MKSFVLLFCLAQLWGCHS

SEQ ID NO: 12223 - protein, 18 aa, Bos taurus
MDSLAGLVLCGVSLLLSA

SEQ ID NO: 12224 - protein, 18 aa, Bos taurus
LGASRLGPSPGCLAVASA

SEQ ID NO: 12225 - protein, 18 aa, Bos taurus
MGHLGALLFLLGGLGALA

SEQ ID NO: 12226 - protein, 18 aa, Bos taurus
MKALVILGFLFLSVAVQG

SEQ ID NO: 12227 - protein, 19 aa, Bos taurus
MRALLLLGALLVSLESTVS

SEQ ID NO: 12228 - protein, 19 aa, Bos taurus
MPDATLPACFLSLLAFTSA

SEQ ID NO: 12229 - protein, 19 aa, Bos taurus
MAGSSLACCLLGLLALTSA

SEQ ID NO: 12230 - protein, 19 aa, Bos taurus
MRLCLFLCLVLLGPRMATL

SEQ ID NO: 12231 - protein, 19 aa, Bos taurus
MALALWVFGLLDLICLASA

SEQ ID NO: 12232 - protein, 19 aa, Bos taurus
MLQTKNLIWTLFFLGTAVS

SEQ ID NO: 12233 - protein, 19 aa, Bos taurus
MKLFVPALLSLGALGLCLA

SEQ ID NO: 12234 - protein, 19 aa, Bos taurus
MKALARLIVGLLILDAAVT

SEQ ID NO: 12235 - protein, 19 aa, Bos taurus
MQGACVLLLLGLHLQLSLG

SEQ ID NO: 12236 - protein, 19 aa, Bos taurus
MAWQMTQLLLLALVAAAWG

SEQ ID NO: 12237 - protein, 19 aa, Bos taurus
MPPPALVLLLGFLCHVAIA

SEQ ID NO: 12238 - protein, 19 aa, Bos taurus
MKSLLLLSILAALAVAALC

SEQ ID NO: 12239 - protein, 19 aa, Bos taurus
MRFLTVAFLFLALSASALA

SEQ ID NO: 12240 - protein, 19 aa, Bos taurus
MMSFVSLLLVGILFHATQA

SEQ ID NO: 12241 - protein, 19 aa, Bos taurus
MFSVRDLCLVLSLVGAIKT

SEQ ID NO: 12242 - protein, 20 aa, Bos taurus
MNRGVCLCLLMAVLAAGALA

SEQ ID NO: 12243 - protein, 20 aa, Bos taurus
MKSLYFVAGLFVMLVQGSWQ

SEQ ID NO: 12244 - protein, 20 aa, Bos taurus
MLRRALLCLALTALFRAGAG

SEQ ID NO: 12245 - protein, 20 aa, Bos taurus
MLLLPLSVLLLLTQPWRSLG

SEQ ID NO: 12246 - protein, 20 aa, Bos taurus
MQALVLLLWTGALLGFGRCQ

SEQ ID NO: 12247 - protein, 20 aa, Bos taurus
MQPAALLGLLGATVVAAVSS

SEQ ID NO: 12248 - protein, 20 aa, Bos taurus
MEPRPLLLLLGLCSAGLVLG

SEQ ID NO: 12249 - protein, 20 aa, Bos taurus
MPLLSLSLLLLLLQVPAGSA

SEQ ID NO: 12250 - protein, 20 aa, Bos taurus
MPLLWLRGFLLASCWIIVRS

SEQ ID NO: 12251 - protein, 20 aa, Bos taurus
MAGALLCALLLLQLLGRGEG

SEQ ID NO: 12252 - protein, 20 aa, Bos taurus
MEMFQGLLLWLLLGVAGVWA

SEQ ID NO: 12253 - protein, 20 aa, Bos taurus
MRVLLACLLVCALVVSDSDG

SEQ ID NO: 12254 - protein, 20 aa, Bos taurus
MTATFLMSMIFGLACGQAMS

SEQ ID NO: 12255 - protein, 20 aa, Bos taurus
MLPLPLSILLLLTQSQSFLG

SEQ ID NO: 12256 - protein, 20 aa, Bos taurus
MKLSSVIPWALLLSTATVDS

SEQ ID NO: 12257 - protein, 20 aa, Bos taurus
MARFVALVLLGLLSLSGLDA

SEQ ID NO: 12258 - protein, 21 aa, Bos taurus
MSAWAALLLLWGLSLSPVTEQ

SEQ ID NO: 12259 - protein, 21 aa, Bos taurus
MAKLIFLTGLAFLLNAQLGSA

SEQ ID NO: 12260 - protein, 21 aa, Bos taurus
MEGSVLTLVLLAALVVCGSWG

SEQ ID NO: 12261 - protein, 21 aa, Bos taurus
MDRRPLTWALVLLGPALAIAL

SEQ ID NO: 12262 - protein, 21 aa, Bos taurus
MGLRAAHTGFVVLVLLQSCAA

SEQ ID NO: 12263 - protein, 21 aa, Bos taurus
MMKSFFLVVTILALTLPFLGA

SEQ ID NO: 12264 - protein, 21 aa, Bos taurus
MTHRCLLQMVLLLCFSTTALS

SEQ ID NO: 12265 - protein, 21 aa, Bos taurus
MQRLCAHVLILVLALAAFCEA

SEQ ID NO: 12266 - protein, 21 aa, Bos taurus
MRVSLAALAFLLTLAVLHSEA

SEQ ID NO: 12267 - protein, 21 aa, Bos taurus
MWATHGLAVALALSVLPASRA

SEQ ID NO: 12268 - protein, 21 aa, Bos taurus
MTYRCLLPMVLLLCFSTTALS

SEQ ID NO: 12269 - protein, 21 aa, Bos taurus
MSRRYTPLAWVLLALLGLGAA

SEQ ID NO: 12270 - protein, 21 aa, Bos taurus
MTYRCLLQMVLLLCFSTTALS

SEQ ID NO: 12271 - protein, 21 aa, Bos taurus
MEPSLLMWRFFVFIVVPGCVT

SEQ ID NO: 12272 - protein, 22 aa, Bos taurus
MRLHHLLLALLFLVLSAGSGIS

SEQ ID NO: 12273 - protein, 22 aa, Bos taurus
MGTRYFLVGFLILLVLGFEVQG

SEQ ID NO: 12274 - protein, 22 aa, Bos taurus
MRGTRLMGLLLALAGLLQLGLS

SEQ ID NO: 12275 - protein, 22 aa, Bos taurus
MCGGQRPLFLLPLLAVCLGAKG

SEQ ID NO: 12276 - protein, 22 aa, Bos taurus
MALLWGLLALILSCLSSLCSAQ

SEQ ID NO: 12277 - protein, 22 aa, Bos taurus
MKAVGAWLLCLLLLGLALQGAA

SEQ ID NO: 12278 - protein, 22 aa, Bos taurus
MRLHHLLLLLLLVVLSSGSGFT

SEQ ID NO: 12279 - protein, 22 aa, Bos taurus
MRLHHLLLVLLFLVLSAGSGFT

SEQ ID NO: 12280 - protein, 22 aa, Bos taurus
MTPDIQAPFLSLLLLFPVLTVA

SEQ ID NO: 12281 - protein, 22 aa, Bos taurus
MAAGAVVGAWMLVLSLGGTVTG

SEQ ID NO: 12282 - protein, 22 aa, Bos taurus
MRLHHLLLALLFLVLSAGSGFT

SEQ ID NO: 12283 - protein, 22 aa, Bos taurus
MRLHHLLLAVLFLVLSAGSGFT

SEQ ID NO: 12284 - protein, 23 aa, Bos taurus
MRMSPVFACLALGLALIFGEGSA

SEQ ID NO: 12285 - protein, 23 aa, Bos taurus
MAPAWSFLLSLLLLSCNAICSLG

SEQ ID NO: 12286 - protein, 23 aa, Bos taurus
MVWLEPPLLLPIFFLASHVGAAV

SEQ ID NO: 12287 - protein, 23 aa, Bos taurus
MLTSAKILLISILSSLLLFGSHG

SEQ ID NO: 12288 - protein, 23 aa, Bos taurus
MEKMAMKMLVIFVLGMNHWTCTG

SEQ ID NO: 12289 - protein, 23 aa, Bos taurus
MAPAWSFLLALLLLSCNAICSLG

SEQ ID NO: 12290 - protein, 23 aa, Bos taurus
MSAFRFWSGLLMLLGFLCPRSSP

SEQ ID NO: 12291 - protein, 23 aa, Bos taurus
MAPAWSFRLALLLLSCNAICSLG

SEQ ID NO: 12292 - protein, 23 aa, Bos taurus
MRTPMLLALLALATLCLAGRADA

SEQ ID NO: 12293 - protein, 23 aa, Bos taurus
MAPFAPMASGILLLLWLTAPSRA

SEQ ID NO: 12294 - protein, 23 aa, Bos taurus
RVRKKDYFGIWSFPLIIAAVCAQ

SEQ ID NO: 12295 - protein, 23 aa, Bos taurus
MKTSGVFLLLSLALFCFFSGVFG

SEQ ID NO: 12296 - protein, 23 aa, Bos taurus
MAPAWSLLLALLLLSCNAICSLG

SEQ ID NO: 12297 - protein, 23 aa, Bos taurus
MVMVLSPLLLVFILGLGLTPVAP

SEQ ID NO: 12298 - protein, 23 aa, Bos taurus
MAFVLSLLMALVLVSYGPGGSLG

SEQ ID NO: 12299 - protein, 23 aa, Bos taurus
MQPRLLLLAAFLALLVLPEATKA

SEQ ID NO: 12300 - protein, 23 aa, Bos taurus
MKVASIFLLTALVLMSLSGNSGA

SEQ ID NO: 12301 - protein, 23 aa, Bos taurus
MAPAWSLLLALLLLSCNAICSLG

SEQ ID NO: 12302 - protein, 23 aa, Bos taurus
MASRLTPLTLLLLLLLAGDRVTS

SEQ ID NO: 12303 - protein, 24 aa, Bos taurus
MARPMLLLXLSLGLLASLLPALAA

SEQ ID NO: 12304 - protein, 24 aa, Bos taurus
MGITAGKSVLVLLAFLAFASCCYA

SEQ ID NO: 12305 - protein, 24 aa, Bos taurus
MAGPAMLVAAALALCLLLASPGLA

SEQ ID NO: 12306 - protein, 24 aa, Bos taurus
MDYYRKYAAVILAILSLFLQILHS

SEQ ID NO: 12307 - protein, 24 aa, Bos taurus
MVKSHIGSWILVLFVAMWSDVGLC

SEQ ID NO: 12308 - protein, 24 aa, Bos taurus
MRAERTSFLLALGLLVAGIRSVHC

SEQ ID NO: 12309 - protein, 24 aa, Bos taurus
MRVLGGRTGTLLACLALVLPVLEA

SEQ ID NO: 12310 - protein, 24 aa, Bos taurus
MSWSSHPPSVIFYILSLLSSACLA

SEQ ID NO: 12311 - protein, 24 aa, Bos taurus
MTPGALLLLLLGVLGAHLAPGARG

SEQ ID NO: 12312 - protein, 24 aa, Bos taurus
MALWTRLRPLLALLALWPPPPARA

SEQ ID NO: 12313 - protein, 24 aa, Bos taurus
MPRAPALLFSCLLGLCALVPRLPG

SEQ ID NO: 12314 - protein, 25 aa, Bos taurus
MALRLGLFLIWAGVSMFLQLDPVNG

SEQ ID NO: 12315 - protein, 25 aa, Bos taurus
MMSAKDMVKVMIVMLAICFLARSDG

SEQ ID NO: 12316 - protein, 25 aa, Bos taurus
MAPLVGLFLIWAGASVFQQLHPVNG

SEQ ID NO: 12317 - protein, 25 aa, Bos taurus
MPEVLAVRAWPLLLSLAVQLGATVG

SEQ ID NO: 12318 - protein, 25 aa, Bos taurus
MAAPGGARRRPLLLLLFAGLVHGAS

SEQ ID NO: 12319 - protein, 25 aa, Bos taurus
MALQLGLFLIWAGVSVFLQLDPVNG

SEQ ID NO: 12320 - protein, 26 aa, Bos taurus
MNPGAARTPALRILALGALLWPAARP

SEQ ID NO: 12321 - protein, 26 aa, Bos taurus
MRSLTAAARRPEVLLLLLCILQPSQP

SEQ ID NO: 12322 - protein, 26 aa, Bos taurus
MNFLLSWVHWSLALLLYLHHAKWSQA

SEQ ID NO: 12323 - protein, 26 aa, Bos taurus
MLPASPKMEHKAVVFLLLLFLKSGLG

SEQ ID NO: 12324 - protein, 26 aa, Bos taurus
MAVFPNSCLAGCLLIFILLQLPKLDS

SEQ ID NO: 12325 - protein, 26 aa, Bos taurus
MRLHHLLLALLFLVLSAWSGFTQGVG

SEQ ID NO: 12326 - protein, 26 aa, Bos taurus
MGAAARSLPLAFCLLLLGTLLPRADA

SEQ ID NO: 12327 - protein, 26 aa, Bos taurus
MALKSLVLLSLLVLVLLLVQVQPSLG

SEQ ID NO: 12328 - protein, 26 aa, Bos taurus
MMAAGPRTSLLLAFALLCLPWTQVVG

SEQ ID NO: 12329 - protein, 26 aa, Bos taurus
MQPLPSLCGRALVALILACGVAGIQA

SEQ ID NO: 12330 - protein, 26 aa, Bos taurus
MALKSLVVLPLLVLVLLLVRVQPSLG

SEQ ID NO: 12331 - protein, 26 aa, Bos taurus
MALKSLVLLSLLVLVLLLVRVQPSLG

SEQ ID NO: 12332 - protein, 26 aa, Bos taurus
MARGPDTARRWATLVVLAALSTAVTT

SEQ ID NO: 12333 - protein, 27 aa, Bos taurus
MLRARPALWAAALTALTLLRGPPAARA

SEQ ID NO: 12334 - protein, 27 aa, Bos taurus
MGVCGSLFQPWKCLVVVSLRLLFLVPT

SEQ ID NO: 12335 - protein, 27 aa, Bos taurus
MGPHLLGRSSLLLLLLGMWWSVRPLCA

SEQ ID NO: 12336 - protein, 27 aa, Bos taurus
MASSSCLWLLALAFLLGSCASLALGHL

SEQ ID NO: 12337 - protein, 28 aa, Bos taurus
MATPNRLWMALLLLGVLGVLQTPAPAQA

SEQ ID NO: 12338 - protein, 28 aa, Bos taurus
MGAASGRRSPPLLLPLLLLLLPPPPVIL

SEQ ID NO: 12339 - protein, 28 aa, Bos taurus
MESKALLLLALSVCLQSLTVSRGGLVAA

SEQ ID NO: 12340 - protein, 28 aa, Bos taurus
MMSPLHSSWRTGLLLLLLFSVAVRESWQ

SEQ ID NO: 12341 - protein, 28 aa, Bos taurus
MASLLSSSLPSCLPSLLFLLLQLTSSSA

SEQ ID NO: 12342 - protein, 28 aa, Bos taurus
MRLSPVLLRLSRGPALLALALPLAVALA

SEQ ID NO: 12343 - protein, 29 aa, Bos taurus
XTSLLLFVTIWGISSTPAPPDSVFSSSQR

SEQ ID NO: 12344 - protein, 29 aa, Bos taurus
MAAAIPRAASLSPLFPLLFLLSAPQDSSG

SEQ ID NO: 12345 - protein, 29 aa, Bos taurus
MAVASAAPGSIFWKQLLFSLLVLILFCDA

SEQ ID NO: 12346 - protein, 29 aa, Bos taurus
MAAAHRCLFLLLLSTCVALLLQPPLGALG

SEQ ID NO: 12347 - protein, 30 aa, Bos taurus
MAFPPRRRLRLGPRGLPLLLSGLLLPLCRA

SEQ ID NO: 12348 - protein, 30 aa, Bos taurus
MDSKGSSQKGSRLLLLLVVSNLLLCQGVVS

SEQ ID NO: 12349 - protein, 30 aa, Bos taurus
MRPPWCPLHTPSLTPPLLLLLFLIGGGAEA

SEQ ID NO: 12350 - protein, 32 aa, Bos taurus
MQTPQYLQQRRKFAAAFLAFIFILAAVDTAEA

SEQ ID NO: 12351 - protein, 32 aa, Bos taurus
MISNGIGTVTAGKRSICLLPLLLIGLWGCVTC

SEQ ID NO: 12352 - protein, 33 aa, Bos taurus
MQPRLGGPALLLLPPLLLLLLLGAGGGDCGARA

SEQ ID NO: 12353 - protein, 33 aa, Bos taurus
MLRLSERNMKILFVAALVVGSVFFLLLPGPSAA

SEQ ID NO: 12354 - protein, 34 aa, Bos taurus
MRLPGRPGGPGGSGGLRVLLCLLLLGSRPGGCNA

SEQ ID NO: 12355 - protein, 35 aa, Bos taurus
MHLRIHARRNPPRRPAWTLGIWSLFWGCIVSSVWS

SEQ ID NO: 12356 - protein, 35 aa, Bos taurus
MATPNGPRVPCPQAAVARALLFGLVLIQGAGVAGT

SEQ ID NO: 12357 - protein, 36 aa, Bos taurus
MRLLSSRAARVSGPSGSLCALLALLLLTPPGPLASA

SEQ ID NO: 12358 - protein, 36 aa, Bos taurus
MAPASSHRGHQWICDLVRGSCLLLLLVVSNLLLCQG

SEQ ID NO: 12359 - protein, 36 aa, Bos taurus
MAPAPSFRGHQWTYNPVRGSCLLLLLVVSNLLLCQG

SEQ ID NO: 12360 - protein, 50 aa, Bos taurus
MVGDARPSGVRAGGCRGAVGSRTSSRALRPPLPPLSSLFVLFLAAPCAWA

SEQ ID NO: 12361 - protein, 56 aa, Bos taurus
MTACTFLAGGLRDPGLCGPTRWAPSPPGLPPIPPRPRLRLRPPLLLLLLLPRSVLS

SEQ ID NO: 12362 - protein, 20 aa, Bos taurus
VWLAVALGAGGAVLLLFWGG

SEQ ID NO: 12363 - protein, 20 aa, Bos taurus
WNCSMFVLAALVAIISFILL

SEQ ID NO: 12364 - protein, 20 aa, Bos taurus
LKIVFGVATSAVLALLVMCI

SEQ ID NO: 12365 - protein, 17 aa, Bos taurus
YLTEGLLQFTILLSLIG

SEQ ID NO: 12366 - protein, 20 aa, Bos taurus
FILLSAGSCLALLFYFGGLQ

SEQ ID NO: 12367 - protein, 20 aa, Bos taurus
MDAGAVHVVIVGGGFGGIAA

SEQ ID NO: 12368 - protein, 20 aa, Bos taurus
VVGILVGLGIIALVTSPLLL

SEQ ID NO: 12369 - protein, 20 aa, Bos taurus
LLGLLLTWLLLLGLLFGLIA

SEQ ID NO: 12370 - protein, 20 aa, Bos taurus
LLLVAGGVGLALLALRWLAT

SEQ ID NO: 12371 - protein, 20 aa, Bos taurus
KAVGFIVLAIALAGVGILAW

SEQ ID NO: 12372 - protein, 22 aa, Bos taurus
VVAAAGLALALETLPAVLRWLW

SEQ ID NO: 12373 - protein, 20 aa, Bos taurus
LWLVLVAVSAGLLLLGLIIL

SEQ ID NO: 12374 - protein, 20 aa, Bos taurus
LVLAGVSLLLAALLLGCLVA

SEQ ID NO: 12375 - protein, 18 aa, Bos taurus
LCLIFLLTCVFACVFFLL

SEQ ID NO: 12376 - protein, 16 aa, Bos taurus
VVGLIFRLTIFGAVTY

SEQ ID NO: 12377 - protein, 19 aa, Bos taurus
LRALGGLAMAALLSTVWLW

SEQ ID NO: 12378 - protein, 20 aa, Bos taurus
TVTIFVAGVLTASLTIWKKM

SEQ ID NO: 12379 - protein, 21 aa, Bos taurus
FSWLSLKALLSLALVGACITL

SEQ ID NO: 12380 - protein, 24 aa, Bos taurus
PTFALMVCLALLIALLSINGFAYF

SEQ ID NO: 12381 - protein, 25 aa, Bos taurus
YLHTVIPAVVVAAILLIAGIIAMIC

SEQ ID NO: 12382 - protein, 16 aa, Bos taurus
TLIIICALFTLVTVLL

SEQ ID NO: 12383 - protein, 22 aa, Bos taurus
VLLPLVIVFGLCLASFASVVLA

SEQ ID NO: 12384 - protein, 23 aa, Bos taurus
FPWFLIIIFGILGLAVTLYLLIF

SEQ ID NO: 12385 - protein, 20 aa, Bos taurus
IFIVVGVVCALLVALLIAAL

SEQ ID NO: 12386 - protein, 20 aa, Bos taurus
AAVIAGPVCFVCISLMLMVY

SEQ ID NO: 12387 - protein, 20 aa, Bos taurus
YITLFSIVLLGLIATGMFQF

SEQ ID NO: 12388 - protein, 20 aa, Bos taurus
TVATVLAFITSFLTLSWYTT

SEQ ID NO: 12389 - protein, 20 aa, Bos taurus
LILLLIAFSLGSMGFLAYYV

SEQ ID NO: 12390 - protein, 33 aa, Bos taurus
HDHRKRMGLKMLLMMGLLLPLVYAMKRHKWSVL

SEQ ID NO: 12391 - protein, 22 aa, Bos taurus
WWTNWLIPAISALFVALIYHLY

SEQ ID NO: 12392 - protein, 25 aa, Bos taurus
EWKTVVGAAMFFIGFTALLLIWEKH

SEQ ID NO: 12393 - protein, 26 aa, Bos taurus
KWRLLAMMTLFFGSGFAAPFFIVRHQ

SEQ ID NO: 12394 - protein, 20 aa, Bos taurus
LYIVLPIALLILLAFGTFLL

SEQ ID NO: 12395 - protein, 40 aa, Bos taurus
LLARRLRFHIVGAFMVSLGFATFYKFAVAEKRKKAYADFY

SEQ ID NO: 12396 - protein, 28 aa, Bos taurus
ATDNILYRVTMTLCLGGTLYSLYCLGWA

SEQ ID NO: 12397 - protein, 24 aa, Bos taurus
ARTWRFLTFGLALPSVALCTLNSW

SEQ ID NO: 12398 - protein, 19 aa, Bos taurus
LLVAVCALHLGVTLVYYLA

SEQ ID NO: 12399 - protein, 22 aa, Bos taurus
AVGAVLSLLLVALTACLLTLLL

SEQ ID NO: 12400 - protein, 20 aa, Bos taurus
LVLAGVSLLLAALLLGCLVA

SEQ ID NO: 12401 - protein, 23 aa, Bos taurus
PKEQAIGLSVTFLSFLLPAGWVL

SEQ ID NO: 12402 - protein, 20 aa, Bos taurus
VVLGAVIGGVLGVVLLALLL

SEQ ID NO: 12403 - protein, 23 aa, Bos taurus
VIPVVVLLAIALFIRWKKSRAFG

SEQ ID NO: 12404 - protein, 25 aa, Bos taurus
LSVGSILLVTLASLVAVYIIGGFLY

SEQ ID NO: 12405 - protein, 20 aa, Bos taurus
VGQWVLLFLGVALLVATLGL

SEQ ID NO: 12406 - protein, 26 aa, Bos taurus
FHDKYGNAVLASGATFCVAVWVYMAT

SEQ ID NO: 12407 - protein, 36 aa, Bos taurus
KESSEARKGFSYLVTATTTVGVAYAAKNVVSQFVSS

SEQ ID NO: 12408 - protein, 15 aa, Bos taurus
VILSMLVVSTVIVVF

SEQ ID NO: 12409 - protein, 20 aa, Bos taurus
ISLQYWLAFLLEIVSFLLSP

SEQ ID NO: 12410 - protein, 20 aa, Bos taurus
EAASMYGTAVAVFLVILVAA

SEQ ID NO: 12411 - protein, 18 aa, Bos taurus
PVKRNTVKKYKIICIVLL

SEQ ID NO: 12412 - protein, 20 aa, Bos taurus
VVLISGAVLLLLGAIGAFYF

SEQ ID NO: 12413 - protein, 21 aa, Bos taurus
IIAILLCIIILLILVLMFVVW

SEQ ID NO: 12414 - protein, 20 aa, Bos taurus
VSGLLKIVGFSTSITALWFV

SEQ ID NO: 12415 - protein, 25 aa, Bos taurus
TALITLYLIVFVVLVPIIGIVAAQL

SEQ ID NO: 12416 - protein, 22 aa, Bos taurus
LFFIIGTVMLVIIIFIVVLSVS

SEQ ID NO: 12417 - protein, 17 aa, Bos taurus
GAIVGILVVTFVLLLVA

SEQ ID NO: 12418 - protein, 22 aa, Bos taurus
IAAIVGGTVGGVVLVGILLLVI

SEQ ID NO: 12419 - protein, 22 aa, Bos taurus
IMIVICCVVLGIVIASTFGGIF

SEQ ID NO: 12420 - protein, 20 aa, Bos taurus
FSQRLFMILWLKGVVFNVTT

SEQ ID NO: 12421 - protein, 27 aa, Bos taurus
MIVITSILGSLPFFLLIGFAGAIVLSL

SEQ ID NO: 12422 - protein, 20 aa, Bos taurus
IITAEGIILLICAVVPGTLL

SEQ ID NO: 12423 - protein, 20 aa, Bos taurus
GFFSPGIWMGLLTSLFMLFI

SEQ ID NO: 12424 - protein, 20 aa, Bos taurus
LVVLVALLAAALVACLAVLG

SEQ ID NO: 12425 - protein, 20 aa, Bos taurus
LLIGFVIAAGLMCIFVMILT

SEQ ID NO: 12426 - protein, 19 aa, Bos taurus
VALGTGITFIMFGVSSFLI

SEQ ID NO: 12427 - protein, 22 aa, Bos taurus
PWALIAIAIVAVLLVLTCCFCI

SEQ ID NO: 12428 - protein, 20 aa, Bos taurus
VMLGLGLATVMTLTLAAIVL

SEQ ID NO: 12429 - protein, 28 aa, Bos taurus
GPSHSVIPLTVALTLLVILAISTLSFCM

SEQ ID NO: 12430 - protein, 23 aa, Bos taurus
IFMYLLTVFLITQMIGSALFAVY

SEQ ID NO: 12431 - protein, 18 aa, Bos taurus
GLIAVVVIGVIIVTLVLG

SEQ ID NO: 12432 - protein, 17 aa, Bos taurus
SLWALLILLIPIVLIIY

SEQ ID NO: 12433 - protein, 21 aa, Bos taurus
GVIVGSVIAGILLLLALVAIL

SEQ ID NO: 12434 - protein, 20 aa, Bos taurus
IIPIVAGVVAGIVLIGLALL

SEQ ID NO: 12435 - protein, 24 aa, Bos taurus
PSVVFIGFLLVVGMGLAGAFLAHY

SEQ ID NO: 12436 - protein, 26 aa, Bos taurus
PGLLKLIGLTTIFSATALGFLAHKRG

SEQ ID NO: 12437 - protein, 24 aa, Bos taurus
SVLLTLVALAGVAGLLVALAVALC

SEQ ID NO: 12438 - protein, 23 aa, Bos taurus
IMIIICCVVLGVVLASSIGGTLG

SEQ ID NO: 12439 - protein, 20 aa, Bos taurus
MLYLYVLSGIGGLLLLFLIF

SEQ ID NO: 12440 - protein, 19 aa, Bos taurus
MMIILGVICAIILIIIIVY

SEQ ID NO: 12441 - protein, 20 aa, Bos taurus
ITLALAFLLLISTAANVSLF

SEQ ID NO: 12442 - protein, 23 aa, Bos taurus
KALGILAILLGVAAVATIIALSV

SEQ ID NO: 12443 - protein, 22 aa, Bos taurus
AAVTLGVLCLGLLVTVILLILQ

SEQ ID NO: 12444 - protein, 23 aa, Bos taurus
PVWVIILAVLAGLLLLAVLVFVM

SEQ ID NO: 12445 - protein, 20 aa, Bos taurus
YPVVFNLVLWIMIGLALTLI

SEQ ID NO: 12446 - protein, 20 aa, Bos taurus
VSTLVPLALVLVAGVVAIGV

SEQ ID NO: 12447 - protein, 22 aa, Bos taurus
VLLGLLAIAALVTVITVPVVLL

SEQ ID NO: 12448 - protein, 28 aa, Bos taurus
VMFAVLFVILVALCAGLIAVSWLSIQGS

SEQ ID NO: 12449 - protein, 22 aa, Bos taurus
LAVGLSTAGVSLVTIPSFLFWL

SEQ ID NO: 12450 - protein, 20 aa, Bos taurus
LFIPVAVMVTAFSGLAFIIW

SEQ ID NO: 12451 - protein, 22 aa, Bos taurus
WAILAMVLGSVLLLCILFTCFC

SEQ ID NO: 12452 - protein, 20 aa, Bos taurus
AGIGLLIMGFLVLGLVPFLL

SEQ ID NO: 12453 - protein, 20 aa, Bos taurus
TWLIVGTCTALFSIPVVIYV

SEQ ID NO: 12454 - protein, 23 aa, Bos taurus
LIPIAVGGALAGLVLIVLLAYLI

SEQ ID NO: 12455 - protein, 23 aa, Bos taurus
LMIALPIAVLLIVGGLVIMLYVF

SEQ ID NO: 12456 - protein, 20 aa, Bos taurus
APLFVGILLVLTALLLASLI

SEQ ID NO: 12457 - protein, 20 aa, Bos taurus
FSFLLVAGATTLFCLLHFGV

SEQ ID NO: 12458 - protein, 20 aa, Bos taurus
LIAILGSAGMTCLTVLLAFL

SEQ ID NO: 12459 - protein, 19 aa, Bos taurus
VVLATSLIWVLLDMFLLLY

SEQ ID NO: 12460 - protein, 20 aa, Bos taurus
MVVITVLLSVAMFLLVLGLI

SEQ ID NO: 12461 - protein, 20 aa, Bos taurus
ILFFVLGLYVAIPFLIKLCP

SEQ ID NO: 12462 - protein, 18 aa, Bos taurus
MMVAFLGASAVTASTGLL

SEQ ID NO: 12463 - protein, 20 aa, Bos taurus
LTVIVTACLTFATGVTVALI

SEQ ID NO: 12464 - protein, 20 aa, Bos taurus
VGFFGSGVGFSLILGFSVAY

SEQ ID NO: 12465 - protein, 20 aa, Bos taurus
ATLIIVVCVGFLVLMVVLGL

SEQ ID NO: 12466 - protein, 20 aa, Bos taurus
YLIPFLIIVGICLILIVIFM

SEQ ID NO: 12467 - protein, 23 aa, Bos taurus
WIVAYWWAVLLMGIALIMLMAGF

SEQ ID NO: 12468 - protein, 18 aa, Bos taurus
CLPGLLLQLLLALCFFSY

SEQ ID NO: 12469 - protein, 18 aa, Bos taurus
IFTSPLNLLLLGLCIFLL

SEQ ID NO: 12470 - protein, 20 aa, Bos taurus
LTIIIIIISVVFIYIIVSPL

SEQ ID NO: 12471 - protein, 21 aa, Bos taurus
IMMYVLIVVLTIWLVAEMVYC

SEQ ID NO: 12472 - protein, 20 aa, Bos taurus
CVLLTALLALAAYYIYIPLP

SEQ ID NO: 12473 - protein, 22 aa, Bos taurus
ILAFVASFLLWPSALIRIYYWY

SEQ ID NO: 12474 - protein, 20 aa, Bos taurus
MIIALGGVIVASVLVFIFVL

SEQ ID NO: 12475 - protein, 16 aa, Bos taurus
WAPALLWLATAAAVAG

SEQ ID NO: 12476 - protein, 22 aa, Bos taurus
VGLIILSVVFAVCLLACLLGVA

SEQ ID NO: 12477 - protein, 25 aa, Bos taurus
YYNILLYSLVPLMLIAGIVICAFWV

SEQ ID NO: 12478 - protein, 23 aa, Bos taurus
GAIIGLMVGGVVIATVIVITLVM

SEQ ID NO: 12479 - protein, 20 aa, Bos taurus
FFTWFMVIALLGVWTSVAVV

SEQ ID NO: 12480 - protein, 20 aa, Bos taurus
FFFPTAPFILFVFTASTIFH

SEQ ID NO: 12481 - protein, 22 aa, Bos taurus
WAAVALPAFFSLVIGFAFGAFY

SEQ ID NO: 12482 - protein, 20 aa, Bos taurus
GMVVGIVAAAALCILILLYA

SEQ ID NO: 12483 - protein, 20 aa, Bos taurus
GMVVGIVAAAALCILILLYA

SEQ ID NO: 12484 - protein, 20 aa, Bos taurus
GMVVGIVAAAALCILILLYA

SEQ ID NO: 12485 - protein, 20 aa, Bos taurus
WIFVAILSAVICLIMVWAVA

SEQ ID NO: 12486 - protein, 20 aa, Bos taurus
VVAGLSCAFIVLVFVTVFLV

SEQ ID NO: 12487 - protein, 20 aa, Bos taurus
LVVIPVTMGVLFAVLLVSAC

SEQ ID NO: 12488 - protein, 20 aa, Bos taurus
WLIILASLLALALILAVCIA

SEQ ID NO: 12489 - protein, 19 aa, Bos taurus
MSWAVVFGLLAALLLLLLL

SEQ ID NO: 12490 - protein, 20 aa, Bos taurus
IAYVMAAICALFMLPLCLMV

SEQ ID NO: 12491 - protein, 20 aa, Bos taurus
SLLATYGWYIVFSCILLYVV

SEQ ID NO: 12492 - protein, 20 aa, Bos taurus
LSIVILLELAILGGLVYYKF

SEQ ID NO: 12493 - protein, 20 aa, Bos taurus
VAVFCLLGLGVLYHLYSGFL

SEQ ID NO: 12494 - protein, 20 aa, Bos taurus
VLLVLILAVVGFGALMTQLF

SEQ ID NO: 12495 - protein, 20 aa, Bos taurus
PLFVVVILLGLLIFFSPTMF

SEQ ID NO: 12496 - protein, 20 aa, Bos taurus
FLGLSSFGLLFVVFYFTHLE

SEQ ID NO: 12497 - protein, 20 aa, Bos taurus
LRIGGLIIAGILFILGILIV

SEQ ID NO: 12498 - protein, 17 aa, Bos taurus
ISPWTLMALTLQTLSLT

SEQ ID NO: 12499 - protein, 20 aa, Bos taurus
WGLILLFYLVFYGFLAALFS

SEQ ID NO: 12500 - protein, 20 aa, Bos taurus
MIVLICVIVFIIILFIVLFA

SEQ ID NO: 12501 - protein, 20 aa, Bos taurus
RVLWWSILQTLILVAIGVWQ

SEQ ID NO: 12502 - protein, 20 aa, Bos taurus
WLAYYLALLVSLLVMVISPV

SEQ ID NO: 12503 - protein, 20 aa, Bos taurus
CIIIFILVIGVVIIGLIIWG

SEQ ID NO: 12504 - protein, 20 aa, Bos taurus
LVLLWLLGLPWTWSTAAALG

SEQ ID NO: 12505 - protein, 20 aa, Bos taurus
LIAVTLGILCSVMLVITVVL

SEQ ID NO: 12506 - protein, 20 aa, Bos taurus
FMLVVSIVIGVGGCWFAYIQ

SEQ ID NO: 12507 - protein, 20 aa, Bos taurus
IWLIIFGVVMGVVVIGIVVL

SEQ ID NO: 12508 - protein, 20 aa, Bos taurus
VLYFSIFSMFCLIGLATWQV

SEQ ID NO: 12509 - protein, 22 aa, Bos taurus
PLLRWVLTLSFLVATVAVGLYA

SEQ ID NO: 12510 - protein, 19 aa, Bos taurus
QDAMVILGGGGLLFASYLT

SEQ ID NO: 12511 - protein, 20 aa, Bos taurus
LPAVFDGVKLAAVAAVLYVI

SEQ ID NO: 12512 - protein, 20 aa, Bos taurus
TLALLVGSQLAVMMYLSLGG

SEQ ID NO: 12513 - protein, 20 aa, Bos taurus
CFGLSLLMVALGLAVPMLHH

SEQ ID NO: 12514 - protein, 22 aa, Bos taurus
CLVLFPRFLGTAFMLWLLDFLC

SEQ ID NO: 12515 - protein, 20 aa, Bos taurus
LFMININILLIFIFIVLLIH

SEQ ID NO: 12516 - protein, 16 aa, Bos taurus
LLGAAALALGGALGLY

SEQ ID NO: 12517 - protein, 20 aa, Bos taurus
ILGILGGILAFLILILLLLL

SEQ ID NO: 12518 - protein, 20 aa, Bos taurus
ALLVLALLFFAAAAGLAVCY

SEQ ID NO: 12519 - protein, 20 aa, Bos taurus
LGAGYIVLVIVAVLIGVGLL

SEQ ID NO: 12520 - protein, 18 aa, Bos taurus
VGASALCVVVLCWLYVFP

SEQ ID NO: 12521 - protein, 20 aa, Bos taurus
ALLIITIVVPGLVLAVAVTV

SEQ ID NO: 12522 - protein, 22 aa, Bos taurus
GLIVGVVSISIILLLLLGLFLW

SEQ ID NO: 12523 - protein, 17 aa, Bos taurus
GHHLWALGCYMLLAVVA

SEQ ID NO: 12524 - protein, 20 aa, Bos taurus
LISGVLGVICLVLMAALGVL

SEQ ID NO: 12525 - protein, 20 aa, Bos taurus
LFCNWFRPVLISVVSIAALI

SEQ ID NO: 12526 - protein, 17 aa, Bos taurus
YLLPILGIFLAYYYYSA

SEQ ID NO: 12527 - protein, 20 aa, Bos taurus
FLIVCIILACSMVCLFIYIK

SEQ ID NO: 12528 - protein, 24 aa, Bos taurus
GLPGTHLALLAASLLSSSVAIYVC

SEQ ID NO: 12529 - protein, 20 aa, Bos taurus
IVVEFFVVTFKVLWAFVLAA

SEQ ID NO: 12530 - protein, 20 aa, Bos taurus
SSTCVLVLLFSFCLLLVPAM

SEQ ID NO: 12531 - protein, 20 aa, Bos taurus
LLVLVCVLVALAIIYLIALV

SEQ ID NO: 12532 - protein, 20 aa, Bos taurus
IAGAVIGTLLALVLIALIVF

SEQ ID NO: 12533 - protein, 22 aa, Bos taurus
LFSFPTKYYFLFLAFSVVTFTV

SEQ ID NO: 12534 - protein, 20 aa, Bos taurus
VLSVVTGMLVVLVVLFALLL

SEQ ID NO: 12535 - protein, 20 aa, Bos taurus
VLAYSLLPVGGLSLIALLAF

SEQ ID NO: 12536 - protein, 20 aa, Bos taurus
GVLAGIVLGDLMLTLLIALA

SEQ ID NO: 12537 - protein, 21 aa, Bos taurus
LSGYSMFAVGIGALLFGYWSM

SEQ ID NO: 12538 - protein, 20 aa, Bos taurus
AAVVSAACCALFLLLLLTGV

SEQ ID NO: 12539 - protein, 20 aa, Bos taurus
LCYILDAILFLYGIVLTLLY

SEQ ID NO: 12540 - protein, 20 aa, Bos taurus
LFLGFFGLSLALHLLTLCCY

SEQ ID NO: 12541 - protein, 20 aa, Bos taurus
VLASAVLGLASIFCLGLTSY

SEQ ID NO: 12542 - protein, 20 aa, Bos taurus
TMVAVVALAGVVATLSLISY

SEQ ID NO: 12543 - protein, 20 aa, Bos taurus
WVAGLSGILIVGALFMSYLA

SEQ ID NO: 12544 - protein, 20 aa, Bos taurus
TIISVSVVTVLLVSVVGVLV

SEQ ID NO: 12545 - protein, 20 aa, Bos taurus
VVLPVLLLLLVLAVGLAVFF

SEQ ID NO: 12546 - protein, 20 aa, Bos taurus
VIWMMAAAMLVLTVVLGLYG

SEQ ID NO: 12547 - protein, 20 aa, Bos taurus
LVLLALAVITIFALVCVLIA

SEQ ID NO: 12548 - protein, 20 aa, Bos taurus
FSQRLFMILWLKGVVFSVTT

SEQ ID NO: 12549 - protein, 19 aa, Bos taurus
ILLLFVCGTALLLGVPSLA

SEQ ID NO: 12550 - protein, 20 aa, Bos taurus
VGGVCYLSMGMVVLLMGLVF

SEQ ID NO: 12551 - protein, 20 aa, Bos taurus
IGIVIGALLVLTTLTCLIII

SEQ ID NO: 12552 - protein, 20 aa, Bos taurus
GLSTRLLALVVLFFIVGVII

SEQ ID NO: 12553 - protein, 20 aa, Bos taurus
LYIILSTGGIFLLVTLVTVC

SEQ ID NO: 12554 - protein, 20 aa, Bos taurus
TLPLILGLILGLVIVVTLVI

SEQ ID NO: 12555 - protein, 20 aa, Bos taurus
LFINFCLISICLLLICIIVM

SEQ ID NO: 12556 - protein, 20 aa, Bos taurus
ILAPVLVLLALLLATGLAAL

SEQ ID NO: 12557 - protein, 20 aa, Bos taurus
AVLGLYLLVFLILVGIFILA

SEQ ID NO: 12558 - protein, 17 aa, Bos taurus
LLVTALVGAGLGGAWLA

SEQ ID NO: 12559 - protein, 18 aa, Bos taurus
MIYYLVVGVTVSAGGYYT

SEQ ID NO: 12560 - protein, 20 aa, Bos taurus
GLVLGALFTSFLLLLYSYAV

SEQ ID NO: 12561 - protein, 18 aa, Bos taurus
IASFLSVFKLVLIGLIIV

SEQ ID NO: 12562 - protein, 20 aa, Bos taurus
LSIILLYILCALLTITVAIL

SEQ ID NO: 12563 - protein, 20 aa, Bos taurus
LIFNIYVVFYCSAVIMPQIC

SEQ ID NO: 12564 - protein, 20 aa, Bos taurus
LASITGISLFLIISMCLLFL

SEQ ID NO: 12565 - protein, 20 aa, Bos taurus
IIFFLILFIFLLFLGIFVYS

SEQ ID NO: 12566 - protein, 20 aa, Bos taurus
AWGFFSSFLLLAFGTLVAAL

SEQ ID NO: 12567 - protein, 20 aa, Bos taurus
VTGPVLAVILIVLIVIAILL

SEQ ID NO: 12568 - protein, 16 aa, Bos taurus
VTATVAGLTLLAVGIY

SEQ ID NO: 12569 - protein, 20 aa, Bos taurus
GAWAQLVAALLLLAIGFSLA

SEQ ID NO: 12570 - protein, 16 aa, Bos taurus
YWPFAVIAALLIGGFL

SEQ ID NO: 12571 - protein, 20 aa, Bos taurus
WPFFLFIPFFIILCVLIATL

SEQ ID NO: 12572 - protein, 25 aa, Bos taurus
ALTIVVGALFFERAFDQGADAIYEH

SEQ ID NO: 12573 - protein, 16 aa, Bos taurus
TWLTMILSMFLTLFII

SEQ ID NO: 12574 - protein, 22 aa, Bos taurus
SPGALTFAIIWPFIAQWLVHLY

SEQ ID NO: 12575 - protein, 22 aa, Bos taurus
LARNWVPTASLWGAVGAVGLVW

SEQ ID NO: 12576 - protein, 22 aa, Bos taurus
SAVTGIVVGALLGAGLLMAFYF

SEQ ID NO: 12577 - protein, 18 aa, Bos taurus
IAVAGCTLLLASILLLSC

SEQ ID NO: 12578 - protein, 28 aa, Bos taurus
RRTRACILRVAPPFVAFYLVYTWGTQEF

SEQ ID NO: 12579 - protein, 19 aa, Bos taurus
VGLVLLVVTGAVVAGVVIC

SEQ ID NO: 12580 - protein, 20 aa, Bos taurus
MGIIVGLVLLVVALVAGAVI

SEQ ID NO: 12581 - protein, 26 aa, Bos taurus
LTPWMVAVAVILVVLGLLTIGSIFFT

SEQ ID NO: 12582 - protein, 29 aa, Bos taurus
AGLGAGAVMSIILALLLLAVLLVVCGPLA

SEQ ID NO: 12583 - protein, 20 aa, Bos taurus
WAILAILLGIALLFCILFTL

SEQ ID NO: 12584 - protein, 23 aa, Bos taurus
LTYVGGAAAGTTGLVTGSILLAL

SEQ ID NO: 12585 - protein, 20 aa, Bos taurus
IAIALLVILVICSLIVTSVI

SEQ ID NO: 12586 - protein, 19 aa, Bos taurus
TSLLGALFGIGPLVFWYYV

SEQ ID NO: 12587 - protein, 20 aa, Bos taurus
GTKISAINLAIFALAMILSI

SEQ ID NO: 12588 - protein, 19 aa, Bos taurus
QLYYQVLNFGMIVSSALMI

SEQ ID NO: 12589 - protein, 16 aa, Bos taurus
ITFCLVMGVLFAVDTG

SEQ ID NO: 12590 - protein, 20 aa, Bos taurus
TILLAVVGSILLTGFALLVI

SEQ ID NO: 12591 - protein, 20 aa, Bos taurus
TVALGILGVILLAFLIATLL

SEQ ID NO: 12592 - protein, 22 aa, Bos taurus
VSFVGALLKGFKWGFAAFVVAI

SEQ ID NO: 12593 - protein, 22 aa, Bos taurus
TYRHSIFAFTHVLIPVWIIHYY

SEQ ID NO: 12594 - protein, 20 aa, Bos taurus
VLVASFAIAGLAVILPTLSP

SEQ ID NO: 12595 - protein, 24 aa, Bos taurus
QLVLAVVGSVSATCLTILAALLTL

SEQ ID NO: 12596 - protein, 20 aa, Bos taurus
WLMVKIFLILIVFFIIFVVF

SEQ ID NO: 12597 - protein, 20 aa, Bos taurus
LGLSVFSMLCCFWPLGIAAF

SEQ ID NO: 12598 - protein, 20 aa, Bos taurus
TLIILGVVGGVIGLLIFILL

SEQ ID NO: 12599 - protein, 20 aa, Bos taurus
AVFVILFALITILILYSSSS

SEQ ID NO: 12600 - protein, 20 aa, Bos taurus
VVLMAVLAAFLALSLLAGLL

SEQ ID NO: 12601 - protein, 20 aa, Bos taurus
WPIFLFFAVILGGPYLIWKL

SEQ ID NO: 12602 - protein, 19 aa, Bos taurus
MMIMLGAICAIIVVVIVIY

SEQ ID NO: 12603 - protein, 20 aa, Bos taurus
LPWKPVLITASLGIVSFAVF

SEQ ID NO: 12604 - protein, 22 aa, Bos taurus
LNILTFLCGSAVGFVLCSQLLS

SEQ ID NO: 12605 - protein, 20 aa, Bos taurus
LVPFLFFVVVPFMEFLLPVA

SEQ ID NO: 12606 - protein, 20 aa, Bos taurus
IWIIIFGVIFCIVLVATMLL

SEQ ID NO: 12607 - protein, 20 aa, Bos taurus
VTILVSLALAFLACIVFLVV

SEQ ID NO: 12608 - protein, 20 aa, Bos taurus
PGFFPRLGVIGFAGVVGLVL

SEQ ID NO: 12609 - protein, 20 aa, Bos taurus
LGYVLATLLLFILLLITVVL

SEQ ID NO: 12610 - protein, 22 aa, Bos taurus
ARAGLGLLLGTAAGLGFLCALY

SEQ ID NO: 12611 - protein, 20 aa, Bos taurus
LGAVVAVAASFFCASLFSAV

SEQ ID NO: 12612 - protein, 22 aa, Bos taurus
LLGLRTFVAFAAKLWSFFIYLL

SEQ ID NO: 12613 - protein, 20 aa, Bos taurus
LAGLVAADAVVSLLIVVVVF

SEQ ID NO: 12614 - protein, 25 aa, Bos taurus
GVPLWIIILAILIGLLLLGLLIYIL

SEQ ID NO: 12615 - protein, 27 aa, Bos taurus
ILLFYLVFYGFLTAMFTLTMWVMLQTV

SEQ ID NO: 12616 - protein, 20 aa, Bos taurus
WAILAILLGIALLFSILLTL

SEQ ID NO: 12617 - protein, 26 aa, Bos taurus
FWALVVVNGVLVFYSLLVTVALSNCW

SEQ ID NO: 12618 - protein, 20 aa, Bos taurus
GMIITDIIATVLLALGVYCF

SEQ ID NO: 12619 - protein, 20 aa, Bos taurus
AGFIFTEIVSIFLLAVGVYF

SEQ ID NO: 12620 - protein, 20 aa, Bos taurus
LVLGVLVGCFIVTGVAVGIF

SEQ ID NO: 12621 - protein, 20 aa, Bos taurus
AVAIGTCFAAVAIVAAIITW

SEQ ID NO: 12622 - protein, 17 aa, Bos taurus
GSIAGLSMVLAAYVFLN

SEQ ID NO: 12623 - protein, 16 aa, Bos taurus
LANFGGLAVGLGFGAL

SEQ ID NO: 12624 - protein, 20 aa, Bos taurus
VPVLSLLAIVFILAGVLLYV

SEQ ID NO: 12625 - protein, 20 aa, Bos taurus
IFFVSVSFFIITAATVGYFI

SEQ ID NO: 12626 - protein, 20 aa, Bos taurus
LFLIVFFSLVFSVFAIVIGI

SEQ ID NO: 12627 - protein, 22 aa, Bos taurus
WLRASFGATVFAVLGFAMYKAL

SEQ ID NO: 12628 - protein, 20 aa, Bos taurus
IMMYILLVFLTLWLLIEMIY

SEQ ID NO: 12629 - protein, 18 aa, Bos taurus
FFVAVPVAVTFLDRVACV

SEQ ID NO: 12630 - protein, 20 aa, Bos taurus
VAAFGVISFIAILVVVVIVL

SEQ ID NO: 12631 - protein, 20 aa, Bos taurus
LLLALAGALLACLLVLTADP

SEQ ID NO: 12632 - protein, 20 aa, Bos taurus
MWAIGITVVVIIIIIIVVWS

SEQ ID NO: 12633 - protein, 20 aa, Bos taurus
LLIPAPLLGLLLLLLLSVLL

SEQ ID NO: 12634 - protein, 20 aa, Bos taurus
GLLGGALANLFVIVGFAAFA

SEQ ID NO: 12635 - protein, 20 aa, Bos taurus
FWSAVNVAVLLLVAVLQVCT

SEQ ID NO: 12636 - protein, 20 aa, Bos taurus
LGAVLGALCLFPALVLLAWP

SEQ ID NO: 12637 - protein, 17 aa, Bos taurus
ILGIVVGTAGISLLLLW

SEQ ID NO: 12638 - protein, 22 aa, Bos taurus
ILFFRLDIRMGLLYITLCIVFL

SEQ ID NO: 12639 - protein, 20 aa, Bos taurus
SLILGGVIGVCTILLLLYAF

SEQ ID NO: 12640 - protein, 20 aa, Bos taurus
AASFIGGIVLVLGVQAVIFF

SEQ ID NO: 12641 - protein, 20 aa, Bos taurus
VAIICAVVVAVGLIVGLSVG

SEQ ID NO: 12642 - protein, 20 aa, Bos taurus
WCIAVLGLALLSACFIVSCV

SEQ ID NO: 12643 - protein, 20 aa, Bos taurus
ALYEAPAYHLILEGILILWI

SEQ ID NO: 12644 - protein, 20 aa, Bos taurus
LIAILLCIVTLLVTVVLFAA

SEQ ID NO: 12645 - protein, 20 aa, Bos taurus
IFAYMMAVILCGTVLFIFSI

SEQ ID NO: 12646 - protein, 20 aa, Bos taurus
IAICLSITVLILVVIIVIST

SEQ ID NO: 12647 - protein, 20 aa, Bos taurus
WLWFIYLLTAALPIALIGSF

SEQ ID NO: 12648 - protein, 20 aa, Bos taurus
LFSTTDVILFSLIVGVMTYW

SEQ ID NO: 12649 - protein, 16 aa, Bos taurus
LLAAGLALALVLAVHL

SEQ ID NO: 12650 - protein, 20 aa, Bos taurus
CIAVLLFSFALIVLPSISPF

SEQ ID NO: 12651 - protein, 20 aa, Bos taurus
KVFIPSLFLSHVLALGLGIY

SEQ ID NO: 12652 - protein, 20 aa, Bos taurus
IPIAMVLVPVFALTMVAAWA

SEQ ID NO: 12653 - protein, 20 aa, Bos taurus
WCMCFGLAFMLAGVILGGAY

SEQ ID NO: 12654 - protein, 20 aa, Bos taurus
GLLYLVLILPSCLTLLVACT

SEQ ID NO: 12655 - protein, 22 aa, Bos taurus
TLTGRMNCVLATYGSIALIVLY

SEQ ID NO: 12656 - protein, 20 aa, Bos taurus
GPWLLALFIFVVCGSAIFQI

SEQ ID NO: 12657 - protein, 19 aa, Bos taurus
EWIAAVTIAAGTAAIGYLA

SEQ ID NO: 12658 - protein, 20 aa, Bos taurus
YYLEILMVTGLLAYIMNYII

SEQ ID NO: 12659 - protein, 20 aa, Bos taurus
GNLASMLLIACAFTLSLVYL

SEQ ID NO: 12660 - protein, 20 aa, Bos taurus
IFSGFAALLAILLVVAVICV

SEQ ID NO: 12661 - protein, 18 aa, Bos taurus
RRRLGQLSCMSKPALKLR

SEQ ID NO: 12662 - protein, 20 aa, Bos taurus
AWAALLLAVAAVLAQVVWLW

SEQ ID NO: 12663 - protein, 20 aa, Bos taurus
FSQRLFMVLWLKGVTFNVTT

SEQ ID NO: 12664 - protein, 22 aa, Bos taurus
VALGAMGAAVAAILSFSLYRVL

SEQ ID NO: 12665 - protein, 20 aa, Bos taurus
VVVVGVIAALLFCLLVVVVV

SEQ ID NO: 12666 - protein, 27 aa, Bos taurus
CAFYQLLLAALMLVAMLQLLYLSLLSG

SEQ ID NO: 12667 - protein, 19 aa, Bos taurus
MAVRLVMVGSAFVLFLFIL

SEQ ID NO: 12668 - protein, 20 aa, Bos taurus
FLTVTVLLALVLSGALVTFL

SEQ ID NO: 12669 - protein, 20 aa, Bos taurus
WRSAVGFFLWVIVLSTWITI

SEQ ID NO: 12670 - protein, 24 aa, Bos taurus
ITLQILPVFFSNCLFLALYDSVIL

SEQ ID NO: 12671 - protein, 20 aa, Bos taurus
AVLNALLVSVLAAVLWKHVR

SEQ ID NO: 12672 - protein, 20 aa, Bos taurus
LAIATALAILLLQGLVVWSF

SEQ ID NO: 12673 - protein, 20 aa, Bos taurus
GLLIVTIVVVMLVLGMAVAF

SEQ ID NO: 12674 - protein, 20 aa, Bos taurus
IIIPAACGLLSKTLVFIGLF

SEQ ID NO: 12675 - protein, 20 aa, Bos taurus
ALVAIFLCILTFTVITLLII

SEQ ID NO: 12676 - protein, 20 aa, Bos taurus
ILKCTLLLFGVWILFYILKL

SEQ ID NO: 12677 - protein, 20 aa, Bos taurus
GVVFGAILGAILGASLLSLV

SEQ ID NO: 12678 - protein, 20 aa, Bos taurus
IWPWLIGAAVVGSVLTAVLG

SEQ ID NO: 12679 - protein, 19 aa, Bos taurus
AATIFSAVLLAAVALAVCV

SEQ ID NO: 12680 - protein, 20 aa, Bos taurus
MIMLGVSLAILLIGVVLLCI

SEQ ID NO: 12681 - protein, 23 aa, Bos taurus
IVTIAVVAALSLVAVIFAGASCL

SEQ ID NO: 12682 - protein, 20 aa, Bos taurus
AVGVLAGIMAIIVAITVLIS

SEQ ID NO: 12683 - protein, 20 aa, Bos taurus
LFALEAVLIPLGSMGLIVSL

SEQ ID NO: 12684 - protein, 20 aa, Bos taurus
IGGIITLFLITAVFISTVMI

SEQ ID NO: 12685 - protein, 20 aa, Bos taurus
WSTFVAPSICMAVIMVGVLS

SEQ ID NO: 12686 - protein, 21 aa, Bos taurus
LIVGIVVGLLLAALVAGVVYW

SEQ ID NO: 12687 - protein, 20 aa, Bos taurus
WIMLILFAWGTLLFYIGGHL

SEQ ID NO: 12688 - protein, 20 aa, Bos taurus
FWATCPSSSTVCFLFVIFAV

SEQ ID NO: 12689 - protein, 20 aa, Bos taurus
IVAAVFVTLILLGALIFGIW

SEQ ID NO: 12690 - protein, 20 aa, Bos taurus
LAAAIFLPLVAMALLVGGVY

SEQ ID NO: 12691 - protein, 20 aa, Bos taurus
LAAVMGSMFAVISLASIAVY

SEQ ID NO: 12692 - protein, 20 aa, Bos taurus
VVTGTMALIFSFLIVVLVLY

SEQ ID NO: 12693 - protein, 17 aa, Bos taurus
LAVTFAIGGALLAGMKY

SEQ ID NO: 12694 - protein, 20 aa, Bos taurus
TIAGVASALAMALIGAVSSY

SEQ ID NO: 12695 - protein, 20 aa, Bos taurus
FFAKYWMYIVPVVLFLMMSG

SEQ ID NO: 12696 - protein, 18 aa, Bos taurus
LTYMAAAAVGMLGASYAA

SEQ ID NO: 12697 - protein, 20 aa, Bos taurus
LLCGAVALGCALLLALKFTC

SEQ ID NO: 12698 - protein, 20 aa, Bos taurus
LVAVVVFGAVTAALVLSTVL

SEQ ID NO: 12699 - protein, 20 aa, Bos taurus
VALLSILVFIPSTVVVILLL

SEQ ID NO: 12700 - protein, 20 aa, Bos taurus
GMLCGVFAWGLFFVVIFLYF

SEQ ID NO: 12701 - protein, 20 aa, Bos taurus
FLCPVREAIQILFIFLIGTL

SEQ ID NO: 12702 - protein, 20 aa, Bos taurus
NLYITAPIFIILIVVGSIWL

SEQ ID NO: 12703 - protein, 20 aa, Bos taurus
FLMNPMVMMMVLPLLIFVLL

SEQ ID NO: 12704 - protein, 16 aa, Bos taurus
LFLLCISLALWSYFFH

SEQ ID NO: 12705 - protein, 17 aa, Bos taurus
AIAAGVCGALFIGYCIY

SEQ ID NO: 12706 - protein, 20 aa, Bos taurus
IFMYMFLAGLGLLVVVGLHQ

SEQ ID NO: 12707 - protein, 20 aa, Bos taurus
GIIAAVAVLSISLAAGILFA

SEQ ID NO: 12708 - protein, 20 aa, Bos taurus
ICVIVLLFILAVINLIITLV

SEQ ID NO: 12709 - protein, 20 aa, Bos taurus
AVPIYVPFLIVGSVFVAFIV

SEQ ID NO: 12710 - protein, 19 aa, Bos taurus
ALWIGTTSFMILVLPVVFE

SEQ ID NO: 12711 - protein, 20 aa, Bos taurus
GEVVIIVVVLLMWAAVIGLF

SEQ ID NO: 12712 - protein, 20 aa, Bos taurus
PYYASAFSMMLGLFIFSVVF

SEQ ID NO: 12713 - protein, 20 aa, Bos taurus
VAAPLLCLAAAVLVWGVLWV

SEQ ID NO: 12714 - protein, 20 aa, Bos taurus
VGAGVGAFTAVLLVALTCYF

SEQ ID NO: 12715 - protein, 20 aa, Bos taurus
MIIIISLGAICAVLLVIMVL

SEQ ID NO: 12716 - protein, 18 aa, Bos taurus
AWDLWSTLCMILFLVIEV

SEQ ID NO: 12717 - protein, 20 aa, Bos taurus
LILVIYFFFYASLAAVITLC

SEQ ID NO: 12718 - protein, 20 aa, Bos taurus
FYLTFPLIFGLFIILLVIFL

SEQ ID NO: 12719 - protein, 20 aa, Bos taurus
ILISALVIASTVILTVLGAV

SEQ ID NO: 12720 - protein, 23 aa, Bos taurus
PEITIVLLTAATLLSIWLAYMIP

SEQ ID NO: 12721 - protein, 20 aa, Bos taurus
TALIFGGFISLIGAAFYPIY

SEQ ID NO: 12722 - protein, 16 aa, Bos taurus
VFQSLVITLIAVMAFC

SEQ ID NO: 12723 - protein, 23 aa, Bos taurus
GVLVGISIASLSLVVALLALLCH

SEQ ID NO: 12724 - protein, 24 aa, Bos taurus
ARMWKALTYFVALPGVGVSMLNVF

SEQ ID NO: 12725 - protein, 28 aa, Bos taurus
IADALLYRATLILTVGGTAYAMYELAVA

SEQ ID NO: 12726 - protein, 23 aa, Bos taurus
TMDIAIGLTSCFLCFLLPSGWVL

SEQ ID NO: 12727 - protein, 16 aa, Bos taurus
AYQEIWVGTGLMAYIV

SEQ ID NO: 12728 - protein, 22 aa, Bos taurus
FLLPILGAALALLLLLLVLLFL

SEQ ID NO: 12729 - protein, 24 aa, Bos taurus
IYIWAPLVGTCGVLLLSLVITGIC

SEQ ID NO: 12730 - protein, 22 aa, Bos taurus
LIPLFIFIGAGGTGAALYVTRL

SEQ ID NO: 12731 - protein, 20 aa, Bos taurus
LFGFVAFMLFMFWVGETYPA

SEQ ID NO: 12732 - protein, 18 aa, Bos taurus
WLKVGLTLGTSVFLWIYL

SEQ ID NO: 12733 - protein, 20 aa, Bos taurus
MWFEVLPGIAVMGVCLFIPG

SEQ ID NO: 12734 - protein, 16 aa, Bos taurus
HWVHVLVPMGFVFGYY

SEQ ID NO: 12735 - protein, 20 aa, Bos taurus
FYILLTGIPVAIGITLINVF

SEQ ID NO: 12736 - protein, 19 aa, Bos taurus
GLHRQLLYITSFVFVGYYL

SEQ ID NO: 12737 - protein, 19 aa, Bos taurus
NGGLIFAALAFIVGLVIIL

SEQ ID NO: 12738 - protein, 22 aa, Bos taurus
WLRLLPFLGVLALLGYLAVRPF

SEQ ID NO: 12739 - protein, 27 aa, Bos taurus
AGLSTGALIAILLCVVILLAIVVLFIT

SEQ ID NO: 12740 - protein, 20 aa, Bos taurus
LIAGAIGTGAVIIIFCIALI

SEQ ID NO: 12741 - protein, 20 aa, Bos taurus
YIAYALVPVFFVMGLFGVLI

SEQ ID NO: 12742 - protein, 20 aa, Bos taurus
FWRLTVFFVSLSLLGVILIA

SEQ ID NO: 12743 - protein, 20 aa, Bos taurus
GVIAGGLVGLIFAVCLVGFM

SEQ ID NO: 12744 - protein, 20 aa, Bos taurus
LGGVVTIVVLLAIAFGVYKF

SEQ ID NO: 12745 - protein, 19 aa, Bos taurus
AVMGMVFILTLLLLGFINH

SEQ ID NO: 12746 - protein, 20 aa, Bos taurus
GGFSVFIQLMPIIVLILVSL

SEQ ID NO: 12747 - protein, 20 aa, Bos taurus
YFGFLILGVLLAGYIYVPLP

SEQ ID NO: 12748 - protein, 20 aa, Bos taurus
VIVALAVCGSILFLLIVLLL

SEQ ID NO: 12749 - protein, 18 aa, Bos taurus
IHYLFNTALFLIAWRLLI

SEQ ID NO: 12750 - protein, 20 aa, Bos taurus
IMAVALGAPALMLLAGGLFL

SEQ ID NO: 12751 - protein, 20 aa, Bos taurus
ILTLLLTVGQGFTIVVLGVM

SEQ ID NO: 12752 - protein, 22 aa, Bos taurus
LLPQLLLALTVASVFYTIWRIW

SEQ ID NO: 12753 - protein, 22 aa, Bos taurus
VNWWSTAQSLVIVLSGILQLYF

SEQ ID NO: 12754 - protein, 20 aa, Bos taurus
LLLVLGCSTLSLLIHQGAQL

SEQ ID NO: 12755 - protein, 20 aa, Bos taurus
LGALRLLLFKLLLLDVLLTC

SEQ ID NO: 12756 - protein, 20 aa, Bos taurus
ILLTLCLVLLIGLAALGLVF

SEQ ID NO: 12757 - protein, 20 aa, Bos taurus
LFVLLLLIVLLVNFALTIWI

SEQ ID NO: 12758 - protein, 20 aa, Bos taurus
LPSLLVVIAAIFIGFFLGKF

SEQ ID NO: 12759 - protein, 22 aa, Bos taurus
YTVFALATLLSGLLLGLFMIFV

SEQ ID NO: 12760 - protein, 20 aa, Bos taurus
LLVGALLGAGAGVGTALFAL

SEQ ID NO: 12761 - protein, 22 aa, Bos taurus
GIVGLCGLVSSILSILTLICPW

SEQ ID NO: 12762 - protein, 20 aa, Bos taurus
LIAAVIGTIQIAVICVVVLC

SEQ ID NO: 12763 - protein, 16 aa, Bos taurus
VAAWFFASLAAVAESL

SEQ ID NO: 12764 - protein, 20 aa, Bos taurus
YLLDVFLFLLVVTLGTMWLC

SEQ ID NO: 12765 - protein, 20 aa, Bos taurus
LKAAVIVACAFTAFLIACLL

SEQ ID NO: 12766 - protein, 20 aa, Bos taurus
LGYVLGITMMVIIVVIGAGI

SEQ ID NO: 12767 - protein, 20 aa, Bos taurus
VATIIVVDICVTLGLLLLVY

SEQ ID NO: 12768 - protein, 24 aa, Bos taurus
TINIVLGVLAILGLVTLAAASVYV

SEQ ID NO: 12769 - protein, 20 aa, Bos taurus
LTLGILGGLGTVALLIGVIV

SEQ ID NO: 12770 - protein, 20 aa, Bos taurus
LALAILLPLGLVIILGSGVY

SEQ ID NO: 12771 - protein, 20 aa, Bos taurus
IIVGAFVGTLIGVIIIISVV

SEQ ID NO: 12772 - protein, 20 aa, Bos taurus
LVTLAVPSAVALVLFLILAY

SEQ ID NO: 12773 - protein, 20 aa, Bos taurus
FLVFWLCLPVALLLFLLIIW

SEQ ID NO: 12774 - protein, 20 aa, Bos taurus
VVIVAIGVLATIFLASFAAL

SEQ ID NO: 12775 - protein, 20 aa, Bos taurus
MGLAVGIALLILLIVLLVIF

SEQ ID NO: 12776 - protein, 20 aa, Bos taurus
LYMLFLLVLVFFLMGLVGFM

SEQ ID NO: 12777 - protein, 20 aa, Bos taurus
FWSMVNLVVMVVVSAIQVYM

SEQ ID NO: 12778 - protein, 20 aa, Bos taurus
AAAGLTLGVTIALAGVVALA

SEQ ID NO: 12779 - protein, 19 aa, Bos taurus
FGLLRVFSIVIPFLYVGTL

SEQ ID NO: 12780 - protein, 17 aa, Bos taurus
ISYVMIALTVAGCVLMV

SEQ ID NO: 12781 - protein, 20 aa, Bos taurus
LGLLTLCVMLLIGLVTLGIM

SEQ ID NO: 12782 - protein, 22 aa, Bos taurus
WLSHYIMSLFTFLTATVAYLFL

SEQ ID NO: 12783 - protein, 22 aa, Bos taurus
NIIKFTGSLILGGSLFITYEVL

SEQ ID NO: 12784 - protein, 20 aa, Bos taurus
PWVSTEVLAAAIGLVIYYLA

SEQ ID NO: 12785 - protein, 20 aa, Bos taurus
LLLLLGLLGFLALLALMSRL

SEQ ID NO: 12786 - protein, 20 aa, Bos taurus
LIFIIINWTAVKDFWAKAST

SEQ ID NO: 12787 - protein, 20 aa, Bos taurus
ILPLVGMAMVPALLGLIGYH

SEQ ID NO: 12788 - protein, 20 aa, Bos taurus
VFLPSLLLSHLLAIGLGIYI

SEQ ID NO: 12789 - protein, 18 aa, Bos taurus
MAQVCLNTKLAKIKSKAL

SEQ ID NO: 12790 - protein, 20 aa, Bos taurus
IKAIMALVAVILLLVIIILI

SEQ ID NO: 12791 - protein, 22 aa, Bos taurus
LSFITDFFWGIAEFVVLFFRTL

SEQ ID NO: 12792 - protein, 20 aa, Bos taurus
FPVWVVVGIVTAVVLGLTLL

SEQ ID NO: 12793 - protein, 20 aa, Bos taurus
LLCGVAVGLIVAFFILSYLL

SEQ ID NO: 12794 - protein, 20 aa, Bos taurus
SWPVIVAALLLSCFVLFGLG

SEQ ID NO: 12795 - protein, 20 aa, Bos taurus
VLLASLGVGLLTLLGVALGA

SEQ ID NO: 12796 - protein, 20 aa, Bos taurus
GGFILGLWALIIMVFFKTYG

SEQ ID NO: 12797 - protein, 20 aa, Bos taurus
YSFSGAFLFSLGFLVAGLCY

SEQ ID NO: 12798 - protein, 20 aa, Bos taurus
IWAILAFLGLALTISLIFNI

SEQ ID NO: 12799 - protein, 20 aa, Bos taurus
VALWLARLLGAGGTVSVIYI

SEQ ID NO: 12800 - protein, 22 aa, Bos taurus
GIRSWSLLVGILSIGLAAAYYS

SEQ ID NO: 12801 - protein, 20 aa, Bos taurus
FAFSLSVMAALTFGCFITTA

SEQ ID NO: 12802 - protein, 20 aa, Bos taurus
FTYLIVVLIGISITGGLFYT

SEQ ID NO: 12803 - protein, 22 aa, Bos taurus
GFVMGCAVGMAAGALFGTFSCL

SEQ ID NO: 12804 - protein, 16 aa, Bos taurus
VGQIGFHRQKDVKIVT

SEQ ID NO: 12805 - protein, 16 aa, Bos taurus
MIMVILLLLVAIVVVA

SEQ ID NO: 12806 - protein, 20 aa, Bos taurus
FSLLLGLGAALYLGYYWTWV

SEQ ID NO: 12807 - protein, 20 aa, Bos taurus
FGTVIAIGVTLFVIAVVTVI

SEQ ID NO: 12808 - protein, 20 aa, Bos taurus
IVTGLGIGALVLAIYGYTFY

SEQ ID NO: 12809 - protein, 20 aa, Bos taurus
LVGMAIVGGMALGVAGLAGL

SEQ ID NO: 12810 - protein, 22 aa, Bos taurus
AGIIAVIVVVVVAIIAGIIVLV

SEQ ID NO: 12811 - protein, 20 aa, Bos taurus
GWILTVTLVLSVMVLLWICC

SEQ ID NO: 12812 - protein, 20 aa, Bos taurus
FITSTAILPLLLGCVGLFSL

SEQ ID NO: 12813 - protein, 28 aa, Bos taurus
FQKIAMATAIGFAIMGFIGFFVKLIHIP

SEQ ID NO: 12814 - protein, 20 aa, Bos taurus
IEPIIAACVVVFLTLVFGVI

SEQ ID NO: 12815 - protein, 16 aa, Bos taurus
MKAVMLGACFLIDFMF

SEQ ID NO: 12816 - protein, 20 aa, Bos taurus
TVVAVGLTIAAAGFAGRYAL

SEQ ID NO: 12817 - protein, 20 aa, Bos taurus
YVMASVFVCLLLSGLAVFFL

SEQ ID NO: 12818 - protein, 20 aa, Bos taurus
FYLLEFLLWISTFLPGLVGW

SEQ ID NO: 12819 - protein, 17 aa, Bos taurus
VMYSITVAFWLLNSWLW

SEQ ID NO: 12820 - protein, 20 aa, Bos taurus
AVIAGGVIGFLFAIFLILLL

SEQ ID NO: 12821 - protein, 20 aa, Bos taurus
FWLPIGCAAFVTVCVFGCVL

SEQ ID NO: 12822 - protein, 20 aa, Bos taurus
GGLGVFVQLMPILILILVSA

SEQ ID NO: 12823 - protein, 20 aa, Bos taurus
VVTVTGISLCLFIIVATVLI

SEQ ID NO: 12824 - protein, 20 aa, Bos taurus
FLDWAAFGVMTLPSIGVPLL

SEQ ID NO: 12825 - protein, 16 aa, Bos taurus
FGAGFGLVGVGTALAL

SEQ ID NO: 12826 - protein, 20 aa, Bos taurus
GVALGVFMTIGFALQLLGGP

SEQ ID NO: 12827 - protein, 20 aa, Bos taurus
WAVLKLLLLLLLCVAGGLVA

SEQ ID NO: 12828 - protein, 20 aa, Bos taurus
VFLAVSICLVTSSLIIFFLF

SEQ ID NO: 12829 - protein, 20 aa, Bos taurus
ALAIGSACALMVIIVIVVVL

SEQ ID NO: 12830 - protein, 20 aa, Bos taurus
FCQTGAVLFLLVTVIVNIKL

SEQ ID NO: 12831 - protein, 20 aa, Bos taurus
LAFCLCVMATVFLLITLQVV

SEQ ID NO: 12832 - protein, 20 aa, Bos taurus
LLAIFLSAVFLYYVLHCILW

SEQ ID NO: 12833 - protein, 12 aa, Bos taurus
WTICTISLLLIF

SEQ ID NO: 12834 - protein, 20 aa, Bos taurus
LGLAVLVLVALMGFLLEDWL

SEQ ID NO: 12835 - protein, 20 aa, Bos taurus
MIIITSILSSLAGLLLLAFL

SEQ ID NO: 12836 - protein, 20 aa, Bos taurus
VVFFFGFSIVLVLGSTFVAY

SEQ ID NO: 12837 - protein, 20 aa, Bos taurus
GFCVAFILSLVLTWAVLFFM

SEQ ID NO: 12838 - protein, 20 aa, Bos taurus
IGALAASGSLLLVLAIAGPV

SEQ ID NO: 12839 - protein, 22 aa, Bos taurus
DIVIPVVAVTLILGALGTAGYV

SEQ ID NO: 12840 - protein, 18 aa, Bos taurus
VLLFTMLLSSCITNLWLW

SEQ ID NO: 12841 - protein, 20 aa, Bos taurus
GVAVMAVAISVALLLLVVAV

SEQ ID NO: 12842 - protein, 20 aa, Bos taurus
ILVICLIAVMVIFIILVVSI

SEQ ID NO: 12843 - protein, 20 aa, Bos taurus
MLSGIGGFVLGLIFLGLGLI

SEQ ID NO: 12844 - protein, 22 aa, Bos taurus
LPLASSALTLLLGALTSLFLWY

SEQ ID NO: 12845 - protein, 22 aa, Bos taurus
PVMAFGLITISLCVAYIGYLHA

SEQ ID NO: 12846 - protein, 20 aa, Bos taurus
SLVLAVLLVVIAVLAFNYWS

SEQ ID NO: 12847 - protein, 16 aa, Bos taurus
GVSLLSLGTCLGLAWF

SEQ ID NO: 12848 - protein, 20 aa, Bos taurus
CLFLGILSIPPFANYLVFLL

SEQ ID NO: 12849 - protein, 20 aa, Bos taurus
IAVVITVVFLTLLSVVILIF

SEQ ID NO: 12850 - protein, 22 aa, Bos taurus
EAWNEATNVYLVVILVSFGLFM

SEQ ID NO: 12851 - protein, 22 aa, Bos taurus
YAPYVTFPVAFVVGAVGYHLEW

SEQ ID NO: 12852 - protein, 20 aa, Bos taurus
LSFALFLVLVLLVTSAIILL

SEQ ID NO: 12853 - protein, 20 aa, Bos taurus
VGLIIVLIISLALVSFVIFL

SEQ ID NO: 12854 - protein, 20 aa, Bos taurus
FPLLLYILAAKTLILCLAFA

SEQ ID NO: 12855 - protein, 20 aa, Bos taurus
AMLVTMFGWFTMVISYVVYY

SEQ ID NO: 12856 - protein, 20 aa, Bos taurus
VAMLVTMFGWFAMVITYVVY

SEQ ID NO: 12857 - protein, 20 aa, Bos taurus
IGLFLILLAEGVILGGVLLL

SEQ ID NO: 12858 - protein, 20 aa, Bos taurus
WYFWFLLMMGVLFCCGAGFF

SEQ ID NO: 12859 - protein, 19 aa, Bos taurus
ACYIMIGLTIIACFAVIAS

SEQ ID NO: 12860 - protein, 20 aa, Bos taurus
IIAILSVLLAVLLAALLALL

SEQ ID NO: 12861 - protein, 20 aa, Bos taurus
IGALIGLGIAALVLLAFVIS

SEQ ID NO: 12862 - protein, 20 aa, Bos taurus
ALGLILIGYMLITVIFISIH

SEQ ID NO: 12863 - protein, 18 aa, Bos taurus
SIRNFLIYVALLRVTPFI

SEQ ID NO: 12864 - protein, 17 aa, Bos taurus
VFRMTIYLTFPVAMFWI

SEQ ID NO: 12865 - protein, 20 aa, Bos taurus
WALGWTCGGLLFLITSICLF

SEQ ID NO: 12866 - protein, 16 aa, Bos taurus
WLGSAPWWWLGTATWW

SEQ ID NO: 12867 - protein, 20 aa, Bos taurus
VLIPVHLITSAVWFGTFYYA

SEQ ID NO: 12868 - protein, 20 aa, Bos taurus
AVAFVGGLVGGPPGLAVGGA

SEQ ID NO: 12869 - protein, 20 aa, Bos taurus
TRLHAAVAIACIVMAFYVLF

SEQ ID NO: 12870 - protein, 20 aa, Bos taurus
FIMVMGAMLLVYLHQAGWFP

SEQ ID NO: 12871 - protein, 20 aa, Bos taurus
IAVGIGVAGGVTGGVLVSIV

SEQ ID NO: 12872 - protein, 20 aa, Bos taurus
VSIGFGSMFFLKYLCLWLIA

SEQ ID NO: 12873 - protein, 20 aa, Bos taurus
ILACCLFLSVLVMLWLSCST

SEQ ID NO: 12874 - protein, 17 aa, Bos taurus
SPYVAVCCIVMAFSILF

SEQ ID NO: 12875 - protein, 20 aa, Bos taurus
GVVTVIVILIAIAALGALIL

SEQ ID NO: 12876 - protein, 20 aa, Bos taurus
VIVIFFWVMLWFLGLPAFGL

SEQ ID NO: 12877 - protein, 18 aa, Bos taurus
WVLALVFGLSLVYFLTST

SEQ ID NO: 12878 - protein, 20 aa, Bos taurus
ALLTLLLGATLGLLLYAQQE

SEQ ID NO: 12879 - protein, 20 aa, Bos taurus
PWWVVLPLSFSLMALVIWCF

SEQ ID NO: 12880 - protein, 20 aa, Bos taurus
LVLGFFLILFCGLCCLTAAC

SEQ ID NO: 12881 - protein, 22 aa, Bos taurus
FSTSMMLLTVYGGYLCSVRAYH

SEQ ID NO: 12882 - protein, 20 aa, Bos taurus
VVQIAVMCVLSLTVVFGIFF

SEQ ID NO: 12883 - protein, 17 aa, Bos taurus
LTACILLALALGMCCGQ

SEQ ID NO: 12884 - protein, 17 aa, Bos taurus
INQVLLFLLIVTLCGIL

SEQ ID NO: 12885 - protein, 20 aa, Bos taurus
AAFFLSLFACLLVVFVVSFI

SEQ ID NO: 12886 - protein, 20 aa, Bos taurus
LPFLFWFSVASLITLFHLFL

SEQ ID NO: 12887 - protein, 15 aa, Bos taurus
FAIRWGFIPLVIYLG

SEQ ID NO: 12888 - protein, 20 aa, Bos taurus
GISITMILMAWMVIAVILFL

SEQ ID NO: 12889 - protein, 20 aa, Bos taurus
WMQGLIAVAVFLVLVAIAFA

SEQ ID NO: 12890 - protein, 22 aa, Bos taurus
TLRYGVPMLLLIVGGSFGLREF

SEQ ID NO: 12891 - protein, 22 aa, Bos taurus
AFAVLLSMVLCTVMLFLLQLKF

SEQ ID NO: 12892 - protein, 20 aa, Bos taurus
ALPLGALYTAAAVAFVLYKC

SEQ ID NO: 12893 - protein, 20 aa, Bos taurus
LVPVGVGIAGALFILGALYS

SEQ ID NO: 12894 - protein, 20 aa, Bos taurus
EELEKELYQEAQECLTLLSQ

SEQ ID NO: 12895 - protein, 20 aa, Bos taurus
LLIIVIGTLITGYMVSCTCL

SEQ ID NO: 12896 - protein, 16 aa, Bos taurus
MLLLIQGLSLLLLFDH

SEQ ID NO: 12897 - protein, 20 aa, Bos taurus
IFVVMIFFRLLGYVLFYLQY

SEQ ID NO: 12898 - protein, 20 aa, Bos taurus
VLLWLVLLGLFVELEFGLAY

SEQ ID NO: 12899 - protein, 20 aa, Bos taurus
ILLLLGLIICINIGINMVTL

SEQ ID NO: 12900 - protein, 17 aa, Bos taurus
LGTSTCLTACWTALCCC

SEQ ID NO: 12901 - protein, 20 aa, Bos taurus
VGYPFYTYGSIIIIALIIWQ

SEQ ID NO: 12902 - protein, 20 aa, Bos taurus
TVVLPTLAVVVLLIVVFVYV

SEQ ID NO: 12903 - protein, 20 aa, Bos taurus
FVLASFALALLLPVFLAVAA

SEQ ID NO: 12904 - protein, 22 aa, Bos taurus
TLRIGGLVFAVVLFSVGILLIL

SEQ ID NO: 12905 - protein, 20 aa, Bos taurus
LLHAAMGVGSALALLSCSAL

SEQ ID NO: 12906 - protein, 19 aa, Bos taurus
SFLKGVMLGSIFCALITML

SEQ ID NO: 12907 - protein, 20 aa, Bos taurus
FRIFIALWNVFMMFCMIVLF

SEQ ID NO: 12908 - protein, 20 aa, Bos taurus
YVQVFSALIVIIAGAFVITI

SEQ ID NO: 12909 - protein, 22 aa, Bos taurus
LTSIMCASYAALIYLTVCVNAV

SEQ ID NO: 12910 - protein, 20 aa, Bos taurus
GPWLLALFVFVVCGSAIFQI

SEQ ID NO: 12911 - protein, 20 aa, Bos taurus
ATFLMLAAFLTIPLLGALVL

SEQ ID NO: 12912 - protein, 20 aa, Bos taurus
VQTVGMTLATILFLLGILII

SEQ ID NO: 12913 - protein, 20 aa, Bos taurus
GWIAAAVGWSLLFLTLILLC

SEQ ID NO: 12914 - protein, 20 aa, Bos taurus
GPVAFLTCLGLAAGLALLIY

SEQ ID NO: 12915 - protein, 20 aa, Bos taurus
VNVVLVMAYGSLVFVLLFIF

SEQ ID NO: 12916 - protein, 20 aa, Bos taurus
FAIFAVTFLLALVGAVLYLY

SEQ ID NO: 12917 - protein, 20 aa, Bos taurus
IVILVLAVALFLLVLHHNFL

SEQ ID NO: 12918 - protein, 20 aa, Bos taurus
AAGIPSLVATALLVALLLIL

SEQ ID NO: 12919 - protein, 22 aa, Bos taurus
LSCLLAMAYVSSVALAVASMAV

SEQ ID NO: 12920 - protein, 20 aa, Bos taurus
VVAFFSLALLLAPLVETLIL

SEQ ID NO: 12921 - protein, 20 aa, Bos taurus
AFIQLLPVLVIVIISVITQL

SEQ ID NO: 12922 - protein, 16 aa, Bos taurus
VVIVGGGVLGLSVAYW

SEQ ID NO: 12923 - protein, 20 aa, Bos taurus
LNFIFIPIVMGMIFTLFTIS

SEQ ID NO: 12924 - protein, 20 aa, Bos taurus
NMLLSVAIFLLLTVIYAYWA

SEQ ID NO: 12925 - protein, 20 aa, Bos taurus
VLIAVTLFVSGIAITVFVIF

SEQ ID NO: 12926 - protein, 20 aa, Bos taurus
ILAFSVLVVFTATVVLLLLI

SEQ ID NO: 12927 - protein, 20 aa, Bos taurus
AGAVTLGIGFFALASALWFL

SEQ ID NO: 12928 - protein, 20 aa, Bos taurus
LLLLVAFTLVAFLFHVLLAP

SEQ ID NO: 12929 - protein, 20 aa, Bos taurus
VLLLIFVIALLSLGIAYYVS

SEQ ID NO: 12930 - protein, 20 aa, Bos taurus
MWFVLTLLFTSLVCWQWGLF

SEQ ID NO: 12931 - protein, 20 aa, Bos taurus
AALGFIGLLFAVLGIIMIVM

SEQ ID NO: 12932 - protein, 20 aa, Bos taurus
ILSILGFSCIIAVIALLALG

SEQ ID NO: 12933 - protein, 24 aa, Bos taurus
RWMLVIFCLAFVLSWLFFGCVFWL

SEQ ID NO: 12934 - protein, 20 aa, Bos taurus
VGVAGSGAGIGTVFGSLIIG

SEQ ID NO: 12935 - protein, 20 aa, Bos taurus
LFLILNIAIFFVMLAMQLTY

SEQ ID NO: 12936 - protein, 21 aa, Bos taurus
GLIAGAVIGAVLAVFGGILMP

SEQ ID NO: 12937 - protein, 20 aa, Bos taurus
VGVAGSGAGIGTVFGSLIIG

SEQ ID NO: 12938 - protein, 20 aa, Bos taurus
EVVPIASIAILLLTGFLLLV

SEQ ID NO: 12939 - protein, 20 aa, Bos taurus
FWAVLWLCTFGMMYWQFGQL

SEQ ID NO: 12940 - protein, 30 aa, Bos taurus
PIMEELLHFHDHTLMIVFLISSLVLYIISL

SEQ ID NO: 12941 - protein, 20 aa, Bos taurus
LAAVGGAVGAGLMGLAGGVV

SEQ ID NO: 12942 - protein, 20 aa, Bos taurus
CSVTFHVIAITCVVWSLYVL

SEQ ID NO: 12943 - protein, 20 aa, Bos taurus
VLPTFFIIGLIFIPIGIGIF

SEQ ID NO: 12944 - protein, 20 aa, Bos taurus
ILALASVFWSISYYSSPFAF

SEQ ID NO: 12945 - protein, 22 aa, Bos taurus
MWLPLLLGVLLWAALWLLRDRQ

SEQ ID NO: 12946 - protein, 20 aa, Bos taurus
FKMYFLWTALFWGGFLFYFL

SEQ ID NO: 12947 - protein, 20 aa, Bos taurus
LCCDVVCFLFITPLAAISGW

SEQ ID NO: 12948 - protein, 20 aa, Bos taurus
LWEEQGGLMGPFSFLLLVLL

SEQ ID NO: 12949 - protein, 20 aa, Bos taurus
VGVAGSGAGIGTVFGSLIIG

SEQ ID NO: 12950 - protein, 20 aa, Bos taurus
TVQLLILAYVIGWVFVWEKG

SEQ ID NO: 12951 - protein, 20 aa, Bos taurus
LAALPVAGALIGGVVGGPIG

SEQ ID NO: 12952 - protein, 22 aa, Bos taurus
ILFTASKSCAIMSTHIVACLLL

SEQ ID NO: 12953 - protein, 20 aa, Bos taurus
WLLSFLLFAQVCLGIIVFLI

SEQ ID NO: 12954 - protein, 18 aa, Bos taurus
VISVLQWVLSFLVLGVAC

SEQ ID NO: 12955 - protein, 20 aa, Bos taurus
MAFYNGWILFLAVLAIPVCA

SEQ ID NO: 12956 - protein, 20 aa, Bos taurus
LFGDMVCFLFITPLATISGW

SEQ ID NO: 12957 - protein, 20 aa, Bos taurus
VFTALLGAAAVSGLTALLLV

SEQ ID NO: 12958 - protein, 20 aa, Bos taurus
ISLRLTVLWGLGVLIRYCLL

SEQ ID NO: 12959 - protein, 20 aa, Bos taurus
FLALPIIMVVAFSMCIICLL

SEQ ID NO: 12960 - protein, 20 aa, Bos taurus
ALYCQLLSFLLTLALTEALV

SEQ ID NO: 12961 - protein, 24 aa, Bos taurus
RWNLFIFILTYTVAWLFMASMWWV

SEQ ID NO: 12962 - protein, 20 aa, Bos taurus
LWILFTLTAVALIFWQCALL

SEQ ID NO: 12963 - protein, 24 aa, Bos taurus
RFNLLVFTMVYTITWLFFGFIWWL

SEQ ID NO: 12964 - protein, 20 aa, Bos taurus
VLVLIAVLPVLLLQITVGLV

SEQ ID NO: 12965 - protein, 20 aa, Bos taurus
LGVAMVVGAVITYYILGTTV

SEQ ID NO: 12966 - protein, 20 aa, Bos taurus
LPVVIFTTFWGLIGIAGPWF

SEQ ID NO: 12967 - protein, 20 aa, Bos taurus
CVIPFAVVVLITGTVVTAVA

SEQ ID NO: 12968 - protein, 20 aa, Bos taurus
WLSVLECVEVFMEMGATKVW

SEQ ID NO: 12969 - protein, 20 aa, Bos taurus
LYDFFLACHPLMPIYFAAVI

SEQ ID NO: 12970 - protein, 20 aa, Bos taurus
SIFNFCAIPQVMAIATLAAC

SEQ ID NO: 12971 - protein, 20 aa, Bos taurus
CCAYITIGMMCIFIGIGLTV

SEQ ID NO: 12972 - protein, 20 aa, Bos taurus
HLLLLVLLIILILPFIYPGV

SEQ ID NO: 12973 - protein, 20 aa, Bos taurus
ACGIVLSAWGVIMLIMLGIF

SEQ ID NO: 12974 - protein, 20 aa, Bos taurus
YLMSTHFWGPVANWGLPIAA

SEQ ID NO: 12975 - protein, 24 aa, Bos taurus
MLLIFSLAFLASWLLFGVIFWVIA

SEQ ID NO: 12976 - protein, 20 aa, Bos taurus
TLFVVIFITYVIAGVTGFIG

SEQ ID NO: 12977 - protein, 20 aa, Bos taurus
WQTPLCSLLTCLGLNVLFLT

SEQ ID NO: 12978 - protein, 20 aa, Bos taurus
GGATVTIVSGLLMLLLFLSE

SEQ ID NO: 12979 - protein, 21 aa, Bos taurus
TYATTSIGGAAGLVVSAYSVA

SEQ ID NO: 12980 - protein, 20 aa, Bos taurus
TLKTLLFFTALMITVPIGLY

SEQ ID NO: 12981 - protein, 20 aa, Bos taurus
FLAAYPFVNMAWEGWFLVQQ

SEQ ID NO: 12982 - protein, 20 aa, Bos taurus
GFQLPWTRLLLLVLVFAIGF

SEQ ID NO: 12983 - protein, 20 aa, Bos taurus
GLTIFSMLCCFWPLGIAAFY

SEQ ID NO: 12984 - protein, 20 aa, Bos taurus
LSLASLLFFTVLLSDHLWFC

SEQ ID NO: 12985 - protein, 20 aa, Bos taurus
LLLLALVLGTILLPAVTMLG

SEQ ID NO: 12986 - protein, 20 aa, Bos taurus
VLGHVNNILISAVLPTAFRV

SEQ ID NO: 12987 - protein, 20 aa, Bos taurus
AALFLLLATALTYIPPLLVA

SEQ ID NO: 12988 - protein, 23 aa, Bos taurus
GIGYPAGFPMGYAAAAPAYSPNM

SEQ ID NO: 12989 - protein, 20 aa, Bos taurus
VPLIVMSVFWGIVGFLVPWF

SEQ ID NO: 12990 - protein, 17 aa, Bos taurus
WLYYQYQIISCCAVLEP

SEQ ID NO: 12991 - protein, 21 aa, Bos taurus
ICLTLASLNRVIYFICDTVLF

SEQ ID NO: 12992 - protein, 20 aa, Bos taurus
IWLSYVLAIGLLHVVLLSIP

SEQ ID NO: 12993 - protein, 20 aa, Bos taurus
AFTLYSLLQAALLCVNAIAV

SEQ ID NO: 12994 - protein, 20 aa, Bos taurus
VFSVLLIFIYLLLMAVAVFL

SEQ ID NO: 12995 - protein, 20 aa, Bos taurus
MVSWIISRLVVLIFGTLYPA

SEQ ID NO: 12996 - protein, 20 aa, Bos taurus
GYMLSSLTCGMAPVTSIMEG

SEQ ID NO: 12997 - protein, 22 aa, Bos taurus
LGMIFSMCGLMLKLKWCAWVAV

SEQ ID NO: 12998 - protein, 20 aa, Bos taurus
ASRGVVGIFLLSALPLLCLE

SEQ ID NO: 12999 - protein, 18 aa, Bos taurus
SLWKGLVGIGLFALAHAA

SEQ ID NO: 13000 - protein, 20 aa, Bos taurus
LLSLYLLFGYGAPLLCSLIG

SEQ ID NO: 13001 - protein, 20 aa, Bos taurus
VFPHLTVVLLAIGMFFTAWF

SEQ ID NO: 13002 - protein, 16 aa, Bos taurus
MLQTTFLDSINTLPTT

SEQ ID NO: 13003 - protein, 18 aa, Bos taurus
FLPKIGVITVSGLAGFIS

SEQ ID NO: 13004 - protein, 20 aa, Bos taurus
LIVFISVCTALLAEGITWVL

SEQ ID NO: 13005 - protein, 20 aa, Bos taurus
MLLIVVSVCTATGAWNWLID

SEQ ID NO: 13006 - protein, 20 aa, Bos taurus
LWALALLGSTWAALTMGALG

SEQ ID NO: 13007 - protein, 20 aa, Bos taurus
MVSWMICRLVVLVFGMLYPA

SEQ ID NO: 13008 - protein, 25 aa, Bos taurus
NGILRGVYPGSPTSWLVVVMATAGS

SEQ ID NO: 13009 - protein, 20 aa, Bos taurus
VLFLIGAFLIIIGSLLLAGY

SEQ ID NO: 13010 - protein, 16 aa, Bos taurus
MSWFYYQYLLVTALYM

SEQ ID NO: 13011 - protein, 20 aa, Bos taurus
LLQFGVFFCTILLLLWVSVF

SEQ ID NO: 13012 - protein, 20 aa, Bos taurus
NWSLIGSVLGALIGVAGSTY

SEQ ID NO: 13013 - protein, 20 aa, Bos taurus
LVVLQQMFFGVIICALATLA

SEQ ID NO: 13014 - protein, 20 aa, Bos taurus
SLQALPATVLGALGALGSEF

SEQ ID NO: 13015 - protein, 20 aa, Bos taurus
FIYCLVLLAFANGLNQLYFY

SEQ ID NO: 13016 - protein, 20 aa, Bos taurus
LVIVVWSVAALIWPVPIIAG

SEQ ID NO: 13017 - protein, 20 aa, Bos taurus
GLAGTGASLWFVAGLGLLYA

SEQ ID NO: 13018 - protein, 20 aa, Bos taurus
CLLLTLLIHACGAVVAWCRL

SEQ ID NO: 13019 - protein, 16 aa, Bos taurus
TTVLAGTACLFTPLAL

SEQ ID NO: 13020 - protein, 20 aa, Bos taurus
GKTYQAHSFVSAFIGGLLVF

SEQ ID NO: 13021 - protein, 20 aa, Bos taurus
FFAVLGLFCAGQGVFWASLA

SEQ ID NO: 13022 - protein, 20 aa, Bos taurus
LISLAFLPYIFAQNNVIFGS

SEQ ID NO: 13023 - protein, 20 aa, Bos taurus
CIFLGTVLGGVYILGKYGQK

SEQ ID NO: 13024 - protein, 20 aa, Bos taurus
MPVYVFLGAIPIIVIPYFLV

SEQ ID NO: 13025 - protein, 20 aa, Bos taurus
LVVALVSVFLVFGFMFTVSG

SEQ ID NO: 13026 - protein, 22 aa, Bos taurus
SLPMLTVLIPLVSLAGLFYSAS

SEQ ID NO: 13027 - protein, 20 aa, Bos taurus
PALWFSHSMFMGFYLLSFLL

SEQ ID NO: 13028 - protein, 20 aa, Bos taurus
VVLASFLLLLLGLVLILTGV

SEQ ID NO: 13029 - protein, 20 aa, Bos taurus
LLLLILPYFTIFLLYLTIIF

SEQ ID NO: 13030 - protein, 20 aa, Bos taurus
ALGVGLLHIVLLSIPFFSVP

SEQ ID NO: 13031 - protein, 20 aa, Bos taurus
MGWIGVGLYLLASAAAFYYV

SEQ ID NO: 13032 - protein, 20 aa, Bos taurus
PLWAGLLLASGTTLFCTTFY

SEQ ID NO: 13033 - protein, 20 aa, Bos taurus
LGLVALSLIIFTYYTAWVIL

SEQ ID NO: 13034 - protein, 19 aa, Bos taurus
YLASTHFWGPVANWGLPLA

SEQ ID NO: 13035 - protein, 20 aa, Bos taurus
ILSGFFAIGLFCLGMGIILL

SEQ ID NO: 13036 - protein, 20 aa, Bos taurus
SLLTVFLAVVCITALMLPTL

SEQ ID NO: 13037 - protein, 20 aa, Bos taurus
YTGHYFITTLLYSFFLGCFG

SEQ ID NO: 13038 - protein, 20 aa, Bos taurus
VVLWTLVCLPVVFLLSFVVS

SEQ ID NO: 13039 - protein, 20 aa, Bos taurus
LLLPQNQFAMFLYCFIFIHI

SEQ ID NO: 13040 - protein, 19 aa, Bos taurus
YPANSIVVVGGCPVCRVGV

SEQ ID NO: 13041 - protein, 20 aa, Bos taurus
LPLTLIYCFAFLTEMTHFIL

SEQ ID NO: 13042 - protein, 20 aa, Bos taurus
ILNVTLIVSGVVFFVNVGMV

SEQ ID NO: 13043 - protein, 20 aa, Bos taurus
GGIFSVTKGAVGATIGGVAW

SEQ ID NO: 13044 - protein, 20 aa, Bos taurus
AALFFATVVIVLGLPLWWKT

SEQ ID NO: 13045 - protein, 20 aa, Bos taurus
SFLLFLLMGTVSVAFLLLPL

SEQ ID NO: 13046 - protein, 22 aa, Bos taurus
AEQMFQGIILFSAIVGFIYGYL

SEQ ID NO: 13047 - protein, 20 aa, Bos taurus
YVLLSILLCLLASGLVVFFL

SEQ ID NO: 13048 - protein, 20 aa, Bos taurus
FYRSLLFWKNLLAMAALLVM

SEQ ID NO: 13049 - protein, 20 aa, Bos taurus
IWLAYIILVGLLHVVLLSIP

SEQ ID NO: 13050 - protein, 20 aa, Bos taurus
ALTVAALPPGLYCYSQGLMP

SEQ ID NO: 13051 - protein, 20 aa, Bos taurus
IIIDYLSLSSIWNYLQATLL

SEQ ID NO: 13052 - protein, 18 aa, Bos taurus
GVSTFVTGTGATFGLQML

SEQ ID NO: 13053 - protein, 20 aa, Bos taurus
AFAVVFYVVVWANIYSTSQM

SEQ ID NO: 13054 - protein, 20 aa, Bos taurus
LMLALLTNFTLATLLVIIAF

SEQ ID NO: 13055 - protein, 20 aa, Bos taurus
MSMVYMNIMMAFTVSLVGLL

SEQ ID NO: 13056 - protein, 29 aa, Bos taurus
LPMAMSICHRGTGIALSAGVSLFGLSALL

SEQ ID NO: 13057 - protein, 20 aa, Bos taurus
ILLAALSVLSACQQSYFAMQ

SEQ ID NO: 13058 - protein, 20 aa, Bos taurus
WVTVFLTEYAGPLFIYLLFY

SEQ ID NO: 13059 - protein, 20 aa, Bos taurus
ALPAAGFLYWVGASTVAYLA

SEQ ID NO: 13060 - protein, 20 aa, Bos taurus
FGSPRLACYTLGGAILLLNV

SEQ ID NO: 13061 - protein, 20 aa, Bos taurus
WCCVVLCFSLIAHNMAHLLL

SEQ ID NO: 13062 - protein, 20 aa, Bos taurus
WTVTAMVLAQLLACWLAQGL

SEQ ID NO: 13063 - protein, 20 aa, Bos taurus
MYYHWLTVIAVPVFYNWCLL

SEQ ID NO: 13064 - protein, 20 aa, Bos taurus
VTILFSALACLLVLALAWVS

SEQ ID NO: 13065 - protein, 20 aa, Bos taurus
VLVNNAGVGLVGPLEGLSLA

SEQ ID NO: 13066 - protein, 20 aa, Bos taurus
FWAVLMLLGVVAVVTASFLI

SEQ ID NO: 13067 - protein, 17 aa, Bos taurus
GTSLALSSLLSLLLFAG

SEQ ID NO: 13068 - protein, 20 aa, Bos taurus
VLVAVVVSLALIATLVYALF

SEQ ID NO: 13069 - protein, 20 aa, Bos taurus
YSVATQIVMGGVSGWCAGFL

SEQ ID NO: 13070 - protein, 20 aa, Bos taurus
VAFAVWVLVLYCQAPVLYFV

SEQ ID NO: 13071 - protein, 20 aa, Bos taurus
TFTLAYLVFAVCFVFTPTEF

SEQ ID NO: 13072 - protein, 20 aa, Bos taurus
PGQLRYVFIHNAIPFIGFGF

SEQ ID NO: 13073 - protein, 20 aa, Bos taurus
MIQALAMTVAEIPVFLYTTF

SEQ ID NO: 13074 - protein, 20 aa, Bos taurus
VFMVLLCLLCIVALVATELW

SEQ ID NO: 13075 - protein, 20 aa, Bos taurus
WWVQVGLLAVPLLAAYLHIP

SEQ ID NO: 13076 - protein, 20 aa, Bos taurus
AVATFLYAEIGLILIFCLPF

SEQ ID NO: 13077 - protein, 20 aa, Bos taurus
WAWLLVLSFVFGCNVLRILL

SEQ ID NO: 13078 - protein, 20 aa, Bos taurus
PWLVGLAGFHVLCLLLTCFS

SEQ ID NO: 13079 - protein, 20 aa, Bos taurus
VSNTFTALILSPLLLLFALW

SEQ ID NO: 13080 - protein, 20 aa, Bos taurus
KRCWDIALGPLKQIPMNLFI

SEQ ID NO: 13081 - protein, 20 aa, Bos taurus
GFVILTGAASFLMVTHLAIN

SEQ ID NO: 13082 - protein, 20 aa, Bos taurus
VFVFSLLDCCALIFLSVYFI

SEQ ID NO: 13083 - protein, 19 aa, Bos taurus
LSTHMTAGAMAGILEHSVM

SEQ ID NO: 13084 - protein, 23 aa, Bos taurus
WVVLPIVIITFFVGMIRHYVSIL

SEQ ID NO: 13085 - protein, 15 aa, Bos taurus
CRTSVSALSGATAGI

SEQ ID NO: 13086 - protein, 20 aa, Bos taurus
ALACVGGFVLGGAFGVFTAG

SEQ ID NO: 13087 - protein, 20 aa, Bos taurus
MLALLLTAALIFFAIWHIIA

SEQ ID NO: 13088 - protein, 20 aa, Bos taurus
LLYILLTGALQFGYCLLVGT

SEQ ID NO: 13089 - protein, 20 aa, Bos taurus
YSVATQLLIGGVTGWCTGFI

SEQ ID NO: 13090 - protein, 21 aa, Bos taurus
LHWTGERVVSVLLLGLIPAAY

SEQ ID NO: 13091 - protein, 20 aa, Bos taurus
AGFWWLIELLVLVGEYVETC

SEQ ID NO: 13092 - protein, 20 aa, Bos taurus
VLLGSGLTILSQPLMYVKVL

SEQ ID NO: 13093 - protein, 20 aa, Bos taurus
LVVGSLTSLLILVTLISAFV

SEQ ID NO: 13094 - protein, 20 aa, Bos taurus
CIVWSWTYLWTVWFFIVLFL

SEQ ID NO: 13095 - protein, 20 aa, Bos taurus
FELAFFTIGGCCMTGAAFGA

SEQ ID NO: 13096 - protein, 22 aa, Bos taurus
FQGRALLVTNTLGCGVLMAAGD

SEQ ID NO: 13097 - protein, 20 aa, Bos taurus
AVRWVVTLGLSFIYMIRVYL

SEQ ID NO: 13098 - protein, 20 aa, Bos taurus
AGVFVLALLWVSVLLLCALL

SEQ ID NO: 13099 - protein, 20 aa, Bos taurus
MDLIGFGYAALVTFGSILGY

SEQ ID NO: 13100 - protein, 20 aa, Bos taurus
IAQVLASELSLLAFILLVVM

SEQ ID NO: 13101 - protein, 20 aa, Bos taurus
GWASLAARGLGTLLFQGWAL

SEQ ID NO: 13102 - protein, 20 aa, Bos taurus
AFLSWFRNGLLASGIGVISF

SEQ ID NO: 13103 - protein, 20 aa, Bos taurus
AAIGGALAVAAVPAVLGAVG

SEQ ID NO: 13104 - protein, 20 aa, Bos taurus
VVAGVVVLILALVLAWLSTY

SEQ ID NO: 13105 - protein, 20 aa, Bos taurus
CGGAFTMGVIGGGVFQAIKG

SEQ ID NO: 13106 - protein, 20 aa, Bos taurus
VYALVVVSYFLITGGIIYDV

SEQ ID NO: 13107 - protein, 20 aa, Bos taurus
ILCSLLFAILLACLLAITYL

SEQ ID NO: 13108 - protein, 20 aa, Bos taurus
FAIASLEQTAYFIGIFAFLW

SEQ ID NO: 13109 - protein, 20 aa, Bos taurus
FYLRIILGANAIYCLVTLVV

SEQ ID NO: 13110 - protein, 20 aa, Bos taurus
MAATLGQVLALVLVAALWGG

SEQ ID NO: 13111 - protein, 20 aa, Bos taurus
LFWVTIIILSFGYYTWVIFW

SEQ ID NO: 13112 - protein, 20 aa, Bos taurus
LVLAVSQLWLAVAVVPFAVS

SEQ ID NO: 13113 - protein, 20 aa, Bos taurus
FGEIILAGFLASVIDIDHFL

SEQ ID NO: 13114 - protein, 24 aa, Bos taurus
PLYFIVNVIIPCLLFSFLTGLVFY

SEQ ID NO: 13115 - protein, 24 aa, Bos taurus
PLFYVINIIVPCVLISGLVLLAYF

SEQ ID NO: 13116 - protein, 25 aa, Bos taurus
LVGAPFASLVATGLCFFGVALFCGC

SEQ ID NO: 13117 - protein, 24 aa, Bos taurus
PLFYLVNVIAPCILITLLAIFVFY

SEQ ID NO: 13118 - protein, 24 aa, Bos taurus
PLFYVINILVPCVLISFMINLVFY

SEQ ID NO: 13119 - protein, 21 aa, Bos taurus
YFVIQTYLPCIMTVILSQVSF

SEQ ID NO: 13120 - protein, 21 aa, Bos taurus
FILQTYMPSTLITILSWVSFW

SEQ ID NO: 13121 - protein, 20 aa, Bos taurus
IGYFILQTYMPSILITILSW

SEQ ID NO: 13122 - protein, 24 aa, Bos taurus
PLFYVINIIAPCVLISSVAILIYF

SEQ ID NO: 13123 - protein, 22 aa, Bos taurus
GLWLMNWFSVLAGIIIFGLGLF

SEQ ID NO: 13124 - protein, 20 aa, Bos taurus
VWLSVLFIFRILLLGTAVES

SEQ ID NO: 13125 - protein, 21 aa, Bos taurus
FMIQTYIPCIMTVILSQVSFW

SEQ ID NO: 13126 - protein, 20 aa, Bos taurus
FMGGGLFCAWVGTILLVVAT

SEQ ID NO: 13127 - protein, 23 aa, Bos taurus
LGFVKVLQWVFAIFAFATCGSYS

SEQ ID NO: 13128 - protein, 22 aa, Bos taurus
YFTIQTYIPCTLIVVLSWVSFW

SEQ ID NO: 13129 - protein, 20 aa, Bos taurus
LLFGFNFIFWLAGIAVLSVG

SEQ ID NO: 13130 - protein, 20 aa, Bos taurus
VVVGLLVMGNIIILLSGLAL

SEQ ID NO: 13131 - protein, 20 aa, Bos taurus
IFGNVIIGMCSIALMAECIF

SEQ ID NO: 13132 - protein, 20 aa, Bos taurus
VIGKVWLTVLFIFRILVLGA

SEQ ID NO: 13133 - protein, 23 aa, Bos taurus
GLWLLSWLLVLVGGLTLLCSGHL

SEQ ID NO: 13134 - protein, 24 aa, Bos taurus
LYYGLNLLIPCVLISALALLVFLL

SEQ ID NO: 13135 - protein, 21 aa, Bos taurus
YLIQMYIPSLLIVILSWISFW

SEQ ID NO: 13136 - protein, 24 aa, Bos taurus
PLFYTINLIIPCLLISFLTVLVFY

SEQ ID NO: 13137 - protein, 21 aa, Bos taurus
FVIQTYLPCIMTVILSQVSFW

SEQ ID NO: 13138 - protein, 20 aa, Bos taurus
IFFFLLQTYFPATLMVMLSW

SEQ ID NO: 13139 - protein, 20 aa, Bos taurus
WCFGFLVLGYLLYLVFGAVV

SEQ ID NO: 13140 - protein, 20 aa, Bos taurus
GWVPVLFITFVVVWSYYAYV

SEQ ID NO: 13141 - protein, 20 aa, Bos taurus
IIALGVIAICSAMAMIDSVL

SEQ ID NO: 13142 - protein, 20 aa, Bos taurus
NISFAGCGFLGVYHIGVASC

SEQ ID NO: 13143 - protein, 16 aa, Bos taurus
AQKAALVLLSACLVAL

SEQ ID NO: 13144 - protein, 20 aa, Bos taurus
LLASVTLLGVLLQAYFSLQV

SEQ ID NO: 13145 - protein, 20 aa, Bos taurus
MLVLLAFIIVFHITSAALLL

SEQ ID NO: 13146 - protein, 22 aa, Bos taurus
MLIGEIFELMQFLFVVAFTTFL

SEQ ID NO: 13147 - protein, 20 aa, Bos taurus
LLFVFNFVFWLAGGVILGVA

SEQ ID NO: 13148 - protein, 20 aa, Bos taurus
LMKLLEISGHGIPWLLGTLY

SEQ ID NO: 13149 - protein, 20 aa, Bos taurus
GTSLAVLGWLCTIVCCALPM

SEQ ID NO: 13150 - protein, 28 aa, Bos taurus
LPAFLLCSALLVIKMYVVAVITGQVRLR

SEQ ID NO: 13151 - protein, 21 aa, Bos taurus
YMMGVYAPTLLIVVLSWLSFW

SEQ ID NO: 13152 - protein, 20 aa, Bos taurus
MGLIVFVWLYNFFLIPKIVL

SEQ ID NO: 13153 - protein, 20 aa, Bos taurus
MNLFKSNQLFFLLHLAHIIA

SEQ ID NO: 13154 - protein, 20 aa, Bos taurus
WWDVFTDYLSVAMLMIGVFG

SEQ ID NO: 13155 - protein, 20 aa, Bos taurus
YVPVSAAAIFLVGATTLFFA

SEQ ID NO: 13156 - protein, 22 aa, Bos taurus
VWLSVIFIFRIMVLVVAAESVW

SEQ ID NO: 13157 - protein, 21 aa, Bos taurus
YFVIQTYLPCIMTVILSQVSF

SEQ ID NO: 13158 - protein, 21 aa, Bos taurus
YFVIQTYLPCIMTVILSQVSF

SEQ ID NO: 13159 - protein, 22 aa, Bos taurus
ASFFAVMGASAAMVFSALGAAY

SEQ ID NO: 13160 - protein, 20 aa, Bos taurus
VQMLITTVGAFAAFSLMTIA

SEQ ID NO: 13161 - protein, 20 aa, Bos taurus
GGIPYASLIATILLYAGVAL

SEQ ID NO: 13162 - protein, 20 aa, Bos taurus
ILGLVLCLVGWVGLILACGL

SEQ ID NO: 13163 - protein, 20 aa, Bos taurus
VFLMSLLHLAAVYSLVLIPK

SEQ ID NO: 13164 - protein, 20 aa, Bos taurus
VSGPMVTVALSVVFLALLKW

SEQ ID NO: 13165 - protein, 20 aa, Bos taurus
NYSGTIALALLVSLVGGLLY

SEQ ID NO: 13166 - protein, 20 aa, Bos taurus
LEWFLGFYFLSHIPITLLMD

SEQ ID NO: 13167 - protein, 20 aa, Bos taurus
FAAAGIMVGSIYWTAVTYGA

SEQ ID NO: 13168 - protein, 20 aa, Bos taurus
GVVFVVLVIVLTSSIVAIAY

SEQ ID NO: 13169 - protein, 20 aa, Bos taurus
GIFYLTLFLILGTCTLFFAF

SEQ ID NO: 13170 - protein, 20 aa, Bos taurus
VVSNLLYYQTNYLVVAAMMI

SEQ ID NO: 13171 - protein, 20 aa, Bos taurus
FLCHLIFCYVFIVSGLIINT

SEQ ID NO: 13172 - protein, 23 aa, Bos taurus
LYFILETYVPSTFLVVLSWVSFW

SEQ ID NO: 13173 - protein, 20 aa, Bos taurus
GWVRLALCLAGLVLSLYALH

SEQ ID NO: 13174 - protein, 20 aa, Bos taurus
GIALAVLGWLGAILSCALPM

SEQ ID NO: 13175 - protein, 20 aa, Bos taurus
LLGFILAFLGWIGSIVSTAL

SEQ ID NO: 13176 - protein, 20 aa, Bos taurus
ILLGVWYLILNAVVLLILLS

SEQ ID NO: 13177 - protein, 20 aa, Bos taurus
LFLIIPCIGLSFLTVLVFYL

SEQ ID NO: 13178 - protein, 20 aa, Bos taurus
WRNIILMSLLHLGALYGITL

SEQ ID NO: 13179 - protein, 20 aa, Bos taurus
FLLYVLLLVFCACAVGLIAV

SEQ ID NO: 13180 - protein, 20 aa, Bos taurus
YSGAFVCLEIVFGGLVWILV

SEQ ID NO: 13181 - protein, 20 aa, Bos taurus
VASWVFSIAVFGPIVNEGYV

SEQ ID NO: 13182 - protein, 19 aa, Bos taurus
GKIWLTVLFIFRIMILVVA

SEQ ID NO: 13183 - protein, 20 aa, Bos taurus
LLLPALLGLRLVLLAAGGTG

SEQ ID NO: 13184 - protein, 20 aa, Bos taurus
MSLYFNTYFFPLWWVSSIMM

SEQ ID NO: 13185 - protein, 19 aa, Bos taurus
VGKIWLTVLFIFRILILGL

SEQ ID NO: 13186 - protein, 20 aa, Bos taurus
SLGALMLLQLVLGLLVWALI

SEQ ID NO: 13187 - protein, 18 aa, Bos taurus
LGMAYVSATTGAVATALG

SEQ ID NO: 13188 - protein, 20 aa, Bos taurus
VVVRAVCLVFALIVFSCIFG

SEQ ID NO: 13189 - protein, 20 aa, Bos taurus
MIGVFSHGFLAGCAVWNIVV

SEQ ID NO: 13190 - protein, 20 aa, Bos taurus
MVILSLYLAAFTLRLLLAGL

SEQ ID NO: 13191 - protein, 20 aa, Bos taurus
LVVFPLQMIYLVVKAAVGLV

SEQ ID NO: 13192 - protein, 18 aa, Bos taurus
VALLCILVGIVLALVAVV

SEQ ID NO: 13193 - protein, 16 aa, Bos taurus
GALWKFLLSGAMAGAV

SEQ ID NO: 13194 - protein, 20 aa, Bos taurus
ACVLTTAAVQLELLSPFQLY

SEQ ID NO: 13195 - protein, 20 aa, Bos taurus
QVVGFLLSILGLAGCIVATE

SEQ ID NO: 13196 - protein, 20 aa, Bos taurus
VIGKVWLTVLFIFRMLVLGT

SEQ ID NO: 13197 - protein, 21 aa, Bos taurus
IVLLAIVTLISVVQNGFFAHK

SEQ ID NO: 13198 - protein, 20 aa, Bos taurus
LYYLWMLNSVTLAVNLVGCL

SEQ ID NO: 13199 - protein, 20 aa, Bos taurus
FIFGFNVIFWFLGIAFLGIG

SEQ ID NO: 13200 - protein, 20 aa, Bos taurus
IGVLWAIFTICFAIINVVVF

SEQ ID NO: 13201 - protein, 20 aa, Bos taurus
LVGLVCIFLALCLDLGAVLS

SEQ ID NO: 13202 - protein, 20 aa, Bos taurus
LVIYSTVFWLIGGLVLSVGI

SEQ ID NO: 13203 - protein, 15 aa, Bos taurus
VFVFLGLILYCVATS

SEQ ID NO: 13204 - protein, 20 aa, Bos taurus
LLYALNLLFWLMSISVLAVS

SEQ ID NO: 13205 - protein, 20 aa, Bos taurus
VWLTVLVVFRIVLTAVGGES

SEQ ID NO: 13206 - protein, 22 aa, Bos taurus
IWLTVLIVFRIVLTAVGGESIY

SEQ ID NO: 13207 - protein, 20 aa, Bos taurus
VGLSLIPLSLVCIVANALLL

SEQ ID NO: 13208 - protein, 22 aa, Bos taurus
LVAVEIFGFFLTAVGLLMLGVT

SEQ ID NO: 13209 - protein, 20 aa, Bos taurus
LLTSSLGLVSLLVAVSTNFW

SEQ ID NO: 13210 - protein, 20 aa, Bos taurus
FGIFFILFGMLLYFDSVLLA

SEQ ID NO: 13211 - protein, 20 aa, Bos taurus
LIYVHLVIWLLLVAKMSVGH

SEQ ID NO: 13212 - protein, 20 aa, Bos taurus
ILFFLNGWYYATYFLLELFI

SEQ ID NO: 13213 - protein, 20 aa, Bos taurus
TFLYLKFLVVWALVLLADFV

SEQ ID NO: 13214 - protein, 20 aa, Bos taurus
IGMGLTGFGVFFLFFGMILF

SEQ ID NO: 13215 - protein, 20 aa, Bos taurus
VIVLRALAFLACAFLLTTAL

SEQ ID NO: 13216 - protein, 20 aa, Bos taurus
LLGFSMALLGWVGLVACTAI

SEQ ID NO: 13217 - protein, 20 aa, Bos taurus
VATCLQVVGFVTSFVGWIGI

SEQ ID NO: 13218 - protein, 20 aa, Bos taurus
LVALSFSGAIGLTFLMLGCA

SEQ ID NO: 13219 - protein, 20 aa, Bos taurus
LLFFFNMLFWVISMVMVAVG

SEQ ID NO: 13220 - protein, 20 aa, Bos taurus
VLNMLSLSLSTASLLSNYWF

SEQ ID NO: 13221 - protein, 20 aa, Bos taurus
LLFTFNCCFWLAGLAVMAVG

SEQ ID NO: 13222 - protein, 20 aa, Bos taurus
LVPLHWLGFGYAALVASGGI

SEQ ID NO: 13223 - protein, 19 aa, Bos taurus
GRIWLSVVFVFRVLVYVVA

SEQ ID NO: 13224 - protein, 20 aa, Bos taurus
VLFFFNLIFWFCGCCILGLG

SEQ ID NO: 13225 - protein, 20 aa, Bos taurus
FLFGFNIVFWVLGALFLAIG

SEQ ID NO: 13226 - protein, 20 aa, Bos taurus
WMCSTLALLLNFLACLASFC

SEQ ID NO: 13227 - protein, 20 aa, Bos taurus
AAGGVAAVVTWLLGEPALWL

SEQ ID NO: 13228 - protein, 20 aa, Bos taurus
MASTASEIIAFMVSISGWVL

SEQ ID NO: 13229 - protein, 20 aa, Bos taurus
TVTVVALSVALGLFFVFMGT

SEQ ID NO: 13230 - protein, 22 aa, Bos taurus
VWVTVLFVFRVMILVVAAQEVW

SEQ ID NO: 13231 - protein, 23 aa, Bos taurus
NEVFMAFASYTTIVLSKMNFMST

SEQ ID NO: 13232 - protein, 16 aa, Bos taurus
SLFLCYLLLYTCGCCE

SEQ ID NO: 13233 - protein, 20 aa, Bos taurus
LVGYVLGLLGLLGTVIAMLL

SEQ ID NO: 13234 - protein, 22 aa, Bos taurus
TMIGRILLTVVVIFRILIVAIV

SEQ ID NO: 13235 - protein, 20 aa, Bos taurus
INLIIPCVLITSLAILVFYL

SEQ ID NO: 13236 - skipped

SEQ ID NO: 13237 - protein, 29 aa, Bos taurus
LLLLLGIIVLHVAVLVLLFVSTIVSQWMV

SEQ ID NO: 13238 - protein, 20 aa, Bos taurus
LLQYVACFFAFFSAGFLVVA

SEQ ID NO: 13239 - protein, 20 aa, Bos taurus
LLCLSGTYYALYFLATLLLL

SEQ ID NO: 13240 - protein, 20 aa, Bos taurus
GVDCAILALSLLALPPGFLC

SEQ ID NO: 13241 - protein, 20 aa, Bos taurus
SVVVKALCAAVLFLYLLSFA

SEQ ID NO: 13242 - protein, 20 aa, Bos taurus
YSLVLSLQFLLLSYDLFVNS

SEQ ID NO: 13243 - protein, 22 aa, Bos taurus
SGRCTLIFICGMQLVCVLERQI

SEQ ID NO: 13244 - protein, 20 aa, Bos taurus
LGAIQILIGLTHIFTAINPS

SEQ ID NO: 13245 - protein, 20 aa, Bos taurus
VVATAVLVALVSLVLNNAAA

SEQ ID NO: 13246 - protein, 20 aa, Bos taurus
VLSFLCGIASVAGLFAGTLL

SEQ ID NO: 13247 - protein, 20 aa, Bos taurus
LLFIFNFFFWVGGAAVMAVG

SEQ ID NO: 13248 - protein, 20 aa, Bos taurus
VWQFVSAVLFSGIAIMALAF

SEQ ID NO: 13249 - protein, 20 aa, Bos taurus
LPGLLIVAEIVLGLLVWTLI

SEQ ID NO: 13250 - protein, 20 aa, Bos taurus
LLILSQIVLMQTVYYGSLGL

SEQ ID NO: 13251 - protein, 16 aa, Bos taurus
SFIALGVIGLLALYLV

SEQ ID NO: 13252 - protein, 19 aa, Bos taurus
PVASFFHLFFRVSAIIVYL

SEQ ID NO: 13253 - protein, 20 aa, Bos taurus
VMIFNGLVALGTVGSQELFT

SEQ ID NO: 13254 - protein, 20 aa, Bos taurus
LYYQTNYLICFGLGLALAGY

SEQ ID NO: 13255 - protein, 20 aa, Bos taurus
FNLFFFVLGSLIFCFGIWIL

SEQ ID NO: 13256 - protein, 17 aa, Bos taurus
WPANVLLYAGFFSGGDA

SEQ ID NO: 13257 - protein, 20 aa, Bos taurus
VQVLTAGSLMGLGDVISQQL

SEQ ID NO: 13258 - protein, 23 aa, Bos taurus
CSMFIFNFVFWLCGAIILSVAIS

SEQ ID NO: 13259 - protein, 20 aa, Bos taurus
LYPVLTKAATSGILSALGNF

SEQ ID NO: 13260 - protein, 20 aa, Bos taurus
ITRIFAGVFSLIVFSSLLTD

SEQ ID NO: 13261 - protein, 20 aa, Bos taurus
VTALGILSLILNIMCAALNL

SEQ ID NO: 13262 - protein, 20 aa, Bos taurus
VVFMISVSAMAIAFLTLGYF

SEQ ID NO: 13263 - protein, 20 aa, Bos taurus
MTGIFCIFMWYLLLILYMGQ

SEQ ID NO: 13264 - protein, 20 aa, Bos taurus
LCALNVVYMLVGLLLIGVAA

SEQ ID NO: 13265 - protein, 20 aa, Bos taurus
MFFSSWTLVFLAVGIIIEEW

SEQ ID NO: 13266 - protein, 20 aa, Bos taurus
VLLIYTFIFWITGVILLAVG

SEQ ID NO: 13267 - protein, 20 aa, Bos taurus
NGSTYVGLNAALCGLIANSL

SEQ ID NO: 13268 - protein, 20 aa, Bos taurus
LISLSFGGAIGLMFLMLGCA

SEQ ID NO: 13269 - protein, 20 aa, Bos taurus
VGLALILVGHVNLLLGAVLH

SEQ ID NO: 13270 - protein, 20 aa, Bos taurus
SSALFFGNAFIVSAIPIWLY

SEQ ID NO: 13271 - protein, 20 aa, Bos taurus
WTTVFLAEYTGPLLIYLLFY

SEQ ID NO: 13272 - protein, 20 aa, Bos taurus
VVAGILFFTGWWIMIDAAVV

SEQ ID NO: 13273 - protein, 20 aa, Bos taurus
VLVFLNLIFWGAAGILCYVG

SEQ ID NO: 13274 - protein, 20 aa, Bos taurus
ILFNMLIFLCGAALLAVGIW

SEQ ID NO: 13275 - protein, 20 aa, Bos taurus
GFSLLVLLLLGVTLNAIPLI

SEQ ID NO: 13276 - protein, 20 aa, Bos taurus
LSSLLIPLALWSIIVNILLY

SEQ ID NO: 13277 - protein, 20 aa, Bos taurus
YTLVSLLLIGIAAWGIGFGL

SEQ ID NO: 13278 - protein, 20 aa, Bos taurus
VFVVIWWYMDEGLLAPQWLF

SEQ ID NO: 13279 - protein, 21 aa, Bos taurus
LLFIFEFVFGGLVWILVSSSH

SEQ ID NO: 13280 - protein, 20 aa, Bos taurus
LVLVVLGHVSFIAAALLHGT

SEQ ID NO: 13281 - protein, 20 aa, Bos taurus
FVFNFFIFLGGACLLGIGIW

SEQ ID NO: 13282 - protein, 20 aa, Bos taurus
IYRLWLFYCATLGVNLVACL

SEQ ID NO: 13283 - protein, 20 aa, Bos taurus
LLLVVSALHILILILLFVAT

SEQ ID NO: 13284 - protein, 20 aa, Bos taurus
TYQRHYRNVFHAFITIGKVD

SEQ ID NO: 13285 - protein, 20 aa, Bos taurus
IFFLFVIGAILLCVGVLLSI

SEQ ID NO: 13286 - protein, 20 aa, Bos taurus
LYAIHGYFCEVMFTAAWEFV

SEQ ID NO: 13287 - protein, 20 aa, Bos taurus
TIILGTWYMVVNLLMAILLT

SEQ ID NO: 13288 - protein, 20 aa, Bos taurus
GFLLFAEIILCLVILICFST

SEQ ID NO: 13289 - protein, 20 aa, Bos taurus
WVMQIVLGLLSGVLGGFLYI

SEQ ID NO: 13290 - protein, 20 aa, Bos taurus
LCFAVAVGLVAGCGAGGVAL

SEQ ID NO: 13291 - protein, 20 aa, Bos taurus
FWGVFNCLCAGAFGALAAAS

SEQ ID NO: 13292 - protein, 20 aa, Bos taurus
VLSGAWGMQMWVTFISGFVL

SEQ ID NO: 13293 - protein, 20 aa, Bos taurus
NIHSGFWILASIVVTYYVDF

SEQ ID NO: 13294 - protein, 20 aa, Bos taurus
AFFGLLLGHILAMEVLAWLM

SEQ ID NO: 13295 - protein, 20 aa, Bos taurus
PAGLAVFRFLFGLMMVLDIP

SEQ ID NO: 13296 - protein, 20 aa, Bos taurus
LVLLYSGVFVAFWACLLVVG

SEQ ID NO: 13297 - protein, 20 aa, Bos taurus
LVVGVFVVYVVHTCWVMYGI

SEQ ID NO: 13298 - protein, 20 aa, Bos taurus
LLRDWDLWGPLILCVTLALM

SEQ ID NO: 13299 - protein, 20 aa, Bos taurus
PKLFLIFLLGLTLFFCGDLL

SEQ ID NO: 13300 - protein, 20 aa, Bos taurus
LLASSFVFLNLLGQLTGCIL

SEQ ID NO: 13301 - protein, 20 aa, Bos taurus
SGFLMGLSVIGSVFNITGIA

SEQ ID NO: 13302 - protein, 20 aa, Bos taurus
MMLYIVFILSVIFVMGFVGF

SEQ ID NO: 13303 - protein, 20 aa, Bos taurus
VPAVGFTLLPSLGGFLGAQY

SEQ ID NO: 13304 - protein, 20 aa, Bos taurus
PTGGALLLLVLAALLGWSWL

SEQ ID NO: 13305 - protein, 22 aa, Bos taurus
WLTRIVLLRALAFVYFVAFLVA

SEQ ID NO: 13306 - protein, 20 aa, Bos taurus
IIPCFVFVEILLGELARAFF

SEQ ID NO: 13307 - protein, 20 aa, Bos taurus
LLLVAALAGLGLGLSLIFIA

SEQ ID NO: 13308 - protein, 20 aa, Bos taurus
IATTALAIYHVIMSVLLFIE

SEQ ID NO: 13309 - protein, 20 aa, Bos taurus
YLLALTIIVSIVHSVFEFLA

SEQ ID NO: 13310 - protein, 20 aa, Bos taurus
LGLGSYTPVGLIQNLLEFMH

SEQ ID NO: 13311 - protein, 20 aa, Bos taurus
LYIPTMAFITYVLLAGMALG

SEQ ID NO: 13312 - protein, 20 aa, Bos taurus
AFLVLLSIWLCVSTIGFGFV

SEQ ID NO: 13313 - protein, 20 aa, Bos taurus
FLVLFLLYLALVLLGFVMIC

SEQ ID NO: 13314 - protein, 20 aa, Bos taurus
TDLAGPMVFCLAFGATLLLA

SEQ ID NO: 13315 - protein, 17 aa, Bos taurus
ITGCMMTFYRTTPAVLF

SEQ ID NO: 13316 - protein, 20 aa, Bos taurus
VGAALILFPCLLYGAYAFLP

SEQ ID NO: 13317 - protein, 22 aa, Bos taurus
MIITGFMLQFYRTMPAVIFWQW

SEQ ID NO: 13318 - protein, 20 aa, Bos taurus
ILIVIFPVLAILLFWGQFGI

SEQ ID NO: 13319 - protein, 20 aa, Bos taurus
LTGPILFCMALGATLLLAGK

SEQ ID NO: 13320 - protein, 20 aa, Bos taurus
LSLGAKAALAAGTVFVSMIV

SEQ ID NO: 13321 - protein, 20 aa, Bos taurus
LVTVCCPLVAFLFCVLWSLL

SEQ ID NO: 13322 - protein, 20 aa, Bos taurus
VYVFLLFCSAYLYKQSFAIP

SEQ ID NO: 13323 - protein, 20 aa, Bos taurus
WNGGVFWFSLLLFYRVFIPV

SEQ ID NO: 13324 - protein, 20 aa, Bos taurus
LVRSSLSGTLLVVVKLSALL

SEQ ID NO: 13325 - protein, 20 aa, Bos taurus
AALLPFTAPTLFLSMLPVKS

SEQ ID NO: 13326 - protein, 20 aa, Bos taurus
MVGVTLANVLPVCLALLPPP

SEQ ID NO: 13327 - protein, 20 aa, Bos taurus
LESVVVLTLALLEILVALRH

SEQ ID NO: 13328 - protein, 20 aa, Bos taurus
MIAFFFIIIYLGPMVLMMIV

SEQ ID NO: 13329 - protein, 22 aa, Bos taurus
VQRSLVLFSVGVVLALVLNLLQ

SEQ ID NO: 13330 - protein, 20 aa, Bos taurus
LLCVTVISLCSLLGASVVPF

SEQ ID NO: 13331 - protein, 20 aa, Bos taurus
LFMYNLVQFLGFSWIFVNMT

SEQ ID NO: 13332 - protein, 20 aa, Bos taurus
DWIILILTFYTAILVPYNVS

SEQ ID NO: 13333 - protein, 20 aa, Bos taurus
GISIFVILVWLGMNVFLFVW

SEQ ID NO: 13334 - protein, 20 aa, Bos taurus
AVTAEFLAMLIFVLLSLGST

SEQ ID NO: 13335 - protein, 29 aa, Bos taurus
FLKDFLAGGVAAAISKTAVAPIERVKLLL

SEQ ID NO: 13336 - protein, 23 aa, Bos taurus
FWRAICAEFFASLFYVFFGLGAS

SEQ ID NO: 13337 - protein, 21 aa, Bos taurus
PTMAVKIFSAGVAACVADIIT

SEQ ID NO: 13338 - protein, 20 aa, Bos taurus
VAFSQLLGLIVVAMTGAWLG

SEQ ID NO: 13339 - protein, 18 aa, Bos taurus
KFLFGGLAGMGATVFVQP

SEQ ID NO: 13340 - protein, 29 aa, Bos taurus
FAKDFLAGGIAAAISKTAVAPIERVKLLL

SEQ ID NO: 13341 - protein, 24 aa, Bos taurus
FWRAVVAEFLAMILFIFISIGSAL

SEQ ID NO: 13342 - protein, 20 aa, Bos taurus
AVLAEFLATLLFVFFGLGSA

SEQ ID NO: 13343 - protein, 20 aa, Bos taurus
YYNWLFCITLPVMYNWTMII

SEQ ID NO: 13344 - protein, 21 aa, Bos taurus
PARGIAIVSVLVILISIVIFC

SEQ ID NO: 13345 - protein, 20 aa, Bos taurus
VYASFALCMFVAAAGAYIHV

SEQ ID NO: 13346 - protein, 16 aa, Bos taurus
WTYLVVLLISIPIGFL

SEQ ID NO: 13347 - protein, 18 aa, Bos taurus
ILWLFFVVLAWNWNCWLI

SEQ ID NO: 13348 - protein, 20 aa, Bos taurus
WVFVLLDVLCVLVAALPCAI

SEQ ID NO: 13349 - protein, 18 aa, Bos taurus
LVIYNVVMTAGWLVIAVG

SEQ ID NO: 13350 - protein, 20 aa, Bos taurus
VLLICLDLFCLFMAGLPFII

SEQ ID NO: 13351 - protein, 20 aa, Bos taurus
ITLPLALLFLIIRYFFELYV

SEQ ID NO: 13352 - protein, 20 aa, Bos taurus
SNLIWIVIMMVLTQFVAFYL

SEQ ID NO: 13353 - protein, 21 aa, Bos taurus
VLRELATYLLFLIVLCILTYG

SEQ ID NO: 13354 - protein, 20 aa, Bos taurus
IAQLIVTVFLGLVIGAIFYD

SEQ ID NO: 13355 - protein, 20 aa, Bos taurus
VFPHPQDTLMAVPLALALVV

SEQ ID NO: 13356 - protein, 29 aa, Bos taurus
FAKDFLAGGVAAAISKTAVAPIERVKLLL

SEQ ID NO: 13357 - protein, 20 aa, Bos taurus
GSPLISLLFWILICFSIAAL

SEQ ID NO: 13358 - protein, 20 aa, Bos taurus
FWSSISFNLAVLMNLLVAFF

SEQ ID NO: 13359 - protein, 20 aa, Bos taurus
LPWALAASMLAGSLLKELSP

SEQ ID NO: 13360 - protein, 20 aa, Bos taurus
VGWFYLSVLALCSLGSMCIL

SEQ ID NO: 13361 - protein, 20 aa, Bos taurus
FLLDALAYLECALGVVCYVL

SEQ ID NO: 13362 - protein, 20 aa, Bos taurus
ALGGPGPGLCCWVSVFSCLS

SEQ ID NO: 13363 - protein, 20 aa, Bos taurus
FIIHGASYFTFLLLLNLYSL

SEQ ID NO: 13364 - skipped

SEQ ID NO: 13365 - protein, 20 aa, Bos taurus
FITPVILGLPLVTLIVLFPS

SEQ ID NO: 13366 - protein, 22 aa, Bos taurus
FFILCGLGGIISCGTTHTALVP

SEQ ID NO: 13367 - protein, 20 aa, Bos taurus
ALLYHALVFLIVLGCLILAV

SEQ ID NO: 13368 - protein, 20 aa, Bos taurus
MVTCFIVGLLFPVFSVCYLI

SEQ ID NO: 13369 - protein, 19 aa, Bos taurus
YRWLFLIALPVLYNWCLLV

SEQ ID NO: 13370 - protein, 20 aa, Bos taurus
AECLGTLILVMFGCGSVAQV

SEQ ID NO: 13371 - protein, 20 aa, Bos taurus
LCTACAVCCVFMAGEVVGGY

SEQ ID NO: 13372 - protein, 20 aa, Bos taurus
LFIYYLIQFCGHSWIFTNMT

SEQ ID NO: 13373 - protein, 20 aa, Bos taurus
LLHLFAGGCGGTVGAIFTCP

SEQ ID NO: 13374 - skipped

SEQ ID NO: 13375 - protein, 29 aa, Bos taurus
FGKDLLAGGVAAAVSKTTVAPIERVKLLL

SEQ ID NO: 13376 - protein, 21 aa, Bos taurus
AAKILAIVSILFIVLSTIALS

SEQ ID NO: 13377 - protein, 20 aa, Bos taurus
ALVFYYVTGFFIAVSVIANV

SEQ ID NO: 13378 - protein, 20 aa, Bos taurus
VSGAAAHLVALGFTIFVAVL

SEQ ID NO: 13379 - protein, 15 aa, Bos taurus
RYWFAATVAVPLVGK

SEQ ID NO: 13380 - protein, 20 aa, Bos taurus
LWGSISFNLAVFINLAVALF

SEQ ID NO: 13381 - protein, 20 aa, Bos taurus
ILAGGSAGLVEICLMHPLDV

SEQ ID NO: 13382 - protein, 20 aa, Bos taurus
LFFFLCLNLSFAFVELLYGI

SEQ ID NO: 13383 - protein, 17 aa, Bos taurus
LLAGGVAGAVSRTSTAP

SEQ ID NO: 13384 - protein, 20 aa, Bos taurus
LWVSWFSIIVTLALAVAAFT

SEQ ID NO: 13385 - protein, 21 aa, Bos taurus
PTTSVKFLAAGTAACFADLLT

SEQ ID NO: 13386 - protein, 17 aa, Bos taurus
ILAGGLAGGIEICITFP

SEQ ID NO: 13387 - protein, 19 aa, Bos taurus
YWLRSFLAGGIAGCCAKTT

SEQ ID NO: 13388 - protein, 20 aa, Bos taurus
FKLYLTIILILISFTCRFLL

SEQ ID NO: 13389 - protein, 20 aa, Bos taurus
LINGGIAGLIGVTCVFPIDL

SEQ ID NO: 13390 - protein, 20 aa, Bos taurus
ALDFLAGCAGGVAGVLVGHP

SEQ ID NO: 13391 - protein, 20 aa, Bos taurus
IFGVISIIFVAVSIVNMALM

SEQ ID NO: 13392 - protein, 17 aa, Bos taurus
LVAGGGAGAVSRTCTAP

SEQ ID NO: 13393 - protein, 20 aa, Bos taurus
ILLFGAINLTCTGFLLMWCS

SEQ ID NO: 13394 - protein, 20 aa, Bos taurus
MVASGAGAVVTSLFMTPLDV

SEQ ID NO: 13395 - protein, 20 aa, Bos taurus
LYGSLATLLICLCSLLGLLL

SEQ ID NO: 13396 - protein, 21 aa, Bos taurus
PTATVKFLGAGTAACIADLIT

SEQ ID NO: 13397 - protein, 20 aa, Bos taurus
LSFLPSALVIWTAAAFIFSY

SEQ ID NO: 13398 - protein, 25 aa, Bos taurus
FLCGSISGTCSTLLFQPLDLLKTRL

SEQ ID NO: 13399 - protein, 20 aa, Bos taurus
LTIAAVLYLLFMIGELVGGY

SEQ ID NO: 13400 - protein, 20 aa, Bos taurus
MFLPLVFTVFTSAGLWIVYF

SEQ ID NO: 13401 - protein, 22 aa, Bos taurus
GLYLNLVLGNVNVTLLSNQAKF

SEQ ID NO: 13402 - protein, 20 aa, Bos taurus
GFTASLVAGGVAGVSVDLIL

SEQ ID NO: 13403 - protein, 20 aa, Bos taurus
PMCLAFWAIAGIWTVFSLAV

SEQ ID NO: 13404 - protein, 20 aa, Bos taurus
GWLLVPLHQLVSWGAAGAMV

SEQ ID NO: 13405 - protein, 20 aa, Bos taurus
MFASCTGAILTSLMVTPFDV

SEQ ID NO: 13406 - protein, 20 aa, Bos taurus
MALALCLQALCSLGGWLSLY

SEQ ID NO: 13407 - protein, 20 aa, Bos taurus
AVAGSVSGLVTRVLISPLDV

SEQ ID NO: 13408 - protein, 23 aa, Bos taurus
LLLIPAALASFILAFGTGVEFVR

SEQ ID NO: 13409 - protein, 20 aa, Bos taurus
FVAGWIGGAASVIVGHPLDT

SEQ ID NO: 13410 - protein, 20 aa, Bos taurus
AVDLVLGASACCLACVFTNP

SEQ ID NO: 13411 - protein, 20 aa, Bos taurus
MTLFHFGNCFALAYFPYFIT

SEQ ID NO: 13412 - protein, 20 aa, Bos taurus
HALPGSFFLIVGLWWSLKYP

SEQ ID NO: 13413 - protein, 20 aa, Bos taurus
ILQSASFLTANGALFMAFFC

SEQ ID NO: 13414 - protein, 20 aa, Bos taurus
WLLMSSPLPQTIILGFYVYF

SEQ ID NO: 13415 - protein, 25 aa, Bos taurus
VFIPSVYTGVFLVSLPLNIMAVVVF

SEQ ID NO: 13416 - protein, 20 aa, Bos taurus
VWFIFLVALFFNLLVILTTF

SEQ ID NO: 13417 - protein, 20 aa, Bos taurus
IIGTTLFGVSLLLGITAAYI

SEQ ID NO: 13418 - protein, 20 aa, Bos taurus
WVGIVISLVCLAICIFTFCF

SEQ ID NO: 13419 - protein, 20 aa, Bos taurus
WVGILLSLVCLLICIFTFCF

SEQ ID NO: 13420 - protein, 20 aa, Bos taurus
LLSVITWVGIVISLVCLAIC

SEQ ID NO: 13421 - protein, 18 aa, Bos taurus
WPLTGALSALLMTSGLTM

SEQ ID NO: 13422 - protein, 24 aa, Bos taurus
FSMLAAYMFLLIMLGFPINFLTLY

SEQ ID NO: 13423 - protein, 23 aa, Bos taurus
LLGVILGGLILFGVLGNILVILS

SEQ ID NO: 13424 - protein, 22 aa, Bos taurus
AMLLTLLIFVIVFGNVLVCMAV

SEQ ID NO: 13425 - protein, 21 aa, Bos taurus
YINTVISCTIFIVGMVGNATL

SEQ ID NO: 13426 - protein, 29 aa, Bos taurus
YIFIMIPTLYSIIFVVGIFGNSLVVIVIY

SEQ ID NO: 13427 - protein, 24 aa, Bos taurus
IFLPTVYSIIFLTGIVGNGLVILV

SEQ ID NO: 13428 - protein, 24 aa, Bos taurus
YINTVVSCLVFVLGIIGNSTLLRI

SEQ ID NO: 13429 - protein, 22 aa, Bos taurus
LVVVLSTISLVTVGLNLLVLYA

SEQ ID NO: 13430 - protein, 19 aa, Bos taurus
RFLGDLSHLLAIILLLLKI

SEQ ID NO: 13431 - protein, 22 aa, Bos taurus
GIALTLFAVLGIFLTAFVLGVF

SEQ ID NO: 13432 - protein, 22 aa, Bos taurus
VVFIVLVAGSLSLVTIIGNILV

SEQ ID NO: 13433 - protein, 25 aa, Bos taurus
VSIPDGLFLSLGLVSLVENVLVVAA

SEQ ID NO: 13434 - protein, 24 aa, Bos taurus
AELALLSTVFVAVALSNGLVLGAL

SEQ ID NO: 13435 - protein, 24 aa, Bos taurus
TAIIIMALYSIVCVVGLFGNFLVM

SEQ ID NO: 13436 - protein, 19 aa, Bos taurus
IVLWRQPLITLQYFSLETL

SEQ ID NO: 13437 - protein, 27 aa, Bos taurus
YKFLRIVVWFVSLLALLGNVFVLVILL

SEQ ID NO: 13438 - protein, 24 aa, Bos taurus
LVMGLGITVCIFIMLANLLVMVAI

SEQ ID NO: 13439 - protein, 23 aa, Bos taurus
GMGILMSLIVLAIVFGNVLVITA

SEQ ID NO: 13440 - protein, 20 aa, Bos taurus
WWAFLASSMVTFFGGLFIIL

SEQ ID NO: 13441 - protein, 25 aa, Bos taurus
LTLVCLAGLLMLFTVFGNVLVIIAV

SEQ ID NO: 13442 - protein, 27 aa, Bos taurus
RLLPPLYSLVFIFGFVGNMLVVLILIN

SEQ ID NO: 13443 - protein, 29 aa, Bos taurus
KLTTVFLPVVYTIVFVVGLPSNGMALWVF

SEQ ID NO: 13444 - protein, 20 aa, Bos taurus
WFLLDNYVPTLVCSILYLLI

SEQ ID NO: 13445 - protein, 20 aa, Bos taurus
LMVIMTLFVLGSIAIFLEAA

SEQ ID NO: 13446 - protein, 21 aa, Bos taurus
LISVVFILICCFIILENIFVL

SEQ ID NO: 13447 - protein, 20 aa, Bos taurus
VLYSLLFVLGLLGNGIVAVV

SEQ ID NO: 13448 - protein, 23 aa, Bos taurus
WSALLTAVVIILTIAGNILVIMA

SEQ ID NO: 13449 - protein, 25 aa, Bos taurus
ILTACFLSLLILSTLLGNTLVCAAV

SEQ ID NO: 13450 - protein, 20 aa, Bos taurus
YIGCSLSVLCLAITLVTFAV

SEQ ID NO: 13451 - protein, 20 aa, Bos taurus
IVALGTVFVVILYSLVFAFG

SEQ ID NO: 13452 - protein, 19 aa, Bos taurus
IGHVLSIASLLISLGIFFY

SEQ ID NO: 13453 - protein, 20 aa, Bos taurus
IVSIINQVIGWIYFVAWSVS

SEQ ID NO: 13454 - protein, 20 aa, Bos taurus
LVAVYSVICLLGILGNGLVI

SEQ ID NO: 13455 - protein, 23 aa, Bos taurus
LALWTAAYLALVLVAVMGNATVI

SEQ ID NO: 13456 - protein, 25 aa, Bos taurus
VILPEEIFFTVSIVGVLENLMVLLA

SEQ ID NO: 13457 - protein, 24 aa, Bos taurus
FSMTMMITGFVGNALAITLVSKSY

SEQ ID NO: 13458 - protein, 24 aa, Bos taurus
VFLPAFFTIAFIIGLAGNSTVVAI

SEQ ID NO: 13459 - protein, 20 aa, Bos taurus
VLIWFISILAITGNILVLVI

SEQ ID NO: 13460 - protein, 23 aa, Bos taurus
VVFIAFLTGVLALVTIIGNILVI

SEQ ID NO: 13461 - protein, 26 aa, Bos taurus
VALAGALLALAVLATVGGNLLVIVAI

SEQ ID NO: 13462 - protein, 20 aa, Bos taurus
VLAVGTVLLVEALSGLSLNI

SEQ ID NO: 13463 - protein, 22 aa, Bos taurus
YYLPAVYILVFIIGFLGNSVAI

SEQ ID NO: 13464 - protein, 24 aa, Bos taurus
FHLQAVFMGFVFFVGTPLNATVLV

SEQ ID NO: 13465 - protein, 24 aa, Bos taurus
ARVEVAVLCLILFLALSGNACVLL

SEQ ID NO: 13466 - protein, 21 aa, Bos taurus
PATSTLMFVAGVVGNGLALGI

SEQ ID NO: 13467 - protein, 17 aa, Bos taurus
SMFPFFDIAHYLVSVMA

SEQ ID NO: 13468 - protein, 20 aa, Bos taurus
LLALLLFAVGIVGSLAVMCI

SEQ ID NO: 13469 - protein, 20 aa, Bos taurus
VYTILLIQLLVTLGVVALFT

SEQ ID NO: 13470 - protein, 24 aa, Bos taurus
VYVALELALAALSVTGNVLVCAAV

SEQ ID NO: 13471 - protein, 20 aa, Bos taurus
MIYTVGYSVSLASLTVAVLI

SEQ ID NO: 13472 - protein, 25 aa, Bos taurus
ILMPLHYSIVFIIGLVGNLLALIVI

SEQ ID NO: 13473 - protein, 20 aa, Bos taurus
LAYGAVIILGVSGNLALIII

SEQ ID NO: 13474 - protein, 20 aa, Bos taurus
VSGVFVWAALVLTGHQIYLH

SEQ ID NO: 13475 - protein, 26 aa, Bos taurus
YAVVVIDALVFLLSLLGNSLVMLVIL

SEQ ID NO: 13476 - protein, 21 aa, Bos taurus
VLIWLINILAITGNVTVLFVL

SEQ ID NO: 13477 - protein, 22 aa, Bos taurus
LYTVGYSTSLVTLTTAMVILCR

SEQ ID NO: 13478 - protein, 27 aa, Bos taurus
ILVIITAVYSVVFVVGLVGNSLVMFVI

SEQ ID NO: 13479 - protein, 20 aa, Bos taurus
IVLLYSIVVVVGLVGNCLLV

SEQ ID NO: 13480 - protein, 25 aa, Bos taurus
KLIPAIYILVFAVGMPANAVTLWML

SEQ ID NO: 13481 - protein, 20 aa, Bos taurus
LASVIFLLLFAPFIVYYFIM

SEQ ID NO: 13482 - protein, 23 aa, Bos taurus
PVTIPAVMFIFGVVGNLVAIVVL

SEQ ID NO: 13483 - protein, 20 aa, Bos taurus
KVGLALSLACLLLCILTFLL

SEQ ID NO: 13484 - protein, 22 aa, Bos taurus
FGGPLGAAALMLLLPVTMFHLL

SEQ ID NO: 13485 - protein, 22 aa, Bos taurus
FAASFCLVGLASNLLALSVLMG

SEQ ID NO: 13486 - protein, 24 aa, Bos taurus
YHLTSAWMVFVVIASVFTNGLVLA

SEQ ID NO: 13487 - protein, 25 aa, Bos taurus
LFVSPEVFVTLGVISLLENILVIVA

SEQ ID NO: 13488 - protein, 28 aa, Bos taurus
QWTAGMGLLMAFIVLLIVVGNVLVLVAI

SEQ ID NO: 13489 - protein, 21 aa, Bos taurus
LFPIFYSIVFVLGVIANSYVL

SEQ ID NO: 13490 - protein, 20 aa, Bos taurus
FTVSAFILLLHVSFVANYPS

SEQ ID NO: 13491 - protein, 20 aa, Bos taurus
VPLFPVFDLSYFIVSILYLK

SEQ ID NO: 13492 - protein, 20 aa, Bos taurus
MGGVLFSTGLVGNLLALGLL

SEQ ID NO: 13493 - protein, 20 aa, Bos taurus
IVIVLLTFLIIAGNLTVIFV

SEQ ID NO: 13494 - protein, 20 aa, Bos taurus
LSTLLLCLSNLMFLPPVVLA

SEQ ID NO: 13495 - protein, 20 aa, Bos taurus
FVHSLVTILAVCIYGVAPVG

SEQ ID NO: 13496 - protein, 20 aa, Bos taurus
ALLGGLVRVLLWVASALLYF

SEQ ID NO: 13497 - protein, 20 aa, Bos taurus
FQEPASAVASFLNGLASLVM

SEQ ID NO: 13498 - protein, 20 aa, Bos taurus
LVYLVIFVVGILGNSVTIRV

SEQ ID NO: 13499 - protein, 20 aa, Bos taurus
LAIISFQALCMLLDFLSMLV

SEQ ID NO: 13500 - protein, 20 aa, Bos taurus
ILLLALSLLGILFVLAIGII

SEQ ID NO: 13501 - protein, 20 aa, Bos taurus
LFGSWLIRIGVWTIAVLALT

SEQ ID NO: 13502 - protein, 20 aa, Bos taurus
VLYLLVCAVGLGGNTLVIYV

SEQ ID NO: 13503 - protein, 20 aa, Bos taurus
LAPVVYVMVLVVGFPANCLS

SEQ ID NO: 13504 - protein, 22 aa, Bos taurus
AYIGIEVLIALVSVPGNVLVIW

SEQ ID NO: 13505 - protein, 19 aa, Bos taurus
VTVTFFLFLLSTIFNTSFL

SEQ ID NO: 13506 - protein, 23 aa, Bos taurus
VVLTFIYFVVCIIGLCGNTLVIY

SEQ ID NO: 13507 - protein, 22 aa, Bos taurus
GVVLSAMGVVGMAGNVYTLTVM

SEQ ID NO: 13508 - protein, 23 aa, Bos taurus
IAVEVFLALGLISLLENILVIGA

SEQ ID NO: 13509 - protein, 20 aa, Bos taurus
VLILAYCSIILLGVIGNSLV

SEQ ID NO: 13510 - protein, 21 aa, Bos taurus
VTLYAVIFLMSVGGNVLIIVV

SEQ ID NO: 13511 - protein, 20 aa, Bos taurus
ALPALVCIMCCLFGVVYCFF

SEQ ID NO: 13512 - protein, 20 aa, Bos taurus
WVLIAAYVAVFFVALVGNTL

SEQ ID NO: 13513 - protein, 20 aa, Bos taurus
LYTTVFMVGLLDNILVVFIL

SEQ ID NO: 13514 - protein, 22 aa, Bos taurus
YISVEILIGLCAIVGNVLVIWV

SEQ ID NO: 13515 - protein, 20 aa, Bos taurus
LYMVMSACFLGAGIFWVSIL

SEQ ID NO: 13516 - protein, 20 aa, Bos taurus
TLYALLFFSVYAQLWLVLLY

SEQ ID NO: 13517 - protein, 20 aa, Bos taurus
LYIFVIGVGLPTNCLALWAA

SEQ ID NO: 13518 - protein, 19 aa, Bos taurus
LFFTVGFTGCAFGSAAIWQ

SEQ ID NO: 13519 - protein, 20 aa, Bos taurus
GIVVAVTGTVGNVLTLLALA

SEQ ID NO: 13520 - protein, 19 aa, Bos taurus
RLTGDLSHLAAIVILLLKI

SEQ ID NO: 13521 - protein, 20 aa, Bos taurus
LLGTFFTWGLTAAGAALVFV

SEQ ID NO: 13522 - protein, 20 aa, Bos taurus
IILEAVAGAGVVTTFVLTII

SEQ ID NO: 13523 - protein, 20 aa, Bos taurus
FVAIVIITVFVCLGNLVIVI

SEQ ID NO: 13524 - protein, 20 aa, Bos taurus
VFLVLTLQLSVTLSTVAVFT

SEQ ID NO: 13525 - protein, 20 aa, Bos taurus
FVVFVAGILLNGMSGWVFFY

SEQ ID NO: 13526 - protein, 20 aa, Bos taurus
VFYSCIFIIGLFVNVTALWV

SEQ ID NO: 13527 - protein, 20 aa, Bos taurus
VGMGLLPFFLACAVYLLVRN

SEQ ID NO: 13528 - protein, 22 aa, Bos taurus
LVIIVLSVALAVGLPGNSFVVW

SEQ ID NO: 13529 - protein, 20 aa, Bos taurus
YLVFLIGIIGSCFATWAFIQ

SEQ ID NO: 13530 - protein, 20 aa, Bos taurus
VVYSVVLAAGLPLNALALWV

SEQ ID NO: 13531 - protein, 20 aa, Bos taurus
VYALIFVVGVVGNLLVCLVI

SEQ ID NO: 13532 - protein, 20 aa, Bos taurus
PAGVFVVAFFARVALIFYGV

SEQ ID NO: 13533 - protein, 26 aa, Bos taurus
FLPIMYSIICFVGLLGNGLVMLTYIY

SEQ ID NO: 13534 - protein, 20 aa, Bos taurus
LSLALASLIVAANLLLAVGI

SEQ ID NO: 13535 - protein, 22 aa, Bos taurus
VLLPVVYSVICAVGLVGNAAVI

SEQ ID NO: 13536 - protein, 22 aa, Bos taurus
PVVYAVICAVGLAGNSAVLFVL

SEQ ID NO: 13537 - protein, 20 aa, Bos taurus
IVIGVALVGIMLTCGIGNFV

SEQ ID NO: 13538 - protein, 20 aa, Bos taurus
VIGMALVGIMLVCGIGNFIF

SEQ ID NO: 13539 - protein, 20 aa, Bos taurus
FFILVSILGILASGTILYAL

SEQ ID NO: 13540 - protein, 20 aa, Bos taurus
FLMTTAAQAISGFFVWTALL

SEQ ID NO: 13541 - protein, 22 aa, Bos taurus
ILLVLIICGLGIVGNIMVVLVV

SEQ ID NO: 13542 - protein, 22 aa, Bos taurus
FSIIFMTVGILSNSLAIAILMK

SEQ ID NO: 13543 - protein, 20 aa, Bos taurus
LIYACLLLFSVLLPLRLDGV

SEQ ID NO: 13544 - protein, 20 aa, Bos taurus
FCVAAWGFCFALSVLVVACE

SEQ ID NO: 13545 - protein, 20 aa, Bos taurus
LAVVLYLLSIVVAVPLCVWE

SEQ ID NO: 13546 - protein, 20 aa, Bos taurus
LLMTYTLWAVGGPAGLHHLY

SEQ ID NO: 13547 - protein, 20 aa, Bos taurus
TCVYFVLWLPSSSPSWVSAL

SEQ ID NO: 13548 - protein, 20 aa, Bos taurus
VLLGLIMCVSLAGNAILSLL

SEQ ID NO: 13549 - protein, 20 aa, Bos taurus
ALFHVALASCLCVATVHTGI

SEQ ID NO: 13550 - protein, 29 aa, Bos taurus
GLFVASHPWEVIVGTVTLTICMMSMNMFT

SEQ ID NO: 13551 - protein, 20 aa, Bos taurus
FGSLLGICLILQILTGLFLA

SEQ ID NO: 13552 - protein, 20 aa, Bos taurus
FMINILMLIIPILLAVAFLT

SEQ ID NO: 13553 - protein, 20 aa, Bos taurus
NAFVLLTVTAVIVGTILGFT

SEQ ID NO: 13554 - protein, 20 aa, Bos taurus
ILCVFQGIGKFILLLVFLYF

SEQ ID NO: 13555 - protein, 18 aa, Bos taurus
INPAPYTIITFPFLFAVM

SEQ ID NO: 13556 - protein, 20 aa, Bos taurus
ISQVVFVSNPISGILILVGL

SEQ ID NO: 13557 - protein, 19 aa, Bos taurus
WLLLSTVVAVVLGIVIGVL

SEQ ID NO: 13558 - protein, 20 aa, Bos taurus
VIMLFVPVTLCMIVVVATIK

SEQ ID NO: 13559 - protein, 20 aa, Bos taurus
GLFCASYPIPIILFTGLCIL

SEQ ID NO: 13560 - protein, 18 aa, Bos taurus
VNPALFTIITFPFLFAVM

SEQ ID NO: 13561 - protein, 20 aa, Bos taurus
ITLLGLAINMLTTLVLISYC

SEQ ID NO: 13562 - protein, 29 aa, Bos taurus
NLLVLLTVVAVVAGVALGLGVSGAGGAFA

SEQ ID NO: 13563 - protein, 20 aa, Bos taurus
FLVVLAVAVGLPFLALVYWF

SEQ ID NO: 13564 - protein, 20 aa, Bos taurus
VFLKLLAAGFYGVSSFLIVV

SEQ ID NO: 13565 - protein, 20 aa, Bos taurus
AVYRISFALAVFFFAFSLLM

SEQ ID NO: 13566 - protein, 20 aa, Bos taurus
LLFLAALALELLGGAGGSQQ

SEQ ID NO: 13567 - protein, 20 aa, Bos taurus
GMLFPAAFIGLFVFLYGVIT

SEQ ID NO: 13568 - protein, 22 aa, Bos taurus
FVLRALQIALVVSLYWVTSISM

SEQ ID NO: 13569 - protein, 20 aa, Bos taurus
GLVRVVFFPLFSSWWIQVTS

SEQ ID NO: 13570 - protein, 20 aa, Bos taurus
NTLPQLAATIIALSLQGVCL

SEQ ID NO: 13571 - protein, 20 aa, Bos taurus
IGTWLLYLPCTWSIGLAADP

SEQ ID NO: 13572 - protein, 20 aa, Bos taurus
LGALVLLLVLTLICSLVPVC

SEQ ID NO: 13573 - protein, 20 aa, Bos taurus
LLVAKILCMVGMFFFMLLGS

SEQ ID NO: 13574 - protein, 20 aa, Bos taurus
NLKYLSLGILVFQTTSLVLT

SEQ ID NO: 13575 - protein, 20 aa, Bos taurus
LRLPLCFLGVFVCYFYYGIL

SEQ ID NO: 13576 - protein, 20 aa, Bos taurus
VMSGLIVGILLVPQSIAYSL

SEQ ID NO: 13577 - protein, 20 aa, Bos taurus
VAMVFLLGLMFEITAKVSII

SEQ ID NO: 13578 - protein, 20 aa, Bos taurus
AWLFLFFLFWTGLVFIMGYS

SEQ ID NO: 13579 - protein, 20 aa, Bos taurus
WTLMLLLSTAMYGAHAPLLA

SEQ ID NO: 13580 - protein, 20 aa, Bos taurus
VVGRWLLVCSGTVAGAVILG

SEQ ID NO: 13581 - protein, 20 aa, Bos taurus
PMLLGLLGQFLVMPFYAFLM

SEQ ID NO: 13582 - protein, 20 aa, Bos taurus
SLLFEFLFFIYLLVALFIQY

SEQ ID NO: 13583 - protein, 20 aa, Bos taurus
SILFELQLFFCQLIALFVHY

SEQ ID NO: 13584 - protein, 19 aa, Bos taurus
VLLTRCPFWGCFSQLMLYA

SEQ ID NO: 13585 - protein, 20 aa, Bos taurus
HGLVLLTVSGVVAGAGLGAA

SEQ ID NO: 13586 - protein, 20 aa, Bos taurus
LDLVFTVVSALMIGLLMFSL

SEQ ID NO: 13587 - protein, 20 aa, Bos taurus
LYHTCLAVLSILVLFLLAML

SEQ ID NO: 13588 - protein, 20 aa, Bos taurus
WFILVSVIADLRNAFYVLFP

SEQ ID NO: 13589 - protein, 34 aa, Bos taurus
NYRGILNWCVVMLILSNARLFLENLIKYGILVDP

SEQ ID NO: 13590 - protein, 20 aa, Bos taurus
IMLFVPVTLCMVVVVATIKS

SEQ ID NO: 13591 - protein, 20 aa, Bos taurus
LVIGWCIFGLLLLAILAFCW

SEQ ID NO: 13592 - protein, 20 aa, Bos taurus
LSIINSMVLVFLLVGFVAVI

SEQ ID NO: 13593 - protein, 20 aa, Bos taurus
SIINSVVVVFFLSGILSMII

SEQ ID NO: 13594 - protein, 20 aa, Bos taurus
VWLWVTFLGDPKSLFLFYFP

SEQ ID NO: 13595 - protein, 20 aa, Bos taurus
LVLFIIALRICNCFLVQTSF

SEQ ID NO: 13596 - protein, 20 aa, Bos taurus
FFYRPHTITLLSFTIVSLMY

SEQ ID NO: 13597 - protein, 20 aa, Bos taurus
IDSSIMITSQILFFGFGWLF

SEQ ID NO: 13598 - protein, 20 aa, Bos taurus
ASAATGVFVLSLSAIPVTYV

SEQ ID NO: 13599 - protein, 20 aa, Bos taurus
FYIGLGLAMSSSIFIGGSFI

SEQ ID NO: 13600 - protein, 20 aa, Bos taurus
EWVKFCRQLFGGFSILLWIG

SEQ ID NO: 13601 - protein, 20 aa, Bos taurus
AANAFFLFIALLQQIPDVSP

SEQ ID NO: 13602 - protein, 20 aa, Bos taurus
LQDVTLIILEIAAIISLVLS

SEQ ID NO: 13603 - protein, 20 aa, Bos taurus
IARATVYFVAMVYMFLGVSI

SEQ ID NO: 13604 - protein, 20 aa, Bos taurus
LWKKYISQFKNPLIMLLLAS

SEQ ID NO: 13605 - protein, 20 aa, Bos taurus
EWVKFCRQLFGGFSMLLWIG

SEQ ID NO: 13606 - protein, 20 aa, Bos taurus
LWELVLEQFEDLLVRILLLA

SEQ ID NO: 13607 - protein, 20 aa, Bos taurus
PRFLYSQFRRAANSFFLFIA

SEQ ID NO: 13608 - protein, 20 aa, Bos taurus
ASEQALRLIISIFLGYPFAL

SEQ ID NO: 13609 - protein, 20 aa, Bos taurus
FIPGVLYEQFKFFLNLYFLI

SEQ ID NO: 13610 - protein, 20 aa, Bos taurus
IICCVLFFLFILGYIAVGIL

SEQ ID NO: 13611 - protein, 20 aa, Bos taurus
VSLVVVVVGGWTAVYLTDLV

SEQ ID NO: 13612 - protein, 32 aa, Bos taurus
WVICAMVGILTGLVACFIDIVVEKLAGLKYRL

SEQ ID NO: 13613 - protein, 27 aa, Bos taurus
LLVNLIGSLMGFVATVTLIPAFRGHFI

SEQ ID NO: 13614 - protein, 20 aa, Bos taurus
IICCVFLFLAIVGYVAVGII

SEQ ID NO: 13615 - protein, 20 aa, Bos taurus
PMLSVSSAMYTFLLGAIFIT

SEQ ID NO: 13616 - protein, 22 aa, Bos taurus
WLAPNLITFSGFLLVVFNFLLL

SEQ ID NO: 13617 - protein, 19 aa, Bos taurus
WTAITLFIFLVCCQIPLFG

SEQ ID NO: 13618 - protein, 20 aa, Bos taurus
INYGIILTLIPSGYLAGIFG

SEQ ID NO: 13619 - protein, 20 aa, Bos taurus
LIYALFLLVGVCVACVMLIP

SEQ ID NO: 13620 - protein, 19 aa, Bos taurus
WTAITLFIFLVCCQIPLFG

SEQ ID NO: 13621 - protein, 20 aa, Bos taurus
GLLLNLLVSICIVFLNKWIY

SEQ ID NO: 13622 - protein, 20 aa, Bos taurus
MALGIVILLLVDVIWVASSE

SEQ ID NO: 13623 - protein, 20 aa, Bos taurus
LTTGFIASIVAIVLFGSNFV

SEQ ID NO: 13624 - protein, 20 aa, Bos taurus
AVGSGGSTATAGPGAVSAGA

SEQ ID NO: 13625 - protein, 20 aa, Bos taurus
PIIFIIILLTIMLGTIIVMI

SEQ ID NO: 13626 - protein, 20 aa, Bos taurus
GWVVLHIFGMMYVFVALAIV

SEQ ID NO: 13627 - protein, 20 aa, Bos taurus
VFNLSNAIVGSGILGLSYAM

SEQ ID NO: 13628 - protein, 20 aa, Bos taurus
LLAGISVGLVQIPQVLMLGL

SEQ ID NO: 13629 - protein, 22 aa, Bos taurus
MSVFNLSNAIMGSGILGLAYAM

SEQ ID NO: 13630 - protein, 20 aa, Bos taurus
YIIFFSLGIGGLLPWNFFVT

SEQ ID NO: 13631 - protein, 20 aa, Bos taurus
LFLQGVAAVFMFAFASLYTQ

SEQ ID NO: 13632 - protein, 20 aa, Bos taurus
AIFIVVNACLGAGLLNFPAA

SEQ ID NO: 13633 - protein, 20 aa, Bos taurus
FGIATGGSNWFSALALGVTL

SEQ ID NO: 13634 - protein, 20 aa, Bos taurus
LLECLGFAGVLFGWTSLVFV

SEQ ID NO: 13635 - protein, 20 aa, Bos taurus
VILEQILFILGFASGYLFLG

SEQ ID NO: 13636 - protein, 20 aa, Bos taurus
FIAGISVGLTVIPQALAYAE

SEQ ID NO: 13637 - protein, 20 aa, Bos taurus
FLIHLLVCTFGMGSWVAING

SEQ ID NO: 13638 - protein, 20 aa, Bos taurus
VLVLSFGFLLLFTAYGGLQS

SEQ ID NO: 13639 - protein, 20 aa, Bos taurus
LFNLEMDISGLIPGLVSTFV

SEQ ID NO: 13640 - protein, 20 aa, Bos taurus
VVAVVFLGLLLDLLAFTLLL

SEQ ID NO: 13641 - protein, 20 aa, Bos taurus
WLLGLPTAVVYGSLALFVSV

SEQ ID NO: 13642 - protein, 20 aa, Bos taurus
LGACSLLSCASCLCGSAPCI

SEQ ID NO: 13643 - protein, 20 aa, Bos taurus
AVFNVVNSIIGSGIIGLPYS

SEQ ID NO: 13644 - protein, 20 aa, Bos taurus
IIAIMSGLGFCISFGIRCNL

SEQ ID NO: 13645 - protein, 20 aa, Bos taurus
IIAIMSGLGFCISFGIRCNL

SEQ ID NO: 13646 - protein, 20 aa, Bos taurus
AAFYGVTANLVLFLNGTAFG

SEQ ID NO: 13647 - protein, 28 aa, Bos taurus
HKDIGTLYLLFGAWAGMVGTALSLLIRA

SEQ ID NO: 13648 - protein, 20 aa, Bos taurus
ALAVLSLLAGALALAELLGA

SEQ ID NO: 13649 - protein, 21 aa, Bos taurus
LMLAVGGAVLGSLQFGYNTGV

SEQ ID NO: 13650 - protein, 20 aa, Bos taurus
FLLSVIGFAVDLANVWRFPY

SEQ ID NO: 13651 - protein, 20 aa, Bos taurus
FWRFMFYGIILYLGEVTKAV

SEQ ID NO: 13652 - protein, 20 aa, Bos taurus
VLAVFTAVLSSFQFGYDIGV

SEQ ID NO: 13653 - protein, 20 aa, Bos taurus
LATLIAAFGSSFQYGYNVAA

SEQ ID NO: 13654 - protein, 20 aa, Bos taurus
VFLAAFAAALGPLSFGFALG

SEQ ID NO: 13655 - protein, 18 aa, Bos taurus
EPLVFLANFALVLQGPVT

SEQ ID NO: 13656 - protein, 20 aa, Bos taurus
VLAVFSAVLGSLQFGYNIGV

SEQ ID NO: 13657 - protein, 20 aa, Bos taurus
PPRIFPSLLVVVALVGLLPV

SEQ ID NO: 13658 - protein, 20 aa, Bos taurus
LLLMLLLVAIAACTTLIVIT

SEQ ID NO: 13659 - protein, 20 aa, Bos taurus
LASFLFLYCACMSPVITFGG

SEQ ID NO: 13660 - protein, 24 aa, Bos taurus
IQALSAILFIYLATVTNAITFGGL

SEQ ID NO: 13661 - protein, 20 aa, Bos taurus
FVLSVAGGFVGLGNVWRFPY

SEQ ID NO: 13662 - protein, 24 aa, Bos taurus
FLLSVIGYAVDLGNVWRFPYICYQ

SEQ ID NO: 13663 - protein, 20 aa, Bos taurus
FLLSVAGEIIGLGNVWRFPY

SEQ ID NO: 13664 - protein, 20 aa, Bos taurus
FLILCLLSAAFAPIYVGIVF

SEQ ID NO: 13665 - protein, 25 aa, Bos taurus
IDFLLSVVGFAVDLANVWRFPYLCY

SEQ ID NO: 13666 - protein, 21 aa, Bos taurus
IFAISVATIGSFQFGYNTGVI

SEQ ID NO: 13667 - protein, 20 aa, Bos taurus
LILFIVFLALLLDNMLLTVV

SEQ ID NO: 13668 - protein, 20 aa, Bos taurus
FVLTSVGYAVGLGNVWRFPY

SEQ ID NO: 13669 - protein, 20 aa, Bos taurus
FVLGLALMADGVEVFVVGFV

SEQ ID NO: 13670 - protein, 20 aa, Bos taurus
VTAAVSGFLVGYELGIISGA

SEQ ID NO: 13671 - protein, 20 aa, Bos taurus
VILPLILLASHNTLQNFTAA

SEQ ID NO: 13672 - protein, 19 aa, Bos taurus
IFLVSECALMLAQGTVGAY

SEQ ID NO: 13673 - protein, 20 aa, Bos taurus
QLPLLCLLLQGATAILFAVF

SEQ ID NO: 13674 - protein, 20 aa, Bos taurus
YILAQVGFSVGLGNVWRFPY

SEQ ID NO: 13675 - protein, 20 aa, Bos taurus
YLWMVILGFIIAFILAFSVG

SEQ ID NO: 13676 - protein, 20 aa, Bos taurus
FIMSCVGFAVGLGNVWRFPY

SEQ ID NO: 13677 - protein, 19 aa, Bos taurus
IAIVALYFILVMCIGFFAM

SEQ ID NO: 13678 - protein, 20 aa, Bos taurus
VVENLLFSAVLLGWGSLLIM

SEQ ID NO: 13679 - protein, 20 aa, Bos taurus
IFLYFICAFQNISCGIHYLA

SEQ ID NO: 13680 - protein, 20 aa, Bos taurus
GWGWMVVLSAFFQSALVFGV

SEQ ID NO: 13681 - protein, 20 aa, Bos taurus
VLTGLAWMADAMEMMILSIL

SEQ ID NO: 13682 - protein, 20 aa, Bos taurus
LAHRLVVLLLMCFLGFGSYF

SEQ ID NO: 13683 - protein, 18 aa, Bos taurus
FLVDFAFLIVPLVTTLTI

SEQ ID NO: 13684 - protein, 17 aa, Bos taurus
WAFTGPGFLMSIAFLDP

SEQ ID NO: 13685 - protein, 20 aa, Bos taurus
FQILQMLLLCISSLITYPHI

SEQ ID NO: 13686 - protein, 20 aa, Bos taurus
RLPVACLLLEVALIALFGVF

SEQ ID NO: 13687 - protein, 22 aa, Bos taurus
HRMLSFSDALLSIIATVMEFDK

SEQ ID NO: 13688 - protein, 20 aa, Bos taurus
GGWGWAVVIGAFISIGFSYA

SEQ ID NO: 13689 - protein, 20 aa, Bos taurus
LAPGIWYRAFILLITFLIYT

SEQ ID NO: 13690 - protein, 20 aa, Bos taurus
FPLMAIGLEVVMIVLFALFV

SEQ ID NO: 13691 - protein, 20 aa, Bos taurus
LGYLARINLLVAICLGLYVR

SEQ ID NO: 13692 - protein, 20 aa, Bos taurus
IVIFLEFFAWGLLTTSMLTV

SEQ ID NO: 13693 - protein, 20 aa, Bos taurus
VALLALPRVLLPMHFLLPIF

SEQ ID NO: 13694 - protein, 20 aa, Bos taurus
ITGLSSGHSALIVAVLCYIN

SEQ ID NO: 13695 - protein, 20 aa, Bos taurus
MLVTAYLAFVVLLASCLGLE

SEQ ID NO: 13696 - protein, 20 aa, Bos taurus
FSHHHMVVFLLTFFSYSLLH

SEQ ID NO: 13697 - protein, 20 aa, Bos taurus
FVVELVWPLSLFLVLIWLRN

SEQ ID NO: 13698 - protein, 20 aa, Bos taurus
MIWVNSTAHSLLISFTSLLL

SEQ ID NO: 13699 - protein, 20 aa, Bos taurus
LKLLILSMAAVLSFSTRLFA

SEQ ID NO: 13700 - protein, 20 aa, Bos taurus
FAVWDYVVFAALFIISSGIG

SEQ ID NO: 13701 - protein, 18 aa, Bos taurus
SASVYTAGLTGILGLGIA

SEQ ID NO: 13702 - protein, 20 aa, Bos taurus
AGDIAVLVLYFLFVLAVGLW

SEQ ID NO: 13703 - protein, 20 aa, Bos taurus
LTVVDIAIIAVYFALNVAVG

SEQ ID NO: 13704 - protein, 20 aa, Bos taurus
FSSLSLVTLLLLTMPIMMMS

SEQ ID NO: 13705 - protein, 20 aa, Bos taurus
LISLGVGSCVGTGMYVVSGL

SEQ ID NO: 13706 - protein, 20 aa, Bos taurus
SVLAEAAVVFVVVLSIHAAV

SEQ ID NO: 13707 - protein, 20 aa, Bos taurus
VLFVCLCCGAAVLVYFILEA

SEQ ID NO: 13708 - protein, 20 aa, Bos taurus
QNTVLVWVPCSYLWVCFPFY

SEQ ID NO: 13709 - protein, 9 aa, Bos taurus
LIKLDLKTK

SEQ ID NO: 13710 - protein, 9 aa, Bos taurus
LVKLDVKTK

SEQ ID NO: 13711 - protein, 9 aa, Bos taurus
MVKIDLRTK

SEQ ID NO: 13712 - protein, 20 aa, Bos taurus
FFLVAITFLLFDLEIALLLP

SEQ ID NO: 13713 - protein, 20 aa, Bos taurus
SLLCLEGMMLSLFVMAALTI

SEQ ID NO: 13714 - protein, 24 aa, Bos taurus
IHTAKFALVFPLMYHTWNGIRHLM

SEQ ID NO: 13715 - protein, 20 aa, Bos taurus
FYPIFIITLWMAGWYFNQVF

SEQ ID NO: 13716 - protein, 20 aa, Bos taurus
VKLALAIFVICQLGNFSIHM

SEQ ID NO: 13717 - protein, 20 aa, Bos taurus
GAILNISSASGMYPVPLLTI

SEQ ID NO: 13718 - protein, 20 aa, Bos taurus
LALLGVGGVFVLSSFLALGF

SEQ ID NO: 13719 - protein, 20 aa, Bos taurus
PLVMLGMVAGALLADFLSGL

SEQ ID NO: 13720 - protein, 20 aa, Bos taurus
WLFFWAYAFGGCVNHSLTLA

SEQ ID NO: 13721 - protein, 20 aa, Bos taurus
IGNLVLYILIIIHWNACIYF

SEQ ID NO: 13722 - protein, 20 aa, Bos taurus
VGSLLLPLLLLLLLLLWYCQ

SEQ ID NO: 13723 - protein, 20 aa, Bos taurus
IVVVSSVMGLQGVVFNEVYA

SEQ ID NO: 13724 - protein, 20 aa, Bos taurus
GAYIAAGVLFALVVMLYVIW

SEQ ID NO: 13725 - protein, 20 aa, Bos taurus
WLTIQGGLLGSGLFVFSLTA

SEQ ID NO: 13726 - protein, 20 aa, Bos taurus
IILCLMGAFFYLISPLDFVP

SEQ ID NO: 13727 - protein, 20 aa, Bos taurus
AATAVGGGFLLLQIASHSGY

SEQ ID NO: 13728 - protein, 20 aa, Bos taurus
VMLSLLFAAPFAVILVCYVL

SEQ ID NO: 13729 - protein, 20 aa, Bos taurus
AATLLCHSLLPLGYYVGMCF

SEQ ID NO: 13730 - protein, 22 aa, Bos taurus
IELSIGIILGISTMAAAALGNL

SEQ ID NO: 13731 - protein, 20 aa, Bos taurus
PGLRKVLFATALGTVALALA

SEQ ID NO: 13732 - protein, 20 aa, Bos taurus
FFISFLISLGWNWMYLYKLA

SEQ ID NO: 13733 - protein, 20 aa, Bos taurus
IWEGLTLSFHRVIALDFLGF

SEQ ID NO: 13734 - protein, 20 aa, Bos taurus
IASFWNKAFLTIIILLIVLF

SEQ ID NO: 13735 - protein, 20 aa, Bos taurus
IKWVISVAFYILQAALMVSL

SEQ ID NO: 13736 - protein, 20 aa, Bos taurus
VGHFLCLVTLVYCAEYINEV

SEQ ID NO: 13737 - protein, 20 aa, Bos taurus
FAPSTIVFHLGHAAMLGLMY

SEQ ID NO: 13738 - protein, 21 aa, Bos taurus
TMMVCMMAWRPIQALMAISAT

SEQ ID NO: 13739 - protein, 20 aa, Bos taurus
FLFFLAVGGVYHPRIVSGLG

SEQ ID NO: 13740 - protein, 20 aa, Bos taurus
LVTVLMLISLHWFIFLLNLP

SEQ ID NO: 13741 - protein, 20 aa, Bos taurus
RGLNVMMMGAGPAHAMYFAC

SEQ ID NO: 13742 - protein, 15 aa, Bos taurus
VTNVLPMILIGGWIN

SEQ ID NO: 13743 - protein, 20 aa, Bos taurus
GFIFYLLASILLSLLLILKA

SEQ ID NO: 13744 - protein, 20 aa, Bos taurus
MSYAKNFAIVGAMFSCTECL

SEQ ID NO: 13745 - protein, 20 aa, Bos taurus
LIHAFFCVMFLCAAEWLTLG

SEQ ID NO: 13746 - protein, 20 aa, Bos taurus
FNSFLSGFISCVGSFILAVC

SEQ ID NO: 13747 - protein, 20 aa, Bos taurus
AATAVGGGFFLLQLANHTGY

SEQ ID NO: 13748 - protein, 20 aa, Bos taurus
MDYSLAATLTLHSHWGIGQV

SEQ ID NO: 13749 - protein, 20 aa, Bos taurus
GWAQVMFQFLSQGFCYGAGL

SEQ ID NO: 13750 - protein, 20 aa, Bos taurus
ILGFFAGLIPRLLGDIISLW

SEQ ID NO: 13751 - protein, 20 aa, Bos taurus
IFFAVCISLSSITACILIYW

SEQ ID NO: 13752 - protein, 20 aa, Bos taurus
FYVALTGTSSLISGLILIFE

SEQ ID NO: 13753 - protein, 20 aa, Bos taurus
ALWANTLGSLALLYSAFGVI

SEQ ID NO: 13754 - protein, 20 aa, Bos taurus
VSMFAVGCSMGPFLHYWYLW

SEQ ID NO: 13755 - protein, 20 aa, Bos taurus
GWYIVTYALGIYHLNLFIAF

SEQ ID NO: 13756 - protein, 20 aa, Bos taurus
FSVIFVFLGALIVTAILLLF

SEQ ID NO: 13757 - protein, 20 aa, Bos taurus
GGVLSLIAGLFVGFLAGYGA

SEQ ID NO: 13758 - protein, 19 aa, Bos taurus
VTTKIYTSVHIMSLGLLHI

SEQ ID NO: 13759 - protein, 20 aa, Bos taurus
LLLPAAVFLLVLLPAAAVVY

SEQ ID NO: 13760 - protein, 20 aa, Bos taurus
FFLLGGLCVVWGGASYVVGL

SEQ ID NO: 13761 - protein, 20 aa, Bos taurus
GGGVAAGSLVATLQSVGAAG

SEQ ID NO: 13762 - protein, 20 aa, Bos taurus
LGVSVGSLMVPVFVVLLGVV

SEQ ID NO: 13763 - protein, 16 aa, Bos taurus
QIGGSFAVWGGLFSTI

SEQ ID NO: 13764 - protein, 20 aa, Bos taurus
IMEGLASSFLFTMGGLGFII

SEQ ID NO: 13765 - protein, 20 aa, Bos taurus
LLGFWSLLIISLTAGFSCCS

SEQ ID NO: 13766 - protein, 20 aa, Bos taurus
LLLKALLLSSYGKLLLIPAV

SEQ ID NO: 13767 - protein, 17 aa, Bos taurus
FWAWMALLFSLAVYGAS

SEQ ID NO: 13768 - protein, 20 aa, Bos taurus
LAVPISNSLAIIFTLIVGKV

SEQ ID NO: 13769 - protein, 20 aa, Bos taurus
VHAWYWLAWMIHVGESLYAI

SEQ ID NO: 13770 - protein, 20 aa, Bos taurus
MTTALPLGPGILGLLTGIVT

SEQ ID NO: 13771 - protein, 20 aa, Bos taurus
FLHCSTVIPTVVLTLKFTMH

SEQ ID NO: 13772 - protein, 18 aa, Bos taurus
MTLSISVLLSLTVFLLVI

SEQ ID NO: 13773 - protein, 18 aa, Bos taurus
CTVSINVLLAQTVFLFLI

SEQ ID NO: 13774 - protein, 28 aa, Bos taurus
YLINVIHAFQYVIYGTASFFFLYGALLL

SEQ ID NO: 13775 - protein, 17 aa, Bos taurus
MGLSIFALLTLTVFLLL

SEQ ID NO: 13776 - protein, 17 aa, Bos taurus
MAISVLLAQSVFLLLIS

SEQ ID NO: 13777 - protein, 21 aa, Bos taurus
VPARTVFGVTTVLTMTTLSIS

SEQ ID NO: 13778 - protein, 22 aa, Bos taurus
ASAARVALGITTVLTMTTISTH

SEQ ID NO: 13779 - protein, 19 aa, Bos taurus
ARVALGITTVLTMTTINTH

SEQ ID NO: 13780 - protein, 18 aa, Bos taurus
CTVAINVLLAQTVFLFLV

SEQ ID NO: 13781 - protein, 16 aa, Bos taurus
SLIGVGVLSCVFNSLA

SEQ ID NO: 13782 - protein, 20 aa, Bos taurus
FWVLQIIFVSVPTLLYLAHV

SEQ ID NO: 13783 - protein, 21 aa, Bos taurus
VPARTVFGITTVLTMTTLSIS

SEQ ID NO: 13784 - protein, 20 aa, Bos taurus
FMILSSLCATSGIIMGIVAF

SEQ ID NO: 13785 - protein, 23 aa, Bos taurus
FVTVAVFAFLYSMGALATYIFLQ

SEQ ID NO: 13786 - protein, 22 aa, Bos taurus
AVPARTSLGITTVLTMTTLSTI

SEQ ID NO: 13787 - protein, 20 aa, Bos taurus
FYTGVYILIGAGALMMLVGF

SEQ ID NO: 13788 - protein, 26 aa, Bos taurus
VFAGAWIAIFCGFSFFVVASFGVGAA

SEQ ID NO: 13789 - protein, 20 aa, Bos taurus
IGMFVGICLFCLSVLGIVGI

SEQ ID NO: 13790 - protein, 20 aa, Bos taurus
ISHVRFWVLQIIFVSTPTLI

SEQ ID NO: 13791 - protein, 19 aa, Bos taurus
VALAASAVALGTGLVGSGA

SEQ ID NO: 13792 - protein, 18 aa, Bos taurus
ISLGITVLLSLTVFMLLV

SEQ ID NO: 13793 - protein, 20 aa, Bos taurus
PARVGLGITTVLTMTTQSSG

SEQ ID NO: 13794 - protein, 18 aa, Bos taurus
VTLCISVLLSLTVFLLVI

SEQ ID NO: 13795 - protein, 21 aa, Bos taurus
VPARTVFGVTTVLTMTTLSIS

SEQ ID NO: 13796 - protein, 20 aa, Bos taurus
VSLGITTVLTMSTIITGVNA

SEQ ID NO: 13797 - protein, 23 aa, Bos taurus
FCIIYSVIGIPFTLLFLTAVVQR

SEQ ID NO: 13798 - protein, 20 aa, Bos taurus
YLVAFHLFFVMFVWSYWMTI

SEQ ID NO: 13799 - protein, 20 aa, Bos taurus
FIMLINWTVMILYNYFNAMF

SEQ ID NO: 13800 - protein, 20 aa, Bos taurus
IYGASAGALTATALVTGACL

SEQ ID NO: 13801 - protein, 24 aa, Bos taurus
KWLVLHLASQQMGLLIKGICSLAE

SEQ ID NO: 13802 - protein, 20 aa, Bos taurus
IYRAQVNCSEYFPLFLAMLW

SEQ ID NO: 13803 - protein, 20 aa, Bos taurus
TMILSTILCCIAFLIFLLQL

SEQ ID NO: 13804 - protein, 25 aa, Bos taurus
NGSLITILVIAGVFWVHRLIKFIYN

SEQ ID NO: 13805 - protein, 20 aa, Bos taurus
ILIAVGAVMMFVGFLGCYGA

SEQ ID NO: 13806 - protein, 20 aa, Bos taurus
VLMNLLFALLLDLLLVSLIK

SEQ ID NO: 13807 - protein, 20 aa, Bos taurus
ALIVIAILLAVFGLLVALVG

SEQ ID NO: 13808 - protein, 29 aa, Bos taurus
NDPDVERCLRAHRNDMETIYPFLFLGFVY

SEQ ID NO: 13809 - protein, 20 aa, Bos taurus
AARVPLGIFSVLSLASECTT

SEQ ID NO: 13810 - protein, 20 aa, Bos taurus
IPGILIIIFYGIAMFCLVAL

SEQ ID NO: 13811 - protein, 20 aa, Bos taurus
WFTLFYFGNGWIPTIITAFV

SEQ ID NO: 13812 - protein, 20 aa, Bos taurus
YFPYLVLIHTLVFMLCSNFW

SEQ ID NO: 13813 - protein, 20 aa, Bos taurus
VVFLFVLANFSMATFMDPGV

SEQ ID NO: 13814 - protein, 19 aa, Bos taurus
LWSLQLILVSTPALLVAMH

SEQ ID NO: 13815 - protein, 21 aa, Bos taurus
VPARTVFGVTTVLTMTTLSIS

SEQ ID NO: 13816 - protein, 21 aa, Bos taurus
VPARTVFGVTTVLTMTTLSIS

SEQ ID NO: 13817 - protein, 20 aa, Bos taurus
IIPVVMAGIIAIYGLVVAVL

SEQ ID NO: 13818 - protein, 20 aa, Bos taurus
SSVFPILSVTLLFFGGLCVA

SEQ ID NO: 13819 - protein, 20 aa, Bos taurus
IYGIAAAFFVYGILLMVEGF

SEQ ID NO: 13820 - protein, 20 aa, Bos taurus
ALTVGAVLLALVALFVTLAG

SEQ ID NO: 13821 - protein, 20 aa, Bos taurus
LTLLWAYFCFLLTALGVTAG

SEQ ID NO: 13822 - protein, 20 aa, Bos taurus
PLSGYYLGRLMFIVISEPDM

SEQ ID NO: 13823 - protein, 20 aa, Bos taurus
LEFIYNKTGWAMVSLCIVFA

SEQ ID NO: 13824 - protein, 20 aa, Bos taurus
FLFCELVFQLPFFPIAAYAF

SEQ ID NO: 13825 - protein, 20 aa, Bos taurus
PLFLLIGLPTIPVMLILGKM

SEQ ID NO: 13826 - protein, 20 aa, Bos taurus
WHFFYSHWNLILIVFHYYQA

SEQ ID NO: 13827 - protein, 20 aa, Bos taurus
LSPAIPVFAAMLFLFSMATL

SEQ ID NO: 13828 - protein, 20 aa, Bos taurus
VVGFLSPFNMILGGIVVVLV

SEQ ID NO: 13829 - protein, 20 aa, Bos taurus
ELAYVPIIGWMWYFTEMVFC

SEQ ID NO: 13830 - protein, 22 aa, Bos taurus
SVPARTCIGVTTVLSMTTLMIG

SEQ ID NO: 13831 - protein, 20 aa, Bos taurus
IFGCIFYTLQLLLGCLQGRW

SEQ ID NO: 13832 - protein, 20 aa, Bos taurus
ALIVICIILAVFGVLLSVVG

SEQ ID NO: 13833 - protein, 20 aa, Bos taurus
ALMVIGILLGLIAIFVATVG

SEQ ID NO: 13834 - protein, 20 aa, Bos taurus
MCIAIAISVLMILICAMATY

SEQ ID NO: 13835 - protein, 20 aa, Bos taurus
ICLCTSVLVSLTVFLLVIEE

SEQ ID NO: 13836 - protein, 20 aa, Bos taurus
IYTYIWVLFYYLMGALGITA

SEQ ID NO: 13837 - protein, 20 aa, Bos taurus
LLPVVIIAVGAFLFLVAFVG

SEQ ID NO: 13838 - protein, 20 aa, Bos taurus
WVMFVSVTAFVCSLLFLGVF

SEQ ID NO: 13839 - protein, 20 aa, Bos taurus
FGVALGLGAFLACSCFLLLD

SEQ ID NO: 13840 - protein, 22 aa, Bos taurus
LWALQLIFVSTPALLVAMHVAY

SEQ ID NO: 13841 - protein, 20 aa, Bos taurus
FWAFQVTLVAVPSALYMGFI

SEQ ID NO: 13842 - protein, 20 aa, Bos taurus
FIVVTIIILITLIEAIRLYL

SEQ ID NO: 13843 - protein, 22 aa, Bos taurus
YWVLQFLFVSTPTLVYLGHVIY

SEQ ID NO: 13844 - protein, 20 aa, Bos taurus
VMFVAVFLWLVTIIFFVLYL

SEQ ID NO: 13845 - protein, 20 aa, Bos taurus
LVGRFVPFAAVAAANCINIP

SEQ ID NO: 13846 - protein, 20 aa, Bos taurus
AIGVLAFLASAFFFVVDIYF

SEQ ID NO: 13847 - protein, 20 aa, Bos taurus
LAYPFQSLLYLLLALSTVSA

SEQ ID NO: 13848 - protein, 20 aa, Bos taurus
FLAEVLFAVTSMLSFTRLAS

SEQ ID NO: 13849 - protein, 20 aa, Bos taurus
IVCLNSVLALSAIPGAIDYC

SEQ ID NO: 13850 - protein, 20 aa, Bos taurus
AIAIFSLGFIIVGTLCALLS

SEQ ID NO: 13851 - protein, 19 aa, Bos taurus
GNGINVLKIAPEYAIKFSV

SEQ ID NO: 13852 - protein, 20 aa, Bos taurus
TNFLFFGPLGFSFFFNMLFV

SEQ ID NO: 13853 - protein, 20 aa, Bos taurus
ALMIVGIVLSVIGLLVAIFA

SEQ ID NO: 13854 - protein, 20 aa, Bos taurus
YWVLQVIFVSTPSLVYLGHA

SEQ ID NO: 13855 - protein, 24 aa, Bos taurus
VYTANQNCVDAYPTFLVMLWSAGL

SEQ ID NO: 13856 - protein, 20 aa, Bos taurus
ATNFGLAFLWLILFTPCSYV

SEQ ID NO: 13857 - protein, 20 aa, Bos taurus
VWLFLVVGGVMFILGFAGCI

SEQ ID NO: 13858 - protein, 20 aa, Bos taurus
FFVLLSMVLILGCITCFALF

SEQ ID NO: 13859 - protein, 20 aa, Bos taurus
ALLLGGAAIILIAFLVGLIS

SEQ ID NO: 13860 - protein, 20 aa, Bos taurus
AIILILLGVVMFIVSFIGVL

SEQ ID NO: 13861 - protein, 17 aa, Bos taurus
MLLVALAVFFGACYILY

SEQ ID NO: 13862 - protein, 20 aa, Bos taurus
FPVVHPVMIAVCCFLIIVGM

SEQ ID NO: 13863 - protein, 20 aa, Bos taurus
FWVFQIVVISTPSVMYLGYA

SEQ ID NO: 13864 - protein, 19 aa, Bos taurus
FWVFQIILVATPSVMYLGY

SEQ ID NO: 13865 - protein, 20 aa, Bos taurus
VWLMAGFVGGGLMVLCPGIS

SEQ ID NO: 13866 - protein, 24 aa, Bos taurus
IQACRALMITAILLGFLGLFLGMV

SEQ ID NO: 13867 - protein, 20 aa, Bos taurus
FCILAVLWGLISTAFLVMSC

SEQ ID NO: 13868 - protein, 20 aa, Bos taurus
LLFLTGLSLIIGLRRTFSFF

SEQ ID NO: 13869 - protein, 20 aa, Bos taurus
YQWEYPYLLSVVPSLLGLLS

SEQ ID NO: 13870 - protein, 20 aa, Bos taurus
LVLDVVMLFLYLGVEVIRLF

SEQ ID NO: 13871 - protein, 20 aa, Bos taurus
AFSVFFVCVAFTSNIICLLF

SEQ ID NO: 13872 - protein, 20 aa, Bos taurus
ALLAIGNVLFVAGLAFVIGL

SEQ ID NO: 13873 - protein, 20 aa, Bos taurus
MGVVALGLLTCLLAMLLAGR

SEQ ID NO: 13874 - protein, 20 aa, Bos taurus
ALMVVSLVLGFLATFVATMG

SEQ ID NO: 13875 - protein, 20 aa, Bos taurus
ALMIAASVLGLPAILLLLTV

SEQ ID NO: 13876 - protein, 20 aa, Bos taurus
VYWPLFVLIFHAISPIPHFI

SEQ ID NO: 13877 - protein, 20 aa, Bos taurus
AILLIVVGILMFLLTFCGCI

SEQ ID NO: 13878 - protein, 20 aa, Bos taurus
FAYIGLELISFILLLTDLLF

SEQ ID NO: 13879 - protein, 20 aa, Bos taurus
LATAYILVVAGIVVMVTGAL

SEQ ID NO: 13880 - protein, 20 aa, Bos taurus
AGSVPSLAAGLLFGGLAGLG

SEQ ID NO: 13881 - protein, 22 aa, Bos taurus
LWALQLIFVTCPSLLVILHVAY

SEQ ID NO: 13882 - protein, 14 aa, Bos taurus
VLVIVGSVIMVVAF

SEQ ID NO: 13883 - protein, 20 aa, Bos taurus
VWLFVVVGGVMSVLGFAGCI

SEQ ID NO: 13884 - protein, 20 aa, Bos taurus
SGFGLSILWILLFTPCSFVC

SEQ ID NO: 13885 - protein, 20 aa, Bos taurus
PLHSLLAFVGANLVFWFLAL

SEQ ID NO: 13886 - protein, 20 aa, Bos taurus
GLMIAAVSLGFFGSIFALIG

SEQ ID NO: 13887 - protein, 20 aa, Bos taurus
ILLRKSIGALEVACGIVMTL

SEQ ID NO: 13888 - protein, 22 aa, Bos taurus
LWALQLIFVSTPALLVAMHVAY

SEQ ID NO: 13889 - protein, 33 aa, Bos taurus
LRTDDRVERVRRAHLNDLENIVPFLGIGLLYSL

SEQ ID NO: 13890 - protein, 20 aa, Bos taurus
MVTYMAVGGGLMAAALPMLG

SEQ ID NO: 13891 - protein, 20 aa, Bos taurus
AMMVTSSAMSSLACIVSVVG

SEQ ID NO: 13892 - protein, 22 aa, Bos taurus
IRYWVFQIIMVCTPSLCFITYS

SEQ ID NO: 13893 - protein, 20 aa, Bos taurus
LCISVLLALTVFLLLISKIV

SEQ ID NO: 13894 - protein, 21 aa, Bos taurus
VMVGLAWTLSILISFIPVQLH

SEQ ID NO: 13895 - protein, 26 aa, Bos taurus
VQATMILSIIFSVLSLFLFFCQLFTL

SEQ ID NO: 13896 - protein, 20 aa, Bos taurus
ALMITADILAGFGFITLLLG

SEQ ID NO: 13897 - protein, 20 aa, Bos taurus
VFTYPHSCLVLDLTLLFLMG

SEQ ID NO: 13898 - protein, 20 aa, Bos taurus
SPLVFALGITILGVCHYTLT

SEQ ID NO: 13899 - protein, 20 aa, Bos taurus
LLIFFSVVNVSVGLLGAFAY

SEQ ID NO: 13900 - protein, 20 aa, Bos taurus
LFIIQDIAILFNIIIIFLMF

SEQ ID NO: 13901 - protein, 20 aa, Bos taurus
APILANFVHIIIVILGLFGT

SEQ ID NO: 13902 - protein, 20 aa, Bos taurus
AISGYLVWGGIFFIISGSLS

SEQ ID NO: 13903 - protein, 20 aa, Bos taurus
LVATAALAAGQLTFVLGLTG

SEQ ID NO: 13904 - protein, 20 aa, Bos taurus
FALPLSILIAMGALLLCLIG

SEQ ID NO: 13905 - protein, 20 aa, Bos taurus
ILIFAGALVMVTGFLGFGAV

SEQ ID NO: 13906 - protein, 20 aa, Bos taurus
ALLSISLIMWNALYTAEKVI

SEQ ID NO: 13907 - protein, 20 aa, Bos taurus
FGWVMFVAVFYWVLTVFFLI

SEQ ID NO: 13908 - protein, 20 aa, Bos taurus
LSTMSFVLNALTCALGLLYF

SEQ ID NO: 13909 - protein, 20 aa, Bos taurus
GASLLCNLIGFGYPAYVSIK

SEQ ID NO: 13910 - protein, 18 aa, Bos taurus
CELFSSSFIACMVTIILL

SEQ ID NO: 13911 - protein, 20 aa, Bos taurus
LYGLAAIGVPALALFLIGVI

SEQ ID NO: 13912 - protein, 20 aa, Bos taurus
LHTLLSALVVAVALGMLVCA

SEQ ID NO: 13913 - protein, 14 aa, Bos taurus
VLAVSGILTMGLAL

SEQ ID NO: 13914 - protein, 16 aa, Bos taurus
VATVAVAFHANLNYVW

SEQ ID NO: 13915 - protein, 20 aa, Bos taurus
TMASLGCGFVGPVVGGWYRV

SEQ ID NO: 13916 - protein, 14 aa, Bos taurus
ILIFVGAVIMILGF

SEQ ID NO: 13917 - protein, 20 aa, Bos taurus
AIYGFFFTGPLGHFFYLLME

SEQ ID NO: 13918 - protein, 20 aa, Bos taurus
CSIAVGAGLLAFLSSLAFLA

SEQ ID NO: 13919 - protein, 20 aa, Bos taurus
ILAFLIPFVACIFQCYLYLF

SEQ ID NO: 13920 - protein, 20 aa, Bos taurus
QVVFTACMTLTAHPGVFPVT

SEQ ID NO: 13921 - protein, 20 aa, Bos taurus
GCSLWGIFFIISGISIIRAT

SEQ ID NO: 13922 - protein, 20 aa, Bos taurus
IIGGVIAVGVFLLLIAVAGL

SEQ ID NO: 13923 - protein, 20 aa, Bos taurus
ILIVVLSLSFMHNLLLGFEF

SEQ ID NO: 13924 - protein, 20 aa, Bos taurus
VPFVLIGTGTVIILLGTFGC

SEQ ID NO: 13925 - protein, 20 aa, Bos taurus
ILHVTQARIAAGLPMAVIPF

SEQ ID NO: 13926 - protein, 20 aa, Bos taurus
QYWPLFVLFFYILSPIPYCI

SEQ ID NO: 13927 - protein, 20 aa, Bos taurus
VISVGSGLLSVSLGLVALLA

SEQ ID NO: 13928 - protein, 21 aa, Bos taurus
LIQSAVLYSVMTLVSTYLVAF

SEQ ID NO: 13929 - protein, 19 aa, Bos taurus
NLLKSCAFYWGFTSWIAYY

SEQ ID NO: 13930 - protein, 20 aa, Bos taurus
HAFHTCGVFSTLAFFMINAV

SEQ ID NO: 13931 - protein, 20 aa, Bos taurus
LIPAVVIIAVGALLFIIGLI

SEQ ID NO: 13932 - protein, 20 aa, Bos taurus
FVNVGYFLIAAGAVLFALGF

SEQ ID NO: 13933 - protein, 20 aa, Bos taurus
ISCFEWWFPGIIGAGVMAIP

SEQ ID NO: 13934 - protein, 20 aa, Bos taurus
FEGICFSGIMMLVVAAVLLV

SEQ ID NO: 13935 - protein, 20 aa, Bos taurus
VVGVVIAVGIFLFLIALVGL

SEQ ID NO: 13936 - protein, 20 aa, Bos taurus
TGLASSLIGYVLFDFIDGGE

SEQ ID NO: 13937 - protein, 21 aa, Bos taurus
WVMFASVFCFVATTVLAFLYV

SEQ ID NO: 13938 - protein, 20 aa, Bos taurus
ILSVTSAIVVITSGISVIVL

SEQ ID NO: 13939 - protein, 20 aa, Bos taurus
LLITGAYILLAMGGLLFLLG

SEQ ID NO: 13940 - protein, 20 aa, Bos taurus
WWIAGGSGANFGLALLWLLL

SEQ ID NO: 13941 - protein, 20 aa, Bos taurus
VQVLMVLSLILCCLSFILFM

SEQ ID NO: 13942 - protein, 20 aa, Bos taurus
LAALQRGLAPALLYQFLMNG

SEQ ID NO: 13943 - protein, 20 aa, Bos taurus
MMLKIAGPACAVVGLGAVIL

SEQ ID NO: 13944 - protein, 20 aa, Bos taurus
FPGVTSVWALFIYGTSILIV

SEQ ID NO: 13945 - protein, 20 aa, Bos taurus
VLFAVSVLMFIISSMLVYGA

SEQ ID NO: 13946 - protein, 20 aa, Bos taurus
GYSFLSVIEMIFAAIFFVVY

SEQ ID NO: 13947 - protein, 20 aa, Bos taurus
SGAPIWTGAVAVLAGAVAFI

SEQ ID NO: 13948 - protein, 20 aa, Bos taurus
LAVGTALCLLALLVLVKQLM

SEQ ID NO: 13949 - protein, 20 aa, Bos taurus
GFCVLGIIMMATTNSLMWTF

SEQ ID NO: 13950 - protein, 20 aa, Bos taurus
LFPFYFHISMGCAFVNLCIL

SEQ ID NO: 13951 - protein, 20 aa, Bos taurus
WFLFGSALLLVSVSIAFYCI

SEQ ID NO: 13952 - protein, 20 aa, Bos taurus
MLGPGWVPSTLAALILAISQ

SEQ ID NO: 13953 - protein, 20 aa, Bos taurus
WMYLIYTIMFLGALGMMLGL

SEQ ID NO: 13954 - protein, 20 aa, Bos taurus
LGIGLAISLSVVGAAWGIYI

SEQ ID NO: 13955 - protein, 20 aa, Bos taurus
YFLALTFFVAAFHLLFDFLA

SEQ ID NO: 13956 - protein, 20 aa, Bos taurus
GGPQFAEVFVIVWFGAVTIT

SEQ ID NO: 13957 - protein, 20 aa, Bos taurus
FYYSTGMSVGIVASLLIIIF

SEQ ID NO: 13958 - protein, 20 aa, Bos taurus
YACFGLFGIIALQTIAYSIL

SEQ ID NO: 13959 - protein, 20 aa, Bos taurus
LCYVFLIWMLTLVAIVPNLC

SEQ ID NO: 13960 - protein, 20 aa, Bos taurus
SPIYGGLGLIVSGGVGCGIV

SEQ ID NO: 13961 - protein, 20 aa, Bos taurus
WILAPIWGTLYSAMGYGSYM

SEQ ID NO: 13962 - protein, 20 aa, Bos taurus
GIPPGPAPWPVVGNFGFVLL

SEQ ID NO: 13963 - protein, 23 aa, Bos taurus
ALALLGLGISSFILVSGCANMVL

SEQ ID NO: 13964 - protein, 20 aa, Bos taurus
FLGVYSFGLFTTTIFANAGQ

SEQ ID NO: 13965 - protein, 20 aa, Bos taurus
CVTWNCIAALLVGCAGIGVG

SEQ ID NO: 13966 - protein, 20 aa, Bos taurus
VSSFLLITMLFIISLSLLVG

SEQ ID NO: 13967 - protein, 20 aa, Bos taurus
LSVRSVFFGVFQSFVVLLYI

SEQ ID NO: 13968 - protein, 20 aa, Bos taurus
WWGAIAACTVLARCLVFPLI

SEQ ID NO: 13969 - protein, 20 aa, Bos taurus
ALVWVVMEVLALLLGIYLAT

SEQ ID NO: 13970 - protein, 20 aa, Bos taurus
WVVFIDCVGVGLLISTLMWF

SEQ ID NO: 13971 - protein, 20 aa, Bos taurus
FVVLHLILQGMVYTEYTWEI

SEQ ID NO: 13972 - protein, 20 aa, Bos taurus
IQFGYVYGISAIGCLGMFCL

SEQ ID NO: 13973 - protein, 20 aa, Bos taurus
LGTAYVSATTGAVATALGLN

SEQ ID NO: 13974 - protein, 20 aa, Bos taurus
VFATFPIVLGILVYGLSLLC

SEQ ID NO: 13975 - protein, 22 aa, Bos taurus
SVRQMAVSYITATTTAVATAVG

SEQ ID NO: 13976 - protein, 20 aa, Bos taurus
IFLLVAGLLLTVLVIVGAFL

SEQ ID NO: 13977 - protein, 20 aa, Bos taurus
FGYVYGMSAIGCLGIHALLN

SEQ ID NO: 13978 - protein, 20 aa, Bos taurus
LFRLQLALFVNSLMLLGSIY

SEQ ID NO: 13979 - protein, 20 aa, Bos taurus
LNFGLNVVENVALLVLTYVS

SEQ ID NO: 13980 - protein, 20 aa, Bos taurus
FLNVLAGALFGPWLGLLLCC

SEQ ID NO: 13981 - protein, 20 aa, Bos taurus
WLEFFLTSIFSALWVLPLFV

SEQ ID NO: 13982 - protein, 20 aa, Bos taurus
AHLYNFLLLKIFLFNHWLLG

SEQ ID NO: 13983 - protein, 20 aa, Bos taurus
LLLGAGVIVSSTFLGLFPRL

SEQ ID NO: 13984 - protein, 20 aa, Bos taurus
SRIIKYMIWFSTAVLIGLYV

SEQ ID NO: 13985 - protein, 20 aa, Bos taurus
NLLLVALCLTFGVEVGFKFA

SEQ ID NO: 13986 - protein, 20 aa, Bos taurus
FLLCVNYFFYGETVTDYFFT

SEQ ID NO: 13987 - protein, 17 aa, Bos taurus
WWVPPCCGTAAAVVGLL

SEQ ID NO: 13988 - protein, 20 aa, Bos taurus
LLYFIALAIGTLYSNALFQL

SEQ ID NO: 13989 - protein, 20 aa, Bos taurus
MMYFCQMLAAVESINAAIGV

SEQ ID NO: 13990 - protein, 20 aa, Bos taurus
AWLVVDSIVDVIFLVDIVLN

SEQ ID NO: 13991 - protein, 20 aa, Bos taurus
ALALARAPAACLNFNCMLIL

SEQ ID NO: 13992 - protein, 19 aa, Bos taurus
MVLISLCFGLSIATMVQCF

SEQ ID NO: 13993 - protein, 24 aa, Bos taurus
LANVIRYFPTQALNFAFKDKYKQI

SEQ ID NO: 13994 - protein, 22 aa, Bos taurus
LHVLQVALAFGLALATLVQAVG

SEQ ID NO: 13995 - protein, 22 aa, Bos taurus
LYSGLPAGLQRQISFASLRIGL

SEQ ID NO: 13996 - protein, 20 aa, Bos taurus
VHPLCMIIGLVFLQGDALLV

SEQ ID NO: 13997 - protein, 18 aa, Bos taurus
GLSAGLLRQATYTTTRLG

SEQ ID NO: 13998 - protein, 24 aa, Bos taurus
LANVIRYFPTQALNFAFKDKYKQI

SEQ ID NO: 13999 - protein, 17 aa, Bos taurus
NVKVSLAFGLSIATLAQ

SEQ ID NO: 14000 - protein, 18 aa, Bos taurus
VLQIAMAFGLAIGTLVQA

SEQ ID NO: 14001 - protein, 18 aa, Bos taurus
YWLAFDYLSDVVYLLDMF

SEQ ID NO: 14002 - protein, 21 aa, Bos taurus
FFIVETVCIVWFSFEFVVRCF

SEQ ID NO: 14003 - protein, 20 aa, Bos taurus
FIQAGLLSALGSLGLMIWLM

SEQ ID NO: 14004 - protein, 23 aa, Bos taurus
AAAVGLGLTLFTCGPHTLHSLVT

SEQ ID NO: 14005 - protein, 18 aa, Bos taurus
LWLLMDYLCDLIYLLDIT

SEQ ID NO: 14006 - protein, 20 aa, Bos taurus
ITHGLMAGVIITATVILVSA

SEQ ID NO: 14007 - protein, 17 aa, Bos taurus
PLKFFQTGALLEILHCA

SEQ ID NO: 14008 - protein, 20 aa, Bos taurus
AVLTAVGIVIAILAIITGEF

SEQ ID NO: 14009 - protein, 20 aa, Bos taurus
FTFYLIAFIAGTAVIVDKPW

SEQ ID NO: 14010 - protein, 20 aa, Bos taurus
WVLFWAYAFGSCVNHSMTLA

SEQ ID NO: 14011 - protein, 20 aa, Bos taurus
FDFFLAACEIIFCLFILYYV

SEQ ID NO: 14012 - protein, 20 aa, Bos taurus
VLFFLTTNQCFSSVSAVELL

SEQ ID NO: 14013 - protein, 20 aa, Bos taurus
FVFYLCCFVCGTMVLYHESW

SEQ ID NO: 14014 - protein, 24 aa, Bos taurus
LANVIRYFPTQALNFAFKDKYKQI

SEQ ID NO: 14015 - protein, 20 aa, Bos taurus
LIVALILRSIYYLGIGPTLN

SEQ ID NO: 14016 - protein, 20 aa, Bos taurus
HWSGLLWTAMLISLAIVIAL

SEQ ID NO: 14017 - protein, 20 aa, Bos taurus
VYFVKVAWAWTFCLLLPFIA

SEQ ID NO: 14018 - protein, 20 aa, Bos taurus
WHPVLMVTGMVVLYSAASLV

SEQ ID NO: 14019 - protein, 20 aa, Bos taurus
AAWTVQELPSLALPLLACAG

SEQ ID NO: 14020 - protein, 20 aa, Bos taurus
VLVVSSLSPLCVLLWRELTG

SEQ ID NO: 14021 - protein, 20 aa, Bos taurus
MGPALERIDYLLILWIIGMI

SEQ ID NO: 14022 - protein, 25 aa, Bos taurus
FLVSLAAADILVATLIIPFSLANEL

SEQ ID NO: 14023 - protein, 20 aa, Bos taurus
WTLMLMSLILFIGSTNLLGL

SEQ ID NO: 14024 - protein, 19 aa, Bos taurus
GWAPTFIGYSLQGLCKFGF

SEQ ID NO: 14025 - protein, 20 aa, Bos taurus
GDWLLLLETFAIFIFGAEFA

SEQ ID NO: 14026 - protein, 20 aa, Bos taurus
FIKFICHTASYLTFLFLLLL

SEQ ID NO: 14027 - protein, 18 aa, Bos taurus
VWLVLDYVSDVVYIADLF

SEQ ID NO: 14028 - protein, 20 aa, Bos taurus
GGFLTINLAFGFAVTLGILI

SEQ ID NO: 14029 - protein, 20 aa, Bos taurus
AAHLLADVGSMMGSLFSLWL

SEQ ID NO: 14030 - protein, 20 aa, Bos taurus
IGLVMQLCQSISLLELLHIY

SEQ ID NO: 14031 - protein, 16 aa, Bos taurus
VYYPQVHLGTISGAGV

SEQ ID NO: 14032 - protein, 19 aa, Bos taurus
AYLVPYLVLLIIIGIPLFF

SEQ ID NO: 14033 - protein, 24 aa, Bos taurus
LANVIRYFPTQALNFAFKDKYKQL

SEQ ID NO: 14034 - protein, 21 aa, Bos taurus
LAHVEAVCIAWFTMEYLLRFL

SEQ ID NO: 14035 - protein, 20 aa, Bos taurus
FPLAFFCMDTACVLIFTGEY

SEQ ID NO: 14036 - protein, 20 aa, Bos taurus
WHPVLMSLAFSFLMTEALLV

SEQ ID NO: 14037 - protein, 19 aa, Bos taurus
FLYLVNLYFLYQYSTRLET

SEQ ID NO: 14038 - protein, 20 aa, Bos taurus
PMFSILLWIAVAICTSMLFF

SEQ ID NO: 14039 - protein, 20 aa, Bos taurus
MIFRTEGLFGFYKGILPPIL

SEQ ID NO: 14040 - protein, 20 aa, Bos taurus
SFHMFFDSTAILAGLAASVI

SEQ ID NO: 14041 - protein, 19 aa, Bos taurus
GNGTNVIKIAPETAVKFWA

SEQ ID NO: 14042 - protein, 20 aa, Bos taurus
SAFGFAFDAILDVLSSAIVL

SEQ ID NO: 14043 - protein, 22 aa, Bos taurus
LYSGLVAGLQRQMSFASIRIGL

SEQ ID NO: 14044 - protein, 19 aa, Bos taurus
GLSSLLYGSIPKAAVRFGT

SEQ ID NO: 14045 - protein, 17 aa, Bos taurus
GAMMIRIFPYGAIQFMA

SEQ ID NO: 14046 - protein, 20 aa, Bos taurus
AFNFLLVWYYCTLTIRESIL

SEQ ID NO: 14047 - protein, 20 aa, Bos taurus
YFGMYRGAAVNLTLVTPEKA

SEQ ID NO: 14048 - protein, 20 aa, Bos taurus
GLGSPLLGLTFINALVFGVQ

SEQ ID NO: 14049 - protein, 20 aa, Bos taurus
ILEYVCISWFTGEFVLRFLC

SEQ ID NO: 14050 - protein, 19 aa, Bos taurus
GNGINVLKIAPESAIKFMA

SEQ ID NO: 14051 - protein, 20 aa, Bos taurus
YLTIFDLFSLITCLVSYWVM

SEQ ID NO: 14052 - protein, 20 aa, Bos taurus
TLWSGLPATLVMTVPATAAY

SEQ ID NO: 14053 - protein, 20 aa, Bos taurus
IIQAFLSMAVGALTGDALLH

SEQ ID NO: 14054 - protein, 22 aa, Bos taurus
LYSGLVAGLQRQMSFASVRIGL

SEQ ID NO: 14055 - protein, 20 aa, Bos taurus
KCLFGAMLNIAAVLCVATIY

SEQ ID NO: 14056 - protein, 26 aa, Bos taurus
GMSPSIVRCVPGVGIYFGTLYSLKQY

SEQ ID NO: 14057 - protein, 20 aa, Bos taurus
ALHMLTDLSAIILTLLALWL

SEQ ID NO: 14058 - protein, 20 aa, Bos taurus
SCVFSQVMNMAAFLALVVAV

SEQ ID NO: 14059 - protein, 20 aa, Bos taurus
FKLYLTIILLLGAVACRFFL

SEQ ID NO: 14060 - protein, 20 aa, Bos taurus
VYAGVPSTAIGSFPNAAAFF

SEQ ID NO: 14061 - protein, 20 aa, Bos taurus
SCIFSQVLNIGAASAAWICI

SEQ ID NO: 14062 - protein, 20 aa, Bos taurus
FSTYVCLVLLVANILRILFW

SEQ ID NO: 14063 - protein, 20 aa, Bos taurus
LWSGLPPTLVMAVPATVIYF

SEQ ID NO: 14064 - protein, 20 aa, Bos taurus
LVTFTHGILSIGLSAYIGFI

SEQ ID NO: 14065 - protein, 20 aa, Bos taurus
LLSIGYGAVQFLSFEALTEL

SEQ ID NO: 14066 - protein, 21 aa, Bos taurus
ILVPLVWDLGLLLLFVGQHSL

SEQ ID NO: 14067 - protein, 20 aa, Bos taurus
GMSFPLASIAVYNSVVFGVF

SEQ ID NO: 14068 - protein, 20 aa, Bos taurus
TYPRLYRGFVASVVAVVRAD

SEQ ID NO: 14069 - protein, 20 aa, Bos taurus
AGVTYLFVQLCKMLFLATFF

SEQ ID NO: 14070 - protein, 20 aa, Bos taurus
IIEAAIRTLFAVIGILVEQF

SEQ ID NO: 14071 - protein, 20 aa, Bos taurus
FYLWSPGFGAALPASYVAIL

SEQ ID NO: 14072 - protein, 20 aa, Bos taurus
VMITYNFSIVLFSVYMFYEF

SEQ ID NO: 14073 - protein, 19 aa, Bos taurus
VVYMLHLAAADVLFVCVLP

SEQ ID NO: 14074 - protein, 20 aa, Bos taurus
FIGLISVSNLFMGAYTGILT

SEQ ID NO: 14075 - protein, 20 aa, Bos taurus
FGLYGAFLASHLIIQSLFAF

SEQ ID NO: 14076 - protein, 20 aa, Bos taurus
TIHKNLCINLFIAEFIFLIG

SEQ ID NO: 14077 - protein, 20 aa, Bos taurus
TIHKNLCISLFVAELLFLIG

SEQ ID NO: 14078 - protein, 20 aa, Bos taurus
TIHKNLCINLFLAELLFLVG

SEQ ID NO: 14079 - protein, 25 aa, Bos taurus
TLLMIGLTTNMLTMYQWWRDVIRES

SEQ ID NO: 14080 - protein, 22 aa, Bos taurus
YILLNLAVADLFMVFGGFTTTL

SEQ ID NO: 14081 - protein, 23 aa, Bos taurus
IVNLAVADLLLTSTVLPFSAIFE

SEQ ID NO: 14082 - protein, 22 aa, Bos taurus
YLIVSLAVADLLVATLVMPWVV

SEQ ID NO: 14083 - protein, 19 aa, Bos taurus
NGPNALIASLALGDLIYVV

SEQ ID NO: 14084 - protein, 27 aa, Bos taurus
VASVFLLNLALADLCFLLTLPLWAVYT

SEQ ID NO: 14085 - protein, 21 aa, Bos taurus
LHLSVADLLFVLTLPFWAVDA

SEQ ID NO: 14086 - protein, 25 aa, Bos taurus
ILIASLALGDLLHIIIDIPINTYKL

SEQ ID NO: 14087 - protein, 20 aa, Bos taurus
NLYIVSLSVADLIVGVVVMP

SEQ ID NO: 14088 - protein, 19 aa, Bos taurus
SGKSQVLFAVVFTARYLDL

SEQ ID NO: 14089 - protein, 20 aa, Bos taurus
LSYLLLFSLLCCFSSSLFFI

SEQ ID NO: 14090 - protein, 20 aa, Bos taurus
YFLFSLACADLIIGVFSMNL

SEQ ID NO: 14091 - protein, 20 aa, Bos taurus
MYYFICCLAVSDLLVSVSNV

SEQ ID NO: 14092 - protein, 20 aa, Bos taurus
IGHLCLADLAVALFQVLPQL

SEQ ID NO: 14093 - protein, 24 aa, Bos taurus
IYIFNLALADALATSTLPFQSVNY

SEQ ID NO: 14094 - protein, 20 aa, Bos taurus
IVVSFLLLLAVLTATYYVEG

SEQ ID NO: 14095 - protein, 22 aa, Bos taurus
FLMCNLAFADFCMGLYLLLIAS

SEQ ID NO: 14096 - protein, 23 aa, Bos taurus
IYYLMANLAAADFFAGLAYFYLM

SEQ ID NO: 14097 - protein, 23 aa, Bos taurus
ITSLACADLVMGLAVVPFGACHI

SEQ ID NO: 14098 - protein, 20 aa, Bos taurus
VLVVLVFALSIGALVIYFID

SEQ ID NO: 14099 - protein, 25 aa, Bos taurus
FLVSLASADILVATLVIPFSLANEV

SEQ ID NO: 14100 - protein, 20 aa, Bos taurus
LLNLAISDLLFIITIPFWAH

SEQ ID NO: 14101 - protein, 28 aa, Bos taurus
PAVIYMANLALADLLSVTWFPLKIAYHI

SEQ ID NO: 14102 - protein, 20 aa, Bos taurus
ILVVYNLGLTLLSLYMFCEL

SEQ ID NO: 14103 - protein, 20 aa, Bos taurus
LIWCSSSPTIVSAFSCFGLW

SEQ ID NO: 14104 - protein, 21 aa, Bos taurus
FIGNLALSDLLAGVAYTANLL

SEQ ID NO: 14105 - protein, 20 aa, Bos taurus
FLLHLAVADALLVLTLPLWA

SEQ ID NO: 14106 - protein, 22 aa, Bos taurus
YFLMSLAIADMLLGFLVMPVST

SEQ ID NO: 14107 - protein, 26 aa, Bos taurus
FFVISLAVSDLLVAVLVMPWKAVAEI

SEQ ID NO: 14108 - protein, 20 aa, Bos taurus
HIHANLSCAVLVAQVLLLIS

SEQ ID NO: 14109 - protein, 20 aa, Bos taurus
IYLLNLALSDLLFVATLPFW

SEQ ID NO: 14110 - protein, 19 aa, Bos taurus
ITLHKNLFFSFVCNSVITI

SEQ ID NO: 14111 - protein, 20 aa, Bos taurus
FVVLNLMGFVAYSVFNIGLF

SEQ ID NO: 14112 - protein, 20 aa, Bos taurus
VWFLNLAVADFLFNVFLPVH

SEQ ID NO: 14113 - protein, 20 aa, Bos taurus
YFIVNLALADLCMAAFNAAF

SEQ ID NO: 14114 - protein, 20 aa, Bos taurus
MYFFICSLAISDMLGSLYKI

SEQ ID NO: 14115 - protein, 20 aa, Bos taurus
IGWLALTDMVGQLLTSPVVI

SEQ ID NO: 14116 - protein, 19 aa, Bos taurus
ILNLAVADLFLLFTLPFWA

SEQ ID NO: 14117 - protein, 22 aa, Bos taurus
FLMCNLAFADLCIGIYLLLIAS

SEQ ID NO: 14118 - protein, 20 aa, Bos taurus
YFLLSLACADLIIGVISMNL

SEQ ID NO: 14119 - protein, 18 aa, Bos taurus
NVFVTSLATADLVVGLLV

SEQ ID NO: 14120 - protein, 20 aa, Bos taurus
LLVLSLALADSGISLNALVA

SEQ ID NO: 14121 - protein, 21 aa, Bos taurus
VYMFNLALADFLYVLTLPALI

SEQ ID NO: 14122 - protein, 25 aa, Bos taurus
YILVNVSLGGFIYCIFSVFIVFITS

SEQ ID NO: 14123 - protein, 22 aa, Bos taurus
FFFMKHLSIADLVVAVFQVLPQ

SEQ ID NO: 14124 - protein, 24 aa, Bos taurus
LVTGLGVTDLLGTCFLSPAVFAAY

SEQ ID NO: 14125 - protein, 21 aa, Bos taurus
LSSWFTAMLHCFGGGILSCVL

SEQ ID NO: 14126 - protein, 20 aa, Bos taurus
VLASLALWDFLVLFFCLPVV

SEQ ID NO: 14127 - protein, 20 aa, Bos taurus
PGWYWASYAVFFATYLTLAC

SEQ ID NO: 14128 - protein, 23 aa, Bos taurus
YFLVSLAAADVAVGLFAIPFAVT

SEQ ID NO: 14129 - protein, 20 aa, Bos taurus
MHLFLSFMLRAVSIFVKDAV

SEQ ID NO: 14130 - protein, 17 aa, Bos taurus
ILFTTALPTRIAYYALG

SEQ ID NO: 14131 - protein, 20 aa, Bos taurus
ILIVNLSFSDLLVAIMCLPF

SEQ ID NO: 14132 - protein, 20 aa, Bos taurus
LLFIVPVYAFDSWLSLLLLG

SEQ ID NO: 14133 - protein, 20 aa, Bos taurus
VYLLNLAMADLLFAMTLPIW

SEQ ID NO: 14134 - protein, 20 aa, Bos taurus
FLMCNLSFADFCMGLYLLLI

SEQ ID NO: 14135 - protein, 18 aa, Bos taurus
FIHMNLFVSFMLRAISVF

SEQ ID NO: 14136 - protein, 23 aa, Bos taurus
IYIFNLALADALVTTTMPFQSTV

SEQ ID NO: 14137 - protein, 20 aa, Bos taurus
LALSDVLMCTACVPLTLAYA

SEQ ID NO: 14138 - protein, 19 aa, Bos taurus
TIFYTNLAIADFLFCVTLP

SEQ ID NO: 14139 - protein, 22 aa, Bos taurus
WLLTHLLWFANAHLLGWFSPTI

SEQ ID NO: 14140 - protein, 23 aa, Bos taurus
TLVCGLAVTDLLGTLLVSPVTIA

SEQ ID NO: 14141 - protein, 20 aa, Bos taurus
TVHLHLCICLFVGSAIFLAG

SEQ ID NO: 14142 - protein, 19 aa, Bos taurus
ALLLCLTWLGLQAALYLLP

SEQ ID NO: 14143 - protein, 20 aa, Bos taurus
LCGLVLTDFMGLLVTGAIVV

SEQ ID NO: 14144 - protein, 25 aa, Bos taurus
WILVNLAIADLAETIIASTISVVNQ

SEQ ID NO: 14145 - protein, 24 aa, Bos taurus
FICSLAVADMLVSVSNGSETIVIT

SEQ ID NO: 14146 - protein, 26 aa, Bos taurus
NLFIMSLASADLVMGLLVVPFGATIV

SEQ ID NO: 14147 - protein, 19 aa, Bos taurus
FMVNLTMADLLFLVTLPLW

SEQ ID NO: 14148 - protein, 20 aa, Bos taurus
VHGALMFVAWMTTVSVGVLI

SEQ ID NO: 14149 - protein, 20 aa, Bos taurus
ASWLCAMLHCFGSYILADLL

SEQ ID NO: 14150 - protein, 20 aa, Bos taurus
SVFYVLVFGLTITDLLGKCL

SEQ ID NO: 14151 - protein, 20 aa, Bos taurus
LFVGVSCLVPTLSLLHYSTG

SEQ ID NO: 14152 - protein, 19 aa, Bos taurus
YVLEAAVYTFTMFFSTFYH

SEQ ID NO: 14153 - protein, 20 aa, Bos taurus
LWLSLFLHAGVLHCLVSVCF

SEQ ID NO: 14154 - protein, 20 aa, Bos taurus
LYHAWLAAVVIFGPLLQFHV

SEQ ID NO: 14155 - protein, 20 aa, Bos taurus
YPTCVAFAWVSLNAWFWSTV

SEQ ID NO: 14156 - protein, 19 aa, Bos taurus
DHMVSLACSDILVFLIGMP

SEQ ID NO: 14157 - protein, 20 aa, Bos taurus
LILLETILFGSLLLYFPVVI

SEQ ID NO: 14158 - protein, 20 aa, Bos taurus
MVRYVILFCHFLNFAGTGFF

SEQ ID NO: 14159 - protein, 20 aa, Bos taurus
LLIGLIAAVNMLMGVSSAVL

SEQ ID NO: 14160 - protein, 20 aa, Bos taurus
IYILNLAVADVLLMLGLPFV

SEQ ID NO: 14161 - protein, 20 aa, Bos taurus
VYLCNLTVADLFYICSLPFW

SEQ ID NO: 14162 - protein, 22 aa, Bos taurus
FIVSLAVADVAVGALVIPLAIL

SEQ ID NO: 14163 - protein, 19 aa, Bos taurus
LLLKHLTLANLLETLIVMP

SEQ ID NO: 14164 - protein, 24 aa, Bos taurus
NIYILNLAIADELFMLGLPFLAMQ

SEQ ID NO: 14165 - protein, 25 aa, Bos taurus
VYVINLALADLLYLLSIPFIVATYV

SEQ ID NO: 14166 - protein, 23 aa, Bos taurus
FVGSLAVADMLVSLSNSWETITI

SEQ ID NO: 14167 - protein, 20 aa, Bos taurus
FFIANLAVADLLVNTLCLPF

SEQ ID NO: 14168 - protein, 21 aa, Bos taurus
VTNAFLLSLAVSDLLLAVACM

SEQ ID NO: 14169 - protein, 20 aa, Bos taurus
CFKAVLFLTGLLFGSVVIFL

SEQ ID NO: 14170 - protein, 22 aa, Bos taurus
YFIVNLSLADVLVTAICLPASL

SEQ ID NO: 14171 - protein, 20 aa, Bos taurus
FLNLALSNLGFLLTLPFWAY

SEQ ID NO: 14172 - protein, 23 aa, Bos taurus
YFIVSLALADIAVGVLVMPLAIV

SEQ ID NO: 14173 - protein, 20 aa, Bos taurus
IHWLMAALTFTKSVSLLFHS

SEQ ID NO: 14174 - protein, 20 aa, Bos taurus
VFLALCLLWAALRTTLFSFY

SEQ ID NO: 14175 - protein, 20 aa, Bos taurus
VYLMNLSIADLLYICTLPLW

SEQ ID NO: 14176 - protein, 19 aa, Bos taurus
TVTGIIAANVFVFCLWRVP

SEQ ID NO: 14177 - protein, 20 aa, Bos taurus
LIANLTVADLLYCTLLQPFS

SEQ ID NO: 14178 - protein, 19 aa, Bos taurus
SGKSQLLFALVFTTRYLDL

SEQ ID NO: 14179 - protein, 20 aa, Bos taurus
LGFAAGVMLAASYWSLLAPA

SEQ ID NO: 14180 - protein, 20 aa, Bos taurus
LLGTQVFFLLGTLGLFCLVF

SEQ ID NO: 14181 - protein, 20 aa, Bos taurus
FVFSLTLSNFLLSVLVLPFV

SEQ ID NO: 14182 - protein, 20 aa, Bos taurus
VWTYYVSYAIFFVSLIVLSC

SEQ ID NO: 14183 - protein, 20 aa, Bos taurus
FIVYLKNIVIADFLMSLTFP

SEQ ID NO: 14184 - protein, 20 aa, Bos taurus
VTVYMMNVALLDLVFIMSLP

SEQ ID NO: 14185 - protein, 20 aa, Bos taurus
WVNVLLKILPVLYLAGFLGT

SEQ ID NO: 14186 - protein, 20 aa, Bos taurus
LMVLHLALADLAVLLTAPFF

SEQ ID NO: 14187 - protein, 20 aa, Bos taurus
VSIYLINLLTADFLLTLALP

SEQ ID NO: 14188 - protein, 20 aa, Bos taurus
VVSVYMCNLAASDLLFTLSL

SEQ ID NO: 14189 - protein, 20 aa, Bos taurus
YLFSLAVSDLLVLLLGMPLE

SEQ ID NO: 14190 - protein, 20 aa, Bos taurus
LNELFGKFLFISFDLFTAFL

SEQ ID NO: 14191 - protein, 20 aa, Bos taurus
YLLNLALADILFLLTLPFWA

SEQ ID NO: 14192 - protein, 20 aa, Bos taurus
FFLSLLLAGLLTGLALPALP

SEQ ID NO: 14193 - protein, 22 aa, Bos taurus
HVFILNLAIADGLFTLVLPTNI

SEQ ID NO: 14194 - protein, 24 aa, Bos taurus
NLFILNLAVADELFTLVPPVNIAD

SEQ ID NO: 14195 - protein, 20 aa, Bos taurus
LLIANLAISDFLVAIICCPF

SEQ ID NO: 14196 - protein, 20 aa, Bos taurus
LLIANLAISDFLVAIVCCPF

SEQ ID NO: 14197 - protein, 20 aa, Bos taurus
RSTLVQLAVGSALFSIVVPI

SEQ ID NO: 14198 - protein, 20 aa, Bos taurus
ILFIVPIYAFDSWLSLLFFT

SEQ ID NO: 14199 - protein, 21 aa, Bos taurus
CYLVSLAVADLMVLVAAGLPN

SEQ ID NO: 14200 - protein, 20 aa, Bos taurus
ASALVITDFFGHLINGTIAV

SEQ ID NO: 14201 - protein, 20 aa, Bos taurus
WAVFAPIWLWKLLVLAGASV

SEQ ID NO: 14202 - protein, 20 aa, Bos taurus
AFAMLATLLSATAAVIYPLY

SEQ ID NO: 14203 - protein, 20 aa, Bos taurus
AWFIAGIFLLLTIPISLWVI

SEQ ID NO: 14204 - protein, 20 aa, Bos taurus
LLWMLTLGGGGLGWLWEFWM

SEQ ID NO: 14205 - protein, 20 aa, Bos taurus
CLPIFCLWLFLLAHGLGFLL

SEQ ID NO: 14206 - protein, 20 aa, Bos taurus
FLLDLCLADGIRSAVCFPFV

SEQ ID NO: 14207 - protein, 20 aa, Bos taurus
FLAMPFNSLVNMAYVFLGVY

SEQ ID NO: 14208 - protein, 21 aa, Bos taurus
VLSSDIIILTITRCIAILYIY

SEQ ID NO: 14209 - protein, 21 aa, Bos taurus
WIIRYMHANGASMFFICLYMH

SEQ ID NO: 14210 - protein, 20 aa, Bos taurus
MFILAPIMALGLALTMWIPL

SEQ ID NO: 14211 - protein, 21 aa, Bos taurus
LLMRMLQMLVLPLIISSLVTG

SEQ ID NO: 14212 - protein, 20 aa, Bos taurus
NSIMSNPLAGMVIGVLVTVL

SEQ ID NO: 14213 - protein, 16 aa, Bos taurus
LGHGILMTLFAVWMVL

SEQ ID NO: 14214 - protein, 20 aa, Bos taurus
PWCALNGCVGTVVSTLTALL

SEQ ID NO: 14215 - protein, 20 aa, Bos taurus
MLKLVILPLIVSSMITGVAT

SEQ ID NO: 14216 - protein, 20 aa, Bos taurus
VLNTLIMISVIVTMTIFLVV

SEQ ID NO: 14217 - protein, 20 aa, Bos taurus
IGIAELIPLVTTYIILFAYI

SEQ ID NO: 14218 - protein, 16 aa, Bos taurus
FGHGFVMFLFALLLVL

SEQ ID NO: 14219 - protein, 20 aa, Bos taurus
PYWTYLLCALGLFIYQSLDA

SEQ ID NO: 14220 - protein, 21 aa, Bos taurus
LLLRLLKMIILPLVVCSLIGG

SEQ ID NO: 14221 - protein, 20 aa, Bos taurus
PFMKFVAHAASFTIFLGLLV

SEQ ID NO: 14222 - protein, 20 aa, Bos taurus
FPSSLCVGLGQMVATVAVLW

SEQ ID NO: 14223 - protein, 20 aa, Bos taurus
FWFFKIAAIVGVMVGSFYIP

SEQ ID NO: 14224 - protein, 20 aa, Bos taurus
ICSLLGSLMVGLSGVFPLLV

SEQ ID NO: 14225 - protein, 20 aa, Bos taurus
GATVFFAVFMAVWATVFLEF

SEQ ID NO: 14226 - protein, 22 aa, Bos taurus
VTFYQCLVTVLLCKGLSSLATC

SEQ ID NO: 14227 - protein, 20 aa, Bos taurus
IFVWLLLLYLMQVIALVLYF

SEQ ID NO: 14228 - protein, 20 aa, Bos taurus
STVAVTLLTLGSMLGTTLIL

SEQ ID NO: 14229 - protein, 20 aa, Bos taurus
WYMLSLFGTGAVLMRGAGCT

SEQ ID NO: 14230 - protein, 20 aa, Bos taurus
LSLVSCFAGGVFLATCLLDL

SEQ ID NO: 14231 - protein, 20 aa, Bos taurus
ILSLCNTFGGGVFLATCFNA

SEQ ID NO: 14232 - protein, 20 aa, Bos taurus
LSSTAVVVAELLKIMACILL

SEQ ID NO: 14233 - protein, 20 aa, Bos taurus
FALTLVFIQCVVNAVFAKIL

SEQ ID NO: 14234 - protein, 20 aa, Bos taurus
PIYGLYTSFFASLIYFILGT

SEQ ID NO: 14235 - protein, 20 aa, Bos taurus
TVFFYMLVAIIIHAIIQEYV

SEQ ID NO: 14236 - protein, 20 aa, Bos taurus
DTVLGLCILAFALSLAMMFT

SEQ ID NO: 14237 - protein, 20 aa, Bos taurus
AVLLTELTKLLLCALSLLVG

SEQ ID NO: 14238 - protein, 17 aa, Bos taurus
MWGRLVGLAYILPAAYF

SEQ ID NO: 14239 - protein, 20 aa, Bos taurus
ALALGLIITCSSPGGGGSYL

SEQ ID NO: 14240 - protein, 20 aa, Bos taurus
TSLNFHLIDYHLAAFITVML

SEQ ID NO: 14241 - protein, 20 aa, Bos taurus
TSLNFHLIDFNLLMVTTIVL

SEQ ID NO: 14242 - protein, 20 aa, Bos taurus
VPYLYFDMGAAVLCASFMSF

SEQ ID NO: 14243 - protein, 20 aa, Bos taurus
MIILPLVVCSLVSGAASLDA

SEQ ID NO: 14244 - protein, 20 aa, Bos taurus
IAVGMLCQFGLMPLIAYLLI

SEQ ID NO: 14245 - protein, 20 aa, Bos taurus
TVPAAVFMVLFSSLCLLLPT

SEQ ID NO: 14246 - protein, 20 aa, Bos taurus
LLWVAVIGDWLNLVFKWILF

SEQ ID NO: 14247 - protein, 25 aa, Bos taurus
WPALCLVIVANIFAVAAFQVEKRLA

SEQ ID NO: 14248 - protein, 20 aa, Bos taurus
ILNAVIMISVIVIMTILLVV

SEQ ID NO: 14249 - protein, 20 aa, Bos taurus
IFSLAIALITSALLPVDIFL

SEQ ID NO: 14250 - protein, 20 aa, Bos taurus
VLGVGAQFLALGTGIIVMAL

SEQ ID NO: 14251 - protein, 20 aa, Bos taurus
LLGSGIQLFCMILIVIFVAM

SEQ ID NO: 14252 - protein, 20 aa, Bos taurus
IAVLWISLITEWLNLVFKWF

SEQ ID NO: 14253 - protein, 20 aa, Bos taurus
VHLLIWIPRLAQALLSAIAD

SEQ ID NO: 14254 - protein, 20 aa, Bos taurus
ILSVIFFFLIISVLAFPNGP

SEQ ID NO: 14255 - protein, 20 aa, Bos taurus
VTFAFSCTMFELIIFEILGV

SEQ ID NO: 14256 - protein, 20 aa, Bos taurus
TIVGAAAVVLLLVALLARVL

SEQ ID NO: 14257 - protein, 20 aa, Bos taurus
WLWWAGLLSMGAGEVANFAA

SEQ ID NO: 14258 - protein, 20 aa, Bos taurus
LGVVLAAVVIVTGCFSYYQE

SEQ ID NO: 14259 - protein, 20 aa, Bos taurus
TLVPLIIILTIAGIKEIVED

SEQ ID NO: 14260 - protein, 20 aa, Bos taurus
GWIEGAAILFSVIIVVLVTA

SEQ ID NO: 14261 - protein, 20 aa, Bos taurus
LTLMALGSSAPEILLSVIEV

SEQ ID NO: 14262 - protein, 18 aa, Bos taurus
SITVAILIVVTVAFVQEY

SEQ ID NO: 14263 - protein, 20 aa, Bos taurus
LGVVLSAVVIITGCFSYYQE

SEQ ID NO: 14264 - protein, 20 aa, Bos taurus
EPFVILLILIANAIVGVWQE

SEQ ID NO: 14265 - protein, 22 aa, Bos taurus
VSPTGRYTTLVPLLFILAVAAI

SEQ ID NO: 14266 - protein, 20 aa, Bos taurus
YNFGTQLYHSLLCIVLQFLI

SEQ ID NO: 14267 - protein, 20 aa, Bos taurus
LKIGYLYTYWAPLGFVLAVT

SEQ ID NO: 14268 - protein, 20 aa, Bos taurus
YWILIALGLALVLSLLFILL

SEQ ID NO: 14269 - protein, 20 aa, Bos taurus
WFNFGMVFGVIAMFSSFFLL

SEQ ID NO: 14270 - protein, 23 aa, Bos taurus
FSLLLWAALNAAFVLLGSTIVAF

SEQ ID NO: 14271 - protein, 19 aa, Bos taurus
GVISGAVFLIILFCFIPFP

SEQ ID NO: 14272 - protein, 20 aa, Bos taurus
YWIIIGLIIAMVLSLLFIIL

SEQ ID NO: 14273 - protein, 20 aa, Bos taurus
VNVCSELVKLVFCALVSFWV

SEQ ID NO: 14274 - protein, 19 aa, Bos taurus
HVPDWVWIVVGILNFMAYT

SEQ ID NO: 14275 - protein, 19 aa, Bos taurus
MELGISPIVTSGLIMQLLA

SEQ ID NO: 14276 - protein, 20 aa, Bos taurus
SLLTLFTPLTADFGVILVIV

SEQ ID NO: 14277 - protein, 20 aa, Bos taurus
AVYRLCFGLAMFYLLLSLLM

SEQ ID NO: 14278 - protein, 19 aa, Bos taurus
MELGISPIVTSGLIMQLLA

SEQ ID NO: 14279 - protein, 20 aa, Bos taurus
GFPNMSLTLVHFVVTWLGLY

SEQ ID NO: 14280 - protein, 20 aa, Bos taurus
FFSTFAKTSMFVLYLLGFIV

SEQ ID NO: 14281 - protein, 20 aa, Bos taurus
FLQWVLCAAIWLVALVVNLI

SEQ ID NO: 14282 - protein, 20 aa, Bos taurus
YISLAVLVVQNASLILSIRY

SEQ ID NO: 14283 - protein, 20 aa, Bos taurus
HWLLVWIGFEMNMLAIIPIM

SEQ ID NO: 14284 - protein, 20 aa, Bos taurus
TFMAAGGSAPELFTSLIGVF

SEQ ID NO: 14285 - protein, 20 aa, Bos taurus
LFIILLTFVSIFSLYSVHLL

SEQ ID NO: 14286 - protein, 20 aa, Bos taurus
LIPPLNVSYAAFCASVIYGI

SEQ ID NO: 14287 - protein, 20 aa, Bos taurus
IALLSSYSIHLLLTCAGVVG

SEQ ID NO: 14288 - protein, 20 aa, Bos taurus
YLAVASTVPSVLCLALNFLL

SEQ ID NO: 14289 - protein, 20 aa, Bos taurus
TAQGLELLSLLGTVLALGAL

SEQ ID NO: 14290 - protein, 20 aa, Bos taurus
VAAGITLQMAMLVFIISGLV

SEQ ID NO: 14291 - protein, 19 aa, Bos taurus
LLFQRFSVIFTDALFVYAV

SEQ ID NO: 14292 - protein, 20 aa, Bos taurus
LIFTLASFTINFMTFPTGYI

SEQ ID NO: 14293 - protein, 20 aa, Bos taurus
GIVLLTLGLVGPCGVGGAAA

SEQ ID NO: 14294 - protein, 20 aa, Bos taurus
GLPPQYGLYSAFMGCFVYFF

SEQ ID NO: 14295 - protein, 20 aa, Bos taurus
LTVIIQLANVGPLLVTLLHH

SEQ ID NO: 14296 - protein, 20 aa, Bos taurus
ALSTLYGGMLLSSMFLPPVL

SEQ ID NO: 14297 - protein, 22 aa, Bos taurus
FPLILSSVGALANSAWLCLLSY

SEQ ID NO: 14298 - protein, 20 aa, Bos taurus
VLFGGLIGSVFSLLQFLSAP

SEQ ID NO: 14299 - protein, 20 aa, Bos taurus
FWVGETVFLLWNSLNDPLFG

SEQ ID NO: 14300 - protein, 20 aa, Bos taurus
FFTVFLFLGVLVCVIMLSPG

SEQ ID NO: 14301 - protein, 20 aa, Bos taurus
LGILLLFWVSYVTDFSLILL

SEQ ID NO: 14302 - protein, 20 aa, Bos taurus
GLIHGSFFWGYIVTQIPGGF

SEQ ID NO: 14303 - protein, 20 aa, Bos taurus
MIHGSFFWGYIITQIPGGYI

SEQ ID NO: 14304 - protein, 20 aa, Bos taurus
QALLLFMGLTYLVSPFGGWL

SEQ ID NO: 14305 - protein, 35 aa, Bos taurus
DQIYNVVVTAHAFVMIFFMVMPIMIGGFGNWLVPL

SEQ ID NO: 14306 - protein, 20 aa, Bos taurus
PGLAKGSHPVHCVLFLALLV

SEQ ID NO: 14307 - protein, 20 aa, Bos taurus
LSVAIFSVGGMIGSFSVGLF

SEQ ID NO: 14308 - protein, 19 aa, Bos taurus
AFLVPYLFFMVVAGVPLFY

SEQ ID NO: 14309 - protein, 23 aa, Bos taurus
LGIGLCLLFIVRTLLLHPAIFGL

SEQ ID NO: 14310 - protein, 20 aa, Bos taurus
LSVSSFAVGGMIASFFGGLL

SEQ ID NO: 14311 - protein, 22 aa, Bos taurus
LLWSVTVSMFPFGGFLGSLMVG

SEQ ID NO: 14312 - protein, 20 aa, Bos taurus
WFGAIVTLGAAAGGVLGGWL

SEQ ID NO: 14313 - protein, 25 aa, Bos taurus
SHWTLYMNVGGFLVGLFSSTLLGAW

SEQ ID NO: 14314 - protein, 20 aa, Bos taurus
ALSVAIFSVGGMISSFLIGI

SEQ ID NO: 14315 - protein, 22 aa, Bos taurus
IALWILLACLMKIGFHVIPTIS

SEQ ID NO: 14316 - protein, 20 aa, Bos taurus
RAVLGTAFFTLAMFVLLYAL

SEQ ID NO: 14317 - protein, 20 aa, Bos taurus
ISAIESLFGASMTGIAYSLF

SEQ ID NO: 14318 - protein, 18 aa, Bos taurus
LESFLGTAVSGAIFCLFA

SEQ ID NO: 14319 - protein, 19 aa, Bos taurus
AFLIPYFIFLFGGGLPVFF

SEQ ID NO: 14320 - protein, 19 aa, Bos taurus
AFLLPYTIMAIFGGIPLFY

SEQ ID NO: 14321 - protein, 20 aa, Bos taurus
GAFFIPYLIFLFTCGIPVFL

SEQ ID NO: 14322 - protein, 20 aa, Bos taurus
LFQSCVNLGFFLGSLGVGYI

SEQ ID NO: 14323 - protein, 23 aa, Bos taurus
AFLIPYTLFLIIAGMPLFYMELA

SEQ ID NO: 14324 - protein, 20 aa, Bos taurus
LSVAIFSVGGMIGSFSVGLF

SEQ ID NO: 14325 - protein, 20 aa, Bos taurus
QVGLLFASKATVQLLTNPFI

SEQ ID NO: 14326 - protein, 19 aa, Bos taurus
AFMFPYFIMLIFCGIPLFF

SEQ ID NO: 14327 - protein, 20 aa, Bos taurus
MLGLIVYLGMMVGAFLWGGL

SEQ ID NO: 14328 - protein, 20 aa, Bos taurus
MVVSSLLIGALLASLIGGVL

SEQ ID NO: 14329 - protein, 20 aa, Bos taurus
LAQSLYMMGVLLGAMTFGCL

SEQ ID NO: 14330 - protein, 20 aa, Bos taurus
VIASSFEIGNLALILFVSYF

SEQ ID NO: 14331 - protein, 20 aa, Bos taurus
PSFQDVHAMIFVGFGFLMVF

SEQ ID NO: 14332 - protein, 19 aa, Bos taurus
AYLLPYLILLLVIGIPLFF

SEQ ID NO: 14333 - protein, 20 aa, Bos taurus
ACILASIFETTGSVLLGAKV

SEQ ID NO: 14334 - protein, 20 aa, Bos taurus
GVFLIPYILIALIGGIPIFF

SEQ ID NO: 14335 - protein, 18 aa, Bos taurus
YFLAGRSMTWVAIGASLF

SEQ ID NO: 14336 - protein, 20 aa, Bos taurus
LAFTVGSFLLSAITLPLGIV

SEQ ID NO: 14337 - protein, 20 aa, Bos taurus
LIQPTFMFGVLLGAVIFGYL

SEQ ID NO: 14338 - protein, 20 aa, Bos taurus
VSWIASIGIAVQQFGSPVGS

SEQ ID NO: 14339 - protein, 20 aa, Bos taurus
ALLTSVVFVGMMSSSTLWGN

SEQ ID NO: 14340 - protein, 20 aa, Bos taurus
LLYAWYSWPNVVLCFFGGFL

SEQ ID NO: 14341 - protein, 18 aa, Bos taurus
SSFVLLEYLVAIILGAGL

SEQ ID NO: 14342 - protein, 19 aa, Bos taurus
AVAGFKLLWVLLWATVLGL

SEQ ID NO: 14343 - protein, 20 aa, Bos taurus
LKSMAKFLFMAGMLVGSIVY

SEQ ID NO: 14344 - protein, 20 aa, Bos taurus
PSFQDVHVMIFVGFGFLMTF

SEQ ID NO: 14345 - protein, 22 aa, Bos taurus
IAVYLMTFLIVTVAWAAHTRLF

SEQ ID NO: 14346 - protein, 20 aa, Bos taurus
WISSIMLAVMYGGGPISSVL

SEQ ID NO: 14347 - protein, 20 aa, Bos taurus
GAVDNAFLVAYAIGMFISGI

SEQ ID NO: 14348 - protein, 20 aa, Bos taurus
FFQDVHIMVFAGFGFLMTFL

SEQ ID NO: 14349 - protein, 20 aa, Bos taurus
LILVIFILGLFVLGIASILY

SEQ ID NO: 14350 - protein, 20 aa, Bos taurus
GLIQGVKGLLSFLSAPLIGA

SEQ ID NO: 14351 - protein, 20 aa, Bos taurus
AISTFFFAGVLVGAEVYGYL

SEQ ID NO: 14352 - protein, 20 aa, Bos taurus
GLIQTVFISSYMVLAPVFGY

SEQ ID NO: 14353 - protein, 20 aa, Bos taurus
LDFYQVYFLALAADWLQAPY

SEQ ID NO: 14354 - protein, 20 aa, Bos taurus
TLFLGMLDTIFLFSYAVGLF

SEQ ID NO: 14355 - protein, 20 aa, Bos taurus
FMIILNRCFPIFMVLAWIYS

SEQ ID NO: 14356 - protein, 20 aa, Bos taurus
SLSTPLLILTMWLLPLMLMA

SEQ ID NO: 14357 - protein, 18 aa, Bos taurus
APLFSSFTTIVTYHLTKE

SEQ ID NO: 14358 - protein, 20 aa, Bos taurus
MSFGPVALSLTASFMSAVTV

SEQ ID NO: 14359 - protein, 20 aa, Bos taurus
MVTTFGLAGIVGYHTVWGVT

SEQ ID NO: 14360 - protein, 20 aa, Bos taurus
GYFLAGGNMLWWPVGASLFA

SEQ ID NO: 14361 - protein, 20 aa, Bos taurus
SGLFIGLAGSGAAGGLAVAG

SEQ ID NO: 14362 - protein, 20 aa, Bos taurus
AFITSMIPTMMFIHSGQELI

SEQ ID NO: 14363 - protein, 20 aa, Bos taurus
AGPGVIVSFIIAAVASILSG

SEQ ID NO: 14364 - protein, 20 aa, Bos taurus
MSANSGLLPASVVMPLLGLV

SEQ ID NO: 14365 - protein, 20 aa, Bos taurus
IVLAALLLPICFADYGVEAL

SEQ ID NO: 14366 - protein, 20 aa, Bos taurus
TALGFLLWIVCWADLFYSFW

SEQ ID NO: 14367 - protein, 8 aa, Bos taurus
LEFTSSGS

SEQ ID NO: 14368 - protein, 8 aa, Bos taurus
VEFSTSGS

SEQ ID NO: 14369 - protein, 8 aa, Bos taurus
VEFSTSGH

SEQ ID NO: 14370 - protein, 19 aa, Bos taurus
YMLFTMVFVIASIIITVIV

SEQ ID NO: 14371 - protein, 21 aa, Bos taurus
YLIFVMVVATLIVMNCVIVLN

SEQ ID NO: 14372 - protein, 26 aa, Bos taurus
FVGITYALTVVWLLVFACSAVPVYIY

SEQ ID NO: 14373 - protein, 21 aa, Bos taurus
YLMFTMVLVTFSVILSVVVLN

SEQ ID NO: 14374 - protein, 21 aa, Bos taurus
FLLFGMVLVTMVVVICVIVLN

SEQ ID NO: 14375 - protein, 21 aa, Bos taurus
MDWFIAVCYAFVFSALIEFAT

SEQ ID NO: 14376 - protein, 22 aa, Bos taurus
AIDIYLMGCFVFVFLALLEYAF

SEQ ID NO: 14377 - protein, 20 aa, Bos taurus
GCFVFVFMALLEYALVNYIF

SEQ ID NO: 14378 - protein, 21 aa, Bos taurus
YLTFLLVVTILIVVNAVVVLN

SEQ ID NO: 14379 - protein, 20 aa, Bos taurus
LAVCVLFNVVLFLVALCCFL

SEQ ID NO: 14380 - protein, 20 aa, Bos taurus
IISILFKSVFEVAFLLIQWY

SEQ ID NO: 14381 - protein, 22 aa, Bos taurus
AMDWFIAVCFAFVFSALIEFAA

SEQ ID NO: 14382 - protein, 20 aa, Bos taurus
FSAGIMFFASTFFVLLALAI

SEQ ID NO: 14383 - protein, 23 aa, Bos taurus
GPMLDFLATAVFAFMWLVSSSAW

SEQ ID NO: 14384 - protein, 22 aa, Bos taurus
AMDLFVSVCFIFVFSALVEYGT

SEQ ID NO: 14385 - protein, 23 aa, Bos taurus
MLGLFFSFLLVIFAIEVAAAIWG

SEQ ID NO: 14386 - protein, 20 aa, Bos taurus
MILTYLILMLIIYIFECASC

SEQ ID NO: 14387 - protein, 20 aa, Bos taurus
ILLVYFILMFIVYAFEVASC

SEQ ID NO: 14388 - protein, 20 aa, Bos taurus
IIFKTLFEVGFIAGQYFLYG

SEQ ID NO: 14389 - protein, 22 aa, Bos taurus
LLVAGTAGGGGLLVLALGLALA

SEQ ID NO: 14390 - protein, 21 aa, Bos taurus
YFASTMIIVGLSVVVTVIVLQ

SEQ ID NO: 14391 - protein, 20 aa, Bos taurus
AIDIWMAVCLLFVFSALLEY

SEQ ID NO: 14392 - protein, 22 aa, Bos taurus
EYLLFTMIFVTLSIVITVFVLN

SEQ ID NO: 14393 - protein, 22 aa, Bos taurus
AMDWFIAVCYAFVFSALIEFAT

SEQ ID NO: 14394 - protein, 20 aa, Bos taurus
IYLWVSFVFVFLSVLEYAAV

SEQ ID NO: 14395 - protein, 20 aa, Bos taurus
VHAVLLGVVTVSCFFFIPAA

SEQ ID NO: 14396 - protein, 20 aa, Bos taurus
FFLLFLFYSLLYCLFVATTV

SEQ ID NO: 14397 - protein, 20 aa, Bos taurus
FTLFLLLAPLGCIHAAFIFV

SEQ ID NO: 14398 - protein, 20 aa, Bos taurus
LIQANVCSTFIPVYCGLIPP

SEQ ID NO: 14399 - protein, 14 aa, Bos taurus
SMRCGALLLLSCYF

SEQ ID NO: 14400 - protein, 20 aa, Bos taurus
FHEGAAALCGLVYLFARLRY

SEQ ID NO: 14401 - protein, 20 aa, Bos taurus
FVLTSIIQLMACLCVMIAAS

SEQ ID NO: 14402 - protein, 25 aa, Bos taurus
LLTLLAKNCAFFAGSILAVLIALTI

SEQ ID NO: 14403 - protein, 22 aa, Bos taurus
LLGTFFTCLVILFACEVAAGIW

SEQ ID NO: 14404 - protein, 20 aa, Bos taurus
LVLAIPLRVLVVLWAFILGL

SEQ ID NO: 14405 - protein, 20 aa, Bos taurus
ITIVAGVLFLLAALLTLVPV

SEQ ID NO: 14406 - protein, 23 aa, Bos taurus
PFVARMHFLVFFLGRMVHTVAYL

SEQ ID NO: 14407 - protein, 20 aa, Bos taurus
ALDVWLIACLLFGFASLVEY

SEQ ID NO: 14408 - protein, 20 aa, Bos taurus
LFLQLCFYTELLTCYALMFS

SEQ ID NO: 14409 - protein, 20 aa, Bos taurus
YFFLIGPPLLIPLYFQYQII

SEQ ID NO: 14410 - protein, 20 aa, Bos taurus
VLKVIKFLIIIAYNSALVSK

SEQ ID NO: 14411 - protein, 20 aa, Bos taurus
FFLFLLSLTAHITGVFGFGL

SEQ ID NO: 14412 - protein, 22 aa, Bos taurus
LWWTYVISVVFRLLFEAAFMYV

SEQ ID NO: 14413 - protein, 21 aa, Bos taurus
MDWFIAVCYAFVFSALIEFAT

SEQ ID NO: 14414 - protein, 21 aa, Bos taurus
MDWFMAVCYAFVFSALIEFAT

SEQ ID NO: 14415 - protein, 21 aa, Bos taurus
LGAGLSVGLSGLAAGFAIGIV

SEQ ID NO: 14416 - protein, 20 aa, Bos taurus
ILSAGIFFVSAGLSNIIGII

SEQ ID NO: 14417 - protein, 20 aa, Bos taurus
AWFIMLTYLFMLAWLGVTAF

SEQ ID NO: 14418 - protein, 20 aa, Bos taurus
ALYALCGLLALVPLCWFANI

SEQ ID NO: 14419 - protein, 20 aa, Bos taurus
ITVVLMCFVVPTLVPWYIWG

SEQ ID NO: 14420 - protein, 20 aa, Bos taurus
PLLVLLLSFPSIMVPLARIL

SEQ ID NO: 14421 - protein, 20 aa, Bos taurus
FVAESHIILVLNAAITMGMD

SEQ ID NO: 14422 - protein, 20 aa, Bos taurus
AIIYSVHTMTTLIPILSTLL

SEQ ID NO: 14423 - protein, 20 aa, Bos taurus
ILCGALVFPTIATIVGKLMF

SEQ ID NO: 14424 - protein, 20 aa, Bos taurus
YFFSFCFFMTLGCVYCSYGS

SEQ ID NO: 14425 - protein, 20 aa, Bos taurus
FYLFILSLSLLTIYVFAFNI

SEQ ID NO: 14426 - protein, 20 aa, Bos taurus
KKQYPTAFVMVVMLASYFLI

SEQ ID NO: 14427 - protein, 20 aa, Bos taurus
TLVNWLFWASMLLYPFFRFV

SEQ ID NO: 14428 - protein, 22 aa, Bos taurus
AIDVYLGICFSFVFGALLEYAV

SEQ ID NO: 14429 - protein, 18 aa, Bos taurus
VLLRLSCLVSLAGSVYLA

SEQ ID NO: 14430 - protein, 20 aa, Bos taurus
MIVAGVVFLLAGLLVMVPVS

SEQ ID NO: 14431 - protein, 20 aa, Bos taurus
AVFGGVIFLISGLAILVATA

SEQ ID NO: 14432 - protein, 20 aa, Bos taurus
WIIPFFCYQIFDFALNTLVA

SEQ ID NO: 14433 - protein, 20 aa, Bos taurus
LVFTMIFVTLSIMVTVFAIN

SEQ ID NO: 14434 - protein, 19 aa, Bos taurus
YKPGVLLLCFILPTLVPWY

SEQ ID NO: 14435 - protein, 20 aa, Bos taurus
LMITFAIFLSLIMLVEVAAA

SEQ ID NO: 14436 - protein, 20 aa, Bos taurus
FAYHFTVFVFYFGAFLLEAA

SEQ ID NO: 14437 - protein, 20 aa, Bos taurus
VLLDLGFSGLWSFLWFVGFC

SEQ ID NO: 14438 - protein, 22 aa, Bos taurus
LWWTYTGSIFFRVIFEAAFMYV

SEQ ID NO: 14439 - protein, 20 aa, Bos taurus
LLWAYVAQLGVRLALEGAAL

SEQ ID NO: 14440 - protein, 20 aa, Bos taurus
LAGFWLLSLLLQLPLILFLL

SEQ ID NO: 14441 - protein, 16 aa, Bos taurus
GALMGTYVASVLCKSV

SEQ ID NO: 14442 - protein, 20 aa, Bos taurus
WPLVLMVFNVGATVLYITAF

SEQ ID NO: 14443 - protein, 20 aa, Bos taurus
FQVVISRICMAIPAMAIPPV

SEQ ID NO: 14444 - protein, 20 aa, Bos taurus
VIGDLLFSALWTFLWFVGFC

SEQ ID NO: 14445 - protein, 20 aa, Bos taurus
FLALDPRALASFLYFTALVL

SEQ ID NO: 14446 - protein, 20 aa, Bos taurus
FMFILMIILTAFLCGLNNIY

SEQ ID NO: 14447 - protein, 20 aa, Bos taurus
AFAFMESLTLGLLDCPGVSA

SEQ ID NO: 14448 - protein, 20 aa, Bos taurus
YLLRPASMFYIFAGLCLSVS

SEQ ID NO: 14449 - protein, 17 aa, Bos taurus
LLAGSLAVATSQTLINP

SEQ ID NO: 14450 - protein, 20 aa, Bos taurus
FMFLFGGVLMTLLGLLGSLF

SEQ ID NO: 14451 - protein, 20 aa, Bos taurus
IMFIIAGLCAIAGVSVFANM

SEQ ID NO: 14452 - protein, 20 aa, Bos taurus
VAFIVGQYLLYGVFLDTLHV

SEQ ID NO: 14453 - protein, 21 aa, Bos taurus
VPAAFAGLMYLFVRQKYFVGY

SEQ ID NO: 14454 - protein, 22 aa, Bos taurus
FSFMAFFFTFMAQLVISIIQAV

SEQ ID NO: 14455 - protein, 20 aa, Bos taurus
FFSVFLGIIFFLELTAGVLA

SEQ ID NO: 14456 - protein, 20 aa, Bos taurus
ICAWMQLLAALCLVLGCMIF

SEQ ID NO: 14457 - protein, 20 aa, Bos taurus
VAVMLFAAVVLQVCSLVLYP

SEQ ID NO: 14458 - protein, 20 aa, Bos taurus
AFMYILGICLIIELIGGVVA

SEQ ID NO: 14459 - protein, 16 aa, Bos taurus
YALAGGVSFPFFWLAG

SEQ ID NO: 14460 - protein, 20 aa, Bos taurus
LLLLAWYFGSLLVIFCVELA

SEQ ID NO: 14461 - protein, 20 aa, Bos taurus
LVARAAFEVAFLVGQYLLYG

SEQ ID NO: 14462 - protein, 22 aa, Bos taurus
IYVLQLLARTVFEVGFLVGQYF

SEQ ID NO: 14463 - protein, 20 aa, Bos taurus
VFCSAIGLLGAIYCLSVSGT

SEQ ID NO: 14464 - protein, 24 aa, Bos taurus
LAATAGALHILAGICGMVAVSWYA

SEQ ID NO: 14465 - protein, 20 aa, Bos taurus
IVSTFMGFAGALSLIVAMTV

SEQ ID NO: 14466 - protein, 20 aa, Bos taurus
SFFLGGVVIVLLRWPLLGMC

SEQ ID NO: 14467 - protein, 20 aa, Bos taurus
ISYLVLSMISMGLFSIAPLI

SEQ ID NO: 14468 - protein, 20 aa, Bos taurus
LGISVALTFPSTMMASYYLL

SEQ ID NO: 14469 - protein, 20 aa, Bos taurus
VCLPTVSLWILFVYIEAAIR

SEQ ID NO: 14470 - protein, 20 aa, Bos taurus
GFFLGGVFVVLIGWPLIGMI

SEQ ID NO: 14471 - protein, 20 aa, Bos taurus
IDAFSTGLWALLLGLHLAEQ

SEQ ID NO: 14472 - protein, 20 aa, Bos taurus
IAMTGGIIFILAGLAALIAC

SEQ ID NO: 14473 - protein, 20 aa, Bos taurus
AGVMLVLVALCAMVATIWFP

SEQ ID NO: 14474 - protein, 20 aa, Bos taurus
LAYFFTTGIVVSAFGFPVIL

SEQ ID NO: 14475 - protein, 20 aa, Bos taurus
FSLCLTVVFLLQLAAGVLGF

SEQ ID NO: 14476 - protein, 20 aa, Bos taurus
AFAAISSVLSGLLGMVGHMM

SEQ ID NO: 14477 - protein, 20 aa, Bos taurus
LYFGLLLIIFLLEIIAGALA

SEQ ID NO: 14478 - protein, 20 aa, Bos taurus
NIWLFLVTSGTLAGIMGMRF

SEQ ID NO: 14479 - protein, 22 aa, Bos taurus
LWWTYLLSLVFKLLIEFLFLYL

SEQ ID NO: 14480 - protein, 25 aa, Bos taurus
LLMSFFVLLLIILLAEVTLAILLFV

SEQ ID NO: 14481 - protein, 20 aa, Bos taurus
FFSVFLGLIFFLELATGILA

SEQ ID NO: 14482 - protein, 20 aa, Bos taurus
FVLQAIGIPGWGFSGWISAL

SEQ ID NO: 14483 - protein, 20 aa, Bos taurus
LISVMILTRVIMQIIKDMIL

SEQ ID NO: 14484 - protein, 20 aa, Bos taurus
IACLAGIVFILSGLCSMTGC

SEQ ID NO: 14485 - protein, 20 aa, Bos taurus
VANFFLLLLVLAVLFFHQLV

SEQ ID NO: 14486 - protein, 22 aa, Bos taurus
LWWTYTSSIFFRIVFEAAFMYV

SEQ ID NO: 14487 - protein, 23 aa, Bos taurus
LSTAILHFRLFVRARIYHTIAYL

SEQ ID NO: 14488 - protein, 20 aa, Bos taurus
LMSWSAVANGGGVPAGGLVA

SEQ ID NO: 14489 - protein, 20 aa, Bos taurus
VAVVGGVFFILGGLLGFIPV

SEQ ID NO: 14490 - protein, 22 aa, Bos taurus
FYIIQVVFRNALEIGFLVGQYF

SEQ ID NO: 14491 - protein, 20 aa, Bos taurus
LMFTMVLVTFSIVTSVCVLN

SEQ ID NO: 14492 - protein, 22 aa, Bos taurus
TYAISSSLISFYIPVAIMIVTY

SEQ ID NO: 14493 - protein, 23 aa, Bos taurus
FYITGVFQILAGLCVMSAASIYT

SEQ ID NO: 14494 - protein, 20 aa, Bos taurus
ISFVAGTTLLIAGAPGIIGS

SEQ ID NO: 14495 - protein, 20 aa, Bos taurus
LAASLVLTVGSALLSAYFLL

SEQ ID NO: 14496 - protein, 20 aa, Bos taurus
YVYMFLAPLLIPIITPLVAV

SEQ ID NO: 14497 - protein, 20 aa, Bos taurus
LVYLFTVRIHGALGFLGGVL

SEQ ID NO: 14498 - protein, 20 aa, Bos taurus
GTIILTAVYFALSISLHVWV

SEQ ID NO: 14499 - protein, 20 aa, Bos taurus
ITGYAVWLVLWVTWNVFVIC

SEQ ID NO: 14500 - protein, 20 aa, Bos taurus
MNVVSAIVSLAGVLLLLVDL

SEQ ID NO: 14501 - protein, 20 aa, Bos taurus
AMAAAFQLASFVLVIGLVTF

SEQ ID NO: 14502 - protein, 20 aa, Bos taurus
AGLLFFLAGTVSLSPSIWVI

SEQ ID NO: 14503 - protein, 20 aa, Bos taurus
LSAYFCLLLAIFLVELVAGV

SEQ ID NO: 14504 - protein, 20 aa, Bos taurus
WTLLTEACYFSVQFLVVTAT

SEQ ID NO: 14505 - protein, 20 aa, Bos taurus
TTVGLWFNGSAFALYLSAAI

SEQ ID NO: 14506 - protein, 20 aa, Bos taurus
CLDFTVTVHFFHLLGCWLYS

SEQ ID NO: 14507 - protein, 18 aa, Bos taurus
QWLTYWVVYGVFSIVEFF

SEQ ID NO: 14508 - protein, 20 aa, Bos taurus
IFWLGLVACPVLWVVFAFSA

SEQ ID NO: 14509 - protein, 20 aa, Bos taurus
FLLLSSIVGRAAVAPVTWSV

SEQ ID NO: 14510 - protein, 22 aa, Bos taurus
SHPAACLAAVLAVGFLVLWAAG

SEQ ID NO: 14511 - protein, 25 aa, Bos taurus
LLGLYFGTLLLLFATQITLGILIST

SEQ ID NO: 14512 - protein, 17 aa, Bos taurus
ALGGPVYVSTFYAGMSI

SEQ ID NO: 14513 - protein, 20 aa, Bos taurus
GGFAPCFLGCFLPLVGTLNG

SEQ ID NO: 14514 - protein, 25 aa, Bos taurus
MMILFFVGLLMILLLQVAAGIVATT

SEQ ID NO: 14515 - protein, 20 aa, Bos taurus
LLFAPAFLSLFFLVMNFLEG

SEQ ID NO: 14516 - protein, 20 aa, Bos taurus
LLDLILAVIWAGVWAVGFCF

SEQ ID NO: 14517 - protein, 20 aa, Bos taurus
TMKVVLMLLFICLGNVYLHG

SEQ ID NO: 14518 - protein, 22 aa, Bos taurus
FWCYKGAIGKVYHALNPKLTVI

SEQ ID NO: 14519 - protein, 20 aa, Bos taurus
ILCMILAIISMILTIVELST

SEQ ID NO: 14520 - protein, 20 aa, Bos taurus
VLLFFYMIILGLVFIFQFGI

SEQ ID NO: 14521 - protein, 20 aa, Bos taurus
LIMTACLAFLTGILLLGALL

SEQ ID NO: 14522 - protein, 20 aa, Bos taurus
AMFLTLIFLVELVAAIIGFV

SEQ ID NO: 14523 - protein, 20 aa, Bos taurus
GGLVGLVFGGLYPVFLAIPV

SEQ ID NO: 14524 - protein, 20 aa, Bos taurus
LAIFLTTGIVVSAFGLPIVF

SEQ ID NO: 14525 - protein, 20 aa, Bos taurus
LLALALVNLLLSAACSLGLL

SEQ ID NO: 14526 - protein, 21 aa, Bos taurus
FSIFYNNTLFLVLVIVASFFI

SEQ ID NO: 14527 - protein, 20 aa, Bos taurus
VAISAINFLICEAGNHFINV

SEQ ID NO: 14528 - protein, 20 aa, Bos taurus
WLFIGFMLMFGSLIASMWIL

SEQ ID NO: 14529 - protein, 20 aa, Bos taurus
FVIILLLVFVTEVVVVVLGY

SEQ ID NO: 14530 - protein, 20 aa, Bos taurus
FFFILLLIFIAEVAAAVVAL

SEQ ID NO: 14531 - protein, 20 aa, Bos taurus
MFLSSLLNAITVIGAAYCLL

SEQ ID NO: 14532 - protein, 20 aa, Bos taurus
MIFSALGIAFSGYCLVISAL

SEQ ID NO: 14533 - protein, 20 aa, Bos taurus
VLLFFYMIILLLVFIVQFSV

SEQ ID NO: 14534 - protein, 20 aa, Bos taurus
AVFMLLGHLIFFDYGANAAI

SEQ ID NO: 14535 - protein, 21 aa, Bos taurus
CVASLFYFGASVLEALAAIQL

SEQ ID NO: 14536 - protein, 20 aa, Bos taurus
ACALLSLTCALGLLASIAMT

SEQ ID NO: 14537 - protein, 20 aa, Bos taurus
LLFFFLFILIIFLAELSAAI

SEQ ID NO: 14538 - protein, 20 aa, Bos taurus
FMAFFFIFGAQFILTIIQAV

SEQ ID NO: 14539 - protein, 20 aa, Bos taurus
TGFCQLCTSVAVFTGALIYA

SEQ ID NO: 14540 - protein, 20 aa, Bos taurus
WKVALAAAMVSGIAVVLAMT

SEQ ID NO: 14541 - protein, 20 aa, Bos taurus
LIFGFLFLTSGMLISVLGIW

SEQ ID NO: 14542 - protein, 20 aa, Bos taurus
LLRCLIYTLWTYLWEFTTGF

SEQ ID NO: 14543 - protein, 20 aa, Bos taurus
WLIPFFCYRLFDFVLSCLVA

SEQ ID NO: 14544 - protein, 20 aa, Bos taurus
FFRTLVAAILYLITSIVVLV

SEQ ID NO: 14545 - protein, 20 aa, Bos taurus
LLALAAFSTATAATIIGAGR

SEQ ID NO: 14546 - protein, 20 aa, Bos taurus
ALVVLLSGLVLLVTGLTLAG

SEQ ID NO: 14547 - protein, 20 aa, Bos taurus
IASVTVTFSNILNSAFLGFV

SEQ ID NO: 14548 - protein, 20 aa, Bos taurus
LTFWEASQLFLLLLSLTLAT

SEQ ID NO: 14549 - protein, 20 aa, Bos taurus
LIPITTATFIVAGICFNVAL

SEQ ID NO: 14550 - protein, 20 aa, Bos taurus
HQHLYFFLIGPPLLTLVNFE

SEQ ID NO: 14551 - protein, 20 aa, Bos taurus
ISCVLFLLPYWYVFLLDKTS

SEQ ID NO: 14552 - protein, 20 aa, Bos taurus
LVSIIFCEAVAIYGIIMAIV

SEQ ID NO: 14553 - protein, 16 aa, Bos taurus
AVLWRCFSTVVIFLFL

SEQ ID NO: 14554 - protein, 20 aa, Bos taurus
FFQSLCVLGYCILPLTMAML

SEQ ID NO: 14555 - protein, 20 aa, Bos taurus
PIYIILVGGWSFSLYLIQLV

SEQ ID NO: 14556 - protein, 20 aa, Bos taurus
FFSILQNIVGTALMILVAIG

SEQ ID NO: 14557 - protein, 20 aa, Bos taurus
TIAVVVFHFIVPMLVVIFCY

SEQ ID NO: 14558 - protein, 20 aa, Bos taurus
FGGSFLGLMVFLIYLGGMMV

SEQ ID NO: 14559 - protein, 20 aa, Bos taurus
VPLGLYAGQLALNWAWPPLF

SEQ ID NO: 14560 - protein, 20 aa, Bos taurus
VCLNTQLLLVNICSWLYYLP

SEQ ID NO: 14561 - protein, 13 aa, Bos taurus
WGFRWLIFRIMLG

SEQ ID NO: 14562 - protein, 20 aa, Bos taurus
AALCAYAVTYTAMYVTLVFR

SEQ ID NO: 14563 - protein, 20 aa, Bos taurus
LAYVLLLLLELLVCLFTLLG

SEQ ID NO: 14564 - protein, 20 aa, Bos taurus
LLPFLSLQIMDFLLCLLTLM

SEQ ID NO: 14565 - protein, 20 aa, Bos taurus
FVVQVSVFIGVLIDLWKITK

SEQ ID NO: 14566 - protein, 20 aa, Bos taurus
LFRPLILPLTQAPIFISFFI

SEQ ID NO: 14567 - protein, 22 aa, Bos taurus
HLLAYSGYKYVGMILSVLTGLL

SEQ ID NO: 14568 - protein, 20 aa, Bos taurus
FYPLLVILHFIQLFFINHVI

SEQ ID NO: 14569 - protein, 20 aa, Bos taurus
FSLYYLFLPYLLLIVNLLFF

SEQ ID NO: 14570 - protein, 20 aa, Bos taurus
GVSFGCVASVLGYCLLPMIL

SEQ ID NO: 14571 - protein, 20 aa, Bos taurus
LIGRFVPFAAVAAANCINIP

SEQ ID NO: 14572 - protein, 20 aa, Bos taurus
LFILYFFNLAVLSTYLPQDA

SEQ ID NO: 14573 - protein, 18 aa, Bos taurus
LVGRWVPFAAVAAANCVN

SEQ ID NO: 14574 - protein, 20 aa, Bos taurus
LGLIVLPTIILILLHYCVFM

SEQ ID NO: 14575 - protein, 20 aa, Bos taurus
VLGYCLLPMVILSSCAIFFS

SEQ ID NO: 14576 - protein, 20 aa, Bos taurus
MVVAAFLALAHSSFFTMIFL

SEQ ID NO: 14577 - protein, 20 aa, Bos taurus
NAFIVFIASSLSHMLLTCIL

SEQ ID NO: 14578 - protein, 20 aa, Bos taurus
LFFFLLFLRLFPMTPNWFLN

SEQ ID NO: 14579 - protein, 20 aa, Bos taurus
LLQALFLLQGMFVSLFPIHL

SEQ ID NO: 14580 - protein, 20 aa, Bos taurus
PVGRVLWAGLTLLEVPVCLA

SEQ ID NO: 14581 - protein, 16 aa, Bos taurus
FIPVIILAQLSGMNVI

SEQ ID NO: 14582 - protein, 20 aa, Bos taurus
IGVGLFTNLVYFGLLQTFPF

SEQ ID NO: 14583 - protein, 20 aa, Bos taurus
FELEIYYIQHVMLYVVPIYL

SEQ ID NO: 14584 - protein, 20 aa, Bos taurus
HRFISFTLYLTGFCMFVLSL

SEQ ID NO: 14585 - protein, 22 aa, Bos taurus
EWASVMRCVAVFVGINHASAKL

SEQ ID NO: 14586 - protein, 20 aa, Bos taurus
AVVFGGFYLFFFTEKILKML

SEQ ID NO: 14587 - protein, 20 aa, Bos taurus
PVVPSLFQLLGRNFILFIIF

SEQ ID NO: 14588 - protein, 18 aa, Bos taurus
YLKTWFVIDLLSCLPYDV

SEQ ID NO: 14589 - protein, 20 aa, Bos taurus
MVAWMIALHTAIHTIAHLFN

SEQ ID NO: 14590 - protein, 20 aa, Bos taurus
VFYIAAQCLGAIIGAGILYL

SEQ ID NO: 14591 - protein, 20 aa, Bos taurus
WRYFAGNLASGGAAGATSLC

SEQ ID NO: 14592 - protein, 22 aa, Bos taurus
RAICYMVAQLLGAVAGAAVLYS

SEQ ID NO: 14593 - protein, 16 aa, Bos taurus
ISAGLMTGGVAVFIGQ

SEQ ID NO: 14594 - protein, 20 aa, Bos taurus
LHGLLHVFAFVIALVGLVAV

SEQ ID NO: 14595 - protein, 21 aa, Bos taurus
FLLKAVIGMTAGATGAFVGTP

SEQ ID NO: 14596 - protein, 20 aa, Bos taurus
WRYFAGNLASGGAAGATSLC

SEQ ID NO: 14597 - protein, 24 aa, Bos taurus
VLRAIMYIIAQCVGAIVATAILSG

SEQ ID NO: 14598 - protein, 21 aa, Bos taurus
AVFYVAAQLLGAVAGAALLHE

SEQ ID NO: 14599 - protein, 19 aa, Bos taurus
YKSTFQFKLDVLSVIPTDL

SEQ ID NO: 14600 - protein, 20 aa, Bos taurus
MNIIDIVSILPYFITLGTDL

SEQ ID NO: 14601 - protein, 20 aa, Bos taurus
LLAGFAFLTGVGLGPALDLC

SEQ ID NO: 14602 - protein, 19 aa, Bos taurus
LALAWTFSYLLFFRALSLL

SEQ ID NO: 14603 - protein, 19 aa, Bos taurus
KSQRFKMDMLCLLPLDLLY

SEQ ID NO: 14604 - protein, 20 aa, Bos taurus
FNNYLAALYKVVGTFLFGAA

SEQ ID NO: 14605 - protein, 17 aa, Bos taurus
SIQVMSRVFLIWAVTHS

SEQ ID NO: 14606 - protein, 20 aa, Bos taurus
VAALYKQVGCFLFGCAISQS

SEQ ID NO: 14607 - protein, 20 aa, Bos taurus
WYYMIELSFYWSLLFSIASD

SEQ ID NO: 14608 - protein, 20 aa, Bos taurus
AMWNRWFGIFANLPIGVPYS

SEQ ID NO: 14609 - protein, 20 aa, Bos taurus
FWNCLDVVIIVLSVVAIGIN

SEQ ID NO: 14610 - protein, 20 aa, Bos taurus
LLPMRMLPSIIFTCITYFLL

SEQ ID NO: 14611 - protein, 20 aa, Bos taurus
LYHWYLLELSFYISLLMTLP

SEQ ID NO: 14612 - protein, 20 aa, Bos taurus
WRYFAGNLASGGAAGATSLC

SEQ ID NO: 14613 - protein, 17 aa, Bos taurus
IVFVVSFVGNRGTFIRG

SEQ ID NO: 14614 - protein, 20 aa, Bos taurus
LFLLGAFNVCNKIIFLMSFV

SEQ ID NO: 14615 - protein, 20 aa, Bos taurus
LSTLLVGTAIWYVCTAIFSN

SEQ ID NO: 14616 - protein, 20 aa, Bos taurus
AAMHLLAFLLTVLGLHAVFE

SEQ ID NO: 14617 - protein, 20 aa, Bos taurus
ILLAMFLVHYAQRSLVFPFL

SEQ ID NO: 14618 - protein, 20 aa, Bos taurus
IFPAALLPLLLTMILFLGPL

SEQ ID NO: 14619 - protein, 20 aa, Bos taurus
AFHPTLVAEGLFAFANVLSY

SEQ ID NO: 14620 - protein, 22 aa, Bos taurus
EVYLALDVLFCTSSIVHLCAIS

SEQ ID NO: 14621 - protein, 20 aa, Bos taurus
QLSMNLGMAIPLWAGAVITG

SEQ ID NO: 14622 - protein, 21 aa, Bos taurus
TSLYLAASASAEFFADIALAP

SEQ ID NO: 14623 - protein, 20 aa, Bos taurus
PLCMLDIFVLIASVPVVAVG

SEQ ID NO: 14624 - protein, 20 aa, Bos taurus
MDFVMNSLYLATISLKIVAF

SEQ ID NO: 14625 - protein, 19 aa, Bos taurus
HTMQFKLDVASIIPTDLIY

SEQ ID NO: 14626 - protein, 24 aa, Bos taurus
IKLPVYTLAQTLGAFLGAGIIFGL

SEQ ID NO: 14627 - protein, 20 aa, Bos taurus
ALASVVSLWMVTGILLYLAF

SEQ ID NO: 14628 - protein, 20 aa, Bos taurus
VVCVLFIFRNLLDMVRYTYS

SEQ ID NO: 14629 - protein, 20 aa, Bos taurus
GVFVPNSNIVHVFSAGSAAF

SEQ ID NO: 14630 - protein, 20 aa, Bos taurus
GIGFSSCIVCLFVGLYYNVI

SEQ ID NO: 14631 - protein, 20 aa, Bos taurus
WRWFLANLASGGAAGATSLC

SEQ ID NO: 14632 - protein, 18 aa, Bos taurus
LNVIDLLAILPYYVTIFL

SEQ ID NO: 14633 - protein, 20 aa, Bos taurus
SVMSLIDVVAILPYYIGLFM

SEQ ID NO: 14634 - protein, 20 aa, Bos taurus
HWVLQLLALLCALLGLGLVI

SEQ ID NO: 14635 - protein, 20 aa, Bos taurus
PADYLFMLLFNWICIVITGL

SEQ ID NO: 14636 - protein, 20 aa, Bos taurus
LILLGAANLCNKIVFLVSFV

SEQ ID NO: 14637 - protein, 20 aa, Bos taurus
LLGYVSLSPALTFAVAGLGS

SEQ ID NO: 14638 - protein, 20 aa, Bos taurus
AEVLAGFVNGLFLIFTAFFI

SEQ ID NO: 14639 - protein, 13 aa, Bos taurus
SMAGATAQTFIYP

SEQ ID NO: 14640 - protein, 20 aa, Bos taurus
EYIACVILGVIFLLSSVCIV

SEQ ID NO: 14641 - protein, 16 aa, Bos taurus
ILAGCTTGAMAVTCAQ

SEQ ID NO: 14642 - protein, 14 aa, Bos taurus
LGAGVPEAVVVVCP

SEQ ID NO: 14643 - protein, 17 aa, Bos taurus
LMAGSMAGMTAVICTYP

SEQ ID NO: 14644 - protein, 20 aa, Bos taurus
GWWVFHHYVSTFLSGVMLTW

SEQ ID NO: 14645 - protein, 20 aa, Bos taurus
MLAGCGAGTCQVIVTTPMEM

SEQ ID NO: 14646 - protein, 20 aa, Bos taurus
FLAGAAAGAIQCVICCPMEL

SEQ ID NO: 14647 - protein, 20 aa, Bos taurus
IIDLLAILPFYITLLVESLS

SEQ ID NO: 14648 - protein, 13 aa, Bos taurus
SLAGAIAQSSIYP

SEQ ID NO: 14649 - protein, 20 aa, Bos taurus
LEVLAVFASTVLAQLGALFI

SEQ ID NO: 14650 - protein, 20 aa, Bos taurus
MVAGALARLGTVTVISPLEL

SEQ ID NO: 14651 - protein, 20 aa, Bos taurus
GFQPTWHLLAVLGGLYAFFL

SEQ ID NO: 14652 - protein, 16 aa, Bos taurus
LLAGSTTGALAVAVAQ

SEQ ID NO: 14653 - protein, 20 aa, Bos taurus
NKAGLVLGLLSCLGLSLVAN

SEQ ID NO: 14654 - protein, 25 aa, Bos taurus
IILGAGSRSVAGVCMSPITVIKTRY

SEQ ID NO: 14655 - protein, 20 aa, Bos taurus
LEVLSAMISVLLVYILMGFL

SEQ ID NO: 14656 - protein, 20 aa, Bos taurus
WLNISGLVALCLASFGMTLL

SEQ ID NO: 14657 - protein, 20 aa, Bos taurus
VFNFLLVWYYCTLTIRESIL

SEQ ID NO: 14658 - protein, 20 aa, Bos taurus
YLMPVTHMLAASVGEVVACL

SEQ ID NO: 14659 - protein, 20 aa, Bos taurus
VILWTGLLCALGTSIVGNFQ

SEQ ID NO: 14660 - protein, 20 aa, Bos taurus
HFESPLLWQSVVMILTMLLM

SEQ ID NO: 14661 - protein, 20 aa, Bos taurus
IVAGIVARLGAVTVISPLEL

SEQ ID NO: 14662 - protein, 20 aa, Bos taurus
VHVLCLTLGYFIFDLGWCIY

SEQ ID NO: 14663 - protein, 20 aa, Bos taurus
FLCGGLSACVATLAVHPVDV

SEQ ID NO: 14664 - protein, 16 aa, Bos taurus
RSLYVACTALALQLVM

SEQ ID NO: 14665 - protein, 20 aa, Bos taurus
LLASMVAGVVSVGLGAPVDL

SEQ ID NO: 14666 - protein, 22 aa, Bos taurus
GLSQQPGGTVVAGAVAGALGAF

SEQ ID NO: 14667 - protein, 20 aa, Bos taurus
IMVAALGWATAELIMSRCIP

SEQ ID NO: 14668 - protein, 20 aa, Bos taurus
LFFAVSGIMDMLTYLITHVP

SEQ ID NO: 14669 - protein, 20 aa, Bos taurus
TLRNGEVLLFCITAAMYMFF

SEQ ID NO: 14670 - protein, 20 aa, Bos taurus
TCWLYYFSKFIELLDTIFFI

SEQ ID NO: 14671 - protein, 21 aa, Bos taurus
FVTAAFYGNMYASIMLMTAIS

SEQ ID NO: 14672 - protein, 20 aa, Bos taurus
IAGFLAVFSSESAIFLLMLA

SEQ ID NO: 14673 - protein, 20 aa, Bos taurus
WMTYEAVITGFFPFFLIATV

SEQ ID NO: 14674 - protein, 20 aa, Bos taurus
IACPIFAGLLHFFFLAAFAW

SEQ ID NO: 14675 - protein, 20 aa, Bos taurus
CAVFAALLHFFFLAAFTWMF

SEQ ID NO: 14676 - protein, 20 aa, Bos taurus
IACPIFAGLLHYFFLAAFSW

SEQ ID NO: 14677 - protein, 32 aa, Bos taurus
PAVQKGLRYGMILFIISEVLFFTGFFWAFYHS

SEQ ID NO: 14678 - protein, 22 aa, Bos taurus
NLEGFFATLGGEIALWSLVVLA

SEQ ID NO: 14679 - protein, 22 aa, Bos taurus
NVWAAVDVLCCTASIMGLCIIS

SEQ ID NO: 14680 - protein, 21 aa, Bos taurus
IFVTLDVMMCTASILNLCAIS

SEQ ID NO: 14681 - protein, 21 aa, Bos taurus
LFPFLQKSSVGITVLNLCALS

SEQ ID NO: 14682 - protein, 26 aa, Bos taurus
YLCKIASASVSFNLYASVFLLTCLSI

SEQ ID NO: 14683 - protein, 19 aa, Bos taurus
AVHVIYTVNLYSSVLILAF

SEQ ID NO: 14684 - protein, 21 aa, Bos taurus
LVPFIQKASVGITVLSLCALS

SEQ ID NO: 14685 - protein, 21 aa, Bos taurus
FWLSMDYVASTASIFSVFILC

SEQ ID NO: 14686 - protein, 20 aa, Bos taurus
YNTCMKVVYIACSFTTVWMI

SEQ ID NO: 14687 - protein, 18 aa, Bos taurus
PAFGISFVLCISCILVKT

SEQ ID NO: 14688 - protein, 21 aa, Bos taurus
LWLALDYVVSNASVMNLLIIS

SEQ ID NO: 14689 - protein, 21 aa, Bos taurus
VIDVLICGSMVSSLCFLGAIA

SEQ ID NO: 14690 - protein, 21 aa, Bos taurus
AVKYLQMVGMYASSYMILAMT

SEQ ID NO: 14691 - protein, 22 aa, Bos taurus
KIVISIDYYNMFTSIFTLCTMS

SEQ ID NO: 14692 - protein, 20 aa, Bos taurus
FLLYAYWIGLGILSSVGLGT

SEQ ID NO: 14693 - protein, 22 aa, Bos taurus
NTAGFFTVFASELSVYTLTVIT

SEQ ID NO: 14694 - protein, 22 aa, Bos taurus
LLRQGLIDTSLTVSVANLLAIA

SEQ ID NO: 14695 - protein, 22 aa, Bos taurus
EFWTSIDVLCVTASIETLCVIA

SEQ ID NO: 14696 - protein, 20 aa, Bos taurus
LQIDMAFNVFFLLYFGLRFI

SEQ ID NO: 14697 - protein, 22 aa, Bos taurus
EIYLALDVLFCTSSIVHLCAIS

SEQ ID NO: 14698 - protein, 21 aa, Bos taurus
LFTGFYFIGYFGGIFFIILLT

SEQ ID NO: 14699 - protein, 27 aa, Bos taurus
VLIGFFYGNMYCSILFMTCLSVQRYWV

SEQ ID NO: 14700 - protein, 20 aa, Bos taurus
VLWWYYFSKLIEFMDTFFFI

SEQ ID NO: 14701 - protein, 20 aa, Bos taurus
ALTLVEMAITTFYSMCFYLL

SEQ ID NO: 14702 - protein, 21 aa, Bos taurus
WFLREGSMFVALSASVFSLLA

SEQ ID NO: 14703 - protein, 20 aa, Bos taurus
AGALFNINFYAGALLLACIS

SEQ ID NO: 14704 - protein, 22 aa, Bos taurus
AVWIYLDVLFSTASIMHLCAIS

SEQ ID NO: 14705 - protein, 22 aa, Bos taurus
NIWVAFDIMCSTASILNLCVIS

SEQ ID NO: 14706 - protein, 20 aa, Bos taurus
VLAMLLHYFFLSAFAWMLVE

SEQ ID NO: 14707 - protein, 20 aa, Bos taurus
ITAFFFIGFFGGIFFITVIS

SEQ ID NO: 14708 - protein, 22 aa, Bos taurus
VSQFIHLYLMGCNYFWMLCEGI

SEQ ID NO: 14709 - protein, 20 aa, Bos taurus
VFFSLHAVALTLVVIVQCLL

SEQ ID NO: 14710 - protein, 20 aa, Bos taurus
ISNFLLIHNMFTSVFLLTVI

SEQ ID NO: 14711 - protein, 21 aa, Bos taurus
FQNLFPITAMFVSIYSMTAIA

SEQ ID NO: 14712 - protein, 21 aa, Bos taurus
VVDSLFILSLLGSICSLSVIA

SEQ ID NO: 14713 - protein, 21 aa, Bos taurus
FFGLTMTVFGLSSLFIASAMA

SEQ ID NO: 14714 - protein, 21 aa, Bos taurus
VTSALYTVNFVSGMQFLACIS

SEQ ID NO: 14715 - protein, 21 aa, Bos taurus
AAGFFTVFASELSVYTLTAIT

SEQ ID NO: 14716 - protein, 21 aa, Bos taurus
LWLSIDYVASNASVMNLLVIS

SEQ ID NO: 14717 - protein, 21 aa, Bos taurus
LWTSVDVLCVTASIETLCALA

SEQ ID NO: 14718 - protein, 20 aa, Bos taurus
GFQGFVTALASICSSAAVAW

SEQ ID NO: 14719 - protein, 21 aa, Bos taurus
LQRFIFHVNLYGSILFLTCIS

SEQ ID NO: 14720 - protein, 19 aa, Bos taurus
AFLGCTAGLVTGWSLAFLA

SEQ ID NO: 14721 - protein, 21 aa, Bos taurus
LVKYLQVVGMFASTYLLLLMS

SEQ ID NO: 14722 - protein, 20 aa, Bos taurus
FAFAMTFFGLASTLILFAMA

SEQ ID NO: 14723 - protein, 19 aa, Bos taurus
TNILLASSIWYIAFFCPCD

SEQ ID NO: 14724 - protein, 20 aa, Bos taurus
VPFVEVSSLGVTTFSLCALG

SEQ ID NO: 14725 - protein, 20 aa, Bos taurus
FPWNLILLTIFTLSMAYLTG

SEQ ID NO: 14726 - protein, 22 aa, Bos taurus
LFLACFVLVLTQSSIFSLLAVA

SEQ ID NO: 14727 - protein, 20 aa, Bos taurus
YYWILVEGLYLHSLIFMAFF

SEQ ID NO: 14728 - protein, 21 aa, Bos taurus
ITALVFYINTYAGVNFMTCLS

SEQ ID NO: 14729 - protein, 20 aa, Bos taurus
PFVQCVSITVSIFSLVLIAV

SEQ ID NO: 14730 - protein, 20 aa, Bos taurus
FVIYSFLSLCFQYLGGESAI

SEQ ID NO: 14731 - protein, 21 aa, Bos taurus
VVSLLKEVNFYSGILLLACIS

SEQ ID NO: 14732 - protein, 22 aa, Bos taurus
SAAGFFTVFASELSVYTLTVIT

SEQ ID NO: 14733 - protein, 25 aa, Bos taurus
AVMVFFHYCVVSNYFWLFIEGLYLF

SEQ ID NO: 14734 - protein, 21 aa, Bos taurus
VVISIDYYNMFTSIFTLTMMS

SEQ ID NO: 14735 - protein, 20 aa, Bos taurus
WVFGGGLCHLVFFLQPVTVY

SEQ ID NO: 14736 - protein, 21 aa, Bos taurus
ATTVIFYGNMYCSILLLACIS

SEQ ID NO: 14737 - protein, 22 aa, Bos taurus
IPLLWCANILGYTVSTFAMVKG

SEQ ID NO: 14738 - protein, 18 aa, Bos taurus
FILLFFGLSGLSIICAMS

SEQ ID NO: 14739 - protein, 20 aa, Bos taurus
CFLAAFCWMSLEGVELYFLV

SEQ ID NO: 14740 - protein, 22 aa, Bos taurus
GFQALVLTALLVGLGVSAGLPL

SEQ ID NO: 14741 - protein, 21 aa, Bos taurus
FMGVIMVFFGLCPLLLGAAMA

SEQ ID NO: 14742 - protein, 19 aa, Bos taurus
GYTVSLCGITGLWSLAIIS

SEQ ID NO: 14743 - protein, 21 aa, Bos taurus
VIDSVICSSLLASICSLLSIA

SEQ ID NO: 14744 - protein, 21 aa, Bos taurus
LWTSVDVLCVTASIETLCVIA

SEQ ID NO: 14745 - protein, 21 aa, Bos taurus
LAGCFFFINTYCSVAFLAVIT

SEQ ID NO: 14746 - protein, 20 aa, Bos taurus
LMLTTSALTFIAFLLPFIYR

SEQ ID NO: 14747 - protein, 20 aa, Bos taurus
SILLASAVWYLIFFCPLDLF

SEQ ID NO: 14748 - protein, 20 aa, Bos taurus
FAFIMSFFGLASTLQLLAMA

SEQ ID NO: 14749 - protein, 20 aa, Bos taurus
VFGYIISVLKSVSMACLACI

SEQ ID NO: 14750 - protein, 20 aa, Bos taurus
VLQFCDFLGSLMSVWVTVIA

SEQ ID NO: 14751 - protein, 20 aa, Bos taurus
IAIIYLLSGVTGNLASAIFL

SEQ ID NO: 14752 - protein, 20 aa, Bos taurus
AWGWTCTFLGGFVLLVVFLA

SEQ ID NO: 14753 - protein, 20 aa, Bos taurus
FCASTVILHSIYLCCVRTVG

SEQ ID NO: 14754 - protein, 21 aa, Bos taurus
VHTFLFEACSYATLLHVLTLS

SEQ ID NO: 14755 - protein, 20 aa, Bos taurus
CILLRWVRLLGFATVYGTVT

SEQ ID NO: 14756 - protein, 20 aa, Bos taurus
MSFTLCISYILMKSLKILLA

SEQ ID NO: 14757 - protein, 20 aa, Bos taurus
VVGFLSIFASESSVFLLTLA

SEQ ID NO: 14758 - protein, 20 aa, Bos taurus
VMTLDGINQFTSIFCLTVMS

SEQ ID NO: 14759 - protein, 20 aa, Bos taurus
CGILLYENIYISVGFLCCIS

SEQ ID NO: 14760 - protein, 21 aa, Bos taurus
LKVACPVLILTQSSILALLAI

SEQ ID NO: 14761 - protein, 21 aa, Bos taurus
VLSYLKLFSMYAPAFMMVVIS

SEQ ID NO: 14762 - protein, 19 aa, Bos taurus
MTVDGINQFTSIFCLTVMS

SEQ ID NO: 14763 - protein, 21 aa, Bos taurus
VLFSLDFLTMHASIFTLTLMS

SEQ ID NO: 14764 - protein, 23 aa, Bos taurus
DNVFDSMICISVVASMCSLLAIA

SEQ ID NO: 14765 - protein, 20 aa, Bos taurus
LVPYAQGLAVQVSTITLTVI

SEQ ID NO: 14766 - protein, 18 aa, Bos taurus
YFMGVSVSVSTLSLVAIA

SEQ ID NO: 14767 - protein, 20 aa, Bos taurus
GASAGIALGIGLLCGLVAML

SEQ ID NO: 14768 - protein, 20 aa, Bos taurus
KVIPYLQAVSVSVAVLTLSF

SEQ ID NO: 14769 - protein, 20 aa, Bos taurus
ILLLLYSIGLYSEAFFNVLL

SEQ ID NO: 14770 - protein, 21 aa, Bos taurus
LMTCLLMIFTHASIMSLLAIA

SEQ ID NO: 14771 - protein, 20 aa, Bos taurus
LLKGALLFITIALIGSGWAF

SEQ ID NO: 14772 - protein, 20 aa, Bos taurus
LGPLPFWLLYCCPVCLQFFT

SEQ ID NO: 14773 - protein, 20 aa, Bos taurus
FGFIFYTNIYISIAFLCCIS

SEQ ID NO: 14774 - protein, 22 aa, Bos taurus
PMLLSTFSHFSLFHMAANMYVL

SEQ ID NO: 14775 - protein, 20 aa, Bos taurus
IFGFLLFVSNSVSILTLCLI

SEQ ID NO: 14776 - protein, 20 aa, Bos taurus
YNTSMKLIYIACSYATVYLI

SEQ ID NO: 14777 - protein, 20 aa, Bos taurus
GFGSLAFLPVAIGFTLGAAF

SEQ ID NO: 14778 - protein, 20 aa, Bos taurus
FLFGVLFAICFSCLVAHVLA

SEQ ID NO: 14779 - protein, 20 aa, Bos taurus
FSALLYLLISSASMLTLGII

SEQ ID NO: 14780 - protein, 20 aa, Bos taurus
LVALSILTVSLSYMVGMIAS

SEQ ID NO: 14781 - protein, 20 aa, Bos taurus
SAVLFYINMYVSIVFFGLIG

SEQ ID NO: 14782 - protein, 20 aa, Bos taurus
ILGALTVFYPSIALWLLAFI

SEQ ID NO: 14783 - protein, 20 aa, Bos taurus
ALLQGALLCSAVGDACLVWP

SEQ ID NO: 14784 - protein, 21 aa, Bos taurus
LFHYVCGVSMYASVLLIMTMS

SEQ ID NO: 14785 - protein, 20 aa, Bos taurus
TACLIYINMYLSIIFLAFVS

SEQ ID NO: 14786 - protein, 20 aa, Bos taurus
AGAVFQMNMYGSCIFLTLIN

SEQ ID NO: 14787 - protein, 18 aa, Bos taurus
ALFETVCFASILSVTTVS

SEQ ID NO: 14788 - protein, 20 aa, Bos taurus
AVLLFVAVAGLTFFALSFGF

SEQ ID NO: 14789 - protein, 21 aa, Bos taurus
LIFGIYKISFFSGMLLLLCIS

SEQ ID NO: 14790 - protein, 20 aa, Bos taurus
LFLYLAPNFCFLSLLANLLL

SEQ ID NO: 14791 - protein, 18 aa, Bos taurus
IFSSVYFLAAMSIDRYLV

SEQ ID NO: 14792 - protein, 19 aa, Bos taurus
VAVDQYNTFSSLYFLTVMS

SEQ ID NO: 14793 - protein, 20 aa, Bos taurus
SLYVSTNALLAIAIDRYLAI

SEQ ID NO: 14794 - protein, 20 aa, Bos taurus
VSLYVSTNALLAIAIDRYLA

SEQ ID NO: 14795 - protein, 23 aa, Bos taurus
HLAHLVAYGSAFAQALLIGYHAC

SEQ ID NO: 14796 - protein, 20 aa, Bos taurus
LVIYNFLSLCYEYLGGESSI

SEQ ID NO: 14797 - protein, 21 aa, Bos taurus
CITYLQYLGINASSCSITAFT

SEQ ID NO: 14798 - protein, 21 aa, Bos taurus
IFGICMVFSGLCPLFLGSLMA

SEQ ID NO: 14799 - protein, 20 aa, Bos taurus
FKAMLIAVGIHLLLLMFEVL

SEQ ID NO: 14800 - protein, 20 aa, Bos taurus
LAASVFAGLLFLAYATEVAL

SEQ ID NO: 14801 - protein, 20 aa, Bos taurus
ILWMVPIYSLDSWIALKYPS

SEQ ID NO: 14802 - protein, 20 aa, Bos taurus
FVAQMIVGMYFGLVALISLS

SEQ ID NO: 14803 - protein, 20 aa, Bos taurus
IFVGLVFSAIGDAFLIWQDQ

SEQ ID NO: 14804 - protein, 20 aa, Bos taurus
IVAFMAVLFCFHAAFMLFCI

SEQ ID NO: 14805 - protein, 18 aa, Bos taurus
VFAGMALVYGPVQWLRIG

SEQ ID NO: 14806 - protein, 24 aa, Bos taurus
YILGIAGLFTIFSSFVFSTVVIHF

SEQ ID NO: 14807 - protein, 20 aa, Bos taurus
WNIGVILLLTVMATAFMGYV

SEQ ID NO: 14808 - protein, 20 aa, Bos taurus
LGVLFMLAMSSLAVYSILWS

SEQ ID NO: 14809 - protein, 22 aa, Bos taurus
AVVYYMTTTIIAVVIGIIIVII

SEQ ID NO: 14810 - protein, 20 aa, Bos taurus
FAGATVHDFFNWLSVLVLLP

SEQ ID NO: 14811 - protein, 29 aa, Bos taurus
TIFSGRYIILLMGVFSIYTGLIYNDCFSK

SEQ ID NO: 14812 - protein, 20 aa, Bos taurus
AITAGLQGYNATLVGILMAI

SEQ ID NO: 14813 - protein, 20 aa, Bos taurus
AVVYYFCTTLIAVILGIVLV

SEQ ID NO: 14814 - protein, 20 aa, Bos taurus
FIHGWLIMSSLMLLFLFTYI

SEQ ID NO: 14815 - protein, 20 aa, Bos taurus
WGLALAAVVTVLSSLLMSVG

SEQ ID NO: 14816 - protein, 29 aa, Bos taurus
MFFNGRYILLLMGLFSVYTGLIYNDCFSK

SEQ ID NO: 14817 - protein, 20 aa, Bos taurus
LFFCSFIGMFMFYCAHWQTY

SEQ ID NO: 14818 - protein, 22 aa, Bos taurus
ALLFFLVTTLLASALGVGLALA

SEQ ID NO: 14819 - protein, 20 aa, Bos taurus
TSCFSWMEMLIISWVIGMIW

SEQ ID NO: 14820 - protein, 20 aa, Bos taurus
TFSWGIKMTVFAMIIGAFVA

SEQ ID NO: 14821 - protein, 20 aa, Bos taurus
WFVIGMVGAAFFILIQLVLL

SEQ ID NO: 14822 - protein, 20 aa, Bos taurus
LLSFALGGLLGNVFLHLLPE

SEQ ID NO: 14823 - protein, 20 aa, Bos taurus
ASGIFFMICVVIAAVFGIVI

SEQ ID NO: 14824 - protein, 19 aa, Bos taurus
LKVARSVLPLSVVFIGMIT

SEQ ID NO: 14825 - protein, 20 aa, Bos taurus
PIVNVSEVLGPLCLMLLMGT

SEQ ID NO: 14826 - protein, 20 aa, Bos taurus
LILQLFVGLAVGTLSGDALL

SEQ ID NO: 14827 - protein, 20 aa, Bos taurus
GVLLCLNYYSIALGAASLLL

SEQ ID NO: 14828 - protein, 20 aa, Bos taurus
VTLQFPLQEFILAMGFFLVL

SEQ ID NO: 14829 - protein, 20 aa, Bos taurus
LAETIMLLGFFMTVFLEQLV

SEQ ID NO: 14830 - protein, 20 aa, Bos taurus
LGVYQWLSLVILMTGVAFVQ

SEQ ID NO: 14831 - protein, 20 aa, Bos taurus
WLYAACSVSYLGAMVSSNSA

SEQ ID NO: 14832 - protein, 20 aa, Bos taurus
IIVGSTVTFVAGVYQVAMGF

SEQ ID NO: 14833 - protein, 20 aa, Bos taurus
SGQLSAFYLFSCIWGTFILI

SEQ ID NO: 14834 - protein, 20 aa, Bos taurus
FITTLLVHIFIALIVLGLLF

SEQ ID NO: 14835 - protein, 20 aa, Bos taurus
AAPFALSALLYGANNNLVIY

SEQ ID NO: 14836 - protein, 20 aa, Bos taurus
VLALCGLVCFQGLLGWYMVK

SEQ ID NO: 14837 - protein, 20 aa, Bos taurus
VTLAISMTFISTVAATGFLP

SEQ ID NO: 14838 - protein, 20 aa, Bos taurus
VLISARLVLLTLCGWVLCWT

SEQ ID NO: 14839 - protein, 22 aa, Bos taurus
TLFRSILLFLTRFTVLTATGWS

SEQ ID NO: 14840 - protein, 20 aa, Bos taurus
WFALGAALQLAISTYAAYVG

SEQ ID NO: 14841 - protein, 20 aa, Bos taurus
AYFGLTTLGASALAVALAFI

SEQ ID NO: 14842 - protein, 20 aa, Bos taurus
IAVLIMGCCPGGTVSNIFTF

SEQ ID NO: 14843 - protein, 20 aa, Bos taurus
PWKILALLYYPALYYPLAAC

SEQ ID NO: 14844 - protein, 20 aa, Bos taurus
GHAMGTAGVYYVMVTSTLSI

SEQ ID NO: 14845 - protein, 22 aa, Bos taurus
QAGLLLHGVNLATILCFPAAVA

SEQ ID NO: 14846 - protein, 22 aa, Bos taurus
IVSSLLLLFFFSFIYLGEVFKT

SEQ ID NO: 14847 - protein, 20 aa, Bos taurus
YYTLYSVILFCVFFWIPFVY

SEQ ID NO: 14848 - protein, 20 aa, Bos taurus
GAINSAAILLYALTCCISGY

SEQ ID NO: 14849 - protein, 20 aa, Bos taurus
ALMTTACFLFMFMGVFGGFS

SEQ ID NO: 14850 - protein, 20 aa, Bos taurus
GSPSGHCMITGAALWPIMTA

SEQ ID NO: 14851 - protein, 20 aa, Bos taurus
LTNTMETVLTIIALFYYPLE

SEQ ID NO: 14852 - protein, 20 aa, Bos taurus
MVFGLSVLYFLFLVFLLFLN

SEQ ID NO: 14853 - protein, 20 aa, Bos taurus
LCVILLILVFMVPFYIGYFI

SEQ ID NO: 14854 - protein, 20 aa, Bos taurus
PLFYVYAVFGFTSVVNRIIG

SEQ ID NO: 14855 - protein, 20 aa, Bos taurus
FAPATLVTPLGALSVLVSAI

SEQ ID NO: 14856 - protein, 19 aa, Bos taurus
EHFIQLITGVAVFLGVSFF

SEQ ID NO: 14857 - protein, 20 aa, Bos taurus
ILVLFGILLVMALVSSVGAL

SEQ ID NO: 14858 - protein, 20 aa, Bos taurus
IMSAITVLILILYFVIDNFV

SEQ ID NO: 14859 - protein, 20 aa, Bos taurus
IVGSAAFNMFIIIALCVYVV

SEQ ID NO: 14860 - protein, 19 aa, Bos taurus
DLLGKQLSFYSFGIIGIIM

SEQ ID NO: 14861 - protein, 19 aa, Bos taurus
EHFIHIITGVAVFLGVSFF

SEQ ID NO: 14862 - protein, 19 aa, Bos taurus
DEFGEQLSKVISLICVAVW

SEQ ID NO: 14863 - protein, 21 aa, Bos taurus
ILILFCILIAMSLVCSVGSAI

SEQ ID NO: 14864 - protein, 20 aa, Bos taurus
TITAVLTTFCVQMGYLLAGY

SEQ ID NO: 14865 - protein, 20 aa, Bos taurus
ALFLALVALSVVMVTLQGFA

SEQ ID NO: 14866 - protein, 20 aa, Bos taurus
VAGPLVFVLIIGVLGVLAYG

SEQ ID NO: 14867 - protein, 11 aa, Bos taurus
KTLIQTLGQMM

SEQ ID NO: 14868 - protein, 18 aa, Bos taurus
RLKTLVIKVSGVILSVVG

SEQ ID NO: 14869 - protein, 26 aa, Bos taurus
HHEFVALIGALLAICCMIFLGFADDV

SEQ ID NO: 14870 - protein, 20 aa, Bos taurus
AGIMVWVMIVMVILVLGYGI

SEQ ID NO: 14871 - protein, 22 aa, Bos taurus
NFMKWSIPAFLYFLDNLIVFYV

SEQ ID NO: 14872 - protein, 22 aa, Bos taurus
LFDHGLDSWSCVYFVVTVYSIF

SEQ ID NO: 14873 - protein, 20 aa, Bos taurus
LFGMIITIGQAIVYVMTGMY

SEQ ID NO: 14874 - protein, 20 aa, Bos taurus
SIAGSGAAFGSFIILCVGGL

SEQ ID NO: 14875 - protein, 20 aa, Bos taurus
GFWFFKFAAAIAIIIGAFFI

SEQ ID NO: 14876 - protein, 20 aa, Bos taurus
LFGMTITIGQSIVYVMTGMY

SEQ ID NO: 14877 - protein, 20 aa, Bos taurus
LLLLALSFCGFVVFTNLSLQ

SEQ ID NO: 14878 - protein, 20 aa, Bos taurus
ISFFFCFVWFLANFSYQEAL

SEQ ID NO: 14879 - protein, 22 aa, Bos taurus
FWPFAMVGGCIWATGNIAVVPI

SEQ ID NO: 14880 - protein, 20 aa, Bos taurus
FFATTAVVMAEVLKGLTCLL

SEQ ID NO: 14881 - protein, 20 aa, Bos taurus
SMLLMMAVIINLMFSGQWTV

SEQ ID NO: 14882 - protein, 20 aa, Bos taurus
IGTIVGSAVFNILFVIGTCA

SEQ ID NO: 14883 - protein, 20 aa, Bos taurus
IGAMSSYLFIVKYELPLVIQ

SEQ ID NO: 14884 - protein, 20 aa, Bos taurus
SCHQMSIGTFFLVSALAINV

SEQ ID NO: 14885 - protein, 20 aa, Bos taurus
VVAAVICLHNVGAMSSYLFI

SEQ ID NO: 14886 - protein, 20 aa, Bos taurus
VLASLTVMLAIFIVMTVLVK

SEQ ID NO: 14887 - protein, 20 aa, Bos taurus
LVYLLLWAAYLSVCQVGQVF

SEQ ID NO: 14888 - protein, 20 aa, Bos taurus
LCEVAIATYTFGTCIAFLII

SEQ ID NO: 14889 - protein, 20 aa, Bos taurus
FILSALLLWNFGLLIVDHIH

SEQ ID NO: 14890 - protein, 20 aa, Bos taurus
LIAIFLYTSATLTIAFTSAD

SEQ ID NO: 14891 - protein, 20 aa, Bos taurus
VMALRFLLGFLLAGVDLGVY

SEQ ID NO: 14892 - protein, 20 aa, Bos taurus
PAYAVLLAFLTGCIQLGMGF

SEQ ID NO: 14893 - protein, 20 aa, Bos taurus
VAVVFTVLGVGTIACTLFAF

SEQ ID NO: 14894 - protein, 20 aa, Bos taurus
LGCKWTLVLAMCCYVAFSLG

SEQ ID NO: 14895 - protein, 22 aa, Bos taurus
STFIGALFGNYTTFLGASFAYI

SEQ ID NO: 14896 - protein, 20 aa, Bos taurus
LAGVATSYAVWAASKSFAAF

SEQ ID NO: 14897 - protein, 22 aa, Bos taurus
ALGWHGPLLALSFLAFWVPWAP

SEQ ID NO: 14898 - protein, 20 aa, Bos taurus
AVYRMCFAMAAFFFLFSLLM

SEQ ID NO: 14899 - protein, 20 aa, Bos taurus
GFPGYLLLSVLQFLYPFIAM

SEQ ID NO: 14900 - protein, 20 aa, Bos taurus
FAANRVFGFAIVATSTLNML

SEQ ID NO: 14901 - protein, 20 aa, Bos taurus
LAANRVFGAAILLTSTLNML

SEQ ID NO: 14902 - protein, 20 aa, Bos taurus
AILLSLALYLLGMLAFPLLA

SEQ ID NO: 14903 - protein, 22 aa, Bos taurus
PRMNNMSFWLLPPSFLLLLASS

SEQ ID NO: 14904 - protein, 20 aa, Bos taurus
LALLFSLTFALLCCPFALGG

SEQ ID NO: 14905 - protein, 21 aa, Bos taurus
GRRNSMLMMNLLAFVSAVLMG

SEQ ID NO: 14906 - protein, 20 aa, Bos taurus
GVGYTAILISLYIGFFYNVI

SEQ ID NO: 14907 - protein, 20 aa, Bos taurus
ALAHFVWIAPLQVTLLMGLL

SEQ ID NO: 14908 - protein, 20 aa, Bos taurus
IKALLVANILSLVGALLMGF

SEQ ID NO: 14909 - protein, 20 aa, Bos taurus
KGTLLFNNIFSIVPALLMGF

SEQ ID NO: 14910 - protein, 20 aa, Bos taurus
LSLVLCALPFVAGFAVITAA

SEQ ID NO: 14911 - protein, 22 aa, Bos taurus
RRPLLVLASLGLLLQTVLSIFV

SEQ ID NO: 14912 - protein, 20 aa, Bos taurus
MLFNNALAVLGGTLMGLAKA

SEQ ID NO: 14913 - protein, 19 aa, Bos taurus
PESCLLIVVGLLVGGLIKG

SEQ ID NO: 14914 - protein, 25 aa, Bos taurus
ISALLIWGCLVTLGYVLVFDFDSPR

SEQ ID NO: 14915 - protein, 20 aa, Bos taurus
LTILGSTGPVLVFEKILFKF

SEQ ID NO: 14916 - protein, 20 aa, Bos taurus
PLTILSSTGPVLVFERLLFN

SEQ ID NO: 14917 - protein, 20 aa, Bos taurus
GIGYASIVIVSLLNIYYIII

SEQ ID NO: 14918 - protein, 25 aa, Bos taurus
IGCAICLIAFYIASYYNTIIAWALY

SEQ ID NO: 14919 - protein, 20 aa, Bos taurus
IVTLLNIYYIIVLAWALFYL

SEQ ID NO: 14920 - protein, 20 aa, Bos taurus
VCLLATTLTCASLGVLTAVA

SEQ ID NO: 14921 - protein, 30 aa, Bos taurus
GVGYAVILIALYVGFYYNVIIAWSLYYLFS

SEQ ID NO: 14922 - protein, 20 aa, Bos taurus
GNSMLIVNLLAIAGGCLMGF

SEQ ID NO: 14923 - protein, 20 aa, Bos taurus
IPMFTGFCIMFISTVMFAFS

SEQ ID NO: 14924 - protein, 20 aa, Bos taurus
GVGYGMMVVSTYIGIYYNVV

SEQ ID NO: 14925 - protein, 20 aa, Bos taurus
CLLISLSVNSVFAFFSSFVQ

SEQ ID NO: 14926 - protein, 20 aa, Bos taurus
AAIILSSCLLGLGSLVLIIS

SEQ ID NO: 14927 - protein, 20 aa, Bos taurus
LIFNYLQTAVSGTCAAFAPN

SEQ ID NO: 14928 - protein, 24 aa, Bos taurus
RLIGCGGIVMALGALLSALPEFLT

SEQ ID NO: 14929 - protein, 20 aa, Bos taurus
FGSVGFTFLLAAFALQWSTL

SEQ ID NO: 14930 - protein, 20 aa, Bos taurus
GIGFASCVVCFFVALYYNVI

SEQ ID NO: 14931 - protein, 20 aa, Bos taurus
LMAGEVSAMVGSAVWQLIAS

SEQ ID NO: 14932 - protein, 20 aa, Bos taurus
VIVFYCNTYYIMVLAWGFYY

SEQ ID NO: 14933 - protein, 23 aa, Bos taurus
LLLLQLLGWVFIPIYIRSGVYTM

SEQ ID NO: 14934 - protein, 20 aa, Bos taurus
LLGSACFAVSCLLIAYGASN

SEQ ID NO: 14935 - protein, 20 aa, Bos taurus
LVLWASSTGVFLFGIAAAFT

SEQ ID NO: 14936 - protein, 20 aa, Bos taurus
VMTGGILTALGMLLASFATS

SEQ ID NO: 14937 - protein, 20 aa, Bos taurus
VLWTLYYGILSAFAPVYSWI

SEQ ID NO: 14938 - protein, 20 aa, Bos taurus
TIIFSCFVCIGQVVFALGGI

SEQ ID NO: 14939 - protein, 20 aa, Bos taurus
FRVVNSAFTAVAILAVDFPL

SEQ ID NO: 14940 - protein, 20 aa, Bos taurus
LAIVGSDMQEVIGTAIAFSL

SEQ ID NO: 14941 - protein, 20 aa, Bos taurus
CCLLQLAITDTSAAFAPTYL

SEQ ID NO: 14942 - protein, 20 aa, Bos taurus
VGFNFLLAAFGIQWALLMQG

SEQ ID NO: 14943 - protein, 9 aa, Bos taurus
DTLALLNLF

SEQ ID NO: 14944 - protein, 20 aa, Bos taurus
PVMIVGGILSGSGLIAASFC

SEQ ID NO: 14945 - protein, 22 aa, Bos taurus
LTAGMLLSGLFTSLFGLGYFWN

SEQ ID NO: 14946 - protein, 20 aa, Bos taurus
FSGVGINLLIAALGLQWGTI

SEQ ID NO: 14947 - protein, 20 aa, Bos taurus
TASLSLSNLWFGFLLGFLCF

SEQ ID NO: 14948 - protein, 20 aa, Bos taurus
FLLGTVFFTCFPIPLMRISP

SEQ ID NO: 14949 - protein, 20 aa, Bos taurus
VSSLALGLASAASVSYIMFA

SEQ ID NO: 14950 - protein, 20 aa, Bos taurus
YLMCGGIAFWSLVTLGSSFI

SEQ ID NO: 14951 - protein, 20 aa, Bos taurus
ILYVCGLASTVLFGLVASSL

SEQ ID NO: 14952 - protein, 20 aa, Bos taurus
WVLSFGMCSSALVVFVFGTL

SEQ ID NO: 14953 - protein, 20 aa, Bos taurus
WFLDSFSIMSMSICLLTIFI

SEQ ID NO: 14954 - protein, 18 aa, Bos taurus
LFITMLISLQLFLIMTFT

SEQ ID NO: 14955 - protein, 17 aa, Bos taurus
AGAGLLAAAMIAVVPGY

SEQ ID NO: 14956 - protein, 20 aa, Bos taurus
FVLFFITYGLVIILTSELFL

SEQ ID NO: 14957 - protein, 19 aa, Bos taurus
LMSVTNAISGLTAVGGLVL

SEQ ID NO: 14958 - protein, 20 aa, Bos taurus
LNGLFFVLMLSWIFLPIYIT

SEQ ID NO: 14959 - protein, 20 aa, Bos taurus
VLLALAWVFVPIYLSSEIVT

SEQ ID NO: 14960 - protein, 20 aa, Bos taurus
MMFIPVALFVTWSIMEFSMW

SEQ ID NO: 14961 - protein, 20 aa, Bos taurus
FVAFFIGWNLILEYLIGTAA

SEQ ID NO: 14962 - protein, 20 aa, Bos taurus
IVVAATGMAVALFSSVLALG

SEQ ID NO: 14963 - protein, 20 aa, Bos taurus
LLLLLGAGGPLLYGLYSLGS

SEQ ID NO: 14964 - protein, 20 aa, Bos taurus
LLAPVFLVSPTLLGITMLLA

SEQ ID NO: 14965 - protein, 10 aa, Bos taurus
VTGSLETKYR

SEQ ID NO: 14966 - protein, 10 aa, Bos taurus
VTGTLETKYK

SEQ ID NO: 14967 - protein, 10 aa, Bos taurus
ASGNLETKYK

SEQ ID NO: 14968 - protein, 20 aa, Bos taurus
LAYMLVCMQWMDLLWAASFY

SEQ ID NO: 14969 - protein, 20 aa, Bos taurus
LFSIGMFPYVMLASSPLFCS

SEQ ID NO: 14970 - protein, 20 aa, Bos taurus
FGAGLTVGLSNLFCGVCVGI

SEQ ID NO: 14971 - protein, 20 aa, Bos taurus
YLSYLLYPLCIGGAIYSLLN

SEQ ID NO: 14972 - protein, 20 aa, Bos taurus
LFVVIIMFAWSIVASTAFLA

SEQ ID NO: 14973 - protein, 20 aa, Bos taurus
CYWQYLLSYVLAVGFMSFAV

SEQ ID NO: 14974 - protein, 20 aa, Bos taurus
LAALTLVVWLFAINVYFNAF

SEQ ID NO: 14975 - protein, 20 aa, Bos taurus
FVVFVLFAICWAPLNFIGLV

SEQ ID NO: 14976 - protein, 20 aa, Bos taurus
AVLGAFVTGLLMEFFMVYYV

SEQ ID NO: 14977 - protein, 20 aa, Bos taurus
GWALVDLLLTGGMAAATAMA

SEQ ID NO: 14978 - protein, 20 aa, Bos taurus
LFYIIGDLFIAGTDTTTNSL

SEQ ID NO: 14979 - protein, 28 aa, Bos taurus
ALQVLFQVVLIISGNLSFLNWLTIVPSL

SEQ ID NO: 14980 - protein, 20 aa, Bos taurus
SLCLALLCPAFLVGVVRVAE

SEQ ID NO: 14981 - protein, 20 aa, Bos taurus
WLVIVMTVMSLLVLVLSWGS

SEQ ID NO: 14982 - protein, 20 aa, Bos taurus
VPLMTLQLLDFCLSILTLCS

SEQ ID NO: 14983 - protein, 20 aa, Bos taurus
YLSWILFPLLGCYAVYSLLY

SEQ ID NO: 14984 - protein, 20 aa, Bos taurus
PIYVLPLVVTATMWGVLELG

SEQ ID NO: 14985 - protein, 19 aa, Bos taurus
YYVALAWTSSALMYFIVRS

SEQ ID NO: 14986 - protein, 20 aa, Bos taurus
FIGYLVGNTLWLVAVGYYIY

SEQ ID NO: 14987 - protein, 20 aa, Bos taurus
YLFTLTASAATMAVVSTVFL

SEQ ID NO: 14988 - protein, 20 aa, Bos taurus
FAVIFSLQGMVGIILTAGII

SEQ ID NO: 14989 - protein, 20 aa, Bos taurus
VVVSRILMAAPGMAIPPFIM

SEQ ID NO: 14990 - protein, 20 aa, Bos taurus
LPLLTGLFAISRLIYWLTFA

SEQ ID NO: 14991 - protein, 22 aa, Bos taurus
VVISRITMAAPGMILLPVLMER

SEQ ID NO: 14992 - protein, 20 aa, Bos taurus
ISILILQLLGYVLSVVGFSL

SEQ ID NO: 14993 - protein, 20 aa, Bos taurus
FGTVSALVIIGWCSLSASKI

SEQ ID NO: 14994 - protein, 20 aa, Bos taurus
FSLVAYTCLGAYVIMLCFLC

SEQ ID NO: 14995 - protein, 20 aa, Bos taurus
LFIINFVSFFTALAVYFRHN

SEQ ID NO: 14996 - protein, 20 aa, Bos taurus
APILNIPIVQFFFSVLIGLI

SEQ ID NO: 14997 - protein, 17 aa, Bos taurus
NWPYYFGFGLPLAFLTA

SEQ ID NO: 14998 - protein, 20 aa, Bos taurus
LVWAGLLGCARALGLGPKWL

SEQ ID NO: 14999 - protein, 17 aa, Bos taurus
VVLFGTSAFIPEVFAYF

SEQ ID NO: 15000 - protein, 20 aa, Bos taurus
FILSCGLVVVNHYLAFQFFA

SEQ ID NO: 15001 - protein, 20 aa, Bos taurus
LPSTGLMFFYHFSILQILGL

SEQ ID NO: 15002 - protein, 20 aa, Bos taurus
LVIHNLFEGMIWFIVPISCV

SEQ ID NO: 15003 - protein, 18 aa, Bos taurus
NVQLSLTLAALSLGLWWT

SEQ ID NO: 15004 - protein, 20 aa, Bos taurus
ALFFNFLSACCCYVGLGFGI

SEQ ID NO: 15005 - protein, 20 aa, Bos taurus
VVFFVFYIWSTVEIFRYPFY

SEQ ID NO: 15006 - protein, 22 aa, Bos taurus
ISSLFSSLKVVRLLRLGRVARK

SEQ ID NO: 15007 - protein, 20 aa, Bos taurus
AVTRLAGITGVVITLCLILI

SEQ ID NO: 15008 - protein, 20 aa, Bos taurus
AGHGLLVELIITFQLVFTIF

SEQ ID NO: 15009 - protein, 20 aa, Bos taurus
VSVQGIIIYRAAYFGVYDTA

SEQ ID NO: 15010 - protein, 20 aa, Bos taurus
VGQATIVEIFLTLQFVLCIF

SEQ ID NO: 15011 - protein, 16 aa, Bos taurus
PNLTRNVIINCTELVT

SEQ ID NO: 15012 - protein, 20 aa, Bos taurus
GILVFALFFAQWLVGFSFFL

SEQ ID NO: 15013 - protein, 19 aa, Bos taurus
GCIPTMARAVVVNAAQLAS

SEQ ID NO: 15014 - protein, 20 aa, Bos taurus
VSVQGIIIYRAAYFGIYDTA

SEQ ID NO: 15015 - protein, 15 aa, Bos taurus
IEIIGTLQLVLCVLA

SEQ ID NO: 15016 - protein, 20 aa, Bos taurus
GQAVTVELFLTLQLVLCIFA

SEQ ID NO: 15017 - protein, 21 aa, Bos taurus
YPEIRLNRLLRISRMFEFFQR

SEQ ID NO: 15018 - protein, 20 aa, Bos taurus
FAILRIIRLVRVFRIFKLSR

SEQ ID NO: 15019 - protein, 20 aa, Bos taurus
ILPTAFMGTAMIFTCFTLSA

SEQ ID NO: 15020 - protein, 17 aa, Bos taurus
AWPAPLFGLLFLLSSHL

SEQ ID NO: 15021 - protein, 22 aa, Bos taurus
VIRTTAYLLYSLHLNSCLYYWA

SEQ ID NO: 15022 - protein, 20 aa, Bos taurus
SFYSGHSSFGMYCMVFLALY

SEQ ID NO: 15023 - protein, 15 aa, Bos taurus
EDSVLLFVIAWTITE

SEQ ID NO: 15024 - protein, 20 aa, Bos taurus
SFFSGHASFSMYTMLYLVLY

SEQ ID NO: 15025 - protein, 20 aa, Bos taurus
QIIHHVATIILISFSWFANY

SEQ ID NO: 15026 - protein, 20 aa, Bos taurus
FFCTTFRKFIWVILQPLFYA

SEQ ID NO: 15027 - protein, 20 aa, Bos taurus
YWQTQFNNIAAVIVFFVWIK

SEQ ID NO: 15028 - protein, 20 aa, Bos taurus
FIMMLTLMMVAYSASSMALA

SEQ ID NO: 15029 - protein, 20 aa, Bos taurus
QVIHHFVTIILISFSYSLNL

SEQ ID NO: 15030 - protein, 20 aa, Bos taurus
VSVQGIIIYRAAYFGIYDTA

SEQ ID NO: 15031 - protein, 20 aa, Bos taurus
YILTSVLGLFAHELFYSILL

SEQ ID NO: 15032 - protein, 20 aa, Bos taurus
XLLICAMGLFVHEFFYSLLL

SEQ ID NO: 15033 - protein, 20 aa, Bos taurus
FWHGFDISGHSFLLTFCALM

SEQ ID NO: 15034 - protein, 20 aa, Bos taurus
LGITTVFLFACQWFLGFSVF

SEQ ID NO: 15035 - protein, 20 aa, Bos taurus
PMPLYAFLLAFIFCTYNGYL

SEQ ID NO: 15036 - protein, 20 aa, Bos taurus
MLAPCTGLGPAVFTCPLFFG

SEQ ID NO: 15037 - protein, 20 aa, Bos taurus
FLGMFLLVLFSFTIGLTQLY

SEQ ID NO: 15038 - protein, 22 aa, Bos taurus
FIILIVWLIAAVISLPPLIYKG

SEQ ID NO: 15039 - protein, 20 aa, Bos taurus
IPMLVIIETISLFIQPMALA

SEQ ID NO: 15040 - protein, 19 aa, Bos taurus
GVAPLWMRQIPYTMMKFAC

SEQ ID NO: 15041 - protein, 21 aa, Bos taurus
LRSLRFLQILRMLRMDRRGGT

SEQ ID NO: 15042 - protein, 20 aa, Bos taurus
MWHPTLVAEALFAIANIFSS

SEQ ID NO: 15043 - protein, 22 aa, Bos taurus
ISNLILYILIIIHWNACIYYAI

SEQ ID NO: 15044 - protein, 20 aa, Bos taurus
VNGFFDQFIGTASLIVCVLA

SEQ ID NO: 15045 - protein, 20 aa, Bos taurus
GAMLLTASIAVCANLLMAFV

SEQ ID NO: 15046 - protein, 20 aa, Bos taurus
VIGISYAVLTWFSQTLWMPI

SEQ ID NO: 15047 - protein, 20 aa, Bos taurus
LTASYAGISETIICFAIYES

SEQ ID NO: 15048 - protein, 18 aa, Bos taurus
WKMTLCLLVAWRIVGMAV

SEQ ID NO: 15049 - protein, 20 aa, Bos taurus
VSVQGIIVYRASYFGAYDTV

SEQ ID NO: 15050 - protein, 20 aa, Bos taurus
RRVVQIFRIMRILRILKLAR

SEQ ID NO: 15051 - protein, 20 aa, Bos taurus
VTLRVFRVFRIFKFSRHSQG

SEQ ID NO: 15052 - protein, 20 aa, Bos taurus
AGLLAVLWAGLQCSGGVGLL

SEQ ID NO: 15053 - protein, 14 aa, Bos taurus
IPLIMSVLYVWAQL

SEQ ID NO: 15054 - protein, 20 aa, Bos taurus
YVLVCMLGLFVHEFFYSFLL

SEQ ID NO: 15055 - protein, 20 aa, Bos taurus
HGVFNMVYFGFYFNVKNIIP

SEQ ID NO: 15056 - protein, 20 aa, Bos taurus
LLLVSILGFVVNLVGIFVFK

SEQ ID NO: 15057 - protein, 19 aa, Bos taurus
GYVPNLLGIIPYAGIDLAV

SEQ ID NO: 15058 - protein, 20 aa, Bos taurus
FLFSVSILSGILCSILAVLK

SEQ ID NO: 15059 - protein, 16 aa, Bos taurus
PNITRNAIVNCGEMVT

SEQ ID NO: 15060 - protein, 19 aa, Bos taurus
GLTATVLKQGSNQGIRFFV

SEQ ID NO: 15061 - protein, 20 aa, Bos taurus
GLMPTILGMAPYAGVSFFTF

SEQ ID NO: 15062 - protein, 17 aa, Bos taurus
FLSFSMYQSFVQFLQYY

SEQ ID NO: 15063 - protein, 20 aa, Bos taurus
GLGATLLRDVPFSIVYFPLF

SEQ ID NO: 15064 - protein, 19 aa, Bos taurus
GMVSTLLRETPSFGVYFLT

SEQ ID NO: 15065 - protein, 21 aa, Bos taurus
IVQVLRLLRALRMLKLGRHST

SEQ ID NO: 15066 - protein, 19 aa, Bos taurus
GYVPNMLGIIPYAGIDLAV

SEQ ID NO: 15067 - protein, 20 aa, Bos taurus
GRLLVGTFVALSFNLFTMLS

SEQ ID NO: 15068 - protein, 20 aa, Bos taurus
LWLGWGPTALRDVPFSALYW

SEQ ID NO: 15069 - protein, 20 aa, Bos taurus
ALLLNVASALTAFIGLYVAL

SEQ ID NO: 15070 - protein, 16 aa, Bos taurus
PNVARNAIVNCAELVT

SEQ ID NO: 15071 - protein, 20 aa, Bos taurus
FFAVHVCGAVLTFGMGSLYM

SEQ ID NO: 15072 - protein, 23 aa, Bos taurus
GLTATLLRDAPFSGIYLMFYSQT

SEQ ID NO: 15073 - protein, 20 aa, Bos taurus
IMLITAAIGVAVNVIMGFLL

SEQ ID NO: 15074 - protein, 20 aa, Bos taurus
VGTSLTFGFGTLTCWIQAAL

SEQ ID NO: 15075 - protein, 20 aa, Bos taurus
GWWVSHHYVSTFLSGVMLTW

SEQ ID NO: 15076 - protein, 20 aa, Bos taurus
RGYKSTVLREIPFSLVQFPL

SEQ ID NO: 15077 - protein, 20 aa, Bos taurus
LTGAFLAFFVGIVYFWLQLF

SEQ ID NO: 15078 - protein, 20 aa, Bos taurus
FADYVQCVLAFTGVAGYITY

SEQ ID NO: 15079 - protein, 21 aa, Bos taurus
WAPTILRDVPFSAMYWYNYEV

SEQ ID NO: 15080 - protein, 20 aa, Bos taurus
GPLMLAHHTLSILGIIVALV

SEQ ID NO: 15081 - protein, 20 aa, Bos taurus
VFYKGLNPTLIAIFPYAGFQ

SEQ ID NO: 15082 - protein, 30 aa, Bos taurus
ATWVPLLCFVLHVISWLLIFSILLVFDYAE

SEQ ID NO: 15083 - protein, 20 aa, Bos taurus
CLYFIPYVFLSDWITPEACA

SEQ ID NO: 15084 - protein, 21 aa, Bos taurus
VGGAVPRVMVGSAAQLATFAS

SEQ ID NO: 15085 - protein, 20 aa, Bos taurus
IDSNISLVHYIVASAQVWMI

SEQ ID NO: 15086 - protein, 20 aa, Bos taurus
IHSLLLYTVFGGALSLAVEV

SEQ ID NO: 15087 - protein, 20 aa, Bos taurus
FQLGAFLGSFVSIYKGTSCF

SEQ ID NO: 15088 - protein, 19 aa, Bos taurus
VTFLHVFHHTIMPWTWWFG

SEQ ID NO: 15089 - protein, 20 aa, Bos taurus
ASFICLAIWAMAIAGVAPLL

SEQ ID NO: 15090 - protein, 20 aa, Bos taurus
FRIAALLAFLGAAVAGSFPL

SEQ ID NO: 15091 - protein, 20 aa, Bos taurus
IWNTLLFLLTVQLVGLIKSS

SEQ ID NO: 15092 - protein, 20 aa, Bos taurus
YYYVAGYLFPATVVGVSAAI

SEQ ID NO: 15093 - protein, 20 aa, Bos taurus
FYLVGYGMPALIVAVSAAVD

SEQ ID NO: 15094 - protein, 20 aa, Bos taurus
YYYLGGYCFPALVVGIAAAI

SEQ ID NO: 15095 - protein, 23 aa, Bos taurus
VPLLNTSVLLASGVSITWAHHSL

SEQ ID NO: 15096 - protein, 20 aa, Bos taurus
AIMGVAFTWVMALACAAPPL

SEQ ID NO: 15097 - protein, 23 aa, Bos taurus
LMALLCVWALSLVISIGPLFGWR

SEQ ID NO: 15098 - protein, 20 aa, Bos taurus
VTVMIAIVWVLSFTISCPML

SEQ ID NO: 15099 - protein, 23 aa, Bos taurus
IVSIWILSFILAIPEAIGFVMVP

SEQ ID NO: 15100 - protein, 23 aa, Bos taurus
MLVAKVTCIIIWLLAGLASLPTI

SEQ ID NO: 15101 - protein, 19 aa, Bos taurus
VVYVGVWLPAVLLTIPDLI

SEQ ID NO: 15102 - protein, 24 aa, Bos taurus
AVEIVLIWVVSVVLAVPEAVGFDI

SEQ ID NO: 15103 - protein, 20 aa, Bos taurus
ASITILAAWFLSFLWIIPIL

SEQ ID NO: 15104 - protein, 17 aa, Bos taurus
FRVEFLVIPTAILAFLV

SEQ ID NO: 15105 - protein, 20 aa, Bos taurus
FLLVFLCTFMQIVICAIWLN

SEQ ID NO: 15106 - protein, 22 aa, Bos taurus
AGMMIAAAWVLSFILWAPAILF

SEQ ID NO: 15107 - protein, 19 aa, Bos taurus
IIAAIWVASILTSLLFITY

SEQ ID NO: 15108 - protein, 20 aa, Bos taurus
VLLAWAFSLLFSLPQLFIFA

SEQ ID NO: 15109 - protein, 21 aa, Bos taurus
AKIINICNWILSSAIGLPVMF

SEQ ID NO: 15110 - protein, 20 aa, Bos taurus
LVQKVGFFGILACASIPNPL

SEQ ID NO: 15111 - protein, 22 aa, Bos taurus
AYVIMLGGWVCCFLLALLPLVG

SEQ ID NO: 15112 - protein, 20 aa, Bos taurus
VVVVIVVIWTMAIVMGAIPS

SEQ ID NO: 15113 - protein, 23 aa, Bos taurus
RVVILMVWIVSGLTSFLPIQMHW

SEQ ID NO: 15114 - protein, 20 aa, Bos taurus
LWFWLEVNSVVDFFTVPPVF

SEQ ID NO: 15115 - protein, 23 aa, Bos taurus
IKAIIVTVWVISAVISFPPLISF

SEQ ID NO: 15116 - protein, 24 aa, Bos taurus
VTFGAATSVVTWVVAVFASLPGII

SEQ ID NO: 15117 - protein, 27 aa, Bos taurus
PKKQANIAIGVSLGIWLLILLLTIPLY

SEQ ID NO: 15118 - protein, 19 aa, Bos taurus
ITVLHVYHHASMLNIWWFV

SEQ ID NO: 15119 - protein, 20 aa, Bos taurus
YAFFKISLTLVGLFLIPDGI

SEQ ID NO: 15120 - protein, 21 aa, Bos taurus
FLLISACWVISLILGGLPIMG

SEQ ID NO: 15121 - protein, 20 aa, Bos taurus
LTCVAVWGLCLLFALPDFIF

SEQ ID NO: 15122 - protein, 23 aa, Bos taurus
AFLKIIAVWTISVGISMPIPVFG

SEQ ID NO: 15123 - protein, 24 aa, Bos taurus
AAFILISVAWTLSVLISFIPVQLS

SEQ ID NO: 15124 - protein, 20 aa, Bos taurus
YYGIGWGFPLLICIISIVFA

SEQ ID NO: 15125 - protein, 20 aa, Bos taurus
VTTSLGVWAAAILVATPQFM

SEQ ID NO: 15126 - protein, 19 aa, Bos taurus
WYYFLGWGFPLIPACIHAV

SEQ ID NO: 15127 - protein, 20 aa, Bos taurus
ISFLVLSWLFTLIALIMAAV

SEQ ID NO: 15128 - protein, 20 aa, Bos taurus
YTACLVIWVLAFFLSSPSLV

SEQ ID NO: 15129 - protein, 20 aa, Bos taurus
AVIAGIWLVALALAFPQCFY

SEQ ID NO: 15130 - protein, 20 aa, Bos taurus
LVILTVLWAGCTGSGITIVT

SEQ ID NO: 15131 - protein, 21 aa, Bos taurus
AVLLGVWLAVLAFALLPVLGV

SEQ ID NO: 15132 - protein, 21 aa, Bos taurus
CWVICFCVWVAAILLSIPQLV

SEQ ID NO: 15133 - protein, 22 aa, Bos taurus
AASIMLVGWIFAFAVALFPIFG

SEQ ID NO: 15134 - protein, 22 aa, Bos taurus
AGVMIGLAWVISFILWAPAILF

SEQ ID NO: 15135 - protein, 22 aa, Bos taurus
AAVVLVWVVSAAVSFAPIMSKW

SEQ ID NO: 15136 - protein, 20 aa, Bos taurus
LVFFVWLSSAFWAALPLLGW

SEQ ID NO: 15137 - protein, 21 aa, Bos taurus
NAVYISVLVWLIVVVGISPIL

SEQ ID NO: 15138 - protein, 23 aa, Bos taurus
ALMVVVATWTIGIGVSIPPFFGW

SEQ ID NO: 15139 - protein, 20 aa, Bos taurus
LAVLVTWLGCLVASAPQVHI

SEQ ID NO: 15140 - protein, 23 aa, Bos taurus
RARLALPAIYAFCTIFCSLPFLG

SEQ ID NO: 15141 - protein, 18 aa, Bos taurus
AYSFLPVQLLAAGMKEVT

SEQ ID NO: 15142 - protein, 20 aa, Bos taurus
LAVIWVGSMTLAAPELLLWQ

SEQ ID NO: 15143 - protein, 20 aa, Bos taurus
SVLLCLSITALVCLSVTVFS

SEQ ID NO: 15144 - protein, 22 aa, Bos taurus
ARGVIAALWVLAFGIGLTPFLG

SEQ ID NO: 15145 - protein, 20 aa, Bos taurus
YLWGFTVFGWGLPAIFVAVW

SEQ ID NO: 15146 - protein, 18 aa, Bos taurus
CICIFVWILVFGQTLPLL

SEQ ID NO: 15147 - protein, 20 aa, Bos taurus
AYVGIAVIWVLAVASSLPFL

SEQ ID NO: 15148 - protein, 20 aa, Bos taurus
LQFCIVKPIMALVTIVLQAF

SEQ ID NO: 15149 - protein, 19 aa, Bos taurus
FICLGIWALSVILALPIFI

SEQ ID NO: 15150 - protein, 22 aa, Bos taurus
AIPVMLGGWLFSTLIAVLPLVG

SEQ ID NO: 15151 - protein, 22 aa, Bos taurus
YIIIGWGTPTVCVSVWAMLRLY

SEQ ID NO: 15152 - protein, 22 aa, Bos taurus
KAKIINICIWILSSSVGISAIV

SEQ ID NO: 15153 - protein, 20 aa, Bos taurus
SAYAVLAIWALSAVLALPAA

SEQ ID NO: 15154 - protein, 23 aa, Bos taurus
RTYALLTCGLVWTTVFLYMLPFF

SEQ ID NO: 15155 - protein, 20 aa, Bos taurus
VTNSMVLVNILQAIYVLDFF

SEQ ID NO: 15156 - protein, 24 aa, Bos taurus
AGLTLFAVYASNVLFCALPSMGLG

SEQ ID NO: 15157 - protein, 20 aa, Bos taurus
LWLCLIGYGVPLIIVGISAG

SEQ ID NO: 15158 - protein, 19 aa, Bos taurus
MLLPLAFAATLTAFIFSLL

SEQ ID NO: 15159 - protein, 22 aa, Bos taurus
WTTVGLVWASALALGLLPLLGV

SEQ ID NO: 15160 - protein, 23 aa, Bos taurus
AITGIAFSWIWAAVWTAPPIFGW

SEQ ID NO: 15161 - protein, 20 aa, Bos taurus
VAITISAIWAACTVSGVLFI

SEQ ID NO: 15162 - protein, 23 aa, Bos taurus
ARARALVCTVWAISALVSFLPIF

SEQ ID NO: 15163 - protein, 21 aa, Bos taurus
GILLSLIIWVSIVGAASYFFV

SEQ ID NO: 15164 - protein, 20 aa, Bos taurus
HPYLGFIVMVLAVLQLLLAA

SEQ ID NO: 15165 - protein, 20 aa, Bos taurus
WFVMIATGWVKGSGVTLMSN

SEQ ID NO: 15166 - protein, 20 aa, Bos taurus
MVAPVVGAFCLAFCALPLVG

SEQ ID NO: 15167 - protein, 20 aa, Bos taurus
ICIILIWIYSCLIFLPSFFG

SEQ ID NO: 15168 - protein, 20 aa, Bos taurus
LQPVVKQVLYLLGAMLLSMA

SEQ ID NO: 15169 - protein, 20 aa, Bos taurus
AEVGPAGSQFGILACLFVEL

SEQ ID NO: 15170 - protein, 20 aa, Bos taurus
FLLIEDLTGSCFEPLPQGLL

SEQ ID NO: 15171 - protein, 20 aa, Bos taurus
ALLLLLLTAHVSYLSLIHFD

SEQ ID NO: 15172 - protein, 20 aa, Bos taurus
VKLLIGFVWVTSALVALPLL

SEQ ID NO: 15173 - protein, 20 aa, Bos taurus
MLAVILLVVFWFLVGWTSSV

SEQ ID NO: 15174 - protein, 20 aa, Bos taurus
IPIIFTCTGIVVVCTLLIFA

SEQ ID NO: 15175 - protein, 20 aa, Bos taurus
ATLALCALLAGTVAAVPLLG

SEQ ID NO: 15176 - protein, 20 aa, Bos taurus
LASAAVWAFSLVMSLPLVVF

SEQ ID NO: 15177 - protein, 20 aa, Bos taurus
AMGVSALIWVKELLTSIYFL

SEQ ID NO: 15178 - protein, 22 aa, Bos taurus
AVVAITGCWILSFVVGLTPMFG

SEQ ID NO: 15179 - protein, 19 aa, Bos taurus
LLSSIFAGPQLYIFGMIHL

SEQ ID NO: 15180 - protein, 19 aa, Bos taurus
INVAVWGVSLLVILPIMIY

SEQ ID NO: 15181 - protein, 18 aa, Bos taurus
VLALGTWLLALLLALPMM

SEQ ID NO: 15182 - protein, 23 aa, Bos taurus
GRRSGAIIGGIWAFCASCGTVFI

SEQ ID NO: 15183 - protein, 20 aa, Bos taurus
FLIIGLAWGVSALLASPLAI

SEQ ID NO: 15184 - protein, 18 aa, Bos taurus
AARVIVATWMLSGLLMVP

SEQ ID NO: 15185 - protein, 20 aa, Bos taurus
VGLFLVGLLLGLLLAAAALL

SEQ ID NO: 15186 - protein, 21 aa, Bos taurus
ARGSILGIWAVSLAVMVPQAA

SEQ ID NO: 15187 - protein, 20 aa, Bos taurus
VAGSIFISVLVWVTATLVTL

SEQ ID NO: 15188 - protein, 21 aa, Bos taurus
IWLALGLCWLVSFLVGLTPMF

SEQ ID NO: 15189 - protein, 20 aa, Bos taurus
IFGIVIPLQVLANVAYIVME

SEQ ID NO: 15190 - protein, 20 aa, Bos taurus
GAFVGASLLFLLVNVLCAML

SEQ ID NO: 15191 - protein, 20 aa, Bos taurus
AVAVSSVVWATELGANSAPL

SEQ ID NO: 15192 - protein, 17 aa, Bos taurus
FMAVYLSAGVISTFVSY

SEQ ID NO: 15193 - protein, 20 aa, Bos taurus
WVVAVASFAPLWPIYILVPV

SEQ ID NO: 15194 - protein, 17 aa, Bos taurus
FRVEFLVVPVGGLSFLV

SEQ ID NO: 15195 - protein, 20 aa, Bos taurus
IALLILAITIHNIPEGLAVG

SEQ ID NO: 15196 - protein, 20 aa, Bos taurus
IFLVALLLSLVEVIINTEWL

SEQ ID NO: 15197 - protein, 20 aa, Bos taurus
AVMVLAYIWLHSLIGCLPPL

SEQ ID NO: 15198 - protein, 20 aa, Bos taurus
AVIMAVGITTTVCFTVVIFS

SEQ ID NO: 15199 - protein, 20 aa, Bos taurus
LLSVLVWSLTLLIALPNMIL

SEQ ID NO: 15200 - protein, 20 aa, Bos taurus
VMACVGVWIMTLTTTIPLLL

SEQ ID NO: 15201 - protein, 20 aa, Bos taurus
AFGLTPLKPGLLLPLLLVSA

SEQ ID NO: 15202 - protein, 20 aa, Bos taurus
AGIWVMSVLLATPVLLYRTV

SEQ ID NO: 15203 - protein, 20 aa, Bos taurus
MISAVVWLMVLLIMVPNMII

SEQ ID NO: 15204 - protein, 20 aa, Bos taurus
VARLLCLGVWALILVFAVPT

SEQ ID NO: 15205 - protein, 20 aa, Bos taurus
ILGIVWGLSVLFSLPNTSIH

SEQ ID NO: 15206 - protein, 20 aa, Bos taurus
FSLGIAAFLPQFILLSAVSF

SEQ ID NO: 15207 - protein, 20 aa, Bos taurus
VLLISKLSCLGIWMLAIVLS

SEQ ID NO: 15208 - protein, 20 aa, Bos taurus
LALLLTWAAPLLFASLPALG

SEQ ID NO: 15209 - protein, 22 aa, Bos taurus
ASLCVWLGVTVAVLPFLTFAGV

SEQ ID NO: 15210 - protein, 19 aa, Bos taurus
VSLAVWGVATLVVLPFAVF

SEQ ID NO: 15211 - protein, 20 aa, Bos taurus
FLIALVWMVSILISIPSAYF

SEQ ID NO: 15212 - protein, 20 aa, Bos taurus
TGLIALVWVVSILVAIPSAY

SEQ ID NO: 15213 - protein, 20 aa, Bos taurus
LGVTVGLWGVAALLSLPVVL

SEQ ID NO: 15214 - protein, 20 aa, Bos taurus
LQFCVVKPLMAVSTVVLQAF

SEQ ID NO: 15215 - protein, 23 aa, Bos taurus
IIIFVWAFTSIYCMLWFFLLDLN

SEQ ID NO: 15216 - protein, 22 aa, Bos taurus
KMMLSGVCFFAVFVALLPILGH

SEQ ID NO: 15217 - protein, 20 aa, Bos taurus
FWLLVFMPLFFVSPVSVAAC

SEQ ID NO: 15218 - protein, 20 aa, Bos taurus
VSGLLKIVQAFVACIIFGAL

SEQ ID NO: 15219 - protein, 20 aa, Bos taurus
VLQYTVVRPFTTIIALVCEL

SEQ ID NO: 15220 - protein, 20 aa, Bos taurus
FYIVGLPLAVGLGVLLVAAV

SEQ ID NO: 15221 - protein, 20 aa, Bos taurus
FVHGMLMFAVTHMLYASAFG

SEQ ID NO: 15222 - protein, 20 aa, Bos taurus
CAAVICMAWTLSVAMAFPPV

SEQ ID NO: 15223 - protein, 20 aa, Bos taurus
VLDQWLTLPIFAWPVAWCLC

SEQ ID NO: 15224 - protein, 25 aa, Bos taurus
ALPFFLLLVDLSRASALAKFALSSN

SEQ ID NO: 15225 - protein, 20 aa, Bos taurus
FFAFHFILPFIIMAIAMVHL

SEQ ID NO: 15226 - protein, 20 aa, Bos taurus
LAIILLSVLLMSGSFTLSTL

SEQ ID NO: 15227 - protein, 23 aa, Bos taurus
SVNGVNALGLVVFSMCFGFVIGN

SEQ ID NO: 15228 - protein, 20 aa, Bos taurus
IVGTILLITSLLILCTCLIL

SEQ ID NO: 15229 - protein, 19 aa, Bos taurus
FKMKMSVILGIIHMLFGVS

SEQ ID NO: 15230 - protein, 20 aa, Bos taurus
FWWLLFPVSAMSMTCPVFSS

SEQ ID NO: 15231 - protein, 23 aa, Bos taurus
YSDGINVLGLIVFCLVLGIVIGR

SEQ ID NO: 15232 - protein, 20 aa, Bos taurus
YPTLFLTVWNFGAVGMVCIH

SEQ ID NO: 15233 - protein, 20 aa, Bos taurus
GGEIFPYLVVVIGLENVLVL

SEQ ID NO: 15234 - protein, 19 aa, Bos taurus
FKMKMSVILGITHMTFGVI

SEQ ID NO: 15235 - protein, 20 aa, Bos taurus
EIQIALVIVFVLSTFGGATM

SEQ ID NO: 15236 - protein, 23 aa, Bos taurus
EVEGMNILGLVVFAIIFGVALRK

SEQ ID NO: 15237 - protein, 20 aa, Bos taurus
LFELWNMLDFGMLAIFAASF

SEQ ID NO: 15238 - protein, 20 aa, Bos taurus
LEGYVFILINDVLTAANGAY

SEQ ID NO: 15239 - protein, 20 aa, Bos taurus
AALLSVTSLFYILSIIFAGL

SEQ ID NO: 15240 - protein, 20 aa, Bos taurus
QLGLWVIAGFLTFLVLEKLF

SEQ ID NO: 15241 - protein, 20 aa, Bos taurus
VATTGTAVCINFCIIMLLNV

SEQ ID NO: 15242 - protein, 22 aa, Bos taurus
VAFYNVGRSLTTVFNVLLSYLL

SEQ ID NO: 15243 - protein, 20 aa, Bos taurus
GVGYQMLGNIVTIGLAFFPF

SEQ ID NO: 15244 - protein, 20 aa, Bos taurus
LGLIGGIHGFFLIEKCFTLL

SEQ ID NO: 15245 - protein, 20 aa, Bos taurus
ITYWPQLALGLTFNWGALLG

SEQ ID NO: 15246 - protein, 20 aa, Bos taurus
ACVLVFSLALHSVFEGLAVG

SEQ ID NO: 15247 - protein, 20 aa, Bos taurus
LLSLVFALSAHSVFEGLALG

SEQ ID NO: 15248 - protein, 20 aa, Bos taurus
FVGLMAVLTACFSSGFAGVY

SEQ ID NO: 15249 - protein, 20 aa, Bos taurus
YPMAKYLCVLLIVAGVALFM

SEQ ID NO: 15250 - protein, 20 aa, Bos taurus
GFVSVYLSDALLGGFVTGAS

SEQ ID NO: 15251 - protein, 20 aa, Bos taurus
LMTFQMKFFYISQLAYWFHA

SEQ ID NO: 15252 - protein, 20 aa, Bos taurus
LLGFAIVSTVITAVLLILIY

SEQ ID NO: 15253 - protein, 20 aa, Bos taurus
QGLALLLLMAAGACYAAGGL

SEQ ID NO: 15254 - protein, 20 aa, Bos taurus
LGSALVLYCASLWTSLSLLL

SEQ ID NO: 15255 - protein, 20 aa, Bos taurus
VSKILGTLLFIAIPIAAGVV

SEQ ID NO: 15256 - protein, 20 aa, Bos taurus
SVLNLLFLGYPFGVYVPLCC

SEQ ID NO: 15257 - protein, 20 aa, Bos taurus
TYSFLNLLFLCYPFGMYIPF

SEQ ID NO: 15258 - protein, 20 aa, Bos taurus
YSRTVAIIGGFLVLASGAGE

SEQ ID NO: 15259 - protein, 20 aa, Bos taurus
EIEGMNILGLVLFALVLGVA

SEQ ID NO: 15260 - protein, 20 aa, Bos taurus
TMAALGMMPLCLYLYTLSWN

SEQ ID NO: 15261 - protein, 20 aa, Bos taurus
HGAAHLLGSLLSWAHLGVQV

SEQ ID NO: 15262 - protein, 20 aa, Bos taurus
FRCLNVMLWLGFWVVQLNVC

SEQ ID NO: 15263 - protein, 31 aa, Bos taurus
VGSVLALMVYTILFLKLFSYRDVNLWCRERR

SEQ ID NO: 15264 - protein, 21 aa, Bos taurus
YISVALLIWNFGVVGMIAIHW

SEQ ID NO: 15265 - protein, 20 aa, Bos taurus
LGFVVICALLLLVGAFVPLN

SEQ ID NO: 15266 - protein, 20 aa, Bos taurus
VWNIILTTSLFSVPFFLTWS

SEQ ID NO: 15267 - protein, 20 aa, Bos taurus
ATLYPGVVFGICFVLNCFIW

SEQ ID NO: 15268 - protein, 21 aa, Bos taurus
WVRVIPSLAYCTFLLAVGLSR

SEQ ID NO: 15269 - protein, 20 aa, Bos taurus
LVALAFIIRPTAVIPWIPLL

SEQ ID NO: 15270 - protein, 20 aa, Bos taurus
GLCWTISITWELTELFFMHL

SEQ ID NO: 15271 - protein, 20 aa, Bos taurus
CLLWLTFMYFFWKLGDPFPI

SEQ ID NO: 15272 - protein, 20 aa, Bos taurus
MICYWDGSAHYLMYLVMVAA

SEQ ID NO: 15273 - protein, 20 aa, Bos taurus
LNLHGKIGCLLSILGSTVMV

SEQ ID NO: 15274 - protein, 17 aa, Bos taurus
VIFLIGIIVANVPEGLL

SEQ ID NO: 15275 - protein, 20 aa, Bos taurus
TFIILYNNLIPISLLVTLEV

SEQ ID NO: 15276 - protein, 20 aa, Bos taurus
FFIIGVTVLVVAVPEGLPLA

SEQ ID NO: 15277 - protein, 20 aa, Bos taurus
FVTAAWSIFAYTWLYIILSV

SEQ ID NO: 15278 - protein, 17 aa, Bos taurus
FTISVSLAVAAIPEGLP

SEQ ID NO: 15279 - protein, 17 aa, Bos taurus
VIFLIGIIVANVPEGLL

SEQ ID NO: 15280 - protein, 17 aa, Bos taurus
FKIAVALAVAAIPEGLP

SEQ ID NO: 15281 - protein, 21 aa, Bos taurus
LTFIILFNNLIPISLLVTLEV

SEQ ID NO: 15282 - protein, 19 aa, Bos taurus
WTMPHCVLTLKLIGLAMDY

SEQ ID NO: 15283 - protein, 20 aa, Bos taurus
SLFRFLLLFSYIIPISLRVN

SEQ ID NO: 15284 - protein, 20 aa, Bos taurus
LAALIILAVLEGVLLLMLIF

SEQ ID NO: 15285 - protein, 24 aa, Bos taurus
VVVPGINLPVNQLTYFFAAVLISG

SEQ ID NO: 15286 - protein, 17 aa, Bos taurus
EGPMIHSGSVIAAGISQ

SEQ ID NO: 15287 - protein, 21 aa, Bos taurus
WRHKLLLPTAASLPLLMVYFT

SEQ ID NO: 15288 - protein, 20 aa, Bos taurus
VAFMIILSIVEVIIILLLIF

SEQ ID NO: 15289 - protein, 22 aa, Bos taurus
PAMAVIFSNFSIITTALLFRIV

SEQ ID NO: 15290 - protein, 22 aa, Bos taurus
GVSVFVLYLLLWVVLFSFILSH

SEQ ID NO: 15291 - protein, 20 aa, Bos taurus
AGICLLIIIQLFVAGLIVLL

SEQ ID NO: 15292 - protein, 20 aa, Bos taurus
FIFYIFGSIGCVCCLLWFTV

SEQ ID NO: 15293 - protein, 20 aa, Bos taurus
WFYVGMAGAFCFILIQLVLL

SEQ ID NO: 15294 - protein, 20 aa, Bos taurus
AGVCLLITIQLFVAGLIVLL

SEQ ID NO: 15295 - protein, 20 aa, Bos taurus
IGTYQLAKAMTTPVIIVIQT

SEQ ID NO: 15296 - protein, 20 aa, Bos taurus
AIVNILSSTSGLFTLILAAM

SEQ ID NO: 15297 - protein, 22 aa, Bos taurus
LGILIWGSFNALTGWASSRFGW

SEQ ID NO: 15298 - protein, 20 aa, Bos taurus
LVLFLHEAVLVQYMDTLKLA

SEQ ID NO: 15299 - protein, 20 aa, Bos taurus
MLMTMALAMKLGMAPFHFWV

SEQ ID NO: 15300 - protein, 20 aa, Bos taurus
FYIFDLMMLILFFLDSLIAW

SEQ ID NO: 15301 - protein, 20 aa, Bos taurus
LWYLNGDYLVLLVSLVLILP

SEQ ID NO: 15302 - protein, 20 aa, Bos taurus
LTGIIQLSMGMLGFGFIVAY

SEQ ID NO: 15303 - protein, 20 aa, Bos taurus
FLKGNLLIIIVSVLIILPLA

SEQ ID NO: 15304 - protein, 20 aa, Bos taurus
HSFFTITITCMAILSGTSTI

SEQ ID NO: 15305 - protein, 20 aa, Bos taurus
WDSLLLETGFLAMLVAPLGL

SEQ ID NO: 15306 - protein, 20 aa, Bos taurus
FTISLTAFLFILPLSIPREI

SEQ ID NO: 15307 - protein, 20 aa, Bos taurus
GAFLFAVLLHFKHIYLYVAP

SEQ ID NO: 15308 - protein, 20 aa, Bos taurus
AVLLFLAMPMLAVGGILFLI

SEQ ID NO: 15309 - protein, 20 aa, Bos taurus
VALAGELVGVGGHFLFLGLA

SEQ ID NO: 15310 - protein, 20 aa, Bos taurus
FISCPVIKGFTSAAAIIIGF

SEQ ID NO: 15311 - protein, 20 aa, Bos taurus
IAFLVLTFFLALVDCTSSVT

SEQ ID NO: 15312 - protein, 20 aa, Bos taurus
FYASWYTLIPASVLVGLGAA

SEQ ID NO: 15313 - protein, 20 aa, Bos taurus
IIDFLFGVVSGLTGLSSGYF

SEQ ID NO: 15314 - protein, 20 aa, Bos taurus
VIGGISKGNVSLCTAIVADL

SEQ ID NO: 15315 - protein, 20 aa, Bos taurus
GFLTLVDLHHHALLADLALS

SEQ ID NO: 15316 - protein, 20 aa, Bos taurus
GFWFFKFLIFVGITVGAFYI

SEQ ID NO: 15317 - protein, 20 aa, Bos taurus
LLIGRHLIIVLSTVVFTLPL

SEQ ID NO: 15318 - protein, 20 aa, Bos taurus
GCVIFVRILQGLVEGVTYPA

SEQ ID NO: 15319 - protein, 20 aa, Bos taurus
GCVIFVRILQGLVEGVTYPA

SEQ ID NO: 15320 - protein, 20 aa, Bos taurus
CAPAVLSALALVGLGVGAVK

SEQ ID NO: 15321 - protein, 29 aa, Bos taurus
ASVDLTIFSLHLAGVSSILGAINFITTII

SEQ ID NO: 15322 - protein, 20 aa, Bos taurus
AAAVPATADQGVWQLLLVTF

SEQ ID NO: 15323 - protein, 23 aa, Bos taurus
MLILGRFIIGVYCGLTTGFVPMY

SEQ ID NO: 15324 - protein, 18 aa, Bos taurus
WQLTSCLVLVIVLLYFSL

SEQ ID NO: 15325 - protein, 20 aa, Bos taurus
TFCGLAFLIVLALLQAGLGK

SEQ ID NO: 15326 - protein, 20 aa, Bos taurus
ISGLYCGLISGLIPMYIGEI

SEQ ID NO: 15327 - protein, 22 aa, Bos taurus
MIIVARVLVGICAGLSSNVVPM

SEQ ID NO: 15328 - protein, 20 aa, Bos taurus
LLTGLACGIASLVAPVYISE

SEQ ID NO: 15329 - protein, 13 aa, Bos taurus
IGYLVLGRILCAL

SEQ ID NO: 15330 - protein, 20 aa, Bos taurus
FFIGAYSGLTSGLVPMYVGE

SEQ ID NO: 15331 - protein, 19 aa, Bos taurus
ILQSEVFFLFLLPPIILDA

SEQ ID NO: 15332 - protein, 20 aa, Bos taurus
LWGRCPSSSFVVFVVYTLLP

SEQ ID NO: 15333 - protein, 20 aa, Bos taurus
IGLWTATLCIILVATDASSL

SEQ ID NO: 15334 - protein, 20 aa, Bos taurus
LEFRLWIGLWSAFLCLILVA

SEQ ID NO: 15335 - protein, 18 aa, Bos taurus
WDLALCLLLVWLVCFFCI

SEQ ID NO: 15336 - protein, 18 aa, Bos taurus
WQLVLCIMFIFTVIYFSI

SEQ ID NO: 15337 - protein, 20 aa, Bos taurus
ELALCLLLAWVVCYFCIWKG

SEQ ID NO: 15338 - protein, 22 aa, Bos taurus
LLIFRLLQGLVSKGSWTAGYTL

SEQ ID NO: 15339 - protein, 20 aa, Bos taurus
QWQLLLCLIIVVIVLFFSLW

SEQ ID NO: 15340 - protein, 23 aa, Bos taurus
MLILGRLIIGLFCGLCTGFVPMY

SEQ ID NO: 15341 - protein, 20 aa, Bos taurus
SLQGIGSSCSSVAGMGMLAS

SEQ ID NO: 15342 - protein, 18 aa, Bos taurus
LPLLGCLGVSWVVVFLCL

SEQ ID NO: 15343 - protein, 20 aa, Bos taurus
LLSGVGIGGSIPIVFSYFSE

SEQ ID NO: 15344 - protein, 20 aa, Bos taurus
IAIGVFISLSSTATCVYIAE

SEQ ID NO: 15345 - protein, 20 aa, Bos taurus
GMSTAGVVLNCMTLNVEWMP

SEQ ID NO: 15346 - protein, 28 aa, Bos taurus
MMYLLLIGAQVLLGIGATPVQPLGVSYI

SEQ ID NO: 15347 - protein, 20 aa, Bos taurus
SMINADFCAGAVLISFGAVL

SEQ ID NO: 15348 - protein, 18 aa, Bos taurus
WKMTICLLAAWVVVCLAM

SEQ ID NO: 15349 - protein, 20 aa, Bos taurus
FPISGTHCIVGATIGFSLVA

SEQ ID NO: 15350 - protein, 20 aa, Bos taurus
LNWEVTLCLLTCWVLVYFCV

SEQ ID NO: 15351 - protein, 20 aa, Bos taurus
VYFAALSLILYIFTKLSVDL

SEQ ID NO: 15352 - protein, 20 aa, Bos taurus
LSVLIFIALALNGFGGMCMT

SEQ ID NO: 15353 - protein, 20 aa, Bos taurus
FIVARFLLAISGSGYLVVVF

SEQ ID NO: 15354 - protein, 20 aa, Bos taurus
LYLSIGLLSGSGWALTFTPT

SEQ ID NO: 15355 - protein, 20 aa, Bos taurus
GLVGFGIGGVPQSVTLYAEF

SEQ ID NO: 15356 - protein, 20 aa, Bos taurus
AFWLMELGRFVFGIGGESLA

SEQ ID NO: 15357 - protein, 20 aa, Bos taurus
LYGTGAMDYGVGGFIFGSAM

SEQ ID NO: 15358 - protein, 19 aa, Bos taurus
IPLWGGVLITVVDTFFFLF

SEQ ID NO: 15359 - protein, 20 aa, Bos taurus
FLAGFSTMSILTNCTVLIVE

SEQ ID NO: 15360 - protein, 19 aa, Bos taurus
LINADFCVGSVCVAFGAVL

SEQ ID NO: 15361 - protein, 21 aa, Bos taurus
GIFLFCMCVIAIGAVQALIVL

SEQ ID NO: 15362 - protein, 20 aa, Bos taurus
LYFSVGVIGGLGLAFNLNPA

SEQ ID NO: 15363 - protein, 22 aa, Bos taurus
VLWYFVLVQIFNGLVQTTGWPA

SEQ ID NO: 15364 - protein, 20 aa, Bos taurus
VTVLISFGAVLGKTSPVQML

SEQ ID NO: 15365 - protein, 20 aa, Bos taurus
PTLLTTVEFLELVGFAIAST

SEQ ID NO: 15366 - protein, 20 aa, Bos taurus
FAMISISGVFSVTFSVIFAY

SEQ ID NO: 15367 - protein, 20 aa, Bos taurus
LTGMALAGFTIIVMPLELEW

SEQ ID NO: 15368 - protein, 20 aa, Bos taurus
VGVGEASYSTIAPTLIADLF

SEQ ID NO: 15369 - protein, 20 aa, Bos taurus
FVLLVGRALGGLSTALLFSA

SEQ ID NO: 15370 - protein, 20 aa, Bos taurus
LWIVNGLLQSTGWPCVVAVM

SEQ ID NO: 15371 - protein, 20 aa, Bos taurus
FILFLFLLAFSIATIMQCFL

SEQ ID NO: 15372 - protein, 22 aa, Bos taurus
ILFYILFEATLVPTLIIITRWG

SEQ ID NO: 15373 - protein, 19 aa, Bos taurus
GIAIFCMLLTYYMWIKAVK

SEQ ID NO: 15374 - protein, 20 aa, Bos taurus
VIYIVQTILYTGVVVYAPAL

SEQ ID NO: 15375 - protein, 20 aa, Bos taurus
GLAALATFISSVNIAGGFLV

SEQ ID NO: 15376 - protein, 20 aa, Bos taurus
IPIILAVLYLFIYIFTKISV

SEQ ID NO: 15377 - protein, 22 aa, Bos taurus
VLSLLLSVFTKISIDLYAGALF

SEQ ID NO: 15378 - protein, 20 aa, Bos taurus
FFKYLLLFLITMLILVTANN

SEQ ID NO: 15379 - protein, 20 aa, Bos taurus
YPDLLALVIAIIVTIIVALG

SEQ ID NO: 15380 - protein, 20 aa, Bos taurus
PVPTNTCVISGLAGGVIIYI

SEQ ID NO: 15381 - protein, 20 aa, Bos taurus
GLDYFNSLWIWTLVVGYVLA

SEQ ID NO: 15382 - protein, 20 aa, Bos taurus
SSGIMLTFWLIALLCALAIL

SEQ ID NO: 15383 - protein, 7 aa, Bos taurus
LTFTEKW

SEQ ID NO: 15384 - protein, 7 aa, Bos taurus
LTFTEKW

SEQ ID NO: 15385 - protein, 7 aa, Bos taurus
LTFTQKW

SEQ ID NO: 15386 - protein, 20 aa, Bos taurus
GFIGGFFATVVFGLLLSYVM

SEQ ID NO: 15387 - protein, 21 aa, Bos taurus
GLGLGITIAFLATLITQLLVY

SEQ ID NO: 15388 - protein, 20 aa, Bos taurus
ANWIFALAGGMFLYISLADM

SEQ ID NO: 15389 - protein, 20 aa, Bos taurus
VWIPLYPMGCLAEAVSVIQS

SEQ ID NO: 15390 - protein, 21 aa, Bos taurus
VLVLLVCVFGLAAHWMACIWY

SEQ ID NO: 15391 - protein, 20 aa, Bos taurus
YFEVFWYTHHLFVIFFIGLA

SEQ ID NO: 15392 - protein, 20 aa, Bos taurus
VTGSIALAIGISVAIGHLFA

SEQ ID NO: 15393 - protein, 20 aa, Bos taurus
IVSWMIAQTVTAVAGLVSYP

SEQ ID NO: 15394 - protein, 16 aa, Bos taurus
VALAVGFSLTLGHLFG

SEQ ID NO: 15395 - protein, 19 aa, Bos taurus
PCHFVSAVVAGFCTTVLSS

SEQ ID NO: 15396 - protein, 20 aa, Bos taurus
QHVFFGAAIFLLSVATALLG

SEQ ID NO: 15397 - protein, 18 aa, Bos taurus
HFCASMISGLVTTAASMP

SEQ ID NO: 15398 - protein, 20 aa, Bos taurus
VVSWMIAQTVTAVAGVVSYP

SEQ ID NO: 15399 - protein, 17 aa, Bos taurus
GPLAIGFSVALGHLLAI

SEQ ID NO: 15400 - protein, 19 aa, Bos taurus
VGTPALSIGFSVALGHLLG

SEQ ID NO: 15401 - protein, 26 aa, Bos taurus
ISNLVMYIIIIIHWNACVYFSISKAI

SEQ ID NO: 15402 - protein, 21 aa, Bos taurus
RELGLLIFFLFIGVILFSSAV

SEQ ID NO: 15403 - protein, 20 aa, Bos taurus
YLFLGGILMSAMSLMLLSSL

SEQ ID NO: 15404 - protein, 29 aa, Bos taurus
FYMIPVFFAFRMRFYVAWIAAECGCIAAG

SEQ ID NO: 15405 - protein, 19 aa, Bos taurus
IVFQGLNYFTGVFAFSVMI

SEQ ID NO: 15406 - protein, 17 aa, Bos taurus
LRPTVQFFLVAFALYVG

SEQ ID NO: 15407 - protein, 17 aa, Bos taurus
TLFIVLYPMGVSGELLT

SEQ ID NO: 15408 - protein, 17 aa, Bos taurus
LRPLLQFTLIMMAFYTG

SEQ ID NO: 15409 - protein, 20 aa, Bos taurus
IFIVFAIVFIITRLVILPFW

SEQ ID NO: 15410 - protein, 20 aa, Bos taurus
YLEIINTVIQITFDIVVYYV

SEQ ID NO: 15411 - protein, 21 aa, Bos taurus
FGFAIMFFIIFLAYAQLAYLV

SEQ ID NO: 15412 - protein, 20 aa, Bos taurus
IATLLMTISFVFMMIFSGLL

SEQ ID NO: 15413 - protein, 20 aa, Bos taurus
MCDTLFIIFSLVFFYTRLVL

SEQ ID NO: 15414 - protein, 20 aa, Bos taurus
FISWMIAQSVTAVAGLTSYP

SEQ ID NO: 15415 - protein, 20 aa, Bos taurus
ILLTALLALILVYLFSIVGF

SEQ ID NO: 15416 - protein, 20 aa, Bos taurus
IILMAVLALILVYLFSIVGY

SEQ ID NO: 15417 - protein, 20 aa, Bos taurus
LVVALGFLTFIWVWMFLCTA

SEQ ID NO: 15418 - protein, 20 aa, Bos taurus
IHVFFGASILSLAIASVVSG

SEQ ID NO: 15419 - protein, 20 aa, Bos taurus
FLTGSALWLIGMLINIHSDH

SEQ ID NO: 15420 - protein, 20 aa, Bos taurus
LIGPVLCHSFCNYMGFPAVC

SEQ ID NO: 15421 - protein, 20 aa, Bos taurus
FIGTCFALFWYIFSLAHVAI

SEQ ID NO: 15422 - protein, 23 aa, Bos taurus
AWYILASSIGSFFAPCLIMILVY

SEQ ID NO: 15423 - protein, 20 aa, Bos taurus
ITAGHLLIHLIGGATLALMS

SEQ ID NO: 15424 - protein, 22 aa, Bos taurus
QLVVTFVAGYIAGVFCAIVSHP

SEQ ID NO: 15425 - protein, 20 aa, Bos taurus
ITAWYIGFLTLILSSFLVYL

SEQ ID NO: 15426 - protein, 20 aa, Bos taurus
MLLDILKFLFIYCLVLLAFA

SEQ ID NO: 15427 - protein, 19 aa, Bos taurus
YLFVIFDFLIGVLIFATIV

SEQ ID NO: 15428 - protein, 19 aa, Bos taurus
GLEAFTVGLVVLVIGTSMG

SEQ ID NO: 15429 - protein, 20 aa, Bos taurus
FVHVLGDLLQSLGVLIASIL

SEQ ID NO: 15430 - protein, 20 aa, Bos taurus
LCVLAEAFTIYQSLPYFESF

SEQ ID NO: 15431 - protein, 20 aa, Bos taurus
FFGLMAAAALSKGCASCVAY

SEQ ID NO: 15432 - protein, 17 aa, Bos taurus
VMYFSSLFPYVVLACFL

SEQ ID NO: 15433 - protein, 20 aa, Bos taurus
LVSFFIAQVVTTCSGILSYP

SEQ ID NO: 15434 - protein, 21 aa, Bos taurus
NELGLLILFLAMGIMIFSSLV

SEQ ID NO: 15435 - protein, 20 aa, Bos taurus
LGFLLFSLTMAIIIFATVMF

SEQ ID NO: 15436 - protein, 20 aa, Bos taurus
GLVGYLLGGASLLLGMCSLW

SEQ ID NO: 15437 - protein, 11 aa, Bos taurus
LPWVILGFNYI

SEQ ID NO: 15438 - protein, 20 aa, Bos taurus
IILTAVLALILVYLFSIIGF

SEQ ID NO: 15439 - protein, 20 aa, Bos taurus
FGIGLLSGTIASVINIPFDV

SEQ ID NO: 15440 - protein, 20 aa, Bos taurus
VFLHILADTLGSIGVIASAI

SEQ ID NO: 15441 - protein, 17 aa, Bos taurus
LGCGALSSTCGQLASYP

SEQ ID NO: 15442 - protein, 20 aa, Bos taurus
ALITDGFNSLVGGVMGFSIL

SEQ ID NO: 15443 - protein, 19 aa, Bos taurus
PCHFVSAFGAGFCATLVAS

SEQ ID NO: 15444 - protein, 17 aa, Bos taurus
GVFGAIAGAASVFGNTP

SEQ ID NO: 15445 - protein, 20 aa, Bos taurus
LLCGGVAGAIAQTISYPFDV

SEQ ID NO: 15446 - protein, 20 aa, Bos taurus
FLLPFLFFGHFWQLFNALTL

SEQ ID NO: 15447 - protein, 20 aa, Bos taurus
SPFYVSFLAGCVAGSAAAVA

SEQ ID NO: 15448 - protein, 20 aa, Bos taurus
LLVPKLLLAGGTSGIASWLS

SEQ ID NO: 15449 - protein, 20 aa, Bos taurus
VGLLLLFLSVGISIFSTVEY

SEQ ID NO: 15450 - protein, 17 aa, Bos taurus
LACGTMSSTCGQLASYP

SEQ ID NO: 15451 - protein, 20 aa, Bos taurus
FVLIDLAGAFALCITYMLIE

SEQ ID NO: 15452 - protein, 20 aa, Bos taurus
GISFVAGGISGMVAATLTLP

SEQ ID NO: 15453 - protein, 20 aa, Bos taurus
WILAVAAGLFLYVALCDMLP

SEQ ID NO: 15454 - protein, 19 aa, Bos taurus
PCHFTSAFGAGFCTTVIAS

SEQ ID NO: 15455 - protein, 20 aa, Bos taurus
LLLVIWCGVSAFSMLTCSSL

SEQ ID NO: 15456 - protein, 26 aa, Bos taurus
VNFSCGIFAGILASLVTQPADVIKTH

SEQ ID NO: 15457 - protein, 20 aa, Bos taurus
FVHALGDLVQSVGVLIAAYI

SEQ ID NO: 15458 - protein, 20 aa, Bos taurus
ILSASITLCVVLYFILMAQG

SEQ ID NO: 15459 - protein, 20 aa, Bos taurus
FLLPFLFCGHFWQLYNAVTL

SEQ ID NO: 15460 - protein, 20 aa, Bos taurus
AAVCGAFAGGFAAAVTTPLD

SEQ ID NO: 15461 - protein, 20 aa, Bos taurus
LVLCSACFILEVAMVVLHSW

SEQ ID NO: 15462 - protein, 20 aa, Bos taurus
ALFVETLGFLAVLTEAMLGV

SEQ ID NO: 15463 - protein, 20 aa, Bos taurus
FTSGALSGSFAAVVTLPFDV

SEQ ID NO: 15464 - protein, 20 aa, Bos taurus
FLFVALFTGVRIGVGACLLF

SEQ ID NO: 15465 - protein, 20 aa, Bos taurus
LLCGSGAGVISKTLTYPLDL

SEQ ID NO: 15466 - protein, 18 aa, Bos taurus
FSHLRHPVCVELLTVLWV

SEQ ID NO: 15467 - protein, 20 aa, Bos taurus
CAVWLAGGMAGAISWGTATP

SEQ ID NO: 15468 - protein, 20 aa, Bos taurus
WLVALAGGMISSIAVVAVMT

SEQ ID NO: 15469 - protein, 20 aa, Bos taurus
PAVLLLMFLSVYKAFVMETF

SEQ ID NO: 15470 - protein, 20 aa, Bos taurus
LLLLQGTWFWQIGFVLFPPF

SEQ ID NO: 15471 - protein, 20 aa, Bos taurus
IIAGFLAGVSMMFYKSTTIS

SEQ ID NO: 15472 - protein, 22 aa, Bos taurus
FHAFLNTAVHVVMYSYYGLCAL

SEQ ID NO: 15473 - protein, 19 aa, Bos taurus
YYFSAFSAVFFFVPLTLST

SEQ ID NO: 15474 - protein, 20 aa, Bos taurus
LGFTVTLVLLNSLAFLLMAI

SEQ ID NO: 15475 - protein, 20 aa, Bos taurus
NIVMVFMSLYSVLYMSSLLP

SEQ ID NO: 15476 - protein, 20 aa, Bos taurus
IWSFIGPVTFIILLNIIFLV

SEQ ID NO: 15477 - protein, 20 aa, Bos taurus
IWSFIGPATLIIMLNVIFLG

SEQ ID NO: 15478 - protein, 20 aa, Bos taurus
FIWSFIGPVSFVIVVNLVFL

SEQ ID NO: 15479 - protein, 27 aa, Bos taurus
RKHMLQALFITITLGVYFTLLQASEYY

SEQ ID NO: 15480 - protein, 21 aa, Bos taurus
FVIYMFVVHFIIPLIVIFFCY

SEQ ID NO: 15481 - protein, 23 aa, Bos taurus
PGYVLFSALGSFYVPLTIILVMY

SEQ ID NO: 15482 - protein, 24 aa, Bos taurus
FVVYSSIVSFYVPFIVTLLVYIKI

SEQ ID NO: 15483 - protein, 21 aa, Bos taurus
WWLFGFYFCMPLVCTAIFYTL

SEQ ID NO: 15484 - protein, 25 aa, Bos taurus
LPVGLGLTKNILGFLFPFLIILTSY

SEQ ID NO: 15485 - protein, 20 aa, Bos taurus
LVVFQFQHIVVGLLLPGIVI

SEQ ID NO: 15486 - protein, 24 aa, Bos taurus
AKDWWLFSFYFCLPLAITALFYTL

SEQ ID NO: 15487 - protein, 20 aa, Bos taurus
FKVMTAIINFYLPTLLMLWF

SEQ ID NO: 15488 - protein, 18 aa, Bos taurus
EILWTFSIYLESVAILPQ

SEQ ID NO: 15489 - protein, 22 aa, Bos taurus
LMALGFLIGYTCLLAAICFFFA

SEQ ID NO: 15490 - protein, 24 aa, Bos taurus
AVTFGTAIAAFYLPVIIMTVLYWH

SEQ ID NO: 15491 - protein, 19 aa, Bos taurus
LVGLFIAMLALMAVLYVHM

SEQ ID NO: 15492 - protein, 19 aa, Bos taurus
GLRAYVTWIALMVFVAPAL

SEQ ID NO: 15493 - protein, 24 aa, Bos taurus
ENLLKICVFIFAFIMPILIITVCY

SEQ ID NO: 15494 - protein, 20 aa, Bos taurus
AGITCGHFLVPFWTFFGATL

SEQ ID NO: 15495 - protein, 21 aa, Bos taurus
AYIILVLLLNIIAFIIVCACY

SEQ ID NO: 15496 - protein, 20 aa, Bos taurus
SYLVFWAIFNLVTFVVMVVL

SEQ ID NO: 15497 - protein, 23 aa, Bos taurus
QPYAIASSIVSFYLPLVVMVFVY

SEQ ID NO: 15498 - protein, 20 aa, Bos taurus
NRSWLGLRFLRALRLIQFSE

SEQ ID NO: 15499 - protein, 24 aa, Bos taurus
QKWYVISSSIGSFFAPCLIMILVY

SEQ ID NO: 15500 - protein, 19 aa, Bos taurus
VILGLVLPLLVMIVCYSGI

SEQ ID NO: 15501 - protein, 33 aa, Bos taurus
VGDMFNYFLSLAIGVFLFPAFLTASAYVLMIRT

SEQ ID NO: 15502 - protein, 19 aa, Bos taurus
FGATLNSFIHVLMYSYYGL

SEQ ID NO: 15503 - protein, 20 aa, Bos taurus
WINTFLGVSTLSALWTIGII

SEQ ID NO: 15504 - protein, 27 aa, Bos taurus
LYHKHYILFCTTVFTLLLLSIVILYCR

SEQ ID NO: 15505 - protein, 20 aa, Bos taurus
FLLPLLVMAYCYARILAVLL

SEQ ID NO: 15506 - protein, 20 aa, Bos taurus
FVLIGSFVAFFIPLTIMVIT

SEQ ID NO: 15507 - protein, 25 aa, Bos taurus
TYAISSSLISFYIPVAIMIVTYTRI

SEQ ID NO: 15508 - protein, 20 aa, Bos taurus
AIWAFVAPALFIIVVNIGIL

SEQ ID NO: 15509 - protein, 20 aa, Bos taurus
IWPVILNTEINFLGFLLPLL

SEQ ID NO: 15510 - protein, 23 aa, Bos taurus
LLYIIHGPICAALLVNLFFLLNI

SEQ ID NO: 15511 - protein, 20 aa, Bos taurus
WLQFLFCFSYIKLAVTLVKY

SEQ ID NO: 15512 - protein, 20 aa, Bos taurus
FLCGFLVPGLITTACYLTIV

SEQ ID NO: 15513 - protein, 21 aa, Bos taurus
YHLIVIALIYFLPLVVMFVAY

SEQ ID NO: 15514 - protein, 18 aa, Bos taurus
LFPLMLAFILCLYVHMFL

SEQ ID NO: 15515 - protein, 25 aa, Bos taurus
VFFASAFAILGLSALVVTFACNLAT

SEQ ID NO: 15516 - protein, 22 aa, Bos taurus
IQILEICIGFIIPFLIMAVCYF

SEQ ID NO: 15517 - protein, 21 aa, Bos taurus
LYVMSLLVLNVLAFVVICGCY

SEQ ID NO: 15518 - protein, 22 aa, Bos taurus
TITFGTAIAAFYMPVTIMTILY

SEQ ID NO: 15519 - protein, 21 aa, Bos taurus
YALLSSSVSFYLPLLVMLFVY

SEQ ID NO: 15520 - protein, 20 aa, Bos taurus
FLFTMAFFNFLLPLFITVVS

SEQ ID NO: 15521 - protein, 22 aa, Bos taurus
FIYSMCTTVAMFCVPLVLILGC

SEQ ID NO: 15522 - protein, 27 aa, Bos taurus
YTWFLFIFCYIVPLSLICFSYSQLLGA

SEQ ID NO: 15523 - protein, 22 aa, Bos taurus
WITLAVYIVPVIVLATCYGLIS

SEQ ID NO: 15524 - protein, 26 aa, Bos taurus
CAFLLAYASLVALLVAAIVLCNGSVT

SEQ ID NO: 15525 - protein, 17 aa, Bos taurus
NGWIVMIAVGWARGAGG

SEQ ID NO: 15526 - protein, 20 aa, Bos taurus
WWSFGCYFCLPVLFTVTCQL

SEQ ID NO: 15527 - protein, 20 aa, Bos taurus
GVLFVLLMTLFFSGLILAIL

SEQ ID NO: 15528 - protein, 24 aa, Bos taurus
MSYMVYFNFFGCVLPPLLIMLVIY

SEQ ID NO: 15529 - protein, 20 aa, Bos taurus
IIQVPILASIVLNFILFINI

SEQ ID NO: 15530 - protein, 22 aa, Bos taurus
LPWILLGACFIGYVLPLVIILI

SEQ ID NO: 15531 - protein, 20 aa, Bos taurus
TTLLLVLQYFGPLCFIFICY

SEQ ID NO: 15532 - protein, 20 aa, Bos taurus
LYITLVYNASVSLALYALFL

SEQ ID NO: 15533 - protein, 22 aa, Bos taurus
MIMRVLPQTFGFLLPLLVMLFC

SEQ ID NO: 15534 - protein, 23 aa, Bos taurus
VYILTILILNVMAFIIICACYIK

SEQ ID NO: 15535 - protein, 22 aa, Bos taurus
KGPVVGSIMVNFVLFIGIIVIL

SEQ ID NO: 15536 - protein, 24 aa, Bos taurus
DLFMKVCVFVFAFVIPVLIIIVCY

SEQ ID NO: 15537 - protein, 20 aa, Bos taurus
AWGLLLVTYLLPLLVILLSY

SEQ ID NO: 15538 - protein, 19 aa, Bos taurus
YYFISLAFFGFLIPFLVII

SEQ ID NO: 15539 - protein, 20 aa, Bos taurus
LGWGDCVWLPYLYTLQGLYL

SEQ ID NO: 15540 - protein, 26 aa, Bos taurus
SYMYAGFSSFLILATVLCNVLVCGAL

SEQ ID NO: 15541 - protein, 20 aa, Bos taurus
FVGPVTFIVLGNAIIFVITV

SEQ ID NO: 15542 - protein, 22 aa, Bos taurus
FGFMLAFGDLAWVPFTYSLQAQ

SEQ ID NO: 15543 - protein, 25 aa, Bos taurus
VAFGLLFALLGSISVGMSFLLNTIS

SEQ ID NO: 15544 - protein, 27 aa, Bos taurus
YMIVLMITCCFIPLSVIILCYLQVWLA

SEQ ID NO: 15545 - protein, 23 aa, Bos taurus
AVIICLITVFFTMLALMASLYVH

SEQ ID NO: 15546 - protein, 25 aa, Bos taurus
GYAITSSVVSFYVPLCIMAFVYLRV

SEQ ID NO: 15547 - protein, 20 aa, Bos taurus
LTIHIFLVFSFFLVFLIILF

SEQ ID NO: 15548 - protein, 20 aa, Bos taurus
IIAVAAMFLGMDLPGLNLPG

SEQ ID NO: 15549 - protein, 20 aa, Bos taurus
EILHMSFPTKASLYGAILFT

SEQ ID NO: 15550 - protein, 20 aa, Bos taurus
VLSYSVLYASLMLLLVLAIV

SEQ ID NO: 15551 - protein, 20 aa, Bos taurus
AYFTGFIVCLLYAPAALVVC

SEQ ID NO: 15552 - protein, 20 aa, Bos taurus
LWNLLGPSLFALGILATAWT

SEQ ID NO: 15553 - protein, 20 aa, Bos taurus
AFFKLLAVVLFLFTFGLLPW

SEQ ID NO: 15554 - protein, 20 aa, Bos taurus
FLLTFCCLLMAEEAAVFAKY

SEQ ID NO: 15555 - protein, 20 aa, Bos taurus
MAANVAIGLLNAAWWLAWCL

SEQ ID NO: 15556 - protein, 24 aa, Bos taurus
TVFQSSIFSAFVVYLVVLVSVAFM

SEQ ID NO: 15557 - protein, 20 aa, Bos taurus
YMTAAAEFLFLLWGVYLCYA

SEQ ID NO: 15558 - protein, 20 aa, Bos taurus
ILAFGSMLGYAAILAFMCFI

SEQ ID NO: 15559 - protein, 20 aa, Bos taurus
GYMVALVLLNSLCFLVMTVA

SEQ ID NO: 15560 - protein, 20 aa, Bos taurus
SVLGFFGPLLVICLCYLLIV

SEQ ID NO: 15561 - protein, 20 aa, Bos taurus
GINYYRFLVGFLFPICLLLA

SEQ ID NO: 15562 - protein, 24 aa, Bos taurus
MEYMVYFNFFVWVLPPLLLMVLIY

SEQ ID NO: 15563 - protein, 19 aa, Bos taurus
FFTFSCLFIIPLLIMVICN

SEQ ID NO: 15564 - protein, 21 aa, Bos taurus
FIIYAFILGFLVPLTIICLCY

SEQ ID NO: 15565 - protein, 22 aa, Bos taurus
AYLTLLFGTSIVGPGVVIGLLY

SEQ ID NO: 15566 - protein, 24 aa, Bos taurus
VICLIAMFLTMLLLMASLYTHMFL

SEQ ID NO: 15567 - protein, 20 aa, Bos taurus
TIYSLSSLLILYVLPLGIIS

SEQ ID NO: 15568 - protein, 22 aa, Bos taurus
VLLLLLLFFVPGVVMAVAYGLI

SEQ ID NO: 15569 - protein, 20 aa, Bos taurus
SVWGPLGLLLGGGLLCALLT

SEQ ID NO: 15570 - protein, 21 aa, Bos taurus
IYHSCFFIVTYLAPLGLMAMA

SEQ ID NO: 15571 - protein, 20 aa, Bos taurus
FLTLKMNILGFLLPLFAFVY

SEQ ID NO: 15572 - protein, 20 aa, Bos taurus
VYFSFFTWILIPLVVMCAIY

SEQ ID NO: 15573 - protein, 20 aa, Bos taurus
ILFLVDLICCGTILFPVVWS

SEQ ID NO: 15574 - protein, 20 aa, Bos taurus
VLVSDSLFVICALSLAACLC

SEQ ID NO: 15575 - protein, 20 aa, Bos taurus
VAWMNLYRVFVGFLFPWALM

SEQ ID NO: 15576 - protein, 16 aa, Bos taurus
SLGASGAIMTVLAAVC

SEQ ID NO: 15577 - protein, 20 aa, Bos taurus
ILMGIYFVVGLSSVGVFYCL

SEQ ID NO: 15578 - protein, 18 aa, Bos taurus
EILWTFSIYLESVAILPQ

SEQ ID NO: 15579 - protein, 22 aa, Bos taurus
FWYGQLSGMVEPLAGVFGAFAV

SEQ ID NO: 15580 - protein, 20 aa, Bos taurus
FVMALIYVMLLLLCAFSGAW

SEQ ID NO: 15581 - protein, 20 aa, Bos taurus
FWQIWCALLPFLVMLVCYGF

SEQ ID NO: 15582 - protein, 20 aa, Bos taurus
VGVLLVSVVVLILFAILCIF

SEQ ID NO: 15583 - protein, 20 aa, Bos taurus
YIFVGIFWIVFLSLIIFYTA

SEQ ID NO: 15584 - protein, 20 aa, Bos taurus
LIFFFLIPLFIMIGCYLVII

SEQ ID NO: 15585 - protein, 20 aa, Bos taurus
MPPQVVWPLLAYSIVLVAML

SEQ ID NO: 15586 - protein, 20 aa, Bos taurus
AFHLFFEVITGFLLPFLVVV

SEQ ID NO: 15587 - protein, 20 aa, Bos taurus
FISIAIFFNFSAIILISNCL

SEQ ID NO: 15588 - protein, 20 aa, Bos taurus
LLPLLLLAEALGFLLPLAAV

SEQ ID NO: 15589 - protein, 20 aa, Bos taurus
FIIQVTSLLFYILPMTVISV

SEQ ID NO: 15590 - protein, 20 aa, Bos taurus
VCTSQYFLWYLCLLPLVMPL

SEQ ID NO: 15591 - protein, 27 aa, Bos taurus
LITIQVAQMVVGFLIPLMAMSFCYLVI

SEQ ID NO: 15592 - protein, 20 aa, Bos taurus
LYLEIYGLLLPAVGAAALLS

SEQ ID NO: 15593 - protein, 22 aa, Bos taurus
IYTLVLGFVVPMCTLCVLYADL

SEQ ID NO: 15594 - protein, 21 aa, Bos taurus
SRLYTLVLGFAIPVSTICVLY

SEQ ID NO: 15595 - protein, 20 aa, Bos taurus
FLFVFGIEFLGPVFTMTLCY

SEQ ID NO: 15596 - protein, 20 aa, Bos taurus
FLFIFGIEFVGPVVTMTLCY

SEQ ID NO: 15597 - protein, 20 aa, Bos taurus
YIHAAACFAIFVLLPLGLLG

SEQ ID NO: 15598 - protein, 20 aa, Bos taurus
VTIIYNISVSLALYALFLFY

SEQ ID NO: 15599 - protein, 21 aa, Bos taurus
MDFGVFYVVPMILATVLYGFI

SEQ ID NO: 15600 - protein, 25 aa, Bos taurus
RFYLLLFAFLGLLALGISFVCNAIT

SEQ ID NO: 15601 - protein, 20 aa, Bos taurus
WLVVFVPLWILMSFLCLVVL

SEQ ID NO: 15602 - protein, 20 aa, Bos taurus
VAVYSLCFLATVVVVILSVL

SEQ ID NO: 15603 - protein, 20 aa, Bos taurus
YLVIINNMSQLFAMYCLLLF

SEQ ID NO: 15604 - protein, 20 aa, Bos taurus
LGAAFLTSPIFYGRPIAILP

SEQ ID NO: 15605 - protein, 20 aa, Bos taurus
LTGAFTYVVGVYVAIIGFMG

SEQ ID NO: 15606 - protein, 20 aa, Bos taurus
FMLMLAVLMAATHAVYGKLL

SEQ ID NO: 15607 - protein, 22 aa, Bos taurus
WLFLAVEGLSLCSYSLALLHPH

SEQ ID NO: 15608 - protein, 27 aa, Bos taurus
GMAILGPTFTLDALVECLVIGVGTMSG

SEQ ID NO: 15609 - protein, 20 aa, Bos taurus
IKDILGALLLILALMLLVLF

SEQ ID NO: 15610 - protein, 20 aa, Bos taurus
MWLILPAWPLAMMWFISTLA

SEQ ID NO: 15611 - protein, 27 aa, Bos taurus
FFDSLNEAIMRLVAVIMWYAPLGILFL

SEQ ID NO: 15612 - protein, 20 aa, Bos taurus
PFSWVTGYLAILVGAGMTFI

SEQ ID NO: 15613 - protein, 20 aa, Bos taurus
IPEIIFMTSLFGYLVILIFY

SEQ ID NO: 15614 - protein, 20 aa, Bos taurus
GGIFLGAILLSSPLMCLHAA

SEQ ID NO: 15615 - protein, 27 aa, Bos taurus
FFNALSDATMKIVQIIMCYMPIGILFL

SEQ ID NO: 15616 - protein, 20 aa, Bos taurus
PLVLQQAYLIMISALMALVF

SEQ ID NO: 15617 - protein, 20 aa, Bos taurus
IVLIGYFTLVPAIQEFCLFA

SEQ ID NO: 15618 - protein, 20 aa, Bos taurus
IPELLFMLCIFGYLIFMIIY

SEQ ID NO: 15619 - protein, 22 aa, Bos taurus
ILPVLGVVGGAIFSCSNYFHVI

SEQ ID NO: 15620 - protein, 27 aa, Bos taurus
FFNSFNDATMVLVSWIMWYAPVGILFL

SEQ ID NO: 15621 - protein, 20 aa, Bos taurus
IISEGLYAIAVVLSFSRIAY

SEQ ID NO: 15622 - protein, 20 aa, Bos taurus
YGLLYYNALFMILPTLAIAY

SEQ ID NO: 15623 - protein, 20 aa, Bos taurus
FISFNLILCVVISVLSIHPK

SEQ ID NO: 15624 - protein, 20 aa, Bos taurus
VAASFLVSKKIGLLTTMAIL

SEQ ID NO: 15625 - protein, 20 aa, Bos taurus
MFLFQFVNLNSSTFYIAFFL

SEQ ID NO: 15626 - protein, 18 aa, Bos taurus
SFYALLTCSVIIGGFWLG

SEQ ID NO: 15627 - protein, 20 aa, Bos taurus
EILTLFCGAPPVTPIIILSI

SEQ ID NO: 15628 - protein, 20 aa, Bos taurus
LLAIMILVGDSLHNFADGLV

SEQ ID NO: 15629 - protein, 20 aa, Bos taurus
VCLPLYFSGIMWTLIYDTIY

SEQ ID NO: 15630 - protein, 20 aa, Bos taurus
AMELCLALLLHKGILAVSLS

SEQ ID NO: 15631 - protein, 20 aa, Bos taurus
VVSLFVGVAIHETLVAVALG

SEQ ID NO: 15632 - protein, 20 aa, Bos taurus
LGFFGSIFGLMGVYVYDGEL

SEQ ID NO: 15633 - protein, 20 aa, Bos taurus
TIGYGELLLLLSLTLDGLTG

SEQ ID NO: 15634 - protein, 20 aa, Bos taurus
VDAIAIAIIGFAITVSLSEM

SEQ ID NO: 15635 - protein, 20 aa, Bos taurus
IPRQLVYIGLYLFHIAGAYL

SEQ ID NO: 15636 - protein, 20 aa, Bos taurus
LWTFAILIFFWVLWVAVLLS

SEQ ID NO: 15637 - protein, 20 aa, Bos taurus
PLHITPLGLLLLILYCLISG

SEQ ID NO: 15638 - protein, 20 aa, Bos taurus
GLVFLTALSGAFVAGLDAGL

SEQ ID NO: 15639 - protein, 20 aa, Bos taurus
VLLLGGLFLAYRMGVFILAG

SEQ ID NO: 15640 - protein, 20 aa, Bos taurus
EVLFNSLFSAYYVAFLPLCF

SEQ ID NO: 15641 - protein, 20 aa, Bos taurus
EVLVSAMLSAYYVAFVPVWF

SEQ ID NO: 15642 - protein, 20 aa, Bos taurus
SLQSTGQVFLGVYLVCVAYS

SEQ ID NO: 15643 - protein, 20 aa, Bos taurus
ATMVLVSWIMWYVPVGIMFL

SEQ ID NO: 15644 - protein, 20 aa, Bos taurus
IPYQNIGITLVCLIIPVAFG

SEQ ID NO: 15645 - protein, 20 aa, Bos taurus
LLASLPLLLGLGFLSLWYPV

SEQ ID NO: 15646 - protein, 20 aa, Bos taurus
IYLAAHFPHQVVAGVLSGIA

SEQ ID NO: 15647 - protein, 34 aa, Bos taurus
RKRFLLRRLLEMLFLTQLQVGLIQQWMVPAIQNS

SEQ ID NO: 15648 - protein, 20 aa, Bos taurus
LQQAYLIMISALMALVFIKY

SEQ ID NO: 15649 - protein, 20 aa, Bos taurus
GLAALSFSISSLTLVGMLAA

SEQ ID NO: 15650 - protein, 20 aa, Bos taurus
ILLLLTVWLLVGFPLTVIGG

SEQ ID NO: 15651 - protein, 20 aa, Bos taurus
VALLCMWFGISLPLVYLGYY

SEQ ID NO: 15652 - protein, 18 aa, Bos taurus
FPHQVLAGLITGAVLGWL

SEQ ID NO: 15653 - protein, 20 aa, Bos taurus
DLILHQFLPVGFVTLSLSLI

SEQ ID NO: 15654 - protein, 20 aa, Bos taurus
QVILDILLCNGGGIWLGMVV

SEQ ID NO: 15655 - protein, 20 aa, Bos taurus
VGVIGVTLMALLSGFGAVNC

SEQ ID NO: 15656 - protein, 20 aa, Bos taurus
IGLYWVGSIIMSIVVFVPGN

SEQ ID NO: 15657 - protein, 20 aa, Bos taurus
GFVVFATLVVIVSLILIFVV

SEQ ID NO: 15658 - protein, 19 aa, Bos taurus
KKSIAYTLTSNIPEITPFL

SEQ ID NO: 15659 - protein, 20 aa, Bos taurus
VLYIIELWFAFVNGFSGQIL

SEQ ID NO: 15660 - protein, 20 aa, Bos taurus
LQFQLTVNVVAVIVAFTGAC

SEQ ID NO: 15661 - protein, 20 aa, Bos taurus
VWEGLLTFFFFPICVVFAWV

SEQ ID NO: 15662 - protein, 19 aa, Bos taurus
KNFVRFQLSTSIAALTLIS

SEQ ID NO: 15663 - protein, 19 aa, Bos taurus
KKSIAYTLTSNIPEITPFL

SEQ ID NO: 15664 - protein, 19 aa, Bos taurus
KQFIRYLISSNVGEVVCIF

SEQ ID NO: 15665 - protein, 20 aa, Bos taurus
CILYCFYKNIVLYIIEIWFA

SEQ ID NO: 15666 - protein, 20 aa, Bos taurus
IWGVPSLLEISGFSYFYGAF

SEQ ID NO: 15667 - protein, 20 aa, Bos taurus
LIISTMQAVFSSVFYFASVP

SEQ ID NO: 15668 - protein, 20 aa, Bos taurus
LVTFALLLVCIAYWAIIALF

SEQ ID NO: 15669 - protein, 12 aa, Bos taurus
GHGIAAIREQVR

SEQ ID NO: 15670 - protein, 19 aa, Bos taurus
FLTWRIFFASMISTFTLNF

SEQ ID NO: 15671 - protein, 19 aa, Bos taurus
ILYYVYMGLLAVFCTNAIN

SEQ ID NO: 15672 - protein, 20 aa, Bos taurus
LVTFFLLCLCIAYWASTAIF

SEQ ID NO: 15673 - protein, 20 aa, Bos taurus
GIQWASLLILFLSIVALTSG

SEQ ID NO: 15674 - protein, 22 aa, Bos taurus
ILFLPWGYDISQVTISFVYIVT

SEQ ID NO: 15675 - protein, 20 aa, Bos taurus
YGLGSGISLFIATNICETIV

SEQ ID NO: 15676 - protein, 20 aa, Bos taurus
LPLWAIFMGFFSHFWLCTII

SEQ ID NO: 15677 - protein, 20 aa, Bos taurus
LLSATALNYLLSLVAVVLFF

SEQ ID NO: 15678 - protein, 20 aa, Bos taurus
YGLGSGISLFIATNICETIV

SEQ ID NO: 15679 - protein, 17 aa, Bos taurus
IRLTLIPITLGVILNSY

SEQ ID NO: 15680 - protein, 20 aa, Bos taurus
FTLSKLLAVILSIGGVVLVN

SEQ ID NO: 15681 - protein, 20 aa, Bos taurus
PVLNYIGAGLSVVSAFIFLF

SEQ ID NO: 15682 - protein, 20 aa, Bos taurus
TFQVTYQLKILTTALFSVLM

SEQ ID NO: 15683 - protein, 20 aa, Bos taurus
IPLSSGLILLTWQKLAPMSV

SEQ ID NO: 15684 - protein, 20 aa, Bos taurus
SVLLLLAYAFYVFTMKWNQQ

SEQ ID NO: 15685 - protein, 20 aa, Bos taurus
LGYTSGLSLLCMMFFLIVVI

SEQ ID NO: 15686 - protein, 20 aa, Bos taurus
PEAAISAYLAATALHVMLSQ

SEQ ID NO: 15687 - protein, 20 aa, Bos taurus
YLGYTSGLSLTCMLFFLISV

SEQ ID NO: 15688 - protein, 20 aa, Bos taurus
ISGGAMGGTLSAVASLVDLA

SEQ ID NO: 15689 - protein, 20 aa, Bos taurus
GLPFWLVRWLLFRLMFASGV

SEQ ID NO: 15690 - protein, 20 aa, Bos taurus
FLSVVGTWYVTAIIIIKYIW

SEQ ID NO: 15691 - protein, 20 aa, Bos taurus
LISLGLIVFLVSALSLGPFL

SEQ ID NO: 15692 - protein, 22 aa, Bos taurus
IITMYNGAFDSSSAVFLIIKLL

SEQ ID NO: 15693 - protein, 20 aa, Bos taurus
MITAPCILFLFYGWPGLFLE

SEQ ID NO: 15694 - protein, 20 aa, Bos taurus
RVGDAVLGLVCMVLLLVLKL

SEQ ID NO: 15695 - protein, 20 aa, Bos taurus
LTTFFVGEGLSGLLPALVAL

SEQ ID NO: 15696 - protein, 20 aa, Bos taurus
IFFLIFQSSGVWGNLISSLV

SEQ ID NO: 15697 - protein, 20 aa, Bos taurus
FVWSFLIVTVALFVNLIYIL

SEQ ID NO: 15698 - protein, 20 aa, Bos taurus
AVIGVAFSLGFTLGPTLGAF

SEQ ID NO: 15699 - protein, 20 aa, Bos taurus
FYCSLFSAAGSLSVFASYAF

SEQ ID NO: 15700 - protein, 20 aa, Bos taurus
IWFYFGVVGSFIFLLIQLLL

SEQ ID NO: 15701 - protein, 20 aa, Bos taurus
LGKISLISTVLTTLILGIVV

SEQ ID NO: 15702 - protein, 20 aa, Bos taurus
TAFCGSYAGAVVAMPLAGVL

SEQ ID NO: 15703 - protein, 20 aa, Bos taurus
TSFCGSYAGAVIAMPLAGIL

SEQ ID NO: 15704 - protein, 20 aa, Bos taurus
FFNWFYWSINLGAIVSLGGI

SEQ ID NO: 15705 - protein, 29 aa, Bos taurus
LFVWSVMITAVLLLLSLPVLAAGITMLLT

SEQ ID NO: 15706 - protein, 20 aa, Bos taurus
LLAIGFGLVVAASHLLVTAT

SEQ ID NO: 15707 - protein, 20 aa, Bos taurus
LGTLHQLGIVVGILIAQVFG

SEQ ID NO: 15708 - protein, 17 aa, Bos taurus
VVWITATMPYVVLFALL

SEQ ID NO: 15709 - protein, 20 aa, Bos taurus
AAYVRYLNSSAFFFSGFFVV

SEQ ID NO: 15710 - protein, 20 aa, Bos taurus
LAIVTGILISQIVGLDFILG

SEQ ID NO: 15711 - protein, 20 aa, Bos taurus
LGVVPQLFITIGILVAQIFG

SEQ ID NO: 15712 - protein, 20 aa, Bos taurus
SCVQLMVVTGILLAYLAGWV

SEQ ID NO: 15713 - protein, 25 aa, Bos taurus
TIRMALLEACIGVAGMLASFIGGFL

SEQ ID NO: 15714 - protein, 20 aa, Bos taurus
LGTLNQLAIVTGILIAQVLG

SEQ ID NO: 15715 - protein, 19 aa, Bos taurus
FAVVGTLWNAFFLGGLMYA

SEQ ID NO: 15716 - protein, 20 aa, Bos taurus
AVTAGLVSSISHLLVLAMHQ

SEQ ID NO: 15717 - protein, 20 aa, Bos taurus
AFASLICIIFIYEALEKLFE

SEQ ID NO: 15718 - protein, 23 aa, Bos taurus
EGFSSLISFIFIYDAFKKMIKLA

SEQ ID NO: 15719 - protein, 17 aa, Bos taurus
VVYFTATFPFAMLLVLL

SEQ ID NO: 15720 - protein, 19 aa, Bos taurus
GKVVWVTATFPYIILLILL

SEQ ID NO: 15721 - protein, 20 aa, Bos taurus
VVYFTATFPYLMLVVLLIRG

SEQ ID NO: 15722 - protein, 20 aa, Bos taurus
ILYQMAFTVGLVLLSGLAYI

SEQ ID NO: 15723 - protein, 24 aa, Bos taurus
TSGKVVWITATLPYLVLFVLLVHG

SEQ ID NO: 15724 - protein, 20 aa, Bos taurus
FGTLNQLGIVIGILVAQIFG

SEQ ID NO: 15725 - protein, 22 aa, Bos taurus
AMGIALGGLAMGVLVGPPFGSV

SEQ ID NO: 15726 - protein, 17 aa, Bos taurus
VVYFTATFPYVVLTILF

SEQ ID NO: 15727 - protein, 20 aa, Bos taurus
WLCMFWMIGGVYAAAMAWAI

SEQ ID NO: 15728 - protein, 20 aa, Bos taurus
GLLVSLNELMIVIGILFAYI

SEQ ID NO: 15729 - protein, 20 aa, Bos taurus
LTGYVYSLGQFLLAGMAYAV

SEQ ID NO: 15730 - protein, 20 aa, Bos taurus
VFGPACGFILGSFCTKIYVD

SEQ ID NO: 15731 - protein, 20 aa, Bos taurus
LLLMALLEVVLFGLNEFVLL

SEQ ID NO: 15732 - protein, 17 aa, Bos taurus
IMYFSSLFPYVVLICFL

SEQ ID NO: 15733 - protein, 20 aa, Bos taurus
IVASWFISPLLSGFMSGVLF

SEQ ID NO: 15734 - protein, 20 aa, Bos taurus
VVLVVLLVRGVLLPGALDGI

SEQ ID NO: 15735 - protein, 25 aa, Bos taurus
LYVSVILLIGMTALLTVTGGLVAVI

SEQ ID NO: 15736 - protein, 20 aa, Bos taurus
IALMIGSYASSAVTFPGVKV

SEQ ID NO: 15737 - protein, 20 aa, Bos taurus
IHLHSFFAFGTMVVALTGYF

SEQ ID NO: 15738 - protein, 20 aa, Bos taurus
LAMGLALTGVGLSSFAFAPL

SEQ ID NO: 15739 - protein, 20 aa, Bos taurus
ILLIEVFWAIGTVFEVVLAV

SEQ ID NO: 15740 - protein, 21 aa, Bos taurus
LNLVFGLQLSMARIGSTVNMN

SEQ ID NO: 15741 - protein, 20 aa, Bos taurus
LYSLWPLVFLGVGRLVAIKS

SEQ ID NO: 15742 - protein, 20 aa, Bos taurus
AFFGFLITIMALTFGYEYVV

SEQ ID NO: 15743 - protein, 20 aa, Bos taurus
MTLSICAACLGQIILGGLAF

SEQ ID NO: 15744 - protein, 22 aa, Bos taurus
LLIMTLFQVTLFSINEYILLNL

SEQ ID NO: 15745 - protein, 20 aa, Bos taurus
VLGIIVRGPALCLAAAGFSL

SEQ ID NO: 15746 - protein, 20 aa, Bos taurus
PLANGLAMAGSPVFLSTLAP

SEQ ID NO: 15747 - protein, 20 aa, Bos taurus
LIMGIWNSHTSVGNILGSLL

SEQ ID NO: 15748 - protein, 20 aa, Bos taurus
MTILEITVYAANEYLVFKIL

SEQ ID NO: 15749 - protein, 20 aa, Bos taurus
MLVEKSLSVILLVVALAMLI

SEQ ID NO: 15750 - protein, 20 aa, Bos taurus
GWVSATFAASLVSSPAIGAY

SEQ ID NO: 15751 - protein, 20 aa, Bos taurus
VLSSTFWTGGVMLLALIGYL

SEQ ID NO: 15752 - protein, 20 aa, Bos taurus
MLSVFYFAIPVGSGLGYIAG

SEQ ID NO: 15753 - protein, 20 aa, Bos taurus
FWNHVLAVAAGVAAEAVACW

SEQ ID NO: 15754 - protein, 20 aa, Bos taurus
VVFGLWSACASVGNILGACL

SEQ ID NO: 15755 - protein, 20 aa, Bos taurus
LAAACSGVIYFTLYLPHILC

SEQ ID NO: 15756 - protein, 20 aa, Bos taurus
LYFLFYTLAGSLPLLVALIY

SEQ ID NO: 15757 - protein, 14 aa, Bos taurus
IYWAAKCALAYFYM

SEQ ID NO: 15758 - protein, 20 aa, Bos taurus
LWGSVFATGIVCTFYCTLGG

SEQ ID NO: 15759 - protein, 20 aa, Bos taurus
YLYLLPAGTFVGGYLASLYS

SEQ ID NO: 15760 - protein, 20 aa, Bos taurus
IVGLLAVTALYTIAGGLAAV

SEQ ID NO: 15761 - protein, 20 aa, Bos taurus
VIMLAITALYTIAGGLTAVI

SEQ ID NO: 15762 - protein, 20 aa, Bos taurus
LFIGWEGVGIMSFLLIGWWY

SEQ ID NO: 15763 - protein, 20 aa, Bos taurus
VLNVLNLAVWVFIMIAGFFF

SEQ ID NO: 15764 - protein, 20 aa, Bos taurus
VIEVLEALLIFVYLNMILLY

SEQ ID NO: 15765 - protein, 20 aa, Bos taurus
AMSIPVWIILLFHLASLAGA

SEQ ID NO: 15766 - protein, 20 aa, Bos taurus
VTFYIYFSLVLIQLVLSCFS

SEQ ID NO: 15767 - protein, 9 aa, Bos taurus
TLGTEITVE

SEQ ID NO: 15768 - protein, 9 aa, Bos taurus
TLGTEIAIE

SEQ ID NO: 15769 - protein, 9 aa, Bos taurus
TLGTEISWE

SEQ ID NO: 15770 - protein, 20 aa, Bos taurus
LTSLQLIQFVLITIHISQFF

SEQ ID NO: 15771 - protein, 22 aa, Bos taurus
LLLSAAVFCIFILCFGPTNILL

SEQ ID NO: 15772 - protein, 20 aa, Bos taurus
CIFFCPVAFFSFAPLITAVS

SEQ ID NO: 15773 - protein, 20 aa, Bos taurus
IGLIPVSVWFTILLGGVIFT

SEQ ID NO: 15774 - protein, 20 aa, Bos taurus
LGAFALLCLLGLTWSFGLLF

SEQ ID NO: 15775 - protein, 20 aa, Bos taurus
WVIGAIALLCLLGLTWAFGL

SEQ ID NO: 15776 - protein, 20 aa, Bos taurus
LGAIALLFLLGLTWAFGLLF

SEQ ID NO: 15777 - protein, 32 aa, Bos taurus
GVYGSTFFVATGFHGLHVIIGSTFLIVCFFRQ

SEQ ID NO: 15778 - protein, 21 aa, Bos taurus
MVIIMVIAFLICWLPYAGVAF

SEQ ID NO: 15779 - protein, 23 aa, Bos taurus
LGIVVGCFVLCWLPFFLVMPIGS

SEQ ID NO: 15780 - protein, 21 aa, Bos taurus
MLAIVLGVFIICWLPFFITHI

SEQ ID NO: 15781 - protein, 21 aa, Bos taurus
TVFCLVVIFALCWFPLHLSRI

SEQ ID NO: 15782 - protein, 28 aa, Bos taurus
KIILAIVLFFFFSWVPHQIFTFMDVLIQ

SEQ ID NO: 15783 - protein, 19 aa, Bos taurus
VILILTFFACWLPYYIGIS

SEQ ID NO: 15784 - protein, 25 aa, Bos taurus
VFCLVLVFALCWLPLHLSRILKLTL

SEQ ID NO: 15785 - protein, 21 aa, Bos taurus
LGFIMAAFIICWIPYFIFFMV

SEQ ID NO: 15786 - protein, 18 aa, Bos taurus
HYLFALGVYRTLYLFNWI

SEQ ID NO: 15787 - protein, 22 aa, Bos taurus
FITFSMLIFFIVWISFIPAYAS

SEQ ID NO: 15788 - protein, 22 aa, Bos taurus
TILAILLAFIITWAPYNVMVLI

SEQ ID NO: 15789 - protein, 25 aa, Bos taurus
ATLTILLGVFFLCWGPFFLHLSLIV

SEQ ID NO: 15790 - protein, 21 aa, Bos taurus
MTLVIVIVYVLCWAPFFLVQL

SEQ ID NO: 15791 - protein, 26 aa, Bos taurus
ITRMVLVVVAVFIVCWTPIHIYVIIK

SEQ ID NO: 15792 - protein, 20 aa, Bos taurus
FVIVAFSKHIVEQMVAFIGA

SEQ ID NO: 15793 - protein, 23 aa, Bos taurus
MAVLIFTDFMCMAPISFYALSAL

SEQ ID NO: 15794 - protein, 24 aa, Bos taurus
LLKTVVIVLGAFIICWTPGLVLLL

SEQ ID NO: 15795 - protein, 23 aa, Bos taurus
LGIIMGTFTLCWLPFFIVNIVHV

SEQ ID NO: 15796 - protein, 20 aa, Bos taurus
VNLLSIFISTWLTAAGFIHL

SEQ ID NO: 15797 - protein, 24 aa, Bos taurus
VLAVVIGVFVVCWFPFFFTYTLTA

SEQ ID NO: 15798 - protein, 24 aa, Bos taurus
LIFVIMIVYFLFWAPYNIVLLLST

SEQ ID NO: 15799 - protein, 39 aa, Bos taurus
SGKKRRRAIKLIVTVLAMYLICFTPSNLLLVVHYFLIKT

SEQ ID NO: 15800 - protein, 20 aa, Bos taurus
GQLLQFVLTIIQTSCGVIWP

SEQ ID NO: 15801 - protein, 20 aa, Bos taurus
FVLFQALLILSALQPSIFSV

SEQ ID NO: 15802 - protein, 20 aa, Bos taurus
VIIVLGVFIACWAPLFILLL

SEQ ID NO: 15803 - protein, 20 aa, Bos taurus
VVVVVVAFALCWTPYHLVVL

SEQ ID NO: 15804 - protein, 21 aa, Bos taurus
LGIVFFLFVVMWCPFFITNIM

SEQ ID NO: 15805 - protein, 26 aa, Bos taurus
TLSVIMGVFVCCWLPFFILNCMVPFC

SEQ ID NO: 15806 - protein, 20 aa, Bos taurus
AVAVLLPILGTSWVFGVLAV

SEQ ID NO: 15807 - protein, 20 aa, Bos taurus
LIFLVVVVFFLFWTPYNVMI

SEQ ID NO: 15808 - protein, 17 aa, Bos taurus
ATLILVPLLGIEFVLIP

SEQ ID NO: 15809 - protein, 20 aa, Bos taurus
SIGNVLLDFTGGSFSLLQMF

SEQ ID NO: 15810 - protein, 20 aa, Bos taurus
IILTIIVTFFLCWCPYHAFY

SEQ ID NO: 15811 - protein, 20 aa, Bos taurus
MVLVVVTFAICWLPYHLYFI

SEQ ID NO: 15812 - protein, 26 aa, Bos taurus
AVTLTVLLGVFIFCWAPFVLHVLLMT

SEQ ID NO: 15813 - protein, 23 aa, Bos taurus
LMGIMCVLSVCWSPLLIMMLKMI

SEQ ID NO: 15814 - protein, 23 aa, Bos taurus
LFTVVIVFIVTQLPYNIVKFCQA

SEQ ID NO: 15815 - protein, 23 aa, Bos taurus
MAMLIFTDFLCMAPISFFAISAS

SEQ ID NO: 15816 - protein, 20 aa, Bos taurus
LSAILLAFIITWTPYNIMVL

SEQ ID NO: 15817 - protein, 21 aa, Bos taurus
TLGLIMGTFTLCWLPFFVVNV

SEQ ID NO: 15818 - protein, 20 aa, Bos taurus
LLLGWGPYALLYLYATIADA

SEQ ID NO: 15819 - protein, 23 aa, Bos taurus
LVIIVLTVFAVSYIPFHVMKTMN

SEQ ID NO: 15820 - protein, 23 aa, Bos taurus
MVVVMVGSFCLCYTPYAALAMYI

SEQ ID NO: 15821 - protein, 18 aa, Bos taurus
MTFIVVLAFIVCWTPFFF

SEQ ID NO: 15822 - protein, 24 aa, Bos taurus
DHLILLALMTGIMAVCSLPLTPQI

SEQ ID NO: 15823 - protein, 16 aa, Bos taurus
SYPAKVTLLGSVIFTF

SEQ ID NO: 15824 - protein, 20 aa, Bos taurus
AGLAAVHALCALPENVCNVV

SEQ ID NO: 15825 - protein, 20 aa, Bos taurus
PWLHAVYAVLGAGVFTLFLA

SEQ ID NO: 15826 - protein, 23 aa, Bos taurus
LALIVGIFALCWLPVHTINCASL

SEQ ID NO: 15827 - protein, 20 aa, Bos taurus
LLKSTLVLMPLFGVHYIVFM

SEQ ID NO: 15828 - protein, 23 aa, Bos taurus
ALNTIIFIIVVFVVCFTPYHVAI

SEQ ID NO: 15829 - protein, 20 aa, Bos taurus
INIMLLSIVVAFAVCWLPLT

SEQ ID NO: 15830 - protein, 20 aa, Bos taurus
FLTIKAVIFLSFWQGLLLAI

SEQ ID NO: 15831 - protein, 21 aa, Bos taurus
VIFAVVLVFLLCWLPYNLVLI

SEQ ID NO: 15832 - protein, 23 aa, Bos taurus
MAVLIFTDFTCMAPISFFAISAA

SEQ ID NO: 15833 - protein, 20 aa, Bos taurus
LARSTLLLIPLFGIHYTVFA

SEQ ID NO: 15834 - protein, 21 aa, Bos taurus
LVLVVVAVFVVCWTPIHIFIL

SEQ ID NO: 15835 - protein, 20 aa, Bos taurus
FCLLVVVVVVFAVCWLPLHV

SEQ ID NO: 15836 - protein, 24 aa, Bos taurus
WYIKASLLTFVIFTICFAPSNIIL

SEQ ID NO: 15837 - protein, 20 aa, Bos taurus
QLPTYYALGVLLLGLLGYYI

SEQ ID NO: 15838 - protein, 27 aa, Bos taurus
IQMVILLIATSLVVLICSIPLVVRVFV

SEQ ID NO: 15839 - protein, 20 aa, Bos taurus
ITAIAQLFVLGCTWVFGLLL

SEQ ID NO: 15840 - protein, 17 aa, Bos taurus
WPLASFICLINAVGYYI

SEQ ID NO: 15841 - protein, 23 aa, Bos taurus
LMGIMVVASICWMPLLVFIAQTV

SEQ ID NO: 15842 - protein, 23 aa, Bos taurus
MVMVMIFAYCLCWGPYTFFACFA

SEQ ID NO: 15843 - protein, 22 aa, Bos taurus
ILIGVFVVCWAPFFLHLIFYIS

SEQ ID NO: 15844 - protein, 29 aa, Bos taurus
QKALKTLGIIMGVFTLCWLPFFLANVVKA

SEQ ID NO: 15845 - protein, 20 aa, Bos taurus
VCTVLAVFIICFVPHHLVQL

SEQ ID NO: 15846 - protein, 20 aa, Bos taurus
YAMIGFVAWHVGTEIILEIH

SEQ ID NO: 15847 - protein, 20 aa, Bos taurus
ASLIFIFTMFMVSCKVFLTA

SEQ ID NO: 15848 - protein, 20 aa, Bos taurus
HLLLLALMTVLFTMCSLPLI

SEQ ID NO: 15849 - protein, 20 aa, Bos taurus
VLFRITSVFYMLWLPYIIYF

SEQ ID NO: 15850 - protein, 20 aa, Bos taurus
LFCLCPGSLIAGSAILLYAF

SEQ ID NO: 15851 - protein, 20 aa, Bos taurus
ISGFISGLFLSFAFLPYISF

SEQ ID NO: 15852 - protein, 20 aa, Bos taurus
VFLLNVLLLGLWNFLLLCTV

SEQ ID NO: 15853 - protein, 20 aa, Bos taurus
VVLLLQGLSLLELLDFPPLF

SEQ ID NO: 15854 - protein, 21 aa, Bos taurus
FLELIVVTLAVCWMPNQVRRI

SEQ ID NO: 15855 - protein, 20 aa, Bos taurus
AVAVHNELIISAIFHTIRFV

SEQ ID NO: 15856 - protein, 20 aa, Bos taurus
FITFGMLIYFIAWITFIPIY

SEQ ID NO: 15857 - protein, 20 aa, Bos taurus
VALLLFTNCILHCPVAFLSF

SEQ ID NO: 15858 - protein, 20 aa, Bos taurus
VVVVVLVFAGCWLPFFIVNI

SEQ ID NO: 15859 - protein, 20 aa, Bos taurus
VLSTVVIFLACFLPYHVLLL

SEQ ID NO: 15860 - protein, 23 aa, Bos taurus
LALILFLFALSWLPLHILNCITL

SEQ ID NO: 15861 - protein, 18 aa, Bos taurus
PYYVLGIWYWFDPDMVNR

SEQ ID NO: 15862 - protein, 24 aa, Bos taurus
VTRMVSIVVAVFIFCWLPFYIFNV

SEQ ID NO: 15863 - protein, 25 aa, Bos taurus
LILGIVLLFWACFLPFWLWQLLAQY

SEQ ID NO: 15864 - protein, 25 aa, Bos taurus
LAMLLGVFIVCWAPFFLHLILMISC

SEQ ID NO: 15865 - protein, 20 aa, Bos taurus
MLVCVVVVFAVSWLPLHAFQ

SEQ ID NO: 15866 - protein, 21 aa, Bos taurus
MLLVIVVLFFLCWLPVYSANT

SEQ ID NO: 15867 - protein, 20 aa, Bos taurus
AVTGAALIATAADYFAELLL

SEQ ID NO: 15868 - protein, 22 aa, Bos taurus
MLMVVLLVFALCYLPISVLNVL

SEQ ID NO: 15869 - protein, 20 aa, Bos taurus
LVFTIMAVFLLMWGPYNIVL

SEQ ID NO: 15870 - protein, 23 aa, Bos taurus
LSLVLFLFALSWLPLSIINCIIY

SEQ ID NO: 15871 - protein, 20 aa, Bos taurus
VMVICYIYFTRIIAILLRAV

SEQ ID NO: 15872 - protein, 20 aa, Bos taurus
GAMVLLYASRACYNLAALAL

SEQ ID NO: 15873 - protein, 20 aa, Bos taurus
LALSLIAIVLVCFAPYHVLL

SEQ ID NO: 15874 - protein, 22 aa, Bos taurus
LAIIFLPMFTFTAGNALKAIIA

SEQ ID NO: 15875 - protein, 20 aa, Bos taurus
CFAVFLCFTLSYIPFLLLNI

SEQ ID NO: 15876 - protein, 18 aa, Bos taurus
HYLFFLGLYRALYLVNWI

SEQ ID NO: 15877 - protein, 17 aa, Bos taurus
ILPYALAFAAGAMVYVI

SEQ ID NO: 15878 - protein, 20 aa, Bos taurus
GVFILLTTTASIAVWVVWIV

SEQ ID NO: 15879 - protein, 20 aa, Bos taurus
VTILVVIGAFMVTWGPYMVV

SEQ ID NO: 15880 - protein, 20 aa, Bos taurus
VLEIVYASLGALLFTCFLAV

SEQ ID NO: 15881 - protein, 20 aa, Bos taurus
IFSIMFVFFICFVPYHIARI

SEQ ID NO: 15882 - protein, 20 aa, Bos taurus
IIITLMVQVLVCFMPFHICF

SEQ ID NO: 15883 - protein, 20 aa, Bos taurus
GALLFVLSDSVLAWNIFTYL

SEQ ID NO: 15884 - protein, 20 aa, Bos taurus
LVALIILAFAAFWLPYHVVN

SEQ ID NO: 15885 - protein, 20 aa, Bos taurus
ILLVTTGYIICFVPYHIVRI

SEQ ID NO: 15886 - protein, 20 aa, Bos taurus
LVIFLLCFVPYNATLAVYGL

SEQ ID NO: 15887 - protein, 20 aa, Bos taurus
VTKMLFVLVLVFAICWAPFH

SEQ ID NO: 15888 - protein, 20 aa, Bos taurus
VVLLMLWFIGQALWLAPAYV

SEQ ID NO: 15889 - protein, 25 aa, Bos taurus
VIIAVVVVFVAFQLPYNGVVLAHTV

SEQ ID NO: 15890 - protein, 20 aa, Bos taurus
LLFGLCWGPYVATLLLSVLA

SEQ ID NO: 15891 - protein, 22 aa, Bos taurus
KVSLLVLAVLAVGLLCWTPFHL

SEQ ID NO: 15892 - protein, 24 aa, Bos taurus
VTVLVVAILAVCLLVWTPYHLSTV

SEQ ID NO: 15893 - protein, 20 aa, Bos taurus
VLVLMCILTAYVLCWAPFYG

SEQ ID NO: 15894 - protein, 20 aa, Bos taurus
VLVLMCILTAYVLCWAPFYG

SEQ ID NO: 15895 - protein, 20 aa, Bos taurus
VLWVWFIFWWPQGMTLGLDS

SEQ ID NO: 15896 - protein, 20 aa, Bos taurus
FFMVKSVIFLSFWQGMLLAI

SEQ ID NO: 15897 - protein, 21 aa, Bos taurus
MLAVVVILFALLWMPYRTLVV

SEQ ID NO: 15898 - protein, 16 aa, Bos taurus
LLGIMCVSCICWSPFL

SEQ ID NO: 15899 - protein, 20 aa, Bos taurus
VTMAICWITIVVPLLIFEVL

SEQ ID NO: 15900 - protein, 20 aa, Bos taurus
VVYTFLAVLLYLSAAVIWPV

SEQ ID NO: 15901 - protein, 20 aa, Bos taurus
VVFVSFWQAVVIALLVKVGV

SEQ ID NO: 15902 - protein, 20 aa, Bos taurus
GLAYLAFTGPLVHSVLCHTA

SEQ ID NO: 15903 - protein, 20 aa, Bos taurus
TELAAGTGALLFIVSDLTIA

SEQ ID NO: 15904 - protein, 20 aa, Bos taurus
FYAITLLFLLLWSPYIVACY

SEQ ID NO: 15905 - protein, 20 aa, Bos taurus
NISSGTYLALGVLSCLGFVV

SEQ ID NO: 15906 - protein, 28 aa, Bos taurus
IMCCFGCMSVLANYFVFMTFFPACVSLV

SEQ ID NO: 15907 - protein, 20 aa, Bos taurus
LGGVLALAFSILILALIPLL

SEQ ID NO: 15908 - protein, 20 aa, Bos taurus
LFFMAEYANIIMMNIFTAIL

SEQ ID NO: 15909 - protein, 21 aa, Bos taurus
VTVIVGLLIHAVIVLPLLYFL

SEQ ID NO: 15910 - protein, 20 aa, Bos taurus
IALCHFFFNISGIILWYPIP

SEQ ID NO: 15911 - protein, 19 aa, Bos taurus
LVVVALLCVPWMLLFKPLV

SEQ ID NO: 15912 - protein, 20 aa, Bos taurus
GLWGFNSSLACIAIGGTFMA

SEQ ID NO: 15913 - protein, 21 aa, Bos taurus
ATVLSGLAIHSIVILPLIYFI

SEQ ID NO: 15914 - protein, 20 aa, Bos taurus
WSAWVILGAISVYDLVAVLC

SEQ ID NO: 15915 - protein, 20 aa, Bos taurus
GLVSDFFLQMLFFTTVLSID

SEQ ID NO: 15916 - protein, 19 aa, Bos taurus
LLLITVLSVPVLFLGKPLF

SEQ ID NO: 15917 - protein, 20 aa, Bos taurus
GTSVLSPGLHIGIIIILAIM

SEQ ID NO: 15918 - protein, 21 aa, Bos taurus
LCCLLGHAIHGLLTLPLIYFL

SEQ ID NO: 15919 - protein, 20 aa, Bos taurus
FMVIFIMVFVAFMIGMFNLY

SEQ ID NO: 15920 - protein, 20 aa, Bos taurus
LFLLQFTLSCVMGFILMYAT

SEQ ID NO: 15921 - protein, 20 aa, Bos taurus
GPSLNKENFIGLLVFVLSLS

SEQ ID NO: 15922 - protein, 20 aa, Bos taurus
AAKLQLSTALGGLLGACFAI

SEQ ID NO: 15923 - protein, 20 aa, Bos taurus
MILQFGFTTIFVAAFPLAPL

SEQ ID NO: 15924 - protein, 19 aa, Bos taurus
SWTGTLFGVLASLCVSLNA

SEQ ID NO: 15925 - protein, 20 aa, Bos taurus
VVVSSVFLLTLSIAFICCAQ

SEQ ID NO: 15926 - protein, 20 aa, Bos taurus
IAILMNFISALTAFIGLYIG

SEQ ID NO: 15927 - protein, 20 aa, Bos taurus
WLSGFSVAMLGALSLVGVNS

SEQ ID NO: 15928 - protein, 20 aa, Bos taurus
VVAGCGILFSCMTPLGIGLG

SEQ ID NO: 15929 - protein, 20 aa, Bos taurus
AKLAVTVSAMIPLGISLGLG

SEQ ID NO: 15930 - protein, 20 aa, Bos taurus
LTWIVVVLQALGGLVIAAVI

SEQ ID NO: 15931 - protein, 20 aa, Bos taurus
LWSTLLLGAGILFTGELWEF

SEQ ID NO: 15932 - protein, 20 aa, Bos taurus
AIGFCNIIPSFFHCFTTSAA

SEQ ID NO: 15933 - protein, 20 aa, Bos taurus
LNHLGLVLLVLHYFVEFLFH

SEQ ID NO: 15934 - protein, 20 aa, Bos taurus
LIGLIWTSEFILACQQMAVA

SEQ ID NO: 15935 - protein, 20 aa, Bos taurus
LPLALQNLFLYSFGVLLNLG

SEQ ID NO: 15936 - protein, 20 aa, Bos taurus
FDHRVLGIASVTAVTVLYFL

SEQ ID NO: 15937 - protein, 20 aa, Bos taurus
LPIVLVGFTVPLVGLLVGYG

SEQ ID NO: 15938 - protein, 20 aa, Bos taurus
CEHLIMVWINAFVMLTTQLL

SEQ ID NO: 15939 - protein, 20 aa, Bos taurus
LFLLVSISTSVILMQHLLPA

SEQ ID NO: 15940 - protein, 20 aa, Bos taurus
LFFVLYGVLALAFLSGYYVT

SEQ ID NO: 15941 - protein, 20 aa, Bos taurus
IFTSILGHFIHGGIVLPLIY

SEQ ID NO: 15942 - protein, 20 aa, Bos taurus
IGAIAGGLLFLVVTGAGMVL

SEQ ID NO: 15943 - protein, 20 aa, Bos taurus
LVLSVTLTGTAIYQVALLLL

SEQ ID NO: 15944 - protein, 20 aa, Bos taurus
FLITCFLFSFAIGFYLLLKW

SEQ ID NO: 15945 - protein, 37 aa, Bos taurus
YSRIVERLLKLAVPNHLIWLIFFYWLFHSCLNAVAEL

SEQ ID NO: 15946 - protein, 23 aa, Bos taurus
ILAVISVYDLVAVLCPKGPLRML

SEQ ID NO: 15947 - protein, 20 aa, Bos taurus
IIWGIFFIFVALLFVISLFL

SEQ ID NO: 15948 - protein, 20 aa, Bos taurus
VGGFLPFSAISVELYYIFAT

SEQ ID NO: 15949 - protein, 20 aa, Bos taurus
GILMAGILPFGAMFIELFFI

SEQ ID NO: 15950 - protein, 20 aa, Bos taurus
FYGLTSLALLLGASLIYWTL

SEQ ID NO: 15951 - protein, 20 aa, Bos taurus
GFPAVLGTHLPFFIHGCFLA

SEQ ID NO: 15952 - protein, 20 aa, Bos taurus
VAGIYLFMIIWQLTELNTFF

SEQ ID NO: 15953 - protein, 20 aa, Bos taurus
GYFFSIYCVWKIFMATINIV

SEQ ID NO: 15954 - protein, 20 aa, Bos taurus
RICPAFFLSIPYTCLPVWAG

SEQ ID NO: 15955 - protein, 20 aa, Bos taurus
TNILVYITICSVIGAVSVSC

SEQ ID NO: 15956 - protein, 20 aa, Bos taurus
GTVTILCIDLGTDMVPAISL

SEQ ID NO: 15957 - protein, 20 aa, Bos taurus
WCIGLYNVIFTALPPFTLGI

SEQ ID NO: 15958 - protein, 20 aa, Bos taurus
AVQMLWVNLIMDTFASLALA

SEQ ID NO: 15959 - protein, 20 aa, Bos taurus
WACFIVSILMIGLLTAFIGD

SEQ ID NO: 15960 - protein, 20 aa, Bos taurus
NAMQILWINIIMDGPPAQSL

SEQ ID NO: 15961 - protein, 20 aa, Bos taurus
GTVTILCIDLGTDMVPAISL

SEQ ID NO: 15962 - protein, 20 aa, Bos taurus
IPVQLLWVNLVTDGLPATAL

SEQ ID NO: 15963 - protein, 19 aa, Bos taurus
WCIGLYNVMFTAMPPLTLG

SEQ ID NO: 15964 - protein, 20 aa, Bos taurus
LALGLVYLVGYTLLSPHITE

SEQ ID NO: 15965 - protein, 20 aa, Bos taurus
GFLMVGYATVYTMFPVFSLV

SEQ ID NO: 15966 - protein, 20 aa, Bos taurus
WVLALGQCVLAGAFASFYWA

SEQ ID NO: 15967 - protein, 22 aa, Bos taurus
NGFGIFLFIIYPGAFVDLFTTH

SEQ ID NO: 15968 - protein, 30 aa, Bos taurus
IPIFIAMGVVGGILGAVFNALNYWLTMFRI

SEQ ID NO: 15969 - protein, 20 aa, Bos taurus
LEAGQSLVISASIIVFNLVE

SEQ ID NO: 15970 - protein, 22 aa, Bos taurus
NFVLALGQVTLAGAFASYYWAM

SEQ ID NO: 15971 - protein, 20 aa, Bos taurus
LGLGHVLIIVQCFISSMANI

SEQ ID NO: 15972 - protein, 22 aa, Bos taurus
LFTAMIFGCALCVTLPMSLLNF

SEQ ID NO: 15973 - protein, 20 aa, Bos taurus
NLMNLIATVFVFAVVIYFQG

SEQ ID NO: 15974 - protein, 20 aa, Bos taurus
LPFIAAASCTILGGQLADFL

SEQ ID NO: 15975 - protein, 20 aa, Bos taurus
FISVNMLLCLGASIMSILPK

SEQ ID NO: 15976 - protein, 20 aa, Bos taurus
NLMNLIATIFVFAVVIYFQG

SEQ ID NO: 15977 - protein, 20 aa, Bos taurus
FLGTVFAALGVLVTSLYQVW

SEQ ID NO: 15978 - protein, 20 aa, Bos taurus
TIGSIWSLVGAMLYAVYIVM

SEQ ID NO: 15979 - protein, 20 aa, Bos taurus
CSLAVISGILYGSTFVPIIY

SEQ ID NO: 15980 - protein, 20 aa, Bos taurus
WASLLLLFTGVAIVQAQQAG

SEQ ID NO: 15981 - protein, 20 aa, Bos taurus
IFPSINLNLILTLSVLSILI

SEQ ID NO: 15982 - protein, 20 aa, Bos taurus
QAIYLFLLPIVFPLWLTVPD

SEQ ID NO: 15983 - protein, 20 aa, Bos taurus
VYAVPILTFSFVCHPAILPI

SEQ ID NO: 15984 - protein, 20 aa, Bos taurus
LGLPKANSTSILLFLTAMVA

SEQ ID NO: 15985 - protein, 20 aa, Bos taurus
MFYTVPIMAFAFVCHPEVLP

SEQ ID NO: 15986 - protein, 20 aa, Bos taurus
LAFFLTADIFLALCIGLYLL

SEQ ID NO: 15987 - protein, 20 aa, Bos taurus
LSVVATFLIEIAVPPLFFAP

SEQ ID NO: 15988 - protein, 20 aa, Bos taurus
ASWIAVFNAMPTICFGFQCH

SEQ ID NO: 15989 - protein, 20 aa, Bos taurus
PLATFICTLIAMLPSVFCLW

SEQ ID NO: 15990 - protein, 20 aa, Bos taurus
FAWHVVWLSVIQLWHYLFIG

SEQ ID NO: 15991 - protein, 19 aa, Bos taurus
NIWKNLLILGFTNFIAHAI

SEQ ID NO: 15992 - protein, 20 aa, Bos taurus
VVSFAALVAYSFQVTGYQPF

SEQ ID NO: 15993 - protein, 20 aa, Bos taurus
LVFFLLLSFMMACCFISFFF

SEQ ID NO: 15994 - protein, 20 aa, Bos taurus
TLLGIYTGCGFLAVLLMAVF

SEQ ID NO: 15995 - protein, 20 aa, Bos taurus
LLLFTMITYFFVTIGVSPIF

SEQ ID NO: 15996 - protein, 20 aa, Bos taurus
VPWLALLFAVSDLLFIWCFL

SEQ ID NO: 15997 - protein, 20 aa, Bos taurus
AFCLALATGSGLGFVGAARL

SEQ ID NO: 15998 - protein, 20 aa, Bos taurus
LFFFTLLFYALSITAVALLF

SEQ ID NO: 15999 - protein, 20 aa, Bos taurus
VGVMSFAFICHHNCFLVYGS

SEQ ID NO: 16000 - protein, 20 aa, Bos taurus
VFYVYGSFGIFWYLFWLLVS

SEQ ID NO: 16001 - protein, 20 aa, Bos taurus
VFYVYGSFGMIWYMFWLLVS

SEQ ID NO: 16002 - protein, 20 aa, Bos taurus
FVTGYAIPAVCIGVAFVVFL

SEQ ID NO: 16003 - protein, 33 aa, Bos taurus
PILYQHLFWFFGHPEVYILILPGFGMISHIVTY

SEQ ID NO: 16004 - protein, 20 aa, Bos taurus
LGANALLFLGVNVYGIFVRI

SEQ ID NO: 16005 - protein, 20 aa, Bos taurus
WPLLLSVIFIPALLQCILLP

SEQ ID NO: 16006 - protein, 17 aa, Bos taurus
ICFSLGVGLGVLIAFSS

SEQ ID NO: 16007 - protein, 18 aa, Bos taurus
ISFCIVLRMAVTRQFPWA

SEQ ID NO: 16008 - protein, 20 aa, Bos taurus
WHILLGLSAVPAILQCLLLF

SEQ ID NO: 16009 - protein, 20 aa, Bos taurus
PILLGLTGIPAVLQLLFLPF

SEQ ID NO: 16010 - protein, 20 aa, Bos taurus
WLAVLGCVPPSFMLLLMCFM

SEQ ID NO: 16011 - protein, 18 aa, Bos taurus
VNPFWLALAVLTVMTLYA

SEQ ID NO: 16012 - protein, 20 aa, Bos taurus
LWPLLLGITVLPALLQMVLL

SEQ ID NO: 16013 - protein, 19 aa, Bos taurus
LLFGSIISAVDPVAVLAVF

SEQ ID NO: 16014 - protein, 20 aa, Bos taurus
VGLKLLATAVVFVCGNLTGA

SEQ ID NO: 16015 - protein, 20 aa, Bos taurus
YVPDVLFWSVILFFSTVTLS

SEQ ID NO: 16016 - protein, 17 aa, Bos taurus
TLMSFILFLGTYTSSMA

SEQ ID NO: 16017 - protein, 17 aa, Bos taurus
IFFSYAICLGAMTSLGS

SEQ ID NO: 16018 - protein, 22 aa, Bos taurus
VWVDAAAQIFFSLGPGFGVLLA

SEQ ID NO: 16019 - protein, 20 aa, Bos taurus
AGTQIFFSFAICLGCLTALG

SEQ ID NO: 16020 - protein, 20 aa, Bos taurus
WLQLAVSLPIFLLLFRFWFV

SEQ ID NO: 16021 - protein, 25 aa, Bos taurus
VWIDAATQIFFSLGAGFGVLIAFAS

SEQ ID NO: 16022 - protein, 20 aa, Bos taurus
WPLLLGFTILPAIIQCAALP

SEQ ID NO: 16023 - protein, 22 aa, Bos taurus
TAPFLVLAALVLLDGAIQLFVL

SEQ ID NO: 16024 - protein, 17 aa, Bos taurus
IFYSLGCAWGGLVTMAS

SEQ ID NO: 16025 - protein, 20 aa, Bos taurus
VFVLVCAFPSVFAIGALTTQ

SEQ ID NO: 16026 - protein, 20 aa, Bos taurus
YMFGLVIPLGVLQAIAMYFL

SEQ ID NO: 16027 - protein, 20 aa, Bos taurus
YLQLLVSAPFFAFFIYSWFF

SEQ ID NO: 16028 - protein, 24 aa, Bos taurus
GAWWGGFLLCGALLFFSSVLMFGF

SEQ ID NO: 16029 - protein, 20 aa, Bos taurus
GGSMTIHTFGAYFGLILSRV

SEQ ID NO: 16030 - protein, 17 aa, Bos taurus
VFFALGLGFGGVIAFSS

SEQ ID NO: 16031 - protein, 20 aa, Bos taurus
IAINVFSIMYTGAPVMGLVL

SEQ ID NO: 16032 - protein, 20 aa, Bos taurus
VWIDAGTQIFFSYAIGLGAL

SEQ ID NO: 16033 - protein, 18 aa, Bos taurus
LQALLMIVGALTLMVISM

SEQ ID NO: 16034 - protein, 20 aa, Bos taurus
FGASFIVILVVWAGCSGLVF

SEQ ID NO: 16035 - protein, 20 aa, Bos taurus
WIYQIVLSSVTVPFVLCCWM

SEQ ID NO: 16036 - protein, 20 aa, Bos taurus
LLLVSALSLHLVACGALLRP

SEQ ID NO: 16037 - protein, 20 aa, Bos taurus
WLLILSAVPLLLFAVLCFWL

SEQ ID NO: 16038 - protein, 20 aa, Bos taurus
LMIGGITCILSLVCALALAY

SEQ ID NO: 16039 - protein, 20 aa, Bos taurus
FFFTLIAVKLITSLLLLICP

SEQ ID NO: 16040 - protein, 18 aa, Bos taurus
LLQAVGIIGAIIMPHNIY

SEQ ID NO: 16041 - protein, 20 aa, Bos taurus
TLQLVFSVPLFVLFLSSRWL

SEQ ID NO: 16042 - protein, 20 aa, Bos taurus
GGSMTIHAFGAYFGLTVAWI

SEQ ID NO: 16043 - protein, 19 aa, Bos taurus
YLLMAMVIVLPHVSKAAGW

SEQ ID NO: 16044 - protein, 20 aa, Bos taurus
AFFMIYGWRGSFLILGGLLL

SEQ ID NO: 16045 - protein, 20 aa, Bos taurus
SFVVPGVITAIMGIITFFFL

SEQ ID NO: 16046 - protein, 20 aa, Bos taurus
GESMTIHAFGAYFGLAVAGI

SEQ ID NO: 16047 - protein, 20 aa, Bos taurus
FLALPNLVIFAVLLFFSSLE

SEQ ID NO: 16048 - protein, 20 aa, Bos taurus
LVVLVATVVALLDICFILLA

SEQ ID NO: 16049 - protein, 20 aa, Bos taurus
WLLLTVTLPCVPGILTLWWV

SEQ ID NO: 16050 - protein, 20 aa, Bos taurus
WALRVTPGLGVLAVVLLFLV

SEQ ID NO: 16051 - protein, 20 aa, Bos taurus
LGPVAPFVAAIPLLALAGAL

SEQ ID NO: 16052 - protein, 20 aa, Bos taurus
FLVTAAVQFAGGIIIFFGLL

SEQ ID NO: 16053 - protein, 20 aa, Bos taurus
FLMSMKMMLLDAALYGLLAW

SEQ ID NO: 16054 - protein, 20 aa, Bos taurus
WLACMMAFMVKMPLYGLHLW

SEQ ID NO: 16055 - protein, 16 aa, Bos taurus
YVFLINLIPLHVLVLM

SEQ ID NO: 16056 - protein, 20 aa, Bos taurus
VVWTDAFQMVVMIVGFLTVL

SEQ ID NO: 16057 - protein, 20 aa, Bos taurus
IMYLGSGLCCVGALAGLSTQ

SEQ ID NO: 16058 - protein, 20 aa, Bos taurus
LIMLIGALILMGYSFAAVGG

SEQ ID NO: 16059 - protein, 20 aa, Bos taurus
LVMVAGAVILTIKAFEQIGG

SEQ ID NO: 16060 - protein, 20 aa, Bos taurus
AILYNRIGDIGFILAMAWFL

SEQ ID NO: 16061 - protein, 20 aa, Bos taurus
WSGVLQGAATCFYAFIGFDI

SEQ ID NO: 16062 - protein, 20 aa, Bos taurus
FTPGEALLVLGGISFMLNQL

SEQ ID NO: 16063 - protein, 20 aa, Bos taurus
IPVFLVIVFLMSVGTLYEKQ

SEQ ID NO: 16064 - protein, 20 aa, Bos taurus
LYKTFGPYFLMSFLFKAVHD

SEQ ID NO: 16065 - protein, 9 aa, Bos taurus
LKLTFDSSF

SEQ ID NO: 16066 - protein, 9 aa, Bos taurus
LKLTFDTTF

SEQ ID NO: 16067 - protein, 9 aa, Bos taurus
LKLTLDTIF

SEQ ID NO: 16068 - protein, 26 aa, Bos taurus
PNPVTQRVKMIMSLGLVLVHAHSRWI

SEQ ID NO: 16069 - protein, 20 aa, Bos taurus
LSQCLFWALVADLLTLTWIG

SEQ ID NO: 16070 - protein, 20 aa, Bos taurus
ELYTINFTIKSLLLTMSFLW

SEQ ID NO: 16071 - protein, 26 aa, Bos taurus
VTRFVLPVGATINMDGTALYEALAAI

SEQ ID NO: 16072 - protein, 20 aa, Bos taurus
WFAIVYLIVFFLLIPLAVFG

SEQ ID NO: 16073 - protein, 24 aa, Bos taurus
IEYCLGCISNTASYLRLWALSLAH

SEQ ID NO: 16074 - protein, 20 aa, Bos taurus
LLALACALFTAYLGASMSHV

SEQ ID NO: 16075 - protein, 26 aa, Bos taurus
ITRFVLPVGATINMDGTALYEAVAAV

SEQ ID NO: 16076 - protein, 20 aa, Bos taurus
LGLGDFIFYSVLVGKAAATG

SEQ ID NO: 16077 - protein, 20 aa, Bos taurus
LIMAGTVVWIGILVYTDPAG

SEQ ID NO: 16078 - protein, 24 aa, Bos taurus
IEYCLGCISNTASYLRLWALSLAH

SEQ ID NO: 16079 - protein, 20 aa, Bos taurus
CLYTLMFGCVFAKVSQKLVI

SEQ ID NO: 16080 - protein, 26 aa, Bos taurus
ISRFILPIGATVNMDGAALFQCVAAV

SEQ ID NO: 16081 - protein, 20 aa, Bos taurus
FKTLFWAIFGLSEVKSVVIN

SEQ ID NO: 16082 - protein, 22 aa, Bos taurus
SALTTTIVGCIKNILITYIGMV

SEQ ID NO: 16083 - protein, 20 aa, Bos taurus
MFHLMLCSASLYIMMTLTNW

SEQ ID NO: 16084 - protein, 20 aa, Bos taurus
VAWILPFTSGGFLYIALVNV

SEQ ID NO: 16085 - protein, 20 aa, Bos taurus
IWYGILEGIGILSVITNAFV

SEQ ID NO: 16086 - protein, 22 aa, Bos taurus
IWRLTFYNNANACVLFLPLLLA

SEQ ID NO: 16087 - protein, 20 aa, Bos taurus
WEFLIWESALLLFLLRLASL

SEQ ID NO: 16088 - protein, 20 aa, Bos taurus
WILTVTAGMFLYLSLVEMLP

SEQ ID NO: 16089 - protein, 20 aa, Bos taurus
MPYYTALAAVGAHLAHQIYT

SEQ ID NO: 16090 - protein, 20 aa, Bos taurus
SVLEGMAAGTFLYITFLEIL

SEQ ID NO: 16091 - protein, 20 aa, Bos taurus
VLLQGLAGGTFLFVTFFEIL

SEQ ID NO: 16092 - protein, 20 aa, Bos taurus
ILKGFATSLSIILSTLISYF

SEQ ID NO: 16093 - protein, 20 aa, Bos taurus
ILLFGLTSALGQSFIFMTVV

SEQ ID NO: 16094 - protein, 20 aa, Bos taurus
VMTALVLLLVLLVIAPLFFS

SEQ ID NO: 16095 - protein, 20 aa, Bos taurus
LWAVLFVLGRLLTLILSVLT

SEQ ID NO: 16096 - protein, 20 aa, Bos taurus
FIIFLGKVLVVCFTVFGGLM

SEQ ID NO: 16097 - protein, 22 aa, Bos taurus
FSGWMALVVLSQALNGLLMSAV

SEQ ID NO: 16098 - protein, 20 aa, Bos taurus
ATTLLALAYTQVGLGISTLL

SEQ ID NO: 16099 - protein, 20 aa, Bos taurus
VSIEVGVQNSLLALAMLQLS

SEQ ID NO: 16100 - protein, 20 aa, Bos taurus
LLNLLILIEGSVVFYQLYSL

SEQ ID NO: 16101 - protein, 20 aa, Bos taurus
ILNILLLLEGAVIVYQLYSL

SEQ ID NO: 16102 - protein, 20 aa, Bos taurus
ILAVLLPPVMLLIDGNVAYW

SEQ ID NO: 16103 - protein, 20 aa, Bos taurus
FLLGLLTPFATAFATCSSSA

SEQ ID NO: 16104 - protein, 20 aa, Bos taurus
IILLMISFIFPLIGHATGFL

SEQ ID NO: 16105 - protein, 20 aa, Bos taurus
SALVLSCLLTFLMLVHSLVT

SEQ ID NO: 16106 - protein, 20 aa, Bos taurus
TTPFASLLKNLGTLFGLGLA

SEQ ID NO: 16107 - protein, 20 aa, Bos taurus
KWAARTAVFLASAFFHEYLV

SEQ ID NO: 16108 - protein, 20 aa, Bos taurus
LGLGDFIFYSVLVGKASATA

SEQ ID NO: 16109 - protein, 20 aa, Bos taurus
LDYILITIIIMYFIFTSMAG

SEQ ID NO: 16110 - protein, 20 aa, Bos taurus
GILFFVFAILLSVGACISIA

SEQ ID NO: 16111 - protein, 20 aa, Bos taurus
FLFLVFIILVVSCSQISIVM

SEQ ID NO: 16112 - protein, 18 aa, Bos taurus
SGAALGLGIALHSPCYAQ

SEQ ID NO: 16113 - protein, 20 aa, Bos taurus
IFLVTVLWTLLVYSMLSHKE

SEQ ID NO: 16114 - protein, 22 aa, Bos taurus
SWCRILFIGGITAPTVRQYYAY

SEQ ID NO: 16115 - protein, 20 aa, Bos taurus
ISFILVGIIIVTSIRGLLIT

SEQ ID NO: 16116 - protein, 20 aa, Bos taurus
LILVLCLLLATGFCVFRGLI

SEQ ID NO: 16117 - protein, 20 aa, Bos taurus
PLTWILLLSLIVCVSTQINY

SEQ ID NO: 16118 - protein, 22 aa, Bos taurus
LVNERLISMAYGQIGMIQALGG

SEQ ID NO: 16119 - protein, 20 aa, Bos taurus
VFWGHCINALVHSLILFWFP

SEQ ID NO: 16120 - protein, 20 aa, Bos taurus
NILGHAVYQLTVIFFLVFAG

SEQ ID NO: 16121 - protein, 20 aa, Bos taurus
FACTIALKDSVTAVVFVALG

SEQ ID NO: 16122 - protein, 19 aa, Bos taurus
LTKNLILKILVSSIIIVCG

SEQ ID NO: 16123 - protein, 22 aa, Bos taurus
LVNERLISMAYGQIGMIQALGG

SEQ ID NO: 16124 - protein, 22 aa, Bos taurus
ISGWLFFRYMAIGGYVGAATVG

SEQ ID NO: 16125 - protein, 21 aa, Bos taurus
FWVHCLNGLFHSVILFWFPLK

SEQ ID NO: 16126 - protein, 20 aa, Bos taurus
VTCWLVTEGVCILTGLGFNG

SEQ ID NO: 16127 - protein, 20 aa, Bos taurus
FLVWVLISIYQGGILMFGAL

SEQ ID NO: 16128 - protein, 20 aa, Bos taurus
LAFGALILTLVQIARVILEY

SEQ ID NO: 16129 - protein, 22 aa, Bos taurus
FILALLGILALILLPVILLPFY

SEQ ID NO: 16130 - protein, 22 aa, Bos taurus
PCLQVVEATLVAAVTATAAFVL

SEQ ID NO: 16131 - protein, 23 aa, Bos taurus
DDHIFSLYFMIPFFFTTLGLLYH

SEQ ID NO: 16132 - protein, 20 aa, Bos taurus
LAFGSLLLAIVQVIRVILEY

SEQ ID NO: 16133 - protein, 20 aa, Bos taurus
IFVQNSKLYFFGVLFNGLTL

SEQ ID NO: 16134 - protein, 22 aa, Bos taurus
VYEAVVPFFSPCLLFILSTAWI

SEQ ID NO: 16135 - protein, 20 aa, Bos taurus
IPIILQSALVSNLYVISQML

SEQ ID NO: 16136 - protein, 22 aa, Bos taurus
LFSSLGLLLPSLCAVALPFVAS

SEQ ID NO: 16137 - protein, 20 aa, Bos taurus
GLLQSSVITVYTMYLTWSAM

SEQ ID NO: 16138 - protein, 20 aa, Bos taurus
IPIILQSALVSNLYVISQML

SEQ ID NO: 16139 - protein, 19 aa, Bos taurus
LLYYQAPMSSAMLLVAVPF

SEQ ID NO: 16140 - protein, 20 aa, Bos taurus
MFFGFVGLFNLLLLWPGFFL

SEQ ID NO: 16141 - protein, 20 aa, Bos taurus
IFAHFSGIFLTSTVYFLAYC

SEQ ID NO: 16142 - protein, 20 aa, Bos taurus
GVGLAAVVASCLSSGFAGVY

SEQ ID NO: 16143 - protein, 20 aa, Bos taurus
IMAYSSIAHMGWMTAVLPYN

SEQ ID NO: 16144 - protein, 20 aa, Bos taurus
FFVITFLGSILWIAMFSYLM

SEQ ID NO: 16145 - protein, 20 aa, Bos taurus
ISFFAMFLMYLLAALFGYLT

SEQ ID NO: 16146 - protein, 20 aa, Bos taurus
EVLIESFSLALVSSSLLVFL

SEQ ID NO: 16147 - protein, 20 aa, Bos taurus
VSIGAMFCMYGLTATFGYLT

SEQ ID NO: 16148 - protein, 20 aa, Bos taurus
GLGFCIIYLFFITSLIFPAI

SEQ ID NO: 16149 - protein, 20 aa, Bos taurus
VLLQVLIILTGNYNFFNLLT

SEQ ID NO: 16150 - protein, 20 aa, Bos taurus
AAMVIALAVYMGTGICGFLT

SEQ ID NO: 16151 - protein, 20 aa, Bos taurus
LCALSSFMFGWHVHEKAILL

SEQ ID NO: 16152 - protein, 20 aa, Bos taurus
NAFAVTQFFGVLCAPWNGLL

SEQ ID NO: 16153 - protein, 20 aa, Bos taurus
FYLCSLLASGTAALACVFLG

SEQ ID NO: 16154 - protein, 20 aa, Bos taurus
GMGAGLVVVPLMGLLESIAV

SEQ ID NO: 16155 - protein, 20 aa, Bos taurus
LAHLTFIYVLVAFVNALTNG

SEQ ID NO: 16156 - protein, 20 aa, Bos taurus
LRLLILLPMLSGFEQAFLSG

SEQ ID NO: 16157 - protein, 20 aa, Bos taurus
VLIGYGSALGSVTFFSSFLG

SEQ ID NO: 16158 - protein, 20 aa, Bos taurus
LVYFLYLFLFSGLEFTLSFL

SEQ ID NO: 16159 - protein, 20 aa, Bos taurus
FLWFVGMDLVQVFHCHFNSN

SEQ ID NO: 16160 - protein, 20 aa, Bos taurus
GKVFIGLNLTLCVCVSIVAI

SEQ ID NO: 16161 - protein, 20 aa, Bos taurus
IIHVSTLISVFISILFATCG

SEQ ID NO: 16162 - protein, 20 aa, Bos taurus
PVYAIIVANFCRSWTFYLLL

SEQ ID NO: 16163 - protein, 20 aa, Bos taurus
PVYAIIVANFCRSWTFYLLL

SEQ ID NO: 16164 - protein, 20 aa, Bos taurus
LVKIVPVFLALIPYWTVYFQ

SEQ ID NO: 16165 - protein, 16 aa, Bos taurus
YMGMVWAMMSIGFLGF

SEQ ID NO: 16166 - protein, 20 aa, Bos taurus
SAVVLALILAALFGLVYLLI

SEQ ID NO: 16167 - protein, 21 aa, Bos taurus
ILIAVVLQLSQQLSGINAVFY

SEQ ID NO: 16168 - protein, 21 aa, Bos taurus
IITTSVNSLTSFSSGFVVFSF

SEQ ID NO: 16169 - protein, 20 aa, Bos taurus
LMFVLIWCLVVFLVEVAASL

SEQ ID NO: 16170 - protein, 20 aa, Bos taurus
ILVALMLHAAQQFSGINGIF

SEQ ID NO: 16171 - protein, 20 aa, Bos taurus
VISIIVLMAGQQLSGVNAIY

SEQ ID NO: 16172 - protein, 20 aa, Bos taurus
FIIGISLMAFQQLSGVNAVM

SEQ ID NO: 16173 - protein, 22 aa, Bos taurus
LALYSLAIFVMITVHLGAQDIL

SEQ ID NO: 16174 - protein, 20 aa, Bos taurus
LVIAIVLQLSQQLSGINAVF

SEQ ID NO: 16175 - protein, 19 aa, Bos taurus
ILVFGESLLNDAVTVVLYH

SEQ ID NO: 16176 - protein, 20 aa, Bos taurus
YYFACASLVFVCILLIHVLL

SEQ ID NO: 16177 - protein, 20 aa, Bos taurus
FAVFLTILCMVLIDYAIGIP

SEQ ID NO: 16178 - protein, 19 aa, Bos taurus
LISDFAIILPILIFCVIDA

SEQ ID NO: 16179 - protein, 21 aa, Bos taurus
MLLGCLNSGTSFVSGFAIFSI

SEQ ID NO: 16180 - protein, 19 aa, Bos taurus
ALVTSAVNCMTSFVSGFVI

SEQ ID NO: 16181 - protein, 20 aa, Bos taurus
FLNSGTSFVAGFAIFSILGF

SEQ ID NO: 16182 - protein, 20 aa, Bos taurus
FILMYLWFTSSVVYQGLIMH

SEQ ID NO: 16183 - protein, 23 aa, Bos taurus
CYRDALLTSTINCVTSFISGFAI

SEQ ID NO: 16184 - protein, 20 aa, Bos taurus
IIISIMLQLSQQLSGINAVF

SEQ ID NO: 16185 - protein, 19 aa, Bos taurus
PYILIAAGSICFANMGIAM

SEQ ID NO: 16186 - protein, 21 aa, Bos taurus
VIISITNCATSVYAGFVIFSI

SEQ ID NO: 16187 - protein, 20 aa, Bos taurus
LMMMGVWFTMSFSYYGLTVW

SEQ ID NO: 16188 - protein, 20 aa, Bos taurus
IMIGLTLVFFVQITGQPNIL

SEQ ID NO: 16189 - protein, 20 aa, Bos taurus
LFLCLSMLWFATSFAYYGLV

SEQ ID NO: 16190 - protein, 21 aa, Bos taurus
LLSNPVFTCIILAACMEIAVV

SEQ ID NO: 16191 - protein, 20 aa, Bos taurus
LFAMIGTIFLWIFWPSFNSA

SEQ ID NO: 16192 - protein, 21 aa, Bos taurus
VLVSFINFFTSILATLVVFAV

SEQ ID NO: 16193 - protein, 20 aa, Bos taurus
AIALISFGVALLFALFVWLF

SEQ ID NO: 16194 - protein, 20 aa, Bos taurus
IILALINSGTSFFAGFVVFS

SEQ ID NO: 16195 - protein, 20 aa, Bos taurus
FLKLLPMFIIVVPGMISRIL

SEQ ID NO: 16196 - protein, 20 aa, Bos taurus
PSFMHSVFSPILLLSLVTMC

SEQ ID NO: 16197 - protein, 20 aa, Bos taurus
TLILWLIWFTGCLGFYTFSL

SEQ ID NO: 16198 - protein, 20 aa, Bos taurus
VALTLINTGYFIPYVHLVAH

SEQ ID NO: 16199 - protein, 20 aa, Bos taurus
TLLLWFIWFSNAFSYYGLVL

SEQ ID NO: 16200 - protein, 20 aa, Bos taurus
WLIFIICVCYYVAIFPFIGL

SEQ ID NO: 16201 - protein, 20 aa, Bos taurus
SWVVAISIAALYQLALDFTP

SEQ ID NO: 16202 - protein, 19 aa, Bos taurus
ATIALSVSFLINLFVMAVF

SEQ ID NO: 16203 - protein, 18 aa, Bos taurus
ICLLSFVRFANFMSFFGL

SEQ ID NO: 16204 - protein, 20 aa, Bos taurus
LFAMIGTLFLWMYWPSFNSA

SEQ ID NO: 16205 - protein, 24 aa, Bos taurus
KERVEAFSDGVYAIVATLLILDIC

SEQ ID NO: 16206 - protein, 20 aa, Bos taurus
FLLYLSGNVLMFFGLFTPLV

SEQ ID NO: 16207 - protein, 20 aa, Bos taurus
LCLLFAKLVSYTFLYWLPLY

SEQ ID NO: 16208 - protein, 20 aa, Bos taurus
LFAMIGSLFLWIFWPSFNSA

SEQ ID NO: 16209 - protein, 20 aa, Bos taurus
PVAFACFFICLITDPFLDIY

SEQ ID NO: 16210 - protein, 20 aa, Bos taurus
STILLICITVFLSYLPEAGQ

SEQ ID NO: 16211 - protein, 20 aa, Bos taurus
ISLCCMVVWFGVNFSYYGVS

SEQ ID NO: 16212 - protein, 20 aa, Bos taurus
LGFTAVAFVTGSLALWAPAF

SEQ ID NO: 16213 - protein, 20 aa, Bos taurus
VLLLGTIQALFESVIFIFVF

SEQ ID NO: 16214 - protein, 20 aa, Bos taurus
LAYACLKLVNYSFFFWLPFY

SEQ ID NO: 16215 - protein, 20 aa, Bos taurus
IVLPATFVFLALMLSLIIPP

SEQ ID NO: 16216 - protein, 20 aa, Bos taurus
PIAGSMVLAAVLLKLGGYGM

SEQ ID NO: 16217 - protein, 25 aa, Bos taurus
HRIYVAYCTVYCLGTILSMQISFVG

SEQ ID NO: 16218 - protein, 20 aa, Bos taurus
HTFWTISVGGTFTWLGIYGV

SEQ ID NO: 16219 - protein, 20 aa, Bos taurus
LGNALGMIGVAGGLAATLGG

SEQ ID NO: 16220 - protein, 20 aa, Bos taurus
GILFGMSIPSLWYWCTDQVI

SEQ ID NO: 16221 - protein, 20 aa, Bos taurus
GMTFGLTIMAAWYWCTDQVI

SEQ ID NO: 16222 - protein, 20 aa, Bos taurus
LIGLALAATGKSAQFGLHPW

SEQ ID NO: 16223 - protein, 20 aa, Bos taurus
ASLVICLTAYVSVSMILTLM

SEQ ID NO: 16224 - protein, 20 aa, Bos taurus
FFLLVVVVGMVLMGIFFSTL

SEQ ID NO: 16225 - protein, 20 aa, Bos taurus
LPGQVISMAASTLATLAISI

SEQ ID NO: 16226 - protein, 20 aa, Bos taurus
YFYTALLFISACLQTLVLHQ

SEQ ID NO: 16227 - protein, 9 aa, Bos taurus
NAKIKTGYK

SEQ ID NO: 16228 - protein, 9 aa, Bos taurus
SGKIKSSYK

SEQ ID NO: 16229 - protein, 9 aa, Bos taurus
SGKLKASYK

SEQ ID NO: 16230 - protein, 20 aa, Bos taurus
IGATVNMDGAAIFQCVAAVF

SEQ ID NO: 16231 - protein, 20 aa, Bos taurus
ISLETGTQNVQMCFTMLQLS

SEQ ID NO: 16232 - protein, 20 aa, Bos taurus
FTAYQTAFTCLGLLVQQILF

SEQ ID NO: 16233 - protein, 20 aa, Bos taurus
FPFRLSCIVASLVLLHLFDS

SEQ ID NO: 16234 - protein, 18 aa, Bos taurus
WAFTGMMAQIPLAWIVGR

SEQ ID NO: 16235 - protein, 20 aa, Bos taurus
IACFVAILIGLCLTLLLLAI

SEQ ID NO: 16236 - protein, 20 aa, Bos taurus
ALLFLCMILLLIVLHTSYMI

SEQ ID NO: 16237 - protein, 20 aa, Bos taurus
SVLSVGSTGLFIFLYSVFYY

SEQ ID NO: 16238 - protein, 20 aa, Bos taurus
NFLVSGGSAFYVLVYAIFYF

SEQ ID NO: 16239 - protein, 20 aa, Bos taurus
LVCLVLAMGLLGPLNWLGYP

SEQ ID NO: 16240 - protein, 20 aa, Bos taurus
FIYPVLPFCMVFCGYSLNNL

SEQ ID NO: 16241 - protein, 20 aa, Bos taurus
VFGVIGFLEAIVCIKFGQDL

SEQ ID NO: 16242 - protein, 20 aa, Bos taurus
VIVLLLAQIMGMYFVSSVLL

SEQ ID NO: 16243 - protein, 20 aa, Bos taurus
MLAYLFYSVPYFVIALYGLV

SEQ ID NO: 16244 - protein, 20 aa, Bos taurus
IVTPIYYVFFTTSVITCSAI

SEQ ID NO: 16245 - protein, 19 aa, Bos taurus
HTAFFASIVVVQWADLIIC

SEQ ID NO: 16246 - protein, 20 aa, Bos taurus
LFVGNIVYTYVVVTVCLKAG

SEQ ID NO: 16247 - protein, 19 aa, Bos taurus
QHYTIIFNTFVLMQLFNEI

SEQ ID NO: 16248 - protein, 20 aa, Bos taurus
AVNVFLGIGVAWSIAAIYHA

SEQ ID NO: 16249 - protein, 19 aa, Bos taurus
TMTFTCFVFFDMFNALSSR

SEQ ID NO: 16250 - protein, 19 aa, Bos taurus
HTAFFVSIVVVQWADLVIC

SEQ ID NO: 16251 - protein, 19 aa, Bos taurus
TMALSVLVTIEMCNALNSL

SEQ ID NO: 16252 - protein, 22 aa, Bos taurus
YLLLGNFVYTFVVITVCLKAGL

SEQ ID NO: 16253 - protein, 20 aa, Bos taurus
GLSLLFLALWHGLHSGYLVC

SEQ ID NO: 16254 - protein, 20 aa, Bos taurus
VVAISFTALVLTELLMVALT

SEQ ID NO: 16255 - protein, 20 aa, Bos taurus
IMIAIYGKNFCVSAKNAFML

SEQ ID NO: 16256 - protein, 17 aa, Bos taurus
YLISLSGALAIVNAVPC

SEQ ID NO: 16257 - protein, 20 aa, Bos taurus
PMTLGLFTLVYFFLACWTYG

SEQ ID NO: 16258 - protein, 18 aa, Bos taurus
GDTFCYFAGMTFAVVGIL

SEQ ID NO: 16259 - protein, 20 aa, Bos taurus
IMIAIYGTNFCTSARNAFFL

SEQ ID NO: 16260 - protein, 20 aa, Bos taurus
AFSVALIFVTAFQGLSVAFI

SEQ ID NO: 16261 - protein, 19 aa, Bos taurus
VFYLMVGTAFANSTCQLIV

SEQ ID NO: 16262 - protein, 20 aa, Bos taurus
FEDPVHVVVYIIFMLGSCAF

SEQ ID NO: 16263 - protein, 22 aa, Bos taurus
IILLILIPGTSNLCDSGFIINT

SEQ ID NO: 16264 - protein, 20 aa, Bos taurus
VQWWHTQGIIGLILFLLCVF

SEQ ID NO: 16265 - protein, 20 aa, Bos taurus
LEDPVHAVVYIVFMLGSCAF

SEQ ID NO: 16266 - protein, 20 aa, Bos taurus
LMVLLSGVIAFMVNLSIYWI

SEQ ID NO: 16267 - protein, 20 aa, Bos taurus
VVLMCIVINGLIGTVLSEFL

SEQ ID NO: 16268 - protein, 20 aa, Bos taurus
AVLPGFLSGVLWAIATCCWF

SEQ ID NO: 16269 - protein, 20 aa, Bos taurus
LGLFGTALGLVGLWWAEGTA

SEQ ID NO: 16270 - protein, 20 aa, Bos taurus
MTLLNLIIYIIMTSTMFTMF

SEQ ID NO: 16271 - protein, 20 aa, Bos taurus
IMGLTILAAGTSIPDLITSV

SEQ ID NO: 16272 - protein, 20 aa, Bos taurus
LLIVRLAVLVAVTLTVPVVI

SEQ ID NO: 16273 - protein, 20 aa, Bos taurus
LIAIGLCNVVSSFFRSYVFT

SEQ ID NO: 16274 - protein, 20 aa, Bos taurus
ILCVRLAVLLAVTLTVPVVL

SEQ ID NO: 16275 - protein, 17 aa, Bos taurus
WSTKFFVPLTTFLLYNF

SEQ ID NO: 16276 - protein, 20 aa, Bos taurus
LAMLTLLLELAVYGLLACGV

SEQ ID NO: 16277 - protein, 20 aa, Bos taurus
MAVAVARAFIILSVLTSYPI

SEQ ID NO: 16278 - protein, 20 aa, Bos taurus
VLPMSLLSVGKAVDASIFLI

SEQ ID NO: 16279 - protein, 22 aa, Bos taurus
AAALRSVVPSLTLTSLLSLGFA

SEQ ID NO: 16280 - protein, 20 aa, Bos taurus
GILLLSMTLTGIASLALLGL

SEQ ID NO: 16281 - protein, 20 aa, Bos taurus
LLALGFTNILGSLFSSYPVT

SEQ ID NO: 16282 - protein, 20 aa, Bos taurus
LSATLSSMASPLTCFLSIFL

SEQ ID NO: 16283 - protein, 20 aa, Bos taurus
FVGYVMICFGAADALCSVLF

SEQ ID NO: 16284 - protein, 20 aa, Bos taurus
IHMAFIGTFTTMVGMAMTAF

SEQ ID NO: 16285 - protein, 17 aa, Bos taurus
KMFFFIGLTMATIQGAY

SEQ ID NO: 16286 - protein, 20 aa, Bos taurus
FLLGISYVAPHLNNLYFLPL

SEQ ID NO: 16287 - protein, 20 aa, Bos taurus
SGLLQASVITLYTMFVTWLA

SEQ ID NO: 16288 - protein, 22 aa, Bos taurus
VTFGRFCYGVTVILTYPIECFV

SEQ ID NO: 16289 - protein, 20 aa, Bos taurus
LVSALPHLVMTIIVPIGGQI

SEQ ID NO: 16290 - protein, 20 aa, Bos taurus
MLSAVPHLVMTIIVPIGGQI

SEQ ID NO: 16291 - protein, 20 aa, Bos taurus
TFPAAWLTMFDAVLILLLIP

SEQ ID NO: 16292 - protein, 28 aa, Bos taurus
VDTRAYFTSATMIIAIPTGVKVFSWLAT

SEQ ID NO: 16293 - protein, 20 aa, Bos taurus
VAVLLLLVFCICFLVACVLY

SEQ ID NO: 16294 - protein, 21 aa, Bos taurus
VYATIGSGIVNTAFTVVSLFV

SEQ ID NO: 16295 - protein, 19 aa, Bos taurus
LPLSSVWAVVFFVMLLTLG

SEQ ID NO: 16296 - protein, 20 aa, Bos taurus
YVGVADTLLALGLFRGLPLV

SEQ ID NO: 16297 - protein, 20 aa, Bos taurus
VYATIGVGAVNTVFTAVSVF

SEQ ID NO: 16298 - protein, 20 aa, Bos taurus
VQYVTAGTGAVNVLITVCAI

SEQ ID NO: 16299 - protein, 20 aa, Bos taurus
LASVVVGVIQVLFTATAALI

SEQ ID NO: 16300 - protein, 22 aa, Bos taurus
LISYGSAAQQLPYLTSLLGLRL

SEQ ID NO: 16301 - protein, 20 aa, Bos taurus
YATIGAGVVNTVFTLVSVFL

SEQ ID NO: 16302 - protein, 20 aa, Bos taurus
FLSFFVVSLGGVFVGVVYGV

SEQ ID NO: 16303 - protein, 20 aa, Bos taurus
TLGVSFGLVACVLGLVLGLC

SEQ ID NO: 16304 - protein, 20 aa, Bos taurus
PWWTVIAAIIPALLCTILIF

SEQ ID NO: 16305 - protein, 27 aa, Bos taurus
VYLAAAIPALLVTILIFMDQQITAVIV

SEQ ID NO: 16306 - protein, 19 aa, Bos taurus
MPLPTFWSILFFIMLLLLG

SEQ ID NO: 16307 - protein, 21 aa, Bos taurus
FFAIVFFLMLITLGLDSTFAG

SEQ ID NO: 16308 - protein, 20 aa, Bos taurus
VVMLPFSPLWACCFFFMVVL

SEQ ID NO: 16309 - protein, 20 aa, Bos taurus
LDFLYSALVEFPAGFIILVT

SEQ ID NO: 16310 - protein, 25 aa, Bos taurus
FWAIVFFIMLLALGIDSSMGGMEAV

SEQ ID NO: 16311 - protein, 20 aa, Bos taurus
VYATIGAGVVNTIFTVVSVF

SEQ ID NO: 16312 - protein, 23 aa, Bos taurus
QLGVAFLPASVSYLIGTNVFGIL

SEQ ID NO: 16313 - protein, 19 aa, Bos taurus
LPISPLWSLLFFFMLILLG

SEQ ID NO: 16314 - protein, 20 aa, Bos taurus
FVSFLGTLAVLPGNIVSALL

SEQ ID NO: 16315 - protein, 20 aa, Bos taurus
LASTGVGVVKVISTIPATLL

SEQ ID NO: 16316 - protein, 20 aa, Bos taurus
LIQVIFGAVDLPAKLVSFLV

SEQ ID NO: 16317 - protein, 23 aa, Bos taurus
ANQLLGMTAIPCACLGIFLGGLL

SEQ ID NO: 16318 - protein, 20 aa, Bos taurus
TYYSLTASTLSTFALSALVG

SEQ ID NO: 16319 - protein, 19 aa, Bos taurus
FPASPFWSVMFFLMLVNLG

SEQ ID NO: 16320 - protein, 20 aa, Bos taurus
VHLLFHFLQVLTACFGSFAH

SEQ ID NO: 16321 - protein, 20 aa, Bos taurus
LMPVAPLWAALFFFMLLLLG

SEQ ID NO: 16322 - protein, 22 aa, Bos taurus
LVMKLVPVGLRGLMMAVMIAAL

SEQ ID NO: 16323 - protein, 20 aa, Bos taurus
SIFGVLQLLCLLTAPVIGYI

SEQ ID NO: 16324 - protein, 20 aa, Bos taurus
LNLFLMGVVEIPAYVLVCLG

SEQ ID NO: 16325 - protein, 20 aa, Bos taurus
LGWDPLPAAFLLSVAAISDL

SEQ ID NO: 16326 - protein, 20 aa, Bos taurus
MDLLWTTLSEFPGVLVTLWI

SEQ ID NO: 16327 - protein, 20 aa, Bos taurus
AINSVVYVISAPMSPIFGLL

SEQ ID NO: 16328 - protein, 20 aa, Bos taurus
IISVLGYVAVHMAGVQTGLY

SEQ ID NO: 16329 - protein, 19 aa, Bos taurus
VILGCLFGPPALYIWAVGL

SEQ ID NO: 16330 - protein, 20 aa, Bos taurus
VFLFQVLFGAVNLPANCVAF

SEQ ID NO: 16331 - protein, 20 aa, Bos taurus
INTYCSLAACVLTSVALSSA

SEQ ID NO: 16332 - protein, 22 aa, Bos taurus
FLAYFGSFATVGLLWFAHHSLF

SEQ ID NO: 16333 - protein, 20 aa, Bos taurus
AFLLSILAFVDMVARPSMGL

SEQ ID NO: 16334 - protein, 20 aa, Bos taurus
TLFDVGGIIGGILAGLVSDY

SEQ ID NO: 16335 - protein, 20 aa, Bos taurus
IVNTYFSLAASVVTAYACSS

SEQ ID NO: 16336 - protein, 20 aa, Bos taurus
LSVVFTGMIELTFFILSAFK

SEQ ID NO: 16337 - protein, 20 aa, Bos taurus
VIGFGSIKIAAFIAMVGILS

SEQ ID NO: 16338 - protein, 20 aa, Bos taurus
LSGLGLNVYLTQLVFGAVEL

SEQ ID NO: 16339 - protein, 20 aa, Bos taurus
LIFGLITCLTGVLGVGLGVE

SEQ ID NO: 16340 - protein, 20 aa, Bos taurus
GAPLGIIFSSFMAASLLGSS

SEQ ID NO: 16341 - protein, 20 aa, Bos taurus
IWYDVGGIIGGTLQGFISDM

SEQ ID NO: 16342 - protein, 20 aa, Bos taurus
VAICVIFAMSFVPASFVLYL

SEQ ID NO: 16343 - protein, 20 aa, Bos taurus
FMAYPFIMLSLWGMIMTSSI

SEQ ID NO: 16344 - protein, 19 aa, Bos taurus
MAAFGVFGLCQIHAFVDYL

SEQ ID NO: 16345 - protein, 20 aa, Bos taurus
LALYFNLLGLWIILLCAVFS

SEQ ID NO: 16346 - protein, 19 aa, Bos taurus
LLAQMSGAMALGGTIGLTI

SEQ ID NO: 16347 - protein, 20 aa, Bos taurus
SLMAAYLKVLPLFIMVFPGM

SEQ ID NO: 16348 - protein, 20 aa, Bos taurus
SILASYLKMLPMGLMVMPGM

SEQ ID NO: 16349 - protein, 20 aa, Bos taurus
TPVSALLHSSTMVVAGIFLL

SEQ ID NO: 16350 - protein, 20 aa, Bos taurus
FVVAIGSVAGLTVSLLGSLF

SEQ ID NO: 16351 - protein, 20 aa, Bos taurus
SSIFFHLMTCVLGLGVVLPW

SEQ ID NO: 16352 - protein, 20 aa, Bos taurus
VYFVSLLWAIVGVQIWSNLW

SEQ ID NO: 16353 - protein, 20 aa, Bos taurus
INMIWSAPLQVILALYLLWL

SEQ ID NO: 16354 - protein, 7 aa, Bos taurus
INLGCDV

SEQ ID NO: 16355 - protein, 7 aa, Bos taurus
INLGCDV

SEQ ID NO: 16356 - protein, 7 aa, Bos taurus
FSLGSNV

SEQ ID NO: 16357 - protein, 18 aa, Bos taurus
KILIFGLLEETALAAFLS

SEQ ID NO: 16358 - protein, 20 aa, Bos taurus
LAVWGSMLIWLVFFGIYSTI

SEQ ID NO: 16359 - protein, 20 aa, Bos taurus
LIFCSVVLGTFISQIIIVEF

SEQ ID NO: 16360 - protein, 20 aa, Bos taurus
LAFSVTLFTIFAFINVGVLL

SEQ ID NO: 16361 - protein, 18 aa, Bos taurus
KMFCYAVLGSIMGQLLVI

SEQ ID NO: 16362 - protein, 18 aa, Bos taurus
KILIFGLFEETALAAFLS

SEQ ID NO: 16363 - protein, 18 aa, Bos taurus
IWLVGSIGLSMSLHFLIL

SEQ ID NO: 16364 - protein, 20 aa, Bos taurus
FSHIAIWGSIALWVVFFGIY

SEQ ID NO: 16365 - protein, 20 aa, Bos taurus
LAQQTIHWLFMGYSMTAFCL

SEQ ID NO: 16366 - protein, 20 aa, Bos taurus
WLMVVAQLLSLGCYVASLAF

SEQ ID NO: 16367 - protein, 20 aa, Bos taurus
LLFFGKLLVVGGVGVLSFFF

SEQ ID NO: 16368 - protein, 11 aa, Bos taurus
ALDGQWILNSF

SEQ ID NO: 16369 - protein, 23 aa, Bos taurus
GVFIPSLLIGAAWGRLFGISLSY

SEQ ID NO: 16370 - protein, 21 aa, Bos taurus
SKTMLLFFMPQVFNFLYSLPQ

SEQ ID NO: 16371 - protein, 20 aa, Bos taurus
FLFLLGKLLIVGSVGILAFF

SEQ ID NO: 16372 - protein, 20 aa, Bos taurus
FHVLMAQVTTVVITTVSVLV

SEQ ID NO: 16373 - protein, 22 aa, Bos taurus
CPTLNWLLLPLFVIVMVVNVGV

SEQ ID NO: 16374 - protein, 20 aa, Bos taurus
AAFGGLCIGALSVLADFLGA

SEQ ID NO: 16375 - protein, 20 aa, Bos taurus
ISRGFGLIAGIISSTATGFL

SEQ ID NO: 16376 - protein, 20 aa, Bos taurus
FFHFMLFLASLYIMMTLTNW

SEQ ID NO: 16377 - protein, 20 aa, Bos taurus
AAFGGLCIGALSVLADFLGA

SEQ ID NO: 16378 - protein, 20 aa, Bos taurus
TYNMFGHFKFCITLFGGYVL

SEQ ID NO: 16379 - protein, 20 aa, Bos taurus
FLTSSLIGTLALSLTIPLSI

SEQ ID NO: 16380 - protein, 20 aa, Bos taurus
VVSFPIITAGPGFIATMWGV

SEQ ID NO: 16381 - protein, 20 aa, Bos taurus
PAVWGVVLNQAFGGLLVAVV

SEQ ID NO: 16382 - protein, 20 aa, Bos taurus
IMTVLILATLLSMGGLPPLS

SEQ ID NO: 16383 - protein, 20 aa, Bos taurus
IFDITVGLPLPWMLFSLING

SEQ ID NO: 16384 - protein, 20 aa, Bos taurus
SVITVSILVFTNLLVIFVPN

SEQ ID NO: 16385 - protein, 20 aa, Bos taurus
FASLVGAGIMLLLMMKMARF

SEQ ID NO: 16386 - protein, 20 aa, Bos taurus
VAIALILLVLVNVLVICVPT

SEQ ID NO: 16387 - protein, 20 aa, Bos taurus
ALPGLALLRTCFVPLFVFCN

SEQ ID NO: 16388 - protein, 20 aa, Bos taurus
VTLPTMWLGAASLAWELLTA

SEQ ID NO: 16389 - protein, 20 aa, Bos taurus
VLQTLVWFLLTLLLALFIPD

SEQ ID NO: 16390 - protein, 22 aa, Bos taurus
LPIKIILMLLFTIYSISSLKTL

SEQ ID NO: 16391 - protein, 20 aa, Bos taurus
SFLYGCNAAFLTLAFPSEHF

SEQ ID NO: 16392 - protein, 20 aa, Bos taurus
FSVLGLFSSQAAGILSTLLA

SEQ ID NO: 16393 - protein, 20 aa, Bos taurus
VCTPAGGLMTGALVLLSLDY

SEQ ID NO: 16394 - protein, 20 aa, Bos taurus
FLGVLAVLGTSFGAYNMAMA

SEQ ID NO: 16395 - protein, 20 aa, Bos taurus
TVLFALGAVTQLACIIALLL

SEQ ID NO: 16396 - protein, 20 aa, Bos taurus
TLMMFLVRLPFLFTVMPLSV

SEQ ID NO: 16397 - protein, 20 aa, Bos taurus
AILLLIPASLFVGWGHTLPI

SEQ ID NO: 16398 - protein, 22 aa, Bos taurus
YAVVRGLFLLKLGLSLLMLLAG

SEQ ID NO: 16399 - protein, 20 aa, Bos taurus
WDAPSIVGLVVFILCTVFIS

SEQ ID NO: 16400 - protein, 20 aa, Bos taurus
VCHIIVTVVIITVATLVSLL

SEQ ID NO: 16401 - protein, 20 aa, Bos taurus
LMNCGGFGMEATLLLVVGYS

SEQ ID NO: 16402 - protein, 20 aa, Bos taurus
IMNCGGFGMEATLLLVVGYS

SEQ ID NO: 16403 - protein, 20 aa, Bos taurus
IAVGMFFVMCSAFAAGILES

SEQ ID NO: 16404 - protein, 21 aa, Bos taurus
PAMMWALGFIFLFTVGGLTGI

SEQ ID NO: 16405 - protein, 20 aa, Bos taurus
VLCIFIVVLIYSVAQGCVVG

SEQ ID NO: 16406 - protein, 20 aa, Bos taurus
TLHLIGLAGMAGCAVLMTIA

SEQ ID NO: 16407 - protein, 18 aa, Bos taurus
LFTLLVVLATFLLSLFCV

SEQ ID NO: 16408 - protein, 20 aa, Bos taurus
IFDFVQLLLIVIGAVVVVSV

SEQ ID NO: 16409 - protein, 20 aa, Bos taurus
LFLIGMSGMFVCAIFMSVGL

SEQ ID NO: 16410 - protein, 20 aa, Bos taurus
FLLLLGFSVCFTACCVLTGA

SEQ ID NO: 16411 - protein, 20 aa, Bos taurus
LLLTLSGVVMVFSTSAFGTY

SEQ ID NO: 16412 - protein, 19 aa, Bos taurus
TWVAEIGLVFNILGMMVFA

SEQ ID NO: 16413 - protein, 20 aa, Bos taurus
LLGLAGMCGCAILMTVALLL

SEQ ID NO: 16414 - protein, 19 aa, Bos taurus
YMAYLSAELFHLSGIMALI

SEQ ID NO: 16415 - protein, 19 aa, Bos taurus
VSLAILTIGSLLVIAVVNL

SEQ ID NO: 16416 - protein, 20 aa, Bos taurus
LLMVAVMLGVCSIMGLPWFV

SEQ ID NO: 16417 - protein, 16 aa, Bos taurus
HLDLFWVAILMVVCSF

SEQ ID NO: 16418 - protein, 18 aa, Bos taurus
IFIASICCVTYLLGLTMV

SEQ ID NO: 16419 - protein, 19 aa, Bos taurus
WFVLGVVITCFFGSLVTLT

SEQ ID NO: 16420 - protein, 20 aa, Bos taurus
VLILGVSVTSFLVGLVMLTE

SEQ ID NO: 16421 - protein, 19 aa, Bos taurus
YPLATSNLAAGLACFLMIF

SEQ ID NO: 16422 - protein, 20 aa, Bos taurus
LFTFAVSFGTFLLALFCITK

SEQ ID NO: 16423 - protein, 20 aa, Bos taurus
RTLHLIGLGGMAFCSILMTI

SEQ ID NO: 16424 - protein, 20 aa, Bos taurus
WLCALLGMIIVGMSILCIPL

SEQ ID NO: 16425 - protein, 18 aa, Bos taurus
YVTLGVAVAGFLLGIPLT

SEQ ID NO: 16426 - protein, 20 aa, Bos taurus
MLAGSSVMSCVSCFFLSFGN

SEQ ID NO: 16427 - protein, 20 aa, Bos taurus
FLCIGSSVMAASLVTMGIVN

SEQ ID NO: 16428 - protein, 20 aa, Bos taurus
PAQMASLLLAGICILINGVV

SEQ ID NO: 16429 - protein, 23 aa, Bos taurus
LSALGAIRMAMLVNLVSTACYVS

SEQ ID NO: 16430 - protein, 20 aa, Bos taurus
LDMVHVQNAALAGGVVVGTS

SEQ ID NO: 16431 - protein, 18 aa, Bos taurus
ILTVICCLLAFCIGLIFV

SEQ ID NO: 16432 - protein, 20 aa, Bos taurus
ATPVWLLFYGGVGICTGLWV

SEQ ID NO: 16433 - protein, 20 aa, Bos taurus
ISVALCCTICFVIDLSMVTD

SEQ ID NO: 16434 - protein, 23 aa, Bos taurus
LMIVGRIFVAFMVVISIAWVPII

SEQ ID NO: 16435 - protein, 20 aa, Bos taurus
LVGFGVTCLIPNLPLQILSF

SEQ ID NO: 16436 - protein, 20 aa, Bos taurus
NILIFSLLSSAVTSGVIMVI

SEQ ID NO: 16437 - protein, 20 aa, Bos taurus
LLMLWTTLTGVILALYPVAE

SEQ ID NO: 16438 - protein, 20 aa, Bos taurus
TMALCFVVFSFCSLLLFICV

SEQ ID NO: 16439 - protein, 20 aa, Bos taurus
IIWVLCAVVTTLASHIMLAF

SEQ ID NO: 16440 - protein, 20 aa, Bos taurus
VACCILLTAIGLFISLYIVQ

SEQ ID NO: 16441 - protein, 17 aa, Bos taurus
VLLTRSCAILPTVLLAV

SEQ ID NO: 16442 - protein, 20 aa, Bos taurus
VSQTLFLFLLGISILAITFV

SEQ ID NO: 16443 - protein, 17 aa, Bos taurus
ATLAGGVGLGTVAELMV

SEQ ID NO: 16444 - protein, 21 aa, Bos taurus
QPMGLLNTLSLAFVGGLPLAY

SEQ ID NO: 16445 - protein, 20 aa, Bos taurus
VQYFFAASIIANGLCHLAAP

SEQ ID NO: 16446 - protein, 20 aa, Bos taurus
ATTCCVMLILAAPMMFLYNH

SEQ ID NO: 16447 - protein, 17 aa, Bos taurus
MVHIQNATLAGGVAVGT

SEQ ID NO: 16448 - protein, 20 aa, Bos taurus
FVIPGFSIFGIFWMICHIIF

SEQ ID NO: 16449 - protein, 20 aa, Bos taurus
NTVLLGLGFQMFQLAWYGFG

SEQ ID NO: 16450 - protein, 20 aa, Bos taurus
LTMAGTLLGAALAVGLRILV

SEQ ID NO: 16451 - protein, 20 aa, Bos taurus
LVCAAGLLGSAPFLFLALAC

SEQ ID NO: 16452 - protein, 20 aa, Bos taurus
PMHLLSLAVLIVVFSLFMLT

SEQ ID NO: 16453 - protein, 20 aa, Bos taurus
APVLALSLLLAIGSLVGYSR

SEQ ID NO: 16454 - protein, 20 aa, Bos taurus
FLWDIMNYTVSAALVVGIFI

SEQ ID NO: 16455 - protein, 19 aa, Bos taurus
SLIAYSSVSHMALVIVAIL

SEQ ID NO: 16456 - protein, 20 aa, Bos taurus
SVISLVGFVLLTIGALLMLT

SEQ ID NO: 16457 - protein, 22 aa, Bos taurus
GLFVACAFSGTLSTVAASINAL

SEQ ID NO: 16458 - protein, 20 aa, Bos taurus
LVAAFHSLVGLAAVLTCIAE

SEQ ID NO: 16459 - protein, 22 aa, Bos taurus
GLMMAVMVAALTSSLTSIFNSA

SEQ ID NO: 16460 - protein, 20 aa, Bos taurus
GLMVAVMMAALMSSLTSIFN

SEQ ID NO: 16461 - protein, 20 aa, Bos taurus
IQSITLCLGAITTLFTAMCA

SEQ ID NO: 16462 - protein, 20 aa, Bos taurus
VIYAMAGDGLLFRFLAHVSS

SEQ ID NO: 16463 - protein, 20 aa, Bos taurus
VYLLAYWCLLATVACLVVLY

SEQ ID NO: 16464 - protein, 20 aa, Bos taurus
LLPVPIAVWVLKKLVIHFGV

SEQ ID NO: 16465 - protein, 20 aa, Bos taurus
SVLAGVAVMVLMVPLNAVMA

SEQ ID NO: 16466 - protein, 8 aa, Bos taurus
SIRGALVL

SEQ ID NO: 16467 - protein, 8 aa, Bos taurus
AIHGSAVF

SEQ ID NO: 16468 - protein, 8 aa, Bos taurus
TIYGWAVL

SEQ ID NO: 16469 - protein, 20 aa, Bos taurus
NSIILPTFMAITALLNLYFY

SEQ ID NO: 16470 - protein, 20 aa, Bos taurus
LFCAIVLLFLMLLFVISSIA

SEQ ID NO: 16471 - protein, 20 aa, Bos taurus
IFGFIGASAAAMLIFILPSA

SEQ ID NO: 16472 - protein, 20 aa, Bos taurus
AIVAGIILSNVLPYLEAVYT

SEQ ID NO: 16473 - protein, 20 aa, Bos taurus
IFGVIGSTSAPSLIFILPSI

SEQ ID NO: 16474 - protein, 20 aa, Bos taurus
VLFTSLLGLSNGYLSTLALI

SEQ ID NO: 16475 - protein, 20 aa, Bos taurus
AAVQLSVFGTATVALFLISL

SEQ ID NO: 16476 - protein, 20 aa, Bos taurus
ISVIGGLAACFIFVFPGLCL

SEQ ID NO: 16477 - protein, 20 aa, Bos taurus
TFYLLGLGPLEVFCEFVFPF

SEQ ID NO: 16478 - protein, 20 aa, Bos taurus
GLVMALSAVVSLLQFPLFTL

SEQ ID NO: 16479 - protein, 20 aa, Bos taurus
GLGLIMALGALGGLSGPAQR

SEQ ID NO: 16480 - protein, 20 aa, Bos taurus
FYYIPKSALAAVIIMAVVPL

SEQ ID NO: 16481 - protein, 20 aa, Bos taurus
VLIVVSWVLFTGCLSYVKVM

SEQ ID NO: 16482 - protein, 20 aa, Bos taurus
PSQLPVFFVFPSLWGMADAV

SEQ ID NO: 16483 - protein, 20 aa, Bos taurus
TMFACLAFLETLGGITAVST

SEQ ID NO: 16484 - protein, 20 aa, Bos taurus
LGLLLYSWAAAVVVPCLSSV

SEQ ID NO: 16485 - protein, 20 aa, Bos taurus
ALLFGMVALVTKPGQTFAPL

SEQ ID NO: 16486 - protein, 20 aa, Bos taurus
FFHLCLVLASVHIMMTLTNW

SEQ ID NO: 16487 - protein, 20 aa, Bos taurus
CLGIVLELNGVLCAAPLIFI

SEQ ID NO: 16488 - protein, 20 aa, Bos taurus
GVAISFLVLAVGFSGFAISG

SEQ ID NO: 16489 - protein, 20 aa, Bos taurus
GVAISFLVLAVGFSGFAISG

SEQ ID NO: 16490 - protein, 20 aa, Bos taurus
VLIGVSEIFASIAGLEFAYS

SEQ ID NO: 16491 - protein, 29 aa, Bos taurus
YYVVAHFHYVLSMGAVFAIMGGFVHWFPL

SEQ ID NO: 16492 - protein, 20 aa, Bos taurus
ESAPHALLCGLVGTLPLAIF

SEQ ID NO: 16493 - protein, 22 aa, Bos taurus
YLSIVAIFGFVAFFEVGPGPIP

SEQ ID NO: 16494 - protein, 20 aa, Bos taurus
GTSILFGVLMEVIGVAWFYG

SEQ ID NO: 16495 - protein, 20 aa, Bos taurus
YIFLATVPVIAAFILLRAYF

SEQ ID NO: 16496 - protein, 20 aa, Bos taurus
AIFLFVSFFEIGPGPIPWFM

SEQ ID NO: 16497 - protein, 22 aa, Bos taurus
MPYVSIACVISYVIGHALGPSP

SEQ ID NO: 16498 - protein, 20 aa, Bos taurus
VGLAWLAVGSMCLFIAGFAV

SEQ ID NO: 16499 - protein, 20 aa, Bos taurus
PLMFTGYGLLFLSLVVTPII

SEQ ID NO: 16500 - protein, 20 aa, Bos taurus
IVAIFGFVAFFEIGPGPIPW

SEQ ID NO: 16501 - protein, 19 aa, Bos taurus
WTFVISTLLFCLIARVLGV

SEQ ID NO: 16502 - protein, 19 aa, Bos taurus
LLPYYTCSCILAFIACSVF

SEQ ID NO: 16503 - protein, 20 aa, Bos taurus
GLMIFILMGSSVFMTSILKF

SEQ ID NO: 16504 - protein, 17 aa, Bos taurus
LPWYVAATVISIAHIDS

SEQ ID NO: 16505 - protein, 20 aa, Bos taurus
GVCLLWVAFFECFAIAWIYG

SEQ ID NO: 16506 - protein, 21 aa, Bos taurus
FATGPAVLTVALIEAVAVFWF

SEQ ID NO: 16507 - protein, 20 aa, Bos taurus
GMCLLFVAIFESFCVAWAYG

SEQ ID NO: 16508 - protein, 22 aa, Bos taurus
WLNIMVACVGRMGITIVFQMVC

SEQ ID NO: 16509 - protein, 26 aa, Bos taurus
IYVLTLLDTFAAGTSILFAVLMEAIG

SEQ ID NO: 16510 - protein, 25 aa, Bos taurus
FICIGAILVFVAFFEIGPGPIPWFI

SEQ ID NO: 16511 - protein, 20 aa, Bos taurus
GVGFAIGMVDSSMMPIMGYL

SEQ ID NO: 16512 - protein, 20 aa, Bos taurus
SFSLVIISCIMCVSIMYIYG

SEQ ID NO: 16513 - protein, 20 aa, Bos taurus
IALLCLFGGVSIASWNALDV

SEQ ID NO: 16514 - protein, 20 aa, Bos taurus
SLLVYVAAFSIGLGPMPWLV

SEQ ID NO: 16515 - protein, 20 aa, Bos taurus
LAVLGKGCLASSFNCIFLYT

SEQ ID NO: 16516 - protein, 22 aa, Bos taurus
LCVMCVCSMIGAMAQTPSVIIL

SEQ ID NO: 16517 - protein, 20 aa, Bos taurus
MMLTPFGALAAGFLAGAIST

SEQ ID NO: 16518 - protein, 20 aa, Bos taurus
TLPLLIVVILENIAVSFVYG

SEQ ID NO: 16519 - protein, 14 aa, Bos taurus
FTIELASAFTVVIA

SEQ ID NO: 16520 - protein, 20 aa, Bos taurus
GTTLLWQAFWECVVVAWVYG

SEQ ID NO: 16521 - protein, 18 aa, Bos taurus
VADYLTPPVAALFLLAIF

SEQ ID NO: 16522 - protein, 20 aa, Bos taurus
GFIHSAVGGLYAAVYPSTQF

SEQ ID NO: 16523 - protein, 20 aa, Bos taurus
VWLVVASMAGKFFIGAAFGL

SEQ ID NO: 16524 - protein, 20 aa, Bos taurus
GLVALTMAYGFTSGALTPVA

SEQ ID NO: 16525 - protein, 20 aa, Bos taurus
LTLLLFIARAFISGGFQAAY

SEQ ID NO: 16526 - protein, 20 aa, Bos taurus
LLGLSYSLLACALWPMVAFV

SEQ ID NO: 16527 - protein, 20 aa, Bos taurus
LAFCIWIVASCLILLSSLLL

SEQ ID NO: 16528 - protein, 20 aa, Bos taurus
LLNVLQSLLLPFAVLPILTF

SEQ ID NO: 16529 - protein, 20 aa, Bos taurus
AVSALGIAVSSVTLMCSFAH

SEQ ID NO: 16530 - protein, 22 aa, Bos taurus
SLIIGFVCGIVSTLGFVYLTPF

SEQ ID NO: 16531 - protein, 20 aa, Bos taurus
VRISCAIIFLASIFQFAIWT

SEQ ID NO: 16532 - protein, 20 aa, Bos taurus
IELCIYAGFFGFAFGWLSSV

SEQ ID NO: 16533 - protein, 20 aa, Bos taurus
IGISIVMLLICGALVNGPYA

SEQ ID NO: 16534 - protein, 20 aa, Bos taurus
IPPYYAMIIGSIAGAVSVFG

SEQ ID NO: 16535 - protein, 20 aa, Bos taurus
FCLISEQLVFFSLLATAILG

SEQ ID NO: 16536 - protein, 20 aa, Bos taurus
AWMMWAAGIVAAVSSITFPA

SEQ ID NO: 16537 - protein, 20 aa, Bos taurus
TALAVMGKAFSEAAFTTAYL

SEQ ID NO: 16538 - protein, 20 aa, Bos taurus
IVATYIFIFIGETLLSMNWA

SEQ ID NO: 16539 - protein, 20 aa, Bos taurus
FIAFLLIELACGLYFPSMSF

SEQ ID NO: 16540 - protein, 20 aa, Bos taurus
LLMAVTGFFIGGPSNMISSA

SEQ ID NO: 16541 - protein, 20 aa, Bos taurus
LPALVALLMLYGWAVIPMMY

SEQ ID NO: 16542 - protein, 22 aa, Bos taurus
SYMGATALMIAHGLTSSMLFCL

SEQ ID NO: 16543 - protein, 22 aa, Bos taurus
WSSYYFDLQLLVFMFPVGLYYC

SEQ ID NO: 16544 - protein, 20 aa, Bos taurus
LLFGVICTSTAVAASLMGGV

SEQ ID NO: 16545 - protein, 20 aa, Bos taurus
IVAYLGTYIGGVTFSGSLVA

SEQ ID NO: 16546 - protein, 20 aa, Bos taurus
IVGRVFVLLLVLVSILWIPV

SEQ ID NO: 16547 - protein, 20 aa, Bos taurus
LLVGRLVIVVLVGVSVAWIP

SEQ ID NO: 16548 - protein, 20 aa, Bos taurus
LGLMMVTIGINQPYLAFLHI

SEQ ID NO: 16549 - protein, 20 aa, Bos taurus
PVVACIVSGFLAALLSLLVS

SEQ ID NO: 16550 - protein, 16 aa, Bos taurus
KYFHFIVVATYIPGII

SEQ ID NO: 16551 - protein, 20 aa, Bos taurus
IISIFIIFLLVIGTLLLALL

SEQ ID NO: 16552 - protein, 20 aa, Bos taurus
VGTFTWVCTPFLVALSTFAV

SEQ ID NO: 16553 - protein, 8 aa, Bos taurus
LAGYQMNF

SEQ ID NO: 16554 - protein, 8 aa, Bos taurus
LAGYQMTF

SEQ ID NO: 16555 - protein, 8 aa, Bos taurus
LAGYQMSF

SEQ ID NO: 16556 - protein, 20 aa, Bos taurus
ILMGISNGVGTLSGMVCPII

SEQ ID NO: 16557 - protein, 20 aa, Bos taurus
ILMGISNGVGTLSGMVCPII

SEQ ID NO: 16558 - protein, 20 aa, Bos taurus
GLFFFFSGVGSFVGSGLLAL

SEQ ID NO: 16559 - protein, 26 aa, Bos taurus
DTWAKIHFAIMFVGVNMTFFPQHFLG

SEQ ID NO: 16560 - protein, 20 aa, Bos taurus
MILLAVLTTSYILVLELSGY

SEQ ID NO: 16561 - protein, 20 aa, Bos taurus
AAIAVAGFSNWTSNFIVGMC

SEQ ID NO: 16562 - protein, 19 aa, Bos taurus
LCWKFVSPCFLLFVVVVSI

SEQ ID NO: 16563 - protein, 20 aa, Bos taurus
LRWFQMRIEMIFVIFFIAVT

SEQ ID NO: 16564 - protein, 20 aa, Bos taurus
AALAIAAFSNWTGNFIIALC

SEQ ID NO: 16565 - protein, 20 aa, Bos taurus
MVAGTVHWLSNFTVGLVFPF

SEQ ID NO: 16566 - protein, 20 aa, Bos taurus
VKGVATGVCVLTNWFMAFLV

SEQ ID NO: 16567 - protein, 25 aa, Bos taurus
GALFSALACVNGLAMLMASGIFNSL

SEQ ID NO: 16568 - protein, 20 aa, Bos taurus
AAMAVAGFSNWTCNFIIGMG

SEQ ID NO: 16569 - protein, 21 aa, Bos taurus
QFIIAYGGLRGAIAFSLGYLL

SEQ ID NO: 16570 - protein, 27 aa, Bos taurus
VLLTVALVAYLVLFNVYPSWQWDCCGH

SEQ ID NO: 16571 - protein, 20 aa, Bos taurus
PVLYGVFLYMGASSLKGIQF

SEQ ID NO: 16572 - protein, 16 aa, Bos taurus
VTGTLVFILTGLSVFM

SEQ ID NO: 16573 - protein, 19 aa, Bos taurus
YCWAVVTPLLCTGCFIFSL

SEQ ID NO: 16574 - protein, 19 aa, Bos taurus
ICWVAISPLFLLFIICSFL

SEQ ID NO: 16575 - protein, 20 aa, Bos taurus
PLIKYCWLFLTPAVCTATFL

SEQ ID NO: 16576 - protein, 20 aa, Bos taurus
GMMVCSSLCDLGGVLTPFLV

SEQ ID NO: 16577 - protein, 22 aa, Bos taurus
FVSPAFLLFVVIVSIINFKPLT

SEQ ID NO: 16578 - protein, 20 aa, Bos taurus
AAMAVAGCSNWTSNFLVGLL

SEQ ID NO: 16579 - protein, 20 aa, Bos taurus
VSVYGSVYAIADVAFCMGYA

SEQ ID NO: 16580 - protein, 19 aa, Bos taurus
ICWRFVSPAIIFFILIFSV

SEQ ID NO: 16581 - protein, 22 aa, Bos taurus
FGFLNALCKLAAVLGISIFTSF

SEQ ID NO: 16582 - protein, 20 aa, Bos taurus
AMALTSSMNWGINLLISLTF

SEQ ID NO: 16583 - protein, 20 aa, Bos taurus
GLGMGSTLARVGSIVSPLVS

SEQ ID NO: 16584 - protein, 25 aa, Bos taurus
YALGVLFLLLRLLGFIPPPLIFGAG

SEQ ID NO: 16585 - protein, 20 aa, Bos taurus
LHGMPGVLGALLGGLVAGLA

SEQ ID NO: 16586 - protein, 21 aa, Bos taurus
YMWKYISPLMLLSLLIASIVN

SEQ ID NO: 16587 - protein, 15 aa, Bos taurus
TTHCKVGSVVAVGWI

SEQ ID NO: 16588 - protein, 20 aa, Bos taurus
WCWSFFTPLVCMGIFIFNVV

SEQ ID NO: 16589 - protein, 21 aa, Bos taurus
YMYVATALFWITGLITVIVSL

SEQ ID NO: 16590 - protein, 20 aa, Bos taurus
LISALFALLQQPLFLAMMGP

SEQ ID NO: 16591 - protein, 20 aa, Bos taurus
LAVGSGSTVGRVGSIVAPLC

SEQ ID NO: 16592 - protein, 20 aa, Bos taurus
IYCGLGLVQMVESIGGLLGA

SEQ ID NO: 16593 - protein, 20 aa, Bos taurus
ALGLGTCSGMARVGALITPF

SEQ ID NO: 16594 - protein, 20 aa, Bos taurus
FMQSIQNLGLAVISIIAGMI

SEQ ID NO: 16595 - protein, 20 aa, Bos taurus
LLFFLLSNVTTGLVNLSIDT

SEQ ID NO: 16596 - protein, 21 aa, Bos taurus
VITSSIMVLVCAVNLYFVISY

SEQ ID NO: 16597 - protein, 20 aa, Bos taurus
SGFLGIASNIGAALAPLLMI

SEQ ID NO: 16598 - protein, 20 aa, Bos taurus
IPGIIGGIAGAVTASIANID

SEQ ID NO: 16599 - protein, 23 aa, Bos taurus
AFMFAKLALYPCASLLAFACTCV

SEQ ID NO: 16600 - protein, 20 aa, Bos taurus
AVGLVTIVECCPVLLGPPVL

SEQ ID NO: 16601 - protein, 20 aa, Bos taurus
AIIDGTGSIGAALGPLLAGL

SEQ ID NO: 16602 - protein, 20 aa, Bos taurus
VHNLHGLPGVIGGLAGIITV

SEQ ID NO: 16603 - protein, 20 aa, Bos taurus
GIFLSMFLIVLPLESMAHGL

SEQ ID NO: 16604 - protein, 20 aa, Bos taurus
LCNGLGPALYGFIFYMFHVE

SEQ ID NO: 16605 - protein, 20 aa, Bos taurus
MGLTALVGRLGGSLAPLAAL

SEQ ID NO: 16606 - protein, 20 aa, Bos taurus
FQIVLSHLLGDAGSPYLIGS

SEQ ID NO: 16607 - protein, 20 aa, Bos taurus
GVLNWFRVPLHLLACLGLLV

SEQ ID NO: 16608 - protein, 20 aa, Bos taurus
GIVDGTGSIGAAVGQYLVSL

SEQ ID NO: 16609 - protein, 20 aa, Bos taurus
VALSCANLFIGINSSAITFV

SEQ ID NO: 16610 - protein, 20 aa, Bos taurus
LLPLMATWWLLASLTNLALP

SEQ ID NO: 16611 - protein, 16 aa, Bos taurus
RIFIIMYGVTSMYFSA

SEQ ID NO: 16612 - protein, 20 aa, Bos taurus
IHGMCGGPMLGLFSLGILFP

SEQ ID NO: 16613 - protein, 19 aa, Bos taurus
HLLNAGLLAGSVGGIIPFM

SEQ ID NO: 16614 - protein, 20 aa, Bos taurus
LFIYIQSISSYLQPPVAVVF

SEQ ID NO: 16615 - protein, 20 aa, Bos taurus
QSVTSSLAPPVTAVFVLGIF

SEQ ID NO: 16616 - protein, 20 aa, Bos taurus
MPFTTTALIVGSLALTGMPF

SEQ ID NO: 16617 - protein, 20 aa, Bos taurus
LIEMMSIGTLLAYTLVSVCV

SEQ ID NO: 16618 - protein, 20 aa, Bos taurus
YVAATVCLAVFIFLEYVRYF

SEQ ID NO: 16619 - protein, 20 aa, Bos taurus
VMSRNVSLLFSTITTLLTIL

SEQ ID NO: 16620 - protein, 20 aa, Bos taurus
ILRFPLNILPMVISSIVQAS

SEQ ID NO: 16621 - protein, 12 aa, Bos taurus
RVTQSNFAVGYK

SEQ ID NO: 16622 - protein, 12 aa, Bos taurus
KLTRNNFAVGYR

SEQ ID NO: 16623 - protein, 12 aa, Bos taurus
KLSQNNFALGYK

SEQ ID NO: 16624 - protein, 20 aa, Bos taurus
LLIIFPHFCLGRGLIDLALS

SEQ ID NO: 16625 - protein, 20 aa, Bos taurus
IILMGVNMVITALYSLYMLI

SEQ ID NO: 16626 - protein, 21 aa, Bos taurus
MLVLAPVMCILSGIGVSQVLS

SEQ ID NO: 16627 - protein, 20 aa, Bos taurus
ALAGLLTGILLSFWVAIGAF

SEQ ID NO: 16628 - protein, 18 aa, Bos taurus
FTTGITCLGSVSALSAVM

SEQ ID NO: 16629 - protein, 20 aa, Bos taurus
AFFGLVLGLLLGLVRLILDF

SEQ ID NO: 16630 - protein, 20 aa, Bos taurus
AFWGLMAGLAVGATRLVLEF

SEQ ID NO: 16631 - protein, 20 aa, Bos taurus
LIATSFTAIYSTRIIFFALL

SEQ ID NO: 16632 - protein, 20 aa, Bos taurus
VTICVLLLFILMFVFCSFII

SEQ ID NO: 16633 - protein, 20 aa, Bos taurus
GPLILTHIYLLLGMSLPIWL

SEQ ID NO: 16634 - protein, 20 aa, Bos taurus
TALLNFVLSLIIFLTTLFYL

SEQ ID NO: 16635 - protein, 20 aa, Bos taurus
KAIGLFISFLSIFLFLCNHV

SEQ ID NO: 16636 - protein, 7 aa, Bos taurus
FQLHTNV

SEQ ID NO: 16637 - protein, 7 aa, Bos taurus
FQLHTNV

SEQ ID NO: 16638 - protein, 7 aa, Bos taurus
FQLHTHV

SEQ ID NO: 16639 - protein, 20 aa, Bos taurus
VVITVLNSYSGWALCAEGFL

SEQ ID NO: 16640 - protein, 20 aa, Bos taurus
LYFSMILSSVTLITVCAVSW

SEQ ID NO: 16641 - protein, 20 aa, Bos taurus
LHFAVALFLLSGAVVVAGSL

SEQ ID NO: 16642 - protein, 20 aa, Bos taurus
LLIGSLFAGYIISNNIPPTT

SEQ ID NO: 16643 - protein, 20 aa, Bos taurus
WAILLVVLMVLLISALVFVI

SEQ ID NO: 16644 - protein, 20 aa, Bos taurus
ALVPYAGVLAVGVGDTVASI

SEQ ID NO: 16645 - protein, 20 aa, Bos taurus
IFGINIVFIPSALAAILGAV

SEQ ID NO: 16646 - protein, 20 aa, Bos taurus
QGITVFGYSMAVSIGGIFAS

SEQ ID NO: 16647 - protein, 9 aa, Bos taurus
EFGGSIYQK

SEQ ID NO: 16648 - protein, 9 aa, Bos taurus
EFGGSIYQK

SEQ ID NO: 16649 - protein, 9 aa, Bos taurus
EFGGSIYQK

SEQ ID NO: 16650 - protein, 20 aa, Bos taurus
MPYYLKTTALIVTILGFILA

SEQ ID NO: 16651 - protein, 20 aa, Bos taurus
MAPCLPFVPAFAMLVNIYLM

SEQ ID NO: 16652 - protein, 20 aa, Bos taurus
FEGTMTSIFAQIISVALILI

SEQ ID NO: 16653 - protein, 20 aa, Bos taurus
FLGTYWAAVPAVLDLWLTQG

SEQ ID NO: 16654 - protein, 20 aa, Bos taurus
VIKMFMGSLFNVIGACIIIL

SEQ ID NO: 16655 - protein, 9 aa, Bos taurus
LETAVNLAW

SEQ ID NO: 16656 - protein, 9 aa, Bos taurus
LDTSVNLAW

SEQ ID NO: 16657 - protein, 9 aa, Bos taurus
IETSINLAW

SEQ ID NO: 16658 - protein, 20 aa, Bos taurus
ECVGNCIVLFASLFAVISRH

SEQ ID NO: 16659 - protein, 7 aa, Bos taurus
ACFSAKV

SEQ ID NO: 16660 - protein, 7 aa, Bos taurus
ASISAKV

SEQ ID NO: 16661 - protein, 7 aa, Bos taurus
TSLSAKV

SEQ ID NO: 16662 - protein, 9 aa, Bos taurus
RFGIAAKYK

SEQ ID NO: 16663 - protein, 20 aa, Bos taurus
ECVGNCIVLFASLFAVISRH

SEQ ID NO: 16664 - protein, 7 aa, Bos taurus
ACFSAKV

SEQ ID NO: 16665 - protein, 7 aa, Bos taurus
ASISAKV

SEQ ID NO: 16666 - protein, 7 aa, Bos taurus
TSLSAKV

SEQ ID NO: 16667 - protein, 9 aa, Bos taurus
LIGLGYTQT

SEQ ID NO: 16668 - protein, 9 aa, Bos taurus
LIGVGYTQT

SEQ ID NO: 16669 - protein, 9 aa, Bos taurus
LIGLGYTQT

SEQ ID NO: 16670 - protein, 9 aa, Bos taurus
GIKLTLSAL

SEQ ID NO: 16671 - protein, 9 aa, Bos taurus
GVKLTLSAL

SEQ ID NO: 16672 - protein, 9 aa, Bos taurus
GVKLTLSAL

SEQ ID NO: 16673 - DNA, 1392 bp, synthetic construct
  source 1..1392: mol_type = other DNA
atgttcgtgttcctcgtgctcctgcccctcgtctccagccagtgcgtggggtccataggggctgcttctatggagttctgttttgatgttttcaaggaactgaaggttcaccatgctaacgagaacatcttttactgtccaatagccatcatgagtgcgcttgctatggtttatttgggtgcaaaagattctactcgcactcagattaataaggtcgttagattcgacaagcttccagggtttggagacagtattgaggcccaatgtggaacgtcagtcaacgtccattcttctctgcgggacattctcaaccaaataacgaagccaaacgacgtgtattccttctcactcgcgtcacggctgtatgctgaagaaaggtatcctatcttgccagaatatctccagtgcgtcaaggagttgtatcgaggcggactggaaccgatcaactttcagactgcagccgaccaggcccgcgaactgatcaacagctgggtcgagtctcagaccaatgggatcatacgcaatgtgttgcaaccgagtagtgtcgactctcagacggctatggtcttggtgaacgctatagtcttcaaaggtctgtgggagaagaccttcaaggatgaagacacacaagcgatgccattcagagtcaccgaacaagaaagcaaacccgtccaaatgatgtaccaaattgggctttttcgggtggcctctatggcctctgagaaaatgaaaatattggaactgcccttcgccagcggcacaatgagtatgttggtccttcttccagatgaagtctcaggtctcgaacagcttgagtctatcattaactttgagaaactcactgaatggacttcttccaatgtgatggaagaacgaaaaatcaaagtctacctgccccgaatgaagatggaagagaaatataatttgacatcagttctgatggccatgggaatcacagacgtgttttcatcctctgcgaatctgtctggcatatcttccgcagaatctctcaagatcagtcaagccgtccacgcggcccatgctgagataaatgaggcgggcagagaggtggtggggtccgccgaagctggagtcgacgcagcttctgtcagtgaagaatttagggccgatcatcctttcctgttctgcataaagcacatagctacgaacgctgtgcttttctttggcagatgcgtttctccaccctggtacatctggctgggcttcatcgcaggactgatcgccatcgtcatggtcaccataatgctctgttgcatgacctcctgctgtagctgcctgaaaggctgttgcagctgcgggagctgctgcaaattcgacgaagacgatagcgaacctgtgctcaaaggggtgaagttgcattacacatagtga

SEQ ID NO: 16674 - DNA, 3267 bp, synthetic construct
  source 1..3267: mol_type = other DNA
atgttcgtgttcctcgtgctcctgcccctcgtctccagccagtgcgtgaccgaaaactttaataacgatctgagcgataatggcctcaatgacaacacgttgagcgataatagtctcaacgaaaataccttgagtgataatactctctcagataaaagcctctccgagagcaccatcatacaaaatgaccacgataacctgaaggatacaaacaacaacgataataacaaggccctcaaggatccggcgaagacgtttacggacctccaaatggaaataattaatgcctctgatctgctcgaattgacggatgattacaagtacaataacgagacggataatataacgcttactatcagtaagagtaatttcgttattaatggtaacgggcataccatcgatggggacaaccaatgcggaatttttcaaattaacggaacgaatataacgctgaaaaatctcaacatcataaatgcgaacagtacaaaggactccgcccttcttctcaatccaggttccgaactcgaaaccaacaatgtcacttttatcaacgacagttctgataaacgcgtcattttcgccttcggtgctaagtacaccagtaacaacgacaagttcatagactgcacatcactcaatgatggtgttattaattcctatttgggcgaaatcaccatcaataacggatacttcgaatctagtaaacctctcgactgggcgttcgtgaattctctcggcaattctagcatctatgtccttaacactactttcgctaataccacatctaaatatgccaccgcgatcaagggggatcgcgagacagtcattcacgacagtaagttcattaacttgtatgcgaatctgaccgcgggcgcgatcggactcaaacgaatcgaggaggctgaaattgataactgcacatttataaacgtgtcaagtcaaaagaatgggggtgcgatcttcttggatatctacagtgactccgaagatgtccctataatgatttcccggtctagctttgtcaactgctacagtgagttcggaggagcaatccttagcctgggcggaaaaattacacttgaggaggataattttacgaataacggcgcgttttttgatgggggtgcgatttattcctcattctctcaactcacgataagccaaacaatattcgataacaactctgtggaactcgacgacgaccgggggagttttggcggtgcgatcttctccgatatctctgcattgattattcttaattgttcctttagcaacaacaatgcgcaaactggcggtgctctgtacacctacgactctggatattacatcgccaattctacttttaaagataataccaacaaagagagcgagttcgacgatattttcaccgatttcgacggggaaatcgcaacactggaaaacaattcctacagtggggaggattccatctgtcttaataacgaacgatacgaaagtgttatagccgttagcggaatgaactttactttgatcgagaatgagatcaatgtgaccaatcccccccggaagtttgaccttcgggaatggggctgggttacgcctgtgaagaaccaggggtatatgggcagctgttgggctttcggaacagttggagctatcgaaagttcaatccttagatttcttggactggagatggacatatccgagaataatatgcaagatagcctgcttcagtattaccgatatgggacgctcggcgcagaggaaggcggtgagtataatcttgggccgagttatgcgttgtcatggttcggggtttttccctctgaatatgatgtttatgatgagctggggaaaatatctgcaataatcgcgaccgacgattcaatacacctccaggatgctgtgttcgtgcctcctctcatgaattcaacagacaaagataaattgaagcagagtctgctcaagtacggcgcactggcagtttcctattacgcagaaacggacgaaccgggcctgaatgagaacacgagttcacaatattctctgaagaatgattctaaccatcgcgttctcctcgtgggttgggacgatgattattctaaagacaatttttacatgaccccacctggcgacggcgcatggatcattaagaactcttggggggaggagctgggagataaaggatattattacatctcctactacgacgcttctttcgcaacattggtccccagtgtgggttttccaataatgaataccgtcatctacaacaaaaactatcaatatgatatcggcggcacgctggaattcacagatatgggtaatgaatacgtgaacgaatttgaggccctggaagacgactttattgcggcggtcgggacgtactttatcgacgccggagtggattacaatattgagatctacgttaacgacgagctcaagtattcccaggacgggactagtcccttttttgggtttcacactatacaattggattcatatgtccccatcaaagaaggagacgagttcgatgtcaaaatcacgagcgattgcattccaattcttgagagtgggcggcaacactatatcgaaaataagtccgcagccaatctgaatggtgaatgggtcgatcttaccagtgatgggaaagtgtgtgccattaaagtttacacaacggacgaagacaaaaaaaaggagtcttccaggataaatactaggatagattgtaagaacatgaccacaacagcggttgcctccgaagatggaagaataggcgagtatttccaggtgactttgaaagatgagaacgggacggctctggctaataaaccaataaaaataggtttcaatggacgagtgtacgatagaacgacggacgagaatggatctgcaaaactccaaattaatctcgcttataaaggcacatacacgttcgccattgggtttttgggagacgaagaatatctgggtgcttttgaagtggccaaaatcaccgtgaaggttcagacgcccaagttgacagcgccgaacaaaagttataaagtgtccgccaaaaccaaatcactcactgccagctttaagactgcgaatggcaaagcggtcagtgggaaaaagatttcattcactgtcaatggcaagacttatagcgcgaaaacaaactccaaagggactgcgaccgtcaacgttagcctcaacaagaaagggacctattcatttaccgtgaagttcgcgggtgacgatacctttgcaacctcatcagctaaagcgaagcttactctgaagtga

SEQ ID NO: 16675 - DNA, 1206 bp, synthetic construct
  source 1..1206: mol_type = other DNA
atgttcgtgttcctcgtgctcctgcccctcgtctccagccagtgcgtggggtccataggggctgcttctatggagttctgttttgatgttttcaaggaactgaaggttcaccatgctaacgagaacatcttttactgtccaatagccatcatgagtgcgcttgctatggtttatttgggtgcaaaagattctactcgcactcagattaataaggtcgttagattcgacaagcttccagggtttggagacagtattgaggcccaatgtggaacgtcagtcaacgtccattcttctctgcgggacattctcaaccaaataacgaagccaaacgacgtgtattccttctcactcgcgtcacggctgtatgctgaagaaaggtatcctatcttgccagaatatctccagtgcgtcaaggagttgtatcgaggcggactggaaccgatcaactttcagactgcagccgaccaggcccgcgaactgatcaacagctgggtcgagtctcagaccaatgggatcatacgcaatgtgttgcaaccgagtagtgtcgactctcagacggctatggtcttggtgaacgctatagtcttcaaaggtctgtgggagaagaccttcaaggatgaagacacacaagcgatgccattcagagtcaccgaacaagaaagcaaacccgtccaaatgatgtaccaaattgggctttttcgggtggcctctatggcctctgagaaaatgaaaatattggaactgcccttcgccagcggcacaatgagtatgttggtccttcttccagatgaagtctcaggtctcgaacagcttgagtctatcattaactttgagaaactcactgaatggacttcttccaatgtgatggaagaacgaaaaatcaaagtctacctgccccgaatgaagatggaagagaaatataatttgacatcagttctgatggccatgggaatcacagacgtgttttcatcctctgcgaatctgtctggcatatcttccgcagaatctctcaagatcagtcaagccgtccacgcggcccatgctgagataaatgaggcgggcagagaggtggtggggtccgccgaagctggagtcgacgcagcttctgtcagtgaagaatttagggccgatcatcctttcctgttctgcataaagcacatagctacgaacgctgtgcttttctttggcagatgcgtttctccatga

SEQ ID NO: 16676 - DNA, 288 bp, synthetic construct
  source 1..288: mol_type = other DNA
atgttcgtgttcctcgtgctcctgcccctcgtctccagccagtgcgtgtacctcatgacactgagcctgccagggttcgcacatcccttcgcactccccccctggtacatctggctgggcttcatcgcaggactgatcgccatcgtcatggtcaccataatgctctgttgcatgacctcctgctgtagctgcctgaaaggctgttgcagctgcgggagctgctgcaaattcgacgaagacgatagcgaacctgtgctcaaaggggtgaagttgcattacacatagtga

SEQ ID NO: 16677 - DNA, 288 bp, synthetic construct
  source 1..288: mol_type = other DNA
atgttcgtgttcctcgtgctcctgcccctcgtctccagccagtgcgtgtacctcatgacactccccctggacggactcgggcaccccttccccctgccaccctggtacatctggctgggcttcatcgcaggactgatcgccatcgtcatggtcaccataatgctctgttgcatgacctcctgctgtagctgcctgaaaggctgttgcagctgcgggagctgctgcaaattcgacgaagacgatagcgaacctgtgctcaaaggggtgaagttgcattacacatagtga

SEQ ID NO: 16678 - DNA, 291 bp, synthetic construct
  source 1..291: mol_type = other DNA
atgttcgtgttcctcgtgctcctgcccctcgtctccagccagtgcgtgtacctcatgaccataccactgaacggcaccccactccacgccttcccactgccaccctggtacatctggctgggcttcatcgcaggactgatcgccatcgtcatggtcaccataatgctctgttgcatgacctcctgctgtagctgcctgaaaggctgttgcagctgcgggagctgctgcaaattcgacgaagacgatagcgaacctgtgctcaaaggggtgaagttgcattacacatagtga

SEQ ID NO: 16679 - DNA, 291 bp, synthetic construct
  source 1..291: mol_type = other DNA
atgttcgtgttcctcgtgctcctgcccctcgtctccagccagtgcgtgtacctgatgataatcccaatcaacgggagtgcactccacatcttccccctcccgccctggtacatctggctgggcttcatcgcaggactgatcgccatcgtcatggtcaccataatgctctgttgcatgacctcctgctgtagctgcctgaaaggctgttgcagctgcgggagctgctgcaaattcgacgaagacgatagcgaacctgtgctcaaaggggtgaagttgcattacacatagtga

SEQ ID NO: 16680 - DNA, 279 bp, synthetic construct
  source 1..279: mol_type = other DNA
atgttcgtgttcctcgtgctcctgcccctcgtctccagccagtgcgtgtacctcatgacggtggtgctcggacacccattcccgctgacaccctggtacatctggctgggcttcatcgcaggactgatcgccatcgtcatggtcaccataatgctctgttgcatgacctcctgctgtagctgcctgaaaggctgttgcagctgcgggagctgctgcaaattcgacgaagacgatagcgaacctgtgctcaaaggggtgaagttgcattacacatagtga

SEQ ID NO: 16681 - DNA, 3453 bp, synthetic construct
  source 1..3453: mol_type = other DNA
atgttcgtgttcctcgtgctcctgcccctcgtctccagccagtgcgtgaccgaaaactttaataacgatctgagcgataatggcctcaatgacaacacgttgagcgataatagtctcaacgaaaataccttgagtgataatactctctcagataaaagcctctccgagagcaccatcatacaaaatgaccacgataacctgaaggatacaaacaacaacgataataacaaggccctcaaggatccggcgaagacgtttacggacctccaaatggaaataattaatgcctctgatctgctcgaattgacggatgattacaagtacaataacgagacggataatataacgcttactatcagtaagagtaatttcgttattaatggtaacgggcataccatcgatggggacaaccaatgcggaatttttcaaattaacggaacgaatataacgctgaaaaatctcaacatcataaatgcgaacagtacaaaggactccgcccttcttctcaatccaggttccgaactcgaaaccaacaatgtcacttttatcaacgacagttctgataaacgcgtcattttcgccttcggtgctaagtacaccagtaacaacgacaagttcatagactgcacatcactcaatgatggtgttattaattcctatttgggcgaaatcaccatcaataacggatacttcgaatctagtaaacctctcgactgggcgttcgtgaattctctcggcaattctagcatctatgtccttaacactactttcgctaataccacatctaaatatgccaccgcgatcaagggggatcgcgagacagtcattcacgacagtaagttcattaacttgtatgcgaatctgaccgcgggcgcgatcggactcaaacgaatcgaggaggctgaaattgataactgcacatttataaacgtgtcaagtcaaaagaatgggggtgcgatcttcttggatatctacagtgactccgaagatgtccctataatgatttcccggtctagctttgtcaactgctacagtgagttcggaggagcaatccttagcctgggcggaaaaattacacttgaggaggataattttacgaataacggcgcgttttttgatgggggtgcgatttattcctcattctctcaactcacgataagccaaacaatattcgataacaactctgtggaactcgacgacgaccgggggagttttggcggtgcgatcttctccgatatctctgcattgattattcttaattgttcctttagcaacaacaatgcgcaaactggcggtgctctgtacacctacgactctggatattacatcgccaattctacttttaaagataataccaacaaagagagcgagttcgacgatattttcaccgatttcgacggggaaatcgcaacactggaaaacaattcctacagtggggaggattccatctgtcttaataacgaacgatacgaaagtgttatagccgttagcggaatgaactttactttgatcgagaatgagatcaatgtgaccaatcccccccggaagtttgaccttcgggaatggggctgggttacgcctgtgaagaaccaggggtatatgggcagctgttgggctttcggaacagttggagctatcgaaagttcaatccttagatttcttggactggagatggacatatccgagaataatatgcaagatagcctgcttcagtattaccgatatgggacgctcggcgcagaggaaggcggtgagtataatcttgggccgagttatgcgttgtcatggttcggggtttttccctctgaatatgatgtttatgatgagctggggaaaatatctgcaataatcgcgaccgacgattcaatacacctccaggatgctgtgttcgtgcctcctctcatgaattcaacagacaaagataaattgaagcagagtctgctcaagtacggcgcactggcagtttcctattacgcagaaacggacgaaccgggcctgaatgagaacacgagttcacaatattctctgaagaatgattctaaccatcgcgttctcctcgtgggttgggacgatgattattctaaagacaatttttacatgaccccacctggcgacggcgcatggatcattaagaactcttggggggaggagctgggagataaaggatattattacatctcctactacgacgcttctttcgcaacattggtccccagtgtgggttttccaataatgaataccgtcatctacaacaaaaactatcaatatgatatcggcggcacgctggaattcacagatatgggtaatgaatacgtgaacgaatttgaggccctggaagacgactttattgcggcggtcgggacgtactttatcgacgccggagtggattacaatattgagatctacgttaacgacgagctcaagtattcccaggacgggactagtcccttttttgggtttcacactatacaattggattcatatgtccccatcaaagaaggagacgagttcgatgtcaaaatcacgagcgattgcattccaattcttgagagtgggcggcaacactatatcgaaaataagtccgcagccaatctgaatggtgaatgggtcgatcttaccagtgatgggaaagtgtgtgccattaaagtttacacaacggacgaagacaaaaaaaaggagtcttccaggataaatactaggatagattgtaagaacatgaccacaacagcggttgcctccgaagatggaagaataggcgagtatttccaggtgactttgaaagatgagaacgggacggctctggctaataaaccaataaaaataggtttcaatggacgagtgtacgatagaacgacggacgagaatggatctgcaaaactccaaattaatctcgcttataaaggcacatacacgttcgccattgggtttttgggagacgaagaatatctgggtgcttttgaagtggccaaaatcaccgtgaaggttcagacgcccaagttgacagcgccgaacaaaagttataaagtgtccgccaaaaccaaatcactcactgccagctttaagactgcgaatggcaaagcggtcagtgggaaaaagatttcattcactgtcaatggcaagacttatagcgcgaaaacaaactccaaagggactgcgaccgtcaacgttagcctcaacaagaaagggacctattcatttaccgtgaagttcgcgggtgacgatacctttgcaacctcatcagctaaagcgaagcttactctgaagccctggtacatctggctgggcttcatcgcaggactgatcgccatcgtcatggtcaccataatgctctgttgcatgacctcctgctgtagctgcctgaaaggctgttgcagctgcgggagctgctgcaaattcgacgaagacgatagcgaacctgtgctcaaaggggtgaagttgcattacacatagtga

SEQ ID NO: 16682 - DNA, 4143 bp, synthetic construct
  source 1..4143: mol_type = other DNA
atgttcgtgttcctcgtgctcctgcccctcgtctccagccagtgcgtgtctgaaacaaaccttgattccattgagctgaacgatctggcggattcttctactgagatcgatgactctaccgatttgaatcaagattactccagtaatcaagatctttctttgaatcaaaatagcgactcaaatctgagtaacgaacaggaactttattccaataagctgtccgagaacagcttggactccaattcccagtcctccaatgaccttagcaatagcttgtacttgtctagtaacggggttcggctcgctgacctcaactcctcattcgctcagtttaacacgagtctgaacgattccaacacgatctatgttaactccagctacattggttctgacgaatttggtacccaatcaaatccttataaaacggtccttgcgggtattaatgctgccacgactgaccttaataatgtctacatcgcgaacggggtctataatatcaacaccactattacagttcttaagtcaattaacataatcggggaatctctgaatgttattctcaatgcctctaacgaaaataatatactctctgttaaaggttcttctgttgaagtctcaatattcaatctcacctttcggaatgggtatgctaataaggggggagcaatatacgtcgataagtcttctctcaacattatagggtcactttttgacagcaatatagcctatgttacatctgataatggctacggcggtgcaatttacaataatgcggggtttttgaagctttacaacactacttttaaaaacaacaaggtcgtggcagcatataacatagtgagcgaggggttcgggggggcgatctacaatgagcttggtgagatgacagtgctcaattcaaaattttacaataactcaatcgacatcaggaacattagcaagtcttcttacggggccggtggagctattttcaatcgggctggcttcgtgacaatctttaatagctccatctctaacaattcaatttacacgaattacagtctcggtggagctatatccatttgggcttctcgaaatgtttacatcatcaatagcaccattaacgacaacatcattagcggatcatatggctttgcttcagtcatcagcaataaagggacgctgttgcaaattgagaattctaccatatctaacaataacattaatgcttcttccgttgaaaatagtacaatttataatataaacgggaactttaaccttattaatagtaagatggaaaataataagatcaagactatcaaaacaaatttgttgatgtgtttggaagatcagctcattgttaactcatcatttaatctcgcgaacgaacttaaaggactcaacatgacatcccttccatcacattacgatttgagggaggagggcctcgtgacagccgtgaagaatcaaggaagttctggggcctgttgggcgtttgccttttactcagctatggagagttatctgttgaaggtggagaatataagttatgatttctcagaaaacaatatgaaaaattgcatgggtgatggtagtgaaaactctacggactgggatgacgggggggcctatgtcgtcgcacttgcttacctgttgaggtggtctggagcaataaatgaaacggacgatccttttaatgctagaagcaaggtcagtcccaccaatctgacccgagttaagtatctcacggacgcactgtacataccgcttcgcctcggggccttggataatgatcagattaagacggcgattcttaagtatggggctatctttgttccggtgtattccaatattataaaagcaaacagtaagagtggctactcagatattcaatacatatgcaaccatgcagtcgcaatcgtcggttgggatgacaactattccgctagcaactttaaagacacgccacccggagatggagcctttattataaaaaacagctggggaacgtcaggcggcgaacagggatattactacatttcttattacgacgccagttttgctgctagtatagaaacttcagccgcagtggcagtgaccaacgttgttaatacaaccggtgagtaccgcaataactattactacgacacattcggaaatacatttgagacgatcggttacaactctgatacaatctggtttgccaatcagtttaccgcgataagtgacaacccgttgaacgcatttggcctgtacacctacggtgactctacgtacacagttaatattacagttaataacaaatcagtctatactagcagtgggaaaattgtgggtgctggatttcatacaataaagctgagccgatatgtgcctctcacgaagggtgacacgttcaggattattgtcaagctcacaacgcctagtacattgttcccgcttgcggttgagaccaattactccggttttaccccacgcgccaagtctgactacaatcaatcttttatatctccagacggcaagacgtggtatgaccttaggaacagctccaataacagggcggtgaaattttacgaagatatgtatttttacacgctgaagaatgccagtgtctgtcttaaggcctatactgcctttgcggatgaactcgagttgaacctgagctccaacagcccgatatactatacgggtgatacgatcaagcttaacctgacggtgaccaacagaggagatcttgcaagtaactcttccattgcagtcccgctggacaaaagttatagtatagtgtcctataaaatctctgagaataacggcaacaaaagctatgacattcactacaacggcagctcttttaacatggcttccggcatatggtctatcccttaccttgaaaatgaggaatccgtctccctgatcctgagcctcaaaatgaattctaataacgacgttaatataaaggtctcagccaacagcagtagttgctccgttaaggataatgtttacgccaatatatctctcaagtacaaaattcctagcaagtttgcgaatattcccagtattaatacgaccgctcggtcctatggtttgcttaattttacgctcctggacataaataacaagcctctcgccaataaaaacgtcaatctcttgctgctgaagctggacgatgaagaggatgaggatctctctctgaatgataccaatctttattacagtgattcctccattagtaacgcatcagttatatctaacttgacgcttaaaacaaatgggaacggcattgtccagtataagcttaacctgacgcttggtgagtacctctttaaattggcgttcgatgaagacaaaaattaccaggcgtcagactacaactacagtttgaacataacaaaaagaaaaagtacgaaaatattgtgtaaggacatggtgacgtatagcgtcgtcgccgaagtggatggacgatccggtgagtattttaatgttacgctgactgattgcgatggctatgctatggccgataagtttatacagattggattcaacggccgcatatacaaccgaactacagattctgagggtaaggctaggcttcaaataaacctcaagaacccgaatgcgtatactttcgctatatgtttcctttctgatgatgactactacgctagctttgaggttgcaaagattactgtgaataaaaaaaagatgagtcttaatgtgcccaacaaggcttataaggcatccgaaaaaagtaaaatactgactgccaccttgattgaaaacaacaagaaaacagtcgctaacaaacttcttacgttcacggtggacggtaaaacgtatagcgctaagacgaacagcgccggggtggcctctgttaaggtcagcttgtcatccaagaagatatattctttcacggttaaatttgcgggggacgattgttatggtagtgcgactaaaagcgccaaagtgattattaaaccctggtacatctggctgggcttcatcgcaggactgatcgccatcgtcatggtcaccataatgctctgttgcatgacctcctgctgtagctgcctgaaaggctgttgcagctgcgggagctgctgcaaattcgacgaagacgatagcgaacctgtgctcaaaggggtgaagttgcattacacatagtga

SEQ ID NO: 16683 - DNA, 5574 bp, synthetic construct
  source 1..5574: mol_type = other DNA
atgttcgtgttcctcgtgctcctgcccctcgtctccagccagtgcgtggctgatttgaataccgtccaaagcggggaggtcagcggaggggtggacatagccagcagcaacccgggtgtcgagaatggagagctgacctacgaaattcccgactccgtggagaacattcaatatgccggtcttttcgtcgatagctacacggcgggttcatccaatttggtgtatgggagcgaggccaacataacgttgacaaagaatggcgagagtgaacagatcgcgagcgaaagactggtcgcttcagtcggaagtgcagatggagaagtgtatgttatcaatgatcataccaccaaatgttttgctgactacatgatgacttacaatttgacagatcggctccaagacgcgaagggcaatattactatcacggtcaatgcaacaccaatagagggatacacattttacaataaaattaaacttataggtctggtttttacgtatgatgacggcgatggcgatcagttccactactgggtgaatgctgggtcatcttgggttaaaactgatagtggtgaaacatcaaaagcaaccttcaaactgggaaacgtgaattacgatcccacggtcgcgacacttgacaactttgctctttcttcacaggatggcgtgtatacattcaatggtaaagagatggacgagagcatagtgacagagacaggcgtctattattatatccatcacaagttcgacatactcgacaagatcaagaacatgacaaatacgctcgtgtacacgcctggagaggggtcttacagtttcagaaacgttctcagcgtcgtcaaactcgtcaaaactgtcccggtttatgctaaagtgaatatttcctccgaatatgacgatatcgtcttttcaggcaccgagaaccttctgaaggttggaataaccaacaatggaactgggtctgcaagctatttgcttgatttgtacgccgacggaaagaaagtgaacagttctcagatttccctcgccgcaggccgagaggcggtgatctctctgatcgataacactattcgaccttccgccgcagacactgtgagtggtgcggataataaaaagattaactacaccgtcgtcgtttctgataagaacacaggtgaggtgctcgacgaatcaagtatctttcctaatctcctctataacggctacctggggaagggccttgcctatcccgccgagaagataagtagcttcaaaaatatcacagtcaacggcggcatgatcattgaatcccttggggattctacatacctggacgccagtatgaccggaaagactgatagttggacaatcgatttgcctgatggcgcattctttacagacgcattcgtctacgtcccgtacaatctcgataatggcaatgtgccgatgtttaccagtaccttcaacggcgcagcggtgaatcccattgcgagctacagagatcagccaaatatcggtgaaaatgccaaaaatgggtatggcctgcttgtctatgatgtgggcgaattgattaaagcaggggttaactccttcgcactttccaaagaggccggtatagccggtgtctacccttctacactcatagcattctataacctgacggattcagacctcttgactagtgcgttcatattcaacggggccgacctgttgtcaaatgaatacaatagtctgggtagagacgtgagctcagataatattcttagtataggagcgttcgacgggctggtctccgccaagcttcacgtctttgcagcggattgccaagccggcgagggggacctgacagtcaacgggaagagttataaaaatgtgtgggcggggacaaaccgctccgtgggagattacgttgtcgacttggggaagtccactaatgcatccaatgaggtgtctttcatcagtactgcctctaacattcttgccctccaacagcttgcggtggttcagtataatgtgcccagtgtgaaggcttcacttgtttctgaatactccaatgccgtgttcgcgggaactaataacgtcttgtcactcaacataacgaacaatggaaagtttgacagcatttatacagttgatttctatgtggacggtaaaaagcaaaatagtacggaaatctcacttaaaagcggcgcgaacaagggcctctatctgatcgatgataccataaggccaatcgatgcttctaccgtcaacggtgcagacaacccgaaagtgaattatacagtcgtgataattgacaaagagaagtccatggtccttgatgagataaccatcactcccagtctcctctataatggtaatcttggtaaggacctggcttaccccgcagaaaatatcacttccttccgcaatatcactgtgtcaggtggggtcattgtcgatacgctggacgatagtacttatataaactcacaggccaccaataggactgacatctggaatgttaatgtggctgacggggatgttttcactgatgctttcgtttacgtgccatataactgggacaagacgaacggatacatgccagtctggaacgctaggtttaatggggtggcggtgtctccccttgttagttaccgagatcagtccaacatcgggttctttggaaaaaatggatatgggcttgtggtctacgatgtctcaaaactgatcaagagtggtgaaaacacattcacactcgaaaaagaggctggtataacggccgtttatcccagtacacttatggcattttacaatgccacttcatcaaactccctcaaaacaatttacatctacaacggggccgatcttttggctaacgaaaacaactttctgaacagaactgtggcctctgattctcacttggatataagtagctttaaggaggttattagtgcgaagctttatgtgttttccgccggagctcagaaaggtgagggtaatataattttcaataacaaaacatataaggacgtgtggaatggcacagtcaatagcgtggactcatttatcattgaccttggtaaaagccccagtgtgtccaacgacgtgtccttcgtcagcacgggcagtacgattatggctttgcagcaacttatagtgttggattactacgtgtcatccgttaaggcaaacgtgagcagcgaatattccggggcagtcttcgccggtaccgacaacgtcttgaaggtcgacctcacgaacgatgggcagggaggctctgtgtacgtcttggatttttacattgatggtaaaatagtgaactcaactgaaatacctctggacgcaggaaaatccacggagatatttctcgtggatgacaaaattcgaccagtggacgctagtacggtgaacggagcaaataatgccaaggtcaactacaccatcactgttactgacaaagcctccggtctggttctctatgaggcaagccttaatcctatagtcttgtacaacggcaatcttggaaaagatctggcatacccggcggaaaacataagctttttcgacgcgatcactgtgaatggaggcgtgatcatagatacacttgacgactctacttacctgggagctaagacgaccggcagaacagatgtttggaaagttgaaatcccgaaggatggtaaaatcgttgatggattcgtttatgtgtcttataattgggataagactaatgggagcatgcccatctggaacgtgagcttcaacggagttagtgtttcaccagtcgcgcattatagagatcagtctaatatgggtacctatggcaagtacgggtacggcctggttgtctatgacgttggggagttgatcaagagtgcggaaaataaattcactctggaaaaagagaatggaaccacagccgtctacccatctacactccttgcattttacaataggacggagtccaataaccgcacaacggtctatatgtataacggcgcagacctgctgagcaatgcgaataatttcctgggacggacagtggccagtaatgctgccctcgacctcgctctgaacccaaacgatgaaataaaatcatccagactctatgtttttgccgcaagcgggcaatctggtgagggtaaactgatagtgaataacaaaacattcaataacgtttacaacggtagcgctaatagtgttgatgcatatatcatagacttgggcaaatctccgtccgccagtaataacgttagtttcatagcaacagggtcaactatccttgccctgcagcaattcgtggtcgtggacgcaatacaccagagttctgaggaacttcaaaaaatgataaatagcgcaagggcggggagcacattgaaccttgggtctaatgtctttaaagacgtttctaacgttataattaataaagatctgactatcacggggggaaccatttacgcgagggagggcgagacgatctttgtcgtcaccgatcgaagtgcgggtggcccgaaagaagtgaacattacgggggtgaaattcgtcctcgataacgctaacacgatcttgcaagctagggcagtgaacgggagtacacctacgagcatcgacgtcgcaagtataaatatcaagaaaaacaacatatcctttgttgatgacgatgttgttcccgagagtatcacagtgctggacctcaaaagtcaacgctccagcattgcaccaacacggaacctcaccatctccggtaataacttgatagccggaatctgccccttcatgtttgaggttacttcattcaatgggaaagactcagttgtggtgccagagggaggaaatatcccagataaaaaggcgagtgtcatacactatgaagacatggtcaccaccgcaattaacacaaacatagaagggcgggtggggaaatattttgaggttaatcttacagattcaaatggtaaccctcttaaggataaaaaagttcaaatagggtttaacggcgtggtttatgaccgcaccactaacgcgaccgggggcgttaaactgcagattaaccttggatacaaaggaacatatactttcgctattgcattcctgggcgatgactactacaatggaagtttcgttgtcgcgaaaataaaagtgaatactcagaagactaaaatcagcacctcttccaaaacgtacaaagcttcagctaagacgaaggcgatatcagcaaccctcaaggacgcgtctagcaatcccatttcaggcaagaagctcagtttcaccgtgaacggcaaaacgtatagcgcgactactaatagtaaaggtactgctacagtcaatgtctcccttagcaagaaaggaacctacagttttacggtgaagtatgcaggagatgacatgtacgctggtgcgactagttccagtaaggtcgttataaaaccctggtacatctggctgggcttcatcgcaggactgatcgccatcgtcatggtcaccataatgctctgttgcatgacctcctgctgtagctgcctgaaaggctgttgcagctgcgggagctgctgcaaattcgacgaagacgatagcgaacctgtgctcaaaggggtgaagttgcattacacatagtga

SEQ ID NO: 16684 - DNA, 4134 bp, synthetic construct
  source 1..4134: mol_type = other DNA
atgttcgtgttcctcgtgctcctgcccctcgtctccagccagtgcgtgaacgacgatatccttaatatcaatgtcaccgacactcaagattccgttattgataactctaacgggatttcagattatttttcttctgacaacgggataatcaacgacgacgggttgagtagtgatgacgagacagccgggtcccagcttcttaatgactctgaagatcttgattcttccgatgatctcgccaaagactctgatttggaagattcaaaggagacgagcaaaacacaagataactctcagaaaaatgaagactctaagacaagactttcagactcatcaattatccgcatcactgatagtagctactcatcttattttgatctttccaaggatggtgctattagagaggggacgataaaggacggggatacgctgctcataggaaatgtgtccggcaaaatattcagcataacgaagaacattaatatccttcccatttctgacggtgatacgatgagtaactgccttattcggttgatagaagggagctccggaactagcttgtccaatttgcgcattgttaataggaacgaaaaagtcggatctttttacctgtgtgggattcacattattaattccgcagggcacgatatcgtgaacctgacgatcaacaacagtcaaatgaaatgttatggaattataatgagcaatgccagcaataaccgaatcataaactcaacgatcattactggccaggcgacagctatacctatgacgggaagcagtaataaccttttttacgggaattacatagagacgtacaacacaaatatgatctactattgtatgtatggtaacggagacttttacccgcgggaggatttggagaaatcacacgacaatattattgctaataattactttacctcacgaaacgggacgtatgacagttattgttactccgtgtgtctcatggcagaggctggaggttctggaacagtgattgccaacaataccttcaacaatacctttcgcccgataacagtttccactccggacactcttgtgataaacaacaccatccttaacgtggggggggaagccggcataatcgtggatggcaacaacgtgacgataatgaataacaatatcagcactaagaggctggagggcttccaatggaacaaggaaggtgacgtggtgggaatctttacctatggcagcaatactcggataatcggaaacagcatcgataccgttggtaccaacggtattcgatctagcggcgatgctacatttatatctgggaatactatcaacactgagtcatctgcttgcataaacctcacgaagtcaaatgcagtggttgaggacaacgccctgaacggcatagggtcttctgctgtgcggatttatactagtaagcttgtggaaaacacaacgattaggaacaataacatatcaagtgactcagagggaatagtgctcaagggtaagatagattattcactcgtctgtggcaatatcattgaaataagcaatcctgaagacgcgattatagttggaaaatatacaaaccggaatccacttgtcccccagcattatgctattttcaataataccataaatgggatagttgtgaatttgacagacatctctgagatagagcgaaacgacacagattccgggttgaataatacaaacacctcagactccggcaataatggcacgggcaatacaggtaacggcaccaatatcactgacgttaacgggaccgacattaacggtacagacgttaacggaacgaatataacggatatcaacggtacggacgttaacggtactaacgtgaccgatgtcaatggcactgatgtcaacgggactgacgttaatggtactgatataaatggaacaggcaacgccactattccggtgaatataaccaaactgagtacatccatcacagtctacaatacaacggtcttgcgaggcgactacctggatgcctatttgaaagatcaatacggcaatccgattagtggggtgtcaatagatttccatttcaaggacaaagtttacgctaaaacaacggactctgaaggaaaggccagcttgcacttcgatgcgatccctgataactatacaatgaatataagctttacgggtaacaattactatttgtcttcaaatatcactatcgatatcagcgtgatacctgtttcatattacctgaatgagagtaatttttacgaatatttcggagaagatggttaccttaaaggagattatgaatatgcggacctgatcttccagggtgatttccggaataaacggatagtgctgaatcaaccactcaggattattagcgatagcgcggttttgtacgacagcattatcaaaatagagtccgataaggttgtcgttgatggtttcacgatcgttaatagaaaccccggaaacaagcaagacaatcacaggtttgcgatcctgttggactatgttagggatgtttcagtcattaacaataagatcaaactcgattcctatgatagtggctatggtatttacctgtctgagactcaagacagtactgtgtcaaacaactccatagatgtcaaagccgacaaattgaccttcggtataatactttacgacagtaaggacaacctcattcaggataatataataaaagtcaatggaaccgacgatccccatcagtacgaatccactattcaggtggacacgagcatttccgtggacgactacgaagcggagggaatgataatcccagaggtttacaaaacgtatggtataattcttttctatagttcatcaaacgatatcggctataacgtcattaacgccacctccggccttaagaaatattacactgctgtcaaggaaagtaccaactctattgtgggcgttgacctgtattatgatagtaattacaacaaagtccatcataataacgtcgtggtctctgcgaaggatccttacctctacgggctgggagttcttggcgccgagactgggaagcgagatcaatttgccaccaataactcctttaccgataatattgtgtttgtcaacgggacttattatgctgctggaataatagcggggtacaactcaatcaacaccacgatacttcgcaattatatcatatgcttctccaataacgtttcctatggcgtgatactcgagggggctctgaactctgtggttgatagtaactatgtgatcagccggtctcgaattaactatgtccttgaggggtatgacaccgattataacttgattagcaataatacattgaacgccttcggccagtatgtgggtgatgtttctctctacaacagtaaacataattacatcgcggggaacaaactttccccaattttccgggaggggagacttaaagacgcatctgaactccccggaggcgtcgattttgacgccatattttccgagctcggggttagtaaccctctccatgactatagtgataaagactggtctgagctgcttcgcaccgaccttacagaccatgctgacgttattccacctcataccggcgctttctacgacgacggcggagagggaaatatttttgtcgacaatgaagttccggcccccccttctggggggaatggccagaccaatcgaacaggatccggtgagacaaactcaaatggcaacggtaactcttcaaatggtagccagaactcaaactcaaattcaacggtcgttaataacaataatggaaattccggttctcaaagtgacatggatggcagtggtaacaacccggaaacggacacccttaagggcaacacggtcggcacatcatccagcgcagctgttacagaatccgcccgggcttacaatctcgacgtggacgaggacgcggcatcctcacggagtttgtcctttgggggtatgaacccctggtacatctggctgggcttcatcgcaggactgatcgccatcgtcatggtcaccataatgctctgttgcatgacctcctgctgtagctgcctgaaaggctgttgcagctgcgggagctgctgcaaattcgacgaagacgatagcgaacctgtgctcaaaggggtgaagttgcattacacatagtga

SEQ ID NO: 16685 - DNA, 5667 bp, synthetic construct
  source 1..5667: mol_type = other DNA
atgttcgtgttcctcgtgctcctgcccctcgtctccagccagtgcgtgggagacgtcgacgatctctccgacgcgggcaattacactagagacaattcccccctcacgatatcaagtacttatcaaagctccacttacggctctgatggggggtacgatgataagaatgagaatatttatatacttgataaggtgtccgatggtgataaatccaaaacatgttgtagcaaggatttgagtctggacaatgcttgctcaatggataaatcttcatgttctaaaagtaattcagcgtgctccaaaggcattagttcagacaaagattcatctaatctgtccaatacgtatctggtctcagagaacaattacaatgatttcaacgtcgacatagacttgaatgacaaacttagtgacctcgatctgaacaatgaccttagtttgaataaggatttgacacttaaccttaatagcaacaatgacatggactatctgaaccttgaagaggttatacagaccgacggcacgctcacctatgaaggggatttggaccagacctatttgaacgacgagagtttgaaccaggatgttcagaatgatgatagcctcaataagaatgatctcaaatctccacttagcgacgagaatactttcaacatatttattatttcagataacacaggaaacaacctttttgacgccgttgcctgcgaaatcctcgataactctaatttttccaacgtgaaattcaacatacgatcaggcaatcaaattaacgcgatgtcagaggatgaaatttacgagttgatggccccgtgtgacgctttcataggacagtgggtttcctcaaatgtggacgccgtccttacctctctgttgaacaaccatccggaactgtcaaataagaagttgttcctgatacttgaaccaccaaccggcaatataaacagcagttcttctagtctgaacttggttcggaacagtaccatagattataagaagatattcaatgggatttcaaacgacgatctgattaactattttaaggccactaagcgcggaaacaatttcgaaagtatccaagagtatatagacaatgaaggatcatctttcaattccattttcaacaaccttgttctctacaaggacatcaacgacaaagcgaatctgaagaatgaactcctgtatattctttaccttttgggccacggatgttcatatgaatccgccaacttcacgggggttcaggcaagtggtatattccgagatagatggtactccttcgacgagtatgtccttaccttttttaacgaatcccgcaatcgaacaataggaatacttgagtccacgatgtatatacagagtcaacagctcgacctcgtcaatgagataaccgaaaggcttgaaagcaagggttataatgtgatccctatatactgtccagccggaaatgccgagcagttgaacataatggttaaatattggacgtctgcatgtagtaacatcagtgggtttctggagaacccccaggactttgacatttatgtcgacggaataatctctatggtggcatatggcgtcggaggtgagaattttaccaatgctacaaagttctttgaagatgccaatgtgcctatatttcgggccgtgcattcagaatatatcactaatgagcaatgggaattgtccccggtcggactctctaccacaaagagtgataaatggtggcacgtgaccattgccgagtcccaagggatattcgatgcaacgtatgtcgggggggtggacagttatatttcaaatcgcacgggtgccatcattcttacatttgtcccagttcacgagaacatcgaactccttacagatcgggtggatgcgtgggtggatcttaaatacacgcccaacgaagacaaaaatatctccatcgtgtattataactaccccccgggtaaacagaacattggggcatcctatctggacgcgatcacctctgtttacaatatgctctatacgttgaaagacgagggctattacttgactgacctgcctaataacgtctcagagcttgaggatatgatgattgcttgcggcataaatgtcgccaattgggctcccggggaggtggagaagctggccaacaggtcaggtgttgccctcctccccgtcgatgaatatctggagtggtttgacagccttgacgacattgtcaaggtgcaaataaccgaaggcccagtggcatacataggacaaatggttcgcagggccgtccttataaactatacggacgaggttgagacaatggtgaacgactggtataaccaaatcaaggcactccttcctgaaaatcaaacagttgccgctacgaacatattggacaaacttgttaacagtctcaagctttatgccaatgcctcatcagatggtgacgaaaacgcaagcctgtattacgacgaattcctgagatactacgacgaattcaaatctcttaacgtctccggtcttaatggatggggggaggcgccaggaaatatcatgctggtgaatcgaaatggaacggactacttcgtcatccccggactcaccttcggcaatgtgtttattgggcctgagccccaacgcgggtgggaggcagatatagaaaacctgtaccactgtacggccgttgcacccactcaccaatacttggcagcatattattatatgcaaacaagacagagtaacgcgatggtgttcgtggggcgacacgccactcatgagtggcttccgggaaaggaagtgctgctctcttataacgattatggtagcattgtcgttggtaaagtcccccaagtttacttctatataacggatggtcttgctgaagccattcaggccaagcggagaggcttcgcggttctgatttcccatctcgactcacccaagtcatatacgcatctgtacgggaacctcaccgtgttggctacacttctcgaggaatatgataacaaccatatcataatagaatccgactctgacaaggataatcaagctataacatatcaagtcattaaagacaatcagacgataacataccaggttatcaaccaggaactggaagataacctcacccgggcgataaaagatctcgttattgcgaataattactacttgactattgggtttaccgcggaagaactcaacaatacagatatgttctcactctcttccactctcaatgcttttctcaagaacacgcaaaacacactgtacccgctgggattgcacgctattggccagaaatggacggacgaagatctcgcgaataccgttgctatcatagtttcccacgattttgagtacggcggtaaaaagacgaatctcttcgaccagctttctctttactattacggggagaagtacagtaatctgacaccgttgaagagagactatatattgaacaggtctgttgacgtgtgtaaggcgttgatctactgggacaccgaaacagtgagcgacacaatagggattggttctcccgagtttatagagtctctcaacattgcaaaaaaatatatcgacctgtacaaccagtgtatttcattggagctcgaagaaatggtgtccgcccttaacggaggttatgtccccgtcaatataggtggagaatccgttacagttccacaggtgctccccacgggcgctaatatgtaccaggatcaatcaagcgagttgccaacacagaaagcgtgggactatgccaagacactgtcattgttgacgcttgccgaccttaatgacactacagagaagataattatgggcatctggtgcgtcgagacggctcgggacgatggtgcccttgtcagcactgtcctttaccttcttggtatggaaccggtgtggcataacagtagtagcgccggtttcgatgaagaggggataccaacgggaaagaaagttgaggatctcccaaatgttatagcgctcgagaatctcacgcgacccgatggatgggctaaaaaacgaatcgacgtcaccgtcataacatcaggcctttttcgggatctttattcaagccaagccaggttgatggacaatgcatatagaatggctcttgcgtgcagttattatacgatagtcaacaacaagacaatcatggatagtgaatacggtccacaagtctatgacgctctgcgcagcattatgcggtccatttcctttaaagggatgtccaatgaatctctcgaagacaactatgtggcgaaacattggctggaagactgcatttactacctcagtcttggctataacagcacggtttcaggcgagtatgcgattacgcggatctttgctccccctaacggcgattacggagctggcatatctaagctggttagtatgtcatggacttggaatgacaccgacgaattgtcagaattttatatcggcaggatgggcaacatgtattctaaatattattggggtgacacgaacccggtggtctttatgagagccttgagtgacacggaccatatcgtggtttccagaaatactaaccaatacggggtgcttgacaacgacgatttctttgactattgggggggcctttctatgacagtggagtacttgtctaataagacacccactatgaatgtgttgatgtatgccaataaagataatgcttacgtggccaccttcgagaatgtcttctacaacgagctgaacacaagatatctgaatccggagtggataaaaggtatgatgcaagaggggtatagtggatcacgctatatgtccaacaaatttatttccaacctttggggatggcaggtgacgagaccgagctccgtgtccgagacagtctgggacgatgtgtataacacttactacaaagacaaatatggtctgggagttaaaagctggctccaatccggaaacaatgcgtacagtctgatttccatgagcggcacaatgctgaactccgcatactcaggttactgggatgcggatgacgccacactgtctgacatagccaatacttgggcacaggcaacggttgcgaatggtgttgcgtgttgtgactgttcctgtggtaacgtcgccatgatgcaatgggcgttcaagtacgttaacgctgatttgttggcaaaattgatgccgaagttgtatgacgccactcagaaccctctgttctacactaactctagtgatatgcctacgaatagttccaatattgaccgacgcacgaccaattccagtgcagagagtaacaatacagaaacagtgcaaaccaatagctcaagtaactcacaacaatccgccaacgggaacaccaatattccaggggcctccggaggttacatggttggtactgaggccgatgctcaatcagacatggctagtgacagcgatgccggaatgaatgacgccaacggcgaaggacgaagcgttgaggttaccaaatcaacgtccacaccagttgctccaaaagacgtgagcatgccctggtacatctggctgggcttcatcgcaggactgatcgccatcgtcatggtcaccataatgctctgttgcatgacctcctgctgtagctgcctgaaaggctgttgcagctgcgggagctgctgcaaattcgacgaagacgatagcgaacctgtgctcaaaggggtgaagttgcattacacatagtga

SEQ ID NO: 16686 - DNA, 1392 bp, synthetic construct; identical to SEQ ID NO: 16673
  source 1..1392: mol_type = other DNA

SEQ ID NO: 16687 - DNA, 102 bp, synthetic construct
  source 1..102: mol_type = other DNA
atgttcgtgttcctcgtgctcctgcccctcgtctccagccagtgcgtgtacctcatgacactccccctggacggactcgggcaccccttccccctgccatga

SEQ ID NO: 16688 - DNA, 1206 bp, synthetic construct; identical to SEQ ID NO: 16675
  source 1..1206: mol_type = other DNA

SEQ ID NO: 16689 - DNA, 207 bp, synthetic construct
  source 1..207: mol_type = other DNA
tctggagacccagatggattagaaaaatcagcagaagatgcaaacgttggcgaagatgttgaagctccagtaatggaagctccattcccagactatacctatgagcctttagaaaaaataggtgaaatcggcgtattgattctaggcgcgctgataacacttattgttgcatggggtataggttatgcattgaaaagatctgaataa

SEQ ID NO: 16690 - DNA, 531 bp, synthetic construct
  source 1..531: mol_type = other DNA
tttaataatactgtaaacatctatcttgatggggaaaatgtaagtgttgaaacacaaacttttgaagatatcgattctaacagtttaaacaaagatatctgtagttatacattaaatgttatgaataatacaacatccgatgtggaaactttaaaaaatggagtagaaaagctttgttatcaacatggtcttgaagatgctgaaataaacattgattcaagtttaggacatgatcagatcccaattattgtccatgttgacggaacatcaatgcttccaacattacaaaacggacaaacagttttagtaaataaaactcatgattttgaagttggtgatattgttgttgcagaatctaaggaatatggtggaattattaaaagggttgaaaaaattgatgaaaataaagttcatttaataagtgacaacaaaaatatttcatatgagtatattgatggagcactatatcaaatcaaaggtataacaacatgggtagatatttctgatgtcaacggtgtggttattgattat

SEQ ID NO: 16691 - DNA, 654 bp, synthetic construct
  source 1..654: mol_type = other DNA
gctgacccattaactgataatcaacttaatccaactattttttatcttgattttaatcatggcgctttaaatgatggttttaaaaaagaatttgatctctttgagtatgttccaacatttgatagcgtagacctttacaacgatggagaaaatgtctctgtaagcttttatagtttaaatcctaccattgatgtggataacttaaatgatgagattatagattatacatttgaggttatggaagatcctaaagccaatataactacattaaaggatggaataaggaacatatgctctgagtatggtgcagatgatgtcaagattaatgtggattctgtaattggagaggatgaaattccagttatttttacaactgaaggagattccatgcttcctaccataaaaagtggagataaggtcttggtgaataagagtcataatattcacgttggaaaccttgtttcagcaaactcttcagagtatggccctatctgtaaaagggttgctgatatagatggagattcagtttatcttgtcagtgacaataagaaggttactcgcgagtattatgatgattattatgtggaatataagggaatcactacatgggttaatattgatgatattgatggtgtgattattgacattatgaat

SEQ ID NO: 16692 - DNA, 723 bp, synthetic construct
  source 1..723: mol_type = other DNA
tcagtaggtacttcaaatggagacctaaatggccaagatgttcaattagctgctgcagctagtttgaaaaatgtttatgatgaaaaattaatccctatgtttgaagaaaaatatcctggtgtaaaagttactcctacttatgcttcaagtggggatttacaaaaacaaattgaaaatggtttaaaagctgatgtgttcatgtctgctggcaataaacagatggatgctttaatcaatgaaagttatgttgataatgattccaatgttaaatttttagaaaacaagcttgttttaatcgtatctgctgattcaaatgtgaatatctcttcatttgaagatttaaaaaatgtaaatggcactattgctattggtgatcctgaatctgtacctgccggacaatatgctaatgaatcattacataatcttggtatttgggatgatgttgaatctaaattatctttgggaactgatgtaacagcagtattaaatcaagtagctcaaggatctgctgattgtggtcttgtatacactactgatgctaaatctagtgatgaggttaaagtaatttgtgaagctcctgaagattctttaaaagatattgtttatcctgtagctccaattaaagattctgaacatgctgatgctgcaaacaaatttatggagttcttacaaactcctgaagctcaaagtgtatttgaagactacggatttacaattcatgaa

SEQ ID NO: 16693 - DNA, 756 bp, synthetic construct
  source 1..756: mol_type = other DNA
tgctctgcaggtttccttgactttttaggaggagacaacgctactgacgacagtttaaatggaaaagaagttaatttagctgcagcagcaagtctaaaaaatgtatatgatgatgaattgattccaatgtttgaagcaaaatatcctggagtaaaagtaactccaacttacgcttcaagtggtgacttacaaactcaaattgaaaacggtttagaaacagacgtattcatgtctgcttccaacaaacaaatgaacgctttagctgatgaaggtttaatcgacaatgacaccaaccttcaattcttagaaaataaagttgttttaatcgtacctaaagattcagacttaaacatcacatcattcgatgacttaaaagatgtgaaaggtaccattgctattggtgacccagaatctgtacctgcaggacaatatgctaaagaagcattaaccaacctcggtatttgggacgctgttgaatctaaattctctttaggaactgatgtaactgctgtattgaaccaagtagctcaaggatctgctgaatgtggtattgtatatgctactgacgctaaatccaatgatgatgtaaaagtggtttgtgaagctcctgaaaactctttaaacacttcagttatttatcctgtagctatgattaaagacgctaaagatgcagatgcagcaaaagcattccttgaattcttacaaacccaagaagctaaagacaaatttgttgaatacggatttaccattcacgaa

SEQ ID NO: 16694 - DNA, 783 bp, synthetic construct
  source 1..783: mol_type = other DNA
aatgatctctctgattctaatgtttcaagtgatttaactgttgattcagactctataagctctgatgatacaggatctagcgatacaagttcagatgattcaaatcaggatgatgtatctcaggataagactaatgataaaaaactgtctgattcccagtcagattcatcaaaagatactcaagatactgatgataataatacagataatggttctgataaatgtaatttgattatcacaaaaaagggcaatgagaaagtcaaagttggagatactgtagagtggacaatagaggtaaaaaactctttaaacactgcagaaaacatctctgttgatgagttcctccctcaaaactttgagtttaagtctgctaaggcaagcaaaggaaactatgcagttgagatagcaaattgggacattggaaatttaaaggaaaatgaatctgctaccttagtgattaaggctcaagcattaaaggctggaaatttcaccaatgtggcaaatctcactacagattccgataatatcaatggaaaggtccttagcgctaaggcagatgtggaagtgctttccgagaataaaaagaatgagactcctgtaggacctaagaagaacaaagataataattctacagtcaaaaagattcataaattaattaaaaatcagacaaataatacaaatatgactccaatagattttaagaaatctggaaattcattgtttgctgttataatagctgctttggctgttcttggaatatttttaggacgaagaagaataaat

SEQ ID NO: 16695 - DNA, 1026 bp, synthetic construct
  source 1..1026: mol_type = other DNA
tcaccatcatctatttctacagatgggaataccacaataactgatatggcaaataggactgtaaatatttcaagtagtgttgatagggtggttgctacaagtccacctatgaccactatcgtttatatgctggcacctgaaaaattggttggtgtaaacttccaatggactgatgaggaactaaaatatgttccggatcagtataaggataaattcccagttatcggtggatggtttggaagtcaagacggtaattatgaagagtttattgcttctgagcctaatttggttattgaaggtattgatgaaggaatgggtgttgacctatcaactgttgaagaaagacaggagaagtttggttcacttcctgtagtggctgtaactgacaatacaaatgttacaaagatagacaatacgatagagttcttaggcaagcttttaggtgctgaagataaggcaaatgagttaattgcttttaatgataagtatttgtctcaagttcaatccactgcaagcagcattccagattctgagaaaaaatctgtttattatgcttctggtgaggatggattatccacttatgcaagtggcgcttcacatggtcaattgatttctcttgttggaggcaaaaacgtagcagacactgaagttaaggatagcggaagtgaattgactgtttccattgaacaggtaatgtcttggaatcctgatgttattatagccacagatgaggacttttataataaggtttataatgattccaaatgggctagcgtaaaggcagttaaggaccatagagtatatctttctccacagtctccatttaagtggtttgataggccaccaggtgctaatataattataggagttccttggactgctaaggttatttatccagataaatattccaatatagatatggttggagctactaaagagttttatagcaatttctatcattatggcttaagtgatgaacaggctaaagagattctaacttcttctggtctaaaggggtctgatttg

SEQ ID NO: 16696 - DNA, 1029 bp, synthetic construct
  source 1..1029: mol_type = other DNA
ttgactccttctagtgtggaaacagaaggctctaaaaatataactgacatgttaaatagaactgttgaagttccaaatggggttaataatgttatagctacttctccgccaatgactactgtattatatatgctttcacctgaaaagttaaaagcagttaacttccaatggactgaagatgaattgaaatatgtgccatctgaatatgccaatttaccagttgttggtggttggtatggtacacaagatgggagctatgaagaatttattgctgctgaacccgatattgtgattgaatctattgatgaagggggggatggtgatgcattcactgttcaggaacgtcaagataaatttggcaaaattccagttcttgccgttaaagacactacaaatgttgaaaaaataggagattccatttcattcatgggtgaagttataggtacggaagacaaagctaatcaacttaatgagtttaatactaaatatttggatattgtacatgataaatcatctaaattagtggatagtaataaaaaaacagtttattatgcagcgagtagtgatggtttacaaacttacccgtcaggtgcttctcatggtcaattgattgatttgattggggggaaaaatgttgctgattcattaaatcaaggtaatactacttcaggtgtacaagtatccattgaacaggtaattaagttggatccggatgttataataactaatgatatgcatttctataataaagtgtataatgattcaagttgggctcatttgaaagctgttaaaaataaaaaggtttatgtatctccacaatctccatttaaatggtttgataaacctgttggtgctaatatgattattggtgttccatggactgctaaagtaatctatcctgaagattataaagatattaatatggtggatgtaactaaagagttctatagtaatttctatcattttgatttaaatgataatcaggcaaaagagattttacttgattcaggacttaaagaatcaaattta

SEQ ID NO: 16697 - DNA, 1056 bp, synthetic construct
  source 1..1056: mol_type = other DNA
agtgaaaatatagttattgatgagtcttctgattccaatttagttatagaccatgctaaggataattatttattcaatggacctataaaagataattatttatctagcagttctattagtgataattatttatctaaaggtgttcttgatgattcttatttatcaagaagcgatttggatgattcttatttatctatggatgatggcaaaggctctatcgatttgacgaatcataatcaactatctaattcagatgataaacagcttaaaacttctaatttagaggatgaaaaacagcttgaaagtgtaaataaaggagataagcttcttaaagattcaaatgacaatgtcgatttgtttattaatatggatgtaaagacatcattgaccaacaagcaatataaccgtgcaggaagcgaagttccatggattataactgtttcctctctcaatggaaccagctataatacccaagttcgtgacgttttatctgaaaatttacagtatttatcacataatgctacaatgggaacattcgatccggaaaatggaatttggactgttggtgacttggaatcttctaaaaatgcaagcttgacaatattgacaagattgaaaagagatggtacatatataaacaaggcttatgctactaccgattcaaatgatgttaatctattgaataacttcctaatcatttccataaggaccggttcatcaaagatcacttctaacattacagagacaagtgatgaaagagagggaattcagcataatgttcattatgctagtatggttgatacggactttatatatagatatgaagaggactcttcagaagacgatggcggcaatgaagaaggccaatctgaaggaaattcccataccaagactagatctttaggaaataaattgaaattattcaatgctcagaatatagattatcattctctttccaaaaacatcggtggagcattaggttttggatataattcaaatggaggattccttaattcaaaggacatttatgaggctttatttgtttatgactataca

SEQ ID NO: 16698 - DNA, 1539 bp, synthetic construct
  source 1..1539: mol_type = other DNA
ggaggaggcactactgaaagaggtcctggagaaatcgtagttgcagcttacagtcacggaggagaaccagaagctggtttcgatccaattgcaggttggaactattatgctgagccactcattcaaagtaccttattgaaaatgacccctaacggtacttacgcaaaagatttggctacagactatgagattagcgatgattataagacatacactgtagacttaagaaaagatgtcaaattcactgacggttctgacttgactgctgaagatgtagcattcacatacaacgcagctaaagaatctggcgcaagcttagacttatccgctttagataaggctgaagctcaaggtgattacaaagtcaaattcaccttaaacaaatcagattccactttcttagataagatggcttacattggtattgttccttccgattcttataacaacgaatcatatggtgaaaacccaatcggttctggaccatacaaattcgtacaatgggacaaaggtcaacaagttatcttagagaaaaaccctgattactatggtaaacaacctgaaatcgaaaagataaccattctctttgctcaaaacgaagctgcgttcaacttagctaaaaacggagaagctgatatcgtagctgtacctctcgaatatggtaaagaaaaacttgacggttacacaatgtacttacaagacaccatcgacgttcgtggtgtatctttacctagtgtacctgataccggagaattatctccagatgacaactacacaatcggtaacaatgtaacctgcgatattgcaatcagaaaagcattgaactatggtattaacagaactgctttagctgaaggagcattaaacggattaggttatccttcctatgacggtattgctcaccaattaccatgggctaacaaagaagcagcaattgaagacggtgacgttgcatacgcaaacaaaaccttagaagaagctggttgggttgactctgacggagatggaatcagagagaaaaacggaaccaaagcttcatttaagatctactactctgcaagtgcacctgaaagacaagctttagctgtcggtgctgctgaacaagctaaacaattcggtattgaaatcgaacctgtaggtgctgaatgggacgaaatctatcctaacgaattctcacaaggagttctctggggatacggttccacagatccatctgacatgtatggagaatactacagttcctctgacttcaaccctgcaagagtaaacaacagtgctgttgacaaacacatggatgacgcatttgctgaatcccgtgaagactcttacaaagattggtctgcagtatcctgggacggttctaccggtatttcccctaaaggtgacgcaaactggttatggttaggtgaaatcaaatatggttacttcgtaaacgacagagtggacatttccaatgacaccgctctcttacaacctcacggaggagacttattcagtaacgtatatgattggaccatgactaacgctactgcagaaaaa

SEQ ID NO: 16699 - DNA, 1542 bp, synthetic construct
  source 1..1542: mol_type = other DNA
ggctcatctactgaacgagcagacaatgagcttatagtggcggcttacagtcatggtggagaaccagaagctggttttgatccaatacttggatggaactactactcagaacccttaatccagtccactttgttaaaaatgacaagaggaatgaaatatgaaaatgatttagctaaaagctgggaagcaaatagtgattttacagaatatacagtaaaaatcagggacgatgttaaattcacagacaacactactttagatgcagaagatgtagcattcacatacaacgaagctaaaaaaagtggagcaagcttagatttaagtagtatggaaaatgcaactgcagtagacaaacaaactattaaatttgaattaaacagaccagattccactttcgtagataaatttgcatacattggtattgtgccatctgattcatacaacaatgaaacctatggtgcaaatccaataggatccggaccatttaaattcgtacaatgggacaaaggccaacaagtaatcttagagaaaaacccagattactatggaaaagagataaaattcgataaattaacaattttattcgaacaaaatgaagctgcattcaatgctgctaaaaataaagaagtagatatagctgcagtaccattgtcttatgcaaatgaaactgtagatggatacaatatgcacctcatggacaccatcgatgtaagaggactttcattaccagtacagaacaataccggtaaattaagcgaagatggaaatccaataggcaacaacattactgcagacaaatcaataagagaagctttaaattatggtgttaatagaaccgcaatatgtaaaggagcattaaacggcataggagtgccaaactacgatggtatcgctcatttattgccatgggcaaataatgaatctgcaattgatgacggtgatgttgataaagctaaagacatcttggaaaaaggcggatggaaagatactgatggcgatggaatagtggaaaaagatggtaagaaagcatcaataaatgtatattactcatcaaatgcacctgaaagacaagctattgcagttactattgctgaagaagccaaagaatttggtattgaagttaatgcaactggttcaaactgggatgaaatggacaaaattaaaaatactgacccagtcgtatggggattcggttcaactgacccgtcaacaatgtggtctgaatactacagtgatcaagcaactgtcggatataataatccagcacttattaacaatagtgctgtagataagcatattgataatgctatgaaatctgatcgcgaatcatcatatgcagaatggtctgctgtatcctgggatggtcaaactggtatttcacctaaaggtgatgcagcatggttatgggttggagaaattaaatacggatatttcgtagatgaaagtttagacatatcaaacaatactgaacttatacaacctcacggaggagatattttcggaaacatatatgattggtcacgtgtatcttcaattgaaaaa

SEQ ID NO: 16700 - DNA, 1545 bp, synthetic construct
  source 1..1545: mol_type = other DNA
gcagacattatagcagacaatcaagattcaatttcatccaatgacaattcaatcaatgaaattgctacagaagacattagcaaagacattaatgacaaatctctttcagatggagtcagcaccggcggaaacaattggattgtaaaaccatcaacagatggaaaaagcgatgcaaattccattcaaaaggcaataaacctcgataatacaaagcctggagacagtctccttttaactgataagaacttcaccttagaaaagtcagttagcttgaataaagaccttacaatcaatgggggaaatatatacaatcagaacaatttaactgatctatttataatagatcctaaatctgaaggaggtccaaagaatataacaattaccaatgttacattttatgtaaatggaaatgaaaacattgtgcttgcaaatggagagaattacggcacaacttatattgatcttgccaatataaaaataagcaactgtacaatcttgcctataaatccagacagcaatatcaatgatacagtgcttcttaatataaaatccgataggacagtaggccaaacaggtcaaagtacaggattcgtattggtttcaggcaacaagctaaacggcataaacacccttaagaataacgattacgtattaaaagacgactttgttattcaaaaggcggaccctatcttaaataccgccctaatatgccctaacatgactattacaacctatgataaaaacactaatgacactccaagctattatgaagtgaaattgatagatcaaaatgtcaatcctgtaatcaacaggacaattcagataggattcaatggcaaaatctatgataggacaagcgatgaaaatggaatagcaaaggtaaaattaaccttagcttacacttcagtttacacatttgcagtttacttcctaggtgatgaaagctatgcaagtgcatttgacgtttcaactgtgacaatcattaagaaaaatgccacaatcactccaaagacagttagctataacgtaaatgcaaaaacaaaaactttaactgctaccttaaaagacaaaaacaataaggctttagccaataagaaggtcactttcactgtaaatggaaaaacatacactgcaacaacaaactcaaaaggtgttgcaagcgctaagataagcctaagcaagaaaggcacatacactttcactgcccaagttttgcaggggacaatatctataattcagtttccaaaaaagggaaagcttaccttaaatccgctttcaacaaacttgactgtcaagaagtacacattcaaaaaagcagccactaagaaaatacaagtcactctcaaatccggcaagactgtgcttaagtccaaaaagcttaccataaaagttaatggaaaaacatactccggaaaaacaaacacaaaaggaatcgctacaattaccataaaattaactaaaaaaggaacctacacttacacagctaattttgcaggagacaatacttataaggctattagcaaatctcaaaaagtggttataaaa

SEQ ID NO: 16701 - DNA, 1560 bp, synthetic construct
  source 1..1560: mol_type = other DNA
tttatgagtggaggaaataccagtacaagagcagataatgaattagtagtttctgcttttgtacatggcagtgaaccagaaacaggttacgacccgatgtatggttggggagaccgtggagaaccattaattcaatcaactttgatgaaaatgaatagaaatatgacctatgacaatgatttagctacaagttggtcttctaataataactttactgaatatactgtaaatatcagagatggagttaaattttctgacaacacaacattagatgctgaagatgtagcattttcatataatcaagcaaaaagtactggaaatacaattgatttaagtagtttagataatgcaagtgcagttaataaaactactattaaattcaagttaaataaaccagattcaacatttacagacaaactgttacatgtaggtatcgtaccttcagattcatatgacaataatacttatggaagtaacccaataggatctggaccattcaaacttgcacaatgggataaaggtcaacaagtaatctttgagaaaaatccaaactattatggaaaacaaccaaaatttgataaattgacaatatcattccaaaaaaatgaagcttcatttaatgcagctaaaaatcatgaattagatattgcagcagtaccattatcttacgcaaatgaaacaatagatggttaccactcatttttatccgaatcaaatgatgtgagaggcatttcattaccaatgaaaaacaatactggtgaaactaatgaagatggcatagcattaggaaataatgtgactgcagataaatcaatcaggttagcattaaactatggtattaacagagaagacatatgtaaaggtgcattaaacggtgccggcgtacctaactacgatggtatcgctcatttcttaccatggtacaataatgattccactatcaaagatgcagatattgacaaagctaaagatttcttgaagaaaggtggatggaaagatacagatggtgatggaatagtagaaaaagatggtaagaaagcatcatttaacctatactactcatcagatgcaccggaaagacaagcaattgcagtagcagtttcagaacaagcaaaagaatttggtattgaaataaatgcaacaggttctaattgggatgaaatagataaaatcaaatttagtgaaccagttgtatggggattcggttctactgatccttatgtaatgtacggagaatactatagtaatcaagcaggtattggatacaacaacccatcacttgtaaataacagtgctgtagattcacatattgataaagcaatgtctgaaccacgtgaacaatcatatgctgactggtctgcagtttcatgggatggtcaaacaggcatttcaccaaaaggtgatgcagcatggttatggataagcgaaatcaaatacacatactttgtagatgatagtttagatatttccaaagatacattcaaattacaacctcatggtggagacttattcggaaacatctacgattggactcgtatatctccaattaatgctacaaat

SEQ ID NO: 16702 - DNA, 1560 bp, synthetic construct
  source 1..1560: mol_type = other DNA
tctatgttaggaacatcaaatgatgatgatcctaggcatattgttgtaactattccaggtcaaactggagagcctgaagctggatttaatccattaaatgggtgggggtgtggacacatggaatttaatcctttagttcaaagcacacttttaaaatctgataaggatggtaattttgtaaatgacttagcaactggatataatataagttctgatgggcttaaatggactgttggtataagggatgatgttaagttttcaaataataaatctttaactgcaaaagatgtagcttttacatttaatgaggcaaaatctagtaattcacaattagacatgtctaatttaaaagaagctaaagctttagataatactacagtggaattcacattaaattcaccaaaatctacttttaattatgatttaagatatgtgggtattgtttctaaagaagattataataatgaaacttatggtcaacaacctattggttctggtccttatgtgttaaaacaatgggataaaggtcaacaagctatttttgaaataaatgataattattatggggataaaccatatttcacacaaataacaatgctattcccaaaagaggatagtgcagcaatgcaaattgcaaaatctggtcaagctgatgttgttcaagtaccaatttcaggtttaaatgaaactgttgaagggtatgagttagttgaattctttagtccacgtgctcaagggattactttaccctatcaaaatgctactggtgaaaaaactactggtggaaatgatgtaggtaacaatgtaactggtgatgttgcaataaggcaagctttaaatgttggaattaatcgtgaagagattgttgattctgtttataaggggcatgctttagttgagactagtggtatagaccatcaaaaatataataatcctaatgctattataaaagataataatcctaaagcagctaaaaaaatattagatgatgctggttgggttgatgctgatggtgatggaatacgtgagaaaaatggaactcctgcaacattcacattactttatagttctgatgatcaagcaagacaagctattgcaacagttgtatctgaacaagctaaagatttaggtattaatattgagttggaaggaactgattgggatacaatatattctaggatgtataaagatcctgcagtattccaacagtcttcagataatccttataaaactacttatttacaatatcatagtaaggataatttaagtgaagataattatatgaacccaaatggttatgaaaattctaaagttgatgctatattggatgcggcattacgtgaaacagatttaaatgcatcatataaattgtggggtgatgcagctaatactgggtcaggttatggatttggacctaatgaggatgcttcatggttatggattgcagattttgattactgttattttgtaaagaaagatattgatatgggtacaaaaccaactatgggtcaagattatatgcaaaatatttgtgaatggaagcacactagcacaactgaa

SEQ ID NO: 16703 - DNA, 1617 bp, synthetic construct
  source 1..1617: mol_type = other DNA
atggataagaaaacaatcattatagctgcagtagctattctcgttattgctggaattgccgttttcgcatttggaggcggcggaagcagcgatagcgatccgacccacttgacagtagctacacacagcaatatggcagaacctgaagcaggtttcaacccgcttacaggttggggttgcggacacatgaactataacccattggtacaaagctgtctctttaagacagacaagaatggagacatagttccagaccttgcaaccaactattcaattagtgctgacggtttaaaatggactgtaaaggttagagatgacgtcaaattctcagataactccacttttgacgcaaaagacgtagcatttacattcaacactgcaaaagacactgaaactgatttagatttaaccaatcttaagaaagttacagctaaggatgacaagactgtcgtatttgaattggaagaaccaagatccacattcatctatgacttaaggtatgtaggtatcgtacctgaagagtatgacaacgctacctacggcgaacacccaatcggtaccggaccttatgtattggaccactgggataaaggtcaacaagctatctttaaggcaaatgacaactggtatggtgacaaaccttacttcactcaaatcaccatgttattccctgaagaagctacctggctagagttagctaaatccggtcaagttgacattgctcctgttgcaacctctgcacttaacgaatctgtagacggatacaactttgttgaaaagtctgcaggtagggcacaaggtatctccttgccatatcttgaagatactggaaaaaccagcccagcaggtgcaaagatcggtaacaatgtaactgctgacaagtccatcagagaagcattgaacataggtgtcaaccgtgataaaatctgtgaagaagtattctctggtcacgcttcacctgaatataccagcgtagataccagaagctttgcaaaccctaacgctaaagtaaaagatggtgatgtagcaaaagctaaacaaatcctcaaagaaggaggatgggaagacacagacggtgacggaatcgttgaaaaagatggcgtaaaagcatcctttgacttatactacccacctgattaccttgacagacaatctttagcaacagtatttgctgaacaagctaaagacttaggcattcaagtaaacctccaaggtgctgactgggataccatctatgctaacatgtattcctctgcttctgtaatgcaacagacctcaccggacccatataaatccatctatcaacaatatcactctaaggaagctgatgacttctatatgaaccctaacttatataacaatactgcttccgatatgttgatggaacaagcaatgcactccaatgacttcaaactagcagactccttatgggctcaatctgcccttgtaaacggcggaggctggggacctgctggagatgctccatgggtatggcttgctaactacaactacaactacttcgtaaaagaagatattgatatgggtgaccaacctgacggtttaggaaatgacttcttgattaatgttgttgattggactagaaccaattcaactgca

SEQ ID NO: 16704 - DNA, 1914 bp, synthetic construct
  source 1..1914: mol_type = other DNA
aatgatttagattcaaattcagtcaatcaagacaattatatttctgatgtagattcttttgatggttctaattcggttttgtccagttctaatttggatagttctattgataaggataattatttaaatttagattctaataataatttaaatttagattctgataagaattctgtttcaggttctgatttgaatttaaataatgctgatttaattaattctgtttcaggttctgatttgaatttaaataatgctgatttaattaataattcaactactaatgattcaagcaattcaaataattcaaataatttagaaaatcttactaatttagatgattctaaaggtgcttctaatcaaaagcctcaaaagtatcttattcctaatgacagttctataggttctgcatatatccaaaagatcattgataatgctgcacctggaagtacaattcaatttacaggttccttctataaaaatatttatctgaaaatagataaagctctaaacattataagtaaatctggcactgtgataaattcaagctatcgtttgcctgtatttactatatcaagaggaggatctggaacaaatatttcaggttttacagcaaatcttgcaaattcctttgtagaggcaagtgatgtgtccgatataagcatatcaaaaaataaaatctttacaaaacggaaagctattgtcctcgaaaatgtttttaattcaaagattgtaaggaatagtttcctaagatttgaaactgccattgacatttcaaaatctggcggattgaccatatccaataataatataactccagataacggatacaatgtgggaattagcttaaaagacatttatagagacaaggttagcatattaaacaataatatcactggccatgacagacgtatagaatccacaggcatttacttcgggccaaacgctaagaatgtattgattgaaggaaatattatagatgaatggtatactggtgtagatttccctaattctgtaaataatgtttccattttaaacaataccctcaatcacaatggtgatggagtaatcattaacggatggattaataatttcacttttaataagaatgtagtcactaatactggaagagttggagttctatttgactatgatttttatggaacaaaaggggatttcactttagagaagaatttctttacccaaagcggacagttggatttaagaaacactggagaccaggcagtaactattggtgaaaactttgctagcagacgttgtgttagggttgccatgaaaaatggattttccattaaaacccgtcaaaatggaaatggctattatttctcaattgtggataagaattccaggggagtaagcgggcttcctaactttagtgctacaatcagcatcaatggagtttcctataatgtcaatttcataaattctgttgcttatgttgaagttgatggcgctagcggcgaaaatgatgaggtccttcttgatgttggtgaagacaagcgtaagcttagcgattggggagagactcaaaatcttagttccagtgaaatggaatactataaaaagatttatgatgatttgatcaaatctatggtagaagagactaataatgataatcaggacatgaaaaaggtagaagataagaatggaacaggctccactccaagtggtggaaacggcggaggcgactctggtatttcagacggtcgttcttctgtaagttcaaatggagattcctctcctgcaagtgcaggaacttctaatgtggcagcaagttctgcatcttcatctgcgggcccttctgcagctcaagcagacactcctgaaagttctactgtaaaatcattgtcacttgatgaggaaacctttagagttgctggtgttggtggattagtc

SEQ ID NO: 16705 - DNA, 1986 bp, synthetic construct
  source 1..1986: mol_type = other DNA
gcagatgctgatgtcacatatataaacgatgctgcagatgtagacgatgttgcagacgaaaaagttgctcctcttacagctagtgctgatgcacaagacatccaaactaagcttgataatgctaaacctggagacacaattgaattagaaaacaagacatatgacgttgatacaacatttaatgtaactaaacaagttaccatcaaaggtcaagacactgtcattaaagctagcggtgcatcccaaggtggtagcggagcactcttcattgcaaatgaagctggaactgcttttgaaggaattaccttcattaacactgacggccacaaaaactatggagaacaagtatcaggatatgctatccaattagctattgaaaacggtactgtagacaactgtaaattcatcgactggagtagcggtgtatacggtaaaggcgcatctttctgtagcattaccaactcttacttcaacggttcatccgaacaagtaaccaacggcggtaaaaaagaatacggtactaaagcaattaaccttatgggttcccacgacattaccgtaaccggatgtacctttgaaggacaagttcttgacgctatttccattgcaagtaactcaggtaacaacatcatgaccgacaacactttcatcgacaactgttatgctatctacttcggtggagcttccacccaaggatgtgtaatcgctaacaacagtttcatcagatgcggatactgtgttgatgacaaaggaaacgtaatctttaaagatttacctataatcagtactcaaaaagcagctaacggatacatcattgctgataacactattgaagcaaatgaaggatctatctttatgaaagctgaatcaggtaacacagcacacggatacccaagtaagatcggtgacataaacattacaggcaacaccattaccgcaactgcaggggctaatcctgaaggcattactttcatgtacatcttaagtaactctggtcctttaaacccatatgcacctattgcaatcgttaacaacaacttagacgcaggcattacccctgtaaccgtatggtatgctgactgggacaatgaaaatggtactgtaattcctgcagcagataaagcagtaacctccatcaacattgcagaaatcgctgcagcagatggaaccgtcactgttgaattggtagacgtaaacggcgctcctcaagcaggacaaaccctttcctacaaaatcgacgatggaaatgcaactgaaatcgaaactgatgaaaacggtaaggctgtaatcaatgtaccaattgatgaaaacgctactgcccaaactgttgccgttgaatttgccggaactaacgaccttgctgcaagcagcgctcaagtttcattcaaaaacactgcaactaaaagaacagctacccaaatcaatgctaacaatatgtcagttgtcactttagcacctaataccggtgacacaaatgacaattacttcaacgcaaccttacttgatgcagaaggcaatcctttagtaaacaaagaagtcaaaattggatttaacggtaaagaatacactaaaaccacaaatgaaaatggtgtagctcaacttaaaattaatttaggatacaaaggaggatacacctttgctgtagcattcctcggtgacgatgaatatgaagcatcatttggagtatacttaattaacgtagccgctcaaactcctaaattaactaccaaagctgctacttacaaagcatccgctaaaaccaaatccattagcgctaccttcaaaaccgaacaaggcagtgtaatcgctaataagaagatcagtttcactgtaaacggcaaaacttacactggaactaccaactctaaaggtgtagctactgttaaagtaagtatcaataagaaaggaacttacagcttcactgctaaatatgcaggtgacaacacctacaaagcagtaagtgcaagtgctaaacttactataaaa

SEQ ID NO: 16706 - DNA, 2067 bp, synthetic construct
  source 1..2067: mol_type = other DNA
ttgtcaaacagtaatacagatagctctgataatgcatcagatgatgcttcaggatctgaaatagtatcaggaattaacgaagagcttgaatcaaataatttattaactgaagatttaagcgtagacgatgtaattttacaaactagcttttatacaagttatgcagttaaatctgcaaaatctcctactgtattaactttcaaaaactctacagtggtaaaaggagataaattatacatttacttaaaagacagttccaatcatggcatttccggcgaaaaggtaatatttaaattttcaaattcatcttatacaagaactaccgattcaaatggaatggccgcacttgacattaaacttaatccaaacaaatatgctttttcagcaatatatgatggcagcgataattatagcgcttccagaaaagactttactttaactgttgctaaagtcaatacaaaattgacttcaagctcaagtgttgtaaggggaagaaacctatacacttatttaaaggataaaaacaacaatgccctttcaaataagaagataagcattaccatctctggaaaaacatataccgttactacagacaaaaatggcagagcaagcctaaaattaagtttaaagacaggaacttactcaacaaaaatcaattttgctggagataaaacatataactcccagtctttatccaaaaagataaaaatatataccttaaagacagtcatgacaattccaagtacttcagttgtcagaggtcaatatatttatgcatatctaaaagacagtgacggaaatgcactctcagggcaaaaagtggtaatgaaattcgacaaaatctactttaacctaaaaacagacaaaaacggaagagtagccctgaaaataaatacaagacttggaaaaatcccagtaaaagcaagcttcgcaggatcaacatcctactcagcaagctcaaaatcagtcactattacctcttatgttgaaaaaaccaagattacagttgaaaattcaacagtgaaaagaggaaaatatttctatgcatatctaaaagacagcaaagataaaggaatttcaaaccaaaaggttaaaattactttagctaatataaattatacaaaaactacagactccaatggtaaagtcgcattgaagatagaggaaaatcctggaaactacacaataaaactcaactttgctaagacaaacagttactatgcaagcagcaaatcattaaagattaatgtcttgaataatgcaactgctaaaatcatagcaaaagatcaaaccgttcttggagaatactctgtcagattaaccgacatgaacagtaatccattggcaaatcagacagttgagattactgcagctacagtaaatcgtagtgtaggatctggattgcctattactaaaaagactgttgttatcaattctgataacatctataacaaagcaacagactcgcaatttattaaatccattggagaagtccttaaatccaaaggatataaagtaattatcaattcaaatatcggtccgaatgctcattgtacagatgcaatgggagcttactctgatgtttgtattttctgtatcttcggtggtgtggacagtggtatgtttgttgacatggcagcaagttggtatcagaatctgttgaagaaatacgataatgaagttgtattaggattcactcacactcaaagaaacctagctacagatacatggcttgaaagagctcatgacgatgattacagtcctaaaaacttcactggattgtcatatcctggaacatatctaaatgattatgatatggattatgtatatggaagaacagctacagaaatggctaataatttcattaaatatgctgtaaatggtttaagcattggtttaaacaatactgttccttgcaatgtcatggaatataatgtaactaccggcgataatggttatgcaaccataacagatttattgccaggtgattatgctgtgatttcttcttatataaataagacagcaggatatgttgcagatactgtgattagtataattgaagttaaa

SEQ ID NO: 16707 - DNA, 2328 bp, synthetic construct
  source 1..2328: mol_type = other DNA
agtgaaaattcaatatcaagcgatattaatgataattcattaattaatgaattcacagcatcaaatcaaatcaacgacaatatagcaattaatgatggcttaagcaaaggcgacaaaagccaattatctgaatccaaatcaatatacgtatccacaaacggcagtgacgattcaggagacggaagtgaaaaaagcccataccaaagcataaaacatgcagtatccaaggcagatgatgattcaatcatatacctatccagcggaacttacaatggagagaataaccaaaacataagcataggaaaaagcttaagcatctatggagaagattccactataatcgacggtgaagacaaggcacagctattcatcatgaattccagcgcaaaattaagcttaaacggacttattttaacaaatgcatataaggacggcaacctaagcgactatggaggagccatcataaatgaaggcggacaattgaccataatcaactctacaatcaaaaactcttatggaaactactatggaggagccatctacaacaatttaggaagattgaccatcataaactcaagcattttaaacaatagcgcaatacaatatggaggagccatctatacacttggagtgacaaacatccagaactcagttttcgagaaaaacaccctaacagctgaaaaaggtgtgggagcaagcatagcagcaggaggaacaataaccctcaacaatacagatttcctcaataatcatgcgatatattcagcagcagcgcttctcagcttaggaaacgcaacaatcaacaactgcagtttcataaaccagaccacaaactatacagcaggggcaataagcaatcacggaaacatgtttataaacaacagccttttcttcaattgcagagtaagattctatgcaggagcaatacttgcacctccaagcggacaccatgtcgtaacagaggtctacaatacaatctttgactataacaatgcaggaaaccacggagcagtcacaaacaacttccaagatgcagagattacaatgataaactgtgcaataaccaataactacatccaaaagaacgttttctatggagatattgcattggatgacaacgctacagtccaatactgctggtggggccaaaacaacataagctcttactactattcccctcacagcaataatgaggatccaggtcaaataaacgcttcaagatggcttatgatgactttcacatcaagcaatggaaacatctcagcagatgaagtgaacacattgactgtaagcattaagcaatactttgacaacgatacaaaagaaatatacgaatataatgaggatataaacctaccattaaccgttaaattcttcgacgacaataaaaagaccattgcaacaaaaactttaaagaatggtacagcaagctacaattacatcccagtgaaaggtgtcaatgctgtctatgcacaaatcaccaatgaaatcattgaaattccagttgtccagaaaaaggaatcaaatcttagcacaagcaatctgaccaaatactacaaaaatgaaagccaattggaagcaaaactgacagatggcgacaataatcctctttccaataaaactataagcatagaacttttaggaaaaacatacaataagacaacaaacgaaaacggaatcgttaaacagaatatcggattaaagccaggccaatacactgcaaacattattttcaaggacccagaatacaaaaacaaaaacattacagtgcaaatcactgtcttaaagaacagcacttcaataagcgctaaaaaccttgtaaaatactataagaacagcagccaattaactgtcaaattgcttgacaataataagaaagcaatgaagtccaaaaaagtcaaattcaccattggaaaaaacacttacacaaggacaacaaatgcaaatggagccgctacattcaacatcaatctaaaggtcggcacatataatgtaaaggtttcatttggaggagatgactactacaaaggatcttcaaagacagtcaaggtaactgtaaagacaacaaagatgcaggcaaagtctactaagatacgcaaaaactctaatttcgtagcaacatttaaggacgctaatggaaaggtcataaagaacactaaagtgaaattcactttaaataaaaagacctatacaaaaacaaccaatagcaaaggacaggctacattaaaggtaagtgtaaaattaggcagctatacaattaaaagtcagtacgcatccactaagacctatggggccactgtctttaatacaaaaattaaagttgtaaaa

SEQ ID NO: 16708 - DNA, 2499 bp, synthetic construct
  source 1..2499: mol_type = other DNA
aatgatttaggcactgtattggaggataatgataataacggattaaatgacttaaataatgatgattttataaattcagatgtgaattcagatagtataaataaagaagcaatttctaatttaaaaagtttaaatagtcaggatgaatctacatcttctgattctaataattctgctagttctaattctaatagttccgttgcttctagttctaatagttctgcaagttctaattctgctaattctaatagttctactagttctaattctgctaattctaatagttctgtaagttctaattctactaattctaatagttctgcaagttctaattctactaattctaatagttctgcaagttctaattctactaattctaatgctaacaccaataactccagttcagatgcatctaaaactcaaactataaaattatcctctcaagaggaaagtgcccttaatgagttcttaaatgcaatcaaaacaactactaaaggcacaattgttctaaaaaacgatttggtccttaatcaaactatctcacttaataacaatattacaatagatggtaggaatcattccataagctccttagatgttacaaacatgtttaagacctttgcaaagatcacacttaaaaacattgtctttacaaactatcatgaaatagagaatttaagggcaatacttaactctggagaattgactgtcctcaattgccaattcaatggattttcatatcttacaaacggctcagctatctataacagcaaaaagcttaccgttcaagggactaagtttaataacaattatgtcaataacagcggaggggccatctatagcacaggaaccctgactataaacaattcctcattcaacaaaaatcatgcaggcaaaaatggtggagccatctattccactttaaacctaatcctaaaccagtctgtctttagcaataattccgctaatgaaagcggaggagctctctattcaaaaggcagcggattaaatataaaatattcccgatttaataataactctgcatcattaaatggaggtgcgctctacagctcatccaacagtacggtgatttcctattcaaatttcgtttcaaactttgtggaagcctatgataaagcaagcaatggaggggctgcatttatctattatggatctaaaattgcatattcaaacttcacatctaaccattgtaaaacaactcttacaaacagttctcagaaaaagtcaattcaatcaatgggtggagctttattctattatggtggaaatcatactttaagcttctctaattttaataagaactctgtagaaaacgacggaggtgctgtgcgcatagccaaaaatgtagggaaatttacattgaacaaatgtaatttcacaaataacaacgcatcctatgaggatgggggagcaatttccttagcaaccccaaacatcacaatctcaaactccattttcaagaataactttgcaaatgaggacggaggagctattgacacattcagtctaggaagctataaggtaaatgtattgattaagaattgcctattcaattcaaacactgcattcaaggcagcaggtgcaatatatttaggagtaaacactgtccaatcaatagtaaactctaatttcacatcaaataaggcaaccgttgcaggtgcattctatatagaatccatttcagtaagcattagcaattgcatcttctcatccaataaggcagacaatgtatccaaaaagacaatatataacaagcaaggcaaggttgtctcccattcaggaggggctgtattcgttaagaatggaagtacagtcaccattaaaaacagccttttcaagagcaataaggccacatcaggtggggccataaccaatcatggaaagatggtcattgataagtgcaatttcacaagcaattctgcaacaaatggtggggcattatatggcggtggaaaaacaagcacaataagaaattccatattctataagaattcagcaacaaaaactggaggagcattattcatcaatgaaggcaatgtcaatatgaaatcaagcatgatagtctcaaacactgcaaaatcctattctgtctacagcacagtttcaatcacattaaacaataactggtggggaaacacattgtcaattaaggacaagtcccctaagactttaggattgaccaatgttaaagtgagcacttggcttcatttaaaaataagggctaagaccactaagcttgctaaaggaaagaccacaacattgactattgacttaagatataataataacgataagcttgtttcaactgcatttaacaatcctcttactttgactgtatctgaaggcactttatctagcaagaaagtgaatttaaaaaatggaaaggccacagttaagtttaaaaagaccaattctaagactgcagttgttaaggtcaagctattgggaaaaacagcacgttgtactataaagactaaa

SEQ ID NO: 16709 - DNA, 2742 bp, synthetic construct
  source 1..2742: mol_type = other DNA
gaaaatattatcacagcagatctaaattcaaattctaatgagcttaattcagattttgcttatggtgattcagattctgaagaaatcttagatgaaccctctcaaaagcttaaaacaggttctgataattctgattttaaagacatacaaaatttaatcgataatgctaaggaaaatgatgtaattgagcttagcggaacctatacaggtgattctctaattgtagtaaacaaatcattaacattaaagtcttcttcaagtgcaacacttgatggagaatttctaaatgaattaatggctataaatgctccaaatgttatattggacaacatcaactttataaatgcaaattacactggtcttagtgtaaataacaattatgtaaccattcaaaattgtaattttgacggctgtatcaatggagagttaggatgtgccttaataatccatgggaataatgtaaatgtattaaactctaattttacaaataatgttgcaaataagtccagctgtcatcatacggatggggcagcaatttatcttattggaaacgattgccaaatcgataattgcagttttataaataattggggttataattttgaaacatcctcatcaggaggagccatttggataaagggaaataatattgtaattaacaattcatatttctttaataattcagctaccgctgaagttggatggacattccatggagaggagataacctatttggcagatggatatggcggagcagcctttttagttggaaaaaatgtaaaaataatcaattccctttttgatagtagcctttcccatgcacaagggggagcattgtattataagtctgcatatgattgttcaataatcaattcaacctttttaaattcattttctgttggagagggaggcgtaatctatttaggtcagaatattgatgggctaatgatagattcttgtaattttataaacaacactgcagacggattggatggagttttagtcaaatacaccgatttaggcagtgttttatatgcttcaaagttcgctgaaaatgtagtgatcactaattcaagtcttttaaacaataaaggaacctctgcagtctactttttaggaaataacttaaatatttcaaattcaatcatagaaaataataatctatcaactgcagtaatttatatgaatggaagtatgaatgacaatttctggtctaagaactttgattctgcagatgagtttaagaatgattgcttcattattcgagataatgagtctcaagttcctgatacttggtttaacttagtttgtgatggcttggatagtttaaaggcgaagggtgtatatgattataatatgtcctttgtcttaaaggatgcttctttagataatcatgcctcaaaaatttcattaacaaataatcttcctaattatcatattaacttaaaaaacagtgcaaagaataagattaatccaaatgaacttgtgattgttgacaatcaggcagacttcacttatgattatattgagtctgctaaggattccattgatgtttatgatgattataataacttgatcttatcaaagaaggttttatctggaataacttatattaatgatagtggaaatgatacaaaagaccttcaggatgcaattgatagtgccagttctggttctttaatctcattatccaataagacttatgttcttgatacaatattaataaataaggatattcacatatctggagaagaaaatacaactgtcatgctttcaaatagttcagattatatatttaaaatctctaattgttctgctgcaaactattctgattatggcatagccatttcaaacattaattttattttagataatggagatattgttgccttagctgaagctgtaaatgggtctggctcattatctattgatgttgcttcaataaagataacagacaactcatttacatctcgtgaaggtgtagtgagggaatcaattactattcttgagcttgatagccaaagggctgtcttagcacctacaagaaatatttctatttctaataattccttggaaattggaatgaatccatttgattttaatgtaaagtctgtcataaatggctctgatgttagagtggatgtagggggcaatttagccagcaaaaaagccagtcagatcatttgtaaagatatggtcactaaagccattgcaagcaatgtagattcccgctctggagaatactttaatgtaagcttaaaggatagccaaggcaaaccattgcaaaataagtttgttcagataggttttaatggtgctgtttataatagaaccactaatgaaagcggagaacttagattacagataaatcttgcttataaaggagtttatacatttgccatatcctatttgggtgatgatgagtgcaacggttcatttgaagttgctaagataactgtaaatcctcaaagtcctattttaatggccaataatgcaaaatataaggtatcatctactaaaaccctttctgctagttttaaatcaatgaaaggaagtcctatttctggcaagacaatcaaattcactgtagatggcaagacttatagtggaaagactaattctaatggtattgctagtgtgaaagttagtttaaataagaagggaacttataaattcactgccaagtttgcaggagataatacttttgcagcggtgactaagtctgctaaggtggttattagt

SEQ ID NO: 16710 - DNA, 2769 bp, synthetic construct
  source 1..2769: mol_type = other DNA
gatatctccacaattccaaatgatgaaaaggtttctatcaatgaaaatgactatgatacaaattattatgagttacctgataaaaaattagatcatttagaatcaaatgataatcaaaatcatttagaaatgaatgataaaaaactaaatgatggaaactcaaataatgattttaactatatacaagagttgatcaatagtcataaagatggagattcaatattcttagaagacaaaacatatataggcaatggaagtccaattatcataaataaaaacctaaatatttatggatatggctataaaaatttatccgatcttgacataaaaacaatactggacggaaactccaaatcaaacatatttatcattaataagggaattcaattaaatctttatggattaagccttatcaatggaaatacaagttatgaggatggaggagccatctataacaatggactattgagtatagatagctgttcaatttcaaacaataatgctggcggaggagcagtatactcctctgaaggctcagaaattgaaatatacaacagtctctttgaaaacaatagcggacttcttggaggagccttggatttggaaaatgcaaatgcaataatatccaagtccacattcaaaggcaacagatgcaatggagacggaggagccatttacaataatattggaaagctaactatctctaattccaccttttcctttaacaagggagctcgtggcggtgttatctacaataatcatggaaccctatcaatatacgattgtgagatgttcttaaactctgcaagccaattaggaggtactgttaaaaattggggaagctgtgaaatatacaattccacaatcaaaaacaatactgcagacatgtacggaggaggattatacacctttgaatttaagatgactgtaaatgattgcctgatagaaaacaactatgcagatgaaggaggaggcctttttgcagatgcagacagcagattgattgtcatcaattccaccataataaacaacaatgctaaaattggagggggaattgatgcaaagcaagcttatctgactgtaaataactcttccattataaacaacaatgctaaaagcaatggaggaggaatctatgctgacaagcaccctgcagaaatccataacactaatataaaggacaataatggaaattccggaggcggagtcttcataggagacatatcagcaaaaataagtgattccaccttaaatggcaactctggagaaactggaggagcaatattcaataaaggaaaattgattatagaaaaaagcaccctaaactcaaatgaagccaattacggtggagcaatctataatcaaaagaacctaacagtaaacaaatcctcttttgattcaaataaagcctatgaagctgcaggaatctataacttaggagactttttaatagagagctctaactttaccaaacaatctgtaagccacaaagcaggagtcatcttaagcgtaaacggaaacattaagattaaagattccatatttaagcaaacaagcggagcagatgaaggcggagtaatctttacaagagaagggaatatatttatagactcctcactgtttctattgaacaatgccttaagttatggtgctgcaattgataatagcgcaatcatgacaatccaaaactccttattcagcagaaacaaggcatttggtgcaggtgcaattgacaatgggggagatttgactgtcacaaactccactttcacaaacaataaggtcacaaacaacggaggggcgattgacaataatggcaagctttatatgagcggatccgttctagtaaacaataccgctcaaaactacggcggagccattatctctagaaaagatacaaatatagagtattgccaaatattggataattccgctccagagggagatgggctttatgatagcggagattacttattaataagcaataattggtggggagaaaacaatccaaactttgatgaactcttaaacttcaatattgatgaagacttcaaatggattgaaatgaattttaccaattcaaccccccttatgcaaaaaaaggtctctaatttgaccataagccttaatggaaaggataaaaacaacaatagcttcaaattagagaatccagataaattgcctattttaaaatcaagtattcaagtggtaagcgaagacagtaaaattaagtacaatttgaatattgttaatggttcagcttccacttcaactgatatgaagcttgcaaagacagtaaatgcaattttggataatgagattgtcagcttagatgttttggaaaacaatgaatcggatgatgattccgaggattcagacgattcaaatgactccaatgatgaatcagataatccgaataattcaaatgataattcagataatgttactgatgattcagatgactccaataagtccaataatccaaacaatcatcaaagcaatggcaataagaataatgataataataagaattattataataaaaatggtttaagatattctaaaatgaaaaatagtcttttaaattctattgattcaaatttagacaatgattatttaaatttaaaagaaaataatgaaaataatgatgattcaaactccaataataaggatatgaattattctgataaaaaaactgatttgaataatgagagttctaataaggaaatcgatgaaaatgagaccaaattatttgatataaattattct

SEQ ID NO: 16711 - DNA, 3093 bp, synthetic construct
  source 1..3093: mol_type = other DNA
tccgaagatataaatacagatatagacacggattatcaatctgatagcattgatgtgtctgatgtaagtttaaatgatgaacagatagcatctgaggatagtttgcctaactatgaaattgcaaataaatccaaggacaaactatatgatgaaggagaagaagaggaaggcggcataacaaatgacgatgatgatgaaaattatagaattgatggaatctatgcagattatacaattacaccgtctgaaaatggaactatctttgttgaaggagaaagaatacaaataatatttaattttacagatcaagactatgagcctgtttccggagactggtttattaatttttatggtgaaagtacagatgtcgacatatatcatccatttgaagcaaccgggctcaccgactatgtcgttccaatttatttgcctccaggagactatgtcatattcttttatgaaggcgtggtttttgatgattttggtggaatagaagatgaaggaactcaattagatgtaacttttgaagatgcagaaggaaaccaattagataatccggaattctctatcagaaccaactacaacaaaaaggtatatgcaaatcttaccatagactacagtgtagcagaacttgaaaatctagtggaaggagacgatataactgcaaaaataagcttaatggatgaattcaataacaaaatgactgaaaaggttaacctagagatttacaggaatggagaaaactatgattctaaaaaggtaaacgttgtagagggccaaaataacaacatcatctttgaaaaccttcaggaaggaaactattcattggaagttgcaagcattgacagcgttccaaaatacactaacatcataacaaaagcagtcaacttcacagtcaaaagcaactatgacccagacaactaccaaatcatcctcaatccagaagatgagaaaaaacttgtaggagactcatatgaaatgggtgtaaaactactaaatccatctgaagaagcagaagaaggaagcattgacttatacctaaatggaaactttgtaaaaacattagaacttaactatgatgaagatggttactcccaccacattgtagaaggccttcagcttggccctaacaatgccacattcctataccaaatcagagatggagtaaacgtaagcgaatcagtaaacctaatcagatacgaaaccgagtccatcatagaccttgaaagctcagatatcattatcggtgacgatgcaaagatcaaggccagcctaagttaccttgacggaatcgtcaaaaagccaatcaacgaaaacttcaagctttatatcaaaaactacgttgaggatgaagatgaggtcgaatttgtctatgatgaagagtttaccataaaaggaagcgaaacaataactcttagcgacctagaggaaggaacatactacatttcagctgtatacaatggtaaaaactacaaatacctagcaactgaagaagaaagcacccttgaagtattccctaaggaaacaagagttgacgctgtcgcaagaacctattcaactgaagagaatgttattgtaggcatagaattagctgacctatctggaaaagccataaaaggcactgtaaatgttgtccttgacaacaagacaagttaccaagtaaacactaccgatgacatccaacatcctgtggaattggaccttggaaagttaggctatggcctccacaatattgaactaaactacacaggagacgatagcgaaggatggcttccaagctacaacaatgcagaattcctagtaatctatccaagcttcatgagcattgaagatggagacgtcacctccggaagcgacctgactgtcaacataagcttgacaggccctgatgatgaaggaataaacggaatcattacagttcgcatttacgacaataccggaaaatatctaataaatggagacttcaacacaacaaatggagtaaaaagcattgaactcaaaaacatcactaaggattatatcatctatggacgctactatggattggatacaagcaaaatagaaataggacctagcaatcattatttaagcagcgaagcttatggattcattagaatagctgaagggaaaagcgaaaaaaccgaatatgaccttgaattgaccaaggtaaatgacaacacagtaattgcaagccttaaggactccgattcaaagcctgttgcaaatgcagagctaacagtaaaagtgaatggagtagaatccaaagcaaaaacagacaataatggaatggccaacattagcttcagcggaaattcatcaatcaaggtaagctatactgatgcaaataacacaactgcaaaggcatctatggaaataattatcataaacaatgttactgaaaagattgtaaaccaaacagtagaggttccggttgaaatagagaagattgtctatgtaaaccaaaccgtggaagtccctgttgaggttgaaaaaattgtatatgtcattccaaacagaacagacactgcattcgaatacgaaaacatggttacaactgcagtggcatctgcagatggcagaacaggagaatacttcaatgtcagactaatagacgcaaccggtaagccattagcctacaagcctattaaaataggattcaatggagtcgtatacgaccgtacaaccgatgcagacggaagagcaaaacttcaaataaacctcggttataagggagattacacctttgcaataggattccttggagatgacaattacactggagcatttgaagtagctaagataactgtaaaacttcaaaagccacagttaagcactgcaagcaaaacatataaggcaagtgcaaagacaaagacattgactgccaccttcaagagcgaacatggaaatacagtaagtggcaaaaagataagctttacagtaaacggaaagacatacagcggaactaccaattcaaaaggtatagccagcgtaaatgtaagcctatccaagaaaggaacttatagctttactgtaaaatgggcaggtaatgatcaatttgcatctgtaacaaagagtggaaaattgaccattaaa

SEQ ID NO: 16712 - DNA, 3774 bp, synthetic construct
  source 1..3774: mol_type = other DNA
gcggtcgagaacgactatagcaatgctgacctcgatatttccaacgattttgttttgtctgataactccaacgagatcttgattgatagttcaggctcccttgatgatagcagtagtgcgctggtttccgaagggagtagcaatggcctggattcttattatagcaatgacctggtgctcaacgatagcctttctagcaggagttctgtcattgaggacagttgcagcatcgattcaacaacgatagaggataaggctctcgagaaatccctctcatctaacgaactcgcagaaggcaccaagacttacacagatctcttgaaggatatcaaatctgctaaaaacgtcctcaacttgaagtatgactatatttacgattctactatcgacaagtctcttaaaaaggggattgttctcacttttgacgaagattatgaactcacgataaacggcaatggtcatatcatcgatggtaacggtatagcgggtgggtttaactttgaaaacggcgaattcgttatcaacaatctctcctttcagaactgtaaaatctcatcattgatactcacctcatgtgatttcacgaccaactacgtgactttcagtaataattacgataaatcaagtggagcgtgcgtgtaccttgacaattcatatttttactcatctcacgacaactttatcgacaactacgcgcctagcggttctgccatctatggggaatgtagcgtcatcgatgtctatgatgggctgtttgaatcccagaagcccatcgattggtcatttatttatgggtgggatgagaccgagatctatatcgaggattgcctttttcggaatactgtgagtaattatagtaccgccgtttacggggattatattattgagatctctaacagccatttcacaaacctgttctctaaattcacgggaggcgccataggagttcgaaatgcaagtcttacggtcgaaaaaagtgagttcaataatgtgtccagtcttagaaacggaggggttatatacgcagatatgaatgtggatgaagaaaaatcctctgaagaaacaatcatcaaagactcttcattcgttaatagtaagtctgacttcggaggcgctgttcttcagctcggcgggaaattgaagatttatcgctccaatttcaccgaaaataccgcgaattactatggcggtgcgatctacacttccaatgtctctttttataccagcaaatcaaaattttcaaacaacgtcgcaaatgagatgaagggatctgctatctactttgacaacggagacctcaagatagaaaacagcaatgtgctgtccaacccgtcatgcgaaggcgcgatttatatctacgactctttctataacatatccggatcaacgttttccaacaacgatgtggcaatccactcattctttgatcgcactagaacggtgaagaatagtaaaacagggaagtcaacaaccgtgaagtccagtctcaacaacaatacatgggggggcgaccggaacaagttgaacaatgtggaatacccctacttcgttagcaaccttggccaggatattattctgaaccctgttaaaattaacgccacaataaaggacaaatatttcaacttggttgacctcggcttggtgacacctgtcaaggatcaaggcgactctggagcgtgttgggcgttcggaggcgcggcggccctggaatcagctattcttaaagcaacaggagtgtccttggacatctccgagaacaacatccagagtgcaggattgagatatagcttgtacggcaaaccttctcttacagaaggtggatacgactacactgcgttggcttactacttgagttggcttggaccaaataactcctccattgatgagtatgaccagtttgggaagatctctccgcaactcttttccgaggataactatcacatcctggacgtcatatttctggatccagcaaacacctcctccataaaagacggcttgattaagtacggggcgcttagcgcgtccgctaacggtgctgatagcgacagtaacgacttcttcaacgagaagacatacgcacagtattgtaatgatgatgaagccagcgcgaatcacattatttcaatagtcgggtgggatgacaactacagcaaaaacaatttcctgattacgcccaaagggaatggcgcttggattgtgaaaaattcatggggttcagattggggcaaaaatggctattactacatctcatattatgatgaatccctgaggtcatgttatgccgttgcgtatttgcttaacaacacgctcaggtacaataagctttaccaatatgatctcacaaattacgacgactttgatgacggggactacgatggggtgatttattccaataagttcacctcaaatggtgacgatctgatcgcggccgtcggtacgtacttcgagtatgaagacgatgattatgttatttcagtttatgtcaatggcaaaaaagcatatcagcaaaaggggacttctgcgtttgtcgggtataatactatcaagctcaacaagtatattgctgtgaacaagggcgagacctttacagttgctatcagctccagcgcaatgccctacgtcgatgacacaaggatacacctcccgaagggatcatcttttctgacagttgacggtgagcagattgacctcagtcagagggggcagatagcatgcatcaaggtgtatacctttaatgatacgaagatcaccagagatcaatctacctattacgggtccgataaaaagctcgcgatagagagcgaacttgaaggtacaactatctctttgacagactctaactgcaagtccctcggatcagccaaggtcgtcgatggggttgctcaattcgacctggtgctcgggcccggcacatacttctacacgtcatcttatgccggagagaagattataaactcctttaaggttttctccaccattggaggggtctccaacaagaatatcggttacaaagcgaccgctagtttcagccttagctttaaagatgagaatggggaaatactcaacaactcacaattcacttatacgctcgatggcaagagcaaaaccctgactacgctggatgacggtacgtacaacatttcattcaagaatcttgctatcggaacccacaagctgtctgtcaaaaatcttattagtggacaagtttctaacgctacaataaaagtggtgagtaggttttcaggagcaaaagatataagtatgttctattttgatggaacatgttacaaggtgcgcattatgggtaacgacgccaaggctgtcggcaaaggtcaaactgtcactgtcgtgctgaacaaaaaaacatacaagcttaagacggacgcgaatggttacatctcacttaagattcccaatactctcacccccaatggagcgaaggccaaagtgtactcaataaaaatgacatatgcaggacagtccctcagtaagaaaataacagttaaacaagttctgaaaactaacagtctgaccgttaaaaaaaaagctaaaagtttttccattaaggtcacactgaaagggaagaccgtccttaagtataaggtcctcaccatcaaattcaagggaaaaacatacaaagtcaagactaacgcgaaaggaattgcgacactgacacttaaaaaggctgtgatcaacggtctgaagaagggcggcaaatatacttttaccgtcacctatctgaaagacactatcaaagcgactgtgagtgtgaag

SEQ ID NO: 16713 - DNA, 3807 bp, synthetic construct
  source 1..3807: mol_type = other DNA
aatgaggatgtggataatggacttatcgattcagatgattctatcttgcagtcagctgaagtctctgattctgccattggatcagattctatcttgcagtcagctgaagtctctgattccactatagaatcagactctattgaactggaagataagggtaatgttttaaagtcaagtgataatgcttcttttgaactagatgataaaaataatataggatcagcagattctgaattggaagacgattatttagaacctaaagaaaagaatgttctttcaatggatgagaatgcatggttttataattatattgtgtggtatgatggtgatgatggagattgggtttcccttgattttgtagatgatttaaaaaatcctgaaaacatcaccatacgattaaacagttatgacactccatttgacggtgtggatttggctgttataaatgattatgactattcaatcactaaattaaccactgatgataatgggactgtagtttataatgttccatatgaggttgatgaattatctgtctttgtaggcttttggtatgatggggattttgtggccacttatggaaattgggaaagttacacaatctgcgcagtgaattggggcacttggtatagggacccttctaaacggacttacgacttttatgtctctgtgtctgatatggacacttatgaaagtccaattggcgcacaggtggtttttacaagcgattccaatcaatatgtcggaacaatagatgagaatgaaagagcaatcataccaaaggtcagctatggcacttatgatgtgaaggtcatatatgacggctattgcattcttaatctttcagattctagcgccattgagttctatgacgaccatcatacagaccctgattcacttggtgatgaaaggatagattatatgtatgtagatagtagtggagtagtttatcttgacctttgttatgatggttctctaaaagtgccagacaactccacttatgagccttatggtgatgacaacccatccggtggcggttcaggcaatcaatctggtggaactgttgctaatggcacattcacttcattgcaaagtctgtttaaccgtgctgcagcaaattcaacaatatccttaacaagggattatgtctatgatgatggattcgacatcaaaggaatagtaattaacaaggatctgacaatcaacggtaatgcccacacacttgatgccctaggcaaatccagaatattctatgttaacaatagcactgtcaaatttaacaatatcctatttgccaatggtaatgccactcttggaggtgccatttataatggaagtgccgtaaattgtctttttattaataatactgctcaagatggtggtgccatttattatggaagcgctttagtatgtgattttataaacaattccgcatctaggaatgggggcgctatctatagtggcggtgccgtaaactgtagctttataaataactcagccaatttaggaggcgctgcaatttatgattccttgtttgctgtgaattctacttttgtgggtaatacattggcttctagcaatcctacaggaggaagcgctacaacagatgtaagtgtggtgtcatttaatccaataactacctatatacctagccctccatccatgacaggttcaattggttggggaggtgccgtacttgactttacaaggcctgttatctatacggattataatgaaacattttacttgttgactaacttcactcttcagcaagatggctttaacaattacggcaatgttcaattgactggcagggatttggtcttcaagtcattatatccttactctggaaactattcaatggctcttatcatctctggacaaatctttactcctacatatgtccttggggaaaatgatacttatgaagcccattttaaactgaatggtctttctttagggctacatatggtttatgcatatgttgatttcggatatccggaatattatagctatagaataggtggaggctatatggatagggttgcttacgatagaactgcggagataatattccctattctcattaataagacagtagaaatctcatcttccaatctgaacaagtattacggtggaaccggaaagtatactgtcactcttacagatggcggaaatcctatagccaatgcaaatctcaatgtctctctagctggcaagacatatcctttaaagacaaatgcaaatggtcaggcaagcatggatataaaccttactcctggaacttatgaggcagtctgcacttatgatggagtttctcaaagatcaaatatcattgttcgctcaactataaatcttcaaaacctcactggcatttatcagaacgctaaagtaaatgccacattcttgaatgctgcaggcagtcctttagcaaacactaaagtcagttttagagtaggttccaagacttacagtgcaacaacaaatgcaaatgggcttgctacagccaatgttgatttagctgcaggcacttatgatgtgattgcaataaatccggtaaataatgagcaaaagacaagcaagctcactatttccaaagctaagtcttctataagtttaagctctacaagcaataatgataaggttaccttaacagcaagcttatccccttcaactgcaagtggaaatgtgacatttaatttaaacaataagaactacactgcaaagataagctctggaaaggcaagccaaaccattactggattgaatgaaggaaactacactgcaaatgcatattactctggagacagtaatcttaactcttcaagcgcaagcactaaagttgttgttaaaatagtcattccaactaaaataatctacaaaaatatgaccactggacctgtagcaaaatcagatggcaggataggaaattatttctgtgtaaaacttgtggatggcagcaataatgcattaacaggccttccaatcaagataggcttcaatggaaaaatctatgacagaacaacagactcaaacggcgaagcaagactgcagataaaccttgctaatgcggacatatacacctttgcaatctgctaccttggagacgatgatcatcaagcatcctttgaagtggctaagattgatgtaaacaagaagtatccaaagccaaacagtgcaaatggaaactccaatggtgtgcctgcccaagagacaataagcaatacaaagcttaagacctatatccaatacagcaatatgaccaccaaatcagtccttaaatcagacggaagggtgggagactactttgaagtcaaattgctggacaataacaaaaaggcaatggcaaatgttccaatcaagataggtttcaatggaaaaatctatgacagaacaacagactcaaacggcggtgcaaagctacagataaacctcttaaagccaacaacatacacatttgcaatcgcatacctaggcgatagcaaatatcaggcttcatttgaggtagcaaagatagttgtaaaagcccaaagccctaaactgactgctcctaaaaagacatttaaggcaaatgcaaagaccaagtctgtctcagcaactctaatctccgagagaggaaagcctatggccagtcagagccttaagtttacaataaacggcaagacatacacagccaaaaccaattccaatggtgttgcaacagtcaatatcagcctaaacaagaaaggaacctattcctgcacagtcaagtttgccggagtgactggagcaaatgcaaagaccactaaaacaacaataaaaattagt

SEQ ID NO: 16714 - DNA, 4305 bp, synthetic construct
  source 1..4305: mol_type = other DNA
ttgtacatctcagagatagagattaatcaaaacattatcctaaacactgaaggcaataaaatatatctaaacaattcccctaaaagcaatatacacgataactggtttggaaacactctgctgaactatgatgaggtgccatatgaaggctgcacaaattggatattcctaaatggagaaagcaaccaggtctcactggagaatccgatcagctttgaaatcacatttaccctatcctctttcaataagaatacaaagaaaataagcaactatgatgatagaaagcttccattcaatctaacagcacatgcagagcatggaatcttaaatccgaacagtaatcttttaggaaaaacaacaatatatgaaacagaaatcatcaatgttgagagaataatcggaaatattgcaaatatagattcagaatttgaaataatggagtttttagtcactgacggaaccacattctatgacttgaaccaactcatcaacaacaacagcaataatgaaatcaatataagcggaaattacacatatcatgatgatatagactttgaatttaaagagggaatcaatgtcaaccgcagcctaatcattaatggaaacggatttacaataaacggattaaactcctcacgcatcttcaatataaatggagacaatgtcacaataaataatatttcccttataaacggaaatggatatgaggacacctacgacagtgacggaggagccatatactggaaaggagctgacggaaccctgattcaaagcaatttcacaaacaacagcggatataatggaggcgccattctctgggaaggagacaatggaagaataataaacaacacattcaaaaacaacagcgcattcgatggaggaggtgccatcaccataacagtagagagaggaataataataaacaacacattcacaaacaacagcgcatcctacgatggaggcgccatctacctaatagcaagcagtggagagataataaacaacacattcacaaacaacagcggatataaaggaggcggaatgatctgctatgcagataatctaagcatgatcaacaatacaatggaaagcaacattgcatccgacgacaatggaggcgccattctctgggaaggagaaataggaagaataataaacaacacattcaaaaacaactacgcctctgaagaaggaggggctatcagcataagaggagagataggagagataataaacaacacattcacaaacaacaacgcatcctacagaggaggagccatcagcataataataactagtggagagataataaacaacacattcacaaacaacagcggatatagcggaggaggaatactttgctatggaaataatgtaagcataatcaacaatacaatggaaagcaacattgcatcctacgatggaggagcactttacgtcagcatggattatgcaatgataataaacaatacaataaaaaacaacaatgcatccgacaatggaggagcaatctactgggatagatataagggaataataagcctaaacacaatcgccaacaataatgcaaatcatgggggagcaatctactatgagggatattcttcaaatcttaactataacatcatcttaaacaataagaatagtgaaatctatttcgacaatgtcagaactttcaacggaagcaataattggtttggaaacaatgcaagcaattataatttgaatccaaacactagcttcgaatatgacaatagcccaaatgtaacccttagtgattggctatttttaaatggaacagcaaatccaaaaatagtgaatgcctttgaaagctcccaaatcttatttaaattatattcctatgacggaatattgataagtgaatatgacaattccctaataacagacaccaagctaaacttaagtgcagaaaggggaagatttgacaagacaagcgccagtttcaatgagccgataaactatactgcaatagaagggggaagagatacaataagaggagcaatagataagagtggatacagcataaatctaacaaacaggagagtatcctcaaaaattgcaatggatactaaagagataaactatagcagaaatgcatcaatcaagcttaattacaatgactttgcaggaggaaatgtcacaataagactaatgggagaaaataatgaatacctctttgaaaacatgaccctgaacaagacaatattccttggagtcataaatagggacagttacaacgtaagaatagaatattcaggagataggtcattcctagaggagaacataagcgaaagccttatagtgaataaggcaggaacaaaaatagttccaacaaatgacacaatagacctaggcataggagagaactcaaaagtcaactacactttctatgttatagatgatgaaggccaatacataactaacccagaggacattggaaacataagcttcaagtcagatggaagcgcagtcgaagtagattcaaagacaggggaaataaatacaattaaggaaggaactgcaaacatcctaataagattccaaggagatgaaaaccatcttgattccaatgcaagtgtatatgtaatttcaagtaataaaataaggaccaaaataacagcagaaaacctaacaacagattataaaaaggatgactacatcatagcaagattaaccgacctcacaggaaaaccgatagccaatgcaaagctgattgttgaacttaatggcacaaataactatacaactaattcaaagggagagataaaagtcccaacaaaaggattggattcaaatgaatacatagcaaagatcatctatgaaggagatgaaagctacagattttcaaatgcaagtgtaagactaatagtgaataagctaaatacagaaataactgcaaataatatcacaacaatctataatataactaaagaattggtgattagactaaaagacgtcaatggagacccagtaagcggggttgaactaactgttgacctgaacggaatgaataattatacaacagatgataatggacaagcaatagtggaaataaaaggattgattcctaacaattacacagcaaagatcacatttgaaggcaatggaaactataacaaggccagcacagaatcagatatagaaatattaaaaattccaagcattttaaatggaacagacatgacagtaaactataaggaagataaatatttgacagttagcctaaaagacaaagataataagcctatccataatgcaagtatctcagttgaattagagggtattaaaaattacactactaattctgatgggcaaataaaagttccaacaagcagtttacctgcaaaaaaccatacagcaatgattagatttgaaggaaacgaaatttacgaaaaatcaaatgctacagcgaaaataactgtaaataaaatttccggcaaattgactgcaagcaatgtcactgcaagatatggagacaatcagaacctagttattagtttaaaagacagcaagaaaaatccattaagtggttttaaagtgtctgttgacttaaacggcaaaaagaactacactacagattcttcaggacaaatcaaagtttcaactaaagatctagttccagacacttataaggcaatcatagtctttgcgggaaatgagaactatacaggatcaaatgcaagtgcaagtgtgagaataaatagaataaatacaacattcaaatacacaaacatgaatacaattgcttttgattcaaatatagaaggacgtattggagaatatttccgcttccaattgttggatgaagatggaaaaccattatctggcaaacaagtctttattggatttaatggagtcaaatacaatagaacaacaaatgaaacaggagaggcaaggcttcaaatcaacttaaaatatgtcaaccattatacctttgcaatagcattcttaggagatgattattataagggaagctttaatgttgctttaatcaatgtgactgaacagattccagtcttaagcacaagtgctaaaacatataaatcaagtgcaaagaccaagactttgactgctactcttaaatcatctagaggacatgtccttgcaggcaagaagattagttttacacttaatggaaaggtatacactgcaaatacaaacagtaaaggtttagcaagtgtaaaggtctctttaagcaaaaaaggaacttatagttttacagttcagtttggaggagacagtacttataagaaggtaactaaaagttcaaaacttacaataaaa

SEQ ID NO: 16715 - DNA, 4413 bp, synthetic construct
  source 1..4413: mol_type = other DNA
atgtccgaagatattggaatcaatgacaataatggtgctttgatagcagacgttaactttgctgatgacaataataatgctttaaaggctgaatccaactctgctagtcagaatgacgcttcaatagatgaatctgctaatcccactcaagatcttgtagatacagataatggattaaaccaatccatcactaaaagcccactaaaatccaatactggcctcactgttacaaaaacaattgataacagctctaaccatatgcctgtagacggattttacgacattggagacactatctactataccatcaacataaccaacaatctagaagaaagcataggcaatatcagtgttgttgaaaacttccctgatggattgatatgggaatatatttggtttgctgatgacaatccaaattggaaaaatgagagcaatgtattcaattatacaaaagcattagagcctgaacatagcatccttctcaagatacgtatgacaggaaataaaacaggcacttacattaacacaatcaatgtaagctccaacctaacaagctctcaagagttcttatccgaagaagtgactgtttatgctccaaatttaacaattacaaaagtggccaatgatccaatcgttaccattggagaaatagcaaactttacaatcaacgttaccaataacggaaataggccattaagtaatttgcgtatctatgaagatcctgaagaatcattattcctaaatgagttcactaacataagtggaaattgggactcttttgcaaatcgtggtggagattacggttttagcttggaccagctggatataggtgaatctgctgctataatagtatcttttttaacaacagaaattggaaatttcaccaataatgtctatagcaactatccgaatcctcaagtagaggcaaatgccactgtcacagttgttccaagaattgaaaagactgtcaatgccactgaaattgatatgggagagtctgttgaatacaatgtttacatcgacatgacaggagccaataaattaggcattgatgactttaaaatcaaggtcaccgacattttaaacgaatacttcgatttggataaagatagcatctcctcaaattggaaatataatagagatgaaaaggcctttgaatatatgctaagcgacattccagagtcatttgaattcaattttgctgtatatatcactgaaagaggaaattacaccaacacagtttcccttaaaataggtgacctgcctgaagtcagtgctgagtctgatgtcactcatgtcagaataagtgatgcaaatatcgctgaaactgccctagattcaacagtaaatcttcaagaacaagcggttttcattgttaatatcaccaatactggagataagacatttaatccttatgaacttgttgtaaacgacgactatgatgaagatgctctaacttacctcagtcatgaagatataacaggcaaatggatagagaatattgaaactgattccctttcatttacattgaattcaacattagaggtaggagaatctgcaagctttaagctttacttcaatacaagcaaggtaggatcttattccaattatgtctatattaacattaatgataaagaggatgattcaatagtcattgtattagctctcatgaacaaatcagtcaattcaagagagattgatgcaggagactctgttgagtataatatcttcattaatttaagcggatatcaaggccctgtaaaggttgaagaccttttcaatgatacatttgcattggataaggacactatctcagagaattggcattatgatgaaacagaaaatgctttcattttcgatcttagcgacaatccagacaccttaaaccttagcttcaatgttacaatcaatgaaaaaggcaattacactaaccttgctaagcttatattaagttcagattatcctgaaatcacagctgaagctccagaggtctgtgtctacaagccggatatgacagtgacaaaaacagtaaacgacactgaaatatatatcggagatactgtaaaatacactgtcactatagataacactggagatagaactttaacaaacattattgtcaaagacgaactggaccctgcatttatactggatgaatcctctatcactgaaggctggacttacaacaaggacaattcttcattcacttacaacaataacataagcgttggagaaagcgccatcttagaatttattgttgagataagcaaagaaggcaaatacacaaatattgtaaatgtctcaagtccaggagttgctaataaagaagctaggtctgaagaaaccgttgctaaaactattccgaccaatatctgcctagaaaacgtgactgccgatccagacagttttgtgagaataataatcaacataactgcagataaaggcttaattaatggaacagtaaacattactttccctgatgggacaaatgaagctgtagaaatcacaaacggaattggagaaacagtctggtatgttcctgataattatgcttcaggaaactacagtgtctttgcatattatgaaggcaatggaacttatttagaatctgaaggccaaggaaatattgaagttattccatattacactgaaataagcctatctaatgtgactgcttatccagacagtgatgtggaaatagaaatcaacataactgcaggagatgctaagcttataaatggaactgtaactgtaagtttcccagacggcacaaacaaaactgcagaaataatcaatggtacaggaaatgtaaattggactgtaccagatgattataagggcaattattccataagcgcaagttatcctggaggtggaaactatctggattcaaatgccacagccaatattgaagtcatagcaaagatcagtactcaaatcacagcagacattcctaatgcctatccgggagaggagatagatatttctgtaaatgtcacagcagataatgatgtaccattcaatggaaatataacagtgaatctacctgatggctctaaagaaactgtagagattaaagacggaaaaggaaacatagcttggactgttccagacaatttggatgtaggagattataatctcaccctcactttcgatggagataataattacctgccttcaaatgcaacaagcaccctaacagttgaaaagataaaattactcatcattatagataacattactgctcatccaaaagaggatgtgactatttctgttaatgttgctatagatgatggtagtgagtctgataattcaactaaaggttctttatctgataacaatctaaataagggtgctttatctgataacaatctaaataagggtgttttatccaataatgataataaggctttattaaaggcttatatcagttcagctaaaggcattctatccagcaaccatcttaatgatggagataatttcaacggctatgtcaatataaccttaccagacaattccaccgttgaagttcaagtcaaggatggaaaagctgctctcaattggactgtaccagagggatacgaaggtgaatatccaataaaagtcactttcaacggcaatggaaaatatctatctgccagcgagacaggatacattacaatcgaaaagatcccaacttcaatcgaccttgaaaacattggaacaaagccaaacagagaaatcataattccaatcacaataaaaactgatgatgacgttccattcaatggaaaagtaagtgttgaactgcctgatggcacaattcaaacagcagaaatcacagagggcattggaaacacaacatggactgttccagatgattataatggagaatataattatacagtaagatttgaaggagacgaaacctacctcccatcaaacaatactgctataattaaggttgattccaagatcccagttgaaataattgttggaaacattacagcaaaaccaaaagataaggtgacaattcctattgaagtaatcactgcagaagaatccttatttaatggaaatgtaactgtaagattgccagacggaactgaagtcactgcccaaatcactaatggtgaaggcagtgtggaatggacagtcccagaggattataatggaacttattccgttagcgtaagattcgatggagatgatacattcctagaggctgatggaactggatttattactgtaactccagagactccggataatccagtgcctccaataagtccagtaagtccagataatccagtagctccagcaaaacattcagctaataagccgatgccaatggataaaacagctccaggtaatcctataatggcattgttaatagtgctttcaagtttaatttttgtaagaagaagtagaaaa

SEQ ID NO: 16716 - DNA, 4917 bp, synthetic construct
  source 1..4917: mol_type = other DNA
gaaaatatcaatgaaagtgaagttgttggaaatgcagaaattgaaaataatttaagcagtactaatgataattttgaagtttcaaaagatataggttataacgtctctaaaaagatttcaacggataattcaaatgaaaatttaagaaattctcaacacatgactttatttataattagtgataatccgggaacaaatattctggataaagctattttagaactttccaatgaaaataagataaatggtgtaaatttaattattagaaatggaaatcaagtaaaatcaatgaatgaaaatgaattaagttatttattatctgattgtgatgcttttataggtgaatggattagtagtgatgtcgattctgtattgacaagtgttttagtaaaaaatcctgatttgtctaataaaaaattatttcttgtattggaacctccttccggcaatttaaattcaggatccagttcactgaatttaattaggaataataccttgaactataataaaatatttacgaattactcgaatgaggagttaattagttattttaaaaatactaaaaggggcaattcatattctatcattaataattatttaacaaatggtaacggaaaaaatttcgattcaatttttaatcgattagttctttataaggatttgaatgataaaaataatttgaaaaatcaaatattgtttattttaaattatttgggcgttgatgttagttatgaacagccaacatttaccggtgttaaaaactatggtatttatagggatagatggtactccttggatgagtatatttctactttttttaaagcaactaataataggacggttgggattttagaaagtaaaatgtatattgaatctcagcagttaaacacttgctattcaattataaactcattggaatcaagaaattataatgtaattcctgtctttgctgatggaggatctgctgaacaattgaaggtcatggttgaatcctggacaagtgcgggagatgatatttcaggatttttatctaattcttctaattttgatgtttatattgatgcgattgtatcgatggtggcatatggtgttggtggggaaaacttcacaaaagcaacatctttttttgaagaagctggtgttcaggtatttagggcggttcactcggatcatgtttcaaatgaacagtgggaattaggttctactggtttaactacagaaaaaagtgataaatggtggcacattactattgctgaagcgcaaggaataattgatgccacattcattggaggtaattcaagttatatatcaaatttaaccggagctcaaattaccacttatattccgcatgaagggaacatagggttacttgctgacagaatcgattcttgggtggatttaaaatacaccttaaatgaggataaactgatatctataatttattataactatccaccgggaaaacaaaacatcggttccagttatttagatacaataaaaagcatttataatatactttatactttaaaagctgcaggatacactgttggaagtttgccagttgatgttagtgaacttgaagatctaatgcttacatgcggtataaatgtagctacatgggcaccgggagaacttgaaaaaatagctaatagatcttgcataactttacttccggtaagtgaatataactcctggtttaattcattagatgaaattgtaagaatacaagtttctaacggtactgttgcatatattggtgagttaactaaaagagccgttgaattagattataccaaaacaattggaagcacaattgacgactggtataatcaagttgtttccttacttccagatgaaaaatcagttgaagcaaaagaagttttaagtaatattgtcagggctttaaaagattatgctaatactcattcacaagactattatagattatatttaaaatattttgatgaatttaaggaattaaacattcaaggattaaatggatggggtgaaactccaggaaatgtcatggtagttaataaaaatggtacagattactttgtaattcccggattgacatttggaaatatattcgtggctccagaacctcaaagaggatgggagtctgatattaaaaacctttaccattgcactgctgttgctccaacacatcaatatttggcggcatattattatatgcaaactagaaatccaaatgcgatggtcttcaccggaagacatgcaacacacgaatggctgccgggtaaagaaattcttttgtccgcaactgattatggatcagttgttgttggcgatgtgcctcaattatacttctatattagtgatggtttaggtgaagctattcaagctaaaagaagaggatttgcagttattatctctcacttaacatctccaatgtcttatgctcatttgtatggtaatctaacttctcttgctaatttgataaacgattatcaaaaggtagggagtaactcagaaaaaaataaaattggagaaaaaatacaagatttgataattagcaatgattattcaaccaatttaggactcaataagagtcaaataaaaagcatttctattgattcattaatagaaaaaattaatatatttttaaaatcaactcaggatactttacatccgttaggccttcatgcattaggagaatattggagtgaagaggatattgccagtacagtttctgcaatgctttctcatgattttgttttagagaataatcagggaacacttaatttatttacagaactttctaattattactattcaaaatcatatggtgatttaactccatttgaaagggaatttgtattgaataaatcttatgatatatgtaaagcattaatttattgggatgttaatactataaatgaggtattaattaatgacaatgttaaatttaacaattctaacttctatgcttgtttaaatttggctaaaagatacataaacctaattaatcaaagtatttcaaatgaactaaatgccatgcttgatggtttaaatggcagatatattcctacaggagaaggtggggaaattgttgtaaaaccaagtattttaccaacaggtacaaacattttccaagatcaatcatctgaactaccaacacaggatgcatggaattatgcaaaaattcttgcattattaactttagctgatttaaatgacactactgaaaaaattatcatggggatatggtgtgttgaaacagcaagggatgatggtgctttggtttcaactgttctttatttgttgggcatgaaacctgtttggacaaattcttcaagcgccggctttgatgatgaaggaaatcctactggaaaaaaagttggtgcaatgcctgaagtcattaaattaaatgatttaactcgtcctgagggttggaataaaaaaagaatagatgttaccataattactagcggattattcagagatttatactcttctcagtctgttttaatggataatgcatttagagtagcattggcaaggtcatatttaacattaattaataataaaactttaatgaatggaaaatatggcaaggaattaagacaggcattggactgtgtcatggagggtataaattattatagggcttctaatgaagctttaaaagataattatgttgctcagcattggattaaagattgcctatattatttgagtattggttataatgcatcttatgcaggggaatgtgcaattacccgtatattcgcaccacctaatggagattatggtgcaggaatatcaaaattggtgtcaatgtcatggacttggaacaacacagacgaattagctcagttttacttaggtcgaatgggaaatatgtattctaaaaattactggggagatacaaatccattagtatttctaaaagcattatctaactcagacacaataataacaagccgcaatacaaatcagtatggtgtattggataatgatgacttctttgattattggggtggtttatcaatggctgttgaacatgtttcaggtaaatctccgaaaatgaatgttttaatgtatgctgataaggataatgcatatatttcttcacttgaagaggttatgtatcgtgaaattgcttccagatatgacaatccggattggattaaaggaatgatgaaggaagggtacggtggagctcgttatatgtcaaataaatttgttagcaatttattaggttggcaagtgacaagaccggattcagtttcagatgatttatggaatagggtgtataatacctattataaagacaaatacaatctgggtgttaaggattggttaatgagtggaaataatgcctattcccttatttcaatgagtggaacaatgttgagttcaattcataagggatattggaatgctgatgatgcaacaataagagatattgcaaatacttgggtgcaggcaacagttaaaaatggtgttgcatgttgtgattgcagctgtggtaatgtggctatgatgcagtgggcagttcagtatgtaaatcctgatattttagcacaattattgccgaaattatatgatgcaactgaaaatccagtattcttaaacaatactcataatccaaatactaaacctgaaaacaataatgatcctcaagtagaaccttcaactccaaatcctactgatggttcttcttctagttcaactatttctaataatgcaacttccacaaattctaatcagcattcattaagcaatagtcaaaattcacaaggaaatgcggtttctgatgtgggagacagtagttccagtgattcaggtacttttagttctgaaggtgctgatgttaaaaaagcaattgaaattaatcctatcacccaacaatctgcaagtgaagttggtatgagtttacttgcagtttta

SEQ ID NO: 16717 - DNA, 4977 bp, synthetic construct
  source 1..4977: mol_type = other DNA
gcttcaagtgatcttagttcaagtcctgccgataatgaaaacttggaaattgatagttttgactcaaatgaggatttaacagttaatacgaatacaaactatattgaaagcggaaataatttggaaattgattataaatctaattctaaagaatctgttaatgcaacaaatgatataaaagaagaaactgttgattacaatgaagatatttcagttgaaaagaataatctaaagtcttctaaattgagttctgtttataaaataacagaatctaactactctaactactttaataaaagtggaaacatcctatctaatgtaaaccctggagatacattagatttttcaggttcattcaacaataaggactttaaaatagatattccattgactgttacaagcagtgacggtgctcaattcattgattgcagcttcaagttcaataagggctctgacggctctaacatatccaatttaaacattaactcttctcgcttacaaagtccgcttatctatttggattctgtcagcaatatgaatgtattcaacaacaatctattttcctgcgcttcaaaatcctatgctctttgctttagcaatgtaagctattcctctgcatatcacaacacccttcagactacagcatttgttgtaggatggggacatccttctgcctttgtcttggctggagcaaataacttaaatatctcctcaaacaatgtgatagtcaacgattccaacggaatctatttcactacatatgttggagacacaattagcgcgaacttaatcaatgaaaataattatatctttaacaataccgttcacagtgtccgaggagttgaatgggcagttgatgaaaatggaaccactcctctcccatcctctttctgctatgcgatacaagtgatgggaagcggtaataaattattgaacaatacggtctacaatgcgtataggggcataagtgcttccggatcaaatagtgtcgttgccggaaatgtggtttatgatattaagggaaattattatagcggaaatacaaaggatgacggcggagactatggaataaatgtaggaccaaattccatagttgaaaacaatacaatatataattcccattttaataaaaactctggagtggccatttctgtaggttcaaatacaactgtaaggtataataacataacaaacatcaatggtacaggggctgatttgtctaaaaacttcatagaatttagccataatcgcattgataatgtttcagataatggaataagagttaaaggccaatatggtaatactaatatttcagataacttcattaattcaacagacagttcaatcactttattgagaagctcaaaggacaaatatccgtccagaatcaatatagaaaataatgatttctatacagatgtctctcctatctattatcttgaagggtatattggcaagctgacagcaaaggacaatactctcaatggttcttccatatcagatattagtattgacgttcctagctctagcgaaactaaggtttctataaattcaactaaaatagatttcaatgaatctgttctaattatgccaactgtcagcgcctatggtctttcacttgaaggccttgtcgatataatagtcaatagccaaaagattgcaactgttcctataggatctaattacactttcactccaactgaagcaggaagttttagcataaacgctaatttcacaggtaatgaagagtataagccatctgaatctgctgttttgattctgactgtgactcctaaggaaactaccacttccataataataagcccaagcactgttgagcttaatgatactgttgtcattagtccttttgttcgctacaatggaactcttttagaaggttttgttgatattcttttagatggtgaaaagttagatactgtagagataggctctgattatagttatgttcctaatagttcaggcagtttctacatcagcgctagcttttctggcggaaatggttatggtgcatctgtttctgatatgctcatccttactgtaaatgagtccagctcaattgaggatccggatgatccaactaatcttacagtctcttcaatccttatcagccctaacactgttgaggttaatgatacagttcttataagtccttttgttcgctgcaatggaactcttttagagggtcttgttgatattcttattgatggtgagaagttagattctgtagttattggctctgattatgcttatgttccttctactgccggcacttttaacattagcgcaagttatgctggtggaaatggatatgagccatctgtttctgatattgttgttcttactgtaaatgaaaagcaaattattgataatggtacagataataatggtacagacaataacggtactgatacaaacggaacaggcactaatggaactgatactaatggtacagacaataatggtactgatacaaacggaacagatactaacggcactgaaaataatggaacagatacagatcaaattaaaataatcataaatgatgacaattactctgattactttgataacggctatccaattgatttagatgttgatggcaattatactctaattatcgactcattaaacaacaaggacataataattccatcaggatttaatataaacatcataggaaaggaaggctctggaacaataaacaacggtacaattcaattaggtgacggcacagatgaggtcggtgatgtaaagatatccaatctgacctttaataattataataaggatgctatagtcataaacgaaattgcttatgatctaactgttgaaaacaataagatcataataaatacagaagccagtcctggaaacctatactttagcgtttatggaatcaatgcaaagggctatgttgattcattggctgtaagagacaacgatattttcctaaacggttctgctccttacttatatggtgttagtttgggaggctacggtgccatagcaaaccctcagaatatattcgttcaaaacaatacaataaatatcaacagcactgcaagtatgggcatggctgagggcatttacttagacaaccctataaatgcagctgttttagacaataaaataaatatagaatcaatcaatgatgtatatgtttacggcatgcagattgcagactctgcattcagcgccataggggaaggaaagaccggtgtcaaatccccatatgacataatgattgaatcaaatgacttgaatcttaaaagcaaatatatggtttatggaataaccattcttgattatggctgtgacggcagcttgaatgaattaggtcagccaatgaccaatatgatggacttggacactacaatccaaaacaacaatctcgttgccgattctgaaaaggcagttatgggaatcgttggaaagacctacaatatgtctgttttatgtaacaatctgtctgtaattggaggatccattgaaggagttgcatcccatgatgcattaggagttgataattatgctcttggagtccaatactctggaaaggattatactgttcttgtaaaggacaatacagttagcacaaatgttttagctgagtatttaaacaataaagactatgaagcctatgtttcatttgttaacaatacaatatatcatattgatggcccatctagtggaaatgatactccagagaatggcactggtgataatggcactaatactaatggaacagatattaacggtacagacactaacggaactgacaacaatggcactaataatggtactaatggcactaatggtacagataccaacaatacagacaatataactaaaagaacagttaaagatctacaggaacttatagataatgcaactagtggttctgtagttgatttaggcaactttgaatatcttgacgtatctaacattgatataagcaaggatatttctattgtaggaaacaatacagtcatcagaactgcaggtgacggcaagccagtcttcaatattaaggaaggactttcctcagtttcaataagcggaatagaattcatggcaaataatggagatgtacttatcagagctaaagcagtcaattcaactagcagattggctatagaaacccctgaaattaatataataaataatactgtaatcaagtcagatgatggtgttgtagccgaatcagtcactgttcttgaattggattcttctagatgcatacttgctccaacaaatgatatcaaggtctcaaacaacacattggaaattggaatgaatccatttaactttgttgtggaaagcgtcattaacgctgctgatgttaatgttccagtagggggagaccttcaaagcaaagtcaaatccgtaattcattatgaggatatggataccgttgccgttgcaaaggctgatggaagggtaggaaaatactttgaggttaatctgactgacagtgatggaaatccattatctggcaaattcgtacagataggattcaacggtgcagtctataatagaaccacaaacgaaacaggtggtgtaagattgcagataaaccttggatacaagggaacctatacatttgcaataagctatcttggggatgagaattacaatggaagctttgtcgttgcaaaaatcaaggtaagcacacagaatacaaagatcactagctcatcaaagacttataaggcaagcgcaaagaccaagactcttactgcaacacttaagtcctcagttaacggcaatcttataagcggaaagaagctgactttcacagtgaatggcaaatcatacacagcaactaccaattcaaagggagtcgctagcgtaaaggtcagcctttcaagcaagaaaacttatagcttcactgtaaaatatgcaggagatgatacatactcatcttccagtgcaagcggtaaacttactataaaa

SEQ ID NO: 16718 - DNA, 4605 bp, synthetic construct
  source 1..4605: mol_type = other DNA
ttaaacaatcatcctgaattgtcaaataagaaactgttccttatcttggaaccacctactggaaacatcaattcaagctccagttcattgaatttggttagaaactctacaattgactataagaagatattcaatggaatttccaatgacgatttgataaattatttcaaggctaccaaaagaggaaacaacttcgaaagcattcaagaatacattgacaatgaaggaagctcttttaatagcatctttaataatttggttctctataaggatataaacgataaggcaaatcttaaaaacgaattgctctatatcctttatctattgggacatggatgttcctatgagtctgcaaactttacaggagtacaggcatctggaatattccgtgacaggtggtattcatttgatgaatacgttctcaccttcttcaatgagtccagaaatcgtaccatagggattttggaaagtacaatgtatatccaatcccaacaattggatttggtaaatgaaatcacagaacgccttgaatcaaaaggatataatgtcattcctatttactgtccggcaggtaacgccgaacagctaaatatcatggtgaaatattggaccagtgcctgttcaaacatcagcggattcttagagaatccacaagactttgacatttatgtggatggaattatttccatggttgcatatggtgtcggtggagagaacttcaccaatgccacaaaattctttgaagatgcaaatgtgcctatattcagagcggttcactctgaatacattaccaatgagcaatgggaattaagccctgtaggtctctctaccactaaaagtgataaatggtggcacgttacaattgcagagtcccagggaatttttgatgctacatatgttggtggtgttgactcttatatttcaaataggacaggagcaatcatattgacttttgttccagttcatgagaatatagaactcttgactgatagggtagacgcttgggtggacttgaagtatactccaaatgaggataagaacatatccatcgtatactacaactaccctcctggtaagcagaatatcggtgcaagctacttggatgcaatcacaagtgtctataatatgctttataccttaaaggatgaaggatactatcttacagacttgccaaacaatgtttcagaacttgaagatatgatgattgcctgcggtataaacgtagctaactgggctcctggagaagtcgaaaagttagctaaccgttcaggtgtcgctcttcttcctgtagatgaatacttggaatggtttgattccttagacgatattgttaaagtccagattaccgaaggtcctgttgcctatattggccagatggttaggcgtgcggttctaatcaactacaccgatgaggtggagacaatggtcaatgattggtacaatcaaatcaaggcattgcttcctgaaaatcagactgttgctgcaacaaatatattggataagcttgtaaacagcctgaagctctatgcaaacgcatcttccgatggcgatgaaaatgcatccctttactatgatgaattcttaagatattatgatgagtttaaaagtttgaatgtttctggattaaacggatggggtgaagctcctggaaatatcatgctggttaatcggaatggaaccgattactttgtaattccaggtcttacattcggtaatgtcttcattggccctgaacctcaaagaggttgggaggctgacattgaaaacctttaccactgtacagctgtagctcctactcaccaatatttggctgcttactattatatgcagaccaggcaatcaaatgccatggtatttgtcggaaggcacgcaacccacgaatggttgccaggcaaggaagttttattatcatataatgattatggttctattgttgtcggaaaggttcctcaagtatatttctatattactgatggtttagcagaggctatacaagctaaaagaagaggatttgcagtattgatttcccacttggattctcctaaatcatatactcatttatatggtaatctaactgtattggcaactctattggaggagtatgataataatcatatcattatagagtctgattctgataaagataatcaggctatcacttatcaggtaatcaaggataatcagactatcacttatcaagtaatcaatcaagagttagaggacaatctaacaagagcaatcaaggacttggtaattgcaaacaattactaccttacaattggattcactgcagaggaattgaacaatactgacatgttctccctaagctcaactttaaatgctttcttaaagaacactcaaaataccctatatccattaggacttcatgcaataggtcagaaatggacagatgaggatttggcgaacaccgttgcaatcatagtctctcatgactttgaatatggcggcaagaagaccaatctattcgatcagctatccttgtattactatggggaaaaatattccaatctgactccattgaagcgtgattatatcctaaacaggtcagtggatgtctgtaaggctttaatctattgggacacagagacagtgtctgatacaattggtataggaagtccagagttcattgagtcattaaacattgcaaagaaatacattgacctttacaatcaatgtatcagccttgagctggaagagatggtttccgccttaaatggaggatatgttccagtcaatataggcggggaaagtgtgactgtccctcaagtgctccctacaggagcaaacatgtaccaagaccagtcatctgagcttccgactcaaaaggcttgggattatgctaagacactctcacttctaaccttggcagaccttaatgacactacagaaaagataatcatgggtatctggtgtgtagagactgcaagggatgacggtgccctagtctctacagtgctctaccttttaggaatggagcctgtctggcataactcatcaagtgcaggatttgacgaagagggcattcctacaggtaagaaagttgaggacttgcctaatgtcatagcattggaaaacctcacccgtcctgacggatgggctaaaaagagaatagacgttactgtgattaccagcggattgttccgtgatctatacagttcacaggcacgtcttatggacaatgcatacaggatggctttagcttgttcatattacactatcgtaaacaataagacaattatggatagcgaatatgggcctcaagtctatgatgcacttagatccatcatgagaagcattagcttcaagggaatgtcaaacgaatcattagaagacaattatgtcgctaagcattggctagaggattgcatctattatctaagcctaggctataactctacagtctctggagaatatgcaataacccgtatctttgcacctcctaacggggattatggtgctggaatatcaaagcttgtgtcaatgtcatggacctggaacgatacagatgagctttcagagttctatattggcagaatgggaaacatgtattcaaaatattactggggagatacaaaccctgtcgtattcatgagggcgctatccgatacagaccatattgtggtaagccgtaataccaaccaatacggagtattggataacgatgacttctttgattactggggaggtctctcaatgacagttgaatacctatccaacaagactcctacaatgaatgtattgatgtatgcaaataaggacaatgcatatgttgcaacattcgagaatgttttctataacgagcttaatacaaggtatctaaaccctgaatggatcaagggaatgatgcaggaaggctacagcggttccagatatatgtccaacaagttcatttccaacctatggggatggcaggtaaccagaccttcatctgtctctgaaacagtttgggatgacgtttacaatacctattataaggacaaatacggattaggagtaaaatcatggctccaatctggaaacaatgcatattcattgatatccatgagcggaacaatgttgaattccgcatattcaggatattgggatgcagatgatgctacattaagtgatatagctaacacttgggcacaggctacagttgcaaatggggtagcatgctgtgactgcagctgcggaaatgtggcaatgatgcaatgggcattcaagtatgtgaatgctgatttgcttgctaagttgatgcctaagttgtatgacgcaactcaaaatccgctcttctatacaaatagcagtgatatgcctacaaactcttcgaatattgaccgccgaactacaaacagcagtgcagagtcaaacaatactgaaactgttcagactaactcaagctctaacagtcagcaaagcgctaacggaaacactaatattccaggagcaagcggcggctatatggtaggtacagaagcggatgcccaatcagatatggccagtgattcagatgcaggaatgaacgatgcaaatggagaaggcagatctgtagaggtcactaagagcacaagcactccagtggctccaaaggacgtaagtatg

SEQ ID NO: 16719 - DNA, 3906 bp, synthetic construct
  source 1..3906: mol_type = other DNA
ggcataagaggcccaaggatatatatcgaccaatattatggagaaatctccaatagcggcaatgtttataccgatgaatatgaagaaaagggattgttttcagattatggaatgggaatttcttttgaaagcaatgaaggtttggtcccattgattcactattacccttcaaacgagtcattgccttcattctatgaccctagaggtggtggagattcagaagatgattatgaagatgaggatgatgattcagatatagctgttaaagaccaaggcattggaggcaactgttgggcattttcaggaattgcaacccttgaggcatgccttgaaaaggtaaccggagaggaattcggcttttcagagggcaatgctaaaaaccttatggccatatcatccatttatggcttgaacatagacacaaacaatggaggatatgacacaatgttccttgcttatcttgcaagctggctaggtcctatctatgaggaatatgatacatataatccattatcctccctatccatagatcttccttcagtattccacattcttgacattgatttcttggctcctcgtaaaaacagcttggataatgatgagtacaaaagggcgataatgaataacggagccgtttcagtgaccttcgattgggtggaaaataaggtttccaacggattccattcagtttccattataggatgggatgatgattatgatgacattgactccttaggaaactatgcaaagggcgcctggatatttaaaaacagctggggctatgaatggggagatggcggtttcggatacctttcctataagcaaaagctttcagaggagatagctccatatatgcatgcatatacattttcatttaaggaaaatgacattggatatactgacatatatcaatatgacttttcaggattaagcgatttcctgattttaaattccacaaatgcctattataagaacaagttcatagcagaggacaatgaattcctatatgcattttccacatattttgataaggagaccgatttcacctattcagtttccataaatggcaatgtcattacaaaaacagaggatggcaaagacatattgacttctatccatcattctccggctggatatcataccattccattaggctataacctgaccttgaaggagggggatgagtttgagataatcataaaattgctgaatgacaatcaaaacaggattcctgtttgccaagctgatgaattgtacagaacttcactgccttcaaatgcatctttcatgagtttaaacggcaaggattggattgacttgagcaatttagcttcatccaatgagttctcttcacttggcatcaaggcaaacacttcacaagtagcttgcataaaggcattcacttccaattggagaatgaattcggattcctctatagtgaactctaagaatcatagcataatcacctcagaaggaacagagttaagccaatatgaaatatgccagcttaaggtaggctcatttacaagggcttcagccaatgaaactatcattatagccatgagcattccagaatggagaaattatcaggatgaatatgaaaattatatagaggttcatatcaatgatgaattctattatgtaagggtcaatgagggagttgcctatttggatatcagctttgataagattggccattatgactttaaggcccagttcaagtccaatatatactcatctgatattgtagagtttgattttgaagtagtaaaggattcaatctttgatgttgatgatttggatgcctcaaacccaggaactttcaaggaacttcaggatataattagaaatgctaagaacggttccataatcagtttggataaggattatgctttctctagtggtgatgagtctgttgttgatgattatatagagataaataaatctctaattattgatggaaaaggccatataattgatggttcttctgattcaggcatttttagactaagttcaggtgataatcttactttgagaaacattaagtttatgaatgcagataatggtgcaatagtttctaatggaaatttgacagtttctaattgttatttcattagtaattgtgcttctggttctagttctacttctacttccagttctgattctagttctactgcttgtggaggtgcaatttactgtgaaggcacttgttttatagtgaattctctatttgaatctaattctgcagatgccggtggtgctgtttactgtgaaggcacttgttttatagtgaattcttattttgattccaattatgcagatcttggtggtgctgtttgttgtgatggcagctgttatatagtgaattctctatttgattccaattttgcagtttatggaggtgcagcttccatagttggaaatgaatcatgtgaaattatagattcaaactttattgaaaatgaggccatctatggcggtgcaatatacttagaaagctattgttatcttttagattcaagtttcaattataattatgcaaacaatggaggcgccatttattctatagctgaccttgacattcataccactggctttaattacaatgaagcctataaggatggaggtgcaatctatcttgtaaacagcacatcctatatcaatgaaggaaatttcactgaaaacagtgctaaagagaggggcggtgcaatatgcgcacttgaattctcaaatctaactattagatgggcttatttcatggataactctgcttcaaagtatggaagtgcaatcttttcagtaaatgcccttaacattacagattctgaagtgactgtaagttctggtaaggtggaacttatctgctttgcttatgattatgcttcaaatggccaggcatatggagatttatactttgatgaaaatagcttttatatcagtggtgctcctgagatttactacttcagagaaaagatagctcataaattagccttggatcttgagttcaataatatagagcttatcagaggaggaggcgttgagatatccagggacttgaatgatgatggctgggaggataaaatcaataacaatatgcttgagatatgcagattggttgatgacgatgattatatgactgtccttagaatgaaggagatagaagtgattctaataaacaagaacaatagatctgacattcaaaagtttaagattccatttaatgtcaagcttaatggctatttccttaacacttcttcattgaagtatggctcttatatccttactggaaatctttctaaggatcttgcaagcaattgtattgtaaagaatggaactttgaaagttttaaggaaaactaccctctcttctctgtctactttcactaaagtttatggaaatagtaagaatcttgtagttactttaaaggacagtagtggaaaagctatagttggtgttaatattgctgttaaattgaatggaaaaacaattaaagcaaagactaattcaaagggtcagatttccatagccattagtcttaagccaaagacatatactgcatatatcagctttgcaggcaatgactattatgcaagcgcaagcaagaaggtaaaggtagttgttaaaaaggcaaaccctaaattgactgcctctaaaaagacctttaagttaaggaatgctaaaaagtatacagtcactcttaagaacaaccttggaaaggcattgaagaatgctaaggtcactattaaggtggctggaaagacttataccgctaagactaatgccaaaggtcaggtaacattcaatttgaaattggctaaaataggcaagttcaaggcagttgttagctttgcaggtaataagctttataatggcttgaagaaggcggttgttttaactgttaaaaag

SEQ ID NO: 16720 - DNA, 4068 bp, synthetic construct
  source 1..4068: mol_type = other DNA
accatatacgaattcacaagcatttatgaatacgcctctttaaatgacacttacattgacggcatagtttccaccaaaatcccttacgccttggaaaacattgaactttatgtatccgatggcagtggcgatgatgaaaatggaaacggcagcataagcaatccatttaaatcaatttccaaggcattgagcgaaggatatcaaaaatcaacaaatattacagtgcatattttggaaggcacttatacaggaagtttaaacagcaatttaagaattccaacaactgttaacatattgcttatcggcgaaggggcagccaagaccataataagtgacagctcctcagactatttcattacagcattaaaaggcaaatgcgaattaagaatatcccagatgacattgaatagggcggcccgtgacacacaatcagccatctatattgaagaggaatccaatgtggccattgacaatgtcacattcattggcggccaaggaaattacggcggagccatcaatactgcaggaaacctttccataagaaattcatatttccatgacaatggatatgcagatagaactttacgtgcaaatgcctattacggaggagccatttgcaatgacggcaccctaatcattgacaatacaatatttgaaagcgaccatgcaggcagactaagtgaaattgcgaatcaaggcacattatacatgaacaattcaaaagtgattgacagcataaacgcatatagcataaacatggatttggttgctatcggcgcttatggtggccaaaagggcgaaattacaatagaaaatagccaattcatagttagctccaagaccatcaatgaattgaatgacagaatctatgatcctacaagggcattgacctgcttgggcattggttcatgccaacatgcaatcctcatcaactccacattcattggcgaaggggcagtattctccccttatgtatttggcggaattaactcaaataatcttgcaagtggaggatgtaccatgattccaggagatttggaagtctacaattcaacatttagaaatgtccaagctgtaaatataatatattcaagaacagataatgtgagatatcactcccaaagggtctttgaaggatgcctattcgataatgtcgaatatataatagctgttttgaatacaggcaatttttcagttgagatgcatgactgcgttattttatcagatgatcttgctaaaataggatttggaagtgaaaaaaccatgaaaatggacatttccaataactggtggtcctccaacgatggaagctatgacaatgccaccctaggaactaccaattacatttcaaattgtgttgtaaaactcaaggaaataagttcagagactgttcatcctgaaagctatctgatcctaactctaaattcaagcaatagaaccggtctgctacaggatgcaatcctggcattcaaggcatacgacggcgaaaacataagcgattacgatggagctttatatcctcgaaatttcgaaatgtctgccataaatgccactttagatgacctggagggcacaataattaacaaggccatcaatccatttgagggtgtagaaaacagcggatattacattgaagccattgtagacaatcaaaaggtcaatctgacagtccatgacagcctatctatcggcaacgcatacattttagctgagaacatttcaatcaactacaatgaaacacaaataaatgtcactgttttggaagagaacggcaaaagagcggatggaggaaacgtttcattgaaattgcatgataaaacctatatatccgaaatcattaacggcactgccatattcgatatagatgtccttcctaaaggggattacctattaaattattcattaaatcgtcctaaggtttatcacagcatttccaactcatcaaatttaactgtcattccatttaaaataaatgcttacgccaatgccagcaatatcaaagtgggagaggatgcaattgtcatagcctatctagataaggatgccggaggcaacgtcactttaggtgaggaaatccaaaaagtcaatgatggaactgccactttcatcatttccaatttggccaaaggggattacacttaccaactaagttattccggagatgaaaaatacgataatgaaacattccatgtttcattctctgttaacttgaaggatgctagcatcagcgttgagaatgacactttggacttgtttgttggctccaatgaaaccattgttgccactatctctccaataggacttgccgtaaattacagttgcagcaatgaatctgtagcaatggttgatgaaaatggtgtcgtcagtgcagttggtgcgggaatggctgtaattaccttgactgtcggtgatgatgtaacttatagcaaaaactctagctctgtcactgtcattgtcagtaaaatcccaaccatcattgagatagttaatgataccattagcttagaagtcacagacagccttgattccattgcaagtttaaatccagaggagggaggcaatttaaactatgcaataagcgatgacttgattgctaagattgacaatggccaaattactgcattaagtgaaggcagtgccattataaccgtttcatttgatggcaatgacaagtatacaaaagctcaaaacaaaagcatcaagattattgttaatcttaaagaggccagcgttagcgcattcagcaatattgacttgctggtgggtgaaaatgataccctttctccaaaaacctcccctgaaggattagatgtgagatatgaatctaacgatacatctgttgtgcttgttgataatggccaagccattgctgttggcgagggcaatgccaccattacattgactgtcggcggcgatggagtatatgcagaaaatacaacaacagtgaaagtcagcgtaagcagaatagctaccatgattgaaattgaaaaagataccattgaattaaaagtcaatgaggaatccccaatcggagctatattggagccggatgttggcaatttaacttacagcataagtgatgaaagcattgctaaagttgaaaacggcaagataattgctttagctgaaggaaatgcaagcctaagcatttcatttgcaggagatgaaagatacattggaacaaatgcaagtgtggagattagagtaaataagataaacacaatattgactgaaacagacataacaacaacctacaaagaggagggctaccttatagcaacactgaaagacagccaaaataatccaataagcggagctgtactgactgttgacttggatggaatcaaaaactatacaactgattccaatgggcaaatcaagatagcgacaaataatctgattccagacacttatactgcaagaatcagctttgcaggcaatgaaaactacagctcatctaatggaaatgcaagtgttaccgttaaaaggataggtacaaagcttaatttcaatgacatgaacactaccgcctttgattccaatatagaaggaagaataggagaatatttctatttccaattagttgactgcgatggaaatccactagccaacaaaaaagttatcataggattcaatggagtcaaatacaataggcaaaccaatgaaacaggatgggcaaagatacagatcaacttgaaatatgccaattcttacacctttgcaatagcattcctaggagatgacaactatagcggatcattcaactttgcagtaatacgcgttagccaacagacccctaaattaactgcaagtagcaagacctataagtcaagcgcaaagaccaagacactgactgccacactcaaatcctctagcggaaaagccattgcaggtaaaaaaataagctttagactaaatggtaaagtctatacagcaaataccaattcattgggagtggctactgtaaaggtctctttaaacaagaagggaacctatagctttacagcgcaattcagtggtgacagcacctataagaaggttactaaaactgcaaagctaacaataaaa

SEQ ID NO: 16721 - DNA, 4530 bp, synthetic construct
  source 1..4530: mol_type = other DNA
ttcgactataattttacagatggaatagtcattgatcgtcctgtgacaattatcggaaatggacatacaataaatgctgctgaaatggtcagaatattccatattcaagcagacaatgtaaaaatcaaaaacattacattcacaaatgccatctcaaacggatacggtggcgctatctactggcaaggagccaatgctaatctttccagttgtctttttgaaaataatagtgctgtaatggctggtgctgtagcgttctatggaagcactggcagtattgtttctgattgcagtttcatgaataattccgccaataatggtggtgcaatcatgtggcaagtcagtgatgacagcgttgtttctgattgcagtttcatgaataattctgccatacagggcggtgctatctattggagcagtaatgatggtgttgtttctgattgcagttttgtgaataattccgctgtgcgtaatggtggagcaatatattgggaaaaaaataatggtaatgtttccggctgtatttttgtgaataacagtgctgataacggtgccatctatttcaataatcaaaactttggtcaaaatttaacaatcaatcataatattttcctgaacaatgatgccgttgcaatctattttgtgagaaatgattccgcttccaatgcagattacaactggtttggaaataatgcaactaattgcgatatagcgccaacaagcaataatatggaaatgaatacttggctgttcttgaatgctacatcagaaccggaaggaatttctattcttgattcatgcgacattatatttaaattatatgcttatgctccttctggagtatcagaatatgatagcagccgtttgaaagagattaacttaacagtgactccaactaacggaaggatcaatactacccaagccaaactgggagaaaaggttcactacactccagagagtgccgaatgcatgctaacagcatcaatagaaaatgccttctacactacaagattaaaaatctcagatggaacaacattccgtgacttgaacaatctcataaaccgcaacgataatgacactattattttggataatgatttcatctataactcactttttgacagtaaatttaaaaatggaataaatattaatcgacctttgacaattgttggaaataattataccatagatgctaccggaatggcaagaatattccgtattcaagcagatgatgtagaaatcaataacattacattcgctaatgctaaaatagacggcaatggtggtgctatctattggtattccggcgctagaggtattgtttctgattgcagttttgtaaataattcagctaagatgtatggagctgctatctattggaatggtgctaatggtaatgtttctgattgcagttttgtgaatagcactgttactgatgaacatggtggtgctatctattggcacggtgccaatggagttgtttctgattgcagttttgtgaacaattctgctaagaaatatggtggtgctatcttttggaacgctgccaatggagttgtttctgattgtatctttgtgaacaattctgctaagagctatgatggtggtgctatagtatggaatgaaggtttgaacggtgctatttctgattgcagttttgtgaataattccgccaatgatggtggtgccatcttatggaatgaagctgctggcggtactgtttctaattgtagttttgtaaataattcagctaataagagtggtgctgctatctattgggattccggtgctaggggtgttgtttctgattgcagttttgtaaataattcagctaataggagtggcgctctatactggtttgctaatgatggtgttgtttctgcttctatttttgtgaataacagtggcgataatggtgttttatacttcaataatacaaataagcgaaatttatcaatcaatgacaatattttcctgaataatgatgtcgttgcaatatattttgttaatagtgattccacttccaatgcagattacaactggttcggaaataatgcaagcaattttgatactgaaccattaactactaacgtggaaattagtacttggctcttcttgaatgctacagcagatccaaatccagttgaaattttaaattcatcagatatctcatttaagctatattcatataacgctacaggaatatctgattatgacaatagccagttacagcctgttaatttaacattgactgcaactaagggtgatgtcgatagcattgctaaattaggggaaactgtcatatacaatccaactagtttaggaactggaagcgtaactgcaaaagttgaaaacgtcgcatattctattgaaataaacaatataaaatcaaatccaaacctatcagttgaatccgatgaacttacatacggcaacaacatagcaattgctcttaattatgagtctgctgctaccggcaaagtcaatataacattaaaaggcaaaaaatcagattatacatttgcagatttggatttaaatgaaacaatttcacttggaattcttgctgctgatgaatatgaggtcattgttgaatattccagagatgagatttataccaatgcaagcgcaaggggaactttaaaggtcaataaagccaattcaacattgacagtcagtgatattgaatttgattataaggatatgggatctggtgaaatatcattcactaacgcaactggtgttgaggccaaagtaataaatcatgatgaagccattgttttcgttagaggaaatactataactgtattaaatttaagtgcagacagctatatattggaagtaacaactattactgatgaaaatcacaatgaggtaagcaagaatgcaacaataacagttagaaaagtcaattctaccattaatgttaatgatattgtcctttattatggcgaatccatcaaccttgctgtaacaactgatggtgctattggaatatctgctgatatcgatggcgagaacgttgagcttaatgaaaacatcgttacaattccagatgatttggaatctggaaatcacacattgaccataacaacagttcctaatgacaaccataaggaagcaagcaaaaccgttaatattgttgattgcaggattggcaatatcactgttgttgttgatggcgttgaatattctattcctgctgtaaatggcactgccattacaaccaatatgccggaggagattgaaaagcttaaagaaaatattactgatttaactggtcaattggaagaagcacaaacaaacgcaactaacctggctaacaatctaacaattgctaatcaaatagttgataaattaatcgcccaattggaagaagcacaagccaatgctactcaaacaatcaatgatttaactcatcaattgaatgaagcccaaaccaatgcaactaaaatagctaacgaccaaacaaatgctaatcaaatagtagacaatctaactggccaattaaatgatgcccaaaccaatgcaactaaaatagctaacgacctagaaaatgctaatcaaatagttgatgatttaactcgccaattagaagaagcacaagccaataatgatcaaaccatcaatgatttaactcatcaattggaagaagctaaagttaatgcaactaaaatagctaacgacctagaaaatgccaatcaaacagttgacaatctaacaacccaattggaagaagctaaagttaatgcaactaaaatagctaacgacctagaaaatgctaatcaaatagttgacaatttaactgaccaattagaagaagccttggctaatgctactaaaatcgaaactgttgttgtcgatggtaaagaataccctatagaatatgtgaacggcactgcaacagtaactaccaattctacaggtcctcaaaacataactcatgagagaaaagccacccaaatcatttataaggatatggaaacaactgctatcgacactaaagttgatggacgtatcggcaaatacttcaatgtcattctcaaggacagtgagggtaatattttagcgaataaacctattcaaattggattcaatggtaaggtctataataggacaactgatgaaaatggatctgctaaattacaaatcaacctcatcaaagcagacatttacacatttgctatatgctacctcggcgatgatgattataacggttctttcgttgtatcaaaaatcaccgtaaaagcgcaaaaaggcactctaaccgttccaaacaaatcttacaaagcaactacaaaaaccaaaactttaagtgcaacattcaaggcagcaagtggtaaagtacttgccaataagaaagtttcattcgttgtgaatggaaaaacttattctgctaagaccaacgccaaaggtgttgctactgtaaacgtcagtttgaataagaaaggaacatatagcttcgttgccaaattcgctggagacaatacatacgctgcagtaagcaaaaaagcaaaattaacaataaaa

SEQ ID NO: 16722 - DNA, 4380 bp, synthetic construct
  source 1..4380: mol_type = other DNA
tcacatgttgaggtagatggaatagacattaattacactgatttggaaaccattacagttactgtaagcgataataatgccactggatttgtaaccattacaatcaacggcactgatattgaattaactaaagaagtttctgcaggtcaagctgtatttgatgtaaaagacttggttgttggagaatacaatgtaactgctgtatatcacagcgatagaaactacttgaacagcactgcttccgatacattcaaagtagataagtcagatgtcaagaacatgaccataagtcctgtaaacattacttatggtgaaaacgaaacaattactgtaagaatcactgataataatatcacaggcaatataaccatttctgtaaatggcactgaatatggtcctgttgaacttgacaatggtgttgcagtctttaatgttcctggattgattgtaggtgattatgaagtaactgctagctatagcggcgattccaactataatcctgcaagctcaaccgagacatttactgtggataaggagaaaccaaatgttcatgtggtctctgaaaacattgactatggaaagaatgagacaattactgttattgtagatggatttaatgtaaccggcaatgttaccattaagattaatggcacagagatagcaactaaagaaattaatgataaaggccgtgcagtatttgttgtacctggccttcaagccggtgaatatgaagtagttgccatatataacggtgatgataatcatgaatcttccgaaggcagtgatacatttacagtagctaccgtcactccaaacatggatgtggaaactgaggacatcgattatggcgacaatgagactataacagtaacccttcctaaagatgcgaaaggtagtgtaaacataaccattaccgatgagaatggcactgttgtttatgaaggtgaagctcagcttgaagatggcaaggctactgttgacgttccaggcatcacaccgggtccatacaatgtaactgtcaagtatcctggagacagaaactataatccaaccaataagacagtcagattcaatgtagataaggtagttcctgatgtcgatgtcgatactgttaatattgattatggcgacaatgagactgtaactgttacagttaaccctgttgatggtggcgtcactcctacaggtagtgtaaatgtcactgtcagagattctgatggtaaagttgtttatgaaggcaatgtagatcttgttgcaggcaaggctacccttgatgttcctgatttaggtgcaggagattacactgttgatgtacgctatggcggtgattccaactacgatgattcaactggaggctcaagcttcaatgtagctaaagtctctcctgatatggatgtgcaaactgaagacattgattatggcgacaatgagactgttactgtaacccttcctaaagatgcgacaggcactgtaaatgtaaccattaaggataatgacggcaatgtcttttatgaaggtgaagctgagcttaaagagggcaaggttactgttgatgttcctggtttgcctgctggcgattacactgttgatgtagcctatggcggtgatgataattacaacccagtcaatagttccgatagcttcagcatagataaggtaagtcctgaagtcgatgttggtactgaaaacattgattatggtgacaatgagactgtaactgtcacagttaaccctgttgaaggaggatctgctcctacaggcactgtaaatctaaccgttaaggatagtgacggcaaagttgtttatgaatgccaagcagaccttgttgaaggcaaggctactgttgatgttcctggtttgcctgctggcgattacactgttgaagttgcttatggcggtgatgagaattacactgctacaaactccaacggaaactttgctgtaggtaaagttaaccctgatatggaagttgatggtgaagacattgactatggtgacaatgagactgttactgtaacccttcctaaagatgcgacaggcactgtaaatgtaaccgttaaggatagtgacggcaatgttgtttatgaaggtgaagctaagcttgatgatggcaaggctactgttgatgttcctggtttgcctgctggcgattacactgttgaagttgcttatggcggtgatgataattacaacccagtcaatagttccgatagcttcagcatagataaggtagctcctgaagtcgatgctgacactgaagacattgattatggtgaggatgagcctataaccgtaaccattgaccctgttgaaggaggttccactcctactggcactgtaaacgtaaccgttaaggataaggatggcaatgtcgtttatgaagaccaagtagatcttgttgatggcaaagtcaccctagacattccagatttagatgccggcgactacactgttgatgtggcatacagcggtgatgagaattacactgctagaaactccagcggaagctttactgtaaacaaggcaaaaccagaattgaatgtagattcagaagacattgattatggtgatgatgaaaccattactgtaagccttccagaggatgcaacaggcactgtaaacataaccattacagataaggacggtaaaaccaaggtattcaatgatgttcctattgaaaacggcaaggctacaattagcgttcctgatttggatgctggagactataatgtaacagtagactatccgggagatgataattaccttggctctaaagctacttcaagctttaaagttgtcagatcaaacagcaatatcactcttgagactgagaacatcacatatggtgacgaagagcctataactgttgatgtaaatccagtggaaggaggagtcactcctaccggtactgtaaacataactattacagataaggatggaaatactaaagtattcaatgatgttcctcttgaaaacggcaaggctactgtagatgttcctgacttggccgctggaaactacatagttgatgtaaaatactccggtgatggcaattacgatccagatagcactgaaggagcatttgaagttgcaaaagcagttcctcacattgaaattcatgtatatgacatttactatggcgatgtagaagtgctcactgtcacatgcgatgctccaggcactgtggacatcactgtaaatggagtcactgtaacagtacctcttgatgacggatatgataagcgtgtattcagttcaattgttagagcatacagcggcaaggcaactcttgaccttgtaaacttggctgttggcacataccctgctaaggcagtctataacggaaatgaaaactacacttccgtcagcgacaatgacactttccatgtatacaaggagaataccactaccaagatatctgtagatgatatcaagctaggtgaagatgcagtgattgatattgaagttacccatgaagacggctctgaaaagatcaatactaacataactgtaactgtcgatggaaaagattatactgttgagctcattgatggaaaaggcactttaaccattcctgatttggatcttggaaaacatactgtcaaagcggtatatcctggaagccacaactacacaaacagttcaaacgctaccagctttaaagtgacaaaagttactccaagcttcgatatttcaactgaaaacatccaagtcggagatgatgaaaccgttactgtaactcttccagatgatgcaacaggaaccgtaacccttaccattgacggcaaagaatatactgctacagttgaaaacggcaaagctacatttgttattcctggcattaaggcaggcgaacataaggtcaatgttgcatatagcggtgatgacaagtacgcccctgctaaaagaagcgacagctttacagtaagcaaggttaaacctgatatgggcatggacgctcctgaaatcaaagtaggccaagacggcgttataaccgtaactgttccagaagatgcaacaggtacaataagcattaccgtagatggcaagacttacactgcaagcattaaggatggcaaagcggtattccatatctctggattaggtccaggcacacatattgtcaaagcctactactctggtgacggcaagtacttggctggctctgttgatggaaccattgttgtagagcctaagaacggtacaagcccacaagataagggcaaagctcatggtggtattgatttagaaagcaaaaagaccggtaatccaatattagtattgttcatggtattgttcagcttaattttaatacctataaaaagaagaagagatgatgatgaagaagaggaaaatgaagatcaaattaatcgtatagat

SEQ ID NO: 16723 - DNA, 4662 bp, synthetic construct
  source 1..4662: mol_type = other DNA
aagaccgttactgtaattggaggaataggccaagtcaatttcggcagcctagaaaccgacacctatgaagctacagtatccttcggaggaagcgatctctatgagcctatctcaaacgctaccgaatttacagtatatcctgaagaggaaggcaccaatttcgagattgatacaaatgcaagcgaaatcacatacggcgcaagcatcaaagtcactcacaaattgcctgaagatgctacaggaaccatcaaatattacctgaacaacggcactgtccttggagaactgccggtcgaagaaaaactgacactggaccttgatgcaggatactatgtaatatttgcaaactattcaggcgacgaaagcttcgagcctgactgggacagcgcagatgtcctcgtaaagcaagtagaaacagaattccatataggcctccagcagcaggtcatatccggcaaccctgcctatgtcacccatagcatatccgagggcgctacaggcacaatcagctactatctgagcaacggaaccttccttggagaagtgcaggtcggcgagacatatgtttcacctaaatggaaggtcggaatctataacataaccgcaaactattccggagacaggaactttgttccggcatcagacagcatggaattcagaatcaatcctgacttctcgttcgacatataccttgacgaagacgacgtcatatacggccagaccactacagtacgtccaagcttgccttatgacgctacaggcaccgtggaattctactataacgacacatacctgggcaaggtaacaataggccaatatgaaatcataatggttgacggagaggaatactacgaaactccaggagtggagcttcctgaattcgacgtgggagtccatgaaatcgtaggaaaatacttgggagacaagaattatgaccctgcaatcgcaaacgtaaggcttactgtcctaagtaccgaaacagtattcgagatcaatgcaagcccaagcgaaataaaatacggagaagctgcagctgtcatccataaactgccaagccttgcagtaggtaccatcttatattacctgagcgacggaacatccctcggcgaactatactactacgaggaccttgcattgcctaaattggctgtgggaagctatgagattcttgccaactattccggagacgaaaacttcaacaatgcaagcgcaagcacaaccttgacaatcaataaggcagaccctgatttcgaaatctatatcgcattcccttcctatgacttcggagatagccctgtagtcttcgttaacttacctgacgacgctacaggaaatatctcatactacctgagcgacggaaccttccttggagagcttccggtagacgaaaggctgtccttgcctatactgaatgtaggaacacatacaattataggaaactattcaggagacggcaactacaacaatgcaagcgcaagcatgacagtgactgtaaatgaggtatccatggaattcaatcttggaatcagcgcagaagagataagctacggcgaaactgcaacagtcacccacagactgccaagccttgccaaaggaaatataacatattatctgagcgacggaacactcctcggagagcttccggtcagcgaaaacctgaccttgcctaagcttgatgttggaacatacattataatcggaaactactccggtgacgaaaacttcgacggagacagcgcaaatgtaacattgacagtcattcaggcagatcctgcattcgcaatcagcataagcgcagaggaagcggcatacggcgaaacagtcacagtcagcccagcactgccagaagatgcaacaggaacagtaatatactacctaagcaacggaacaatactaggcgaacttgcagcagacgaaaacctgaccctgccaaccttcgatgtagatgtctatgacattttggcaaactattcaggagacaagaactacctcaatgcaagcgcagaaacagcactgattgtaagccaggcagaccctggattcgaaatcagcataagcgcagaggaagcagcatacggcgaaacagtcacagcaagccctgttctgccagaagatgcaacaggaacagtgatatactacctaagcaacggaacaatactgggcgaacttcctgtagacgaaagcctgaccctgccaaccttcgatgtaggcacatacacaatccttgcaaactactcaggagacagcaactacctcgatgcaagtgcagaaaaagagctgaccctaataaaggcagactctacactggaaatcaatgacatagcctttgactacagcaagacaggctcagccgaagcaaagacttcaggcgcagaaggaatcgtcgcttcagtggcgggccatgacgaagccgtcgtcgaggtaaacggaaacgagattacagtatccggacttgatgcaggcagctacaccctaagcgtttcaacaatcgtagacgacaaccacaacagcgcaagcaagaacatcacagtaacagtcaaaaagatcgattcaagcctttcagtcgaaggccttgagctggactatggcgaatcaggcaatgttgatgcagcagctgaaggagctaccggcatcagcgccaagatcggaagcaagagcattggagtaaacggatattccatccctatttccggactggatgcaggcaaatacaacctgacagtgactacaatccctgacaggaaccacaaccctgtaacaaaaacagcccagatcactgtaaacaagatagattccacattggaagcaaatgacatggcattcgactacgagggcaccggcacaagttcagtgacatacaccggcgcaaccggcgtaaaggcttcagtaatcggacagccaaatgcaaaggtcaatgtaaagggcaaggagatttccgtctcaggattggatgccggaaactatactctggaaatcactacaatccctgacaagaaccacaaggctgtaagccaaacagtcaatgtcacagtcaacaagatcgattcaaagcttgacttcaacaaccttgtagactacggatctgcaatgaacgttaccgtaaagaccgaaggggcaagtggaataatggctgaaatcgacggaaaggaactcggcgtcgacaagtacacaatccctatctccgcattggatgcaggggaatacgaccttacagtaacaacaatccctaacagcaaccacaatcctgtcagcaagaccgtcaaggttacaataaccaagcttgactcagaactggctgtcgaagaccttgaattcgactacaacagcactggaactaccaatgcaacattcgaaggcgcaacaggcatcacagccaaagtcgtcggccagccaaacgcaacagtagagataaatggcaattccatatcagtttccggattgaagcctggaagctacaccctggaagtcactacagtccctgacgaaaaccacaaccctgttacagcaaaatctgcaataagggtaaacaagctggagaccgcaatttcagccaatgacataagcacagtccacggcgcagacaagaacctgaccgcaatcataagggacatcaacggcaatcctgtagccaacgccacagtatccgtcagcctcaacggcagcaaaaaatatgtcagcgattcaagcggacagatttcaattcctttgaagagccttgctgcaggcaactacacagctacaatcagctttgcaggcacagagatatacggcaagtcaagcgcaagcatcaaagtggctgtagacaaggagccaacatcaatagctgcaacaaacgtcaatacacagtatggccttgaagactatattacagcagtgctgaaagacggccaaggcaatcctttgggcggagtcaagctgaatgtagatctggacggcaacaggacaatcgttaccgactcaaacggacagatcaagattgctaccaaagacctgacagcaggcaactacattgcgacaatcagctttgcaggaaacggaaactacatggcatccgagtcaaatgcaatcgtcaacatcaacagaacaggcacaaggttcaacttcaagaacatgacaaccaccgcattcgactacagaatcgaaggaaggataggaaaatacttctacttccagctagtcgacgaggatggaaacccattggccaacaagaacgtatgcatcggattcaatggagtcaagtacaaccgtacaaccaatgaaaccggctggaccaagctgcagatcaacctgagatgcgtaaacctgtacacctttgcagtaacattcagcggagacgacaactacacaggcgcattcaatgtagccatgataaacgtgacacatcaaagccctaaattgactgcaggcaacaagagctataaggccagcgcaaatacaaagacattgactgcaaaattcaagagcttcaagggaaccgctattgtaggcaagaagataacctttactgtaaacggcaagaaatactcagccataaccgataaaaaaggaattgcaactgtaaacgtaagccttaacaagaaaggaacttataaatacactgcagcctttgctggagacagcacatacaagaaggtgagtgttacttcaaagctgactataaag

SEQ ID NO: 16724 - DNA, 5781 bp, synthetic construct
  source 1..5781: mol_type = other DNA
atcaatggaaacggttttacaataaacggttccaacaaagcacccatatttcatataaccggggataatgttaccatcaataacattagttttgttaatggatatgcaaatgcatatgtaaatggctatgatggtgaagatatgaggggtggtgccatctactggcaaggtagaaacggcaaggtaacatactctaacttcaccaacaacaatgcaaatgatggtggtgcaatttattggtttggtacagatggtattgtagaatattcaaatttcattaacaacaatgcaaatgatggtggtgcaatttattggtttggtacagatggtattgtagaatattcaaatttcattaacaacaatgcaaatgatggtggtgcaatttattggtttggtcaaaacggaaatgtcgaaaattccgtcttcacccaaaatcatgctggctcttatggaggtgcgatttattgctctggtgctgagagtattgtagaatattcaaatttcaccaacaataatgcatataatggtggtgcaatttattggtttggtcaaaacggaaatgtcgaaaattccgtcttcacccaaaatcatgctggctcttatggaggtgcgatttattgctctggtgctgagagtattgtagaatattcaaatttcaccaacaataatgcatttaatgggggtgcaatttattggtttggtcaaaacggaaatgtcgaaaattccgtcttcacccaaaatcatgctacctttgctggaggtgcgatttattgctctggtgcagagagtattgtaaaatattcaaatttcaccaacaacgatgcaattaagggtggtgcaatctattggaatggtcgaaacggaaatgtcgaaaattccgtcttcacccaaaatcatgttgacaatgatggaggtgcattatattgggatgatagtgaaggtaaagtcacttcttgcatatttgtaaataatactgctgaaactaagcatagcggacatcttattttgcctatgggaagaggtggtgcaatctattggaatggtcgaaacggaaatgtcgaaaattccgtcttcacccaaaatcatgttgacaatgatggaggtgcattatattgggttgatagtgaaggtgaagtcacttcttgcatatttgtaaataatgctgcagatgttgaggccagcgtatattataatgaacggggtgcctattccaattttagcaataacattatgttaaataatggaaaaaacgaaattaaattcaagatttttgatcgctcaaatatagattataattggtttggaaataatctaagcaattacaatgaaaaaccaggaggttttgagggcaatatttggctatttttaaatgctacagtagaccctaatatgctcttacttggtgaaagttctgaaattacttttagattatatgcctatgatggaacaaatgttattgaatatgacaatgatttaatatatcctattaacttaactttaatttcatcaaatggaaacatcaatgaaactgtagggttggaagaaacagcaatattcactcctcaaaatgtaggaactgccatagtaactgcaaaagcggaaggctttgacatccaaacagtatcaataaatgttcgtgcagcaagcttcagtgacttaaacagaaccataaatggcaatgaagatgctgaaataactttaggaaaatattatgaatttgatccagaaacagatggtgctttcatacatggaataatcattaaccgcacagtgacaatcaatggaaacggcactacaataaacgcatcaggcaaagctcgtatcttccaagttatcgctgataatgtaacactcaataacattacatttacaaatggaaatgcaagcggcgagggtgctgataggagtggaggcgctatccgttgggaaggtgcaaatggtattatatcatactccaatttcacctttaaccatgcatacctaactggaggggctattatctggtccggtgaaaacggtactgtcaaacactccagtttctctcaaaatgatgtagatggttctggtggagctattaggtgggctggtgcaaagggcactattacagattccgatttctatctcaacagtgcaacagatgcaggtgccatctggtggcttggtgcatatggtacagtcaaatactccaatttaatcaacaaccatgcaggtagtcgtggtggagctatcatgtggagtggtgaaaacggtaatgtgacatactccaatttctcactcaataatggaggaagtggaactgggtatgatggcggtggcgctatcttttgggatcatttaaacggtactgtgtcatattccaatttctccaacaaccacataaatggtcatggaggagctatcgcttggcatgaacaatatggaaatgtatcctcttgcttatttgtaaacaacactgcaactgacggcgctagcgtataccataatgatcattcagaatcatattccaatttcaacaacaacatcttgctaaacaatggggaaaatgagattcattatgatgtatatgatggctccaatgcagattataactggtttggaaacaatggaagcaattacaatgagaaacctgcaggcagcgttggaaatgtatggcttttcttaaatgcaacagccgatccaaacccaatatctattttaggtagctcagatgtaagctttaaattatatgcctatgatggattagaccttattgaatatgacaataatctattatatcctatcatattaagcctaagctcatcaaatggaaatataaatgacactgctggattggatgaaaagataatattcactcctcaaaatattggaactgccactgtaactgcaaaggcagaaggcatcttccaaacactatcaataaatgtttatcctccaagctttagtgacttaaacagaaccattaatggaaatgatgatgatgaaataactttagacaaatattatgagtttaatccagagttggattcagctttcatacatggaatcatcattaaccgcacagttacaatcaatggaaacggaagcacaataaacggttcaagcaaagcacgtatcttccaggttatcgctcctgatgttgtcctcaataatattacctttgcaaacggaaatgcgaatggtgaaaatgaggggggctatggtggcgctatcctgtgggaaggcgataacggaagagtcgaagattcaaccttcatcaacaacaatgcaagcggatacggtggagcaatctttggaggaaactgctcagataatgttattttccaaaacaaccacgcaggcatagaaggagatgactggtatgtccctaaacctgtaatatccgtcaatgacttcacatccacatataaatcaggagagaagctatatgtcaatgtgtcctatgttggtactcaaatagatggaatcaatgttacaatctctgtatttgacagttccaaccaattaattggcaactattcctgcctaagcggtgacggatggactgtagatttggatgctggaaactataacgcattagtatttgtagattcagatgaatatggctatggagaggagacaattgcattaacaatcaataagcgcgcttctcaaatttcagctaacccattgaacacaacatacaatggaaacgaaaacattataatgatccttaaagacaattataatgaatccattgccaatgcaactgttttggtagactttaatggtgagaaaaacctaacaaccgatgagaacggtcaaattgttgtgtccgctaatggaattgttcctggagaatactgggcacagttcatcttcgacggcagcaaaaactatgatgggtcagatgaaaaggttaaagtgattataagtaaggcttctacaagcctaagctcagagaatatgaatgttagctataatgaaagcaaatacctgattgctacattaaaagatcaatattccaatcctttagctgaaatcagcatagaattcaaatctaattcatcaactgttaaaaatgagaatactgacaataagggacaagctaaactcttaattgacttcaacccaggaacttataatattgatatcagtttcgctggaaacagcttatatgatgcctcatatgctactgtgactgtggtagtaaacccatctgatgatagtggaaatggcactgaacctagtggcaatggaagcagtggaaacggtactagtcctgaaggaaatggtacttctccaggtggtaatggaacctctccgagcggaaatggtacttctccaggtggtaatggtacttctccaagtggtaatggtactagccctggtggtaacggtactgatcctggtggtaatggtacttctccaagtggtaatggtactgatcctggtggtaatggtacttctccaagtggtaatggtactagccctggtggtaacggtactgatcctagtggtaatggaacctctccgggcggaaatggtactgatcctggtggtaatggtacttcttcaactgttaaagatactctaataggcattagcacatccacagtcatatatggaaatgatgagcttatcaatctgaccttaacaactgcagacaaaactcctattgatggggtcattgagctaagagttggcaattctatctataatgtaactattacaggtggaaaaggttcaaaggctctttccaatcttactataggaaactacacagtaactgcagactataaaggagattctgaatacaattcatccactgcaagctctagtttcaccgtgagagaccgtatcgaaaccagaatcatatataacaatatgaccactgcccctgtaggtgcaaatgatggcagaataggtaattacttcagagtcaaattggttgatgaaaacaatcaagcactagcaggagttcctatccaaataggcttcaacggaagaatctacaacagaacaacagactctgaaggcggagcaaaactacagataaaccttgcaaaagaggatggatacacctttgcaatctgcttcaaaggagacgacaactacaacgcatccttcgaagtagcaaaaatagacgtaaacaagaaatatccaaaaccaaacagtgcaaattcagagtccgccgaaccagcaaacaaaacacaaaagaacacaagactcgaaacctccatcctctacaaggacatgaaaaccgaatcagtcctaaaagctgaaggaagagccggaaaatacttcgaaatccaactagtagacaacaacaaaaaggctttagccggagttcctatcaaaataggattcaacggagtagtctacgacagaataacaaatgccacaggaggcgcaaaactacaaataaacctcctgaaagtaacccaatacacattcgctatcgcatacctcggagacagcaaatatcaggcatcattcgaagtagcaaaaatcactgtaaacaaacaaaccccaaaaatcacagcccctcaaaaaacatttaaggcaaaagcaaaaacaaaaacagtcactgcaacacttaaatcacaaagaggaacattactaagcggcaagaagatcaagtttacagtaaacggcaaaacctacactggaacaaccaattccaaaggtgtagcaagtgtaaaggtctccttaagcaaaaaaggaacatacacagcaactgccaaatttgatggagatgccaatacaaaggcaaccagtgtaaaattcaaagtaaaaattagt

SEQ ID NO: 16725 - DNA, 4356 bp, synthetic construct
  source 1..4356: mol_type = other DNA
gccattgcaatgtttaccgatgagaagatcagaccggttacagaaaacacagtcaaaggggcagacaatgaaaaagtcaattacactgcagtcgtaagagatgttgacgaccttgttgaggatgctgaagctacaatcactccggatatcctctataacggtaacttaggcaaggacttagcatatcctgctgaggagatcacattctttgactccatcacagtaaacggtggcatttacattgaaatccaaaatgattcaagctaccttgcatctggagctaccaacagaactgacatatggaacattgaagcacctgaagacgctgatttcgtagctggatttgtatatgtggcttacaactgggataagacctctgcaggaatccctgcacttaacatcacattcaatggtgtatctgtcgctcctgttgcacattacagagaccaatccaatatgggaacctatggcaaatatggatacggacttttagtatatgatgtaagcgaccttttagaagcaggggataatgtattcaccttaacaaaagatgctaacatgactgccatctatccaagtgttttggttgcaggctacgaccaagaagtatctgacagcatgaaaaccatttacatgttcaacggcgcagacttattgtccaatgcaaacaacttcttaggaagagttgttgcatctaacagtgttttagacattgaattgcctgatgatgtaattgattgtgcacttggaatatttgcagcaagctctcaaaaaggcgaaggcaatctaatagtaaacggagaaagctttgaagatgtttggaacggatcttccaactcagtccaagcttgcgtatttaacttgacagatgatatcgaagaatccaacacagtatcatttgttgcaaccggaagcactatactagcccttcagcaattcatctttgtggaatacgagcttgtttctgttgacgctaaattaggctctgaatacaataacgttgcatttgctggaaccgacaatgtcttagaatttaacattaccaatgacggaacaattcctaccgcatacaccattgagttctatatcgatggcgaattggcagacactttagaacttgaacttgcaaacggtgaaagcgacagcctataccttgtggacccaaccatcagaccagttgatgaaaccactgtaaacggcgcagacaatgctaaagtcaactacactgttgtaatcacagacaattcaactggagatgtcttagatataatcactatcactccttctgtactctacaacggtaacttaggcaaagacttggcatatcctgctggagaaatcactttcttcgatgtaattacagtaaatggagatatcattgtcataggaatgaatgattccacttatcttggctctaagacaacaggacgtactgacgtatgggacttaaccactaatgaagatattatctttgcagccggatacctttatgttgcatacaactgggataagacccctgctggaatgcctgtatggaacaccacattcaatggcgtaactgtcactcctgttgcacattacagagaccaatccaatatgggaacctacggcaaatatggctacggacttatcgtttacgatgtatctgaccttattgtagctggtgaaaacacattcaccttagaaaaagaaaatggaaccactgcagtatatccaagtacccttgtagcattctataatatgcctgaatccagcacttatgtaactacatacctatacaatggcgcagacttattatccaatgcaaacaacttcttaggaagacttgttgcatctaacagcacattggatatcgattcatttgacaatatagtcggcgctgaccttttagtatttgcagctagcgctcaagctggagaaggtagccttgtcataaatggcgatcttgtagctgacatctggaatggcagcagcaacagcgtagatgcatatgctattgacttaggcaaaaaccctaaggcatctaatgaggtatcatttgttgcaaccggatctaccattctagcattgcaacagttcattgttgttgaatacaatgttccttcagctgaggcaagcctcgttagcgaatattctaatgttgcattcgctggaaccaacaatgtattgcaattcaacttaacaaacaacggcgctcttaacacttcttacattgtcgacttctatattgacggcaagaaggtaaacagcactcaaattgcactcaactctggcgaaagctttggccaatactttatcgatgatacaatcaggccagttgacgcaagcactgtaaacggcgcagccaatgctaaggtaaactacacagtcttagtcagcgataaggataccggacttatattggatgaagtgaccctcactccttctgtattatataacggtaacttaggcaaggacttagcacatcctccagaagaaatcgtcctatttgacacaatcactgtaaacggtgatgtgattatagatacattagatgattctacctatcttggagctaagacaaccggacgtactgatgaatggaacttaaccgttccttcagatgctgatttcgaagtggcatacctttatgttgcatacaactgggataagactgcaagtggaatgcctgaatggaacaccaccttcaatggtgtaaatgtcactcctgttgctcattacagagaccaatccaatatgggaacctatggcaaatatggatacggactttacatttatgatgtatcagacctcattaaggcaggtctaaacacattcaccttaggaaaagaaaacggaactacagcggtatatccaagtactcttgtagcattatataatgttaacgagtcaaatgtacttactaccgtttccttattcaacggtgcagacttattatccaatgcaaacaacttcttaaacagaactgttgcaagcaataatgtcttagaattagatttcactgtatttgatgaaatcctatccagccaactctatgtatttgctgcaagcgctcaagctggagaaggaaaccttattgtaaacaatgaaacattcactaatgtctggaatggaacttctaatagcgtagatgcttatattgttgatttaggaaatgaccctagcttatccaatgatgtatcatttgtagctaccggttctacaatccttgcattagagcaatttgtcgttgtaaaatccaaatatcaaaccagctctgacttgcaaaaactcatcgatgctgctgaacctggatccaccttggatttaggtgacaacgtattccaagatgttgctaatgtagtaatcgataagaacttaaccatcaaaggcggttccataatgggcaaagctggagagaccatctttgtaattccagcaaaatccgctaacggtcctgatgaggtaaacataactggcgttgactttattgtggaagatgcaaatgtaattgttcaagcaactgctgacaatggaagcagcccaacttcaatcgacactccaaacatcagaatcagtgacaacttcattgacatgatagacggaagcgttgtacctgaatcagtaactgtattgaaacttgacagcgaaagaggagtccttgcacctaccggtgaactcaaggtcactgacaacgcaattgcagctggaatcaaaccattcgagtttgatgtaactggcgtatccaacggcagcgacaccaatattccagaaggcggtaacattcctgctaaacaggcttctgtaatccactatcaagatatggaaacaactgctgttaactctaagattgaaggaagagtgggcaaatacttcgaagtcaacttgacagacacaaatggaaacccattagcaaataaatttgtccaaataggtttcaacggtgtagtatataacagaacaacaaacgaaaccggcggagtcaaactccaaatcaacttaggatacaaaggaacttacacctttgctatctcctaccttggagatgactactacaacggtagctttgttgtatctaagatcaaggtaagcacacaaaacaccaagcttactactgctgcaaaaacctataaggcaagcgctaagacaaaaacattaactgcaacactcaagtcaagcgtgtacaacaaaccaatcaacggtaagaaagtaactttcacagtaaacggcaaatcctactcagcaactacaaacgctaaaggtgtagcaactgttaaagtaagcctttcaaccaagaaaacctacagtttcacagccaaattcgctggagacgatatgtacaccaaatcaagtgttacaggtaaggtaactataaaa

SEQ ID NO: 16726 - DNA, 6801 bp, synthetic construct
  source 1..6801: mol_type = other DNA
ttagaaccacaaaacttcacagtattcgaaaacccatactctgaattagaagtaactgatgacggccctattgcatctggtgaaactgtaaacattacagctaccctcactgacttccaaggcaaccctatagaaggagctaccttagaagtatatgatactggcgtatggattgctaatattactaccaatgcagaaggtattgctgaaacttctattgataatttaggatatggtcttcacgacattactgtaatattcaatgacactgtacacgatgtccaaactgaaaccgtaactgtatctgtaactcctaagaagggtactttcacagacttgcaatacttaatcgacactgctgatggaagattagtcttgccatacgacttcgcatttgatgcagcttatgatgaacaattcttcttaacaggtgtgcttgtagacgataacattattatctctggcgctggacatatcattgacggtatgaaaaaagcaagaatcttatacatcaatgctcctaatgtcaagatattcaatgtaagctttgtcaatggtaaatctgatgtaggtgctgctatttacaccgaagctgattacttacttgtagacagctgttacttcgcaaacaacgaccctgaagctggtgctgcaatctatgctgaaagcggtgtaactgatgtagaagaaactatcttcttcaataacactgctgtaaacggcggtgccatatatgttgaatccggtgctacattaaacgttgctgattcagaatttaatcaaaacactgcaacctaccgtggtggagctatttggtctaatggtactgttaatgtaaaagattcatcatttgataaaaatgatatcacttacagagttaaaaacgatgataatggtggagctgccatctttaacaatggcactttgaatgttgtcaattccagatttacaaataaccttttaaactatgtcataagaactggagatgataatcatcctgaattagttgacggtgttattttaagctctggaaaagctaaaatcagcaattcccactttgaaaacaacagcggtacttatggttctgcaataactgctttacctataggcactgaactcagtgatttaactgtagaaaattgtgaatttataactaacttagcatactgcggtgcagctatctatgtaggtagtggtactacattattctacattaatgactgtgttttcataggcaataatgctacaggtgtcggcagtaacggatatgttgctactggtggtgctattaagatagctaagaaagctactggtataattgcagattctcaattctataacaactctgctgctaacggtggagctatagatataagtgctactagtggtaatactgcatcagtacttattgatagctgtgtctttggatataatgttgcagatcaaggtggagctatctacattgataatagaactacagtaaacctttatgactctacattatactacaatgaaggtgaagctctcaattaccacatcttcttaaatggagatgcaactcttggctttgaaggtaataacttctatacaacaatacctaccattgtagcagaagacacctacgcttacggtgaaaccataaccattaatggtacattcgattggggagtaaacaacaaacctatcaatatgatttacaccattaacggtgcacctggcactgcagaagtagttgatggcaattacacaatattaattgacaatcaaccagatgtaggtgattacactattgtaattactgcatttactgatgaaaacggaaatgtataccatgtagaaactgctcaaaaaacaattagtgttactaaagcaacccctatcttatctgttgaaggtgatgaatacttaatgcctcctagtgatgatgctactgttaccatttctcttaccgataaagatggaaacggtattaagggcactgttattgtaactgttgctggtgaaacctacttagttgaaactgatgaagatggtgacggcgagctcactattaatgacttacctgctaccacttgggccattgacgctaaattcataggcaacgataactataatgaagttgtaaacgacactgaagagattaccttcatagctgatgttgcatacttcgacataattatcgaagacggtgtttacggcgataagcttactgtcatagttgaaaacgcaactgacattgacggcaatagcttaactggaatggtcacaggcatgatttctacaggcgatgatgacatttcattcatagtatatgtgaataacggtcaaggaaccaacactaccactactgctggcggagttggtaaattcactggagatgcatacttctatgattcaatgatggaatttatgtccggccctgaagaatgcagtgcatatgtaagcccagctaatgctacattatatctagttccatgggatgcagatgatctatcatcagacattgcatatggcgataccatagaattcggcgctgccgtattcggtgtaaatctagaggaattaaacggtactgtatattacatcataaccgaattaaataaaaaaggtgaaattgcgattgtaaacggatctggtgctgtaaacctcactgatattttagatgtaggaacctacactgtcataagctacttcgtagatgacaaaggcaactacgacccagaatcatcagttaactacactaacttcaaagtggccaaagcaacccctaccttaaatgtagagaatgctcaacaagtatatgctgataccaatacaataacattcaatgttacaggcattgatgataaaggtgttaaaggtactgtaattgctattaaacctatttcagaagatgtgtctggtgcaatctacgatcctgaaaccggtcttggagaattaacattcaatggtttagttgtgggcgacaatccaattgtagtaaaattcttaagtgacgatgataactatgcaaatgcagaaaagaccattaacataactatcactcaagctacacttgcaatcgactctacaataaccactcaagaaattgtatatggcaaagatgttgaagctgatgtaaccgtaaccggcatagtccaagaagatactgtaattgcaaatgtcagtttatacgacaacgctactggagaattattagactcctttaacattgcccttggcttggaagacagcatctcattcgaagacttagaagttggcgactactactacacaatcgaatttacaagcgaattatacgctggagacaacttcacatctgaagtattcactgtaaacacagccgaaatccttgatttagattcttccaatgtagacaatgtatcctacggcgaaggaatcgacataaccgtatatgtagatggaatgattgaaggagacctcattgaagttaacttcactgtagttgacgcaacaaccggtgacgatgtattcaatggaacttacaacatcagcaacggtgatgttatcacagttcctccattagatgtaggtaaatacagctatagtgtctcattctatggagatgataaatataacactggcggtgcagattccattgctgctgtcggaagctttgaagtattggatatgtctgatgtagatgttcttgtcactgcagatgaaagcatcacttacggtgaaaaggtcactgtagaaattgatcctatcgtttctgaaggtggattacctgtaacaggtactgctaccatttatgtatatgatgatccagcatctgtagatcctgtatatgttttagctgatgtagaacttgataaagacggcgctactgcagtccttgataccatattgcctactggcgaatactggattgttgtagactttgaaagtgatgatggctactatgatggcagaggcgtaacttcaaccattgttgatttagctctagctaaattatccatagaccctatcactgttacctatggcgaaaccatccctattactgtaacagctcttggcaatggcggtgaactattaaacggaaccgttgaatttaagatttacggtccaggatttgaaggaacagtcactgtcaaaaatggtactggagtaaccaatattacagaaaggtttgatgttggaacctacactatcatagctgcatttggagatgatggtgctaattacgaaggattcaacattacttccttagaaatcactcctgctacccctatagtccgtgtaactggaagtgaagttgaatatggcgaacctagcactgtaactgtcagtgtaagtgacattgatggcatgccattatccggtaaagtaatcgtaactgttgactgggtcgttgacggtcttacccaagtaattgaccttgacgattccaatgaagcttcattcgatctcagcccatatgtccatcaaggaacatacgatgtaactgtaacctacattgcaaacggcaactacggcgaagctgtaaacgacactgaaacagttaatgtaactgcttccactaccgctacagttaacgttgaagttccagaggacgtatcatacggcgatgaactaactatcaaagtcactgctgaagacggcgctggcgaacaaatccctctagaagcagtcaatgtaactgtaaacggtgaaaccaaagaataccctgtagatgaaaacggcactgtaaaccttggcgtattgcctgcaggagataatgaaatcaccgtagctctcgatgacggtactcacaagcctacaaaaactgaagctacagccaaagttgctcctgctgaagctgttgtatttgttgacactgacaatgataacccaagctatggagatgtcgttgttgtaactgtcaatgctaccaacaaggacaaacctatagatgccgatgcatgtcttgttgtagacggctacttaatcggctactacgatcttgaagacggccaagttgaaatctctattaaagacttagcccctggcaaacatgaaatcgaggtttcagtcgcaaacggaaactactctgaaggtagttacggacgcgcaattgtcaatgtagataaagcaactcctgtaatttcagcagaaggcgaaacagtcgaatggggtgaagttgcaactgttaaagttaatgcaaccggtgcaaacggcgaaaaattaaacattcctttagtagtaagagtcatctgggaagtatctggtgtcgatgaacttattgaaattgaaaacggcactggagaagctgctttccaaatctccaactatgttgctcctggaacttacaatgtaactgtcatattcttaggaaatgatgaatattacccagtaaacaacactgaggctaagattatcttaaccgaaccaaaaactgttgaaatggaagtatccatcacccctgacgaatacggcaaagctacaaatgtaactgtaacccttaaggacgttgcaagcaaaccacttgaaggctcaactgtaaccgtaactgtagatggcaaagaatacgctaacgctacaatcggcgaagacggaaccgtaaccgtccctgtagaaggattagaagctggcaaccacactattgctgtcgacttcgatgacggtgaacactcccctgttcatgaggaagaaaacatagcaattgaaccatcaactgatgctaccgttgaagctactgtaaacgtaggcgaaaacgaaaccactgttgatgtaattgttaaggattccacaggtgaaggcataaatggtactgtaattgtctatgtagacggcgaacctgtcgctaacactacagttggcaatgacacttcaagcgtatccattggccaattagctcctggcgaccacacagttgacgttgaatttgtaaaccctaactatgctccaacaagctactccactcatgtaacagaatctacttcactcactaacatgacagttaaagtagacaagaaaaatatcctctatggtgaatcagacataactgcaaccattgaattcacctcagaaggcaaagctcttgacggtgtagttgaagtattgttaaacggtgaagcacaaaacgtaactgtaaccggcggaaaagcaactgtaaaattcagcgacttagctgcagatcactacactgttgtaagtaacttcgctggaaacgctacatacgctccttcaagcgactcagcaaacttcgtagtggaaagaaaagcaaccaagttcaactacaacgacatgaataccacagcagtcaaccctaatgttgatggaagaatcggcgaatacttctacttccaattagttgaccaagacggaaaagcccttgctaacaagagcgtatccatcggattcaacggaaaagtatacaaccgtacaaccaacgaaaccggttgggctaaactccaaatcaacttaagaatcgtattcggatacacctttgcaatctcattcttaggagacgacaactacacaggcgcattcaatgtagccttaatcaacgtaagcgctcaaactcctaagctatccacaagcagcaaggtttacaaagcctctgctaagactaagactttaactgcaaaactcttaacaagctctggaaacgtggacaaaggtaaaaaactaacatttaccgtaaacggtaaatcctactctgcaactaccaacgataaaggtgtggcatctgtaaaagtaagcatctcccagaaaggaacttacagttttaccgtcaagaacgctaaagacaatacatatgcctctgtatctaagactgcgaagttagtaattaaa

SEQ ID NO: 16727 - DNA, 6678 bp, synthetic construct
  source 1..6678: mol_type = other DNA
aattatagatatttatctactcgtttgaataatttgattataaaggctgaggacggcgctgaagtaaatgttgatttaaggggaatgaatcaaaacagtttgtattggactttctatggtgataatgtaactgtaagcggcattaactttatgaatgccaatatgacatcttacaaccttaacaattatcacgctgtattgaaatttatcaactcaagcaattctcgtgtggaagattgttcattcagcaatttgaaatcctatggaattcttgcaggaaacagtactgatgttgtaatcagcaattgtaatttcacaaatggaagctctagaatgttcagtataaccaattcaagtgtcactgttgaagattctatcatgaagaacttctctaccagctacattagaaattccacattcactatggtaaatagcaccgtgacagatttcaatgatgacgacatctttaatttcgcaaacactgatttggatattagggacaatacattcaagaatttgacattcccaaacaaaaccaattttcaacgttttggagtgttctatgcctgggatgataatgctggcataagttataatttcataaacaacacctttgccaatttcactggaacagatgcttatatgatttatcgttcagcatcctcttcagtcaaaccaatgtgcaaagtaaacttcacagacaacaatgtatcaaacgtatctgttggagttaatatatattatggaaatatcactgttgaaaataacagcttcgatcatatgagtccggccaatactttacgtttcagctattcaaacattgacataagagataacaactttacagattctaactctacccatgtttattcagatagatgcaatggtacaattgaatataataatttcattaacaactctgcattgcctgtttcagctgagtggggtaatttgaatatttcctttaacaatttcactgacaataagggcaatttctctgcaggagccattcaatctactggagtagtgaatatatttaacaatactttctgtaacaattccgctcgcgttggtgctgtgaatgttgccagcattagtagtaataaaaccatttacaataacacatttgtcaacaacacaggtgttagcggtaccctttatgtcaatggaaatgcaacagttcatgacaacagattcatagacaataatgtaagcgaaaatggaggagccatctatgcagcatatgataatagctataataattattataatatttctgctaatattactgacaatattttcgatggaaatattgctaataagggtggtgcaatctattatgaacaatataatagcgcttatggccttgataacttggcaaacaacacatttgtcaataacaaagccgaatatggtggtgcaatttattcaaataaaacagtgaatgtcactatttcagagaacgagtttgtcaataacagtgcaacaattggaggtgctatctttttagacaattatacctctgcctttaacactggaacaaacattactctaaacaatttcacaaacaactctgcacaaagtgctggagctgtagtggtttatggaaacaacaccaatgttataggcaataactttgttggaaacaatgctacacgctatggtggtggtgcacttgtgactgatggtgcaaatggattgatttataacaacacatttgaaaacaacaccgcattcctatatgcaggagccatcggaacaaacaacagcaagatcataaacaacactttcactaacaacaacgcttatcaggctggagcaattttaacaatcaattccactatacataataacacattcagtggaaatgacgctacaagagctcctagtgttggctatatagacaattacaactacactgtttcctcttactacgtttactactgtagcagtgaagattgcagcggatgcactgcatgcgaatcctgcacaagcacaatcatcgaccctataaccggagcggaaatcaaggtaatcaactgctctaacggtgatgtacctgagtgcatttgtgaagattcagttgcaacattgtataatattagcctattgtacaataatgaaggtctcaatcttgatgaagatgtttatgtttacgatgaaagcaccattcttagagttgctttaaacaataatgatatgtacttcctatatgaaaacgcaagcattccaaatgccagcgaatatcattactgggcatactgcattgaacagaacaactctaagccatggcaatggaacggaactactggtgttcttgtagatgacttgtactttgtaagaaacagcctggacggctcttatgttggagattacattaaggtattggtatcctacttctactttaaccttgacgaggatgtctataacttgaaagattatgtatatgtatttacagacactgactatcgtgctaatacagatagggtaattcgaagagttattaaccttacagaaagagaggacacatctcttgtaaacggcaataactggattaacggagtttataactgtctttcattccatagctttatcatgcctaccacaagacagaacctgattctcattaattcatgtatggctatgcagactccagacttcaatcctcagaaaatagccaacaaggagaatgtcggcactggagacattgtaaactacacagtcactgtttacaacaatggtactgtgtcactgcataatgtgactgtaaccgaaaggcctaacagcatgcttacctatctatcattcactgatttccgcaatcaaggatgggtgcaaactggtgagatgacttgggtcttgaataggcctctgaaggtccatgaaactggtacattcaatataaactttagggtaaataatgtcacatatctcactaatatcacaaactatattgatgtaggctgtgatgaggtttcaaacaaatctgcttttaccagaaccgaaaccaaatggccacgcatacaggttcaaaaaatcactttggaccaaaatgtaactccaggatcaactgtaagattcttgcttttagttaaaaatataggaacccttgaagcaagcaacatcactttggtggacaattttaatagaaatgaattggagtacgaatatagatgggattcatataaaggtaattggtctggaggacacggatggggaggaagcagctcttcttggcatgtcgacacattatacttgaaccaagtcctctatccgggtcaagaggctggagtgattatctacttcaaagtacctaacaatgtaacagtagggtctgcttataattcagtaaatgcttatagaaacggaacatctgaaggttattcaagcaattacacaattatacaacgtccttacttttcaatttggaaaaccttggttagctcaaaaacttcaaccataggagaggaagtggtattccaaatcaacgtacagaatacaggttatgtgaatttaactggtgtttatgtagaagacattcttccaataggattgaaatatcttaggttctacaatacagataatcataactggactcattttgtagatgaagatggaaaacatagattcctattgcaaaacactcttcctacctattattcagacagtcagaattatgttgcccgactttatattgtctgcaatgctacagaatatggtaattggtacaaccttgctacaggatacacagaacagacaaataagagtacctctcaggcaaatgttacaataattccatttggtgtatcaattgagaaagtcagcaataatccaatatcacaagttggagatcaggtctcatttaccattagggtaagaaacacaggaatatataacttaactgatgtctatgtaaatgaaacaaggaactcctatatggtattcgatcactttgttgacaattcaggcaagtggattttaaatgaatcttatgcaacttcaggcgtgcctagctggaattataatggtacttttgaagtaggagctgtaagcgaatttgatgttttctataatgttactaatattaattattatggaaacataacaaataccgcttatgtctcttccaaccaaactaccaacaggtctgtttccaatcagacagctgcctataatattaaggtaagaaaaatcagcaataatgctacagcaagggttggagatcaagtttcgttcactatccaaatatcacgggatggctattcttgggaaagtcctttctcattatatggcattcatgtaaaagatttggttcctgatggcttggtatttgaccatgctgataacagttactattggatttataatgaaagcgatgagacatggtactatagatctggtttgacagcaggcagaaccattagccttacattgtactttaatgtgaccaaggcagccaacataaccaatgttgcaattgtcggagtcaataacagtacagtgaaaactgcaaataatactacaaacagtatttaccataacttgcaagtggaaaaggtcactttaaacgaaacagtttacccaggaaatatcacagaattccttgttcgtgtgaacaacaccggtgacaataacctcacaaatgtattcgttaaagaaaacattccaaacggacttgtttactatgattatattaataagactggcaaatggaattatacggaagatgatgacggacctatatggctttatgatggcattttagctccaggagcattcggtgaattcattataagattcaatacaaccgtacctggaatctttgtcaacaatgtcgtagcaggctctaatgaaacttccaataagtccactgagaattcaaccaaagtcttgggtccaataatctctgttggaaaaatcactttaaacaagaccgtatatattggagagctaactgaatttagaattaaagtctctaatgatggggactgtaatttatctggcgtatatgttgttgaatacatcccagatggcttaaagttcgttgaatttaaagatgaaagtggtttatggacttacaatgaatcaagcagaacattctattacaatggaattttagaacgtgatgattcccttgagtttgtcgttgtatttaatgcaacaagagcaggcaactttaccaatgttgttcatgcaggatctaacgtgactaacgaatcagttgcaaacaacactactgaagcattggatgtaagaatggacattcaaaaggtcaccttaaacgaaaccgtattcactggtcaggaaaccggatttgtaattgtcgtttccaataccggacttaaggacttgactgatgtccgccttaaggaaatttatccagatggcttagtatattcacgcttcatagatgattcaggcaaatggtttaacagaggtgattattggatctataatggtgttttagctgttggagaaagcactaacttcactgttatattcaacacaaccaagagcggcacattcaacaatacaataattgtaagctctaatgaaacaggtcctaagaacacttcaaataccactaaggtagttgtagcaaatgttaccgttgcgaagatcacattaaatgaaactgtcatgagcggagagcaaaccagcttcgacattgttgtcaccaacgacggaatctataacttgactggtgttgtcgttaccgacgccttccctgaaggcttggcttacagcggcttcgttgatgcttccggcaagtggatctttgatgattccaaaggaaatgcttggatttataatggcactttggctcctggtgagtctgcaagctttacagttgtctttgacactgatgaagtaggtgaattcactaacatagtcaaggtaagcactaaccaaacccaagataagaacgcgtccaatataaccaaggtaatcaagcttattccaaatgtcgcaatccaaaaggtcactcttaacagaacagtctacagcggagagcaaaccagcttcgaaattattgtaagaaataatggagaaatgaatttaactgctgtgacagttactgacgccttccctgaaggcttggcttacagcggcttcgttgatgcttctggcaagtggatatttgatgatgctaagggcaatgcttggatttatgatggcattttggctcctggtgagtctgcaagctttacagttgtctttgacaccaatcaaacaggcaactttacaaacattgtaacagtaagcagcaatcaaactaaagagaaaaatgcatccaatattactgaagtaatcattaaatctgttccaggcattgagattataaaaatcacaatcaacagaactgtatacagcggtgagcaaacttcatttgacattgttgtaagcaatgatggtaatgtcaatttaagcaatgtgactgtaatcgacagcttccctgaaggcttgacctacagcaatttcattgacgacactggaaaatggtttaacataggcaataagtggatttataatggaattctacttcctggtgagtctgctggtttcagaattgtctttgataccaataagtctggaaacttcactaaccatgtaaaagtcacaagcaatgagactggagagaaaaactcatccaatgttaccgaagtaatatttgct

SEQ ID NO: 16728 - DNA, 6927 bp, synthetic construct
  source 1..6927: mol_type = other DNA
atcttcattggtgaaggtacttatgttgaatccaacctcacaatcagcaaagacttaaacatcactgcacttggagaagtgatttgggatgctaacggtcaaagggcattctccatgtctacaggtagtgtatccatttcaaacattacattcataaacggtaactacacccgcaatggtcacttgatctactgtgctggtgacagtctcaaattcgatgaatgtaagttcttaagcaacggtggaaatgtaactggtaccaacggagtcatctatgtagaacttgcaagtgcaaacttcaacaactgttacttcgaaaacaacactgcaggtactggaacaagctatggtttgatttccgctaaagattcagttattatagtagatggctgtacatttgtaaacaactttaataaaaacggctgtatttatgtaagcggatctaatattgggtccatggctgtcataaataataccaaattcattggaaacaatgctacctctgcaagcggaggttctggtggagctatctatgcaagcggttcaatggcttaccaatactctaacggtactgtaagacctggtgctcaatctgctgtctatgtaattgactgtgactttatcaataacactgctttcggcggtaaatactacaacgctgaaggtggagctatctttgtaaatgcaaatgcaacattatatgcatctaattcaagattcatcgataatactgctcttgattatgaagaaactaataaatcaggtcgtggaggagctattgcggccacaacaggtaatgtacaaatttcaaattgtatattccaaggcaacactgctaacaatggttctgttatcgccatgaaatttgcaaacaaagaccttacaactgtaaatgtcttaagcataagcaactctgtaatcatgggccctggcgaaaaattaattgtctctgacttcactaacggttctttagttgccaacaacaactggtgggcagcgaatgaaaacccatctgatagggtaagcgaaggaatcactgtagacagttgggtaatcctaactgcagatccaagtgaaatcactggaactcttgatgaaattataccaatcgttgctaacttcagacacaccaacagcactgatggaactatcggtgatttggaaggagaattcccagaactagaagtattcggaatgactttagatgaaggtgaaattactgaatccaaccttactgtagacaatgtagctaccctttactacactccagaagaaactggtgaaaccactgtatatgctatttcaggcaatgcaatggttccaatcaaagtaactataaccgacactcctcaacctgttgcagatgttatctatgtatcaccatccggtgctgataccaatgcaggtacatatgaagctcctgttgcaaccattgcacacgcagtggaacttgcaggtgctgaaggtgcttcaggtttagtcgtcattgaagaaggtatctataacgaaaacggcattgtaataaactctgctatacctattaccattacaggtaacggaactgttataatcagaggaaacaaccatgtcgttaacggaaacggagctggaagatttggcgatgtaagcgaatccacaagcataataattgtaaacacaactgaagctgttgttattgcaaacattgcatttgaagacaacattgcagcaaacggtggtgcaatactcattgcaggaaccagcagttccaacttattcgatgctgatgtattggttgaaaactgtagtttcaataacttgcaaggaagaaatggtggtgctatctatgcatactacgctattggcaacctaactgtagccaattgtgaattcacaaacatcaacgcaacttgggctgctttatgcgcatatcaagctgcttatggcgaagggctcactgtagagataaaagattcaagctttacaaacaactctgcaaacaatgctcctgcactttacttgcaagcaactaatgttgtaataaaagattccaactttacagacaacaatgcaacctaccaccctggtgctatctacttgcagaacactactgcaacaatcgacaattgtattgttgcaaacaactctgctaaatacgataaggcagctattgcaatccatggaggcaatatccaatacaacccagtaattgtaaaaccttctgaagtaacaattacaaactctattattgaaaacaacatcggtagggataaagcagctcctgctatctacttggaaaactccatcttaaacatgtcttactcttctgtagtaaacgaaatcaacattaacaataccgttactgcaacctatggagatgaaaaacctggacttgttttaatcaacaacaactggtggggaaccaacgacccaagcactaccatattcggtacaaacatcactatggacaattgggtcatcatgaatgtagaagcaaacgctactgaaatccttgctggagaagaagtaaaattaactgttgactttaaccatgtaaacactaccgctggtgagattgaagaattaaccggtggagttattccaagagaatcctacagtgtagcactttctgtagataatggtactgttgcacctgaaacattaaccattgctaacggagctactggcgaagcaattttcactgcagctaatgctaatgcattaataactgtaacaagcgaaaatgcagttgaaactatattgattaatgttggagaacaaccagttccattcactggagttgtatatgtctccaaagatggtgatgacgctaatgaaggttctgaagatgagcctgtagcaagccttgcaagagctattgaaatcgctacagctgaagaaggatctggtcaaatcatcattaaggaaggcacatacattgttgacggatacaacattaccaaagacttaaccattactggtgaaggagatgtaatactcgatgctcaaaaccaaggcaacagattattcaatatggcctatggtactactgtatccaatttcgaattgcataaccttgttcttgctaatgtaactgctatgtatggcgcagttgtttacagctatgcagctaatgcagtcttagacaacattacagttgctggaatcaaccatgaaatggctaggctcatttcaaactatggtaatttaacaattaaagactctgtatttgcaaacaacactgtaagcggaataatcacccactctggaaacaataatttaaatattgtcaatacaatatttgaaggcaacaatgtaacatatgattcatctatcatgggtgtggtttatgtttcatcaggcagaggaaacataacaatcgaagattccaaattctatgacaaccttgtacgtcaatccacagtacgcggttacacagatactaacattacagtcaaaggtactgaattcattaacaacactgcagacaactctccatattactgctctggcggagctatttttgcacaagctaatttggatgtaacagaatccatattcatcaataacaatgctagaagagaaggaggagcaatttatattggaatcaatggtgtggcaaacatcaccaaatccgagttcatcaataacacaatctatgataatgagtactatggagatgcaatctacactaaaggtacaactgccatcaattactgtatattcttgacaaatggcacaagatatgcagtttacaatggcggatccaaagaagtaaatgctcaatacaactggtggggcactaacgacgatcctcaaggatttgcttactctgcagatgcatctaactggattattatgactgtaaccgctccaagcactcaagatattcaagcaggagacgaatatgaattgactgttgacttcaaccattacactgatggcagtgacattttagaattgccagatagcttagctcaagaattgactgtagaattcacttctaccacaggcacatttgacaatcctgtagtaactactgaaaatcaagtggctactgcaaaatacactgtagttgcaggtgaaaacagtatcacagtaaaatccactgatgctgtatggaacactagtttcactgctggagaaaaggctaaggctaagatgaatgtttcaatggaaaacaatacaattattgtaacccttaccgatgaggaaggagctcctattgcaggcaaaaccattagtgtgctcattaacgaagacacattatccaacgaaaccaattcaagcggtattgctgcaatttcacttggcactttagatgctggcacttatccagctacaatcagcttagctgacagcgaatatcaagctccagagctaactgtatttgtacttgtagaagagactcttgtagacaaccctataggtgcagtcattgaattggctcttgctgaaaatggcacttccattgaagtgaccttgaaggacattaacggtcagcctattggcgatactattgttagatattacattggaagcactgatggagctctccttcctattgatgcaaacggtaaaggatcatttgacattgacaatacagtcaatcaaaccattaaggtcagctacactaaggaaggcactgaatggtcttcatattatgactttattgtaaacaatgaagtaactcctgttcctgttgccaataacgctaaattcgatgtaattgttcgtgaagatagcattgatgtattcttatacaacgataacttagacgatttcgaaggcgctaagattatggttactatcggtgaagaagatccagttgaatatattgctggagagaacggaaatataaccatccctatcaatggcgataccactgtagagctttcatacactgatgaaaacggagctactgtctaccacactgttaaagtttccactagtggtgtggatccttctgctgaaattgaaattatcgtcgaatctcataacgacacttctattgaagtaagcgtaactgttgatggtgatgatgtcagtgatggtgaaattacctattacattggtgatgatgacgatggaacagttgttcctattgaagatggaattgctatcataccattcgacaatactgtaaatcaaaccatcgaaatcacatactcagatggtgacgctacagagtcagtatactacactatagttgcattcactcacgaagttcctgttgagcctcctgtagctaatggcagctttgatgttgaaacaactgatgatgctattgttgctactttagttgactctgatggtaaacctattgctgatgcaactgtttctgctatagtcaatggcgaagagcaaaacttcacaactgatgcggatggtaagctaagcgttcctattgatggcaatgcaactgttgagcttagctacacagatcctgaaaacggtgctgtcttaaaatatgtaactgatgtggtaactaaagaagttcctattgaagttcctgttgttgctaacggcactatgagtgtagaaacaactgatgatgctgttgaagctaccttagttgacagtgacggaaaccctattgaaaatgctactgtcactgctgtaatcgatggtgaggaacaaaacttcacaactgatgcagatggtaaggtaagcattcctgtaggtgaaaacgctactgtagagctttcatacactgaccctgaaaacggtgcagttgttaaatacagcactaaagtcgtaactaaagaagtggaagttcctgttgacgttcctgttgttgctaacggaacattaactgttgaaacaactgacgatgctattgtcgctacattagttgacagcgacggcaaaccaattgctaacgctactatcattgcagttgtagatggcgaggaaatggaaatacctaccgacgaagatggtaaatgcagcgttcttatcacaggaaacaacactgtagagttcagctacacagatcctgcaaacaacgctacagtttcatactccactaaagtggtcactgaagtcgaagaagtaatcgttcctgttccagtagttgctaacgctacaatctccttaagcactgaagacggcagctcaatcgttgcaaccctaaaggaccttgacggcaacgcaatagcaaacgctacacttgatgctaatgtcaatggcgaagaaactaagttaactacagatgcaaacggaatagcaactattcctgtatctgcaaacacaacagcagtagtctcctacacagattctaacaaagctactgtaacaagctcaatgagcctaacagtaatcgaaaccatcgtagaaatcaacaagacaattgaagttcctccagtaagaaacgcatctcaaatcgtttgtgaagacatgaacacaattgcagttgcaaaagatgatggaagaatcggagaatacttctacgtaaaactagttgacgcaaacggcaatgcattagtcaacaagtccgtacaaatcggattcaacggcagagtatacaaccgtacaactaatgaaacaggtgatgtaaaactacaaatcaacctcgcatacaaaggaacctacacattcgctatcgcatacctaggcgatgacaactacaacggttcatttgtcgtttcaaagattacagtaaaacaacaaagtcctaagattactacaacttccaagacttataaggctagcgcaaaaacaaaagcattgaccgctacctttaagacagcaaatggaaacctaatagctgataagactattaagtttactgtaaacggtaagacatactctggcaagaccaatgcaaaaggtgtagcaactgtaaaagtaagccttaacactaaaggaacttacagctttacagcaaaatacgcaggagacgacacctttaaggcaactagtgcaagcggtaaattaactattaaa

SEQ ID NO: 16729 - DNA, 204 bp, synthetic construct
  source 1..204: mol_type = other DNA
tccggagaccccgacggacttgaaaagagcgcagaggatgccaacgtgggggaggatgtggaagcaccagtcatggaagctcccttcccggactacacctacgagcctctcgagaagatcggtgaaatcggcgtattgattctgggcgccctgataacactaattgttgcgtgggggatcggctatgccctgaaaagaagcgag

SEQ ID NO: 16730 - DNA, 531 bp, synthetic construct
  source 1..531: mol_type = other DNA
tttaataacactgtaaacatctatctcgacggggagaacgtcagtgtggaaacacagactttcgaggatatcgactcgaacagtctgaacaaggacatctgctcctacaccctgaatgtgatgaacaatacaacctccgatgtggagactttaaagaatggagtggaaaagctgtgttatcagcatggtcttgaggatgctgaaatcaacatcgattcaagcctcggacacgaccagatccccatcattgtccatgttgacggcacctcaatgctgccaacattgcaaaacgggcagacggtcctcgtaaataaaacacacgacttcgaggttggcgacattgtggtggcagaatccaaggaatacggtggaatcattaagagggtggagaaaattgacgagaataaggttcacctgataagcgacaacaaaaatatcagctacgagtacattgacggcgccctatatcaaatcaaagggataaccacctgggtcgatatatctgatgtcaacggcgtggtgattgattac

SEQ ID NO: 16731 - DNA, 654 bp, synthetic construct
  source 1..654: mol_type = other DNA
gcggaccccctgaccgataaccagctgaacccaactattttttaccttgacttcaaccacggcgctctgaatgatggttttaaaaaagaatttgatctcttcgagtatgttcccacatttgatagcgtagacctatacaacgacggagaaaacgtctctgtaagcttctacagtctgaaccctaccattgacgtggacaacttaaatgacgagatcatagactatacattcgaggtgatggaagaccctaaagccaatatcacgacactcaaggacgggataagaaacatctgcagcgagtatggggccgatgacgtcaagattaatgtggattctgtcattggagaggacgaaattccagtaatcttcacaactgagggagattccatgctcccgaccataaaatcaggagataaggtcttggtgaataagagtcataatatccacgtgggcaacctggtgtccgcaaactcgtcagagtacggccccatctgtaaaagggtggcagatatcgatggggactccgtttaccttgtcagcgacaataagaaggttactcgggagtactacgatgactattacgtggaatataagggcatcaccacctgggtgaacattgatgatattgacggtgtgatcatcgacatcatgaat

SEQ ID NO: 16732 - DNA, 723 bp, synthetic construct
  source 1..723: mol_type = other DNA
tcagtcggtacctcaaacggagacctaaatggccaggatgttcaactcgccgccgcagcttccttgaagaatgtgtatgacgagaagctgatccctatgtttgaagagaagtaccctggagtgaaggtgaccccgacttacgccagctccggggacctgcaaaaacagattgaaaatgggctgaaagccgatgtgttcatgagcgccggcaacaaacagatggacgccctcatcaatgaaagttacgtggacaacgattccaatgttaagttcctggagaacaagcttgtgctgatcgtgtctgctgacagcaacgtgaatatcagcagcttcgaagatctaaagaacgtcaacgggacgatcgccataggtgaccccgaatccgtgccagccggccagtatgctaatgagtcattacataacctgggcatatgggatgatgtggagtcgaaactctctttgggcaccgacgtcacagcagtcctgaaccaggtagctcaaggaagcgccgactgcgggcttgtctacacaactgatgctaagtctagtgatgaggttaaagtcatttgtgaggcgcccgaagacagcctcaaagatattgtgtatccagtagcgccaatcaaggattccgaacacgcagacgctgcaaacaagtttatggagttcctgcagacccccgaggcacagagtgtatttgaggactacggattcacaattcacgag

SEQ ID NO: 16733 - DNA, 756 bp, synthetic construct
  source 1..756: mol_type = other DNA
tgctcggcaggtttcctggactttctgggaggagacaacgctacagacgacagtctgaatggcaaagaggttaatttagccgccgccgccagtctaaaaaatgtctatgatgatgagttgattccaatgtttgaggcaaagtatcctggcgtcaaggtgactcccacttacgcctcaagcggcgacctccaaacacagattgagaacggtctggagacagacgttttcatgagcgcctccaacaagcagatgaacgctctcgctgatgaggggctaatcgacaatgacaccaacctgcagttcctcgagaataaagtggtgctgatcgtaccgaaggattccgaccttaacatcacaagcttcgatgaccttaaagatgtgaaggggaccattgcgatcggggacccagaatctgtccctgcaggacagtacgctaaggaggcactgaccaacctcgggatctgggacgctgtggagtccaagttcagcctgggaacggatgtcactgctgtcttgaatcaggtagcccagggtagcgctgagtgtggcatagtatatgcgacagacgccaagtccaatgatgatgtgaaggtggtgtgcgaagctcccgaaaactctctgaacacgtcagtgatataccccgttgcaatgatcaaagacgcgaaggatgcagatgccgcaaaagccttcctcgaatttcttcagacccaagaagccaaggacaaatttgtggaatacggctttaccattcacgaa

SEQ ID NO: 16734 - DNA, 783 bp, synthetic construct
  source 1..783: mol_type = other DNA
aacgacctctccgattccaatgtttcaagtgacctgactgttgacagcgactcgataagctctgatgatacaggttctagcgacacaagtagtgatgattcaaaccaggatgatgtctctcaggacaagacgaacgataagaaactgtcggactcccagtcagactcatccaaggacactcaagacaccgacgacaacaataccgacaacggtagcgataaatgcaatctgattatcaccaaaaagggcaatgagaaagtcaaagtgggggatacggtggaatggacaatcgaggtaaagaactccctaaacactgccgaaaacatcagtgtcgatgagttcctcccccagaactttgagttcaagagtgctaaggccagcaaaggaaactacgccgttgagatcgcaaactgggacattgggaatttaaaggaaaatgaatctgctaccctcgtgattaaggctcaagcactgaaggcgggaaacttcaccaatgtggcaaacctcactaccgattccgataacatcaatggcaaggtcctgagcgccaaggccgacgtggaagtgctttccgagaataaaaagaatgagacacctgtaggaccgaagaagaacaaagacaataactctacagtcaaaaagattcacaaactgattaagaatcagacaaacaacaccaatatgactccaatcgactttaagaaaagcggcaatagcttgttcgccgtgatcatagcggctttggcagtgcttgggatctttctgggcaggcggagaataaac

SEQ ID NO: 16735 - DNA, 1026 bp, synthetic construct
  source 1..1026: mol_type = other DNA
tcacccagctctatctctacagatgggaataccacaataaccgacatggccaatcgcactgtcaacatttcaagttccgttgatcgagtggtcgcaacaagtccacccatgaccacgatcgtctatatgctggcccctgaaaaactggttggggtaaacttccaatggactgatgaggaactcaaatacgtgccggaccagtataaggataaattcccagttatcggcggctggtttggaagtcaggacgggaattatgaagagttcattgcctctgagcctaacctggtgattgaaggaattgacgaaggaatgggtgtcgacctctcaaccgtggaagaacggcaggagaagttcggttcacttcctgtagtggctgtcacagacaatacaaacgtgacaaagatagacaacacgatagagttccttggcaagctgctgggggccgaggacaaggcaaatgagttaattgcctttaacgataagtacctatcccaggtacaatccaccgccagcagcattccggatagtgagaagaaatcggtgtattacgcttccggcgaggatggactgtccacttacgcaagtggcgcttcacacggtcaattgatctctctggtgggaggcaaaaacgtcgcagacaccgaggttaaggacagcggaagcgagctcactgtgtccattgaacaggtaatgtcttggaatcctgatgttatcatcgccacagatgaggacttttacaacaaggtgtataacgactccaaatgggctagcgtcaaggcagtgaaggaccatagagtctacctgtcgccacagtctccatttaagtggttcgataggccccccggggcgaacataatcatcggcgtgccctggactgctaaggtgatctacccagataaatattccaacatcgatatggtgggagccaccaaagagttttatagcaatttctaccactacggccttagtgacgaacaggcgaaagagatcctcaccagcagcggtctaaaggggtctgacttg

SEQ ID NO: 16736 - DNA, 1029 bp, synthetic construct
  source 1..1029: mol_type = other DNA
ctcactcctagcagtgtggaaacagaaggctctaaaaacataaccgacatgttaaacagaaccgtcgaagtgccaaatggggtgaataacgttatagctacaagcccgcccatgactacagtactgtacatgctgagccctgagaagctaaaggcagtgaacttccagtggactgaggacgaactcaaatacgtgccatccgaatatgccaatctgccagtggtgggcggatggtatggaacacaagacgggagctacgaggaatttatcgcggctgagcccgatatcgtgattgagagcatcgacgaggggggggacggcgatgcattcaccgtgcaggagaggcaggataaatttggcaagattcccgtgctggccgtgaaggacaccacaaatgtcgagaagataggagattccatctccttcatgggtgaggtcatcggtacggaagacaaggctaaccaactgaatgagtttaacaccaaatatttggatattgtacacgacaagtcatcgaagctggtggacagcaacaaaaaaacagtatactatgccgcgtccagtgacggtctgcaaacgtacccgtccggagcctctcacggccagctcattgacttgatcgggggcaaaaacgtcgccgatagcctaaaccagggaaatactaccagcggcgtccaggtctccatcgaacaggtcattaagctcgatccagatgttataatcactaatgatatgcatttctataacaaagtgtataacgactcaagttgggcacatcttaaagccgtgaagaataagaaggtttatgtcagcccacagtctcccttcaagtggtttgacaagcctgttggcgctaacatgattatcggtgttccctggaccgccaaggtcatctaccctgaggactacaaggacattaatatggtggatgtaaccaaagagttctacagtaacttctaccactttgatctgaatgacaaccaggcaaaagagatcctccttgattcaggactgaaggaatcaaatctt

SEQ ID NO: 16737 - DNA, 1056 bp, synthetic construct
  source 1..1056: mol_type = other DNA
agtgaaaacatagtaattgatgagtcgtccgattccaatctggtgatagaccacgccaaggacaattacttattcaatgggcccataaaggacaattaccttagcagcagttctattagtgataactacctcagcaaaggggttctcgatgactcgtatctgtcaaggagcgacctggatgatagctatctgtccatggacgatggcaaaggctctatcgatttgacgaaccacaaccaactaagcaactcagacgataagcagctgaaaacttctaatttagaggatgagaaacagcttgaaagtgtgaataaaggggataagcttctgaaagatagtaacgacaacgtcgatctgtttattaatatggacgtaaagacatcactgaccaacaagcagtataaccgggcaggaagcgaagtcccttggattatcaccgtctccagcctcaacggcaccagctacaacacccaggttcgcgacgtgctctccgaaaatctacagtacctgtcccacaatgctacaatgggaacattcgatccagagaacggaatctggactgtgggtgacctggaatcttctaaaaacgccagcctgacaatcctcacacggctgaagcgcgacgggacatacatcaacaaggcctacgcgactaccgactctaacgatgtcaacctcttgaataacttcctaatcatctccataaggaccggttcatcaaagatcactagcaacattacggagaccagtgacgagcgagagggaattcagcataatgtgcattatgctagtatggtggacacggactttatctatagatacgaagaggactcctcagaggacgacggcggcaacgaagaaggccaatctgaggggaattcccacaccaagactagatctttgggcaataagttgaagctgttcaatgctcagaacatcgattatcattctctttccaaaaacatcggtggcgcactcggttttggatacaactcaaatgggggattccttaatagcaaggacatttacgaggccctgtttgtgtatgactacaca

SEQ ID NO: 16738 - DNA, 1539 bp, synthetic construct
  source 1..1539: mol_type = other DNA
ggaggaggcactactgagcgggggcccggcgagatcgtagtggccgcctacagtcatggcggagagccagaggctgggttcgatccaattgccggctggaattattatgccgagccactcattcaatcaaccctgttgaaaatgacccccaacggcacgtacgccaaagatttggccacagactacgagattagcgatgattataagacatacactgtcgacctgcgcaaagatgtcaaattcactgacggttctgacttgacagctgaggatgttgcatttacatacaacgccgcgaaggaaagcggcgcaagcctggacctcagcgccctggataaggccgaggcccaaggcgattacaaggtcaaatttaccctgaataaatcagattccactttcctggataagatggcatacatcggtattgtgccgtccgattcttataacaacgaatcatatggcgagaacccaatcgggtcgggaccctacaaattcgtgcagtgggacaagggtcaacaggtgatcctggagaagaatcccgattactatggtaaacagcctgagatcgaaaagataaccattctctttgcccagaacgaggctgcgttcaaccttgctaagaatggagaagccgatatcgtggccgtccctctcgagtatgggaaagagaagcttgacgggtacacaatgtacctacaagacaccatcgacgtgcgtggggtttctctgcctagtgtgccggataccggagagctgtctcccgatgacaactacacaatcgggaataatgtcacctgcgatattgcaatccgcaaggcattgaactatgggattaacaggacggctctagccgagggcgcactaaatggcttaggttatccaagctatgacggtattgctcaccagcttccatgggctaataaggaggccgcaatagaagacggcgacgtggcctacgcaaacaagaccctggaggaagctggatgggttgactctgacggagatggaatcagggagaagaacggcaccaaggcttcatttaagatctactactcggccagtgcccctgagagacaggcgctggctgtcggggctgccgaacaggcgaagcagttcggtatagaaatcgaacctgtaggggctgaatgggacgaaatctatcctaatgagttttcacagggagtgctctggggatacggcagcacagatccatctgacatgtatggcgagtactacagttcctctgacttcaaccccgcacgagtaaataacagtgctgtggacaaacacatggatgacgcatttgctgaatcccgggaagactcctacaaagattggtccgcagttagctgggacggtagcaccggtattagccctaagggcgacgcaaattggctgtggttaggggaaatcaagtatggctacttcgtgaacgacagagtggacatatccaatgacacggcgctcctgcagccccacggaggagaccttttctccaacgtctatgattggacaatgactaacgctactgccgaaaaa

SEQ ID NO: 16739 - DNA, 1542 bp, synthetic construct
  source 1..1542: mol_type = other DNA
ggcagctcaactgagcgagcagacaatgagctgatagtggcggcttacagtcatggtggagaacccgaagctgggtttgatccaatcctgggatggaactactactccgagcccctcatccagtccaccctcctcaagatgacaagaggaatgaagtatgagaacgatctagctaagagctgggaagctaatagtgattttacagaatatacagttaagatcagggacgatgtgaaattcacagacaacaccaccctagacgccgaggacgtggctttcacatacaacgaagccaagaaaagtggagccagccttgacctgagtagtatggagaatgcaactgccgtagacaaacagactatcaagtttgaactgaaccggcccgattccaccttcgtcgacaaatttgcatacatcgggattgtgccttctgattcgtacaacaatgagacctatggtgccaaccccatcggatccgggccctttaaattcgtccagtgggacaaaggccagcaagtaatcctggagaaaaacccagactactatggaaaagagatcaagtttgacaagctgacaattctcttcgaacagaacgaggccgctttcaatgccgccaaaaataaggaggttgacatagccgccgttcccttgtcttatgcaaatgagaccgtagacggctacaatatgcacctcatggacaccatcgatgttcgcggcctgtcccttccagtccagaacaataccgggaagttgagcgaggatgggaatccaataggcaacaacattactgcagacaaatccatcagagaggctcttaactatggcgtgaataggaccgcaatatgcaaaggagctttaaacggcatcggagtgccaaactacgatgggatcgctcacttactgccatgggccaataatgaatctgctattgacgacggagatgtggataaagctaaggacatcttggagaaaggcgggtggaaggacaccgatggcgatggcatcgtggagaaggacgggaagaaggccagcataaacgtgtactactcatcaaatgcacctgaacggcaagcgattgccgtgacgattgctgaggaggccaaggaatttggtattgaggttaacgcaactggttcaaactgggatgaaatggacaagattaagaatacagacccggtcgtatggggcttcggtagcactgacccgtcaacaatgtggtctgaatactacagcgatcaggcaacggtcgggtataataaccctgcactgatcaacaatagtgcggtcgacaagcatattgataacgcgatgaaatctgatcgcgagtcctcgtatgccgagtggtctgctgtgtcctgggatgggcaaacgggtatttcacctaagggtgacgccgcctggctgtgggtgggcgaaattaagtacggctatttcgtggatgaaagcctcgacataagcaacaacactgagctgatccagcctcacggaggagatattttcggcaacatctatgattggagccgtgtctcttccatcgaaaag

SEQ ID NO: 16740 - DNA, 1545 bp, synthetic construct
  source 1..1545: mol_type = other DNA
gcggacattatcgccgacaatcaggatagcatcagctccaatgacaattcaatcaatgaaattgctacggaagacattagtaaagacattaatgacaagtctcttagcgatggagtcagcaccggcggaaacaattggattgtaaagccatcgacagatgggaaaagcgatgccaattccattcaaaaggcaatcaacctcgataacacaaagcctggagacagtctccttttgactgataagaacttcaccctcgagaagtcagtgtccttgaataaagacctgacaatcaatgggggcaatatctacaaccagaacaatcttacggatctattcataatcgatcccaagtctgaaggcggtcccaagaacatcacaatcaccaatgttacattttatgtaaacgggaacgagaacattgtgctcgcgaatggagagaactacggcacaacttatatcgaccttgccaacataaaaataagtaactgtacaatcctgcctatcaacccagacagcaatatcaacgataccgtgctgctgaatataaaatccgatagaacagtcggccagacaggtcagagtacaggattcgtcttggtttcgggcaacaagctaaacggcataaacaccctgaagaataacgattacgtgctgaaggacgactttgttattcaaaaggcggaccccatcctgaacaccgccctaatctgccctaacatgactattaccacctatgataaaaacacgaatgacacccccagctattatgaggtgaaattgatcgaccagaatgtcaatcctgtgatcaacaggacaattcagattggattcaatggcaaaatctatgatcggacaagcgatgaaaacgggatagccaaggtcaagctgaccttagcttacacctcagtttacacctttgcagtttacttcctcggtgatgagtcctatgcaagtgcatttgacgtgtcaactgtgacaatcattaagaaaaatgccacaatcacgccaaagaccgtgagctataacgtaaatgcaaaaacaaaaactctgactgctaccctgaaagacaaaaacaacaaggctctggccaataagaaggtcactttcactgtaaatgggaaaacctacactgccaccacaaactctaagggtgtggcaagcgctaagatcagcctcagtaagaaaggcacatacactttcactgcccaggtgttgcaggggaccatttctataattcagtttccaaagaagggtaagctgaccttaaacccgctgtcaacaaaccttactgtcaagaagtacaccttcaagaaggccgccactaagaagatccaagtcactctcaaatccggcaagactgtgctgaagtccaaaaagctcaccatcaaagtgaacggaaaaacctactccgggaagacgaacaccaagggcatcgctacaattaccatcaaactgacgaaaaaagggacctacacgtacacagctaattttgcaggagacaacacttataaggctattagcaagtctcagaaagtggtgataaaa

SEQ ID NO: 16741 - DNA, 1560 bp, synthetic construct
  source 1..1560: mol_type = other DNA
tttatgagtggcggaaacacctccacccgagccgacaatgagctggtagtttctgcttttgtacacggcagtgagcccgagacaggctacgacccgatgtatggttggggagaccggggagagcccctgattcaatcaactttgatgaagatgaaccgcaatatgacctatgacaacgatttagctaccagttggagctctaacaataactttacggaatataccgtgaatatcagagatggagttaagttttctgacaacacaaccctggacgctgaggatgtggcattttcctataatcaggcaaagagtactggcaacacaatcgatctgagcagtctcgataatgcatccgctgtgaacaagaccacgatcaagttcaagctcaacaaacccgactcaacattcacagacaaactgctacatgtggggatcgtcccttcagatagctatgacaataatacttatggcagcaacccaatcggctcgggaccattcaaacttgcccagtgggacaaaggtcagcaagtcatctttgagaaaaatcctaactattatggaaaacagccaaagtttgataagttgaccatttcattccagaagaatgaagctagcttcaatgccgctaagaaccatgagctggatattgccgcagtcccactctcttacgccaatgagacaatagacggttaccactcctttctctccgaatccaatgatgtgcgcggcattagcctacccatgaagaacaatactggtgagacgaatgaggacggcatcgcgctgggaaacaatgtgactgccgacaagtcaatcaggttagccctcaactatgggattaacagggaagacatctgcaagggtgcactgaacggtgccggcgtccctaactacgatggtatcgctcacttcctcccatggtacaacaatgactccactatcaaggatgcagatattgacaaagctaaggatttcttgaagaaggggggctggaaggacaccgacggggatggcatagtcgaaaaagacgggaagaaagcctcctttaacctatactactcaagcgacgccccggagagacaggcaattgccgtcgccgtgagcgaacaggccaaagagttcgggatcgaaataaatgccacaggttcgaactgggatgaaattgataaaatcaaattcagtgaaccagttgtatggggattcgggagcactgacccttatgtgatgtacggagaatactacagtaatcaggcagggatcggatacaacaacccctcccttgtgaacaactccgctgtggattcacatattgataaggccatgtctgagccccgtgagcagagctatgctgactggagcgcggtttcttgggatggccagacaggcatctctcccaaaggggacgcggcatggctgtggataagcgagatcaagtacacatacttcgtggacgatagcctggatatttccaaagacaccttcaagctgcaacctcacgggggagaccttttcggcaacatctacgactggactcggatatctcctattaacgctaccaat

SEQ ID NO: 16742 - DNA, 1560 bp, synthetic construct
  source 1..1560: mol_type = other DNA
agcatgctgggaacatcaaatgacgatgacccgcgacatatcgtggtcactattcccgggcaaacgggagagcccgaagctggatttaacccattaaacgggtgggggtgcggacacatggagtttaatcctctggtgcagagcacccttctcaaatctgataaggacggtaacttcgtcaatgacctggccaccggatataacatcagttccgatgggcttaaatggactgtgggcatcagggatgacgtgaagttttcaaataataagtctctaaccgccaaagacgtagcttttacattcaacgaggcaaaatcgagtaattcacagttggacatgtctaacctcaaagaagctaaagccctggacaacaccacagtggaattcacactgaattcacccaaatccacgtttaattacgatctgagatatgtgggtattgtatctaaggaggactataataacgaaacttacggtcagcagcctatcggctcgggcccctacgtgctcaaacaatgggacaagggccaacaggctatctttgagataaatgacaactactacggggataagccatatttcacacaaataaccatgctattcccaaaggaggattccgcggcaatgcaaatcgccaaatccggccaggctgacgttgtccaggtacccattagcggcctcaacgagaccgtggaagggtacgagctcgttgagttcttcagtccacgtgctcaagggatcacccttccctatcagaacgctaccggtgaaaaaactactggcggaaacgatgtcggcaacaatgtcaccggcgatgtcgccataaggcaggctctgaacgtgggaatcaatcgggaagagatcgttgacagcgtgtataaggggcacgccctggtggagacaagtggtattgaccatcagaagtacaataaccctaacgcgattataaaggataataatcctaaggccgccaaaaagattctcgacgacgccggctgggttgatgctgacggcgacggcatccgcgagaaaaacggaacgcctgcaacattcacactgctttacagctctgatgatcaggccagacaggcaatcgcaacagttgtaagcgaacaggctaaggatctaggcattaacatcgagttggagggaactgattgggataccatctactcccgcatgtataaggaccctgccgtcttccagcagtcctccgataacccgtacaagaccacctacctgcagtaccacagtaaggataacctgtccgaggataactatatgaacccaaacgggtacgagaattctaaggtggacgccatattggacgcggcattacgggaaacagatctgaacgcatcatataagttgtggggcgacgcagccaatacggggagcggttatggattcggacccaatgaggacgccagctggctgtggattgcagattttgactactgctactttgtgaagaaggacattgacatgggtaccaaaccaactatgggtcaggactatatgcagaacatctgtgaatggaagcacactagcacaactgaa

SEQ ID NO: 16743 - DNA, 1617 bp, synthetic construct
  source 1..1617: mol_type = other DNA
atggataagaaaacaatcattatagccgccgtagctattctcgtgattgctggaattgccgtgttcgcatttggcggcggcggaagcagcgatagcgatccgacccacttgacagtagctacacatagcaatatggccgaaccggaggcaggtttcaacccgctcacaggttgggggtgcggacatatgaactataacccactggtacagagctgcctctttaagacagacaagaatggagacatagtgccagaccttgcaaccaactactcaattagtgccgacgggttaaaatggacggtcaaggttcgcgatgacgtcaaattcagtgataacagtacttttgacgccaaggacgtggcctttacattcaacactgcaaaggacacggaaactgatctggatttaacgaatctgaagaaagttacagccaaggatgacaagactgtcgtgtttgaactggaggaaccacggtctacattcatctatgacctgaggtatgttgggatcgtccccgaggagtatgacaatgctacctacggcgaacaccccataggtaccggaccttacgtgctggaccactgggataaagggcagcaggctatctttaaggcaaatgacaactggtatggtgacaaaccctacttcactcaaatcaccatgcttttccccgaggaggctacctggctagagctcgcgaagtccggtcaggtggacattgctccagtggccacctctgcacttaacgaatctgtagacggatacaactttgtggaaaagtcggccggccgggcacagggcatctccctcccatatctggaagatactgggaaaacgagcccagcaggagccaagatcgggaacaatgtgactgcggacaagtcaatccgagaggcattgaacataggggtcaacagggataagatctgtgaggaggtcttctctgggcacgcctcacctgagtataccagcgttgataccagaagctttgccaatcctaacgccaaagtgaaagatggggatgtcgccaaggctaagcagatcctcaaagaaggcggatgggaggacacagacggggacggaatcgtggaaaaggatggcgtgaaggcatccttcgacctgtactacccacctgattacctggaccgccaatctctggcaacagtttttgccgaacaagcgaaagacctgggcattcaagtgaacctccagggtgctgactgggataccatctatgcgaacatgtattccagtgctagtgtcatgcaacagacctcacccgacccctacaaatccatctaccagcagtatcatagcaaggaggccgatgacttctatatgaaccctaatctgtacaataatactgcttctgatatgttgatggagcaggccatgcactccaatgacttcaagctagcagactccctgtgggctcagtcggcccttgtcaacggcggcggctggggacctgctggcgatgctccctgggtgtggctagcgaactacaactacaactacttcgtgaaagaggatattgatatgggcgaccagcctgatggtctgggaaatgacttcttgattaatgtggttgattggactagaaccaattcaaccgcc

SEQ ID NO: 16744 - DNA, 1914 bp, synthetic construct
  source 1..1914: mol_type = other DNA
aacgatttagattcaaactcagtcaaccaggacaattatatctccgatgtagatagctttgatggttctaattcggtcctgtccagcagtaatctggatagcagcatcgataaggacaattatctgaacctggattctaataataatctgaacctggactctgacaagaactctgtgtccggtagcgacttgaacctcaataacgctgatctgattaacagcgtgtcagggtctgatctcaacctgaataacgctgatctgattaacaattcaacgaccaacgattcgagcaactcaaataattcaaacaatctcgagaacctcacgaatctcgacgactctaaaggtgcctccaatcagaagccccagaagtaccttattcccaatgacagtagcatcgggtctgcttacatccagaagatcattgataacgccgcccctggaagtacaatccagttcacaggttccttctacaaaaatatctacctgaaaatcgataaggctctaaacatcataagtaaaagcggcactgtgatcaatagtagctacaggctgccagtatttaccatatcaagaggaggctctggaacaaatatttcaggttttacagcaaatctggcaaattcctttgtcgaggccagtgatgtgtccgatatcagcatatcaaaaaataaaatctttacaaaacggaaggccattgtcctcgagaacgttttcaactcaaagattgtgaggaatagtttcctaagatttgaaactgccattgacatttcaaaatctggcggactgaccatatccaataataacataactccagacaacggatacaacgtgggtattagcctcaaagacatttatcgcgacaaggttagcatattaaacaacaatatcactggccatgaccgacgcatagaatccacaggcatttacttcgggccaaacgcgaagaacgtgctgattgaaggcaatatcatcgatgaatggtatactggtgtcgacttccccaacagcgtgaataacgtgtccattttaaacaacaccctcaatcacaatggggatggggtaatcatcaacggctggataaacaacttcacgtttaacaagaacgtggtcacaaataccggaagagttggtgtcctattcgactatgacttttacggaacaaaaggggatttcaccctggagaagaacttcttcacccagagcggacagttggatttgcgcaacaccggcgaccaggctgtaaccatcggggaaaactttgccagcagacggtgcgttagggtggccatgaagaacggattttccattaagacccggcaaaacggaaatggctattacttcagcattgtggacaagaactccaggggcgtcagcgggcttcctaacttcagtgcgacaatcagcatcaacggagtgtcctacaatgtcaatttcatcaactccgtggcttatgttgaggttgacggcgccagcggcgaaaacgatgaggtccttcttgacgtgggggaggacaagcgtaagttgagcgactggggcgagactcaaaatctcagttccagtgagatggaatactataaaaagatctacgacgacctgatcaaatctatggtagaagagactaacaatgataatcaggacatgaaaaaggtggaggataagaacggaacaggctccaccccaagtgggggtaacggcggaggcgactcggggatctcagacgggcggtcctctgtgagttccaatggagactccagccctgcaagtgctggaacttctaacgtggcagcaagctcggcctcttcttctgcgggcccctctgcagctcaagcagacactccggagagttcgacggtgaagtcattgtcccttgatgaggaaacctttcgagttgccggggtgggtggcctggtc

SEQ ID NO: 16745 - DNA, 1986 bp, synthetic construct
  source 1..1986: mol_type = other DNA
gcagatgctgatgtcacatatataaacgatgctgccgatgtggacgatgttgccgacgagaaagttgctccgcttacagccagtgcggatgcccaggacatccagactaagctggataatgccaaacctggagacacaattgagctggagaacaagacatatgacgttgatacaacatttaatgtcacgaaacaggtgaccatcaaagggcaggacacggtcataaaggcgagcggtgcctcccagggtggtagcggagcactcttcatagcaaatgaggctggcacggcttttgaaggaattacattcattaacacagacggccacaaaaattatggcgagcaggtgtcaggctatgctatccaattagctatcgaaaacggaactgtggacaactgcaagttcatcgactggagcagcggggtctacggtaaaggcgcctctttctgcagcattaccaactcttacttcaacggttcatccgagcaggttaccaatggcgggaaaaaggagtacggtactaaagccattaacctcatggggtcccatgacataaccgtgaccggatgtacctttgagggccaagtgctggacgctatttccattgccagtaacagcgggaacaacatcatgaccgacaacacttttatcgacaactgttatgctatctacttcgggggcgcgtccacacaaggatgcgtgatcgctaacaacagtttcatcaggtgcggctactgtgtggatgacaaaggaaacgtgatctttaaagatctgcctataatctcgactcagaaagcagctaacggatacatcatcgctgataacactattgaagcaaatgaaggatctatctttatgaaggctgagtcagggaacacagcccacgggtacccaagtaagatcggtgacataaacattacaggcaacaccataaccgcaactgcaggggccaatcctgaaggcattacattcatgtacatcctgagtaactctgggcccctgaacccatatgcaccaattgcaatcgtgaacaacaacctcgacgccggcattacccccgtcaccgtgtggtatgccgactgggacaatgaaaatgggacagtgattcccgccgccgataaggcagtgacctccatcaacatagcagagatcgctgcagccgatggaaccgtcacggtggaattggtagacgtaaatggcgccccccaggccggccaaaccctgtcctataaaatcgacgatggcaatgccactgaaatcgagactgatgagaatggtaaggctgtgatcaatgttccaattgatgagaacgctactgcccaaactgttgccgtggagtttgccggaactaacgaccttgccgccagcagcgctcaggtttcattcaagaacactgcaactaagagaacagccacccagatcaatgcgaacaatatgtcagtggtcacattggcccccaataccggtgacacaaatgacaattacttcaatgccaccttgctagatgccgaaggcaatccgctggtcaacaaggaagtcaaaattggatttaacggtaaggagtacacaaagaccacaaatgaaaatggtgtagcgcagcttaagattaatctaggatacaagggcggatacacctttgctgtagcattcctcggggacgatgaatatgaggcatcatttggggtatacctgattaacgtcgccgcgcagactcctaagctgactaccaaggcggccacgtacaaggcatccgctaagaccaagtccattagcgctaccttcaaaaccgagcagggcagtgtgatcgctaataagaagatctcgttcacggtgaacggcaaaacatatactggaacaaccaattctaagggcgtagctacggtgaaggtcagcatcaataagaagggaacatacagcttcactgctaaatatgcaggggataacacctacaaagcagtgagcgcaagcgccaaactcacgataaag

SEQ ID NO: 16746 - DNA, 2067 bp, synthetic construct
  source 1..2067: mol_type = other DNA
ctctcaaacagtaacacagatagcagtgacaacgcatcagatgacgcctccggcagcgagatagtgtcaggaatcaacgaggagctggaatcgaataatcttctgactgaagatttaagcgtggacgatgtcattttacaaacgagcttttacacaagttatgcagttaaatctgccaagtctcccactgtgttaactttcaagaactctacagtggtaaagggcgacaaactgtacatctacctgaaagacagttccaatcatggcatttccggcgagaaggtaatctttaagttctcaaattcctcttatacacgcacgaccgattcaaacggaatggccgccctggacattaagctcaatccaaacaagtatgctttttccgccatctatgatggcagcgataattatagcgcttccagaaaggactttacccttactgttgcgaaagtcaatactaaattgacttcgagctcaagtgtggtgaggggacgcaacctatacacttatctgaaggataaaaacaacaacgccctgtcgaacaagaagataagcattaccatctctgggaagacatataccgtgactaccgacaaaaacggccgggccagcctaaagctcagtcttaagaccggcacttactccaccaaaatcaactttgctggcgataaaacatataactcccagtctctttccaagaagataaaaatatacaccctcaagacagtcatgacaatcccaagtacgagcgttgtccgggggcagtacatctacgcatacctaaaggactccgacggtaatgccctctccgggcaaaaggtggtcatgaagttcgacaagatctactttaacctaaaaacagacaagaacggacgggtagccctgaaaataaataccaggctgggaaaaatccccgtaaaagcaagcttcgccggatcaacatcctacagcgccagctcaaagagcgtcacgattacctcttacgttgagaaaaccaagattacagtggaaaattcaacagtgaaacgaggaaagtacttctacgcctatctcaaggacagcaaggacaaagggatttccaaccaaaaggttaagattaccctggcgaatataaattatactaaaaccacagactccaatggtaaagtcgcattgaagatcgaggagaaccctggtaactacacaataaaactcaactttgctaagaccaacagttactatgcaagcagcaagagcctgaagatcaatgtcctgaataacgcaacggctaaaatcatagcaaaggatcagaccgtgctgggagagtactctgtccgactgaccgacatgaacagtaatccattggcaaatcagaccgtggagattactgcagctacagtcaaccgtagtgtaggctctggcttgcccattactaaaaagactgttgtgatcaattctgacaacatctataacaaagctaccgactcgcagtttattaagtccattggagaagtcctgaagtccaagggctataaagtgattatcaattcaaacatcgggccgaatgctcactgtacagatgcaatgggggcttactctgatgtttgtatcttctgcatcttcggtggtgtggacagtggtatgttcgttgacatggccgctagttggtaccagaatctgctcaagaaatacgacaatgaggtggtgctggggttcacccacacgcagaggaacctcgccacagatacatggcttgaaagagcgcacgacgatgattacagccccaagaacttcactggcttgtcatatcctggaacatacctcaacgattacgacatggactacgtatatggtagaaccgccacagaaatggcgaataatttcatcaaatatgctgtgaacgggcttagcattgggctgaacaacactgtgccttgcaatgtcatggaatataatgtcacgaccggcgataacggctatgccaccatcaccgatctgttgccaggggattacgctgtgatctcttcttatattaacaagaccgccggatacgtggctgatactgtgatctccatcattgaggtgaaa

SEQ ID NO: 16747 - DNA, 2328 bp, synthetic construct
  source 1..2328: mol_type = other DNA
agtgaaaattcaatatctagcgatattaatgataactcactgattaatgaattcacagcctcaaatcaaatcaacgacaatatagccattaatgatggcctgagcaaaggcgacaaatcccaactatctgaatccaaatcaatttacgtgtccacaaacggcagtgacgattcaggtgacggaagtgaaaagagcccataccaaagtatcaaacatgctgtatccaaggccgatgatgattcaatcatttacctatccagcgggacttacaatggagagaataaccagaacatcagcatcggaaaaagcctgagcatctatggcgaggattccactataatcgacggtgaggacaaggcccagctctttatcatgaattccagcgctaaactctccctcaacggactgattctgacaaacgcctataaggacggcaacctctcggactatggcggagccatcatcaacgagggcgggcaattgaccataatcaactctacgatcaaaaactcttatggcaactactatggcggtgccatctacaacaatttaggacggttgaccatcataaactcaagcattctgaacaatagcgcaattcagtatggaggtgccatctatacactcggtgtgacaaacatccagaactctgttttcgagaaaaacaccctaacggctgagaaaggtgtgggagccagcatcgccgcggggggaacaatcaccctcaacaatacggatttcctcaataatcatgcgatatactcagcggcggcgctgctcagcctcggcaacgcaaccatcaacaactgtagtttcatcaaccagaccacaaactataccgccggggcaattagtaatcacggaaacatgtttataaacaactcccttttcttcaattgcagagtgagattttatgccggggccatccttgcacctccgagcgggcaccatgtcgtgacagaggtctacaatacaatctttgactataacaatgcaggaaaccacggggcagtcacgaacaacttccaagatgcagagattacaatgattaactgtgcaattaccaataactacatccagaagaacgttttctatggagatattgctttggacgacaacgctaccgtccagtactgctggtggggccagaacaacattagctcttactactattcccctcacagtaataatgaggatcccggtcagatcaacgcttcccgatggctgatgatgactttcacctcttcgaatggcaacatctcagcagacgaggtgaacacattgactgttagcattaagcagtactttgacaacgataccaaggagatatacgaatataacgaggatatcaacctaccccttaccgtgaaatttttcgacgacaacaaaaagaccattgctacaaaaactctgaagaatggtacagcctcctacaattacatcccagtgaagggtgtcaatgctgtgtatgcacaaatcaccaacgaaatcattgagattcccgtggtccagaaaaaggaatcgaatcttagcaccagcaatctgaccaaatactacaagaatgagagccagttggaagccaaactgaccgatggcgacaataaccctctgtccaataaaactataagcatcgaactgttagggaagacatacaataagacaacgaacgaaaacgggatcgttaaacagaatatcggcctgaagccaggccagtacactgctaacattattttcaaggaccccgagtacaaaaacaaaaacattacagtgcaaatcactgtgcttaagaacagcactagtatcagcgctaaaaacctggttaagtactataagaacagcagccagctgactgtcaagttgcttgacaataataagaaggccatgaagtccaaaaaggtgaaatttaccattggcaaaaacacttacacaaggaccacaaatgcaaatggggccgctacgttcaacatcaatctcaaggtgggcacatataatgtaaaggtttcatttggaggtgatgactactacaagggatctagtaagaccgtcaaggtgactgtaaagacaaccaagatgcaggccaagtctactaagatacgcaagaactctaatttcgtagcaacgtttaaggacgctaatgggaaggtcataaagaacactaaggtgaaattcactttaaataaaaagacctatacgaagacaaccaattcgaaagggcaggctaccctgaaggtgagtgtaaagctgggctcctatactattaaaagtcagtacgcttccactaagacctatggggccactgtctttaataccaaaattaaggtggtgaag

SEQ ID NO: 16748 - DNA, 2499 bp, synthetic construct
  source 1..2499: mol_type = other DNA
aatgatctcggcaccgtgttggaggataatgataacaacggccttaatgacttaaataacgatgactttatcaattcagatgtgaattcggatagcataaataaagaagcgatttctaaccttaaaagtttaaacagtcaggatgagtctacatcttctgattctaataactctgctagttcgaatagcaatagttccgttgcttccagttctaatagttctgcaagctctaattcggctaatagcaatagtagcaccagctctaactcggctaactccaacagctcggtgagttctaactccactaactctaatagtagcgcaagttctaattctactaattctaacagttctgccagttcgaattctactaatagcaatgctaacaccaataactccagttcagatgcctccaaaactcaaacgatcaaactgtcctctcaagaggaaagcgccctgaacgagttcctaaatgccatcaaaacaactactaagggcaccattgtgctaaagaacgatttggtcctgaaccagaccatctcacttaataacaatattacaatagacgggaggaatcattccatcagctcccttgacgtgacaaacatgtttaagacctttgcaaagatcacactgaaaaacattgtctttacaaactaccacgaaatcgagaacctgagagccatacttaactctggagaactgacggtcctcaattgccagttcaatggctttagttacctgacaaacggctcagctatctataacagcaaaaagctcaccgtgcaggggactaagtttaacaacaactatgtgaataacagcggcggggccatctatagcaccggaaccctgaccatcaacaattcctcattcaacaagaatcacgccggcaaaaatggtggagccatctattccactctgaacctaatcctaaaccagtctgtctttagcaataactccgctaatgaaagcggcggagctctctactcaaagggcagcggcctgaacataaagtactcccgatttaacaataactcggcctccctcaacggaggtgcgctctacagctcatccaacagtacggtgatttcctattcaaatttcgtgtccaactttgtggaggcctacgacaaagcaagcaatggcggggctgcatttatctactatggaagcaaaattgcctatagtaacttcaccagtaaccattgtaagacaacgctgacaaacagttctcagaaaaagtcaattcagtcaatggggggcgctctgttctattatgggggcaaccacaccctgagcttctctaactttaacaagaactctgtggagaacgacggaggggctgtgcgcatagccaaaaatgtggggaaatttacactcaacaaatgtaatttcaccaacaacaacgcatcctacgaggatgggggagcaatttccctcgccaccccaaacatcacaatctcaaactccattttcaagaataactttgcaaatgaggacggtggtgctattgacacattcagtctcggcagctacaaggtaaatgtgctcattaagaattgcctattcaactcaaacacggccttcaaggcagcgggcgccatctaccttggcgtaaacactgtgcagtcaatcgtgaactctaacttcacatcaaataaggccaccgttgcaggtgccttctatatcgagtccatttcagtgagcattagcaactgcatcttctcctccaataaggcagacaacgtatccaaaaagacaatctataacaagcaaggcaaggttgtctcccactcaggaggggctgtattcgttaagaatggaagtacagtcaccattaaaaacagcctgttcaagagcaataaggccacatcagggggggccatcaccaatcacggaaagatggtcattgacaagtgcaacttcaccagcaatagcgcgacaaacggtggggccttatacggcggtggaaaaacaagcaccatccggaattccatcttctacaagaattcagctacaaaaacgggtggagcgttattcatcaacgaaggcaacgtcaatatgaaaagcagcatgatagtcagtaacactgcaaaatcctactctgtctacagcacagtttccatcaccctgaacaataactggtggggaaacacattgtccattaaggacaagtcccccaagactctgggactgaccaatgttaaggtgagcacgtggctgcatttgaaaataagggctaagaccactaagctggctaaagggaagaccaccaccttgactattgacctcagatacaataataacgacaagcttgtatcaactgcgtttaacaatcctctgactttgactgtatctgaaggcactctgtctagcaagaaagtgaacctgaaaaatggtaaggccacagttaagtttaaaaagaccaactccaagactgcagtggtgaaggtcaagctcttgggtaaaaccgcccggtgtacgataaagactaaa

SEQ ID NO: 16749 - DNA, 2742 bp, synthetic construct
  source 1..2742: mol_type = other DNA
gagaatatcatcacagcagatctaaattcaaacagcaatgagcttaattccgatttcgcctatggtgactcagactctgaggaaatcctggacgaaccctctcagaagctgaaaaccggttccgataacagcgattttaaagacatccagaacttaatcgataacgctaaggaaaacgacgtaatcgagttgagcggcacctacacaggggattctctaattgtcgtcaacaaaagcttaacactgaagtcttcttcaagtgccacactcgatggagaattcctaaacgaattgatggctatcaatgctccaaatgttatcctggacaacatcaacttcataaacgccaactacactgggctgagtgtgaacaacaactatgtcaccattcagaattgcaactttgacggctgcatcaatggcgagctgggatgtgccctcataatccatgggaataacgtcaatgtgctgaactctaacttcacaaataatgtggcaaataagtccagctgtcaccatacggacggggcagccatttatcttattggaaacgactgccagatcgacaattgcagtttcataaacaattgggggtacaacttcgagacatccagctcaggcggggccatctggatcaagggaaataatattgtgatcaacaactcatatttcttcaataactccgctaccgctgaagtggggtggacattccacggggaggagatcacctatctggcagacggctacggcggagcagccttcttggttggaaaaaatgtgaaaatcatcaactccctctttgacagtagcctctcgcacgcgcaagggggcgcattgtactataagagcgcatacgattgttcaataatcaattcaacctttctgaattcattttccgtgggagagggaggcgtcatctatctcggtcagaatattgatgggctcatgatcgactcttgcaatttcataaacaacacagccgacggtttggatggagtgctggtcaaatacaccgacctcggcagcgtgttgtatgctagcaagttcgctgagaacgtagtgatcaccaattccagtcttctcaacaacaaaggaaccagcgcagtctacttcttaggcaataacctgaacatttcaaattcaatcatcgaaaataataacctatcaacggcagtcatctacatgaatggaagtatgaatgacaatttctggtctaagaactttgatagcgctgacgagtttaagaacgactgcttcattattcgagataatgagtctcaagtgcccgacacgtggttcaacctcgtgtgtgatggcttggacagtctgaaggcgaagggggtgtatgattacaacatgtcctttgtcctgaaggatgcttcgttggacaatcacgcctccaaaattagcctgaccaacaacctgcccaactatcatattaacctgaaaaacagtgccaagaacaagatcaacccaaatgaacttgtgattgttgacaaccaggcagacttcacttatgactacattgagtctgccaaggattccattgacgtgtacgatgattataacaacctgatcctgtccaagaaggtgctgtctggaatcacttatatcaacgatagcggcaatgatacaaaagaccttcaggacgccattgactccgccagttctggttccctgatctcactatccaataagacctacgtgcttgacacaatcctgataaacaaggatattcacataagcggtgaagaaaatacaacggtcatgctctccaacagttccgattacatattcaaaatctcgaattgttctgcggcaaactattctgactacggcatagccatttcaaacatcaacttcattttagacaacggcgacattgttgccctggctgaggctgtcaatgggagcggctcactctctattgatgttgcgtcgataaagatcacagacaacagctttacatcccgggagggggtagtgagggaatccattacgattctggagcttgacagccaaagggctgtcttagcaccgaccagaaacatttctatctctaataattccctggagatcggaatgaacccatttgattttaacgtaaagagcgtcattaacggctcggatgtgcgggtggatgttgggggcaatctggccagcaaaaaagccagtcagatcatttgtaaagatatggtcactaaagccattgcaagcaacgtagactcccgcagcggcgagtactttaacgtgagcctgaaggatagccagggcaaacccctacaaaataagtttgttcagataggtttcaacggtgctgtgtacaatcgcaccactaacgaaagcggcgaacttagactccagataaacctcgcttacaaaggagtgtacacatttgccatctcctacctgggtgacgatgagtgcaacggtagcttcgaagtggcgaagataactgtcaatcctcagagccctatcctcatggccaataatgcaaaatataaggtatcaagcactaaaaccctttctgctagttttaaatccatgaaaggaagccctatttctggcaagaccatcaagttcactgtagatggcaagacttacagtggaaagaccaattccaatggtattgctagtgtgaaggttagtttgaataagaaggggacctataaattcactgccaagtttgccggagacaacacttttgccgcggtgactaagtctgctaaggtggttatcagt

SEQ ID NO: 16750 - DNA, 2769 bp, synthetic construct
  source 1..2769: mol_type = other DNA
gatatctccacaattccaaatgacgaaaaggttagcatcaatgaaaacgactacgacaccaactattatgagcttcctgataagaaattagatcacctcgagtcaaatgacaatcagaatcatctggagatgaatgacaaaaagctcaacgatggcaacagtaacaacgatttcaactatatacaggagctgatcaacagtcacaaagatggagatagcattttccttgaagacaaaacatatatcggcaacggaagtccaatcatcatcaataagaacctaaatatttacgggtacggctataaaaacctgtccgacctggacattaaaacgatcctggacgggaactccaagagcaacatctttatcatcaataagggcattcaactcaacctgtatggccttagcctgatcaatggaaatacgagttacgaggacggcggggccatctataacaatggcctattgagtattgatagctgttcaattagtaacaataatgctggcgggggggctgtgtactcctctgagggctcagaaatcgaaatttacaacagtctctttgagaacaatagcggactcctgggcggggccctcgacctggaaaatgccaacgccataatttccaagtccacattcaagggcaaccgctgcaatggagacggtggagccatttacaataatatcggaaagctaaccatctctaattcgaccttctccttcaacaagggagctaggggcggtgtgatctacaacaatcacggcaccctatcaatttacgattgtgagatgttcctgaactctgcaagccagctagggggtactgttaaaaattgggggagctgtgaaatatacaactcgacaatcaaaaacaacactgccgacatgtacggcggaggcctctacacctttgagtttaagatgacggtgaatgattgcctgatcgagaacaactatgcggatgaggggggaggcctgttcgcagatgcagacagccgattgatcgtcatcaattccaccataatcaacaacaatgctaaaatcggagggggaatcgatgccaagcaagcttatctgactgtgaacaactcttcgattattaacaacaacgctaaaagcaatggaggcgggatctacgctgacaagcaccctgcagagatccataacactaacataaaggacaataacggaaattccggtggcggtgtcttcataggtgacattagcgcaaaaattagtgactccaccctgaacggcaactctggcgaaactggtggggcaatattcaataaaggaaaactcattattgaaaagagcaccctcaactcaaatgaggccaattacggtggagcaatctacaatcagaagaacctcaccgtgaacaaatcctcttttgacagtaataaagcctatgaggctgcgggaatctataaccttggcgactttttaattgagagctctaacttcaccaaacaatctgtgagccacaaagcaggggtcatccttagcgtaaacggaaacatcaagattaaggattccatatttaagcagacaagcggtgccgatgaaggcggagtaatctttacacgggaagggaatatatttatagactcctcactgttcctcttgaacaacgccctgagttacggtgctgccattgacaacagcgcaatcatgacaatccagaactccctgttcagcagaaacaaggcgtttggtgccggtgcaatcgacaatgggggagacttgactgtcacgaactccactttcacaaacaacaaggtcacaaacaacggcggggcgattgacaataacggcaagctgtacatgagcggttccgtgctagtgaacaacaccgctcagaactacggcggcgccatcatctctagaaaggatacaaatatagagtactgccagatcttggataattccgctcccgagggagacgggctttatgacagcggggactacttactgataagcaacaactggtggggggaaaacaaccccaactttgatgagctccttaacttcaacattgacgaagacttcaagtggattgagatgaactttaccaattcaaccccccttatgcaaaaaaaggtctctaatttgaccataagcctgaatggaaaggataagaacaacaatagcttcaagctggagaacccagataaactgcctattctgaagtcaagtatccaggtggttagcgaagacagtaaaatcaagtacaacttgaacattgtgaacggttcagcttcgacatcaactgatatgaagctggccaagacagtaaatgccattttggataacgagattgtgagcttagatgtgctggaaaacaatgaatcggatgatgactccgaggattcagacgactcaaacgactccaacgatgagtcagacaatccgaataattcaaatgataacagcgacaacgttactgatgacagcgacgactccaacaagtccaataaccccaacaatcatcagagcaacggcaataagaataatgataataacaagaattattacaataagaatggtctgaggtattctaaaatgaaaaacagtcttctgaattctattgatagcaatttagacaatgattatctgaatctcaaagagaacaatgaaaataacgatgatagtaactccaataataaggacatgaattattctgataagaaaactgatttgaacaatgagagttctaacaaggagatcgacgaaaatgagaccaaactctttgacatcaattattct

SEQ ID NO: 16751 - DNA, 3093 bp, synthetic construct
  source 1..3093: mol_type = other DNA
tccgaggatatcaatacagatatcgacacggactatcaatctgatagcattgatgtgtctgatgtgagtctgaatgatgagcagatagcttctgaggatagtctgcctaactacgagattgctaataaatccaaggacaaactctatgatgaaggggaggaggaggagggcggcataaccaatgacgatgatgatgaaaattatagaattgatgggatctatgcagattatacaattacgccgtctgaaaatgggactatctttgtggaaggagagcggatccagattatctttaattttacagatcaggactatgagcccgtttccggagactggtttattaatttttatggtgagagtaccgatgtcgacatatatcatccttttgaagctaccgggctcaccgactacgtcgttcctatttatttgcctccaggagactatgtcatattcttttacgagggcgtggtttttgacgactttggtgggatagaagatgagggcactcaattagatgtgacttttgaggacgctgagggcaaccagttagataatccggaattctctatccggaccaactacaacaaaaaggtatatgccaatcttaccatcgactacagtgtggccgaactggaaaatctcgtggaaggggacgatatcactgccaagataagcctgatggatgaattcaacaacaaaatgactgagaaggtgaacttggagatttacaggaatggggagaactacgactctaagaaggtgaacgtggtggagggccaaaataacaacatcatcttcgaaaaccttcaggaggggaactactcactggaagtggcgagcattgactcggttccaaagtacacgaacatcatcacgaaagccgtcaacttcacagtcaaatccaactatgacccagacaactaccaaatcatcctcaatcctgaagacgagaaaaagcttgtgggtgactcatatgaaatgggtgtgaaactactcaatccatctgaagaggccgaggaaggcagcattgacctgtacctcaatggcaactttgtaaaaacactggaacttaactatgacgaagacggttactcccaccacattgtggaaggccttcagcttggccccaacaatgccacattcctataccagatcagagatggggtgaacgtaagcgagtcagtgaacctaatcaggtacgaaaccgagtccatcatagacctggagagctcagatatcattatcggtgacgacgccaagatcaaggcctccctcagttacctggacgggatcgtcaaaaagccaatcaacgagaacttcaagctgtacatcaaaaactacgtggaggatgaagatgaggtcgagtttgtctatgatgaagagtttaccatcaaaggatccgagacaataactctgagcgacctagaggagggcacctactacatttcagctgtttacaatggtaagaactacaaatacctagcaactgaggaagaaagcaccctggaggtattccctaaggagacaagggttgacgctgtcgcccggacctactcaactgaagagaatgtgattgtgggcatcgagttggctgacttgtctggcaaggccatcaaaggcactgtgaatgtggtcctggacaacaagaccagttaccaggtaaacactaccgatgacatccagcatcccgtggagttggaccttggcaagttaggctatggcctccacaatattgaactcaactacaccggagacgatagcgagggctggctgccttcgtacaacaatgctgagttcctggttatctacccatccttcatgagcattgaagatggagacgtcacctccggctcggacctgactgtcaacatcagcctgacaggccccgatgatgagggaatcaacggaatcattacagtgcgcatttacgacaataccggaaaatatctaatcaacggcgacttcaacacaaccaacggagtgaaaagcattgaactcaagaacatcactaaggattatatcatctatggtcgctactacgggttggataccagcaaaattgaaatcgggcccagtaatcattatttgtcgagcgaggcttatggattcattagaatagctgaagggaagtccgagaaaaccgaatatgacctggaactgaccaaggtgaatgacaacacagtgattgccagcctgaaggactccgattcaaagcccgttgccaatgcggagctgaccgtcaaagtgaatggggtggagtccaaagcgaagacagacaataatggaatggccaacattagcttcagcggaaattcatcaatcaaggtgagctatacggatgctaacaacacaactgctaaggcatctatggagatcattatcatcaacaatgttactgaaaagattgtaaaccagacagtggaggttccggttgaaatagagaagattgtctatgtgaaccagaccgtggaggtccccgttgaggttgagaaaattgtctatgtcattcccaacagaacagacacggccttcgaatacgagaacatggtgacaactgcagtggcgtctgcggatggccgaacaggggaatacttcaacgtccgactcatcgacgcaaccggtaagccattagcctacaagcctattaagataggattcaatggagtcgtatacgacaggaccaccgatgcagacggacgcgcaaaactgcagatcaacctcggttataagggagattacaccttcgcaataggcttccttggggatgacaattacacgggagcatttgaagtagctaagataactgtgaaactgcagaagccacagctgagcactgccagcaaaacatataaggctagtgcaaagacgaagacattgactgccaccttcaagagcgagcacggcaatacagtcagtggcaaaaagataagctttacagtgaacgggaagacatactccggaacgaccaattcaaaaggtatcgccagcgtgaatgtaagtctctccaagaaaggtacttattcctttactgtcaaatgggcaggtaacgaccaattcgcctctgtaacaaagagtggaaagctgaccattaag

SEQ ID NO: 16752 - DNA, 3774 bp, synthetic construct
  source 1..3774: mol_type = other DNA
gcggtcgagaacgactatagcaatgctgacctcgatatttccaacgattttgttctgtctgataacagcaacgagatcttgattgacagttcgggctcccttgatgatagcagttccgcactggtttccgaagggtccagcaatggcctggattcttattacagcaatgacctggtgctcaacgatagcttgtctagcaggagttctgtcattgaggacagttgcagcatcgattcaacaaccatagaggacaaggctctagagaaatccttatcgtctaacgaactcgcagaaggcaccaagacttacacagatctattgaaggatatcaaatctgctaaaaacgtcctcaacttgaagtacgactatatttacgactctactatcgacaagtctcttaagaaggggatcgtgctcacttttgacgaggattatgaactcaccataaacggcaatggtcatatcatcgatggtaacggtatagcgggtgggttcaacttcgaaaacggcgagttcgttatcaataatctctcctttcagaactgcaaaatctcgtcattgattctcacctcatgtgatttcacgaccaactacgtgactttcagtaataattacgataaatcgagtggagcctgcgtgtaccttgacaattcatatttttactcatctcatgacaactttatcgacaactacgcccctagcggttctgccatctatggggaatgtagcgtaatcgatgtctacgatggactgtttgagtcccagaagccaatcgattggtcgtttatttatggctgggacgagaccgagatctatatcgaggattgcctgtttcggaatactgtgagtaattatagtaccgccgtgtacggggattatattattgagatctctaacagccatttcacaaacctgttctctaagttcacgggaggcgccataggagttcgaaatgcaagtcttacggtagaaaaaagcgagttcaataatgtgtccagtcttagaaacggaggggttatatacgcagatatgaatgtggacgaggaaaaatcctctgaagaaaccatcatcaaggactcttcattcgtgaatagtaagtctgacttcggaggcgctgttcttcagctaggcgggaaattgaagatttatcgctccaatttcaccgagaataccgccaattactatggcggtgccatctacacttccaatgtctctttttataccagcaaaagcaaattttcaaacaacgtcgcaaatgagatgaagggatctgctatctactttgacaacggagacctcaagatcgaaaacagcaatgtgctgtccaacccatcatgcgaaggcgccatttatatctacgactctttctataacatttccggatcgaccttttccaacaacgatgtggcaatccactcattctttgatcgcactagaacggtgaagaatagtaaaacagggaagtcaacaaccgtgaagtccagtctcaacaacaatacatgggggggcgaccggaacaagctgaacaatgtggaatacccctacttcgttagcaaccttggccaggatattattctgaaccctgtgaaaattaacgccacaataaaggacaaatatttcaacttggtggacctcggcctggtgacacctgtaaaggaccaaggcgactctggagcctgttgggccttcggaggcgcggcggccctggaatcagctattcttaaagcaacaggagtgtccctagacatctccgagaacaacatccagagtgcaggactgagatatagcttgtacggcaaaccttctctgacagaaggtggatacgactacactgctttggcttactacttgagttggctgggaccaaataactcctccattgacgagtacgaccagtttgggaagatctctccgcagctattttccgaggataactatcacatcctggacgtaatattcctggacccagcaaacacctcctccataaaagacggcttgattaagtacggggcccttagcgcaagcgctaacggtgctgatagcgacagtaacgacttcttcaacgagaagacatacgcacagtattgtaatgatgatgaagccagcgccaatcacattatctcaatcgtcgggtgggatgacaactacagcaaaaacaatttcctgatcacgcccaaaggcaatggcgcttggattgtgaaaaatagctggggttcagattggggcaaaaatggctattactacatctcatattatgatgagtccctgcggagctgttacgccgtggcctatttgctgaacaacacgttaaggtacaataagctataccaatacgatttaacaaattacgacgactttgatgacggggactacgatggggtgatttattccaataagttcaccagcaatggcgacgatctgatcgccgccgtcggcacttacttcgagtatgaagacgatgactacgtaatttcagtttatgtaaatggcaaaaaggcatatcagcaaaaggggacttctgcgtttgtagggtataatactatcaagctaaacaagtatatcgctgtgaacaagggcgagacctttacagtggctatcagctccagcgcaatgccctacgtcgatgacacaaggatacacctgccgaagggatcatcttttctgacagttgacggtgagcagattgacctcagtcagagggggcagatagcatgcatcaaggtgtatacctttaatgatacaaagatcacccgagatcaatctacctattacgggtccgataaaaagctcgccatagagagcgaactggaaggtacaactatctctctgacagactctaactgcaagtccctcggatcagccaaggtcgtcgacggggttgctcagttcgacctggtgctagggccaggcacatacttctacacgagctcttatgccggagagaagattataaactcctttaaggttttctccaccattggaggggtctccaacaagaatatcggttacaaagcgaccgctagcttcagccttagctttaaagatgagaatggggagatactcaacaactcacaattcacttatacgctcgatggcaagagcaaaaccctgactaccctggacgacggtacctacaacatttcattcaagaatcttgctatcggaacccacaagctgtctgtcaaaaatctgattagcggacaagtttctaacgctacaataaaagtggtgtcgagattctcaggagcaaaggatatcagtatgttctattttgatggaacatgttacaaggtgcgcattatgggtaacgacgccaaggctgtcggcaaaggtcagactgtcactgtcgtgctgaacaaaaaaacatacaagcttaagacggacgccaatggttacatctcattaaagattcccaatactctcacccccaatggcgcaaaggccaaagtgtacagcataaaaatgacatatgcaggacagagcctcagtaagaaaatcacagttaaacaggtgctgaaaactaacagtctgaccgtgaagaagaaagctaaaagtttttccattaaggtaacactgaaagggaagaccgtcttaaagtacaaggtcctcaccatcaaattcaagggaaagacatacaaggtcaagactaacgcgaaaggaattgccacactgaccttaaagaaggctgtgatcaacggtctgaagaagggcggcaaatatacttttaccgtaacctatctgaaagacactatcaaggccactgtgagtgtgaag

SEQ ID NO: 16753 - DNA, 3807 bp, synthetic construct
  source 1..3807: mol_type = other DNA
aatgaggatgtggacaacggcttgatcgattcagatgactcgatcctccagagcgctgaggtctctgattctgccattggaagcgactctatcttgcagtcagctgaggtctctgattccactattgagtcagactccattgaactggaggataagggtaacgttttgaagtccagtgacaatgcttccttcgagctcgatgacaaaaataatataggaagcgcagattctgagttggaggacgattacctggaacctaaagaaaagaacgttctttcaatggacgagaatgcatggttttacaattatattgtgtggtacgatggtgatgacggagattgggtgtcccttgactttgtggatgatctgaaaaaccccgaaaacatcaccatccgattgaacagttatgacacgccctttgacggtgtggatctggctgttataaatgattatgactactcaatcacgaaactgaccactgatgacaatgggactgtagtgtataacgttccatatgaggtcgacgaactgagcgtcttcgtaggcttttggtatgacggggactttgtggccacttatgggaattgggaaagttacacaatctgcgccgtgaactggggcacgtggtatagggacccttcgaaacggacttacgacttttacgtctctgtgagcgacatggacacctacgaaagtccaattggcgcccaggtggtttttaccagcgattccaatcaatatgtcgggacaatagatgagaacgaacgcgccatcatcccaaaggtcagctacggcacatacgatgtgaaggtcatctacgacggctattgcattctcaacctgagcgattctagcgccattgagttctatgacgaccatcacaccgaccctgattccctgggggatgaaaggatagattatatgtacgtggatagttccggcgtagtatatctcgacctgtgttatgacggttctctaaaagtgccagacaactccacttatgagccctacggggacgacaacccgtccgggggcggcagtggcaaccaatctggtggaactgtggctaatggcacattcacctcactgcagagtctgttcaaccgtgctgcagcaaattcaacaatctccctaaccagggattacgtctacgacgatggattcgacatcaaaggaatcgtaattaacaaggacctgacaatcaacgggaatgcccacacacttgacgccctaggcaaatcccgaattttctacgttaacaatagcactgtcaagttcaacaatatcctcttcgccaacggtaatgccactcttggcggggccatttataatggaagtgccgtaaactgtctttttattaacaatactgctcaggatggtggtgccatttattatggaagcgctttagtgtgtgatttcataaacaactccgcatcgcggaacgggggcgctatctatagtggcggggccgtgaactgtagctttatcaacaactcagccaacttggggggcgctgccatttatgactccttgtttgctgtgaattctactttcgtgggtaataccctggcttctagcaatcctaccggaggcagcgctaccaccgatgtgagtgtggtgtcctttaacccaatcactacctatatacccagccctccatccatgacaggatcaattggttgggggggggccgtattagactttacaaggcccgtgatctacacggattacaatgaaaccttctacctgctgacgaacttcactcttcagcaagatggctttaacaattacggcaatgttcagctgactggccgggacttggtcttcaagagcctgtatccctactctggaaactattcaatggctcttatcatctctggacagatctttactcctacatatgtccttggggagaatgacacttatgaagcccattttaaactgaacggtctctctctcgggctacacatggtgtacgcgtacgtggatttcgggtacccggaatattatagctatagaatcggtgggggctacatggatcgcgttgcttacgatagaactgcggagataatcttccctattctcattaacaagacagtagaaatctcatcctccaatctgaacaagtattacggtggaaccgggaagtatacggtcactttgacagatggcggaaaccccatcgccaacgcaaatctcaacgtctctctagctggcaagacataccctttaaagaccaacgcaaacggtcaggcaagcatggatattaaccttaccccggggacctatgaggcagtctgcacttatgacggagtttcgcaacgctcaaatatcattgttcgctcaacgatcaacctccaaaacctcactggcatttaccagaacgctaaagtgaatgccacattcttgaatgctgccggcagtcccctcgcgaacaccaaggtcagttttagagtgggttccaagacttacagtgcgacaacaaatgcaaatgggctggctacagccaatgtggatctggctgcaggcacttacgatgtgattgcaattaacccggtgaataatgagcagaagacaagcaagctcactatttccaaagctaagagctctataagtttaagctctacaagcaataacgataaggttaccctcaccgccagcttatcccccagcacggccagtggaaatgtgacattcaacttaaacaacaagaactacacggcaaagattagctctggaaaggcgagccagaccattactggactgaacgagggaaactacaccgccaatgcctattactctggggacagtaatcttaactcgtccagcgcaagcactaaagtggttgtgaaaatcgtcattccaacgaaaataatctacaaaaatatgaccactggccctgtggcaaagtcagacggcaggataggaaattatttctgtgtaaaattggtggatggcagcaataacgccctgaccggcctgcccatcaagatcggcttcaacggaaaaatctacgacagaacaaccgacagcaacggcgaagcacgactgcagattaacctggctaacgcggacatatacacctttgccatctgctaccttggagacgatgaccaccaagcatccttcgaagtggctaagattgacgtaaacaagaagtacccaaagccaaacagtgctaatggaaactccaacggtgtgcccgcccaggagacaataagcaatacaaagctgaagacctacatccaatacagcaatatgaccaccaaatccgtcctgaaatcagacggacgggtgggagactactttgaggtcaaactgctggacaataacaaaaaggcaatggcgaatgttccaatcaagatcggtttcaacgggaagatctacgaccggaccaccgactcaaacggcggtgcgaagctccagatcaacctcctgaagccaacaacatacacattcgctatcgcatacctcggcgacagcaaatatcaggcttcattcgaggtagccaagatcgtggtgaaagcccagagccctaaactgaccgctcctaaaaagacatttaaggcaaatgcgaagaccaagtcggtctcagccaccctaatctccgagagaggaaagcccatggccagtcagagcctgaagttcacaataaacggcaagacctacacagccaaaaccaattccaatggtgttgcaacagtcaatatcagcctaaacaagaaaggaacctactcctgcacagtcaagtttgccggggtgacgggagcaaatgccaagaccactaaaaccacaataaaaattagt

SEQ ID NO: 16754 - DNA, 4305 bp, synthetic construct
  source 1..4305: mol_type = other DNA
ctgtacatctcagagatagagattaatcagaacattatcttgaacacggagggcaataaaatatatctcaacaattcccctaaaagcaatatccacgataactggtttggaaacactctgctgaactatgacgaggtgccatatgaaggctgcaccaattggatcttcctaaacggagaatctaaccaggtgtcgctggagaaccccatcagctttgaaatcacatttaccctatcctctttcaataagaataccaagaaaattagcaactatgacgatcgaaagctgccattcaatctaaccgcccacgcagagcacggtatcctgaatcccaacagtaatctgctgggcaagacaacaatctatgagaccgaaatcatcaacgttgagcgtattatcgggaacattgccaatatcgattcagagtttgaaataatggagtttttagtcactgacgggaccacattctatgacctgaaccagctcatcaacaacaacagcaacaatgaaatcaatattagcggcaattacacataccatgatgatatcgactttgagtttaaggagggcatcaatgtcaaccgcagcctaatcattaatggaaacggctttaccatcaacggattaaactcctcacgcatcttcaatatcaatggagacaatgtgacaattaataatatttcccttataaacggtaatggttatgaggacacctacgactccgacggtggagccatctactggaaaggggctgacgggaccctgattcagagcaatttcacaaacaacagcgggtataatggaggcgccattctctgggaaggtgacaacggaagaatcatcaacaacaccttcaagaacaacagcgctttcgatggtggaggtgccatcaccatcaccgttgagcgaggcattattattaacaacaccttcacaaacaacagcgcatcctacgatgggggcgccatctacctcatcgcaagcagtggcgagatcataaacaacaccttcaccaacaacagcggctacaaagggggcggtatgatctgctacgctgacaatttgagcatgatcaacaatactatggagtcgaacattgcatccgacgacaatggaggcgccattctctgggaaggggaaataggccgcatcatcaacaacaccttcaaaaacaactacgcctctgaagaaggcggggctatcagcattcgcggagagatcggtgagatcatcaacaacactttcactaacaacaacgcttcctaccgggggggagccatctcgattattatcactagtggagagatcatcaacaacaccttcacaaacaactccggatacagcggcggtggtatcctgtgttacggcaacaacgtaagcatcatcaacaatacaatggagagcaacattgcatcctacgatgggggcgcactttacgtcagcatggattatgctatgattatcaacaataccataaaaaacaacaatgcctccgacaatggaggggctatctactgggatagatataagggtattatcagcctcaacacaatcgccaacaataatgccaaccacgggggcgccatctactatgagggttattcttcaaatcttaactataacatcatcttaaacaataagaatagcgagatctatttcgacaatgtccggactttcaacgggagcaataattggtttggaaacaacgctagcaactataacctgaatccaaacactagcttcgaatacgacaacagccctaatgtaaccctgagtgattggttgtttcttaatggcacggctaacccaaaaatagtgaacgcctttgagagctcccagatcttgtttaaattgtattcctatgacggtattttgattagtgaatatgacaactccctcatcaccgacaccaagctcaacctgagcgcagaaaggggacggttcgacaagacaagcgccagtttcaatgagccgataaactacacggcgattgaagggggccgagataccatccgaggagctattgataagagtgggtacagcataaatctcaccaacaggcgggtatcctcaaaaattgctatggatactaaagagataaactacagccggaatgcatcaatcaagctgaattacaatgactttgctggaggcaatgtcacaataaggctcatgggagaaaataatgaatacctctttgaaaacatgaccctgaacaagactatattcctgggagtgataaatagggacagttacaacgtccggatcgagtactccggcgataggtccttcctagaggagaacattagcgaatctctgatagtgaataaggctggcaccaagattgttcctacaaatgacacaatagacttgggcattggcgagaacagcaaggtcaactacactttctatgtgattgacgatgaaggccagtacataacgaacccagaggacattggaaacattagcttcaagtcagatgggagcgctgtcgaggtagattcaaagacaggggagatcaataccattaaggaagggactgccaacatcctcattcgtttccagggtgatgaaaaccatcttgattccaatgccagtgtatatgtaatttccagtaataagattaggaccaagatcacagcggaaaacctaacaaccgattacaaaaaggacgactacatcattgccagactgaccgacctcacagggaaaccgatcgccaatgcaaagctgattgtggagcttaatggcacaaataactatacgacgaattcaaagggcgagataaaggtccccactaaagggttggattcgaatgagtacatcgcaaagatcatctatgagggagatgaatcctaccggttttcaaacgcatccgttagacttatcgtgaacaagctcaacaccgagatcactgccaataatatcacaacaatctataatataacgaaagagctggtgattcgcctcaaggacgtcaatggggaccccgtgagcggggtggaactaactgtggacctgaacggaatgaataactacacaacagacgacaatggtcaagcaatcgtggagataaagggactgattcctaacaattacacagccaagatcacctttgaaggcaatggtaactacaacaaggcctccaccgaatcagatatagagatcttaaagattcccagcattctgaatgggacagacatgaccgtaaactataaggaagataagtatctgactgtgagcctcaaagacaaagataataagcctatccataatgccagcatcagcgtggaattagagggtattaaaaattacacgactaactctgatgggcaaattaaagtgcctaccagcagccttcctgcgaaaaaccacacagccatgattagatttgaaggcaacgaaatttacgagaagtcaaatgctacagcgaaaatcacggtgaataagatttccggcaaattgactgcctccaacgtcactgccagatacggagacaatcagaacttggttattagtctgaaagacagcaagaaaaatccactgtccggtttcaaggtgtctgtggacctgaacggcaaaaagaactacacgacagattctagcggccagatcaaagtgtcaactaaagatctcgttccagacacttataaggcaatcatagtgtttgcggggaatgagaactacactggatcaaatgccagtgcaagtgtgcgaataaatagaataaataccaccttcaaatacactaacatgaatacaattgcttttgattcaaacatagagggacgtattggcgaatatttccgcttccaattgctcgatgaagatgggaagcccctgtctggcaaacaggtgttcattggatttaatggggtcaagtacaatagaaccacaaacgagacaggagaggctaggctgcaaatcaacctgaaatatgtcaaccactatacctttgcaatcgcattcctgggcgatgattattacaagggcagctttaatgtggctctgatcaatgtgactgagcagattcccgtccttagcaccagtgctaagacatataagtcgagtgctaagaccaagactttgacggctactctgaagtcatctaggggtcatgtccttgcaggcaagaagattagttttaccctgaacggaaaggtttacactgcgaatacaaactcgaaaggtcttgcgtccgttaaggtgtctttatccaaaaaaggaacttatagttttaccgttcagttcggcggtgacagtacttacaagaaggttacgaagagttcaaaacttacaatcaaa

SEQ ID NO: 16755 - DNA, 4413 bp, synthetic construct
  source 1..4413: mol_type = other DNA
atgtccgaggatatcgggatcaacgacaataatggtgctttgattgccgacgtgaacttcgccgacgacaataacaacgcgcttaaggctgagtccaacagcgccagtcagaacgacgcttcaatagatgagtctgctaatcccactcaggatctggtagacacagataacggactgaaccagtccatcactaaaagccccctaaaatccaacacgggcctcactgttacaaaaaccatcgacaacagctctaaccacatgcctgtggacgggttttacgacattggagacactatctactataccatcaacataaccaacaatctcgaggagagcataggcaatatcagtgttgttgagaacttccctgatggattgatatgggaatatatttggttcgcggatgacaaccccaactggaagaatgagagcaatgtcttcaactacacaaaagcactggagcctgaacacagcatcctgctcaagatccgtatgaccggaaacaaaacaggcacgtacattaacaccatcaacgtaagctccaacctaacaagctctcaggagttcttatccgaagaggtgaccgtttatgctcccaatttaacaatcacaaaagtggccaatgatcccatcgtgaccatcggagagatagcaaactttacaatcaacgttaccaataacggaaataggccactgagtaacttgcggatctacgaggatcctgaggaatcactgttcctcaatgagttcactaacattagtgggaactgggactcttttgcaaaccggggtggagattacggttttagcttggaccagctggacattggtgaatctgctgctatcatagtatcttttctgacaacagaaattggcaatttcaccaacaatgtctatagcaactatccgaatcctcaggtggaggccaatgccacggtcacagtggtgcccagaattgaaaagactgtcaatgccactgaaattgacatgggggagtcggttgaatacaacgtttacatcgacatgacaggagccaacaagctgggcattgacgactttaaaatcaaggtcaccgacattctgaacgaatacttcgacttggacaaggatagcatctcctcaaattggaagtataatcgcgatgaaaaggcctttgaatatatgctaagcgacattcccgagtcatttgagttcaactttgcggtatatatcacggagcgcggcaattacaccaacacagtttccctgaaaataggtgacctgcctgaagtctccgcggagtcggatgtcactcatgtccgaattagtgacgcaaatatcgccgaaactgccctcgactcaacagtgaatcttcaagagcaagcggtgttcattgtgaacatcaccaatacgggagacaagacatttaatccttatgaacttgtggtaaacgacgactacgacgaggatgctctcacgtacctcagtcatgaggatatcacaggcaaatggatcgagaatatcgaaacggattccctttcatttacattgaattcaacactcgaggtgggggagtctgccagctttaagctttacttcaacacaagcaaggtcgggtcttattccaactatgtctatattaacatcaacgacaaagaggatgactcaatagtcattgtgctggctctcatgaacaagtcagtcaatagcagagagattgacgccggagactctgtggagtataatatcttcattaatctgagcgggtatcaaggccctgtgaaggtggaagacctgttcaatgatacctttgcattggataaggacacgatctcagagaactggcactacgatgaaaccgaaaatgccttcattttcgatcttagcgacaatccagacaccctgaacctgagcttcaatgtgaccatcaatgaaaagggcaattacactaacctggccaagctgatactgagttcagattatcctgagatcaccgctgaagctccagaggtctgtgtctacaagccggatatgacagtgaccaaaaccgtgaacgacactgaaatctacatcggtgataccgtgaaatacactgtcaccatagataacactggagaccgcactcttacaaacattatcgtcaaggacgagctggaccctgcctttatactggatgaatcctctatcaccgagggctggacttacaacaaggacaactcgtcattcacctacaacaataacataagcgtgggtgaaagcgccatcctggaatttattgttgagataagcaaagaaggcaaatacacaaatatcgtaaacgtcagcagtcccggggtggctaataaagaagctaggtcggaggagaccgttgctaaaactattccgaccaacatctgcctggagaacgtgactgccgatccagacagttttgtgagaatcatcatcaacataacggcagacaagggcctgattaacgggaccgtaaacatcactttccctgacgggacaaatgaagccgtagagatcacaaacgggattggggagaccgtctggtacgtgcctgacaactacgcttctggaaactactccgtctttgcatattacgagggcaacggcacctaccttgagtctgaaggccaaggcaatattgaggttatcccctactacactgaaattagcctatcgaacgtgacggcctacccagacagtgatgtggaaattgagatcaacattacggcaggggatgctaagcttatcaacggcactgtgaccgtgtccttccccgacggcacaaacaaaacggcagaaatcatcaatggtaccggaaatgttaattggaccgtaccagacgattataagggcaattattccataagcgcaagttatcctgggggtgggaactatctggattcaaatgccacagccaatattgaagtcatagcaaagatcagtacccagatcacagccgacattcctaatgcctatccgggcgaggagatcgatatttctgtcaatgtcaccgcagataacgatgtgccattcaacggaaatattacagtgaatctacctgacggcagcaaggaaactgtagagattaaagacggcaaaggcaacatagcctggaccgttcccgacaatttggatgtaggagattacaatctcaccctcactttcgatggagacaacaactacctgcctagcaatgcaaccagcaccctcacagtggagaagatcaagttactcatcatcatagataacatcactgcccacccaaaggaggacgtgaccatttctgttaacgttgctattgatgatggttctgagtctgataactcaactaaaggttcgttatctgataacaacctcaataagggtgctctgtctgataacaatctaaataagggtgtgctgtccaacaacgataataaggctttactgaaggcgtatatcagttctgccaaaggcattctctccagcaaccatcttaatgacggagataatttcaacggctatgtcaacatcaccctgcccgacaactccaccgttgaggtgcaggtcaaggatggcaaagctgctctcaattggactgtcccagaggggtacgaaggtgagtacccaattaaagtcactttcaacggcaacggaaagtatctatctgccagcgagacaggatacattacaatcgaaaagatcccaacctcaatcgaccttgagaacattgggacaaagccaaaccgggagatcataattcccatcacaataaaaacggatgacgacgtgccattcaatggcaaagtgagtgtggaactgcctgatggcacaattcagaccgcagaaatcacagagggcatcggaaacacaacctggactgtgcccgatgactacaatggggagtataattatacagtgaggtttgaaggggacgaaacctacctcccctccaacaacactgcgatcattaaggtggattccaagatcccagtggaaataattgtgggaaacatcaccgcaaaaccaaaggacaaggtgacaattcctatcgaagtaatcactgcagaggagtccctgtttaatggaaatgtgacggtacggttgcccgacggaaccgaggtcactgcccagatcactaatggtgaaggctccgtggaatggacagtccccgaggactataacggaacttactccgttagcgtgaggttcgacggggatgatacattcctcgaggctgatgggactgggtttatcaccgttactccagagacgccggataatcccgtgcctccaattagtcccgtttcccccgacaacccagtggcaccagcaaagcactccgccaataagccgatgccaatggataaaaccgctccgggtaatcctattatggcattgttaatagtgctgtcaagtttgatttttgtgcgacgaagtagaaag

SEQ ID NO: 16756 - DNA, 4917 bp, synthetic construct
  source 1..4917: mol_type = other DNA
gaaaacatcaatgaatccgaagttgtgggcaacgctgagatcgaaaacaacctcagcagtacaaacgacaatttcgaggtgtccaaggatatagggtacaacgtcagcaagaagatctccacggacaatagcaatgaaaaccttcggaactctcaacacatgaccctgttcataatcagtgataatcccggcaccaatattctggacaaagctattttggagctttccaatgagaataagatcaacggtgtcaacttaattatccgcaatggaaatcaggtaaagagcatgaatgaaaacgagctaagctatctgttgtctgattgtgatgctttcataggggaatggatctccagtgatgtcgactctgtactgacaagtgtgctcgtcaaaaatcctgatctgtctaacaagaagctgtttctagtcttggaacctccttccggcaacctaaactccggatccagctcactgaaccttattaggaataacaccttgaactataataaaattttcacgaactactcgaatgaggagctgattagttatttcaaaaacacgaaaaggggcaactcatattctatcattaataactacctaacaaatggtaacggcaagaatttcgattcaatttttaaccgactcgttctctataaggatctgaacgacaaaaacaatttgaagaaccagatcctgtttatcctcaattatctcggcgtggatgtgtcctacgaacagccaacattcaccggtgttaaaaactatggtatctacagggaccggtggtactccctggatgagtatatttctaccttctttaaggcaactaataataggacggtggggatcctggagagtaagatgtatattgaatctcagcagctgaacacctgctactcaattatcaacagcttggaatcacgcaattacaacgtaatacctgtctttgccgacggcggatccgctgaacaactgaaggtcatggtggaatcctggacaagtgcgggagacgatatttccggatttctgtctaactcttccaactttgacgtgtatattgatgcgatcgtatcgatggtggcatacggggtgggcggggagaacttcaccaaagccacctctttctttgaggaagctggtgtgcaggtctttagggcggttcactcggatcacgtcagcaacgaacagtgggaactggggtccactggtttaacgacagagaagagtgataaatggtggcacattactatcgccgaagcgcaaggcattattgatgccacattcatcggagggaattcaagttatatctccaatttgaccggagcccaaatcaccacctatattccccacgaagggaacattgggctgctggctgacagaatcgattcttgggtggacctcaagtacaccctcaatgaggacaaactgataagcataatttattacaactatccacctggcaagcagaacatcggttccagttacttagatacaatcaagagcatctacaacatactctatactctcaaagctgccggatacactgtgggaagtctgccagtggacgttagtgagcttgaggatctaatgcttacatgcgggatcaatgtagcgacctgggcccccggagagcttgagaagatagccaacagatcttgcatcacgctccttcccgtaagtgaatacaactcctggtttaacagcctggatgagatcgtccggatacaggtctctaacgggactgttgcctatattggggagctgactaagagagccgtggagctggactataccaaaacaattggcagcacaattgacgactggtataatcaggttgtgtccttgctgccagacgaaaagtcagtggaagccaaggaagtgttgagtaatatcgtcagggctctcaaagattatgctaatacccattcccaagactattaccggctttacctgaagtactttgacgagtttaaggagctgaacatccagggactgaatggatggggtgaaaccccaggcaatgtcatggtagtgaacaaaaatggtaccgattacttcgtcattcccggcttgacatttggaaatatattcgtggccccagagcctcagagaggatgggagtctgacatcaaaaacctctaccattgcactgctgttgcccccacacatcaatacctggcggcatattattacatgcaaactagaaacccaaatgcgatggtcttcaccggcagacacgcaacccacgagtggctgcccggtaaagagattctcttgtccgccactgactacggatcagttgttgttggcgatgtgcctcagctgtacttctatattagcgatggcctcggcgaggctatccaagctaagagaagaggattcgccgtgattatctctcacctcaccagcccaatgtcttatgcacatctgtatggtaacctgactagcctggctaacttgataaacgactatcaaaaggtagggagcaactccgagaaaaataaaatcggagagaagatacaggacttgataattagcaatgattactcaaccaatctcggactcaacaagtcccagataaagagcatttccatcgattccttgatcgagaagattaatatcttcctcaagagcacccaggatactctgcatcccctgggcctgcacgcattaggagagtactggagtgaggaggacatcgccagtacagtgtctgccatgctctctcatgatttcgtgctagagaataatcagggcactcttaacctttttacagaactgagcaattactactattcaaaatcatatggtgatcttactccattcgagcgggagtttgtattgaacaagtcgtacgatatatgcaaggcacttatttactgggacgttaatacgataaatgaggtattaattaacgacaacgttaagttcaacaattctaacttctacgcctgtcttaacctggccaaacgctacatcaacctaatcaatcagagtattagcaacgagctcaacgccatgcttgacgggctgaacggccgatacatccctaccggagagggtggggaaatcgtggttaagccaagtatcttacccaccggcacaaacattttccaggaccagtcgtctgagctaccgacacaggatgcatggaactacgccaaaattcttgccctgctgaccctcgccgacctgaatgacactactgaaaagatcatcatggggatctggtgtgtggagacagcacgagacgatggggctttggtgtcaaccgtcctgtatctgttgggcatgaagcctgtctggacaaattcgagcagcgccggctttgacgatgaaggcaatcctactggcaaaaaggttggtgcaatgcctgaagtcattaaactaaatgatctcactcgtcctgagggttggaataagaaaagaatcgatgtgaccatcattacgagcggcctcttccgagatctctactctagccagtctgtgttaatggataacgcttttcgagtagcactggcaaggagctatctgacactgattaataataaaactctgatgaacggaaaatacggcaaggagctccgccaggctctggactgtgtcatggagggcataaactactatagggcttctaatgaagctttaaaggacaactacgtggctcagcactggatcaaagactgcctatattacctgagtatcggatacaacgcatcgtacgcaggggagtgcgcaatcacccggatcttcgcaccacccaacggagattatggtgccggcatatcaaagcttgtgtcaatgagctggacttggaacaacacagacgagctcgctcagttttacctcgggcgcatgggaaatatgtacagcaagaactactggggagacacaaatccacttgtctttctaaaagcattaagcaactcagacacaatcatcacaagccgcaacaccaaccagtacggggtcttggacaacgatgacttctttgactactggggggggctgtcaatggccgtggaacacgtctcaggtaaatctccgaagatgaacgtgcttatgtacgccgataaggacaacgcatatatttcctcacttgaagaggtgatgtaccgtgaaattgcttcccggtacgacaatcccgactggatcaaaggcatgatgaaggaggggtacgggggagctcgttatatgtcaaataaattcgtgagcaacctgctgggttggcaggtgacacgcccggacagcgttagcgacgacctttggaatagggtgtataatacctattataaggacaagtacaatctgggggtgaaggattggctcatgagcggaaataacgcctactccctgatctccatgtccggaacgatgctgagctcaatccataagggctattggaatgctgatgacgccacaatacgggatatcgccaatacttgggtgcaggccacagtgaagaacggggtggcctgttgtgactgcagctgtggcaacgtggctatgatgcagtgggctgttcagtacgtcaacccggacatcctggcccaattattgccgaaactgtatgacgcaactgaaaaccccgtcttcctaaacaacacccataatccaaacacaaaacccgaaaacaataatgatccccaggtagaaccttcaaccccaaatcctaccgatggttcttctagctcctcgactatctctaacaatgccacgtccacaaactctaatcagcacagcctcagcaatagtcaaaactcccaaggaaacgcggtgagcgacgtgggcgacagtagttcctccgattcaggcacttttagctctgagggcgctgacgtcaagaaggcaatcgagattaaccccatcacccagcagtctgccagtgaggtgggcatgagtctgctggcagtgctc

SEQ ID NO: 16757 - DNA, 4977 bp, synthetic construct
  source 1..4977: mol_type = other DNA
gcgtcaagtgatctgagttccagtcctgccgataatgaaaacctcgaaattgatagttttgactcaaacgaggatttaaccgtgaacacgaataccaactatatcgaaagcggaaataacttggaaatcgattataaatctaattctaaagaatctgtgaatgccacaaatgatatcaaagaggagactgtggattacaatgaagatattagcgtggagaagaataacctaaagtcctctaaactgagtagcgtttataaaataacagagtctaactactctaactactttaacaaaagtggaaacatcctatcgaacgtgaaccctggagacacactggatttttcagggtcattcaacaacaaggactttaaaatagatatccccttgactgtaaccagcagtgacggtgctcagttcattgactgcagcttcaagttcaataagggctctgacggctctaacatatccaatctcaacattaactcttctcgcctgcaaagtccgcttatctacttggattccgtcagcaatatgaatgtgttcaacaacaacctattttcctgcgcttcaaagtcctatgcgctctgttttagcaatgtaagctattcctctgcataccacaacaccctgcagacgacagcattcgttgtaggctggggccatccctctgcctttgtcctggctggggcaaacaacctgaatatctcctcaaacaatgtgatcgtcaacgattccaacggcatctatttcactacatatgtgggagacaccattagcgcgaacttaatcaatgaaaataactatatctttaacaataccgtgcacagtgtccgaggtgttgaatgggctgtggatgaaaacggcaccacccccctcccatcctctttctgttatgcgattcaggtgatgggaagcggtaataaattactgaacaatacggtctacaacgcgtataggggcattagtgcttccggatccaacagtgtcgttgccgggaatgtggtgtacgatatcaaggggaattactatagcggaaatacaaaggacgacggcggggactacggcatcaacgtggggcccaactccatagtggaaaacaacacaatttataattcccactttaataaaaactctggggtggccatctcggtgggttcaaataccaccgtgaggtataacaacatcacaaacatcaacgggacaggggcggacctctccaaaaacttcatagaatttagccacaatcgcattgataatgtgtcagacaatggaatccgagtgaaaggccagtacgggaataccaatatttccgataacttcattaattcaacagacagttcaatcactttactgaggagctcaaaggacaaatacccgtccagaatcaacattgaaaacaatgatttctacacagatgtctctcctatctactatctggaggggtacattggcaagctgaccgccaaggacaacacgctcaacggttcgtccatctcagatatcagtatcgacgtgcctagctcgagcgagactaaggtgtctatcaactcaactaaaatcgatttcaatgaatccgttctaattatgccaacggtcagcgcctacggtctttccctcgagggcctcgtcgatatcattgtcaatagccaaaagatcgcaactgttcctatcgggtctaactacacgttcactccaaccgaagccggcagtttcagcatcaacgccaatttcaccggtaatgaagagtataagcccagcgagtctgctgttctgatcctgactgtgactcctaaggaaacaaccacttccattatcatcagcccaagcactgttgagctgaacgacacggttgtcatcagtcctttcgttcgctacaatggaactcttctggaaggttttgttgacattctgctcgatggggagaagctggatactgtagagataggctctgattatagttatgtgcccaatagttccggcagtttctacatcagcgctagcttttctggcggaaatggttatggggcttctgtgtcggacatgctcatcctcaccgtaaatgagtccagctcaattgaggacccggacgaccccacgaacttgacagtctcttccatcctcatcagccctaacaccgtggaggtgaacgatacagtgctgataagtcctttcgtgcgatgcaacgggacgctgctggagggtcttgtggatatcttgatcgacggtgagaagctggactctgtcgtgatcggctctgattatgcttacgtgccctcgacggccggcacttttaacattagcgcaagttatgccgggggaaatggctacgagccctctgtctcggacatcgtggtgcttactgtcaatgagaagcaaattattgacaacggtaccgataacaatggtacagacaacaacggtactgacacaaacggaacaggcactaatggaactgatactaatggtaccgacaataatggtactgatacaaacggaacagatacgaacggcaccgagaataatggaacagatacagaccagattaagatcatcataaatgatgacaactactctgactactttgataacggctacccaattgacttagacgtggacggcaactatacgctaattatcgacagtctgaacaacaaggacataataattccatcaggatttaatattaacatcataggaaaggaaggctctggcacaataaacaacggtacaatccaactgggggacggcacagacgaggtcggggatgtaaagatctccaatctgacctttaacaactataataaggatgctattgtcattaacgagatcgcctatgatctaactgtggaaaacaataagatcataatcaatacagaagccagtcctggaaacctatactttagcgtttatggaatcaatgcaaagggctacgttgattcactcgctgtgagagacaacgatattttcctaaacggttctgcgccttacctctatggggtgagtttggggggctacggggccatcgccaacccgcagaatattttcgttcagaacaacaccattaatatcaacagcacggctagtatgggcatggccgagggcatttacctggacaaccctataaatgcagccgttctggacaataaaattaacatagaatctatcaatgatgtctatgtgtacggcatgcagattgcagactctgccttcagcgccataggggagggaaagaccggtgtcaaatccccatacgacattatgattgaatcaaatgacttgaatttgaaaagcaaatacatggtgtatgggataaccatccttgattacggctgtgacggcagcttgaatgaactgggtcagccaatgaccaatatgatggacctggacactacaatccaaaacaacaatctcgttgccgactccgagaaggcagtgatgggaatcgttggaaagacctacaatatgtccgtgttatgtaacaatctgtccgtaatcggcggatccattgagggagttgcctcccatgacgcactcggagtggacaattatgctctgggagtccagtactctggaaaggattacactgtgttggtcaaggacaatacagttagcaccaatgtgctcgctgagtatctgaacaacaaagactatgaagcctacgtgtcattcgtgaacaacacaatttaccatatcgacggcccatccagtggaaatgatactcccgagaatggcactggtgataatggcaccaacaccaacggcacagatattaacgggacagacactaacggaaccgacaacaacggcaccaataatgggactaatggcacgaacggtacagacaccaacaatacagacaatataaccaaacggaccgtgaaagacctccaggaattgattgacaacgcaactagtgggtctgtggtggatctcggcaactttgagtatcttgacgtgtctaacattgacattagcaaggatatctctattgtgggaaacaatacagtcatcagaactgcaggtgacggcaagccagtcttcaacattaaggagggcctttcctcagtgtccattagcggaatcgagttcatggcaaataatggggacgtactcatcagagccaaagcagtcaattcaaccagccggctggctatagaaacccccgagattaacataattaataatactgtaatcaagtccgatgatggggtggtagccgagtccgtcaccgtgctggagctggactcgtcgcggtgcatccttgctcccacaaatgacatcaaggtctccaacaacacactggagattggaatgaacccatttaactttgttgtggagagcgtcatcaacgctgctgatgttaatgtgccagtcgggggagacctgcagagcaaagtcaaatccgtaatccactacgaggatatggataccgtggccgtggccaaggctgacggcagggtaggaaaatacttcgaggttaacctgactgacagtgatggaaaccccctgtctggcaaattcgtccagatcgggttcaacggggctgtctacaatcgtaccaccaacgaaaccggtggtgtacggttgcagataaacttaggatacaagggaacctatacatttgcaataagctatcttggggatgagaactacaacggcagctttgtcgtggctaaaatcaaggtaagcacccagaacacaaagatcaccagctcatcaaagacttacaaggccagcgccaagaccaagacccttactgccacactgaagtcctcagtgaacggcaatcttatcagcgggaagaagctgactttcacagtgaatggcaaatcatacacagcaaccaccaactcaaagggggtcgctagcgtaaaggtcagcctttcaagcaagaaaacctacagcttcaccgtaaaatatgcaggagatgatacatactcctcttccagtgcaagcggtaaattgacgataaaa

SEQ ID NO: 16758 - DNA, 4605 bp, synthetic construct
  source 1..4605: mol_type = other DNA
ttaaacaatcatcctgaactgtcaaacaaaaaactgttcctgatccttgagccacccacgggaaacatcaattcgagctccagttcattgaacttagtgcgcaactctacaattgactataagaagattttcaatggaatttccaatgacgacctgatcaattacttcaaggctaccaaaagaggaaacaacttcgagagcattcaagagtacattgacaatgaaggcagctcttttaatagcatctttaataatctggttctctacaaagatataaacgataaggcaaacctgaaaaacgaactgctctatatcctttacctcttgggacatggatgctcctatgagtctgcaaactttacaggcgtacaggcatctggcatctttcgggacaggtggtatagctttgatgaatacgttctcaccttcttcaatgagtcccgaaatcggaccatagggattttggaaagtacaatgtacatccagtcccaacaattggacctggtgaatgaaatcacagagcgccttgaatcaaaaggttataacgtcattcccatttactgtccggccggtaacgccgaacagctcaatatcatggtgaaatattggaccagtgcctgctccaacatcagcggcttcctggagaatccacaggactttgacatttatgtggacggcattatttccatggtggcctacggggtcgggggcgagaacttcaccaatgccaccaaattctttgaagacgctaatgtgcccatattcagagcggtgcactctgaatacatcaccaacgagcagtgggagttaagccctgtggggctctctaccactaaaagtgacaaatggtggcacgttacaattgccgagtcccagggaatttttgatgctacctatgtgggtggggttgactcttatatttcaaataggaccggcgcaatcatattgacttttgtgccagtgcacgagaatatagagctcctgacggatagggtggacgcctgggtggacttgaagtacactccaaatgaggataagaacatttccatcgtatactacaactacccccccgggaagcagaacatcggtgccagctacctggatgctatcacaagtgtctacaatatgctgtataccctgaaggatgagggatactacctgaccgaccttccaaacaacgtgagtgaactcgaagatatgatgatcgcctgcgggataaacgtggctaactgggcgcccggagaagtcgaaaagctggccaaccggtcgggggtcgctctgctgcctgtagacgagtacttggagtggtttgattccttagacgatattgttaaagtccagattaccgaaggtccggttgcctatattggccagatggttaggcgtgcggtgctcatcaactacaccgacgaggtggagacaatggtcaatgactggtacaatcaaatcaaggcattgctgcccgaaaatcagactgtggccgccaccaatatattggataagcttgtaaacagcctgaagctctatgcaaacgcctcttccgatggcgatgagaatgcctccctgtactacgatgaattcctgagatattacgacgagtttaaaagtttgaatgtttctggcttaaacggctggggggaagcgcctggaaacatcatgctggtgaaccggaatggaaccgactactttgtgatcccaggtcttacattcggtaatgtcttcatcggccccgagcctcaaagagggtgggaggctgacattgaaaacctgtaccactgtacagctgtagcgccgactcaccagtatttggctgcttactattacatgcagaccaggcagagtaatgccatggtgtttgtcggcaggcacgcaacccacgaatggttgccaggcaaggaagttttactatcatacaatgactacggttctattgtggtcggcaaagttccccaggtctacttctatattacggatggtctggcagaggctatccaagctaaaagacgaggctttgccgtgctgatttcccaccttgattctcctaaatcatatactcacctctacgggaatctaactgtgcttgcaacgctactggaggagtatgacaataatcatatcatcatagagtctgattctgacaaagataatcaggctatcacttatcaggtaatcaaggataaccagactatcacttatcaagtaatcaaccaggagctggaggacaatctcacaagagcaatcaaggacttggtcatcgcaaacaactactacctgacaatcggattcacggcagaggaactgaacaatactgacatgttctccctaagcagcacgctgaatgctttcctgaagaacactcaaaataccctctatccactgggactgcacgccataggtcagaaatggaccgatgaggatctggcgaacaccgtggcaatcatagtctctcatgactttgaatatggcggcaagaagaccaacctcttcgatcagctctccctttattactacggggaaaaatattccaacctgacgccattgaagcgggattatatcctcaacaggtcagtggatgtctgtaaggctctgatctattgggacacagagaccgtgtctgatacaattgggataggtagtccagagttcattgagagcttaaacattgccaaaaaatacatcgacctttacaatcagtgcatcagccttgagctggaagagatggtttccgccctgaatggaggatacgtgccagtcaatatcggcggggaaagtgtgactgtccctcaggtgctccctaccggcgcaaacatgtaccaagaccagtcatctgagcttccgacgcagaaggcttgggattatgccaagacactctcacttctaaccctggccgacctgaacgacacgacggaaaagataatcatggggatctggtgtgtagagactgcacgagatgacggtgccctagtctctacagtgctctacctgctgggcatggagcccgtctggcataacagctcaagtgctggatttgacgaggagggcattcctaccgggaagaaagttgaggaccttcccaatgtcatagctcttgaaaacctcacccgtcctgacggttgggccaaaaagcgtatcgacgttactgtgatcaccagcggactgttccgggacctatacagttcgcaggctcgcctgatggacaacgcctacaggatggctttagcttgttcctattacactatcgtaaacaacaagacaattatggatagcgagtatgggccccaggtctatgacgcactgcgctccatcatgagaagcattagcttcaagggtatgtcaaacgaaagcctggaagacaattacgtcgctaagcattggctagaggactgcatctattacctcagcctaggctataactctacagtctctggcgaatatgcgataacccgcatctttgcaccccctaacggggattacggggctggcatttccaagcttgtgtcgatgtcatggacctggaacgacacagatgagctgagcgagttctatatcggccggatgggcaacatgtatagtaaatattactggggagatacaaaccctgtcgtgttcatgcgagcgctatccgatacagaccatattgtggtgagccggaataccaaccaatacggtgtactcgataacgatgacttctttgactactggggagggctcagcatgaccgttgaatacctctccaacaagactcccacaatgaacgtactgatgtatgccaataaggacaatgcctatgtggccacattcgagaatgttttctataacgagcttaacacaaggtacctaaaccccgaatggatcaagggaatgatgcaggaaggctacagcgggtccagatacatgtccaacaagtttatttccaacctctggggatggcaggtaaccagaccttcatctgtctctgaaacggtttgggatgacgtgtacaacacctactataaggacaaatacggactgggcgtgaaatcatggctccaatctggaaacaatgcatattcactgatatccatgagcgggacaatgctgaattccgcctactcaggatattgggatgccgatgatgctacattaagtgatatagctaacacttgggcacaggccaccgttgcaaatggggtggcctgctgtgactgcagctgcggcaatgtggccatgatgcaatgggcattcaagtatgtgaatgctgacttgctggctaagttgatgcctaagttgtatgacgccactcagaatccgctcttttacacaaatagcagtgatatgcctacaaactcttcgaatatcgaccgccgaaccacaaacagcagtgcagagtcgaacaatactgaaactgtgcagactaactcaagctctaacagtcagcagagcgccaacggtaacactaacattccaggagcaagcggcggctacatggtgggtacagaggcggatgcccagtccgatatggccagtgattcagatgctggaatgaacgatgccaatggagagggccgctctgtggaggtcactaagagcacaagcactccagtggctccaaaggacgtgagtatg

SEQ ID NO: 16759 - DNA, 3906 bp, synthetic construct
  source 1..3906: mol_type = other DNA
ggcatcagaggcccaaggatctatatcgaccagtactatggggaaatctccaatagcggcaatgtttataccgatgaatacgaagaaaaggggctgttttcagattatggaatggggatttcgttcgagagcaacgaggggttggtcccactgattcactactaccctagcaacgagtcattgccctcattctacgacccccgaggtggtggagattcagaagacgactacgaggacgaggatgatgatagcgatatagcggtgaaagaccaaggcattggaggcaactgttgggcattcagtggaattgccacccttgaggcctgcctggaaaaggtaaccggagaggaattcggctttagcgagggcaacgctaaaaacctgatggccattagctccatttacggcctgaacatagacacaaacaacggaggatacgacacaatgttcctcgcctacctcgcaagctggctaggtcctatctacgaggaatacgatacatacaatccactgtcctccctatccattgaccttccttcagtcttccacatccttgacatcgatttcttggctcctcgtaaaaacagcctcgacaacgacgagtacaaacgcgcgattatgaacaacggagccgtgagcgtgaccttcgattgggtggagaataaagtgtccaacggattccattcagtgtccattatcgggtgggacgacgattatgatgacattgactccttaggaaactacgcaaagggcgcctggatctttaaaaacagctgggggtatgaatggggagacggcggtttcgggtacctttcctacaaacagaagctgtcagaggagatcgctccttatatgcacgcctatacattttcatttaaggaaaatgacatcgggtatacggacatataccaatatgacttttcaggattaagcgatttcctgattctcaattccacaaatgcctattacaagaacaagttcattgcagaggacaacgaattcctctacgccttctccacatattttgataaggagaccgatttcacctacagcgtgtccatcaacggcaacgtcattacaaaaacagaggatggcaaagacattctgacttctatccaccactctccggctggatatcataccattcccttaggctataacctgaccttgaaagagggggatgagtttgagatcatcattaaactgctgaatgacaaccagaacaggattccggtgtgccaagctgatgagctctacagaacgagtctgcccagcaacgcatctttcatgagtctcaacggcaaggattggattgacctcagcaatttagcttcatccaatgagttctcttcacttggcatcaaggccaacactagccaggtcgcttgcataaaggccttcacttccaattggagaatgaactcggattcctctatcgtgaacagcaagaaccacagcattatcacctcagaaggaacagagctgagccaatatgaaatatgccagcttaaagtcggctcatttacaagggcttcagccaatgagaccatcatcatcgccatgagcattcccgaatggcgaaattaccaggatgagtatgaaaattatatagaggtgcatatcaacgacgaattctactatgtccgggtcaatgagggggtggcctatctggacatcagctttgacaaaattggccactatgactttaaggcccagttcaagtccaacatctactcatctgacatcgtagagtttgactttgaagtcgtcaaggatagcatctttgatgtggacgatctggacgccagcaacccagggaccttcaaggaactgcaggatataattagaaatgctaagaacggttccataatcagtttggataaggattatgctttctctagtggtgatgagtctgttgtcgacgactatatcgagataaataaatctctaattatcgacggaaaaggccatatcattgatgggagctctgactcaggcatttttcggctaagtagtggtgataatcttactctgagaaacattaagtttatgaatgccgacaacggtgcaatagtgtctaacggaaacttgacagtttcgaattgttacttcattagtaattgtgcttctggttccagttctacatctacttccagttcggattctagttccactgcttgcgggggtgcaatctactgtgagggcacctgtttcatagtgaatagcctctttgaatcgaatagcgcagatgccggtggtgcggtctactgcgaaggcacttgttttatagtgaattcctattttgattccaactacgcagatcttgggggtgctgtgtgttgtgatggcagctgttacatcgtgaattcgctatttgattccaattttgccgtttatggaggtgcagcttccatcgtggggaacgagtcctgcgaaattatagacagcaactttatcgagaatgaggccatctatggcggtgccatctacttagaaagctattgctatctgctggactcaagtttcaattacaattacgcaaacaatggaggcgccatttattctatcgcggaccttgacattcataccactggcttcaactacaatgaagcctacaaggatggaggcgcaatctacctggtaaacagcacatcctacatcaatgaaggaaacttcacggaaaacagtgctaaagagaggggcggggccatctgcgcactcgagttctccaatctaaccattcgatgggcttacttcatggacaactctgcttccaagtatggaagtgccatctttagcgtcaatgccctgaacattacagattctgaagtgactgtaagttctgggaaggtggaacttatctgctttgcttacgactatgcgtcaaatggccaggcatacggggatctgtacttcgacgaaaacagcttttatatcagtggtgcgcccgagatttactacttccgcgaaaagatagctcacaaactagccctggacctcgagttcaataacatcgagttgatccgcggagggggcgttgagatatcccgcgacttgaatgatgacggctgggaggacaaaatcaacaacaacatgctggagatttgccggttggtggatgacgatgactacatgactgtcctgcggatgaaggagatcgaagtgatcctaataaacaagaacaaccggtctgacatccagaagtttaagatcccatttaatgtcaagcttaatggctacttcctcaacactagctcactgaaatatgggagctacatcctcactggaaacctctctaaggatctggcaagcaactgtattgtaaagaatggaaccttgaaagtgctgcgtaaaaccaccctcagcagcctgtccacgttcactaaagtttatggaaacagtaagaatcttgtagttaccctcaaggacagtagtgggaaagcgatagtgggggttaacatcgctgttaaactgaatggaaaaacaattaaagcaaagacgaatagtaagggtcagatctccatagccatcagtctgaagccaaagacatacaccgcatacatcagctttgccggcaatgactattatgcaagcgccagcaagaaggtcaaggtagtggttaaaaaggcaaaccctaaactcactgcctcgaaaaagaccttcaagctcaggaatgctaaaaagtacacagtcaccttgaagaacaacctgggaaaagcactgaagaacgctaaggtcactattaaggtggctgggaagacatacaccgctaagacgaacgccaaaggtcaggtaacattcaatttgaaactggctaaaatcggcaagttcaaggccgtggtgagctttgccgggaataagctctataatggcctgaagaaggcggtggttttaacggtgaaaaag

SEQ ID NO: 16760 - DNA, 4068 bp, synthetic construct
  source 1..4068: mol_type = other DNA
accatatacgaattcacaagcatttatgagtacgcctctttaaacgacacttacattgacggcatagtttccaccaaaatcccttacgccttggaaaacatcgagctttatgtgtccgatggcagtggcgatgacgaaaatggtaacggcagcatctcgaatccatttaaatcaatttccaaggcgttgagcgagggatatcaaaaaagcacaaacatcaccgtgcacattctggagggcacgtatacaggtagtctcaactctaatctgcgcattcccacaacggtgaacattctgcttatcggcgagggggctgccaagaccattataagtgacagctcctcggactatttcattacagcattaaaagggaaatgcgagttacgaatttcccagatgacgctgaatagggcggcccgtgacacacagtcagccatctacattgaagaggaatccaacgtggccatcgacaatgtcacattcattggcgggcaagggaactacggcggagccatcaacactgctggaaacctttccattagaaattcatacttccatgacaatggatatgcagatcgaactctgcgggctaatgcctattacgggggagccatctgtaatgacggcaccctaatcattgacaatacaatttttgagagcgaccatgccggccggctcagtgaaattgcgaatcagggcacactctacatgaacaactcaaaggtgattgacagcatcaacgcgtatagcatcaacatggatctggtggctatcggcgcttatggtggccagaagggcgaaatcacaatagaaaacagccaattcatagttagctccaagaccatcaatgagttgaatgaccgcatctatgatcctacaagggcgctcacctgtctgggcatcggttcctgccaacacgcaatcctcatcaactccacattcatcggcgagggggcagtgttctccccttatgtatttgggggaattaacagcaataatctggcaagtggtgggtgtaccatgattcccggggacctcgaggtctacaactcaacatttagaaacgtccaggctgtgaatattatatattcaaggacagataacgtgcggtatcactcccagagggtctttgaaggatgcctattcgacaacgtggaatatatcatagctgtgctgaatacgggcaacttttcagtggagatgcacgactgtgtaatcctgtcagatgaccttgctaagataggatttggtagtgaaaaaaccatgaaaatggacatttccaataactggtggtcctccaacgatggatcctatgacaatgccaccctagggaccaccaattacatttcaaattgtgttgtaaagctcaaggaaataagttcagagactgttcaccctgaaagctatctgatcctcacgctcaattcgagcaaccgaaccggtctgctccaggatgcaatcctggccttcaaggcatacgacggcgaaaacatcagcgattacgatggagctctgtaccctcgaaatttcgaaatgtctgccataaacgccactctcgacgacctggaggggaccataattaacaaggccatcaatccatttgagggtgtagaaaacagcggatactacatcgaagccattgtagacaatcagaaggtcaatctgacagtgcatgacagcctctctatcggcaacgcatacattctggctgagaacatttcaatcaactacaacgaaacacagataaacgtcactgtgttggaagagaacggcaagagagcggatggggggaacgtgtcattgaaactgcacgacaaaacctatatctccgagatcattaacggcactgccatattcgatatcgacgtccttcctaaaggggattacctactgaactattcactgaatcgtccaaaggtttatcactctatttccaactcatccaacctcactgtcatcccatttaagatcaatgcttacgccaatgccagcaacatcaaagtgggtgaggatgctatcgtcattgcctacctagataaggatgccggaggcaacgtgactctgggtgaggagatccaaaaagtcaatgatggaacggccactttcatcatctccaatttagccaaaggggattacacttaccagctaagttattccggagatgaaaagtacgataatgagacattccatgtgtcattctctgtgaacttgaaggatgctagcatcagcgttgagaatgacactctggacttgtttgttggctccaatgaaaccatcgttgccactatctctccaatcgggcttgccgtgaactacagttgctctaatgaatctgtagcaatggttgatgaaaatggtgtcgtcagtgcagttggtgcgggaatggctgtgattaccctgactgtgggtgacgacgtaacttatagcaaaaactctagctctgtcactgtcattgtcagtaaaatccccaccatcattgagattgtgaatgataccatcagcctggaggtcacagacagccttgattccatcgctagtttaaacccagaggaggggggcaacctcaactacgcaataagcgatgacttgattgctaagattgacaatgggcagattactgcactcagtgaaggcagtgccattataaccgtgtcatttgacggcaacgacaagtatacaaaggctcagaacaaaagcatcaagattattgttaacctgaaagaggccagcgtgtcggcattctcgaacattgacctcctggtgggtgagaatgataccctttctccaaaaacctccccggaaggactggatgtgcggtatgagtctaacgatacatctgtggtgctggttgacaatggccaggccatcgctgtgggcgagggcaatgccaccatcacattgactgtcggcggcgatggagtatatgctgaaaatacgacaacagtgaaagtcagcgtgtcccggattgctaccatgattgagattgaaaaagacaccattgaactgaaagtcaatgaggagtcccccatcggggctatcttggagccggatgtgggcaacctgacttacagtatcagtgatgagagcattgctaaagtggaaaacggcaagataatcgctttagctgaaggaaacgcaagccttagcatttcattcgcaggagatgagagatacattggaacgaatgcaagtgtggagatccgcgtaaataagataaacaccatccttactgagacagacataacgacaacctacaaggaggagggctaccttatagcaacactgaaggacagccagaataatcccatcagcggagctgtactgacggtggacctggatggaatcaaaaactatacaactgattccaacgggcagatcaagatagcgacaaacaatctgattcccgacacttatactgcacgcatcagctttgcaggcaacgagaactacagctcctctaatggaaacgctagtgtgaccgttaaaaggatcggtacaaagcttaatttcaatgacatgaacactaccgcctttgattccaacatcgaggggagaatcggggaatatttctacttccaactggttgactgcgatggaaaccccctagccaacaagaaggttatcataggattcaatggggtcaagtacaacaggcagaccaatgagaccgggtgggccaagatccagatcaacttgaaatatgccaattcttacacctttgcaatcgccttcctcggagatgacaactacagcggatcattcaactttgcagtgatccgcgtgagccaacagacccctaaactgactgcaagtagcaagacctataagtcgtctgctaagaccaagacactgactgccacactcaaatcctcttcggggaaagccatcgcaggtaaaaagatcagctttagactcaatggtaaggtctacacagccaacaccaactcattgggtgtggctactgtaaaggtctctttaaacaagaagggaacctacagctttacagcgcagttcagtggtgacagcacctacaagaaggtgactaagacggccaagctaaccataaag

SEQ ID NO: 16761 - DNA, 4530 bp, synthetic construct
  source 1..4530: mol_type = other DNA
ttcgactataattttacagacggcatcgtcattgaccggcctgtgacaattatcggcaatggacacaccatcaacgccgctgagatggtccggatcttccacattcaggcagacaacgtaaagatcaaaaacattaccttcacaaacgccatctcaaacggatacgggggcgctatctactggcagggagccaatgccaacctctccagttgtctgtttgagaataatagtgctgtaatggctggggctgtcgcgttctatggaagcactggcagtatcgtgtctgactgttccttcatgaataattccgccaataacgggggtgcaatcatgtggcaggtcagtgatgacagcgtggtgtcggattgcagcttcatgaataactctgccatacagggcggtgctatctactggagctccaacgacggcgtggtgtcggattgtagttttgtgaacaactccgctgtgcggaatgggggagcaatctattgggaaaagaataatgggaatgtgtccggctgtatcttcgtgaacaacagtgctgacaacggggccatctacttcaacaatcagaactttgggcaaaatctgacaatcaaccacaatattttcctgaacaatgatgccgtcgcaatctactttgtgcgcaacgactccgcctccaatgcagattacaactggtttggaaataatgcaactaactgcgatatcgcgccaaccagcaataatatggaaatgaacacttggctgttcttgaacgctacctccgagccggaaggcatctctatccttgattcatgcgacattatctttaagctgtacgcctatgctccttcgggagtctcagagtacgatagcagcaggctgaaagagattaaccttaccgtgacgccaacgaacggaaggatcaatacgacccaggccaagctgggagagaaggttcactacaccccagagagtgccgaatgcatgctaacagccagcatagaaaacgccttctacacgacaagactgaaaatctcagacggaacaacattccgtgacctcaacaatctcataaaccgcaacgataatgacactattattttggataatgacttcatctacaactccctttttgacagtaaatttaagaacggaatcaatattaaccgacctttgaccatcgtgggcaataactacaccatagacgctaccggcatggcacgcatcttccgtattcaagcagatgatgtagagatcaacaacattacattcgccaacgctaaaatagacggcaatggtggtgcgatctattggtactccggcgcccggggtattgtgtctgattgcagtttcgtaaataattcagctaagatgtatggagccgccatctattggaacggggctaacggcaatgtgtctgattgcagctttgtgaatagcactgtgacggatgagcatggtggggccatctattggcacggtgccaatggcgtggtttctgactgctcctttgtgaacaactctgctaagaagtatgggggggctatcttttggaacgctgccaacggagtggtgtccgattgtatctttgtgaacaacagcgctaagagctatgacggtggtgctattgtatggaacgaggggctgaacggggccatttctgattgcagctttgtgaataactccgccaacgacgggggtgccatcctttggaacgaagccgctggcggtactgtgtctaattgtagtttcgtcaataactcagctaacaagagcggtgctgctatctactgggattccggggcgcgaggtgtggtgtctgattgcagttttgtcaataattcagcgaataggagcggcgctctatactggtttgctaatgatggggttgtgtctgcttcgatttttgtgaacaacagtggcgacaatggggttctgtacttcaataatacaaacaagcgaaacctgagcatcaatgacaacattttcctgaacaacgatgtcgtggcaatatatttcgttaacagcgattccacttccaacgcagactacaactggttcggaaacaatgcaagcaattttgataccgagccattaactactaacgtggaaattagtacctggctctttttgaacgcgacagcagatcccaacccagtggaaattctaaattcctcagacatctcctttaagctatactcatacaacgccacaggaattagcgattacgacaatagccagctgcagcccgttaatctgaccctgactgcaactaagggtgatgtcgatagcatcgctaagctgggggaaactgtcatatacaatcccaccagtcttggaacaggaagcgtaactgcaaaagtggagaacgtcgcatattctattgagatcaacaatataaagtccaaccccaacctctcagtggagtccgatgaactgacatacggcaacaacatcgccattgcgcttaattatgagtctgctgctaccggcaaagtcaacattacactgaaaggcaagaaatcagattatacctttgcagatttggacttaaatgaaacaatctcactgggaattcttgctgctgacgagtatgaggtcattgtggaatactccagagacgagatttataccaacgcaagcgcaaggggaactttaaaggtcaacaaagccaactcaacactgacagtctccgatatcgagtttgattataaggacatgggatctggtgagatatcattcacgaacgcaactggtgttgaggccaaagtaataaatcatgacgaagccattgttttcgtgagaggcaacactataactgtcctcaatttatcggccgacagctatatattggaggtcacaactatcacggacgaaaatcacaacgaggtcagcaagaatgcaaccattacagtgagaaaggtcaattctaccatcaatgtgaacgacattgtcctgtattacggcgaatccatcaacctggccgtgaccaccgacggggccattggaatatctgctgatatcgacggcgagaacgttgagctcaatgaaaacatcgtgacaatcccagatgatttggaatctggaaatcacacactcaccattacaacagttcctaacgacaaccataaggaggccagcaaaaccgtgaatatcgttgattgtaggattggcaatatcactgtggtggtggatggcgttgagtattctattcccgccgtcaatggcactgccattaccaccaatatgccggaggagattgagaagctcaaggaaaatattaccgacctgactgggcagttggaagaagcacagacaaacgcaactaacctggcgaacaacctcacaattgctaatcagatagttgacaagctgatcgcccagctggaggaagcacaggccaatgctacgcagacaatcaatgacctgacccatcagcttaatgaagcccaaaccaatgcaacgaaaatagccaacgaccaaacaaacgccaatcaaatagtagacaacctaaccggccagcttaatgatgcccagaccaacgcaacgaagattgctaacgacctcgagaatgctaatcaaatcgtggatgatttaactcgccagctggaagaggcacaggccaacaatgatcaaaccatcaacgaccttactcatcagttggaagaggccaaagttaacgcaactaagatcgcgaacgacctcgagaatgccaatcagacagttgacaatctcacaacccagctggaggaggcaaaagtgaatgccactaaaatagcgaacgacctagaaaatgctaaccaaatagttgacaatctgactgaccagcttgaagaagccttggctaatgccacgaagatcgagacggtggttgtcgacgggaaggagtaccctatagaatatgtgaacggcaccgcaacagtaactaccaattcgacagggcctcaaaacatcacccacgagagaaaagccacccagatcatttataaggacatggaaacaaccgccatcgacaccaaagtggatggccggatcggcaagtacttcaacgtcattctcaaggacagcgagggaaatattttagcgaataaacccattcagatcggcttcaacggtaaggtctataacaggaccactgacgagaacggatccgctaaactgcagatcaacctcatcaaggcagacatttacacatttgctatctgttacctcggcgatgatgattataacggcagcttcgtagtatcaaaaatcaccgtaaaagcgcagaagggcaccctaaccgttcccaacaaatcttacaaggcaactacaaagaccaagacgctgagtgcaacattcaaggccgcaagtgggaaagtactcgccaacaagaaggtgtcattcgttgtgaacggaaaaacttactctgctaagaccaacgccaagggtgtggccactgtcaacgtcagtttgaacaagaagggaacatacagcttcgtggccaaattcgcgggagacaacacctacgctgcagtcagcaaaaaagccaaactgacaataaag

SEQ ID NO: 16762 - DNA, 4380 bp, synthetic construct
  source 1..4380: mol_type = other DNA
tcacatgtggaggtcgatggaatagacattaattacacagatctggagaccatcacagttactgtgtcggataataatgccacaggatttgtgaccattacaatcaacggcaccgatatcgaactgacgaaagaagtttctgcaggtcaagccgtattcgacgtgaaggacctggtggttggagaatacaacgtaactgccgtttaccacagcgacaggaactacttgaactccactgcgtccgatacattcaaagtcgacaagtcagatgtcaagaacatgaccatcagtcctgtaaacattacctatggtgagaacgagacaattactgtcaggatcaccgacaacaatatcacaggcaatatcaccatttctgtaaacggcaccgaatatggtcctgtggaacttgacaatggtgtggcagtctttaatgtgcccggattgatcgtaggtgactatgaggtgacggcctcgtactcgggggactccaactataatcctgcaagctcaaccgagacatttactgtggataaggagaaaccaaatgtgcacgtggtctctgaaaacatcgactatggaaagaatgagacaattacagttattgtagacggatttaatgttaccggcaatgtgaccattaagattaatggcacagagatcgcaactaaagaaattaatgataaagggcgggccgtttttgttgtgcctggccttcaggccggtgaatatgaagtggtggccatatataacggggatgataatcacgaatcttccgagggaagtgacacattcacagttgctaccgtcacaccaaacatggacgtggaaactgaggacatcgactatggcgacaatgagacgataacagtcaccctccccaaagatgcgaaaggtagtgtaaacataaccattaccgatgagaatgggacggtggtttacgagggggaagctcagctggaagatggaaaggccacggtggacgtgccaggcatcacaccggggccatacaacgttacggtcaagtatccgggagacagaaactataatccaaccaataagacagtccgattcaatgtggataaggtagtgcccgatgtcgatgtcgatactgtgaatattgactacggcgacaatgagacggtaactgtgacagtgaaccctgtggacgggggcgtcacgcctacaggtagtgtgaatgtcactgtccgcgactctgatgggaaagtggtgtatgaaggcaacgtagacctggtggcaggcaaggccaccttggacgtgcctgatctgggtgcaggagattacactgttgatgtccgctatggcggggactccaactacgatgattcaactggaggatcaagcttcaatgtcgccaaggtctctcccgacatggatgtgcagacggaagacattgattatggcgacaacgagacagttactgtgaccctgcctaaggatgcgacaggcaccgtcaatgttaccatcaaggataacgacgggaatgtcttttatgagggtgaggctgagctcaaggaggggaaggtgactgtggatgttcccggactgcccgctggcgattacaccgtggacgtcgcctatgggggggacgataactacaacccagtcaacagttccgactccttcagcatagacaaggtgagtcccgaagtcgacgttggtactgagaacatcgattatggggacaacgagactgtgacagtcacagttaacccggtggaaggaggatctgctcctacaggcactgtgaatctaaccgtgaaggatagtgacggcaaagtggtgtatgaatgccaggcagaccttgtggaagggaaggctactgtggatgttcccgggctccccgctggcgattacactgttgaggtggcttatggcggggatgagaactacactgctacaaactccaacggaaactttgctgtggggaaagttaaccctgacatggaagtggatggtgaagacattgactacggtgacaatgagactgtgaccgtgaccctgcccaaagatgcgacaggcactgtcaacgtcaccgtgaaggatagtgacggcaatgttgtgtatgagggtgaagccaagctcgatgatggcaaggctacagtggatgttcccggtctccccgctggcgactacactgtggaagttgcgtatggcggtgacgataattacaacccagtcaacagttccgattccttctccatagataaggtagctcctgaagtcgacgctgacaccgaggacatcgactatggtgaggacgagccgataaccgtgaccatcgaccctgtggaaggagggtccactcctactgggacggttaacgtaaccgtgaaggacaaggatggcaacgtcgtttatgaggaccaggtcgacctcgttgacggcaaagtcaccctagacattccagacttagatgccggcgactacactgtggatgtggcctacagcggtgatgagaattacactgccaggaactccagcggaagctttactgttaacaaggccaaaccagagttgaatgtagattcagaggacattgattacggggatgatgagaccattacggtgagtcttccagaggatgcaacaggcactgtcaacatcaccattacagataaggacggtaaaaccaaggtcttcaacgacgtgccgattgaaaacggcaaggctacaatcagcgttcctgacctcgacgccggagactataatgtaacagtagactacccgggagacgacaattaccttggctctaaagctacttcatcgtttaaagttgtcagatcaaacagcaatatcactctggagacagagaacatcacatatggtgacgaagaacccataactgtggatgtgaatccagtggaaggaggagtcactcctaccggtactgtcaacataaccatcacagataaggacggaaatactaaagtgttcaatgacgtgcccctggaaaacggcaaggccaccgtcgatgttcccgacctcgccgcaggaaactacatcgtggacgtcaaatactccggtgatggcaactacgacccagacagcacagagggagcctttgaggtggcaaaagcagtgccccacattgaaatccacgtatatgacatctactatggggatgtagaagtgctcacggtcacatgtgatgctccagggaccgtggacatcacggtaaatggagtcaccgtaacagtacctctggatgacggatatgacaagcgagtattcagttcaatcgttcgggcatacagcggcaaggcaaccctcgaccttgtcaacctggccgtgggcacatacccggctaaggcagtctacaacggaaatgagaactacacctccgtcagcgacaacgacacgttccacgtgtacaaggagaataccacgaccaagatatctgtggacgatatcaagctaggtgaagatgcagtgatcgatattgaggttacccatgaggacggctctgagaagatcaatactaacattactgtaacggtcgatggaaaagattataccgttgagctcatcgacggaaaagggacgttaaccatccctgatttggacctgggaaagcatactgtcaaggcggtgtaccccggaagccacaactacacaaacagttcaaacgccaccagctttaaagtgacaaaagtgaccccaagcttcgatatctcaacggagaacatccaggtcggagacgacgaaaccgtgactgtcactctaccagatgatgccacaggaaccgtaacccttaccattgacggaaaagagtataccgccacagtggagaacggcaaagccacatttgtgattcccggcattaaggcaggcgagcacaaggtcaatgttgcatacagcggggacgacaagtacgcccctgctaaaagaagcgactccttcacagtgagcaaggtgaaacctgacatgggcatggacgcccccgaaatcaaagtgggccaagacggggtgatcaccgtaaccgtgccagaggatgcaacaggtacaataagcattaccgtcgatggcaagacctacactgccagcatcaaggatgggaaagcggtgttccatatctctggactggggccaggcacacacattgtcaaagcctactactctggtgacggcaagtacttggctggctctgtggatggaaccatcgtggtggagcccaagaacgggacaagcccacaggacaagggcaaagctcatggggggatcgacctggaatccaagaagaccgggaatccaatattagtgctgttcatggtgctgttcagcctgatcctgatccctatcaaaagaaggcgcgacgatgatgaagaggaggagaatgaagatcaaattaaccggatagat

SEQ ID NO: 16763 - DNA, 4662 bp, synthetic construct
  source 1..4662: mol_type = other DNA
aaaaccgttactgtgattggtggaattggccaggtgaattttggcagcctagaaaccgacacctatgaagctacagtatccttcggagggagcgatctctatgagcccatctcaaacgctaccgagtttacagtatatcccgaagaggaaggcaccaattttgagattgatacaaatgcctccgaaatcacatacggggctagcatcaaagtgactcacaaattgccagaagatgctactgggaccatcaaatattacctgaacaacggcactgtgctcggggagctgccggtggaagagaaactgacactggaccttgatgctggttactatgtcatttttgccaactatagtggcgacgagagcttcgagcccgactgggacagtgccgatgtcctcgtgaagcaagtagaaacagagtttcatattggcctccagcagcaggtgatatccggcaatcctgcctatgtcacccattccatatccgagggcgctaccggcacaatcagctactatctgagtaacgggaccttccttggagaggtgcaggtcggcgagacatatgtttcacccaaatggaaggtcggaatctataacattaccgctaactattccggagaccggaactttgttccggcatcggacagcatggaatttagaatcaatcctgacttctcgttcgacatatacctggatgaggacgacgtgatatacggccagaccactacggtgagaccaagcttgccctatgacgctactgggaccgtggagttctactataacgatacatatctgggcaaggtgacaattggccaatatgaaatcattatggttgacggagaggaatactacgaaactccaggtgtggagcttcccgagttcgacgtgggtgtccatgagatcgtaggtaaatatttgggggacaagaattatgaccccgctatcgccaacgtaaggctcactgtcctaagtaccgaaacagtattcgagatcaatgcaagcccaagcgaaattaaatacggagaggctgccgctgtgatccataaactgccaagccttgctgttggtaccatcttatattacctgagcgatggaacttccctcggcgaactatactactacgaggatttagcattgcctaaactcgctgtggggagctatgagattctcgccaactattccggagacgagaatttcaataatgcaagcgctagcacgaccctgaccatcaataaggccgatcctgatttcgagatctatatcgccttcccctcctatgacttcggtgatagcccagtggtcttcgttaacttacctgacgatgctacagggaatatctcatactatctgagcgatggaaccttccttggtgagctgccggtagatgaacggctgtccttgcccattctgaatgtaggaacccacactattatagggaactattcaggagacggcaactacaataatgcctccgcgagcatgacagtgactgtgaatgaggtgtccatggagtttaatcttgggatcagcgcagaagagatcagctacggcgaaactgcaacagtcacccaccgcctgccaagccttgccaaagggaatataacgtattatctgagtgacggaacactcctcggggagcttccggtcagcgaaaacctgaccttacctaagttagatgttggaacttacattattatcggaaactactccggtgatgaaaattttgacggtgacagcgcaaatgtgaccctcactgtcattcaggcggatcctgcgttcgcaatcagcattagcgcagaggaagcggcctacggcgaaacagtgactgtgagtccagccctgccagaagatgcaacaggaacagtgatttactacctaagcaacggtacaatactaggcgagctcgcagccgacgagaacctgaccctgccaaccttcgatgttgatgtctatgatattttggcaaactattcaggagacaagaactacctcaatgcaagtgccgaaacagcactgattgtgagccaggcagaccctggattcgagatcagcatatcggccgaggaagctgcgtacggcgagacggtcacggcaagccccgttctgccagaggatgcaacaggtacggtgatttactacctaagcaatggaacaatactgggcgaactccccgtggacgaaagcctgaccctgccaaccttcgatgttggcacttacacaatcctcgcaaactactcaggggacagcaactatctcgatgcgagtgcagaaaaagagctgaccctaattaaggccgattctaccctggagatcaatgatattgcctttgactactccaagacgggctcagccgaagccaagacttcgggcgcagagggtatcgtggcttcagtggcgggccatgacgaagccgtggtcgaggtgaacggaaacgagattacggtgtccgggcttgatgcagggagctataccctatccgtttccacgatcgtagacgataaccacaacagcgcaagcaagaacatcacagtcacagtcaaaaagatcgatagtagcctatccgtggaagggttagagctggactatggcgaatcaggcaatgttgatgctgccgctgagggagctaccggcatcagcgccaagatcgggagtaagagtattggagtgaacggttattccatccccatttccggactggatgccgggaaatacaacctgacagtgactactatccctgacaggaaccacaatcccgtgacgaaaacagcccagatcactgtgaacaagatagattccacattggaggcgaatgacatggccttcgattacgagggcaccggcacaagttcagtgacctacaccggggctaccggcgtaaaagcttccgtaatcggtcagccaaatgccaaggtgaatgtgaaggggaaggagatttccgtctcaggtttggatgccggaaactatactctggaaatcactaccatccctgacaagaaccacaaggctgtaagccaaacagtcaatgtgactgtcaacaagatcgattcaaagttagacttcaacaaccttgtggactacggatctgccatgaacgttaccgtgaagaccgagggggctagtggtattatggctgaaatcgacggaaaggaactcggcgtggacaagtacacgatccccatctccgcgttggatgccggggaatacgaccttacggtgacaactatccctaacagcaaccacaatcctgtcagcaagaccgtcaaagttacaattaccaagctcgacagtgagctggctgtggaagaccttgagtttgactacaacagcactgggactaccaatgcaacttttgagggtgccacagggatcacagccaaagtcgtcggccagccaaacgccaccgtggagataaatgggaattccatcagtgtttccggattgaagcccggaagctacaccctggaagtcactacggtccctgatgagaaccacaaccccgttacagccaaatctgcgatacgagtgaacaagctggagaccgcaatttcagccaatgacataagcactgtccacggcgcagacaaaaacctgaccgccatcataagggacatcaatggcaatcctgtagccaatgccacagtgtccgtcagcctcaacggcagcaaaaaatatgtcagtgattcaagcgggcagatttcaattccgttgaagtcgcttgctgccggcaactacacggctacaatctcgtttgctggcacagagatttacggcaagagtagcgcgtcgatcaaagtggctgttgacaaggagccaacatcaatagctgccacaaatgtcaatactcagtatggcctcgaggactatattacagcagtgctgaaagacgggcaaggcaatcctttgggcggagtcaagctgaatgtagatctggacggcaacaggacgatcgttaccgactcaaacggtcagatcaagattgctaccaaagatctgacagcaggcaattacattgcgacaatcagctttgctggaaacggaaactacatggcctccgagagtaatgccatcgtcaacatcaacagaaccggcacacgcttcaacttcaagaacatgactaccaccgcattcgattacagaatcgaaggacgaataggtaaatacttttacttccagctcgtggacgaggatggaaacccattggccaacaagaacgtatgcatcggattcaatggggtcaagtacaaccggacaaccaatgaaaccgggtggaccaagctgcagatcaacctgcgctgtgtgaatctgtacacctttgcagtgacatttagcggggacgacaactacaccggggcattcaatgttgccatgatcaatgtgacacatcaaagccctaaattgactgccggcaacaagagctataaggccagcgctaatacgaagacactcactgctaaatttaagagtttcaagggaaccgctattgtgggtaagaagataacctttactgtgaacggtaagaaatactcagccattaccgataaaaaaggaattgccactgtgaacgttagccttaacaagaaaggtacttataaatacactgccgcctttgctggtgacagcacttacaagaaggtgagtgttacttccaagctgactataaag

SEQ ID NO: 16764 - DNA, 5781 bp, synthetic construct
  source 1..5781: mol_type = other DNA
atcaacggaaacgggtttacaataaacggttccaacaaagcccccatttttcacatcaccggggataatgtgaccatcaataacattagttttgtgaatggatatgcaaacgcctacgttaatggctacgacggtgaagatatgaggggtggtgccatctactggcagggcaggaacggcaaggtgacatacagcaacttcaccaacaacaacgccaacgatgggggggccatttattggtttggtacagatggtattgtagaatattcaaatttcattaacaacaatgcaaatgatgggggggcaatctattggtttggtacagatggtattgtcgaatacagcaatttcattaacaacaatgcaaatgacgggggtgcaatctactggtttgggcagaacggcaatgtcgaaaattccgtcttcacccaaaatcatgccggctcttacggcggtgcgatttactgctctggtgctgagtccattgtggagtacagcaatttcaccaacaataacgcatataatgggggtgctatttactggtttgggcaaaacggcaatgtcgaaaattccgtcttcacccagaaccatgctggctcttatggaggtgcgatctattgttctggggccgagagtattgtagaatattcaaacttcaccaacaataatgcatttaatgggggtgccatttattggtttggccagaacggaaacgtcgagaattccgtcttcacccagaatcacgctacctttgcgggaggtgcgatttactgctctggtgctgagagtattgtaaaatacagcaacttcaccaacaacgacgctatcaagggtggtgccatctattggaacgggcgaaacggcaacgtcgaaaactccgtcttcacccaaaatcacgtggacaatgacggcggtgctctgtactgggacgatagtgaggggaaagtcacttcttgtatatttgtgaataatactgctgagactaagcacagcggccatcttatcttgcctatgggacgaggtggggcaatctattggaacggtcgaaacggaaatgtcgaaaactccgtcttcacccagaatcacgtggacaatgatggcggggcactgtattgggttgatagtgagggggaggtcacttcttgtatttttgtgaacaatgctgcagatgttgaggccagcgtgtattataatgagcggggcgcctactccaattttagcaataacattatgctgaataatggaaaaaacgagattaagttcaagatctttgatcgcagcaatatagactacaactggtttggcaataatctgagcaattacaacgaaaagccaggaggctttgagggcaatatttggctgtttctgaacgctacagtagacccgaatatgctcctgcttggtgaaagttctgaaattacatttaggttgtatgcctatgatggaacaaatgttattgaatatgacaatgatctaatttaccctatcaacctgactctgatttcaagcaatggcaacatcaacgaaactgtggggttggaggaaacagctatattcactccccaaaatgtcggaacggccatagtaactgcaaaagcggaaggctttgacatccagacagtgtcaatcaatgttcgggctgccagcttcagtgacctgaaccggaccatcaatggcaatgaggatgccgaaatcactttggggaagtactatgagtttgatccagaaaccgatggggctttcatacatggaataatcattaaccgcaccgtgacaatcaacggaaacggcactacaattaacgcatcaggcaaagcccggatcttccaggttatcgctgataatgtgacactcaataacattacctttacaaacggaaatgcaagcggcgagggtgccgataggagtggaggcgctatccggtgggaaggggctaacgggattatctcatactccaatttcacctttaaccacgcatacctgacgggaggggcgattatctggtccggtgagaacggtactgtcaagcactccagtttctctcagaacgatgtggatgggtctgggggagcgatcaggtgggctggtgctaagggcaccattacagactccgatttctacctcaacagtgcaaccgatgcaggggccatctggtggcttggtgcatatgggacagtcaaatactccaatctgatcaacaaccacgcaggtagtcgggggggcgctatcatgtggagtggtgagaacggcaatgtgacctactccaatttctcgctcaataacggcggatccggcacggggtacgatggcgggggcgctatcttttgggatcatctgaacgggactgtgagctattccaatttctccaacaaccacataaatgggcacggaggagctatcgcctggcatgaacagtacggaaatgtttcctcttgtctgtttgtaaacaacactgccactgacggcgctagcgtgtaccataatgaccattcagagtcatattccaatttcaacaacaacatcttgctcaacaatggggagaacgagatccactatgacgtatacgatggctccaatgcagattataactggttcggaaacaatggcagcaattacaatgagaaacctgcaggcagcgttggcaatgtatggcttttcctgaatgccacagccgatccaaacccaatatctattctgggtagctcagatgtgagctttaaactgtatgcctatgatggactggaccttatcgagtatgacaacaacctcctgtatccgatcatactgagcctgagctcaagcaacggaaatatcaacgacactgccggattggacgagaagataatattcacgcctcagaacattggcactgccacggtgactgcaaaggcagaaggcatcttccaaaccctgtcaataaatgtgtaccctccaagctttagtgacttaaacagaaccattaacggcaacgacgatgatgagataactttagacaagtactatgagtttaaccccgagttggattcagctttcattcacggaatcatcatcaaccgcacagttacaatcaatggaaacggaagcacaatcaacggtagcagcaaagcccggatcttccaggttatcgcgcctgacgtggtcctcaataacattacctttgccaacggcaatgcgaacggggagaatgaggggggctatgggggcgcgatcctgtgggaaggcgataacggaagagtcgaggactcaaccttcatcaacaacaatgctagcggatacggtggagcaatctttggaggcaactgctcggataacgtgattttccagaacaaccacgccggcatagaaggcgatgactggtacgtccctaagcctgtgatttccgtcaatgacttcacatccacatataaatcaggagagaagctctatgtcaatgtgtcctatgtgggcactcagatcgacggaatcaatgtgacaatctctgtgtttgacagttccaaccagctgattggcaactattcctgcctcagcggtgacggatggaccgtggacttggatgctggaaactataacgctctggtttttgtggatagcgatgaatatggctacggagaggagacaattgccctgacaatcaataagcgcgcttctcaaatttcagctaacccattgaacacaacatacaacggaaacgagaacattatcatgatccttaaagacaactacaatgaatccattgccaatgctacggttttggtggactttaatggggagaagaacctaacaaccgacgagaacggtcagattgtggtgtccgcgaatggcatcgtgcccggagaatactgggctcagttcatcttcgacggcagcaaaaactacgacgggtcagatgagaaggttaaggtgattataagtaaggcttctaccagcctcagctcagagaatatgaatgttagctacaatgagagcaaatacctgatcgctacattaaaggaccagtactccaatcccctggccgaaatcagcatagaattcaaatctaactcatcaaccgtgaagaacgagaatactgacaacaagggacaggccaagctcttaatcgacttcaacccaggaacttataatattgatatcagtttcgctggcaacagcctgtatgatgcctcgtacgctactgtgactgtggtagtaaacccctctgatgactccggaaacggcactgagccctcgggcaatggaagcagtggcaacggtacgagtcctgaaggaaacggtacttctcccgggggtaatggcacctctccgagcggaaacggcacttctcccggggggaatgggacgtctccaagtgggaacgggacgagccccggcggtaacggtactgaccccggtggcaatggcacgtctccaagtggtaatgggactgaccctggggggaatggtacctctccatcgggaaatggaactagccccggggggaacgggaccgaccctagcggcaatggaacctctccgggcggaaacggaactgaccccggggggaatggcacctcttcaacggtgaaagacacgctgataggcattagcacatccaccgtcatatatggaaatgacgagcttatcaatctgaccctgacaacggcagacaaaactcccattgatggggtcattgagctccgcgttggcaattctatctataatgtaactattacaggcggaaaggggtcgaaggctctttccaaccttactataggcaactacaccgtgactgccgactataaaggagattctgagtacaactcgtccactgccagctctagtttcaccgtgagagaccgtatcgaaacccgcatcatatacaacaatatgaccacggcccctgtgggtgccaatgacggcagaatcgggaattacttcagagtcaaattggttgatgagaacaatcaagctctagctggagtgccgatccagattggcttcaacggcagaatctacaacaggaccacagactctgaaggcggagcaaagctacagataaaccttgctaaggaggacggctacacctttgcaatctgcttcaaaggagacgacaactacaacgcatccttcgaagtggccaaaatcgacgttaacaagaagtatccaaagccaaacagtgccaactcagagtccgccgaaccagcaaacaagacacagaagaacacaagactcgaaacctccatcctctacaaggacatgaaaaccgagtcggtcctaaaagcggaaggccgagccggaaagtacttcgaaatccagctagtggacaacaacaaaaaggctttagccggcgtgcctatcaaaattggattcaacggagtggtctacgacaggataaccaatgccaccggaggcgcaaagctccagataaacctcctgaaggtgacccaatacacattcgccatcgcctacctcggagacagcaaataccaggcctcattcgaggtggcaaagatcacggtaaacaagcaaaccccaaaaatcacagcccctcagaaaacatttaaggccaaggcaaaaacaaaaacagtcaccgccacacttaagtcacagcgtggcaccttactaagcggcaagaagatcaagtttacagtaaacggcaaaacctacactggaacaaccaattccaagggcgtggccagtgttaaggtctccctgagcaagaagggaacatacaccgcgactgccaaatttgatggcgatgccaacacaaaggcaaccagtgtgaagttcaaggtgaaaattagt

SEQ ID NO: 16765 - DNA, 4356 bp, synthetic construct
  source 1..4356: mol_type = other DNA
gccattgccatgtttaccgatgagaagatccgaccggtgacagagaacacagtcaaaggggctgacaatgaaaaggtcaattacaccgcagtcgtgcgcgatgtggacgacctggtggaggatgccgaggctacaatcactccggatatcctctataacgggaatctgggcaaggacctggcctatcccgctgaggagatcacattctttgactccatcacagtgaacgggggcatttacattgagatccagaatgattcaagctaccttgcatctggagctaccaaccggactgacatatggaacattgaagcacccgaagacgcggatttcgttgcggggtttgtctatgtggcttacaactgggataagacctctgccggtatccctgccctgaacatcacattcaatggggtgagcgtcgcccctgttgcccattaccgcgaccaatccaatatgggcacctatggcaagtatgggtacggacttctcgtatatgatgtgagcgacctgctcgaggcaggggataatgtcttcacccttacaaaagatgctaacatgactgccatctatccaagtgtgttggttgctggctacgaccaggaggtttctgacagcatgaaaaccatttacatgttcaacggcgccgaccttttgtccaatgcaaacaacttcctgggaagggttgtggcgtctaatagtgttcttgacattgaattgcccgacgatgtgattgactgtgcacttggaatatttgccgcaagctctcagaaaggcgagggcaatctaatagtgaacggcgagagctttgaagatgtgtggaacggttcttccaattcagtccaggcttgcgtgtttaacttgacagacgatatcgaagagtccaacacagtatcatttgttgcaaccgggagcactatactagcccttcagcagttcatctttgtggagtacgagcttgtgtctgtggacgctaaactgggctctgagtacaataacgtggcatttgcggggaccgacaatgtcctggaatttaacattaccaatgacggaacaattcctaccgcctacaccattgagttctatatcgacggcgagttggcggacacgctggagctcgagctggcaaacggtgaaagcgacagcctatacctggtggacccaaccatcagaccagtggatgaaaccacggtgaacggcgccgacaatgctaaggtcaactacacggtggttatcacagacaattcaactggagatgtcctggatataatcactatcacgccctctgtactctacaacggtaacctcggcaaagacttggcatatcctgctggagagatcactttcttcgatgtgattaccgtcaatggagacatcattgtcatagggatgaatgattccacttatcttggctctaagacaacagggaggactgacgtatgggacctgaccactaatgaggatatcatctttgcagccggatacctgtatgtggcatacaactgggataagaccccggctggaatgcctgtttggaacaccacattcaatggcgtgacggtcactcccgttgcccactaccgagaccaatccaatatgggtacctacggcaaatatggctacggactgatcgtgtacgatgtgtctgacctgattgtcgctggtgaaaacacattcaccctggagaaggaaaatggaaccacggccgtgtatccaagtaccctggtagccttctataatatgcccgaatccagcacgtatgtcactacatacctatacaatggcgcagacttactgtccaatgcaaacaacttcctggggagactcgtggccagcaacagtacattggacatcgattcatttgacaatatagtcggcgctgaccttctggtatttgccgctagtgctcaggctggagagggtagcctggtcataaatggcgatctggtcgctgacatctggaatggcagcagcaacagcgtcgatgcatatgctatcgacctgggcaaaaacccgaaggcctctaatgaggtctcatttgtggccaccggatcgaccattctagccttgcagcagttcattgtggtggagtacaatgttccttcagctgaggcaagtctcgtgagcgaatattctaatgtggcattcgctggaaccaacaatgtgttgcagttcaacctaacaaacaacggcgcgctgaatacttcttacattgtcgacttctatattgacggcaagaaggttaacagcacgcagattgcactcaactctggcgagagctttggccagtacttcatcgatgatacaatcaggccagttgacgcatccacggtgaacggcgccgccaatgcgaaggtgaactacacagtcctggtctcggataaggataccgggctcatattggatgaagtgaccctcacgccttctgttctgtataacgggaacttaggcaaggacttagcccatcccccagaagaaatcgtcctatttgacacaatcactgtcaacggggatgtgattatcgatacattagatgactctacctatctgggggctaagacaaccggacgtactgatgaatggaacctcaccgttccttcagatgctgatttcgaagtggcatacctgtatgttgcatacaactgggataagactgccagtgggatgcctgaatggaataccaccttcaatggtgtaaatgtcacgcccgtggcgcactacagagaccaatccaatatgggaacctatggcaaatatgggtacggactgtacatttatgatgtgtcagacctcattaaggccggtctaaacacattcacccttggtaaggaaaacgggacgacagcggtatatccaagtactctggtggcactgtataatgtgaacgagtcaaatgttctcacgaccgtttccctcttcaacggtgccgacctgctctccaatgccaacaacttcttaaacaggactgtggccagcaataatgtcctggagctggatttcactgtttttgatgagatcctatcctcccaactctatgtctttgcggccagcgctcaagccggagaaggaaacctgattgtaaacaatgagacattcactaatgtctggaatggaacttcgaattccgtggatgcctatattgttgatctgggaaatgacccttctttatccaatgacgtgtcatttgtggctaccgggtctacaatcctggcactggagcagtttgtcgtggttaagtccaaatatcagaccagttcggacttgcagaagctcatcgatgctgcggagcccggatccaccttggatctgggtgacaacgtattccaagatgtggctaatgtagtaatcgataagaaccttaccatcaaaggcggttccataatgggcaaagccggggagaccatctttgtaattcccgccaaatccgccaacggtccagatgaggttaacataacgggcgtggactttatcgtggaagatgcaaatgtcattgtgcaggccactgccgacaatggaagtagcccaacaagtatcgacactccaaacatccgcatcagtgacaacttcattgacatgatagacggaagtgtggtgcctgagagtgtgactgtattgaagctggactcggaacggggagtccttgcccctaccggtgagctcaaggtcactgacaacgcaattgccgctgggatcaagccattcgagtttgatgttactggcgtgtccaacggcagcgacaccaatattccagaaggcggtaacattcccgctaaacaggccagcgtgatccactatcaagatatggaaacaactgccgtgaactctaagattgaaggacgggtgggcaaatacttcgaagtcaacttgacagacacaaatggaaaccccttagccaataaatttgtccagataggtttcaacggggtggtgtataacagaacaacaaacgagaccggcggagtcaaactccagatcaacctggggtacaaggggacttacacctttgctatctcctacctcggggatgactactacaacggtagctttgtggtaagcaagatcaaggtaagcacacagaacaccaagcttactactgctgcaaagacctacaaggccagcgctaagacaaaaacattaactgcaacactcaagtcaagcgtgtacaacaaacccatcaacggtaagaaggtaactttcacagtaaacggcaaatcctactcagccactacaaacgctaaaggggtggctactgtgaaagttagcctgtcaaccaagaaaacctacagtttcacagccaaattcgctggagacgatatgtacaccaaatcaagtgtgacaggtaaggtcactataaag

SEQ ID NO: 16766 - DNA, 6801 bp, synthetic construct
  source 1..6801: mol_type = other DNA
ctggaaccacaaaacttcacagtgttcgaaaacccatactctgagctggaagtaactgatgacggccccatcgcctctggggaaactgtcaacatcacagctaccctcactgacttccagggcaaccctatagagggagccacccttgaggtatatgacaccggcgtatggattgccaatatcactaccaatgccgaggggattgcggagacctcgatcgacaatctgggatatggtctgcacgacatcactgtgattttcaatgacacggtccacgacgtccagactgagaccgtcacggtcagtgtaacgcccaagaagggaaccttcacagacttgcaatacctgatcgacactgctgatgggagacttgtcttgccatacgacttcgcttttgatgcagcttatgatgagcagttcttcttaacaggtgtgctggtggacgataacattattatctctggcgcgggacacatcatcgacgggatgaagaaggcaagaatcctgtacatcaatgccccgaatgtcaagatatttaatgtgagctttgtcaatgggaaatctgatgtcggggctgccatttacaccgaggctgattatctgctggtggacagctgttacttcgcaaacaacgaccctgaggctggtgctgcaatctatgctgagagcggggtaactgatgtggaggagaccatcttcttcaataacactgctgtgaacggcggtgccatctatgttgagtccggtgctacactgaacgttgctgattcagagtttaatcagaacactgcaacctaccggggtggagcgatttggagcaatgggacggtgaatgtaaaagattcctcatttgataaaaatgacatcacgtacagagttaaaaacgatgataatggtggagccgccatctttaacaatggcacattgaacgttgtcaattcccgatttacaaataacctcctgaactatgtcataagaactggagatgataatcatcctgaattggttgacggggttattttaagctctggaaaagctaaaatcagcaattcccactttgagaacaacagcggtacctatggttcggccataacggccctgcccataggcactgaactcagtgatttaactgtggaaaattgtgagtttataaccaacctcgcatactgcggggccgccatctatgtggggagtgggacgacattattctacattaatgactgcgttttcataggcaataatgcgacaggtgtcggcagtaacggatatgttgctaccgggggtgccattaagatagctaagaaagctaccgggatcattgcggattctcagttctataacaactctgcggctaacgggggagccatagatataagtgctactagtggtaatactgcatcagtacttatcgacagctgtgtctttggatataatgttgcagaccaggggggagctatctacattgataataggacaacagtcaacctctatgacagcacactttactacaatgaaggggaagccctcaattaccacatctttttgaatggagacgcaactctgggctttgaagggaataacttctatacaacaatacctaccattgtggcagaagacacctacgcctacggtgaaaccataaccattaatggtacattcgattggggagtgaacaacaagcccatcaatatgatctacaccatcaacggggcacccggcaccgcagaggtggttgatggcaattacacaatactgattgacaatcagccagatgtaggggattacaccattgtgattactgcatttactgatgagaacggaaatgtgtaccatgtagaaactgcgcagaaaacaatcagtgttacaaaagcaaccccaatcctgtcggtggaaggtgatgaatacttgatgcccccgagtgatgatgctactgttaccatctctcttaccgataaggacggaaacggtattaagggcactgtgattgtcactgtggctggtgagacctacttggttgaaacggacgaggatggggacggcgagctcaccatcaatgacctgcctgcgaccacttgggccattgacgccaagttcataggcaacgacaactataatgaggtggtgaacgacaccgaagagattaccttcatcgcggatgttgcatatttcgacataatcatcgaggacggtgtttacggcgataagctgactgtcatagtggaaaacgcaacggacatcgacggcaatagccttactggaatggtcacaggcatgatttctacaggcgatgatgacatttcattcattgtgtatgtgaataacggtcagggaaccaacacgaccactacggctggcggagtggggaaattcacgggggatgcatacttctatgattcaatgatggaatttatgtccggccccgaagagtgcagtgcatatgtgagcccagctaatgccacactttatctagtgccatgggacgcagatgatctatcatcagacattgcctatggggataccatcgagttcggcgcggccgtgtttggggtgaatctagaggaactcaacggtactgtctattatatcataaccgagctgaataaaaaaggtgagatcgcgatcgtcaacggatctggtgcggtgaacctcactgatattcttgacgttggaacctacacagtcataagctactttgtagatgacaaaggcaactacgacccagagtcctcagtgaactacactaacttcaaggtggccaaagccacccccaccctgaatgtagagaatgctcagcaagtgtatgccgacaccaatacaattacattcaatgtgacagggatcgacgacaagggggttaaaggtacagtgatcgcgattaagcccatttcagaggatgtgtcgggtgcaatctacgatccggaaaccggtctgggagaactgacattcaatggtttggtggtgggcgacaatccaattgtggtcaagttcttgagtgacgatgataactatgcaaatgcagagaagaccatcaacataacaatcactcaagctacactggccatcgactctacaataaccacccaggaaattgtgtatggcaaggatgttgaggccgatgtgaccgttaccggcatagtccaggaggatactgtaattgcaaatgtcagtctctacgacaacgctactggagaactgctggactcctttaacattgccctgggcttggaggacagcatctccttcgaggacctggaggtgggcgactactactacacaatcgagtttacaagcgaattatacgccggagacaacttcacatctgaagtattcactgtaaacacagccgagatccttgatctggattcttccaatgtagacaatgtctcctacggcgaaggaatcgacatcaccgtgtatgtggatggaatgattgaaggagacctcattgaagtgaactttaccgtggtggacgccacaaccggggacgatgtattcaatggaacttacaacatcagcaacggggacgtgatcacagtgccccccttagatgtggggaaatacagctatagtgtctccttttatggagatgataaatataacacaggcggggcagattccatcgctgcggtcggaagctttgaggtattggacatgtcggacgtagatgtgctggtcactgcagacgagagcatcacttacggtgaaaaggtcaccgtggagattgatcccatcgttagcgaagggggactgcctgtgacaggtacagctaccatttatgtgtatgatgacccagcctctgtagacccggtgtatgtgctggccgatgtcgagctggataaagacggcgcgactgcagtcctggataccatattgcctactggcgaatactggattgtggttgactttgagagtgatgatggctactatgatggccgaggcgtgaccagtaccattgtggatcttgctctagccaaactgtccatcgaccccatcaccgttacctatggcgaaaccatccccattacagtaacagctctgggcaatggcggggagctactgaacgggaccgtggagtttaagatctacggtccaggatttgaaggaacagtcacagtcaagaatgggactggagtaaccaatatcacagagaggtttgatgtgggaacctacacgatcatagccgcctttggagatgatggggctaattacgagggattcaacattacttccctcgagatcactccggccacccccatagtcagggtgactggaagtgaagttgaatatggcgaacccagcactgtgaccgtcagtgtcagtgacatcgacggcatgccactgtccgggaaggtcatcgttactgtggactgggtcgttgacgggctgacccaagtgattgaccttgacgattccaatgaggcttcattcgatctcagcccatatgtccatcagggaacatacgacgtgactgtgacctacattgccaacggcaactacggcgaggctgtcaacgacactgaaacagtgaatgtgacggcttccaccaccgctacagtgaacgtggaggtgccagaggacgtctcatacggcgatgagctaacaatcaaagtcactgctgaggacggcgccggcgaacaaatcccgctagaagcagtcaatgtgacggtgaacggtgagaccaaggagtaccctgtagatgaaaacggcacggtaaaccttggcgttttgcctgccggagataatgagatcaccgtagctctcgatgacgggactcacaagcctacaaagactgaagccacagccaaggttgctcctgccgaggctgtggtgtttgtggacacagacaatgataacccaagctatggagatgtcgtggttgtgacggtcaatgctaccaacaaggacaaacctatcgatgccgatgcatgcctcgtggtcgacggctacctcatcggctactatgaccttgaagacggccaggttgaaatctctattaaggacttggcccctggcaaacatgagatcgaggtttcggtcgccaacggaaactactctgaaggtagttacggacgcgcaattgtcaatgttgataaagcaacgcctgtgatttcagccgagggcgagacagtcgaatggggggaggtggccactgtgaaagttaatgcaaccggggcaaacggcgagaaactgaacattcctctagtggtccgcgtcatctgggaggtttctggtgtcgatgagctcattgaaattgagaacggcactggagaagctgctttccagatctccaactatgtggcccctgggacgtacaatgtgacggtcatattcctgggaaatgatgaatattacccagttaacaacacagaggccaagattatcctgaccgaaccaaagactgttgaaatggaggtgtccatcacccctgacgagtacggcaaagcgacaaatgtgactgtcacccttaaggacgtggccagcaagccactcgagggctcaacggtcaccgtgactgtcgacggcaaggagtatgctaacgctacaatcggcgaggacggaaccgtgaccgtccctgtggaaggattagaggccggcaaccacacgattgccgtcgactttgatgacggtgagcactcccctgtgcatgaggaggaaaacatcgccattgagccatcaacggatgctaccgttgaggctacggtgaacgtgggcgagaacgagaccactgttgatgtgattgtgaaggactccacaggtgagggcataaatgggacggtaatcgtctatgtagacggcgaacccgtcgccaacactacagttggcaatgacacctcgagcgtgtccattggccagctggcccccggcgaccacacagtggacgttgaatttgtgaacccgaactatgctccaacaagctactccactcatgtgacagagtctacctcactcactaacatgacagtgaaagttgacaagaagaatatcctctatggtgagtcagacataacagccaccattgaattcacctccgaaggcaaggccctggacggtgtggttgaagtattgctcaacggggaagcacagaacgtaactgtaaccggcggaaaagcaactgttaaattcagcgacctggctgcagatcactacactgttgtgagtaacttcgctggaaacgctacatacgctccttcaagcgactcagcaaacttcgtggtggagcggaaagccaccaagtttaactacaacgacatgaataccacagcagtcaaccccaatgtggatggacgcatcggcgaatatttctacttccagctggtggaccaagacggaaaagccctggccaacaagagcgtctccatcggattcaacgggaaggtatacaaccggacaaccaacgagaccgggtgggctaagctccagatcaaccttaggatcgtgttcgggtacacctttgcaatctccttcttaggagacgacaactatacaggcgcatttaatgtcgcccttatcaacgtgagcgcccagactcccaagctatccacaagcagcaaggtgtacaaggcctctgccaagacgaagacactgacggcaaagctcctgacaagctctggaaacgtggacaaggggaagaaactaacatttaccgtgaacgggaaatcctactctgccacaaccaacgataaaggtgtggcatctgtgaaggtcagcatctcccagaagggaacatacagttttaccgtcaagaacgccaaggacaatacatatgcctctgtgtctaagactgcgaagctcgtgattaaa

SEQ ID NO: 16767 - DNA, 6678 bp, synthetic construct
  source 1..6678: mol_type = other DNA
aattacagatatctctctactcgtctgaataatctgatcataaaggctgaggacggcgccgaagtaaatgtggatctcaggggaatgaatcaaaacagtttgtattggactttctacggggacaatgtaacggtgagcggcattaactttatgaatgccaacatgacatcttacaaccttaacaactatcacgctgtgctaaaatttatcaactcatctaattctcgggtggaagattgtagtttcagcaatttgaaatcctatggaatcctggcaggaaacagtactgacgttgtcatctccaattgtaatttcacaaacggcagttctcggatgttcagtatcaccaatagcagtgtcacggtggaggacagtatcatgaagaacttctcgaccagctacattcgcaactccaccttcacgatggtgaatagcaccgtgacagatttcaatgacgacgacatctttaatttcgcaaacaccgatttggatattagggacaatacattcaagaacctgacattcccaaacaagaccaactttcagcgttttggagtgttctatgcctgggatgataatgccggcattagttataatttcatcaacaacacctttgccaatttcacgggcacagatgcttacatgatctatcggtcagcatcctcgtcagtcaaaccaatgtgcaaggtgaacttcacagacaacaatgtgtccaacgtctctgttggcgtgaatatatactacggaaacatcactgtggagaataacagcttcgatcacatgagtccggccaatactctccggttcagctattcaaacatcgacatcagagacaacaactttacagattctaactctacccacgtttactcagataggtgcaacggtacaattgagtacaacaatttcattaacaactccgccctgcctgtttcagctgagtgggggaatctgaatatttcctttaacaacttcacggacaacaagggcaatttctctgcaggggccatccaatctactggagtggtgaacatctttaacaatactttctgtaacaattccgctcgcgttggtgctgtgaacgttgccagcattagtagtaataaaaccatttacaataacacatttgtcaacaacacaggggttagcgggaccctgtacgtcaatgggaatgcaacagttcacgacaaccggttcatagacaataatgtgagcgagaacgggggagccatctatgccgcctacgataatagctataataactattataatatctctgctaatatcactgacaacatcttcgatggaaatattgctaataagggtggtgccatctactatgaacaatataacagcgcttatggcctggataacttggccaacaacacatttgtcaacaacaaagccgagtacggtggggcaatctattcaaataagacagtgaacgtcactatctcagagaacgagtttgtcaataacagtgcaacaattgggggggctatctttttagacaactatacctcggcctttaacactggaacaaacattactctaaacaatttcacaaacaacagcgcacagagtgcgggggctgtagtggtttatgggaacaacaccaatgttatcggcaacaactttgtgggaaacaatgcgacacgctatggggggggtgccctggtgactgatggtgcaaacggactcatttacaacaacacctttgaaaacaacaccgcattcctatatgccggggccatcggaacaaacaactctaagatcatcaacaacaccttcactaacaacaacgcttatcaggctggggccattttaacaatcaattccacgatacacaataacacattcagtggcaatgacgcgacaagagcgcccagtgtgggctacatagacaactacaactacactgtgtcctcttactacgtgtactactgtagtagtgaagactgcagcgggtgcactgcgtgcgaatcctgcacaagcacaatcatcgaccctataaccggagcggagatcaaggtaatcaactgctctaacggggatgtgcccgagtgcatttgtgaagattccgtggcaacactgtataacattagcctactgtacaataatgaaggtctcaatcttgatgaggatgtgtatgtgtacgatgagagcaccatccttcgcgtggctctcaacaataatgatatgtacttcctatacgaaaacgcaagcattccaaacgccagcgagtatcactactgggcctactgcattgaacagaacaactctaagccctggcagtggaacggaactacgggtgttcttgtggatgacttgtactttgtaagaaacagcctggacggctcgtatgttggggattacattaaggtgctcgtctcctacttctactttaacctggacgaggatgtctataacctgaaggattatgtatacgtatttaccgacacggactatcgggctaacacagacagggtaattcgacgagtgattaaccttacagaaagagaggacacatctctcgtaaacggcaataactggatcaacggagtttacaactgtctgtcattccatagctttatcatgcccaccacacgacagaacctgattctcatcaattcatgtatggctatgcagactccagacttcaatcctcagaaaatagccaacaaggagaatgtcggcaccggggacattgttaactacaccgtcactgtgtacaacaacgggactgtgtccctgcacaatgtgactgtgaccgaaaggcctaacagcatgctcacctatctaagcttcactgatttccgcaatcaagggtgggtgcagaccggtgagatgacttgggtcctgaataggcctctgaaggtccatgagacggggacattcaatataaactttagggtcaacaacgtcacctatctcactaatatcacaaactacattgacgtaggctgtgatgaggtttcaaacaaatctgcctttacccggaccgaaaccaaatggccacgcatacaggtgcagaagatcactctggaccagaatgtgacgccaggctcaactgtaagattcttgcttctggttaagaatatcgggacccttgaagcaagcaacatcactctggtggacaattttaatagaaatgaactggagtacgaatatagatgggatagctataaaggtaactggtctggaggacacggatgggggggatccagctcgtcttggcatgtcgacacactctacttgaaccaggtcctctatccggggcaggaggccggagtgattatctacttcaaagtccccaacaatgtgaccgtggggtctgcttataattcagtaaatgcttaccgcaacggcacctcggaggggtattcctccaattacacaattatacaacggccttacttttccatctggaaaaccctggttagctcaaaaacttcaaccataggagaggaggtggtgttccagatcaacgtacagaataccgggtatgtgaatctgacgggtgtgtatgtagaagacatcctgccaataggcctgaaatatctgaggttctacaatacagataaccataactggacccattttgtagacgaggatggaaaacatagattcctactccagaacacgcttcctacctactactccgacagtcagaattacgtggcccgactgtatatcgtctgcaacgccacagaatatggtaattggtacaacctggctacaggctacaccgaacagacaaataagagtacctcgcaggcaaatgtgacaataattccctttggggtgtcaattgagaaagtcagcaataatccaatatcacaggttggagaccaggtctcctttaccattagggtgaggaacacagggatatacaacctgacggatgtctatgtaaatgaaacaaggaactcctacatggtcttcgatcactttgtggacaattccggcaagtggattctgaatgagtcttatgccacttcaggcgtgccctcctggaattataatggtacgtttgaagtgggagccgtgagcgagtttgacgttttctataatgttactaatattaattactacggaaacataacaaataccgcttacgtctcttccaaccaaactaccaacaggtctgtgtccaatcagaccgctgcctacaatattaaggtgcgtaaaatcagcaacaatgctaccgcaagggtgggagatcaggtttcgttcactatccagatatcacgggacggctactcttgggagagtccgttctcattgtatggcattcatgtgaaagacctggtgcccgatggcttggtgtttgaccacgctgacaacagttactattggatctacaatgaaagcgacgagacatggtactatcgatctgggctgacagcaggcagaaccatcagccttaccttgtactttaatgtgaccaaggcagccaacataaccaatgtggccatcgtcggggtcaataacagtacagtgaaaactgccaataatacgacaaacagtatctaccacaacttgcaggtggagaaggtcactttaaacgaaaccgtgtacccaggaaatatcacagaattcctcgttcgggtgaacaacaccggtgacaataacctcacaaacgtgttcgtgaaagagaacatccccaacggactggtgtactatgattatattaataagacgggcaaatggaattacacggaggatgacgacggacctatatggctctatgatggcatccttgcgccaggagccttcggtgaattcattatacgattcaatacaaccgtacctggcatctttgtcaacaatgtcgtagcaggcagcaacgagacttccaataagtccactgagaattccaccaaagtcttgggtccaatcatctctgttggaaagatcacgctcaacaagaccgtatacattggagagctaaccgagtttagaattaaagtctctaatgatggggactgtaatttatctggcgtatatgtggtggaatacatcccagatggcctgaagttcgttgagtttaaagatgaaagtggtctttggacttacaatgagtccagccgtacattctattacaacggaattttagaacgggatgactccctggagtttgtcgttgtgtttaacgcaacaagagcaggcaactttaccaatgtggtgcatgcaggctctaacgtgactaacgaatcagttgcaaacaacactactgaagccctcgatgtaaggatggacatccaaaaggtcaccttgaacgagaccgtgttcactggtcaggagaccggctttgtcattgtcgtgtccaacaccggacttaaggacctcactgatgtccgcctgaaggaaatttatcccgatggcttagtgtactcacgcttcattgacgattcaggcaagtggtttaaccgcggtgattactggatctataatggtgttttagctgtgggagaaagcactaacttcacggttatcttcaacaccaccaagagcggcacattcaacaacacaataatcgtaagcagcaatgaaacaggtcctaagaacacttcaaataccaccaaggtagttgtggccaatgtgaccgttgcgaagatcacactgaatgagactgtcatgagcggcgagcaaaccagcttcgacatcgtggtcaccaacgacggaatctataacctcactggtgttgtcgtgaccgacgccttccccgaaggcttggcctacagcggcttcgtggacgcctccggcaagtggatctttgatgattccaaaggcaatgcttggatttacaacggcacgctggctcctggtgagtccgcaagttttacagttgtctttgacacggatgaagtcggtgagttcactaacatagtcaaggtgtccaccaaccaaacccaggataagaacgcgtccaatatcaccaaggtgatcaagctcattccaaatgtcgccatccaaaaggtcaccctgaaccggacagtctacagcggagagcaaaccagtttcgagatcatcgtgcgaaataatggggagatgaaccttactgccgtgacagtgactgacgccttccccgaaggcctggcttacagcggcttcgttgatgcttctggcaagtggatatttgatgatgctaagggcaatgcttggatttatgacggcattctggcgccgggtgagtctgcaagctttacagtggtctttgacaccaatcagacaggcaactttaccaacattgtaacagtaagtagcaaccagacaaaagagaaaaacgcatccaatatcactgaagtgatcattaagtcggtgcctggcattgagattataaaaatcacaatcaacagaactgtctactccggggagcagacgtcatttgacattgttgtgagtaatgacgggaacgtcaatttatccaatgtgactgtcatcgacagcttccctgaaggcctgacctacagcaatttcattgacgacactggaaaatggtttaacataggcaataagtggatttataacggaattctacttcccggtgagtctgctggtttcagaatcgtctttgacaccaataagtctggaaacttcactaaccacgtgaaagtcacaagcaatgagactggagagaaaaactcatccaatgttaccgaagtgatctttgct

SEQ ID NO: 16768 - DNA, 6927 bp, synthetic construct
  source 1..6927: mol_type = other DNA
atctttattggtgaagggacttatgttgaatccaacctcacaatcagcaaggacctgaacatcactgcactgggagaggtgatctgggacgcgaatggtcagagggcattctccatgtctacagggagtgtgtccatttcaaacatcacattcataaatggtaactacacccgcaatgggcacttgatctactgtgccggggacagtctcaagttcgatgagtgtaagttcctgagcaacggtggaaatgtaacgggtaccaacggagtcatctatgtggaactggccagtgcaaacttcaacaactgttactttgaaaacaacaccgcagggactggaacaagctatgggttgatctccgctaaggattcagtgattatagtggatggctgtacatttgttaacaactttaataagaacggctgtatttatgtaagcggatctaatattgggtccatggccgtcataaataataccaaattcattggaaacaatgctacctctgccagcggcggttcggggggcgctatctatgccagcgggagtatggcttaccagtactctaacgggactgtaaggccgggtgctcagtctgctgtctatgttattgactgcgactttatcaataacactgctttcggcggtaaatactacaacgctgaaggtggcgctatctttgtgaatgcaaatgccacattgtatgcatcgaattcaagattcatcgataatacggctcttgattatgaggagactaataagtcagggcgtggaggcgctattgcggccacaacagggaatgtccagatttcaaattgcatattccaaggcaacactgcgaacaatgggtctgtgatcgccatgaagtttgccaacaaagaccttacaactgtgaatgtcttgagcataagcaactcggtgatcatgggcccgggcgaaaaactgattgtctctgacttcactaatggatctctggttgccaacaataactggtgggcagcgaatgaaaacccatctgatagggtatccgaaggaatcaccgtggacagttgggtcatcctaactgcagatccaagtgagatcaccggaacccttgacgagatcataccaatcgtggccaacttccggcacaccaacagcactgacggaactatcggtgatctggaaggagaattcccagagctagaagttttcggcatgactttagatgagggggagattaccgagtccaacctcacggtagacaatgtcgctaccctttactacaccccagaagagactggtgaaaccacggtgtatgcgatctcaggcaatgcaatggtgccaatcaaagttaccataaccgacacgccccagcctgtggccgatgttatctatgtgagtccctccggtgctgataccaatgccgggacatatgaggcgcccgtggcaaccatcgcacacgcagtggagctggccggggccgaaggtgcttcagggttagtcgtcattgaggaggggatctataacgagaacggcatcgtgataaactctgctataccgattaccatcaccgggaacggaactgtgataatccgcggaaacaaccacgtcgttaatggaaacggagccggccgctttggcgatgtaagcgagtccacaagcataataattgtcaacacaacggaagccgttgtgattgcaaacattgcttttgaagacaacattgccgctaacgggggggcgatactcattgcaggaaccagcagttccaacctgttcgatgctgacgtactggttgagaactgtagtttcaataacttgcagggacggaatggcggtgctatctatgcctactacgccattggcaatctaactgtcgccaattgcgaattcacaaacatcaacgccacttgggccgccctgtgcgcatatcaggctgcctatggcgaagggctcacggtcgagataaaggatagtagctttacaaacaactctgccaacaatgctcccgccctgtacttgcaggcaactaatgtggtgataaaagattccaactttacagacaacaatgccacctaccacccgggtgctatctacctgcagaacactaccgcgacaatcgacaattgtatagttgcaaacaactctgctaaatacgataaggcagccattgcaatccatggcggcaatatccagtacaacccagtgattgttaaaccatctgaggtgacaattacaaactctattattgaaaataacatcgggagggacaaggccgcgccggccatctacttggagaactccatcctgaacatgtcgtactcttcggtcgtcaacgaaatcaacattaacaataccgtgactgccacctatggagacgagaaacccggacttgtgttgatcaacaacaactggtggggaaccaacgaccccagcaccaccatattcgggacaaacatcaccatggacaattgggtcatcatgaatgtcgaggcaaacgctactgaaatcctggctggagaggaggtgaaactgacggtggactttaaccatgtaaacacgaccgccggtgagatcgaagaattgaccgggggagtgattccccgagagtcctacagtgtagctctgtctgtagataatggtactgtggcccccgagacattaaccattgctaacggcgccacaggcgaggccattttcactgcagctaatgctaatgcacttataactgtcacaagcgaaaatgccgtggaaaccatattgatcaatgttggagaacagcccgtgccattcacgggcgttgtatatgtctccaaggatggtgatgacgctaatgagggttctgaagatgagcctgtggcatccctggcccgagctatcgaaatcgctacagccgaggaaggatctgggcaaatcatcattaaggaaggcacatacatcgtggacggatacaatatcaccaaagacttgaccattacgggggagggagatgtgatcctcgatgctcagaaccaaggcaacagattattcaatatggcctatggtaccacggtgtccaatttcgagctgcacaatctcgtgctggctaatgtaacggccatgtatggcgcagttgtttacagttatgccgctaatgcagtcctggacaacattacagtggccggcatcaatcatgagatggctaggctcatttcaaactatgggaatctcacaattaaggactctgtgtttgcaaacaacactgtcagcggcataatcacccactcgggaaacaataatctgaatattgtcaatacaatatttgaaggcaacaatgtgacatatgattcatctatcatgggggtggtttatgtttcatcaggcagaggcaacataacaatcgaggactccaaattttatgacaacctggtccgccagtccacagtacgcgggtacaccgacaccaacattacagtcaaggggacggaattcattaacaatactgcagacaactctccatattactgctctggcggagctatttttgcccaggctaatctggacgtgacagagtccatattcatcaataacaatgctaggcgagagggaggcgccatttatatcggaatcaatggtgtggccaacatcaccaaatccgagttcatcaataacacaatctatgataatgagtactatggagacgcaatctacaccaagggtacaactgccatcaattactgcatattcttgacaaatggcacaagatatgcagtgtacaatggcggatccaaagaggtcaatgcccaatacaactggtggggcactaacgacgatcctcagggatttgcctactcggccgatgcatctaactggattattatgactgtgaccgctccaagcacgcaggatattcaggcaggagacgaatatgaactgacggtggacttcaaccattacacggacggcagtgacattttggagctgccagatagcctagcgcaagaactcactgtggaattcacttctaccacaggcacatttgacaatcctgtagtaactaccgaaaatcaggtggccacggcaaagtacacggtggtggcaggggaaaatagtatcacagtcaaatccaccgacgctgtatggaacaccagtttcactgcgggagagaaggccaaggcgaagatgaatgtttcaatggagaacaataccattatcgtcaccctcaccgatgaggagggagccccgattgcaggcaaaaccattagtgtgctcattaacgaagacacactgtccaatgaaaccaattcaagcggtatcgccgccatttcacttggcaccctggacgctggcacctatccagccacaatcagcctggccgactccgagtatcaagctccagagctcactgtgtttgtgctggtggaagagactctggtggacaatcctataggggcagtcatcgaactggccctggcggaaaatggcacttccatcgaggtgaccctcaaggacattaacggtcagcccattggcgacacgatcgtgagatattacattggaagcactgatggagctctccttcctatcgacgcaaacgggaaaggatcctttgacattgacaatacagtcaatcagaccatcaaggtcagctacaccaaggaaggcacagaatggtcctcatattatgactttatcgtgaacaatgaggtaactcctgttcctgttgccaataacgccaagttcgatgtcattgtgcgtgaggacagcattgatgtattcctgtacaacgataacctggacgatttcgagggcgctaagattatggtgaccatcggtgaggaggatccagttgaatatatcgctggagagaacggaaatataaccatccccatcaatggcgataccactgtggagctgtcctacactgatgagaacggagccaccgtctaccacaccgttaaggtttccaccagtggggtggacccctctgccgaaattgaaattatcgtcgagtctcataacgacacttctatcgaggtcagcgtgaccgttgatggggatgatgtcagtgatggtgagatcacctattacatcggggatgatgacgatggcaccgtggtgcctattgaagatggaatcgctatcataccattcgacaatactgtaaatcagaccatcgaaatcacctactcagacggggacgccacagagagtgtatactacacgatagtggccttcacgcacgaggtgcctgtggagccccccgtggcgaatggcagctttgatgtggagacaacggatgatgctatcgtggcgaccctcgtggactctgacggtaaacctattgctgatgcaactgtgtcggctatagtcaatggcgaggagcagaatttcacaaccgatgcggatgggaagctaagcgtgccgattgacggcaatgcaactgtggagcttagctacacagatcccgaaaacggggctgtcctgaaatatgtcaccgatgtggtcactaaagaggttcccattgaggttcctgtggtggctaacggcactatgagtgtagaaacaaccgatgatgcggtggaggccaccctggttgacagtgacggcaaccccattgagaatgctacggtcaccgctgtcatcgacggtgaggagcaaaattttacaactgatgccgatggtaaggtatccattcctgtcggtgagaacgctaccgtggagctttcatacactgaccctgagaacggtgccgttgtgaaatacagtaccaaagtcgtcactaaagaggtggaggttcctgtggacgtgcccgttgtggcgaacggcacactgaccgtggaaacaactgacgacgctattgtcgctacactggttgacagcgacggcaagccaattgctaacgccactatcatcgcagtggtcgatggcgaggaaatggaaatacctaccgacgaggacggtaaatgcagcgttcttatcacaggaaacaacaccgtggagttcagctatacagatcctgcaaacaacgccacagtttcatactccactaaggtggtcactgaggtcgaagaagtgatcgtgcctgttccagtcgtggccaacgctacaatctccttaagcactgaggacggcagctcaatcgttgcgaccctaaaggaccttgacggcaacgccatagcaaacgctacacttgatgctaatgtcaatggcgaagagactaagttaactacagatgcaaacggaatagccaccattcctgtctctgcaaacacaacagcagtggtctcctacacagatagcaacaaggctactgtaaccagctcaatgagcctaacagtgatcgagaccatcgtcgaaatcaacaagacaatcgaggtgcccccagttagaaacgcctctcagatcgtgtgcgaagacatgaacacaattgcagttgccaaagatgacggccggatcggagagtacttctacgtaaagctagtggacgcaaacggcaatgcactggtcaacaagtccgtgcagatcggattcaacggccgggtatacaaccggacaactaatgaaacaggggatgtgaaactccaaatcaacctcgcctacaaagggacctacacatttgccatcgcctacctcggcgatgacaactacaacggttcatttgtcgtgtcaaagatcacagtaaaacagcaaagtcctaagattaccacaacttccaagacgtataaggccagcgccaaaacaaaagcactcaccgccacctttaagacagccaatggaaacctaatagctgacaagaccattaagtttactgtgaacgggaagacatactctggcaagaccaatgccaagggggtggcaactgtgaaagtaagcctcaacactaagggaacgtacagctttacagcgaaatatgccggcgacgacacctttaaggcaacgagtgccagcggtaagttaactattaag

SEQ ID NO: 16769 - protein, 68 aa, synthetic construct
SGDPDGLEKSAEDANVGEDVEAPVMEAPFPDYTYEPLEKIGEIGVLILGALITLIVAWGIGYALKRSE

SEQ ID NO: 16770 - protein, 177 aa, synthetic construct
FNNTVNIYLDGENVSVETQTFEDIDSNSLNKDICSYTLNVMNNTTSDVETLKNGVEKLCYQHGLEDAEINIDSSLGHDQIPIIVHVDGTSMLPTLQNGQTVLVNKTHDFEVGDIVVAESKEYGGIIKRVEKIDENKVHLISDNKNISYEYIDGALYQIKGITTWVDISDVNGVVIDY

SEQ ID NO: 16771 - protein, 218 aa, synthetic construct
ADPLTDNQLNPTIFYLDFNHGALNDGFKKEFDLFEYVPTFDSVDLYNDGENVSVSFYSLNPTIDVDNLNDEIIDYTFEVMEDPKANITTLKDGIRNICSEYGADDVKINVDSVIGEDEIPVIFTTEGDSMLPTIKSGDKVLVNKSHNIHVGNLVSANSSEYGPICKRVADIDGDSVYLVSDNKKVTREYYDDYYVEYKGITTWVNIDDIDGVIIDIMN

SEQ ID NO: 16772 - protein, 241 aa, synthetic construct
SVGTSNGDLNGQDVQLAAAASLKNVYDEKLIPMFEEKYPGVKVTPTYASSGDLQKQIENGLKADVFMSAGNKQMDALINESYVDNDSNVKFLENKLVLIVSADSNVNISSFEDLKNVNGTIAIGDPESVPAGQYANESLHNLGIWDDVESKLSLGTDVTAVLNQVAQGSADCGLVYTTDAKSSDEVKVICEAPEDSLKDIVYPVAPIKDSEHADAANKFMEFLQTPEAQSVFEDYGFTIHE

SEQ ID NO: 16773 - protein, 252 aa, synthetic construct
CSAGFLDFLGGDNATDDSLNGKEVNLAAAASLKNVYDDELIPMFEAKYPGVKVTPTYASSGDLQTQIENGLETDVFMSASNKQMNALADEGLIDNDTNLQFLENKVVLIVPKDSDLNITSFDDLKDVKGTIAIGDPESVPAGQYAKEALTNLGIWDAVESKFSLGTDVTAVLNQVAQGSAECGIVYATDAKSNDDVKVVCEAPENSLNTSVIYPVAMIKDAKDADAAKAFLEFLQTQEAKDKFVEYGFTIHE

SEQ ID NO: 16774 - protein, 261 aa, synthetic construct
NDLSDSNVSSDLTVDSDSISSDDTGSSDTSSDDSNQDDVSQDKTNDKKLSDSQSDSSKDTQDTDDNNTDNGSDKCNLIITKKGNEKVKVGDTVEWTIEVKNSLNTAENISVDEFLPQNFEFKSAKASKGNYAVEIANWDIGNLKENESATLVIKAQALKAGNFTNVANLTTDSDNINGKVLSAKADVEVLSENKKNETPVGPKKNKDNNSTVKKIHKLIKNQTNNTNMTPIDFKKSGNSLFAVIIAALAVLGIFLGRRRIN

SEQ ID NO: 16775 - protein, 342 aa, synthetic construct
SPSSISTDGNTTITDMANRTVNISSSVDRVVATSPPMTTIVYMLAPEKLVGVNFQWTDEELKYVPDQYKDKFPVIGGWFGSQDGNYEEFIASEPNLVIEGIDEGMGVDLSTVEERQEKFGSLPVVAVTDNTNVTKIDNTIEFLGKLLGAEDKANELIAFNDKYLSQVQSTASSIPDSEKKSVYYASGEDGLSTYASGASHGQLISLVGGKNVADTEVKDSGSELTVSIEQVMSWNPDVIIATDEDFYNKVYNDSKWASVKAVKDHRVYLSPQSPFKWFDRPPGANIIIGVPWTAKVIYPDKYSNIDMVGATKEFYSNFYHYGLSDEQAKEILTSSGLKGSDL

SEQ ID NO: 16776 - protein, 343 aa, synthetic construct
LTPSSVETEGSKNITDMLNRTVEVPNGVNNVIATSPPMTTVLYMLSPEKLKAVNFQWTEDELKYVPSEYANLPVVGGWYGTQDGSYEEFIAAEPDIVIESIDEGGDGDAFTVQERQDKFGKIPVLAVKDTTNVEKIGDSISFMGEVIGTEDKANQLNEFNTKYLDIVHDKSSKLVDSNKKTVYYAASSDGLQTYPSGASHGQLIDLIGGKNVADSLNQGNTTSGVQVSIEQVIKLDPDVIITNDMHFYNKVYNDSSWAHLKAVKNKKVYVSPQSPFKWFDKPVGANMIIGVPWTAKVIYPEDYKDINMVDVTKEFYSNFYHFDLNDNQAKEILLDSGLKESNL

SEQ ID NO: 16777 - protein, 352 aa, synthetic construct
SENIVIDESSDSNLVIDHAKDNYLFNGPIKDNYLSSSSISDNYLSKGVLDDSYLSRSDLDDSYLSMDDGKGSIDLTNHNQLSNSDDKQLKTSNLEDEKQLESVNKGDKLLKDSNDNVDLFINMDVKTSLTNKQYNRAGSEVPWIITVSSLNGTSYNTQVRDVLSENLQYLSHNATMGTFDPENGIWTVGDLESSKNASLTILTRLKRDGTYINKAYATTDSNDVNLLNNFLIISIRTGSSKITSNITETSDEREGIQHNVHYASMVDTDFIYRYEEDSSEDDGGNEEGQSEGNSHTKTRSLGNKLKLFNAQNIDYHSLSKNIGGALGFGYNSNGGFLNSKDIYEALFVYDYT

SEQ ID NO: 16778 - protein, 513 aa, synthetic construct
GGGTTERGPGEIVVAAYSHGGEPEAGFDPIAGWNYYAEPLIQSTLLKMTPNGTYAKDLATDYEISDDYKTYTVDLRKDVKFTDGSDLTAEDVAFTYNAAKESGASLDLSALDKAEAQGDYKVKFTLNKSDSTFLDKMAYIGIVPSDSYNNESYGENPIGSGPYKFVQWDKGQQVILEKNPDYYGKQPEIEKITILFAQNEAAFNLAKNGEADIVAVPLEYGKEKLDGYTMYLQDTIDVRGVSLPSVPDTGELSPDDNYTIGNNVTCDIAIRKALNYGINRTALAEGALNGLGYPSYDGIAHQLPWANKEAAIEDGDVAYANKTLEEAGWVDSDGDGIREKNGTKASFKIYYSASAPERQALAVGAAEQAKQFGIEIEPVGAEWDEIYPNEFSQGVLWGYGSTDPSDMYGEYYSSSDFNPARVNNSAVDKHMDDAFAESREDSYKDWSAVSWDGSTGISPKGDANWLWLGEIKYGYFVNDRVDISNDTALLQPHGGDLFSNVYDWTMTNATAEK

SEQ ID NO: 16779 - protein, 514 aa, synthetic construct
GSSTERADNELIVAAYSHGGEPEAGFDPILGWNYYSEPLIQSTLLKMTRGMKYENDLAKSWEANSDFTEYTVKIRDDVKFTDNTTLDAEDVAFTYNEAKKSGASLDLSSMENATAVDKQTIKFELNRPDSTFVDKFAYIGIVPSDSYNNETYGANPIGSGPFKFVQWDKGQQVILEKNPDYYGKEIKFDKLTILFEQNEAAFNAAKNKEVDIAAVPLSYANETVDGYNMHLMDTIDVRGLSLPVQNNTGKLSEDGNPIGNNITADKSIREALNYGVNRTAICKGALNGIGVPNYDGIAHLLPWANNESAIDDGDVDKAKDILEKGGWKDTDGDGIVEKDGKKASINVYYSSNAPERQAIAVTIAEEAKEFGIEVNATGSNWDEMDKIKNTDPVVWGFGSTDPSTMWSEYYSDQATVGYNNPALINNSAVDKHIDNAMKSDRESSYAEWSAVSWDGQTGISPKGDAAWLWVGEIKYGYFVDESLDISNNTELIQPHGGDIFGNIYDWSRVSSIEK

SEQ ID NO: 16780 - protein, 515 aa, synthetic construct
ADIIADNQDSISSNDNSINEIATEDISKDINDKSLSDGVSTGGNNWIVKPSTDGKSDANSIQKAINLDNTKPGDSLLLTDKNFTLEKSVSLNKDLTINGGNIYNQNNLTDLFIIDPKSEGGPKNITITNVTFYVNGNENIVLANGENYGTTYIDLANIKISNCTILPINPDSNINDTVLLNIKSDRTVGQTGQSTGFVLVSGNKLNGINTLKNNDYVLKDDFVIQKADPILNTALICPNMTITTYDKNTNDTPSYYEVKLIDQNVNPVINRTIQIGFNGKIYDRTSDENGIAKVKLTLAYTSVYTFAVYFLGDESYASAFDVSTVTIIKKNATITPKTVSYNVNAKTKTLTATLKDKNNKALANKKVTFTVNGKTYTATTNSKGVASAKISLSKKGTYTFTAQVLQGTISIIQFPKKGKLTLNPLSTNLTVKKYTFKKAATKKIQVTLKSGKTVLKSKKLTIKVNGKTYSGKTNTKGIATITIKLTKKGTYTYTANFAGDNTYKAISKSQKVVIK

SEQ ID NO: 16781 - protein, 520 aa, synthetic construct
FMSGGNTSTRADNELVVSAFVHGSEPETGYDPMYGWGDRGEPLIQSTLMKMNRNMTYDNDLATSWSSNNNFTEYTVNIRDGVKFSDNTTLDAEDVAFSYNQAKSTGNTIDLSSLDNASAVNKTTIKFKLNKPDSTFTDKLLHVGIVPSDSYDNNTYGSNPIGSGPFKLAQWDKGQQVIFEKNPNYYGKQPKFDKLTISFQKNEASFNAAKNHELDIAAVPLSYANETIDGYHSFLSESNDVRGISLPMKNNTGETNEDGIALGNNVTADKSIRLALNYGINREDICKGALNGAGVPNYDGIAHFLPWYNNDSTIKDADIDKAKDFLKKGGWKDTDGDGIVEKDGKKASFNLYYSSDAPERQAIAVAVSEQAKEFGIEINATGSNWDEIDKIKFSEPVVWGFGSTDPYVMYGEYYSNQAGIGYNNPSLVNNSAVDSHIDKAMSEPREQSYADWSAVSWDGQTGISPKGDAAWLWISEIKYTYFVDDSLDISKDTFKLQPHGGDLFGNIYDWTRISPINATN

SEQ ID NO: 16782 - protein, 520 aa, synthetic construct
SMLGTSNDDDPRHIVVTIPGQTGEPEAGFNPLNGWGCGHMEFNPLVQSTLLKSDKDGNFVNDLATGYNISSDGLKWTVGIRDDVKFSNNKSLTAKDVAFTFNEAKSSNSQLDMSNLKEAKALDNTTVEFTLNSPKSTFNYDLRYVGIVSKEDYNNETYGQQPIGSGPYVLKQWDKGQQAIFEINDNYYGDKPYFTQITMLFPKEDSAAMQIAKSGQADVVQVPISGLNETVEGYELVEFFSPRAQGITLPYQNATGEKTTGGNDVGNNVTGDVAIRQALNVGINREEIVDSVYKGHALVETSGIDHQKYNNPNAIIKDNNPKAAKKILDDAGWVDADGDGIREKNGTPATFTLLYSSDDQARQAIATVVSEQAKDLGINIELEGTDWDTIYSRMYKDPAVFQQSSDNPYKTTYLQYHSKDNLSEDNYMNPNGYENSKVDAILDAALRETDLNASYKLWGDAANTGSGYGFGPNEDASWLWIADFDYCYFVKKDIDMGTKPTMGQDYMQNICEWKHTSTTE

SEQ ID NO: 16783 - protein, 539 aa, synthetic construct; identical to SEQ ID NO: 6142

SEQ ID NO: 16784 - protein, 638 aa, synthetic construct
NDLDSNSVNQDNYISDVDSFDGSNSVLSSSNLDSSIDKDNYLNLDSNNNLNLDSDKNSVSGSDLNLNNADLINSVSGSDLNLNNADLINNSTTNDSSNSNNSNNLENLTNLDDSKGASNQKPQKYLIPNDSSIGSAYIQKIIDNAAPGSTIQFTGSFYKNIYLKIDKALNIISKSGTVINSSYRLPVFTISRGGSGTNISGFTANLANSFVEASDVSDISISKNKIFTKRKAIVLENVFNSKIVRNSFLRFETAIDISKSGGLTISNNNITPDNGYNVGISLKDIYRDKVSILNNNITGHDRRIESTGIYFGPNAKNVLIEGNIIDEWYTGVDFPNSVNNVSILNNTLNHNGDGVIINGWINNFTFNKNVVTNTGRVGVLFDYDFYGTKGDFTLEKNFFTQSGQLDLRNTGDQAVTIGENFASRRCVRVAMKNGFSIKTRQNGNGYYFSIVDKNSRGVSGLPNFSATISINGVSYNVNFINSVAYVEVDGASGENDEVLLDVGEDKRKLSDWGETQNLSSSEMEYYKKIYDDLIKSMVEETNNDNQDMKKVEDKNGTGSTPSGGNGGGDSGISDGRSSVSSNGDSSPASAGTSNVAASSASSSAGPSAAQADTPESSTVKSLSLDEETFRVAGVGGLV

SEQ ID NO: 16785 - protein, 662 aa, synthetic construct
ADADVTYINDAADVDDVADEKVAPLTASADAQDIQTKLDNAKPGDTIELENKTYDVDTTFNVTKQVTIKGQDTVIKASGASQGGSGALFIANEAGTAFEGITFINTDGHKNYGEQVSGYAIQLAIENGTVDNCKFIDWSSGVYGKGASFCSITNSYFNGSSEQVTNGGKKEYGTKAINLMGSHDITVTGCTFEGQVLDAISIASNSGNNIMTDNTFIDNCYAIYFGGASTQGCVIANNSFIRCGYCVDDKGNVIFKDLPIISTQKAANGYIIADNTIEANEGSIFMKAESGNTAHGYPSKIGDINITGNTITATAGANPEGITFMYILSNSGPLNPYAPIAIVNNNLDAGITPVTVWYADWDNENGTVIPAADKAVTSINIAEIAAADGTVTVELVDVNGAPQAGQTLSYKIDDGNATEIETDENGKAVINVPIDENATAQTVAVEFAGTNDLAASSAQVSFKNTATKRTATQINANNMSVVTLAPNTGDTNDNYFNATLLDAEGNPLVNKEVKIGFNGKEYTKTTNENGVAQLKINLGYKGGYTFAVAFLGDDEYEASFGVYLINVAAQTPKLTTKAATYKASAKTKSISATFKTEQGSVIANKKISFTVNGKTYTGTTNSKGVATVKVSINKKGTYSFTAKYAGDNTYKAVSASAKLTIK

SEQ ID NO: 16786 - protein, 689 aa, synthetic construct
LSNSNTDSSDNASDDASGSEIVSGINEELESNNLLTEDLSVDDVILQTSFYTSYAVKSAKSPTVLTFKNSTVVKGDKLYIYLKDSSNHGISGEKVIFKFSNSSYTRTTDSNGMAALDIKLNPNKYAFSAIYDGSDNYSASRKDFTLTVAKVNTKLTSSSSVVRGRNLYTYLKDKNNNALSNKKISITISGKTYTVTTDKNGRASLKLSLKTGTYSTKINFAGDKTYNSQSLSKKIKIYTLKTVMTIPSTSVVRGQYIYAYLKDSDGNALSGQKVVMKFDKIYFNLKTDKNGRVALKINTRLGKIPVKASFAGSTSYSASSKSVTITSYVEKTKITVENSTVKRGKYFYAYLKDSKDKGISNQKVKITLANINYTKTTDSNGKVALKIEENPGNYTIKLNFAKTNSYYASSKSLKINVLNNATAKIIAKDQTVLGEYSVRLTDMNSNPLANQTVEITAATVNRSVGSGLPITKKTVVINSDNIYNKATDSQFIKSIGEVLKSKGYKVIINSNIGPNAHCTDAMGAYSDVCIFCIFGGVDSGMFVDMAASWYQNLLKKYDNEVVLGFTHTQRNLATDTWLERAHDDDYSPKNFTGLSYPGTYLNDYDMDYVYGRTATEMANNFIKYAVNGLSIGLNNTVPCNVMEYNVTTGDNGYATITDLLPGDYAVISSYINKTAGYVADTVISIIEVK

SEQ ID NO: 16787 - protein, 776 aa, synthetic construct
SENSISSDINDNSLINEFTASNQINDNIAINDGLSKGDKSQLSESKSIYVSTNGSDDSGDGSEKSPYQSIKHAVSKADDDSIIYLSSGTYNGENNQNISIGKSLSIYGEDSTIIDGEDKAQLFIMNSSAKLSLNGLILTNAYKDGNLSDYGGAIINEGGQLTIINSTIKNSYGNYYGGAIYNNLGRLTIINSSILNNSAIQYGGAIYTLGVTNIQNSVFEKNTLTAEKGVGASIAAGGTITLNNTDFLNNHAIYSAAALLSLGNATINNCSFINQTTNYTAGAISNHGNMFINNSLFFNCRVRFYAGAILAPPSGHHVVTEVYNTIFDYNNAGNHGAVTNNFQDAEITMINCAITNNYIQKNVFYGDIALDDNATVQYCWWGQNNISSYYYSPHSNNEDPGQINASRWLMMTFTSSNGNISADEVNTLTVSIKQYFDNDTKEIYEYNEDINLPLTVKFFDDNKKTIATKTLKNGTASYNYIPVKGVNAVYAQITNEIIEIPVVQKKESNLSTSNLTKYYKNESQLEAKLTDGDNNPLSNKTISIELLGKTYNKTTNENGIVKQNIGLKPGQYTANIIFKDPEYKNKNITVQITVLKNSTSISAKNLVKYYKNSSQLTVKLLDNNKKAMKSKKVKFTIGKNTYTRTTNANGAATFNINLKVGTYNVKVSFGGDDYYKGSSKTVKVTVKTTKMQAKSTKIRKNSNFVATFKDANGKVIKNTKVKFTLNKKTYTKTTNSKGQATLKVSVKLGSYTIKSQYASTKTYGATVFNTKIKVVK

SEQ ID NO: 16788 - protein, 833 aa, synthetic construct
NDLGTVLEDNDNNGLNDLNNDDFINSDVNSDSINKEAISNLKSLNSQDESTSSDSNNSASSNSNSSVASSSNSSASSNSANSNSSTSSNSANSNSSVSSNSTNSNSSASSNSTNSNSSASSNSTNSNANTNNSSSDASKTQTIKLSSQEESALNEFLNAIKTTTKGTIVLKNDLVLNQTISLNNNITIDGRNHSISSLDVTNMFKTFAKITLKNIVFTNYHEIENLRAILNSGELTVLNCQFNGFSYLTNGSAIYNSKKLTVQGTKFNNNYVNNSGGAIYSTGTLTINNSSFNKNHAGKNGGAIYSTLNLILNQSVFSNNSANESGGALYSKGSGLNIKYSRFNNNSASLNGGALYSSSNSTVISYSNFVSNFVEAYDKASNGGAAFIYYGSKIAYSNFTSNHCKTTLTNSSQKKSIQSMGGALFYYGGNHTLSFSNFNKNSVENDGGAVRIAKNVGKFTLNKCNFTNNNASYEDGGAISLATPNITISNSIFKNNFANEDGGAIDTFSLGSYKVNVLIKNCLFNSNTAFKAAGAIYLGVNTVQSIVNSNFTSNKATVAGAFYIESISVSISNCIFSSNKADNVSKKTIYNKQGKVVSHSGGAVFVKNGSTVTIKNSLFKSNKATSGGAITNHGKMVIDKCNFTSNSATNGGALYGGGKTSTIRNSIFYKNSATKTGGALFINEGNVNMKSSMIVSNTAKSYSVYSTVSITLNNNWWGNTLSIKDKSPKTLGLTNVKVSTWLHLKIRAKTTKLAKGKTTTLTIDLRYNNNDKLVSTAFNNPLTLTVSEGTLSSKKVNLKNGKATVKFKKTNSKTAVVKVKLLGKTARCTIKTK

SEQ ID NO: 16789 - protein, 914 aa, synthetic construct
ENIITADLNSNSNELNSDFAYGDSDSEEILDEPSQKLKTGSDNSDFKDIQNLIDNAKENDVIELSGTYTGDSLIVVNKSLTLKSSSSATLDGEFLNELMAINAPNVILDNINFINANYTGLSVNNNYVTIQNCNFDGCINGELGCALIIHGNNVNVLNSNFTNNVANKSSCHHTDGAAIYLIGNDCQIDNCSFINNWGYNFETSSSGGAIWIKGNNIVINNSYFFNNSATAEVGWTFHGEEITYLADGYGGAAFLVGKNVKIINSLFDSSLSHAQGGALYYKSAYDCSIINSTFLNSFSVGEGGVIYLGQNIDGLMIDSCNFINNTADGLDGVLVKYTDLGSVLYASKFAENVVITNSSLLNNKGTSAVYFLGNNLNISNSIIENNNLSTAVIYMNGSMNDNFWSKNFDSADEFKNDCFIIRDNESQVPDTWFNLVCDGLDSLKAKGVYDYNMSFVLKDASLDNHASKISLTNNLPNYHINLKNSAKNKINPNELVIVDNQADFTYDYIESAKDSIDVYDDYNNLILSKKVLSGITYINDSGNDTKDLQDAIDSASSGSLISLSNKTYVLDTILINKDIHISGEENTTVMLSNSSDYIFKISNCSAANYSDYGIAISNINFILDNGDIVALAEAVNGSGSLSIDVASIKITDNSFTSREGVVRESITILELDSQRAVLAPTRNISISNNSLEIGMNPFDFNVKSVINGSDVRVDVGGNLASKKASQIICKDMVTKAIASNVDSRSGEYFNVSLKDSQGKPLQNKFVQIGFNGAVYNRTTNESGELRLQINLAYKGVYTFAISYLGDDECNGSFEVAKITVNPQSPILMANNAKYKVSSTKTLSASFKSMKGSPISGKTIKFTVDGKTYSGKTNSNGIASVKVSLNKKGTYKFTAKFAGDNTFAAVTKSAKVVIS

SEQ ID NO: 16790 - protein, 923 aa, synthetic construct
DISTIPNDEKVSINENDYDTNYYELPDKKLDHLESNDNQNHLEMNDKKLNDGNSNNDFNYIQELINSHKDGDSIFLEDKTYIGNGSPIIINKNLNIYGYGYKNLSDLDIKTILDGNSKSNIFIINKGIQLNLYGLSLINGNTSYEDGGAIYNNGLLSIDSCSISNNNAGGGAVYSSEGSEIEIYNSLFENNSGLLGGALDLENANAIISKSTFKGNRCNGDGGAIYNNIGKLTISNSTFSFNKGARGGVIYNNHGTLSIYDCEMFLNSASQLGGTVKNWGSCEIYNSTIKNNTADMYGGGLYTFEFKMTVNDCLIENNYADEGGGLFADADSRLIVINSTIINNNAKIGGGIDAKQAYLTVNNSSIINNNAKSNGGGIYADKHPAEIHNTNIKDNNGNSGGGVFIGDISAKISDSTLNGNSGETGGAIFNKGKLIIEKSTLNSNEANYGGAIYNQKNLTVNKSSFDSNKAYEAAGIYNLGDFLIESSNFTKQSVSHKAGVILSVNGNIKIKDSIFKQTSGADEGGVIFTREGNIFIDSSLFLLNNALSYGAAIDNSAIMTIQNSLFSRNKAFGAGAIDNGGDLTVTNSTFTNNKVTNNGGAIDNNGKLYMSGSVLVNNTAQNYGGAIISRKDTNIEYCQILDNSAPEGDGLYDSGDYLLISNNWWGENNPNFDELLNFNIDEDFKWIEMNFTNSTPLMQKKVSNLTISLNGKDKNNNSFKLENPDKLPILKSSIQVVSEDSKIKYNLNIVNGSASTSTDMKLAKTVNAILDNEIVSLDVLENNESDDDSEDSDDSNDSNDESDNPNNSNDNSDNVTDDSDDSNKSNNPNNHQSNGNKNNDNNKNYYNKNGLRYSKMKNSLLNSIDSNLDNDYLNLKENNENNDDSNSNNKDMNYSDKKTDLNNESSNKEIDENETKLFDINYS

SEQ ID NO: 16791 - protein, 1031 aa, synthetic construct
SEDINTDIDTDYQSDSIDVSDVSLNDEQIASEDSLPNYEIANKSKDKLYDEGEEEEGGITNDDDDENYRIDGIYADYTITPSENGTIFVEGERIQIIFNFTDQDYEPVSGDWFINFYGESTDVDIYHPFEATGLTDYVVPIYLPPGDYVIFFYEGVVFDDFGGIEDEGTQLDVTFEDAEGNQLDNPEFSIRTNYNKKVYANLTIDYSVAELENLVEGDDITAKISLMDEFNNKMTEKVNLEIYRNGENYDSKKVNVVEGQNNNIIFENLQEGNYSLEVASIDSVPKYTNIITKAVNFTVKSNYDPDNYQIILNPEDEKKLVGDSYEMGVKLLNPSEEAEEGSIDLYLNGNFVKTLELNYDEDGYSHHIVEGLQLGPNNATFLYQIRDGVNVSESVNLIRYETESIIDLESSDIIIGDDAKIKASLSYLDGIVKKPINENFKLYIKNYVEDEDEVEFVYDEEFTIKGSETITLSDLEEGTYYISAVYNGKNYKYLATEEESTLEVFPKETRVDAVARTYSTEENVIVGIELADLSGKAIKGTVNVVLDNKTSYQVNTTDDIQHPVELDLGKLGYGLHNIELNYTGDDSEGWLPSYNNAEFLVIYPSFMSIEDGDVTSGSDLTVNISLTGPDDEGINGIITVRIYDNTGKYLINGDFNTTNGVKSIELKNITKDYIIYGRYYGLDTSKIEIGPSNHYLSSEAYGFIRIAEGKSEKTEYDLELTKVNDNTVIASLKDSDSKPVANAELTVKVNGVESKAKTDNNGMANISFSGNSSIKVSYTDANNTTAKASMEIIIINNVTEKIVNQTVEVPVEIEKIVYVNQTVEVPVEVEKIVYVIPNRTDTAFEYENMVTTAVASADGRTGEYFNVRLIDATGKPLAYKPIKIGFNGVVYDRTTDADGRAKLQINLGYKGDYTFAIGFLGDDNYTGAFEVAKITVKLQKPQLSTASKTYKASAKTKTLTATFKSEHGNTVSGKKISFTVNGKTYSGTTNSKGIASVNVSLSKKGTYSFTVKWAGNDQFASVTKSGKLTIK

SEQ ID NO: 16792 - protein, 1258 aa, synthetic construct
AVENDYSNADLDISNDFVLSDNSNEILIDSSGSLDDSSSALVSEGSSNGLDSYYSNDLVLNDSLSSRSSVIEDSCSIDSTTIEDKALEKSLSSNELAEGTKTYTDLLKDIKSAKNVLNLKYDYIYDSTIDKSLKKGIVLTFDEDYELTINGNGHIIDGNGIAGGFNFENGEFVINNLSFQNCKISSLILTSCDFTTNYVTFSNNYDKSSGACVYLDNSYFYSSHDNFIDNYAPSGSAIYGECSVIDVYDGLFESQKPIDWSFIYGWDETEIYIEDCLFRNTVSNYSTAVYGDYIIEISNSHFTNLFSKFTGGAIGVRNASLTVEKSEFNNVSSLRNGGVIYADMNVDEEKSSEETIIKDSSFVNSKSDFGGAVLQLGGKLKIYRSNFTENTANYYGGAIYTSNVSFYTSKSKFSNNVANEMKGSAIYFDNGDLKIENSNVLSNPSCEGAIYIYDSFYNISGSTFSNNDVAIHSFFDRTRTVKNSKTGKSTTVKSSLNNNTWGGDRNKLNNVEYPYFVSNLGQDIILNPVKINATIKDKYFNLVDLGLVTPVKDQGDSGACWAFGGAAALESAILKATGVSLDISENNIQSAGLRYSLYGKPSLTEGGYDYTALAYYLSWLGPNNSSIDEYDQFGKISPQLFSEDNYHILDVIFLDPANTSSIKDGLIKYGALSASANGADSDSNDFFNEKTYAQYCNDDEASANHIISIVGWDDNYSKNNFLITPKGNGAWIVKNSWGSDWGKNGYYYISYYDESLRSCYAVAYLLNNTLRYNKLYQYDLTNYDDFDDGDYDGVIYSNKFTSNGDDLIAAVGTYFEYEDDDYVISVYVNGKKAYQQKGTSAFVGYNTIKLNKYIAVNKGETFTVAISSSAMPYVDDTRIHLPKGSSFLTVDGEQIDLSQRGQIACIKVYTFNDTKITRDQSTYYGSDKKLAIESELEGTTISLTDSNCKSLGSAKVVDGVAQFDLVLGPGTYFYTSSYAGEKIINSFKVFSTIGGVSNKNIGYKATASFSLSFKDENGEILNNSQFTYTLDGKSKTLTTLDDGTYNISFKNLAIGTHKLSVKNLISGQVSNATIKVVSRFSGAKDISMFYFDGTCYKVRIMGNDAKAVGKGQTVTVVLNKKTYKLKTDANGYISLKIPNTLTPNGAKAKVYSIKMTYAGQSLSKKITVKQVLKTNSLTVKKKAKSFSIKVTLKGKTVLKYKVLTIKFKGKTYKVKTNAKGIATLTLKKAVINGLKKGGKYTFTVTYLKDTIKATVSVK

SEQ ID NO: 16793 - protein, 1269 aa, synthetic construct
NEDVDNGLIDSDDSILQSAEVSDSAIGSDSILQSAEVSDSTIESDSIELEDKGNVLKSSDNASFELDDKNNIGSADSELEDDYLEPKEKNVLSMDENAWFYNYIVWYDGDDGDWVSLDFVDDLKNPENITIRLNSYDTPFDGVDLAVINDYDYSITKLTTDDNGTVVYNVPYEVDELSVFVGFWYDGDFVATYGNWESYTICAVNWGTWYRDPSKRTYDFYVSVSDMDTYESPIGAQVVFTSDSNQYVGTIDENERAIIPKVSYGTYDVKVIYDGYCILNLSDSSAIEFYDDHHTDPDSLGDERIDYMYVDSSGVVYLDLCYDGSLKVPDNSTYEPYGDDNPSGGGSGNQSGGTVANGTFTSLQSLFNRAAANSTISLTRDYVYDDGFDIKGIVINKDLTINGNAHTLDALGKSRIFYVNNSTVKFNNILFANGNATLGGAIYNGSAVNCLFINNTAQDGGAIYYGSALVCDFINNSASRNGGAIYSGGAVNCSFINNSANLGGAAIYDSLFAVNSTFVGNTLASSNPTGGSATTDVSVVSFNPITTYIPSPPSMTGSIGWGGAVLDFTRPVIYTDYNETFYLLTNFTLQQDGFNNYGNVQLTGRDLVFKSLYPYSGNYSMALIISGQIFTPTYVLGENDTYEAHFKLNGLSLGLHMVYAYVDFGYPEYYSYRIGGGYMDRVAYDRTAEIIFPILINKTVEISSSNLNKYYGGTGKYTVTLTDGGNPIANANLNVSLAGKTYPLKTNANGQASMDINLTPGTYEAVCTYDGVSQRSNIIVRSTINLQNLTGIYQNAKVNATFLNAAGSPLANTKVSFRVGSKTYSATTNANGLATANVDLAAGTYDVIAINPVNNEQKTSKLTISKAKSSISLSSTSNNDKVTLTASLSPSTASGNVTFNLNNKNYTAKISSGKASQTITGLNEGNYTANAYYSGDSNLNSSSASTKVVVKIVIPTKIIYKNMTTGPVAKSDGRIGNYFCVKLVDGSNNALTGLPIKIGFNGKIYDRTTDSNGEARLQINLANADIYTFAICYLGDDDHQASFEVAKIDVNKKYPKPNSANGNSNGVPAQETISNTKLKTYIQYSNMTTKSVLKSDGRVGDYFEVKLLDNNKKAMANVPIKIGFNGKIYDRTTDSNGGAKLQINLLKPTTYTFAIAYLGDSKYQASFEVAKIVVKAQSPKLTAPKKTFKANAKTKSVSATLISERGKPMASQSLKFTINGKTYTAKTNSNGVATVNISLNKKGTYSCTVKFAGVTGANAKTTKTTIKIS

SEQ ID NO: 16794 - protein, 1435 aa, synthetic construct
LYISEIEINQNIILNTEGNKIYLNNSPKSNIHDNWFGNTLLNYDEVPYEGCTNWIFLNGESNQVSLENPISFEITFTLSSFNKNTKKISNYDDRKLPFNLTAHAEHGILNPNSNLLGKTTIYETEIINVERIIGNIANIDSEFEIMEFLVTDGTTFYDLNQLINNNSNNEINISGNYTYHDDIDFEFKEGINVNRSLIINGNGFTINGLNSSRIFNINGDNVTINNISLINGNGYEDTYDSDGGAIYWKGADGTLIQSNFTNNSGYNGGAILWEGDNGRIINNTFKNNSAFDGGGAITITVERGIIINNTFTNNSASYDGGAIYLIASSGEIINNTFTNNSGYKGGGMICYADNLSMINNTMESNIASDDNGGAILWEGEIGRIINNTFKNNYASEEGGAISIRGEIGEIINNTFTNNNASYRGGAISIIITSGEIINNTFTNNSGYSGGGILCYGNNVSIINNTMESNIASYDGGALYVSMDYAMIINNTIKNNNASDNGGAIYWDRYKGIISLNTIANNNANHGGAIYYEGYSSNLNYNIILNNKNSEIYFDNVRTFNGSNNWFGNNASNYNLNPNTSFEYDNSPNVTLSDWLFLNGTANPKIVNAFESSQILFKLYSYDGILISEYDNSLITDTKLNLSAERGRFDKTSASFNEPINYTAIEGGRDTIRGAIDKSGYSINLTNRRVSSKIAMDTKEINYSRNASIKLNYNDFAGGNVTIRLMGENNEYLFENMTLNKTIFLGVINRDSYNVRIEYSGDRSFLEENISESLIVNKAGTKIVPTNDTIDLGIGENSKVNYTFYVIDDEGQYITNPEDIGNISFKSDGSAVEVDSKTGEINTIKEGTANILIRFQGDENHLDSNASVYVISSNKIRTKITAENLTTDYKKDDYIIARLTDLTGKPIANAKLIVELNGTNNYTTNSKGEIKVPTKGLDSNEYIAKIIYEGDESYRFSNASVRLIVNKLNTEITANNITTIYNITKELVIRLKDVNGDPVSGVELTVDLNGMNNYTTDDNGQAIVEIKGLIPNNYTAKITFEGNGNYNKASTESDIEILKIPSILNGTDMTVNYKEDKYLTVSLKDKDNKPIHNASISVELEGIKNYTTNSDGQIKVPTSSLPAKNHTAMIRFEGNEIYEKSNATAKITVNKISGKLTASNVTARYGDNQNLVISLKDSKKNPLSGFKVSVDLNGKKNYTTDSSGQIKVSTKDLVPDTYKAIIVFAGNENYTGSNASASVRINRINTTFKYTNMNTIAFDSNIEGRIGEYFRFQLLDEDGKPLSGKQVFIGFNGVKYNRTTNETGEARLQINLKYVNHYTFAIAFLGDDYYKGSFNVALINVTEQIPVLSTSAKTYKSSAKTKTLTATLKSSRGHVLAGKKISFTLNGKVYTANTNSKGLASVKVSLSKKGTYSFTVQFGGDSTYKKVTKSSKLTIK

SEQ ID NO: 16795 - protein, 1471 aa, synthetic construct; identical to SEQ ID NO: 4465

SEQ ID NO: 16796 - protein, 1639 aa, synthetic construct
ENINESEVVGNAEIENNLSSTNDNFEVSKDIGYNVSKKISTDNSNENLRNSQHMTLFIISDNPGTNILDKAILELSNENKINGVNLIIRNGNQVKSMNENELSYLLSDCDAFIGEWISSDVDSVLTSVLVKNPDLSNKKLFLVLEPPSGNLNSGSSSLNLIRNNTLNYNKIFTNYSNEELISYFKNTKRGNSYSIINNYLTNGNGKNFDSIFNRLVLYKDLNDKNNLKNQILFILNYLGVDVSYEQPTFTGVKNYGIYRDRWYSLDEYISTFFKATNNRTVGILESKMYIESQQLNTCYSIINSLESRNYNVIPVFADGGSAEQLKVMVESWTSAGDDISGFLSNSSNFDVYIDAIVSMVAYGVGGENFTKATSFFEEAGVQVFRAVHSDHVSNEQWELGSTGLTTEKSDKWWHITIAEAQGIIDATFIGGNSSYISNLTGAQITTYIPHEGNIGLLADRIDSWVDLKYTLNEDKLISIIYYNYPPGKQNIGSSYLDTIKSIYNILYTLKAAGYTVGSLPVDVSELEDLMLTCGINVATWAPGELEKIANRSCITLLPVSEYNSWFNSLDEIVRIQVSNGTVAYIGELTKRAVELDYTKTIGSTIDDWYNQVVSLLPDEKSVEAKEVLSNIVRALKDYANTHSQDYYRLYLKYFDEFKELNIQGLNGWGETPGNVMVVNKNGTDYFVIPGLTFGNIFVAPEPQRGWESDIKNLYHCTAVAPTHQYLAAYYYMQTRNPNAMVFTGRHATHEWLPGKEILLSATDYGSVVVGDVPQLYFYISDGLGEAIQAKRRGFAVIISHLTSPMSYAHLYGNLTSLANLINDYQKVGSNSEKNKIGEKIQDLIISNDYSTNLGLNKSQIKSISIDSLIEKINIFLKSTQDTLHPLGLHALGEYWSEEDIASTVSAMLSHDFVLENNQGTLNLFTELSNYYYSKSYGDLTPFEREFVLNKSYDICKALIYWDVNTINEVLINDNVKFNNSNFYACLNLAKRYINLINQSISNELNAMLDGLNGRYIPTGEGGEIVVKPSILPTGTNIFQDQSSELPTQDAWNYAKILALLTLADLNDTTEKIIMGIWCVETARDDGALVSTVLYLLGMKPVWTNSSSAGFDDEGNPTGKKVGAMPEVIKLNDLTRPEGWNKKRIDVTIITSGLFRDLYSSQSVLMDNAFRVALARSYLTLINNKTLMNGKYGKELRQALDCVMEGINYYRASNEALKDNYVAQHWIKDCLYYLSIGYNASYAGECAITRIFAPPNGDYGAGISKLVSMSWTWNNTDELAQFYLGRMGNMYSKNYWGDTNPLVFLKALSNSDTIITSRNTNQYGVLDNDDFFDYWGGLSMAVEHVSGKSPKMNVLMYADKDNAYISSLEEVMYREIASRYDNPDWIKGMMKEGYGGARYMSNKFVSNLLGWQVTRPDSVSDDLWNRVYNTYYKDKYNLGVKDWLMSGNNAYSLISMSGTMLSSIHKGYWNADDATIRDIANTWVQATVKNGVACCDCSCGNVAMMQWAVQYVNPDILAQLLPKLYDATENPVFLNNTHNPNTKPENNNDPQVEPSTPNPTDGSSSSSTISNNATSTNSNQHSLSNSQNSQGNAVSDVGDSSSSDSGTFSSEGADVKKAIEINPITQQSASEVGMSLLAVL

SEQ ID NO: 16797 - protein, 1659 aa, synthetic construct
ASSDLSSSPADNENLEIDSFDSNEDLTVNTNTNYIESGNNLEIDYKSNSKESVNATNDIKEETVDYNEDISVEKNNLKSSKLSSVYKITESNYSNYFNKSGNILSNVNPGDTLDFSGSFNNKDFKIDIPLTVTSSDGAQFIDCSFKFNKGSDGSNISNLNINSSRLQSPLIYLDSVSNMNVFNNNLFSCASKSYALCFSNVSYSSAYHNTLQTTAFVVGWGHPSAFVLAGANNLNISSNNVIVNDSNGIYFTTYVGDTISANLINENNYIFNNTVHSVRGVEWAVDENGTTPLPSSFCYAIQVMGSGNKLLNNTVYNAYRGISASGSNSVVAGNVVYDIKGNYYSGNTKDDGGDYGINVGPNSIVENNTIYNSHFNKNSGVAISVGSNTTVRYNNITNINGTGADLSKNFIEFSHNRIDNVSDNGIRVKGQYGNTNISDNFINSTDSSITLLRSSKDKYPSRINIENNDFYTDVSPIYYLEGYIGKLTAKDNTLNGSSISDISIDVPSSSETKVSINSTKIDFNESVLIMPTVSAYGLSLEGLVDIIVNSQKIATVPIGSNYTFTPTEAGSFSINANFTGNEEYKPSESAVLILTVTPKETTTSIIISPSTVELNDTVVISPFVRYNGTLLEGFVDILLDGEKLDTVEIGSDYSYVPNSSGSFYISASFSGGNGYGASVSDMLILTVNESSSIEDPDDPTNLTVSSILISPNTVEVNDTVLISPFVRCNGTLLEGLVDILIDGEKLDSVVIGSDYAYVPSTAGTFNISASYAGGNGYEPSVSDIVVLTVNEKQIIDNGTDNNGTDNNGTDTNGTGTNGTDTNGTDNNGTDTNGTDTNGTENNGTDTDQIKIIINDDNYSDYFDNGYPIDLDVDGNYTLIIDSLNNKDIIIPSGFNINIIGKEGSGTINNGTIQLGDGTDEVGDVKISNLTFNNYNKDAIVINEIAYDLTVENNKIIINTEASPGNLYFSVYGINAKGYVDSLAVRDNDIFLNGSAPYLYGVSLGGYGAIANPQNIFVQNNTININSTASMGMAEGIYLDNPINAAVLDNKINIESINDVYVYGMQIADSAFSAIGEGKTGVKSPYDIMIESNDLNLKSKYMVYGITILDYGCDGSLNELGQPMTNMMDLDTTIQNNNLVADSEKAVMGIVGKTYNMSVLCNNLSVIGGSIEGVASHDALGVDNYALGVQYSGKDYTVLVKDNTVSTNVLAEYLNNKDYEAYVSFVNNTIYHIDGPSSGNDTPENGTGDNGTNTNGTDINGTDTNGTDNNGTNNGTNGTNGTDTNNTDNITKRTVKDLQELIDNATSGSVVDLGNFEYLDVSNIDISKDISIVGNNTVIRTAGDGKPVFNIKEGLSSVSISGIEFMANNGDVLIRAKAVNSTSRLAIETPEINIINNTVIKSDDGVVAESVTVLELDSSRCILAPTNDIKVSNNTLEIGMNPFNFVVESVINAADVNVPVGGDLQSKVKSVIHYEDMDTVAVAKADGRVGKYFEVNLTDSDGNPLSGKFVQIGFNGAVYNRTTNETGGVRLQINLGYKGTYTFAISYLGDENYNGSFVVAKIKVSTQNTKITSSSKTYKASAKTKTLTATLKSSVNGNLISGKKLTFTVNGKSYTATTNSKGVASVKVSLSSKKTYSFTVKYAGDDTYSSSSASGKLTIK

SEQ ID NO: 16798 - protein, 1535 aa, synthetic construct
LNNHPELSNKKLFLILEPPTGNINSSSSSLNLVRNSTIDYKKIFNGISNDDLINYFKATKRGNNFESIQEYIDNEGSSFNSIFNNLVLYKDINDKANLKNELLYILYLLGHGCSYESANFTGVQASGIFRDRWYSFDEYVLTFFNESRNRTIGILESTMYIQSQQLDLVNEITERLESKGYNVIPIYCPAGNAEQLNIMVKYWTSACSNISGFLENPQDFDIYVDGIISMVAYGVGGENFTNATKFFEDANVPIFRAVHSEYITNEQWELSPVGLSTTKSDKWWHVTIAESQGIFDATYVGGVDSYISNRTGAIILTFVPVHENIELLTDRVDAWVDLKYTPNEDKNISIVYYNYPPGKQNIGASYLDAITSVYNMLYTLKDEGYYLTDLPNNVSELEDMMIACGINVANWAPGEVEKLANRSGVALLPVDEYLEWFDSLDDIVKVQITEGPVAYIGQMVRRAVLINYTDEVETMVNDWYNQIKALLPENQTVAATNILDKLVNSLKLYANASSDGDENASLYYDEFLRYYDEFKSLNVSGLNGWGEAPGNIMLVNRNGTDYFVIPGLTFGNVFIGPEPQRGWEADIENLYHCTAVAPTHQYLAAYYYMQTRQSNAMVFVGRHATHEWLPGKEVLLSYNDYGSIVVGKVPQVYFYITDGLAEAIQAKRRGFAVLISHLDSPKSYTHLYGNLTVLATLLEEYDNNHIIIESDSDKDNQAITYQVIKDNQTITYQVINQELEDNLTRAIKDLVIANNYYLTIGFTAEELNNTDMFSLSSTLNAFLKNTQNTLYPLGLHAIGQKWTDEDLANTVAIIVSHDFEYGGKKTNLFDQLSLYYYGEKYSNLTPLKRDYILNRSVDVCKALIYWDTETVSDTIGIGSPEFIESLNIAKKYIDLYNQCISLELEEMVSALNGGYVPVNIGGESVTVPQVLPTGANMYQDQSSELPTQKAWDYAKTLSLLTLADLNDTTEKIIMGIWCVETARDDGALVSTVLYLLGMEPVWHNSSSAGFDEEGIPTGKKVEDLPNVIALENLTRPDGWAKKRIDVTVITSGLFRDLYSSQARLMDNAYRMALACSYYTIVNNKTIMDSEYGPQVYDALRSIMRSISFKGMSNESLEDNYVAKHWLEDCIYYLSLGYNSTVSGEYAITRIFAPPNGDYGAGISKLVSMSWTWNDTDELSEFYIGRMGNMYSKYYWGDTNPVVFMRALSDTDHIVVSRNTNQYGVLDNDDFFDYWGGLSMTVEYLSNKTPTMNVLMYANKDNAYVATFENVFYNELNTRYLNPEWIKGMMQEGYSGSRYMSNKFISNLWGWQVTRPSSVSETVWDDVYNTYYKDKYGLGVKSWLQSGNNAYSLISMSGTMLNSAYSGYWDADDATLSDIANTWAQATVANGVACCDCSCGNVAMMQWAFKYVNADLLAKLMPKLYDATQNPLFYTNSSDMPTNSSNIDRRTTNSSAESNNTETVQTNSSSNSQQSANGNTNIPGASGGYMVGTEADAQSDMASDSDAGMNDANGEGRSVEVTKSTSTPVAPKDVSM

SEQ ID NO: 16799 - protein, 1302 aa, synthetic construct
GIRGPRIYIDQYYGEISNSGNVYTDEYEEKGLFSDYGMGISFESNEGLVPLIHYYPSNESLPSFYDPRGGGDSEDDYEDEDDDSDIAVKDQGIGGNCWAFSGIATLEACLEKVTGEEFGFSEGNAKNLMAISSIYGLNIDTNNGGYDTMFLAYLASWLGPIYEEYDTYNPLSSLSIDLPSVFHILDIDFLAPRKNSLDNDEYKRAIMNNGAVSVTFDWVENKVSNGFHSVSIIGWDDDYDDIDSLGNYAKGAWIFKNSWGYEWGDGGFGYLSYKQKLSEEIAPYMHAYTFSFKENDIGYTDIYQYDFSGLSDFLILNSTNAYYKNKFIAEDNEFLYAFSTYFDKETDFTYSVSINGNVITKTEDGKDILTSIHHSPAGYHTIPLGYNLTLKEGDEFEIIIKLLNDNQNRIPVCQADELYRTSLPSNASFMSLNGKDWIDLSNLASSNEFSSLGIKANTSQVACIKAFTSNWRMNSDSSIVNSKNHSIITSEGTELSQYEICQLKVGSFTRASANETIIIAMSIPEWRNYQDEYENYIEVHINDEFYYVRVNEGVAYLDISFDKIGHYDFKAQFKSNIYSSDIVEFDFEVVKDSIFDVDDLDASNPGTFKELQDIIRNAKNGSIISLDKDYAFSSGDESVVDDYIEINKSLIIDGKGHIIDGSSDSGIFRLSSGDNLTLRNIKFMNADNGAIVSNGNLTVSNCYFISNCASGSSSTSTSSSDSSSTACGGAIYCEGTCFIVNSLFESNSADAGGAVYCEGTCFIVNSYFDSNYADLGGAVCCDGSCYIVNSLFDSNFAVYGGAASIVGNESCEIIDSNFIENEAIYGGAIYLESYCYLLDSSFNYNYANNGGAIYSIADLDIHTTGFNYNEAYKDGGAIYLVNSTSYINEGNFTENSAKERGGAICALEFSNLTIRWAYFMDNSASKYGSAIFSVNALNITDSEVTVSSGKVELICFAYDYASNGQAYGDLYFDENSFYISGAPEIYYFREKIAHKLALDLEFNNIELIRGGGVEISRDLNDDGWEDKINNNMLEICRLVDDDDYMTVLRMKEIEVILINKNNRSDIQKFKIPFNVKLNGYFLNTSSLKYGSYILTGNLSKDLASNCIVKNGTLKVLRKTTLSSLSTFTKVYGNSKNLVVTLKDSSGKAIVGVNIAVKLNGKTIKAKTNSKGQISIAISLKPKTYTAYISFAGNDYYASASKKVKVVVKKANPKLTASKKTFKLRNAKKYTVTLKNNLGKALKNAKVTIKVAGKTYTAKTNAKGQVTFNLKLAKIGKFKAVVSFAGNKLYNGLKKAVVLTVKK

SEQ ID NO: 16800 - protein, 1356 aa, synthetic construct
TIYEFTSIYEYASLNDTYIDGIVSTKIPYALENIELYVSDGSGDDENGNGSISNPFKSISKALSEGYQKSTNITVHILEGTYTGSLNSNLRIPTTVNILLIGEGAAKTIISDSSSDYFITALKGKCELRISQMTLNRAARDTQSAIYIEEESNVAIDNVTFIGGQGNYGGAINTAGNLSIRNSYFHDNGYADRTLRANAYYGGAICNDGTLIIDNTIFESDHAGRLSEIANQGTLYMNNSKVIDSINAYSINMDLVAIGAYGGQKGEITIENSQFIVSSKTINELNDRIYDPTRALTCLGIGSCQHAILINSTFIGEGAVFSPYVFGGINSNNLASGGCTMIPGDLEVYNSTFRNVQAVNIIYSRTDNVRYHSQRVFEGCLFDNVEYIIAVLNTGNFSVEMHDCVILSDDLAKIGFGSEKTMKMDISNNWWSSNDGSYDNATLGTTNYISNCVVKLKEISSETVHPESYLILTLNSSNRTGLLQDAILAFKAYDGENISDYDGALYPRNFEMSAINATLDDLEGTIINKAINPFEGVENSGYYIEAIVDNQKVNLTVHDSLSIGNAYILAENISINYNETQINVTVLEENGKRADGGNVSLKLHDKTYISEIINGTAIFDIDVLPKGDYLLNYSLNRPKVYHSISNSSNLTVIPFKINAYANASNIKVGEDAIVIAYLDKDAGGNVTLGEEIQKVNDGTATFIISNLAKGDYTYQLSYSGDEKYDNETFHVSFSVNLKDASISVENDTLDLFVGSNETIVATISPIGLAVNYSCSNESVAMVDENGVVSAVGAGMAVITLTVGDDVTYSKNSSSVTVIVSKIPTIIEIVNDTISLEVTDSLDSIASLNPEEGGNLNYAISDDLIAKIDNGQITALSEGSAIITVSFDGNDKYTKAQNKSIKIIVNLKEASVSAFSNIDLLVGENDTLSPKTSPEGLDVRYESNDTSVVLVDNGQAIAVGEGNATITLTVGGDGVYAENTTTVKVSVSRIATMIEIEKDTIELKVNEESPIGAILEPDVGNLTYSISDESIAKVENGKIIALAEGNASLSISFAGDERYIGTNASVEIRVNKINTILTETDITTTYKEEGYLIATLKDSQNNPISGAVLTVDLDGIKNYTTDSNGQIKIATNNLIPDTYTARISFAGNENYSSSNGNASVTVKRIGTKLNFNDMNTTAFDSNIEGRIGEYFYFQLVDCDGNPLANKKVIIGFNGVKYNRQTNETGWAKIQINLKYANSYTFAIAFLGDDNYSGSFNFAVIRVSQQTPKLTASSKTYKSSAKTKTLTATLKSSSGKAIAGKKISFRLNGKVYTANTNSLGVATVKVSLNKKGTYSFTAQFSGDSTYKKVTKTAKLTIK

SEQ ID NO: 16801 - protein, 1510 aa, synthetic construct
FDYNFTDGIVIDRPVTIIGNGHTINAAEMVRIFHIQADNVKIKNITFTNAISNGYGGAIYWQGANANLSSCLFENNSAVMAGAVAFYGSTGSIVSDCSFMNNSANNGGAIMWQVSDDSVVSDCSFMNNSAIQGGAIYWSSNDGVVSDCSFVNNSAVRNGGAIYWEKNNGNVSGCIFVNNSADNGAIYFNNQNFGQNLTINHNIFLNNDAVAIYFVRNDSASNADYNWFGNNATNCDIAPTSNNMEMNTWLFLNATSEPEGISILDSCDIIFKLYAYAPSGVSEYDSSRLKEINLTVTPTNGRINTTQAKLGEKVHYTPESAECMLTASIENAFYTTRLKISDGTTFRDLNNLINRNDNDTIILDNDFIYNSLFDSKFKNGININRPLTIVGNNYTIDATGMARIFRIQADDVEINNITFANAKIDGNGGAIYWYSGARGIVSDCSFVNNSAKMYGAAIYWNGANGNVSDCSFVNSTVTDEHGGAIYWHGANGVVSDCSFVNNSAKKYGGAIFWNAANGVVSDCIFVNNSAKSYDGGAIVWNEGLNGAISDCSFVNNSANDGGAILWNEAAGGTVSNCSFVNNSANKSGAAIYWDSGARGVVSDCSFVNNSANRSGALYWFANDGVVSASIFVNNSGDNGVLYFNNTNKRNLSINDNIFLNNDVVAIYFVNSDSTSNADYNWFGNNASNFDTEPLTTNVEISTWLFLNATADPNPVEILNSSDISFKLYSYNATGISDYDNSQLQPVNLTLTATKGDVDSIAKLGETVIYNPTSLGTGSVTAKVENVAYSIEINNIKSNPNLSVESDELTYGNNIAIALNYESAATGKVNITLKGKKSDYTFADLDLNETISLGILAADEYEVIVEYSRDEIYTNASARGTLKVNKANSTLTVSDIEFDYKDMGSGEISFTNATGVEAKVINHDEAIVFVRGNTITVLNLSADSYILEVTTITDENHNEVSKNATITVRKVNSTINVNDIVLYYGESINLAVTTDGAIGISADIDGENVELNENIVTIPDDLESGNHTLTITTVPNDNHKEASKTVNIVDCRIGNITVVVDGVEYSIPAVNGTAITTNMPEEIEKLKENITDLTGQLEEAQTNATNLANNLTIANQIVDKLIAQLEEAQANATQTINDLTHQLNEAQTNATKIANDQTNANQIVDNLTGQLNDAQTNATKIANDLENANQIVDDLTRQLEEAQANNDQTINDLTHQLEEAKVNATKIANDLENANQTVDNLTTQLEEAKVNATKIANDLENANQIVDNLTDQLEEALANATKIETVVVDGKEYPIEYVNGTATVTTNSTGPQNITHERKATQIIYKDMETTAIDTKVDGRIGKYFNVILKDSEGNILANKPIQIGFNGKVYNRTTDENGSAKLQINLIKADIYTFAICYLGDDDYNGSFVVSKITVKAQKGTLTVPNKSYKATTKTKTLSATFKAASGKVLANKKVSFVVNGKTYSAKTNAKGVATVNVSLNKKGTYSFVAKFAGDNTYAAVSKKAKLTIK

SEQ ID NO: 16802 - protein, 1460 aa, synthetic construct
SHVEVDGIDINYTDLETITVTVSDNNATGFVTITINGTDIELTKEVSAGQAVFDVKDLVVGEYNVTAVYHSDRNYLNSTASDTFKVDKSDVKNMTISPVNITYGENETITVRITDNNITGNITISVNGTEYGPVELDNGVAVFNVPGLIVGDYEVTASYSGDSNYNPASSTETFTVDKEKPNVHVVSENIDYGKNETITVIVDGFNVTGNVTIKINGTEIATKEINDKGRAVFVVPGLQAGEYEVVAIYNGDDNHESSEGSDTFTVATVTPNMDVETEDIDYGDNETITVTLPKDAKGSVNITITDENGTVVYEGEAQLEDGKATVDVPGITPGPYNVTVKYPGDRNYNPTNKTVRFNVDKVVPDVDVDTVNIDYGDNETVTVTVNPVDGGVTPTGSVNVTVRDSDGKVVYEGNVDLVAGKATLDVPDLGAGDYTVDVRYGGDSNYDDSTGGSSFNVAKVSPDMDVQTEDIDYGDNETVTVTLPKDATGTVNVTIKDNDGNVFYEGEAELKEGKVTVDVPGLPAGDYTVDVAYGGDDNYNPVNSSDSFSIDKVSPEVDVGTENIDYGDNETVTVTVNPVEGGSAPTGTVNLTVKDSDGKVVYECQADLVEGKATVDVPGLPAGDYTVEVAYGGDENYTATNSNGNFAVGKVNPDMEVDGEDIDYGDNETVTVTLPKDATGTVNVTVKDSDGNVVYEGEAKLDDGKATVDVPGLPAGDYTVEVAYGGDDNYNPVNSSDSFSIDKVAPEVDADTEDIDYGEDEPITVTIDPVEGGSTPTGTVNVTVKDKDGNVVYEDQVDLVDGKVTLDIPDLDAGDYTVDVAYSGDENYTARNSSGSFTVNKAKPELNVDSEDIDYGDDETITVSLPEDATGTVNITITDKDGKTKVFNDVPIENGKATISVPDLDAGDYNVTVDYPGDDNYLGSKATSSFKVVRSNSNITLETENITYGDEEPITVDVNPVEGGVTPTGTVNITITDKDGNTKVFNDVPLENGKATVDVPDLAAGNYIVDVKYSGDGNYDPDSTEGAFEVAKAVPHIEIHVYDIYYGDVEVLTVTCDAPGTVDITVNGVTVTVPLDDGYDKRVFSSIVRAYSGKATLDLVNLAVGTYPAKAVYNGNENYTSVSDNDTFHVYKENTTTKISVDDIKLGEDAVIDIEVTHEDGSEKINTNITVTVDGKDYTVELIDGKGTLTIPDLDLGKHTVKAVYPGSHNYTNSSNATSFKVTKVTPSFDISTENIQVGDDETVTVTLPDDATGTVTLTIDGKEYTATVENGKATFVIPGIKAGEHKVNVAYSGDDKYAPAKRSDSFTVSKVKPDMGMDAPEIKVGQDGVITVTVPEDATGTISITVDGKTYTASIKDGKAVFHISGLGPGTHIVKAYYSGDGKYLAGSVDGTIVVEPKNGTSPQDKGKAHGGIDLESKKTGNPILVLFMVLFSLILIPIKRRRDDDEEEENEDQINRID

SEQ ID NO: 16803 - protein, 1554 aa, synthetic construct
KTVTVIGGIGQVNFGSLETDTYEATVSFGGSDLYEPISNATEFTVYPEEEGTNFEIDTNASEITYGASIKVTHKLPEDATGTIKYYLNNGTVLGELPVEEKLTLDLDAGYYVIFANYSGDESFEPDWDSADVLVKQVETEFHIGLQQQVISGNPAYVTHSISEGATGTISYYLSNGTFLGEVQVGETYVSPKWKVGIYNITANYSGDRNFVPASDSMEFRINPDFSFDIYLDEDDVIYGQTTTVRPSLPYDATGTVEFYYNDTYLGKVTIGQYEIIMVDGEEYYETPGVELPEFDVGVHEIVGKYLGDKNYDPAIANVRLTVLSTETVFEINASPSEIKYGEAAAVIHKLPSLAVGTILYYLSDGTSLGELYYYEDLALPKLAVGSYEILANYSGDENFNNASASTTLTINKADPDFEIYIAFPSYDFGDSPVVFVNLPDDATGNISYYLSDGTFLGELPVDERLSLPILNVGTHTIIGNYSGDGNYNNASASMTVTVNEVSMEFNLGISAEEISYGETATVTHRLPSLAKGNITYYLSDGTLLGELPVSENLTLPKLDVGTYIIIGNYSGDENFDGDSANVTLTVIQADPAFAISISAEEAAYGETVTVSPALPEDATGTVIYYLSNGTILGELAADENLTLPTFDVDVYDILANYSGDKNYLNASAETALIVSQADPGFEISISAEEAAYGETVTASPVLPEDATGTVIYYLSNGTILGELPVDESLTLPTFDVGTYTILANYSGDSNYLDASAEKELTLIKADSTLEINDIAFDYSKTGSAEAKTSGAEGIVASVAGHDEAVVEVNGNEITVSGLDAGSYTLSVSTIVDDNHNSASKNITVTVKKIDSSLSVEGLELDYGESGNVDAAAEGATGISAKIGSKSIGVNGYSIPISGLDAGKYNLTVTTIPDRNHNPVTKTAQITVNKIDSTLEANDMAFDYEGTGTSSVTYTGATGVKASVIGQPNAKVNVKGKEISVSGLDAGNYTLEITTIPDKNHKAVSQTVNVTVNKIDSKLDFNNLVDYGSAMNVTVKTEGASGIMAEIDGKELGVDKYTIPISALDAGEYDLTVTTIPNSNHNPVSKTVKVTITKLDSELAVEDLEFDYNSTGTTNATFEGATGITAKVVGQPNATVEINGNSISVSGLKPGSYTLEVTTVPDENHNPVTAKSAIRVNKLETAISANDISTVHGADKNLTAIIRDINGNPVANATVSVSLNGSKKYVSDSSGQISIPLKSLAAGNYTATISFAGTEIYGKSSASIKVAVDKEPTSIAATNVNTQYGLEDYITAVLKDGQGNPLGGVKLNVDLDGNRTIVTDSNGQIKIATKDLTAGNYIATISFAGNGNYMASESNAIVNINRTGTRFNFKNMTTTAFDYRIEGRIGKYFYFQLVDEDGNPLANKNVCIGFNGVKYNRTTNETGWTKLQINLRCVNLYTFAVTFSGDDNYTGAFNVAMINVTHQSPKLTAGNKSYKASANTKTLTAKFKSFKGTAIVGKKITFTVNGKKYSAITDKKGIATVNVSLNKKGTYKYTAAFAGDSTYKKVSVTSKLTIK

SEQ ID NO: 16804 - protein, 1927 aa, synthetic construct
INGNGFTINGSNKAPIFHITGDNVTINNISFVNGYANAYVNGYDGEDMRGGAIYWQGRNGKVTYSNFTNNNANDGGAIYWFGTDGIVEYSNFINNNANDGGAIYWFGTDGIVEYSNFINNNANDGGAIYWFGQNGNVENSVFTQNHAGSYGGAIYCSGAESIVEYSNFTNNNAYNGGAIYWFGQNGNVENSVFTQNHAGSYGGAIYCSGAESIVEYSNFTNNNAFNGGAIYWFGQNGNVENSVFTQNHATFAGGAIYCSGAESIVKYSNFTNNDAIKGGAIYWNGRNGNVENSVFTQNHVDNDGGALYWDDSEGKVTSCIFVNNTAETKHSGHLILPMGRGGAIYWNGRNGNVENSVFTQNHVDNDGGALYWVDSEGEVTSCIFVNNAADVEASVYYNERGAYSNFSNNIMLNNGKNEIKFKIFDRSNIDYNWFGNNLSNYNEKPGGFEGNIWLFLNATVDPNMLLLGESSEITFRLYAYDGTNVIEYDNDLIYPINLTLISSNGNINETVGLEETAIFTPQNVGTAIVTAKAEGFDIQTVSINVRAASFSDLNRTINGNEDAEITLGKYYEFDPETDGAFIHGIIINRTVTINGNGTTINASGKARIFQVIADNVTLNNITFTNGNASGEGADRSGGAIRWEGANGIISYSNFTFNHAYLTGGAIIWSGENGTVKHSSFSQNDVDGSGGAIRWAGAKGTITDSDFYLNSATDAGAIWWLGAYGTVKYSNLINNHAGSRGGAIMWSGENGNVTYSNFSLNNGGSGTGYDGGGAIFWDHLNGTVSYSNFSNNHINGHGGAIAWHEQYGNVSSCLFVNNTATDGASVYHNDHSESYSNFNNNILLNNGENEIHYDVYDGSNADYNWFGNNGSNYNEKPAGSVGNVWLFLNATADPNPISILGSSDVSFKLYAYDGLDLIEYDNNLLYPIILSLSSSNGNINDTAGLDEKIIFTPQNIGTATVTAKAEGIFQTLSINVYPPSFSDLNRTINGNDDDEITLDKYYEFNPELDSAFIHGIIINRTVTINGNGSTINGSSKARIFQVIAPDVVLNNITFANGNANGENEGGYGGAILWEGDNGRVEDSTFINNNASGYGGAIFGGNCSDNVIFQNNHAGIEGDDWYVPKPVISVNDFTSTYKSGEKLYVNVSYVGTQIDGINVTISVFDSSNQLIGNYSCLSGDGWTVDLDAGNYNALVFVDSDEYGYGEETIALTINKRASQISANPLNTTYNGNENIIMILKDNYNESIANATVLVDFNGEKNLTTDENGQIVVSANGIVPGEYWAQFIFDGSKNYDGSDEKVKVIISKASTSLSSENMNVSYNESKYLIATLKDQYSNPLAEISIEFKSNSSTVKNENTDNKGQAKLLIDFNPGTYNIDISFAGNSLYDASYATVTVVVNPSDDSGNGTEPSGNGSSGNGTSPEGNGTSPGGNGTSPSGNGTSPGGNGTSPSGNGTSPGGNGTDPGGNGTSPSGNGTDPGGNGTSPSGNGTSPGGNGTDPSGNGTSPGGNGTDPGGNGTSSTVKDTLIGISTSTVIYGNDELINLTLTTADKTPIDGVIELRVGNSIYNVTITGGKGSKALSNLTIGNYTVTADYKGDSEYNSSTASSSFTVRDRIETRIIYNNMTTAPVGANDGRIGNYFRVKLVDENNQALAGVPIQIGFNGRIYNRTTDSEGGAKLQINLAKEDGYTFAICFKGDDNYNASFEVAKIDVNKKYPKPNSANSESAEPANKTQKNTRLETSILYKDMKTESVLKAEGRAGKYFEIQLVDNNKKALAGVPIKIGFNGVVYDRITNATGGAKLQINLLKVTQYTFAIAYLGDSKYQASFEVAKITVNKQTPKITAPQKTFKAKAKTKTVTATLKSQRGTLLSGKKIKFTVNGKTYTGTTNSKGVASVKVSLSKKGTYTATAKFDGDANTKATSVKFKVKIS

SEQ ID NO: 16805 - protein, 1452 aa, synthetic construct
AIAMFTDEKIRPVTENTVKGADNEKVNYTAVVRDVDDLVEDAEATITPDILYNGNLGKDLAYPAEEITFFDSITVNGGIYIEIQNDSSYLASGATNRTDIWNIEAPEDADFVAGFVYVAYNWDKTSAGIPALNITFNGVSVAPVAHYRDQSNMGTYGKYGYGLLVYDVSDLLEAGDNVFTLTKDANMTAIYPSVLVAGYDQEVSDSMKTIYMFNGADLLSNANNFLGRVVASNSVLDIELPDDVIDCALGIFAASSQKGEGNLIVNGESFEDVWNGSSNSVQACVFNLTDDIEESNTVSFVATGSTILALQQFIFVEYELVSVDAKLGSEYNNVAFAGTDNVLEFNITNDGTIPTAYTIEFYIDGELADTLELELANGESDSLYLVDPTIRPVDETTVNGADNAKVNYTVVITDNSTGDVLDIITITPSVLYNGNLGKDLAYPAGEITFFDVITVNGDIIVIGMNDSTYLGSKTTGRTDVWDLTTNEDIIFAAGYLYVAYNWDKTPAGMPVWNTTFNGVTVTPVAHYRDQSNMGTYGKYGYGLIVYDVSDLIVAGENTFTLEKENGTTAVYPSTLVAFYNMPESSTYVTTYLYNGADLLSNANNFLGRLVASNSTLDIDSFDNIVGADLLVFAASAQAGEGSLVINGDLVADIWNGSSNSVDAYAIDLGKNPKASNEVSFVATGSTILALQQFIVVEYNVPSAEASLVSEYSNVAFAGTNNVLQFNLTNNGALNTSYIVDFYIDGKKVNSTQIALNSGESFGQYFIDDTIRPVDASTVNGAANAKVNYTVLVSDKDTGLILDEVTLTPSVLYNGNLGKDLAHPPEEIVLFDTITVNGDVIIDTLDDSTYLGAKTTGRTDEWNLTVPSDADFEVAYLYVAYNWDKTASGMPEWNTTFNGVNVTPVAHYRDQSNMGTYGKYGYGLYIYDVSDLIKAGLNTFTLGKENGTTAVYPSTLVALYNVNESNVLTTVSLFNGADLLSNANNFLNRTVASNNVLELDFTVFDEILSSQLYVFAASAQAGEGNLIVNNETFTNVWNGTSNSVDAYIVDLGNDPSLSNDVSFVATGSTILALEQFVVVKSKYQTSSDLQKLIDAAEPGSTLDLGDNVFQDVANVVIDKNLTIKGGSIMGKAGETIFVIPAKSANGPDEVNITGVDFIVEDANVIVQATADNGSSPTSIDTPNIRISDNFIDMIDGSVVPESVTVLKLDSERGVLAPTGELKVTDNAIAAGIKPFEFDVTGVSNGSDTNIPEGGNIPAKQASVIHYQDMETTAVNSKIEGRVGKYFEVNLTDTNGNPLANKFVQIGFNGVVYNRTTNETGGVKLQINLGYKGTYTFAISYLGDDYYNGSFVVSKIKVSTQNTKLTTAAKTYKASAKTKTLTATLKSSVYNKPINGKKVTFTVNGKSYSATTNAKGVATVKVSLSTKKTYSFTAKFAGDDMYTKSSVTGKVTIK

SEQ ID NO: 16806 - protein, 2267 aa, synthetic construct
LEPQNFTVFENPYSELEVTDDGPIASGETVNITATLTDFQGNPIEGATLEVYDTGVWIANITTNAEGIAETSIDNLGYGLHDITVIFNDTVHDVQTETVTVSVTPKKGTFTDLQYLIDTADGRLVLPYDFAFDAAYDEQFFLTGVLVDDNIIISGAGHIIDGMKKARILYINAPNVKIFNVSFVNGKSDVGAAIYTEADYLLVDSCYFANNDPEAGAAIYAESGVTDVEETIFFNNTAVNGGAIYVESGATLNVADSEFNQNTATYRGGAIWSNGTVNVKDSSFDKNDITYRVKNDDNGGAAIFNNGTLNVVNSRFTNNLLNYVIRTGDDNHPELVDGVILSSGKAKISNSHFENNSGTYGSAITALPIGTELSDLTVENCEFITNLAYCGAAIYVGSGTTLFYINDCVFIGNNATGVGSNGYVATGGAIKIAKKATGIIADSQFYNNSAANGGAIDISATSGNTASVLIDSCVFGYNVADQGGAIYIDNRTTVNLYDSTLYYNEGEALNYHIFLNGDATLGFEGNNFYTTIPTIVAEDTYAYGETITINGTFDWGVNNKPINMIYTINGAPGTAEVVDGNYTILIDNQPDVGDYTIVITAFTDENGNVYHVETAQKTISVTKATPILSVEGDEYLMPPSDDATVTISLTDKDGNGIKGTVIVTVAGETYLVETDEDGDGELTINDLPATTWAIDAKFIGNDNYNEVVNDTEEITFIADVAYFDIIIEDGVYGDKLTVIVENATDIDGNSLTGMVTGMISTGDDDISFIVYVNNGQGTNTTTTAGGVGKFTGDAYFYDSMMEFMSGPEECSAYVSPANATLYLVPWDADDLSSDIAYGDTIEFGAAVFGVNLEELNGTVYYIITELNKKGEIAIVNGSGAVNLTDILDVGTYTVISYFVDDKGNYDPESSVNYTNFKVAKATPTLNVENAQQVYADTNTITFNVTGIDDKGVKGTVIAIKPISEDVSGAIYDPETGLGELTFNGLVVGDNPIVVKFLSDDDNYANAEKTINITITQATLAIDSTITTQEIVYGKDVEADVTVTGIVQEDTVIANVSLYDNATGELLDSFNIALGLEDSISFEDLEVGDYYYTIEFTSELYAGDNFTSEVFTVNTAEILDLDSSNVDNVSYGEGIDITVYVDGMIEGDLIEVNFTVVDATTGDDVFNGTYNISNGDVITVPPLDVGKYSYSVSFYGDDKYNTGGADSIAAVGSFEVLDMSDVDVLVTADESITYGEKVTVEIDPIVSEGGLPVTGTATIYVYDDPASVDPVYVLADVELDKDGATAVLDTILPTGEYWIVVDFESDDGYYDGRGVTSTIVDLALAKLSIDPITVTYGETIPITVTALGNGGELLNGTVEFKIYGPGFEGTVTVKNGTGVTNITERFDVGTYTIIAAFGDDGANYEGFNITSLEITPATPIVRVTGSEVEYGEPSTVTVSVSDIDGMPLSGKVIVTVDWVVDGLTQVIDLDDSNEASFDLSPYVHQGTYDVTVTYIANGNYGEAVNDTETVNVTASTTATVNVEVPEDVSYGDELTIKVTAEDGAGEQIPLEAVNVTVNGETKEYPVDENGTVNLGVLPAGDNEITVALDDGTHKPTKTEATAKVAPAEAVVFVDTDNDNPSYGDVVVVTVNATNKDKPIDADACLVVDGYLIGYYDLEDGQVEISIKDLAPGKHEIEVSVANGNYSEGSYGRAIVNVDKATPVISAEGETVEWGEVATVKVNATGANGEKLNIPLVVRVIWEVSGVDELIEIENGTGEAAFQISNYVAPGTYNVTVIFLGNDEYYPVNNTEAKIILTEPKTVEMEVSITPDEYGKATNVTVTLKDVASKPLEGSTVTVTVDGKEYANATIGEDGTVTVPVEGLEAGNHTIAVDFDDGEHSPVHEEENIAIEPSTDATVEATVNVGENETTVDVIVKDSTGEGINGTVIVYVDGEPVANTTVGNDTSSVSIGQLAPGDHTVDVEFVNPNYAPTSYSTHVTESTSLTNMTVKVDKKNILYGESDITATIEFTSEGKALDGVVEVLLNGEAQNVTVTGGKATVKFSDLAADHYTVVSNFAGNATYAPSSDSANFVVERKATKFNYNDMNTTAVNPNVDGRIGEYFYFQLVDQDGKALANKSVSIGFNGKVYNRTTNETGWAKLQINLRIVFGYTFAISFLGDDNYTGAFNVALINVSAQTPKLSTSSKVYKASAKTKTLTAKLLTSSGNVDKGKKLTFTVNGKSYSATTNDKGVASVKVSISQKGTYSFTVKNAKDNTYASVSKTAKLVIK

SEQ ID NO: 16807 - protein, 2226 aa, synthetic construct
NYRYLSTRLNNLIIKAEDGAEVNVDLRGMNQNSLYWTFYGDNVTVSGINFMNANMTSYNLNNYHAVLKFINSSNSRVEDCSFSNLKSYGILAGNSTDVVISNCNFTNGSSRMFSITNSSVTVEDSIMKNFSTSYIRNSTFTMVNSTVTDFNDDDIFNFANTDLDIRDNTFKNLTFPNKTNFQRFGVFYAWDDNAGISYNFINNTFANFTGTDAYMIYRSASSSVKPMCKVNFTDNNVSNVSVGVNIYYGNITVENNSFDHMSPANTLRFSYSNIDIRDNNFTDSNSTHVYSDRCNGTIEYNNFINNSALPVSAEWGNLNISFNNFTDNKGNFSAGAIQSTGVVNIFNNTFCNNSARVGAVNVASISSNKTIYNNTFVNNTGVSGTLYVNGNATVHDNRFIDNNVSENGGAIYAAYDNSYNNYYNISANITDNIFDGNIANKGGAIYYEQYNSAYGLDNLANNTFVNNKAEYGGAIYSNKTVNVTISENEFVNNSATIGGAIFLDNYTSAFNTGTNITLNNFTNNSAQSAGAVVVYGNNTNVIGNNFVGNNATRYGGGALVTDGANGLIYNNTFENNTAFLYAGAIGTNNSKIINNTFTNNNAYQAGAILTINSTIHNNTFSGNDATRAPSVGYIDNYNYTVSSYYVYYCSSEDCSGCTACESCTSTIIDPITGAEIKVINCSNGDVPECICEDSVATLYNISLLYNNEGLNLDEDVYVYDESTILRVALNNNDMYFLYENASIPNASEYHYWAYCIEQNNSKPWQWNGTTGVLVDDLYFVRNSLDGSYVGDYIKVLVSYFYFNLDEDVYNLKDYVYVFTDTDYRANTDRVIRRVINLTEREDTSLVNGNNWINGVYNCLSFHSFIMPTTRQNLILINSCMAMQTPDFNPQKIANKENVGTGDIVNYTVTVYNNGTVSLHNVTVTERPNSMLTYLSFTDFRNQGWVQTGEMTWVLNRPLKVHETGTFNINFRVNNVTYLTNITNYIDVGCDEVSNKSAFTRTETKWPRIQVQKITLDQNVTPGSTVRFLLLVKNIGTLEASNITLVDNFNRNELEYEYRWDSYKGNWSGGHGWGGSSSSWHVDTLYLNQVLYPGQEAGVIIYFKVPNNVTVGSAYNSVNAYRNGTSEGYSSNYTIIQRPYFSIWKTLVSSKTSTIGEEVVFQINVQNTGYVNLTGVYVEDILPIGLKYLRFYNTDNHNWTHFVDEDGKHRFLLQNTLPTYYSDSQNYVARLYIVCNATEYGNWYNLATGYTEQTNKSTSQANVTIIPFGVSIEKVSNNPISQVGDQVSFTIRVRNTGIYNLTDVYVNETRNSYMVFDHFVDNSGKWILNESYATSGVPSWNYNGTFEVGAVSEFDVFYNVTNINYYGNITNTAYVSSNQTTNRSVSNQTAAYNIKVRKISNNATARVGDQVSFTIQISRDGYSWESPFSLYGIHVKDLVPDGLVFDHADNSYYWIYNESDETWYYRSGLTAGRTISLTLYFNVTKAANITNVAIVGVNNSTVKTANNTTNSIYHNLQVEKVTLNETVYPGNITEFLVRVNNTGDNNLTNVFVKENIPNGLVYYDYINKTGKWNYTEDDDGPIWLYDGILAPGAFGEFIIRFNTTVPGIFVNNVVAGSNETSNKSTENSTKVLGPIISVGKITLNKTVYIGELTEFRIKVSNDGDCNLSGVYVVEYIPDGLKFVEFKDESGLWTYNESSRTFYYNGILERDDSLEFVVVFNATRAGNFTNVVHAGSNVTNESVANNTTEALDVRMDIQKVTLNETVFTGQETGFVIVVSNTGLKDLTDVRLKEIYPDGLVYSRFIDDSGKWFNRGDYWIYNGVLAVGESTNFTVIFNTTKSGTFNNTIIVSSNETGPKNTSNTTKVVVANVTVAKITLNETVMSGEQTSFDIVVTNDGIYNLTGVVVTDAFPEGLAYSGFVDASGKWIFDDSKGNAWIYNGTLAPGESASFTVVFDTDEVGEFTNIVKVSTNQTQDKNASNITKVIKLIPNVAIQKVTLNRTVYSGEQTSFEIIVRNNGEMNLTAVTVTDAFPEGLAYSGFVDASGKWIFDDAKGNAWIYDGILAPGESASFTVVFDTNQTGNFTNIVTVSSNQTKEKNASNITEVIIKSVPGIEIIKITINRTVYSGEQTSFDIVVSNDGNVNLSNVTVIDSFPEGLTYSNFIDDTGKWFNIGNKWIYNGILLPGESAGFRIVFDTNKSGNFTNHVKVTSNETGEKNSSNVTEVIFA

SEQ ID NO: 16808 - protein, 2309 aa, synthetic construct
IFIGEGTYVESNLTISKDLNITALGEVIWDANGQRAFSMSTGSVSISNITFINGNYTRNGHLIYCAGDSLKFDECKFLSNGGNVTGTNGVIYVELASANFNNCYFENNTAGTGTSYGLISAKDSVIIVDGCTFVNNFNKNGCIYVSGSNIGSMAVINNTKFIGNNATSASGGSGGAIYASGSMAYQYSNGTVRPGAQSAVYVIDCDFINNTAFGGKYYNAEGGAIFVNANATLYASNSRFIDNTALDYEETNKSGRGGAIAATTGNVQISNCIFQGNTANNGSVIAMKFANKDLTTVNVLSISNSVIMGPGEKLIVSDFTNGSLVANNNWWAANENPSDRVSEGITVDSWVILTADPSEITGTLDEIIPIVANFRHTNSTDGTIGDLEGEFPELEVFGMTLDEGEITESNLTVDNVATLYYTPEETGETTVYAISGNAMVPIKVTITDTPQPVADVIYVSPSGADTNAGTYEAPVATIAHAVELAGAEGASGLVVIEEGIYNENGIVINSAIPITITGNGTVIIRGNNHVVNGNGAGRFGDVSESTSIIIVNTTEAVVIANIAFEDNIAANGGAILIAGTSSSNLFDADVLVENCSFNNLQGRNGGAIYAYYAIGNLTVANCEFTNINATWAALCAYQAAYGEGLTVEIKDSSFTNNSANNAPALYLQATNVVIKDSNFTDNNATYHPGAIYLQNTTATIDNCIVANNSAKYDKAAIAIHGGNIQYNPVIVKPSEVTITNSIIENNIGRDKAAPAIYLENSILNMSYSSVVNEININNTVTATYGDEKPGLVLINNNWWGTNDPSTTIFGTNITMDNWVIMNVEANATEILAGEEVKLTVDFNHVNTTAGEIEELTGGVIPRESYSVALSVDNGTVAPETLTIANGATGEAIFTAANANALITVTSENAVETILINVGEQPVPFTGVVYVSKDGDDANEGSEDEPVASLARAIEIATAEEGSGQIIIKEGTYIVDGYNITKDLTITGEGDVILDAQNQGNRLFNMAYGTTVSNFELHNLVLANVTAMYGAVVYSYAANAVLDNITVAGINHEMARLISNYGNLTIKDSVFANNTVSGIITHSGNNNLNIVNTIFEGNNVTYDSSIMGVVYVSSGRGNITIEDSKFYDNLVRQSTVRGYTDTNITVKGTEFINNTADNSPYYCSGGAIFAQANLDVTESIFINNNARREGGAIYIGINGVANITKSEFINNTIYDNEYYGDAIYTKGTTAINYCIFLTNGTRYAVYNGGSKEVNAQYNWWGTNDDPQGFAYSADASNWIIMTVTAPSTQDIQAGDEYELTVDFNHYTDGSDILELPDSLAQELTVEFTSTTGTFDNPVVTTENQVATAKYTVVAGENSITVKSTDAVWNTSFTAGEKAKAKMNVSMENNTIIVTLTDEEGAPIAGKTISVLINEDTLSNETNSSGIAAISLGTLDAGTYPATISLADSEYQAPELTVFVLVEETLVDNPIGAVIELALAENGTSIEVTLKDINGQPIGDTIVRYYIGSTDGALLPIDANGKGSFDIDNTVNQTIKVSYTKEGTEWSSYYDFIVNNEVTPVPVANNAKFDVIVREDSIDVFLYNDNLDDFEGAKIMVTIGEEDPVEYIAGENGNITIPINGDTTVELSYTDENGATVYHTVKVSTSGVDPSAEIEIIVESHNDTSIEVSVTVDGDDVSDGEITYYIGDDDDGTVVPIEDGIAIIPFDNTVNQTIEITYSDGDATESVYYTIVAFTHEVPVEPPVANGSFDVETTDDAIVATLVDSDGKPIADATVSAIVNGEEQNFTTDADGKLSVPIDGNATVELSYTDPENGAVLKYVTDVVTKEVPIEVPVVANGTMSVETTDDAVEATLVDSDGNPIENATVTAVIDGEEQNFTTDADGKVSIPVGENATVELSYTDPENGAVVKYSTKVVTKEVEVPVDVPVVANGTLTVETTDDAIVATLVDSDGKPIANATIIAVVDGEEMEIPTDEDGKCSVLITGNNTVEFSYTDPANNATVSYSTKVVTEVEEVIVPVPVVANATISLSTEDGSSIVATLKDLDGNAIANATLDANVNGEETKLTTDANGIATIPVSANTTAVVSYTDSNKATVTSSMSLTVIETIVEINKTIEVPPVRNASQIVCEDMNTIAVAKDDGRIGEYFYVKLVDANGNALVNKSVQIGFNGRVYNRTTNETGDVKLQINLAYKGTYTFAIAYLGDDNYNGSFVVSKITVKQQSPKITTTSKTYKASAKTKALTATFKTANGNLIADKTIKFTVNGKTYSGKTNAKGVATVKVSLNTKGTYSFTAKYAGDDTFKATSASGKLTIK

SEQ ID NO: 16809 - DNA, 1500 bp, unidentified
  source 1..1500: mol_type = unassigned DNA; note = non-methanobrevibacter Methanogen
atgaaggcgatcgttgccacggctctcaccttcgctctaataatcggcatgaccgtgttcttcatgagcatcgacgaattcgaccaatcgtccgccgaacccccgctgggtctttccagcaccaagatcaccctcgaggaaggtgacagttccgacctcacggtctggagtcttccgtcgggtacgacatacgataacatctcctgggagtccgataccgaggatgtagctaccgtgagttacggtaccgttaccgccgtgagtcccgggaccgccatgattacggcgagtgtctacagcggcggtgtcgagtacacggatacatgtctcgtcactgttaccgataccgctgtcgtgagtgctctgacagtctacaatccctattcggagaaatacgacagtgcggtcctttccggcaagggtttcctcggcgaagaatcaactgggggcgtgctttccctcggattcaaccgcggcggttacatcataatctccgtagcggggagcacatacagctggggagagagcctcaactccgtgggcgtggaggtccgcaactattcccgtattgtcatgaggctcacttcagtttccggtgtttatgcgacctacaatccttcgtcatccgtttcccaatccacattcgtcacgaccagcggtatcacatacaacagtgtcgcccaatccccttcgctgtacctgaaaggtctggattacggcacatacaatgtccagttcaccgtttacaaggacgggtttctcagcagtactgagatagtgtcggtgacaggtacgttcacctattccgaaggagatggaagatacgatacctcttcagaattcaccaggttctatgcctggaacagcgatatcaccggaagtagcgagctgtgcggcatcaaggtgacctacagctatgcggactattggaacgcagttcttcagagcaaggaagagatgatccactacagcaacggcatagcaagtgccagatacgaatccgaatgcgtggattatgtcaatacggggaccgcggtgaagagtctcgaagccgctctcagggaggaattcgaatccacctattcttcttatacagacaaaagcgagatgtacgcgcagttcatattcacgttccttcagatccgcttcttctacgagaacgactacacccaatactacgactgctacagctcccattcctcgggaacggatgtgtgggcatatcccgagatgaccatctattcgggcatgggggactgcgaggatacagccgctttgctatcctcactgttcaaagcggccggttacgatactgctctcatcatcctgcccagccacatgatgagtgcgttggtcctttcggattattcctacaccgcatcgttcgaatacgggaacaagaaatactacttctgcgagagtaccgccgattcgggagtgaggatcggttattgctcctccacctaccaatacggcgagttctcctactatttcgtgtga

SEQ ID NO: 16810 - DNA, 1443 bp, unidentified
  source 1..1443: mol_type = unassigned DNA; note = non-methanobrevibacter Methanogen
atggtggacaattcctggattagtagggaccgtgtttcgacggatgctggaaaccgtatcattcgcgtaaaggtgttactaaccatcgcggtcatattaatcgggggatgtacgacttttcttatacatggtttgggagcaaatgcgacccaataccaatctgagggagtcgttatagatttcgggaattacaaaactgtttggacaaacatcagtttcagcgagacagacgatccggtcgaattgctgaataaggcctgcgattcccactacagtacaacgcctatcttcacagatggggttctgaccggtatagatgatggagaaaccgtgacttccaacgatgcccagcatacctgggacctttggtacatcgagaaaggcaagtacgattatgtgaagagcgacacctattcaataaacgcatccgattacaccctgatttcatgggcatataccgaaacggatggtaaacccaccatcggcgtggatgctaccgcaacttcgatctacggttattccatgcctcattccctagtaaccctgtcccccgtatgtactgaattggttggtgccatggatgctgcagatatcatcatcggtacggacgactccagcaattatccatcaatcatagctaaggggaaggcagagcatacgattgatgttgtaggaacatatacggatcctagttacgaagctattctgcatgctcatgctgacatggtattctgcgatgcttcagcatattctcatgtaaccgtggcgagttctttgcggaattccaatgtcaattccgtggttatctatgatggggccgacctcgagaccgttctcaataacatattcatcgtgggaactgcgatgaattacgaattgcgtgcagcatatctggcctcacagatcgacatcgcactcgatacccttatcgcactaaccaatgcgaacgagggatacaagaccctcgttacgctgagttcagacccctctccgttcattgcgggtacagggacctatgtgaacgatatgctgtacaaaatgaatggttctaatgccatcaacgatcctgtatggccaagcaaaacacctaagactggatggcgtaacgtaactccatccataataatggacacgaacccctcttgcataatcatattcgattatgggaaatatcccgttggtagctatgatgagatgcttaatgctttatccgatgagtggaagaacacggatgcttataccaacggcaaaatctaccttttcgctgacggactaggggagatggcacagcgttccggcccgaggatcgcacagttgaccgaactcgtggccaggatcgtcaaccctgatgcgtttacggatggtgtcgtaatccccaacgccatcggtgatgactatcaggactatctgaaatatacaagccatttgggattcggtgagtga

SEQ ID NO: 16811 - DNA, 1410 bp, unidentified
  source 1..1410: mol_type = unassigned DNA; note = non-methanobrevibacter Methanogen
atgactgatctcaaccgccgttcgttcctcgcggcctccgccgcgctcgccggtgccgccgtagtgccctcggccgaagccgcgacctacagcccctgcacccgcatgccccgcaagtggaacgagaccttcgacgtgatcgtcgtgggctcgggcttcgccgggctcgcggccgctgccgaagcgaaactttccggcgcgaaacgcgtggttgtgcttgaaaagatgccgctccccggcggtaactcgaagatcaacggcggcattctcgccgttccgggaaacccggtccagaaggcgaaggggatccaggactccgccgcgaagctcgccgaggacatcaaagcgctcgttcaggtcactgaggacgacgagaccctcgtcgaagtgaagaacgacggaaagctgctcaccattatcgttcccgaggacaggctggccgccggtgtcgagtacaccaccggattcaccgttgtctgcgctgccgtcactgaggccatcatcgacaggtacaacgtgccgatgtacaaggccaacatggtgaaggccgccgtctggggcaaatacccgcagaccgtgaacttcgtcggagccaacgtcaaatccatcctcgagcccccgcagatgaacgagggtgccggattcgccctgaggaacatcatggcgaaccacgtcgttgctctcgtccagaggaacgccatgcagggcgccgcgctctcctcgatcttcgagacctgcgccgcctacgagatgggagacgccgtcgggcccttcgagaggcagcacctgctcgccctcgcctaccagggactgaacgccaacaacctcgtctactccctcgttaagaagaacgggaagaccggaaccgtcggaaccgttatcgcctccctcatggagagggcaatcgacgacggagtcatccgcgtgaaagagaccctcccgtccggatacaagatgtacaccaccgatgaccttcccatgtggaacgcctacgccgcggccggagaggtcgccgccgtcatggtcaacgtcggtgctgcccgtgcggcccagggaataccctccactgttctgtactacaacgaccttctcgagcacgagtcctcgctccccggagtcgactacggccgtgctgagggtgtcggtgtcggaatgtccttcttctctcactccatctacggaggcggaggacccggactgttccacggaaaccacgtcgttaccaggcacgccaagggaaccctcatccccgctgtcaccgcaggaaactgcctcgatggcggaacccagaccttctctgctgaggccacttccggtctcttcaaggatgtcttcggaggaatgcccgagttcaacactccgatgcagttcgtcggagccgaggccaagaagatcaggaacaagatctga

SEQ ID NO: 16812 - DNA, 1371 bp, unidentified
  source 1..1371: mol_type = unassigned DNA; note = non-methanobrevibacter Methanogen
atgaagatcggcatcaagctgatgaccgtgctggcagtcctgctggcgatcaatatctccggcgcggccgccatcgccggaatgatgggaggggacggaaacagcggaggcacatcgagcgccagcggggaatcgaggctctgggtattcggcaatgcgaaccaggacgacaggatcgatgaaaccgacatcgattacctgaacggcgtgctggacgggacatacgaggagaacaggctctgcgatgccaataacgacggcgtcgtggattccaaggacgcggattacataagcaggatcatcgcggccgcggagaacgggacagacgagatcaccgtgtggtacatcgacagctacctgaaggtcgcatccgtcgattggccggtgaactcgatcgccatcggctactgcagcggggcgtacgcagcggacatcgcgcacctgtgctccaaagtgacgatggtggacaataccatcaagaactactggtcgggcatgaactcgcatttcgcttccgccgaatcgttcggcaccactgaggaccccgatacagaggcgatgatgaaggcgggcatcgatgtctatgtggtcggttactgcgacgagaacgcggaccagctaacgccttccaagctgaatcccgccggcatcgacgtcatgttcctgacgaccgcggacaacagcggcatcgacgagcccaacgagtacatcgaccgttcgttcctgatattcgcctatcttctccagggggacatggacaatgcctatgcctaccttgcatggcatgacagggtcctgagcgccctcgaagatgcgggatcctccgttacggatgatgagaaagcatcgttcgtcatggccaggtcgtccttccaatatcagaagtccacgatatccgtcaccgggtacaacaacaccaataacatccatgccgaatgggtcggagtctacgcggccggccagcacagctcggtcctgtcgaagaactacaactccctgaccgaggagcaggtactggaggtggtatcgtccgagaagagcgcatccggatacatctattacatggacaatgagcacgacggcatgaggcagcagcacacgctggaagaatgccttgccgccgatgccgagatgctctcagaggccgatgcgtacgtccatctcctgggcatggcccgcgaagcagggaactctccgatgtacgtggttgagctggcattctaccagaacgtcatgtacccggagctctactcgggggtcaattggaagagcctcttctgggagtacttcaccttctcagaagaggattacacgagtatcatcgatatcgaccgtttcttctacgattacggagtcgtcacaaaggcctga

SEQ ID NO: 16813 - DNA, 1281 bp, unidentified
  source 1..1281: mol_type = unassigned DNA; note = non-methanobrevibacter Methanogen
atgaactcctacgccaaggccctactcctcatagcggtatcagccttggctctctcggtactcgcgtcccccgggacctcggcggaggatacctcgtggaccgacgtcgattccgagagcggactgaccgaagccctgaacggcggagcgaagaacatccgcatcgtctccgacatcacggtgaccggggacctgaacatcccggccggggtcagggtcctcatcccctacggggcggacgacatctccggactgaaggtagggggagagacgttcaggatcgccgggagcagctacgtccacctcaccgtgaccctcagcgggaacctggtcgtcggcggagagctgatcatcggagggaccataggcaacagcaataccttctcctaccagggacacacctccgcaggccattcggtgctggtgaacaacggatccatcgcggtgaagtccggcggctccgtgagctgcttcggattcgtcaggggctccggggagatcgtggcggagagcggttcgacggtcaccgagcccgtcgtcatcacggactacaccggcggcgacaacctgatgagcagccacaacgccaaccaggccatcttcaaccgctacagcatctccaacatcaggtgccccctgcagatcgaccacggagcgacccttctcgggaaggtggccatcagcgtctccggcatgatacacgagaaccaggttacctacatcggggagacagccaccttcatcagactgtcggaaggcgcaagtgccagactcacctacagtgcatccccgtcgatagagagcagcgagagcctcggactccattcggacatcgggaagaccactgtcaccataaccgggggcgccaccttcgaggcgatggagatcctcgtgaacaacgacttcatcaacgcgagatactccttcgccgagcaccccttccccctcccctacaccacggtcctggagaacgggaactacctgatgaacgaggacttccgcatcctccccggagccaagctgaccgtgggggccgacgccacgctcgcggtgaacaactccctctccgtgctctggggcctggaggacaagacctacaaggacggcgtgcgcgtcgatatgaagtacccctccacctcgacgctgggttccagcgggttcgacaagtccggaaggctgatcgtgaacggcagcctcatcctgctggataacgcggatttcagcggtatcgcggagatggggagcgcctccgcctcgataaccacctccaagcgtacggac

SEQ ID NO: 16814 - DNA, 1206 bp, unidentified
  source 1..1206: mol_type = unassigned DNA; note = non-methanobrevibacter Methanogen
atgattggcttgatttgtctgtcgccgttctttttatatattttcctgatacgatattggactatacatccaagtgatttcatggaaaagaaaatactggcaatcgcggccgtggcggtagtgatcatcgccggtgccgccgcagccgtcgtcctcaccgatgatgatggctcgtccgacagcaagaagggattctattcgtgggacccgaccgtcgtcgaggtgaacggcgactactccaactgcactccctacttcatgaccatagccgagaccgtttacgagaaggtctacggcgacgttccggaatacagcggcatcgcccgctcagacataccctcggagtacctctactcctacgacagttacgtgaccgcctccacagaggacaccatcactgtcaagaccttcgacaacaccagcaccggcacctcctctgcttacctggagaagaccgtgaacagcagtcccgtcaaggtcatctgctacaccgatgcttacatcgacaccatctacatgatcctctgcaacaaatacggggagaccgcccactcagggaacaccccgcaggcagacgaagctctctgggacctcatccctgccatgacctcgagcgtcaagagcggccttgaaagcaagttcggcctcaccgtcccggcatccgtcacgatcctcggtaccggccaggaggaccttgtcaactactgcagcgagcactctgatacccagacgatcgtcttcatgtccgagtacaatatccgcgccaccaacaagaacagctggtgggacaactgccaggccatcgaatccaacacctccgggaacatccagttcatcttcaccctttccaactctccggccatggtcctctcgaccatcgagatgatcggcaaggtcatcggctcggacaacaccgacgccatgatgacctccatcctcgccgagatatacgtcatgcagaaagccatagacggatccgggaaagagatcagcttctactgcgagaccgccagcgggaacagcgtcggctccaacaccctcatgggcgggatcttcagcagcatcctcaagatggagaacgtcttcgacggcagcctcatgggaagcaagatgagcgacgagcagatcatctccgccgaacctgacgtcatcggcttctacaccagcgacacacgctcgatggacgagaagatgcgcgcggcctga

SEQ ID NO: 16815 - DNA, 1188 bp, unidentified
  source 1..1188: mol_type = unassigned DNA; note = non-methanobrevibacter Methanogen
atgggcgggaaaggcaggagatgctccgaagatgcagagtatgataatatgaatgcgaagaaactagcgatcctgtctgcgatcgccgcgctggcgatggttttcgccgcggctgcggtcgtacagggctctgaggattcagctgcagatgatgcataccagaccctcgttgtgggcgacggggacggagagtatgcgaccatcgcagccgctctcgagaaagcaaggaatggagaccacatacagcttgccaaagacgtcgaagaagacgtaacgatcgctgctggcaatgtggtcctcgacctcaacggccacaagctgaccaatgtttcgtccgatacgatcaccgtcgcgctcggggccgagcttatcatcacggacagctccgatggcaaagggaccgtggacaacgtcaccgacggcaaggccgctgtgttcaacaacggcaccgtcacgatccagaacggcaaattcatccgctccctcgagaccggggtctctcccaaagaaaaaggagacaacagtttctacaccgtcctcaaccatgggattatgaccgtcgagaacggaaccttcgagaacagcggaaagttctccagtctattcgagaacggctactatacttatgccagcaccgattccaggagcggttatgtcgagagcaccaaccagaccgcgccctcgctgacaatcaacggcggttcgttctccggcggagtcaacgcaatcaagaacgatgacggaggagtcctcgagattaccggcggcaccttcgagaacgtgacgcagttctgcgtcatgacctactcgaacgcctctatcaccggaggaacctacaagatctccgattcggcctcggcagccatctactgcaagggcgacaagaccgctcccaccgacctcggcaagctggggatctccggaaacctcggtaagatcatactggcgaacgacgccgacgttaccctctcgggagacgtcactaccgatgtgatcgtatgcggcagcggcgccgccaccatcgacctgaacggccacaagctgaccaacgcctccgatgacaccatcacagtggcgctcggggccagccttactatcactgggaacggcaccgtcgacaacctcaccaacgggaaggccgacgtcttcaacaacggcaccgtcgtcatcgagaacggcaagttcacc

SEQ ID NO: 16816 - DNA, 1131 bp, unidentified
  source 1..1131: mol_type = unassigned DNA; note = non-methanobrevibacter Methanogen
atgaagactctgttcaaatatatcaccatgatggcattgcccgtttttgcccttgcctcctgccagagcaatgacgatgacgatttcgacaacaaggctgccatcaacgcctcctccatggtggcggagaccatagtcaagggtagcgtcaactctgccacaaagacccttgagctcattacgccgcgcccggtggagcaggaggttaaagcctctttccgtgcggcacctgagttggtgggccgctacaaccaggcctattacacttcggccgtgctgctgcccgacacctgctatgcgtggcaggagaacaatgtcgtcatcaatccgggtagcgtgaagagtacgtcggccgtcatcgatttccaaaagcttggaagtctgagccgcgactctgtctatgtgctgcctgttacggcgcagacgcctgggctggagctgctgcagtcgaagagtacctattatttcgtcttccgcgccggtgccctcatcaatgtggtgcctgacatggaaaagaacaatatccgcattgactggaaaaatacggcgatgatcaacagcatgtcgcagttgacctttgaggctcttatccgtgcccgcgacttcgaccgcctcatctccaccgtgatgggtatcgagggctatttcctcatgcgtattggagacgccggtgtgccaagcaaccagattcagattgccaccagcaacggcaacctcaccaacagcgaccttcagttgcagaccaacaagtggtaccacctcgccctgacctacgattcttctaccggcaccatccaggtttatgtcaatggccgcaagatgctcgagggcacaaaatatctcggacgcatcaacctgaccgatggcgatttctatatcggacgctcctacgaggacagccgctatctcgccggcaacatcagcgaggtgcgcatctggaacgtcgtacgcacgcaggaggagattgccgccaatccctattacgttgaccccgcctcagagggcctcgtggcttactggaagctcgacgacatgtcaaccaacgtcgtaaaggactacaccatgtacggcaacgacggtaccgccaagaacacgctttcgtggcaaaacgtatcgctgcctgagaaataa

SEQ ID NO: 16817 - DNA, 1095 bp, unidentified
  source 1..1095: mol_type = unassigned DNA; note = non-methanobrevibacter Methanogen
atgaaagttaggaatgcgttactgttaacagctttagcagtgctgttaacagcgaccgtattgacaatagaatcagaaaatgaaggatcggaagacaccgaccagttggtaagacaagatgtcgatgacggatcatatctgcttctcggaggtgccttcaatccggaaaaggatatgacgaacatcgaagttagcaacaatgtaatttcggctcatttcaatttgagtggatattccgaatataactggacaataatcgatgaagataaaccccgttctacttctacaaccagtttctgcgaatatacgggagacgaaatcactactaccactccggatttgacattatccactccgggttacggagactatcagatcatcctttcagtcgatgacgaggaattcagcggagagatcgtactgatatctactttgacaaagaattatgaattcgaattcgacaatgaaaattgccagataacgtttgagatttcctatgaagaatattatgaaaccagaaagatagattcaaacagatctccgactgatgatagatacagcgactttgtcacagaagatgattcagtatcccaaatagcggatgaaatattggcgatttccgatggcaatgccgatgatgccgccgccatcgcattgtcctttgtccagctgttcatcgcttacccgccatgcaccctcgatggaaacggatccttcataatgagccccgacatgtacctggttgggaaggagaactacgcattctaccccatagaaacattattcttggaaacgggagattgcgaagatacttcgatactttacgcttcgatcttgaaagcgatgaacatcgagacaggattgctgttgatgcccgggcacatgatggcattggccgaattgaccggaggagacccggaaaacagcaattccagcctctccttatacaagacgagtgtagatgacagaacatattacgtttgtgaaacatcgtcatcccaaacgattccggtagggtacgcgtatgaatctgtcacgtttggaggcaatgacattcaatattatttgaatagcaattatatcgaatttatctaa

SEQ ID NO: 16818 - DNA, 1086 bp, unidentified
  source 1..1086: mol_type = unassigned DNA; note = non-methanobrevibacter Methanogen
aaaggtatgcttcaaatcaggaagaactatgctcctctcaagggcacaggcttctcaactccgaccttcacatcctcttacggatatgtaatcggctacacctacagcaacagcacctcaggtcagtggaacaagctggcggttctggttaactccaacgcaagcgcttcctacacaatcaacctgggcagctcaaactggacgatcgtcggcaacaacaccaccgcaggcgttaagtcacttggtacagtaagcggctcaagctacacgatccccgcaagaagcgttgctgttctggttgataccgcaagcttcaataacctcaagctcaacgaaagcttcggtactcttaccgttaagcatgttgacaacaagggcaacgtgctcaagacaagcacagccaagtacagagcaggcagcacataccgtgcgcttcccgacacaacactgctctacgactacaacctcaccaagaccgagggcacaacaacaggtacagtggcggcaaacggcaactacaccgtaaccttcacatacaccgacagcggcgtagcttcaggctacctcaacgtaaactatgttgaccagagcggaaaggcaatcaaagacgccaaggcacccgtcggactgatggatgtcgtctccctccccaagagcggagccaactaccgtgtccttctgaccagcaagggaaagctgaccctcgtccccatcaacgcggacgaagccaggtggatcctctgcaggatcgagaacaagaccaaggtagcaggcggaaagattcagctcaacctgtccggcggaaggaacatcctcgtcgacgagaacaagtacagcaccggtgacagcgtgaagctctgcctcgagaacaacaagatcgtcgcagactaccccctcgccgagaacgcagtcgtgctcgtcatctccggacgccacatcggcgccatcgagaccgtcgacaagtacaccgtcgtcaacaggcccaccgagaacaccatcaccttcaaggacaacaccgagaccgtgaagaagaacgtcttcgtcatcggcagcggcaagtctgagctcccggaggtctctgaatga

SEQ ID NO: 16819 - DNA, 1038 bp, unidentified
  source 1..1038: mol_type = unassigned DNA; note = non-methanobrevibacter Methanogen
atgagcttcggctcgcatatcggcaggaagagagcggccgaggctgccgtcgtcattgcgatctgcgccgtgatcttcatcggagaggcatatgcctatcttcctgacgactacggttacgggtcctcggtgtcggatgccggagattatgcagaatataccgtgacagtgaacggttcgcacgagtatgctgcgtccctgatctcctgcggagattatgtcccggtgtcatcagtataccttttcctcgaggaagggcgcacgtcccagtacagcgacggcagcgacctgttcctgtcccgcatggacgagcccgggttctatctggaacaaaccgagaccgctctcagagtatgcgggatcgatgatactgtctatatggacatggacggcctcgccgaggcgctgcagtccgacatatatgaggggaccgctgccggcaagggcctggtgatggtgtacggggcattcccgataacggtctacgacgggtcctccggcgggacggccctggaatggatggaagcgggcggcaccgtctattgggtagggccggcccccggcgattacgtgatggcccgcgatgggtacgaatacgccggcgggagggccttcttcaccggaacggccgaatatcttgccgaagacgatccggcggataccgaggggccgttcagaaaggagctgcagctcaagggcgatcttctgatgaacgcccccgacatgtccgggacagggatggaatctctcacggccggatatacgtccgggaacagagggaccctgacattcgtgagggaaggctccggacagatatgcatcgctgcaggcggggtctccctcttccaggcggaggatatcgcctcttctgcctcggccggcctgtgctggtgcagtgttctcttggatacctgctcgggcacggcgcacgggagcgattccgggacgctggacaagaacggggcctcgggcacgctctgtgtctacgtgaccgtcggcgatgcctaccagatatacgcgtgccggcatcagatctga

SEQ ID NO: 16820 - DNA, 1023 bp, unidentified
  source 1..1023: mol_type = unassigned DNA; note = non-methanobrevibacter Methanogen
atggataaacgcgattacgggctgataattctggctgtggcggtatgcgctgtcgtcctggtcggggagttcgccacctacggcaacatctacaggtacgactcctccgccgacgcgtccgggaacttctccgtctacgattcgggctcgcactgctacaccgcggtcctgtccgataacggcagcttccaggcccccaccaggttctacgtctattacgacgagggctacggcagcgtggtacacgacgctaaggtcgaggtcggtgccaaggcgctcgatcagaagtactacctcagtcagctggtcaacaatctgaagtactactcggtcaccgacgtgacctatgtcaacgccgcggagctggcgtccaagatgtccgaggccgggaccggcgtgggactcatcatgatatccggtgccatccccgagacggtctacagcggggctgcgggatgttcaatcctcacatggatcgcatcaggcggatcgctttactgggccggcgaggcgatcgggaagtacatcgggaaggcggacggaacgacctccgaggtcaccggttacgaggcactgttcctcggcgccggcaccctgaaccccgagaccggggacacccgcgccctgaacgatgtcgcggccaacagctaccgcagggacctctccctcaagaacaacgacgtgaggtatgcggtcaacatcgcctccgcaggtgccgattcattggccgtcggatacgagaaggacggatgtgccagcaccgtcctggtgaagaacggtgcgggaatggtgtgcgtcatgggaggcaactactccaacaaccagcgcatggacatggccaacatcatagcatccggaatctgctactgctccgccgagctcgactgcaagaccggaaacgtcgcccgcggcaccgtgaccggtaccttcagcaattggcccgccaccggcaacgtcgcagcgttcctgtacctgggaggcgacttctcggtctatggtaagctgttcacgatgaccctgtga

SEQ ID NO: 16821 - DNA, 1008 bp, unidentified
  source 1..1008: mol_type = unassigned DNA; note = non-methanobrevibacter Methanogen
atgtctgccaacagccacaacagaacgattgccgtcctcgcagtgttcggtctggtcttctcaggcatcaccttcatcggtaccagtgacgaatccgctgcggagaatgtctccgccactctttacattgtacctttaggaaacgaacaggccagcacatgggaccaagtgcagacatttcccagtgctctatccaaaacctatgtttgtaactacggttcgaccgtgaatatagatatctggcccagtgccggccctggtttcaacggagctgcattctcgttcacccagaccaacacgtccagcggactgtctctcagtaccaccatggagaagacctcccccatgggaacgggcacaaaagtgctgcacatcaccggaaccgcactcgacaacacctcggtcagggtctacaacaagacctccatgacaggttcctacgaggcattcatcaacttcaatgtgacgatgccttcctacacccacaccgtgacctactcggccaacggcggtaacggatccaccgagagcacggtcgtgaccgacagcaacaacggcaacaccgacgtcaccctggccgacagcggcttctccagggcgggttacaacttcgcgggatggaagataggcaatacaatctaccagcctggacagttcgtccccgtcgctgccgatacctcagtatcggcggtcgcccagtggacccccatccccgttaccatcacctcttccgccgagcaggcggacatcgtggtgggggactccttcgtcaggatgatcaccaccgatccctcgggagccacgctctcagtgagcggtgtgtcatgggtcacactgagcggatccacgctcgtgggtactcccacccaggccggtgattacacggtgacggtgaccgcatccaacgagagttcgtccgattcgcagaccatcgtcatccatgtggtgaaccgtctcgccttcgagagcgtccccaccggagggatccttgcaacgccggtgatatga

SEQ ID NO: 16822 - DNA, 1002 bp, unidentified
  source 1..1002: mol_type = unassigned DNA; note = non-methanobrevibacter Methanogen
gaatactacaagagtaacagcacctatcttgatgccttggctgagggcggcttctcgccaagcatcttacagattagcgcctttgccaacaagaaggatgcaagtggctatgagtcagcttacaatgtagagggtttcttcggcaatgctcagtacaactacgacaacaagtacttcggctcattctcttatcgtcgtgatgcttcttcacgctttgccaaggagaaccgttggggtagcttctggtcagtaggcgctgcttggctgatcaacaaggaggcttggtttaatgctccttgggtagacgagttgaagttgaaggcttctatcggtcagcagggtaacgataacatcggcaactgggcttacaccgacctctataccttgtctcaggtttcagatacagagatgtctgcatctttcgcacgcttgggtaacaagaatatcacttgggaaactaccaccaacttcaacattggtacagagttcagtttcttcaagggtcgcttgagtggtagcttcgacttctataccaagaagactaccgacttgctcttctggttgcgtgtaccagagtcacagggtactcgtggctactatagcaatgtgggcgatctccgcaacacgggtgtcgagttgaccttgacaggtcacattttccgcaccaaggatttcgactggtcagttacagcaaacttggcacacaacaagaccgaaatattgaagcttgactctacttcaaagaaccagtttggtggtttctcacaggcaagtgacatgagctacaccatgtattggtacaaggagggtggacctctctacaatggtttcctgcctaagtatgctggtgtcaacgaaaagggtgaggcgctctattgggtagatgaggatatctcagacagtgaaagaacaggtcgccctgcccctcgacaagaagatcgctgtcgggaagcccgcgtccatgaccgacctgaagaagaggaccaccatcttcagggctga

SEQ ID NO: 16823 - DNA, 993 bp, unidentified
  source 1..993: mol_type = unassigned DNA; note = non-methanobrevibacter Methanogen
ctgaaccagatcggaatcggagccctgaagaaggagctttatgcgggacacggtatctccgtcgcctaccacacacccgtaggtgacgagaacttctacaaccccgagaccgccggccaatacgccaacgccctgctcgggaccaaccaccttgtgcaattggtgggatggaatgatgatgtgccagcaaccattttcaatacccgtgctcccggtaacggggcctggttatgcaagaacagctggggctcggaaaccgacagttacaccaaggacggagtcggctacgctaagagcacctacggaatcaagaactccgaaggaaaagcgacaggttacttctggatctcctactatgaccagaccatgaggggcgtggagagcctttccttcctcaccggattcggagacgagaacggattccagacctacaggcacgacaacatgcccgcttacgccggcacatacgtcggaggatacgaacaggaagccagctgtgcgaacgtgttcagtgctgcctcgaacgagatcctgaaggcggtttccgtaaggtcctctgcctacagctccgagatgaacatcaagatctacctcctcggagataacaccgcccccggtgcgggaaccctggtctatgaccacgacatgttcttccagttcgctggctaccacaccgtcctgctggacaaggacatcgccctagaagcaggaaagaggttcgcgatagtgaccactgagaagatcgataacgacggccagactatctacgcgtacaacgtcaacaccgcacccagcgaggagaaggccaaggccccgaacagcacctccaacgtctacggaatggcatacatcggagagggagagagtttcataaactacggtgaaggctggacagacctttcgatccccgagatgcacgctgcgattgccgagaagttccccggcgatgtgttcgacaacttcagtatcaaggcgttcaccgttctcgcctga

SEQ ID NO: 16824 - DNA, 1344 bp, unidentified
  source 1..1344: mol_type = unassigned DNA; note = non-methanobrevibacter Methanogen
gcccaggtcgtctacggatccttcggggacaagcacctgtacgctcagtggacggctcacgtgtactccctgacccttaccagcaccggagcatccgacggaagcgccaccgtgacctacctttccgacgagatcgcgtatctggtggatgcgaaggtcaccggatacaacgtcgtcggttacaacaccgagggcggtgtgctggtcatcgatgacgagaggcacctcgtggcctccgtggagggttacaccgacgccgacggaaggtggatcagggcacaggacaccgttctgacacccgcgaccgtgatccaggtgcacacgctgaccatcaactacgagttctccgcaggaggaaccgcggctgagcagtacgtgggacagttcgagtacggacaggcctacgacatcacctctcccgctgtcaccggatacacccccggcgatgccaagataaccggtaccatgggcgaagccaatgtcgagaaggcggtgctctacaccgtcaaccagtacaccatcaccttcagcggcaacggaggttcccctgcgggtgtcgtgcaggaactggattacggtgcgcccgtagtcgctcctgacgaccctgagagggaaggattcgtgttcaagggatgggaacctgccgtccccgcgaccatgcctgctgaaaacatcaccgtgaacgcagtatggtccgccaagccctcctctccctccgcagaggtcatagagatcgctgattcgcaggcggaaacggtcgtcatcgacttatccgtccctgcggtcgtcgaggccctaaacaacggctccaagaccgaggtagacctcaagggagacggatggaccatggagatccccaagtccgtcatcaccggcgccaccggaaacgtctctgcatccgcgaagaccctctccgacgatgccaaggcggccctgcctgaggaggcgaagaagctcgtcgagggcaagactgtgttctcgctgaacctctctgacagcaacggtgccgtcagcttcagcggaagcaagatcaaggtctccctgccctacgctctgaaggacggcgagaacgcggaccgtatctgcatgtactacatcgatgcggagaacaaggcggttagggtcgatgccacctacgacagtgccagcatgtgcgttgtgttcgagaccgaccacttctccacctggttcgtggacttcgacgcacccgcttccagcggaggaggtaacaacaccatgatcatcgtgggagtggtgatagccatcgccgcggtgctcggaatcttcggatacctcatcatgaccggaaagctgcagctcggagccctcggcaagaagcagtga

SEQ ID NO: 16825 - DNA, 1116 bp, unidentified
  source 1..1116: mol_type = unassigned DNA; note = non-methanobrevibacter Methanogen
atgaactacactaaaaaatcatatttggtcatcgcacccctcgcaatcatcaccatgattgtgtcagtcatccccgcaggactctcggacagctcggatgctgcttcaatcaccatcaccgacggatacgggaccgtgttctcgttcgatgacgaacctgcccatgtaatcaccgtcggcaaaggaataacctccacagtcattcaactgagcggtatcgacaagattgtcgttgccgacagttattccaagagcgatactgaccctgtctttgacatcctcaggcaatatgttaccgacggcaaaataaccgccggaggaaacatctactccagcggaaagtcccagctccagactgaaattatcaatgcagccgacactgcccacggaggagtcttcaacaaggagactgaccccgtcatcatcaccggcggaaacagctacatcacccccatcaaggattatctggtctccaacggattccagaagatcctcctttggaatgacataacagaatactccaagattcctgacttcgtaagcaccatctctaaaatcctcaccggttccgaatccgacaaggtcgcacagatgagacacgtctcggatgtaatcgcatccggtgtggaaggccacgaaaaagcggaagcgttctatgtcacatactccggaagcgtgttcaaggtaggcaacaccaactccctcgcaaactccatgatcggcgcagcgggcggaacctccatcaccaccgatgacggtaaagcaaagcccacttacgaggcaagcctcaccagtctcgtggagtctcatcccaaggcagtgatattcatcgatcagtccatcaacggcaacgaaagcagactcaacgacctgaagacccaggtaggtgataacgctaagatcgttcctctgaaagcactctggaacaactacagtatcgagagcatgaacggcgtatggaccatggcctgcgccatgtaccccgacctcttcagcggcgaagtccccacagttccagccaaacatgagaacaacaccctcctttacttcggagtgggtatggcggcagccatcataatcgccggagtaggattcatgttcctccgcaggcactga

SEQ ID NO: 16826 - DNA, 957 bp, unidentified
  source 1..957: mol_type = unassigned DNA; note = non-methanobrevibacter Methanogen
atggccgatgaagaggacgtgaaaccgaggaaagagcgcgagcccatttccctggtctgcctgattgtcattgtcgttgcgaccatcgcggtcgtcggtgcatacgtcaatgaccacatgatcaacgatgggaacgatacggaggccgacaccggcagcactgtggtcactgactacaccctgtcgctgtacgactactatgacaacggcggcgcgatctaccagaccaccgtggagagcatagctgattcgacccagtgggtccactccgccggttatacagaagcgacgtcctacagcacattctcggtgaccatcgggtccgggagcgtcctccaggcgttcaacgatgccctctacggcgcgaaggaaggggacaagatccgcctggcaatcccgctcggcgaaggctacactgcttccagcaccacgaagtccgcatcgatgagcggcctcaccaccccgacgagcgtcacgatggctgcatccgagttcaccaacatgtactctgatgtctctgttccctccaacggggctgcaaccgccatcgagaagaccgttctcggatggagcggcatcgccactgccagcagtgatggcaaagtcactgtcacatacatgccgactgcgggagaggagtatactatcgtggaaggcagcttcggcactgtgaaggcaagtgtcagcactgtttcgggcggagttatcacattcagtctcgtgatctccaatacccagaccgtgaccgaccagtactccgacgatctcgacggtttcagcgagatcaagatgatcaagctcagcctctacaatgtgaccgccggcagcgatgttatctccgggaccgtttacatcaacggcctcaacagcggcaacggcgagttcagctacaggaccctggccgagaactacaacaccgtcctgtactacgtcatcaccgtcaagtcggtcagctga

SEQ ID NO: 16827 - DNA, 561 bp, unidentified
  source 1..561: mol_type = unassigned DNA; note = non-methanobrevibacter Methanogen
atgatcgataagaagatcatcgcaatcgcagccgttgcgatactcgttgtcgccggcatttctgcaataatgatcatcggcaacgatgatgaggattctaaggacagcacggacttcgcaggcaaggaactggaggtcgcggacaatctggacaacggcatcgtagccgtgggccaggattccttcagatggatgacctatttcggcctggcggacaaatgcgacgagccggtctgcagcctgtccggcgggcagaagcagcgcgtcgccatcgcgcgtgcgctcatgcgaaagccctcgctgctgctggcggacgagccggtcgcctcgctcgacccggtcaccggtcggcagatcctcgcgctgctgcaggacattcagcgcacggagggtgtcgccattctcatgaacagtcataatctcgaccagagccgggcggtttccacccggctccttggcctgcatgccgggcggatcgtgctcgacggcgcgcccgccgccgtgacggacgcagacctcgcgcggatctacggcggcgcggaaagcggggctgcgccatga

SEQ ID NO: 16828 - DNA, 993 bp, unidentified
  source 1..993: mol_type = unassigned DNA; note = non-methanobrevibacter Methanogen
gtggttcctatctcggaagccataatcgagcagctttcgaaatgcggggactatgattacgagctcctgttcatcgataacgattccagagataccaccagggacaagatctgcctcctctgcgcccagaaccctaagatcaaggcgatattcaacgccaagaactacggacagttcaactccccctactacgggatcctgcaggccactggcgactgcgtgatcagcatggcggccgatttccaggaccctccggagctcatcccgcagtatgtggaagcgtgggaggagggatacaagctcgtgatgtgccagaagacctccagcaaagagagccgcctggtctacagggcccgccgttcatattaccgcttcatgaggaagcattcgagcgtggagtggctggagcaggtcaacggctcggggctctacgaccgcgagttcgtggagatcatgcgtaagatcgacgatcccaagccgttcctcaggggcgtcgtggccgagatgggctacaagatcaagctcatcccgttcgagcagccgaagcgcagggccggcaagtccagcaacaatctcttcagctactatgacggcgcgatgcagagcatcacatcatacacgaagtacccagtccggctggccgccggtctagggttggggctcacggccgtgagtgccgttgcatgggcagttgcgatcatcaacaaaatcctcaattgggattcctacgccttcacagatgatgttctggcacttgcgatattctcggcggtttctctcaatctgttcttcatcgggatggtcggggagtatgtgatgaacgtcaacgacagggtgaggaagcgccccctggtcgtcgaggccgagcgcatcaacttcggcagggagcgaatcagagaagaccgagtatatcgcggggggtgcgcgcgaagcggtgcccagcagggacatcttcggccgaacggtatccgaatccgtaaaggacggcgatga

SEQ ID NO: 16829 - DNA, 942 bp, unidentified
  source 1..942: mol_type = unassigned DNA; note = non-methanobrevibacter Methanogen
atcaccgaaggccatccggaagtgactgatattgttccgctgaatatgactgaaaacgaactgctggcactaaccgcttcggcagagttcggatcgcagcaccccatcgccaaggccatcgtcagaagcgctgaggaaaggggcatggaaatcgcatctgtatccggattcgacaccgtggtcggaaagggaattgtctgcaccgtgaacggcagaaaggtcgcagtgggcaatgcctctctcatggaggaggtcggtacggacatctccgccgctgctgaacactacaattcgctcaccgcagaggccaagacctgcatgttcgtctctgcggacggaaccatcgcaggaatcgtggcggtagctgacccgctcagacccacctcatcagaggctgtttcactcatcaaatcgatgggtgccatgccggtcatggtgaccggggacaacagacagaccgcggaggccgtggcacacgccgtcggtatcaatgaagtcaagtccgaagtccttccccaggacaagctggctatcgtgaagaagtaccagatcatgcagaagaccgtggccatggccggagacgggataaacgatgcccccgcactgacccaggccaatataggcatggcagcgggttacggcacagacatcgccataggcgcggcggacgtggtcctcatgaacagcgatccgagatcggtgcctgtcgctatggatatcggcaggaagacggtcaccaacatccgtcagaacctgttccttgccttcgtttacaatgcgatatgcatacccatcgcagcaggactcccgtaccttctgggtatgggggaattcagccacatgcccatgctggcggccgcggccatgtcctgctcctcggtatcggttaccctcaacgccctgaggatgtgcggatacagaccggcgttcgcgaatcagtga

SEQ ID NO: 16830 - DNA, 546 bp, unidentified
  source 1..546: mol_type = unassigned DNA; note = methanogen bacteria; note = non-methanobrevibacter Methanogen
atgcatggaaagggactgacgtccgaagaggtcaaggagagggcatcgaaaggactctccaacgacaaggaggaacgtcagagcaggggctatttcgagatcttcgccaagaacctgctcacccctttcaacgtggtcctcttcatcctcggtatcgccctcctctatttccaggagctcaccagcgccatcgccgccaccggagtcatcatcttcaacgtcatcgtctccaccgcccaggaatggaaggccaaacgccgtctcgacaagatcgcggtgctcatgaggcccaaggtcagcgccctccgcgacggggagctgaaggtcatcgaccgttccgagatcgtcatggacgacatcctcttcctgggagcgggcgaccaggcacaggtcgacggggtcgtcgacgacgagaagtccctggagatggacgagtccctcctcaccggggagtccaagaccatccgcaagcacaagggcgaccaggtcttctccggctcctactgcgtcaccggcgagtgctggatgctcgtcactggcgtcggc

SEQ ID NO: 16831 - DNA, 333 bp, unidentified
  source 1..333: mol_type = unassigned DNA; note = non-methanobrevibacter Methanogen
atgggactcagcaagaatcagaaactctacatcggatgcttcgcggtcatcggagtcttctgcgtggccaccctggcattggctgacggcggattcggcggatcggacgatgccggaggagagtcggcagacaagtacggatatgaagcctggaccggggacatcctcacgatcatcaccggcgaccccgattacgagcttcccggcgagaccgaatccatgctcttcgcagtacaggccgccatcggagctatcatcatcggatacttcatcggatacaacgccgctgtcggcaaaaccctgaagaaatccgaggaagagaagaaggaatga

SEQ ID NO: 16832 - DNA, 330 bp, unidentified
  source 1..330: mol_type = unassigned DNA; note = non-methanobrevibacter Methanogen
atggcactcagcaacaaccagaaactgtacatcggatgcttcgccgtcatcatcgtgatgagcgtcgtgttcctcgcatgcgtcaacggcgacttcggaggttccgacgacgccggaggaggagtcgcggacgactacggatacgaggcatggaccggagatatcctcaccatcatcaccggcgaccccaactacgagctccccggagagaccgagtccctcctcttcgcagtccaggccgccatcggtgcgatcatcatcggttacttcatcggcttcaacgccggacagaagagagccggaaccggcaagaccgagaccgaacagtga

SEQ ID NO: 16833 - DNA, 1500 bp, synthetic construct
  source 1..1500: mol_type = other DNA
atgaaggcgatcgttgccacagctttaaccttcgctctgataatcggcatgactgtgttctttatgagcattgacgaatttgaccaatcgtccgccgagcccccgctgggtttatccagcaccaagattaccctcgaggaaggcgacagttccgacctcacggtctggagtcttccatcggggacgacatatgataacatcagctgggagtccgacaccgaggacgtagctaccgtgagttacggtactgtgaccgccgtgagtccagggaccgccatgattacggcgagcgtctacagcggcggtgtcgagtacactgacacatgtctagtcactgttaccgataccgctgtggtgagtgctctgacagtctacaatccctattcagagaaatacgacagcgcggtcctgtcaggcaagggtttcctgggcgaagaatcaactgggggcgtgctgtccctgggattcaatcgcggcgggtatatcataatctctgtagcagggagcacatacagctggggagagagcctgaactccgtgggcgtggaggtccggaactattcccgtattgtcatgaggctcacttcagttagcggcgtttatgcaacctataatcctagctcatccgtatcccagtccacattcgtaacgaccagcggaatcacatacaacagtgtggcccagtccccttcactgtacctgaaagggctggactacggcacatacaatgtccagtttacagtttacaaggacgggtttctcagcagtactgagattgtgtcggtgacaggtactttcacctattccgaaggagatggaagatacgatacctcttcagaatttacccggttctatgcctggaacagcgatattaccggaagtagcgagctgtgcggcatcaaggtgacctacagctatgcggactattggaacgcagttcttcagagcaaggaagagatgattcactacagcaacggcatagcaagtgcccgatacgagtccgaatgtgtggattatgtcaatacggggaccgcagtgaagagcctcgaagccgctctcagggaggaatttgaatccacctattcttcttatacagacaaaagcgagatgtacgcccagttcatatttacgttcttgcagatccgcttcttctacgagaacgactacacccagtactacgactgctacagctctcattcctctggaacggatgtgtgggcatatccagagatgactatctattcgggcatgggggactgcgaggatacagccgctttgctatcctcactgttcaaagccgccggttacgatactgctctcatcatcctgcccagccacatgatgagtgccttggtgcttagcgattattcttacacagcatcgttcgaatacgggaacaagaaatactacttctgtgagagtactgccgattcaggagtgagaatcggatattgctcttcaacctaccaatacggcgagttttcctattattttgtgtga

SEQ ID NO: 16834 - DNA, 1443 bp, synthetic construct
  source 1..1443: mol_type = other DNA
atggtggacaattcctggattagtagagaccgcgtttcgactgatgctggaaaccgaatcattcgcgtgaaggtgttactaaccatcgccgtcatattaatcgggggctgtaccacttttcttatacacggtttgggcgcaaacgcgacccaataccaaagcgagggagtcgtgatagattttgggaattacaaaactgtctggacaaacatcagtttcagcgagacagacgatccggtcgaattgctgaataaggcctgcgactcccactacagcacaacgcctatcttcacagatggggttctgaccggcatagatgatggagaaaccgtgacttccaacgatgcccagcacacctgggacctgtggtacatcgagaaaggcaagtacgattacgtgaagagcgacacctattcaattaacgcatccgattacaccctgatttcatgggcatataccgaaacggatggcaagcccacaatcggcgtggacgctaccgccacttcgatctacggctactccatgcctcattccctggtcacactgtcccccgtgtgtactgaactggttggcgccatggatgctgcagacattatcatcggtactgacgactcgagcaactacccatcaatcattgccaaggggaaggcagagcatacaattgatgtggtaggaacatatacggaccctagttacgaagctattctgcacgcccacgctgacatggtcttctgcgacgctagcgcttatagccatgtgaccgtggcgagttctctccggaatagtaatgtcaatagcgtggtaatctatgacggggccgacctcgagaccgttctcaataacatattcatcgtgggaactgcgatgaattacgaactgcgtgcagcctatctggcctcacagatcgacatcgccctcgacacccttattgcactaaccaatgcgaacgagggatacaagaccctcgttacgctgagttcagacccctctcctttcattgcgggtacagggacctacgtgaacgatatgctgtacaaaatgaacggctctaatgccatcaacgatcctgtatggccaagcaaaacaccaaagactggctggcggaacgtgactccatccattataatggacacgaacccctcttgcattatcatttttgactacgggaaatatcccgtgggtagctacgacgagatgcttaatgccctttccgatgagtggaagaacacggatgcctataccaacggcaaaatctacctgttcgctgacggactcggggagatggcacagagaagcggcccgaggatcgctcagttgaccgaactcgtggccaggatcgtcaacccagatgcctttacagacggggtcgtaatccccaacgccatcggtgatgactatcaggactatctgaaatatacaagccacttgggattcggcgagtga

SEQ ID NO: 16835 - DNA, 1410 bp, synthetic construct
  source 1..1410: mol_type = other DNA
atgacggatctcaaccgccggtcgttcctcgcggccagcgccgcgttagctggggccgccgtagtgcccagcgccgaagccgctacatatagcccctgtacgcgcatgccccggaagtggaatgagaccttcgacgtgatcgtcgtgggcagtggctttgccgggttagcggccgctgccgaagcaaaacttagtggcgctaaacgcgtggtggtgcttgaaaagatgccgttgcccggcggtaactcaaagattaatggcggcattctagccgttccaggcaatcctgtccaaaaagcgaaggggatacaggacagcgccgctaagttggcagaggatatcaaagcgctcgtgcaggtcacggaagacgacgaaaccctcgtcgaagtgaaaaacgacggcaagctgctgaccattatcgtacccgaggatcgactggccgcaggtgtcgagtacacaaccggctttaccgtggtttgcgctgccgtcactgaggcaatcatcgataggtataacgtgccgatgtacaaggccaacatggtgaaggccgctgtctggggcaaatatccccaaacagtgaatttcgtaggagccaatgtcaaatcaattctcgaacctcctcagatgaacgagggggcaggatttgccctgagaaacattatggcgaaccacgtagtggctctggtgcagagaaacgccatgcagggcgctgcgctctccagtatcttcgaaacctgcgccgcatacgagatgggcgacgccgtagggcccttcgagcggcagcacctgctcgcactggcttaccagggactgaatgccaataacctggtctactctctggtgaaaaagaacgggaagactggaaccgtgggtaccgttatcgcctcgctgatggaaagagcaatcgacgacggagtcattcgagtgaaagagactctcccatccggatacaagatgtacaccaccgatgaccttccaatgtggaacgcatatgccgcggcaggagaggttgccgccgtgatggtgaatgttggtgctgcccgggcagctcagggaataccatccacggtgctgtattacaacgaccttttggaacacgagtcctcactacccggggttgactatggccgtgctgagggggttggtgtggggatgtccttcttttctcatagcatatacggcggcggtggacctgggctgttccacggaaatcatgtcgtgaccaggcacgccaaaggcacactgatcccagctgtgacagcaggcaattgcctggatggcggaactcaaacattctctgctgaggctacaagcgggttgtttaaggatgtgttcgggggtatgcctgagtttaacactccgatgcagttcgtcggagccgaggcaaagaagatcaggaacaagatctga

SEQ ID NO: 16836 - DNA, 1371 bp, synthetic construct
  source 1..1371: mol_type = other DNA
atgaaaatcggtatcaaattgatgacagtgctggcagtcctgttagcaatcaatattagtggcgcggctgccattgccggaatgatgggaggggacggaaacagcggaggcacatccagcgccagcggggaaagccgcctctgggtattcggcaatgcgaaccaggacgaccgaatcgatgaaaccgacattgattacttaaacggtgtgctcgacgggacatatgaagagaacaggctctgtgatgccaataacgacggcgtcgtggattccaaggacgctgattacataagccggatcatcgcggccgctgagaacgggacagacgagattaccgtgtggtacatcgatagctacctgaaggtggcatccgtcgattggccagtgaactctatcgccattggctattgcagcggggcttacgcagcggacatcgctcacctgtgctccaaagtgacgatggtggacaataccatcaagaactactggtctggcatgaactcgcatttcgcttccgccgaaagtttcggcaccactgaggaccccgatacagaggctatgatgaaggcgggcattgatgtgtatgtggtgggttattgcgacgagaacgctgaccagctaactccttccaagctgaatcccgccggtattgacgtcatgttcctaactaccgctgacaacagcggcatagacgagcccaacgagtacattgaccgttcttttctgatattcgcctatcttttgcaaggggacatggacaatgcctatgcataccttgcatggcatgacagagtactgagcgccctcgaagatgctggatcaagtgttactgatgatgagaaagcatcttttgtgatggcccggtcgtcctttcaatatcagaaatccacgataagtgtcaccgggtacaataacaccaataacatccatgccgaatgggtgggagtttacgctgccggccagcacagcagtgtgctgtcgaagaactacaactcactgaccgaggaacaggtactggaggtggtatcttccgagaagagcgcatccggatatatctattacatggacaatgagcacgacggcatgaggcagcagcacacgctggaagaatgtcttgccgccgatgccgagatgctctcagaggccgatgcgtacgtccacctcctgggcatggcccgcgaagcaggtaattctccgatgtacgtggttgaactggcattctatcagaacgttatgtacccagagttgtactcaggggttaattggaagagcctcttctgggagtactttaccttctcagaagaggattatactagtatcattgatatcgacagatttttttatgattacggagtcgtcacaaaggcctga

SEQ ID NO: 16837 - DNA, 1281 bp, synthetic construct
  source 1..1281: mol_type = other DNA
atgaactcctacgccaaagccctattactcatagctgtatcagccttggctctctcggtacttgcgagccctgggacctcggctgaggatacttcatggacagacgttgattctgaaagcggcctgaccgaagccctgaacggcggagctaagaacatccggatcgtctctgacatcacggtgaccggagacctgaacattccagcaggggtccgggtcctcattccctacggtgcagacgacatttccggactgaaggtagggggagaaactttcaggatcgccgggagcagctatgtccatctcaccgtgactcttagtgggaatctggttgttggcggagaactgatcatcggaggtacaattggcaatagcaataccttctcctaccagggacacacatccgcaggccattctgtgctggtgaacaacggatcaatcgctgtgaaatccggcggctccgtgagctgtttcggatttgtgaggggcagtggtgaaatcgtggcggagagcggtagtacggtcacagagcccgtcgttattacagactataccggcggcgacaacctgatgtcaagccacaatgcaaatcaggccatcttcaaccgctacagcatctctaatatccggtgccccctgcaaatcgaccacggagcgacccttctagggaaggtggccattagcgtatccggcatgatacacgagaaccaggttacctacatcggggagacagccaccttcatcagactgtcggaaggcgcaagtgcccgcctcacttatagtgcatctccgtctatagaaagcagcgagagcttgggactccattctgacattgggaaaaccactgtcaccataaccgggggcgcaacctttgaggctatggagatcttggtgaacaacgattttatcaacgctagatatagtttcgccgagcaccccttccctttaccttacactacggtgctggagaacggtaattatctgatgaatgaagactttcgcattctcccaggagccaagctgactgtgggggccgacgccacgctcgcggtgaacaattccctttccgtgctctggggcctggaggataagacttacaaggacggcgtgcgagtcgatatgaaatacccatcaacatcaacgctgggttccagcgggtttgataaatccggcaggctgattgtgaacggcagtttgattctactggataatgctgatttcagtggtatcgctgagatggggagcgcctcagcctcgataacaacctccaagcgtacagat

SEQ ID NO: 16838 - DNA, 1206 bp, synthetic construct
  source 1..1206: mol_type = other DNA
atgattggcttgatttgtctgtctccgttctttttatatatttttctgatacgatattggactattcatccaagtgatttcatggaaaagaaaatactggcaattgcggctgtggcggtagtgatcatcgccggtgccgctgcagcagtggtcctcaccgatgatgatggctcgtccgacagcaagaagggattctattcttgggaccccaccgtcgtggaggtgaacggggactactccaactgcactccctacttcatgaccatagccgagactgtttacgagaaagtttatggcgacgttcctgaatacagtggtatcgcccgctcagacataccctcggagtacctgtattcctatgacagttatgtgaccgcctcaacagaggacaccatcactgtcaaaaccttcgacaacacaagcacaggcacctcctctgcttatctggagaagactgtgaacagcagtcccgtgaaggtgatctgttacacagatgcttacatcgatacgatctatatgattctgtgtaataaatacggggaaaccgcacactcagggaacacaccacaggcagacgaagctctctgggacttgatccctgccatgacctcgagcgtcaaaagcggccttgaaagcaagttcggcctaacggtgccggcatccgtcacgattctcggtacaggccaggaagaccttgtaaattactgcagcgagcactctgatacccaaacgattgtgttcatgtccgagtacaatatcagggccaccaacaagaatagctggtgggacaattgccaggctattgaatccaacacatcagggaatatccagtttattttcacgctgtccaactctccagccatggtcctatctactatcgagatgatcggaaaggtcattggctctgacaataccgatgccatgatgacctccatcctcgccgaaatatacgtaatgcaaaaagcgatagatggatcagggaaagagatcagcttttactgcgagactgccagcgggaacagcgtgggttccaacacactgatgggagggatcttcagcagtatcctgaagatggagaacgtttttgatggaagcctcatgggaagtaagatgagtgatgagcagatcatctccgctgaacctgacgtgatcggcttttacaccagcgacacaagatcaatggacgagaagatgcgggcggcctga

SEQ ID NO: 16839 - DNA, 1188 bp, synthetic construct
  source 1..1188: mol_type = other DNA
atgggcgggaaaggtcgaagatgctccgaagatgcagagtatgataatatgaatgcgaagaaactagcaatcctgtctgcgatagccgcgctggcaatggtttttgccgcggctgctgtggtacagggatctgaggattcagctgcagatgatgcataccagaccttggttgtgggcgacggggacggagagtacgccaccattgcagccgctctggagaaagcaaggaatggagaccacatacagcttgccaaagacgtggaagaagacgtaacgatcgctgctggcaatgtggtgttggacctcaacggccacaagctgaccaatgttagttccgatacgatcaccgtggcgctcggggccgagcttattattacggatagctcagatggcaaagggactgtggacaatgtgaccgacggcaaggccgctgtgtttaacaacggcaccgtcacgattcaaaacggcaaattcatccgctccctggagacaggggtttctccaaaagaaaaaggagacaatagtttttacaccgtgctcaaccatgggattatgacagtcgaaaacggaaccttcgagaacagcggaaagttctccagtctattcgaaaacggctactatacttatgccagcaccgattcacggagcggttatgtggaaagcaccaaccagacagctcccagcctgacaattaacggcggtagtttttcaggtggagtcaacgcaatcaagaatgatgacggaggagtgttagagattacaggcggcactttcgagaatgtgacgcagttctgcgtcatgacctactcgaacgcctctatcaccggagggacctacaagatctccgatagcgccagtgcagccatctactgcaagggcgacaagactgctccgacagacctcggcaagctggggatctccggaaatttgggtaagatcatactggctaacgacgccgacgttaccctgtcgggagacgtcactactgatgtgatagtatgtggcagcggtgccgccacaatcgacctgaacggccacaagctgactaacgcctccgatgacacaatcacagtggccctcggggccagccttactatcactgggaatggtaccgtcgacaatctcacgaacgggaaggccgacgtcttcaacaacgggaccgtcgtgattgagaacggcaagtttaca

SEQ ID NO: 16840 - DNA, 1131 bp, synthetic construct
  source 1..1131: mol_type = other DNA
atgaagactctgtttaaatacatcaccatgatggcactgcccgtttttgcccttgcttcctgccagagcaatgacgatgacgatttcgacaacaaggctgccatcaacgcttcctccatggtggcggagactatagtgaaggggtcagtcaacagcgccacaaagacccttgaactcattacgccgaggcccgtggaacaggaagttaaagcatctttccgtgcggcaccagaactagtgggccggtacaatcaggcatattacacttccgccgtgctgctgcccgacacctgttatgcgtggcaggagaataatgtggtcatcaatccggggagcgtgaagagtacatcggccgtcatcgatttccaaaagttaggaagtctgagcagggactctgtctacgtgctgcctgtcacggcgcaaacaccagggctggagctgctgcagtccaagagtacctactatttcgtctttcgggccggtgctttaatcaatgtggtgcctgacatggaaaaaaacaatatccggattgactggaaaaatacggcaatgattaacagcatgagtcagttgacatttgaagctcttatacgagcccgcgacttcgataggttgatctccaccgtgatgggtatcgaaggctatttcctcatgagaattggagacgccggtgtgccaagcaaccagattcagattgccaccagcaacggcaacctcactaatagcgaccttcagttgcagactaacaaatggtaccacctcgccctgacctacgattcttctaccggaaccatccaggtttatgtcaatggcagaaagatgctcgagggcacaaaatatctaggacgaataaacctgactgatggcgatttctatatcggaagatcctacgaggacagtcgctacctggctggcaacatcagcgaggtgcggatctggaacgtcgtacgcacgcaggaggagattgccgccaatccctattacgttgatcccgcatcagagggcctcgtggcttactggaagctcgacgatatgtcaaccaacgtggtaaaggactacacaatgtacgggaacgacgggaccgccaagaacacactgtcatggcaaaacgtatcgctgcctgagaaatga

SEQ ID NO: 16841 - DNA, 1095 bp, synthetic construct
  source 1..1095: mol_type = other DNA
atgaaagtgaggaatgccctgctgctgaccgctttagcagtgctgcttactgctaccgtgctgacaatcgaatcagaaaatgaaggatcagaggacaccgaccagctcgtaagacaagacgtggatgacggaagttatctgcttctcggcggtgccttcaatcctgaaaaggacatgacgaacatcgaagtgagcaacaacgtgattagcgctcatttcaatttgagtggctattccgagtacaactggacaataatcgatgaggataaaccccgctctacctctacaaccagtttctgtgagtacacaggggacgaaatcactactaccactcctgatctaactttatccaccccaggttacggagactaccagatcatcctttcagtcgatgacgaggaatttagcggagagatcgtgctgatttctactttgacaaagaactatgagtttgaatttgacaatgagaattgccagatcacgtttgagatttcctatgaagagtattacgagacccggaagattgatagcaaccgctctcctactgacgatcgatacagcgacttcgtcacagaggatgattcagtgtcccagatagcggatgaaattctggccatttccgacggcaacgccgacgatgccgccgccatcgcactgagtttcgtccagctgttcatcgcttacccgccatgcaccctcgacggtaacggcagcttcattatgagccccgacatgtacctggttgggaaggagaactacgcattctaccccatagagaccctgttcctcgagacgggcgactgcgaggatacctcgatactttacgcttcgatcctgaaagccatgaacatcgagacaggcttgctgctcatgcccgggcacatgatggcattggccgagctaaccggaggcgacccggaaaacagcaactccagcctctccctgtacaagaccagtgtagatgaccggacatattacgtttgtgagacatcgtcatcccaaacgattccagtggggtacgcgtatgagtctgtcacgtttgggggcaacgacattcagtactatctcaatagcaattatatcgaatttatctga

SEQ ID NO: 16842 - DNA, 1086 bp, synthetic construct
  source 1..1086: mol_type = other DNA
aaaggtatgctgcaaattcggaaaaattatgctcctctcaaaggcacgggcttctcaactccgacctttacatcctcttacggatatgtaattggctatacctacagcaattccacctcagggcagtggaataagctggccgttctggtgaactccaatgcaagtgcttcctacacaatcaacctggggagcagtaattggacgatagtcggcaacaacactaccgcaggggtaaagagtcttggtacagtaagtgggtcaagctacacgatccccgcaagaagcgtggctgttctggttgataccgcaagctttaataatctcaagttgaacgaatcgttcggtactcttaccgtgaagcatgttgacaacaaaggaaacgtgttgaaaacatcgacagccaagtaccgagccggcagtacataccgtgcgttgccagacactacactgctatatgactacaatctcaccaagacggagggcacaactactggtacagtggcggctaacggcaactacactgtgacctttacatacaccgatagcggcgtagcttcaggctacttaaacgtgaactatgttgaccagtccggaaaagccatcaaagacgccaaggcccccgtgggactgatggatgtcgtctccctgccaaaaagcggagccaactatcgggtccttctgaccagcaagggaaagctgacgctggtgcctatcaacgcggatgaagccagatggatcttatgtcgcattgaaaataagacgaaggtggcagggggaaaaattcagctcaacctgtccggggggaggaatatactcgtcgatgagaataaatacagcaccggcgacagcgtgaagctctgcctagagaacaataagattgtcgccgactatcccctggccgagaacgctgtggtgctggtgatctccggacgccacataggggccatcgagaccgtcgacaagtacaccgtggtgaataggcccactgagaacaccatcactttcaaggataacaccgaaaccgtgaaaaagaacgtgttcgtcatcggcagcggcaagtctgagctcccagaggtctctgaatga

SEQ ID NO: 16843 - DNA, 1038 bp, synthetic construct
  source 1..1038: mol_type = other DNA
atgagctttggctcgcacatcggcaggaagcgagctgccgaggctgccgtcgtcattgcgatctgcgccgtgatcttcatcggagaggcatatgcctaccttcctgacgactacggttacgggtccagcgtgtcggatgccggagattatgcagaatataccgtgacagtgaacggtagccacgagtatgctgcttccctgatcagttgtggagattacgtcccagtgtcatcagtataccttttcctcgaggagggtcgcacgtcacagtacagcgacggcagcgacctgttcctgtcccggatggacgagcccgggttctatctggaacaaaccgagaccgctctcagagtttgcggaatcgatgatactgtctatatggacatggacggcctcgccgaggcgctgcagagcgacatttatgagggcaccgctgccggcaaaggcctggtgatggtgtacggtgcatttccgattacagtgtacgacgggtcctccggcgggacagccctggaatggatggaggcaggaggcacagtatattgggtagggccagcccccggcgattacgtgatggcccgcgatggttacgaatacgccggcggtcgtgccttcttcaccggaacggcagaataccttgctgaagacgatccagcggacaccgagggacctttcagaaaggagctgcagttgaaaggcgacttactgatgaacgcccccgacatgagcgggacagggatggaatctttgacggccggatatacttcagggaaccgggggaccctgacatttgtgagggaaggcagtggacagatatgtatcgctgcaggcggtgtctccctctttcaggcggaggatatcgcatcttctgcctctgccggcctatgctggtgtagtgttctattggacacctgcagtggcactgctcacgggagcgattccggaactctggacaagaatggggcatctggaactctctgtgtttacgtgaccgtcggcgatgcctaccagatatacgcgtgccggcatcaaatttga

SEQ ID NO: 16844 - DNA, 1023 bp, synthetic construct
  source 1..1023: mol_type = other DNA
atggataaacgggattacgggctgataattctggctgtggcggtatgcgctgtcgtcctagtgggggagttcgccacctacggcaacatttaccgatacgacagtagcgccgacgcctctgggaactttagtgtctacgattcaggctcgcactgttacacagctgtgctgtccgataatggcagctttcaggccccaactaggttctatgtttattatgatgaaggctatggcagcgtggtacatgacgctaaagtggaagtgggtgccaaagcgctcgatcagaagtactatctcagtcaactggttaacaatctgaagtactacagcgtgacagacgtgacctatgttaacgccgcagagctggctagcaagatgtccgaggccgggactggcgtgggattgatcatgatatccggtgccatccccgagacggtctacagcggggctgctggatgttcaatcctcacatggatcgcatcaggcggatcgctttactgggcaggcgaggcgatcgggaagtacatcgggaaggctgacggaacgacatccgaagttaccggttacgaagcactgtttttgggcgccggcacccttaaccctgagaccggggacactcgcgccctgaatgatgtggctgcaaacagctacagaagggacctctctctaaagaataacgacgtgagatatgcggttaatattgcctccgcaggtgccgattcattggccgtcggatatgaaaaagacggatgtgccagcaccgtgctggtgaagaatggggcggggatggtgtgcgtcatgggaggcaactactccaacaatcagcgcatggacatggccaacatcattgcaagtggaatctgctactgctccgccgagctcgactgcaagacaggaaacgtcgcccggggcaccgtgaccggtacctttagcaattggccggccactggcaacgtagcagctttcctgtatctgggaggcgacttctctgtctatggtaaacttttcacgatgacattatga

SEQ ID NO: 16845 - DNA, 1008 bp, synthetic construct
  source 1..1008: mol_type = other DNA
atgtctgccaacagccacaacagaacgattgccgttctggcagtgtttgggctggtcttctcaggcattacctttatcggcaccagtgacgaatccgctgcggagaatgtatccgccactctttatattgtaccacttggaaacgaacaggccagcacatgggaccaagtgcagacatttcccagtgctctatccaaaacttatgtttgcaactacggtagtacagtgaatatagatatctggccaagtgccggccctggtttcaacggagctgcattctcatttacccagacaaacacgtccagcggactgtctctgagtaccaccatggagaagaccagtccaatgggcacgggcacaaaagtgctgcacatcaccggaactgcactcgacaacacatcggtcagggtatataacaagacaagcatgacaggtagctacgaagcatttatcaacttcaatgtgacgatgccttcctacacccacaccgtgacctattcggccaacggcgggaacggatcaacagaaagcactgtcgtgaccgacagcaataatggcaataccgacgtcacactggccgacagcggcttctcccgcgctgggtacaacttcgcgggctggaagataggcaatacaatttaccagcctggacagttcgttcccgtcgctgccgataccagcgtatcggcggtcgcccagtggacccccattcccgttaccatcacttcttccgccgagcaggctgacattgtggtgggggactccttcgtccggatgatcaccaccgatccgtctggggccacgttgtcagtgagcggggtgtcatgggtcacactgagcggatcaacgctcgtgggtactccaacccaagccggggattacactgtgacggtgaccgcatccaatgagagttcttccgatagccagactatcgtcatccatgtggtgaaccgactcgcttttgagagcgttcccactggcgggatcttagcaactccggtgatatga

SEQ ID NO: 16846 - DNA, 1002 bp, synthetic construct
  source 1..1002: mol_type = other DNA
gaatactacaagagtaatagcacctatcttgatgccctggccgagggcggcttctcgccaagcatcttacagattagcgcctttgccaacaagaaggatgcatccggctatgagtccgcttacaatgtggaggggttctttggcaatgcgcagtacaactacgacaacaaatactttggcagcttctcctatcgaagagatgctagctcccgctttgccaaagagaaccgctggggcagcttctggtccgttggcgcggcttggctgatcaacaaagaggcatggtttaatgccccctgggtggacgagttgaaactgaaggcttctatcgggcagcaaggaaacgataacatcggcaactgggcttacaccgacctctataccctgtctcaggtgtcagatacagagatgtctgcctcctttgcacggttgggaaacaagaatataacatgggaaactacgaccaacttcaatattggtacagagtttagtttcttcaagggacgcctaagtgggagcttcgacttctataccaagaaaactaccgacctgctcttctggctccgtgtgccagagagtcaggggactcggggctactatagcaatgtgggcgacctcaggaacacgggagtcgagttgaccctgacaggtcacattttccggacgaaggattttgactggtcagtcacagccaacctggcacacaacaagaccgaaatactgaagcttgactcgacttcaaaaaatcagtttggagggttctcacaggcaagtgacatgagctacaccatgtattggtacaaagaggggggacctctctacaatgggttcctgcctaagtatgctggagtcaacgaaaagggtgaggcgctatactgggtagatgaggatatcagcgactccgaaagaacaggtaggcccgccccccgacaagaagatcgctgccgggaagccagagtgcatgacaggccggaagaagaggaccaccatctgcagggctga

SEQ ID NO: 16847 - DNA, 993 bp, synthetic construct
  source 1..993: mol_type = other DNA
ctgaatcagataggcatcggcgccctgaagaaggagctttatgcaggacacggtatttccgtggcctaccacacaccagtaggtgacgagaacttctacaatcccgagactgccggccaatatgccaacgccctgctcgggacgaaccacttggtgcaattggtgggctggaatgatgatgtgccagcaaccattttcaatacacgagctcctgggaacggggcctggttatgcaagaatagctggggctcagaaactgatagttatacgaaagatggagtcggctacgctaagagcacgtacggtatcaaaaactccgaaggaaaagcgacagggtacttctggatcagctattatgaccagaccatgaggggcgtggaatctctttctttcctgaccggatttggagacgagaacggatttcagacctaccggcacgacaacatgcctgcttacgccggcacatatgtcggcgggtacgaacaggaagccagctgtgcaaacgtgtttagtgctgcctcgaatgagattctgaaggctgtttccgtacgctcctctgcatacagctcagagatgaacattaagatttatctcctcggtgataataccgcccccggggcgggaaccctggtctatgaccacgacatgttctttcagttcgctggctaccataccgtcctgctggacaaagacatcgccctagaagcaggtaagagatttgctatagtgaccactgagaaaatcgataacgacggccagactatctacgcttataacgtcaacaccgcacccagcgaggaaaaggccaaggccccgaatagcacttccaacgtgtacggaatggcatacatcggggagggggagagtttcataaactacggggaaggctggacagacctgtcgatcccagagatgcatgctgcgattgccgagaagtttcccggcgatgtgttcgacaatttctcaatcaaagcgttcacagttctcgcctga

SEQ ID NO: 16848 - DNA, 1344 bp, synthetic construct
  source 1..1344: mol_type = other DNA
gcccaggtggtctatggatcatttggggataagcacctgtacgctcaatggacggctcacgtgtactccctgacccttacaagcacgggggcaagtgacgggagcgccaccgtgacctatctttcagacgagatcgcgtatctggtggatgcaaaagttactggctataacgtcgtcggctacaatacagagggcggtgtgctggttatcgatgatgaacggcatctcgtggccagcgtggaggggtacaccgacgccgacgggcgatggattagggcacaggacaccgttctgacaccagccaccgtgatccaagtgcacacgctgaccattaactacgagttcagtgcaggaggcaccgctgctgagcagtacgtgggccagtttgagtatgggcaggcctatgacattacctctccagctgtcaccggatatacccccggcgatgccaagataaccggtaccatgggcgaagccaatgtcgagaaagcggtgctctacactgttaaccagtacactatcacattcagcggcaacggaggttcaccggcgggggtagtgcaagaactggattacggtgcacccgtagtcgctcctgacgatcctgaaagagaaggattcgtgttcaagggctgggaaccggccgtgcccgcgactatgcctgctgaaaacattacagtgaacgcagtatggtccgccaagccatcctctccatccgcagaggtaatagagatcgctgattcgcaggctgaaacggtggtcattgacttatccgtgccagccgtcgtcgaggccctaaacaatggcagtaagactgaggtagacctaaaaggagatgggtggaccatggaaatccccaaatccgtcattacaggcgccacaggaaatgtctctgcatctgctaagactctctccgacgatgccaaggcggccctgcctgaggaggccaagaagctcgttgagggcaaaactgtgttttcgctgaacttgtctgacagcaacggggccgtgagcttcagcggtagcaaaattaaggtctccctgccctacgctcttaaggacggcgagaatgcggaccggatctgtatgtactatatcgatgcagagaacaaggcagttcgcgtcgatgccacgtacgacagtgccagcatgtgcgttgtgtttgaaaccgaccatttcagtacttggttcgtggactttgacgcacccgcttcaagcggaggcggtaataatacaatgatcatagtgggggtggtgatagccatcgccgctgtgttgggaatcttcggatacctcatcatgacagggaaactgcagctcggcgccttgggcaaaaagcagtga

SEQ ID NO: 16849 - DNA, 1116 bp, synthetic construct
  source 1..1116: mol_type = other DNA
atgaattacactaaaaaatcatatttggtgattgcacccctcgcaatcattacgatgattgtgtcagtcatccccgcagggctctcggacagctcggatgctgcttcaattaccatcacggatggatatgggacagtgttttcattcgatgacgaacctgcccatgttatcaccgtcggcaaaggaataacgtccacagtgattcaactgagcggtattgacaagattgtcgttgccgacagttattccaagagcgatactgaccctgtgtttgacatcctacgacaatatgttacggacggcaaaataaccgccgggggaaacatctactccagcgggaagagtcagctccagactgaaattatcaatgccgccgacactgcccacggaggagtcttcaacaaggagactgacccagtcatcatcaccggcggaaacagctacatcaccccaatcaaggattatctggtctccaacggcttccagaagatcctcctttggaatgacataacagaatactccaagattcctgacttcgtaagcacaatttctaaaatcctaaccggttccgagtccgacaaggtcgcacagatgcggcacgtcagtgatgtgatcgcgtctggggtggaaggccacgagaaagcggaggcgttctatgtgacatactccggctcggtgtttaaggtgggcaacaccaattccttagccaacagtatgatcggcgcagccggcgggacctcaatcacaacagatgatggtaaagctaagcccacttacgaggcaagcctgaccagtctggtggagtctcatcccaaggctgtgatatttattgatcagtctatcaacggcaatgaaagcagactgaacgacctgaagacccaggtgggtgataacgctaagattgttccgctgaaagctctgtggaataactacagtatcgagagcatgaatggcgtatggaccatggcctgcgccatgtacccggacctcttcagcggcgaggtgcccacagttccagccaaacacgagaataacaccctgctttacttcggggtggggatggcggctgccataataatcgccggagtaggatttatgttcttgcgcaggcactga

SEQ ID NO: 16850 - DNA, 957 bp, synthetic construct
  source 1..957: mol_type = other DNA
atggccgatgaagaagacgtgaaaccaagaaaagagcgggagcccatttccctggtctgcctgattgtaattgtagttgcaaccatcgctgtcgtcggtgcatacgtgaatgaccatatgatcaacgatgggaacgatacggaggccgacactggtagcactgtggtgactgactatacactgtcgctgtacgactactatgacaacggaggagctatataccaaaccaccgtggagagcatagctgactcaacacagtgggtacactccgccggttatacagaagcgacgtcctacagcacattcagtgtgaccatcgggtccgggagcgtgctacaggcctttaatgatgccctttatggcgcgaaggaaggggacaagatccgcctggccatcccattgggcgaagggtacactgcttccagcactacgaaatccgcatcgatgtcaggattgaccaccccgacgtctgtcacgatggctgcatccgagtttaccaatatgtattctgatgtgtctgttccctctaacggggctgcaaccgccattgaaaagaccgttctcggatggagcggcatcgccactgcctcaagtgatggcaaagtcactgtgacatacatgcctacagcgggagaggagtatactattgtggaaggcagcttcggaacagtgaaggcaagtgtcagcacagtttcaggcggagtgattacattcagtctcgtgatctcaaatacgcagaccgtgaccgaccagtactccgacgatctcgacggtttcagcgagatcaagatgataaagctttctttatacaatgtgaccgccggcagtgatgttatctccgggacagtctacatcaacggcctcaacagcggcaacggcgagtttagctataggaccctggccgagaactacaacaccgtcctgtactatgtcatcaccgtgaagtcggtgagttga

SEQ ID NO: 16851 - DNA, 561 bp, synthetic construct
  source 1..561: mol_type = other DNA
atgatcgataagaagatcatcgcaattgcagccgtggccatattagtggtcgccggaattagcgcaataatgataattggcaacgatgatgaggattcaaaggacagcacagatttcgcaggaaaagaactggaagttgcggacaatctggacaacggcatcgtagccgtgggacaggattccttcagatggatgacctattttggcctggctgacaaatgcgacgagccggtctgttcactgtccggcgggcagaagcaacgcgtcgccatcgcccgtgccttgatgcgaaaacccagtctgctgctggctgacgagcctgtggcctcgctcgacccagtgaccggtaggcagatccttgcgctgctacaggacattcagcgcactgagggtgtcgccattctcatgaacagtcacaatctcgaccaaagcagagctgtttccacaaggctccttggcctgcatgccgggcggatcgtgttggacggcgcacccgccgccgtgacggatgcagacctcgctcggatctacgggggagcggaaagcggggctgctccatga

SEQ ID NO: 16852 - DNA, 993 bp, synthetic construct
  source 1..993: mol_type = other DNA
gtggttcctatttcggaagctataattgagcaactttctaaatgcggggactatgattacgagctgctgttcatcgacaacgattccagagataccaccagagacaagatttgcctgctctgcgctcagaaccctaagatcaaggcaatatttaatgccaagaattacggacagttcaattccccctactacggcatcttacaggcaactggcgactgtgtgatcagcatggcggccgactttcaggaccctccggagctcattccccagtatgtggaagcgtgggaggagggatataagctcgtgatgtgtcagaagacctccagcaaagaaagtcgcctggtctacagagcccgcagatcatattaccgcttcatgaggaagcattcgagcgtggagtggctggagcaggtcaacggctctgggctctacgaccgggagttcgtggagatcatgcgtaagatcgacgatcccaagccatttctgaggggcgtcgtggccgagatgggctacaagatcaaactcatcccgtttgaacagcccaaacggagggccggcaagtccagcaacaatttgtttagttactatgacggcgcaatgcagagcatcacatcatacacgaagtacccagtgcggctggccgctggtctagggttggggttgactgccgtgagtgccgtggcatgggcagttgcgattatcaacaaaatcctgaattgggattcctacgccttcacagatgatgttctggcacttgctatattttcagctgtatctctaaatctgttcttcataggaatggtaggggagtatgtgatgaacgtcaacgacagggtgaggaaacgccccctggtcgtcgaagccgagcgcattaacttcggcagggaacgaatcagagaagaccgagtatatcgcggagggtgcgctcgaagcggtgcccaacaaggacaccttcggccaaacggtattcgtatccggaaaggacggagatga

SEQ ID NO: 16853 - DNA, 942 bp, synthetic construct
  source 1..942: mol_type = other DNA
atcaccgaaggccatccagaagtgactgatattgttcctctgaatatgactgagaacgagctgctggcactaaccgcttccgcagagttcggaagccaacaccccatcgccaaagccatcgtgcgaagcgctgaggaacgcggcatggaaatcgcctctgtatccggattcgacacagtggtggggaagggaattgtctgtacagtgaacggccggaaggtcgcagtgggcaatgcctctctcatggaggaggtcggtacggacatttccgccgctgctgaacattataatagcctcactgcagaggccaaaacctgtatgtttgtgtctgccgacgggaccatcgcaggaatcgtggcggtagctgacccgctcagacccaccagttcagaggctgtttcactcatcaaaagtatgggggccatgccagtcatggtgaccggggataacagacagacagcggaggccgtggcacacgccgttggtattaacgaagtcaaatccgaggtccttccccaggacaagctggctatcgtgaagaagtaccagatcatgcagaagacagtggccatggccggcgacgggataaacgatgcccccgcactgacccaagccaatataggcatggcagcgggttatggcacagacattgccataggcgcggctgacgtggtcttgatgaacagcgatcctcgctcagtgcctgtcgctatggatatcggcaggaagacggtgactaacatccgtcagaacctgttccttgccttcgtttacaatgctatttgcattccaatcgccgcaggactcccatacttgctgggtatgggggaatttagccacatgcccatgctggcggccgctgccatgagctgctccagtgtatcggttacgttaaacgccctgaggatgtgcggataccggccggcgtttgcaaatcagtga

SEQ ID NO: 16854 - DNA, 546 bp, synthetic construct
  source 1..546: mol_type = other DNA
atgcatggtaagggactgacgagtgaagaggtgaaggagagggcatcgaaaggacttagcaatgacaaggaggaacgacagagcagaggctactttgagattttcgccaagaacctgctaactccatttaacgtggtgcttttcatcttgggtatagccttactgtatttccaggagctgaccagcgctatcgccgctacaggagtgatcatttttaacgttattgtcagtaccgcccaggaatggaaagctaaacggagactggacaagatcgcggtgctcatgaggcccaaggtaagcgccctccgcgacggggagctgaaggttattgatcggtccgaaatcgtcatggatgatatcctcttcctgggagcgggcgaccaggcacaggtagacggggtcgtggatgacgagaagtccctggagatggatgaatctttgctcaccggggaatcaaaaacaatacgcaagcacaaaggcgaccaagtgttctccggctcatactgtgtgaccggcgagtgctggatgctggtcactggcgtgggg

SEQ ID NO: 16855 - DNA, 333 bp, synthetic construct
  source 1..333: mol_type = other DNA
atgggactcagcaagaatcagaaattgtacatagggtgcttcgcggtcataggagtgttctgtgtggccacactggcactagcggacggcgggtttggcggaagcgacgatgccggtggggagtcagcagacaagtatggctatgaagcctggactggggatatcctcacgattattacaggcgaccccgattacgagcttccaggcgagaccgaaagtatgctgttcgcagtgcaggccgccattggagctatcatcatcgggtactttatcggttacaacgccgctgtaggcaaaaccctgaagaaatccgaggaagagaagaaggaatga

SEQ ID NO: 16856 - DNA, 330 bp, synthetic construct
  source 1..330: mol_type = other DNA
atggcgcttagtaacaatcagaaactgtatattgggtgtttcgccgtaataatcgtgatgagcgtcgtgtttctcgcatgcgtcaatggcgacttcggagggagcgatgacgccgggggcggcgttgcggatgactacggatacgaggcatggaccggggatatcctgacaatcatcaccggcgacccaaactatgagctgcccggggaaactgagtccctcctattcgctgtgcaagccgccattggtgctataatcatcggttactttattggcttcaacgctggacagaagcgggccggaaccggcaagacggagacagaacagtga

SEQ ID NO: 16857 - protein, 499 aa, unidentified
  source 1..499: note = non-methanobrevibacter Methanogen
MKAIVATALTFALIIGMTVFFMSIDEFDQSSAEPPLGLSSTKITLEEGDSSDLTVWSLPSGTTYDNISWESDTEDVATVSYGTVTAVSPGTAMITASVYSGGVEYTDTCLVTVTDTAVVSALTVYNPYSEKYDSAVLSGKGFLGEESTGGVLSLGFNRGGYIIISVAGSTYSWGESLNSVGVEVRNYSRIVMRLTSVSGVYATYNPSSSVSQSTFVTTSGITYNSVAQSPSLYLKGLDYGTYNVQFTVYKDGFLSSTEIVSVTGTFTYSEGDGRYDTSSEFTRFYAWNSDITGSSELCGIKVTYSYADYWNAVLQSKEEMIHYSNGIASARYESECVDYVNTGTAVKSLEAALREEFESTYSSYTDKSEMYAQFIFTFLQIRFFYENDYTQYYDCYSSHSSGTDVWAYPEMTIYSGMGDCEDTAALLSSLFKAAGYDTALIILPSHMMSALVLSDYSYTASFEYGNKKYYFCESTADSGVRIGYCSSTYQYGEFSYYFV

SEQ ID NO: 16858 - protein, 480 aa, unidentified
  source 1..480: note = non-methanobrevibacter Methanogen
MVDNSWISRDRVSTDAGNRIIRVKVLLTIAVILIGGCTTFLIHGLGANATQYQSEGVVIDFGNYKTVWTNISFSETDDPVELLNKACDSHYSTTPIFTDGVLTGIDDGETVTSNDAQHTWDLWYIEKGKYDYVKSDTYSINASDYTLISWAYTETDGKPTIGVDATATSIYGYSMPHSLVTLSPVCTELVGAMDAADIIIGTDDSSNYPSIIAKGKAEHTIDVVGTYTDPSYEAILHAHADMVFCDASAYSHVTVASSLRNSNVNSVVIYDGADLETVLNNIFIVGTAMNYELRAAYLASQIDIALDTLIALTNANEGYKTLVTLSSDPSPFIAGTGTYVNDMLYKMNGSNAINDPVWPSKTPKTGWRNVTPSIIMDTNPSCIIIFDYGKYPVGSYDEMLNALSDEWKNTDAYTNGKIYLFADGLGEMAQRSGPRIAQLTELVARIVNPDAFTDGVVIPNAIGDDYQDYLKYTSHLGFGE

SEQ ID NO: 16859 - protein, 469 aa, unidentified
  source 1..469: note = non-methanobrevibacter Methanogen
MTDLNRRSFLAASAALAGAAVVPSAEAATYSPCTRMPRKWNETFDVIVVGSGFAGLAAAAEAKLSGAKRVVVLEKMPLPGGNSKINGGILAVPGNPVQKAKGIQDSAAKLAEDIKALVQVTEDDETLVEVKNDGKLLTIIVPEDRLAAGVEYTTGFTVVCAAVTEAIIDRYNVPMYKANMVKAAVWGKYPQTVNFVGANVKSILEPPQMNEGAGFALRNIMANHVVALVQRNAMQGAALSSIFETCAAYEMGDAVGPFERQHLLALAYQGLNANNLVYSLVKKNGKTGTVGTVIASLMERAIDDGVIRVKETLPSGYKMYTTDDLPMWNAYAAAGEVAAVMVNVGAARAAQGIPSTVLYYNDLLEHESSLPGVDYGRAEGVGVGMSFFSHSIYGGGGPGLFHGNHVVTRHAKGTLIPAVTAGNCLDGGTQTFSAEATSGLFKDVFGGMPEFNTPMQFVGAEAKKIRNKI

SEQ ID NO: 16860 - protein, 456 aa, unidentified
  source 1..456: note = non-methanobrevibacter Methanogen
MKIGIKLMTVLAVLLAINISGAAAIAGMMGGDGNSGGTSSASGESRLWVFGNANQDDRIDETDIDYLNGVLDGTYEENRLCDANNDGVVDSKDADYISRIIAAAENGTDEITVWYIDSYLKVASVDWPVNSIAIGYCSGAYAADIAHLCSKVTMVDNTIKNYWSGMNSHFASAESFGTTEDPDTEAMMKAGIDVYVVGYCDENADQLTPSKLNPAGIDVMFLTTADNSGIDEPNEYIDRSFLIFAYLLQGDMDNAYAYLAWHDRVLSALEDAGSSVTDDEKASFVMARSSFQYQKSTISVTGYNNTNNIHAEWVGVYAAGQHSSVLSKNYNSLTEEQVLEVVSSEKSASGYIYYMDNEHDGMRQQHTLEECLAADAEMLSEADAYVHLLGMAREAGNSPMYVVELAFYQNVMYPELYSGVNWKSLFWEYFTFSEEDYTSIIDIDRFFYDYGVVTKA

SEQ ID NO: 16861 - protein, 427 aa, unidentified
  source 1..427: note = non-methanobrevibacter Methanogen
MNSYAKALLLIAVSALALSVLASPGTSAEDTSWTDVDSESGLTEALNGGAKNIRIVSDITVTGDLNIPAGVRVLIPYGADDISGLKVGGETFRIAGSSYVHLTVTLSGNLVVGGELIIGGTIGNSNTFSYQGHTSAGHSVLVNNGSIAVKSGGSVSCFGFVRGSGEIVAESGSTVTEPVVITDYTGGDNLMSSHNANQAIFNRYSISNIRCPLQIDHGATLLGKVAISVSGMIHENQVTYIGETATFIRLSEGASARLTYSASPSIESSESLGLHSDIGKTTVTITGGATFEAMEILVNNDFINARYSFAEHPFPLPYTTVLENGNYLMNEDFRILPGAKLTVGADATLAVNNSLSVLWGLEDKTYKDGVRVDMKYPSTSTLGSSGFDKSGRLIVNGSLILLDNADFSGIAEMGSASASITTSKRTD

SEQ ID NO: 16862 - protein, 401 aa, unidentified
  source 1..401: note = non-methanobrevibacter Methanogen
MIGLICLSPFFLYIFLIRYWTIHPSDFMEKKILAIAAVAVVIIAGAAAAVVLTDDDGSSDSKKGFYSWDPTVVEVNGDYSNCTPYFMTIAETVYEKVYGDVPEYSGIARSDIPSEYLYSYDSYVTASTEDTITVKTFDNTSTGTSSAYLEKTVNSSPVKVICYTDAYIDTIYMILCNKYGETAHSGNTPQADEALWDLIPAMTSSVKSGLESKFGLTVPASVTILGTGQEDLVNYCSEHSDTQTIVFMSEYNIRATNKNSWWDNCQAIESNTSGNIQFIFTLSNSPAMVLSTIEMIGKVIGSDNTDAMMTSILAEIYVMQKAIDGSGKEISFYCETASGNSVGSNTLMGGIFSSILKMENVFDGSLMGSKMSDEQIISAEPDVIGFYTSDTRSMDEKMRAA

SEQ ID NO: 16863 - protein, 396 aa, unidentified
  source 1..396: note = non-methanobrevibacter Methanogen
MGGKGRRCSEDAEYDNMNAKKLAILSAIAALAMVFAAAAVVQGSEDSAADDAYQTLVVGDGDGEYATIAAALEKARNGDHIQLAKDVEEDVTIAAGNVVLDLNGHKLTNVSSDTITVALGAELIITDSSDGKGTVDNVTDGKAAVFNNGTVTIQNGKFIRSLETGVSPKEKGDNSFYTVLNHGIMTVENGTFENSGKFSSLFENGYYTYASTDSRSGYVESTNQTAPSLTINGGSFSGGVNAIKNDDGGVLEITGGTFENVTQFCVMTYSNASITGGTYKISDSASAAIYCKGDKTAPTDLGKLGISGNLGKIILANDADVTLSGDVTTDVIVCGSGAATIDLNGHKLTNASDDTITVALGASLTITGNGTVDNLTNGKADVFNNGTVVIENGKFT

SEQ ID NO: 16864 - protein, 376 aa, unidentified
  source 1..376: note = non-methanobrevibacter Methanogen
MKTLFKYITMMALPVFALASCQSNDDDDFDNKAAINASSMVAETIVKGSVNSATKTLELITPRPVEQEVKASFRAAPELVGRYNQAYYTSAVLLPDTCYAWQENNVVINPGSVKSTSAVIDFQKLGSLSRDSVYVLPVTAQTPGLELLQSKSTYYFVFRAGALINVVPDMEKNNIRIDWKNTAMINSMSQLTFEALIRARDFDRLISTVMGIEGYFLMRIGDAGVPSNQIQIATSNGNLTNSDLQLQTNKWYHLALTYDSSTGTIQVYVNGRKMLEGTKYLGRINLTDGDFYIGRSYEDSRYLAGNISEVRIWNVVRTQEEIAANPYYVDPASEGLVAYWKLDDMSTNVVKDYTMYGNDGTAKNTLSWQNVSLPEK

SEQ ID NO: 16865 - protein, 364 aa, unidentified
  source 1..364: note = non-methanobrevibacter Methanogen
MKVRNALLLTALAVLLTATVLTIESENEGSEDTDQLVRQDVDDGSYLLLGGAFNPEKDMTNIEVSNNVISAHFNLSGYSEYNWTIIDEDKPRSTSTTSFCEYTGDEITTTTPDLTLSTPGYGDYQIILSVDDEEFSGEIVLISTLTKNYEFEFDNENCQITFEISYEEYYETRKIDSNRSPTDDRYSDFVTEDDSVSQIADEILAISDGNADDAAAIALSFVQLFIAYPPCTLDGNGSFIMSPDMYLVGKENYAFYPIETLFLETGDCEDTSILYASILKAMNIETGLLLMPGHMMALAELTGGDPENSNSSLSLYKTSVDDRTYYVCETSSSQTIPVGYAYESVTFGGNDIQYYLNSNYIEFI

SEQ ID NO: 16866 - protein, 361 aa, unidentified
  source 1..361: note = non-methanobrevibacter Methanogen
KGMLQIRKNYAPLKGTGFSTPTFTSSYGYVIGYTYSNSTSGQWNKLAVLVNSNASASYTINLGSSNWTIVGNNTTAGVKSLGTVSGSSYTIPARSVAVLVDTASFNNLKLNESFGTLTVKHVDNKGNVLKTSTAKYRAGSTYRALPDTTLLYDYNLTKTEGTTTGTVAANGNYTVTFTYTDSGVASGYLNVNYVDQSGKAIKDAKAPVGLMDVVSLPKSGANYRVLLTSKGKLTLVPINADEARWILCRIENKTKVAGGKIQLNLSGGRNILVDENKYSTGDSVKLCLENNKIVADYPLAENAVVLVISGRHIGAIETVDKYTVVNRPTENTITFKDNTETVKKNVFVIGSGKSELPEVSE

SEQ ID NO: 16867 - protein, 345 aa, unidentified
  source 1..345: note = non-methanobrevibacter Methanogen
MSFGSHIGRKRAAEAAVVIAICAVIFIGEAYAYLPDDYGYGSSVSDAGDYAEYTVTVNGSHEYAASLISCGDYVPVSSVYLFLEEGRTSQYSDGSDLFLSRMDEPGFYLEQTETALRVCGIDDTVYMDMDGLAEALQSDIYEGTAAGKGLVMVYGAFPITVYDGSSGGTALEWMEAGGTVYWVGPAPGDYVMARDGYEYAGGRAFFTGTAEYLAEDDPADTEGPFRKELQLKGDLLMNAPDMSGTGMESLTAGYTSGNRGTLTFVREGSGQICIAAGGVSLFQAEDIASSASAGLCWCSVLLDTCSGTAHGSDSGTLDKNGASGTLCVYVTVGDAYQIYACRHQI

SEQ ID NO: 16868 - protein, 340 aa, unidentified
  source 1..340: note = non-methanobrevibacter Methanogen
MDKRDYGLIILAVAVCAVVLVGEFATYGNIYRYDSSADASGNFSVYDSGSHCYTAVLSDNGSFQAPTRFYVYYDEGYGSVVHDAKVEVGAKALDQKYYLSQLVNNLKYYSVTDVTYVNAAELASKMSEAGTGVGLIMISGAIPETVYSGAAGCSILTWIASGGSLYWAGEAIGKYIGKADGTTSEVTGYEALFLGAGTLNPETGDTRALNDVAANSYRRDLSLKNNDVRYAVNIASAGADSLAVGYEKDGCASTVLVKNGAGMVCVMGGNYSNNQRMDMANIIASGICYCSAELDCKTGNVARGTVTGTFSNWPATGNVAAFLYLGGDFSVYGKLFTMTL

SEQ ID NO: 16869 - protein, 335 aa, unidentified
  source 1..335: note = non-methanobrevibacter Methanogen
MSANSHNRTIAVLAVFGLVFSGITFIGTSDESAAENVSATLYIVPLGNEQASTWDQVQTFPSALSKTYVCNYGSTVNIDIWPSAGPGFNGAAFSFTQTNTSSGLSLSTTMEKTSPMGTGTKVLHITGTALDNTSVRVYNKTSMTGSYEAFINFNVTMPSYTHTVTYSANGGNGSTESTVVTDSNNGNTDVTLADSGFSRAGYNFAGWKIGNTIYQPGQFVPVAADTSVSAVAQWTPIPVTITSSAEQADIVVGDSFVRMITTDPSGATLSVSGVSWVTLSGSTLVGTPTQAGDYTVTVTASNESSSDSQTIVIHVVNRLAFESVPTGGILATPVI

SEQ ID NO: 16870 - protein, 333 aa, unidentified
  source 1..333: note = non-methanobrevibacter Methanogen
EYYKSNSTYLDALAEGGFSPSILQISAFANKKDASGYESAYNVEGFFGNAQYNYDNKYFGSFSYRRDASSRFAKENRWGSFWSVGAAWLINKEAWFNAPWVDELKLKASIGQQGNDNIGNWAYTDLYTLSQVSDTEMSASFARLGNKNITWETTTNFNIGTEFSFFKGRLSGSFDFYTKKTTDLLFWLRVPESQGTRGYYSNVGDLRNTGVELTLTGHIFRTKDFDWSVTANLAHNKTEILKLDSTSKNQFGGFSQASDMSYTMYWYKEGGPLYNGFLPKYAGVNEKGEALYWVDEDISDSERTGRPAPRQEDRCREARVHDRPEEEDHHLQG

SEQ ID NO: 16871 - protein, 330 aa, unidentified
  source 1..330: note = non-methanobrevibacter Methanogen
LNQIGIGALKKELYAGHGISVAYHTPVGDENFYNPETAGQYANALLGTNHLVQLVGWNDDVPATIFNTRAPGNGAWLCKNSWGSETDSYTKDGVGYAKSTYGIKNSEGKATGYFWISYYDQTMRGVESLSFLTGFGDENGFQTYRHDNMPAYAGTYVGGYEQEASCANVFSAASNEILKAVSVRSSAYSSEMNIKIYLLGDNTAPGAGTLVYDHDMFFQFAGYHTVLLDKDIALEAGKRFAIVTTEKIDNDGQTIYAYNVNTAPSEEKAKAPNSTSNVYGMAYIGEGESFINYGEGWTDLSIPEMHAAIAEKFPGDVFDNFSIKAFTVLA

SEQ ID NO: 16872 - protein, 447 aa, unidentified
  source 1..447: note = non-methanobrevibacter Methanogen
AQVVYGSFGDKHLYAQWTAHVYSLTLTSTGASDGSATVTYLSDEIAYLVDAKVTGYNVVGYNTEGGVLVIDDERHLVASVEGYTDADGRWIRAQDTVLTPATVIQVHTLTINYEFSAGGTAAEQYVGQFEYGQAYDITSPAVTGYTPGDAKITGTMGEANVEKAVLYTVNQYTITFSGNGGSPAGVVQELDYGAPVVAPDDPEREGFVFKGWEPAVPATMPAENITVNAVWSAKPSSPSAEVIEIADSQAETVVIDLSVPAVVEALNNGSKTEVDLKGDGWTMEIPKSVITGATGNVSASAKTLSDDAKAALPEEAKKLVEGKTVFSLNLSDSNGAVSFSGSKIKVSLPYALKDGENADRICMYYIDAENKAVRVDATYDSASMCVVFETDHFSTWFVDFDAPASSGGGNNTMIIVGVVIAIAAVLGIFGYLIMTGKLQLGALGKKQ

SEQ ID NO: 16873 - protein, 371 aa, unidentified
  source 1..371: note = non-methanobrevibacter Methanogen
MNYTKKSYLVIAPLAIITMIVSVIPAGLSDSSDAASITITDGYGTVFSFDDEPAHVITVGKGITSTVIQLSGIDKIVVADSYSKSDTDPVFDILRQYVTDGKITAGGNIYSSGKSQLQTEIINAADTAHGGVFNKETDPVIITGGNSYITPIKDYLVSNGFQKILLWNDITEYSKIPDFVSTISKILTGSESDKVAQMRHVSDVIASGVEGHEKAEAFYVTYSGSVFKVGNTNSLANSMIGAAGGTSITTDDGKAKPTYEASLTSLVESHPKAVIFIDQSINGNESRLNDLKTQVGDNAKIVPLKALWNNYSIESMNGVWTMACAMYPDLFSGEVPTVPAKHENNTLLYFGVGMAAAIIIAGVGFMFLRRH

SEQ ID NO: 16874 - protein, 318 aa, unidentified
  source 1..318: note = non-methanobrevibacter Methanogen
MADEEDVKPRKEREPISLVCLIVIVVATIAVVGAYVNDHMINDGNDTEADTGSTVVTDYTLSLYDYYDNGGAIYQTTVESIADSTQWVHSAGYTEATSYSTFSVTIGSGSVLQAFNDALYGAKEGDKIRLAIPLGEGYTASSTTKSASMSGLTTPTSVTMAASEFTNMYSDVSVPSNGAATAIEKTVLGWSGIATASSDGKVTVTYMPTAGEEYTIVEGSFGTVKASVSTVSGGVITFSLVISNTQTVTDQYSDDLDGFSEIKMIKLSLYNVTAGSDVISGTVYINGLNSGNGEFSYRTLAENYNTVLYYVITVKSVS

SEQ ID NO: 16875 - protein, 186 aa, unidentified
  source 1..186: note = non-methanobrevibacter Methanogen
MIDKKIIAIAAVAILVVAGISAIMIIGNDDEDSKDSTDFAGKELEVADNLDNGIVAVGQDSFRWMTYFGLADKCDEPVCSLSGGQKQRVAIARALMRKPSLLLADEPVASLDPVTGRQILALLQDIQRTEGVAILMNSHNLDQSRAVSTRLLGLHAGRIVLDGAPAAVTDADLARIYGGAESGAAP

SEQ ID NO: 16876 - protein, 330 aa, unidentified
  source 1..330: note = non-methanobrevibacter Methanogen
MVPISEAIIEQLSKCGDYDYELLFIDNDSRDTTRDKICLLCAQNPKIKAIFNAKNYGQFNSPYYGILQATGDCVISMAADFQDPPELIPQYVEAWEEGYKLVMCQKTSSKESRLVYRARRSYYRFMRKHSSVEWLEQVNGSGLYDREFVEIMRKIDDPKPFLRGVVAEMGYKIKLIPFEQPKRRAGKSSNNLFSYYDGAMQSITSYTKYPVRLAAGLGLGLTAVSAVAWAVAIINKILNWDSYAFTDDVLALAIFSAVSLNLFFIGMVGEYVMNVNDRVRKRPLVVEAERINFGRERIREDRVYRGGCARSGAQQGHLRPNGIRIRKGRR

SEQ ID NO: 16877 - protein, 313 aa, unidentified
  source 1..313: note = non-methanobrevibacter Methanogen
ITEGHPEVTDIVPLNMTENELLALTASAEFGSQHPIAKAIVRSAEERGMEIASVSGFDTVVGKGIVCTVNGRKVAVGNASLMEEVGTDISAAAEHYNSLTAEAKTCMFVSADGTIAGIVAVADPLRPTSSEAVSLIKSMGAMPVMVTGDNRQTAEAVAHAVGINEVKSEVLPQDKLAIVKKYQIMQKTVAMAGDGINDAPALTQANIGMAAGYGTDIAIGAADVVLMNSDPRSVPVAMDIGRKTVTNIRQNLFLAFVYNAICIPIAAGLPYLLGMGEFSHMPMLAAAAMSCSSVSVTLNALRMCGYRPAFANQ

SEQ ID NO: 16878 - protein, 182 aa, unidentified
  source 1..182: note = non-methanobrevibacter Methanogen
MHGKGLTSEEVKERASKGLSNDKEERQSRGYFEIFAKNLLTPFNVVLFILGIALLYFQELTSAIAATGVIIFNVIVSTAQEWKAKRRLDKIAVLMRPKVSALRDGELKVIDRSEIVMDDILFLGAGDQAQVDGVVDDEKSLEMDESLLTGESKTIRKHKGDQVFSGSYCVTGECWMLVTGVG

SEQ ID NO: 16879 - protein, 110 aa, unidentified
  source 1..110: note = non-methanobrevibacter Methanogen
MGLSKNQKLYIGCFAVIGVFCVATLALADGGFGGSDDAGGESADKYGYEAWTGDILTIITGDPDYELPGETESMLFAVQAAIGAIIIGYFIGYNAAVGKTLKKSEEEKKE

SEQ ID NO: 16880 - protein, 109 aa, unidentified
  source 1..109: note = non-methanobrevibacter Methanogen
MALSNNQKLYIGCFAVIIVMSVVFLACVNGDFGGSDDAGGGVADDYGYEAWTGDILTIITGDPNYELPGETESLLFAVQAAIGAIIIGYFIGFNAGQKRAGTGKTETEQ

SEQ ID NO: 16881 - DNA, 1500 bp, synthetic construct; identical to SEQ ID NO: 16809
  source 1..1500: mol_type = other DNA

SEQ ID NO: 16882 - DNA, 1443 bp, synthetic construct; identical to SEQ ID NO: 16810
  source 1..1443: mol_type = other DNA

SEQ ID NO: 16883 - DNA, 1410 bp, synthetic construct; identical to SEQ ID NO: 16811
  source 1..1410: mol_type = other DNA

SEQ ID NO: 16884 - DNA, 1371 bp, synthetic construct; identical to SEQ ID NO: 16812
  source 1..1371: mol_type = other DNA

SEQ ID NO: 16885 - DNA, 1281 bp, synthetic construct; identical to SEQ ID NO: 16813
  source 1..1281: mol_type = other DNA

SEQ ID NO: 16886 - DNA, 1206 bp, synthetic construct; identical to SEQ ID NO: 16814
  source 1..1206: mol_type = other DNA

SEQ ID NO: 16887 - DNA, 1188 bp, synthetic construct; identical to SEQ ID NO: 16815
  source 1..1188: mol_type = other DNA

SEQ ID NO: 16888 - DNA, 1131 bp, synthetic construct; identical to SEQ ID NO: 16816
  source 1..1131: mol_type = other DNA

SEQ ID NO: 16889 - DNA, 1095 bp, synthetic construct; identical to SEQ ID NO: 16817
  source 1..1095: mol_type = other DNA

SEQ ID NO: 16890 - DNA, 1086 bp, synthetic construct; identical to SEQ ID NO: 16818
  source 1..1086: mol_type = other DNA

SEQ ID NO: 16891 - DNA, 1038 bp, synthetic construct; identical to SEQ ID NO: 16819
  source 1..1038: mol_type = other DNA

SEQ ID NO: 16892 - DNA, 1023 bp, synthetic construct; identical to SEQ ID NO: 16820
  source 1..1023: mol_type = other DNA

SEQ ID NO: 16893 - DNA, 1008 bp, synthetic construct; identical to SEQ ID NO: 16821
  source 1..1008: mol_type = other DNA

SEQ ID NO: 16894 - DNA, 1002 bp, synthetic construct; identical to SEQ ID NO: 16822
  source 1..1002: mol_type = other DNA

SEQ ID NO: 16895 - DNA, 993 bp, synthetic construct; identical to SEQ ID NO: 16823
  source 1..993: mol_type = other DNA

SEQ ID NO: 16896 - DNA, 1344 bp, synthetic construct; identical to SEQ ID NO: 16824
  source 1..1344: mol_type = other DNA

SEQ ID NO: 16897 - DNA, 1116 bp, synthetic construct; identical to SEQ ID NO: 16825
  source 1..1116: mol_type = other DNA

SEQ ID NO: 16898 - DNA, 957 bp, synthetic construct; identical to SEQ ID NO: 16826
  source 1..957: mol_type = other DNA

SEQ ID NO: 16899 - DNA, 561 bp, synthetic construct; identical to SEQ ID NO: 16827
  source 1..561: mol_type = other DNA

SEQ ID NO: 16900 - DNA, 993 bp, synthetic construct; identical to SEQ ID NO: 16828
  source 1..993: mol_type = other DNA

SEQ ID NO: 16901 - DNA, 942 bp, synthetic construct; identical to SEQ ID NO: 16829
  source 1..942: mol_type = other DNA

SEQ ID NO: 16902 - DNA, 546 bp, synthetic construct; identical to SEQ ID NO: 16830
  source 1..546: mol_type = other DNA

SEQ ID NO: 16903 - DNA, 333 bp, synthetic construct; identical to SEQ ID NO: 16831
  source 1..333: mol_type = other DNA

SEQ ID NO: 16904 - DNA, 330 bp, synthetic construct; identical to SEQ ID NO: 16832
  source 1..330: mol_type = other DNA

SEQ ID NO: 16905 - DNA, 1500 bp, synthetic construct; identical to SEQ ID NO: 16833
  source 1..1500: mol_type = other DNA

SEQ ID NO: 16906 - DNA, 1443 bp, synthetic construct; identical to SEQ ID NO: 16834
  source 1..1443: mol_type = other DNA

SEQ ID NO: 16907 - DNA, 1410 bp, synthetic construct; identical to SEQ ID NO: 16835
  source 1..1410: mol_type = other DNA

SEQ ID NO: 16908 - DNA, 1371 bp, synthetic construct; identical to SEQ ID NO: 16836
  source 1..1371: mol_type = other DNA

SEQ ID NO: 16909 - DNA, 1281 bp, synthetic construct; identical to SEQ ID NO: 16837
  source 1..1281: mol_type = other DNA

SEQ ID NO: 16910 - DNA, 1206 bp, synthetic construct; identical to SEQ ID NO: 16838
  source 1..1206: mol_type = other DNA

SEQ ID NO: 16911 - DNA, 1188 bp, synthetic construct; identical to SEQ ID NO: 16839
  source 1..1188: mol_type = other DNA

SEQ ID NO: 16912 - DNA, 1131 bp, synthetic construct; identical to SEQ ID NO: 16840
  source 1..1131: mol_type = other DNA

SEQ ID NO: 16913 - DNA, 1095 bp, synthetic construct; identical to SEQ ID NO: 16841
  source 1..1095: mol_type = other DNA

SEQ ID NO: 16914 - DNA, 1086 bp, synthetic construct; identical to SEQ ID NO: 16842
  source 1..1086: mol_type = other DNA

SEQ ID NO: 16915 - DNA, 1038 bp, synthetic construct; identical to SEQ ID NO: 16843
  source 1..1038: mol_type = other DNA

SEQ ID NO: 16916 - DNA, 1023 bp, synthetic construct; identical to SEQ ID NO: 16844
  source 1..1023: mol_type = other DNA

SEQ ID NO: 16917 - DNA, 1008 bp, synthetic construct; identical to SEQ ID NO: 16845
  source 1..1008: mol_type = other DNA

SEQ ID NO: 16918 - DNA, 1002 bp, synthetic construct; identical to SEQ ID NO: 16846
  source 1..1002: mol_type = other DNA

SEQ ID NO: 16919 - DNA, 993 bp, synthetic construct; identical to SEQ ID NO: 16847
  source 1..993: mol_type = other DNA

SEQ ID NO: 16920 - DNA, 1344 bp, synthetic construct; identical to SEQ ID NO: 16848
  source 1..1344: mol_type = other DNA

SEQ ID NO: 16921 - DNA, 1116 bp, synthetic construct; identical to SEQ ID NO: 16849
  source 1..1116: mol_type = other DNA

SEQ ID NO: 16922 - DNA, 957 bp, synthetic construct; identical to SEQ ID NO: 16850
  source 1..957: mol_type = other DNA

SEQ ID NO: 16923 - DNA, 561 bp, synthetic construct; identical to SEQ ID NO: 16851
  source 1..561: mol_type = other DNA

SEQ ID NO: 16924 - DNA, 993 bp, synthetic construct; identical to SEQ ID NO: 16852
  source 1..993: mol_type = other DNA

SEQ ID NO: 16925 - DNA, 942 bp, synthetic construct; identical to SEQ ID NO: 16853
  source 1..942: mol_type = other DNA

SEQ ID NO: 16926 - DNA, 546 bp, synthetic construct; identical to SEQ ID NO: 16854
  source 1..546: mol_type = other DNA

SEQ ID NO: 16927 - DNA, 333 bp, synthetic construct; identical to SEQ ID NO: 16855
  source 1..333: mol_type = other DNA

SEQ ID NO: 16928 - DNA, 330 bp, synthetic construct; identical to SEQ ID NO: 16856
  source 1..330: mol_type = other DNA

SEQ ID NO: 16929 - protein, 499 aa, synthetic construct; identical to SEQ ID NO: 16857

SEQ ID NO: 16930 - protein, 480 aa, synthetic construct; identical to SEQ ID NO: 16858

SEQ ID NO: 16931 - protein, 469 aa, synthetic construct; identical to SEQ ID NO: 16859

SEQ ID NO: 16932 - protein, 456 aa, synthetic construct; identical to SEQ ID NO: 16860

SEQ ID NO: 16933 - protein, 427 aa, synthetic construct; identical to SEQ ID NO: 16861

SEQ ID NO: 16934 - protein, 401 aa, synthetic construct; identical to SEQ ID NO: 16862

SEQ ID NO: 16935 - protein, 396 aa, synthetic construct; identical to SEQ ID NO: 16863

SEQ ID NO: 16936 - protein, 376 aa, synthetic construct; identical to SEQ ID NO: 16864

SEQ ID NO: 16937 - protein, 364 aa, synthetic construct; identical to SEQ ID NO: 16865

SEQ ID NO: 16938 - protein, 361 aa, synthetic construct; identical to SEQ ID NO: 16866

SEQ ID NO: 16939 - protein, 345 aa, synthetic construct; identical to SEQ ID NO: 16867

SEQ ID NO: 16940 - protein, 340 aa, synthetic construct; identical to SEQ ID NO: 16868

SEQ ID NO: 16941 - protein, 335 aa, synthetic construct; identical to SEQ ID NO: 16869

SEQ ID NO: 16942 - protein, 333 aa, synthetic construct; identical to SEQ ID NO: 16870

SEQ ID NO: 16943 - protein, 330 aa, synthetic construct; identical to SEQ ID NO: 16871

SEQ ID NO: 16944 - protein, 447 aa, synthetic construct; identical to SEQ ID NO: 16872

SEQ ID NO: 16945 - protein, 371 aa, synthetic construct; identical to SEQ ID NO: 16873

SEQ ID NO: 16946 - protein, 318 aa, synthetic construct; identical to SEQ ID NO: 16874

SEQ ID NO: 16947 - protein, 186 aa, synthetic construct; identical to SEQ ID NO: 16875

SEQ ID NO: 16948 - protein, 330 aa, synthetic construct; identical to SEQ ID NO: 16876

SEQ ID NO: 16949 - protein, 313 aa, synthetic construct; identical to SEQ ID NO: 16877

SEQ ID NO: 16950 - protein, 182 aa, synthetic construct; identical to SEQ ID NO: 16878

SEQ ID NO: 16951 - protein, 110 aa, synthetic construct; identical to SEQ ID NO: 16879

SEQ ID NO: 16952 - protein, 109 aa, synthetic construct; identical to SEQ ID NO: 16880

SEQ ID NO: 16953 - RNA, 54 nt, synthetic construct
  source 1..54: mol_type = other RNA
gagaataaactagtattcttctggtccccacagactcagagagaacccgccacc

SEQ ID NO: 16954 - RNA, 295 nt, synthetic construct
  source 1..295: mol_type = other RNA
ctcgagctggtactgcatgcacgcaatgctagctgcccctttcccgtcctgggtaccccgagtctcccccgacctcgggtcccaggtatgctcccacctccacctgccccactcaccacctctgctagttccagacacctcccaagcacgcagcaatgcagctcaaaacgcttagcctagccacacccccacgggaaacagcagtgattaacctttagcaataaacgaaagtttaactaagctatactaaccccagggttggtcaatttcgtgccagccacaccctggagctagc

SEQ ID NO: 16955 - RNA, 24 nt, synthetic construct
  source 1..24: mol_type = other RNA
caaaggctcttttcagagccacca

SEQ ID NO: 16956 - RNA, 24 nt, synthetic construct
  source 1..24: mol_type = other RNA
caaaggctcttttcagagccacca

SEQ ID NO: 16957 - RNA, 250 nt, synthetic construct
  source 1..250: mol_type = other RNA
  variation 101..250: note = Nucleotides may be deleted
aaaaaaaaaaaaaaaaaaaaaaaaaaaaaaaaaaaaaaaaaaaaaaaaaaaaaaaaaaaaaaaaaaaaaaaaaaaaaaaaaaaaaaaaaaaaaaaaaaaaaaaaaaaaaaaaaaaaaaaaaaaaaaaaaaaaaaaaaaaaaaaaaaaaaaaaaaaaaaaaaaaaaaaaaaaaaaaaaaaaaaaaaaaaaaaaaaaaaaaaaaaaaaaaaaaaaaaaaaaaaaaaaaaaaaaaaaaaaaaaaaaaaaaaaa

SEQ ID NO: 16958 - protein, 13 aa, synthetic construct
MFVFLVLLPLVSS

SEQ ID NO: 16959 - protein, 25 aa, synthetic construct
PWYIWLGFIAGLIAIVMVTIMLCCM

SEQ ID NO: 16960 - protein, 37 aa, synthetic construct
MTSCCSCLKGCCSCGSCCKFDEDDSEPVLKGVKLHYT

SEQ ID NO: 16961 - DNA, 48 bp, synthetic construct
  source 1..48: mol_type = other DNA
atgttcgtgttcctggtgctgctgcctctggtgtccagccagtgtgtg

SEQ ID NO: 16962 - DNA, 75 bp, synthetic construct
  source 1..75: mol_type = other DNA
ccctggtacatctggctgggctttatcgccggactgattgccatcgtgatggtcacaatcatgctgtgttgcatg

SEQ ID NO: 16963 - DNA, 111 bp, synthetic construct
  source 1..111: mol_type = other DNA
atgaccagctgctgtagctgcctgaagggctgttgtagctgtggcagctgctgcaagttcgacgaggacgattctgagcccgtgctgaagggcgtgaaactgcactacaca

SEQ ID NO: 16964 - DNA, 48 bp, synthetic construct
  source 1..48: mol_type = other DNA
atgttcgtgttcctcgtgctcctgcccctcgtctccagccagtgcgtg

SEQ ID NO: 16965 - RNA, 47 nt, synthetic construct
  source 1..47: mol_type = other RNA
aggaaataagagagaaaagaagagtaagaagaaatataagagccacc

SEQ ID NO: 16966 - RNA, 93 nt, synthetic construct
  source 1..93: mol_type = other RNA
gctgccttctgcggggcttgccttctggccatgcccttcttctctcccttgcacctgtacctcttggtctttgaataaagcctgagtaggaag

SEQ ID NO: 16967 - RNA, 47 nt, synthetic construct; identical to SEQ ID NO: 16965
  source 1..47: mol_type = other RNA

SEQ ID NO: 16968 - RNA, 93 nt, synthetic construct; identical to SEQ ID NO: 16966
  source 1..93: mol_type = other RNA

SEQ ID NO: 16969 - DNA, 51 bp, synthetic construct
  source 1..51: mol_type = other DNA
tacctcatgacactgagcctgccagggttcgcacatcccttcgcactcccc

SEQ ID NO: 16970 - DNA, 51 bp, synthetic construct
  source 1..51: mol_type = other DNA
tacctcatgacactccccctggacggactcgggcaccccttccccctgcca

SEQ ID NO: 16971 - DNA, 54 bp, synthetic construct
  source 1..54: mol_type = other DNA
tacctcatgaccataccactgaacggcaccccactccacgccttcccactgcca

SEQ ID NO: 16972 - DNA, 54 bp, synthetic construct
  source 1..54: mol_type = other DNA
tacctgatgataatcccaatcaacgggagtgcactccacatcttccccctcccg

SEQ ID NO: 16973 - DNA, 42 bp, synthetic construct
  source 1..42: mol_type = other DNA
tacctcatgacggtggtgctcggacacccattcccgctgaca

SEQ ID NO: 16974 - DNA, 3216 bp, synthetic construct
  source 1..3216: mol_type = other DNA
accgaaaactttaataacgatctgagcgataatggcctcaatgacaacacgttgagcgataatagtctcaacgaaaataccttgagtgataatactctctcagataaaagcctctccgagagcaccatcatacaaaatgaccacgataacctgaaggatacaaacaacaacgataataacaaggccctcaaggatccggcgaagacgtttacggacctccaaatggaaataattaatgcctctgatctgctcgaattgacggatgattacaagtacaataacgagacggataatataacgcttactatcagtaagagtaatttcgttattaatggtaacgggcataccatcgatggggacaaccaatgcggaatttttcaaattaacggaacgaatataacgctgaaaaatctcaacatcataaatgcgaacagtacaaaggactccgcccttcttctcaatccaggttccgaactcgaaaccaacaatgtcacttttatcaacgacagttctgataaacgcgtcattttcgccttcggtgctaagtacaccagtaacaacgacaagttcatagactgcacatcactcaatgatggtgttattaattcctatttgggcgaaatcaccatcaataacggatacttcgaatctagtaaacctctcgactgggcgttcgtgaattctctcggcaattctagcatctatgtccttaacactactttcgctaataccacatctaaatatgccaccgcgatcaagggggatcgcgagacagtcattcacgacagtaagttcattaacttgtatgcgaatctgaccgcgggcgcgatcggactcaaacgaatcgaggaggctgaaattgataactgcacatttataaacgtgtcaagtcaaaagaatgggggtgcgatcttcttggatatctacagtgactccgaagatgtccctataatgatttcccggtctagctttgtcaactgctacagtgagttcggaggagcaatccttagcctgggcggaaaaattacacttgaggaggataattttacgaataacggcgcgttttttgatgggggtgcgatttattcctcattctctcaactcacgataagccaaacaatattcgataacaactctgtggaactcgacgacgaccgggggagttttggcggtgcgatcttctccgatatctctgcattgattattcttaattgttcctttagcaacaacaatgcgcaaactggcggtgctctgtacacctacgactctggatattacatcgccaattctacttttaaagataataccaacaaagagagcgagttcgacgatattttcaccgatttcgacggggaaatcgcaacactggaaaacaattcctacagtggggaggattccatctgtcttaataacgaacgatacgaaagtgttatagccgttagcggaatgaactttactttgatcgagaatgagatcaatgtgaccaatcccccccggaagtttgaccttcgggaatggggctgggttacgcctgtgaagaaccaggggtatatgggcagctgttgggctttcggaacagttggagctatcgaaagttcaatccttagatttcttggactggagatggacatatccgagaataatatgcaagatagcctgcttcagtattaccgatatgggacgctcggcgcagaggaaggcggtgagtataatcttgggccgagttatgcgttgtcatggttcggggtttttccctctgaatatgatgtttatgatgagctggggaaaatatctgcaataatcgcgaccgacgattcaatacacctccaggatgctgtgttcgtgcctcctctcatgaattcaacagacaaagataaattgaagcagagtctgctcaagtacggcgcactggcagtttcctattacgcagaaacggacgaaccgggcctgaatgagaacacgagttcacaatattctctgaagaatgattctaaccatcgcgttctcctcgtgggttgggacgatgattattctaaagacaatttttacatgaccccacctggcgacggcgcatggatcattaagaactcttggggggaggagctgggagataaaggatattattacatctcctactacgacgcttctttcgcaacattggtccccagtgtgggttttccaataatgaataccgtcatctacaacaaaaactatcaatatgatatcggcggcacgctggaattcacagatatgggtaatgaatacgtgaacgaatttgaggccctggaagacgactttattgcggcggtcgggacgtactttatcgacgccggagtggattacaatattgagatctacgttaacgacgagctcaagtattcccaggacgggactagtcccttttttgggtttcacactatacaattggattcatatgtccccatcaaagaaggagacgagttcgatgtcaaaatcacgagcgattgcattccaattcttgagagtgggcggcaacactatatcgaaaataagtccgcagccaatctgaatggtgaatgggtcgatcttaccagtgatgggaaagtgtgtgccattaaagtttacacaacggacgaagacaaaaaaaaggagtcttccaggataaatactaggatagattgtaagaacatgaccacaacagcggttgcctccgaagatggaagaataggcgagtatttccaggtgactttgaaagatgagaacgggacggctctggctaataaaccaataaaaataggtttcaatggacgagtgtacgatagaacgacggacgagaatggatctgcaaaactccaaattaatctcgcttataaaggcacatacacgttcgccattgggtttttgggagacgaagaatatctgggtgcttttgaagtggccaaaatcaccgtgaaggttcagacgcccaagttgacagcgccgaacaaaagttataaagtgtccgccaaaaccaaatcactcactgccagctttaagactgcgaatggcaaagcggtcagtgggaaaaagatttcattcactgtcaatggcaagacttatagcgcgaaaacaaactccaaagggactgcgaccgtcaacgttagcctcaacaagaaagggacctattcatttaccgtgaagttcgcgggtgacgatacctttgcaacctcatcagctaaagcgaagcttactctgaag

SEQ ID NO: 16975 - DNA, 3906 bp, synthetic construct
  source 1..3906: mol_type = other DNA
tctgaaacaaaccttgattccattgagctgaacgatctggcggattcttctactgagatcgatgactctaccgatttgaatcaagattactccagtaatcaagatctttctttgaatcaaaatagcgactcaaatctgagtaacgaacaggaactttattccaataagctgtccgagaacagcttggactccaattcccagtcctccaatgaccttagcaatagcttgtacttgtctagtaacggggttcggctcgctgacctcaactcctcattcgctcagtttaacacgagtctgaacgattccaacacgatctatgttaactccagctacattggttctgacgaatttggtacccaatcaaatccttataaaacggtccttgcgggtattaatgctgccacgactgaccttaataatgtctacatcgcgaacggggtctataatatcaacaccactattacagttcttaagtcaattaacataatcggggaatctctgaatgttattctcaatgcctctaacgaaaataatatactctctgttaaaggttcttctgttgaagtctcaatattcaatctcacctttcggaatgggtatgctaataaggggggagcaatatacgtcgataagtcttctctcaacattatagggtcactttttgacagcaatatagcctatgttacatctgataatggctacggcggtgcaatttacaataatgcggggtttttgaagctttacaacactacttttaaaaacaacaaggtcgtggcagcatataacatagtgagcgaggggttcgggggggcgatctacaatgagcttggtgagatgacagtgctcaattcaaaattttacaataactcaatcgacatcaggaacattagcaagtcttcttacggggccggtggagctattttcaatcgggctggcttcgtgacaatctttaatagctccatctctaacaattcaatttacacgaattacagtctcggtggagctatatccatttgggcttctcgaaatgtttacatcatcaatagcaccattaacgacaacatcattagcggatcatatggctttgcttcagtcatcagcaataaagggacgctgttgcaaattgagaattctaccatatctaacaataacattaatgcttcttccgttgaaaatagtacaatttataatataaacgggaactttaaccttattaatagtaagatggaaaataataagatcaagactatcaaaacaaatttgttgatgtgtttggaagatcagctcattgttaactcatcatttaatctcgcgaacgaacttaaaggactcaacatgacatcccttccatcacattacgatttgagggaggagggcctcgtgacagccgtgaagaatcaaggaagttctggggcctgttgggcgtttgccttttactcagctatggagagttatctgttgaaggtggagaatataagttatgatttctcagaaaacaatatgaaaaattgcatgggtgatggtagtgaaaactctacggactgggatgacgggggggcctatgtcgtcgcacttgcttacctgttgaggtggtctggagcaataaatgaaacggacgatccttttaatgctagaagcaaggtcagtcccaccaatctgacccgagttaagtatctcacggacgcactgtacataccgcttcgcctcggggccttggataatgatcagattaagacggcgattcttaagtatggggctatctttgttccggtgtattccaatattataaaagcaaacagtaagagtggctactcagatattcaatacatatgcaaccatgcagtcgcaatcgtcggttgggatgacaactattccgctagcaactttaaagacacgccacccggagatggagcctttattataaaaaacagctggggaacgtcaggcggcgaacagggatattactacatttcttattacgacgccagttttgctgctagtatagaaacttcagccgcagtggcagtgaccaacgttgttaatacaaccggtgagtaccgcaataactattactacgacacattcggaaatacatttgagacgatcggttacaactctgatacaatctggtttgccaatcagtttaccgcgataagtgacaacccgttgaacgcatttggcctgtacacctacggtgactctacgtacacagttaatattacagttaataacaaatcagtctatactagcagtgggaaaattgtgggtgctggatttcatacaataaagctgagccgatatgtgcctctcacgaagggtgacacgttcaggattattgtcaagctcacaacgcctagtacattgttcccgcttgcggttgagaccaattactccggttttaccccacgcgccaagtctgactacaatcaatcttttatatctccagacggcaagacgtggtatgaccttaggaacagctccaataacagggcggtgaaattttacgaagatatgtatttttacacgctgaagaatgccagtgtctgtcttaaggcctatactgcctttgcggatgaactcgagttgaacctgagctccaacagcccgatatactatacgggtgatacgatcaagcttaacctgacggtgaccaacagaggagatcttgcaagtaactcttccattgcagtcccgctggacaaaagttatagtatagtgtcctataaaatctctgagaataacggcaacaaaagctatgacattcactacaacggcagctcttttaacatggcttccggcatatggtctatcccttaccttgaaaatgaggaatccgtctccctgatcctgagcctcaaaatgaattctaataacgacgttaatataaaggtctcagccaacagcagtagttgctccgttaaggataatgtttacgccaatatatctctcaagtacaaaattcctagcaagtttgcgaatattcccagtattaatacgaccgctcggtcctatggtttgcttaattttacgctcctggacataaataacaagcctctcgccaataaaaacgtcaatctcttgctgctgaagctggacgatgaagaggatgaggatctctctctgaatgataccaatctttattacagtgattcctccattagtaacgcatcagttatatctaacttgacgcttaaaacaaatgggaacggcattgtccagtataagcttaacctgacgcttggtgagtacctctttaaattggcgttcgatgaagacaaaaattaccaggcgtcagactacaactacagtttgaacataacaaaaagaaaaagtacgaaaatattgtgtaaggacatggtgacgtatagcgtcgtcgccgaagtggatggacgatccggtgagtattttaatgttacgctgactgattgcgatggctatgctatggccgataagtttatacagattggattcaacggccgcatatacaaccgaactacagattctgagggtaaggctaggcttcaaataaacctcaagaacccgaatgcgtatactttcgctatatgtttcctttctgatgatgactactacgctagctttgaggttgcaaagattactgtgaataaaaaaaagatgagtcttaatgtgcccaacaaggcttataaggcatccgaaaaaagtaaaatactgactgccaccttgattgaaaacaacaagaaaacagtcgctaacaaacttcttacgttcacggtggacggtaaaacgtatagcgctaagacgaacagcgccggggtggcctctgttaaggtcagcttgtcatccaagaagatatattctttcacggttaaatttgcgggggacgattgttatggtagtgcgactaaaagcgccaaagtgattattaaa

SEQ ID NO: 16976 - DNA, 5337 bp, synthetic construct
  source 1..5337: mol_type = other DNA
gctgatttgaataccgtccaaagcggggaggtcagcggaggggtggacatagccagcagcaacccgggtgtcgagaatggagagctgacctacgaaattcccgactccgtggagaacattcaatatgccggtcttttcgtcgatagctacacggcgggttcatccaatttggtgtatgggagcgaggccaacataacgttgacaaagaatggcgagagtgaacagatcgcgagcgaaagactggtcgcttcagtcggaagtgcagatggagaagtgtatgttatcaatgatcataccaccaaatgttttgctgactacatgatgacttacaatttgacagatcggctccaagacgcgaagggcaatattactatcacggtcaatgcaacaccaatagagggatacacattttacaataaaattaaacttataggtctggtttttacgtatgatgacggcgatggcgatcagttccactactgggtgaatgctgggtcatcttgggttaaaactgatagtggtgaaacatcaaaagcaaccttcaaactgggaaacgtgaattacgatcccacggtcgcgacacttgacaactttgctctttcttcacaggatggcgtgtatacattcaatggtaaagagatggacgagagcatagtgacagagacaggcgtctattattatatccatcacaagttcgacatactcgacaagatcaagaacatgacaaatacgctcgtgtacacgcctggagaggggtcttacagtttcagaaacgttctcagcgtcgtcaaactcgtcaaaactgtcccggtttatgctaaagtgaatatttcctccgaatatgacgatatcgtcttttcaggcaccgagaaccttctgaaggttggaataaccaacaatggaactgggtctgcaagctatttgcttgatttgtacgccgacggaaagaaagtgaacagttctcagatttccctcgccgcaggccgagaggcggtgatctctctgatcgataacactattcgaccttccgccgcagacactgtgagtggtgcggataataaaaagattaactacaccgtcgtcgtttctgataagaacacaggtgaggtgctcgacgaatcaagtatctttcctaatctcctctataacggctacctggggaagggccttgcctatcccgccgagaagataagtagcttcaaaaatatcacagtcaacggcggcatgatcattgaatcccttggggattctacatacctggacgccagtatgaccggaaagactgatagttggacaatcgatttgcctgatggcgcattctttacagacgcattcgtctacgtcccgtacaatctcgataatggcaatgtgccgatgtttaccagtaccttcaacggcgcagcggtgaatcccattgcgagctacagagatcagccaaatatcggtgaaaatgccaaaaatgggtatggcctgcttgtctatgatgtgggcgaattgattaaagcaggggttaactccttcgcactttccaaagaggccggtatagccggtgtctacccttctacactcatagcattctataacctgacggattcagacctcttgactagtgcgttcatattcaacggggccgacctgttgtcaaatgaatacaatagtctgggtagagacgtgagctcagataatattcttagtataggagcgttcgacgggctggtctccgccaagcttcacgtctttgcagcggattgccaagccggcgagggggacctgacagtcaacgggaagagttataaaaatgtgtgggcggggacaaaccgctccgtgggagattacgttgtcgacttggggaagtccactaatgcatccaatgaggtgtctttcatcagtactgcctctaacattcttgccctccaacagcttgcggtggttcagtataatgtgcccagtgtgaaggcttcacttgtttctgaatactccaatgccgtgttcgcgggaactaataacgtcttgtcactcaacataacgaacaatggaaagtttgacagcatttatacagttgatttctatgtggacggtaaaaagcaaaatagtacggaaatctcacttaaaagcggcgcgaacaagggcctctatctgatcgatgataccataaggccaatcgatgcttctaccgtcaacggtgcagacaacccgaaagtgaattatacagtcgtgataattgacaaagagaagtccatggtccttgatgagataaccatcactcccagtctcctctataatggtaatcttggtaaggacctggcttaccccgcagaaaatatcacttccttccgcaatatcactgtgtcaggtggggtcattgtcgatacgctggacgatagtacttatataaactcacaggccaccaataggactgacatctggaatgttaatgtggctgacggggatgttttcactgatgctttcgtttacgtgccatataactgggacaagacgaacggatacatgccagtctggaacgctaggtttaatggggtggcggtgtctccccttgttagttaccgagatcagtccaacatcgggttctttggaaaaaatggatatgggcttgtggtctacgatgtctcaaaactgatcaagagtggtgaaaacacattcacactcgaaaaagaggctggtataacggccgtttatcccagtacacttatggcattttacaatgccacttcatcaaactccctcaaaacaatttacatctacaacggggccgatcttttggctaacgaaaacaactttctgaacagaactgtggcctctgattctcacttggatataagtagctttaaggaggttattagtgcgaagctttatgtgttttccgccggagctcagaaaggtgagggtaatataattttcaataacaaaacatataaggacgtgtggaatggcacagtcaatagcgtggactcatttatcattgaccttggtaaaagccccagtgtgtccaacgacgtgtccttcgtcagcacgggcagtacgattatggctttgcagcaacttatagtgttggattactacgtgtcatccgttaaggcaaacgtgagcagcgaatattccggggcagtcttcgccggtaccgacaacgtcttgaaggtcgacctcacgaacgatgggcagggaggctctgtgtacgtcttggatttttacattgatggtaaaatagtgaactcaactgaaatacctctggacgcaggaaaatccacggagatatttctcgtggatgacaaaattcgaccagtggacgctagtacggtgaacggagcaaataatgccaaggtcaactacaccatcactgttactgacaaagcctccggtctggttctctatgaggcaagccttaatcctatagtcttgtacaacggcaatcttggaaaagatctggcatacccggcggaaaacataagctttttcgacgcgatcactgtgaatggaggcgtgatcatagatacacttgacgactctacttacctgggagctaagacgaccggcagaacagatgtttggaaagttgaaatcccgaaggatggtaaaatcgttgatggattcgtttatgtgtcttataattgggataagactaatgggagcatgcccatctggaacgtgagcttcaacggagttagtgtttcaccagtcgcgcattatagagatcagtctaatatgggtacctatggcaagtacgggtacggcctggttgtctatgacgttggggagttgatcaagagtgcggaaaataaattcactctggaaaaagagaatggaaccacagccgtctacccatctacactccttgcattttacaataggacggagtccaataaccgcacaacggtctatatgtataacggcgcagacctgctgagcaatgcgaataatttcctgggacggacagtggccagtaatgctgccctcgacctcgctctgaacccaaacgatgaaataaaatcatccagactctatgtttttgccgcaagcgggcaatctggtgagggtaaactgatagtgaataacaaaacattcaataacgtttacaacggtagcgctaatagtgttgatgcatatatcatagacttgggcaaatctccgtccgccagtaataacgttagtttcatagcaacagggtcaactatccttgccctgcagcaattcgtggtcgtggacgcaatacaccagagttctgaggaacttcaaaaaatgataaatagcgcaagggcggggagcacattgaaccttgggtctaatgtctttaaagacgtttctaacgttataattaataaagatctgactatcacggggggaaccatttacgcgagggagggcgagacgatctttgtcgtcaccgatcgaagtgcgggtggcccgaaagaagtgaacattacgggggtgaaattcgtcctcgataacgctaacacgatcttgcaagctagggcagtgaacgggagtacacctacgagcatcgacgtcgcaagtataaatatcaagaaaaacaacatatcctttgttgatgacgatgttgttcccgagagtatcacagtgctggacctcaaaagtcaacgctccagcattgcaccaacacggaacctcaccatctccggtaataacttgatagccggaatctgccccttcatgtttgaggttacttcattcaatgggaaagactcagttgtggtgccagagggaggaaatatcccagataaaaaggcgagtgtcatacactatgaagacatggtcaccaccgcaattaacacaaacatagaagggcgggtggggaaatattttgaggttaatcttacagattcaaatggtaaccctcttaaggataaaaaagttcaaatagggtttaacggcgtggtttatgaccgcaccactaacgcgaccgggggcgttaaactgcagattaaccttggatacaaaggaacatatactttcgctattgcattcctgggcgatgactactacaatggaagtttcgttgtcgcgaaaataaaagtgaatactcagaagactaaaatcagcacctcttccaaaacgtacaaagcttcagctaagacgaaggcgatatcagcaaccctcaaggacgcgtctagcaatcccatttcaggcaagaagctcagtttcaccgtgaacggcaaaacgtatagcgcgactactaatagtaaaggtactgctacagtcaatgtctcccttagcaagaaaggaacctacagttttacggtgaagtatgcaggagatgacatgtacgctggtgcgactagttccagtaaggtcgttataaaa

SEQ ID NO: 16977 - DNA, 3897 bp, synthetic construct
  source 1..3897: mol_type = other DNA
aacgacgatatccttaatatcaatgtcaccgacactcaagattccgttattgataactctaacgggatttcagattatttttcttctgacaacgggataatcaacgacgacgggttgagtagtgatgacgagacagccgggtcccagcttcttaatgactctgaagatcttgattcttccgatgatctcgccaaagactctgatttggaagattcaaaggagacgagcaaaacacaagataactctcagaaaaatgaagactctaagacaagactttcagactcatcaattatccgcatcactgatagtagctactcatcttattttgatctttccaaggatggtgctattagagaggggacgataaaggacggggatacgctgctcataggaaatgtgtccggcaaaatattcagcataacgaagaacattaatatccttcccatttctgacggtgatacgatgagtaactgccttattcggttgatagaagggagctccggaactagcttgtccaatttgcgcattgttaataggaacgaaaaagtcggatctttttacctgtgtgggattcacattattaattccgcagggcacgatatcgtgaacctgacgatcaacaacagtcaaatgaaatgttatggaattataatgagcaatgccagcaataaccgaatcataaactcaacgatcattactggccaggcgacagctatacctatgacgggaagcagtaataaccttttttacgggaattacatagagacgtacaacacaaatatgatctactattgtatgtatggtaacggagacttttacccgcgggaggatttggagaaatcacacgacaatattattgctaataattactttacctcacgaaacgggacgtatgacagttattgttactccgtgtgtctcatggcagaggctggaggttctggaacagtgattgccaacaataccttcaacaatacctttcgcccgataacagtttccactccggacactcttgtgataaacaacaccatccttaacgtggggggggaagccggcataatcgtggatggcaacaacgtgacgataatgaataacaatatcagcactaagaggctggagggcttccaatggaacaaggaaggtgacgtggtgggaatctttacctatggcagcaatactcggataatcggaaacagcatcgataccgttggtaccaacggtattcgatctagcggcgatgctacatttatatctgggaatactatcaacactgagtcatctgcttgcataaacctcacgaagtcaaatgcagtggttgaggacaacgccctgaacggcatagggtcttctgctgtgcggatttatactagtaagcttgtggaaaacacaacgattaggaacaataacatatcaagtgactcagagggaatagtgctcaagggtaagatagattattcactcgtctgtggcaatatcattgaaataagcaatcctgaagacgcgattatagttggaaaatatacaaaccggaatccacttgtcccccagcattatgctattttcaataataccataaatgggatagttgtgaatttgacagacatctctgagatagagcgaaacgacacagattccgggttgaataatacaaacacctcagactccggcaataatggcacgggcaatacaggtaacggcaccaatatcactgacgttaacgggaccgacattaacggtacagacgttaacggaacgaatataacggatatcaacggtacggacgttaacggtactaacgtgaccgatgtcaatggcactgatgtcaacgggactgacgttaatggtactgatataaatggaacaggcaacgccactattccggtgaatataaccaaactgagtacatccatcacagtctacaatacaacggtcttgcgaggcgactacctggatgcctatttgaaagatcaatacggcaatccgattagtggggtgtcaatagatttccatttcaaggacaaagtttacgctaaaacaacggactctgaaggaaaggccagcttgcacttcgatgcgatccctgataactatacaatgaatataagctttacgggtaacaattactatttgtcttcaaatatcactatcgatatcagcgtgatacctgtttcatattacctgaatgagagtaatttttacgaatatttcggagaagatggttaccttaaaggagattatgaatatgcggacctgatcttccagggtgatttccggaataaacggatagtgctgaatcaaccactcaggattattagcgatagcgcggttttgtacgacagcattatcaaaatagagtccgataaggttgtcgttgatggtttcacgatcgttaatagaaaccccggaaacaagcaagacaatcacaggtttgcgatcctgttggactatgttagggatgtttcagtcattaacaataagatcaaactcgattcctatgatagtggctatggtatttacctgtctgagactcaagacagtactgtgtcaaacaactccatagatgtcaaagccgacaaattgaccttcggtataatactttacgacagtaaggacaacctcattcaggataatataataaaagtcaatggaaccgacgatccccatcagtacgaatccactattcaggtggacacgagcatttccgtggacgactacgaagcggagggaatgataatcccagaggtttacaaaacgtatggtataattcttttctatagttcatcaaacgatatcggctataacgtcattaacgccacctccggccttaagaaatattacactgctgtcaaggaaagtaccaactctattgtgggcgttgacctgtattatgatagtaattacaacaaagtccatcataataacgtcgtggtctctgcgaaggatccttacctctacgggctgggagttcttggcgccgagactgggaagcgagatcaatttgccaccaataactcctttaccgataatattgtgtttgtcaacgggacttattatgctgctggaataatagcggggtacaactcaatcaacaccacgatacttcgcaattatatcatatgcttctccaataacgtttcctatggcgtgatactcgagggggctctgaactctgtggttgatagtaactatgtgatcagccggtctcgaattaactatgtccttgaggggtatgacaccgattataacttgattagcaataatacattgaacgccttcggccagtatgtgggtgatgtttctctctacaacagtaaacataattacatcgcggggaacaaactttccccaattttccgggaggggagacttaaagacgcatctgaactccccggaggcgtcgattttgacgccatattttccgagctcggggttagtaaccctctccatgactatagtgataaagactggtctgagctgcttcgcaccgaccttacagaccatgctgacgttattccacctcataccggcgctttctacgacgacggcggagagggaaatatttttgtcgacaatgaagttccggcccccccttctggggggaatggccagaccaatcgaacaggatccggtgagacaaactcaaatggcaacggtaactcttcaaatggtagccagaactcaaactcaaattcaacggtcgttaataacaataatggaaattccggttctcaaagtgacatggatggcagtggtaacaacccggaaacggacacccttaagggcaacacggtcggcacatcatccagcgcagctgttacagaatccgcccgggcttacaatctcgacgtggacgaggacgcggcatcctcacggagtttgtcctttgggggtatgaac

SEQ ID NO: 16978 - DNA, 5430 bp, synthetic construct
  source 1..5430: mol_type = other DNA
ggagacgtcgacgatctctccgacgcgggcaattacactagagacaattcccccctcacgatatcaagtacttatcaaagctccacttacggctctgatggggggtacgatgataagaatgagaatatttatatacttgataaggtgtccgatggtgataaatccaaaacatgttgtagcaaggatttgagtctggacaatgcttgctcaatggataaatcttcatgttctaaaagtaattcagcgtgctccaaaggcattagttcagacaaagattcatctaatctgtccaatacgtatctggtctcagagaacaattacaatgatttcaacgtcgacatagacttgaatgacaaacttagtgacctcgatctgaacaatgaccttagtttgaataaggatttgacacttaaccttaatagcaacaatgacatggactatctgaaccttgaagaggttatacagaccgacggcacgctcacctatgaaggggatttggaccagacctatttgaacgacgagagtttgaaccaggatgttcagaatgatgatagcctcaataagaatgatctcaaatctccacttagcgacgagaatactttcaacatatttattatttcagataacacaggaaacaacctttttgacgccgttgcctgcgaaatcctcgataactctaatttttccaacgtgaaattcaacatacgatcaggcaatcaaattaacgcgatgtcagaggatgaaatttacgagttgatggccccgtgtgacgctttcataggacagtgggtttcctcaaatgtggacgccgtccttacctctctgttgaacaaccatccggaactgtcaaataagaagttgttcctgatacttgaaccaccaaccggcaatataaacagcagttcttctagtctgaacttggttcggaacagtaccatagattataagaagatattcaatgggatttcaaacgacgatctgattaactattttaaggccactaagcgcggaaacaatttcgaaagtatccaagagtatatagacaatgaaggatcatctttcaattccattttcaacaaccttgttctctacaaggacatcaacgacaaagcgaatctgaagaatgaactcctgtatattctttaccttttgggccacggatgttcatatgaatccgccaacttcacgggggttcaggcaagtggtatattccgagatagatggtactccttcgacgagtatgtccttaccttttttaacgaatcccgcaatcgaacaataggaatacttgagtccacgatgtatatacagagtcaacagctcgacctcgtcaatgagataaccgaaaggcttgaaagcaagggttataatgtgatccctatatactgtccagccggaaatgccgagcagttgaacataatggttaaatattggacgtctgcatgtagtaacatcagtgggtttctggagaacccccaggactttgacatttatgtcgacggaataatctctatggtggcatatggcgtcggaggtgagaattttaccaatgctacaaagttctttgaagatgccaatgtgcctatatttcgggccgtgcattcagaatatatcactaatgagcaatgggaattgtccccggtcggactctctaccacaaagagtgataaatggtggcacgtgaccattgccgagtcccaagggatattcgatgcaacgtatgtcgggggggtggacagttatatttcaaatcgcacgggtgccatcattcttacatttgtcccagttcacgagaacatcgaactccttacagatcgggtggatgcgtgggtggatcttaaatacacgcccaacgaagacaaaaatatctccatcgtgtattataactaccccccgggtaaacagaacattggggcatcctatctggacgcgatcacctctgtttacaatatgctctatacgttgaaagacgagggctattacttgactgacctgcctaataacgtctcagagcttgaggatatgatgattgcttgcggcataaatgtcgccaattgggctcccggggaggtggagaagctggccaacaggtcaggtgttgccctcctccccgtcgatgaatatctggagtggtttgacagccttgacgacattgtcaaggtgcaaataaccgaaggcccagtggcatacataggacaaatggttcgcagggccgtccttataaactatacggacgaggttgagacaatggtgaacgactggtataaccaaatcaaggcactccttcctgaaaatcaaacagttgccgctacgaacatattggacaaacttgttaacagtctcaagctttatgccaatgcctcatcagatggtgacgaaaacgcaagcctgtattacgacgaattcctgagatactacgacgaattcaaatctcttaacgtctccggtcttaatggatggggggaggcgccaggaaatatcatgctggtgaatcgaaatggaacggactacttcgtcatccccggactcaccttcggcaatgtgtttattgggcctgagccccaacgcgggtgggaggcagatatagaaaacctgtaccactgtacggccgttgcacccactcaccaatacttggcagcatattattatatgcaaacaagacagagtaacgcgatggtgttcgtggggcgacacgccactcatgagtggcttccgggaaaggaagtgctgctctcttataacgattatggtagcattgtcgttggtaaagtcccccaagtttacttctatataacggatggtcttgctgaagccattcaggccaagcggagaggcttcgcggttctgatttcccatctcgactcacccaagtcatatacgcatctgtacgggaacctcaccgtgttggctacacttctcgaggaatatgataacaaccatatcataatagaatccgactctgacaaggataatcaagctataacatatcaagtcattaaagacaatcagacgataacataccaggttatcaaccaggaactggaagataacctcacccgggcgataaaagatctcgttattgcgaataattactacttgactattgggtttaccgcggaagaactcaacaatacagatatgttctcactctcttccactctcaatgcttttctcaagaacacgcaaaacacactgtacccgctgggattgcacgctattggccagaaatggacggacgaagatctcgcgaataccgttgctatcatagtttcccacgattttgagtacggcggtaaaaagacgaatctcttcgaccagctttctctttactattacggggagaagtacagtaatctgacaccgttgaagagagactatatattgaacaggtctgttgacgtgtgtaaggcgttgatctactgggacaccgaaacagtgagcgacacaatagggattggttctcccgagtttatagagtctctcaacattgcaaaaaaatatatcgacctgtacaaccagtgtatttcattggagctcgaagaaatggtgtccgcccttaacggaggttatgtccccgtcaatataggtggagaatccgttacagttccacaggtgctccccacgggcgctaatatgtaccaggatcaatcaagcgagttgccaacacagaaagcgtgggactatgccaagacactgtcattgttgacgcttgccgaccttaatgacactacagagaagataattatgggcatctggtgcgtcgagacggctcgggacgatggtgcccttgtcagcactgtcctttaccttcttggtatggaaccggtgtggcataacagtagtagcgccggtttcgatgaagaggggataccaacgggaaagaaagttgaggatctcccaaatgttatagcgctcgagaatctcacgcgacccgatggatgggctaaaaaacgaatcgacgtcaccgtcataacatcaggcctttttcgggatctttattcaagccaagccaggttgatggacaatgcatatagaatggctcttgcgtgcagttattatacgatagtcaacaacaagacaatcatggatagtgaatacggtccacaagtctatgacgctctgcgcagcattatgcggtccatttcctttaaagggatgtccaatgaatctctcgaagacaactatgtggcgaaacattggctggaagactgcatttactacctcagtcttggctataacagcacggtttcaggcgagtatgcgattacgcggatctttgctccccctaacggcgattacggagctggcatatctaagctggttagtatgtcatggacttggaatgacaccgacgaattgtcagaattttatatcggcaggatgggcaacatgtattctaaatattattggggtgacacgaacccggtggtctttatgagagccttgagtgacacggaccatatcgtggtttccagaaatactaaccaatacggggtgcttgacaacgacgatttctttgactattgggggggcctttctatgacagtggagtacttgtctaataagacacccactatgaatgtgttgatgtatgccaataaagataatgcttacgtggccaccttcgagaatgtcttctacaacgagctgaacacaagatatctgaatccggagtggataaaaggtatgatgcaagaggggtatagtggatcacgctatatgtccaacaaatttatttccaacctttggggatggcaggtgacgagaccgagctccgtgtccgagacagtctgggacgatgtgtataacacttactacaaagacaaatatggtctgggagttaaaagctggctccaatccggaaacaatgcgtacagtctgatttccatgagcggcacaatgctgaactccgcatactcaggttactgggatgcggatgacgccacactgtctgacatagccaatacttgggcacaggcaacggttgcgaatggtgttgcgtgttgtgactgttcctgtggtaacgtcgccatgatgcaatgggcgttcaagtacgttaacgctgatttgttggcaaaattgatgccgaagttgtatgacgccactcagaaccctctgttctacactaactctagtgatatgcctacgaatagttccaatattgaccgacgcacgaccaattccagtgcagagagtaacaatacagaaacagtgcaaaccaatagctcaagtaactcacaacaatccgccaacgggaacaccaatattccaggggcctccggaggttacatggttggtactgaggccgatgctcaatcagacatggctagtgacagcgatgccggaatgaatgacgccaacggcgaaggacgaagcgttgaggttaccaaatcaacgtccacaccagttgctccaaaagacgtgagcatg

SEQ ID NO: 16979 - DNA, 1155 bp, synthetic construct
  source 1..1155: mol_type = other DNA
gggtccataggggctgcttctatggagttctgttttgatgttttcaaggaactgaaggttcaccatgctaacgagaacatcttttactgtccaatagccatcatgagtgcgcttgctatggtttatttgggtgcaaaagattctactcgcactcagattaataaggtcgttagattcgacaagcttccagggtttggagacagtattgaggcccaatgtggaacgtcagtcaacgtccattcttctctgcgggacattctcaaccaaataacgaagccaaacgacgtgtattccttctcactcgcgtcacggctgtatgctgaagaaaggtatcctatcttgccagaatatctccagtgcgtcaaggagttgtatcgaggcggactggaaccgatcaactttcagactgcagccgaccaggcccgcgaactgatcaacagctgggtcgagtctcagaccaatgggatcatacgcaatgtgttgcaaccgagtagtgtcgactctcagacggctatggtcttggtgaacgctatagtcttcaaaggtctgtgggagaagaccttcaaggatgaagacacacaagcgatgccattcagagtcaccgaacaagaaagcaaacccgtccaaatgatgtaccaaattgggctttttcgggtggcctctatggcctctgagaaaatgaaaatattggaactgcccttcgccagcggcacaatgagtatgttggtccttcttccagatgaagtctcaggtctcgaacagcttgagtctatcattaactttgagaaactcactgaatggacttcttccaatgtgatggaagaacgaaaaatcaaagtctacctgccccgaatgaagatggaagagaaatataatttgacatcagttctgatggccatgggaatcacagacgtgttttcatcctctgcgaatctgtctggcatatcttccgcagaatctctcaagatcagtcaagccgtccacgcggcccatgctgagataaatgaggcgggcagagaggtggtggggtccgccgaagctggagtcgacgcagcttctgtcagtgaagaatttagggccgatcatcctttcctgttctgcataaagcacatagctacgaacgctgtgcttttctttggcagatgcgtttctcca

SEQ ID NO: 16980 - DNA, 48 bp, synthetic construct; identical to SEQ ID NO: 16964
  source 1..48: mol_type = other DNA

SEQ ID NO: 16981 - DNA, 189 bp, synthetic construct
  source 1..189: mol_type = other DNA
ccctggtacatctggctgggcttcatcgcaggactgatcgccatcgtcatggtcaccataatgctctgttgcatgacctcctgctgtagctgcctgaaaggctgttgcagctgcgggagctgctgcaaattcgacgaagacgatagcgaacctgtgctcaaaggggtgaagttgcattacacatagtga

SEQ ID NO: 16982 - RNA, 47 nt, synthetic construct; identical to SEQ ID NO: 16965
  source 1..47: mol_type = other RNA

SEQ ID NO: 16983 - RNA, 93 nt, synthetic construct; identical to SEQ ID NO: 16966
  source 1..93: mol_type = other RNA

SEQ ID NO: 16984 - RNA, 48 nt, synthetic construct
  source 1..48: mol_type = other RNA
atgttcgtgttcctcgtgctcctgcccctcgtctccagccagtgcgtg

SEQ ID NO: 16985 - RNA, 189 nt, synthetic construct
  source 1..189: mol_type = other RNA
ccctggtacatctggctgggcttcatcgcaggactgatcgccatcgtcatggtcaccataatgctctgttgcatgacctcctgctgtagctgcctgaaaggctgttgcagctgcgggagctgctgcaaattcgacgaagacgatagcgaacctgtgctcaaaggggtgaagttgcattacacatagtga

SEQ ID NO: 16986 - RNA, 47 nt, synthetic construct; identical to SEQ ID NO: 16965
  source 1..47: mol_type = other RNA

SEQ ID NO: 16987 - RNA, 93 nt, synthetic construct; identical to SEQ ID NO: 16966
  source 1..93: mol_type = other RNA

SEQ ID NO: 16988 - RNA, 120 nt, synthetic construct
  source 1..120: mol_type = other RNA
aaaaaaaaaaaaaaaaaaaaaaaaaaaaaaaaaaaaaaaaaaaaaaaaaaaaaaaaaaaaaaaaaaaaaaaaaaaaaaaaaaaaaaaaaaaaaaaaaaaaaaaaaaaaaaaaaaaaaaaa

SEQ ID NO: 16989 - RNA, 48 nt, synthetic construct; identical to SEQ ID NO: 16984
  source 1..48: mol_type = other RNA

SEQ ID NO: 16990 - RNA, 189 nt, synthetic construct; identical to SEQ ID NO: 16985
  source 1..189: mol_type = other RNA

SEQ ID NO: 16991 - DNA, 75 bp, synthetic construct
  source 1..75: mol_type = other DNA
ccctggtacatctggctgggcttcatcgcaggactgatcgccatcgtcatggtcaccataatgctctgttgcatg

SEQ ID NO: 16992 - DNA, 108 bp, synthetic construct
  source 1..108: mol_type = other DNA
acctcctgctgtagctgcctgaaaggctgttgcagctgcgggagctgctgcaaattcgacgaagacgatagcgaacctgtgctcaaaggggtgaagttgcattacaca

SEQ ID NO: 16993 - RNA, 80 nt, synthetic construct
  source 1..80: mol_type = other RNA
aaaaaaaaaaaaaaaaaaaaaaaaaaaaaaaaaaaaaaaaaaaaaaaaaaaaaaaaaaaaaaaaaaaaaaaaaaaaaaaa

SEQ ID NO: 16994 - RNA, 160 nt, synthetic construct
  source 1..160: mol_type = other RNA
aaaaaaaaaaaaaaaaaaaaaaaaaaaaaaaaaaaaaaaaaaaaaaaaaaaaaaaaaaaaaaaaaaaaaaaaaaaaaaaaaaaaaaaaaaaaaaaaaaaaaaaaaaaaaaaaaaaaaaaaaaaaaaaaaaaaaaaaaaaaaaaaaaaaaaaaaaaaaaaa

SEQ ID NO: 16995 - RNA, 20 nt, synthetic construct
  source 1..20: mol_type = other RNA
aaaaaaaaaaaaaaaaaaaa

SEQ ID NO: 16996 - RNA, 40 nt, synthetic construct
  source 1..40: mol_type = other RNA
aaaaaaaaaaaaaaaaaaaaaaaaaaaaaaaaaaaaaaaa

SEQ ID NO: 16997 - RNA, 100 nt, synthetic construct
  source 1..100: mol_type = other RNA
aaaaaaaaaaaaaaaaaaaaaaaaaaaaaaaaaaaaaaaaaaaaaaaaaaaaaaaaaaaaaaaaaaaaaaaaaaaaaaaaaaaaaaaaaaaaaaaaaaaa

SEQ ID NO: 16998 - RNA, 140 nt, synthetic construct
  source 1..140: mol_type = other RNA
aaaaaaaaaaaaaaaaaaaaaaaaaaaaaaaaaaaaaaaaaaaaaaaaaaaaaaaaaaaaaaaaaaaaaaaaaaaaaaaaaaaaaaaaaaaaaaaaaaaaaaaaaaaaaaaaaaaaaaaaaaaaaaaaaaaaaaaaaaaa

SEQ ID NO: 16999 - DNA, 102 bp, unidentified
  source 1..102: mol_type = unassigned DNA; note = methanogen bacteria
gatgaaaaaggctatgaatacatttacagtacgggagacatggtcagatttttacctgacggaaccttggccatagtggaccgtcgtgacagccaggttaaa

SEQ ID NO: 17000 - DNA, 33 bp, unidentified
  source 1..33: mol_type = unassigned DNA; note = methanogen bacteria
aaccgtgtagaattacctgaagtcgaatcagca

SEQ ID NO: 17001 - DNA, 186 bp, unidentified
  source 1..186: mol_type = unassigned DNA; note = methanogen bacteria
aaaatacgttatgttgatgacgttactgttcaggttgcaaataataacggaagtaatgaattagttgcttatgtggttgcgtctaaagaatttgcccctgattcactgtcagagcatattcgagaatatgtttcaaaacataaaccagattacatgattccttcatttattattcctttaaacaaa

SEQ ID NO: 17002 - DNA, 54 bp, unidentified
  source 1..54: mol_type = unassigned DNA; note = methanogen bacteria
ggtaaagtggacaagaaagcattgcctaaagttaatctggaacatttgcatgca

SEQ ID NO: 17003 - DNA, 111 bp, unidentified
  source 1..111: mol_type = unassigned DNA; note = methanogen bacteria
aattatgttgaagacgtgactgtccaaacaataaaacgaggatcaaattatgaactggttgcatatgtcattgaaagtaaaaaaacagataatcttgacgaaataattaca

SEQ ID NO: 17004 - DNA, 39 bp, unidentified
  source 1..39: mol_type = unassigned DNA; note = methanogen bacteria
attggaaaatccaaaccagaatacatgattccttcattt

SEQ ID NO: 17005 - DNA, 60 bp, unidentified
  source 1..60: mol_type = unassigned DNA; note = methanogen bacteria
ggaaaagtagataaaaaagcactgcctgaaattgatcctgacagtttgcatgaaaaatat

SEQ ID NO: 17006 - DNA, 231 bp, unidentified
  source 1..231: mol_type = unassigned DNA; note = methanogen bacteria
atactggatgattcaaatgccaaagttcttattgtaagtgatgaaacttatgaaaggtccaatgatttaataaatgatgatgttactattttaaatatttcaaacattttaaaagaagatattggtgttttatcaacattacctgttgtttataatgatttggcctgtattttatacacaagtggtactacaggcattccaaaaggagttaaagttaccagaaaatcaatt

SEQ ID NO: 17007 - DNA, 126 bp, unidentified
  source 1..126: mol_type = unassigned DNA; note = methanogen bacteria
ataaaacaaggatccaactatgaactggttgcatatgttgttccaagtacagaaacagataatctcgaggaaataattacaaaacatattgaaaattccaaaccagaatacatgattccttcattt

SEQ ID NO: 17008 - DNA, 51 bp, unidentified
  source 1..51: mol_type = unassigned DNA; note = methanogen bacteria
gtagataagaaagcactgcctgaagttgacctggacactttgcatgaaaaa

SEQ ID NO: 17009 - DNA, 72 bp, unidentified
  source 1..72: mol_type = unassigned DNA; note = methanogen bacteria
ggtactacaggcattccaaaaggagtaaaaatcacaagaaaatcaattgtaaattatattgaatactatgca

SEQ ID NO: 17010 - DNA, 39 bp, unidentified
  source 1..39: mol_type = unassigned DNA; note = methanogen bacteria
tcaaacatgacacaggaagacacgtttgcattatacgca

SEQ ID NO: 17011 - DNA, 132 bp, unidentified
  source 1..132: mol_type = unassigned DNA; note = methanogen bacteria
attttcgtttcacttttcgttggagcctgtttaaatataattcctgaagaaatcaagttaaatatgaaaaaattaaatgaacatttcattaataacaacattactcatgcccacctcccaacacaggtagca

SEQ ID NO: 17012 - DNA, 180 bp, unidentified
  source 1..180: mol_type = unassigned DNA; note = methanogen bacteria
aatgaatttgaaagttcttcactgaaaattttagttactggaggagaaaaattaggcgaaatcgattattccaccgaatatattcttgttgattcatatggtcctactgaagcctgtgtatctgtaactgccattaaagaacaggataaaattggctattcttccattggtcatctgtta

SEQ ID NO: 17013 - DNA, 102 bp, unidentified
  source 1..102: mol_type = unassigned DNA; note = methanogen bacteria
attaaaaatgcgaacaacaatgaattggcagcttatgttgttgcaaattgtgaagttgaaaacattaatgatttagtttgcgattatgtaaatgagcacaaa

SEQ ID NO: 17014 - DNA, 72 bp, unidentified
  source 1..72: mol_type = unassigned DNA; note = methanogen bacteria
aaagctttaccagatattgatttggatgcattacgtgtagaatatgttgcccctacaaatgaaacggaaaag

SEQ ID NO: 17015 - DNA, 126 bp, unidentified
  source 1..126: mol_type = unassigned DNA; note = methanogen bacteria
gagaaaaataatatttcatgcaccgctagagatatattgaatcataaaactccatacttaattgcacaaaatgtagattctgcagaaatcatcagctatgatacagttgaaggtgaagtcgaccta

SEQ ID NO: 17016 - DNA, 63 bp, unidentified
  source 1..63: mol_type = unassigned DNA; note = methanogen bacteria
cctattcagtcattttactttgatcagattaaatctgatgagtatatgcaaccgttcttctta

SEQ ID NO: 17017 - DNA, 42 bp, unidentified
  source 1..42: mol_type = unassigned DNA; note = methanogen bacteria
caaagtgctttaaatgaattgaccaatcttcatgacatgctt

SEQ ID NO: 17018 - DNA, 33 bp, unidentified
  source 1..33: mol_type = unassigned DNA; note = methanogen bacteria
gaaaatggaaaagcagttcaggaaataaagcat

SEQ ID NO: 17019 - DNA, 63 bp, unidentified
  source 1..63: mol_type = unassigned DNA; note = methanogen bacteria
atagaaatcaatcttattcattataatgatgaatcttacataatattcgtcatacaccattta

SEQ ID NO: 17020 - DNA, 45 bp, unidentified
  source 1..45: mol_type = unassigned DNA; note = methanogen bacteria
aatgcccttccggaagttgatagagatactctgctgacagaatat

SEQ ID NO: 17021 - DNA, 60 bp, unidentified
  source 1..60: mol_type = unassigned DNA; note = methanogen bacteria
tatagatatgatactgataaaacatatacatttaaagatatttctactttgaatcaagaa

SEQ ID NO: 17022 - DNA, 57 bp, unidentified
  source 1..57: mol_type = unassigned DNA; note = methanogen bacteria
gaaatcaataacttttttaattattcttttaatgaaattaccgattcaactttgtac

SEQ ID NO: 17023 - DNA, 42 bp, unidentified
  source 1..42: mol_type = unassigned DNA; note = methanogen bacteria
ttcgattacacatcaattaaaaaaatatataacctatttaat

SEQ ID NO: 17024 - DNA, 45 bp, unidentified
  source 1..45: mol_type = unassigned DNA; note = methanogen bacteria
cctatagatgtgaccaataaagaactatattacaataaagagcgt

SEQ ID NO: 17025 - DNA, 60 bp, unidentified
  source 1..60: mol_type = unassigned DNA; note = methanogen bacteria
tataatataaaatccaataattataataagataaatatcccccttaataatgaaacaatc

SEQ ID NO: 17026 - DNA, 81 bp, unidentified
  source 1..81: mol_type = unassigned DNA; note = methanogen bacteria
ttcctcgatgaaaataacatttcaaaatttgaatatgtaacagcaatattctcattatacttatcccgaattgatagaaca

SEQ ID NO: 17027 - DNA, 177 bp, unidentified
  source 1..177: mol_type = unassigned DNA; note = methanogen bacteria
ctaaataattattttgatattaattcattttattccatttatgattttacaggttttaatgatatttctattattaatggagaaggttctgccttaacaattaatatttatgataattcaatagaattaatctataatacggatttatttaataaaacatatattgaacacatgata

SEQ ID NO: 17028 - DNA, 144 bp, unidentified
  source 1..144: mol_type = unassigned DNA; note = methanogen bacteria
aatattgaatcattaatcaataatattggcgaatctccaaaccaaatttgctgcgatattgacattctttcaaatgaagaaaaaaatttaatctccaggtttagtaaagcaaaaactattgaatttaatgaaaacaaaactttg

SEQ ID NO: 17029 - DNA, 78 bp, unidentified
  source 1..78: mol_type = unassigned DNA; note = methanogen bacteria
ccttccctaggtctttcaattgcaaatgaagacattaatttgaagtatatgcttttggcaggagctaaatttgataat

SEQ ID NO: 17030 - DNA, 162 bp, unidentified
  source 1..162: mol_type = unassigned DNA; note = methanogen bacteria
aactttgattctatttcaaacatttatctggatgttgataatgataatttaattgcatattatacaaccaatcaggatttaaatattgataaggtaaaaaatgctcttaaaaatgaattacctccttatatgattccatcaatttttattaaattagatgaa

SEQ ID NO: 17031 - DNA, 39 bp, unidentified
  source 1..39: mol_type = unassigned DNA; note = methanogen bacteria
atcgataaatttgcattgaaaaaaactacccacaataga

SEQ ID NO: 17032 - DNA, 93 bp, unidentified
  source 1..93: mol_type = unassigned DNA; note = methanogen bacteria
acttttatggaagttttaaacttagattatattttaatggatgatgatttcgtatcattaggaagaaattccttatctgcaatgaaactgcag

SEQ ID NO: 17033 - DNA, 264 bp, unidentified
  source 1..264: mol_type = unassigned DNA; note = methanogen bacteria
aaagaaaaattagattataatatatcttcaaatgaaataatggagctttcaacacccctcaacattacaaatcacattaaatttaatttaaataatcaaagcattgataaattaaaatatgcatttgataaatcctgtccgttatccgaatcccaattaaacgtttatcttgatgaaaaggtcaataaattaggtacaagatataataacccatttaaaatagaacttaataatgaatattccattgaagatattaaaatagca

SEQ ID NO: 17034 - DNA, 84 bp, unidentified
  source 1..84: mol_type = unassigned DNA; note = methanogen bacteria
gaactatatcctgttttatcttcaagaataaataataatgatacaccatcatttacttttgatgctaaactagaaattattgaa

SEQ ID NO: 17035 - DNA, 90 bp, unidentified
  source 1..90: mol_type = unassigned DNA; note = methanogen bacteria
ttaatcgttaaaaataatgaatcaacttcattatatgtggatttccatcatttaattatggatggaacatctgcagacattcttttaaac

SEQ ID NO: 17036 - DNA, 261 bp, unidentified
  source 1..261: mol_type = unassigned DNA; note = methanogen bacteria
tttgaaaaaaatattgattcccattacatggatgatgctgaaagattttttgataatatgttaactgatacagaagaagtatctccattattaacaccaatccaaactgataaatcattagatgatgaatttactaatgaattaaatttggatgttgacatagaatcttttttaaagaaacatggacttacacataatcaatttttctgtagtgtttttgcatatactttatcaagatttacaggatcttctaaagtttta

SEQ ID NO: 17037 - DNA, 81 bp, unidentified
  source 1..81: mol_type = unassigned DNA; note = methanogen bacteria
aatcttattgaagacggaagaggacatattgatttagccgattcagtaggaatgtatgttcgcactctcccattgctcatg

SEQ ID NO: 17038 - DNA, 126 bp, unidentified
  source 1..126: mol_type = unassigned DNA; note = methanogen bacteria
aaaaatcaaaatattagttcttttcttgattattcaagcaatttaattaatttaactatgaaatatgacttatatcctttccgtttactggcaaataaatatgatttaaattccaatattttattc

SEQ ID NO: 17039 - DNA, 99 bp, unidentified
  source 1..99: mol_type = unassigned DNA; note = methanogen bacteria
ttaaaacatgattatactaatgacatatcattttatatttttaactcacaggaaaataagtttggaatcagagttgaattttcagataaatattctaag

SEQ ID NO: 17040 - DNA, 147 bp, unidentified
  source 1..147: mol_type = unassigned DNA; note = methanogen bacteria
gatgaaatatcagatgttactgtccaaactgttgataataacggcaataacgagctagttgcctatgttgtattgtccaataatctggatgttaatttaaatgattatatttctagttatgtggatgaacgtaaaccagattatatg

SEQ ID NO: 17041 - DNA, 69 bp, unidentified
  source 1..69: mol_type = unassigned DNA; note = methanogen bacteria
aaagcactacctgaaattgatattaacagtttgcgtgctgagtatgctgctccaacaaacacaatagaa

SEQ ID NO: 17042 - DNA, 33 bp, unidentified
  source 1..33: mol_type = unassigned DNA; note = methanogen bacteria
aatgttgatgaagattacataaaagaatttcta

SEQ ID NO: 17043 - DNA, 30 bp, unidentified
  source 1..30: mol_type = unassigned DNA; note = methanogen bacteria
gaaaatgaagaaaattatcagatatttgct

SEQ ID NO: 17044 - DNA, 72 bp, unidentified
  source 1..72: mol_type = unassigned DNA; note = methanogen bacteria
aaaagtatttcatcatttatggatcatacatccaatctagtttataacgtgatgaaatacaactattatgca

SEQ ID NO: 17045 - DNA, 30 bp, unidentified
  source 1..30: mol_type = unassigned DNA; note = methanogen bacteria
catgaatatgacctcacgtcaaatatttta

SEQ ID NO: 17046 - DNA, 168 bp, unidentified
  source 1..168: mol_type = unassigned DNA; note = methanogen bacteria
atccccgaatggatcatggatggtgatggaaattcatacctaaatgactatgcaacaacagaacgtgaagacttaatcagtgatttaagtatagatataattcaaaaaggtaaagaatatgatttaatcgtcgaatattcagataaatattcaaataactttattaaa

SEQ ID NO: 17047 - DNA, 216 bp, unidentified
  source 1..216: mol_type = unassigned DNA; note = methanogen bacteria
atgctcaatgtcaatgaattaaaagaaataaattatattagtaaagaagatataaatcttttagactcatataatcaaacagaacatgaattaatctatgacgacattttagatgcattcaatgataatttaagcaaaaatcccaacaataaactcgtatcatttaaagatattagttatacatatgccgaaggcgcttatattgccaaacaaatt

SEQ ID NO: 17048 - DNA, 78 bp, unidentified
  source 1..78: mol_type = unassigned DNA; note = methanogen bacteria
aaagatacatcaagcaaggcaattattgcagatgacaatacctatgaacgtgctaaaacattaggaaaagatgtcatt

SEQ ID NO: 17049 - DNA, 45 bp, unidentified
  source 1..45: mol_type = unassigned DNA; note = methanogen bacteria
aaatatggtaagttatcatgtattttatacaccagcggcactaca

SEQ ID NO: 17050 - DNA, 231 bp, unidentified
  source 1..231: mol_type = unassigned DNA; note = methanogen bacteria
tacgtatcttattatacaaatagaacaaatatgacttcaaatgatgtcttggcattattttcttcaattagttttgatgttggagcaataaaaagtatttttgcaccaatatattctggttcatgcttagatattattccaaaaagttttagattaaatatgaaagaattgaataaatatttcaatgataataatataacacatgctgatttccctacacaaattgcaaaa

SEQ ID NO: 17051 - DNA, 189 bp, unidentified
  source 1..189: mol_type = unassigned DNA; note = methanogen bacteria
ttctttaaagaaaatgattcagttgaattaaaaattttagttacaggtggggaaaaattaggtgaaatcaatacaaaaaattttgagcaattaattgatgcatatggacctacagaaacatgcgtatccatatgttccattaagaaactagataaaatagattcctcttccattgggcatttattgtat

SEQ ID NO: 17052 - DNA, 108 bp, unidentified
  source 1..108: mol_type = unassigned DNA; note = methanogen bacteria
gtggaagatactacagtacaaatcaataaaaattccagtaattatgaattaatagcctatgtagttgtatctgaggaaatatataacttaaaagagagtatttgtagt

SEQ ID NO: 17053 - DNA, 39 bp, unidentified
  source 1..39: mol_type = unassigned DNA; note = methanogen bacteria
cctgaaattgatattaatagtttgcgtgctgagtatgtt

SEQ ID NO: 17054 - DNA, 150 bp, unidentified
  source 1..150: mol_type = unassigned DNA; note = methanogen bacteria
gattcactgactgccatcaagttactgtcttatctggacagtccgggcattactgctgcagacattttgaccctgcacactccttatgcaatagcagaaaacattaaggaagatacactcgatttagatatgtatactttggaaagcggt

SEQ ID NO: 17055 - DNA, 153 bp, unidentified
  source 1..153: mol_type = unassigned DNA; note = methanogen bacteria
ttgaatgaacctcaattgaatgtatatctggacattattgcaaacaatatggtaaattcctatttaattccattaaatatagttatttccaaagagtatgatgttgatgagatacataatgctttaaatgttatgttggatgttcatcctatt

SEQ ID NO: 17056 - DNA, 153 bp, unidentified
  source 1..153: mol_type = unassigned DNA; note = methanogen bacteria
tatttagttaaaggattaaaaccaccaatcaccttcaaatccaatgccgatgatgagtttgtcaatactttcctaacaaaaggatttgacttgaatgaatgtttgtctaaatttttagttgttgaaaaagaagacaaatatgaattgtttgct

SEQ ID NO: 17057 - DNA, 54 bp, unidentified
  source 1..54: mol_type = unassigned DNA; note = methanogen bacteria
aatcaaagtgtttctgatttcatgaatcagatgtctgatttggtttatgatgtg

SEQ ID NO: 17058 - DNA, 84 bp, unidentified
  source 1..84: mol_type = unassigned DNA; note = methanogen bacteria
aaggatacaagttctaaagttgttcttgtaagtgatgaaacctacactcgtgcaaaagatatggttgatgacagtattgttctt

SEQ ID NO: 17059 - DNA, 57 bp, unidentified
  source 1..57: mol_type = unassigned DNA; note = methanogen bacteria
gttgttgtggataatgatttggatggtgaagctttaagtgattccatttgtgattat

SEQ ID NO: 17060 - DNA, 33 bp, unidentified
  source 1..33: mol_type = unassigned DNA; note = methanogen bacteria
gaagtggatgttgaaggtttacgtgttgaatat

SEQ ID NO: 17061 - DNA, 264 bp, unidentified
  source 1..264: mol_type = unassigned DNA; note = methanogen bacteria
ggtggtgattcaatttcagcaatcagagttatttcatttatccagaaaaatggtatttcctgcagtgctaaagatgtattgacttataaaactccttatatgattgcacaaaatattggtgaaatcgatcgtgtttcctatgatgcggttgaaggtgaagttgctttgcttccaattcaaagttatttctttgaccaaatcaacactaatgaattttcacaggaatttatcctgaaagcaaagaatgatttggatttagagatt

SEQ ID NO: 17062 - DNA, 99 bp, unidentified
  source 1..99: mol_type = unassigned DNA; note = methanogen bacteria
ttcgatgaattgactaaaattcatgacatgttaagagtaaactacagatatgaaggagataatgtagttcaagagattctaccagttgatactagaatc

SEQ ID NO: 17063 - DNA, 99 bp, unidentified
  source 1..99: mol_type = unassigned DNA; note = methanogen bacteria
gaaatcaatgaaattagattaactggtgatttcaatactgccattagcgattttgttaatgaatcaatcagttcaattgacatgaataataatctaatt

SEQ ID NO: 17064 - DNA, 72 bp, unidentified
  source 1..72: mol_type = unassigned DNA; note = methanogen bacteria
ccatatccttataaaaattgggttgaagatgtaaatagtttagttgaaaatatttctgataatgaaaaacag

SEQ ID NO: 17065 - DNA, 93 bp, unidentified
  source 1..93: mol_type = unassigned DNA; note = methanogen bacteria
aatacggaatctaaagttgttatagttgatgatgatacttatgagcgtgctgaattattaaatgatgatgtaattcttttaaatatttctgac

SEQ ID NO: 17066 - DNA, 120 bp, unidentified
  source 1..120: mol_type = unassigned DNA; note = methanogen bacteria
tttggaaatgatgatgtttatggaatgtttgctaatatcagtttcgatgcaggttcatgggctatctgccaaacaatttatgcgggagcctgcttatcaatcgttccggatgacatcaag

SEQ ID NO: 17067 - DNA, 255 bp, unidentified
  source 1..255: mol_type = unassigned DNA; note = methanogen bacteria
gttgaccatggcgtaactcatacaatgattaccacacaagttggtaaactctttatggagagtgttgaagacacttccctagatgttttaatggttggtggtgagaaattaggtgactttgaaagtcctgaagattatcttttaattgacggattcggaccaacagaaacatttgcattcatatcatcaatcaacaacaacgataagattgattcctcatccattggtgatattaactataatactaaattctat

SEQ ID NO: 17068 - DNA, 33 bp, unidentified
  source 1..33: mol_type = unassigned DNA; note = methanogen bacteria
gaagtggatcgtagcggtttgcatgtggagtat

SEQ ID NO: 17069 - DNA, 153 bp, unidentified
  source 1..153: mol_type = unassigned DNA; note = methanogen bacteria
ggtggtgattcattaactgcaattaaagtcctttcctatcttgaggattataatgttactgcggcggacattttgagtttgcgtactccatttgccattgctgaaagtattaaagaagatacattggatttggatgtttacactttagaagat

SEQ ID NO: 17070 - DNA, 48 bp, unidentified
  source 1..48: mol_type = unassigned DNA; note = methanogen bacteria
aacaattacaatgcaatcggcatgtatgtaaatacattgcctatgctt

SEQ ID NO: 17071 - DNA, 75 bp, unidentified
  source 1..75: mol_type = unassigned DNA; note = methanogen bacteria
aaccagaatgtttctgatttcatggaatacatgtctggtttggtatacgatgtaatgaaatataattattatcca

SEQ ID NO: 17072 - DNA, 36 bp, unidentified
  source 1..36: mol_type = unassigned DNA; note = methanogen bacteria
gcaaaagaatatggtattgattcaagcattttattc

SEQ ID NO: 17073 - DNA, 72 bp, unidentified
  source 1..72: mol_type = unassigned DNA; note = methanogen bacteria
gatactcaggctagtgttcttattgttgataatagtacttatgagcatgctgaattattagctgatgatgca

SEQ ID NO: 17074 - DNA, 30 bp, unidentified
  source 1..30: mol_type = unassigned DNA; note = methanogen bacteria
atcagaaaatatggcttaagtgaagatgat

SEQ ID NO: 17075 - DNA, 282 bp, unidentified
  source 1..282: mol_type = unassigned DNA; note = methanogen bacteria
gatgcaatcaaattagatatggcttcaatgaatgattatttcattgaacatggtgtaacacacaccgaaatttctacacaagtagccaaactcttcataagtcaagtagatgaaacttccttgaaggttttaacaactggtggggaaaaattgggtggaagtgaaattgatgttgattatcgttttgtagactcatacggtccaacagaagcatgtgttgatgtaaccagtatagattcagatgagagaattgacccatcatcaattgggttcctgcttgac

SEQ ID NO: 17076 - DNA, 33 bp, unidentified
  source 1..33: mol_type = unassigned DNA; note = methanogen bacteria
gaagttgacacggataatctacgtgccgggtat

SEQ ID NO: 17077 - DNA, 36 bp, unidentified
  source 1..36: mol_type = unassigned DNA; note = methanogen bacteria
tcagtattttataatttagttaataatatagatttt

SEQ ID NO: 17078 - DNA, 105 bp, unidentified
  source 1..105: mol_type = unassigned DNA; note = methanogen bacteria
gatgattataaatatgatttatcattagatgaaattagaagtatatcaaatcaggattcaactttaaatcattattttgatgctatttcaaatattttccaaaat

SEQ ID NO: 17079 - DNA, 60 bp, unidentified
  source 1..60: mol_type = unassigned DNA; note = methanogen bacteria
tcattaggttgtatttatgcaacattaattgctgaaaaattggaaaaagaccgagttgtg

SEQ ID NO: 17080 - DNA, 93 bp, unidentified
  source 1..93: mol_type = unassigned DNA; note = methanogen bacteria
gaattaatttataatgcagacctgttttctaatagttatatggaacatatggcagcaaacattaaatctttaataagcagtacttcagagtta

SEQ ID NO: 17081 - DNA, 45 bp, unidentified
  source 1..45: mol_type = unassigned DNA; note = methanogen bacteria
ttagatagttcaagtaattcaattgctaatgacttaaaagagaat

SEQ ID NO: 17082 - DNA, 39 bp, unidentified
  source 1..39: mol_type = unassigned DNA; note = methanogen bacteria
gagtttgatcttgtgcagggtagtgattttgctatttta

SEQ ID NO: 17083 - DNA, 111 bp, unidentified
  source 1..111: mol_type = unassigned DNA; note = methanogen bacteria
gagagtaatgattttacaaaaatagttaatgcttatggtatgactgaaatcatggcaactgcaaatatctgtaatacagcaaaaaaggataattctatcggtaaatccatg

SEQ ID NO: 17084 - DNA, 42 bp, unidentified
  source 1..42: mol_type = unassigned DNA; note = methanogen bacteria
aactcatattcgtcattagatgttaattatacttttaatgat

SEQ ID NO: 17085 - DNA, 144 bp, unidentified
  source 1..144: mol_type = unassigned DNA; note = methanogen bacteria
gacgaagttaatgatttattggatagtgttaatggtgatggggaaaatgcctatactgactattttaagatggatttatcttcttttttaaaagacaattctattacttataatcagtttttcgcatccgtgtttgcatataca

SEQ ID NO: 17086 - DNA, 48 bp, unidentified
  source 1..48: mol_type = unassigned DNA; note = methanogen bacteria
attaaatattcttctggtttaattaattctgttatgaagtatgatttg

SEQ ID NO: 17087 - DNA, 30 bp, unidentified
  source 1..30: mol_type = unassigned DNA; note = methanogen bacteria
aattatattgggtcttctgatttaactatt

SEQ ID NO: 17088 - DNA, 132 bp, unidentified
  source 1..132: mol_type = unassigned DNA; note = methanogen bacteria
gttaagtatccagataatgcccttgtctcttataataatatttcttacagttatgccgaaggagctttcattgcagataaaatcagaaaattactaatcgattttggtgttgaacctggtgattgtgttagt

SEQ ID NO: 17089 - DNA, 108 bp, unidentified
  source 1..108: mol_type = unassigned DNA; note = methanogen bacteria
gaggatagtgattctcacgttgttattgctagtgatgaaacatatgataaagtgaatagtttatgtgaggacattattttaaatatttctgatttgtttaatgatgat

SEQ ID NO: 17090 - DNA, 96 bp, unidentified
  source 1..96: mol_type = unassigned DNA; note = methanogen bacteria
tcaaatatgaattctagtgatgtttatgcgctgtttgcatctattggttttgatgtgggtgctattaaaagtatttttgtaccgctgtattgtggt

SEQ ID NO: 17091 - DNA, 132 bp, unidentified
  source 1..132: mol_type = unassigned DNA; note = methanogen bacteria
gtcactggtggtgaaaaattaggtgaagttgattattcgggcaattatctttttattgattcatatggaccgacagaagcttgcgtatcagttactgctattgaagaaaaggacaaaatagattcatcctca

SEQ ID NO: 17092 - DNA, 63 bp, unidentified
  source 1..63: mol_type = unassigned DNA; note = methanogen bacteria
acttatattgatagttttaatatttctgcaggtgacattttaagtttacgtaccccatatgca

SEQ ID NO: 17093 - DNA, 57 bp, unidentified
  source 1..57: mol_type = unassigned DNA; note = methanogen bacteria
tcgggcgagtatagtgttgatgatattgggactgctttgggtgtgatgtttgatgtc

SEQ ID NO: 17094 - DNA, 84 bp, unidentified
  source 1..84: mol_type = unassigned DNA; note = methanogen bacteria
tccagtgatgtttttaaacgggatttatatactattcttggcggaagagttgttggcgtggatgattcctttttgaaggcttct

SEQ ID NO: 17095 - DNA, 48 bp, unidentified
  source 1..48: mol_type = unassigned DNA; note = methanogen bacteria
attgatgagaatgatttattggataatatgggtgatttaatcgctgat

SEQ ID NO: 17096 - DNA, 84 bp, unidentified
  source 1..84: mol_type = unassigned DNA; note = methanogen bacteria
tcctataatgctattttaaacgatatgttgtgtgttaaggcgttgagtgatatatcttatgtttctagtaatgatttggttctt

SEQ ID NO: 17097 - DNA, 108 bp, unidentified
  source 1..108: mol_type = unassigned DNA; note = methanogen bacteria
ccagataaggatttggttacatatatgaatcgttcttattcttatggtgagagtgcttttatagcagacaagattgctaaatctttaactgatttgggtgttgaatcg

SEQ ID NO: 17098 - DNA, 45 bp, unidentified
  source 1..45: mol_type = unassigned DNA; note = methanogen bacteria
gttagtgataaaacttataatagggctgatgaaataagtgattgt

SEQ ID NO: 17099 - DNA, 123 bp, unidentified
  source 1..123: mol_type = unassigned DNA; note = methanogen bacteria
agcttggatgaaaatgatgtttatggtttgtattctgcaattggatttgatatgagcactttcgttattgatgtagttatcactgcaggcgcatgtttggctgttatacctgatgagattaaa

SEQ ID NO: 17100 - DNA, 72 bp, unidentified
  source 1..72: mol_type = unassigned DNA; note = methanogen bacteria
gatatgttgaagttaaatgattattttattgaccataatgtttctcatgccgccattcctactccagtagct

SEQ ID NO: 17101 - DNA, 171 bp, unidentified
  source 1..171: mol_type = unassigned DNA; note = methanogen bacteria
tttatgaagagtgttgatgatacttctttggatgttttacatattggtggtgaaaagttaggtgattttgtttgtagcgaagcttatcgcgttattgatagttatggtccaactgagtcatttgcttatgtttgttcaattgataattctgataaagtggatccctcttct

SEQ ID NO: 17102 - DNA, 93 bp, unidentified
  source 1..93: mol_type = unassigned DNA; note = methanogen bacteria
ttgacttatcttgatggttttaatatttctgctggtgatgttttaggtttgcgtactccttatgctattgcaggtagtgttaggaatatttct

SEQ ID NO: 17103 - DNA, 75 bp, unidentified
  source 1..75: mol_type = unassigned DNA; note = methanogen bacteria
tccaatgatgtttttaaacgagatttattcactgttcttgacggcggagttgttgacttggatgattccttcttg

SEQ ID NO: 17104 - DNA, 123 bp, unidentified
  source 1..123: mol_type = unassigned DNA; note = methanogen bacteria
gttatggataatgataattctgatgtaaatattattaaatctgttagggagaatattgattctgatgatggtgatttattggatgacatgagcgatttgattgctgatttaagtgcagggatt

SEQ ID NO: 17105 - DNA, 99 bp, unidentified
  source 1..99: mol_type = unassigned DNA; note = methanogen bacteria
tttgaggagttaagtgatatttcttatgtttcctgtgatgatcttgctcttttagatgcctataatgatactgctcatgttttggattatgttgatgtt

SEQ ID NO: 17106 - DNA, 36 bp, unidentified
  source 1..36: mol_type = unassigned DNA; note = methanogen bacteria
gaagataagtcgtatacttatggtgaaagtgctttt

SEQ ID NO: 17107 - DNA, 30 bp, unidentified
  source 1..30: mol_type = unassigned DNA; note = methanogen bacteria
attaatgaaattgccagtatgttgaatggt

SEQ ID NO: 17108 - DNA, 105 bp, unidentified
  source 1..105: mol_type = unassigned DNA; note = methanogen bacteria
ccaaaagaatatgttttaagcgatgtctatggtccaacagaaacggttttatccatcacttctactgatgtggttgataaaattgatgattcatctgttggattc

SEQ ID NO: 17109 - DNA, 57 bp, unidentified
  source 1..57: mol_type = unassigned DNA; note = methanogen bacteria
tctggaagatataaaattgatgcaattatcagtgctttagagagtatgttgaatgtt

SEQ ID NO: 17110 - DNA, 87 bp, unidentified
  source 1..87: mol_type = unassigned DNA; note = methanogen bacteria
tctgatgatgtttatggtatgcattgttcttatgtatttgatatgcatgttcatgctttgtattcaccaattgtttctggtgggtca

SEQ ID NO: 17111 - DNA, 87 bp, unidentified
  source 1..87: mol_type = unassigned DNA; note = methanogen bacteria
gctgaaagtggtatggagaccactattaagcttttatgttttggtggtatgaagttaggtgagttgaatgcacctgattctattgga

SEQ ID NO: 17112 - DNA, 48 bp, unidentified
  source 1..48: mol_type = unassigned DNA; note = methanogen bacteria
tcagaaaatttagctatatctactagcatatttgctaatagacgtatt

SEQ ID NO: 17113 - DNA, 30 bp, unidentified
  source 1..30: mol_type = unassigned DNA; note = methanogen bacteria
gatgatagtgttgctaatgatgatttgtct

SEQ ID NO: 17114 - DNA, 72 bp, unidentified
  source 1..72: mol_type = unassigned DNA; note = methanogen bacteria
gtattagactctgaatcttatggtatcacgtttaatgtttcacgcgttggtgattattatgttattaatggt

SEQ ID NO: 17115 - DNA, 54 bp, unidentified
  source 1..54: mol_type = unassigned DNA; note = methanogen bacteria
gaattggatggtaaggttgatttaggttttgtttatgctagtcgtgattctttt

SEQ ID NO: 17116 - DNA, 57 bp, unidentified
  source 1..57: mol_type = unassigned DNA; note = methanogen bacteria
attgatgaggtttcttctttgttgaatgatgttgacggctatgcaggtagtgttagt

SEQ ID NO: 17117 - DNA, 90 bp, unidentified
  source 1..90: mol_type = unassigned DNA; note = methanogen bacteria
actgttagtagtttcttgaatgctgttttcgcttatgcttattcacgttttattggtggagataaggtttattatacttttactgtgaat

SEQ ID NO: 17118 - DNA, 75 bp, unidentified
  source 1..75: mol_type = unassigned DNA; note = methanogen bacteria
actaatgcttctgttggtgattttttatcaggcgtttctaatttgattttagaatcaatgggcaatagtgtttat

SEQ ID NO: 17119 - DNA, 102 bp, unidentified
  source 1..102: mol_type = unassigned DNA; note = methanogen bacteria
agtgagtttggtttatccaatagtattacttttgaatataattatgatttgaatgatacaactggcgttggtgatgaaattgtctttagtgacagagcggat

SEQ ID NO: 17120 - DNA, 36 bp, unidentified
  source 1..36: mol_type = unassigned DNA; note = methanogen bacteria
aatgatttggatgatggttttcttgttagtttgaat

SEQ ID NO: 17121 - DNA, 102 bp, unidentified
  source 1..102: mol_type = unassigned DNA; note = methanogen bacteria
atggacagtattgatgagacttcattggatgttttagttaccggtggcgagaagttaggagaatttagtagtcctgaatcttatagtttaattgatagttat

SEQ ID NO: 17122 - DNA, 51 bp, unidentified
  source 1..51: mol_type = unassigned DNA; note = methanogen bacteria
gattcaatggataatttggataagttggattattcttctgacggttttgtt

SEQ ID NO: 17123 - DNA, 66 bp, unidentified
  source 1..66: mol_type = unassigned DNA; note = methanogen bacteria
ataagtttcaatgattttctaaatcaggttaatgatgtttatgattctgcaatccaacattccatg

SEQ ID NO: 17124 - DNA, 48 bp, unidentified
  source 1..48: mol_type = unassigned DNA; note = methanogen bacteria
aacatagaaaattatactgattatgcctgtttttattctgtttatgat

SEQ ID NO: 17125 - DNA, 126 bp, unidentified
  source 1..126: mol_type = unassigned DNA; note = methanogen bacteria
aatatttatgaggattatttggaattaatttataatgcagacctgttttctaatagttatatggaacatatggcagcaaacattaaatctttaataaacagtgcttcagagttacctaatataatg

SEQ ID NO: 17126 - DNA, 54 bp, unidentified
  source 1..54: mol_type = unassigned DNA; note = methanogen bacteria
aaggatattgatattttatcagataatgagaaaaagaccatttctgaattttcc

SEQ ID NO: 17127 - DNA, 60 bp, unidentified
  source 1..60: mol_type = unassigned DNA; note = methanogen bacteria
gaattagatagttcaagtaattcaattgctaatgacttaaaagagaattatggtattggc

SEQ ID NO: 17128 - DNA, 48 bp, unidentified
  source 1..48: mol_type = unassigned DNA; note = methanogen bacteria
gatgattgtgagtttgatcttgtgcagggtagtgattttgctatttta

SEQ ID NO: 17129 - DNA, 138 bp, unidentified
  source 1..138: mol_type = unassigned DNA; note = methanogen bacteria
gggtctaaattaaacgctcttcccgagagtaatgattttacgaaaatagttaatgcttatggtatgactgaaatcatggcaactgcaaatatctgcaatacagcaaaaaaggataattctatcggtaaatccatggcc

SEQ ID NO: 17130 - DNA, 60 bp, unidentified
  source 1..60: mol_type = unassigned DNA; note = methanogen bacteria
gagtctgttttaattgatgataattttgtaggattgggtggaaattctctatctgcaatg

SEQ ID NO: 17131 - DNA, 42 bp, unidentified
  source 1..42: mol_type = unassigned DNA; note = methanogen bacteria
aactcatattcgtcattagatgttaattataattttaataat

SEQ ID NO: 17132 - DNA, 156 bp, unidentified
  source 1..156: mol_type = unassigned DNA; note = methanogen bacteria
gaaagagacgaagttaatgatttattggatagtgttaatggtgatggggaaaatgcctatactgactattttaagatggatttatcttcttttttaaaagacaattctattacttataatcagtttttcgcatccgtgtttgcatatacactgtca

SEQ ID NO: 17133 - DNA, 33 bp, unidentified
  source 1..33: mol_type = unassigned DNA; note = methanogen bacteria
ctcattgaagatggtagaggtcatgttaattta

SEQ ID NO: 17134 - DNA, 57 bp, unidentified
  source 1..57: mol_type = unassigned DNA; note = methanogen bacteria
tttattaaatattcttctggtttaattaattctgttatgaagtatgatttgtattct

SEQ ID NO: 17135 - DNA, 243 bp, unidentified
  source 1..243: mol_type = unassigned DNA; note = methanogen bacteria
aatgaaattaattatattgggtcttctgatttaactattttagataattataatcaaactgagcatgatttattttataatgatattatggatgcatttaacgataatttagttaagtatccagataatgcccttgtctcttataataatatttcttacagttatgccgaaggagctttcattgcagataaaatcagaaaattactaatcgattgtggtgttgaacctggtgattgtgttagt

SEQ ID NO: 17136 - DNA, 120 bp, unidentified
  source 1..120: mol_type = unassigned DNA; note = methanogen bacteria
attttagaggatagtgattctcacgttgttattgctagtgatgaaacatatgatagagtgaatagtttatgtgagggcattattttaaatatttctgatttgtttaatgatgatattggt

SEQ ID NO: 17137 - DNA, 129 bp, unidentified
  source 1..129: mol_type = unassigned DNA; note = methanogen bacteria
gccgagtatgatttggatgatggcgatgtttatggaatgttttctaatattggttttgatgtaggtaattttgctattaatgtagttatgtgtgccggagcttgtttaaatgttatacctgaagagatt

SEQ ID NO: 17138 - DNA, 54 bp, unidentified
  source 1..54: mol_type = unassigned DNA; note = methanogen bacteria
ttaaagttaaatgattatttcatcagccataatgtttcacatacttatgtgact

SEQ ID NO: 17139 - DNA, 165 bp, unidentified
  source 1..165: mol_type = unassigned DNA; note = methanogen bacteria
atggaaaatgttgacaagacttctttggatattttgcttgttggtggtgagaaattaggtaatctcataatgcctaaagattatcatataattgatgcttacggtcctactgaatcatttacatttattagtttaatggataataatgataagttagactcctcc

SEQ ID NO: 17140 - DNA, 60 bp, unidentified
  source 1..60: mol_type = unassigned DNA; note = methanogen bacteria
tatattgatggttttaatatttctgcaggtgacattttaagtttacgtaccccatatgca

SEQ ID NO: 17141 - DNA, 60 bp, unidentified
  source 1..60: mol_type = unassigned DNA; note = methanogen bacteria
atttcgggcgagtatagtgttgatgatattgggactgctttgggtgtgatgtttgatgtc

SEQ ID NO: 17142 - DNA, 90 bp, unidentified
  source 1..90: mol_type = unassigned DNA; note = methanogen bacteria
atatccagtgatgtttttaaacgggatttatatactattcttggcggaagagttgttggcgtggatgattcctttttgaaggcttctgct

SEQ ID NO: 17143 - DNA, 48 bp, unidentified
  source 1..48: mol_type = unassigned DNA; note = methanogen bacteria
gatattgatgagaatgatttattggataatatgggtgatttgatcgct

SEQ ID NO: 17144 - DNA, 96 bp, unidentified
  source 1..96: mol_type = unassigned DNA; note = methanogen bacteria
attttaaacgatatgttgtgtgttaaggcgttgggtgatatatcttatgtttctagtgatgatttggttcttttagatgagtttaataatactgag

SEQ ID NO: 17145 - DNA, 108 bp, unidentified
  source 1..108: mol_type = unassigned DNA; note = methanogen bacteria
ccggataaggatttggttacatatatgaatcgttcttattcttatggtgagggtgcttttatagcagacaagattgctaaatctctaactgatttgggtgttgaatct

SEQ ID NO: 17146 - DNA, 48 bp, unidentified
  source 1..48: mol_type = unassigned DNA; note = methanogen bacteria
gttagtgatgaaacttataatagggctgatgaaataagtgattgtgtt

SEQ ID NO: 17147 - DNA, 120 bp, unidentified
  source 1..120: mol_type = unassigned DNA; note = methanogen bacteria
agcttggatgaaaatgatgtttatggtttgtattctgcaattggatttgatatgagcactttcgttattgatgtagttatcactgcaggcgcatgtttggctgttatacctgatgagatt

SEQ ID NO: 17148 - DNA, 219 bp, unidentified
  source 1..219: mol_type = unassigned DNA; note = methanogen bacteria
attgaccataatgtttctcatgccgccattcctactccagtagctaagttgtttatgaagagtgttgatgatacttctttggatgttttacatattggtggtgaaaagttaggtgattttgtttgtagcgaagcttatcgcgttattgatagttatggtccaactgagtcatttgcttatgtttgttcaattgataattctgataaagtggatccctct

SEQ ID NO: 17149 - DNA, 81 bp, unidentified
  source 1..81: mol_type = unassigned DNA; note = methanogen bacteria
acttatcttgatggttttaatatttctgctggtgatgttttaggtttgcgtactccttatgctattgcaggtagtgttagg

SEQ ID NO: 17150 - DNA, 33 bp, unidentified
  source 1..33: mol_type = unassigned DNA; note = methanogen bacteria
tctattgaggatattaagtctgctttgaatgtg

SEQ ID NO: 17151 - DNA, 84 bp, unidentified
  source 1..84: mol_type = unassigned DNA; note = methanogen bacteria
tccaatgatgtttttaaacgagatttattcactgttcttgacggcggagttgttgacttggatgattccttcttgagagcttct

SEQ ID NO: 17152 - DNA, 114 bp, unidentified
  source 1..114: mol_type = unassigned DNA; note = methanogen bacteria
gttatggataatgataattctgatgtgaatattattaaatctgttagggagaatattgattctgatgatggtgatttattggatgacatgagcgatttgattgctgatttaagt

SEQ ID NO: 17153 - DNA, 96 bp, unidentified
  source 1..96: mol_type = unassigned DNA; note = methanogen bacteria
tttgaggagttaagtgatatttcttatgtttcctgtgatgatcttgctcttttagatgcctataatgatactgctcatgttttggattatgttgat

SEQ ID NO: 17154 - DNA, 30 bp, unidentified; identical to SEQ ID NO: 17107
  source 1..30: mol_type = unassigned DNA; note = methanogen bacteria

SEQ ID NO: 17155 - DNA, 51 bp, unidentified
  source 1..51: mol_type = unassigned DNA; note = methanogen bacteria
aatgttagggacacttctattaaacatattcaagccattggtgaaaaatta

SEQ ID NO: 17156 - DNA, 108 bp, unidentified
  source 1..108: mol_type = unassigned DNA; note = methanogen bacteria
gtacctccaaaagaatatgttttaagcgatgtctatggtccaacagaaacggttttatccatcacttctactgatgtggttgataaaattgatgattcatctgttgga

SEQ ID NO: 17157 - DNA, 60 bp, unidentified
  source 1..60: mol_type = unassigned DNA; note = methanogen bacteria
atatctggaagatataagattgatgcaattatcagtgctttagagagtatgttggatgtt

SEQ ID NO: 17158 - DNA, 48 bp, unidentified
  source 1..48: mol_type = unassigned DNA; note = methanogen bacteria
agtgttagtgataaggaggatgttccttatttagttaagggttctaaa

SEQ ID NO: 17159 - DNA, 30 bp, unidentified
  source 1..30: mol_type = unassigned DNA; note = methanogen bacteria
atagttgaaaacaatgaggattataattta

SEQ ID NO: 17160 - DNA, 87 bp, unidentified
  source 1..87: mol_type = unassigned DNA; note = methanogen bacteria
gatgtttatggtatgcactgttcttatgtatttgatatgcatgttcatgctttgtattcaccaattgtttctggtgggtcattgtat

SEQ ID NO: 17161 - DNA, 174 bp, unidentified
  source 1..174: mol_type = unassigned DNA; note = methanogen bacteria
gctgaaagtggtatggagaccactattaagcttttatgttttggtggtatgaagttaggtgagttgaatgcacctgattctattggaccatttgagtcatatggtccatcagaaaatttagctatatctactagcatatttgctaatagacgtattgataattccagtattggt

SEQ ID NO: 17162 - DNA, 51 bp, unidentified
  source 1..51: mol_type = unassigned DNA; note = methanogen bacteria
gatgatagtgttgctgatgatttgtctttgattagtgatgtttatagtctt

SEQ ID NO: 17163 - DNA, 39 bp, unidentified
  source 1..39: mol_type = unassigned DNA; note = methanogen bacteria
agtagtgatgtattagactctgaatcttatggtatcacg

SEQ ID NO: 17164 - DNA, 60 bp, unidentified
  source 1..60: mol_type = unassigned DNA; note = methanogen bacteria
ggagaattggatggtaaggttgatttaggttttgtttatgctagtcgtgattcttttgat

SEQ ID NO: 17165 - DNA, 63 bp, unidentified
  source 1..63: mol_type = unassigned DNA; note = methanogen bacteria
gatattgatgaggtttcttctttgttgaatgatgttgacggctatgcaggtagtgttagtctt

SEQ ID NO: 17166 - DNA, 117 bp, unidentified
  source 1..117: mol_type = unassigned DNA; note = methanogen bacteria
attactgttagtagtttcttgaatgctgttttcgcttatgcttattcacgttttattggtggggataaggtttattatacttttactgtgaatggtcgtcatgaggattacagtcag

SEQ ID NO: 17167 - DNA, 81 bp, unidentified
  source 1..81: mol_type = unassigned DNA; note = methanogen bacteria
tgtactaatgcttctgttggtgattttttatcaggcgtttctaatttgattttagaatctatgggtaatagtgtttatcct

SEQ ID NO: 17168 - DNA, 120 bp, unidentified
  source 1..120: mol_type = unassigned DNA; note = methanogen bacteria
agtgagtttggtttatccaatagtattacttttgaatataattatgatttgaatgatacaactggcgttggtgatgaaattgtctttagtgacagagcggattgtgtttctgatttgtta

SEQ ID NO: 17169 - DNA, 51 bp, unidentified
  source 1..51: mol_type = unassigned DNA; note = methanogen bacteria
tttgttaatgatttggatgatggttttcttgttagtttgaatcatgttgat

SEQ ID NO: 17170 - DNA, 108 bp, unidentified
  source 1..108: mol_type = unassigned DNA; note = methanogen bacteria
agtattgatgagacttcattggatgttttagttaccggtggtgagaagttaggagaatttagtagtccggaatcttatagtttaattgatagttatggtcctactgag

SEQ ID NO: 17171 - DNA, 36 bp, unidentified
  source 1..36: mol_type = unassigned DNA; note = methanogen bacteria
gttgattcaatggataatttggataagttggattat

SEQ ID NO: 17172 - DNA, 126 bp, unidentified
  source 1..126: mol_type = unassigned DNA; note = methanogen bacteria
actattatcaatactcaatcatggggtggagctttaaaaacaagtgatgatcgtagagttaattatgccggttgggattcaagtcactgggataccaataccactggtggtgacgctggtgctatt

SEQ ID NO: 17173 - DNA, 57 bp, unidentified
  source 1..57: mol_type = unassigned DNA; note = methanogen bacteria
ctatataatgtaactttcattaactgtaatggatctggccgtggaggagcagtgttc

SEQ ID NO: 17174 - DNA, 279 bp, unidentified
  source 1..279: mol_type = unassigned DNA; note = methanogen bacteria
tgtaactttacaaacaatgctgcattaggtacagatatcagtaccttgtttttaaatttgacagatctcaatcaaattaaatatggaacttccctaccggataaagatagttttggtttaaataaggtctttgttcttattcagtataatggtgatcaaaaggttagttacacattgtattcaatcaatccggataatgatgaatggactatattggaatttactacagaaaccggtccttctcctactgattgggttactgatgaatactttggtggt

SEQ ID NO: 17175 - DNA, 147 bp, unidentified
  source 1..147: mol_type = unassigned DNA; note = methanogen bacteria
ggtactgtggacaactgtagattcattgactccaactccgctcgtcgtggtggtggagcatacatgacaggttcagacaacattgtatttaaaaactcatactttgaaaactgtacttcaggtactaatggtggaggtcttgactgg

SEQ ID NO: 17176 - DNA, 78 bp, unidentified
  source 1..78: mol_type = unassigned DNA; note = methanogen bacteria
gcaaactatggtagagtaataaactgtactttcaacaatacccgtgctgcccgttcagccggtgcaatctactacgac

SEQ ID NO: 17177 - DNA, 132 bp, unidentified
  source 1..132: mol_type = unassigned DNA; note = methanogen bacteria
actgttatcaataccaaatcttatggtggaactttaaaacacagtacatacggcagaaataatgttatttatgccggttgggatgcaagtcactgggataccaatactactggtggtgacgccggcgctatc

SEQ ID NO: 17178 - DNA, 60 bp, unidentified
  source 1..60: mol_type = unassigned DNA; note = methanogen bacteria
tatgtttacaatgcaactttcatcaacacaacttcacagggccgtggaggagctgtgttc

SEQ ID NO: 17179 - DNA, 138 bp, unidentified
  source 1..138: mol_type = unassigned DNA; note = methanogen bacteria
tcctgtaagttcattggtgatgaagcattaggtattgctaccaatacctggaaggattacactaaaaacagagatgataataatcctgatactaaacttgattataaattaactggtcatggtggagcaattgcattt

SEQ ID NO: 17180 - DNA, 87 bp, unidentified
  source 1..87: mol_type = unassigned DNA; note = methanogen bacteria
catgatgttgtaattaaaaagtctgaattcatatataactatgctcgtcgtgacggcggtgcaattaacatcgcggaaaattcattc

SEQ ID NO: 17181 - DNA, 81 bp, unidentified
  source 1..81: mol_type = unassigned DNA; note = methanogen bacteria
gctactattgaagattgtatatttacaaacaattcctgtggtgacgatggtggagctataaactgggaaggtaatttaggt

SEQ ID NO: 17182 - DNA, 252 bp, unidentified
  source 1..252: mol_type = unassigned DNA; note = methanogen bacteria
atctataacagtacttttacaattaccaatgcagtaggtttaaacggacatcattccaaaggtggtgcagttaatgtaattggtgattattctgttattacaaaatccaaattccaaatgacttccgcagctgttgatggtggagctatctatgctacaggtaattatattaatattacagattcatcattcaataaatgtaatgtttcacacacttatgaagcaaagtatgaccatggtggaggcgctata

SEQ ID NO: 17183 - DNA, 39 bp, unidentified
  source 1..39: mol_type = unassigned DNA; note = methanogen bacteria
actttcgaccaaactaacgctagaataggtggtaccttg

SEQ ID NO: 17184 - DNA, 30 bp, unidentified
  source 1..30: mol_type = unassigned DNA; note = methanogen bacteria
tttgtatctacttccggcggatcagtttat

SEQ ID NO: 17185 - DNA, 231 bp, unidentified
  source 1..231: mol_type = unassigned DNA; note = methanogen bacteria
aataattccgaaatatcaatgtccaacgcaaccctttccggtggtgcagtatatattgaaggtcagtatgcaactattgaaaattcaaacttaagcaatgctgttgcaaaaggttcatcatatactgctagtaatttgggtggtatagtatatattcacggtaacgatgctagtattataggttccagatttgccaatggtcaggcatatcatggaggaatcgtttacttg

SEQ ID NO: 17186 - DNA, 108 bp, unidentified
  source 1..108: mol_type = unassigned DNA; note = methanogen bacteria
tgtgtaattaaaaatagtgtttgttctaaagaagcaggcggaatatatttctccaacaataatcttaaaaccgattatgtatatttacctaaggatatccgtatgata

SEQ ID NO: 17187 - DNA, 72 bp, unidentified
  source 1..72: mol_type = unassigned DNA; note = methanogen bacteria
gattctacatttgtaaaatcctatgctggtgatggtggagcagtatattattatgcatctttaagtaatcca

SEQ ID NO: 17188 - DNA, 78 bp, unidentified
  source 1..78: mol_type = unassigned DNA; note = methanogen bacteria
cttaaaattgaaaattgtacattcattaaaaacattgcatactataatggtggtgcggttttatatcttattaatagt

SEQ ID NO: 17189 - DNA, 162 bp, unidentified
  source 1..162: mol_type = unassigned DNA; note = methanogen bacteria
gttattttaccatctaaaagaactgatgttactatgcagggcacaacaaataagttcatttctgaatcattatttgaattaaatgaagattatgaatttgctattactcattattcagatattgagactcctgttattacagtttatttagacaggcctagg

SEQ ID NO: 17190 - DNA, 30 bp, unidentified
  source 1..30: mol_type = unassigned DNA; note = methanogen bacteria
gttattgtaactgaagaaaatttcactgct

SEQ ID NO: 17191 - DNA, 69 bp, unidentified
  source 1..69: mol_type = unassigned DNA; note = methanogen bacteria
aagggtttcaataatacattcatagataatgttgcagaaacttctggagcagcacttgcatggttaaat

SEQ ID NO: 17192 - DNA, 132 bp, unidentified
  source 1..132: mol_type = unassigned DNA; note = methanogen bacteria
ttaaagattatagatacggaatcccactcaaacggtgcattatctcttgtaaactgtaatgattcaaagatatataatgtaacatttaagggtgctattacaataaggaacggaggttccatttcatgggtt

SEQ ID NO: 17193 - DNA, 162 bp, unidentified
  source 1..162: mol_type = unassigned DNA; note = methanogen bacteria
tcaactaacggaataattgatttatgtgactttttcgattctgctgcatcatataacggtggagcaattttcttatataacattgataactttaatgtttcaaactccaatttcagcaatactcacgcattatacggtaacggtggaggaatctttgtaaac

SEQ ID NO: 17194 - DNA, 51 bp, unidentified
  source 1..51: mol_type = unassigned DNA; note = methanogen bacteria
ctttcattcgaaagttatatggctgctgaagattatgctggtggtatattt

SEQ ID NO: 17195 - DNA, 186 bp, unidentified
  source 1..186: mol_type = unassigned DNA; note = methanogen bacteria
tcaacaattgctaactcaaaattcaatggtcctgatgcaatatgggttaatgaaagtgctattgcatacttaattaataattatattactgggtcaaatccaaataagaatattacttatctggaaaagccatatgatgcaagatacaataaatatgactatgccgtatggaatgatggtgattta

SEQ ID NO: 17196 - DNA, 30 bp, unidentified
  source 1..30: mol_type = unassigned DNA; note = methanogen bacteria
tggaccaatactacaacttggattcttaat

SEQ ID NO: 17197 - DNA, 90 bp, unidentified
  source 1..90: mol_type = unassigned DNA; note = methanogen bacteria
agtgttaatggtgatggggaaaatgcctatactgactattttaagatggatttatcttcttttttaaaagacaattctattacttataat

SEQ ID NO: 17198 - DNA, 87 bp, unidentified
  source 1..87: mol_type = unassigned DNA; note = methanogen bacteria
aaatattcttctggtttaattaattctgttatgaagtatgatttgtattcttttcgtattttagttaatgattatgatttgaattct

SEQ ID NO: 17199 - DNA, 51 bp, unidentified
  source 1..51: mol_type = unassigned DNA; note = methanogen bacteria
attggttttgatgtgggtgctattaaaagtatttttgtaccgttgtattgt

SEQ ID NO: 17200 - DNA, 39 bp, unidentified
  source 1..39: mol_type = unassigned DNA; note = methanogen bacteria
gttgattattcgggcaattatctttttattgattcatat

SEQ ID NO: 17201 - DNA, 54 bp, unidentified
  source 1..54: mol_type = unassigned DNA; note = methanogen bacteria
tttgatgtgacattggcaatgtattcctctattgttgttggtggtgcaaccact

SEQ ID NO: 17202 - DNA, 57 bp, unidentified
  source 1..57: mol_type = unassigned DNA; note = methanogen bacteria
gatgaggtttcttctttgttgaatgatgttgacggctatgcaggtagtgttagtctc

SEQ ID NO: 17203 - DNA, 66 bp, unidentified
  source 1..66: mol_type = unassigned DNA; note = methanogen bacteria
aatgcttctgttggtgattttttatcaggcgtttctaatttgattttagaatctatgggcaatagt

SEQ ID NO: 17204 - DNA, 75 bp, unidentified
  source 1..75: mol_type = unassigned DNA; note = methanogen bacteria
ggacaattaattattcacggcaatggtgcaatattagaatgcggcgatgaatatggcaataacaaaggcaaatta

SEQ ID NO: 17205 - DNA, 138 bp, unidentified
  source 1..138: mol_type = unassigned DNA; note = methanogen bacteria
tttgatgtctatgagccaggcggtgttattcacaattataatactgcttattttagaggttgtgcttttctagccaattcagcaaaaaccgccataggcctttatacagcaggtggcgttttatatgcagaaccttat

SEQ ID NO: 17206 - DNA, 48 bp, unidentified
  source 1..48: mol_type = unassigned DNA; note = methanogen bacteria
gaactaatgaatgcattgtgttgcattaatacattaacacccggcatg

SEQ ID NO: 17207 - DNA, 75 bp, unidentified
  source 1..75: mol_type = unassigned DNA; note = methanogen bacteria
gttccaatcaccataaacggtaacggcgccaccataaaacgtactggcgacaaaaatgatgacgaccactttgct

SEQ ID NO: 17208 - DNA, 36 bp, unidentified
  source 1..36: mol_type = unassigned DNA; note = methanogen bacteria
acagtctttgcttatttagccagcatttgtcaagca

SEQ ID NO: 17209 - DNA, 66 bp, unidentified
  source 1..66: mol_type = unassigned DNA; note = methanogen bacteria
agtgttttcaatgatttgatacaatatactgataatgtgcattataataatatgacccatcttatc

SEQ ID NO: 17210 - DNA, 69 bp, unidentified
  source 1..69: mol_type = unassigned DNA; note = methanogen bacteria
tcattcaataatatgctagttacccgaaacatgattataaataatgactgggcctcaacatattattcc

SEQ ID NO: 17211 - DNA, 48 bp, unidentified
  source 1..48: mol_type = unassigned DNA; note = methanogen bacteria
cttagcgcattaattgcatataacactttaatccataatttaaattcc

SEQ ID NO: 17212 - DNA, 51 bp, unidentified
  source 1..51: mol_type = unassigned DNA; note = methanogen bacteria
attattactgcatataatctgatgtggtcttattccattaccagtaatcct

SEQ ID NO: 17213 - DNA, 30 bp, unidentified
  source 1..30: mol_type = unassigned DNA; note = methanogen bacteria
aatgtagatatactatatttgaataactta

SEQ ID NO: 17214 - DNA, 30 bp, unidentified
  source 1..30: mol_type = unassigned DNA; note = methanogen bacteria
ggcagtttttctcccgacttaaaaactaaa

SEQ ID NO: 17215 - DNA, 33 bp, unidentified
  source 1..33: mol_type = unassigned DNA; note = methanogen bacteria
cctttgggtatggattctgcttatgcattgata

SEQ ID NO: 17216 - DNA, 75 bp, unidentified
  source 1..75: mol_type = unassigned DNA; note = methanogen bacteria
gtttacacagataatggtggacttgttaagtattctgatttgtattcttgggtttcaaatgaaatacttaattat

SEQ ID NO: 17217 - DNA, 96 bp, unidentified
  source 1..96: mol_type = unassigned DNA; note = methanogen bacteria
ccaataccagatattcctgaaattattcctaatattccagaggttaatccaaatatccctaatattccagaggttaatccaaatatccctaatatt

SEQ ID NO: 17218 - DNA, 60 bp, unidentified
  source 1..60: mol_type = unassigned DNA; note = methanogen bacteria
aatttacctgatggtgatatgatttatttgagtattttaaagatgttatattcagaatat

SEQ ID NO: 17219 - DNA, 105 bp, unidentified
  source 1..105: mol_type = unassigned DNA; note = methanogen bacteria
tatattccgaaggttaatcctaatgctccgaaggttaatcctaatgctcctaaggttaatcctaatgctcctaaggttaatcctaatgctcctaaggttaatcct

SEQ ID NO: 17220 - DNA, 45 bp, unidentified
  source 1..45: mol_type = unassigned DNA; note = methanogen bacteria
taccatgatttaatgcttttaaaattgtatgattataatttgtac

SEQ ID NO: 17221 - DNA, 30 bp, unidentified
  source 1..30: mol_type = unassigned DNA; note = methanogen bacteria
ataaatcatatctatactcagaattctata

SEQ ID NO: 17222 - DNA, 51 bp, unidentified
  source 1..51: mol_type = unassigned DNA; note = methanogen bacteria
gcatacgataagaatggaaatatgatttgttctaatgattattatattaat

SEQ ID NO: 17223 - DNA, 138 bp, unidentified
  source 1..138: mol_type = unassigned DNA; note = methanogen bacteria
cacagttatgagccgaatgatgttgtttatactgctgatggaaaagctattttagctaaagatatggaatatatgaatttccatggcggattttctgttgatatgtacggtagaccatattatgcaagtttaaatgat

SEQ ID NO: 17224 - DNA, 63 bp, unidentified
  source 1..63: mol_type = unassigned DNA; note = methanogen bacteria
gatgatggttttgttcatgattgtcacggcaatcttcttttcaaacaaccacttaaaggcaat

SEQ ID NO: 17225 - DNA, 210 bp, unidentified
  source 1..210: mol_type = unassigned DNA; note = methanogen bacteria
gataaagtttctttcttcgaaaaatacataggtaattcttttttccatcctttggctacattaagttttgttgatgatattaatgttaaagatacaattgctggtgtatcccatcctgttatttttaattgtaggaccaatctggagttggctcatgctttacgtactattaataattatggtgctaaaggtagtgaaattattattaat

SEQ ID NO: 17226 - DNA, 45 bp, unidentified
  source 1..45: mol_type = unassigned DNA; note = methanogen bacteria
gagtgttatattggtcttaaaaaggaattcagtttgattaataaa

SEQ ID NO: 17227 - DNA, 264 bp, unidentified
  source 1..264: mol_type = unassigned DNA; note = methanogen bacteria
gactttgataagataatagatttatattatgatttgtggtctaatcctagtgtggttaatcctttggatggtgttaatccgaatgatttaagtaatgatgaattgggtaagttgattattgataatatggctaggattctccttattggttttgttgatactaggcttcagcataggttccctactttgtggactaatgctgaagagttacatttgagttatattcaggttaaagtttcaatacttatgaaacaaaatacttta

SEQ ID NO: 17228 - DNA, 99 bp, unidentified
  source 1..99: mol_type = unassigned DNA; note = methanogen bacteria
tatgttaaagagggatatgattatcttgttgtatgggggcatatatcacctattaaggttgcttcgattcaaaatcattttttaaaatatgatgtggat

SEQ ID NO: 17229 - DNA, 201 bp, unidentified
  source 1..201: mol_type = unassigned DNA; note = methanogen bacteria
ctattaaaatatcctaatatgtataagtttatgattcctaatatcgtatctggtgtacaatctattatttctggaatgatgagagataatcttataaatgagagtgtatataattattggtgtgatgaaattttgtctcgttatgtaaatgtttatactaaggatgttttgctcttttacactgatattcataattatttg

SEQ ID NO: 17230 - DNA, 54 bp, unidentified
  source 1..54: mol_type = unassigned DNA; note = methanogen bacteria
atggataatagggttatgttgtttgaggataaaattaattcttatcctaatgct

SEQ ID NO: 17231 - DNA, 45 bp, unidentified
  source 1..45: mol_type = unassigned DNA; note = methanogen bacteria
caatatggtgatattattgatgctttggatgtttatgattccgtt

SEQ ID NO: 17232 - DNA, 72 bp, unidentified
  source 1..72: mol_type = unassigned DNA; note = methanogen bacteria
gagagtttaaaagatgcatataatcagatttttgataaattatctgaatttagggataatgatggattattg

SEQ ID NO: 17233 - DNA, 78 bp, unidentified
  source 1..78: mol_type = unassigned DNA; note = methanogen bacteria
gaacacaatacttatgtggcatataagaatggaaactttattgttactaaagagtattatattaatgatcagaaacct

SEQ ID NO: 17234 - DNA, 234 bp, unidentified
  source 1..234: mol_type = unassigned DNA; note = methanogen bacteria
aattctaacttcacagacagtttcactgaaaataataatggtgaaaatttcggtggtactattttcatcacagggcatgatgtggatcttgttggttgtaactttaataattcagaagctagaagctctgatggtggaacaatatacataataggtcatgacgttagagttataaattccactatcgataattcatctgcaagaaaaggtggagcaatatatattgatggtgta

SEQ ID NO: 17235 - DNA, 150 bp, unidentified
  source 1..150: mol_type = unassigned DNA; note = methanogen bacteria
aatacttttgcaaaaactggaaatagttataccgctaataatttaggtggtgcagtatacataaaaggtaacaatgctaatattatcggttctgagattgaaaatgcaagcgcttaccaaggtggtggactctacttagaaggagattac

SEQ ID NO: 17236 - DNA, 186 bp, unidentified
  source 1..186: mol_type = unassigned DNA; note = methanogen bacteria
aattgtaatttcacaaacaactcagctggtgatgacggtggtgcaattaactgggaaggtaatttaggatttgttaaatattctaaattctacaataatactgctgttgcttttgcagatccagttacaggagcatcttcatcaagaggaggaactgtatttattaaaggtgataacgtaactatc

SEQ ID NO: 17237 - DNA, 63 bp, unidentified
  source 1..63: mol_type = unassigned DNA; note = methanogen bacteria
ggttttaacaatactttcagatcaaacattgctttaaccaacggatctgctcttgcatggata

SEQ ID NO: 17238 - DNA, 135 bp, unidentified
  source 1..135: mol_type = unassigned DNA; note = methanogen bacteria
tcaacatttagatttaacactgctattaaaaatggtggtgctattgacagtaatgcagcaaacattggaatttataacattacatttgaagcaaattatgctggtgaatatggtgcagcattatgtagagagtca

SEQ ID NO: 17239 - DNA, 258 bp, unidentified
  source 1..258: mol_type = unassigned DNA; note = methanogen bacteria
gctaatggttttggtgaaaataacactttcattgataataaggctggaatttcaggtgctgctcttgcatggttaggtgtaaatggaattgatattcataattatacatttattaacaacactgcatctaaaagtggtggaggaatatatgtacgttcagatagtgctaactgtaaagtaagtaactgtaagtttgataacaattatgtaactgatattagggacagtcatggtggagctattgattggcatggtact

SEQ ID NO: 17240 - DNA, 39 bp, unidentified
  source 1..39: mol_type = unassigned DNA; note = methanogen bacteria
caatatgaagcatttgatgattatgctggaggaatcttt

SEQ ID NO: 17241 - DNA, 276 bp, unidentified
  source 1..276: mol_type = unassigned DNA; note = methanogen bacteria
ggtggaaactcaacaattatcaattcaacattcattggtcctgatgcggtatgggttggtgaacatggagaagcacatctggctgaaaattatattactggtgcttatccaaataaagatgtaaaatatctagaagaaccgtataattcaagatataacaaatatgattatgcaatatggaatgacggtaaattatacctcaataaaaatacttttgactacattgtatttaataatggtacaattacatctccaactacactttggattttagat

SEQ ID NO: 17242 - DNA, 243 bp, unidentified
  source 1..243: mol_type = unassigned DNA; note = methanogen bacteria
acaaatgtaactattgatttatgtaatattacatcttcttccgcaacttaccgtggaggagcaatatacgttgaaaatataaatgatgccagtatcatcaattccaatttcgatgatatttcaactccatggggtaacggtggaactttatacattgacggtaatgttaccttgtataatgatacctttactaatttcaaagcatctacaggatatgcaggagcaatatacttctgtaacgga

SEQ ID NO: 17243 - DNA, 249 bp, unidentified
  source 1..249: mol_type = unassigned DNA; note = methanogen bacteria
aagtggggttcggccatttggggttatataaataatatgtcaatcaataactgcaggttcattaattgttcagcaaaatttgagggaggtgcgattaatttggttggaaaagtgcttacaataaccaattccactttcattaacaatacggctgatgaaaatgggggctctttgattgtaatgggtattaagactgtaattaaggattgcattttcattaattcccattctggtatggagggatgtttc

SEQ ID NO: 17244 - DNA, 63 bp, unidentified
  source 1..63: mol_type = unassigned DNA; note = methanogen bacteria
ttcataaataactgggccggtgtggatggaggtgcgatatatgaacatgatattgcgaattat

SEQ ID NO: 17245 - DNA, 39 bp, unidentified
  source 1..39: mol_type = unassigned DNA; note = methanogen bacteria
actgccggaagaaatggcggtgcggtctgttcagattca

SEQ ID NO: 17246 - DNA, 57 bp, unidentified
  source 1..57: mol_type = unassigned DNA; note = methanogen bacteria
tccattgacggcattttcgattcaaatgcggctgcttttggtggtgctgtttatagt

SEQ ID NO: 17247 - DNA, 297 bp, unidentified
  source 1..297: mol_type = unassigned DNA; note = methanogen bacteria
aattatactgttatcgttacaaaccttgatacagaaaacgttattggaaattcatcatcacaggacttccaagtctttaaaatcaattccaccatcaaattaaacgacatatcagacatttattatgaagataatgtttcaattagttttgaagtcgaaaataaaactattgtaaatatcaggattcaaaatcaggatggcgaagtagtttatgacaataacgtcacatcagacatgattcaggttcctaatttgaatgctggaaactacacggtaactgttacaaatctagaaacc

SEQ ID NO: 17248 - DNA, 51 bp, unidentified
  source 1..51: mol_type = unassigned DNA; note = methanogen bacteria
attaaaataacacaaaaactcccaagcgatgcaacaggcacaataacctac

SEQ ID NO: 17249 - DNA, 63 bp, unidentified
  source 1..63: mol_type = unassigned DNA; note = methanogen bacteria
tttgctaatggaacccttatcaatgttattaacgttaatgaatcattcgttttatcaaacctt

SEQ ID NO: 17250 - DNA, 144 bp, unidentified
  source 1..144: mol_type = unassigned DNA; note = methanogen bacteria
gcgggatcttatgtaatatatggatactactccggcgattccaatcacaaatcttccagagacagtataacaataaccgtcaataaagccataaataacgtaattgtatctggtgaaaacacagcatatccacaaaacacaaca

SEQ ID NO: 17251 - DNA, 219 bp, unidentified
  source 1..219: mol_type = unassigned DNA; note = methanogen bacteria
acagcagatattgacggagaatatgcagtagtaataggtgataaaaaaatcattgtaaatgtaataaatggaattggaacgggcacatttgttttagatgcgggaaaatacacagccactatcgaatacacaaacaaaaactatgaaaacaacatcaaaagcattccattcaatgtagccaaagaagatgttactttaagcattgaagtcttagacaaa

SEQ ID NO: 17252 - DNA, 90 bp, unidentified
  source 1..90: mol_type = unassigned DNA; note = methanogen bacteria
tctaatatagacggtaacatatttgcaagcgttgatggcgaatataatgttatcatcaatggcagaacaattccagtaactgttaaaaac

SEQ ID NO: 17253 - DNA, 189 bp, unidentified
  source 1..189: mol_type = unassigned DNA; note = methanogen bacteria
aaaataacacaaaaactcccaagcgatgcaaaaggcacaataacatacacatatgccaatgaaaccctaatcaaagttatcaaagtcgatgaatcattcgttttatccaatcttgatgcaggatcctatgtaatatatggatactactccggcgataccaatcacaaatcctccagagacagcctgaca

SEQ ID NO: 17254 - DNA, 30 bp, unidentified
  source 1..30: mol_type = unassigned DNA; note = methanogen bacteria
actatcgcagataaaaaaatcattgtaaaa

SEQ ID NO: 17255 - DNA, 36 bp, unidentified
  source 1..36: mol_type = unassigned DNA; note = methanogen bacteria
atcaacggcaatacaattccagtaactgttaaaaac

SEQ ID NO: 17256 - DNA, 39 bp, unidentified
  source 1..39: mol_type = unassigned DNA; note = methanogen bacteria
aacatcaaaataacacaaaaacttccaagtgacgcaaca

SEQ ID NO: 17257 - DNA, 240 bp, unidentified
  source 1..240: mol_type = unassigned DNA; note = methanogen bacteria
agtgtagggtctgttgagcaaatcaatgtaactctgcctgataatgcaacaggtcaagtattgcttgacattaacggccaacagtattatgctaatataactgaaggacttgcacaattcaacatcacaggtcttaaagcaggcgaatataaatttaacgtaacttacattggagattacaaatatcttgataataatactaattcagccttgaaagtatccaaactgcagcctgcattt

SEQ ID NO: 17258 - DNA, 99 bp, unidentified
  source 1..99: mol_type = unassigned DNA; note = methanogen bacteria
gatgaattaattaaatttgaaacctcggataacattaccggtttggtcaaagttgaaattgataataaaaactacactgcattcattaatgaaggtaaa

SEQ ID NO: 17259 - DNA, 42 bp, unidentified
  source 1..42: mol_type = unassigned DNA; note = methanogen bacteria
attacattatacttcgaaggcaatgaaaaatacttaaattca

SEQ ID NO: 17260 - DNA, 126 bp, unidentified
  source 1..126: mol_type = unassigned DNA; note = methanogen bacteria
gaaactgttgttgtttatgttgatgctgtcggtgatgtggccttaagaatcggttcatacattaatacaactgctcttgttgatggtaaagcggtatttgttgttaaagacttagctactggtgac

SEQ ID NO: 17261 - DNA, 42 bp, unidentified
  source 1..42: mol_type = unassigned DNA; note = methanogen bacteria
actgaagctgacttcactgttgcaaaatctgctcctgatgta

SEQ ID NO: 17262 - DNA, 78 bp, unidentified
  source 1..78: mol_type = unassigned DNA; note = methanogen bacteria
aacggcactgttaaaggtgaagaactaggcattgataatggtaaagtcgaattgatagtcaatgatttggctgctggt

SEQ ID NO: 17263 - DNA, 30 bp, unidentified
  source 1..30: mol_type = unassigned DNA; note = methanogen bacteria
attgctgaaggtaaagctaacttaacttta

SEQ ID NO: 17264 - DNA, 69 bp, unidentified
  source 1..69: mol_type = unassigned DNA; note = methanogen bacteria
ttaaccggcaactggatctctgcaacatttgaagtaaataaatttggctctgaattgacaattaacgta

SEQ ID NO: 17265 - DNA, 129 bp, unidentified
  source 1..129: mol_type = unassigned DNA; note = methanogen bacteria
attgtacgtcaaaaagaaattattaaagtcaatgtaactgaatgtgctacaggtgatgtgataattactgtagcaggtaaagattatatagtagaaattaaaaatggatttgctacattagagttagat

SEQ ID NO: 17266 - DNA, 102 bp, unidentified
  source 1..102: mol_type = unassigned DNA; note = methanogen bacteria
gaagcacctattgatgcaaccggtaaagttaatgtaacaatatttgatggggttcaaaataaaacatacatcgtttatgtaaatgatggtattggaatatta

SEQ ID NO: 17267 - DNA, 48 bp, unidentified
  source 1..48: mol_type = unassigned DNA; note = methanogen bacteria
ttcgaaggcaatgaaaaatacttaaatgcatccgctaagaataacttc

SEQ ID NO: 17268 - DNA, 69 bp, unidentified
  source 1..69: mol_type = unassigned DNA; note = methanogen bacteria
ggttcatacattaatacaactgatcttgttggcggtaaggcagtatttgttgttaaagacttggctgct

SEQ ID NO: 17269 - DNA, 99 bp, unidentified
  source 1..99: mol_type = unassigned DNA; note = methanogen bacteria
gtaaatggcactgttaaaggtgaagaactaattattgataatggtaaagttgaattgaaagtaaatgatttggctgctggtgtttatgatgttgaagta

SEQ ID NO: 17270 - DNA, 69 bp, unidentified
  source 1..69: mol_type = unassigned DNA; note = methanogen bacteria
gtcaaacaggctcctgtaactgttgatgttgaagttggagacattaatgttattggtaaggaaataatc

SEQ ID NO: 17271 - DNA, 45 bp, unidentified
  source 1..45: mol_type = unassigned DNA; note = methanogen bacteria
aactacaccaggcctattgctgagggtaaagctaacttgaccttg

SEQ ID NO: 17272 - DNA, 72 bp, unidentified
  source 1..72: mol_type = unassigned DNA; note = methanogen bacteria
ttaactggcaactggacttctgcaacattcaatgttgataggttaagttctgaattaacaattaatgtaact

SEQ ID NO: 17273 - DNA, 108 bp, unidentified
  source 1..108: mol_type = unassigned DNA; note = methanogen bacteria
aaaacggttaatgtgacttataatggtgacggcaggttcttaacaagcactaattcaaccaacttcacagtcggcaaagcaactaaagacataattctaatagttgaa

SEQ ID NO: 17274 - DNA, 57 bp, unidentified
  source 1..57: mol_type = unassigned DNA; note = methanogen bacteria
ggtaagcacaatgtaaccttgacttatgctggtgatgacaaatatgaatctgcttca

SEQ ID NO: 17275 - DNA, 69 bp, unidentified
  source 1..69: mol_type = unassigned DNA; note = methanogen bacteria
gtcagagttgacggtaaagattatactgttcctgtttcaggtggtaaaggaatattggttgttcttagt

SEQ ID NO: 17276 - DNA, 240 bp, unidentified
  source 1..240: mol_type = unassigned DNA; note = methanogen bacteria
cctcatagtgttgaagttgtcttcaacggatcagataaatatgaacctgactctgattctgcttcattcaatgtagctaaagccgaattctctcctgatgacattaaggtaattgataaaggcaataacactatcgtagttgttgttccaaataatgctacaggtaatgtaacagttaaaattggaaacaacacttacaatgctactgttaaagatggaatagctactattaccttagat

SEQ ID NO: 17277 - DNA, 249 bp, unidentified
  source 1..249: mol_type = unassigned DNA; note = methanogen bacteria
aaaactgcaactatcagatatagtggtgatgataactatgaagctactgaaaccgcagtaaacttcactgtaaataaatgtggggctccgattaatgccgaatccgaagatatcaaagttggagatgatgcgacaattacagtcactttcccaaaagatgcaacaggccgtgcaattttaggattggctggtgaggaatactatgcagatattattgacgttaaatctaaaaactttttatatttaatt

SEQ ID NO: 17278 - DNA, 36 bp, unidentified
  source 1..36: mol_type = unassigned DNA; note = methanogen bacteria
atgaacgaacgtgacatcataatcaacttcgaaaac

SEQ ID NO: 17279 - DNA, 168 bp, unidentified
  source 1..168: mol_type = unassigned DNA; note = methanogen bacteria
ctatatgacctaggggaaacctacaacgtcaaaataacagacaaaaacggcaatccaatcaaaaaagggtacgcctgcttcctcatttacaacagaatattctacagcaacataacagaagcaggaatcgccacctgcaccctaccactagacttgaacttcacagga

SEQ ID NO: 17280 - DNA, 126 bp, unidentified
  source 1..126: mol_type = unassigned DNA; note = methanogen bacteria
ttagcagctagcgaagcaatcagcataggcaccaaaacattggtatcactagaccaaaccacaatcggatcacgcatggtcaacaacctaaacaagtacaacttcacattcaaagaaggcaaacac

SEQ ID NO: 17281 - DNA, 54 bp, unidentified
  source 1..54: mol_type = unassigned DNA; note = methanogen bacteria
agatccctcggaggcacagtcatctgccacaactgcaagttcatagacaacgat

SEQ ID NO: 17282 - DNA, 96 bp, unidentified
  source 1..96: mol_type = unassigned DNA; note = methanogen bacteria
agaaacgaaggatcacttacactaatcaactgcagcatatacagcaatgactgcaacaacgaaatcatatacaatcttggcatattagccacctat

SEQ ID NO: 17283 - DNA, 87 bp, unidentified
  source 1..87: mol_type = unassigned DNA; note = methanogen bacteria
gactgtgcaataataggatacgacaacaacccaacaaaggtcaaatttgacaagccatggtccaatgcaaaaacaggatttataaaa

SEQ ID NO: 17284 - DNA, 54 bp, unidentified
  source 1..54: mol_type = unassigned DNA; note = methanogen bacteria
ttagaaggcagagcctaccatgactacagcaatctctggaacaatgcattatca

SEQ ID NO: 17285 - DNA, 39 bp, unidentified
  source 1..39: mol_type = unassigned DNA; note = methanogen bacteria
ggcctaatcaattattattcaaaaacatttacctcactg

SEQ ID NO: 17286 - DNA, 132 bp, unidentified
  source 1..132: mol_type = unassigned DNA; note = methanogen bacteria
ccatttataagcatatcaagcggcttaataagcgatttcctaacccaatcaaatcacttgatgatgagcatcgatagcaatgagaatctaagatatttaagggatagaatttattcaagcacatacagtcat

SEQ ID NO: 17287 - DNA, 60 bp, unidentified
  source 1..60: mol_type = unassigned DNA; note = methanogen bacteria
ttttgggatttatacaacggcgcacataattatggcttccacaacttgaacaactcactt

SEQ ID NO: 17288 - DNA, 213 bp, unidentified
  source 1..213: mol_type = unassigned DNA; note = methanogen bacteria
accaaagctttccgcaatagtggactaaagaaaaccgatgtgaataataaggacaaggatacacaaaccataataaaggaaaaaatcgaacagctttacaaggacataggcagcaaaatagcaaaaaacaaccctgactacgacaaatacacttcaatgaacttagaatacgaaaacaacataggaacagacaacatcgactatttatggtat

SEQ ID NO: 17289 - DNA, 138 bp, unidentified
  source 1..138: mol_type = unassigned DNA; note = methanogen bacteria
aacatactaatagatataaataacacaattgacatcaattatgacacttacaataatatggtctcatttaattacaccgactccattaaaaaaaatatatacaacggcatatttaaacgggaatcatatatttctcat

SEQ ID NO: 17290 - DNA, 42 bp, unidentified
  source 1..42: mol_type = unassigned DNA; note = methanogen bacteria
gagttttatgaaaaaattctagaggataatcttgaaaacaaa

SEQ ID NO: 17291 - DNA, 39 bp, unidentified
  source 1..39: mol_type = unassigned DNA; note = methanogen bacteria
aatgaggaatattaccttctaggccagtcatataatgag

SEQ ID NO: 17292 - DNA, 66 bp, unidentified
  source 1..66: mol_type = unassigned DNA; note = methanogen bacteria
ttatatgaatccatttctgaggatttatctgaatataggaaatctgatataaacgaagactacatt

SEQ ID NO: 17293 - DNA, 174 bp, unidentified
  source 1..174: mol_type = unassigned DNA; note = methanogen bacteria
ttttatcaaataagatacttgttagataactacaggcttgcctactgtgcccttaatgataaagataaattaattgttaataaatatttatatgaacaatgcaatgaattgattaaagcatttgatggtgttgaattaaatggagtagctattgaatcttatgtggaaaaatta

SEQ ID NO: 17294 - DNA, 60 bp, unidentified
  source 1..60: mol_type = unassigned DNA; note = methanogen bacteria
atgactacaaaaaataatcaaaatattttcagcaatgatatctctgaaatggattcaaat

SEQ ID NO: 17295 - DNA, 60 bp, unidentified
  source 1..60: mol_type = unassigned DNA; note = methanogen bacteria
aaaattcttcattatggcaatactaatgaacttaaaaaattaactgaaatatataatcaa

SEQ ID NO: 17296 - DNA, 39 bp, unidentified
  source 1..39: mol_type = unassigned DNA; note = methanogen bacteria
agaacattaaatttagacaatgagttaatgcctaatgaa

SEQ ID NO: 17297 - DNA, 45 bp, unidentified
  source 1..45: mol_type = unassigned DNA; note = methanogen bacteria
aataagtatataaatacagatataacagaaccaaatgttaacttc

SEQ ID NO: 17298 - DNA, 174 bp, unidentified
  source 1..174: mol_type = unassigned DNA; note = methanogen bacteria
ggttacattactgtgaaggtgtcctatgcagctaaagattactacgataagattgtagcagaactacctaataaagaagaagttttagatagattaggtcagctaaatcctatcaaaacactaacttttagtgaaattgatgctacaggtcttatagatagaataaacttattt

SEQ ID NO: 17299 - DNA, 45 bp, unidentified
  source 1..45: mol_type = unassigned DNA; note = methanogen bacteria
gcatgtccagtaggccatcatattttaacaacatggttccaaaaa

SEQ ID NO: 17300 - DNA, 48 bp, unidentified
  source 1..48: mol_type = unassigned DNA; note = methanogen bacteria
agccaatggaaatttgataaggactataacggatatgtcaatattgag

SEQ ID NO: 17301 - DNA, 69 bp, unidentified
  source 1..69: mol_type = unassigned DNA; note = methanogen bacteria
attaatgaatattattatgaattctgcaatgagacaatgaatacaatgaaaataataatggaaaagtta

SEQ ID NO: 17302 - DNA, 120 bp, unidentified
  source 1..120: mol_type = unassigned DNA; note = methanogen bacteria
attcttgacaaagacaataatatcatatttgaaagtgttaattatactattggcagattaatagataatgaaaatttccttaataatatctttaacaaaaaacagtattttatgaatatt

SEQ ID NO: 17303 - DNA, 156 bp, unidentified
  source 1..156: mol_type = unassigned DNA; note = methanogen bacteria
tacttgaaaaatatcaaagctgagttatatgacgatataatgaatggcattttagataaaaccaaaaatttcaatgaatgggttaaaaagcaagaaaaattagaatattccactcttttaaagaaatattctgatatttttgaccaattgggaaag

SEQ ID NO: 17304 - DNA, 63 bp, unidentified
  source 1..63: mol_type = unassigned DNA; note = methanogen bacteria
atagtattggacaatgaaattaatgtcataatcaatcaattagacgagaataccattgataat

SEQ ID NO: 17305 - DNA, 120 bp, unidentified
  source 1..120: mol_type = unassigned DNA; note = methanogen bacteria
gacactcaagcagacttagctgaaatgaagtctaaaatatacagtcaattagcatactttatcaatttttgggacacttataataacaataagagaaatccaaacatattgaatatgaaa

SEQ ID NO: 17306 - DNA, 66 bp, unidentified
  source 1..66: mol_type = unassigned DNA; note = methanogen bacteria
tttgatgataagattgatttaaatgcattaaacattaatcaaatgaaagatctattccttaataat

SEQ ID NO: 17307 - DNA, 57 bp, unidentified
  source 1..57: mol_type = unassigned DNA; note = methanogen bacteria
acaataatcaaattgtacaatgacattcacaacaaaatcctcgaatacaaaaaagaa

SEQ ID NO: 17308 - DNA, 201 bp, unidentified
  source 1..201: mol_type = unassigned DNA; note = methanogen bacteria
ggggctttgaataaactaaacgaagaatatcatgaggcttataaaaatattttagacaatgtcataaagaacatggatgaatatatagaaagtcattataacaatttcgaggaaatgcgcaaggagattattgactatttagaaaagatttacaataacgaggaggtgaaaccgtcaataaataacgatgatatgaaagca

SEQ ID NO: 17309 - DNA, 42 bp, unidentified
  source 1..42: mol_type = unassigned DNA; note = methanogen bacteria
gaccaatacaacgaaatcaaaaaaatcatgaaaaacaagaca

SEQ ID NO: 17310 - DNA, 144 bp, unidentified
  source 1..144: mol_type = unassigned DNA; note = methanogen bacteria
ggatcatgggatttaatagaagaaaaatacccaaatatcgctaaagaaattaagtcctacttatttggaaaacatgagaacttattaaaatatgcaatcattgaaggagatccggaaaacggatatgaaacaattcgtcaaaac

SEQ ID NO: 17311 - DNA, 42 bp, unidentified
  source 1..42: mol_type = unassigned DNA; note = methanogen bacteria
tacaaaaaagaggataaagatattggcattagcgagaaaatc

SEQ ID NO: 17312 - DNA, 30 bp, unidentified
  source 1..30: mol_type = unassigned DNA; note = methanogen bacteria
aagagtattttagagccaaatcttgaagaa

SEQ ID NO: 17313 - DNA, 45 bp, unidentified
  source 1..45: mol_type = unassigned DNA; note = methanogen bacteria
gacactttctgtgcatacaaagaattctcaaaattaatggaaaat

SEQ ID NO: 17314 - DNA, 51 bp, unidentified
  source 1..51: mol_type = unassigned DNA; note = methanogen bacteria
gagacctatccactgattgccaaagatgttataaataaactttatgaaaat

SEQ ID NO: 17315 - DNA, 30 bp, unidentified
  source 1..30: mol_type = unassigned DNA; note = methanogen bacteria
atagagatttcaaaaaaaggagatgaagaa

SEQ ID NO: 17316 - DNA, 51 bp, unidentified
  source 1..51: mol_type = unassigned DNA; note = methanogen bacteria
attaaaaatcatttttcaagcaatgaagacaataatgcaccaaatcaacag

SEQ ID NO: 17317 - DNA, 69 bp, unidentified
  source 1..69: mol_type = unassigned DNA; note = methanogen bacteria
aaagaaataaatccaaatgattacattgattatattgaacttgacaactggctaatagaaaaagaagcc

SEQ ID NO: 17318 - DNA, 81 bp, unidentified
  source 1..81: mol_type = unassigned DNA; note = methanogen bacteria
gaaaaaaataaaatgtatgcctacgaattaaattccaagtatagtagtaatagcaatttaaagggatctaattatgatgtt

SEQ ID NO: 17319 - DNA, 33 bp, unidentified
  source 1..33: mol_type = unassigned DNA; note = methanogen bacteria
ttaaatcagttaattattgactcatacaaactg

SEQ ID NO: 17320 - DNA, 51 bp, unidentified
  source 1..51: mol_type = unassigned DNA; note = methanogen bacteria
ttcacaaacaatactgccggaagaaatggtggtgcggtctgttcagattca

SEQ ID NO: 17321 - DNA, 69 bp, unidentified
  source 1..69: mol_type = unassigned DNA; note = methanogen bacteria
acgatttccattgacggcattttcgattcaaatgcggctgcttttggtggtgctgtttatagtttcaat

SEQ ID NO: 17322 - DNA, 30 bp, unidentified
  source 1..30: mol_type = unassigned DNA; note = methanogen bacteria
aaagtcataactgtcgacgaatcattcata

SEQ ID NO: 17323 - DNA, 216 bp, unidentified
  source 1..216: mol_type = unassigned DNA; note = methanogen bacteria
tcggtcctaaagatcaccggaaggagcccgctggtgaaggtcggcagctccgagaagactctcagtatctatggcatcggcaccatgaccctaagacgcgactccatcgtatccattgaagaccctatcgacgcagtcgcccagtaccgcagtctcagcaaggacaacctcccgtccaccgtagcggcaccgtccaacgagatcaggttcctgacc

SEQ ID NO: 17324 - DNA, 123 bp, unidentified
  source 1..123: mol_type = unassigned DNA; note = methanogen bacteria
aacggcaccattatcaaagtcataactgtcgacgaatcattcatattagccggattaaatgcaggaacatacacaatttatgcaaataactgttgcaaaagcatccaacgaaataacagttta

SEQ ID NO: 17325 - DNA, 45 bp, unidentified
  source 1..45: mol_type = unassigned DNA; note = methanogen bacteria
aatgttactgctacttccaatttaaccaatgagaccaatagttct

SEQ ID NO: 17326 - DNA, 243 bp, unidentified
  source 1..243: mol_type = unassigned DNA; note = methanogen bacteria
gatgagattgtatacgtcggtaacactaccagcttcagaatagttgtcactaacactggtgactgcaatttatctgatgttgttgttactgatgttgattacagtgcaggcttagaatatgctgataagtatgataacggtagtagattatggaattacctcggtgaaggtaaatgggctttagtaggagatcttgaagttggtcaatctgctgatttccttgtttacttcaatgtacttgct

SEQ ID NO: 17327 - DNA, 30 bp, unidentified
  source 1..30: mol_type = unassigned DNA; note = methanogen bacteria
tccaatttaactaacgagaccaatagttct

SEQ ID NO: 17328 - DNA, 246 bp, unidentified
  source 1..246: mol_type = unassigned DNA; note = methanogen bacteria
actgttcaaaaaattgctgttgaaaaagtggtttatgttggtaacactacaagctttgtaattgtagtaaccaatacaggagactgcaacttgtctgatgttgttgttactgatgttgattacagtgcaggcttagtatatgctgaaaagtatgataacagtagtcgtgaatggacttatgataacggtaaatggactttagttggtgaccttaatgtaggtcaatctgcagagttcactgtttac

SEQ ID NO: 17329 - DNA, 132 bp, unidentified
  source 1..132: mol_type = unassigned DNA; note = methanogen bacteria
gactgcaatttatctgatgttgttgttactgatgttgatttcagtcaaggtttagagttcaatggtgtttggactaatggtagccgtgagtggacttatgatggtaataatcattggactttagtcggtgat

SEQ ID NO: 17330 - DNA, 159 bp, unidentified
  source 1..159: mol_type = unassigned DNA; note = methanogen bacteria
ttatctgatgttgttgttactgatgttgatttcagtgcaggcttagagtatgctaacaggtatgaaaacggtactagatactggaattaccttggaaatggtaaatggattttagacggtgatcttgaagttggcgcatctgctgatttccttgtttac

SEQ ID NO: 17331 - DNA, 150 bp, unidentified
  source 1..150: mol_type = unassigned DNA; note = methanogen bacteria
tctgaagttgtcgttactgatgttgactacagtgcaggtttagaatatgctgataagtatgataacagtagtcgtgaatggacttatgataacggtaaatggactttagtcggtgatcttgaagttggtcaatctgcagagtttacagtt

SEQ ID NO: 17332 - DNA, 144 bp, unidentified
  source 1..144: mol_type = unassigned DNA; note = methanogen bacteria
gttgttactgatgttgatttcagtcaaggtttagagttcaatggtgtttggactaatggtaaccgtgagtggacttacgatggtaataatcattggactttagttggagatcttaatgtaggtcaatctgctgatttcactgtt

SEQ ID NO: 17333 - DNA, 150 bp, unidentified
  source 1..150: mol_type = unassigned DNA; note = methanogen bacteria
gtagtaaccaatacaggagactgcagtttatctgatgttgttgttactgatgttgatttcagtcaaggtttagaattcaatggtgtttggactgacggtaaccgtgagtggacttacgatggcaataatcattggactttagttggtgac

SEQ ID NO: 17334 - DNA, 33 bp, unidentified
  source 1..33: mol_type = unassigned DNA; note = methanogen bacteria
ggtgttggagaatctgctgatttcactgtttac

SEQ ID NO: 17335 - DNA, 177 bp, unidentified
  source 1..177: mol_type = unassigned DNA; note = methanogen bacteria
gactgcaacttatctgatgttgtcgttactgatgttgactacagccaaggcttagaatatgctaacaagtatgaaaacagtactagattatggaattaccttggtgaaggtaaatgggctttagtaggagatcttgaacctggcatgtctgctgagttcactgtttacttcaatgta

SEQ ID NO: 17336 - DNA, 33 bp, unidentified
  source 1..33: mol_type = unassigned DNA; note = methanogen bacteria
acttccaatttaaccaacgaaaccaataatacc

SEQ ID NO: 17337 - DNA, 186 bp, unidentified
  source 1..186: mol_type = unassigned DNA; note = methanogen bacteria
gactgtaacttgtctgatgttgttgttactgatgttgattacagtgaaggtttagtatatgctaacaggtatgataacagtagtcgtgagtggacttatgaaaacggtaaatggactttagtcggtgatctcgaagttggtcaatctgcagaatttacagtttacttccttgttaatgcaacaggt

SEQ ID NO: 17338 - DNA, 36 bp, unidentified
  source 1..36: mol_type = unassigned DNA; note = methanogen bacteria
aatgttactgcaacttccaatttaaccaatgaaact

SEQ ID NO: 17339 - DNA, 237 bp, unidentified
  source 1..237: mol_type = unassigned DNA; note = methanogen bacteria
aaaatcactattgatcaagtggtttatgttggtaacaccaccagcttcagaatagttgtcactaacactggtgactgtaacttgtctgatgttgttgttactgatgttgattacagtgaaggtttagtatatatcaacaagtatgataacggtagtcgtgaatggacttatgataacggtaaatggactttagtcggtgagcttggtgttggagaatctgctgatttcactgtttac

SEQ ID NO: 17340 - DNA, 36 bp, unidentified
  source 1..36: mol_type = unassigned DNA; note = methanogen bacteria
gctacttccaatttaaccaacgaaaccaataacact

SEQ ID NO: 17341 - DNA, 252 bp, unidentified
  source 1..252: mol_type = unassigned DNA; note = methanogen bacteria
atcactatcgaagatgtggtttatgttggcaatatcacaagcttcaaaatcgtagttaccaacactggtgactgtaacttgtctgaagttgttgttactgatgttgactacagcgaaggcttagaatatgctaataaatacgataacagttctagattatggacttatgacggcaatggtcattggactttagttggtgacctcggtgttggagaatctgctgaatttactgtttacttcaaagtgcttgct

SEQ ID NO: 17342 - DNA, 180 bp, unidentified
  source 1..180: mol_type = unassigned DNA; note = methanogen bacteria
gtagttaccaacactggtgactgcagtttatctgatgttgttgttactgatgttgattacagtgaaggtttagtatatgctaacaggtatgataacggtagtcgtgaatggacttatgaaaacggtaaatggactttagtcggtgatcttggtgttggagaatctgctgatttcactgtt

SEQ ID NO: 17343 - DNA, 87 bp, unidentified
  source 1..87: mol_type = unassigned DNA; note = methanogen bacteria
tcagatgatgtggataataatgatttgatttcacttcctttatattctacattggagattgatgataatgtggatatgcagaatgat

SEQ ID NO: 17344 - DNA, 126 bp, unidentified
  source 1..126: mol_type = unassigned DNA; note = methanogen bacteria
tcatcaaatgtttctaagttaattactattaatccggttaatactgttttgtctttgtctttgagtaatgatactttgttggttggtgattctttaacggttactgctgttgttaatgctagtcag

SEQ ID NO: 17345 - DNA, 72 bp, unidentified
  source 1..72: mol_type = unassigned DNA; note = methanogen bacteria
aaagtgcttttctatattaatgatattttaaatgatactgttgatgtgaatattgatggtcttgctcgttta

SEQ ID NO: 17346 - DNA, 96 bp, unidentified
  source 1..96: mol_type = unassigned DNA; note = methanogen bacteria
cagtttggcgattatgttgattatggcaatgtaacctttttaattgatgataagccttatacagttaaactagtagattctgttgccaataaaact

SEQ ID NO: 17347 - DNA, 102 bp, unidentified
  source 1..102: mol_type = unassigned DNA; note = methanogen bacteria
tcggttaatactgttttgtctttgtctttgagtaatgatactttgttggttggtgagcctttaacggttactgctgttgttaatgctactcagggtaaagtg

SEQ ID NO: 17348 - DNA, 63 bp, unidentified
  source 1..63: mol_type = unassigned DNA; note = methanogen bacteria
ttctatattaataatgttttaaatgatactgttgatgttggtagaaatggtgttgctatttta

SEQ ID NO: 17349 - DNA, 165 bp, unidentified
  source 1..165: mol_type = unassigned DNA; note = methanogen bacteria
gaagttagtggttgggattgtgattggaaggttaacggaaatgttactcttcaggttagagttaaagatcagtttggcgattatattgattatggtgatgtggtctttttaattgatggtaaggcttacactgttaagttagtcgattctgttgctaataagact

SEQ ID NO: 17350 - DNA, 123 bp, unidentified
  source 1..123: mol_type = unassigned DNA; note = methanogen bacteria
tcctcaaatattacaaagttagttgatgtttctcctctccaaactgctttatctttgtctttggatgaggatatcatatttgttgatgattctttaactgctactgctgttgtcaatgctact

SEQ ID NO: 17351 - DNA, 51 bp, unidentified
  source 1..51: mol_type = unassigned DNA; note = methanogen bacteria
ggtactgttgatgtcgatagtgatggtgttgctgttttaacattaagtaat

SEQ ID NO: 17352 - DNA, 99 bp, unidentified
  source 1..99: mol_type = unassigned DNA; note = methanogen bacteria
ctaaccgctgttttcagtgatgatgaaggcatttatttaaatagctctgataaaacagaatttactgtattttcaatgacttttattgaagtcagtggt

SEQ ID NO: 17353 - DNA, 129 bp, unidentified
  source 1..129: mol_type = unassigned DNA; note = methanogen bacteria
tatactcttcaggttagggttaaagatcagttcggtgattatattaaagatggtgaagtgttcttttatattgaaggtgatgcttataccgttgaattagttgattctgttgccaataaaacgatttca

SEQ ID NO: 17354 - DNA, 30 bp, unidentified
  source 1..30: mol_type = unassigned DNA; note = methanogen bacteria
caatatgatattttagttatattcaatact

SEQ ID NO: 17355 - DNA, 123 bp, unidentified
  source 1..123: mol_type = unassigned DNA; note = methanogen bacteria
tcatatgtcattaaattaattgatattaagccggttaatactgttctgtctttgtctttgagtaatggtactttgttggttggtgagcctttaactgctactgccgttgtcaatgctactcag

SEQ ID NO: 17356 - DNA, 72 bp, unidentified
  source 1..72: mol_type = unassigned DNA; note = methanogen bacteria
attaatggtgttttaaatgatactgttggtgtggatagtgatggtgttgctgttttaactttaaataatctt

SEQ ID NO: 17357 - DNA, 30 bp, unidentified
  source 1..30: mol_type = unassigned DNA; note = methanogen bacteria
gattataatataactgctgttttcactgat

SEQ ID NO: 17358 - DNA, 42 bp, unidentified
  source 1..42: mol_type = unassigned DNA; note = methanogen bacteria
aataatatatccgaatggattttgctcctaaaacacatgttt

SEQ ID NO: 17359 - DNA, 210 bp, unidentified
  source 1..210: mol_type = unassigned DNA; note = methanogen bacteria
accggaaggacgcccgctctgatcttcttcggcgacggacagggacccatggcgggcaacggattcgtccgcgagggctacaggttccgcggatggtccaggaccagggacggcaacgcggagtacatggactgctccgatatctccgccctcggaaagatccacatggtcaagctctatgcggtatgggaggaggtgaggtccgatgcc

SEQ ID NO: 17360 - DNA, 135 bp, unidentified
  source 1..135: mol_type = unassigned DNA; note = methanogen bacteria
ggtgtaattgtagaggaattgattgatcctcatttggaagtactttccaatactacaactagcggcaaatatgaggctggtacatggaatattggtaatttggctaacggttccagtgcaactttaactattgtt

SEQ ID NO: 17361 - DNA, 39 bp, unidentified
  source 1..39: mol_type = unassigned DNA; note = methanogen bacteria
atgtttacaatcactgttacaaataacggtccttgcaat

SEQ ID NO: 17362 - DNA, 135 bp, unidentified
  source 1..135: mol_type = unassigned DNA; note = methanogen bacteria
accggtgtatatgtcggtgaaagtttaagtcctcatcttaaaatgatttcaaataagacaacaatcggtgaatatgacggttcaacatggattattggcaatttaaacagcggtgaagttcataacttgacaatt

SEQ ID NO: 17363 - DNA, 42 bp, unidentified
  source 1..42: mol_type = unassigned DNA; note = methanogen bacteria
gaaattactaaaagagtctggggagcaacaagatttgtaaat

SEQ ID NO: 17364 - DNA, 45 bp, unidentified
  source 1..45: mol_type = unassigned DNA; note = methanogen bacteria
attgtatttgagattattgtgaggaataaagggccatgtgacgct

SEQ ID NO: 17365 - DNA, 144 bp, unidentified
  source 1..144: mol_type = unassigned DNA; note = methanogen bacteria
aacgttaatgttactgaagttttaagctctcatcttaaaatgattgaaaatgatgcatatgtgggcaattatgatgtggataaaggagtttggtacataggcgatttggctaaaaatgattggtgttatttgctcattagggct

SEQ ID NO: 17366 - DNA, 96 bp, unidentified
  source 1..96: mol_type = unassigned DNA; note = methanogen bacteria
gttgaagttagtgaagctttacctgatcaacttaaattaatcaatgtgactggagatggttattatgatgcaactaatggtatttggtatatcggc

SEQ ID NO: 17367 - DNA, 96 bp, unidentified
  source 1..96: mol_type = unassigned DNA; note = methanogen bacteria
tatgttgttgatttgcagattacaaaagaagtaaacactgataaaactgagattgacattactgaatccattgtatttactattaaggtttataat

SEQ ID NO: 17368 - DNA, 147 bp, unidentified
  source 1..147: mol_type = unassigned DNA; note = methanogen bacteria
ggagtgtatgttgctgaacctttaagcaatattcttatatctcagggtgatattaaaactcctggaactacatatgatggttatacttggtatattggtaatttaactagtggatcagaagctattttaatgattattgcaaaacct

SEQ ID NO: 17369 - DNA, 90 bp, unidentified
  source 1..90: mol_type = unassigned DNA; note = methanogen bacteria
tatgtccttgaagagttagactctcatcttgagttgtattcttatgttgcaactgatggtactacttatgtgggtaatacttggaatatt

SEQ ID NO: 17370 - DNA, 63 bp, unidentified
  source 1..63: mol_type = unassigned DNA; note = methanogen bacteria
aaattaaccaaaaatgaaacaggaaacggttattatagtttagctgatggtatctggtatatt

SEQ ID NO: 17371 - DNA, 51 bp, unidentified
  source 1..51: mol_type = unassigned DNA; note = methanogen bacteria
aaaaatgaaactaatgctggttattataacgtaactgaaggtatttggcat

SEQ ID NO: 17372 - DNA, 99 bp, unidentified
  source 1..99: mol_type = unassigned DNA; note = methanogen bacteria
actgatgtatatgtttatgagaccttaagcgataaacttgctttaaatagatttgttgcaagtgttggcagatgggacggcaatatatggtacatcggt

SEQ ID NO: 17373 - DNA, 96 bp, unidentified
  source 1..96: mol_type = unassigned DNA; note = methanogen bacteria
gtatatgtacttgaagagttagactctcatcttggagattatacttatgttgcaacttccggtacatatgatggtcataaatgggatatcggcttt

SEQ ID NO: 17374 - DNA, 93 bp, unidentified
  source 1..93: mol_type = unassigned DNA; note = methanogen bacteria
aacttaatcaaaaatgagacaactgtcggtaaatatgatggttctgtttgggatattggtaatttggctaaaggacaagtagcttatttaact

SEQ ID NO: 17375 - DNA, 144 bp, unidentified
  source 1..144: mol_type = unassigned DNA; note = methanogen bacteria
aatgtatttgttagggaaattttagatcctgctttaagattggttaaatggaatgcaactaagtatgcaagtttcggatatgataattatacttgggttatcggcgatatggctgttggagaaaatgctactttaacaatcgtt

SEQ ID NO: 17376 - DNA, 30 bp, unidentified
  source 1..30: mol_type = unassigned DNA; note = methanogen bacteria
gagaccaataattatgacaatatcgctcct

SEQ ID NO: 17377 - DNA, 138 bp, unidentified
  source 1..138: mol_type = unassigned DNA; note = methanogen bacteria
aatgtaactgaagtactaagttcacatcttaaaatgattgaatacattacatgggacagttattatgatgtaactgaaggcgtatggcatataggtaccttaaacaaatatgactggcggcaattgattattataact

SEQ ID NO: 17378 - DNA, 138 bp, unidentified
  source 1..138: mol_type = unassigned DNA; note = methanogen bacteria
accaatgtggaagttagtgaagttttaagtccttatcttgactatatgggacacaatactaaatttggtaattattctaatactaagggtatatggagcatcggcaatttggcggctggtgccagagcaaacttaact

SEQ ID NO: 17379 - DNA, 57 bp, unidentified
  source 1..57: mol_type = unassigned DNA; note = methanogen bacteria
aaagacactaatccatataacaacagggatgaagttacaattgctgcattgcctgtt

SEQ ID NO: 17380 - DNA, 135 bp, unidentified
  source 1..135: mol_type = unassigned DNA; note = methanogen bacteria
gtcacagtttacaatgacggtccttgtgatgctactggtatatatgtaactgaatcattaagtgataagcttagattggttaaaaatatcactagcgttggtgaatgggatggatacacttggaatattcctaaa

SEQ ID NO: 17381 - DNA, 42 bp, unidentified
  source 1..42: mol_type = unassigned DNA; note = methanogen bacteria
ttggaaatcagtaaaatggtcaatgtttcatctgctgttgtg

SEQ ID NO: 17382 - DNA, 174 bp, unidentified
  source 1..174: mol_type = unassigned DNA; note = methanogen bacteria
gttgttaggaataatggtccttgtgatgctactggtgtgtatgtgagtgaggttttagattcacatcttaaattggtttctaattcgactgatgttggtagttatgatggttctagttgggttattggtaatttgactaatcagtctagtgctgttttggtaattgaggctctt

SEQ ID NO: 17383 - DNA, 111 bp, unidentified
  source 1..111: mol_type = unassigned DNA; note = methanogen bacteria
ccttgtgatgctagtggtgtttatgttggtgaaacattgaactctaatcttgagttggtttcatgtaatgctactgttggtgattataatggatttatttggaatattggt

SEQ ID NO: 17384 - DNA, 45 bp, unidentified
  source 1..45: mol_type = unassigned DNA; note = methanogen bacteria
ccttgtgatgctactggtgtagttgtggctgaggctttgaactct

SEQ ID NO: 17385 - DNA, 36 bp, unidentified
  source 1..36: mol_type = unassigned DNA; note = methanogen bacteria
actgttggtggttatgatggttatacttggaatgtt

SEQ ID NO: 17386 - DNA, 132 bp, unidentified
  source 1..132: mol_type = unassigned DNA; note = methanogen bacteria
gattcagctaaagctattgttgttgattgtaattttactggtaactccgctaaatatggtggtggaattttcatttttgctgatgatggtaaattagaaaattgtattttcaccaataatttcgcaactact

SEQ ID NO: 17387 - DNA, 60 bp, unidentified
  source 1..60: mol_type = unassigned DNA; note = methanogen bacteria
tccggtgttggcagtttagtaaattgtattttcaccaataattctgcttctagatatggt

SEQ ID NO: 17388 - DNA, 81 bp, unidentified
  source 1..81: mol_type = unassigned DNA; note = methanogen bacteria
ataagtgctggctctgatcagactgagattttaactgcaaatgcaacagtcaatgtcttaaagccagagtttaaagttgaa

SEQ ID NO: 17389 - DNA, 216 bp, unidentified
  source 1..216: mol_type = unassigned DNA; note = methanogen bacteria
ggcgagcaggtaatttatgaaattgtcatacataacactggtgaagctgacctgaccaatattgttgttgaagagatgcctgatgcgtctttgatattcgatcatgttgacagtggacgctttaaatattctgttgtcccaggtaagtatatctggactttagacaaattggcaaaaggcacttacgaaggatttaaactatacttcaacactact

SEQ ID NO: 17390 - DNA, 63 bp, unidentified
  source 1..63: mol_type = unassigned DNA; note = methanogen bacteria
aggatatcagtaaaatctgatgaaatacctgaagagattatatcttcaaataatacgactgtt

SEQ ID NO: 17391 - DNA, 36 bp, unidentified
  source 1..36: mol_type = unassigned DNA; note = methanogen bacteria
ttcactgtggaaaagatttgtctttatcctaatgtt

SEQ ID NO: 17392 - DNA, 288 bp, unidentified
  source 1..288: mol_type = unassigned DNA; note = methanogen bacteria
ggacaaatcacattcgaaatcgttattcataataccggtaatacgaatctggaaaacgttaaaatttcagaaatattgcctgaaggattagtatatgatcattttgtcgactatcttaatttatggacatataataatgatttaacatggtctgctacaagagcaattgtacctggtcaatatgtgggattctttgtaacattcaacactaccaaagcaggtaaatctgtaaataatgtagttgtcagtgctgataaggcaaattcaactagtgctaatacttcattt

SEQ ID NO: 17393 - DNA, 255 bp, unidentified
  source 1..255: mol_type = unassigned DNA; note = methanogen bacteria
ttcactattgaaaagatattggttgaagacaatattgtaaatggcggtcaggccacatttgaaattgtcattcacaatactggaaatgctccattaactaatgtaactgtaaaagaatatgactttaaaggccttatttataataattttgctgactatcttggtttgtggacttacaatggtgatttaagctggactatgaattctaaattacatcctggagaatatgcagaattattaatcatattcaacact

SEQ ID NO: 17394 - DNA, 123 bp, unidentified
  source 1..123: mol_type = unassigned DNA; note = methanogen bacteria
gcaagtgctgaatctggtgaaacaggtatcttaattgctaatgcaactttacatgtaattgatgataaaaaacctgaccctgagcacaattcatcaaatgactataaaatggatgtatttaaa

SEQ ID NO: 17395 - DNA, 288 bp, unidentified
  source 1..288: mol_type = unassigned DNA; note = methanogen bacteria
ggacaaatcacattcgaaatcgttgtacacaacacaggtaataagaaccttgaaaacgttaaaatttcagaaatattacctgaaggactaatatatgatcattttgttgataatattgatttgtggacttataatggtgatttaacctggtctgcaacaagagcaattgtacctggtgaatatgcaggattcttcatcacattcaacactaccaaagcaggtaaatctgtaaataatgtaaatgtcagtgccgataacacaaattcaactggtgctaatacttcattt

SEQ ID NO: 17396 - DNA, 234 bp, unidentified
  source 1..234: mol_type = unassigned DNA; note = methanogen bacteria
tttactattgaaaagatattgattaaagacaatattgcaaatggcgctcaggctacatttgaaattgtcattcacaacacaggtaatgctccattaacaaacatgattgttagagaatacttctctgaaggattgtccaaattagtacctggtgaatatgtaggattctttgtaacattcaacactacaaaagatggagtattcaccaatattgtcgttgcaaactccacagaa

SEQ ID NO: 17397 - DNA, 60 bp, unidentified
  source 1..60: mol_type = unassigned DNA; note = methanogen bacteria
gataacagattctctaacaacgtaagtgtaagtgttcataatgaaacagtcgatattcgt

SEQ ID NO: 17398 - DNA, 120 bp, unidentified
  source 1..120: mol_type = unassigned DNA; note = methanogen bacteria
gttattgtaggcgaacaggcaatctttgaaataaccgtgcaaaatactggtaaaatcaatatagataaattaaaattatctgaatttgattttgaaggcttaatctatgaccattacatg

SEQ ID NO: 17399 - DNA, 87 bp, unidentified
  source 1..87: mol_type = unassigned DNA; note = methanogen bacteria
ttaggccactggattaacgatggaataacctggacattaaacacaacactcgttccaggcgaagttacttcattgtttatagtattc

SEQ ID NO: 17400 - DNA, 132 bp, unidentified
  source 1..132: mol_type = unassigned DNA; note = methanogen bacteria
aacttcactaatgttgttttagccaataatgatgttttagatactaatgaacttttatccgctaacagcttggaagatggaatctatgtaagtgctgatgtggaagttgtaaaacctgaatacactattgaa

SEQ ID NO: 17401 - DNA, 243 bp, unidentified
  source 1..243: mol_type = unassigned DNA; note = methanogen bacteria
gcgtacgggatctccgccggcgacaattacgccctgtccggcggcagcagcgcgagcagcaacctccgcatcgtcatggagatcatggcgggcacctacgacccgtccagcgtcgcctccctgaactatccgttcgggtctgtgagcgcctacgggccggcctatgattacataatggcgggcatagcgcagatcgtgacggctttcggcatctcggaccgcaccgcggcagccgggaccatc

SEQ ID NO: 17402 - DNA, 33 bp, unidentified
  source 1..33: mol_type = unassigned DNA; note = methanogen bacteria
atgaccactcccttctcgagcggctccgggttc

SEQ ID NO: 17403 - DNA, 108 bp, unidentified
  source 1..108: mol_type = unassigned DNA; note = methanogen bacteria
ctcgacggggacctctcgcatgcgatattccacggcaacagcgtctacagcggcaccctcatggaggacctcgccgacaatgcgaccaggacctcgatctccgacatg

SEQ ID NO: 17404 - DNA, 39 bp, unidentified
  source 1..39: mol_type = unassigned DNA; note = methanogen bacteria
catgaaggagatgacattcctcatattgtatctgtgtcc

SEQ ID NO: 17405 - DNA, 180 bp, unidentified
  source 1..180: mol_type = unassigned DNA; note = methanogen bacteria
actgatgttttaactgttattgatagtttacctgctggtttagagtttgtcaaaacagtaaatgttattggtgctgttaaagttagtgaagataaaaatggtcaagtcattatctggaaattaactaatatttctactaataacgctactattgttgttagggttaaagttaacagttta

SEQ ID NO: 17406 - DNA, 30 bp, unidentified
  source 1..30: mol_type = unassigned DNA; note = methanogen bacteria
cctaaaggcagtagcagaactgtaaactgt

SEQ ID NO: 17407 - DNA, 36 bp, unidentified
  source 1..36: mol_type = unassigned DNA; note = methanogen bacteria
aagttgaatgaattgattcctgatgagtttgaatat

SEQ ID NO: 17408 - DNA, 66 bp, unidentified
  source 1..66: mol_type = unassigned DNA; note = methanogen bacteria
tactgtgaccttccggatggtactgtatataatgaaactactggagtttggagcattcctgaattg

SEQ ID NO: 17409 - DNA, 102 bp, unidentified
  source 1..102: mol_type = unassigned DNA; note = methanogen bacteria
gttactttgaaggatttattcccatctgattatttcgaattcattaattgcactttaccggacggcacagtatataatgaaacaaccggtgtttggacaatc

SEQ ID NO: 17410 - DNA, 81 bp, unidentified
  source 1..81: mol_type = unassigned DNA; note = methanogen bacteria
aaagctggtattacagttgatgtttatgatctcccatatcctgtaaaatccgttaataataatactccgtattacaatgat

SEQ ID NO: 17411 - DNA, 240 bp, unidentified
  source 1..240: mol_type = unassigned DNA; note = methanogen bacteria
aacgtcactgacactttacctgatggtttaaaatttgttggttatgtagttaaagatgctaatgaggctgctaaatatgtaaatgttaataatcagactgtaacctggtttataacaaatattgcaggtaaatctaaagctacaattactgtttgggttaaagttgttggtcttggtgataatattatcagcgacagtactttcattactaataatgtgactagagatcctgcagttaag

SEQ ID NO: 17412 - DNA, 81 bp, unidentified
  source 1..81: mol_type = unassigned DNA; note = methanogen bacteria
attcctgatgaatttgagttcatgtactcttccgatgatgttgcttataacaatgaaacaggagtttggaccattcctgaa

SEQ ID NO: 17413 - DNA, 39 bp, unidentified
  source 1..39: mol_type = unassigned DNA; note = methanogen bacteria
gatggtactgtatataatgagactactggtgtttggagt

SEQ ID NO: 17414 - DNA, 84 bp, unidentified
  source 1..84: mol_type = unassigned DNA; note = methanogen bacteria
cctgatggtttagagtttattaagactctcagtattagtaatgctaagaatatcagtgaagttcgtgaaggtcaagtaattact

SEQ ID NO: 17415 - DNA, 114 bp, unidentified
  source 1..114: mol_type = unassigned DNA; note = methanogen bacteria
aatattaacttaaaagatctgttctcacctgaaaacttcaaattgattaactgtactgacagtaacggtaaatcttatgatgtaaccgatgatgtatggattattcctgtaatc

SEQ ID NO: 17416 - DNA, 33 bp, unidentified
  source 1..33: mol_type = unassigned DNA; note = methanogen bacteria
ggaaataatattattggcactgctgaagttaat

SEQ ID NO: 17417 - DNA, 66 bp, unidentified
  source 1..66: mol_type = unassigned DNA; note = methanogen bacteria
gaagatgaatggaattatgataacaataaagcaattaaaccagttaatatagttcctcttcctaaa

SEQ ID NO: 17418 - DNA, 69 bp, unidentified
  source 1..69: mol_type = unassigned DNA; note = methanogen bacteria
actgttgttaatgttggtagtgataattatatggataatttaactcttattgacagtttgcctgatggt

SEQ ID NO: 17419 - DNA, 69 bp, unidentified
  source 1..69: mol_type = unassigned DNA; note = methanogen bacteria
accgttaatgttattggtgctgttaaagtcagtgaaaatcaaaatggtcaagtaattacctggatgtta

SEQ ID NO: 17420 - DNA, 57 bp, unidentified
  source 1..57: mol_type = unassigned DNA; note = methanogen bacteria
tactgtgatcttccagatggtacttcatataatgaaactactggtgtttggacaatc

SEQ ID NO: 17421 - DNA, 33 bp, unidentified
  source 1..33: mol_type = unassigned DNA; note = methanogen bacteria
tacactaacaacgatgataaaaagattgttgac

SEQ ID NO: 17422 - DNA, 132 bp, unidentified
  source 1..132: mol_type = unassigned DNA; note = methanogen bacteria
attagtgagtttgatgttattgactccttgcctgttggtttagagtttaatggaactcttagtattgttggtgctgatttgattaaggaaagtgttgatggtcaagttgttaaatgggctattactaatatt

SEQ ID NO: 17423 - DNA, 42 bp, unidentified
  source 1..42: mol_type = unassigned DNA; note = methanogen bacteria
tataatcagtatctctcactttgggataaaaatgaccctgac

SEQ ID NO: 17424 - DNA, 90 bp, unidentified
  source 1..90: mol_type = unassigned DNA; note = methanogen bacteria
aaatattttgatgatttaattcacagtggtgtaaaagagattgttttagactttgatattgttttaactgatggtgaggaatcacaatat

SEQ ID NO: 17425 - DNA, 162 bp, unidentified
  source 1..162: mol_type = unassigned DNA; note = methanogen bacteria
ctggatgcggacgatttgattattgagggtaatggccatacgatagatgcccaaggcaaaacaagaatatttgactgcataggaaaaaacattactattaaaaacattattttaaaaaacggatttacagaagatgatggtggagcaatacacaacaatggt

SEQ ID NO: 17426 - DNA, 45 bp, unidentified
  source 1..45: mol_type = unassigned DNA; note = methanogen bacteria
attattgattgtgagtttataggcaataatgttgaaaaagatgta

SEQ ID NO: 17427 - DNA, 72 bp, unidentified
  source 1..72: mol_type = unassigned DNA; note = methanogen bacteria
tacttggataaaaaaatccatgaaagcaaatccaaagagataattttaaatcaggatataacttttgaaaat

SEQ ID NO: 17428 - DNA, 135 bp, unidentified
  source 1..135: mol_type = unassigned DNA; note = methanogen bacteria
gatgatttagtcattgatggtaatgggcatacaattgacggagccaataagtcacgtatttttataataactggcaaaaacatcacattaaagaatataacttttaaaaatggagtcacacacgataactatcat

SEQ ID NO: 17429 - DNA, 39 bp, unidentified
  source 1..39: mol_type = unassigned DNA; note = methanogen bacteria
tggaatgatgatgttatttcatctgatgacgttacaatt

SEQ ID NO: 17430 - DNA, 45 bp, unidentified
  source 1..45: mol_type = unassigned DNA; note = methanogen bacteria
tccatattagggaataacacggcatctaaaggtggagcaatctac

SEQ ID NO: 17431 - DNA, 42 bp, unidentified
  source 1..42: mol_type = unassigned DNA; note = methanogen bacteria
aatactattatttccggttttagtccatatatgcagttgatt

SEQ ID NO: 17432 - DNA, 45 bp, unidentified
  source 1..45: mol_type = unassigned DNA; note = methanogen bacteria
ggtgtaagacattcagtaatatccaattgtattgctggtcatgat

SEQ ID NO: 17433 - DNA, 210 bp, unidentified
  source 1..210: mol_type = unassigned DNA; note = methanogen bacteria
attgataatattcttgttgttgataataaagcaaccaataatggtggaggaatagctttggatgctgcttcttcacagggaactacttctatttctaattctttattcaaagcaaatactgctgattatggtggtgcaatttattgttctaacatgtttacaaacatattggattcaaactttgccaatgatcatgctaattatggtgga

SEQ ID NO: 17434 - DNA, 81 bp, unidentified
  source 1..81: mol_type = unassigned DNA; note = methanogen bacteria
attattttacagcaacttttacttgacaataaagttggggtaattgattcaaaaattgttggatgtattgctggtcgtgat

SEQ ID NO: 17435 - DNA, 90 bp, unidentified
  source 1..90: mol_type = unassigned DNA; note = methanogen bacteria
attacctgtagagtaaataaggctgaagataaaggcggttcaatctatatttccggttctgatttatctttcacagactccatgttcatt

SEQ ID NO: 17436 - DNA, 39 bp, unidentified
  source 1..39: mol_type = unassigned DNA; note = methanogen bacteria
attagtggagataatgttttaattaataattccctattt

SEQ ID NO: 17437 - DNA, 42 bp, unidentified
  source 1..42: mol_type = unassigned DNA; note = methanogen bacteria
aaaattataggttctgactttgataaatgtactgcttacgaa

SEQ ID NO: 17438 - DNA, 51 bp, unidentified
  source 1..51: mol_type = unassigned DNA; note = methanogen bacteria
tctggaaatggagccattgtaaatggatcaacttttgcttattgtatggct

SEQ ID NO: 17439 - DNA, 36 bp, unidentified
  source 1..36: mol_type = unassigned DNA; note = methanogen bacteria
gatgatgcaacaatttccggttccgactttgaaatg

SEQ ID NO: 17440 - DNA, 39 bp, unidentified
  source 1..39: mol_type = unassigned DNA; note = methanogen bacteria
gttgacggaatcaatgcaaaaatcgatggagcttcattt

SEQ ID NO: 17441 - DNA, 36 bp, unidentified
  source 1..36: mol_type = unassigned DNA; note = methanogen bacteria
caaatttacctttcaaatgctgaactttatatagaa

SEQ ID NO: 17442 - DNA, 132 bp, unidentified
  source 1..132: mol_type = unassigned DNA; note = methanogen bacteria
aaaacttttaaagctttaataagaaattccaaattccttgatttaaaagccaatattaccgcaggtgcaattggtactaaagagggtggagaactatatattgaaaactgtgaattcgaaaacatcacttct

SEQ ID NO: 17443 - DNA, 48 bp, unidentified
  source 1..48: mol_type = unassigned DNA; note = methanogen bacteria
aatgtgactataattgattccaaatttagggacacatattctgaattt

SEQ ID NO: 17444 - DNA, 51 bp, unidentified
  source 1..51: mol_type = unassigned DNA; note = methanogen bacteria
ttcgtgttaaagaatacagaattcataaactctcatgctaaatataatgga

SEQ ID NO: 17445 - DNA, 30 bp, unidentified
  source 1..30: mol_type = unassigned DNA; note = methanogen bacteria
tttttcaataatgtggcaattgctggcagt

SEQ ID NO: 17446 - DNA, 39 bp, unidentified
  source 1..39: mol_type = unassigned DNA; note = methanogen bacteria
acaggttcccaatttaatcttgaaaacattacctttgcc

SEQ ID NO: 17447 - DNA, 177 bp, unidentified
  source 1..177: mol_type = unassigned DNA; note = methanogen bacteria
accactgccacatattcaccagctatatatcttgtaggttctaaaattagaataattgattctaaattcattaatctaaaagctaatttgactgcaggtgcaatgagccttagggaaggtggtgaactttacattagcaattgtgaattcataaacactacttcttccagaaatgca

SEQ ID NO: 17448 - DNA, 33 bp, unidentified
  source 1..33: mol_type = unassigned DNA; note = methanogen bacteria
acagaattcataaacaaccgtgttaccttcaat

SEQ ID NO: 17449 - DNA, 48 bp, unidentified
  source 1..48: mol_type = unassigned DNA; note = methanogen bacteria
aagtttttcaacaatgttgcaagtgaaggtaatgcaatatatgcatat

SEQ ID NO: 17450 - DNA, 75 bp, unidentified
  source 1..75: mol_type = unassigned DNA; note = methanogen bacteria
acattcaaaaacaatacaaatgccgttttcagtgtctttactaaaaaatatactatagatacaaccactgaatta

SEQ ID NO: 17451 - DNA, 225 bp, unidentified
  source 1..225: mol_type = unassigned DNA; note = methanogen bacteria
gagttggctctggttaacaataccataaatgttgatactcttccagccaaatttgatttgcgtgactggggatgggtatcatcagttaaagatcaaggatggatgggtgcctgctggacttttggaatgtcaggctcattagaatcagcattattaaaagctacaggaattccatttaatgtttctatgaataacatgaaaactgtgatgaaatattctccttat

SEQ ID NO: 17452 - DNA, 102 bp, unidentified
  source 1..102: mol_type = unassigned DNA; note = methanogen bacteria
ttgagctggcttggagcaattccatatggtgtagatacttatgatgagctaggaaaaattacaatgccaatcacaacaggcaaggacattcatgttcaggat

SEQ ID NO: 17453 - DNA, 63 bp, unidentified
  source 1..63: mol_type = unassigned DNA; note = methanogen bacteria
aacggtacacaaattaaattggcaatcctgaaatatggatctctggatgtgtcctttttcgga

SEQ ID NO: 17454 - DNA, 48 bp, unidentified
  source 1..48: mol_type = unassigned DNA; note = methanogen bacteria
gtctcatttgacggaaaaacatggcaagatgcttatgacttaggttat

SEQ ID NO: 17455 - DNA, 30 bp, unidentified
  source 1..30: mol_type = unassigned DNA; note = methanogen bacteria
tacactgttgctgatgacagtaaaatcatc

SEQ ID NO: 17456 - DNA, 249 bp, unidentified
  source 1..249: mol_type = unassigned DNA; note = methanogen bacteria
ttcgtatacggcatctccgcaggcgacaactacgcactgtcgggcgggagcagcgctgccagtcaccgtcgtataatcgctgaaatcctctggggaacctacaaccccggcaacgaggccgccctcaactacccctacggtgctgagagcatatacggccccctgttcgattactgctgtgctgcctgggccaagctgttctcggcattcggcatgagttacgacgcttccgcaggcgcagcactcgct

SEQ ID NO: 17457 - DNA, 30 bp, unidentified
  source 1..30: mol_type = unassigned DNA; note = methanogen bacteria
atgacctcccccttctcctacggaaccgag

SEQ ID NO: 17458 - DNA, 33 bp, unidentified
  source 1..33: mol_type = unassigned DNA; note = methanogen bacteria
tacatcccctacggaatgtgggacagtgtattc

SEQ ID NO: 17459 - DNA, 105 bp, unidentified
  source 1..105: mol_type = unassigned DNA; note = methanogen bacteria
gcacccgagctctccgatgcggccctcagcggaaacgatgtctacgtcggttccctcatgagttccctcgcagccgagaccagccgtaccagcatctccgctatg

SEQ ID NO: 17460 - DNA, 63 bp, unidentified
  source 1..63: mol_type = unassigned DNA; note = methanogen bacteria
catgatagtggaaatgcaagcaaatccagtacagtaatttatgctcaaaatatggataaggga

SEQ ID NO: 17461 - DNA, 114 bp, unidentified
  source 1..114: mol_type = unassigned DNA; note = methanogen bacteria
aatacttttagtaaaattaaatgtaatcattcattaaatagtaatgttaataaatatttagaatttagatggagtaataatgatactaaaatgactagtgttttaatattggac

SEQ ID NO: 17462 - DNA, 60 bp, unidentified
  source 1..60: mol_type = unassigned DNA; note = methanogen bacteria
aggaattataatcctagtggagattatgcttcattcaatgttttaaaagtcaattcatcc

SEQ ID NO: 17463 - DNA, 294 bp, unidentified
  source 1..294: mol_type = unassigned DNA; note = methanogen bacteria
aatgacactaaaacattttacgtattgaaagtcggttcatccattgaatttgattatttaaatgtaacatcttatggaatgcctttcagattggattatgacgtggataatgaaacattattaaacatctgcatttacgattctgaaggaaatgtcgttttcgataaaaatttcaatgaaattagtgaacttccagaggatatgtctaatttgactgaagaagcttatttgggttattatttctttatttatagaaatttaacagttggaaattattctttcgagtttacaaat

SEQ ID NO: 17464 - DNA, 225 bp, unidentified
  source 1..225: mol_type = unassigned DNA; note = methanogen bacteria
gtcacaagcattccgttcactgttgctaaggctgatgttgctttaagtgttgaggttttagataaggtttatactgctgatattaagggtaatgtatttgccagtgttgatggtgagtatactgtagttattgggaataatattattccagtgactgttttgaatggtgttggtgcctttgacgttggtgttttaaatgttggaaactatactgttcgtgtaatg

SEQ ID NO: 17465 - DNA, 54 bp, unidentified
  source 1..54: mol_type = unassigned DNA; note = methanogen bacteria
gttaatgaaagcacatttaaagttactcagtttggaaccaatttcaatattgct

SEQ ID NO: 17466 - DNA, 159 bp, unidentified
  source 1..159: mol_type = unassigned DNA; note = methanogen bacteria
aattcaataattattgctccaagtcttccagatggtgcttcaggaaatgtcacttatttctttgctaatggaactgtaattggggttttaaatgttggcgaatcatttgtaatccctgctttggatgttgggtctcatgtggtttatgcaaattattcc

SEQ ID NO: 17467 - DNA, 111 bp, unidentified
  source 1..111: mol_type = unassigned DNA; note = methanogen bacteria
gtaaatgcatctgctaatttaagttattttggaaaacgtatgaaaatgaattccaaagaacttcaaaattttaataattatcttggtgatactcaaaagcaattcagaaaa

SEQ ID NO: 17468 - DNA, 93 bp, unidentified
  source 1..93: mol_type = unassigned DNA; note = methanogen bacteria
ggggcttcagctttagaaatgggaaccaagatgaaattatctaaaaatgatatgaaggatttaactcaaatgactgcggttatgagttctgct

SEQ ID NO: 17469 - DNA, 33 bp, unidentified
  source 1..33: mol_type = unassigned DNA; note = methanogen bacteria
aaggagggccgtagtcaaacagatgcaattctt

SEQ ID NO: 17470 - DNA, 165 bp, unidentified
  source 1..165: mol_type = unassigned DNA; note = methanogen bacteria
aagaaaaaatccaaagattggttaaaactattagattatcctggaaaaataccaaaatacattgcatatcacatggctcttgatgaaggctgcaaagaccctcaaaaatgtttcttcggagtggcagacacccatataaataaaattatgaatactgcataccct

SEQ ID NO: 17471 - DNA, 51 bp, unidentified
  source 1..51: mol_type = unassigned DNA; note = methanogen bacteria
cctatgaataacaaagtagaagatttcagggatggaaaaactaaaagcatt

SEQ ID NO: 17472 - DNA, 114 bp, unidentified
  source 1..114: mol_type = unassigned DNA; note = methanogen bacteria
gaaagcattctcagaaacattttaaccgcaagaggttttgctaatccaggaacttatgagtattatgcaaacagtaaaagatccaaccaacaagtgtgggatcaagtacgatgc

SEQ ID NO: 17473 - DNA, 81 bp, unidentified
  source 1..81: mol_type = unassigned DNA; note = methanogen bacteria
gagatgatagttgaaattggtcaaatgttaggtcttggtggcagtcttgttcacgggtcttggaaaggagaaggacatatg

SEQ ID NO: 17474 - DNA, 48 bp, unidentified
  source 1..48: mol_type = unassigned DNA; note = methanogen bacteria
gcaatggttgcaggaaaattgtatgatatgacacaattccaaaaacgt

SEQ ID NO: 17475 - DNA, 192 bp, unidentified
  source 1..192: mol_type = unassigned DNA; note = methanogen bacteria
ttccgcggaactcctggagtagtgtttggttcaaatgaaaaatcacatagctctaaaagagttagtggacctaatggatctaattcaaaaaaaggagatgttactattttcaatgttaataatgatttttcaaatgcaaggatttatggtattgatgatttggacaatcacatcaaagaaaccacaaaagaa

SEQ ID NO: 17476 - DNA, 120 bp, unidentified
  source 1..120: mol_type = unassigned DNA; note = methanogen bacteria
gaaactattaatgctaaatcagagatgaatggttatttccaaatgcttggttattctacaaggcaagttgatgagtttaataaggcattggatgttactgttaagaagtttcctcgtttg

SEQ ID NO: 17477 - DNA, 120 bp, unidentified
  source 1..120: mol_type = unassigned DNA; note = methanogen bacteria
gagatgaagaaagcgatgccagttgtttctatgattacctccgagtatttgagggcaggtaggaatgttaatgaggcgagtttggcagtaaaggacatcttacaaggtgagtttcagaga

SEQ ID NO: 17478 - DNA, 102 bp, unidentified
  source 1..102: mol_type = unassigned DNA; note = methanogen bacteria
gaaatcatctctgaagcaaaggatactgttgatgatttaacttctaaaaaagaaagattagcagagaaattagatactcttgaaaaaggtacttatgcttat

SEQ ID NO: 17479 - DNA, 84 bp, unidentified
  source 1..84: mol_type = unassigned DNA; note = methanogen bacteria
gctacaagtgttcaaaatgctttaaatgaattagaaaatactaaattaactgataaagaagttactgttttaattcgtaggaaa

SEQ ID NO: 17480 - DNA, 132 bp, unidentified
  source 1..132: mol_type = unassigned DNA; note = methanogen bacteria
ggtaatgaaattgcagatgccaaagaagagttaggtaatgctacaagtttaactgaatatcttgataaatggttatggttacaagttaaacaaataaagaatgcttttgttgattgggatattcataatgat

SEQ ID NO: 17481 - DNA, 81 bp, unidentified
  source 1..81: mol_type = unassigned DNA; note = methanogen bacteria
acacaagcattggctaaagattggggtcttgagggagttggaactcgatttgttgataagattaaagaagagggacttggt

SEQ ID NO: 17482 - DNA, 102 bp, unidentified
  source 1..102: mol_type = unassigned DNA; note = methanogen bacteria
actgatgctttatatgattttttccatatggatacatttgcatctgatttagaacaatttaaacaaggttttcaagatatgttcaaagaccttgattttgat

SEQ ID NO: 17483 - DNA, 123 bp, unidentified
  source 1..123: mol_type = unassigned DNA; note = methanogen bacteria
cctgctcctgcaagtgcttctgatggtacttctgaccatccatcatttatggaggatgtgtctgctattcttggttttgatgttcagtcttgggttgatagttttagttctgatccattaggt

SEQ ID NO: 17484 - DNA, 30 bp, unidentified
  source 1..30: mol_type = unassigned DNA; note = methanogen bacteria
agtcaatgggtttatagttcttttgttaaa

SEQ ID NO: 17485 - DNA, 51 bp, unidentified
  source 1..51: mol_type = unassigned DNA; note = methanogen bacteria
actgatgagaatgttagtgcatcgaataagggtaaatctattgctcattgg

SEQ ID NO: 17486 - DNA, 126 bp, unidentified
  source 1..126: mol_type = unassigned DNA; note = methanogen bacteria
ttggctctgatagcattagcgaacacattcggcttctctggtagtatggctcatggtagttggactgacccgtcagggaagaagactgctcatgtttgggcagttattaatggtgttaagatggat

SEQ ID NO: 17487 - DNA, 54 bp, unidentified
  source 1..54: mol_type = unassigned DNA; note = methanogen bacteria
actggaatgcaacaaagaggtagttggagaccatccgcaagtgcaggaggtaat

SEQ ID NO: 17488 - DNA, 120 bp, unidentified
  source 1..120: mol_type = unassigned DNA; note = methanogen bacteria
gatgttgatggagattatattgtaaacatcaatggaaaagagactgttgttaatgttagggatggtgttggaaattcacctgttgatttgaacgctggtgaatacactacaagcacaaga

SEQ ID NO: 17489 - DNA, 201 bp, unidentified
  source 1..201: mol_type = unassigned DNA; note = methanogen bacteria
atcagtgaatctgttttcaaagtttataatgcaataaacaatgtaatagtgaatgttgaagatgtcatttatggggaacagtccctaattattattattgcagatgctgacggcaattatatagttaatattaatggaaagagagttactgttaatgttgcaggaggcaaaggaaacgcaagtgtggcattggatgcaaat

SEQ ID NO: 17490 - DNA, 93 bp, unidentified
  source 1..93: mol_type = unassigned DNA; note = methanogen bacteria
gtaagttatggaacatctgctgttattaagattagtgctgatgttgatggtaattatactgtaaacattaatggaacaactatcaatgtcaac

SEQ ID NO: 17491 - DNA, 156 bp, unidentified
  source 1..156: mol_type = unassigned DNA; note = methanogen bacteria
tttacattgcctcgtttggattctggggaatacctgattatcgctaactacactggtgaccataattatctctctgcagtgagtatgctgaaaattaaaatcaatactccaacaggtaatgttgttgttagtgtcgaagatgtaagctatggaact

SEQ ID NO: 17492 - DNA, 114 bp, unidentified
  source 1..114: mol_type = unassigned DNA; note = methanogen bacteria
tctgttatcaatattgttgcagaagttgatggaacctacactgtaaaaatcaatggaaaaacagttactgttaatgtttttaatggtgtcggtagcaattcaatcagtttagat

SEQ ID NO: 17493 - DNA, 117 bp, unidentified
  source 1..117: mol_type = unassigned DNA; note = methanogen bacteria
ggatcatattccacagaaacttcatttttaggcaattatgatttgaatgttactgaagctgattttgaagtcaaaaaggctgaaatgtcattaaacataagtgtggctaatgtcact

SEQ ID NO: 17494 - DNA, 234 bp, unidentified
  source 1..234: mol_type = unassigned DNA; note = methanogen bacteria
aacgttgaatatgtagtttatgccagtgttgacggcatgtataatgtaactgtcggaagcgcttccatgactgtcaatgttataaatggtatctgcaagtttgatgtaggtgtattggatgctggagattataatgcaactgtaagattcagcggatctaaaaactataacaacaatacaaatgctaccaacttcactgttgaaaaagcagacatattcttgttaatttctgta

SEQ ID NO: 17495 - DNA, 201 bp, unidentified
  source 1..201: mol_type = unassigned DNA; note = methanogen bacteria
tatgaaacaatagtaaatgaagttggattcattgtcaataagatagataatgacttcagaatccttgtaaacgatattgttttaggatcttcttcaattattaatttaataagcactattgatggcatctatgaaatatccataaacgatactgtaggaaatatcactgttaagaatggtgtaggaagttatgatgcagga

SEQ ID NO: 17496 - DNA, 87 bp, unidentified
  source 1..87: mol_type = unassigned DNA; note = methanogen bacteria
gattctggtgtttatgatctaacattaaaagtatcggtaacaataatgtcaatccatggagtggaacagccactttcacagtattcg

SEQ ID NO: 17497 - DNA, 75 bp, unidentified
  source 1..75: mol_type = unassigned DNA; note = methanogen bacteria
gctgtgggttatttcagaaataaggacgatgatgaaaaaataactgatttagataaacttttcaatgaaatgagg

SEQ ID NO: 17498 - DNA, 36 bp, unidentified
  source 1..36: mol_type = unassigned DNA; note = methanogen bacteria
ggatactttagagacagtgacgataaggataaaaaa

SEQ ID NO: 17499 - DNA, 30 bp, unidentified
  source 1..30: mol_type = unassigned DNA; note = methanogen bacteria
gatttggataagcttttcagagaaaaattt

SEQ ID NO: 17500 - DNA, 195 bp, unidentified
  source 1..195: mol_type = unassigned DNA; note = methanogen bacteria
tgtgaaaatacaacttcattttgggtattcgctgcatatcctattgaagcggaagacacatatataatatataatacgaacaattatttcaaagccaagttttatgatgaaaatcacaatgtattatctaataagtatgttgtatttaatgttggcggaaaggattacgcaagattaactgacgattacggatgg

SEQ ID NO: 17501 - DNA, 42 bp, unidentified
  source 1..42: mol_type = unassigned DNA; note = methanogen bacteria
atttataatgagaaaactactaataagatagttatcttttcc

SEQ ID NO: 17502 - DNA, 123 bp, unidentified
  source 1..123: mol_type = unassigned DNA; note = methanogen bacteria
gcccacaatagtagtgctgatttttatgccacatttttagacaataaagctaaaccattgtctaatactccagttatttttaaagttaatggttctgattatacagttaacaccaatatggat

SEQ ID NO: 17503 - DNA, 45 bp, unidentified
  source 1..45: mol_type = unassigned DNA; note = methanogen bacteria
aaaacaaatattgtgactatcgtcccaagtattcaagccaagaat

SEQ ID NO: 17504 - DNA, 45 bp, unidentified
  source 1..45: mol_type = unassigned DNA; note = methanogen bacteria
aaagcaactttcattggtgcaaataatgactacttaaataatacg

SEQ ID NO: 17505 - DNA, 75 bp, unidentified
  source 1..75: mol_type = unassigned DNA; note = methanogen bacteria
gttacttttgaaatcggatcaaggaaatatcctgccatgactgatgaaaagggtatcgctattttaaatgtacca

SEQ ID NO: 17506 - DNA, 174 bp, unidentified
  source 1..174: mol_type = unassigned DNA; note = methanogen bacteria
tctacggagcatatacctaagaatggagtaatcgttaaaactatttccaaattggatagtggaaaatatccgattaatgtgaaatttgaaggcaataacaactataatccactcaacgctacggctgttttaaaagttaataagctgtcaactaccttaaagttatcatatgta

SEQ ID NO: 17507 - DNA, 177 bp, unidentified
  source 1..177: mol_type = unassigned DNA; note = methanogen bacteria
gttacgctgactgctcttgttaatccttcatctgccggcggtaatgtagtatttactgtcaatggtaagaattatacttctaaaatcagccgaggtaaggctacatataaattatctgatttgagtgctggttcatatactgttaatgctgtttataaaggtgatgtcaatcataag

SEQ ID NO: 17508 - DNA, 123 bp, unidentified
  source 1..123: mol_type = unassigned DNA; note = methanogen bacteria
agtgaaaaattagtaattactttaactaatccggattctaaagctgtcagcaatgttaatattaaggtttctcttgcaggtaaagattatactttgactactgataaaaatggtaaagcttca

SEQ ID NO: 17509 - DNA, 75 bp, unidentified
  source 1..75: mol_type = unassigned DNA; note = methanogen bacteria
gcttcaagttcaatcaattttaatgttgttgagcgttatgttgtgataactgccccagacgttaccaagaattat

SEQ ID NO: 17510 - DNA, 87 bp, unidentified
  source 1..87: mol_type = unassigned DNA; note = methanogen bacteria
actaatcaggatttcaaagctgtcggtaatgccggaattaaggtttctcttgcaggtaaagattatactttgactactgataaaaat

SEQ ID NO: 17511 - DNA, 60 bp, unidentified
  source 1..60: mol_type = unassigned DNA; note = methanogen bacteria
gcagatattgtttttgtaggaaatagtgaatatctgcctgaaagtactctggttaaagtt

SEQ ID NO: 17512 - DNA, 63 bp, unidentified
  source 1..63: mol_type = unassigned DNA; note = methanogen bacteria
gttaatggtaaggattatacagttaaaatcagtggaggtaaagctacacttaaattatctgat

SEQ ID NO: 17513 - DNA, 210 bp, unidentified
  source 1..210: mol_type = unassigned DNA; note = methanogen bacteria
gtcagtaatgctgagattagagtttctcttgatggtacagtttatactttgactactgataaaaatggtaaagcttcactggaccttggtttagatagtggaatttatgatgcttatattgtttttgtaggaaatgaggattataaatcagaaaccaagattgttaaaattactattaatcgattaatcaccaatattggtttatcctat

SEQ ID NO: 17514 - DNA, 138 bp, unidentified
  source 1..138: mol_type = unassigned DNA; note = methanogen bacteria
aatccttcatccaccgaaggtattgttgtatttaccgttaatgataaggattatgaagttaaactcagtggcggtaaagctatacttaaattgtctgatttggctcctgcttcatatgatgtcgaagcaacatatgtt

SEQ ID NO: 17515 - DNA, 222 bp, unidentified
  source 1..222: mol_type = unassigned DNA; note = methanogen bacteria
atttccaataccatcatatttactgttgaagaacctaaatacaaaatttcagctcctgatgtaaccaaatattatcatggccctgaaagattcgttgtaacagtaaaagataagaaaaataacccaatagtgaatggaaaggtaacgattactcttaatggtgttccttataacagaactactgatgctaacggtcaggcttcaatggcaattaaccttgat

SEQ ID NO: 17516 - DNA, 162 bp, unidentified
  source 1..162: mol_type = unassigned DNA; note = methanogen bacteria
ggttcaaactgtactgctgttttaactgctgttggtaaatattatgctattgcagtctttaatgatgataattatgatattacaattaataatgatacattcgatgtcctgaaagctattaataatattaaagtcgaagttaatagtgtgaattatccgaat

SEQ ID NO: 17517 - DNA, 45 bp, unidentified
  source 1..45: mol_type = unassigned DNA; note = methanogen bacteria
atcaataatattaaaattgaagtcaatgacactatttatccaaac

SEQ ID NO: 17518 - DNA, 153 bp, unidentified
  source 1..153: mol_type = unassigned DNA; note = methanogen bacteria
acagtcaaactaaccgcagacattgctggtgtttatacggtgaaattaaatggtactgaactgcacatcaatgtagatgaaaacaaaggcacaggatttaaatcattaaatctgactccaggtaaatacaatgcatctgtcatttacactgat

SEQ ID NO: 17519 - DNA, 72 bp, unidentified
  source 1..72: mol_type = unassigned DNA; note = methanogen bacteria
ggatactttagagacaaagatgaaagtaaaaaatcaaataataatttagatgagctatttaatcaggaatta

SEQ ID NO: 17520 - DNA, 66 bp, unidentified
  source 1..66: mol_type = unassigned DNA; note = methanogen bacteria
ggatactttagaaatgaagatgataaggataaagttcaagatttagataagctatttaatgaaaga

SEQ ID NO: 17521 - DNA, 72 bp, unidentified
  source 1..72: mol_type = unassigned DNA; note = methanogen bacteria
gtcggatactttagaaatgaagatgataaagataaagttcaagatttagataagctatttaatgaaagaggg

SEQ ID NO: 17522 - DNA, 69 bp, unidentified
  source 1..69: mol_type = unassigned DNA; note = methanogen bacteria
gttggatactttagaaataatgataataaagataaagttcaagatttagataagctatttaatgaaaga

SEQ ID NO: 17523 - DNA, 33 bp, unidentified
  source 1..33: mol_type = unassigned DNA; note = methanogen bacteria
ggatatttcagaaataaaagaaatgatgaattt

SEQ ID NO: 17524 - DNA, 66 bp, unidentified
  source 1..66: mol_type = unassigned DNA; note = methanogen bacteria
tactttagagacgaggatgataaagacaaagttcaagatttagataaattatttgatgaaaaagtg

SEQ ID NO: 17525 - DNA, 72 bp, unidentified
  source 1..72: mol_type = unassigned DNA; note = methanogen bacteria
gaaattttcgctaaaggttctcaaatttccattactggagatgctgtagcgtatatagaaaacactactttt

SEQ ID NO: 17526 - DNA, 273 bp, unidentified
  source 1..273: mol_type = unassigned DNA; note = methanogen bacteria
atcacttcatcttatgcaccggcagtatatgttaaatctgctaaagcttcaatagtcaattccaaattccttgatttaaaagccaacattactgcaggtgcaattgccactaaagagggtggagaactatatattgaaaattgcgaattcgaaaatgttacctcttccaaaaatggaggtgccatttatgcagatgttgctggagaaaatgacgttacaggtaatgtgaccataatcgatacccaatttaaggacacctattctgaatttggt

SEQ ID NO: 17527 - DNA, 90 bp, unidentified
  source 1..90: mol_type = unassigned DNA; note = methanogen bacteria
ttcgtgttaaacaatacagaattcataaactcccatgctaaatacaatggaggagcaatttacctttcaaatacaaatactgaaatcaat

SEQ ID NO: 17528 - DNA, 57 bp, unidentified
  source 1..57: mol_type = unassigned DNA; note = methanogen bacteria
aaatttttcaataatctggcaagtgcaggaagtgcagtctatgcatatgataactca

SEQ ID NO: 17529 - DNA, 90 bp, unidentified
  source 1..90: mol_type = unassigned DNA; note = methanogen bacteria
agcatcaaaaattcaacatttgaaaacaatgcaaaccctatctacaccgttttcgataaggaatccgttttagaaaacaatgattatatt

SEQ ID NO: 17530 - DNA, 63 bp, unidentified
  source 1..63: mol_type = unassigned DNA; note = methanogen bacteria
gataaaggaggtcaggtcatgggctccacagatgccagattctatctcgaaaacgttaccttt

SEQ ID NO: 17531 - DNA, 213 bp, unidentified
  source 1..213: mol_type = unassigned DNA; note = methanogen bacteria
accactgccacctatgcaccggcaatatatcttgtaggttctaaagccaaaataatcgattcaaaattcattaatctaaaagccaatatgactgcaggtgcaatgagccttagggaaggcggcgaactctacatcaagaattgtgaattcataaacactacctcttccagaaatgcaggtgccatctatgtggatattactggttatcagggc

SEQ ID NO: 17532 - DNA, 33 bp, unidentified
  source 1..33: mol_type = unassigned DNA; note = methanogen bacteria
gacggcaatgtgacaataatcgattccaaattt

SEQ ID NO: 17533 - DNA, 48 bp, unidentified
  source 1..48: mol_type = unassigned DNA; note = methanogen bacteria
tggctaagcaattgcgaattcataaacaatcatgctaccttcaatgga

SEQ ID NO: 17534 - DNA, 105 bp, unidentified
  source 1..105: mol_type = unassigned DNA; note = methanogen bacteria
aagttcttcaataatgttgcaagcgaaggcaatgcaatttatgcatatgacagctcattaaacattaaaggttcaacattcaagaacaatacaaatgcaatttac

SEQ ID NO: 17535 - DNA, 189 bp, unidentified
  source 1..189: mol_type = unassigned DNA; note = methanogen bacteria
aacaataccattaatgttgatattcttccagccaaatttgatttgcgtgactgggaatgggtttcatcagtcaaaaatcaaggatggatgggtgcctgctggacattcggaatgtccggggcattggaatcagcattactaaaagctacaggaatttcatttaacatttccatgaataacatgaaaact

SEQ ID NO: 17536 - DNA, 87 bp, unidentified
  source 1..87: mol_type = unassigned DNA; note = methanogen bacteria
ttattgagctggcttggagcaattccatatgacaccgatacctatgatgagcttggaaaaattacaatgccgatcataaccgaccag

SEQ ID NO: 17537 - DNA, 33 bp, unidentified
  source 1..33: mol_type = unassigned DNA; note = methanogen bacteria
gacgatgatttgattgcagctgtcggaacatac

SEQ ID NO: 17538 - DNA, 69 bp, unidentified
  source 1..69: mol_type = unassigned DNA; note = methanogen bacteria
agttataccgtcgagatttacgtcaatgacgaattaaaattgactcaagaaggagtgtccccatatgtt

SEQ ID NO: 17539 - DNA, 78 bp, unidentified
  source 1..78: mol_type = unassigned DNA; note = methanogen bacteria
gacagttacataccaatcaaaaaaggagatgtgttcaaagcagcaataacctcaaattgggttccataccttctatta

SEQ ID NO: 17540 - DNA, 42 bp, unidentified
  source 1..42: mol_type = unassigned DNA; note = methanogen bacteria
tcatttgacggtaaaacctggaaagatgcttatgacttaggt

SEQ ID NO: 17541 - DNA, 108 bp, unidentified
  source 1..108: mol_type = unassigned DNA; note = methanogen bacteria
ctaaaagtatacacagttgccgatgacagcaaaatcatcaacaacaaggacatcactgttgattacggcagcgggtcctacttctctgttaaagttgtaaccgctgac

SEQ ID NO: 17542 - DNA, 36 bp, unidentified
  source 1..36: mol_type = unassigned DNA; note = methanogen bacteria
gtgggctacttcagaaataaagatgatattgataaa

SEQ ID NO: 17543 - DNA, 69 bp, unidentified
  source 1..69: mol_type = unassigned DNA; note = methanogen bacteria
ggatactttagaaatgaagatgataaggacaaagttcaagatttagataaattatttaatgaaaaatta

SEQ ID NO: 17544 - DNA, 72 bp, unidentified
  source 1..72: mol_type = unassigned DNA; note = methanogen bacteria
gtgggatactttagaaatgaagatgataaggacaaagttcaagatttagataagttatttaatgaaagacaa

SEQ ID NO: 17545 - DNA, 69 bp, unidentified
  source 1..69: mol_type = unassigned DNA; note = methanogen bacteria
ggatactttagaaatgaagatgataaggataaagttcaagatttagataaattatttaatgaaaaatta

SEQ ID NO: 17546 - DNA, 72 bp, unidentified
  source 1..72: mol_type = unassigned DNA; note = methanogen bacteria
gtcggatactttagaaatgaagatgataaggataaagttcaggatttagataaattatttgaaaataaatgg

SEQ ID NO: 17547 - DNA, 69 bp, unidentified
  source 1..69: mol_type = unassigned DNA; note = methanogen bacteria
ggatactttagaaatgaagatgataaggataaagttcaggatttagataaattatttgaaaataaacgg

SEQ ID NO: 17548 - DNA, 39 bp, unidentified
  source 1..39: mol_type = unassigned DNA; note = methanogen bacteria
actttcgattcaaatggtgttgatgttattgaaggttat

SEQ ID NO: 17549 - DNA, 48 bp, unidentified
  source 1..48: mol_type = unassigned DNA; note = methanogen bacteria
aggttcttcaataattttgcaggtgaaggtaatgcaatatatgcatat

SEQ ID NO: 17550 - DNA, 96 bp, unidentified
  source 1..96: mol_type = unassigned DNA; note = methanogen bacteria
tcattcaacattaaaggttcaacattcaaaaacaataaaaatgctgttttcagtgtctttactaaaaaatatactatagataaaaacactgaatta

SEQ ID NO: 17551 - DNA, 198 bp, unidentified
  source 1..198: mol_type = unassigned DNA; note = methanogen bacteria
accctggttaacaataccattaatgttgatgttattccagctaaatttgatttgcgtgactggggatgggtttcatccgttaaaaatcaaggatggatgggtgcctgttggacattcggaatgacaggttcattagaatcagtgttattaaaagctacaggaattccattcaacgtttctatgaataacatgaaaaca

SEQ ID NO: 17552 - DNA, 96 bp, unidentified
  source 1..96: mol_type = unassigned DNA; note = methanogen bacteria
ttactgagctggcttggaacagttccatatgatgtcgaaacttatgatgagctgggtaaaattacaatgcctattgtaaccgataacagcattcat

SEQ ID NO: 17553 - DNA, 57 bp, unidentified
  source 1..57: mol_type = unassigned DNA; note = methanogen bacteria
gtttcattcgacggaaaaacatggcaagatgcttatgacttaggttatattgcatgt

SEQ ID NO: 17554 - DNA, 141 bp, unidentified
  source 1..141: mol_type = unassigned DNA; note = methanogen bacteria
tgtggatttaattgccagtataatgttccaatattccatgaatcttatcagtatggtttgtatcgggataaatatatgtcattggatgaatacaaaaaacagtattttgattcttcaagaaaatatactgttggtttactt

SEQ ID NO: 17555 - DNA, 111 bp, unidentified
  source 1..111: mol_type = unassigned DNA; note = methanogen bacteria
ttaaatcaaacttattatgagaaaaagttttctcatttcaacgataaatataaattaatacatgctgaggacccggatttgaaagtatcaacaggagagagaataagtttt

SEQ ID NO: 17556 - DNA, 30 bp, unidentified
  source 1..30: mol_type = unassigned DNA; note = methanogen bacteria
ggagcttatggagggggatttgttgattat

SEQ ID NO: 17557 - DNA, 288 bp, unidentified
  source 1..288: mol_type = unassigned DNA; note = methanogen bacteria
attgatgaggttgaatcttctcaatcagatgagggaatccttgaagcagggaacaatgtaattaatgtcgttaatgttaaagattcttataatgaaactagcaaaacttgggatgaagacggctttaatttagcgggagctaccattaaagtatatgattcttctaataaattaatttcaactcataaaaccgattctaatggtaatgcaattatcaaaaatttaggatcttcagtatattatctggaggtttctttttcaacttatgaaccaattgtcactgaaaag

SEQ ID NO: 17558 - DNA, 285 bp, unidentified
  source 1..285: mol_type = unassigned DNA; note = methanogen bacteria
gatatattattattagttgattacaactcccacaatgaaaaggtcgatgtgttaatgaacatgtcaagaagggttgcttatattagtactacagattttgataagtctagggcatggctggtggaatatgcaaaatatatgcatattgacatgttttcagagtctgcatatagtgttttaactgctaagtatctaaaggaacttcttgcaaggtctcccgccaataaagattacaatgttgcatatacgtttagtgtattttcaaaacagattttaaataacact

SEQ ID NO: 17559 - DNA, 222 bp, unidentified
  source 1..222: mol_type = unassigned DNA; note = methanogen bacteria
attcatattgtaggggcctctgcagctaataatacttttgatactattgagaatacctatattggttcatatttccaagctagagacatcgctgaatccaatatcttacagagcaacatgaagaattatttgagttatgtcaaatatttgattgacccagaaaaatattctaatcctactgatgatgagaataatgctcctttaatgtctccagaatgtggt

SEQ ID NO: 17560 - DNA, 75 bp, unidentified
  source 1..75: mol_type = unassigned DNA; note = methanogen bacteria
gcaggttcagatccttctcaatctggaaatgctaaatccgcatcagattcatctagttcacaggatgcatcatcc

SEQ ID NO: 17561 - DNA, 78 bp, unidentified
  source 1..78: mol_type = unassigned DNA; note = methanogen bacteria
agtactggtggagctaagtcatatgaaatttcagaaaaatctgcagctaaatcttcaagttccactgaatctagcatg

SEQ ID NO: 17562 - DNA, 60 bp, unidentified
  source 1..60: mol_type = unassigned DNA; note = methanogen bacteria
aaatcctataataatacagcaacattctatggtggtgctttttaccaaatgtatgatgaa

SEQ ID NO: 17563 - DNA, 243 bp, unidentified
  source 1..243: mol_type = unassigned DNA; note = methanogen bacteria
ttctttaatatcacagttacctataatgaaaactctcattactcacaatccagcataactcaattgtttaataaaccggatgaaattttatctgtaagtattgatgatatctattatggtcaaaatttaatttcaaatattactttaaaatattctaccggtagtttaattaacggtactgttgaattacttattggaaatcattcttatagtgcacaatcaaattcactgtttataattgat

SEQ ID NO: 17564 - DNA, 231 bp, unidentified
  source 1..231: mol_type = unassigned DNA; note = methanogen bacteria
gatttcattattactgctcaatatggtgaatctcaagtttcaaataatattaaggtattgccaatccttataacgaataatcttgtcatgaaatataaggacgggtcaaaattccaggctactgctttagatggacaaggtaatccatatcctttaactaatgttcaatttaatattaatggtgtattatatacaagattaactaatgaaaatggtgtagctagtttaaat

SEQ ID NO: 17565 - DNA, 54 bp, unidentified
  source 1..54: mol_type = unassigned DNA; note = methanogen bacteria
ataacatcattttacaatggatatagtgctggaaacactgttgttattagttga

SEQ ID NO: 17566 - DNA, 129 bp, unidentified
  source 1..129: mol_type = unassigned DNA; note = methanogen bacteria
atgttgcctagtggatttgtatttgttagtgcaagttctggtaatgttactgctggtcagaaagttagttggattattgataggttaaatgttggtgatgtcagagagttctggattgttgctaggtct

SEQ ID NO: 17567 - DNA, 90 bp, unidentified
  source 1..90: mol_type = unassigned DNA; note = methanogen bacteria
tggactaatgttgtggaagttaattctactgagaatgtgactgttgtggattcaaatgttactattgatgttcgtcctttaactgttgtt

SEQ ID NO: 17568 - DNA, 174 bp, unidentified
  source 1..174: mol_type = unassigned DNA; note = methanogen bacteria
aatgctacaaacataactgttaaagatgtattgcctggtgaatttgcattcgttaatgcaactgctggttataccagaagtggtcaattagtcagctggactatcgacaagttagatgtcaatggtgttgaaacattctggataattgcaaaaacaatagctaccaatgcaacc

SEQ ID NO: 17569 - DNA, 45 bp, unidentified
  source 1..45: mol_type = unassigned DNA; note = methanogen bacteria
actggtaaattcgatgtaaatgtagttgaagtcaatgcaactctt

SEQ ID NO: 17570 - DNA, 135 bp, unidentified
  source 1..135: mol_type = unassigned DNA; note = methanogen bacteria
actgtctgtgattctttacctgatggatttgcatttgtaaacgctactggagtctataccagaaacggtcaagaaatcaaatggtatttcgacacattaaaaccgggtcaaattgtagagctttggattacagcc

SEQ ID NO: 17571 - DNA, 138 bp, unidentified
  source 1..138: mol_type = unassigned DNA; note = methanogen bacteria
acaattaaagatgttttacctgacggtttcacatttgttggagcttctgataactacaaacaatctggtcaagttgttgaatggtactttgataaattaactaaaggcgaatacaagttatggattgttgctaaatcc

SEQ ID NO: 17572 - DNA, 96 bp, unidentified
  source 1..96: mol_type = unassigned DNA; note = methanogen bacteria
gcatttgtaaatgctactggaaatcctaccagaaatggtcaggaaatcaaatggcatttcgacaaattaacaaaaggatacttcgaattggaaatt

SEQ ID NO: 17573 - DNA, 84 bp, unidentified
  source 1..84: mol_type = unassigned DNA; note = methanogen bacteria
acagttgttaaagaggtttccgctaaaaccattgatgttttaggtctcgttaactttacaattacaataactaacaatggtaaa

SEQ ID NO: 17574 - DNA, 186 bp, unidentified
  source 1..186: mol_type = unassigned DNA; note = methanogen bacteria
gctactaatgtatctattgctgatattatggacttgtctgtattcaatattacaaatcacaatggaacctacgtacaaaaaggaaacgaacttgtatggaatattggttctttaaacgttggcgaaacttacaaagtatggattgaagcaaaagctttaacacacggtactttcaccaatgtagtc

SEQ ID NO: 17575 - DNA, 114 bp, unidentified
  source 1..114: mol_type = unassigned DNA; note = methanogen bacteria
tcagataatgttagtgtaaaagtgattcctgtagttaatttaactgttgtaaaaactgttgatgttaaaaaaattgctttaaatggtttaattacctttacaattaatgtaact

SEQ ID NO: 17576 - DNA, 183 bp, unidentified
  source 1..183: mol_type = unassigned DNA; note = methanogen bacteria
gcaactaacgtggatattgatgacgtgcttccaaatgaattagaatttatagatgctactgagggttatatttatggtcatcaattaacagtttcattaatcgaacctggtaaatcttttgtatttaatattactgcaaggggtttaacagcgggtaactggacaaatattgttaatgtagat

SEQ ID NO: 17577 - DNA, 36 bp, unidentified
  source 1..36: mol_type = unassigned DNA; note = methanogen bacteria
actgttgttaaaactgctgatgagattattgttgct

SEQ ID NO: 17578 - DNA, 246 bp, unidentified
  source 1..246: mol_type = unassigned DNA; note = methanogen bacteria
aactatacaattagcattactaatccgtctgatttcaatgcaacaaatatttgggtatttgattatttgatggatggttttgaatttgtaaatgcaactgaaggttattatcttacacaaggcattgtatcatggaatatccataatatcactaaaggtgaaactttagaactttggattgttgtcaaaactacaaaagtaggtaatcttaccaataatgtaaatgttatttgtgatgaatccgat

SEQ ID NO: 17579 - DNA, 57 bp, unidentified
  source 1..57: mol_type = unassigned DNA; note = methanogen bacteria
gctaatgtgaacgttactgaaattaatggtgaagttgtctttactgttaatgtaaca

SEQ ID NO: 17580 - DNA, 177 bp, unidentified
  source 1..177: mol_type = unassigned DNA; note = methanogen bacteria
ttggtaaatgtaactgatataattcctgtcggatttgagtttgttgaatctagtgataaaggttataacagtactactggtcgtttaacaattccatttattaaagctggtgagtcttatgtatttactattactcttaaggctgtgattaatggtactttgaccaatgtggttaat

SEQ ID NO: 17581 - DNA, 213 bp, unidentified
  source 1..213: mol_type = unassigned DNA; note = methanogen bacteria
gttgacctcaacgacactactattggtgatgttgttactttcacaattactgtgattaataatggtccttctaaggctactaacattaaggttgttgatagtcttgatcttaatggattccgccatttaactggtgatttgaatacaactattgattcattggcaagcggtgaaaattgtacaattgttattcaagctgcaactactgctaat

SEQ ID NO: 17582 - DNA, 72 bp, unidentified
  source 1..72: mol_type = unassigned DNA; note = methanogen bacteria
aatagggttactgtaaaatgtgatcaaaatgatacaataaaatctgcaaacgctagtgtctatgtttatagc

SEQ ID NO: 17583 - DNA, 207 bp, unidentified
  source 1..207: mol_type = unassigned DNA; note = methanogen bacteria
gatgttattaactttacaatcactgttaaaaatcatggaatgtcaaatgctactaatgttcatattattgatgaattaaacagtgcatttgagtttgttaatgctagtgcaggttataaattgtccggtaagactgttacttggaatatttccagaattgctaatgagactacatactctgtatggattgttgtccgtgtattgact

SEQ ID NO: 17584 - DNA, 240 bp, unidentified
  source 1..240: mol_type = unassigned DNA; note = methanogen bacteria
ttaactgttgtgaaagttgttgagggtgatgatgatgctacaattggtgatgttattacttatactattattgtaaccaataatggtccgtctaatgctaccaacattaaggttatagatattcctgataaaggtttaaaaatacttggtgataaatatgagactgtcattggatttttggaaagcggtaattctactaacattactattcaggtcagaacaactgctaaaggtacttac

SEQ ID NO: 17585 - DNA, 147 bp, unidentified
  source 1..147: mol_type = unassigned DNA; note = methanogen bacteria
actaatgttcacattattgatgaattaaacagtgcatttgagtttgttgacgctagtgcaggctacacaagaaacggtcaaaccgttacttggaatattcctaaattggctaatgagacttcatactctgtatggattgtagttcgc

SEQ ID NO: 17586 - DNA, 123 bp, unidentified
  source 1..123: mol_type = unassigned DNA; note = methanogen bacteria
actgttaaaaatactacttcaactgttaatgttgctcctgtggttaatttgactgttgttaagtctgctgatgtgtctgttgttgatgttaatggtgaggttgtctttactgttaatgttact

SEQ ID NO: 17587 - DNA, 195 bp, unidentified
  source 1..195: mol_type = unassigned DNA; note = methanogen bacteria
cagtatactgttgttattggaaattatagtgttcttgtgactgttttgaatggtgttggtgcatttgatgttggtgttttagatgttggaagctatactgttcgtgtgatatttgctggaaacgataattataatggaaatgttaatgagagcacttttgaagttactcagtctggaactaagttcaatattgtt

SEQ ID NO: 17588 - DNA, 51 bp, unidentified
  source 1..51: mol_type = unassigned DNA; note = methanogen bacteria
gatgtcgaatacattaatgtaaattatgtgaataatgtcacaagcattccg

SEQ ID NO: 17589 - DNA, 141 bp, unidentified
  source 1..141: mol_type = unassigned DNA; note = methanogen bacteria
actgttgctaaggctaatgttgctttaagtgttgaggttttggatgtggtttattctgctgatgttgatggtcagtatagtgtcgttattggcgataatattattccggtgactgttttgaatggtgttggtgcttttaat

SEQ ID NO: 17590 - DNA, 159 bp, unidentified
  source 1..159: mol_type = unassigned DNA; note = methanogen bacteria
agtgtgattaaggttttaaatgttggtgaatcatttaccatgcctgttttggatgctggatcttatgtggtttatgctaattattctggtgattctaattatgctcctgcaagggacagcttaacaattactgtcaatagagcggtaaataatgttctt

SEQ ID NO: 17591 - DNA, 39 bp, unidentified
  source 1..39: mol_type = unassigned DNA; note = methanogen bacteria
actattactgttgtggctgatgtggatggtgaatattat

SEQ ID NO: 17592 - DNA, 204 bp, unidentified
  source 1..204: mol_type = unassigned DNA; note = methanogen bacteria
gttgtgaatgtttcaaatggtatgggagtaagtgtagtcgctttggatgctggaagttacttcgctgatgttggttatgttaatgtgaattatgtgaataatgtcataagtattccatttagtgtagttaaggccggtgttgctttaagtgttgaggttttggatgtggtttattctgctgatgttgagggtaatgtttttgcc

SEQ ID NO: 17593 - DNA, 57 bp, unidentified
  source 1..57: mol_type = unassigned DNA; note = methanogen bacteria
ttggatgtggtttattctgctgatgttgggggtaatgtatttgccagtgttgatggt

SEQ ID NO: 17594 - DNA, 30 bp, unidentified
  source 1..30: mol_type = unassigned DNA; note = methanogen bacteria
ttaaatgttgatgaatcatttgttttatct

SEQ ID NO: 17595 - DNA, 90 bp, unidentified
  source 1..90: mol_type = unassigned DNA; note = methanogen bacteria
tctggtgattctaattatgctcctgcaagggacagcttaacaatcacagtcaataaggccattaataatgttcttgtattcggtcaggat

SEQ ID NO: 17596 - DNA, 114 bp, unidentified
  source 1..114: mol_type = unassigned DNA; note = methanogen bacteria
cttattactgttgtggctgatgtggatggtgaatattatgttgatgttggcggtaaaataattgttgtgaatgtttcaaatggtatgggagtgaatacaatagctctggatgct

SEQ ID NO: 17597 - DNA, 210 bp, unidentified
  source 1..210: mol_type = unassigned DNA; note = methanogen bacteria
ggttcctatgaagaggcaattccagtagaaaatgctagtatcacattaataaaagaaaatgatgttactaaaatttacacaacaactactgataaaaaaggcacatattcattgaaagatataagttcaggaaactacgaattaagcatcaattacaaaacttattctacttacaaaaaaaatataacaattaatagtgctttaactgtt

SEQ ID NO: 17598 - DNA, 63 bp, unidentified
  source 1..63: mol_type = unassigned DNA; note = methanogen bacteria
cagactgttcctattgtggatggtaaggctgttgtggatatttctgatttagaacctggtaat

SEQ ID NO: 17599 - DNA, 105 bp, unidentified
  source 1..105: mol_type = unassigned DNA; note = methanogen bacteria
actgtaagtgtctcatgcaatgagaatgatacaattattactaccaatgctaccgtagatgttcttcctgtaactgcaaacattacaaaagaagctaatgttact

SEQ ID NO: 17600 - DNA, 201 bp, unidentified
  source 1..201: mol_type = unassigned DNA; note = methanogen bacteria
gttaactttacaattagtgtaaactacacttctgatgtaaatgcaaccaatgtaacaattaaagatgttttacctgacggtttcacatttgttggagcttctggtaactacaaacaaactggtcaagttgttgaatggtactttgataaattaactaacggtgaatacaagttatggattgttgctaaatccaatgctgtt

SEQ ID NO: 17601 - DNA, 42 bp, unidentified
  source 1..42: mol_type = unassigned DNA; note = methanogen bacteria
tcaactatcctaggcgataatgctactgtagatgttatccca

SEQ ID NO: 17602 - DNA, 78 bp, unidentified
  source 1..78: mol_type = unassigned DNA; note = methanogen bacteria
gcaagtatcactaaaaaggctaatattactttaataggtaacaatacattagttaaatttacaattggtgtaaactac

SEQ ID NO: 17603 - DNA, 150 bp, unidentified
  source 1..150: mol_type = unassigned DNA; note = methanogen bacteria
gctactaatgtaactatctgtgatgtattgcctgatggatttgcatttgtaaatgctactggaaatcctaccagaaatggtcaggaaatcaaatggcatttcgacacattaacaaaaggatacttcgaattggaaattgtcgcaaggtct

SEQ ID NO: 17604 - DNA, 111 bp, unidentified
  source 1..111: mol_type = unassigned DNA; note = methanogen bacteria
attaatgctcaagcaaaaattgatgcattcggtaatagacttcagatgtctggttctaaattagactcatttaaatctgatttaagcagtttacaaagtgaattcagaaaa

SEQ ID NO: 17605 - DNA, 129 bp, unidentified
  source 1..129: mol_type = unassigned DNA; note = methanogen bacteria
agtgatgacatgactgaattgtcaagaactgttgccattgcatcatctgcatttgtgagtgaaggaagaacacaagaagatgctattcttgcagtgtccgatgcattagatggtcaaatgaaaaggatg

SEQ ID NO: 17606 - DNA, 69 bp, unidentified
  source 1..69: mol_type = unassigned DNA; note = methanogen bacteria
actgatggagtaatgcgtctttggaatgcatttattaatcatcctgatgttcaaggtgccttgtctgca

SEQ ID NO: 17607 - DNA, 81 bp, unidentified
  source 1..81: mol_type = unassigned DNA; note = methanogen bacteria
ggttgtagtccaggtattgttcctgctttggaaaaagtacttgaagtatttggtgttgtttggaatgctattgtatcatta

SEQ ID NO: 17608 - DNA, 42 bp, unidentified
  source 1..42: mol_type = unassigned DNA; note = methanogen bacteria
ttcaaaaagatggcagaggatgtattcagtcaatgtcattac

SEQ ID NO: 17609 - DNA, 54 bp, unidentified
  source 1..54: mol_type = unassigned DNA; note = methanogen bacteria
tatgactcaaataagtatggtaactggatgactgcattccaacatggggacatg

SEQ ID NO: 17610 - DNA, 51 bp, unidentified
  source 1..51: mol_type = unassigned DNA; note = methanogen bacteria
catgcatgtggtttacctgcctacaaagttcatggacattggaataaattc

SEQ ID NO: 17611 - DNA, 222 bp, unidentified
  source 1..222: mol_type = unassigned DNA; note = methanogen bacteria
actgttattaactctactttcattaataataatgttaatggaaatggaggtgctattgcatttgtaaatactaaagatggaattattataaattccactttcatcgataatactgcagtaggaagtggtggtgcagtttatattaatcgtggaggttacataattgattcagaattttataataatcaggcaagtaatggtggtgctgttagattgaattct

SEQ ID NO: 17612 - DNA, 231 bp, unidentified
  source 1..231: mol_type = unassigned DNA; note = methanogen bacteria
actataaataattcaatatttattaataacacagcaacaaatgaaggaggagcaatatactcataccgcacagccaatatcacagattcaacattcacatcaaataatgcaagctcccaaggaggagcaataacctgctctattgaaacatcatctaatccaacacatataaataattcaacatttaatggaaataccgcatctgcttacccagcaattagtggcagatac

SEQ ID NO: 17613 - DNA, 45 bp, unidentified
  source 1..45: mol_type = unassigned DNA; note = methanogen bacteria
tatattagcaacaccgcaacaatgtatggtggagcaaacttcttc

SEQ ID NO: 17614 - DNA, 45 bp, unidentified
  source 1..45: mol_type = unassigned DNA; note = methanogen bacteria
acctataccaacaacaccgcaaggaatggtggagcaaactacttc

SEQ ID NO: 17615 - DNA, 60 bp, unidentified
  source 1..60: mol_type = unassigned DNA; note = methanogen bacteria
ggaacttacaactccaacaacgcaaaatatggtggagcaaactatttctataataaggtt

SEQ ID NO: 17616 - DNA, 33 bp, unidentified
  source 1..33: mol_type = unassigned DNA; note = methanogen bacteria
aacgccgcaataaatggtggagcaaactacttc

SEQ ID NO: 17617 - DNA, 108 bp, unidentified
  source 1..108: mol_type = unassigned DNA; note = methanogen bacteria
ttcattaacaatactgcaacaaagggtggagcaatctatgttgaaacagaatcaactaataataatttttcatccctgttctatgacaacaaggcaatacagagtgga

SEQ ID NO: 17618 - DNA, 108 bp, unidentified
  source 1..108: mol_type = unassigned DNA; note = methanogen bacteria
aatttcataggcaatactgcaggctatggaggaggaatctttttctccagaaaaacaaactctaataggttcaacggtgactttatagacaacactgccttatcatgc

SEQ ID NO: 17619 - DNA, 48 bp, unidentified
  source 1..48: mol_type = unassigned DNA; note = methanogen bacteria
gctttaggccaacttaatgagacagttggaaacggtggggcaataacc

SEQ ID NO: 17620 - DNA, 39 bp, unidentified
  source 1..39: mol_type = unassigned DNA; note = methanogen bacteria
acagacaacaatgcatccctgtacggtggagcggttaac

SEQ ID NO: 17621 - DNA, 141 bp, unidentified
  source 1..141: mol_type = unassigned DNA; note = methanogen bacteria
tttgaaacattcgacaatgtagtgttcaatggcgagttcatcgccaactccgcagtcaaaggcggtgcaatcgccactgtagatggaatcattagggatgtttcattcaaggacaatcatgctgaagacggtggagcagtt

SEQ ID NO: 17622 - DNA, 90 bp, unidentified
  source 1..90: mol_type = unassigned DNA; note = methanogen bacteria
aactgtaatttcaccgccaaccatgcaaataacgagggtggtgcagtttacttcgctgataatggtgaagtggcaaattgtaatttcaca

SEQ ID NO: 17623 - DNA, 66 bp, unidentified
  source 1..66: mol_type = unassigned DNA; note = methanogen bacteria
tattcaggaaatgtgacagattccattttcacagccaacactgcaggatttggtggtgctgtttac

SEQ ID NO: 17624 - DNA, 144 bp, unidentified
  source 1..144: mol_type = unassigned DNA; note = methanogen bacteria
gactatgatggtactgtggaaaactgtaatttcacagccaacactgcagaatatggtggtgctgtttactttgataatgattctgctaatataatgaactgtaatttcattaacaacaatgcttcttcttatggcggtgctgtc

SEQ ID NO: 17625 - DNA, 129 bp, unidentified
  source 1..129: mol_type = unassigned DNA; note = methanogen bacteria
ttcaccggcaacactgctgattcttcttctggtggtgctgtcgtaatggattcaggtaatgtgataaattctatcttcacagccaacaaggcagccagaactggtggagcaatatatgttggagcaaaa

SEQ ID NO: 17626 - DNA, 39 bp, unidentified
  source 1..39: mol_type = unassigned DNA; note = methanogen bacteria
tcaggccaattctataataatcaagcaggacaaagcggt

SEQ ID NO: 17627 - DNA, 123 bp, unidentified
  source 1..123: mol_type = unassigned DNA; note = methanogen bacteria
aacaatactttcgatggcatcttcaaggacaacaccgcaggctacggtgcaggaatgtttttctacaaggatgcaaacggcaataatattaaaggcgactttataaacaacactgcccaatcc

SEQ ID NO: 17628 - DNA, 30 bp, unidentified
  source 1..30: mol_type = unassigned DNA; note = methanogen bacteria
ttcattaacaacaccgcttccttgaacggt

SEQ ID NO: 17629 - DNA, 45 bp, unidentified
  source 1..45: mol_type = unassigned DNA; note = methanogen bacteria
agcagatttaataagaatgatgctgtgagtggaggagcaatccat

SEQ ID NO: 17630 - DNA, 261 bp, unidentified
  source 1..261: mol_type = unassigned DNA; note = methanogen bacteria
ggtgaagcttttggatggtggcatgatgtaggttcaatgattgatgctattacatcaaatataggtagattatggaatgcatttataaatcatcctgatgttcaggcggctatcagtattatttcaaaggctctaggtgacttaataaattgggttggtaatgctggtcgtgaagttttaaaattctttggaatttcaactggttctaactgggatgttgtaagaagtattattgatggaattggtgctgcatggaacggt

SEQ ID NO: 17631 - DNA, 39 bp, unidentified
  source 1..39: mol_type = unassigned DNA; note = methanogen bacteria
ggtcaaggtatttataatgctttaaaacctatagtgtgt

SEQ ID NO: 17632 - DNA, 84 bp, unidentified
  source 1..84: mol_type = unassigned DNA; note = methanogen bacteria
ggttgcagcccaggtattgttcctgctttacagaaagttcaagaagtattctctactgtttggaatgcaattgcaggatttatt

SEQ ID NO: 17633 - DNA, 33 bp, unidentified
  source 1..33: mol_type = unassigned DNA; note = methanogen bacteria
aatgaagatgctttgaaaactagtattggtgtt

SEQ ID NO: 17634 - DNA, 132 bp, unidentified
  source 1..132: mol_type = unassigned DNA; note = methanogen bacteria
gcttatgatgatattccattcccaaatattaagttaattaaagacactagtaatgaatgggatatgaaaggacctcttgtaggaagatatcaaaccaataaagggtttaaagttaaagatttccttaatggt

SEQ ID NO: 17635 - DNA, 30 bp, unidentified
  source 1..30: mol_type = unassigned DNA; note = methanogen bacteria
gcagaagatgtatttggacaaacacaatat

SEQ ID NO: 17636 - DNA, 144 bp, unidentified
  source 1..144: mol_type = unassigned DNA; note = methanogen bacteria
gatgatgaccaccatggtaactggttaaatgcgtttaatgctggaagtatgaattgtaaacatggtgccgaagcattaattgcattagcatctgttttcggatttagcggagaaatggttcatggtcattggaatcaattcggc

SEQ ID NO: 17637 - DNA, 81 bp, unidentified
  source 1..81: mol_type = unassigned DNA; note = methanogen bacteria
ccaaaaagtttaggtttcaaagatctcattgaagttctcaaagatttattaagtgatgatccaaaaccaaacgataacagc

SEQ ID NO: 17638 - DNA, 234 bp, unidentified
  source 1..234: mol_type = unassigned DNA; note = methanogen bacteria
atggtacttatgggtatctttgtgaataatactgctgctaagaatggtggtgcggtttatttagataatattaaacaaggtgaatgtgataatactacatttagtaattctcgctttgaaaataactctgctggtgttaatggtggtgctattgattggcatgaaggtgctacaaatggtgcaattgttgattctgaatttgtgaataatgttgctggtgctaatggtggtggt

SEQ ID NO: 17639 - DNA, 66 bp, unidentified
  source 1..66: mol_type = unassigned DNA; note = methanogen bacteria
ggtttggttgatgattgtaactttataaataactctgctgtgaaaaatggtggtgctgtttattta

SEQ ID NO: 17640 - DNA, 114 bp, unidentified
  source 1..114: mol_type = unassigned DNA; note = methanogen bacteria
ataaatgctcaagcaaacatcgatgcttttggtaaaagaattggtatgtccaagtctgaagttgaaagcttcaaaaatagtatgggcgatttacaaagtgagttcagaaaagta

SEQ ID NO: 17641 - DNA, 180 bp, unidentified
  source 1..180: mol_type = unassigned DNA; note = methanogen bacteria
gatgctgttggtgcttcagcactagagatgggagtaaaacttggaataagtaaagacaagatggttgatttatcccgaactacagctattatgtcctctgctttcgttaaagaaggccgtacccaggaagacgctattcttgcagtatctgatgcaatggatggtcaattaaaaagatta

SEQ ID NO: 17642 - DNA, 159 bp, unidentified
  source 1..159: mol_type = unassigned DNA; note = methanogen bacteria
caagccggtgtaatgcgtttatggagtgcttttattcatcatccagatgttgagaatactattaaaactattggtgctgtttggcaatggttagttgaagtcactaagccagttgttgattggttacatggaatttgggatgaaatgttccctgcttca

SEQ ID NO: 17643 - DNA, 72 bp, unidentified
  source 1..72: mol_type = unassigned DNA; note = methanogen bacteria
gttttcatgactgtttggaatgctattgtatccttgttaagtggaatcattcctactgtacttagtgctatt

SEQ ID NO: 17644 - DNA, 45 bp, unidentified
  source 1..45: mol_type = unassigned DNA; note = methanogen bacteria
aaaatcattggcaaatacgctacaagcattgggtttaaagttggt

SEQ ID NO: 17645 - DNA, 45 bp, unidentified
  source 1..45: mol_type = unassigned DNA; note = methanogen bacteria
tttaaacagattgctgaagatgtgttcagccaatgccattatgct

SEQ ID NO: 17646 - DNA, 54 bp, unidentified
  source 1..54: mol_type = unassigned DNA; note = methanogen bacteria
tttgacagtaacaaatggggtagttggatgaatgctttccagcatggagatatg

SEQ ID NO: 17647 - DNA, 63 bp, unidentified
  source 1..63: mol_type = unassigned DNA; note = methanogen bacteria
gatgcaattattgcgatggctcatagtatgggcttacctgcaagtaaagttcatggtcattgg

SEQ ID NO: 17648 - DNA, 255 bp, unidentified
  source 1..255: mol_type = unassigned DNA; note = methanogen bacteria
tttggaaattattctgtaagtaattttactgtttacaaatatgaatcagagattacaatacatgacatgaaggatgttgtctacggcgaaaatgttttaataggctttgaagttaaaaacccaaccattgtgcatgtaaaaataactgattcagaaggcaatatcatttatgatgaggatgaaactaattacagcatcctgttcactaatttggatgttggagattatgttataaacatcactaatatggaaaca

SEQ ID NO: 17649 - DNA, 51 bp, unidentified
  source 1..51: mol_type = unassigned DNA; note = methanogen bacteria
gatgaaaaccatactgctgtaacagaaactgctacaatcactgtcaataag

SEQ ID NO: 17650 - DNA, 45 bp, unidentified
  source 1..45: mol_type = unassigned DNA; note = methanogen bacteria
tccactttaacattggatgatgttgttttagattatggtgaaact

SEQ ID NO: 17651 - DNA, 69 bp, unidentified
  source 1..69: mol_type = unassigned DNA; note = methanogen bacteria
acaggtattactgctaagattgatggtgttaatgtaactgtcaatggttatactattccgatttcaggt

SEQ ID NO: 17652 - DNA, 246 bp, unidentified
  source 1..246: mol_type = unassigned DNA; note = methanogen bacteria
gatgataatcacaatcctgtaaatgtaacatctaaaatcacagtaaataaggtagaatctacattgactgttggtgatattgtatttgattatgatggtgagggttctggtgatgtttctttcaccggtgcaagcaaagttactgctaacgttatcaaccaacctaaagcggttgttagtgtaaatgataataagattactgtttctggtttggctgcaggaacttatactttgaatgttactact

SEQ ID NO: 17653 - DNA, 51 bp, unidentified
  source 1..51: mol_type = unassigned DNA; note = methanogen bacteria
gatgaaaaccatactgctgtaacagaaaccgctggaatcacagtcaataaa

SEQ ID NO: 17654 - DNA, 81 bp, unidentified
  source 1..81: mol_type = unassigned DNA; note = methanogen bacteria
tccactttaacattggatgatgttgaattggattatggtgactccaagaatgtcactgtagcaactgaaggagcaacaggt

SEQ ID NO: 17655 - DNA, 168 bp, unidentified
  source 1..168: mol_type = unassigned DNA; note = methanogen bacteria
gatattgtatttgattatgatggtgagggttctggtgatgtttctttcactggtgcaagtgaagtccttgctaatgttgtcaatcagccttctgctgttattagtgtaaatgataataagattactgtttctggtttgggcgctggaacttatactttgaatgttact

SEQ ID NO: 17656 - DNA, 51 bp, unidentified
  source 1..51: mol_type = unassigned DNA; note = methanogen bacteria
gatgaaaaccatactgctgtaacagaaactgctacaatcacagtcaataaa

SEQ ID NO: 17657 - DNA, 123 bp, unidentified
  source 1..123: mol_type = unassigned DNA; note = methanogen bacteria
tcaaccttaacattggatgatgttgaattggattatggtgactccaagaatgtcactgtagcaactgaaggagcaacaggcattactgctaaaattgatggagttaatgtaactgtcaatggt

SEQ ID NO: 17658 - DNA, 117 bp, unidentified
  source 1..117: mol_type = unassigned DNA; note = methanogen bacteria
gtcgttactgctgaagatacatcagatattaccaattatatttatggacttattaaagtgactggagaatctggagaatctggtgaatccggaggtgttgattatagtgctttggca

SEQ ID NO: 17659 - DNA, 42 bp, unidentified
  source 1..42: mol_type = unassigned DNA; note = methanogen bacteria
atcggaggcgatgaatccggtggatctgactggataactgat

SEQ ID NO: 17660 - DNA, 36 bp, unidentified
  source 1..36: mol_type = unassigned DNA; note = methanogen bacteria
tccagtggtggttccggtgatgatgatttgactggt

SEQ ID NO: 17661 - DNA, 225 bp, unidentified
  source 1..225: mol_type = unassigned DNA; note = methanogen bacteria
gataactataacagcaaaagcacatcagtaagctttgaaattctcgaacacgtcaaaaatgatacagaaattgaagcaaatccaagcgtaaacggcactacagttacaatagttacaactgtcgacgaagctgctacaggcaatgtcactattgatgtagtgggtcaaacattccttgttcctgtttcaaaaggaaaagcggttttcacttatgatttcttccct

SEQ ID NO: 17662 - DNA, 63 bp, unidentified
  source 1..63: mol_type = unassigned DNA; note = methanogen bacteria
gacaacttcaatgaagcatccacaaccacttcatttacagtacttgaaacatcccctgaaatg

SEQ ID NO: 17663 - DNA, 30 bp, unidentified
  source 1..30: mol_type = unassigned DNA; note = methanogen bacteria
aatgtgacaattacagcaacagttaataaa

SEQ ID NO: 17664 - DNA, 51 bp, unidentified
  source 1..51: mol_type = unassigned DNA; note = methanogen bacteria
ggtcaagccgtatatcttcctgttaacaacggtcaagcggtttatgatgtc

SEQ ID NO: 17665 - DNA, 51 bp, unidentified
  source 1..51: mol_type = unassigned DNA; note = methanogen bacteria
aacactgttgtggccgtaaaagttgttgacggtgttgcagtatgggaaaca

SEQ ID NO: 17666 - DNA, 39 bp, unidentified
  source 1..39: mol_type = unassigned DNA; note = methanogen bacteria
gaaatgcttcttgaaaacactccaatcgatgcaatcgtc

SEQ ID NO: 17667 - DNA, 42 bp, unidentified
  source 1..42: mol_type = unassigned DNA; note = methanogen bacteria
gtgaccataacagtaaatgtaaatgaacgtgcaacaggattt

SEQ ID NO: 17668 - DNA, 63 bp, unidentified
  source 1..63: mol_type = unassigned DNA; note = methanogen bacteria
gaaaactacgttttatacatggttctttcagatggaaaagttgttcttgaagacgtattgtct

SEQ ID NO: 17669 - DNA, 36 bp, unidentified
  source 1..36: mol_type = unassigned DNA; note = methanogen bacteria
attcctgttgaagacggaaaagctgttttcacatat

SEQ ID NO: 17670 - DNA, 33 bp, unidentified
  source 1..33: mol_type = unassigned DNA; note = methanogen bacteria
ggacaggcagtatatcttgctgttaacaacggt

SEQ ID NO: 17671 - DNA, 48 bp, unidentified
  source 1..48: mol_type = unassigned DNA; note = methanogen bacteria
aataaggtagtggctgtaaaagttgttgacggcgttgctgtatgggaa

SEQ ID NO: 17672 - DNA, 36 bp, unidentified
  source 1..36: mol_type = unassigned DNA; note = methanogen bacteria
gatgagggtaaggttgttcttgaagacgtattgact

SEQ ID NO: 17673 - DNA, 39 bp, unidentified
  source 1..39: mol_type = unassigned DNA; note = methanogen bacteria
aaggacacaccaataagtgcagtcactaatgtcaataag

SEQ ID NO: 17674 - DNA, 33 bp, unidentified
  source 1..33: mol_type = unassigned DNA; note = methanogen bacteria
tccacaacagcttcattcagcgtatttgaaaca

SEQ ID NO: 17675 - DNA, 33 bp, unidentified
  source 1..33: mol_type = unassigned DNA; note = methanogen bacteria
gatgagcttaaaaacaccaatattgatgttaat

SEQ ID NO: 17676 - DNA, 45 bp, unidentified
  source 1..45: mol_type = unassigned DNA; note = methanogen bacteria
gcaggtcaggtagtataccttgctgtaaacaacggtcaggtagta

SEQ ID NO: 17677 - DNA, 48 bp, unidentified
  source 1..48: mol_type = unassigned DNA; note = methanogen bacteria
gtagcaggttatgatgtaaccattagtgctaaaatcaatgaaaatgca

SEQ ID NO: 17678 - DNA, 60 bp, unidentified
  source 1..60: mol_type = unassigned DNA; note = methanogen bacteria
gcattggatggcaaggttgtagttataagggctgttgacggtgttgccgtatgggaaaca

SEQ ID NO: 17679 - DNA, 207 bp, unidentified
  source 1..207: mol_type = unassigned DNA; note = methanogen bacteria
gtgaccaaaaaggacactccaattgacattagtgttgacagtattgaaaataatgtgacaataactgtcaatgttgattctgacgccacaggtcttgttgaaataagcattggtgatgaagcaatttatcttcctgtaaacaacggaaaagtcacaggtgaattcatgatatctggcggcgattatgaagtcactgcaacttacctg

SEQ ID NO: 17680 - DNA, 132 bp, unidentified
  source 1..132: mol_type = unassigned DNA; note = methanogen bacteria
gcaaacacaacatccgcagaattcacagtcaaagatcatgaaaagataaacactaccatttcagcagaggctgctgttgatgaaagcgcagtaacaattaccatcaatgtaaatgatggcgctaccggcttt

SEQ ID NO: 17681 - DNA, 57 bp, unidentified
  source 1..57: mol_type = unassigned DNA; note = methanogen bacteria
gcaggcaagaagtattatgttcctgtagatggtggaaaggccacatttgtagatgac

SEQ ID NO: 17682 - DNA, 78 bp, unidentified
  source 1..78: mol_type = unassigned DNA; note = methanogen bacteria
ccggctaaggcttcagcctcatttaccgtaatcgaacataacgaaacaaaaatgaacactccaatcagtgttgaagtt

SEQ ID NO: 17683 - DNA, 30 bp, unidentified
  source 1..30: mol_type = unassigned DNA; note = methanogen bacteria
acagtcaatgttaatgaaaatgccacaggc

SEQ ID NO: 17684 - DNA, 93 bp, unidentified
  source 1..93: mol_type = unassigned DNA; note = methanogen bacteria
attgatggtgaggccatctatcttcctgtaaacaatggaatggcttcatgtggatttgtattgcctggcggcgattatatggttacagccact

SEQ ID NO: 17685 - DNA, 102 bp, unidentified
  source 1..102: mol_type = unassigned DNA; note = methanogen bacteria
aacgttgatggcgagtcagtatatcttcctttaagcaatggtgttgcagcatgtgggattgtattgcctgcaggaatgcatgaggtcagtgcaacctatctt

SEQ ID NO: 17686 - DNA, 129 bp, unidentified
  source 1..129: mol_type = unassigned DNA; note = methanogen bacteria
acaatatccactaaattcactgtcaagggccatgagaaggccaacactacaattgcagccgctgtcagtgtggacaacaatacagtcacactcacagtcactgtaaataatgaggctaccggttttgtt

SEQ ID NO: 17687 - DNA, 42 bp, unidentified
  source 1..42: mol_type = unassigned DNA; note = methanogen bacteria
ggcaagaagtattatgttccagttgaaaaaggcaaagccaca

SEQ ID NO: 17688 - DNA, 99 bp, unidentified
  source 1..99: mol_type = unassigned DNA; note = methanogen bacteria
gtcgaattcacagtaaaagaccatgaaaaagttgatccttcaatcaaatctcaggccgctgtggacggcaataccgtaacaattacagtcaatgtaaat

SEQ ID NO: 17689 - DNA, 90 bp, unidentified
  source 1..90: mol_type = unassigned DNA; note = methanogen bacteria
ggcaagaaatactatgttcctgttgatgttggcaaggcagtattcagcaacgactataatgcaggaacttacagcgcagatataacatac

SEQ ID NO: 17690 - DNA, 39 bp, unidentified
  source 1..39: mol_type = unassigned DNA; note = methanogen bacteria
aacacagccgaggattccacttcatttactgtaatcgag

SEQ ID NO: 17691 - DNA, 45 bp, unidentified
  source 1..45: mol_type = unassigned DNA; note = methanogen bacteria
accaaaaaggacactccaatagatattgctgttgacagtgttgag

SEQ ID NO: 17692 - DNA, 60 bp, unidentified
  source 1..60: mol_type = unassigned DNA; note = methanogen bacteria
ggcgatgaaagcatttaccttcctgtaaataatggtgtggctataggcgaattcctgctt

SEQ ID NO: 17693 - DNA, 60 bp, unidentified
  source 1..60: mol_type = unassigned DNA; note = methanogen bacteria
acatccgctgaattcacagtaaaagaccatgaaaaggttgattcttcaatcaaatctcag

SEQ ID NO: 17694 - DNA, 42 bp, unidentified
  source 1..42: mol_type = unassigned DNA; note = methanogen bacteria
gtggacggcaatacagtaacaattgcagtcaatgtaaatgag

SEQ ID NO: 17695 - DNA, 57 bp, unidentified
  source 1..57: mol_type = unassigned DNA; note = methanogen bacteria
ggcaagaaatactatgttcctgtcgatgcaggcaatgccaaactggtaattgactat

SEQ ID NO: 17696 - DNA, 39 bp, unidentified
  source 1..39: mol_type = unassigned DNA; note = methanogen bacteria
gatgacaactacaacacagccaaaacttccacttcattt

SEQ ID NO: 17697 - DNA, 48 bp, unidentified
  source 1..48: mol_type = unassigned DNA; note = methanogen bacteria
accaaaaaggacactctaatagatattgctgttgacagtgttgagaat

SEQ ID NO: 17698 - DNA, 39 bp, unidentified
  source 1..39: mol_type = unassigned DNA; note = methanogen bacteria
gtgacaataactgtcactgttgatgcaaacgctacaggc

SEQ ID NO: 17699 - DNA, 117 bp, unidentified
  source 1..117: mol_type = unassigned DNA; note = methanogen bacteria
atcagcataggtgatgaggcagtttacattcctgtaaacaatggagcagccattggagaatttttactgcctggtggtgattatgaagtaactgcaacttatcttggtgacaacaag

SEQ ID NO: 17700 - DNA, 66 bp, unidentified
  source 1..66: mol_type = unassigned DNA; note = methanogen bacteria
ataagcattgaaggaaatgcagattttactggcatatttgacagtgaatttataaacaactctgct

SEQ ID NO: 17701 - DNA, 141 bp, unidentified
  source 1..141: mol_type = unassigned DNA; note = methanogen bacteria
ggaaataccagcacattagttattaataatacagtatttgatggaaactacgcaccatatgcaggtgcattatgcctcaaaggtgcaaaaaatcttattatatccgattcaaacttcacaaacaataaaggaaccgatgaa

SEQ ID NO: 17702 - DNA, 63 bp, unidentified
  source 1..63: mol_type = unassigned DNA; note = methanogen bacteria
aacttgacagaatccacgattatgaactcaaaatttgaaaataacagcgcacgtaccggtgga

SEQ ID NO: 17703 - DNA, 42 bp, unidentified
  source 1..42: mol_type = unassigned DNA; note = methanogen bacteria
ggtaatttgaacactacaacattcaatcacaatcaattcaca

SEQ ID NO: 17704 - DNA, 66 bp, unidentified
  source 1..66: mol_type = unassigned DNA; note = methanogen bacteria
caaggaaacgcaacaaacaacaaatttgaaaaatcaatctttatgaaaaacactgctacaacccac

SEQ ID NO: 17705 - DNA, 60 bp, unidentified
  source 1..60: mol_type = unassigned DNA; note = methanogen bacteria
gacgaaaacaacacattcaacaaatgtatcttcatggacaactatgcaccatacggagga

SEQ ID NO: 17706 - DNA, 72 bp, unidentified
  source 1..72: mol_type = unassigned DNA; note = methanogen bacteria
gcagtaagtaacagcagccaaacactcaacataaccgactgtatcttcacaaacaccaaagaacctgaaaaa

SEQ ID NO: 17707 - DNA, 75 bp, unidentified
  source 1..75: mol_type = unassigned DNA; note = methanogen bacteria
atatacttcataagcgatgcaaacgaactatacataaccaactctgaattcaaagcactcaccgcacgcgcagga

SEQ ID NO: 17708 - DNA, 51 bp, unidentified
  source 1..51: mol_type = unassigned DNA; note = methanogen bacteria
gacctaaacggtacagtaatcgccgaaaccaacttcattgacaacaaagca

SEQ ID NO: 17709 - DNA, 48 bp, unidentified
  source 1..48: mol_type = unassigned DNA; note = methanogen bacteria
gtcgaaggaaatgcaaaagatgtagtaataatcgactccaacttcaca

SEQ ID NO: 17710 - DNA, 54 bp, unidentified
  source 1..54: mol_type = unassigned DNA; note = methanogen bacteria
aacaatacaaatatagtaatatcctcatcatttgacggaaactacgcaccatac

SEQ ID NO: 17711 - DNA, 75 bp, unidentified
  source 1..75: mol_type = unassigned DNA; note = methanogen bacteria
gcaatatcccttggaaccacagaatcactttatatattcgattcaaacttcacaaacaacaaaggaacctcagca

SEQ ID NO: 17712 - DNA, 63 bp, unidentified
  source 1..63: mol_type = unassigned DNA; note = methanogen bacteria
ggaaacctcaccaacgcacgaatactcgaaacagaattcataaataacagcgcacgtgccgga

SEQ ID NO: 17713 - DNA, 48 bp, unidentified
  source 1..48: mol_type = unassigned DNA; note = methanogen bacteria
gtagaaggaattatggataatagcacattcctaaaatcattcttccaa

SEQ ID NO: 17714 - DNA, 75 bp, unidentified
  source 1..75: mol_type = unassigned DNA; note = methanogen bacteria
gcagtacaaggaaacgcaacaaacaacaaatttaatgttttattattcacagcaaatactggaacaacacatgga

SEQ ID NO: 17715 - DNA, 117 bp, unidentified
  source 1..117: mol_type = unassigned DNA; note = methanogen bacteria
ttgggtggagccgtcatattcaacaatgatgtttcaggtatagcaattgacaattgtaaattcataaacaattccgctgccaaaaatggtggtgcattatatgtcaatggcgcattt

SEQ ID NO: 17716 - DNA, 45 bp, unidentified
  source 1..45: mol_type = unassigned DNA; note = methanogen bacteria
attggaaatagtgagtttataagcaatgtcgctactaataatggt

SEQ ID NO: 17717 - DNA, 60 bp, unidentified
  source 1..60: mol_type = unassigned DNA; note = methanogen bacteria
ctctttgagaacctgaccttttccgacaacagggcagaaaataatgacggtggagcaatt

SEQ ID NO: 17718 - DNA, 42 bp, unidentified
  source 1..42: mol_type = unassigned DNA; note = methanogen bacteria
ttctttaaaaacactgccaaaaactatggtggagcaataaac

SEQ ID NO: 17719 - DNA, 75 bp, unidentified
  source 1..75: mol_type = unassigned DNA; note = methanogen bacteria
aaagagaatgaatatgttgatgttgattttattaacaacaaagcttctaatggtggagcaatgggtggatatggt

SEQ ID NO: 17720 - DNA, 63 bp, unidentified
  source 1..63: mol_type = unassigned DNA; note = methanogen bacteria
tcatttgagggatgtttatttgcaaataactctgctaccaataatggtggagcggtatgttat

SEQ ID NO: 17721 - DNA, 45 bp, unidentified
  source 1..45: mol_type = unassigned DNA; note = methanogen bacteria
gaaaacacttcatttgccagaaacaccgcaggtagtggtggagca

SEQ ID NO: 17722 - DNA, 36 bp, unidentified
  source 1..36: mol_type = unassigned DNA; note = methanogen bacteria
aattgtttttttgccgataacgctgcaagaactgga

SEQ ID NO: 17723 - DNA, 84 bp, unidentified
  source 1..84: mol_type = unassigned DNA; note = methanogen bacteria
atttccaataagttcaataaagatttatttataaataattccgctgccaataatgcttctgtaatttattatcaaggttcttca

SEQ ID NO: 17724 - DNA, 201 bp, unidentified
  source 1..201: mol_type = unassigned DNA; note = methanogen bacteria
aatgctacatacactttaagaaaagtaaacactactggaaacaataataaaacaaaaggtggtgcagtttacatcgcagatgaggataatgtcatagaaaattccaagttctacaacaatactgcaagtactaaccgtccttacaacaataaaggaaacgacccttcatcatctgatgacggatttggaggtgcaatattt

SEQ ID NO: 17725 - DNA, 30 bp, unidentified
  source 1..30: mol_type = unassigned DNA; note = methanogen bacteria
accattgatgcaagggaaaaagtgccgata

SEQ ID NO: 17726 - DNA, 30 bp, unidentified
  source 1..30: mol_type = unassigned DNA; note = methanogen bacteria
acgattgatgcgggaggaaagtcacgtatc

SEQ ID NO: 17727 - DNA, 45 bp, unidentified
  source 1..45: mol_type = unassigned DNA; note = methanogen bacteria
attgttcttgaatcagacattattttaagcagctctgatgagtca

SEQ ID NO: 17728 - DNA, 39 bp, unidentified
  source 1..39: mol_type = unassigned DNA; note = methanogen bacteria
aatggccacacgattgatgcaatggaaaacacacgtatt

SEQ ID NO: 17729 - DNA, 219 bp, unidentified
  source 1..219: mol_type = unassigned DNA; note = methanogen bacteria
atttactttagcggtgatgatttggtgattgccgattctaaattcatttcaaatgaagcagaggattgcggagcagttgcggttaactctgcaaccactaaaatcagaaatacagaattcgttgaaaacggagcatatgactacggtgcaatcgaaatttcaagtggggatgttttaattgacaattgtagattcgacagcaattatgcaaacagatcc

SEQ ID NO: 17730 - DNA, 63 bp, unidentified
  source 1..63: mol_type = unassigned DNA; note = methanogen bacteria
tgccaattcattgacaatgactgctgcgcagtatacctttctcattataacgccaggatttta

SEQ ID NO: 17731 - DNA, 42 bp, unidentified
  source 1..42: mol_type = unassigned DNA; note = methanogen bacteria
aaattcgagaacagcgtttcagatgatggaattgccatttat

SEQ ID NO: 17732 - DNA, 114 bp, unidentified
  source 1..114: mol_type = unassigned DNA; note = methanogen bacteria
gtttatttatatttccaggatgataattataacttgattaaggttatggactttgatttgcttgtcaacaataccaaaatcgattatgtattcagtaataggtatcaagatttt

SEQ ID NO: 17733 - DNA, 36 bp, unidentified
  source 1..36: mol_type = unassigned DNA; note = methanogen bacteria
ggtgcgatatatgcaaatactgatgtgtatgttgat

SEQ ID NO: 17734 - DNA, 279 bp, unidentified
  source 1..279: mol_type = unassigned DNA; note = methanogen bacteria
ttctttgagagcaattatgctgatgattgtggtgatgcagtatttgctaagggcagtgtttacatcaataatatcagtgatgattatccatgtcgcttcataagcaatagtgttgatgatggtgatggtggtgcaatctgttgtgctggctcattatatttgaataatggtttgttcatttctaattctgcttttaagaaaggcggggcgatttgttgtgatggtgttttcacttccaagggcagcttgtttgaaaagaatactgcacatggcagtcat

SEQ ID NO: 17735 - DNA, 297 bp, unidentified
  source 1..297: mol_type = unassigned DNA; note = methanogen bacteria
gcatatggtggtgctgtatactctggtagtaatgcctttgtctataattctagctttgaggataatgagtgtatattacatttgccttccggtggtgctgtttatgcagtgaaaaacatttatgttaatattgatcaagatgttacaaagcctttttactcttactttagaggtaatgttgcagctaatggcggtgcattgtacagtgggtctggtagtgttcgttgtgtgaatagtttttttgagttgaatcatggagagttttccagtgtcgtttatgggtctgatgtagatttt

SEQ ID NO: 17736 - DNA, 129 bp, unidentified
  source 1..129: mol_type = unassigned DNA; note = methanogen bacteria
ggtgctggtgatgtttctgttgcgaattttgagactgatgattgtggtctttttaattgttccggttgtagtttggtaaacgattatgaaaagtattccgaattagagaaggttcttattcgtactgct

SEQ ID NO: 17737 - DNA, 75 bp, unidentified
  source 1..75: mol_type = unassigned DNA; note = methanogen bacteria
attgatgatgctgttattggaggctctgctagggaccatagtaatcgttttgatattgttgccagttatgctgca

SEQ ID NO: 17738 - DNA, 153 bp, unidentified
  source 1..153: mol_type = unassigned DNA; note = methanogen bacteria
agcaaagaagatttaaatgaaattaaagattatctattagatccaaataacaaggaagtggttaaattggctaaaggccaatcctttaatctggaagtgagttatataagctttaaaggtatatttggaaagatgtattttgatgataggacc

SEQ ID NO: 17739 - DNA, 36 bp, unidentified
  source 1..36: mol_type = unassigned DNA; note = methanogen bacteria
gattgtgcaattgatcgcattatatcgaccaaactg

SEQ ID NO: 17740 - DNA, 234 bp, unidentified
  source 1..234: mol_type = unassigned DNA; note = methanogen bacteria
agttcctcatatatgatttccaataattataaccctgaacttaacactcggacggtttataaaactgtaattggtgtttctgctgtagctggagtaattggaggtgcatttggtgggtatgtggctattgaaggctttttcgagcaaatttcatatatgttattggatatggaaacttatggtgaaatacctggattctctctttattcagagtatactatggttgcgattcct

SEQ ID NO: 17741 - DNA, 144 bp, unidentified
  source 1..144: mol_type = unassigned DNA; note = methanogen bacteria
actgcagcattaaatgacacagttaaagtaagtgttttaaaggctactccaactattaatgtcagtgctgaaaatgcaacctattcgagtgatgttattattaccgttatcactgatgctggcggtaaatacaatataactgtt

SEQ ID NO: 17742 - DNA, 36 bp, unidentified
  source 1..36: mol_type = unassigned DNA; note = methanogen bacteria
ggttctattgttggtgttcttgctccgactgttgct

SEQ ID NO: 17743 - DNA, 63 bp, unidentified
  source 1..63: mol_type = unassigned DNA; note = methanogen bacteria
ggtcttatggagggtaatgcttatcatgattacagcaatctttggagtaatgtattgtctttt

SEQ ID NO: 17744 - DNA, 30 bp, unidentified
  source 1..30: mol_type = unassigned DNA; note = methanogen bacteria
actggttttagtgtttacagtgcttttact

SEQ ID NO: 17745 - DNA, 141 bp, unidentified
  source 1..141: mol_type = unassigned DNA; note = methanogen bacteria
tttggtgttgctggtaatcctcaaggttatcctggttctcagggtgctggtaatcctcaaggttatcctggttctcagggtgctgctggttctcatggttctggggagatttctcttaatgacgggtatcagaattctgct

SEQ ID NO: 17746 - DNA, 234 bp, unidentified
  source 1..234: mol_type = unassigned DNA; note = methanogen bacteria
agttcctcatatatgatttccaataattataaccctgaacttaacactcggacggtttataaaactgtaattggtgtttctgctgtagccggagtaattggaggtgcatttggtgggtatgtggctattgaaggctttttcgagcaaatttcatatatgttattggatatggaaacttatggtgaaatacctggattctctctttattcagagtatactatggttgcgattcct

SEQ ID NO: 17747 - DNA, 93 bp, unidentified
  source 1..93: mol_type = unassigned DNA; note = methanogen bacteria
gaaaatactgtatataaagatgttattaatgttaataatgataaagataataatttagaaataaataatcaagataatgaagtttcaagaagt

SEQ ID NO: 17748 - DNA, 153 bp, unidentified
  source 1..153: mol_type = unassigned DNA; note = methanogen bacteria
tttaaaaataacactggagcttatggtgtaggagtatacttttactatgaaggaattgctgaaaattgtgcattcatcaataacaaaatggaggaaaatattctgccgggtacagcaatctattttgatgatggatttggaaaagtcaataac

SEQ ID NO: 17749 - DNA, 132 bp, unidentified
  source 1..132: mol_type = unassigned DNA; note = methanogen bacteria
atggaaactaatactggtttggatgctttgattggtaaggcttttagtcgtgcgggtaaaaaaattggtaatgaattcttaccaattattaaggatgttaaacgtggtttcattgatttagataatgaatta

SEQ ID NO: 17750 - DNA, 93 bp, unidentified
  source 1..93: mol_type = unassigned DNA; note = methanogen bacteria
ttcaatttagataagaatacaacattagtcaatcagctaattgaattaacaaataatgctacatttatgaagaaactgcttgagttaactaag

SEQ ID NO: 17751 - DNA, 30 bp, unidentified
  source 1..30: mol_type = unassigned DNA; note = methanogen bacteria
ggagctacattcaataagttaattgaatta

SEQ ID NO: 17752 - DNA, 84 bp, unidentified
  source 1..84: mol_type = unassigned DNA; note = methanogen bacteria
aatttaacagtaacaggtcctaacggcactattgtaatggataaatgtagtgtttatcctaatcctattgtagatatttctgtt

SEQ ID NO: 17753 - DNA, 60 bp, unidentified
  source 1..60: mol_type = unassigned DNA; note = methanogen bacteria
aaagatgaatattatatagatgacattgctgtttggactgttgttgtttcaaatgctaat

SEQ ID NO: 17754 - DNA, 195 bp, unidentified
  source 1..195: mol_type = unassigned DNA; note = methanogen bacteria
accaatgttactttgagggatttcttcccaggcagtaactttgagtttattaattgtactttggctaatggtactagttatactggtgatacctggtatataggtgatttggctaacggcactaatgttaccttcacagtttattcacgtgctattgctgttggtactgcaaaacacaacgttactgtatcatgt

SEQ ID NO: 17755 - DNA, 84 bp, unidentified
  source 1..84: mol_type = unassigned DNA; note = methanogen bacteria
gaaaccgagtggaatttaaccaacaataagaataataagactgttgtagttgtttctcttccggatcctgtaaagaatgtttca

SEQ ID NO: 17756 - DNA, 39 bp, unidentified
  source 1..39: mol_type = unassigned DNA; note = methanogen bacteria
cctaacggtactaaaaaatatgctaatttgactgtttat

SEQ ID NO: 17757 - DNA, 57 bp, unidentified
  source 1..57: mol_type = unassigned DNA; note = methanogen bacteria
aaggatgagtactttgttgatgatattgctgtttggactgttgttgtgtctaatgct

SEQ ID NO: 17758 - DNA, 150 bp, unidentified
  source 1..150: mol_type = unassigned DNA; note = methanogen bacteria
agaattactaatattactgctaagtccaatgctactatcactattagggttaaagtagttggtattggtgataatattatcagaaacagtactttcattgctaataatgtgactaatgatcctgctgttaagtatgttggtaatttaacc

SEQ ID NO: 17759 - DNA, 96 bp, unidentified
  source 1..96: mol_type = unassigned DNA; note = methanogen bacteria
ttgactgttgttggtcctaatggtactgtaaattctactgatttgactgtttatcctgttcctattgttgatatttctgttaatattactagttta

SEQ ID NO: 17760 - DNA, 33 bp, unidentified
  source 1..33: mol_type = unassigned DNA; note = methanogen bacteria
atgatattgctgtttggactgttgttgtgtcta

SEQ ID NO: 17761 - DNA, 225 bp, unidentified
  source 1..225: mol_type = unassigned DNA; note = methanogen bacteria
tatgtggatgataattatgagaataatgtgacttctattccgtttactgtttctaaagcggatgttgctttgacagttgaggttttagataaggtttatactgctgatgttaatggtattgtatttgccagtgctgatggtgagtacaaagtagttattggtaattatgaaaccccagttattgttaaggatggtgtgggtagttttgatgttgcctttgaagtt

SEQ ID NO: 17762 - DNA, 84 bp, unidentified
  source 1..84: mol_type = unassigned DNA; note = methanogen bacteria
agtgaaattgcttatggtggtgctgttgagattgctcagggtcttcctggtgatgcaactggcagtgtaacctacagttttgct

SEQ ID NO: 17763 - DNA, 159 bp, unidentified
  source 1..159: mol_type = unassigned DNA; note = methanogen bacteria
actgtttctaaagcggatgttgctttgacagttgaggttttagataaggtttattctgctgatgtttgtggtattgtatttgctagtgtggatggtgagtacaaagttgttatcggtaattatgaaaccctagtaattgttaaggatggtgtgggtagt

SEQ ID NO: 17764 - DNA, 36 bp, unidentified
  source 1..36: mol_type = unassigned DNA; note = methanogen bacteria
gatgacaattataatcctaattataatgagactgcc

SEQ ID NO: 17765 - DNA, 39 bp, unidentified
  source 1..39: mol_type = unassigned DNA; note = methanogen bacteria
attacttatggtggtgctgttgagattgctcaaggtctt

SEQ ID NO: 17766 - DNA, 87 bp, unidentified
  source 1..87: mol_type = unassigned DNA; note = methanogen bacteria
actatcattaaggttgttggtgttaatgagtcatttgtattgtctggtttgaatgctggaagttatgtgatttatgctaattattct

SEQ ID NO: 17767 - DNA, 48 bp, unidentified
  source 1..48: mol_type = unassigned DNA; note = methanogen bacteria
gagatcgaatcgtggatggaggacctcgtcaccgagggcgagcaccag

SEQ ID NO: 17768 - DNA, 69 bp, unidentified
  source 1..69: mol_type = unassigned DNA; note = methanogen bacteria
catgtagtatatgctggtgaagaggggaatggtgacggtgatgatgaaaatgattatggtacttatgta

SEQ ID NO: 17769 - DNA, 120 bp, unidentified
  source 1..120: mol_type = unassigned DNA; note = methanogen bacteria
tccaaaatccaattctcttttgaagatgatgatactggtgatggcggtgatgaaaatgataaaggcaacggcgaaaaggatacatccaacggcagggatgtctacatagcctcaggcact

SEQ ID NO: 17770 - DNA, 267 bp, unidentified
  source 1..267: mol_type = unassigned DNA; note = methanogen bacteria
atttccaattcctacatgtccagctacgactgggatgacaagtatgtcgtctatgttgaagatggtgttgaagatggcaatgttgtattggatgacaactactggtccggagatgtctacaaacgggaatatgatgaagaagccaatgaagaaattgaagtgcttgcagtttccaatattgaactccacaattacctagaattgattttgaaagtgagccctgaagatgatcctttaatccctggcaaagaatatgagttctatgcc

SEQ ID NO: 17771 - DNA, 156 bp, unidentified
  source 1..156: mol_type = unassigned DNA; note = methanogen bacteria
aaattcgaaggattgcctaaatccaatttcatattctatgttgaaaacatgaatgggcacactgaagaattcgaaaactgtgaagttcctgtggaaaatggacagacatcttttaccatagaagacgaccagtatgcaatgcattgtgaaatatcc

SEQ ID NO: 17772 - DNA, 168 bp, unidentified
  source 1..168: mol_type = unassigned DNA; note = methanogen bacteria
agtgctccaaactttggaggaggcatttacaacgagggagatatgactatcacatattccattttatgccacaactgtgctaagattggaaatgacatctatcataacggaacttcattatatgtatccaattccttcctgacatcaggggaaagcgatttcgcacca

SEQ ID NO: 17773 - DNA, 198 bp, unidentified
  source 1..198: mol_type = unassigned DNA; note = methanogen bacteria
atttcaaactacggagaatatgttttatatgctgaaaatactgaagactgtgtattgaacgacatctggtggggcacaaacagtcctgatgaaaacacaacaaacattgaactgaataattatgtaatattcagcctaacagctcaaaatgaaatagttgagaatgaaagcaatgtattcaatgttgcatttatcaaa

SEQ ID NO: 17774 - DNA, 78 bp, unidentified
  source 1..78: mol_type = unassigned DNA; note = methanogen bacteria
ggtgcttctgcaagtattgttgtagtatttaatgctactagtccatacataaatgcatataacactgcttatgtccat

SEQ ID NO: 17775 - DNA, 225 bp, unidentified
  source 1..225: mol_type = unassigned DNA; note = methanogen bacteria
gtcactgtggctcctggtgaaaatgtagagttcactatccgtgtaatgaattccggaaacactacattgaattatgtatttgttgtagaaaaaccttctgaaggtttagtctatatagattatgccaacaagacaggcaattggacatatgatggcattgacaaatggactcttgcaggtggcttagatgcaaatgaaactgcagaatttatagtaatctataat

SEQ ID NO: 17776 - DNA, 207 bp, unidentified
  source 1..207: mol_type = unassigned DNA; note = methanogen bacteria
tatggtgaaacagttgaatttacaattgtagttagaaatactggtgaaaccaatcttacagatgtatttgttgaagaaagaccttctgaaggattggtatatcttgactatgtgaacaagacaggcaattggaataaggatggtggcatatggactcttgcaggtaatttagagcttggcggaactgctgaatttacagtaatctat

SEQ ID NO: 17777 - DNA, 204 bp, unidentified
  source 1..204: mol_type = unassigned DNA; note = methanogen bacteria
gtaggagaaactgttggattcactattgtagtaacaaatatcggtgatcaagatttaactggcgtatttgttgaagagcaaattcctgaaggattagtctatcttgactatgtaaacaagactggctcttgggataaggaaggaaataaatggactcttgcaggcaatttagagtatggcggaactgctgaattggtaattatt

SEQ ID NO: 17778 - DNA, 225 bp, unidentified
  source 1..225: mol_type = unassigned DNA; note = methanogen bacteria
aaaaaaggagaaaaggttgagtttgtcatcatagttacaaataatggtgatgaggacttaactggcgtattcgtgaaagaagagattccagatggattagcttactctagcttcatatccgaatctggcaaatggttctttaatggagcagatatgtggatttacgatggaactttagctgctggcgaatcatctaacctcacaataatctttgatactgaaaaa

SEQ ID NO: 17779 - DNA, 195 bp, unidentified
  source 1..195: mol_type = unassigned DNA; note = methanogen bacteria
tacacaatcgttgtaaacaatacaggtgaatgtgaccttacaggcgtatttgttgaagagcaagctcctgacggattggtctatgttgactttgttgatgaaagcaacaagtggacatatgatgaagagacccatgtatttacttacaatggcgttttagttcctggagaagtagtccaatttgttgtaatattc

SEQ ID NO: 17780 - DNA, 147 bp, unidentified
  source 1..147: mol_type = unassigned DNA; note = methanogen bacteria
tacacaattcaagtaactaacactggtgactgtgaccttacaaatgtatttgttgaggaacaagctcctgaaggattagtttacattgattatgtaaacagaaccggtacttgggataaacatggcaataagtggacttatgttggt

SEQ ID NO: 17781 - DNA, 198 bp, unidentified
  source 1..198: mol_type = unassigned DNA; note = methanogen bacteria
ggaaacattaccagctacactattgaggtaaccaatactggtgactgtgatcttacaagagtatttgttgaagagcaagctcctgaaggtcttgtatatgttgattatgtagaaatagttggcagctgggataaacagggcaataagtggacttatgaaggtactttagctcctggtgattcagtagcatttgttgtg

SEQ ID NO: 17782 - DNA, 96 bp, unidentified
  source 1..96: mol_type = unassigned DNA; note = methanogen bacteria
cctaaattcgatattgttaaagtggcaagcgatgaagttgtatatgctggtaacactaccagttacactattgaagtaaccaattatattatgggg

SEQ ID NO: 17783 - DNA, 63 bp, unidentified
  source 1..63: mol_type = unassigned DNA; note = methanogen bacteria
attgccgttgaaggaaatgctagttcaatcctcatatttaacagtgattttattaataacact

SEQ ID NO: 17784 - DNA, 57 bp, unidentified
  source 1..57: mol_type = unassigned DNA; note = methanogen bacteria
gatgaattaaatacttttgatggatgtatcttttataataactatgctccatacggt

SEQ ID NO: 17785 - DNA, 54 bp, unidentified
  source 1..54: mol_type = unassigned DNA; note = methanogen bacteria
cttggaaacactgattatcttgttatttcagagtccaatttcacaaatcacatt

SEQ ID NO: 17786 - DNA, 63 bp, unidentified
  source 1..63: mol_type = unassigned DNA; note = methanogen bacteria
acaaatgctaatatagtggattcattattcgaaaataacagtgcacgtgctggcggagcaata

SEQ ID NO: 17787 - DNA, 48 bp, unidentified
  source 1..48: mol_type = unassigned DNA; note = methanogen bacteria
gttgaaaacaatatgaatcaagtccaaatttatgatacttatttcatt

SEQ ID NO: 17788 - DNA, 66 bp, unidentified
  source 1..66: mol_type = unassigned DNA; note = methanogen bacteria
gaagaagatgcaacaaacaacttttttgattcagttacttttgtatcaaatattgctcagactcat

SEQ ID NO: 17789 - DNA, 30 bp, unidentified
  source 1..30: mol_type = unassigned DNA; note = methanogen bacteria
atcttttataataactatgctccatacggt

SEQ ID NO: 17790 - DNA, 48 bp, unidentified
  source 1..48: mol_type = unassigned DNA; note = methanogen bacteria
cttaaccttacagattgtttatttggaatcaatgatgatgaatatccg

SEQ ID NO: 17791 - DNA, 132 bp, unidentified
  source 1..132: mol_type = unassigned DNA; note = methanogen bacteria
gatacatatagtttagttattgatggttctagtttttatggactttctgcacgtgctggtggagcaatatatgtggaaggtgacttaaatactgcagatattaatggatctaatttcattggcaacaaagct

SEQ ID NO: 17792 - DNA, 57 bp, unidentified
  source 1..57: mol_type = unassigned DNA; note = methanogen bacteria
gaaggaaattcaaatgtgttgattctaactgaatgtaattttataaataattctgcg

SEQ ID NO: 17793 - DNA, 51 bp, unidentified
  source 1..51: mol_type = unassigned DNA; note = methanogen bacteria
acttatacagtaatagacaattccagatttgattcaaattatgctccatac

SEQ ID NO: 17794 - DNA, 36 bp, unidentified
  source 1..36: mol_type = unassigned DNA; note = methanogen bacteria
acaatgtttattttgaattcaggctcaactcacgga

SEQ ID NO: 17795 - DNA, 150 bp, unidentified
  source 1..150: mol_type = unassigned DNA; note = methanogen bacteria
gatattaacaatacaatctatgaatgcgaattcataaacaattatggaagatacggcactgctcttgcagtgaataagaacagtgaaaacctcaatattactaaatctgttttcgcatcattcaatgaatccagcaaagaagttatagct

SEQ ID NO: 17796 - DNA, 156 bp, unidentified
  source 1..156: mol_type = unassigned DNA; note = methanogen bacteria
ataactaacttatacattgcagattgtaacttcagtggaaatgttgtacgtgctggcggagcaatctatgtggagaaaaaaatagaaaaatctttaatagaaaattgtctgtttaaagaaaacacaattaccactgcaaatgaagaatatggtgga

SEQ ID NO: 17797 - DNA, 249 bp, unidentified
  source 1..249: mol_type = unassigned DNA; note = methanogen bacteria
tacactgctttcgtaagctttgaaggtgatgacaattacaactctgcaaataatgaaactgcttttgaagttgctcaaaccggaactaatttcaatattattgctaatactactgagattgtttatggtgatgtgattaacattactcagtccattccaagtgatgcaactggaagtgtaatatataaatttgctaatggttcaataatcaaagttttaaacgttaatgagtcatttgtattgtctggt

SEQ ID NO: 17798 - DNA, 66 bp, unidentified
  source 1..66: mol_type = unassigned DNA; note = methanogen bacteria
ttcaattcaactgttagtggaacatacacaaacaacaaagcaggagatgatggtggagcaaactat

SEQ ID NO: 17799 - DNA, 66 bp, unidentified
  source 1..66: mol_type = unassigned DNA; note = methanogen bacteria
tccaattcaactgttagtggaacatacacaaacaacaatgcagtagatggtggtggagcaaactac

SEQ ID NO: 17800 - DNA, 144 bp, unidentified
  source 1..144: mol_type = unassigned DNA; note = methanogen bacteria
actgttagcggaacatacacaaacaacaaagcaggatacggcggagcaaactacttttttgatgaggtttcaaatacaaatattacaggaacatacacagataacaatgcaacagaacatggtggagcaaactacttttatgat

SEQ ID NO: 17801 - DNA, 30 bp, unidentified
  source 1..30: mol_type = unassigned DNA; note = methanogen bacteria
gccaccgcctcccgcgacagattggatgtc

SEQ ID NO: 17802 - DNA, 141 bp, unidentified
  source 1..141: mol_type = unassigned DNA; note = methanogen bacteria
agcggagcaatcagcgcagcaaccggcaccgaatccggcgaatacagcgcactaacaaacgtcatctcaggattcataggcgactacctaggaggcggaaattcaggaggttcaggcgattctgattccctgacagctctt

SEQ ID NO: 17803 - DNA, 39 bp, unidentified
  source 1..39: mol_type = unassigned DNA; note = methanogen bacteria
ggaggaggaaactcaggaagctcaggaaactccgactcc

SEQ ID NO: 17804 - DNA, 99 bp, unidentified
  source 1..99: mol_type = unassigned DNA; note = methanogen bacteria
ggagcaatcagcgcagccaccggcagtgaatccggcgaatacagcggactgacaaacggaagctcaggaagctcaggaagctcaggaaactccgactcc

SEQ ID NO: 17805 - DNA, 30 bp, unidentified
  source 1..30: mol_type = unassigned DNA; note = methanogen bacteria
gaaggaggctccaacgacgctttaaacgca

SEQ ID NO: 17806 - DNA, 42 bp, unidentified
  source 1..42: mol_type = unassigned DNA; note = methanogen bacteria
agcgcagccaccggcagtgaatccggcgaatacagcggactg

SEQ ID NO: 17807 - DNA, 219 bp, unidentified
  source 1..219: mol_type = unassigned DNA; note = methanogen bacteria
accaacactacatctaaggatgttgaaatccttggtcatgtgctgaaagatactccaatcacagcaaatgttgctatgaatggaaacagggttacattaactgttaaagttgatgaaaacgctactggatttgttgaacttaaatttggtgataatgtatttaatattgcattaaaagatggtattggaacattgacaacttccttgccttacggaagt

SEQ ID NO: 17808 - DNA, 270 bp, unidentified
  source 1..270: mol_type = unassigned DNA; note = methanogen bacteria
gatgagaactacaataagaactccactaaactcgaattcacaattgttgagcctgctaaggaaaacactccaatttccatggatattgtgactgatgaaaactatgtgggtatgactgttgctgttgatgatgctgcaactggtcttgtcaaattccaagtaattggtagcacaggagaatacacaatctatgcagatctaattaatggtaaggcgattcttgaagatactctgccaatcggagattacactgtatttgcaacatatatg

SEQ ID NO: 17809 - DNA, 105 bp, unidentified
  source 1..105: mol_type = unassigned DNA; note = methanogen bacteria
ggtactgttgttaatattgaagtggtggatggtgtcgcaacactaacaactacattgtctccaaacagttactatgttgatgtgacttatcttggtgatgatgac

SEQ ID NO: 17810 - DNA, 117 bp, unidentified
  source 1..117: mol_type = unassigned DNA; note = methanogen bacteria
gatgttgcctttattatggttgatttggataaagctgcaactggtttggttaagttctatgtgatttggaaagaaactggtgagaactatactgtgtacatggatgttgtagatggt

SEQ ID NO: 17811 - DNA, 30 bp, unidentified
  source 1..30: mol_type = unassigned DNA; note = methanogen bacteria
aatgtatttaatattgcgttaaaagatggt

SEQ ID NO: 17812 - DNA, 51 bp, unidentified
  source 1..51: mol_type = unassigned DNA; note = methanogen bacteria
actgatgaaaactatgtgggtatgactgttgctgttgatgatgctgcaact

SEQ ID NO: 17813 - DNA, 60 bp, unidentified
  source 1..60: mol_type = unassigned DNA; note = methanogen bacteria
acaggggaatacacactttatgcagatgtaattgggggtaaagctgttcttgaagatact

SEQ ID NO: 17814 - DNA, 33 bp, unidentified
  source 1..33: mol_type = unassigned DNA; note = methanogen bacteria
gtgattggaaatagggttactttgactgttaat

SEQ ID NO: 17815 - DNA, 33 bp, unidentified
  source 1..33: mol_type = unassigned DNA; note = methanogen bacteria
gcaacatacatgggtgattcagtattcaacact

SEQ ID NO: 17816 - DNA, 54 bp, unidentified
  source 1..54: mol_type = unassigned DNA; note = methanogen bacteria
gttaatggaaatagggttacattaacagttaatgttgatgaaaacgctactggc

SEQ ID NO: 17817 - DNA, 33 bp, unidentified
  source 1..33: mol_type = unassigned DNA; note = methanogen bacteria
tcaaaaaacaacaaaatcaactacaactatatt

SEQ ID NO: 17818 - DNA, 54 bp, unidentified
  source 1..54: mol_type = unassigned DNA; note = methanogen bacteria
ctggatattagcttaggaattgatgagaatggaaatctatcaattggagattta

SEQ ID NO: 17819 - DNA, 189 bp, unidentified
  source 1..189: mol_type = unassigned DNA; note = methanogen bacteria
gtgaaaaaatccaaaataataaagaaggtgattcctaaagcaaaaagagtagttcattatgtaaaaaaatcagttgaaaaaattaaaggaaccgtttctaaatttaaaaaaacagttaaaaatgtaaacagggctgtaaaaagagccagtaattcggttaaaagatttgttagtaaatttaaattttgg

SEQ ID NO: 17820 - DNA, 45 bp, unidentified
  source 1..45: mol_type = unassigned DNA; note = methanogen bacteria
actttaaacgatgcaaacgttaccgctaaaaatatagaattaact

SEQ ID NO: 17821 - DNA, 36 bp, unidentified
  source 1..36: mol_type = unassigned DNA; note = methanogen bacteria
actgatttaaacgttagttttgttcctgatgattca

SEQ ID NO: 17822 - DNA, 42 bp, unidentified
  source 1..42: mol_type = unassigned DNA; note = methanogen bacteria
actttaaacgatgcaagcattaccgccaaagacatagaatta

SEQ ID NO: 17823 - DNA, 84 bp, unidentified
  source 1..84: mol_type = unassigned DNA; note = methanogen bacteria
gatgattcaggcattgtcaaagtttctgataatggtactgttacagcattaaaaacaggtatcgccaacattaccattactgta

SEQ ID NO: 17824 - DNA, 87 bp, unidentified
  source 1..87: mol_type = unassigned DNA; note = methanogen bacteria
gatgattcaggcattgttaaagtttctgataatggtactgttactgcattaaaagcgggaactgcccaagtcactattactgtcggt

SEQ ID NO: 17825 - DNA, 246 bp, unidentified
  source 1..246: mol_type = unassigned DNA; note = methanogen bacteria
atgggtggagctatcttctttgaaggtaatgatttattgattgccgattcaaaattcatgtcaaatgaggcatatgagtatggtgcagttttcgctgattctctgacagcagaagtcagaaacactgaattcagcaaaaatgctgcagaggattacggtgcattggctgttttaggtggtgatgttttaatttacaaatgtaattttactgataattccgccagatattatggtggtgctatcctc

SEQ ID NO: 17826 - DNA, 207 bp, unidentified
  source 1..207: mol_type = unassigned DNA; note = methanogen bacteria
gcatgcaatttcacaaataatgttgcagagggtgagtattcaaatgaggcacatgattgcggagcagtatctgttgaatctgtaactactgaaatcataaacactgaattcattggaaacggagcgtatgattgcggtgcagtgggaattttcgaaggtaatgctttaattgaaaattgcacattcgacagcaattatgcaaacaga

SEQ ID NO: 17827 - DNA, 174 bp, unidentified
  source 1..174: mol_type = unassigned DNA; note = methanogen bacteria
acttcagttcatttggatgttttaaatattggtgaggataatgctgatattgttgcaacagtctttgatgaatacggtaatttagtcaataggggggatgtgacatttacaatcaacggtttggattatactgttaaaattgcaaacggcattgccaaattcaatgctttgctg

SEQ ID NO: 17828 - DNA, 207 bp, unidentified
  source 1..207: mol_type = unassigned DNA; note = methanogen bacteria
tcaagcaatttcataatggtttccaacaagccaattagcacatcaatgaatgtaagcgtttcatcttcaaacagtaatcctctcaaaatcagtgcagtgattttagacaaaaacggtaataaggtagaaagcggaatggttacttttaatgttgatggtgaggattataagattaatgtgaatgatggggaggctaactttactcat

SEQ ID NO: 17829 - DNA, 186 bp, unidentified
  source 1..186: mol_type = unassigned DNA; note = methanogen bacteria
aaaaacattgtagtcagttatgatgacttatattgttacgcttcttcaaaaaggacattatctaaggaaatagggataaaggatgtttcaatttatttgtccgttgacaataactataatcctgttgtcattactgcagatattgttgataaggatggcttttctgtgaattgtggtaaagttact

SEQ ID NO: 17830 - DNA, 60 bp, unidentified
  source 1..60: mol_type = unassigned DNA; note = methanogen bacteria
aatgtggaaggaagtgattttactgtggatgtcaaaaatggggtggctgacttgaaatat

SEQ ID NO: 17831 - DNA, 219 bp, unidentified
  source 1..219: mol_type = unassigned DNA; note = methanogen bacteria
aaatccaattctacctatgatttctttgatatttcagcgataaagacatatttggaatttaatttcgattcagtcaatgtattcaatccggttaatataagctgtaccgttagggatttgaattccaatttggtcaatagaggatatgtcacttttatcataaataatgatgaaagcaaagtcaaggtagaaaacggagtggccagtctggaatatcta

SEQ ID NO: 17832 - DNA, 192 bp, unidentified
  source 1..192: mol_type = unassigned DNA; note = methanogen bacteria
tcttccaataccatatcactgaacgtatccaagacaagtgtggatttgtctgttggtgtggatgtggaaaaaaatgtccatacaattagggtcaaaatttcaaaacctgtttcagattatgtgacaattaggcttaatgataatccttattcagttaaatcagataatggtcaggccattttaatattggaa

SEQ ID NO: 17833 - DNA, 75 bp, unidentified
  source 1..75: mol_type = unassigned DNA; note = methanogen bacteria
aaatctgatgaagcaacatttgattttactgttaataagaaagccaccaggatttcttgcgatgatgtcttctac

SEQ ID NO: 17834 - DNA, 138 bp, unidentified
  source 1..138: mol_type = unassigned DNA; note = methanogen bacteria
agtcagatttcatgccctataacctttgtggacgaattcggacatgaagtttctggatgcaagctttcggtaaatattgatggaaaattgtatgatgtcactaccaatgatagtggtattggattgcttaagttcagc

SEQ ID NO: 17835 - DNA, 141 bp, unidentified
  source 1..141: mol_type = unassigned DNA; note = methanogen bacteria
attcaaatgtatcacaaaaacgaattactcgaagccttcatcgaaaaacatttccacaatggtacctatgataaaactgaatccgaaaaaatcaaaaatcaaacttattatttattagataattactcgatctggtccggt

SEQ ID NO: 17836 - DNA, 72 bp, unidentified
  source 1..72: mol_type = unassigned DNA; note = methanogen bacteria
tccaatttcattgtcgaagataatcccgaaagacttaatatgataagacaattagaaaattgcttcggtgat

SEQ ID NO: 17837 - DNA, 138 bp, unidentified
  source 1..138: mol_type = unassigned DNA; note = methanogen bacteria
cctatgaaacacttgagaagaaacttggaccctaaagtctgcttcttctttgatagaactcgattcgaagaagatcaaataaataacttatatgaagcatataaatggtacacttcaacttatggtaatactgttcat

SEQ ID NO: 17838 - DNA, 33 bp, unidentified
  source 1..33: mol_type = unassigned DNA; note = methanogen bacteria
ttagtgttcaaatgcaataaggaaggtcttacc

SEQ ID NO: 17839 - DNA, 42 bp, unidentified
  source 1..42: mol_type = unassigned DNA; note = methanogen bacteria
aatgaaacatccgatgaagcaggcagtgcggagctctccaac

SEQ ID NO: 17840 - DNA, 36 bp, unidentified
  source 1..36: mol_type = unassigned DNA; note = methanogen bacteria
tttgaaggcaacgtttccgaatcagtgattttcaat

SEQ ID NO: 17841 - DNA, 135 bp, unidentified
  source 1..135: mol_type = unassigned DNA; note = methanogen bacteria
tcagcttcaaatcaaatcacgggttcgggcagtgtggaaagcgttgagctgagcgattccttccaataccttgacagccttattcacagcggcgttaaagtgataacacttgactctgacatcatggcgcagcac

SEQ ID NO: 17842 - DNA, 180 bp, unidentified
  source 1..180: mol_type = unassigned DNA; note = methanogen bacteria
aatcttgatgttgaaggcctcacaatcgatggagggggtcatgaaatcaacgcaaatgctttttcaaggatattcaatgtcactgccgacggcgtaactcttaaaaacatcagattcatccggccaaaaggcacggcaattcataattccggctctttgaggattgaaaactgcacgctt

SEQ ID NO: 17843 - DNA, 57 bp, unidentified
  source 1..57: mol_type = unassigned DNA; note = methanogen bacteria
acattctcaaacaaccgatgcgaagtcatacataataaggccacattgtccgttgca

SEQ ID NO: 17844 - DNA, 33 bp, unidentified
  source 1..33: mol_type = unassigned DNA; note = methanogen bacteria
tccgttttttcaaacagcgaatttatccgggca

SEQ ID NO: 17845 - DNA, 81 bp, unidentified
  source 1..81: mol_type = unassigned DNA; note = methanogen bacteria
ttcaacgacagtgatgcaacccttgatgtggtcatgtgcagattttcagacaatttcacagtcgaaggaaattcttttctt

SEQ ID NO: 17846 - DNA, 66 bp, unidentified
  source 1..66: mol_type = unassigned DNA; note = methanogen bacteria
agaggcgtcttgagtgttgaaagctcctcgttcatatccaatgccgtaaatgaaaatagcggaggc

SEQ ID NO: 17847 - DNA, 30 bp, unidentified
  source 1..30: mol_type = unassigned DNA; note = methanogen bacteria
ataagcaatgagggggatttgaccgtcagg

SEQ ID NO: 17848 - DNA, 63 bp, unidentified
  source 1..63: mol_type = unassigned DNA; note = methanogen bacteria
tccgttttcgaatccaatgaaatggcagtgggcggagcgatatatctccatctcaaccgcttt

SEQ ID NO: 17849 - DNA, 87 bp, unidentified
  source 1..87: mol_type = unassigned DNA; note = methanogen bacteria
tgccgctttgtttccaacaagtcaatgggatatgccgccgcaataaatggcagtacatatgccgactattatgatttcaacatatac

SEQ ID NO: 17850 - DNA, 120 bp, unidentified
  source 1..120: mol_type = unassigned DNA; note = methanogen bacteria
tcaaaggataccggcgtcattgcggttcattcgggtgctttgaaaatcataaactgcaaatttacaaaaaacaggggcaggaaatatataatcaaaaacaacgatttcctccagatttac

SEQ ID NO: 17851 - DNA, 126 bp, unidentified
  source 1..126: mol_type = unassigned DNA; note = methanogen bacteria
aacaaggctccaaatataataacaaatctctcaaaaagcatgtacagcaacgggcttttaaccaatttctccattttcaatgccaaatttttaaacaacaaggtaaaggatgcggtaatctacaat

SEQ ID NO: 17852 - DNA, 60 bp, unidentified
  source 1..60: mol_type = unassigned DNA; note = methanogen bacteria
attgaaggctcagacgcagacattgaaggaaaggtctacggttccggtgtggttgaggaa

SEQ ID NO: 17853 - DNA, 36 bp, unidentified
  source 1..36: mol_type = unassigned DNA; note = methanogen bacteria
gataacgcttctgaaggaatatacaacatcggagat

SEQ ID NO: 17854 - DNA, 54 bp, unidentified
  source 1..54: mol_type = unassigned DNA; note = methanogen bacteria
cggctttcgggcaattcagttggaatcgtaaacatggcaaatctgagcatctcg

SEQ ID NO: 17855 - DNA, 57 bp, unidentified
  source 1..57: mol_type = unassigned DNA; note = methanogen bacteria
gcaatctcgggccatgaaaagaattcagtaataaacaaaggcaggataaggatggag

SEQ ID NO: 17856 - DNA, 42 bp, unidentified
  source 1..42: mol_type = unassigned DNA; note = methanogen bacteria
gataattccggaccgatttttaataagggtgctttaaacata

SEQ ID NO: 17857 - DNA, 51 bp, unidentified
  source 1..51: mol_type = unassigned DNA; note = methanogen bacteria
tcagacaataaaaacggcgcaattaaaaacaggggtgagctgacggtaggc

SEQ ID NO: 17858 - DNA, 51 bp, unidentified
  source 1..51: mol_type = unassigned DNA; note = methanogen bacteria
tcctcaaaggatggcggcgcaataaaaaattcgggcaggctgacggtagac

SEQ ID NO: 17859 - DNA, 105 bp, unidentified
  source 1..105: mol_type = unassigned DNA; note = methanogen bacteria
attttcaataaggacatcctggtcattgacaaatcctcctttgagctcaacacgtccggcaaaaagggaagtgcaatatacaattcaggggatgtgaaaattgcc

SEQ ID NO: 17860 - DNA, 60 bp, unidentified
  source 1..60: mol_type = unassigned DNA; note = methanogen bacteria
agtcttgatggctatgaatgctgtggtgaagactgtcactgtcaagatgagaactttaca

SEQ ID NO: 17861 - DNA, 228 bp, unidentified
  source 1..228: mol_type = unassigned DNA; note = methanogen bacteria
aatgaaacagtatttgagatagttcctaaatctgtttctgttgttgtttctgttgaggatattgtatatggcgaggatgctattgtttgggtttatggtgaaattgatggtgaatacattgtagggatatataatcaaaattacaccgtaaatgtttttgacggaaaaggaaatactacagtttctgatttgtttgttgatgaagatattttagtttctgtgtctatt

SEQ ID NO: 17862 - DNA, 246 bp, unidentified
  source 1..246: mol_type = unassigned DNA; note = methanogen bacteria
tatagtgcatataacactacaatatttaacatagctcctaaaggaatatccgttgttatttctgttggaaatattacttatggtgaagatactgctgttattgtgcagtctgatgttgccggtgattacatcgtaactattagggatgaaaactatacagtatttgtaaatggaggaactggagttacttttattcctaatttgggtgttggaaatcaaattgtagttactgttaaacgtgatgat

SEQ ID NO: 17863 - DNA, 231 bp, unidentified
  source 1..231: mol_type = unassigned DNA; note = methanogen bacteria
actgcgtttaatgaaactacatttaatattaatcctaaactgaccaatgttttagtctctgttgatgatattacttatggtgaaaatgcttctgccaatattgttgctgaaattgatggaatgtacactttatccgtaaatggcactgaatatccgattgaggtaattgatggtaaagcaagtcaggtcatttctggtttgactgtcggaaattatgttgtacaaattgct

SEQ ID NO: 17864 - DNA, 183 bp, unidentified
  source 1..183: mol_type = unassigned DNA; note = methanogen bacteria
caaaccaccttttatgtagtgcctaaacctatttctcttgttgtatctgttgaagatattacctatgaagaaaaagcaatggttattgttgtgtctgatgttgatggtgagtatttggtttatgttgatgatgctccttatgttgtggatgttcttggtggtactggaaatgtgtctgtttct

SEQ ID NO: 17865 - DNA, 225 bp, unidentified
  source 1..225: mol_type = unassigned DNA; note = methanogen bacteria
gcggttaatttcacttcatttgatgtggcagttaaagagattgatgtttctgtttctgttggggatattatttttggtgagagtgctttggttgttgttgtgtctgatgttgatggtgagtatttggtttatgttgatggtgctccttatgttgtggatgttcttggtggtactggaaatgtgtctgtttctgatttgactgttggtagttatgctgttaatgtt

SEQ ID NO: 17866 - DNA, 246 bp, unidentified
  source 1..246: mol_type = unassigned DNA; note = methanogen bacteria
gcgtacggggtctccgccggcgacaattatgccctgtccggcggatccagtgcatccagtcaccttcgcatcgtaaccgagatacttgcaggaacctacgaccctgccaaccaggcaaccatcaacttcccgtacggttccggaagcatctccggccccctgttcgactacctcatggcagccatcgcctacgtcgtgaccctctgcggggtcagccaggccacggcggccgcaggtaccctcgcc

SEQ ID NO: 17867 - DNA, 33 bp, unidentified
  source 1..33: mol_type = unassigned DNA; note = methanogen bacteria
atgacgaccgccttctccaacggaaccgagaat

SEQ ID NO: 17868 - DNA, 36 bp, unidentified
  source 1..36: mol_type = unassigned DNA; note = methanogen bacteria
tactacatccccctcggactgtggagcaccgtcttc

SEQ ID NO: 17869 - DNA, 108 bp, unidentified
  source 1..108: mol_type = unassigned DNA; note = methanogen bacteria
ttcgcaccctccgtatcctccgccctcctccacggcagcagcccccaggtgggcgccctcgccaacgacctcgcccaccagttcagcaggaccagcatctcctccatg

SEQ ID NO: 17870 - DNA, 213 bp, unidentified
  source 1..213: mol_type = unassigned DNA; note = methanogen bacteria
cagtcaagcaatttcataatggtttccgacaagccggtcaacacatcaataaatctaaacgtttcatcttcaaaaaataatcctttcgaaatcaatgcattggttttggacaaaaacggtaatagggtcgaaagcggaatggttacttttaatgttgatggtgaggactataaggttaaggtgaatgatggggaggctaacttgactcatatt

SEQ ID NO: 17871 - DNA, 246 bp, unidentified
  source 1..246: mol_type = unassigned DNA; note = methanogen bacteria
aatattgtagtcagttatgatgacttatactgttacgcttcttcaaaaatgacattgtctaaggaaattgagataaaggatatttcaatttatctgtccgttgacaataactacaatcctgttgtcattactgcagaagtggttgataaggatggattttctgtgaattgtggtaaagttactttcaatgtggagggaagtgattttactgtagatgtcaaaaacggtttggctagcttgaaatat

SEQ ID NO: 17872 - DNA, 222 bp, unidentified
  source 1..222: mol_type = unassigned DNA; note = methanogen bacteria
tataaatccaattccgtctatgattactttgatatttcagctataaagacttatttggaatttaattttgatacagtcaatgtattcaatcctgttaatataagctgtaccgttagggatttggattccaatttggtcaatagaggatatgtcacttttatcataaataatgttgaaagcaaagtcaaggtagaaaacggagtggccagtttggagtatcta

SEQ ID NO: 17873 - DNA, 195 bp, unidentified
  source 1..195: mol_type = unassigned DNA; note = methanogen bacteria
tcttccaattcaatatccttgaacgtatccaagacaagtgtggatttgtctgtggatgtgagtgttgtgaaaaatgtccatacaattatggtcactatttcaaaacctgtttcagattatgtggtaattaaacttaataataatccttattcagttaaatcagataatggtcaggccattttaatattggaaaat

SEQ ID NO: 17874 - DNA, 102 bp, unidentified
  source 1..102: mol_type = unassigned DNA; note = methanogen bacteria
tatgaaattaatgcatatatggatagttatatttataagtctgatgaagcaacatctgatttcaccgttgataagaaagctaccaaaatttactgtgatgat

SEQ ID NO: 17875 - DNA, 48 bp, unidentified
  source 1..48: mol_type = unassigned DNA; note = methanogen bacteria
tacaacaacaaagcagaatctggaggagccatcaactggtatgccgat

SEQ ID NO: 17876 - DNA, 78 bp, unidentified
  source 1..78: mol_type = unassigned DNA; note = methanogen bacteria
tttgaaggttccaatacagactacaattggtttggaaacaatggaagcaattataatcaaaaaccatataataactcc

SEQ ID NO: 17877 - DNA, 138 bp, unidentified
  source 1..138: mol_type = unassigned DNA; note = methanogen bacteria
tccacattcaacaacaacaccgcaaactatggaggagctatccaatcttataatgaaaatggtaacataatcaactctacattcaacagcaacaaagcaaactccaatggaggagcaatctattgatataatagccat

SEQ ID NO: 17878 - DNA, 39 bp, unidentified
  source 1..39: mol_type = unassigned DNA; note = methanogen bacteria
acattcaacaataatgaggcaagagagggtggagctatc

SEQ ID NO: 17879 - DNA, 30 bp, unidentified
  source 1..30: mol_type = unassigned DNA; note = methanogen bacteria
aactctggaactaatggaggagctatccta

SEQ ID NO: 17880 - DNA, 48 bp, unidentified
  source 1..48: mol_type = unassigned DNA; note = methanogen bacteria
aatgcagactacaattggtttggaaacaatgaaatcaattataaccaa

SEQ ID NO: 17881 - DNA, 102 bp, unidentified
  source 1..102: mol_type = unassigned DNA; note = methanogen bacteria
aacccaaatatgattggactttcagacatatcagaaatcacatttaagctatactcatatgatggaagcgaaataagagaatatgacaatagcatcttatac

SEQ ID NO: 17882 - DNA, 60 bp, unidentified
  source 1..60: mol_type = unassigned DNA; note = methanogen bacteria
ttaagcttaagcacaactagaggtactttaagcaaagataccgcaagattatctgaaatc

SEQ ID NO: 17883 - DNA, 282 bp, unidentified
  source 1..282: mol_type = unassigned DNA; note = methanogen bacteria
tgggacttaaacagaaccataaacggcaacaacaacactgaaatcacattaaacaagaattatacctacaatccagaaatagactctgatttcataaatggaatcataatcaaccgcacactaacaataaacggaaacaagaacacaataaacggatcagaccttgcacgtatcttcaacattatcgcagatgatgtaatcatcgacaacataatatttacaaatggaaacgcagatactggtggagcaatctattgggaaggggactatggtactctaagc

SEQ ID NO: 17884 - DNA, 33 bp, unidentified
  source 1..33: mol_type = unassigned DNA; note = methanogen bacteria
tccacattcaacaacaataacgcaagtgaatat

SEQ ID NO: 17885 - DNA, 30 bp, unidentified
  source 1..30: mol_type = unassigned DNA; note = methanogen bacteria
aacaaagcaaacagaggtggagccatcaca

SEQ ID NO: 17886 - DNA, 84 bp, unidentified
  source 1..84: mol_type = unassigned DNA; note = methanogen bacteria
cctaatgaaatctattaccagaactttgaaggttccaatgctgacaacaattggtttggaaacaatgcaagcaattatgaccaa

SEQ ID NO: 17887 - DNA, 36 bp, unidentified
  source 1..36: mol_type = unassigned DNA; note = methanogen bacteria
ttaaatactgcttttggtgctagacctttaagagct

SEQ ID NO: 17888 - DNA, 147 bp, unidentified
  source 1..147: mol_type = unassigned DNA; note = methanogen bacteria
gttaacagggatattgctcttcaggttaaggtaaaagatcagtttggtgattatattgaggatggtaatgtaacatttttaattgatggtgaggcttttactgttagtttggttgattgtgttgccaataagactgtttcatttgct

SEQ ID NO: 17889 - DNA, 39 bp, unidentified
  source 1..39: mol_type = unassigned DNA; note = methanogen bacteria
gtttcaaaattaattgatattgagccggttaatacttct

SEQ ID NO: 17890 - DNA, 198 bp, unidentified
  source 1..198: mol_type = unassigned DNA; note = methanogen bacteria
tctttgagtgatgatactttgttggttggtgagtctttaacggttactgctgttgttaatgctactcagggtaaagtgttgttctatattaatggtgttttaaatgatactgttgatgttgttagtgatggtgttgcttgtttggttttagataatctttattatggtggttataatgttactgctgttttcactgat

SEQ ID NO: 17891 - DNA, 48 bp, unidentified
  source 1..48: mol_type = unassigned DNA; note = methanogen bacteria
agttctaataggtctgcattttctgtttattctaatactgttcttgaa

SEQ ID NO: 17892 - DNA, 54 bp, unidentified
  source 1..54: mol_type = unassigned DNA; note = methanogen bacteria
gaggcttttactgttagtttggttgattgtgttgccaataagactgtttcattc

SEQ ID NO: 17893 - DNA, 45 bp, unidentified
  source 1..45: mol_type = unassigned DNA; note = methanogen bacteria
ttggttggtgagcctttaacggttactgctgttgttaatgctact

SEQ ID NO: 17894 - DNA, 81 bp, unidentified
  source 1..81: mol_type = unassigned DNA; note = methanogen bacteria
gtgcttttctatattaataatgttttaaataatactgttgttttagatagtatgggtgctgctgttttaactttaaataat

SEQ ID NO: 17895 - DNA, 60 bp, unidentified
  source 1..60: mol_type = unassigned DNA; note = methanogen bacteria
aaagcgaattttactgtcatttatccaactgaaataattacacaagatttaactaaatat

SEQ ID NO: 17896 - DNA, 126 bp, unidentified
  source 1..126: mol_type = unassigned DNA; note = methanogen bacteria
tttacttttagattgcttgacaatcagggtaatcctgttggtgctggaattagtgctacaataaatataaatggtgttttttatacccgaacaactgatgcaaatggatatattactctgaatatt

SEQ ID NO: 17897 - DNA, 39 bp, unidentified
  source 1..39: mol_type = unassigned DNA; note = methanogen bacteria
gttttagatgttgatgtttatgatgtttgttatcctgat

SEQ ID NO: 17898 - DNA, 81 bp, unidentified
  source 1..81: mol_type = unassigned DNA; note = methanogen bacteria
gcgtttgctattgtatctgcatcagttgatggggaatatattgtatcatttaataataaaaattacactgtaattgtttca

SEQ ID NO: 17899 - DNA, 201 bp, unidentified
  source 1..201: mol_type = unassigned DNA; note = methanogen bacteria
gaatctttagttgttagtgttgctaatgttagttatggtgatattccacttgtatttgttaatgctagtgttggtggtaaatatagggttgttgttgaaggtacggatattaataaggttgtattgattaatagttcgttttctttaagttttgttgaattaccgattttgggtgttaaatcaaattataatgttaatgtg

SEQ ID NO: 17900 - DNA, 111 bp, unidentified
  source 1..111: mol_type = unassigned DNA; note = methanogen bacteria
attaatgtattatttagtgttaatccaattccatctagtttaaatattagtgattgtgaatttgtttttggtggggttggaaatattaatttcacatattatggtgcttta

SEQ ID NO: 17901 - DNA, 60 bp, unidentified
  source 1..60: mol_type = unassigned DNA; note = methanogen bacteria
gcaaatatttttatagatgataatcatattattttatctaacttggatgcaggtaattat

SEQ ID NO: 17902 - DNA, 54 bp, unidentified
  source 1..54: mol_type = unassigned DNA; note = methanogen bacteria
aaaactgttaatgttgaagtagataaagcagatccacatttaagtttgaatgtg

SEQ ID NO: 17903 - DNA, 150 bp, unidentified
  source 1..150: mol_type = unassigned DNA; note = methanogen bacteria
aatgtgtctattattcttaaatctgaagttgatggggtttattcagttgatattaatggcagtgcagttattgtagttgtggaaaatggtatcggatttttaagtattaaaaaatctgttaatgtgtataatgctagtgttagtctaata

SEQ ID NO: 17904 - DNA, 144 bp, unidentified
  source 1..144: mol_type = unassigned DNA; note = methanogen bacteria
gattattgtatttttagtgtatatatgaacatgacttatgagtttattgttgaacctaaagttgcatctattaattatggtgaatcaatttcattttatgccggtattaatgatgataatgcaacaggtaatgtaatattcttt

SEQ ID NO: 17905 - DNA, 237 bp, unidentified
  source 1..237: mol_type = unassigned DNA; note = methanogen bacteria
ccgaaattttatgatatttgtgtattgcctgcaaattccactataaattcaaatgatttgactgtaagctatgatgctaatccaattaatattaattatgtttgtgaaaatgcaactggaataatgtatcatgtatatgatatggacaaaaatttagttgaatattctactgttggtttaaatgaaaaaatcacattatataatttagtagttggtaagtattctatcattttaaca

SEQ ID NO: 17906 - DNA, 189 bp, unidentified
  source 1..189: mol_type = unassigned DNA; note = methanogen bacteria
aaacaatacatgattaatatcgaattaggggaaataaaattaaatacaacaattaaatctgcaaaatatccaaatgatgttattgtaactatcacaacagacatatctggaaaatatcaagtattcatcaacaattcctacttaaaggaaattaatcttgttaaaaataatccatacaatttaatcata

SEQ ID NO: 17907 - DNA, 75 bp, unidentified
  source 1..75: mol_type = unassigned DNA; note = methanogen bacteria
gaagatattaaaattttcaaagtctacaatggtacaataaatttgaatttagatgtttcagacatttcttaccca

SEQ ID NO: 17908 - DNA, 87 bp, unidentified
  source 1..87: mol_type = unassigned DNA; note = methanogen bacteria
ttaacaataaatcttaaaacaaatgtttctggaaaatataggattcaaatccttgaacggaattttattaaagaaatcaacttaatt

SEQ ID NO: 17909 - DNA, 63 bp, unidentified
  source 1..63: mol_type = unassigned DNA; note = methanogen bacteria
attatggaaagtattaatcttggtattctacctccaaattcatatacaattaatatatctagc

SEQ ID NO: 17910 - DNA, 210 bp, unidentified
  source 1..210: mol_type = unassigned DNA; note = methanogen bacteria
gaagctaaatcaattcaaaaaatcgttaaaattaatgaatcaattgattatcattcaactgttattatttctaaaaatacttcactttattatcataatggtactaaacttgaagctaaattagttgatgctaatggtaatgctataataaatgaaaatattgagtttgaaattaatggtaaaaattatactcgtatcactgacagtaat

SEQ ID NO: 17911 - DNA, 294 bp, unidentified
  source 1..294: mol_type = unassigned DNA; note = methanogen bacteria
attgctagaattgcaattaatcttgatgttggtgagtatacagtgaatatttactatgcaggtaacaaaaatcaaaaatctgctaaaaacacagtaatcgttagtgttttaagcacaattaatggtactaatattgttaaaatattccataatgatactcaatactatgcaactttcaaagacagtaaaggtaattaccttgcaaatggaatggaagttacatttaatattaatggtgtaatgtatcatcgtaaagttaacgggaacatgggtcttgttagattaaacattaat

SEQ ID NO: 17912 - DNA, 231 bp, unidentified
  source 1..231: mol_type = unassigned DNA; note = methanogen bacteria
gaatacattttaactgcaattaaccctgttaataatgagatgatttctaatattattaaagttattccaagaataattgaaaataatgacttggtaaaatactttaaaaacaactcacaatacagaattaaagtattggatgataaaggtaatgctgtaggtgcaaatgaaaaagttattttcaacattaatggcgtaatgtatgaaagattcactgatgatgatggttat

SEQ ID NO: 17913 - DNA, 231 bp, unidentified
  source 1..231: mol_type = unassigned DNA; note = methanogen bacteria
atcacggcccaatataaaggatccatggtttctaataaaattaaagtattgcctattattactgcaggcgatttaattaagaaacaaggcactcctgatgcatttaaagctaaaattgttgatggtaaaggtaaacctattgccgctcaatatgttacattcaatattaatggtgtaatgtatcaaagattaactgataataatggtattgctaagttaaatattaatctc

SEQ ID NO: 17914 - DNA, 33 bp, unidentified
  source 1..33: mol_type = unassigned DNA; note = methanogen bacteria
tcgaattatgtaacagtaacaaattgagttaat

SEQ ID NO: 17915 - DNA, 201 bp, unidentified
  source 1..201: mol_type = unassigned DNA; note = methanogen bacteria
attaagaaggacactccaatcacagcatctgctgttgtgaatggtaacagggttacattgactgtaaacgtggatgaaaacgctaccggatttgtaaaagtaactgttggaagtactgttactaatattgaagtagttgacggaaccgcaacactaacaactgtcttggtgccaaacagttactttgtagatgtaacttac

SEQ ID NO: 17916 - DNA, 63 bp, unidentified
  source 1..63: mol_type = unassigned DNA; note = methanogen bacteria
aaaacctctgtgacattcaccataacagatattgccaagaaaaacaccaatattgatcttaac

SEQ ID NO: 17917 - DNA, 123 bp, unidentified
  source 1..123: mol_type = unassigned DNA; note = methanogen bacteria
gtttatgaagacgctgcattggttaaagttgatataaacgaatctgcaacaggactggtaaaattctatatggtaggtaaagaaagcggtgaagaatatacaatgtacatggatgttatagac

SEQ ID NO: 17918 - DNA, 66 bp, unidentified
  source 1..66: mol_type = unassigned DNA; note = methanogen bacteria
gttgcaacatacatgggagattcagtattcaacaccaacactacatccaaagacgttgaaatcctc

SEQ ID NO: 17919 - DNA, 204 bp, unidentified
  source 1..204: mol_type = unassigned DNA; note = methanogen bacteria
catctcatgaaagatactccaatcgacgtagaagttgaaaccaatgcaaacagagttacattaactgttaaagttgatgaaaacgctacaggatttgttgaagtcaaatctggcgtaagtgtatccaatattgcattagaaaatggtgaagctacattaacaatcaccttgccttacggaagctacacattagatgtaacttac

SEQ ID NO: 17920 - DNA, 105 bp, unidentified
  source 1..105: mol_type = unassigned DNA; note = methanogen bacteria
gaagagtacactctctatgcagatgtaattaacggtaaagcggttcttgaatatgttcttttaactggtgattacactgtagttgcaacatatatgggagatgac

SEQ ID NO: 17921 - DNA, 189 bp, unidentified
  source 1..189: mol_type = unassigned DNA; note = methanogen bacteria
cctatttctgcccgtgctgatgtgagcggaaacagggttacattgactgtgaacgttgatgaaaacgctacaggatttgtacgattagctgttggcggtactgttgctaatattgaagtagttgatggtgtcgcaaaattaacaactaatttacttccaaatagttactttgttgaggtaacttatctt

SEQ ID NO: 17922 - DNA, 192 bp, unidentified
  source 1..192: mol_type = unassigned DNA; note = methanogen bacteria
actaaggtgacatttactgttactgaagttgctaaggaaaatactactattgatcttgacgtcctggtttatgaggatactgccttgattatggttgatttggataaagctgcaactggtttggttaaattgtatatggtcttaaaagaaaccggtgaggactatactatgtatatggatgttgtagatggt

SEQ ID NO: 17923 - DNA, 144 bp, unidentified
  source 1..144: mol_type = unassigned DNA; note = methanogen bacteria
gttgttaatggaaacagggttactttaacagttaatgttgatgaaaatgctactggttttgttgaacttaaatttggtgataatgtatttaacattgcattaactgatggtgttggaacattgacaacttcactgccttatgga

SEQ ID NO: 17924 - DNA, 33 bp, unidentified
  source 1..33: mol_type = unassigned DNA; note = methanogen bacteria
agtctggatattacttatttaggtgatgaaaac

SEQ ID NO: 17925 - DNA, 117 bp, unidentified
  source 1..117: mol_type = unassigned DNA; note = methanogen bacteria
gaaggacttgacgctcaaataggcaaaactttttcacgtgcaggaaaaaaattaggaaatgaatttctaccttctattaaggacttaaagaaagcctttatagaattggataatgaa

SEQ ID NO: 17926 - DNA, 177 bp, unidentified
  source 1..177: mol_type = unassigned DNA; note = methanogen bacteria
atgtttggtcccatattaagtggacagggtactcctatgctgttatatatggcaaagttctctcctttcttcttacaacataatatgttttataagtggcttagtaatgatgttaaaaatattgaatctgtattaaatttgccttctgttatggatacggttggaatagattgctat

SEQ ID NO: 17927 - DNA, 57 bp, unidentified
  source 1..57: mol_type = unassigned DNA; note = methanogen bacteria
acagtgtttggtgcatatgatggtaatgtggctgaatatgggccggataattatttc

SEQ ID NO: 17928 - DNA, 240 bp, unidentified
  source 1..240: mol_type = unassigned DNA; note = methanogen bacteria
ggtgatggtggtatgcttgatgatgaatgtgaggaggaatttgatgtggtggatgtttttgttgatgcagtgtatgcggatttgaaggatgtgggtggtgttaatgtttttggtagtgctgttcaaaaaacggtagtatcttctgaaagtgatgttctggtaaatccgtcagcttctaaaagtattgtttctgtggcaaatgcagataaaaatatagggtttataccgtctatgtttagt

SEQ ID NO: 17929 - DNA, 105 bp, unidentified
  source 1..105: mol_type = unassigned DNA; note = methanogen bacteria
gatgcattaataggcaaatcttttagccgtgcaggaaaaaagataggtaatgaattcttacctcagttgaaagaaattaaaaaggcatttattgagatagatgag

SEQ ID NO: 17930 - DNA, 261 bp, unidentified
  source 1..261: mol_type = unassigned DNA; note = methanogen bacteria
aatactaagctgacatttactgtaacagaggtttccaaggaaaatactgctattgatcttaacattattcctgttgatgaagacagtgttgtgtttgttgttagtttgaataaatccgcaactggactggttaaattctatataatcagtaaagaaagtggtaaaaacgctacttcgtacatggatgttaaaaatggttatgcaagaatcattgttcacgactttgattctggaaactatactgtagtcgcaacatacatg

SEQ ID NO: 17931 - DNA, 30 bp, unidentified
  source 1..30: mol_type = unassigned DNA; note = methanogen bacteria
gcggttattggtgcttttgttcctactgtt

SEQ ID NO: 17932 - DNA, 87 bp, unidentified
  source 1..87: mol_type = unassigned DNA; note = methanogen bacteria
cttgagggtagtgtttatcatgattacagtaatctttggggaaatgccttgtcttttaccatgttaggtttcagtatgggtaatctt

SEQ ID NO: 17933 - DNA, 243 bp, unidentified
  source 1..243: mol_type = unassigned DNA; note = methanogen bacteria
ggcaaaggtaatgatcctttcagtgaaatctataaggatcctatatttaaggaggctttggacaattgtcttaaggatggtatgaacagtatggagactttgcgtaacgcttatcctgatcttgtcaattattggtacaagtctgttgatgcattgttttccaatcctcaggccagtgctcaggatgtggtgaatctttttgatactcttaatcttatcacatccaccactgctgtgaatggt

SEQ ID NO: 17934 - DNA, 33 bp, unidentified
  source 1..33: mol_type = unassigned DNA; note = methanogen bacteria
aatacagagaataataatattattgaggaccat

SEQ ID NO: 17935 - DNA, 54 bp, unidentified
  source 1..54: mol_type = unassigned DNA; note = methanogen bacteria
gcaaataatgctataattagtaattaccttggtccgctcaattatttggatagt

SEQ ID NO: 17936 - DNA, 48 bp, unidentified
  source 1..48: mol_type = unassigned DNA; note = methanogen bacteria
ttgggtattatgtatatgtctaacagtatggtttcctatttgagtttg

SEQ ID NO: 17937 - DNA, 48 bp, unidentified
  source 1..48: mol_type = unassigned DNA; note = methanogen bacteria
gacgatatgcaggtttcgtcggtcgcagcggccgacttctatgacgac

SEQ ID NO: 17938 - DNA, 69 bp, unidentified
  source 1..69: mol_type = unassigned DNA; note = methanogen bacteria
aacgacttcaacggggaccacatggacatctttggctacaagttcccgctgttcgctttcgattccgat

SEQ ID NO: 17939 - DNA, 243 bp, unidentified
  source 1..243: mol_type = unassigned DNA; note = methanogen bacteria
atccgtgtggtccgctacgacgccaacggcggacagggaagcacccccgctaccgtcttcttctgcgacggagagggcagcctcccggagaacgggttcaccagggagggatacaccttcggcggatggtcgaggaaggcggacggcagcgacccaatttcagccgacgcggagctctccgccctcggtaagattcatttcctgaagctctatgcagtatggaacaaggaggaggtgcagcag

SEQ ID NO: 17940 - DNA, 240 bp, unidentified
  source 1..240: mol_type = unassigned DNA; note = methanogen bacteria
tatactattacatcaaccaaccctgctacaggtgaaaatgctgcaaacaatattactgtactctccaccattactggtgatgatattgtcaaatactataaaaacggtactcaatatactgctactttccttgacggtgaaggtaatcctttaaataacggtactgcatcattcaacattaacggtgtaatgtacggtcgtaagattgttaacggtactgctaaacttaatattaattta

SEQ ID NO: 17941 - DNA, 249 bp, unidentified
  source 1..249: mol_type = unassigned DNA; note = methanogen bacteria
ggcaatctgaccgatattgttaattcaattaacaacggcactcttatttcattaattaatgaagctgcctctaaactcaatgcaactttagtaaatcttactgaagcatttaaaaaagtcacagtcattaacggcactgaagttgacataaatgctactttagctaagttaactaattatgtagattttatttccaagtttaaagttgaaaatattgcaggattcaatgctaccaaatcattggagttc

SEQ ID NO: 17942 - DNA, 72 bp, unidentified
  source 1..72: mol_type = unassigned DNA; note = methanogen bacteria
aatactacttcaaatattgctgcaatgcttccgtcatttgacgttaacagctctacattaatcagtcctatt

SEQ ID NO: 17943 - DNA, 51 bp, unidentified
  source 1..51: mol_type = unassigned DNA; note = methanogen bacteria
ttatccgaaagtattaaagctattgataatggaacacttatttcgttaatt

SEQ ID NO: 17944 - DNA, 249 bp, unidentified
  source 1..249: mol_type = unassigned DNA; note = methanogen bacteria
gaaaaccttactaaaggtattggcctgtatggtgatcctgaagctcctgcagttaatgttactgttaaatttaacattaacggtgtattgtatacaagaacaactaatgcaaccggtgatgctaagctgaatattaacttgcctgtcaaggattatgtcattaccaccacgtataatggcctcagtgttgcaaataacattaaagttgctgaacagtttcgcatcttcaccagcttatcctcttatttc

SEQ ID NO: 17945 - DNA, 36 bp, unidentified
  source 1..36: mol_type = unassigned DNA; note = methanogen bacteria
aattatttagatatttatttcattttcaatgacgct

SEQ ID NO: 17946 - DNA, 39 bp, unidentified
  source 1..39: mol_type = unassigned DNA; note = methanogen bacteria
catgtaattaatggcggtaggatattagaagcatatact

SEQ ID NO: 17947 - DNA, 69 bp, unidentified
  source 1..69: mol_type = unassigned DNA; note = methanogen bacteria
gattatctctttggtgttccatctgatagagaattagaacatttcatgtggaataatactaacggatat

SEQ ID NO: 17948 - DNA, 39 bp, unidentified
  source 1..39: mol_type = unassigned DNA; note = methanogen bacteria
aacttagtttatggaatatcaatctttacttcacatgaa

SEQ ID NO: 17949 - DNA, 69 bp, unidentified
  source 1..69: mol_type = unassigned DNA; note = methanogen bacteria
gattggattttcggtgtacctagtgatagacaattagagcactttatgtggaatgaaattaatggatat

SEQ ID NO: 17950 - DNA, 105 bp, unidentified
  source 1..105: mol_type = unassigned DNA; note = methanogen bacteria
gagataggttttaataaattcaaaaacaataaaaacggacttattctaaaaaacaataataaaatatattccaatacattttcaggcaatgatatggggattaat

SEQ ID NO: 17951 - DNA, 144 bp, unidentified
  source 1..144: mol_type = unassigned DNA; note = methanogen bacteria
aatacttttaaaaacaacaaaatctgtgttgtttcaaatgaaagcaatacatttttaggaaatgtattctataataattccatggctttgaaatgcttgaagtcaaataaaatatccaacaatacattttcttataatgaaaaa

SEQ ID NO: 17952 - DNA, 39 bp, unidentified
  source 1..39: mol_type = unassigned DNA; note = methanogen bacteria
gaattgttcagcaattctttctcatacaacacaatagga

SEQ ID NO: 17953 - DNA, 51 bp, unidentified
  source 1..51: mol_type = unassigned DNA; note = methanogen bacteria
tcaaacaataatattatcaagtccaattccttctcaaacaattaccaaaac

SEQ ID NO: 17954 - DNA, 60 bp, unidentified
  source 1..60: mol_type = unassigned DNA; note = methanogen bacteria
agaggaaatgaaaacaaggcatcaggcaacatcttcaaaaacaacaaataccatgccttg

SEQ ID NO: 17955 - DNA, 93 bp, unidentified
  source 1..93: mol_type = unassigned DNA; note = methanogen bacteria
aatatcttcaaagacactggaaacataagtctgcgagtaaatggaaacagcatcaagatcaaaaacaacaagttcacaggcaataagaacacc

SEQ ID NO: 17956 - DNA, 39 bp, unidentified
  source 1..39: mol_type = unassigned DNA; note = methanogen bacteria
acaaactccaaaaagggaatcctcatacatggagataaa

SEQ ID NO: 17957 - DNA, 150 bp, unidentified
  source 1..150: mol_type = unassigned DNA; note = methanogen bacteria
ataagtaaaaacaatataaccaaatcaaataaaggattattaatccatggaaaccataacaacatcctgcagaatgttataaagagcaacaggataggagtgcacaattacaagtccaaaaacaacaaaatcaactacaactacattgtc

SEQ ID NO: 17958 - DNA, 33 bp, unidentified
  source 1..33: mol_type = unassigned DNA; note = methanogen bacteria
aaagatattatgcaaatgttctatataaaggat

SEQ ID NO: 17959 - DNA, 39 bp, unidentified
  source 1..39: mol_type = unassigned DNA; note = methanogen bacteria
aatttaacttctggaatttctatctttacttctcacact

SEQ ID NO: 17960 - DNA, 69 bp, unidentified
  source 1..69: mol_type = unassigned DNA; note = methanogen bacteria
gacttcattttcggtgtcccatctgatagaaacttagaacatttcatgtggaacaatgttaatggttat

SEQ ID NO: 17961 - DNA, 30 bp, unidentified
  source 1..30: mol_type = unassigned DNA; note = methanogen bacteria
agagcagtcagaactcatcctttaagtctt

SEQ ID NO: 17962 - DNA, 39 bp, unidentified
  source 1..39: mol_type = unassigned DNA; note = methanogen bacteria
ttaaatttatatgctggaattccaatattttcttcacgt

SEQ ID NO: 17963 - DNA, 69 bp, unidentified
  source 1..69: mol_type = unassigned DNA; note = methanogen bacteria
gattacttatttggagtaccctcagatagagatttggaacatttcatgtggaataatgttaacggatat

SEQ ID NO: 17964 - DNA, 48 bp, unidentified; identical to SEQ ID NO: 17937
  source 1..48: mol_type = unassigned DNA; note = methanogen bacteria

SEQ ID NO: 17965 - DNA, 69 bp, unidentified; identical to SEQ ID NO: 17938
  source 1..69: mol_type = unassigned DNA; note = methanogen bacteria

SEQ ID NO: 17966 - DNA, 33 bp, unidentified
  source 1..33: mol_type = unassigned DNA; note = methanogen bacteria
gatgagttgatccatagcggtgccggggaggta

SEQ ID NO: 17967 - DNA, 63 bp, unidentified
  source 1..63: mol_type = unassigned DNA; note = methanogen bacteria
attgatggaaacaataaaacaatagacggtggagacttgtcaagaattttcattgtatcggca

SEQ ID NO: 17968 - DNA, 138 bp, unidentified
  source 1..138: mol_type = unassigned DNA; note = methanogen bacteria
ggaatgagcaatgaggaattgatgatgttctcaagcaccgtgaacgatgtaggtcagagagctatcctcatgggaaagagcggtgaggaggcgatttccctcatgcaagcggcaggaagaggattgaacggtgagttc

SEQ ID NO: 17969 - DNA, 249 bp, unidentified
  source 1..249: mol_type = unassigned DNA; note = methanogen bacteria
gagacactcacagaccttggatggagcggtgcggctgacgatgtcgagggctatcagatggctttggacaaggctcttgagaagggcggagacatggacggaatgctcgacaccacaacagggcaccttgagacattgaagaagaacttccgtgtcgcaggtaggcatgtgggagagatgttcactccatacatagacatggctgtgcagaagctcaatgacttgaatgacaggtttcctggattgttt

SEQ ID NO: 17970 - DNA, 171 bp, unidentified
  source 1..171: mol_type = unassigned DNA; note = methanogen bacteria
acagcaggtctgcacaggctttggagcgcattcatcaacaatcctaacgtacaaggattcctgaaggacctgtctaacgcttggaatgacatatgcgaggcgttggctcctgtcatagattgggctaggaaggcttggaacgagctgttccctcctagcgccacaggaagc

SEQ ID NO: 17971 - DNA, 45 bp, unidentified
  source 1..45: mol_type = unassigned DNA; note = methanogen bacteria
ggcaaggttgtgaacagtgcgaaaagcgcttgggaagccattgga

SEQ ID NO: 17972 - DNA, 123 bp, unidentified
  source 1..123: mol_type = unassigned DNA; note = methanogen bacteria
gccttcggtccgtcgcacagcatgtcgctgtcggaggctgccggcaatctgatctctgctatagacaaaggcgggaaagggctgaccaatgacgagctctacgtctacgagtcccgcctgccc

SEQ ID NO: 17973 - DNA, 48 bp, unidentified
  source 1..48: mol_type = unassigned DNA; note = methanogen bacteria
atcgccagcgggttcaccctctgggggctcctcgggaactccgacttc

SEQ ID NO: 17974 - DNA, 90 bp, unidentified
  source 1..90: mol_type = unassigned DNA; note = methanogen bacteria
acggtcatactgaccacatccgattccgaggacctgcagaacgcggtctcctggctgtacgggagcttcacatccgtcgactgggacaat

SEQ ID NO: 17975 - DNA, 33 bp, unidentified
  source 1..33: mol_type = unassigned DNA; note = methanogen bacteria
aggatgatcatgatcccgcaggagctgccggtg

SEQ ID NO: 17976 - DNA, 90 bp, unidentified
  source 1..90: mol_type = unassigned DNA; note = methanogen bacteria
gatttaatccacagtggagttaatgagattgtattggatgcagatattgttttagacaagtgggaaagaccaaaatatgcggaaggcatt

SEQ ID NO: 17977 - DNA, 147 bp, unidentified
  source 1..147: mol_type = unassigned DNA; note = methanogen bacteria
gatgttgatcgtttggttattgatggaaatggtcattcaattgatgcatgtggtaaagtagggatattcagatgcagtggaaagaatattacaattaaaaataccacctttaaaaatggattatcagttgggggtggggccatatat

SEQ ID NO: 17978 - DNA, 39 bp, unidentified
  source 1..39: mol_type = unassigned DNA; note = methanogen bacteria
tttgaaggtaatgtaagtccatatggatcgggtattagt

SEQ ID NO: 17979 - DNA, 39 bp, unidentified
  source 1..39: mol_type = unassigned DNA; note = methanogen bacteria
agtaacgttatcaataataagaaggatttgacttttatg

SEQ ID NO: 17980 - DNA, 69 bp, unidentified
  source 1..69: mol_type = unassigned DNA; note = methanogen bacteria
gatttttcatacctaaacagtttaatacaggaaagtactgatggaatagttagtctggaaaatgatatt

SEQ ID NO: 17981 - DNA, 30 bp, unidentified
  source 1..30: mol_type = unassigned DNA; note = methanogen bacteria
ttggaaaattatgaattggacttctttgaa

SEQ ID NO: 17982 - DNA, 171 bp, unidentified
  source 1..171: mol_type = unassigned DNA; note = methanogen bacteria
atcactgaagacaacataacaatagaaggaaataaccatataatcgatgcaaaaaacagaacacgaatatttcaaatacttggaaaaaacatcacaataaaaaaaataatattcaaaaacggatatgcatccaataaatatggagaacacataaacggcggaggagcaata

SEQ ID NO: 17983 - DNA, 66 bp, unidentified
  source 1..66: mol_type = unassigned DNA; note = methanogen bacteria
acactcgaagactgccaattcatcgaaaacacatcagacaatgatggcggagcaatacaaaacaac

SEQ ID NO: 17984 - DNA, 39 bp, unidentified
  source 1..39: mol_type = unassigned DNA; note = methanogen bacteria
aatgaaaacaataagttttttaattatgatacaaaatca

SEQ ID NO: 17985 - DNA, 117 bp, unidentified
  source 1..117: mol_type = unassigned DNA; note = methanogen bacteria
gagattgttgattcggggttttataataattcaagcaaaaataaatcattaataaacaataatggtgaattaataatcatcaatacaaatttcacaaacaataatagccaatcagaa

SEQ ID NO: 17986 - DNA, 75 bp, unidentified
  source 1..75: mol_type = unassigned DNA; note = methanogen bacteria
caggttttagttaaaaactctaattttacaaataattcctctacaaaaaatggtggagcaataatctgtcgggaa

SEQ ID NO: 17987 - DNA, 222 bp, unidentified
  source 1..222: mol_type = unassigned DNA; note = methanogen bacteria
acgatttttgagattaaggattctagatttgtaaacaataactcaaatctcaaaggcggagcaatatatagtgatggagatgaatttaagttgcatgattgtatttttaatggaaaccatgcgtttagtgttggtggtgctatatataatcatggtaaacttagttgtaaaaatactgatttcactaataattccgcacaaaatcacggcggtgcgatagct

SEQ ID NO: 17988 - DNA, 69 bp, unidentified
  source 1..69: mol_type = unassigned DNA; note = methanogen bacteria
gattcaggtaatgtggccgattgttattttgccggtaacactgcttcttcttctggtggtgctgtcagt

SEQ ID NO: 17989 - DNA, 69 bp, unidentified
  source 1..69: mol_type = unassigned DNA; note = methanogen bacteria
tgtaatttcaccagcaatgaagcgaatggcgagaaaagttctggtggagcaatttactttaatggcgca

SEQ ID NO: 17990 - DNA, 144 bp, unidentified
  source 1..144: mol_type = unassigned DNA; note = methanogen bacteria
aatgttacaaattctatcttcacagccaacaaggcaactagaactggtggagcaatatttttcaaggataattcagtcgataacaagtttgtcgctgatttctatggcaatagcgcaggacaaagcggaggagcaatattcttc

SEQ ID NO: 17991 - DNA, 132 bp, unidentified
  source 1..132: mol_type = unassigned DNA; note = methanogen bacteria
aacactttcgattgcattttcaaggacaattatgcagcttatggtggagcaatgtttttctacaaaaaggcaaacggcaataagattggaggcgactttataaacaatactgccaaatcatgcggaggtgca

SEQ ID NO: 17992 - DNA, 63 bp, unidentified
  source 1..63: mol_type = unassigned DNA; note = methanogen bacteria
agcttcatcaacaacagtgctttaggtcaggttgattcagaaaacggaaacggtggtgcaata

SEQ ID NO: 17993 - DNA, 150 bp, unidentified
  source 1..150: mol_type = unassigned DNA; note = methanogen bacteria
aaagaaacttcaatgagcattaaagttgatgatgatgagattgttattgaattgcctgaagatgctactggtaatgtgactgtatctattgacggtaagcctcaaactgttccggtttcaggcggtagggctgttgttgatatttctggt

SEQ ID NO: 17994 - DNA, 30 bp, unidentified
  source 1..30: mol_type = unassigned DNA; note = methanogen bacteria
gtaacttatcctggtgatgacaattatgat

SEQ ID NO: 17995 - DNA, 201 bp, unidentified
  source 1..201: mol_type = unassigned DNA; note = methanogen bacteria
gtttcaaattcaaccagctttgaagttcctaaagtttcagattatccaattgacataactgaagaagacggtaaattagttattactgttcctgatgatgctactggtagtgtgactgtatctattgatggtaagcctcaaactgttcctgttgaagatggtaaggctgttgtagatatttccggtttagaacctggtaaa

SEQ ID NO: 17996 - DNA, 297 bp, unidentified
  source 1..297: mol_type = unassigned DNA; note = methanogen bacteria
ggtgttgaagtaacctatcctggtgataagaaatatgctccagtatccaatgcaacaatcgtcgacattccgaaagtcgttgattatccattcgaagtaatagctgaagacattaatgttggacaaaaaactaatataactgtaaacttacctaaagatataaacggtcaggtattagttgatattggtggtgtcggatattatgtaactgtaactaatggtgttgctcatatagagttaccacttgatttaaaaccaggatcttatgatgctgttgttacattccctggaaacgag

SEQ ID NO: 17997 - DNA, 75 bp, unidentified
  source 1..75: mol_type = unassigned DNA; note = methanogen bacteria
aactggactaatgttgttgttgccaaatctaatttgactgaaaataaaagtgccgataatgttacttttgttgaa

SEQ ID NO: 17998 - DNA, 213 bp, unidentified
  source 1..213: mol_type = unassigned DNA; note = methanogen bacteria
cttggaaatgagacctatttcatggttattgttaaaaatactggtaactgtgatttgcatgacattagggttgttgaaatattcaactctacagaaatggcctatgtaaatcataataaacagaatttatgggttaaaactggtgatgttttcgcttatcaaggtgttttggcaaaaggtgaaagtgttaactttaccatttggtttaagact

SEQ ID NO: 17999 - DNA, 30 bp, unidentified
  source 1..30: mol_type = unassigned DNA; note = methanogen bacteria
gaaagcgaaaacttaacagtaatgaataac

SEQ ID NO: 18000 - DNA, 39 bp, unidentified
  source 1..39: mol_type = unassigned DNA; note = methanogen bacteria
gatgtctatttcatgattgttgtaaccaacattggtaac

SEQ ID NO: 18001 - DNA, 111 bp, unidentified
  source 1..111: mol_type = unassigned DNA; note = methanogen bacteria
gataatgtaaccgtctatgaaatttatgattctaatgaattggattcaattacattaatcaatggtaaaaaatggactcaattcggcaatactttcatatatgatggtaga

SEQ ID NO: 18002 - DNA, 210 bp, unidentified
  source 1..210: mol_type = unassigned DNA; note = methanogen bacteria
tttgttaatgatactgttttgtggacaattactattgttaatgttggtcctagtgttgcaaaaggcgttattgtcaatgatacattgcctgatggcgttgaaattataggtactatttctaatggtggtcaacaaagtggtagaaatattgtttggaatattggagatttaaaagttaaagatctgattgttcttacttttgctaccaaa

SEQ ID NO: 18003 - DNA, 30 bp, unidentified
  source 1..30: mol_type = unassigned DNA; note = methanogen bacteria
agatccaataacaaagctatcaataccact

SEQ ID NO: 18004 - DNA, 189 bp, unidentified
  source 1..189: mol_type = unassigned DNA; note = methanogen bacteria
gttttatggactatttctgttgttaatgttggtcctagcactgcaaaagatgtcattgtaaatgatactttgcctgatggcgttattgtaatcggagaaattccttatcatggtgtaatatctggcaatactattgtttggaaacttggagatttacaagtaaatgctccagtcatcataacattcact

SEQ ID NO: 18005 - DNA, 189 bp, unidentified
  source 1..189: mol_type = unassigned DNA; note = methanogen bacteria
aaatggacaattactgttgtaaacaatggtccaagcgctgctaaagatgttgttgttaatgatacgattccaagcggtcttgagtttgtagttcctgaaaattgcactttcgatggaaaatatttgatctggaatattgctacattggaagtgaatgcacctgtgactttagaattaataactaaagtt

SEQ ID NO: 18006 - DNA, 210 bp, unidentified
  source 1..210: mol_type = unassigned DNA; note = methanogen bacteria
tatgtaaatgatatggtcgaatggactataattgtattaaatagaggtccttcatccgctgtgggtgttgttgttaatgatactttacctgacggtttagaaatcatttcagcaactccatctgtgggggagtttaataataaaactagggtttgggagattgaaaaattagatattaatgaaccagtttcccttattttggtaactaaa

SEQ ID NO: 18007 - DNA, 42 bp, unidentified
  source 1..42: mol_type = unassigned DNA; note = methanogen bacteria
gattcaaatgaatctaacaatcatgcgcaaaacacaaccgtt

SEQ ID NO: 18008 - DNA, 186 bp, unidentified
  source 1..186: mol_type = unassigned DNA; note = methanogen bacteria
aaatggaatattactgttgtaaacaatggtccaagcactgcaagagatgttgttgttaacgacaaattgcccgatggcgtaagactactgaaagttcctgaaggttgtacacaaaaaggaaatactgtaatctggaacattggaaacttgaaaacaaacgttcctgtttcaattacattattgact

SEQ ID NO: 18009 - DNA, 177 bp, unidentified
  source 1..177: mol_type = unassigned DNA; note = methanogen bacteria
gttaatgcaataacagttaatttaacagaccttgttaaatggactatcgttgttaaaaataatggtcctagtactgctcgtgacgttatggttgctgatgttttacctgatggtcttaaattgattggtgctgatgcgtctgttggcagttattcaaatggtgtttggaatgttggg

SEQ ID NO: 18010 - DNA, 36 bp, unidentified
  source 1..36: mol_type = unassigned DNA; note = methanogen bacteria
acagattcatcttctgaaactttagttttaattact

SEQ ID NO: 18011 - DNA, 228 bp, unidentified
  source 1..228: mol_type = unassigned DNA; note = methanogen bacteria
atgtcaaacaatagggcaaataacactactgatgtaaaaccggtttgtgatgttgaagtcaccaaacttgtaaatgcatctgaaatttactttaatgatttagttgaatggactgttgttgttaaaaataatggtcctagtactgctcgtgatgttaaagttgttgatgttttaccggatggtttgaaattggttggtgctgatgcgtctgttggcagttattcaaat

SEQ ID NO: 18012 - DNA, 36 bp, unidentified
  source 1..36: mol_type = unassigned DNA; note = methanogen bacteria
catagcggtgcaaaagagattgcattgcattcagat

SEQ ID NO: 18013 - DNA, 42 bp, unidentified
  source 1..42: mol_type = unassigned DNA; note = methanogen bacteria
ggaaacggccacacaatcgatgcaaaaggaaaggcacgaata

SEQ ID NO: 18014 - DNA, 33 bp, unidentified
  source 1..33: mol_type = unassigned DNA; note = methanogen bacteria
ttggttaaattcactattgttgtgaataatact

SEQ ID NO: 18015 - DNA, 258 bp, unidentified
  source 1..258: mol_type = unassigned DNA; note = methanogen bacteria
gttatgaacgctacaaatgtggttgttagtgatatcttacctgatgaatttgtattctacaaagtaagtgaaggaaatgttactgatggtcagaaagttagctggactattgataagtttaatacaggtgatgttaaaacattctggataatcgcaagaactattgcaaccaatgcaactacaaatgtcgtaactgtaacatctaaagagaataaaacaaatgtaacaggcaaagctgttgtcaatgttgttgaaatt

SEQ ID NO: 18016 - DNA, 144 bp, unidentified
  source 1..144: mol_type = unassigned DNA; note = methanogen bacteria
actaatgtgactatctgtgatgttttaccaaacggatttgtatttgatagggcaatagatggttatactcgaactggtcaggaaatcaaatggcatttcgacacagttaaatctggtgaagttattgaactctggattacagca

SEQ ID NO: 18017 - DNA, 135 bp, unidentified
  source 1..135: mol_type = unassigned DNA; note = methanogen bacteria
actatctgtgatgtattgcctgatggtttcacatttgttgacgcttcagaaggttacaaccagactggtcaaaaagtagaatggtatttcgatactttaacaaaaggagtctatcagctatggattgttgccaaa

SEQ ID NO: 18018 - DNA, 147 bp, unidentified
  source 1..147: mol_type = unassigned DNA; note = methanogen bacteria
gctactaatgtgactattcgtgatgttttacctaacggattagcatttatcaatgctactggagataaaattgtaaatggacaggaaattacatggcatttcgatactttaacaaaaggatactatgaatttgaaatagttgctaaa

SEQ ID NO: 18019 - DNA, 282 bp, unidentified
  source 1..282: mol_type = unassigned DNA; note = methanogen bacteria
acagttatcaaagaggttgacgtcaaatctgttgacgttttaggtcttgttaacttcacaattactgtaactaacattggtaaaataaatgttactgatgtatcatttacagatatcatggatctctcagcattcgaaattaaaggttacaatggaacattcaaaccagatggaaatgaacttctatttgaaatcggttccttaaaagttggtgaaacatacaaagtttggattcaggctaaagctttaacaaacggtactttcactaatgttgttaatgtg

SEQ ID NO: 18020 - DNA, 201 bp, unidentified
  source 1..201: mol_type = unassigned DNA; note = methanogen bacteria
aacttcacaattgaagttacaaatgaagatgttctcaatgctacatacctgtttatctatgatatgatacctggcggctttgaatttgtcaatgctactgaaggttattataaagaaggaaacatggtattctggcaatttgaaagattatccaatggttcaagcattaaactttggattgttctaaaaacaaaagaagtt

SEQ ID NO: 18021 - DNA, 75 bp, unidentified
  source 1..75: mol_type = unassigned DNA; note = methanogen bacteria
aatttaactaatgaagttgaagtttactatgctgaaaacagttacagagtttatacaaacagtactgtagaagta

SEQ ID NO: 18022 - DNA, 60 bp, unidentified
  source 1..60: mol_type = unassigned DNA; note = methanogen bacteria
actgctggtgctgatgagatatatctaaatgaagaaatcacattcactataaatgttaca

SEQ ID NO: 18023 - DNA, 177 bp, unidentified
  source 1..177: mol_type = unassigned DNA; note = methanogen bacteria
aacgtaactgtaattgatgttgtaccttacggatttgaatttgtcaaatcaaatgcaacaggctatgataataaaactggtagattaacagttcctgttattgaggctggtaaatcatacatatttacaattaccttaaaagcaataactaacggcactttaacaaattatgttaac

SEQ ID NO: 18024 - DNA, 255 bp, unidentified
  source 1..255: mol_type = unassigned DNA; note = methanogen bacteria
gaaaatgtcactgttgtaaatactacatcagatgtaaatgttcttcctgtggttaatttaactgtcaataagactgttgatgtgactgtaatttatgttaacgatgaagttactttcactgttaatgtgactaataatggtccttctaatgctactggtgtgaaaggttatgataatgttactggtgtgttaaacattgatttaattgaagctggtgagtcttatgtatttactattactcttaaaccaatgact

SEQ ID NO: 18025 - DNA, 33 bp, unidentified
  source 1..33: mol_type = unassigned DNA; note = methanogen bacteria
aaaaacagttcaatttcagttaatgttactcct

SEQ ID NO: 18026 - DNA, 63 bp, unidentified
  source 1..63: mol_type = unassigned DNA; note = methanogen bacteria
actgttgatgtgactgtaatttatgttaacgatgaagttactttcactgttaatgtgactaat

SEQ ID NO: 18027 - DNA, 141 bp, unidentified
  source 1..141: mol_type = unassigned DNA; note = methanogen bacteria
actcaaatgtatcacaagaatgaactccttgaagactttattgaaaaacatttccacaatggaacatacgataaaaccgctgcagaaaaaatcaaaaatcaaacttactatttaatcgataactactcaatctggtctgga

SEQ ID NO: 18028 - DNA, 39 bp, unidentified
  source 1..39: mol_type = unassigned DNA; note = methanogen bacteria
tctaacttcattgaagaagataacccagaaagacttaat

SEQ ID NO: 18029 - DNA, 48 bp, unidentified; identical to SEQ ID NO: 17937
  source 1..48: mol_type = unassigned DNA; note = methanogen bacteria

SEQ ID NO: 18030 - DNA, 69 bp, unidentified; identical to SEQ ID NO: 17938
  source 1..69: mol_type = unassigned DNA; note = methanogen bacteria

SEQ ID NO: 18031 - DNA, 48 bp, unidentified; identical to SEQ ID NO: 17937
  source 1..48: mol_type = unassigned DNA; note = methanogen bacteria

SEQ ID NO: 18032 - DNA, 69 bp, unidentified; identical to SEQ ID NO: 17938
  source 1..69: mol_type = unassigned DNA; note = methanogen bacteria

SEQ ID NO: 18033 - DNA, 36 bp, unidentified
  source 1..36: mol_type = unassigned DNA; note = methanogen bacteria
tatgccaagacatatagtgctaaattgaaggtttac

SEQ ID NO: 18034 - DNA, 123 bp, unidentified
  source 1..123: mol_type = unassigned DNA; note = methanogen bacteria
cagggtctcgatgcacttataggtaaagctttttcacgtgcaggtaaaaaaattggtaatgactttttacccttcctaaaagacattaaaaaaggattcctagaattagatgattcattaggt

SEQ ID NO: 18035 - DNA, 78 bp, unidentified
  source 1..78: mol_type = unassigned DNA; note = methanogen bacteria
atttccaacacctatgacgtaagccagagtagagcaaaagtattagtgactttgatgactggatgtgcacttgccgga

SEQ ID NO: 18036 - DNA, 147 bp, unidentified
  source 1..147: mol_type = unassigned DNA; note = methanogen bacteria
ggaatgtttggaattgatttctttgtagatttccttccgttcgattatgctatgtattatggctggggagaatttgctgcatggatgtctctaaacggagtccttggaatgggaatggttgctgcactttataactgtgttttaatg

SEQ ID NO: 18037 - DNA, 39 bp, unidentified
  source 1..39: mol_type = unassigned DNA; note = methanogen bacteria
aaaaaaggtgctgaagatttatataaaactgttgataaa

SEQ ID NO: 18038 - DNA, 30 bp, unidentified
  source 1..30: mol_type = unassigned DNA; note = methanogen bacteria
attggtattactgatgatatggccaacttt

SEQ ID NO: 18039 - DNA, 144 bp, unidentified
  source 1..144: mol_type = unassigned DNA; note = methanogen bacteria
aaagaattaatggaaaccaaccaaggtttagatgctttgattggtaaagctttcagtcgtgcaggaaaaaaattaggtaatgaattcttacctcaaatcaaagacattaaaagagcattcttagatatggataataacatgggc

SEQ ID NO: 18040 - DNA, 111 bp, unidentified
  source 1..111: mol_type = unassigned DNA; note = methanogen bacteria
gctatgaatcgtgaaagaatgacagcattaacatctgcaactatgggttcagctgcagcaggagaaagttttgttaatacaatggataaattaacagatacttcattagtt

SEQ ID NO: 18041 - DNA, 126 bp, unidentified
  source 1..126: mol_type = unassigned DNA; note = methanogen bacteria
caagaactacaaaatttcacaactactgtaaatgatgtagggcaaagagcaatacttatgggtaaatctggtgaagaagctgtttcacttatgcaagctgcaggtagaggtttgaatggtgaattt

SEQ ID NO: 18042 - DNA, 249 bp, unidentified
  source 1..249: mol_type = unassigned DNA; note = methanogen bacteria
gaacaacttatggatcttggttggagtggtgcagcggacgatgttgaaggttaccaaaaagcattagataaagcattagaagccggcggtagtatggagggaatgatgaatactacaactggtaaacttgaaacattaaaaaagaatttcagagtagcaggtagacatgtaggtgaaatgtttactccatatatagaacaagctgtaggttggttaaataatttacagaaaacatgtcccggattattt

SEQ ID NO: 18043 - DNA, 120 bp, unidentified
  source 1..120: mol_type = unassigned DNA; note = methanogen bacteria
ggtaaagcatttggttggtgggatagtgtgcaaggaatgttaggtgcaatatgggctggaataaataggttatggtctgcttttattaatcatcctgacgttcaagctgcaattcaagca

SEQ ID NO: 18044 - DNA, 30 bp, unidentified
  source 1..30: mol_type = unassigned DNA; note = methanogen bacteria
agtggagctgttaaagcaattttggaattc

SEQ ID NO: 18045 - DNA, 57 bp, unidentified
  source 1..57: mol_type = unassigned DNA; note = methanogen bacteria
attactggtcagatggatctacaaactgcattgataaccatatggaacttgattaaa

SEQ ID NO: 18046 - DNA, 42 bp, unidentified
  source 1..42: mol_type = unassigned DNA; note = methanogen bacteria
tataatgaatttgctaaaatacctggtaaaataagagatgct
